United States Patent Application Publication US 2014/0004565 A1 - sequence listing, part 40

SEQ ID NO: 912749 - RNA, 19 nt, Artificial Sequence
  Description of Artificial Sequence: Synthetic oligonucleotide
ggucggauuaagcagcagc

SEQ ID NO: 912750 - RNA, 19 nt, Artificial Sequence
  Description of Artificial Sequence: Synthetic oligonucleotide
aagccuacucccaggggcg

SEQ ID NO: 912751 - RNA, 19 nt, Artificial Sequence
  Description of Artificial Sequence: Synthetic oligonucleotide
ugagcaugcccacccgcag

SEQ ID NO: 912752 - RNA, 19 nt, Artificial Sequence
  Description of Artificial Sequence: Synthetic oligonucleotide
caccccguagaaaugcgcc

SEQ ID NO: 912753 - RNA, 19 nt, Artificial Sequence
  Description of Artificial Sequence: Synthetic oligonucleotide
ugaagcggcaagccugaca

SEQ ID NO: 912754 - RNA, 19 nt, Artificial Sequence
  Description of Artificial Sequence: Synthetic oligonucleotide
ucuuugcagcaaauauaca

SEQ ID NO: 912755 - RNA, 19 nt, Artificial Sequence
  Description of Artificial Sequence: Synthetic oligonucleotide
gagaucaguuucugccucc

SEQ ID NO: 912756 - RNA, 19 nt, Artificial Sequence
  Description of Artificial Sequence: Synthetic oligonucleotide
cuucaccccguagaaaugc

SEQ ID NO: 912757 - RNA, 19 nt, Artificial Sequence
  Description of Artificial Sequence: Synthetic oligonucleotide
aaagcaucacccacuggga

SEQ ID NO: 912758 - RNA, 19 nt, Artificial Sequence
  Description of Artificial Sequence: Synthetic oligonucleotide
uacucccaggggcggaugg

SEQ ID NO: 912759 - RNA, 19 nt, Artificial Sequence
  Description of Artificial Sequence: Synthetic oligonucleotide
gaccacuaucucucgauca

SEQ ID NO: 912760 - RNA, 19 nt, Artificial Sequence
  Description of Artificial Sequence: Synthetic oligonucleotide
acugacaucugguccgaca

SEQ ID NO: 912761 - RNA, 19 nt, Artificial Sequence
  Description of Artificial Sequence: Synthetic oligonucleotide
ucugucgcccaccucggac

SEQ ID NO: 912762 - RNA, 19 nt, Artificial Sequence
  Description of Artificial Sequence: Synthetic oligonucleotide
caaaugccagcucauccug

SEQ ID NO: 912763 - RNA, 19 nt, Artificial Sequence
  Description of Artificial Sequence: Synthetic oligonucleotide
auucccuucccucccugag

SEQ ID NO: 912764 - RNA, 19 nt, Artificial Sequence
  Description of Artificial Sequence: Synthetic oligonucleotide
aaggggcagcacugugccc

SEQ ID NO: 912765 - RNA, 19 nt, Artificial Sequence
  Description of Artificial Sequence: Synthetic oligonucleotide
uuagucuccauaguauauu

SEQ ID NO: 912766 - RNA, 19 nt, Artificial Sequence
  Description of Artificial Sequence: Synthetic oligonucleotide
cucgagcauuuccagaaac

SEQ ID NO: 912767 - RNA, 19 nt, Artificial Sequence
  Description of Artificial Sequence: Synthetic oligonucleotide
auacuccucccgcuccagc

SEQ ID NO: 912768 - RNA, 19 nt, Artificial Sequence
  Description of Artificial Sequence: Synthetic oligonucleotide
agcaucacccacugggaga

SEQ ID NO: 912769 - RNA, 19 nt, Artificial Sequence
  Description of Artificial Sequence: Synthetic oligonucleotide
uagagucucuguacagcca

SEQ ID NO: 912770 - RNA, 19 nt, Artificial Sequence
  Description of Artificial Sequence: Synthetic oligonucleotide
ucaccccguagaaaugcgc

SEQ ID NO: 912771 - RNA, 19 nt, Artificial Sequence
  Description of Artificial Sequence: Synthetic oligonucleotide
acuaaugcccaaugcgaau

SEQ ID NO: 912772 - RNA, 19 nt, Artificial Sequence
  Description of Artificial Sequence: Synthetic oligonucleotide
guuuagucuccauaguaua

SEQ ID NO: 912773 - RNA, 19 nt, Artificial Sequence
  Description of Artificial Sequence: Synthetic oligonucleotide
auauaguguuauugcucug

SEQ ID NO: 912774 - RNA, 19 nt, Artificial Sequence
  Description of Artificial Sequence: Synthetic oligonucleotide
aggagcgaaggggacaggg

SEQ ID NO: 912775 - RNA, 19 nt, Artificial Sequence
  Description of Artificial Sequence: Synthetic oligonucleotide
aggccggacagcuguacuc

SEQ ID NO: 912776 - RNA, 19 nt, Artificial Sequence
  Description of Artificial Sequence: Synthetic oligonucleotide
cucgaugcuccccuggaug

SEQ ID NO: 912777 - RNA, 19 nt, Artificial Sequence
  Description of Artificial Sequence: Synthetic oligonucleotide
gccgcuuguacuucugucg

SEQ ID NO: 912778 - RNA, 19 nt, Artificial Sequence
  Description of Artificial Sequence: Synthetic oligonucleotide
uugcgucuccgcuugguga

SEQ ID NO: 912779 - RNA, 19 nt, Artificial Sequence
  Description of Artificial Sequence: Synthetic oligonucleotide
cacacucuguaguacugac

SEQ ID NO: 912780 - RNA, 19 nt, Artificial Sequence
  Description of Artificial Sequence: Synthetic oligonucleotide
cagcaaaagcaucacccac

SEQ ID NO: 912781 - RNA, 19 nt, Artificial Sequence
  Description of Artificial Sequence: Synthetic oligonucleotide
cuugagcaugcccacccgc

SEQ ID NO: 912782 - RNA, 19 nt, Artificial Sequence
  Description of Artificial Sequence: Synthetic oligonucleotide
gaugguccucuugaagaag

SEQ ID NO: 912783 - RNA, 19 nt, Artificial Sequence
  Description of Artificial Sequence: Synthetic oligonucleotide
gagcaugcccacccgcagg

SEQ ID NO: 912784 - RNA, 19 nt, Artificial Sequence
  Description of Artificial Sequence: Synthetic oligonucleotide
aggcaauggguccaccucu

SEQ ID NO: 912785 - RNA, 19 nt, Artificial Sequence
  Description of Artificial Sequence: Synthetic oligonucleotide
auaugcacagagucagaau

SEQ ID NO: 912786 - RNA, 19 nt, Artificial Sequence
  Description of Artificial Sequence: Synthetic oligonucleotide
accacuaucucucgaucaa

SEQ ID NO: 912787 - RNA, 19 nt, Artificial Sequence
  Description of Artificial Sequence: Synthetic oligonucleotide
ugguccucuugaagaaggc

SEQ ID NO: 912788 - RNA, 19 nt, Artificial Sequence
  Description of Artificial Sequence: Synthetic oligonucleotide
aggcucaaccaccagcaga

SEQ ID NO: 912789 - RNA, 19 nt, Artificial Sequence
  Description of Artificial Sequence: Synthetic oligonucleotide
ucgcccaccucggacacgg

SEQ ID NO: 912790 - RNA, 19 nt, Artificial Sequence
  Description of Artificial Sequence: Synthetic oligonucleotide
acaggaugccacaccauag

SEQ ID NO: 912791 - RNA, 19 nt, Artificial Sequence
  Description of Artificial Sequence: Synthetic oligonucleotide
gacacgguccagacgcacg

SEQ ID NO: 912792 - RNA, 19 nt, Artificial Sequence
  Description of Artificial Sequence: Synthetic oligonucleotide
uugcagucgccguaccagc

SEQ ID NO: 912793 - RNA, 19 nt, Artificial Sequence
  Description of Artificial Sequence: Synthetic oligonucleotide
uugccuaguccaucauggc

SEQ ID NO: 912794 - RNA, 19 nt, Artificial Sequence
  Description of Artificial Sequence: Synthetic oligonucleotide
guuucugccucccacacau

SEQ ID NO: 912795 - RNA, 19 nt, Artificial Sequence
  Description of Artificial Sequence: Synthetic oligonucleotide
agagccuucagcaguacau

SEQ ID NO: 912796 - RNA, 19 nt, Artificial Sequence
  Description of Artificial Sequence: Synthetic oligonucleotide
cuucauacuccagcagggc

SEQ ID NO: 912797 - RNA, 19 nt, Artificial Sequence
  Description of Artificial Sequence: Synthetic oligonucleotide
cuucugucgcccaccucgg

SEQ ID NO: 912798 - RNA, 19 nt, Artificial Sequence
  Description of Artificial Sequence: Synthetic oligonucleotide
gcuucauacuccagcaggg

SEQ ID NO: 912799 - RNA, 19 nt, Artificial Sequence
  Description of Artificial Sequence: Synthetic oligonucleotide
ugacagugaggagaagccu

SEQ ID NO: 912800 - RNA, 19 nt, Artificial Sequence
  Description of Artificial Sequence: Synthetic oligonucleotide
caccccuugaggugggagc

SEQ ID NO: 912801 - RNA, 19 nt, Artificial Sequence
  Description of Artificial Sequence: Synthetic oligonucleotide
uucccuucccucccugaga

SEQ ID NO: 912802 - RNA, 19 nt, Artificial Sequence
  Description of Artificial Sequence: Synthetic oligonucleotide
uuauugcucugcagggcau

SEQ ID NO: 912803 - RNA, 19 nt, Artificial Sequence
  Description of Artificial Sequence: Synthetic oligonucleotide
gcgaaugaggagaggagcg

SEQ ID NO: 912804 - RNA, 19 nt, Artificial Sequence
  Description of Artificial Sequence: Synthetic oligonucleotide
cuauggcuuccgcaaggcc

SEQ ID NO: 912805 - RNA, 19 nt, Artificial Sequence
  Description of Artificial Sequence: Synthetic oligonucleotide
acaggccuugcgucuccgc

SEQ ID NO: 912806 - RNA, 19 nt, Artificial Sequence
  Description of Artificial Sequence: Synthetic oligonucleotide
acaggggccuuugcuuucc

SEQ ID NO: 912807 - RNA, 19 nt, Artificial Sequence
  Description of Artificial Sequence: Synthetic oligonucleotide
uccacacacucuguaguac

SEQ ID NO: 912808 - RNA, 19 nt, Artificial Sequence
  Description of Artificial Sequence: Synthetic oligonucleotide
ugacaucugguccgacagu

SEQ ID NO: 912809 - RNA, 19 nt, Artificial Sequence
  Description of Artificial Sequence: Synthetic oligonucleotide
aggcguuugggcagagagc

SEQ ID NO: 912810 - RNA, 19 nt, Artificial Sequence
  Description of Artificial Sequence: Synthetic oligonucleotide
guacauacuccucccgcuc

SEQ ID NO: 912811 - RNA, 19 nt, Artificial Sequence
  Description of Artificial Sequence: Synthetic oligonucleotide
ugcgucuccgcuuggugau

SEQ ID NO: 912812 - RNA, 19 nt, Artificial Sequence
  Description of Artificial Sequence: Synthetic oligonucleotide
cacuuuccuggcuucugac

SEQ ID NO: 912813 - RNA, 19 nt, Artificial Sequence
  Description of Artificial Sequence: Synthetic oligonucleotide
caguuucugccucccacac

SEQ ID NO: 912814 - RNA, 19 nt, Artificial Sequence
  Description of Artificial Sequence: Synthetic oligonucleotide
ucgccguaccagcugcagc

SEQ ID NO: 912815 - RNA, 19 nt, Artificial Sequence
  Description of Artificial Sequence: Synthetic oligonucleotide
uugccugcugucuggcgga

SEQ ID NO: 912816 - RNA, 19 nt, Artificial Sequence
  Description of Artificial Sequence: Synthetic oligonucleotide
augcgaaugaggagaggag

SEQ ID NO: 912817 - RNA, 19 nt, Artificial Sequence
  Description of Artificial Sequence: Synthetic oligonucleotide
uuugggcagagagcugagc

SEQ ID NO: 912818 - RNA, 19 nt, Artificial Sequence
  Description of Artificial Sequence: Synthetic oligonucleotide
aggggccuuugcuuuccac

SEQ ID NO: 912819 - RNA, 19 nt, Artificial Sequence
  Description of Artificial Sequence: Synthetic oligonucleotide
cauccugcccaccccuugc

SEQ ID NO: 912820 - RNA, 19 nt, Artificial Sequence
  Description of Artificial Sequence: Synthetic oligonucleotide
cacuaaugcccaaugcgaa

SEQ ID NO: 912821 - RNA, 19 nt, Artificial Sequence
  Description of Artificial Sequence: Synthetic oligonucleotide
ucggauuaagcagcagcaa

SEQ ID NO: 912822 - RNA, 19 nt, Artificial Sequence
  Description of Artificial Sequence: Synthetic oligonucleotide
auccacacacucuguagua

SEQ ID NO: 912823 - RNA, 19 nt, Artificial Sequence
  Description of Artificial Sequence: Synthetic oligonucleotide
ugcccagacuccagcuuug

SEQ ID NO: 912824 - RNA, 19 nt, Artificial Sequence
  Description of Artificial Sequence: Synthetic oligonucleotide
gcaguacauacuccucccg

SEQ ID NO: 912825 - RNA, 19 nt, Artificial Sequence
  Description of Artificial Sequence: Synthetic oligonucleotide
gcuuggugaucucacacuc

SEQ ID NO: 912826 - RNA, 19 nt, Artificial Sequence
  Description of Artificial Sequence: Synthetic oligonucleotide
cagucgccguaccagcugc

SEQ ID NO: 912827 - RNA, 19 nt, Artificial Sequence
  Description of Artificial Sequence: Synthetic oligonucleotide
cuugaggugggagcugaug

SEQ ID NO: 912828 - RNA, 19 nt, Artificial Sequence
  Description of Artificial Sequence: Synthetic oligonucleotide
gcaugaagccuacucccag

SEQ ID NO: 912829 - RNA, 19 nt, Artificial Sequence
  Description of Artificial Sequence: Synthetic oligonucleotide
gaaaugcgccaggacuuug

SEQ ID NO: 912830 - RNA, 19 nt, Artificial Sequence
  Description of Artificial Sequence: Synthetic oligonucleotide
agacgcacgcccuccuuga

SEQ ID NO: 912831 - RNA, 19 nt, Artificial Sequence
  Description of Artificial Sequence: Synthetic oligonucleotide
accccguagaaaugcgcca

SEQ ID NO: 912832 - RNA, 19 nt, Artificial Sequence
  Description of Artificial Sequence: Synthetic oligonucleotide
cucggacacgguccagacg

SEQ ID NO: 912833 - RNA, 19 nt, Artificial Sequence
  Description of Artificial Sequence: Synthetic oligonucleotide
caccucccuggccaaaccc

SEQ ID NO: 912834 - RNA, 19 nt, Artificial Sequence
  Description of Artificial Sequence: Synthetic oligonucleotide
ucauuggaggccggacagc

SEQ ID NO: 912835 - RNA, 19 nt, Artificial Sequence
  Description of Artificial Sequence: Synthetic oligonucleotide
ggauuaagcagcagcaaaa

SEQ ID NO: 912836 - RNA, 19 nt, Artificial Sequence
  Description of Artificial Sequence: Synthetic oligonucleotide
cagcgucuucaauaugcac

SEQ ID NO: 912837 - RNA, 19 nt, Artificial Sequence
  Description of Artificial Sequence: Synthetic oligonucleotide
caggacuuugccugcuguc

SEQ ID NO: 912838 - RNA, 19 nt, Artificial Sequence
  Description of Artificial Sequence: Synthetic oligonucleotide
ugacacccgugcugggcag

SEQ ID NO: 912839 - RNA, 19 nt, Artificial Sequence
  Description of Artificial Sequence: Synthetic oligonucleotide
cagcuuugccccguugggg

SEQ ID NO: 912840 - RNA, 19 nt, Artificial Sequence
  Description of Artificial Sequence: Synthetic oligonucleotide
gcagcaaaagcaucaccca

SEQ ID NO: 912841 - RNA, 19 nt, Artificial Sequence
  Description of Artificial Sequence: Synthetic oligonucleotide
ccaaugcgaaugaggagag

SEQ ID NO: 912842 - RNA, 19 nt, Artificial Sequence
  Description of Artificial Sequence: Synthetic oligonucleotide
gaggaguggcagugugagc

SEQ ID NO: 912843 - RNA, 19 nt, Artificial Sequence
  Description of Artificial Sequence: Synthetic oligonucleotide
gccugcuuggaguuauugc

SEQ ID NO: 912844 - RNA, 19 nt, Artificial Sequence
  Description of Artificial Sequence: Synthetic oligonucleotide
acacacucuguaguacuga

SEQ ID NO: 912845 - RNA, 19 nt, Artificial Sequence
  Description of Artificial Sequence: Synthetic oligonucleotide
ugggucaggcauggcauac

SEQ ID NO: 912846 - RNA, 19 nt, Artificial Sequence
  Description of Artificial Sequence: Synthetic oligonucleotide
gcugauggugaccacuauc

SEQ ID NO: 912847 - RNA, 19 nt, Artificial Sequence
  Description of Artificial Sequence: Synthetic oligonucleotide
cccaccucggacacggucc

SEQ ID NO: 912848 - RNA, 19 nt, Artificial Sequence
  Description of Artificial Sequence: Synthetic oligonucleotide
cugcccaccccuugccuag

SEQ ID NO: 912849 - RNA, 19 nt, Artificial Sequence
  Description of Artificial Sequence: Synthetic oligonucleotide
cacuggggcugucuuccgg

SEQ ID NO: 912850 - RNA, 19 nt, Artificial Sequence
  Description of Artificial Sequence: Synthetic oligonucleotide
ucccugagaucaguuucug

SEQ ID NO: 912851 - RNA, 19 nt, Artificial Sequence
  Description of Artificial Sequence: Synthetic oligonucleotide
uggcuugcaaggggcagca

SEQ ID NO: 912852 - RNA, 19 nt, Artificial Sequence
  Description of Artificial Sequence: Synthetic oligonucleotide
cacacucauuggaggccgg

SEQ ID NO: 912853 - RNA, 19 nt, Artificial Sequence
  Description of Artificial Sequence: Synthetic oligonucleotide
gaucaguuucugccuccca

SEQ ID NO: 912854 - RNA, 19 nt, Artificial Sequence
  Description of Artificial Sequence: Synthetic oligonucleotide
gcacuaaugcccaaugcga

SEQ ID NO: 912855 - RNA, 19 nt, Artificial Sequence
  Description of Artificial Sequence: Synthetic oligonucleotide
ggacuuugccugcugucug

SEQ ID NO: 912856 - RNA, 19 nt, Artificial Sequence
  Description of Artificial Sequence: Synthetic oligonucleotide
ugccagccgcccauccugc

SEQ ID NO: 912857 - RNA, 19 nt, Artificial Sequence
  Description of Artificial Sequence: Synthetic oligonucleotide
cguaccagcugcagcaggg

SEQ ID NO: 912858 - RNA, 19 nt, Artificial Sequence
  Description of Artificial Sequence: Synthetic oligonucleotide
cccaaugcgaaugaggaga

SEQ ID NO: 912859 - RNA, 19 nt, Artificial Sequence
  Description of Artificial Sequence: Synthetic oligonucleotide
ugcucuuggcccagcugau

SEQ ID NO: 912860 - RNA, 19 nt, Artificial Sequence
  Description of Artificial Sequence: Synthetic oligonucleotide
aggucgcaaagaguggcca

SEQ ID NO: 912861 - RNA, 19 nt, Artificial Sequence
  Description of Artificial Sequence: Synthetic oligonucleotide
cacaggaugccacaccaua

SEQ ID NO: 912862 - RNA, 19 nt, Artificial Sequence
  Description of Artificial Sequence: Synthetic oligonucleotide
ccagcuacugccagaggac

SEQ ID NO: 912863 - RNA, 19 nt, Artificial Sequence
  Description of Artificial Sequence: Synthetic oligonucleotide
caaugcgaaugaggagagg

SEQ ID NO: 912864 - RNA, 19 nt, Artificial Sequence
  Description of Artificial Sequence: Synthetic oligonucleotide
acgcccuccuugagcaugc

SEQ ID NO: 912865 - RNA, 19 nt, Artificial Sequence
  Description of Artificial Sequence: Synthetic oligonucleotide
gacaggggccuuugcuuuc

SEQ ID NO: 912866 - RNA, 19 nt, Artificial Sequence
  Description of Artificial Sequence: Synthetic oligonucleotide
gggcacuaaugcccaaugc

SEQ ID NO: 912867 - RNA, 19 nt, Artificial Sequence
  Description of Artificial Sequence: Synthetic oligonucleotide
ggggcacuaaugcccaaug

SEQ ID NO: 912868 - RNA, 19 nt, Artificial Sequence
  Description of Artificial Sequence: Synthetic oligonucleotide
agccugcuuggaguuauug

SEQ ID NO: 912869 - RNA, 19 nt, Artificial Sequence
  Description of Artificial Sequence: Synthetic oligonucleotide
cugacacccgugcugggca

SEQ ID NO: 912870 - RNA, 19 nt, Artificial Sequence
  Description of Artificial Sequence: Synthetic oligonucleotide
ggagcgaaggggacagggg

SEQ ID NO: 912871 - RNA, 19 nt, Artificial Sequence
  Description of Artificial Sequence: Synthetic oligonucleotide
gacgcacgcccuccuugag

SEQ ID NO: 912872 - RNA, 19 nt, Artificial Sequence
  Description of Artificial Sequence: Synthetic oligonucleotide
gucgcaaagaguggccaca

SEQ ID NO: 912873 - RNA, 19 nt, Artificial Sequence
  Description of Artificial Sequence: Synthetic oligonucleotide
accccuugaggugggagcu

SEQ ID NO: 912874 - RNA, 19 nt, Artificial Sequence
  Description of Artificial Sequence: Synthetic oligonucleotide
uauugcucugcagggcaua

SEQ ID NO: 912875 - RNA, 19 nt, Artificial Sequence
  Description of Artificial Sequence: Synthetic oligonucleotide
ggccggacagcuguacucg

SEQ ID NO: 912876 - RNA, 19 nt, Artificial Sequence
  Description of Artificial Sequence: Synthetic oligonucleotide
ugcuguccccaccccuuga

SEQ ID NO: 912877 - RNA, 19 nt, Artificial Sequence
  Description of Artificial Sequence: Synthetic oligonucleotide
gccucgagcauuuccagaa

SEQ ID NO: 912878 - RNA, 19 nt, Artificial Sequence
  Description of Artificial Sequence: Synthetic oligonucleotide
acucgaugcuccccuggau

SEQ ID NO: 912879 - RNA, 19 nt, Artificial Sequence
  Description of Artificial Sequence: Synthetic oligonucleotide
acacccgugcugggcagac

SEQ ID NO: 912880 - RNA, 19 nt, Artificial Sequence
  Description of Artificial Sequence: Synthetic oligonucleotide
uagaggcagugcugucccc

SEQ ID NO: 912881 - RNA, 19 nt, Artificial Sequence
  Description of Artificial Sequence: Synthetic oligonucleotide
cacucauuggaggccggac

SEQ ID NO: 912882 - RNA, 19 nt, Artificial Sequence
  Description of Artificial Sequence: Synthetic oligonucleotide
cccguuggggcugacaccc

SEQ ID NO: 912883 - RNA, 19 nt, Artificial Sequence
  Description of Artificial Sequence: Synthetic oligonucleotide
uucugucgcccaccucgga

SEQ ID NO: 912884 - RNA, 19 nt, Artificial Sequence
  Description of Artificial Sequence: Synthetic oligonucleotide
ggaguggcagugugagcag

SEQ ID NO: 912885 - RNA, 19 nt, Artificial Sequence
  Description of Artificial Sequence: Synthetic oligonucleotide
gacaggccuugcgucuccg

SEQ ID NO: 912886 - RNA, 19 nt, Artificial Sequence
  Description of Artificial Sequence: Synthetic oligonucleotide
ggaugguccucuugaagaa

SEQ ID NO: 912887 - RNA, 19 nt, Artificial Sequence
  Description of Artificial Sequence: Synthetic oligonucleotide
gcaauggguccaccucugg

SEQ ID NO: 912888 - RNA, 19 nt, Artificial Sequence
  Description of Artificial Sequence: Synthetic oligonucleotide
accccuugccuaguccauc

SEQ ID NO: 912889 - RNA, 19 nt, Artificial Sequence
  Description of Artificial Sequence: Synthetic oligonucleotide
agggcuugcagucgccgua

SEQ ID NO: 912890 - RNA, 19 nt, Artificial Sequence
  Description of Artificial Sequence: Synthetic oligonucleotide
agaaaugcgccaggacuuu

SEQ ID NO: 912891 - RNA, 19 nt, Artificial Sequence
  Description of Artificial Sequence: Synthetic oligonucleotide
uggugaucucacacucauu

SEQ ID NO: 912892 - RNA, 19 nt, Artificial Sequence
  Description of Artificial Sequence: Synthetic oligonucleotide
acccgggcauucacuuucc

SEQ ID NO: 912893 - RNA, 19 nt, Artificial Sequence
  Description of Artificial Sequence: Synthetic oligonucleotide
cugggaugcucuuggccca

SEQ ID NO: 912894 - RNA, 19 nt, Artificial Sequence
  Description of Artificial Sequence: Synthetic oligonucleotide
ccggccagcuucauacucc

SEQ ID NO: 912895 - RNA, 19 nt, Artificial Sequence
  Description of Artificial Sequence: Synthetic oligonucleotide
ggcguuugggcagagagcu

SEQ ID NO: 912896 - RNA, 19 nt, Artificial Sequence
  Description of Artificial Sequence: Synthetic oligonucleotide
guacagccaagggcucugg

SEQ ID NO: 912897 - RNA, 19 nt, Artificial Sequence
  Description of Artificial Sequence: Synthetic oligonucleotide
agugagcgcugggccacac

SEQ ID NO: 912898 - RNA, 19 nt, Artificial Sequence
  Description of Artificial Sequence: Synthetic oligonucleotide
cccuauggcuuccgcaagg

SEQ ID NO: 912899 - RNA, 19 nt, Artificial Sequence
  Description of Artificial Sequence: Synthetic oligonucleotide
acguccccacagacaaggc

SEQ ID NO: 912900 - RNA, 19 nt, Artificial Sequence
  Description of Artificial Sequence: Synthetic oligonucleotide
ggucgcaaagaguggccac

SEQ ID NO: 912901 - RNA, 19 nt, Artificial Sequence
  Description of Artificial Sequence: Synthetic oligonucleotide
uacuucugucgcccaccuc

SEQ ID NO: 912902 - RNA, 19 nt, Artificial Sequence
  Description of Artificial Sequence: Synthetic oligonucleotide
accucggacacgguccaga

SEQ ID NO: 912903 - RNA, 19 nt, Artificial Sequence
  Description of Artificial Sequence: Synthetic oligonucleotide
cuaguccaucauggccucg

SEQ ID NO: 912904 - RNA, 19 nt, Artificial Sequence
  Description of Artificial Sequence: Synthetic oligonucleotide
cagagcauucacuggggcu

SEQ ID NO: 912905 - RNA, 19 nt, Artificial Sequence
  Description of Artificial Sequence: Synthetic oligonucleotide
cuucucgcagcugcuccac

SEQ ID NO: 912906 - RNA, 19 nt, Artificial Sequence
  Description of Artificial Sequence: Synthetic oligonucleotide
gcuguccccaccccuugag

SEQ ID NO: 912907 - RNA, 19 nt, Artificial Sequence
  Description of Artificial Sequence: Synthetic oligonucleotide
gagccuucagcaguacaua

SEQ ID NO: 912908 - RNA, 19 nt, Artificial Sequence
  Description of Artificial Sequence: Synthetic oligonucleotide
gccccguuggggcugacac

SEQ ID NO: 912909 - RNA, 19 nt, Artificial Sequence
  Description of Artificial Sequence: Synthetic oligonucleotide
ccagccguagggcuugcag

SEQ ID NO: 912910 - RNA, 19 nt, Artificial Sequence
  Description of Artificial Sequence: Synthetic oligonucleotide
uucccucccugagaucagu

SEQ ID NO: 912911 - RNA, 19 nt, Artificial Sequence
  Description of Artificial Sequence: Synthetic oligonucleotide
ggccugggaaaggcaaugg

SEQ ID NO: 912912 - RNA, 19 nt, Artificial Sequence
  Description of Artificial Sequence: Synthetic oligonucleotide
gcgguuucucuuugcagca

SEQ ID NO: 912913 - RNA, 19 nt, Artificial Sequence
  Description of Artificial Sequence: Synthetic oligonucleotide
gucgccguaccagcugcag

SEQ ID NO: 912914 - RNA, 19 nt, Artificial Sequence
  Description of Artificial Sequence: Synthetic oligonucleotide
cauucccuucccucccuga

SEQ ID NO: 912915 - RNA, 19 nt, Artificial Sequence
  Description of Artificial Sequence: Synthetic oligonucleotide
caaccaccagcagaugaga

SEQ ID NO: 912916 - RNA, 19 nt, Artificial Sequence
  Description of Artificial Sequence: Synthetic oligonucleotide
agccuacucccaggggcgg

SEQ ID NO: 912917 - RNA, 19 nt, Artificial Sequence
  Description of Artificial Sequence: Synthetic oligonucleotide
ugguagccggaagccacgu

SEQ ID NO: 912918 - RNA, 19 nt, Artificial Sequence
  Description of Artificial Sequence: Synthetic oligonucleotide
acacucauuggaggccgga

SEQ ID NO: 912919 - RNA, 19 nt, Artificial Sequence
  Description of Artificial Sequence: Synthetic oligonucleotide
cugggagacuguggccucc

SEQ ID NO: 912920 - RNA, 19 nt, Artificial Sequence
  Description of Artificial Sequence: Synthetic oligonucleotide
gugcuguccccaccccuug

SEQ ID NO: 912921 - RNA, 19 nt, Artificial Sequence
  Description of Artificial Sequence: Synthetic oligonucleotide
caggaugccacaccauagu

SEQ ID NO: 912922 - RNA, 19 nt, Artificial Sequence
  Description of Artificial Sequence: Synthetic oligonucleotide
agacccugccagccgccca

SEQ ID NO: 912923 - RNA, 19 nt, Artificial Sequence
  Description of Artificial Sequence: Synthetic oligonucleotide
ccuauggcuuccgcaaggc

SEQ ID NO: 912924 - RNA, 19 nt, Artificial Sequence
  Description of Artificial Sequence: Synthetic oligonucleotide
cguagaaaugcgccaggac

SEQ ID NO: 912925 - RNA, 19 nt, Artificial Sequence
  Description of Artificial Sequence: Synthetic oligonucleotide
cagagccuucagcaguaca

SEQ ID NO: 912926 - RNA, 19 nt, Artificial Sequence
  Description of Artificial Sequence: Synthetic oligonucleotide
gcagucgccguaccagcug

SEQ ID NO: 912927 - RNA, 19 nt, Artificial Sequence
  Description of Artificial Sequence: Synthetic oligonucleotide
gcuugcaaggggcagcacu

SEQ ID NO: 912928 - RNA, 19 nt, Artificial Sequence
  Description of Artificial Sequence: Synthetic oligonucleotide
ccuugagcaugcccacccg

SEQ ID NO: 912929 - RNA, 19 nt, Artificial Sequence
  Description of Artificial Sequence: Synthetic oligonucleotide
gugagcgcugggccacacc

SEQ ID NO: 912930 - RNA, 19 nt, Artificial Sequence
  Description of Artificial Sequence: Synthetic oligonucleotide
ccgggccccuucuucaucc

SEQ ID NO: 912931 - RNA, 19 nt, Artificial Sequence
  Description of Artificial Sequence: Synthetic oligonucleotide
cauuggaggccggacagcu

SEQ ID NO: 912932 - RNA, 19 nt, Artificial Sequence
  Description of Artificial Sequence: Synthetic oligonucleotide
gcuuggaguuauugcuuca

SEQ ID NO: 912933 - RNA, 19 nt, Artificial Sequence
  Description of Artificial Sequence: Synthetic oligonucleotide
ccgggcauucacuuuccug

SEQ ID NO: 912934 - RNA, 19 nt, Artificial Sequence
  Description of Artificial Sequence: Synthetic oligonucleotide
uggcauugcccuggcccug

SEQ ID NO: 912935 - RNA, 19 nt, Artificial Sequence
  Description of Artificial Sequence: Synthetic oligonucleotide
cccguagaaaugcgccagg

SEQ ID NO: 912936 - RNA, 19 nt, Artificial Sequence
  Description of Artificial Sequence: Synthetic oligonucleotide
uuugccccguuggggcuga

SEQ ID NO: 912937 - RNA, 19 nt, Artificial Sequence
  Description of Artificial Sequence: Synthetic oligonucleotide
gccuaguccaucauggccu

SEQ ID NO: 912938 - RNA, 19 nt, Artificial Sequence
  Description of Artificial Sequence: Synthetic oligonucleotide
ggaaaggcaauggguccac

SEQ ID NO: 912939 - RNA, 19 nt, Artificial Sequence
  Description of Artificial Sequence: Synthetic oligonucleotide
gcggaggaguggcagugug

SEQ ID NO: 912940 - RNA, 19 nt, Artificial Sequence
  Description of Artificial Sequence: Synthetic oligonucleotide
gcuggagccugcuuggagu

SEQ ID NO: 912941 - RNA, 19 nt, Artificial Sequence
  Description of Artificial Sequence: Synthetic oligonucleotide
ggcaauggguccaccucug

SEQ ID NO: 912942 - RNA, 19 nt, Artificial Sequence
  Description of Artificial Sequence: Synthetic oligonucleotide
guacugacaucugguccga

SEQ ID NO: 912943 - RNA, 19 nt, Artificial Sequence
  Description of Artificial Sequence: Synthetic oligonucleotide
gggcagacccugccagccg

SEQ ID NO: 912944 - RNA, 19 nt, Artificial Sequence
  Description of Artificial Sequence: Synthetic oligonucleotide
uugccccauggcccugcac

SEQ ID NO: 912945 - RNA, 19 nt, Artificial Sequence
  Description of Artificial Sequence: Synthetic oligonucleotide
ggguacauuauggcuugca

SEQ ID NO: 912946 - RNA, 19 nt, Artificial Sequence
  Description of Artificial Sequence: Synthetic oligonucleotide
ggcucaaccaccagcagau

SEQ ID NO: 912947 - RNA, 19 nt, Artificial Sequence
  Description of Artificial Sequence: Synthetic oligonucleotide
cacgguccagacgcacgcc

SEQ ID NO: 912948 - RNA, 19 nt, Artificial Sequence
  Description of Artificial Sequence: Synthetic oligonucleotide
ggggcggauggcauugccc

SEQ ID NO: 912949 - RNA, 19 nt, Artificial Sequence
  Description of Artificial Sequence: Synthetic oligonucleotide
gaggccggacagcuguacu

SEQ ID NO: 912950 - RNA, 19 nt, Artificial Sequence
  Description of Artificial Sequence: Synthetic oligonucleotide
uggaggccggacagcugua

SEQ ID NO: 912951 - RNA, 19 nt, Artificial Sequence
  Description of Artificial Sequence: Synthetic oligonucleotide
aggagaagccugggaugcu

SEQ ID NO: 912952 - RNA, 19 nt, Artificial Sequence
  Description of Artificial Sequence: Synthetic oligonucleotide
ccuaguccaucauggccuc

SEQ ID NO: 912953 - RNA, 19 nt, Artificial Sequence
  Description of Artificial Sequence: Synthetic oligonucleotide
ccccguagaaaugcgccag

SEQ ID NO: 912954 - RNA, 19 nt, Artificial Sequence
  Description of Artificial Sequence: Synthetic oligonucleotide
gggccugggaaaggcaaug

SEQ ID NO: 912955 - RNA, 19 nt, Artificial Sequence
  Description of Artificial Sequence: Synthetic oligonucleotide
cagacccugccagccgccc

SEQ ID NO: 912956 - RNA, 19 nt, Artificial Sequence
  Description of Artificial Sequence: Synthetic oligonucleotide
gcuugcagucgccguacca

SEQ ID NO: 912957 - RNA, 19 nt, Artificial Sequence
  Description of Artificial Sequence: Synthetic oligonucleotide
ccggaagccacguccccac

SEQ ID NO: 912958 - RNA, 19 nt, Artificial Sequence
  Description of Artificial Sequence: Synthetic oligonucleotide
gccguagggcuugcagucg

SEQ ID NO: 912959 - RNA, 19 nt, Artificial Sequence
  Description of Artificial Sequence: Synthetic oligonucleotide
agaggcguuugggcagaga

SEQ ID NO: 912960 - RNA, 19 nt, Artificial Sequence
  Description of Artificial Sequence: Synthetic oligonucleotide
ccguaccagcugcagcagg

SEQ ID NO: 912961 - RNA, 19 nt, Artificial Sequence
  Description of Artificial Sequence: Synthetic oligonucleotide
ccaccccuugccuagucca

SEQ ID NO: 912962 - RNA, 19 nt, Artificial Sequence
  Description of Artificial Sequence: Synthetic oligonucleotide
gguccagacgcacgcccuc

SEQ ID NO: 912963 - RNA, 19 nt, Artificial Sequence
  Description of Artificial Sequence: Synthetic oligonucleotide
cggauuaagcagcagcaaa

SEQ ID NO: 912964 - RNA, 19 nt, Artificial Sequence
  Description of Artificial Sequence: Synthetic oligonucleotide
gcauagaggcagugcuguc

SEQ ID NO: 912965 - RNA, 19 nt, Artificial Sequence
  Description of Artificial Sequence: Synthetic oligonucleotide
ccagccgcccauccugccc

SEQ ID NO: 912966 - RNA, 19 nt, Artificial Sequence
  Description of Artificial Sequence: Synthetic oligonucleotide
cucccaggggcggauggca

SEQ ID NO: 912967 - RNA, 19 nt, Artificial Sequence
  Description of Artificial Sequence: Synthetic oligonucleotide
gcuccagccguagggcuug

SEQ ID NO: 912968 - RNA, 19 nt, Artificial Sequence
  Description of Artificial Sequence: Synthetic oligonucleotide
cuacucccaggggcggaug

SEQ ID NO: 912969 - RNA, 19 nt, Artificial Sequence
  Description of Artificial Sequence: Synthetic oligonucleotide
uggagccugcuuggaguua

SEQ ID NO: 912970 - RNA, 19 nt, Artificial Sequence
  Description of Artificial Sequence: Synthetic oligonucleotide
cacacccgggcauucacuu

SEQ ID NO: 912971 - RNA, 19 nt, Artificial Sequence
  Description of Artificial Sequence: Synthetic oligonucleotide
gacacccgugcugggcaga

SEQ ID NO: 912972 - RNA, 19 nt, Artificial Sequence
  Description of Artificial Sequence: Synthetic oligonucleotide
ggcauugcccuggcccugc

SEQ ID NO: 912973 - RNA, 19 nt, Artificial Sequence
  Description of Artificial Sequence: Synthetic oligonucleotide
ccgcccauccugcccaccc

SEQ ID NO: 912974 - RNA, 19 nt, Artificial Sequence
  Description of Artificial Sequence: Synthetic oligonucleotide
uccagccguagggcuugca

SEQ ID NO: 912975 - RNA, 19 nt, Artificial Sequence
  Description of Artificial Sequence: Synthetic oligonucleotide
gccucagcgucuucaauau

SEQ ID NO: 912976 - RNA, 19 nt, Artificial Sequence
  Description of Artificial Sequence: Synthetic oligonucleotide
gguagccggaagccacguc

SEQ ID NO: 912977 - RNA, 19 nt, Artificial Sequence
  Description of Artificial Sequence: Synthetic oligonucleotide
ggcacuuggugaagcggca

SEQ ID NO: 912978 - RNA, 19 nt, Artificial Sequence
  Description of Artificial Sequence: Synthetic oligonucleotide
gacccugccagccgcccau

SEQ ID NO: 912979 - RNA, 19 nt, Artificial Sequence
  Description of Artificial Sequence: Synthetic oligonucleotide
ggacacgguccagacgcac

SEQ ID NO: 912980 - RNA, 19 nt, Artificial Sequence
  Description of Artificial Sequence: Synthetic oligonucleotide
gguccucuugaagaaggcu

SEQ ID NO: 912981 - RNA, 19 nt, Artificial Sequence
  Description of Artificial Sequence: Synthetic oligonucleotide
ggggagggcaugaagccua

SEQ ID NO: 912982 - RNA, 19 nt, Artificial Sequence
  Description of Artificial Sequence: Synthetic oligonucleotide
ggcauucacuuuccuggcu

SEQ ID NO: 912983 - RNA, 19 nt, Artificial Sequence
  Description of Artificial Sequence: Synthetic oligonucleotide
ccccuauggcuuccgcaag

SEQ ID NO: 912984 - RNA, 19 nt, Artificial Sequence
  Description of Artificial Sequence: Synthetic oligonucleotide
ccauccugcccaccccuug

SEQ ID NO: 912985 - RNA, 19 nt, Artificial Sequence
  Description of Artificial Sequence: Synthetic oligonucleotide
gucuccgcuuggugaucuc

SEQ ID NO: 912986 - RNA, 19 nt, Artificial Sequence
  Description of Artificial Sequence: Synthetic oligonucleotide
agucgccguaccagcugca

SEQ ID NO: 912987 - RNA, 19 nt, Artificial Sequence
  Description of Artificial Sequence: Synthetic oligonucleotide
ccccguuggggcugacacc

SEQ ID NO: 912988 - RNA, 19 nt, Artificial Sequence
  Description of Artificial Sequence: Synthetic oligonucleotide
ggacaggggccuuugcuuu

SEQ ID NO: 912989 - RNA, 19 nt, Artificial Sequence
  Description of Artificial Sequence: Synthetic oligonucleotide
ggaggccggacagcuguac

SEQ ID NO: 912990 - RNA, 19 nt, Artificial Sequence
  Description of Artificial Sequence: Synthetic oligonucleotide
ccugccugcgcgccuccgc

SEQ ID NO: 912991 - RNA, 19 nt, Artificial Sequence
  Description of Artificial Sequence: Synthetic oligonucleotide
gcggcaagccugacaggcc

SEQ ID NO: 912992 - RNA, 19 nt, Artificial Sequence
  Description of Artificial Sequence: Synthetic oligonucleotide
uugcugggucaggcauggc

SEQ ID NO: 912993 - RNA, 19 nt, Artificial Sequence
  Description of Artificial Sequence: Synthetic oligonucleotide
gggucggauuaagcagcag

SEQ ID NO: 912994 - RNA, 19 nt, Artificial Sequence
  Description of Artificial Sequence: Synthetic oligonucleotide
acccugccagccgcccauc

SEQ ID NO: 912995 - RNA, 19 nt, Artificial Sequence
  Description of Artificial Sequence: Synthetic oligonucleotide
gggcuugcugggucaggca

SEQ ID NO: 912996 - RNA, 19 nt, Artificial Sequence
  Description of Artificial Sequence: Synthetic oligonucleotide
uggccgccgcuuguacuuc

SEQ ID NO: 912997 - RNA, 19 nt, Artificial Sequence
  Description of Artificial Sequence: Synthetic oligonucleotide
ggggucggauuaagcagca

SEQ ID NO: 912998 - RNA, 19 nt, Artificial Sequence
  Description of Artificial Sequence: Synthetic oligonucleotide
cuugccccauggcccugca

SEQ ID NO: 912999 - RNA, 19 nt, Artificial Sequence
  Description of Artificial Sequence: Synthetic oligonucleotide
cagaggcguuugggcagag

SEQ ID NO: 913000 - RNA, 19 nt, Artificial Sequence
  Description of Artificial Sequence: Synthetic oligonucleotide
cacccgugcugggcagacc

SEQ ID NO: 913001 - RNA, 19 nt, Artificial Sequence
  Description of Artificial Sequence: Synthetic oligonucleotide
cagugcuguccccaccccu

SEQ ID NO: 913002 - RNA, 19 nt, Artificial Sequence
  Description of Artificial Sequence: Synthetic oligonucleotide
gugaagcggcaagccugac

SEQ ID NO: 913003 - RNA, 19 nt, Artificial Sequence
  Description of Artificial Sequence: Synthetic oligonucleotide
ccaccccuugaggugggag

SEQ ID NO: 913004 - RNA, 19 nt, Artificial Sequence
  Description of Artificial Sequence: Synthetic oligonucleotide
gggucaggcauggcauaca

SEQ ID NO: 913005 - RNA, 19 nt, Artificial Sequence
  Description of Artificial Sequence: Synthetic oligonucleotide
ccguagaaaugcgccagga

SEQ ID NO: 913006 - RNA, 19 nt, Artificial Sequence
  Description of Artificial Sequence: Synthetic oligonucleotide
gcucaaccaccagcagaug

SEQ ID NO: 913007 - RNA, 19 nt, Artificial Sequence
  Description of Artificial Sequence: Synthetic oligonucleotide
gcccagacuccagcuuugc

SEQ ID NO: 913008 - RNA, 19 nt, Artificial Sequence
  Description of Artificial Sequence: Synthetic oligonucleotide
gccggacagcuguacucga

SEQ ID NO: 913009 - RNA, 19 nt, Artificial Sequence
  Description of Artificial Sequence: Synthetic oligonucleotide
gggagggcaugaagccuac

SEQ ID NO: 913010 - RNA, 19 nt, Artificial Sequence
  Description of Artificial Sequence: Synthetic oligonucleotide
caccucggacacgguccag

SEQ ID NO: 913011 - RNA, 19 nt, Artificial Sequence
  Description of Artificial Sequence: Synthetic oligonucleotide
cccagaccagcugcccggg

SEQ ID NO: 913012 - RNA, 19 nt, Artificial Sequence
  Description of Artificial Sequence: Synthetic oligonucleotide
cugccugcgcgccuccgcu

SEQ ID NO: 913013 - RNA, 19 nt, Artificial Sequence
  Description of Artificial Sequence: Synthetic oligonucleotide
cgaaugaggagaggagcga

SEQ ID NO: 913014 - RNA, 19 nt, Artificial Sequence
  Description of Artificial Sequence: Synthetic oligonucleotide
gccuugcgucuccgcuugg

SEQ ID NO: 913015 - RNA, 19 nt, Artificial Sequence
  Description of Artificial Sequence: Synthetic oligonucleotide
uggccaccccaggggucca

SEQ ID NO: 913016 - RNA, 19 nt, Artificial Sequence
  Description of Artificial Sequence: Synthetic oligonucleotide
ccagaccagcugcccgggc

SEQ ID NO: 913017 - RNA, 19 nt, Artificial Sequence
  Description of Artificial Sequence: Synthetic oligonucleotide
augccacaccauaguggua

SEQ ID NO: 913018 - RNA, 19 nt, Artificial Sequence
  Description of Artificial Sequence: Synthetic oligonucleotide
gcacuuggugaagcggcaa

SEQ ID NO: 913019 - RNA, 19 nt, Artificial Sequence
  Description of Artificial Sequence: Synthetic oligonucleotide
cccuugaggugggagcuga

SEQ ID NO: 913020 - RNA, 19 nt, Artificial Sequence
  Description of Artificial Sequence: Synthetic oligonucleotide
ccacuaucucucgaucaaa

SEQ ID NO: 913021 - RNA, 19 nt, Artificial Sequence
  Description of Artificial Sequence: Synthetic oligonucleotide
caccccuugccuaguccau

SEQ ID NO: 913022 - RNA, 19 nt, Artificial Sequence
  Description of Artificial Sequence: Synthetic oligonucleotide
ccucgagcauuuccagaaa

SEQ ID NO: 913023 - RNA, 19 nt, Artificial Sequence
  Description of Artificial Sequence: Synthetic oligonucleotide
ccaggacuuugccugcugu

SEQ ID NO: 913024 - RNA, 19 nt, Artificial Sequence
  Description of Artificial Sequence: Synthetic oligonucleotide
ccccaccccuugagguggg

SEQ ID NO: 913025 - RNA, 19 nt, Artificial Sequence
  Description of Artificial Sequence: Synthetic oligonucleotide
gcgaaggggacaggggccu

SEQ ID NO: 913026 - RNA, 19 nt, Artificial Sequence
  Description of Artificial Sequence: Synthetic oligonucleotide
cggaggaguggcaguguga

SEQ ID NO: 913027 - RNA, 19 nt, Artificial Sequence
  Description of Artificial Sequence: Synthetic oligonucleotide
cgcccauccugcccacccc

SEQ ID NO: 913028 - RNA, 19 nt, Artificial Sequence
  Description of Artificial Sequence: Synthetic oligonucleotide
cagccucagcgucuucaau

SEQ ID NO: 913029 - RNA, 19 nt, Artificial Sequence
  Description of Artificial Sequence: Synthetic oligonucleotide
cagugagcgcugggccaca

SEQ ID NO: 913030 - RNA, 19 nt, Artificial Sequence
  Description of Artificial Sequence: Synthetic oligonucleotide
gcccaccccuugccuaguc

SEQ ID NO: 913031 - RNA, 19 nt, Artificial Sequence
  Description of Artificial Sequence: Synthetic oligonucleotide
gguccaggggcuggagccu

SEQ ID NO: 913032 - RNA, 19 nt, Artificial Sequence
  Description of Artificial Sequence: Synthetic oligonucleotide
cccgggccccuucuucauc

SEQ ID NO: 913033 - RNA, 19 nt, Artificial Sequence
  Description of Artificial Sequence: Synthetic oligonucleotide
ccgcaggcacuuggugaag

SEQ ID NO: 913034 - RNA, 19 nt, Artificial Sequence
  Description of Artificial Sequence: Synthetic oligonucleotide
gccuacucccaggggcgga

SEQ ID NO: 913035 - RNA, 19 nt, Artificial Sequence
  Description of Artificial Sequence: Synthetic oligonucleotide
cuguggcccugcccagacu

SEQ ID NO: 913036 - RNA, 19 nt, Artificial Sequence
  Description of Artificial Sequence: Synthetic oligonucleotide
ccaucauggccucgagcau

SEQ ID NO: 913037 - RNA, 19 nt, Artificial Sequence
  Description of Artificial Sequence: Synthetic oligonucleotide
gcgucuccgcuuggugauc

SEQ ID NO: 913038 - RNA, 19 nt, Artificial Sequence
  Description of Artificial Sequence: Synthetic oligonucleotide
uugccccguuggggcugac

SEQ ID NO: 913039 - RNA, 19 nt, Artificial Sequence
  Description of Artificial Sequence: Synthetic oligonucleotide
ggcggaggaguggcagugu

SEQ ID NO: 913040 - RNA, 19 nt, Artificial Sequence
  Description of Artificial Sequence: Synthetic oligonucleotide
ccacccgcaggcacuuggu

SEQ ID NO: 913041 - RNA, 19 nt, Artificial Sequence
  Description of Artificial Sequence: Synthetic oligonucleotide
ccggacagcuguacucgau

SEQ ID NO: 913042 - RNA, 19 nt, Artificial Sequence
  Description of Artificial Sequence: Synthetic oligonucleotide
ggagggcaugaagccuacu

SEQ ID NO: 913043 - RNA, 19 nt, Artificial Sequence
  Description of Artificial Sequence: Synthetic oligonucleotide
ccuugcgucuccgcuuggu

SEQ ID NO: 913044 - RNA, 19 nt, Artificial Sequence
  Description of Artificial Sequence: Synthetic oligonucleotide
gcccggccagcuucauacu

SEQ ID NO: 913045 - RNA, 19 nt, Artificial Sequence
  Description of Artificial Sequence: Synthetic oligonucleotide
ccgccgcuuguacuucugu

SEQ ID NO: 913046 - RNA, 19 nt, Artificial Sequence
  Description of Artificial Sequence: Synthetic oligonucleotide
ccuacucccaggggcggau

SEQ ID NO: 913047 - RNA, 19 nt, Artificial Sequence
  Description of Artificial Sequence: Synthetic oligonucleotide
cgucuccgcuuggugaucu

SEQ ID NO: 913048 - RNA, 19 nt, Artificial Sequence
  Description of Artificial Sequence: Synthetic oligonucleotide
gcuugugcaugggcaccuu

SEQ ID NO: 913049 - RNA, 19 nt, Artificial Sequence
  Description of Artificial Sequence: Synthetic oligonucleotide
cccgugcugggcagacccu

SEQ ID NO: 913050 - RNA, 19 nt, Artificial Sequence
  Description of Artificial Sequence: Synthetic oligonucleotide
aauacauucaguuccaagc

SEQ ID NO: 913051 - RNA, 19 nt, Artificial Sequence
  Description of Artificial Sequence: Synthetic oligonucleotide
aaaucuaucauacaaucgg

SEQ ID NO: 913052 - RNA, 19 nt, Artificial Sequence
  Description of Artificial Sequence: Synthetic oligonucleotide
uguaugcagaauuagaacg

SEQ ID NO: 913053 - RNA, 19 nt, Artificial Sequence
  Description of Artificial Sequence: Synthetic oligonucleotide
uaaaguacgguccacaugu

SEQ ID NO: 913054 - RNA, 19 nt, Artificial Sequence
  Description of Artificial Sequence: Synthetic oligonucleotide
aauuagaacgugcaauuuc

SEQ ID NO: 913055 - RNA, 19 nt, Artificial Sequence
  Description of Artificial Sequence: Synthetic oligonucleotide
aguaguuuuacgcacaaag

SEQ ID NO: 913056 - RNA, 19 nt, Artificial Sequence
  Description of Artificial Sequence: Synthetic oligonucleotide
ugaauggagaauauacucg

SEQ ID NO: 913057 - RNA, 19 nt, Artificial Sequence
  Description of Artificial Sequence: Synthetic oligonucleotide
uauacaauguuggugaagg

SEQ ID NO: 913058 - RNA, 19 nt, Artificial Sequence
  Description of Artificial Sequence: Synthetic oligonucleotide
uuaggaaacgacaagccag

SEQ ID NO: 913059 - RNA, 19 nt, Artificial Sequence
  Description of Artificial Sequence: Synthetic oligonucleotide
acuaaggaggugcacaucc

SEQ ID NO: 913060 - RNA, 19 nt, Artificial Sequence
  Description of Artificial Sequence: Synthetic oligonucleotide
aacguugucaauuccauca

SEQ ID NO: 913061 - RNA, 19 nt, Artificial Sequence
  Description of Artificial Sequence: Synthetic oligonucleotide
guugguguaacuuaguuug

SEQ ID NO: 913062 - RNA, 19 nt, Artificial Sequence
  Description of Artificial Sequence: Synthetic oligonucleotide
uuugcagauaacucaaggg

SEQ ID NO: 913063 - RNA, 19 nt, Artificial Sequence
  Description of Artificial Sequence: Synthetic oligonucleotide
agauauacaauguugguga

SEQ ID NO: 913064 - RNA, 19 nt, Artificial Sequence
  Description of Artificial Sequence: Synthetic oligonucleotide
gauugaaccauccaguaac

SEQ ID NO: 913065 - RNA, 19 nt, Artificial Sequence
  Description of Artificial Sequence: Synthetic oligonucleotide
gacuauaaccccaagaaag

SEQ ID NO: 913066 - RNA, 19 nt, Artificial Sequence
  Description of Artificial Sequence: Synthetic oligonucleotide
aagggauugaaccauccag

SEQ ID NO: 913067 - RNA, 19 nt, Artificial Sequence
  Description of Artificial Sequence: Synthetic oligonucleotide
acuaucuucaucuaacacu

SEQ ID NO: 913068 - RNA, 19 nt, Artificial Sequence
  Description of Artificial Sequence: Synthetic oligonucleotide
uagugaauggagaauauac

SEQ ID NO: 913069 - RNA, 19 nt, Artificial Sequence
  Description of Artificial Sequence: Synthetic oligonucleotide
uugaugaacgcucgaaggg

SEQ ID NO: 913070 - RNA, 19 nt, Artificial Sequence
  Description of Artificial Sequence: Synthetic oligonucleotide
gaaacgacaagccaggauc

SEQ ID NO: 913071 - RNA, 19 nt, Artificial Sequence
  Description of Artificial Sequence: Synthetic oligonucleotide
agauucacaggcuauauga

SEQ ID NO: 913072 - RNA, 19 nt, Artificial Sequence
  Description of Artificial Sequence: Synthetic oligonucleotide
aaccagaggguccaguaac

SEQ ID NO: 913073 - RNA, 19 nt, Artificial Sequence
  Description of Artificial Sequence: Synthetic oligonucleotide
aacuuaguuugauacuguc

SEQ ID NO: 913074 - RNA, 19 nt, Artificial Sequence
  Description of Artificial Sequence: Synthetic oligonucleotide
cuaucauacaaucgggugg

SEQ ID NO: 913075 - RNA, 19 nt, Artificial Sequence
  Description of Artificial Sequence: Synthetic oligonucleotide
aaguacgguccacaugucc

SEQ ID NO: 913076 - RNA, 19 nt, Artificial Sequence
  Description of Artificial Sequence: Synthetic oligonucleotide
ugcagauaacucaagggcc

SEQ ID NO: 913077 - RNA, 19 nt, Artificial Sequence
  Description of Artificial Sequence: Synthetic oligonucleotide
ucuuuaggaaacgacaagc

SEQ ID NO: 913078 - RNA, 19 nt, Artificial Sequence
  Description of Artificial Sequence: Synthetic oligonucleotide
ucuaucauacaaucgggug

SEQ ID NO: 913079 - RNA, 19 nt, Artificial Sequence
  Description of Artificial Sequence: Synthetic oligonucleotide
aagcaugccuuguaucagc

SEQ ID NO: 913080 - RNA, 19 nt, Artificial Sequence
  Description of Artificial Sequence: Synthetic oligonucleotide
aauaaaaccagagggucca

SEQ ID NO: 913081 - RNA, 19 nt, Artificial Sequence
  Description of Artificial Sequence: Synthetic oligonucleotide
aaaacuugaugaacgcucg

SEQ ID NO: 913082 - RNA, 19 nt, Artificial Sequence
  Description of Artificial Sequence: Synthetic oligonucleotide
uacgcacaaagcuagaaac

SEQ ID NO: 913083 - RNA, 19 nt, Artificial Sequence
  Description of Artificial Sequence: Synthetic oligonucleotide
aguguaagguauccaggcc

SEQ ID NO: 913084 - RNA, 19 nt, Artificial Sequence
  Description of Artificial Sequence: Synthetic oligonucleotide
uaugcuuuccacuacggaa

SEQ ID NO: 913085 - RNA, 19 nt, Artificial Sequence
  Description of Artificial Sequence: Synthetic oligonucleotide
uaggaaacgacaagccagg

SEQ ID NO: 913086 - RNA, 19 nt, Artificial Sequence
  Description of Artificial Sequence: Synthetic oligonucleotide
acuauaaccccaagaaagc

SEQ ID NO: 913087 - RNA, 19 nt, Artificial Sequence
  Description of Artificial Sequence: Synthetic oligonucleotide
agucaagucuuaaagacuc

SEQ ID NO: 913088 - RNA, 19 nt, Artificial Sequence
  Description of Artificial Sequence: Synthetic oligonucleotide
ugcagaauuagaacgugca

SEQ ID NO: 913089 - RNA, 19 nt, Artificial Sequence
  Description of Artificial Sequence: Synthetic oligonucleotide
guguaacuuaguuugauac

SEQ ID NO: 913090 - RNA, 19 nt, Artificial Sequence
  Description of Artificial Sequence: Synthetic oligonucleotide
aagccacucacguaaaacu

SEQ ID NO: 913091 - RNA, 19 nt, Artificial Sequence
  Description of Artificial Sequence: Synthetic oligonucleotide
uguaguagauguaggagaa

SEQ ID NO: 913092 - RNA, 19 nt, Artificial Sequence
  Description of Artificial Sequence: Synthetic oligonucleotide
ucaggcuuauaucauucag

SEQ ID NO: 913093 - RNA, 19 nt, Artificial Sequence
  Description of Artificial Sequence: Synthetic oligonucleotide
ugugaguucuugaagccug

SEQ ID NO: 913094 - RNA, 19 nt, Artificial Sequence
  Description of Artificial Sequence: Synthetic oligonucleotide
cuuugcagauaacucaagg

SEQ ID NO: 913095 - RNA, 19 nt, Artificial Sequence
  Description of Artificial Sequence: Synthetic oligonucleotide
acagguagacugcugguac

SEQ ID NO: 913096 - RNA, 19 nt, Artificial Sequence
  Description of Artificial Sequence: Synthetic oligonucleotide
guaacuuaguuugauacug

SEQ ID NO: 913097 - RNA, 19 nt, Artificial Sequence
  Description of Artificial Sequence: Synthetic oligonucleotide
uggagaauauacucgaaaa

SEQ ID NO: 913098 - RNA, 19 nt, Artificial Sequence
  Description of Artificial Sequence: Synthetic oligonucleotide
uuagcuaacaggagugcca

SEQ ID NO: 913099 - RNA, 19 nt, Artificial Sequence
  Description of Artificial Sequence: Synthetic oligonucleotide
acuaaggcugcuuacagau

SEQ ID NO: 913100 - RNA, 19 nt, Artificial Sequence
  Description of Artificial Sequence: Synthetic oligonucleotide
uguaagguauccaggccag

SEQ ID NO: 913101 - RNA, 19 nt, Artificial Sequence
  Description of Artificial Sequence: Synthetic oligonucleotide
uucuuagugacuuggguuc

SEQ ID NO: 913102 - RNA, 19 nt, Artificial Sequence
  Description of Artificial Sequence: Synthetic oligonucleotide
ucuuugguugugaagucug

SEQ ID NO: 913103 - RNA, 19 nt, Artificial Sequence
  Description of Artificial Sequence: Synthetic oligonucleotide
acucacguaaaacuguucu

SEQ ID NO: 913104 - RNA, 19 nt, Artificial Sequence
  Description of Artificial Sequence: Synthetic oligonucleotide
ucagaagaaggaucaacug

SEQ ID NO: 913105 - RNA, 19 nt, Artificial Sequence
  Description of Artificial Sequence: Synthetic oligonucleotide
acuuaguuugauacugucc

SEQ ID NO: 913106 - RNA, 19 nt, Artificial Sequence
  Description of Artificial Sequence: Synthetic oligonucleotide
uuugauacugucccuugcu

SEQ ID NO: 913107 - RNA, 19 nt, Artificial Sequence
  Description of Artificial Sequence: Synthetic oligonucleotide
uguaacuuaguuugauacu

SEQ ID NO: 913108 - RNA, 19 nt, Artificial Sequence
  Description of Artificial Sequence: Synthetic oligonucleotide
caagucuuaaagacucugg

SEQ ID NO: 913109 - RNA, 19 nt, Artificial Sequence
  Description of Artificial Sequence: Synthetic oligonucleotide
aacgaaauggcaguggaau

SEQ ID NO: 913110 - RNA, 19 nt, Artificial Sequence
  Description of Artificial Sequence: Synthetic oligonucleotide
uggguucaaauaaaaccag

SEQ ID NO: 913111 - RNA, 19 nt, Artificial Sequence
  Description of Artificial Sequence: Synthetic oligonucleotide
ucuaguguacuugugcuug

SEQ ID NO: 913112 - RNA, 19 nt, Artificial Sequence
  Description of Artificial Sequence: Synthetic oligonucleotide
gugaauggagaauauacuc

SEQ ID NO: 913113 - RNA, 19 nt, Artificial Sequence
  Description of Artificial Sequence: Synthetic oligonucleotide
gaacccauaggaccuacag

SEQ ID NO: 913114 - RNA, 19 nt, Artificial Sequence
  Description of Artificial Sequence: Synthetic oligonucleotide
uaucauacaaucggguggc

SEQ ID NO: 913115 - RNA, 19 nt, Artificial Sequence
  Description of Artificial Sequence: Synthetic oligonucleotide
auaggaaccggucacacuu

SEQ ID NO: 913116 - RNA, 19 nt, Artificial Sequence
  Description of Artificial Sequence: Synthetic oligonucleotide
agaauuagaacgugcaauu

SEQ ID NO: 913117 - RNA, 19 nt, Artificial Sequence
  Description of Artificial Sequence: Synthetic oligonucleotide
aggaucaacugacuauaac

SEQ ID NO: 913118 - RNA, 19 nt, Artificial Sequence
  Description of Artificial Sequence: Synthetic oligonucleotide
uguucuuagugacuugggu

SEQ ID NO: 913119 - RNA, 19 nt, Artificial Sequence
  Description of Artificial Sequence: Synthetic oligonucleotide
augggacacugccaaaagc

SEQ ID NO: 913120 - RNA, 19 nt, Artificial Sequence
  Description of Artificial Sequence: Synthetic oligonucleotide
aguaacuguaggccugugg

SEQ ID NO: 913121 - RNA, 19 nt, Artificial Sequence
  Description of Artificial Sequence: Synthetic oligonucleotide
guuuuacgcacaaagcuag

SEQ ID NO: 913122 - RNA, 19 nt, Artificial Sequence
  Description of Artificial Sequence: Synthetic oligonucleotide
acuguucuuagugacuugg

SEQ ID NO: 913123 - RNA, 19 nt, Artificial Sequence
  Description of Artificial Sequence: Synthetic oligonucleotide
aaacugagcgggaugauga

SEQ ID NO: 913124 - RNA, 19 nt, Artificial Sequence
  Description of Artificial Sequence: Synthetic oligonucleotide
aagaaggaucaacugacua

SEQ ID NO: 913125 - RNA, 19 nt, Artificial Sequence
  Description of Artificial Sequence: Synthetic oligonucleotide
uccucaguaguuuuacgca

SEQ ID NO: 913126 - RNA, 19 nt, Artificial Sequence
  Description of Artificial Sequence: Synthetic oligonucleotide
acugacuauaaccccaaga

SEQ ID NO: 913127 - RNA, 19 nt, Artificial Sequence
  Description of Artificial Sequence: Synthetic oligonucleotide
ugcaauuaacaaaggacua

SEQ ID NO: 913128 - RNA, 19 nt, Artificial Sequence
  Description of Artificial Sequence: Synthetic oligonucleotide
ugcugugaccauaggaacc

SEQ ID NO: 913129 - RNA, 19 nt, Artificial Sequence
  Description of Artificial Sequence: Synthetic oligonucleotide
aggcuuauaucauucagau

SEQ ID NO: 913130 - RNA, 19 nt, Artificial Sequence
  Description of Artificial Sequence: Synthetic oligonucleotide
ggaaaugccagugaagucc

SEQ ID NO: 913131 - RNA, 19 nt, Artificial Sequence
  Description of Artificial Sequence: Synthetic oligonucleotide
ugaagggauugaaccaucc

SEQ ID NO: 913132 - RNA, 19 nt, Artificial Sequence
  Description of Artificial Sequence: Synthetic oligonucleotide
ugugaauggggccugggau

SEQ ID NO: 913133 - RNA, 19 nt, Artificial Sequence
  Description of Artificial Sequence: Synthetic oligonucleotide
auuagaacgugcaauuucu

SEQ ID NO: 913134 - RNA, 19 nt, Artificial Sequence
  Description of Artificial Sequence: Synthetic oligonucleotide
uaacaggagugccacauuc

SEQ ID NO: 913135 - RNA, 19 nt, Artificial Sequence
  Description of Artificial Sequence: Synthetic oligonucleotide
cugacuauaaccccaagaa

SEQ ID NO: 913136 - RNA, 19 nt, Artificial Sequence
  Description of Artificial Sequence: Synthetic oligonucleotide
accuaugcuuuccacuacg

SEQ ID NO: 913137 - RNA, 19 nt, Artificial Sequence
  Description of Artificial Sequence: Synthetic oligonucleotide
caauacauucaguuccaag

SEQ ID NO: 913138 - RNA, 19 nt, Artificial Sequence
  Description of Artificial Sequence: Synthetic oligonucleotide
ugacuauaaccccaagaaa

SEQ ID NO: 913139 - RNA, 19 nt, Artificial Sequence
  Description of Artificial Sequence: Synthetic oligonucleotide
uucuaacugugaaagccac

SEQ ID NO: 913140 - RNA, 19 nt, Artificial Sequence
  Description of Artificial Sequence: Synthetic oligonucleotide
uuacgcacaaagcuagaaa

SEQ ID NO: 913141 - RNA, 19 nt, Artificial Sequence
  Description of Artificial Sequence: Synthetic oligonucleotide
cagauauacaauguuggug

SEQ ID NO: 913142 - RNA, 19 nt, Artificial Sequence
  Description of Artificial Sequence: Synthetic oligonucleotide
uauagugaauggagaauau

SEQ ID NO: 913143 - RNA, 19 nt, Artificial Sequence
  Description of Artificial Sequence: Synthetic oligonucleotide
aaaaucacccaaggguuca

SEQ ID NO: 913144 - RNA, 19 nt, Artificial Sequence
  Description of Artificial Sequence: Synthetic oligonucleotide
uucaacaaaagugucccaa

SEQ ID NO: 913145 - RNA, 19 nt, Artificial Sequence
  Description of Artificial Sequence: Synthetic oligonucleotide
gauaacucaagggccagac

SEQ ID NO: 913146 - RNA, 19 nt, Artificial Sequence
  Description of Artificial Sequence: Synthetic oligonucleotide
uacuggaaaugccagugaa

SEQ ID NO: 913147 - RNA, 19 nt, Artificial Sequence
  Description of Artificial Sequence: Synthetic oligonucleotide
gaaccggucacacuucuca

SEQ ID NO: 913148 - RNA, 19 nt, Artificial Sequence
  Description of Artificial Sequence: Synthetic oligonucleotide
uaacuuaguuugauacugu

SEQ ID NO: 913149 - RNA, 19 nt, Artificial Sequence
  Description of Artificial Sequence: Synthetic oligonucleotide
agugacuuggguucaaaua

SEQ ID NO: 913150 - RNA, 19 nt, Artificial Sequence
  Description of Artificial Sequence: Synthetic oligonucleotide
acuaggucugcugugacca

SEQ ID NO: 913151 - RNA, 19 nt, Artificial Sequence
  Description of Artificial Sequence: Synthetic oligonucleotide
aaaggacuaucugaaggga

SEQ ID NO: 913152 - RNA, 19 nt, Artificial Sequence
  Description of Artificial Sequence: Synthetic oligonucleotide
auggagaauauacucgaaa

SEQ ID NO: 913153 - RNA, 19 nt, Artificial Sequence
  Description of Artificial Sequence: Synthetic oligonucleotide
uguugguguaacuuaguuu

SEQ ID NO: 913154 - RNA, 19 nt, Artificial Sequence
  Description of Artificial Sequence: Synthetic oligonucleotide
ucacguaaaacuguucuua

SEQ ID NO: 913155 - RNA, 19 nt, Artificial Sequence
  Description of Artificial Sequence: Synthetic oligonucleotide
agaguguaagguauccagg

SEQ ID NO: 913156 - RNA, 19 nt, Artificial Sequence
  Description of Artificial Sequence: Synthetic oligonucleotide
aguuccaagcacaacguug

SEQ ID NO: 913157 - RNA, 19 nt, Artificial Sequence
  Description of Artificial Sequence: Synthetic oligonucleotide
cuuagcuaacaggagugcc

SEQ ID NO: 913158 - RNA, 19 nt, Artificial Sequence
  Description of Artificial Sequence: Synthetic oligonucleotide
agugaauggagaauauacu

SEQ ID NO: 913159 - RNA, 19 nt, Artificial Sequence
  Description of Artificial Sequence: Synthetic oligonucleotide
guaaaguacgguccacaug

SEQ ID NO: 913160 - RNA, 19 nt, Artificial Sequence
  Description of Artificial Sequence: Synthetic oligonucleotide
acuacggaagucaauacau

SEQ ID NO: 913161 - RNA, 19 nt, Artificial Sequence
  Description of Artificial Sequence: Synthetic oligonucleotide
ccaaaucuaucauacaauc

SEQ ID NO: 913162 - RNA, 19 nt, Artificial Sequence
  Description of Artificial Sequence: Synthetic oligonucleotide
acgaaauggcaguggaaug

SEQ ID NO: 913163 - RNA, 19 nt, Artificial Sequence
  Description of Artificial Sequence: Synthetic oligonucleotide
agucuuaaagacucugguu

SEQ ID NO: 913164 - RNA, 19 nt, Artificial Sequence
  Description of Artificial Sequence: Synthetic oligonucleotide
auauacaauguuggugaag

SEQ ID NO: 913165 - RNA, 19 nt, Artificial Sequence
  Description of Artificial Sequence: Synthetic oligonucleotide
aggucucggggauccaccc

SEQ ID NO: 913166 - RNA, 19 nt, Artificial Sequence
  Description of Artificial Sequence: Synthetic oligonucleotide
aaacuugaugaacgcucga

SEQ ID NO: 913167 - RNA, 19 nt, Artificial Sequence
  Description of Artificial Sequence: Synthetic oligonucleotide
uuugguugugaagucugca

SEQ ID NO: 913168 - RNA, 19 nt, Artificial Sequence
  Description of Artificial Sequence: Synthetic oligonucleotide
accaccuaugcuuuccacu

SEQ ID NO: 913169 - RNA, 19 nt, Artificial Sequence
  Description of Artificial Sequence: Synthetic oligonucleotide
ucucaagcaugccuuguau

SEQ ID NO: 913170 - RNA, 19 nt, Artificial Sequence
  Description of Artificial Sequence: Synthetic oligonucleotide
uaacugugaaagccacuca

SEQ ID NO: 913171 - RNA, 19 nt, Artificial Sequence
  Description of Artificial Sequence: Synthetic oligonucleotide
aaaucacccaaggguucac

SEQ ID NO: 913172 - RNA, 19 nt, Artificial Sequence
  Description of Artificial Sequence: Synthetic oligonucleotide
cacuaucuucaucuaacac

SEQ ID NO: 913173 - RNA, 19 nt, Artificial Sequence
  Description of Artificial Sequence: Synthetic oligonucleotide
gcuugguggagcaucaugg

SEQ ID NO: 913174 - RNA, 19 nt, Artificial Sequence
  Description of Artificial Sequence: Synthetic oligonucleotide
cuuugguugugaagucugc

SEQ ID NO: 913175 - RNA, 19 nt, Artificial Sequence
  Description of Artificial Sequence: Synthetic oligonucleotide
cuguuggcuauagugaaug

SEQ ID NO: 913176 - RNA, 19 nt, Artificial Sequence
  Description of Artificial Sequence: Synthetic oligonucleotide
uuuacgcacaaagcuagaa

SEQ ID NO: 913177 - RNA, 19 nt, Artificial Sequence
  Description of Artificial Sequence: Synthetic oligonucleotide
aacugacuauaaccccaag

SEQ ID NO: 913178 - RNA, 19 nt, Artificial Sequence
  Description of Artificial Sequence: Synthetic oligonucleotide
uuuuacgcacaaagcuaga

SEQ ID NO: 913179 - RNA, 19 nt, Artificial Sequence
  Description of Artificial Sequence: Synthetic oligonucleotide
gugaauggggccugggaug

SEQ ID NO: 913180 - RNA, 19 nt, Artificial Sequence
  Description of Artificial Sequence: Synthetic oligonucleotide
ugugaccauaggaaccggu

SEQ ID NO: 913181 - RNA, 19 nt, Artificial Sequence
  Description of Artificial Sequence: Synthetic oligonucleotide
auccaguaacuguaggccu

SEQ ID NO: 913182 - RNA, 19 nt, Artificial Sequence
  Description of Artificial Sequence: Synthetic oligonucleotide
ucacuaaggaggugcacau

SEQ ID NO: 913183 - RNA, 19 nt, Artificial Sequence
  Description of Artificial Sequence: Synthetic oligonucleotide
gacuguuggcuauagugaa

SEQ ID NO: 913184 - RNA, 19 nt, Artificial Sequence
  Description of Artificial Sequence: Synthetic oligonucleotide
aaucggguggcaaaugcaa

SEQ ID NO: 913185 - RNA, 19 nt, Artificial Sequence
  Description of Artificial Sequence: Synthetic oligonucleotide
cugaggcucccauuuagug

SEQ ID NO: 913186 - RNA, 19 nt, Artificial Sequence
  Description of Artificial Sequence: Synthetic oligonucleotide
aguaacuuggucauugcuu

SEQ ID NO: 913187 - RNA, 19 nt, Artificial Sequence
  Description of Artificial Sequence: Synthetic oligonucleotide
cacccaaggguucacuaag

SEQ ID NO: 913188 - RNA, 19 nt, Artificial Sequence
  Description of Artificial Sequence: Synthetic oligonucleotide
acguaaaacuguucuuagu

SEQ ID NO: 913189 - RNA, 19 nt, Artificial Sequence
  Description of Artificial Sequence: Synthetic oligonucleotide
gaagggauugaaccaucca

SEQ ID NO: 913190 - RNA, 19 nt, Artificial Sequence
  Description of Artificial Sequence: Synthetic oligonucleotide
caggaaguuuaaucagaag

SEQ ID NO: 913191 - RNA, 19 nt, Artificial Sequence
  Description of Artificial Sequence: Synthetic oligonucleotide
uugguguaacuuaguuuga

SEQ ID NO: 913192 - RNA, 19 nt, Artificial Sequence
  Description of Artificial Sequence: Synthetic oligonucleotide
auaggaccuacagauguca

SEQ ID NO: 913193 - RNA, 19 nt, Artificial Sequence
  Description of Artificial Sequence: Synthetic oligonucleotide
aguuuuacgcacaaagcua

SEQ ID NO: 913194 - RNA, 19 nt, Artificial Sequence
  Description of Artificial Sequence: Synthetic oligonucleotide
ugugaaagccacucacgua

SEQ ID NO: 913195 - RNA, 19 nt, Artificial Sequence
  Description of Artificial Sequence: Synthetic oligonucleotide
ggaaguuuaaucagaagaa

SEQ ID NO: 913196 - RNA, 19 nt, Artificial Sequence
  Description of Artificial Sequence: Synthetic oligonucleotide
cuauagugaauggagaaua

SEQ ID NO: 913197 - RNA, 19 nt, Artificial Sequence
  Description of Artificial Sequence: Synthetic oligonucleotide
augacggcagagcugugca

SEQ ID NO: 913198 - RNA, 19 nt, Artificial Sequence
  Description of Artificial Sequence: Synthetic oligonucleotide
caugggacacugccaaaag

SEQ ID NO: 913199 - RNA, 19 nt, Artificial Sequence
  Description of Artificial Sequence: Synthetic oligonucleotide
cuguguaugcagaauuaga

SEQ ID NO: 913200 - RNA, 19 nt, Artificial Sequence
  Description of Artificial Sequence: Synthetic oligonucleotide
gauauacaauguuggugaa

SEQ ID NO: 913201 - RNA, 19 nt, Artificial Sequence
  Description of Artificial Sequence: Synthetic oligonucleotide
uucucaagcaugccuugua

SEQ ID NO: 913202 - RNA, 19 nt, Artificial Sequence
  Description of Artificial Sequence: Synthetic oligonucleotide
uggauggauaaaacuugau

SEQ ID NO: 913203 - RNA, 19 nt, Artificial Sequence
  Description of Artificial Sequence: Synthetic oligonucleotide
acuggaaaugccagugaag

SEQ ID NO: 913204 - RNA, 19 nt, Artificial Sequence
  Description of Artificial Sequence: Synthetic oligonucleotide
gcugugaccauaggaaccg

SEQ ID NO: 913205 - RNA, 19 nt, Artificial Sequence
  Description of Artificial Sequence: Synthetic oligonucleotide
cauaggaccuacagauguc

SEQ ID NO: 913206 - RNA, 19 nt, Artificial Sequence
  Description of Artificial Sequence: Synthetic oligonucleotide
uagcuaacaggagugccac

SEQ ID NO: 913207 - RNA, 19 nt, Artificial Sequence
  Description of Artificial Sequence: Synthetic oligonucleotide
aacaggagugccacauucu

SEQ ID NO: 913208 - RNA, 19 nt, Artificial Sequence
  Description of Artificial Sequence: Synthetic oligonucleotide
cuaacacucccucuucuga

SEQ ID NO: 913209 - RNA, 19 nt, Artificial Sequence
  Description of Artificial Sequence: Synthetic oligonucleotide
aucuaucauacaaucgggu

SEQ ID NO: 913210 - RNA, 19 nt, Artificial Sequence
  Description of Artificial Sequence: Synthetic oligonucleotide
uuagaacgugcaauuucuu

SEQ ID NO: 913211 - RNA, 19 nt, Artificial Sequence
  Description of Artificial Sequence: Synthetic oligonucleotide
aaaguacgguccacauguc

SEQ ID NO: 913212 - RNA, 19 nt, Artificial Sequence
  Description of Artificial Sequence: Synthetic oligonucleotide
aaggacuaucugaagggau

SEQ ID NO: 913213 - RNA, 19 nt, Artificial Sequence
  Description of Artificial Sequence: Synthetic oligonucleotide
ucacagguagacugcuggu

SEQ ID NO: 913214 - RNA, 19 nt, Artificial Sequence
  Description of Artificial Sequence: Synthetic oligonucleotide
cacuaggucugcugugacc

SEQ ID NO: 913215 - RNA, 19 nt, Artificial Sequence
  Description of Artificial Sequence: Synthetic oligonucleotide
acuaucugaagggauugaa

SEQ ID NO: 913216 - RNA, 19 nt, Artificial Sequence
  Description of Artificial Sequence: Synthetic oligonucleotide
aggccggguaucugcaauc

SEQ ID NO: 913217 - RNA, 19 nt, Artificial Sequence
  Description of Artificial Sequence: Synthetic oligonucleotide
ucggggauccacccauugu

SEQ ID NO: 913218 - RNA, 19 nt, Artificial Sequence
  Description of Artificial Sequence: Synthetic oligonucleotide
ucggguggcaaaugcaauu

SEQ ID NO: 913219 - RNA, 19 nt, Artificial Sequence
  Description of Artificial Sequence: Synthetic oligonucleotide
auagugaauggagaauaua

SEQ ID NO: 913220 - RNA, 19 nt, Artificial Sequence
  Description of Artificial Sequence: Synthetic oligonucleotide
ugggcccauggccuuagcu

SEQ ID NO: 913221 - RNA, 19 nt, Artificial Sequence
  Description of Artificial Sequence: Synthetic oligonucleotide
uccgggcuugcgugaaggg

SEQ ID NO: 913222 - RNA, 19 nt, Artificial Sequence
  Description of Artificial Sequence: Synthetic oligonucleotide
aucuaguguacuugugcuu

SEQ ID NO: 913223 - RNA, 19 nt, Artificial Sequence
  Description of Artificial Sequence: Synthetic oligonucleotide
guucuuagugacuuggguu

SEQ ID NO: 913224 - RNA, 19 nt, Artificial Sequence
  Description of Artificial Sequence: Synthetic oligonucleotide
caugccuuguaucagcgcu

SEQ ID NO: 913225 - RNA, 19 nt, Artificial Sequence
  Description of Artificial Sequence: Synthetic oligonucleotide
ugguguaacuuaguuugau

SEQ ID NO: 913226 - RNA, 19 nt, Artificial Sequence
  Description of Artificial Sequence: Synthetic oligonucleotide
uacaaucggguggcaaaug

SEQ ID NO: 913227 - RNA, 19 nt, Artificial Sequence
  Description of Artificial Sequence: Synthetic oligonucleotide
cugaagggauugaaccauc

SEQ ID NO: 913228 - RNA, 19 nt, Artificial Sequence
  Description of Artificial Sequence: Synthetic oligonucleotide
aggcugcuuacagauucac

SEQ ID NO: 913229 - RNA, 19 nt, Artificial Sequence
  Description of Artificial Sequence: Synthetic oligonucleotide
uaucugcaaucacuuccuc

SEQ ID NO: 913230 - RNA, 19 nt, Artificial Sequence
  Description of Artificial Sequence: Synthetic oligonucleotide
guacgguccacauguccac

SEQ ID NO: 913231 - RNA, 19 nt, Artificial Sequence
  Description of Artificial Sequence: Synthetic oligonucleotide
ccuaugcuuuccacuacgg

SEQ ID NO: 913232 - RNA, 19 nt, Artificial Sequence
  Description of Artificial Sequence: Synthetic oligonucleotide
uggagcaucaugggacacu

SEQ ID NO: 913233 - RNA, 19 nt, Artificial Sequence
  Description of Artificial Sequence: Synthetic oligonucleotide
cuaugcuuuccacuacgga

SEQ ID NO: 913234 - RNA, 19 nt, Artificial Sequence
  Description of Artificial Sequence: Synthetic oligonucleotide
acuuugcagauaacucaag

SEQ ID NO: 913235 - RNA, 19 nt, Artificial Sequence
  Description of Artificial Sequence: Synthetic oligonucleotide
aggguuguugguguaacuu

SEQ ID NO: 913236 - RNA, 19 nt, Artificial Sequence
  Description of Artificial Sequence: Synthetic oligonucleotide
auacaaucggguggcaaau

SEQ ID NO: 913237 - RNA, 19 nt, Artificial Sequence
  Description of Artificial Sequence: Synthetic oligonucleotide
guaugcagaauuagaacgu

SEQ ID NO: 913238 - RNA, 19 nt, Artificial Sequence
  Description of Artificial Sequence: Synthetic oligonucleotide
aggagagagcugcuguaaa

SEQ ID NO: 913239 - RNA, 19 nt, Artificial Sequence
  Description of Artificial Sequence: Synthetic oligonucleotide
acgcacaaagcuagaaaca

SEQ ID NO: 913240 - RNA, 19 nt, Artificial Sequence
  Description of Artificial Sequence: Synthetic oligonucleotide
ccucaguaguuuuacgcac

SEQ ID NO: 913241 - RNA, 19 nt, Artificial Sequence
  Description of Artificial Sequence: Synthetic oligonucleotide
gugaccauaggaaccgguc

SEQ ID NO: 913242 - RNA, 19 nt, Artificial Sequence
  Description of Artificial Sequence: Synthetic oligonucleotide
ugagcgggaugaugacggc

SEQ ID NO: 913243 - RNA, 19 nt, Artificial Sequence
  Description of Artificial Sequence: Synthetic oligonucleotide
acgguccacauguccacca

SEQ ID NO: 913244 - RNA, 19 nt, Artificial Sequence
  Description of Artificial Sequence: Synthetic oligonucleotide
ugaacgcucgaagggcaga

SEQ ID NO: 913245 - RNA, 19 nt, Artificial Sequence
  Description of Artificial Sequence: Synthetic oligonucleotide
aaggcugcuuacagauuca

SEQ ID NO: 913246 - RNA, 19 nt, Artificial Sequence
  Description of Artificial Sequence: Synthetic oligonucleotide
cuaaggaggugcacaucca

SEQ ID NO: 913247 - RNA, 19 nt, Artificial Sequence
  Description of Artificial Sequence: Synthetic oligonucleotide
augccuuguaucagcgcuc

SEQ ID NO: 913248 - RNA, 19 nt, Artificial Sequence
  Description of Artificial Sequence: Synthetic oligonucleotide
gaacgcucgaagggcagac

SEQ ID NO: 913249 - RNA, 19 nt, Artificial Sequence
  Description of Artificial Sequence: Synthetic oligonucleotide
aggacuaucugaagggauu

SEQ ID NO: 913250 - RNA, 19 nt, Artificial Sequence
  Description of Artificial Sequence: Synthetic oligonucleotide
cacucacguaaaacuguuc

SEQ ID NO: 913251 - RNA, 19 nt, Artificial Sequence
  Description of Artificial Sequence: Synthetic oligonucleotide
cagaauuagaacgugcaau

SEQ ID NO: 913252 - RNA, 19 nt, Artificial Sequence
  Description of Artificial Sequence: Synthetic oligonucleotide
agugacuccugaggaguug

SEQ ID NO: 913253 - RNA, 19 nt, Artificial Sequence
  Description of Artificial Sequence: Synthetic oligonucleotide
cugugaaagccacucacgu

SEQ ID NO: 913254 - RNA, 19 nt, Artificial Sequence
  Description of Artificial Sequence: Synthetic oligonucleotide
ccaagcacaacguugucaa

SEQ ID NO: 913255 - RNA, 19 nt, Artificial Sequence
  Description of Artificial Sequence: Synthetic oligonucleotide
uagugacuccugaggaguu

SEQ ID NO: 913256 - RNA, 19 nt, Artificial Sequence
  Description of Artificial Sequence: Synthetic oligonucleotide
uuccaagcacaacguuguc

SEQ ID NO: 913257 - RNA, 19 nt, Artificial Sequence
  Description of Artificial Sequence: Synthetic oligonucleotide
ugcgugaagggugccaauu

SEQ ID NO: 913258 - RNA, 19 nt, Artificial Sequence
  Description of Artificial Sequence: Synthetic oligonucleotide
cuucaacaaaaguguccca

SEQ ID NO: 913259 - RNA, 19 nt, Artificial Sequence
  Description of Artificial Sequence: Synthetic oligonucleotide
gguguaacuuaguuugaua

SEQ ID NO: 913260 - RNA, 19 nt, Artificial Sequence
  Description of Artificial Sequence: Synthetic oligonucleotide
gacucacuaaggaggugca

SEQ ID NO: 913261 - RNA, 19 nt, Artificial Sequence
  Description of Artificial Sequence: Synthetic oligonucleotide
caacugacuauaaccccaa

SEQ ID NO: 913262 - RNA, 19 nt, Artificial Sequence
  Description of Artificial Sequence: Synthetic oligonucleotide
agauaacucaagggccaga

SEQ ID NO: 913263 - RNA, 19 nt, Artificial Sequence
  Description of Artificial Sequence: Synthetic oligonucleotide
caagugugaauggggccug

SEQ ID NO: 913264 - RNA, 19 nt, Artificial Sequence
  Description of Artificial Sequence: Synthetic oligonucleotide
guagauguaggagaagcuu

SEQ ID NO: 913265 - RNA, 19 nt, Artificial Sequence
  Description of Artificial Sequence: Synthetic oligonucleotide
ggauugaaccauccaguaa

SEQ ID NO: 913266 - RNA, 19 nt, Artificial Sequence
  Description of Artificial Sequence: Synthetic oligonucleotide
augaacgcucgaagggcag

SEQ ID NO: 913267 - RNA, 19 nt, Artificial Sequence
  Description of Artificial Sequence: Synthetic oligonucleotide
aacgcucgaagggcagacu

SEQ ID NO: 913268 - RNA, 19 nt, Artificial Sequence
  Description of Artificial Sequence: Synthetic oligonucleotide
cagguucaauuucacaggu

SEQ ID NO: 913269 - RNA, 19 nt, Artificial Sequence
  Description of Artificial Sequence: Synthetic oligonucleotide
gggauugaaccauccagua

SEQ ID NO: 913270 - RNA, 19 nt, Artificial Sequence
  Description of Artificial Sequence: Synthetic oligonucleotide
cgcacaaagcuagaaacac

SEQ ID NO: 913271 - RNA, 19 nt, Artificial Sequence
  Description of Artificial Sequence: Synthetic oligonucleotide
gaagacuguuggcuauagu

SEQ ID NO: 913272 - RNA, 19 nt, Artificial Sequence
  Description of Artificial Sequence: Synthetic oligonucleotide
ggguuguugguguaacuua

SEQ ID NO: 913273 - RNA, 19 nt, Artificial Sequence
  Description of Artificial Sequence: Synthetic oligonucleotide
guaucagcgcucucugccu

SEQ ID NO: 913274 - RNA, 19 nt, Artificial Sequence
  Description of Artificial Sequence: Synthetic oligonucleotide
cugugaccauaggaaccgg

SEQ ID NO: 913275 - RNA, 19 nt, Artificial Sequence
  Description of Artificial Sequence: Synthetic oligonucleotide
cuugcgugaagggugccaa

SEQ ID NO: 913276 - RNA, 19 nt, Artificial Sequence
  Description of Artificial Sequence: Synthetic oligonucleotide
gacuccccaaaucuaucau

SEQ ID NO: 913277 - RNA, 19 nt, Artificial Sequence
  Description of Artificial Sequence: Synthetic oligonucleotide
gcaggaaguuuaaucagaa

SEQ ID NO: 913278 - RNA, 19 nt, Artificial Sequence
  Description of Artificial Sequence: Synthetic oligonucleotide
gauccacccauuguccccu

SEQ ID NO: 913279 - RNA, 19 nt, Artificial Sequence
  Description of Artificial Sequence: Synthetic oligonucleotide
ccuuagcuaacaggagugc

SEQ ID NO: 913280 - RNA, 19 nt, Artificial Sequence
  Description of Artificial Sequence: Synthetic oligonucleotide
caguaacuuggucauugcu

SEQ ID NO: 913281 - RNA, 19 nt, Artificial Sequence
  Description of Artificial Sequence: Synthetic oligonucleotide
agaacccauaggaccuaca

SEQ ID NO: 913282 - RNA, 19 nt, Artificial Sequence
  Description of Artificial Sequence: Synthetic oligonucleotide
uugcgugaagggugccaau

SEQ ID NO: 913283 - RNA, 19 nt, Artificial Sequence
  Description of Artificial Sequence: Synthetic oligonucleotide
gcagugaccaggcccgauc

SEQ ID NO: 913284 - RNA, 19 nt, Artificial Sequence
  Description of Artificial Sequence: Synthetic oligonucleotide
gcaagugugaauggggccu

SEQ ID NO: 913285 - RNA, 19 nt, Artificial Sequence
  Description of Artificial Sequence: Synthetic oligonucleotide
cauaggaaccggucacacu

SEQ ID NO: 913286 - RNA, 19 nt, Artificial Sequence
  Description of Artificial Sequence: Synthetic oligonucleotide
ggaguuggccuuaugcucu

SEQ ID NO: 913287 - RNA, 19 nt, Artificial Sequence
  Description of Artificial Sequence: Synthetic oligonucleotide
cucacguaaaacuguucuu

SEQ ID NO: 913288 - RNA, 19 nt, Artificial Sequence
  Description of Artificial Sequence: Synthetic oligonucleotide
gcaauuaacaaaggacuau

SEQ ID NO: 913289 - RNA, 19 nt, Artificial Sequence
  Description of Artificial Sequence: Synthetic oligonucleotide
gcaugccuuguaucagcgc

SEQ ID NO: 913290 - RNA, 19 nt, Artificial Sequence
  Description of Artificial Sequence: Synthetic oligonucleotide
gcccgaucugggcccaugg

SEQ ID NO: 913291 - RNA, 19 nt, Artificial Sequence
  Description of Artificial Sequence: Synthetic oligonucleotide
cacuaaggaggugcacauc

SEQ ID NO: 913292 - RNA, 19 nt, Artificial Sequence
  Description of Artificial Sequence: Synthetic oligonucleotide
gcaaugucggaaggcagga

SEQ ID NO: 913293 - RNA, 19 nt, Artificial Sequence
  Description of Artificial Sequence: Synthetic oligonucleotide
auaugaccaccaguuucuu

SEQ ID NO: 913294 - RNA, 19 nt, Artificial Sequence
  Description of Artificial Sequence: Synthetic oligonucleotide
cagugccugaagaauuccu

SEQ ID NO: 913295 - RNA, 19 nt, Artificial Sequence
  Description of Artificial Sequence: Synthetic oligonucleotide
ccauaggaaccggucacac

SEQ ID NO: 913296 - RNA, 19 nt, Artificial Sequence
  Description of Artificial Sequence: Synthetic oligonucleotide
gucucggggauccacccau

SEQ ID NO: 913297 - RNA, 19 nt, Artificial Sequence
  Description of Artificial Sequence: Synthetic oligonucleotide
agguucaauuucacaggua

SEQ ID NO: 913298 - RNA, 19 nt, Artificial Sequence
  Description of Artificial Sequence: Synthetic oligonucleotide
ggcuuauaucauucagaua

SEQ ID NO: 913299 - RNA, 19 nt, Artificial Sequence
  Description of Artificial Sequence: Synthetic oligonucleotide
cuacggaagucaauacauu

SEQ ID NO: 913300 - RNA, 19 nt, Artificial Sequence
  Description of Artificial Sequence: Synthetic oligonucleotide
guaagguauccaggccaga

SEQ ID NO: 913301 - RNA, 19 nt, Artificial Sequence
  Description of Artificial Sequence: Synthetic oligonucleotide
cacucccucuucugacuca

SEQ ID NO: 913302 - RNA, 19 nt, Artificial Sequence
  Description of Artificial Sequence: Synthetic oligonucleotide
uccugaggaguuggccuua

SEQ ID NO: 913303 - RNA, 19 nt, Artificial Sequence
  Description of Artificial Sequence: Synthetic oligonucleotide
cagugaccaggcccgaucu

SEQ ID NO: 913304 - RNA, 19 nt, Artificial Sequence
  Description of Artificial Sequence: Synthetic oligonucleotide
cacaaggguuguuggugua

SEQ ID NO: 913305 - RNA, 19 nt, Artificial Sequence
  Description of Artificial Sequence: Synthetic oligonucleotide
cuuagugacuuggguucaa

SEQ ID NO: 913306 - RNA, 19 nt, Artificial Sequence
  Description of Artificial Sequence: Synthetic oligonucleotide
gggcuugcgugaagggugc

SEQ ID NO: 913307 - RNA, 19 nt, Artificial Sequence
  Description of Artificial Sequence: Synthetic oligonucleotide
ccggguaucugcaaucacu

SEQ ID NO: 913308 - RNA, 19 nt, Artificial Sequence
  Description of Artificial Sequence: Synthetic oligonucleotide
ggcugcuuacagauucaca

SEQ ID NO: 913309 - RNA, 19 nt, Artificial Sequence
  Description of Artificial Sequence: Synthetic oligonucleotide
ccuacagaugucaaucauu

SEQ ID NO: 913310 - RNA, 19 nt, Artificial Sequence
  Description of Artificial Sequence: Synthetic oligonucleotide
cccgaucugggcccauggc

SEQ ID NO: 913311 - RNA, 19 nt, Artificial Sequence
  Description of Artificial Sequence: Synthetic oligonucleotide
gccggguaucugcaaucac

SEQ ID NO: 913312 - RNA, 19 nt, Artificial Sequence
  Description of Artificial Sequence: Synthetic oligonucleotide
cuaaggcugcuuacagauu

SEQ ID NO: 913313 - RNA, 19 nt, Artificial Sequence
  Description of Artificial Sequence: Synthetic oligonucleotide
ggccggguaucugcaauca

SEQ ID NO: 913314 - RNA, 19 nt, Artificial Sequence
  Description of Artificial Sequence: Synthetic oligonucleotide
gcagacuccccaaaucuau

SEQ ID NO: 913315 - RNA, 19 nt, Artificial Sequence
  Description of Artificial Sequence: Synthetic oligonucleotide
guacuuggucagcauccuu

SEQ ID NO: 913316 - RNA, 19 nt, Artificial Sequence
  Description of Artificial Sequence: Synthetic oligonucleotide
gcuugcgugaagggugcca

SEQ ID NO: 913317 - RNA, 19 nt, Artificial Sequence
  Description of Artificial Sequence: Synthetic oligonucleotide
cagcuccgggcuugcguga

SEQ ID NO: 913318 - RNA, 19 nt, Artificial Sequence
  Description of Artificial Sequence: Synthetic oligonucleotide
caguuccaagcacaacguu

SEQ ID NO: 913319 - RNA, 19 nt, Artificial Sequence
  Description of Artificial Sequence: Synthetic oligonucleotide
gcgugaagggugccaauuu

SEQ ID NO: 913320 - RNA, 19 nt, Artificial Sequence
  Description of Artificial Sequence: Synthetic oligonucleotide
ggcuugcgugaagggugcc

SEQ ID NO: 913321 - RNA, 19 nt, Artificial Sequence
  Description of Artificial Sequence: Synthetic oligonucleotide
ggcccgaucugggcccaug

SEQ ID NO: 913322 - RNA, 19 nt, Artificial Sequence
  Description of Artificial Sequence: Synthetic oligonucleotide
caaugucggaaggcaggau

SEQ ID NO: 913323 - RNA, 19 nt, Artificial Sequence
  Description of Artificial Sequence: Synthetic oligonucleotide
gccuuguaucagcgcucuc

SEQ ID NO: 913324 - RNA, 19 nt, Artificial Sequence
  Description of Artificial Sequence: Synthetic oligonucleotide
caggcccgaucugggccca

SEQ ID NO: 913325 - RNA, 19 nt, Artificial Sequence
  Description of Artificial Sequence: Synthetic oligonucleotide
ccagaacccauaggaccua

SEQ ID NO: 913326 - RNA, 19 nt, Artificial Sequence
  Description of Artificial Sequence: Synthetic oligonucleotide
aggcccgaucugggcccau

SEQ ID NO: 913327 - RNA, 19 nt, Artificial Sequence
  Description of Artificial Sequence: Synthetic oligonucleotide
cccuuccaucaggcuuaua

SEQ ID NO: 913328 - RNA, 19 nt, Artificial Sequence
  Description of Artificial Sequence: Synthetic oligonucleotide
auauccuucagauugaagc

SEQ ID NO: 913329 - RNA, 19 nt, Artificial Sequence
  Description of Artificial Sequence: Synthetic oligonucleotide
aaucucauggcgcaguggg

SEQ ID NO: 913330 - RNA, 19 nt, Artificial Sequence
  Description of Artificial Sequence: Synthetic oligonucleotide
uagauaauccguagcaugg

SEQ ID NO: 913331 - RNA, 19 nt, Artificial Sequence
  Description of Artificial Sequence: Synthetic oligonucleotide
auaacgcucagcuguaucc

SEQ ID NO: 913332 - RNA, 19 nt, Artificial Sequence
  Description of Artificial Sequence: Synthetic oligonucleotide
aaagggccggcguacaucc

SEQ ID NO: 913333 - RNA, 19 nt, Artificial Sequence
  Description of Artificial Sequence: Synthetic oligonucleotide
ucuaacuugcgcuugaaga

SEQ ID NO: 913334 - RNA, 19 nt, Artificial Sequence
  Description of Artificial Sequence: Synthetic oligonucleotide
cagagaguaggaaagaggg

SEQ ID NO: 913335 - RNA, 19 nt, Artificial Sequence
  Description of Artificial Sequence: Synthetic oligonucleotide
ggaguauucacagagaugg

SEQ ID NO: 913336 - RNA, 19 nt, Artificial Sequence
  Description of Artificial Sequence: Synthetic oligonucleotide
uuuaacucgggccacugag

SEQ ID NO: 913337 - RNA, 19 nt, Artificial Sequence
  Description of Artificial Sequence: Synthetic oligonucleotide
aggguuugcgcccagauuc

SEQ ID NO: 913338 - RNA, 19 nt, Artificial Sequence
  Description of Artificial Sequence: Synthetic oligonucleotide
gacacugugguugagauug

SEQ ID NO: 913339 - RNA, 19 nt, Artificial Sequence
  Description of Artificial Sequence: Synthetic oligonucleotide
aaacggcugucauacagcg

SEQ ID NO: 913340 - RNA, 19 nt, Artificial Sequence
  Description of Artificial Sequence: Synthetic oligonucleotide
uccucauuagugaugagug

SEQ ID NO: 913341 - RNA, 19 nt, Artificial Sequence
  Description of Artificial Sequence: Synthetic oligonucleotide
acaguagauaauccguagc

SEQ ID NO: 913342 - RNA, 19 nt, Artificial Sequence
  Description of Artificial Sequence: Synthetic oligonucleotide
uacgaacagaccuuuaacc

SEQ ID NO: 913343 - RNA, 19 nt, Artificial Sequence
  Description of Artificial Sequence: Synthetic oligonucleotide
cugguuacggccaagcucc

SEQ ID NO: 913344 - RNA, 19 nt, Artificial Sequence
  Description of Artificial Sequence: Synthetic oligonucleotide
agauucagcagccaccagg

SEQ ID NO: 913345 - RNA, 19 nt, Artificial Sequence
  Description of Artificial Sequence: Synthetic oligonucleotide
uagaagugcagcauguccc

SEQ ID NO: 913346 - RNA, 19 nt, Artificial Sequence
  Description of Artificial Sequence: Synthetic oligonucleotide
accuuuaaccacaugaugg

SEQ ID NO: 913347 - RNA, 19 nt, Artificial Sequence
  Description of Artificial Sequence: Synthetic oligonucleotide
agagggaucaugugggugg

SEQ ID NO: 913348 - RNA, 19 nt, Artificial Sequence
  Description of Artificial Sequence: Synthetic oligonucleotide
agcaggaucuaacuugcgc

SEQ ID NO: 913349 - RNA, 19 nt, Artificial Sequence
  Description of Artificial Sequence: Synthetic oligonucleotide
acccauauaggguuugcgc

SEQ ID NO: 913350 - RNA, 19 nt, Artificial Sequence
  Description of Artificial Sequence: Synthetic oligonucleotide
gucaggaguauucacagag

SEQ ID NO: 913351 - RNA, 19 nt, Artificial Sequence
  Description of Artificial Sequence: Synthetic oligonucleotide
auacgaacagaccuuuaac

SEQ ID NO: 913352 - RNA, 19 nt, Artificial Sequence
  Description of Artificial Sequence: Synthetic oligonucleotide
uaaugugcuguccuuggag

SEQ ID NO: 913353 - RNA, 19 nt, Artificial Sequence
  Description of Artificial Sequence: Synthetic oligonucleotide
uuugccgacacugugguug

SEQ ID NO: 913354 - RNA, 19 nt, Artificial Sequence
  Description of Artificial Sequence: Synthetic oligonucleotide
gaagucaggcggcaaacgg

SEQ ID NO: 913355 - RNA, 19 nt, Artificial Sequence
  Description of Artificial Sequence: Synthetic oligonucleotide
ucuccuuagcagcaaaggc

SEQ ID NO: 913356 - RNA, 19 nt, Artificial Sequence
  Description of Artificial Sequence: Synthetic oligonucleotide
uggccgaccagccagagca

SEQ ID NO: 913357 - RNA, 19 nt, Artificial Sequence
  Description of Artificial Sequence: Synthetic oligonucleotide
uacguaaauguuguggucc

SEQ ID NO: 913358 - RNA, 19 nt, Artificial Sequence
  Description of Artificial Sequence: Synthetic oligonucleotide
auaauccguagcauggucc

SEQ ID NO: 913359 - RNA, 19 nt, Artificial Sequence
  Description of Artificial Sequence: Synthetic oligonucleotide
uuuuauuggguuaccgggu

SEQ ID NO: 913360 - RNA, 19 nt, Artificial Sequence
  Description of Artificial Sequence: Synthetic oligonucleotide
auauucaggcuccucgggg

SEQ ID NO: 913361 - RNA, 19 nt, Artificial Sequence
  Description of Artificial Sequence: Synthetic oligonucleotide
uuugcgcccagauucagca

SEQ ID NO: 913362 - RNA, 19 nt, Artificial Sequence
  Description of Artificial Sequence: Synthetic oligonucleotide
acauauucaggcuccucgg

SEQ ID NO: 913363 - RNA, 19 nt, Artificial Sequence
  Description of Artificial Sequence: Synthetic oligonucleotide
guauucacagagauggccg

SEQ ID NO: 913364 - RNA, 19 nt, Artificial Sequence
  Description of Artificial Sequence: Synthetic oligonucleotide
agggcuacaguagauaauc

SEQ ID NO: 913365 - RNA, 19 nt, Artificial Sequence
  Description of Artificial Sequence: Synthetic oligonucleotide
uuaacucgggccacugagg

SEQ ID NO: 913366 - RNA, 19 nt, Artificial Sequence
  Description of Artificial Sequence: Synthetic oligonucleotide
ggcaucacgaaacaggugc

SEQ ID NO: 913367 - RNA, 19 nt, Artificial Sequence
  Description of Artificial Sequence: Synthetic oligonucleotide
acgaacagaccuuuaacca

SEQ ID NO: 913368 - RNA, 19 nt, Artificial Sequence
  Description of Artificial Sequence: Synthetic oligonucleotide
aagucaggcggcaaacggc

SEQ ID NO: 913369 - RNA, 19 nt, Artificial Sequence
  Description of Artificial Sequence: Synthetic oligonucleotide
guagaagugcagcaugucc

SEQ ID NO: 913370 - RNA, 19 nt, Artificial Sequence
  Description of Artificial Sequence: Synthetic oligonucleotide
ucccauacguaaauguugu

SEQ ID NO: 913371 - RNA, 19 nt, Artificial Sequence
  Description of Artificial Sequence: Synthetic oligonucleotide
aggaggaguccacuggggc

SEQ ID NO: 913372 - RNA, 19 nt, Artificial Sequence
  Description of Artificial Sequence: Synthetic oligonucleotide
acggccaagcucccgagcc

SEQ ID NO: 913373 - RNA, 19 nt, Artificial Sequence
  Description of Artificial Sequence: Synthetic oligonucleotide
aggucaggaguauucacag

SEQ ID NO: 913374 - RNA, 19 nt, Artificial Sequence
  Description of Artificial Sequence: Synthetic oligonucleotide
cagcacaauaagaacagac

SEQ ID NO: 913375 - RNA, 19 nt, Artificial Sequence
  Description of Artificial Sequence: Synthetic oligonucleotide
guugaguuaggaaacugcc

SEQ ID NO: 913376 - RNA, 19 nt, Artificial Sequence
  Description of Artificial Sequence: Synthetic oligonucleotide
guugucaugucccagaccu

SEQ ID NO: 913377 - RNA, 19 nt, Artificial Sequence
  Description of Artificial Sequence: Synthetic oligonucleotide
uggguuaccggguugcagc

SEQ ID NO: 913378 - RNA, 19 nt, Artificial Sequence
  Description of Artificial Sequence: Synthetic oligonucleotide
acgguguguugucaugucc

SEQ ID NO: 913379 - RNA, 19 nt, Artificial Sequence
  Description of Artificial Sequence: Synthetic oligonucleotide
gaccuuuaaccacaugaug

SEQ ID NO: 913380 - RNA, 19 nt, Artificial Sequence
  Description of Artificial Sequence: Synthetic oligonucleotide
cauuggacacguuccagag

SEQ ID NO: 913381 - RNA, 19 nt, Artificial Sequence
  Description of Artificial Sequence: Synthetic oligonucleotide
aauguaggauguguaccag

SEQ ID NO: 913382 - RNA, 19 nt, Artificial Sequence
  Description of Artificial Sequence: Synthetic oligonucleotide
accugucgcaaacccagcc

SEQ ID NO: 913383 - RNA, 19 nt, Artificial Sequence
  Description of Artificial Sequence: Synthetic oligonucleotide
uacagcgcgugugagacag

SEQ ID NO: 913384 - RNA, 19 nt, Artificial Sequence
  Description of Artificial Sequence: Synthetic oligonucleotide
ugucauacagcgcguguga

SEQ ID NO: 913385 - RNA, 19 nt, Artificial Sequence
  Description of Artificial Sequence: Synthetic oligonucleotide
ugugguugagauuggcaga

SEQ ID NO: 913386 - RNA, 19 nt, Artificial Sequence
  Description of Artificial Sequence: Synthetic oligonucleotide
cuagccgugucucacugcc

SEQ ID NO: 913387 - RNA, 19 nt, Artificial Sequence
  Description of Artificial Sequence: Synthetic oligonucleotide
guuggcacgcucaacaggc

SEQ ID NO: 913388 - RNA, 19 nt, Artificial Sequence
  Description of Artificial Sequence: Synthetic oligonucleotide
cagcuaacugcccugcugg

SEQ ID NO: 913389 - RNA, 19 nt, Artificial Sequence
  Description of Artificial Sequence: Synthetic oligonucleotide
ugugagccuagucgggcgg

SEQ ID NO: 913390 - RNA, 19 nt, Artificial Sequence
  Description of Artificial Sequence: Synthetic oligonucleotide
cuaguggccgaccagccag

SEQ ID NO: 913391 - RNA, 19 nt, Artificial Sequence
  Description of Artificial Sequence: Synthetic oligonucleotide
uguaccagugcuccugggu

SEQ ID NO: 913392 - RNA, 19 nt, Artificial Sequence
  Description of Artificial Sequence: Synthetic oligonucleotide
cauacagcgcgugugagac

SEQ ID NO: 913393 - RNA, 19 nt, Artificial Sequence
  Description of Artificial Sequence: Synthetic oligonucleotide
guagcacauauucaggcuc

SEQ ID NO: 913394 - RNA, 19 nt, Artificial Sequence
  Description of Artificial Sequence: Synthetic oligonucleotide
gauaauccguagcaugguc

SEQ ID NO: 913395 - RNA, 19 nt, Artificial Sequence
  Description of Artificial Sequence: Synthetic oligonucleotide
gaggcgauggucugcacac

SEQ ID NO: 913396 - RNA, 19 nt, Artificial Sequence
  Description of Artificial Sequence: Synthetic oligonucleotide
uggcauaaugugcuguccu

SEQ ID NO: 913397 - RNA, 19 nt, Artificial Sequence
  Description of Artificial Sequence: Synthetic oligonucleotide
uuuauuggguuaccggguu

SEQ ID NO: 913398 - RNA, 19 nt, Artificial Sequence
  Description of Artificial Sequence: Synthetic oligonucleotide
uauucaggcuccucggggu

SEQ ID NO: 913399 - RNA, 19 nt, Artificial Sequence
  Description of Artificial Sequence: Synthetic oligonucleotide
ucuugucccguccaccugu

SEQ ID NO: 913400 - RNA, 19 nt, Artificial Sequence
  Description of Artificial Sequence: Synthetic oligonucleotide
agcacaauaagaacagaca

SEQ ID NO: 913401 - RNA, 19 nt, Artificial Sequence
  Description of Artificial Sequence: Synthetic oligonucleotide
ugaggcgauggucugcaca

SEQ ID NO: 913402 - RNA, 19 nt, Artificial Sequence
  Description of Artificial Sequence: Synthetic oligonucleotide
aguggguacaacucauccu

SEQ ID NO: 913403 - RNA, 19 nt, Artificial Sequence
  Description of Artificial Sequence: Synthetic oligonucleotide
cuaacuugcgcuugaagaa

SEQ ID NO: 913404 - RNA, 19 nt, Artificial Sequence
  Description of Artificial Sequence: Synthetic oligonucleotide
agcguagaagugcagcaug

SEQ ID NO: 913405 - RNA, 19 nt, Artificial Sequence
  Description of Artificial Sequence: Synthetic oligonucleotide
caauguaggauguguacca

SEQ ID NO: 913406 - RNA, 19 nt, Artificial Sequence
  Description of Artificial Sequence: Synthetic oligonucleotide
caguagauaauccguagca

SEQ ID NO: 913407 - RNA, 19 nt, Artificial Sequence
  Description of Artificial Sequence: Synthetic oligonucleotide
uuauuggguuaccggguug

SEQ ID NO: 913408 - RNA, 19 nt, Artificial Sequence
  Description of Artificial Sequence: Synthetic oligonucleotide
augucccgcaccaacacac

SEQ ID NO: 913409 - RNA, 19 nt, Artificial Sequence
  Description of Artificial Sequence: Synthetic oligonucleotide
ucagcuaguggccgaccag

SEQ ID NO: 913410 - RNA, 19 nt, Artificial Sequence
  Description of Artificial Sequence: Synthetic oligonucleotide
ugcgcacucucucacccag

SEQ ID NO: 913411 - RNA, 19 nt, Artificial Sequence
  Description of Artificial Sequence: Synthetic oligonucleotide
caucacuccccucaguuuc

SEQ ID NO: 913412 - RNA, 19 nt, Artificial Sequence
  Description of Artificial Sequence: Synthetic oligonucleotide
cuuacguguggagagucag

SEQ ID NO: 913413 - RNA, 19 nt, Artificial Sequence
  Description of Artificial Sequence: Synthetic oligonucleotide
uacguguggagagucagcu

SEQ ID NO: 913414 - RNA, 19 nt, Artificial Sequence
  Description of Artificial Sequence: Synthetic oligonucleotide
accgucaggguugaguuag

SEQ ID NO: 913415 - RNA, 19 nt, Artificial Sequence
  Description of Artificial Sequence: Synthetic oligonucleotide
agccuagucgggcggaccg

SEQ ID NO: 913416 - RNA, 19 nt, Artificial Sequence
  Description of Artificial Sequence: Synthetic oligonucleotide
gcaaacggcugucauacag

SEQ ID NO: 913417 - RNA, 19 nt, Artificial Sequence
  Description of Artificial Sequence: Synthetic oligonucleotide
augaguguagcugaagaau

SEQ ID NO: 913418 - RNA, 19 nt, Artificial Sequence
  Description of Artificial Sequence: Synthetic oligonucleotide
gcgcgugugagacagacag

SEQ ID NO: 913419 - RNA, 19 nt, Artificial Sequence
  Description of Artificial Sequence: Synthetic oligonucleotide
uuacguguggagagucagc

SEQ ID NO: 913420 - RNA, 19 nt, Artificial Sequence
  Description of Artificial Sequence: Synthetic oligonucleotide
ucauacagcgcgugugaga

SEQ ID NO: 913421 - RNA, 19 nt, Artificial Sequence
  Description of Artificial Sequence: Synthetic oligonucleotide
aggguguauccacaaucuc

SEQ ID NO: 913422 - RNA, 19 nt, Artificial Sequence
  Description of Artificial Sequence: Synthetic oligonucleotide
ugccuguggugacaucacg

SEQ ID NO: 913423 - RNA, 19 nt, Artificial Sequence
  Description of Artificial Sequence: Synthetic oligonucleotide
ccauacguaaauguugugg

SEQ ID NO: 913424 - RNA, 19 nt, Artificial Sequence
  Description of Artificial Sequence: Synthetic oligonucleotide
aguuaggaaacugccucag

SEQ ID NO: 913425 - RNA, 19 nt, Artificial Sequence
  Description of Artificial Sequence: Synthetic oligonucleotide
gaacagaccuuuaaccaca

SEQ ID NO: 913426 - RNA, 19 nt, Artificial Sequence
  Description of Artificial Sequence: Synthetic oligonucleotide
cccauauaggguuugcgcc

SEQ ID NO: 913427 - RNA, 19 nt, Artificial Sequence
  Description of Artificial Sequence: Synthetic oligonucleotide
acgcucaacaggcuggcug

SEQ ID NO: 913428 - RNA, 19 nt, Artificial Sequence
  Description of Artificial Sequence: Synthetic oligonucleotide
aacgcucagcuguauccca

SEQ ID NO: 913429 - RNA, 19 nt, Artificial Sequence
  Description of Artificial Sequence: Synthetic oligonucleotide
ccagagaguaggaaagagg

SEQ ID NO: 913430 - RNA, 19 nt, Artificial Sequence
  Description of Artificial Sequence: Synthetic oligonucleotide
agaguaggaaagagggauc

SEQ ID NO: 913431 - RNA, 19 nt, Artificial Sequence
  Description of Artificial Sequence: Synthetic oligonucleotide
cucauugccgcuuacgugu

SEQ ID NO: 913432 - RNA, 19 nt, Artificial Sequence
  Description of Artificial Sequence: Synthetic oligonucleotide
gcgccggucacccauauag

SEQ ID NO: 913433 - RNA, 19 nt, Artificial Sequence
  Description of Artificial Sequence: Synthetic oligonucleotide
ggagcauguggcgaggugg

SEQ ID NO: 913434 - RNA, 19 nt, Artificial Sequence
  Description of Artificial Sequence: Synthetic oligonucleotide
gguugaguuaggaaacugc

SEQ ID NO: 913435 - RNA, 19 nt, Artificial Sequence
  Description of Artificial Sequence: Synthetic oligonucleotide
ugccuuugccgacacugug

SEQ ID NO: 913436 - RNA, 19 nt, Artificial Sequence
  Description of Artificial Sequence: Synthetic oligonucleotide
cauacgaacagaccuuuaa

SEQ ID NO: 913437 - RNA, 19 nt, Artificial Sequence
  Description of Artificial Sequence: Synthetic oligonucleotide
gagaguaggaaagagggau

SEQ ID NO: 913438 - RNA, 19 nt, Artificial Sequence
  Description of Artificial Sequence: Synthetic oligonucleotide
uggcaccugucgcaaaccc

SEQ ID NO: 913439 - RNA, 19 nt, Artificial Sequence
  Description of Artificial Sequence: Synthetic oligonucleotide
agauuggcagaggacacca

SEQ ID NO: 913440 - RNA, 19 nt, Artificial Sequence
  Description of Artificial Sequence: Synthetic oligonucleotide
gucgcaaacccagccacgg

SEQ ID NO: 913441 - RNA, 19 nt, Artificial Sequence
  Description of Artificial Sequence: Synthetic oligonucleotide
cacagagcucagcuagugg

SEQ ID NO: 913442 - RNA, 19 nt, Artificial Sequence
  Description of Artificial Sequence: Synthetic oligonucleotide
cauguuccguguccagugg

SEQ ID NO: 913443 - RNA, 19 nt, Artificial Sequence
  Description of Artificial Sequence: Synthetic oligonucleotide
cugucgcaaacccagccac

SEQ ID NO: 913444 - RNA, 19 nt, Artificial Sequence
  Description of Artificial Sequence: Synthetic oligonucleotide
gguguuccggcccggaggg

SEQ ID NO: 913445 - RNA, 19 nt, Artificial Sequence
  Description of Artificial Sequence: Synthetic oligonucleotide
guaccagugcuccuggguc

SEQ ID NO: 913446 - RNA, 19 nt, Artificial Sequence
  Description of Artificial Sequence: Synthetic oligonucleotide
aucuagccgugucucacug

SEQ ID NO: 913447 - RNA, 19 nt, Artificial Sequence
  Description of Artificial Sequence: Synthetic oligonucleotide
ggaggguguauccacaauc

SEQ ID NO: 913448 - RNA, 19 nt, Artificial Sequence
  Description of Artificial Sequence: Synthetic oligonucleotide
ugggucugcucgucgaugu

SEQ ID NO: 913449 - RNA, 19 nt, Artificial Sequence
  Description of Artificial Sequence: Synthetic oligonucleotide
guuacggccaagcucccga

SEQ ID NO: 913450 - RNA, 19 nt, Artificial Sequence
  Description of Artificial Sequence: Synthetic oligonucleotide
auuuaacucgggccacuga

SEQ ID NO: 913451 - RNA, 19 nt, Artificial Sequence
  Description of Artificial Sequence: Synthetic oligonucleotide
agcgcacuggaagccaggc

SEQ ID NO: 913452 - RNA, 19 nt, Artificial Sequence
  Description of Artificial Sequence: Synthetic oligonucleotide
guuaccggguugcagccac

SEQ ID NO: 913453 - RNA, 19 nt, Artificial Sequence
  Description of Artificial Sequence: Synthetic oligonucleotide
cauaacgcucagcuguauc

SEQ ID NO: 913454 - RNA, 19 nt, Artificial Sequence
  Description of Artificial Sequence: Synthetic oligonucleotide
guguagcugaagaaucaag

SEQ ID NO: 913455 - RNA, 19 nt, Artificial Sequence
  Description of Artificial Sequence: Synthetic oligonucleotide
ucauugccgcuuacgugug

SEQ ID NO: 913456 - RNA, 19 nt, Artificial Sequence
  Description of Artificial Sequence: Synthetic oligonucleotide
ccauauaggguuugcgccc

SEQ ID NO: 913457 - RNA, 19 nt, Artificial Sequence
  Description of Artificial Sequence: Synthetic oligonucleotide
ugccucauugccgcuuacg

SEQ ID NO: 913458 - RNA, 19 nt, Artificial Sequence
  Description of Artificial Sequence: Synthetic oligonucleotide
ggauguguaccagugcucc

SEQ ID NO: 913459 - RNA, 19 nt, Artificial Sequence
  Description of Artificial Sequence: Synthetic oligonucleotide
ugaucacagagcucagcua

SEQ ID NO: 913460 - RNA, 19 nt, Artificial Sequence
  Description of Artificial Sequence: Synthetic oligonucleotide
gaguguagcugaagaauca

SEQ ID NO: 913461 - RNA, 19 nt, Artificial Sequence
  Description of Artificial Sequence: Synthetic oligonucleotide
agaccuuuaaccacaugau

SEQ ID NO: 913462 - RNA, 19 nt, Artificial Sequence
  Description of Artificial Sequence: Synthetic oligonucleotide
uagucgggcggaccgucag

SEQ ID NO: 913463 - RNA, 19 nt, Artificial Sequence
  Description of Artificial Sequence: Synthetic oligonucleotide
cucacccagcacaauaaga

SEQ ID NO: 913464 - RNA, 19 nt, Artificial Sequence
  Description of Artificial Sequence: Synthetic oligonucleotide
uaccagugcuccugggucu

SEQ ID NO: 913465 - RNA, 19 nt, Artificial Sequence
  Description of Artificial Sequence: Synthetic oligonucleotide
ucaggccgccauuuaacuc

SEQ ID NO: 913466 - RNA, 19 nt, Artificial Sequence
  Description of Artificial Sequence: Synthetic oligonucleotide
uuggguuaccggguugcag

SEQ ID NO: 913467 - RNA, 19 nt, Artificial Sequence
  Description of Artificial Sequence: Synthetic oligonucleotide
ucuagccgugucucacugc

SEQ ID NO: 913468 - RNA, 19 nt, Artificial Sequence
  Description of Artificial Sequence: Synthetic oligonucleotide
uuccguguccaguggguac

SEQ ID NO: 913469 - RNA, 19 nt, Artificial Sequence
  Description of Artificial Sequence: Synthetic oligonucleotide
agcuaguggccgaccagcc

SEQ ID NO: 913470 - RNA, 19 nt, Artificial Sequence
  Description of Artificial Sequence: Synthetic oligonucleotide
ugcgaucuagccgugucuc

SEQ ID NO: 913471 - RNA, 19 nt, Artificial Sequence
  Description of Artificial Sequence: Synthetic oligonucleotide
gccgcuuacguguggagag

SEQ ID NO: 913472 - RNA, 19 nt, Artificial Sequence
  Description of Artificial Sequence: Synthetic oligonucleotide
uguuccggcccggagggug

SEQ ID NO: 913473 - RNA, 19 nt, Artificial Sequence
  Description of Artificial Sequence: Synthetic oligonucleotide
guguugucaugucccagac

SEQ ID NO: 913474 - RNA, 19 nt, Artificial Sequence
  Description of Artificial Sequence: Synthetic oligonucleotide
aggaguauucacagagaug

SEQ ID NO: 913475 - RNA, 19 nt, Artificial Sequence
  Description of Artificial Sequence: Synthetic oligonucleotide
cacccauauaggguuugcg

SEQ ID NO: 913476 - RNA, 19 nt, Artificial Sequence
  Description of Artificial Sequence: Synthetic oligonucleotide
acgaaacaggugcuggcau

SEQ ID NO: 913477 - RNA, 19 nt, Artificial Sequence
  Description of Artificial Sequence: Synthetic oligonucleotide
cauugugaucacagagcuc

SEQ ID NO: 913478 - RNA, 19 nt, Artificial Sequence
  Description of Artificial Sequence: Synthetic oligonucleotide
aaggccuccugugguagca

SEQ ID NO: 913479 - RNA, 19 nt, Artificial Sequence
  Description of Artificial Sequence: Synthetic oligonucleotide
gaguauucacagagauggc

SEQ ID NO: 913480 - RNA, 19 nt, Artificial Sequence
  Description of Artificial Sequence: Synthetic oligonucleotide
cucauggcgcagugggaag

SEQ ID NO: 913481 - RNA, 19 nt, Artificial Sequence
  Description of Artificial Sequence: Synthetic oligonucleotide
ucaugagugguaggccaca

SEQ ID NO: 913482 - RNA, 19 nt, Artificial Sequence
  Description of Artificial Sequence: Synthetic oligonucleotide
augggccgcuugcagugac

SEQ ID NO: 913483 - RNA, 19 nt, Artificial Sequence
  Description of Artificial Sequence: Synthetic oligonucleotide
aacugcccugcugguacuc

SEQ ID NO: 913484 - RNA, 19 nt, Artificial Sequence
  Description of Artificial Sequence: Synthetic oligonucleotide
cagcuaguggccgaccagc

SEQ ID NO: 913485 - RNA, 19 nt, Artificial Sequence
  Description of Artificial Sequence: Synthetic oligonucleotide
gguggcgccaggcaaugcc

SEQ ID NO: 913486 - RNA, 19 nt, Artificial Sequence
  Description of Artificial Sequence: Synthetic oligonucleotide
cauuuaacucgggccacug

SEQ ID NO: 913487 - RNA, 19 nt, Artificial Sequence
  Description of Artificial Sequence: Synthetic oligonucleotide
cuuggcacgguguguuguc

SEQ ID NO: 913488 - RNA, 19 nt, Artificial Sequence
  Description of Artificial Sequence: Synthetic oligonucleotide
gcaccauacgaacagaccu

SEQ ID NO: 913489 - RNA, 19 nt, Artificial Sequence
  Description of Artificial Sequence: Synthetic oligonucleotide
ccgccauuuaacucgggcc

SEQ ID NO: 913490 - RNA, 19 nt, Artificial Sequence
  Description of Artificial Sequence: Synthetic oligonucleotide
uugccgacacugugguuga

SEQ ID NO: 913491 - RNA, 19 nt, Artificial Sequence
  Description of Artificial Sequence: Synthetic oligonucleotide
gaaggccuccugugguagc

SEQ ID NO: 913492 - RNA, 19 nt, Artificial Sequence
  Description of Artificial Sequence: Synthetic oligonucleotide
ggguguauccacaaucuca

SEQ ID NO: 913493 - RNA, 19 nt, Artificial Sequence
  Description of Artificial Sequence: Synthetic oligonucleotide
auugccgcuuacgugugga

SEQ ID NO: 913494 - RNA, 19 nt, Artificial Sequence
  Description of Artificial Sequence: Synthetic oligonucleotide
ucacccauauaggguuugc

SEQ ID NO: 913495 - RNA, 19 nt, Artificial Sequence
  Description of Artificial Sequence: Synthetic oligonucleotide
gucauacagcgcgugugag

SEQ ID NO: 913496 - RNA, 19 nt, Artificial Sequence
  Description of Artificial Sequence: Synthetic oligonucleotide
gcaccugucgcaaacccag

SEQ ID NO: 913497 - RNA, 19 nt, Artificial Sequence
  Description of Artificial Sequence: Synthetic oligonucleotide
agucgggcggaccgucagg

SEQ ID NO: 913498 - RNA, 19 nt, Artificial Sequence
  Description of Artificial Sequence: Synthetic oligonucleotide
gucgggcggaccgucaggg

SEQ ID NO: 913499 - RNA, 19 nt, Artificial Sequence
  Description of Artificial Sequence: Synthetic oligonucleotide
gaggguguauccacaaucu

SEQ ID NO: 913500 - RNA, 19 nt, Artificial Sequence
  Description of Artificial Sequence: Synthetic oligonucleotide
gcguacaucccauacguaa

SEQ ID NO: 913501 - RNA, 19 nt, Artificial Sequence
  Description of Artificial Sequence: Synthetic oligonucleotide
ugccgcuuacguguggaga

SEQ ID NO: 913502 - RNA, 19 nt, Artificial Sequence
  Description of Artificial Sequence: Synthetic oligonucleotide
uugccgcuuacguguggag

SEQ ID NO: 913503 - RNA, 19 nt, Artificial Sequence
  Description of Artificial Sequence: Synthetic oligonucleotide
gccauuucaugauguguug

SEQ ID NO: 913504 - RNA, 19 nt, Artificial Sequence
  Description of Artificial Sequence: Synthetic oligonucleotide
auguugugguccaccauca

SEQ ID NO: 913505 - RNA, 19 nt, Artificial Sequence
  Description of Artificial Sequence: Synthetic oligonucleotide
ugucccgcaccaacacacu

SEQ ID NO: 913506 - RNA, 19 nt, Artificial Sequence
  Description of Artificial Sequence: Synthetic oligonucleotide
accugguuacggccaagcu

SEQ ID NO: 913507 - RNA, 19 nt, Artificial Sequence
  Description of Artificial Sequence: Synthetic oligonucleotide
agggccggcguacauccca

SEQ ID NO: 913508 - RNA, 19 nt, Artificial Sequence
  Description of Artificial Sequence: Synthetic oligonucleotide
cauggagcauguggcgagg

SEQ ID NO: 913509 - RNA, 19 nt, Artificial Sequence
  Description of Artificial Sequence: Synthetic oligonucleotide
acagaccuuuaaccacaug

SEQ ID NO: 913510 - RNA, 19 nt, Artificial Sequence
  Description of Artificial Sequence: Synthetic oligonucleotide
ccugguuacggccaagcuc

SEQ ID NO: 913511 - RNA, 19 nt, Artificial Sequence
  Description of Artificial Sequence: Synthetic oligonucleotide
gcaggaucuaacuugcgcu

SEQ ID NO: 913512 - RNA, 19 nt, Artificial Sequence
  Description of Artificial Sequence: Synthetic oligonucleotide
gagggaucauguggguggc

SEQ ID NO: 913513 - RNA, 19 nt, Artificial Sequence
  Description of Artificial Sequence: Synthetic oligonucleotide
gcagcuaacugcccugcug

SEQ ID NO: 913514 - RNA, 19 nt, Artificial Sequence
  Description of Artificial Sequence: Synthetic oligonucleotide
gucccgcaccaacacacug

SEQ ID NO: 913515 - RNA, 19 nt, Artificial Sequence
  Description of Artificial Sequence: Synthetic oligonucleotide
gccgccauuuaacucgggc

SEQ ID NO: 913516 - RNA, 19 nt, Artificial Sequence
  Description of Artificial Sequence: Synthetic oligonucleotide
caccugguuacggccaagc

SEQ ID NO: 913517 - RNA, 19 nt, Artificial Sequence
  Description of Artificial Sequence: Synthetic oligonucleotide
cauugccgcuuacgugugg

SEQ ID NO: 913518 - RNA, 19 nt, Artificial Sequence
  Description of Artificial Sequence: Synthetic oligonucleotide
agcgcugcagcagaucaau

SEQ ID NO: 913519 - RNA, 19 nt, Artificial Sequence
  Description of Artificial Sequence: Synthetic oligonucleotide
caggaguauucacagagau

SEQ ID NO: 913520 - RNA, 19 nt, Artificial Sequence
  Description of Artificial Sequence: Synthetic oligonucleotide
accauacgaacagaccuuu

SEQ ID NO: 913521 - RNA, 19 nt, Artificial Sequence
  Description of Artificial Sequence: Synthetic oligonucleotide
gccuuugccgacacugugg

SEQ ID NO: 913522 - RNA, 19 nt, Artificial Sequence
  Description of Artificial Sequence: Synthetic oligonucleotide
cacugugguugagauuggc

SEQ ID NO: 913523 - RNA, 19 nt, Artificial Sequence
  Description of Artificial Sequence: Synthetic oligonucleotide
cauggcgcagugggaaggc

SEQ ID NO: 913524 - RNA, 19 nt, Artificial Sequence
  Description of Artificial Sequence: Synthetic oligonucleotide
aaaggcucagcaggaucua

SEQ ID NO: 913525 - RNA, 19 nt, Artificial Sequence
  Description of Artificial Sequence: Synthetic oligonucleotide
gcuacaguagauaauccgu

SEQ ID NO: 913526 - RNA, 19 nt, Artificial Sequence
  Description of Artificial Sequence: Synthetic oligonucleotide
cucagcuaguggccgacca

SEQ ID NO: 913527 - RNA, 19 nt, Artificial Sequence
  Description of Artificial Sequence: Synthetic oligonucleotide
ggcacaucacuccccucag

SEQ ID NO: 913528 - RNA, 19 nt, Artificial Sequence
  Description of Artificial Sequence: Synthetic oligonucleotide
gaucuagccgugucucacu

SEQ ID NO: 913529 - RNA, 19 nt, Artificial Sequence
  Description of Artificial Sequence: Synthetic oligonucleotide
ggaucuaacuugcgcuuga

SEQ ID NO: 913530 - RNA, 19 nt, Artificial Sequence
  Description of Artificial Sequence: Synthetic oligonucleotide
ggguuaccggguugcagcc

SEQ ID NO: 913531 - RNA, 19 nt, Artificial Sequence
  Description of Artificial Sequence: Synthetic oligonucleotide
aagggccggcguacauccc

SEQ ID NO: 913532 - RNA, 19 nt, Artificial Sequence
  Description of Artificial Sequence: Synthetic oligonucleotide
ugguuacggccaagcuccc

SEQ ID NO: 913533 - RNA, 19 nt, Artificial Sequence
  Description of Artificial Sequence: Synthetic oligonucleotide
cagcgcgugugagacagac

SEQ ID NO: 913534 - RNA, 19 nt, Artificial Sequence
  Description of Artificial Sequence: Synthetic oligonucleotide
aauccguagcaugguccau

SEQ ID NO: 913535 - RNA, 19 nt, Artificial Sequence
  Description of Artificial Sequence: Synthetic oligonucleotide
gagcgcacuggaagccagg

SEQ ID NO: 913536 - RNA, 19 nt, Artificial Sequence
  Description of Artificial Sequence: Synthetic oligonucleotide
ccucauugccgcuuacgug

SEQ ID NO: 913537 - RNA, 19 nt, Artificial Sequence
  Description of Artificial Sequence: Synthetic oligonucleotide
guacaucccauacguaaau

SEQ ID NO: 913538 - RNA, 19 nt, Artificial Sequence
  Description of Artificial Sequence: Synthetic oligonucleotide
ugcagccaccuuccauccu

SEQ ID NO: 913539 - RNA, 19 nt, Artificial Sequence
  Description of Artificial Sequence: Synthetic oligonucleotide
cagagugguggaggcuugg

SEQ ID NO: 913540 - RNA, 19 nt, Artificial Sequence
  Description of Artificial Sequence: Synthetic oligonucleotide
gauguguaccagugcuccu

SEQ ID NO: 913541 - RNA, 19 nt, Artificial Sequence
  Description of Artificial Sequence: Synthetic oligonucleotide
cuuccagccauuucaugau

SEQ ID NO: 913542 - RNA, 19 nt, Artificial Sequence
  Description of Artificial Sequence: Synthetic oligonucleotide
caugucccgcaccaacaca

SEQ ID NO: 913543 - RNA, 19 nt, Artificial Sequence
  Description of Artificial Sequence: Synthetic oligonucleotide
gaucuaacuugcgcuugaa

SEQ ID NO: 913544 - RNA, 19 nt, Artificial Sequence
  Description of Artificial Sequence: Synthetic oligonucleotide
ccggcguacaucccauacg

SEQ ID NO: 913545 - RNA, 19 nt, Artificial Sequence
  Description of Artificial Sequence: Synthetic oligonucleotide
auuggguuaccggguugca

SEQ ID NO: 913546 - RNA, 19 nt, Artificial Sequence
  Description of Artificial Sequence: Synthetic oligonucleotide
auacagcgcgugugagaca

SEQ ID NO: 913547 - RNA, 19 nt, Artificial Sequence
  Description of Artificial Sequence: Synthetic oligonucleotide
gguguauccacaaucucau

SEQ ID NO: 913548 - RNA, 19 nt, Artificial Sequence
  Description of Artificial Sequence: Synthetic oligonucleotide
acaucgcccugcucagcgu

SEQ ID NO: 913549 - RNA, 19 nt, Artificial Sequence
  Description of Artificial Sequence: Synthetic oligonucleotide
ugcagguguuccggcccgg

SEQ ID NO: 913550 - RNA, 19 nt, Artificial Sequence
  Description of Artificial Sequence: Synthetic oligonucleotide
agagugguggaggcuuggu

SEQ ID NO: 913551 - RNA, 19 nt, Artificial Sequence
  Description of Artificial Sequence: Synthetic oligonucleotide
ugggccgcuugcagugacu

SEQ ID NO: 913552 - RNA, 19 nt, Artificial Sequence
  Description of Artificial Sequence: Synthetic oligonucleotide
ggcacgguguguugucaug

SEQ ID NO: 913553 - RNA, 19 nt, Artificial Sequence
  Description of Artificial Sequence: Synthetic oligonucleotide
aggccgccauuuaacucgg

SEQ ID NO: 913554 - RNA, 19 nt, Artificial Sequence
  Description of Artificial Sequence: Synthetic oligonucleotide
gagccuagucgggcggacc

SEQ ID NO: 913555 - RNA, 19 nt, Artificial Sequence
  Description of Artificial Sequence: Synthetic oligonucleotide
agaugggguggcgccgguc

SEQ ID NO: 913556 - RNA, 19 nt, Artificial Sequence
  Description of Artificial Sequence: Synthetic oligonucleotide
ugagccuagucgggcggac

SEQ ID NO: 913557 - RNA, 19 nt, Artificial Sequence
  Description of Artificial Sequence: Synthetic oligonucleotide
gcugcgaucuagccguguc

SEQ ID NO: 913558 - RNA, 19 nt, Artificial Sequence
  Description of Artificial Sequence: Synthetic oligonucleotide
aguggccgaccagccagag

SEQ ID NO: 913559 - RNA, 19 nt, Artificial Sequence
  Description of Artificial Sequence: Synthetic oligonucleotide
cucaggccgccauuuaacu

SEQ ID NO: 913560 - RNA, 19 nt, Artificial Sequence
  Description of Artificial Sequence: Synthetic oligonucleotide
uugcugcgaucuagccgug

SEQ ID NO: 913561 - RNA, 19 nt, Artificial Sequence
  Description of Artificial Sequence: Synthetic oligonucleotide
gccgcuugcagugacuaca

SEQ ID NO: 913562 - RNA, 19 nt, Artificial Sequence
  Description of Artificial Sequence: Synthetic oligonucleotide
agcauaacgcucagcugua

SEQ ID NO: 913563 - RNA, 19 nt, Artificial Sequence
  Description of Artificial Sequence: Synthetic oligonucleotide
gccggcguacaucccauac

SEQ ID NO: 913564 - RNA, 19 nt, Artificial Sequence
  Description of Artificial Sequence: Synthetic oligonucleotide
guacucagcuucaccaccu

SEQ ID NO: 913565 - RNA, 19 nt, Artificial Sequence
  Description of Artificial Sequence: Synthetic oligonucleotide
uguccccuuugcugcgauc

SEQ ID NO: 913566 - RNA, 19 nt, Artificial Sequence
  Description of Artificial Sequence: Synthetic oligonucleotide
ggucaggaguauucacaga

SEQ ID NO: 913567 - RNA, 19 nt, Artificial Sequence
  Description of Artificial Sequence: Synthetic oligonucleotide
ggugcucuucaaacauagc

SEQ ID NO: 913568 - RNA, 19 nt, Artificial Sequence
  Description of Artificial Sequence: Synthetic oligonucleotide
guggccgaccagccagagc

SEQ ID NO: 913569 - RNA, 19 nt, Artificial Sequence
  Description of Artificial Sequence: Synthetic oligonucleotide
gguuacggccaagcucccg

SEQ ID NO: 913570 - RNA, 19 nt, Artificial Sequence
  Description of Artificial Sequence: Synthetic oligonucleotide
ccgcuugcagugacuacag

SEQ ID NO: 913571 - RNA, 19 nt, Artificial Sequence
  Description of Artificial Sequence: Synthetic oligonucleotide
cuagucgggcggaccguca

SEQ ID NO: 913572 - RNA, 19 nt, Artificial Sequence
  Description of Artificial Sequence: Synthetic oligonucleotide
aucgcccugcucagcguag

SEQ ID NO: 913573 - RNA, 19 nt, Artificial Sequence
  Description of Artificial Sequence: Synthetic oligonucleotide
ccaucuugucccguccacc

SEQ ID NO: 913574 - RNA, 19 nt, Artificial Sequence
  Description of Artificial Sequence: Synthetic oligonucleotide
cacguuccagaggcagaag

SEQ ID NO: 913575 - RNA, 19 nt, Artificial Sequence
  Description of Artificial Sequence: Synthetic oligonucleotide
gguuugcgcccagauucag

SEQ ID NO: 913576 - RNA, 19 nt, Artificial Sequence
  Description of Artificial Sequence: Synthetic oligonucleotide
gccgcaaccugcagggcag

SEQ ID NO: 913577 - RNA, 19 nt, Artificial Sequence
  Description of Artificial Sequence: Synthetic oligonucleotide
augcagagugguggaggcu

SEQ ID NO: 913578 - RNA, 19 nt, Artificial Sequence
  Description of Artificial Sequence: Synthetic oligonucleotide
gcccuggcaccauacgaac

SEQ ID NO: 913579 - RNA, 19 nt, Artificial Sequence
  Description of Artificial Sequence: Synthetic oligonucleotide
ccauaacagaggcccucag

SEQ ID NO: 913580 - RNA, 19 nt, Artificial Sequence
  Description of Artificial Sequence: Synthetic oligonucleotide
ugcugcgaucuagccgugu

SEQ ID NO: 913581 - RNA, 19 nt, Artificial Sequence
  Description of Artificial Sequence: Synthetic oligonucleotide
gccucauugccgcuuacgu

SEQ ID NO: 913582 - RNA, 19 nt, Artificial Sequence
  Description of Artificial Sequence: Synthetic oligonucleotide
cgccauuuaacucgggcca

SEQ ID NO: 913583 - RNA, 19 nt, Artificial Sequence
  Description of Artificial Sequence: Synthetic oligonucleotide
caccauacgaacagaccuu

SEQ ID NO: 913584 - RNA, 19 nt, Artificial Sequence
  Description of Artificial Sequence: Synthetic oligonucleotide
ucgggcggaccgucagggu

SEQ ID NO: 913585 - RNA, 19 nt, Artificial Sequence
  Description of Artificial Sequence: Synthetic oligonucleotide
uccucggggugcacauguu

SEQ ID NO: 913586 - RNA, 19 nt, Artificial Sequence
  Description of Artificial Sequence: Synthetic oligonucleotide
ggaccgucaggguugaguu

SEQ ID NO: 913587 - RNA, 19 nt, Artificial Sequence
  Description of Artificial Sequence: Synthetic oligonucleotide
cccauacguaaauguugug

SEQ ID NO: 913588 - RNA, 19 nt, Artificial Sequence
  Description of Artificial Sequence: Synthetic oligonucleotide
ucgcccugcucagcguaga

SEQ ID NO: 913589 - RNA, 19 nt, Artificial Sequence
  Description of Artificial Sequence: Synthetic oligonucleotide
gguaagaggcugugagccu

SEQ ID NO: 913590 - RNA, 19 nt, Artificial Sequence
  Description of Artificial Sequence: Synthetic oligonucleotide
ccauuucaugauguguuga

SEQ ID NO: 913591 - RNA, 19 nt, Artificial Sequence
  Description of Artificial Sequence: Synthetic oligonucleotide
ccugucgcaaacccagcca

SEQ ID NO: 913592 - RNA, 19 nt, Artificial Sequence
  Description of Artificial Sequence: Synthetic oligonucleotide
ccucauuggacacguucca

SEQ ID NO: 913593 - RNA, 19 nt, Artificial Sequence
  Description of Artificial Sequence: Synthetic oligonucleotide
ccagccccuguccucuggg

SEQ ID NO: 913594 - RNA, 19 nt, Artificial Sequence
  Description of Artificial Sequence: Synthetic oligonucleotide
cccauauccuucagauuga

SEQ ID NO: 913595 - RNA, 19 nt, Artificial Sequence
  Description of Artificial Sequence: Synthetic oligonucleotide
cguacaucccauacguaaa

SEQ ID NO: 913596 - RNA, 19 nt, Artificial Sequence
  Description of Artificial Sequence: Synthetic oligonucleotide
caucgcccugcucagcgua

SEQ ID NO: 913597 - RNA, 19 nt, Artificial Sequence
  Description of Artificial Sequence: Synthetic oligonucleotide
ggcugucauacagcgcgug

SEQ ID NO: 913598 - RNA, 19 nt, Artificial Sequence
  Description of Artificial Sequence: Synthetic oligonucleotide
gggcggaccgucaggguug

SEQ ID NO: 913599 - RNA, 19 nt, Artificial Sequence
  Description of Artificial Sequence: Synthetic oligonucleotide
ggccauaacagaggcccuc

SEQ ID NO: 913600 - RNA, 19 nt, Artificial Sequence
  Description of Artificial Sequence: Synthetic oligonucleotide
cuccugugguagcacauau

SEQ ID NO: 913601 - RNA, 19 nt, Artificial Sequence
  Description of Artificial Sequence: Synthetic oligonucleotide
ugccgacacugugguugag

SEQ ID NO: 913602 - RNA, 19 nt, Artificial Sequence
  Description of Artificial Sequence: Synthetic oligonucleotide
agcgcgugugagacagaca

SEQ ID NO: 913603 - RNA, 19 nt, Artificial Sequence
  Description of Artificial Sequence: Synthetic oligonucleotide
ccucauuauccucauuagu

SEQ ID NO: 913604 - RNA, 19 nt, Artificial Sequence
  Description of Artificial Sequence: Synthetic oligonucleotide
cugcgaucuagccgugucu

SEQ ID NO: 913605 - RNA, 19 nt, Artificial Sequence
  Description of Artificial Sequence: Synthetic oligonucleotide
cgaucuagccgugucucac

SEQ ID NO: 913606 - RNA, 19 nt, Artificial Sequence
  Description of Artificial Sequence: Synthetic oligonucleotide
gugagccuagucgggcgga

SEQ ID NO: 913607 - RNA, 19 nt, Artificial Sequence
  Description of Artificial Sequence: Synthetic oligonucleotide
gagcugugucacuccgagu

SEQ ID NO: 913608 - RNA, 19 nt, Artificial Sequence
  Description of Artificial Sequence: Synthetic oligonucleotide
gcgaucuagccgugucuca

SEQ ID NO: 913609 - RNA, 19 nt, Artificial Sequence
  Description of Artificial Sequence: Synthetic oligonucleotide
cugguacacagggaugggu

SEQ ID NO: 913610 - RNA, 19 nt, Artificial Sequence
  Description of Artificial Sequence: Synthetic oligonucleotide
cgccggucacccauauagg

SEQ ID NO: 913611 - RNA, 19 nt, Artificial Sequence
  Description of Artificial Sequence: Synthetic oligonucleotide
accggguugcagccaccuu

SEQ ID NO: 913612 - RNA, 19 nt, Artificial Sequence
  Description of Artificial Sequence: Synthetic oligonucleotide
gggugcacauguuccgugu

SEQ ID NO: 913613 - RNA, 19 nt, Artificial Sequence
  Description of Artificial Sequence: Synthetic oligonucleotide
gccaccuuccauccuggua

SEQ ID NO: 913614 - RNA, 19 nt, Artificial Sequence
  Description of Artificial Sequence: Synthetic oligonucleotide
uggccgcaaccugcagggc

SEQ ID NO: 913615 - RNA, 19 nt, Artificial Sequence
  Description of Artificial Sequence: Synthetic oligonucleotide
ggguuugcgcccagauuca

SEQ ID NO: 913616 - RNA, 19 nt, Artificial Sequence
  Description of Artificial Sequence: Synthetic oligonucleotide
ccgucaggguugaguuagg

SEQ ID NO: 913617 - RNA, 19 nt, Artificial Sequence
  Description of Artificial Sequence: Synthetic oligonucleotide
gcggcaaacggcugucaua

SEQ ID NO: 913618 - RNA, 19 nt, Artificial Sequence
  Description of Artificial Sequence: Synthetic oligonucleotide
gcacauauucaggcuccuc

SEQ ID NO: 913619 - RNA, 19 nt, Artificial Sequence
  Description of Artificial Sequence: Synthetic oligonucleotide
agcugccuuccagccauuu

SEQ ID NO: 913620 - RNA, 19 nt, Artificial Sequence
  Description of Artificial Sequence: Synthetic oligonucleotide
cguagaagugcagcauguc

SEQ ID NO: 913621 - RNA, 19 nt, Artificial Sequence
  Description of Artificial Sequence: Synthetic oligonucleotide
ggccgcuugcagugacuac

SEQ ID NO: 913622 - RNA, 19 nt, Artificial Sequence
  Description of Artificial Sequence: Synthetic oligonucleotide
guggcgccaggcaaugccu

SEQ ID NO: 913623 - RNA, 19 nt, Artificial Sequence
  Description of Artificial Sequence: Synthetic oligonucleotide
cccgcaccaacacacugaa

SEQ ID NO: 913624 - RNA, 19 nt, Artificial Sequence
  Description of Artificial Sequence: Synthetic oligonucleotide
gggucugcucgucgauguc

SEQ ID NO: 913625 - RNA, 19 nt, Artificial Sequence
  Description of Artificial Sequence: Synthetic oligonucleotide
gcguagaagugcagcaugu

SEQ ID NO: 913626 - RNA, 19 nt, Artificial Sequence
  Description of Artificial Sequence: Synthetic oligonucleotide
gguuaccggguugcagcca

SEQ ID NO: 913627 - RNA, 19 nt, Artificial Sequence
  Description of Artificial Sequence: Synthetic oligonucleotide
caugggccgcuugcaguga

SEQ ID NO: 913628 - RNA, 19 nt, Artificial Sequence
  Description of Artificial Sequence: Synthetic oligonucleotide
gcuaacugcccugcuggua

SEQ ID NO: 913629 - RNA, 19 nt, Artificial Sequence
  Description of Artificial Sequence: Synthetic oligonucleotide
gcacgguguguugucaugu

SEQ ID NO: 913630 - RNA, 19 nt, Artificial Sequence
  Description of Artificial Sequence: Synthetic oligonucleotide
ccuagucgggcggaccguc

SEQ ID NO: 913631 - RNA, 19 nt, Artificial Sequence
  Description of Artificial Sequence: Synthetic oligonucleotide
ccgaccagccagagcauaa

SEQ ID NO: 913632 - RNA, 19 nt, Artificial Sequence
  Description of Artificial Sequence: Synthetic oligonucleotide
ccgacacugugguugagau

SEQ ID NO: 913633 - RNA, 19 nt, Artificial Sequence
  Description of Artificial Sequence: Synthetic oligonucleotide
cagcguagaagugcagcau

SEQ ID NO: 913634 - RNA, 19 nt, Artificial Sequence
  Description of Artificial Sequence: Synthetic oligonucleotide
cagaagcgcugcagcagau

SEQ ID NO: 913635 - RNA, 19 nt, Artificial Sequence
  Description of Artificial Sequence: Synthetic oligonucleotide
ccgcaccaacacacugaag

SEQ ID NO: 913636 - RNA, 19 nt, Artificial Sequence
  Description of Artificial Sequence: Synthetic oligonucleotide
cggcguacaucccauacgu

SEQ ID NO: 913637 - RNA, 19 nt, Artificial Sequence
  Description of Artificial Sequence: Synthetic oligonucleotide
cgcuuacguguggagaguc

SEQ ID NO: 913638 - RNA, 19 nt, Artificial Sequence
  Description of Artificial Sequence: Synthetic oligonucleotide
ccauacgaacagaccuuua

SEQ ID NO: 913639 - RNA, 19 nt, Artificial Sequence
  Description of Artificial Sequence: Synthetic oligonucleotide
gggccgcuugcagugacua

SEQ ID NO: 913640 - RNA, 19 nt, Artificial Sequence
  Description of Artificial Sequence: Synthetic oligonucleotide
uuccggcccggagggugua

SEQ ID NO: 913641 - RNA, 19 nt, Artificial Sequence
  Description of Artificial Sequence: Synthetic oligonucleotide
gcgcagugggaaggccucc

SEQ ID NO: 913642 - RNA, 19 nt, Artificial Sequence
  Description of Artificial Sequence: Synthetic oligonucleotide
ggccgccauuuaacucggg

SEQ ID NO: 913643 - RNA, 19 nt, Artificial Sequence
  Description of Artificial Sequence: Synthetic oligonucleotide
ggcguacaucccauacgua

SEQ ID NO: 913644 - RNA, 19 nt, Artificial Sequence
  Description of Artificial Sequence: Synthetic oligonucleotide
cuuugccgacacugugguu

SEQ ID NO: 913645 - RNA, 19 nt, Artificial Sequence
  Description of Artificial Sequence: Synthetic oligonucleotide
gcagguguuccggcccgga

SEQ ID NO: 913646 - RNA, 19 nt, Artificial Sequence
  Description of Artificial Sequence: Synthetic oligonucleotide
ccguagcaugguccauguc

SEQ ID NO: 913647 - RNA, 19 nt, Artificial Sequence
  Description of Artificial Sequence: Synthetic oligonucleotide
gcgguggcaccugucgcaa

SEQ ID NO: 913648 - RNA, 19 nt, Artificial Sequence
  Description of Artificial Sequence: Synthetic oligonucleotide
cacuccgaguguccccuuu

SEQ ID NO: 913649 - RNA, 19 nt, Artificial Sequence
  Description of Artificial Sequence: Synthetic oligonucleotide
ggcggaccgucaggguuga

SEQ ID NO: 913650 - RNA, 19 nt, Artificial Sequence
  Description of Artificial Sequence: Synthetic oligonucleotide
cgcgugugagacagacaga

SEQ ID NO: 913651 - RNA, 19 nt, Artificial Sequence
  Description of Artificial Sequence: Synthetic oligonucleotide
ccauuuaacucgggccacu

SEQ ID NO: 913652 - RNA, 19 nt, Artificial Sequence
  Description of Artificial Sequence: Synthetic oligonucleotide
gcauaacgcucagcuguau

SEQ ID NO: 913653 - RNA, 19 nt, Artificial Sequence
  Description of Artificial Sequence: Synthetic oligonucleotide
ggcgccggucacccauaua

SEQ ID NO: 913654 - RNA, 19 nt, Artificial Sequence
  Description of Artificial Sequence: Synthetic oligonucleotide
ggccggcguacaucccaua

SEQ ID NO: 913655 - RNA, 19 nt, Artificial Sequence
  Description of Artificial Sequence: Synthetic oligonucleotide
cggaccgucaggguugagu

SEQ ID NO: 913656 - RNA, 19 nt, Artificial Sequence
  Description of Artificial Sequence: Synthetic oligonucleotide
cccgagccacuuuugcauu

SEQ ID NO: 913657 - RNA, 19 nt, Artificial Sequence
  Description of Artificial Sequence: Synthetic oligonucleotide
gccuagucgggcggaccgu

SEQ ID NO: 913658 - RNA, 19 nt, Artificial Sequence
  Description of Artificial Sequence: Synthetic oligonucleotide
gggccggcguacaucccau

SEQ ID NO: 913659 - RNA, 19 nt, Artificial Sequence
  Description of Artificial Sequence: Synthetic oligonucleotide
ccgcuuacguguggagagu

SEQ ID NO: 913660 - RNA, 19 nt, Artificial Sequence
  Description of Artificial Sequence: Synthetic oligonucleotide
cgggcggaccgucaggguu

SEQ ID NO: 913661 - RNA, 19 nt, Artificial Sequence
  Description of Artificial Sequence: Synthetic oligonucleotide
ccgcaaccugcagggcagu

SEQ ID NO: 913662 - RNA, 19 nt, Artificial Sequence
  Description of Artificial Sequence: Synthetic oligonucleotide
aauauagguacccauggug

SEQ ID NO: 913663 - RNA, 19 nt, Artificial Sequence
  Description of Artificial Sequence: Synthetic oligonucleotide
gagaccauagaucuggacg

SEQ ID NO: 913664 - RNA, 19 nt, Artificial Sequence
  Description of Artificial Sequence: Synthetic oligonucleotide
auuccuagagccuucacgg

SEQ ID NO: 913665 - RNA, 19 nt, Artificial Sequence
  Description of Artificial Sequence: Synthetic oligonucleotide
ugaccuuuuaauagcaucc

SEQ ID NO: 913666 - RNA, 19 nt, Artificial Sequence
  Description of Artificial Sequence: Synthetic oligonucleotide
uucaccaguccuaagacgc

SEQ ID NO: 913667 - RNA, 19 nt, Artificial Sequence
  Description of Artificial Sequence: Synthetic oligonucleotide
uacaagggucuccagaacg

SEQ ID NO: 913668 - RNA, 19 nt, Artificial Sequence
  Description of Artificial Sequence: Synthetic oligonucleotide
aguaacgagaugcugucac

SEQ ID NO: 913669 - RNA, 19 nt, Artificial Sequence
  Description of Artificial Sequence: Synthetic oligonucleotide
agaccauagaucuggacgg

SEQ ID NO: 913670 - RNA, 19 nt, Artificial Sequence
  Description of Artificial Sequence: Synthetic oligonucleotide
acgcuuugcauauauaguc

SEQ ID NO: 913671 - RNA, 19 nt, Artificial Sequence
  Description of Artificial Sequence: Synthetic oligonucleotide
aaggcauccacugagguug

SEQ ID NO: 913672 - RNA, 19 nt, Artificial Sequence
  Description of Artificial Sequence: Synthetic oligonucleotide
gucaaugauggauggaugg

SEQ ID NO: 913673 - RNA, 19 nt, Artificial Sequence
  Description of Artificial Sequence: Synthetic oligonucleotide
uugagugucacugugcugc

SEQ ID NO: 913674 - RNA, 19 nt, Artificial Sequence
  Description of Artificial Sequence: Synthetic oligonucleotide
gaccauaccuuucaaguag

SEQ ID NO: 913675 - RNA, 19 nt, Artificial Sequence
  Description of Artificial Sequence: Synthetic oligonucleotide
uguguaggcucacagguug

SEQ ID NO: 913676 - RNA, 19 nt, Artificial Sequence
  Description of Artificial Sequence: Synthetic oligonucleotide
agcaagacgucaucagugc

SEQ ID NO: 913677 - RNA, 19 nt, Artificial Sequence
  Description of Artificial Sequence: Synthetic oligonucleotide
ucaugcgcacaaaagcagg

SEQ ID NO: 913678 - RNA, 19 nt, Artificial Sequence
  Description of Artificial Sequence: Synthetic oligonucleotide
guaugauacagaaaucucc

SEQ ID NO: 913679 - RNA, 19 nt, Artificial Sequence
  Description of Artificial Sequence: Synthetic oligonucleotide
uguaugauacagaaaucuc

SEQ ID NO: 913680 - RNA, 19 nt, Artificial Sequence
  Description of Artificial Sequence: Synthetic oligonucleotide
agggaggucauguguaggc

SEQ ID NO: 913681 - RNA, 19 nt, Artificial Sequence
  Description of Artificial Sequence: Synthetic oligonucleotide
gaauccagcgcaccgauac

SEQ ID NO: 913682 - RNA, 19 nt, Artificial Sequence
  Description of Artificial Sequence: Synthetic oligonucleotide
cuauguaugauacagaaau

SEQ ID NO: 913683 - RNA, 19 nt, Artificial Sequence
  Description of Artificial Sequence: Synthetic oligonucleotide
accgauaccgggaacacgc

SEQ ID NO: 913684 - RNA, 19 nt, Artificial Sequence
  Description of Artificial Sequence: Synthetic oligonucleotide
acagugaaccccucugccc

SEQ ID NO: 913685 - RNA, 19 nt, Artificial Sequence
  Description of Artificial Sequence: Synthetic oligonucleotide
auauagaccauaccuuuca

SEQ ID NO: 913686 - RNA, 19 nt, Artificial Sequence
  Description of Artificial Sequence: Synthetic oligonucleotide
ugugagauggccuguugcc

SEQ ID NO: 913687 - RNA, 19 nt, Artificial Sequence
  Description of Artificial Sequence: Synthetic oligonucleotide
aggccugcaccauauagac

SEQ ID NO: 913688 - RNA, 19 nt, Artificial Sequence
  Description of Artificial Sequence: Synthetic oligonucleotide
aucgcagaucaucaccgcc

SEQ ID NO: 913689 - RNA, 19 nt, Artificial Sequence
  Description of Artificial Sequence: Synthetic oligonucleotide
ucaaugauggauggauggg

SEQ ID NO: 913690 - RNA, 19 nt, Artificial Sequence
  Description of Artificial Sequence: Synthetic oligonucleotide
auauaguccguccucaaau

SEQ ID NO: 913691 - RNA, 19 nt, Artificial Sequence
  Description of Artificial Sequence: Synthetic oligonucleotide
aauccagcgcaccgauacc

SEQ ID NO: 913692 - RNA, 19 nt, Artificial Sequence
  Description of Artificial Sequence: Synthetic oligonucleotide
caagacgucaucagugcgg

SEQ ID NO: 913693 - RNA, 19 nt, Artificial Sequence
  Description of Artificial Sequence: Synthetic oligonucleotide
ugcauauauaguccguccu

SEQ ID NO: 913694 - RNA, 19 nt, Artificial Sequence
  Description of Artificial Sequence: Synthetic oligonucleotide
aguagauucgggcaucgca

SEQ ID NO: 913695 - RNA, 19 nt, Artificial Sequence
  Description of Artificial Sequence: Synthetic oligonucleotide
auagaccauaccuuucaag

SEQ ID NO: 913696 - RNA, 19 nt, Artificial Sequence
  Description of Artificial Sequence: Synthetic oligonucleotide
cuuuucugugggaagggcc

SEQ ID NO: 913697 - RNA, 19 nt, Artificial Sequence
  Description of Artificial Sequence: Synthetic oligonucleotide
ucugcucaacaacucaucu

SEQ ID NO: 913698 - RNA, 19 nt, Artificial Sequence
  Description of Artificial Sequence: Synthetic oligonucleotide
uugaccuuuuaauagcauc

SEQ ID NO: 913699 - RNA, 19 nt, Artificial Sequence
  Description of Artificial Sequence: Synthetic oligonucleotide
caaaagcaggcaagaagcg

SEQ ID NO: 913700 - RNA, 19 nt, Artificial Sequence
  Description of Artificial Sequence: Synthetic oligonucleotide
ucacaaaggucuugaguag

SEQ ID NO: 913701 - RNA, 19 nt, Artificial Sequence
  Description of Artificial Sequence: Synthetic oligonucleotide
auagguacccauggugugc

SEQ ID NO: 913702 - RNA, 19 nt, Artificial Sequence
  Description of Artificial Sequence: Synthetic oligonucleotide
ucuccucucuaccaaguca

SEQ ID NO: 913703 - RNA, 19 nt, Artificial Sequence
  Description of Artificial Sequence: Synthetic oligonucleotide
uucacggauaucugccggg

SEQ ID NO: 913704 - RNA, 19 nt, Artificial Sequence
  Description of Artificial Sequence: Synthetic oligonucleotide
uccucccuauguaugauac

SEQ ID NO: 913705 - RNA, 19 nt, Artificial Sequence
  Description of Artificial Sequence: Synthetic oligonucleotide
uugaguagaccaugcaccu

SEQ ID NO: 913706 - RNA, 19 nt, Artificial Sequence
  Description of Artificial Sequence: Synthetic oligonucleotide
gaguagaccaugcaccuuc

SEQ ID NO: 913707 - RNA, 19 nt, Artificial Sequence
  Description of Artificial Sequence: Synthetic oligonucleotide
  modified_base (7)..(7): a, c, u, g, unknown or other
cuugccnucuccccucagg

SEQ ID NO: 913708 - RNA, 19 nt, Artificial Sequence
  Description of Artificial Sequence: Synthetic oligonucleotide
guagauucgggcaucgcag

SEQ ID NO: 913709 - RNA, 19 nt, Artificial Sequence
  Description of Artificial Sequence: Synthetic oligonucleotide
ucggcuuccggccagucac

SEQ ID NO: 913710 - RNA, 19 nt, Artificial Sequence
  Description of Artificial Sequence: Synthetic oligonucleotide
cagugaaccccucugcccg

SEQ ID NO: 913711 - RNA, 19 nt, Artificial Sequence
  Description of Artificial Sequence: Synthetic oligonucleotide
aaggauuggcgcaaggccu

SEQ ID NO: 913712 - RNA, 19 nt, Artificial Sequence
  Description of Artificial Sequence: Synthetic oligonucleotide
gcuuugcauauauaguccg

SEQ ID NO: 913713 - RNA, 19 nt, Artificial Sequence
  Description of Artificial Sequence: Synthetic oligonucleotide
aucggcuugaccuuuuaau

SEQ ID NO: 913714 - RNA, 19 nt, Artificial Sequence
  Description of Artificial Sequence: Synthetic oligonucleotide
acgggcacggcuucuugcc

SEQ ID NO: 913715 - RNA, 19 nt, Artificial Sequence
  Description of Artificial Sequence: Synthetic oligonucleotide
gaucacaugggaggguggg

SEQ ID NO: 913716 - RNA, 19 nt, Artificial Sequence
  Description of Artificial Sequence: Synthetic oligonucleotide
aagacccaccuuuucugug

SEQ ID NO: 913717 - RNA, 19 nt, Artificial Sequence
  Description of Artificial Sequence: Synthetic oligonucleotide
  modified_base (6)..(6): a, c, u, g, unknown or other
uugccnucuccccucagga

SEQ ID NO: 913718 - RNA, 19 nt, Artificial Sequence
  Description of Artificial Sequence: Synthetic oligonucleotide
ugaucacaugggagggugg

SEQ ID NO: 913719 - RNA, 19 nt, Artificial Sequence
  Description of Artificial Sequence: Synthetic oligonucleotide
ugaaguugagugucacugu

SEQ ID NO: 913720 - RNA, 19 nt, Artificial Sequence
  Description of Artificial Sequence: Synthetic oligonucleotide
acgagaugcugucaccauc

SEQ ID NO: 913721 - RNA, 19 nt, Artificial Sequence
  Description of Artificial Sequence: Synthetic oligonucleotide
caugcgcacaaaagcaggc

SEQ ID NO: 913722 - RNA, 19 nt, Artificial Sequence
  Description of Artificial Sequence: Synthetic oligonucleotide
uaacgagaugcugucacca

SEQ ID NO: 913723 - RNA, 19 nt, Artificial Sequence
  Description of Artificial Sequence: Synthetic oligonucleotide
cuucacggauaucugccgg

SEQ ID NO: 913724 - RNA, 19 nt, Artificial Sequence
  Description of Artificial Sequence: Synthetic oligonucleotide
aaccaugacuucauguaca

SEQ ID NO: 913725 - RNA, 19 nt, Artificial Sequence
  Description of Artificial Sequence: Synthetic oligonucleotide
ucggcuugaccuuuuaaua

SEQ ID NO: 913726 - RNA, 19 nt, Artificial Sequence
  Description of Artificial Sequence: Synthetic oligonucleotide
guuagugcggaugcgcggg

SEQ ID NO: 913727 - RNA, 19 nt, Artificial Sequence
  Description of Artificial Sequence: Synthetic oligonucleotide
guaguaacgagaugcuguc

SEQ ID NO: 913728 - RNA, 19 nt, Artificial Sequence
  Description of Artificial Sequence: Synthetic oligonucleotide
caaggcgaccugcugagcc

SEQ ID NO: 913729 - RNA, 19 nt, Artificial Sequence
  Description of Artificial Sequence: Synthetic oligonucleotide
ucuaccaagucaggggccc

SEQ ID NO: 913730 - RNA, 19 nt, Artificial Sequence
  Description of Artificial Sequence: Synthetic oligonucleotide
aggcucccggaguagauuc

SEQ ID NO: 913731 - RNA, 19 nt, Artificial Sequence
  Description of Artificial Sequence: Synthetic oligonucleotide
acggauaucugccggguga

SEQ ID NO: 913732 - RNA, 19 nt, Artificial Sequence
  Description of Artificial Sequence: Synthetic oligonucleotide
auagucuugcucaaacaug

SEQ ID NO: 913733 - RNA, 19 nt, Artificial Sequence
  Description of Artificial Sequence: Synthetic oligonucleotide
uauagaccauaccuuucaa

SEQ ID NO: 913734 - RNA, 19 nt, Artificial Sequence
  Description of Artificial Sequence: Synthetic oligonucleotide
accggaauccagcgcaccg

SEQ ID NO: 913735 - RNA, 19 nt, Artificial Sequence
  Description of Artificial Sequence: Synthetic oligonucleotide
cuauagccaagcacagccc

SEQ ID NO: 913736 - RNA, 19 nt, Artificial Sequence
  Description of Artificial Sequence: Synthetic oligonucleotide
accgggaacacgccguccg

SEQ ID NO: 913737 - RNA, 19 nt, Artificial Sequence
  Description of Artificial Sequence: Synthetic oligonucleotide
ugcgcacaaaagcaggcaa

SEQ ID NO: 913738 - RNA, 19 nt, Artificial Sequence
  Description of Artificial Sequence: Synthetic oligonucleotide
ugagcucaucacauaucca

SEQ ID NO: 913739 - RNA, 19 nt, Artificial Sequence
  Description of Artificial Sequence: Synthetic oligonucleotide
aguccuaagacgccccagu

SEQ ID NO: 913740 - RNA, 19 nt, Artificial Sequence
  Description of Artificial Sequence: Synthetic oligonucleotide
ucugugagauggccuguug

SEQ ID NO: 913741 - RNA, 19 nt, Artificial Sequence
  Description of Artificial Sequence: Synthetic oligonucleotide
guaacgagaugcugucacc

SEQ ID NO: 913742 - RNA, 19 nt, Artificial Sequence
  Description of Artificial Sequence: Synthetic oligonucleotide
cuccccucaggacucaacc

SEQ ID NO: 913743 - RNA, 19 nt, Artificial Sequence
  Description of Artificial Sequence: Synthetic oligonucleotide
ucccggaguagauucgggc

SEQ ID NO: 913744 - RNA, 19 nt, Artificial Sequence
  Description of Artificial Sequence: Synthetic oligonucleotide
auccagcgcaccgauaccg

SEQ ID NO: 913745 - RNA, 19 nt, Artificial Sequence
  Description of Artificial Sequence: Synthetic oligonucleotide
acgucaucagugcggcugg

SEQ ID NO: 913746 - RNA, 19 nt, Artificial Sequence
  Description of Artificial Sequence: Synthetic oligonucleotide
gguguaaaaggugauguuc

SEQ ID NO: 913747 - RNA, 19 nt, Artificial Sequence
  Description of Artificial Sequence: Synthetic oligonucleotide
uguugaaguugagugucac

SEQ ID NO: 913748 - RNA, 19 nt, Artificial Sequence
  Description of Artificial Sequence: Synthetic oligonucleotide
aaccccucugcccgaagca

SEQ ID NO: 913749 - RNA, 19 nt, Artificial Sequence
  Description of Artificial Sequence: Synthetic oligonucleotide
guaaagacccaccuuuucu

SEQ ID NO: 913750 - RNA, 19 nt, Artificial Sequence
  Description of Artificial Sequence: Synthetic oligonucleotide
aacgagaugcugucaccau

SEQ ID NO: 913751 - RNA, 19 nt, Artificial Sequence
  Description of Artificial Sequence: Synthetic oligonucleotide
aaggcgaccugcugagccu

SEQ ID NO: 913752 - RNA, 19 nt, Artificial Sequence
  Description of Artificial Sequence: Synthetic oligonucleotide
gacauagugcucugcgauc

SEQ ID NO: 913753 - RNA, 19 nt, Artificial Sequence
  Description of Artificial Sequence: Synthetic oligonucleotide
ucuccagaucggcuugacc

SEQ ID NO: 913754 - RNA, 19 nt, Artificial Sequence
  Description of Artificial Sequence: Synthetic oligonucleotide
agacccaccuuuucuguga

SEQ ID NO: 913755 - RNA, 19 nt, Artificial Sequence
  Description of Artificial Sequence: Synthetic oligonucleotide
uuggcgcaaggccugcacc

SEQ ID NO: 913756 - RNA, 19 nt, Artificial Sequence
  Description of Artificial Sequence: Synthetic oligonucleotide
uagauucgggcaucgcaga

SEQ ID NO: 913757 - RNA, 19 nt, Artificial Sequence
  Description of Artificial Sequence: Synthetic oligonucleotide
uccaagacgggcacggcuu

SEQ ID NO: 913758 - RNA, 19 nt, Artificial Sequence
  Description of Artificial Sequence: Synthetic oligonucleotide
aggcucacagguuguuccg

SEQ ID NO: 913759 - RNA, 19 nt, Artificial Sequence
  Description of Artificial Sequence: Synthetic oligonucleotide
cauauauaguccguccuca

SEQ ID NO: 913760 - RNA, 19 nt, Artificial Sequence
  Description of Artificial Sequence: Synthetic oligonucleotide
accgccccgacauagugcu

SEQ ID NO: 913761 - RNA, 19 nt, Artificial Sequence
  Description of Artificial Sequence: Synthetic oligonucleotide
gcucaucacauauccagcc

SEQ ID NO: 913762 - RNA, 19 nt, Artificial Sequence
  Description of Artificial Sequence: Synthetic oligonucleotide
agaccauaccuuucaagua

SEQ ID NO: 913763 - RNA, 19 nt, Artificial Sequence
  Description of Artificial Sequence: Synthetic oligonucleotide
cucgcgagaccauagaucu

SEQ ID NO: 913764 - RNA, 19 nt, Artificial Sequence
  Description of Artificial Sequence: Synthetic oligonucleotide
gaaccccucugcccgaagc

SEQ ID NO: 913765 - RNA, 19 nt, Artificial Sequence
  Description of Artificial Sequence: Synthetic oligonucleotide
ucaccgccccgacauagug

SEQ ID NO: 913766 - RNA, 19 nt, Artificial Sequence
  Description of Artificial Sequence: Synthetic oligonucleotide
cugcuauagccaagcacag

SEQ ID NO: 913767 - RNA, 19 nt, Artificial Sequence
  Description of Artificial Sequence: Synthetic oligonucleotide
auagcauccaccacgcuuu

SEQ ID NO: 913768 - RNA, 19 nt, Artificial Sequence
  Description of Artificial Sequence: Synthetic oligonucleotide
gaccaugcaccuucucggc

SEQ ID NO: 913769 - RNA, 19 nt, Artificial Sequence
  Description of Artificial Sequence: Synthetic oligonucleotide
ggcacuaggacccgggcug

SEQ ID NO: 913770 - RNA, 19 nt, Artificial Sequence
  Description of Artificial Sequence: Synthetic oligonucleotide
ggcaucgcagaucaucacc

SEQ ID NO: 913771 - RNA, 19 nt, Artificial Sequence
  Description of Artificial Sequence: Synthetic oligonucleotide
gcaucgcagaucaucaccg

SEQ ID NO: 913772 - RNA, 19 nt, Artificial Sequence
  Description of Artificial Sequence: Synthetic oligonucleotide
caaaggucuugaguagacc

SEQ ID NO: 913773 - RNA, 19 nt, Artificial Sequence
  Description of Artificial Sequence: Synthetic oligonucleotide
cucuaccaagucaggggcc

SEQ ID NO: 913774 - RNA, 19 nt, Artificial Sequence
  Description of Artificial Sequence: Synthetic oligonucleotide
guccacaauauagguaccc

SEQ ID NO: 913775 - RNA, 19 nt, Artificial Sequence
  Description of Artificial Sequence: Synthetic oligonucleotide
gacaugccggaugccacgg

SEQ ID NO: 913776 - RNA, 19 nt, Artificial Sequence
  Description of Artificial Sequence: Synthetic oligonucleotide
ucaccauccggaaggcauc

SEQ ID NO: 913777 - RNA, 19 nt, Artificial Sequence
  Description of Artificial Sequence: Synthetic oligonucleotide
agucaaugauggauggaug

SEQ ID NO: 913778 - RNA, 19 nt, Artificial Sequence
  Description of Artificial Sequence: Synthetic oligonucleotide
acuaggacccgggcugagc

SEQ ID NO: 913779 - RNA, 19 nt, Artificial Sequence
  Description of Artificial Sequence: Synthetic oligonucleotide
cuggacggcuuucggaggc

SEQ ID NO: 913780 - RNA, 19 nt, Artificial Sequence
  Description of Artificial Sequence: Synthetic oligonucleotide
gggagguuagugcggaugc

SEQ ID NO: 913781 - RNA, 19 nt, Artificial Sequence
  Description of Artificial Sequence: Synthetic oligonucleotide
aagacgccccaguccaaga

SEQ ID NO: 913782 - RNA, 19 nt, Artificial Sequence
  Description of Artificial Sequence: Synthetic oligonucleotide
ugccucacaaaggucuuga

SEQ ID NO: 913783 - RNA, 19 nt, Artificial Sequence
  Description of Artificial Sequence: Synthetic oligonucleotide
gcaucgcccguccagagcc

SEQ ID NO: 913784 - RNA, 19 nt, Artificial Sequence
  Description of Artificial Sequence: Synthetic oligonucleotide
aggguggguaaagacccac

SEQ ID NO: 913785 - RNA, 19 nt, Artificial Sequence
  Description of Artificial Sequence: Synthetic oligonucleotide
cauagucuugcucaaacau

SEQ ID NO: 913786 - RNA, 19 nt, Artificial Sequence
  Description of Artificial Sequence: Synthetic oligonucleotide
gcaagacgucaucagugcg

SEQ ID NO: 913787 - RNA, 19 nt, Artificial Sequence
  Description of Artificial Sequence: Synthetic oligonucleotide
acggcuuucggaggccgcc

SEQ ID NO: 913788 - RNA, 19 nt, Artificial Sequence
  Description of Artificial Sequence: Synthetic oligonucleotide
uggcacgcuggcaucgccc

SEQ ID NO: 913789 - RNA, 19 nt, Artificial Sequence
  Description of Artificial Sequence: Synthetic oligonucleotide
uccccucaggacucaacca

SEQ ID NO: 913790 - RNA, 19 nt, Artificial Sequence
  Description of Artificial Sequence: Synthetic oligonucleotide
caucgcagaucaucaccgc

SEQ ID NO: 913791 - RNA, 19 nt, Artificial Sequence
  Description of Artificial Sequence: Synthetic oligonucleotide
ucgggcaucgcagaucauc

SEQ ID NO: 913792 - RNA, 19 nt, Artificial Sequence
  Description of Artificial Sequence: Synthetic oligonucleotide
accaguccuaagacgcccc

SEQ ID NO: 913793 - RNA, 19 nt, Artificial Sequence
  Description of Artificial Sequence: Synthetic oligonucleotide
ggaaggauuggcgcaaggc

SEQ ID NO: 913794 - RNA, 19 nt, Artificial Sequence
  Description of Artificial Sequence: Synthetic oligonucleotide
ugcgcgggcaccggaaucc

SEQ ID NO: 913795 - RNA, 19 nt, Artificial Sequence
  Description of Artificial Sequence: Synthetic oligonucleotide
uuagugcggaugcgcgggc

SEQ ID NO: 913796 - RNA, 19 nt, Artificial Sequence
  Description of Artificial Sequence: Synthetic oligonucleotide
uuccuagagccuucacgga

SEQ ID NO: 913797 - RNA, 19 nt, Artificial Sequence
  Description of Artificial Sequence: Synthetic oligonucleotide
gaacacgccguccgguuuc

SEQ ID NO: 913798 - RNA, 19 nt, Artificial Sequence
  Description of Artificial Sequence: Synthetic oligonucleotide
uuccggccagucacguggg

SEQ ID NO: 913799 - RNA, 19 nt, Artificial Sequence
  Description of Artificial Sequence: Synthetic oligonucleotide
uaucugccgggugagugga

SEQ ID NO: 913800 - RNA, 19 nt, Artificial Sequence
  Description of Artificial Sequence: Synthetic oligonucleotide
  modified_base (9)..(9): a, c, u, g, unknown or other
uucuugccnucuccccuca

SEQ ID NO: 913801 - RNA, 19 nt, Artificial Sequence
  Description of Artificial Sequence: Synthetic oligonucleotide
agggagguuagugcggaug

SEQ ID NO: 913802 - RNA, 19 nt, Artificial Sequence
  Description of Artificial Sequence: Synthetic oligonucleotide
ugccagucccaaacacgcc

SEQ ID NO: 913803 - RNA, 19 nt, Artificial Sequence
  Description of Artificial Sequence: Synthetic oligonucleotide
gauguucuacaguuccccu

SEQ ID NO: 913804 - RNA, 19 nt, Artificial Sequence
  Description of Artificial Sequence: Synthetic oligonucleotide
ggcaccggaauccagcgca

SEQ ID NO: 913805 - RNA, 19 nt, Artificial Sequence
  Description of Artificial Sequence: Synthetic oligonucleotide
gguaguaacgagaugcugu

SEQ ID NO: 913806 - RNA, 19 nt, Artificial Sequence
  Description of Artificial Sequence: Synthetic oligonucleotide
caucaccgccccgacauag

SEQ ID NO: 913807 - RNA, 19 nt, Artificial Sequence
  Description of Artificial Sequence: Synthetic oligonucleotide
gauucgggcaucgcagauc

SEQ ID NO: 913808 - RNA, 19 nt, Artificial Sequence
  Description of Artificial Sequence: Synthetic oligonucleotide
uccuuacaagggucuccag

SEQ ID NO: 913809 - RNA, 19 nt, Artificial Sequence
  Description of Artificial Sequence: Synthetic oligonucleotide
  modified_base (5)..(5): a, c, u, g, unknown or other
ugccnucuccccucaggac

SEQ ID NO: 913810 - RNA, 19 nt, Artificial Sequence
  Description of Artificial Sequence: Synthetic oligonucleotide
acgccccaguccaagacgg

SEQ ID NO: 913811 - RNA, 19 nt, Artificial Sequence
  Description of Artificial Sequence: Synthetic oligonucleotide
cuccccgggcaacaaggcg

SEQ ID NO: 913812 - RNA, 19 nt, Artificial Sequence
  Description of Artificial Sequence: Synthetic oligonucleotide
cgcccgaccgucuugaggg

SEQ ID NO: 913813 - RNA, 19 nt, Artificial Sequence
  Description of Artificial Sequence: Synthetic oligonucleotide
cccgacauagugcucugcg

SEQ ID NO: 913814 - RNA, 19 nt, Artificial Sequence
  Description of Artificial Sequence: Synthetic oligonucleotide
agauucgggcaucgcagau

SEQ ID NO: 913815 - RNA, 19 nt, Artificial Sequence
  Description of Artificial Sequence: Synthetic oligonucleotide
  modified_base (8)..(8): a, c, u, g, unknown or other
ucuugccnucuccccucag

SEQ ID NO: 913816 - RNA, 19 nt, Artificial Sequence
  Description of Artificial Sequence: Synthetic oligonucleotide
ucacggauaucugccgggu

SEQ ID NO: 913817 - RNA, 19 nt, Artificial Sequence
  Description of Artificial Sequence: Synthetic oligonucleotide
uaguaacgagaugcuguca

SEQ ID NO: 913818 - RNA, 19 nt, Artificial Sequence
  Description of Artificial Sequence: Synthetic oligonucleotide
cauagugcucugcgaucag

SEQ ID NO: 913819 - RNA, 19 nt, Artificial Sequence
  Description of Artificial Sequence: Synthetic oligonucleotide
acgcuggcaucgcccgucc

SEQ ID NO: 913820 - RNA, 19 nt, Artificial Sequence
  Description of Artificial Sequence: Synthetic oligonucleotide
ugaaccccucugcccgaag

SEQ ID NO: 913821 - RNA, 19 nt, Artificial Sequence
  Description of Artificial Sequence: Synthetic oligonucleotide
augcgcgggcaccggaauc

SEQ ID NO: 913822 - RNA, 19 nt, Artificial Sequence
  Description of Artificial Sequence: Synthetic oligonucleotide
gauaccgggaacacgccgu

SEQ ID NO: 913823 - RNA, 19 nt, Artificial Sequence
  Description of Artificial Sequence: Synthetic oligonucleotide
gguacccauggugugcagg

SEQ ID NO: 913824 - RNA, 19 nt, Artificial Sequence
  Description of Artificial Sequence: Synthetic oligonucleotide
accauaccuuucaaguaga

SEQ ID NO: 913825 - RNA, 19 nt, Artificial Sequence
  Description of Artificial Sequence: Synthetic oligonucleotide
acauucccaaccaggcuca

SEQ ID NO: 913826 - RNA, 19 nt, Artificial Sequence
  Description of Artificial Sequence: Synthetic oligonucleotide
ggcacgcuggcaucgcccg

SEQ ID NO: 913827 - RNA, 19 nt, Artificial Sequence
  Description of Artificial Sequence: Synthetic oligonucleotide
gaucggcuugaccuuuuaa

SEQ ID NO: 913828 - RNA, 19 nt, Artificial Sequence
  Description of Artificial Sequence: Synthetic oligonucleotide
auagugcucugcgaucagu

SEQ ID NO: 913829 - RNA, 19 nt, Artificial Sequence
  Description of Artificial Sequence: Synthetic oligonucleotide
acaaggcgaccugcugagc

SEQ ID NO: 913830 - RNA, 19 nt, Artificial Sequence
  Description of Artificial Sequence: Synthetic oligonucleotide
cacgcuuugcauauauagu

SEQ ID NO: 913831 - RNA, 19 nt, Artificial Sequence
  Description of Artificial Sequence: Synthetic oligonucleotide
cauagguucugguuggcau

SEQ ID NO: 913832 - RNA, 19 nt, Artificial Sequence
  Description of Artificial Sequence: Synthetic oligonucleotide
aggauuggcgcaaggccug

SEQ ID NO: 913833 - RNA, 19 nt, Artificial Sequence
  Description of Artificial Sequence: Synthetic oligonucleotide
caccgccccgacauagugc

SEQ ID NO: 913834 - RNA, 19 nt, Artificial Sequence
  Description of Artificial Sequence: Synthetic oligonucleotide
cacaaaggucuugaguaga

SEQ ID NO: 913835 - RNA, 19 nt, Artificial Sequence
  Description of Artificial Sequence: Synthetic oligonucleotide
accauagaucuggacggcu

SEQ ID NO: 913836 - RNA, 19 nt, Artificial Sequence
  Description of Artificial Sequence: Synthetic oligonucleotide
ggcagaguucuucugccca

SEQ ID NO: 913837 - RNA, 19 nt, Artificial Sequence
  Description of Artificial Sequence: Synthetic oligonucleotide
guccuaagacgccccaguc

SEQ ID NO: 913838 - RNA, 19 nt, Artificial Sequence
  Description of Artificial Sequence: Synthetic oligonucleotide
cuuugcauauauaguccgu

SEQ ID NO: 913839 - RNA, 19 nt, Artificial Sequence
  Description of Artificial Sequence: Synthetic oligonucleotide
gcuggcaucgcccguccag

SEQ ID NO: 913840 - RNA, 19 nt, Artificial Sequence
  Description of Artificial Sequence: Synthetic oligonucleotide
ggugcggucccagguacgg

SEQ ID NO: 913841 - RNA, 19 nt, Artificial Sequence
  Description of Artificial Sequence: Synthetic oligonucleotide
caccgauaccgggaacacg

SEQ ID NO: 913842 - RNA, 19 nt, Artificial Sequence
  Description of Artificial Sequence: Synthetic oligonucleotide
auguugaaguugaguguca

SEQ ID NO: 913843 - RNA, 19 nt, Artificial Sequence
  Description of Artificial Sequence: Synthetic oligonucleotide
caugcaccuucucggcuuc

SEQ ID NO: 913844 - RNA, 19 nt, Artificial Sequence
  Description of Artificial Sequence: Synthetic oligonucleotide
caccauccggaaggcaucc

SEQ ID NO: 913845 - RNA, 19 nt, Artificial Sequence
  Description of Artificial Sequence: Synthetic oligonucleotide
uguaggcucacagguuguu

SEQ ID NO: 913846 - RNA, 19 nt, Artificial Sequence
  Description of Artificial Sequence: Synthetic oligonucleotide
cacggauaucugccgggug

SEQ ID NO: 913847 - RNA, 19 nt, Artificial Sequence
  Description of Artificial Sequence: Synthetic oligonucleotide
ugccuucaccaguccuaag

SEQ ID NO: 913848 - RNA, 19 nt, Artificial Sequence
  Description of Artificial Sequence: Synthetic oligonucleotide
ccacccaugagcaucugga

SEQ ID NO: 913849 - RNA, 19 nt, Artificial Sequence
  Description of Artificial Sequence: Synthetic oligonucleotide
cuuucggaggccgcccgac

SEQ ID NO: 913850 - RNA, 19 nt, Artificial Sequence
  Description of Artificial Sequence: Synthetic oligonucleotide
gcccaagcuaauuuauuaa

SEQ ID NO: 913851 - RNA, 19 nt, Artificial Sequence
  Description of Artificial Sequence: Synthetic oligonucleotide
aguagaccaugcaccuucu

SEQ ID NO: 913852 - RNA, 19 nt, Artificial Sequence
  Description of Artificial Sequence: Synthetic oligonucleotide
ggagguuagugcggaugcg

SEQ ID NO: 913853 - RNA, 19 nt, Artificial Sequence
  Description of Artificial Sequence: Synthetic oligonucleotide
ugcccgaagcagcggcacu

SEQ ID NO: 913854 - RNA, 19 nt, Artificial Sequence
  Description of Artificial Sequence: Synthetic oligonucleotide
cuguggguaguaacgagau

SEQ ID NO: 913855 - RNA, 19 nt, Artificial Sequence
  Description of Artificial Sequence: Synthetic oligonucleotide
caucgcccguccagagccg

SEQ ID NO: 913856 - RNA, 19 nt, Artificial Sequence
  Description of Artificial Sequence: Synthetic oligonucleotide
gaugcacaccaggucuaca

SEQ ID NO: 913857 - RNA, 19 nt, Artificial Sequence
  Description of Artificial Sequence: Synthetic oligonucleotide
cucaaaugaggcagccaua

SEQ ID NO: 913858 - RNA, 19 nt, Artificial Sequence
  Description of Artificial Sequence: Synthetic oligonucleotide
cccaaccaggcucaucagc

SEQ ID NO: 913859 - RNA, 19 nt, Artificial Sequence
  Description of Artificial Sequence: Synthetic oligonucleotide
gaguugaccuucccauagu

SEQ ID NO: 913860 - RNA, 19 nt, Artificial Sequence
  Description of Artificial Sequence: Synthetic oligonucleotide
gcuguggguaguaacgaga

SEQ ID NO: 913861 - RNA, 19 nt, Artificial Sequence
  Description of Artificial Sequence: Synthetic oligonucleotide
ugaguagaccaugcaccuu

SEQ ID NO: 913862 - RNA, 19 nt, Artificial Sequence
  Description of Artificial Sequence: Synthetic oligonucleotide
cuggcacgcuggcaucgcc

SEQ ID NO: 913863 - RNA, 19 nt, Artificial Sequence
  Description of Artificial Sequence: Synthetic oligonucleotide
aacacgccguccgguuucu

SEQ ID NO: 913864 - RNA, 19 nt, Artificial Sequence
  Description of Artificial Sequence: Synthetic oligonucleotide
ggcaccuggcauguugaag

SEQ ID NO: 913865 - RNA, 19 nt, Artificial Sequence
  Description of Artificial Sequence: Synthetic oligonucleotide
caguccuaagacgccccag

SEQ ID NO: 913866 - RNA, 19 nt, Artificial Sequence
  Description of Artificial Sequence: Synthetic oligonucleotide
ggguaguaacgagaugcug

SEQ ID NO: 913867 - RNA, 19 nt, Artificial Sequence
  Description of Artificial Sequence: Synthetic oligonucleotide
guagaccaugcaccuucuc

SEQ ID NO: 913868 - RNA, 19 nt, Artificial Sequence
  Description of Artificial Sequence: Synthetic oligonucleotide
  modified_base (4)..(4): a, c, u, g, unknown or other
gccnucuccccucaggacu

SEQ ID NO: 913869 - RNA, 19 nt, Artificial Sequence
  Description of Artificial Sequence: Synthetic oligonucleotide
uggacggcuuucggaggcc

SEQ ID NO: 913870 - RNA, 19 nt, Artificial Sequence
  Description of Artificial Sequence: Synthetic oligonucleotide
gccuacaaccaugacuuca

SEQ ID NO: 913871 - RNA, 19 nt, Artificial Sequence
  Description of Artificial Sequence: Synthetic oligonucleotide
agaucggcuugaccuuuua

SEQ ID NO: 913872 - RNA, 19 nt, Artificial Sequence
  Description of Artificial Sequence: Synthetic oligonucleotide
ucaucaccgccccgacaua

SEQ ID NO: 913873 - RNA, 19 nt, Artificial Sequence
  Description of Artificial Sequence: Synthetic oligonucleotide
uaccgggaacacgccgucc

SEQ ID NO: 913874 - RNA, 19 nt, Artificial Sequence
  Description of Artificial Sequence: Synthetic oligonucleotide
agguacccauggugugcag

SEQ ID NO: 913875 - RNA, 19 nt, Artificial Sequence
  Description of Artificial Sequence: Synthetic oligonucleotide
uaccaagucaggggcccuc

SEQ ID NO: 913876 - RNA, 19 nt, Artificial Sequence
  Description of Artificial Sequence: Synthetic oligonucleotide
augccggaugccacggaug

SEQ ID NO: 913877 - RNA, 19 nt, Artificial Sequence
  Description of Artificial Sequence: Synthetic oligonucleotide
ccgaccgucuugagggagg

SEQ ID NO: 913878 - RNA, 19 nt, Artificial Sequence
  Description of Artificial Sequence: Synthetic oligonucleotide
uagugcggaugcgcgggca

SEQ ID NO: 913879 - RNA, 19 nt, Artificial Sequence
  Description of Artificial Sequence: Synthetic oligonucleotide
guccaagacgggcacggcu

SEQ ID NO: 913880 - RNA, 19 nt, Artificial Sequence
  Description of Artificial Sequence: Synthetic oligonucleotide
ccuauguaugauacagaaa

SEQ ID NO: 913881 - RNA, 19 nt, Artificial Sequence
  Description of Artificial Sequence: Synthetic oligonucleotide
ccauccggaaggcauccac

SEQ ID NO: 913882 - RNA, 19 nt, Artificial Sequence
  Description of Artificial Sequence: Synthetic oligonucleotide
cagcgcaccgauaccggga

SEQ ID NO: 913883 - RNA, 19 nt, Artificial Sequence
  Description of Artificial Sequence: Synthetic oligonucleotide
  modified_base (3)..(3): a, c, u, g, unknown or other
ccnucuccccucaggacuc

SEQ ID NO: 913884 - RNA, 19 nt, Artificial Sequence
  Description of Artificial Sequence: Synthetic oligonucleotide
ccagcgcaccgauaccggg

SEQ ID NO: 913885 - RNA, 19 nt, Artificial Sequence
  Description of Artificial Sequence: Synthetic oligonucleotide
gcggcugguguaaaaggug

SEQ ID NO: 913886 - RNA, 19 nt, Artificial Sequence
  Description of Artificial Sequence: Synthetic oligonucleotide
ccuuuucugugggaagggc

SEQ ID NO: 913887 - RNA, 19 nt, Artificial Sequence
  Description of Artificial Sequence: Synthetic oligonucleotide
ggcaucgcccguccagagc

SEQ ID NO: 913888 - RNA, 19 nt, Artificial Sequence
  Description of Artificial Sequence: Synthetic oligonucleotide
gcucgcgagaccauagauc

SEQ ID NO: 913889 - RNA, 19 nt, Artificial Sequence
  Description of Artificial Sequence: Synthetic oligonucleotide
cgauaccgggaacacgccg

SEQ ID NO: 913890 - RNA, 19 nt, Artificial Sequence
  Description of Artificial Sequence: Synthetic oligonucleotide
auguguaggcucacagguu

SEQ ID NO: 913891 - RNA, 19 nt, Artificial Sequence
  Description of Artificial Sequence: Synthetic oligonucleotide
caccggaauccagcgcacc

SEQ ID NO: 913892 - RNA, 19 nt, Artificial Sequence
  Description of Artificial Sequence: Synthetic oligonucleotide
cccggaguagauucgggca

SEQ ID NO: 913893 - RNA, 19 nt, Artificial Sequence
  Description of Artificial Sequence: Synthetic oligonucleotide
cucaacaacucaucuccuu

SEQ ID NO: 913894 - RNA, 19 nt, Artificial Sequence
  Description of Artificial Sequence: Synthetic oligonucleotide
agacgucaucagugcggcu

SEQ ID NO: 913895 - RNA, 19 nt, Artificial Sequence
  Description of Artificial Sequence: Synthetic oligonucleotide
ggggugcggucccagguac

SEQ ID NO: 913896 - RNA, 19 nt, Artificial Sequence
  Description of Artificial Sequence: Synthetic oligonucleotide
cacugagguugcagccuuc

SEQ ID NO: 913897 - RNA, 19 nt, Artificial Sequence
  Description of Artificial Sequence: Synthetic oligonucleotide
acccaccuuuucugugaga

SEQ ID NO: 913898 - RNA, 19 nt, Artificial Sequence
  Description of Artificial Sequence: Synthetic oligonucleotide
ggacggcuuucggaggccg

SEQ ID NO: 913899 - RNA, 19 nt, Artificial Sequence
  Description of Artificial Sequence: Synthetic oligonucleotide
ucagugcggcugguguaaa

SEQ ID NO: 913900 - RNA, 19 nt, Artificial Sequence
  Description of Artificial Sequence: Synthetic oligonucleotide
cuccucccuauguaugaua

SEQ ID NO: 913901 - RNA, 19 nt, Artificial Sequence
  Description of Artificial Sequence: Synthetic oligonucleotide
gaggguggguaaagaccca

SEQ ID NO: 913902 - RNA, 19 nt, Artificial Sequence
  Description of Artificial Sequence: Synthetic oligonucleotide
ggcucacagguuguuccgc

SEQ ID NO: 913903 - RNA, 19 nt, Artificial Sequence
  Description of Artificial Sequence: Synthetic oligonucleotide
aggacucaaccaagcuggu

SEQ ID NO: 913904 - RNA, 19 nt, Artificial Sequence
  Description of Artificial Sequence: Synthetic oligonucleotide
ggacauccuggagacccug

SEQ ID NO: 913905 - RNA, 19 nt, Artificial Sequence
  Description of Artificial Sequence: Synthetic oligonucleotide
aucaccgccccgacauagu

SEQ ID NO: 913906 - RNA, 19 nt, Artificial Sequence
  Description of Artificial Sequence: Synthetic oligonucleotide
gggcaacaaggcgaccugc

SEQ ID NO: 913907 - RNA, 19 nt, Artificial Sequence
  Description of Artificial Sequence: Synthetic oligonucleotide
gcgggcaccggaauccagc

SEQ ID NO: 913908 - RNA, 19 nt, Artificial Sequence
  Description of Artificial Sequence: Synthetic oligonucleotide
cuaagacgccccaguccaa

SEQ ID NO: 913909 - RNA, 19 nt, Artificial Sequence
  Description of Artificial Sequence: Synthetic oligonucleotide
gaugcgcgggcaccggaau

SEQ ID NO: 913910 - RNA, 19 nt, Artificial Sequence
  Description of Artificial Sequence: Synthetic oligonucleotide
gggcaucgcagaucaucac

SEQ ID NO: 913911 - RNA, 19 nt, Artificial Sequence
  Description of Artificial Sequence: Synthetic oligonucleotide
ccgauaccgggaacacgcc

SEQ ID NO: 913912 - RNA, 19 nt, Artificial Sequence
  Description of Artificial Sequence: Synthetic oligonucleotide
cuagagccuucacggauau

SEQ ID NO: 913913 - RNA, 19 nt, Artificial Sequence
  Description of Artificial Sequence: Synthetic oligonucleotide
cgagaccauagaucuggac

SEQ ID NO: 913914 - RNA, 19 nt, Artificial Sequence
  Description of Artificial Sequence: Synthetic oligonucleotide
cuacaucuuggugcagcaa

SEQ ID NO: 913915 - RNA, 19 nt, Artificial Sequence
  Description of Artificial Sequence: Synthetic oligonucleotide
  modified_base (17)..(17): a, c, u, g, unknown or other
ggcacggcuucuugccnuc

SEQ ID NO: 913916 - RNA, 19 nt, Artificial Sequence
  Description of Artificial Sequence: Synthetic oligonucleotide
cacuaggacccgggcugag

SEQ ID NO: 913917 - RNA, 19 nt, Artificial Sequence
  Description of Artificial Sequence: Synthetic oligonucleotide
aggccgcccgaccgucuug

SEQ ID NO: 913918 - RNA, 19 nt, Artificial Sequence
  Description of Artificial Sequence: Synthetic oligonucleotide
ccuggcccaagcuaauuua

SEQ ID NO: 913919 - RNA, 19 nt, Artificial Sequence
  Description of Artificial Sequence: Synthetic oligonucleotide
caccacgcuuugcauauau

SEQ ID NO: 913920 - RNA, 19 nt, Artificial Sequence
  Description of Artificial Sequence: Synthetic oligonucleotide
ccgacauagugcucugcga

SEQ ID NO: 913921 - RNA, 19 nt, Artificial Sequence
  Description of Artificial Sequence: Synthetic oligonucleotide
uucgggcaucgcagaucau

SEQ ID NO: 913922 - RNA, 19 nt, Artificial Sequence
  Description of Artificial Sequence: Synthetic oligonucleotide
accauccggaaggcaucca

SEQ ID NO: 913923 - RNA, 19 nt, Artificial Sequence
  Description of Artificial Sequence: Synthetic oligonucleotide
ggcaagucuggaggaguca

SEQ ID NO: 913924 - RNA, 19 nt, Artificial Sequence
  Description of Artificial Sequence: Synthetic oligonucleotide
gcccguccagagccgcucg

SEQ ID NO: 913925 - RNA, 19 nt, Artificial Sequence
  Description of Artificial Sequence: Synthetic oligonucleotide
cgggcaucgcagaucauca

SEQ ID NO: 913926 - RNA, 19 nt, Artificial Sequence
  Description of Artificial Sequence: Synthetic oligonucleotide
ggauuggcgcaaggccugc

SEQ ID NO: 913927 - RNA, 19 nt, Artificial Sequence
  Description of Artificial Sequence: Synthetic oligonucleotide
accacgcuuugcauauaua

SEQ ID NO: 913928 - RNA, 19 nt, Artificial Sequence
  Description of Artificial Sequence: Synthetic oligonucleotide
gcaccgauaccgggaacac

SEQ ID NO: 913929 - RNA, 19 nt, Artificial Sequence
  Description of Artificial Sequence: Synthetic oligonucleotide
gccgcucgcgagaccauag

SEQ ID NO: 913930 - RNA, 19 nt, Artificial Sequence
  Description of Artificial Sequence: Synthetic oligonucleotide
ccgcccgaccgucuugagg

SEQ ID NO: 913931 - RNA, 19 nt, Artificial Sequence
  Description of Artificial Sequence: Synthetic oligonucleotide
gcuuccggccagucacgug

SEQ ID NO: 913932 - RNA, 19 nt, Artificial Sequence
  Description of Artificial Sequence: Synthetic oligonucleotide
ccagucacgugggucaaca

SEQ ID NO: 913933 - RNA, 19 nt, Artificial Sequence
  Description of Artificial Sequence: Synthetic oligonucleotide
cccgauuccuagagccuuc

SEQ ID NO: 913934 - RNA, 19 nt, Artificial Sequence
  Description of Artificial Sequence: Synthetic oligonucleotide
ccccucaggacucaaccaa

SEQ ID NO: 913935 - RNA, 19 nt, Artificial Sequence
  Description of Artificial Sequence: Synthetic oligonucleotide
ccaguccaagacgggcacg

SEQ ID NO: 913936 - RNA, 19 nt, Artificial Sequence
  Description of Artificial Sequence: Synthetic oligonucleotide
ccgggaacacgccguccgg

SEQ ID NO: 913937 - RNA, 19 nt, Artificial Sequence
  Description of Artificial Sequence: Synthetic oligonucleotide
ccaagacgggcacggcuuc

SEQ ID NO: 913938 - RNA, 19 nt, Artificial Sequence
  Description of Artificial Sequence: Synthetic oligonucleotide
cauccaccacgcuuugcau

SEQ ID NO: 913939 - RNA, 19 nt, Artificial Sequence
  Description of Artificial Sequence: Synthetic oligonucleotide
gggugcggucccagguacg

SEQ ID NO: 913940 - RNA, 19 nt, Artificial Sequence
  Description of Artificial Sequence: Synthetic oligonucleotide
gccacggaugguggcauuc

SEQ ID NO: 913941 - RNA, 19 nt, Artificial Sequence
  Description of Artificial Sequence: Synthetic oligonucleotide
cggauaucugccgggugag

SEQ ID NO: 913942 - RNA, 19 nt, Artificial Sequence
  Description of Artificial Sequence: Synthetic oligonucleotide
gggucaacagguccacaau

SEQ ID NO: 913943 - RNA, 19 nt, Artificial Sequence
  Description of Artificial Sequence: Synthetic oligonucleotide
gucaggggcccuccucccu

SEQ ID NO: 913944 - RNA, 19 nt, Artificial Sequence
  Description of Artificial Sequence: Synthetic oligonucleotide
ccagagccgcucgcgagac

SEQ ID NO: 913945 - RNA, 19 nt, Artificial Sequence
  Description of Artificial Sequence: Synthetic oligonucleotide
gcuuucggaggccgcccga

SEQ ID NO: 913946 - RNA, 19 nt, Artificial Sequence
  Description of Artificial Sequence: Synthetic oligonucleotide
cgcaccgauaccgggaaca

SEQ ID NO: 913947 - RNA, 19 nt, Artificial Sequence
  Description of Artificial Sequence: Synthetic oligonucleotide
cccgaccgucuugagggag

SEQ ID NO: 913948 - RNA, 19 nt, Artificial Sequence
  Description of Artificial Sequence: Synthetic oligonucleotide
  modified_base (2)..(2): a, c, u, g, unknown or other
cnucuccccucaggacuca

SEQ ID NO: 913949 - RNA, 19 nt, Artificial Sequence
  Description of Artificial Sequence: Synthetic oligonucleotide
ccaguccuaagacgcccca

SEQ ID NO: 913950 - RNA, 19 nt, Artificial Sequence
  Description of Artificial Sequence: Synthetic oligonucleotide
cgacauagugcucugcgau

SEQ ID NO: 913951 - RNA, 19 nt, Artificial Sequence
  Description of Artificial Sequence: Synthetic oligonucleotide
gugaaccccucugcccgaa

SEQ ID NO: 913952 - RNA, 19 nt, Artificial Sequence
  Description of Artificial Sequence: Synthetic oligonucleotide
ggaugcgcgggcaccggaa

SEQ ID NO: 913953 - RNA, 19 nt, Artificial Sequence
  Description of Artificial Sequence: Synthetic oligonucleotide
ggucccagguacggcgauc

SEQ ID NO: 913954 - RNA, 19 nt, Artificial Sequence
  Description of Artificial Sequence: Synthetic oligonucleotide
gcaccggaauccagcgcac

SEQ ID NO: 913955 - RNA, 19 nt, Artificial Sequence
  Description of Artificial Sequence: Synthetic oligonucleotide
ccuggcacgcuggcaucgc

SEQ ID NO: 913956 - RNA, 19 nt, Artificial Sequence
  Description of Artificial Sequence: Synthetic oligonucleotide
gaggccgcccgaccgucuu

SEQ ID NO: 913957 - RNA, 19 nt, Artificial Sequence
  Description of Artificial Sequence: Synthetic oligonucleotide
cggcuuccggccagucacg

SEQ ID NO: 913958 - RNA, 19 nt, Artificial Sequence
  Description of Artificial Sequence: Synthetic oligonucleotide
gcucaacaacucaucuccu

SEQ ID NO: 913959 - RNA, 19 nt, Artificial Sequence
  Description of Artificial Sequence: Synthetic oligonucleotide
gcgagaccauagaucugga

SEQ ID NO: 913960 - RNA, 19 nt, Artificial Sequence
  Description of Artificial Sequence: Synthetic oligonucleotide
gcacuaggacccgggcuga

SEQ ID NO: 913961 - RNA, 19 nt, Artificial Sequence
  Description of Artificial Sequence: Synthetic oligonucleotide
ccggaauccagcgcaccga

SEQ ID NO: 913962 - RNA, 19 nt, Artificial Sequence
  Description of Artificial Sequence: Synthetic oligonucleotide
caagacgggcacggcuucu

SEQ ID NO: 913963 - RNA, 19 nt, Artificial Sequence
  Description of Artificial Sequence: Synthetic oligonucleotide
ccaugcaccuucucggcuu

SEQ ID NO: 913964 - RNA, 19 nt, Artificial Sequence
  Description of Artificial Sequence: Synthetic oligonucleotide
cuaccaagucaggggcccu

SEQ ID NO: 913965 - RNA, 19 nt, Artificial Sequence
  Description of Artificial Sequence: Synthetic oligonucleotide
ggaauccagcgcaccgaua

SEQ ID NO: 913966 - RNA, 19 nt, Artificial Sequence
  Description of Artificial Sequence: Synthetic oligonucleotide
ggccgcccgaccgucuuga

SEQ ID NO: 913967 - RNA, 19 nt, Artificial Sequence
  Description of Artificial Sequence: Synthetic oligonucleotide
ccgauuccuagagccuuca

SEQ ID NO: 913968 - RNA, 19 nt, Artificial Sequence
  Description of Artificial Sequence: Synthetic oligonucleotide
ccccgacauagugcucugc

SEQ ID NO: 913969 - RNA, 19 nt, Artificial Sequence
  Description of Artificial Sequence: Synthetic oligonucleotide
cgccccaguccaagacggg

SEQ ID NO: 913970 - RNA, 19 nt, Artificial Sequence
  Description of Artificial Sequence: Synthetic oligonucleotide
ccgggcaacaaggcgaccu

SEQ ID NO: 913971 - RNA, 19 nt, Artificial Sequence
  Description of Artificial Sequence: Synthetic oligonucleotide
gccgcccgaccgucuugag

SEQ ID NO: 913972 - RNA, 19 nt, Artificial Sequence
  Description of Artificial Sequence: Synthetic oligonucleotide
ggauaucugccgggugagu

SEQ ID NO: 913973 - RNA, 19 nt, Artificial Sequence
  Description of Artificial Sequence: Synthetic oligonucleotide
ggcgaccugcugagccuac

SEQ ID NO: 913974 - RNA, 19 nt, Artificial Sequence
  Description of Artificial Sequence: Synthetic oligonucleotide
gcggucccagguacggcga

SEQ ID NO: 913975 - RNA, 19 nt, Artificial Sequence
  Description of Artificial Sequence: Synthetic oligonucleotide
gcgcaaggccugcaccaua

SEQ ID NO: 913976 - RNA, 19 nt, Artificial Sequence
  Description of Artificial Sequence: Synthetic oligonucleotide
gcccgaccgucuugaggga

SEQ ID NO: 913977 - RNA, 19 nt, Artificial Sequence
  Description of Artificial Sequence: Synthetic oligonucleotide
gcgaccugcugagccuaca

SEQ ID NO: 913978 - RNA, 19 nt, Artificial Sequence
  Description of Artificial Sequence: Synthetic oligonucleotide
ccgcucgcgagaccauaga

SEQ ID NO: 913979 - RNA, 19 nt, Artificial Sequence
  Description of Artificial Sequence: Synthetic oligonucleotide
ggacucaaccaagcugguu

SEQ ID NO: 913980 - RNA, 19 nt, Artificial Sequence
  Description of Artificial Sequence: Synthetic oligonucleotide
ggccagucacgugggucaa

SEQ ID NO: 913981 - RNA, 19 nt, Artificial Sequence
  Description of Artificial Sequence: Synthetic oligonucleotide
  modified_base (19)..(19): a, c, u, g, unknown or other
cgggcacggcuucuugccn

SEQ ID NO: 913982 - RNA, 19 nt, Artificial Sequence
  Description of Artificial Sequence: Synthetic oligonucleotide
gcgcgggcaccggaaucca

SEQ ID NO: 913983 - RNA, 19 nt, Artificial Sequence
  Description of Artificial Sequence: Synthetic oligonucleotide
cccgggcaacaaggcgacc

SEQ ID NO: 913984 - RNA, 19 nt, Artificial Sequence
  Description of Artificial Sequence: Synthetic oligonucleotide
ccacggaugguggcauucu

SEQ ID NO: 913985 - RNA, 19 nt, Artificial Sequence
  Description of Artificial Sequence: Synthetic oligonucleotide
cggaauccagcgcaccgau

SEQ ID NO: 913986 - RNA, 19 nt, Artificial Sequence
  Description of Artificial Sequence: Synthetic oligonucleotide
cgcucgcgagaccauagau

SEQ ID NO: 913987 - RNA, 19 nt, Artificial Sequence
  Description of Artificial Sequence: Synthetic oligonucleotide
cgcccguccagagccgcuc

SEQ ID NO: 913988 - RNA, 19 nt, Artificial Sequence
  Description of Artificial Sequence: Synthetic oligonucleotide
gcacgcuggcaucgcccgu

SEQ ID NO: 913989 - RNA, 19 nt, Artificial Sequence
  Description of Artificial Sequence: Synthetic oligonucleotide
ccagaucggcuugaccuuu

SEQ ID NO: 913990 - RNA, 19 nt, Artificial Sequence
  Description of Artificial Sequence: Synthetic oligonucleotide
ccgccccgacauagugcuc

SEQ ID NO: 913991 - RNA, 19 nt, Artificial Sequence
  Description of Artificial Sequence: Synthetic oligonucleotide
cgggaacacgccguccggu

SEQ ID NO: 913992 - RNA, 19 nt, Artificial Sequence
  Description of Artificial Sequence: Synthetic oligonucleotide
ccaccacgcuuugcauaua

SEQ ID NO: 913993 - RNA, 19 nt, Artificial Sequence
  Description of Artificial Sequence: Synthetic oligonucleotide
cggucccagguacggcgau

SEQ ID NO: 913994 - RNA, 19 nt, Artificial Sequence
  Description of Artificial Sequence: Synthetic oligonucleotide
aauaguacaaucaaagucc

SEQ ID NO: 913995 - RNA, 19 nt, Artificial Sequence
  Description of Artificial Sequence: Synthetic oligonucleotide
aaauaguacaaucaaaguc

SEQ ID NO: 913996 - RNA, 19 nt, Artificial Sequence
  Description of Artificial Sequence: Synthetic oligonucleotide
aauguaguuucguggaugc

SEQ ID NO: 913997 - RNA, 19 nt, Artificial Sequence
  Description of Artificial Sequence: Synthetic oligonucleotide
gauaucgucauccauggcg

SEQ ID NO: 913998 - RNA, 19 nt, Artificial Sequence
  Description of Artificial Sequence: Synthetic oligonucleotide
uagguuuugucaaagaaag

SEQ ID NO: 913999 - RNA, 19 nt, Artificial Sequence
  Description of Artificial Sequence: Synthetic oligonucleotide
gauggcaugagggagagcg

SEQ ID NO: 914000 - RNA, 19 nt, Artificial Sequence
  Description of Artificial Sequence: Synthetic oligonucleotide
uccauaucgucccaguugg

SEQ ID NO: 914001 - RNA, 19 nt, Artificial Sequence
  Description of Artificial Sequence: Synthetic oligonucleotide
uguggagcggcgaagaaag

SEQ ID NO: 914002 - RNA, 19 nt, Artificial Sequence
  Description of Artificial Sequence: Synthetic oligonucleotide
agaaagagcugcgaaaggc

SEQ ID NO: 914003 - RNA, 19 nt, Artificial Sequence
  Description of Artificial Sequence: Synthetic oligonucleotide
uguucaaugggguacuuca

SEQ ID NO: 914004 - RNA, 19 nt, Artificial Sequence
  Description of Artificial Sequence: Synthetic oligonucleotide
aacaaagccaugccaaugu

SEQ ID NO: 914005 - RNA, 19 nt, Artificial Sequence
  Description of Artificial Sequence: Synthetic oligonucleotide
gguuuugucaaagaaaggg

SEQ ID NO: 914006 - RNA, 19 nt, Artificial Sequence
  Description of Artificial Sequence: Synthetic oligonucleotide
gauuccauacccaggaagg

SEQ ID NO: 914007 - RNA, 19 nt, Artificial Sequence
  Description of Artificial Sequence: Synthetic oligonucleotide
uuagguuuugucaaagaaa

SEQ ID NO: 914008 - RNA, 19 nt, Artificial Sequence
  Description of Artificial Sequence: Synthetic oligonucleotide
aucacaaugccagugguac

SEQ ID NO: 914009 - RNA, 19 nt, Artificial Sequence
  Description of Artificial Sequence: Synthetic oligonucleotide
gagagcguagcccucauag

SEQ ID NO: 914010 - RNA, 19 nt, Artificial Sequence
  Description of Artificial Sequence: Synthetic oligonucleotide
auccacacagaguacuugc

SEQ ID NO: 914011 - RNA, 19 nt, Artificial Sequence
  Description of Artificial Sequence: Synthetic oligonucleotide
gaaaggguguaaaacacag

SEQ ID NO: 914012 - RNA, 19 nt, Artificial Sequence
  Description of Artificial Sequence: Synthetic oligonucleotide
uggugguaccaccagacag

SEQ ID NO: 914013 - RNA, 19 nt, Artificial Sequence
  Description of Artificial Sequence: Synthetic oligonucleotide
gacagugaggccaggaugg

SEQ ID NO: 914014 - RNA, 19 nt, Artificial Sequence
  Description of Artificial Sequence: Synthetic oligonucleotide
aacgagcgcagcgauaucg

SEQ ID NO: 914015 - RNA, 19 nt, Artificial Sequence
  Description of Artificial Sequence: Synthetic oligonucleotide
aaagccaugccaauguugu

SEQ ID NO: 914016 - RNA, 19 nt, Artificial Sequence
  Description of Artificial Sequence: Synthetic oligonucleotide
ucaguaacaguccgccuag

SEQ ID NO: 914017 - RNA, 19 nt, Artificial Sequence
  Description of Artificial Sequence: Synthetic oligonucleotide
gucagaauaccucucuugc

SEQ ID NO: 914018 - RNA, 19 nt, Artificial Sequence
  Description of Artificial Sequence: Synthetic oligonucleotide
aacaugaucugggucaucu

SEQ ID NO: 914019 - RNA, 19 nt, Artificial Sequence
  Description of Artificial Sequence: Synthetic oligonucleotide
ucauccauggcgaacuggu

SEQ ID NO: 914020 - RNA, 19 nt, Artificial Sequence
  Description of Artificial Sequence: Synthetic oligonucleotide
uguaguuucguggaugcca

SEQ ID NO: 914021 - RNA, 19 nt, Artificial Sequence
  Description of Artificial Sequence: Synthetic oligonucleotide
agcucaguaacaguccgcc

SEQ ID NO: 914022 - RNA, 19 nt, Artificial Sequence
  Description of Artificial Sequence: Synthetic oligonucleotide
uuucguggaugccacagga

SEQ ID NO: 914023 - RNA, 19 nt, Artificial Sequence
  Description of Artificial Sequence: Synthetic oligonucleotide
uacgaccagaggcauacag

SEQ ID NO: 914024 - RNA, 19 nt, Artificial Sequence
  Description of Artificial Sequence: Synthetic oligonucleotide
uaaagcuguagccacgcuc

SEQ ID NO: 914025 - RNA, 19 nt, Artificial Sequence
  Description of Artificial Sequence: Synthetic oligonucleotide
acagcucaguaacaguccg

SEQ ID NO: 914026 - RNA, 19 nt, Artificial Sequence
  Description of Artificial Sequence: Synthetic oligonucleotide
agagcagugaucuccuucu

SEQ ID NO: 914027 - RNA, 19 nt, Artificial Sequence
  Description of Artificial Sequence: Synthetic oligonucleotide
ugcgaaaggccugugcucg

SEQ ID NO: 914028 - RNA, 19 nt, Artificial Sequence
  Description of Artificial Sequence: Synthetic oligonucleotide
ugauggaauugaauguagu

SEQ ID NO: 914029 - RNA, 19 nt, Artificial Sequence
  Description of Artificial Sequence: Synthetic oligonucleotide
gaaagagcugcgaaaggcc

SEQ ID NO: 914030 - RNA, 19 nt, Artificial Sequence
  Description of Artificial Sequence: Synthetic oligonucleotide
uucugcgcaaguuagguuu

SEQ ID NO: 914031 - RNA, 19 nt, Artificial Sequence
  Description of Artificial Sequence: Synthetic oligonucleotide
ucucuuugaugucacgcac

SEQ ID NO: 914032 - RNA, 19 nt, Artificial Sequence
  Description of Artificial Sequence: Synthetic oligonucleotide
acacagcucaguaacaguc

SEQ ID NO: 914033 - RNA, 19 nt, Artificial Sequence
  Description of Artificial Sequence: Synthetic oligonucleotide
guuagguuuugucaaagaa

SEQ ID NO: 914034 - RNA, 19 nt, Artificial Sequence
  Description of Artificial Sequence: Synthetic oligonucleotide
uuuucugcgcaaguuaggu

SEQ ID NO: 914035 - RNA, 19 nt, Artificial Sequence
  Description of Artificial Sequence: Synthetic oligonucleotide
aaaggccugugcucgcggg

SEQ ID NO: 914036 - RNA, 19 nt, Artificial Sequence
  Description of Artificial Sequence: Synthetic oligonucleotide
gaauguaguuucguggaug

SEQ ID NO: 914037 - RNA, 19 nt, Artificial Sequence
  Description of Artificial Sequence: Synthetic oligonucleotide
cagaauaccucucuugcuc

SEQ ID NO: 914038 - RNA, 19 nt, Artificial Sequence
  Description of Artificial Sequence: Synthetic oligonucleotide
gagccaccgauccacacag

SEQ ID NO: 914039 - RNA, 19 nt, Artificial Sequence
  Description of Artificial Sequence: Synthetic oligonucleotide
ugagggagagcguagcccu

SEQ ID NO: 914040 - RNA, 19 nt, Artificial Sequence
  Description of Artificial Sequence: Synthetic oligonucleotide
uugucgacaacgagcgcag

SEQ ID NO: 914041 - RNA, 19 nt, Artificial Sequence
  Description of Artificial Sequence: Synthetic oligonucleotide
acacagaguacuugcgcuc

SEQ ID NO: 914042 - RNA, 19 nt, Artificial Sequence
  Description of Artificial Sequence: Synthetic oligonucleotide
ggguguaaaacacagcuca

SEQ ID NO: 914043 - RNA, 19 nt, Artificial Sequence
  Description of Artificial Sequence: Synthetic oligonucleotide
gucaucuuuucacgguugg

SEQ ID NO: 914044 - RNA, 19 nt, Artificial Sequence
  Description of Artificial Sequence: Synthetic oligonucleotide
uggaugggaagacggcccg

SEQ ID NO: 914045 - RNA, 19 nt, Artificial Sequence
  Description of Artificial Sequence: Synthetic oligonucleotide
agaauaccucucuugcucu

SEQ ID NO: 914046 - RNA, 19 nt, Artificial Sequence
  Description of Artificial Sequence: Synthetic oligonucleotide
augccacaggauuccauac

SEQ ID NO: 914047 - RNA, 19 nt, Artificial Sequence
  Description of Artificial Sequence: Synthetic oligonucleotide
uccauggcgaacugguggc

SEQ ID NO: 914048 - RNA, 19 nt, Artificial Sequence
  Description of Artificial Sequence: Synthetic oligonucleotide
aucuuuucacgguuggccu

SEQ ID NO: 914049 - RNA, 19 nt, Artificial Sequence
  Description of Artificial Sequence: Synthetic oligonucleotide
ucagaauaccucucuugcu

SEQ ID NO: 914050 - RNA, 19 nt, Artificial Sequence
  Description of Artificial Sequence: Synthetic oligonucleotide
agcgauaucgucauccaug

SEQ ID NO: 914051 - RNA, 19 nt, Artificial Sequence
  Description of Artificial Sequence: Synthetic oligonucleotide
caaagccaugccaauguug

SEQ ID NO: 914052 - RNA, 19 nt, Artificial Sequence
  Description of Artificial Sequence: Synthetic oligonucleotide
gucgacaacgagcgcagcg

SEQ ID NO: 914053 - RNA, 19 nt, Artificial Sequence
  Description of Artificial Sequence: Synthetic oligonucleotide
aaagagcugcgaaaggccu

SEQ ID NO: 914054 - RNA, 19 nt, Artificial Sequence
  Description of Artificial Sequence: Synthetic oligonucleotide
ucacaaugccagugguacg

SEQ ID NO: 914055 - RNA, 19 nt, Artificial Sequence
  Description of Artificial Sequence: Synthetic oligonucleotide
cuccauaucgucccaguug

SEQ ID NO: 914056 - RNA, 19 nt, Artificial Sequence
  Description of Artificial Sequence: Synthetic oligonucleotide
aggaggagcaaugaucuug

SEQ ID NO: 914057 - RNA, 19 nt, Artificial Sequence
  Description of Artificial Sequence: Synthetic oligonucleotide
auggaauugaauguaguuu

SEQ ID NO: 914058 - RNA, 19 nt, Artificial Sequence
  Description of Artificial Sequence: Synthetic oligonucleotide
agcugcgaaaggccugugc

SEQ ID NO: 914059 - RNA, 19 nt, Artificial Sequence
  Description of Artificial Sequence: Synthetic oligonucleotide
cugggucaucuuuucacgg

SEQ ID NO: 914060 - RNA, 19 nt, Artificial Sequence
  Description of Artificial Sequence: Synthetic oligonucleotide
uggagcggcgaagaaagag

SEQ ID NO: 914061 - RNA, 19 nt, Artificial Sequence
  Description of Artificial Sequence: Synthetic oligonucleotide
ugccacaggauuccauacc

SEQ ID NO: 914062 - RNA, 19 nt, Artificial Sequence
  Description of Artificial Sequence: Synthetic oligonucleotide
aguuucguggaugccacag

SEQ ID NO: 914063 - RNA, 19 nt, Artificial Sequence
  Description of Artificial Sequence: Synthetic oligonucleotide
gugguaaagcuguagccac

SEQ ID NO: 914064 - RNA, 19 nt, Artificial Sequence
  Description of Artificial Sequence: Synthetic oligonucleotide
ggauuccauacccaggaag

SEQ ID NO: 914065 - RNA, 19 nt, Artificial Sequence
  Description of Artificial Sequence: Synthetic oligonucleotide
cacagugugggugaccccg

SEQ ID NO: 914066 - RNA, 19 nt, Artificial Sequence
  Description of Artificial Sequence: Synthetic oligonucleotide
gacgcaggauggcaugagg

SEQ ID NO: 914067 - RNA, 19 nt, Artificial Sequence
  Description of Artificial Sequence: Synthetic oligonucleotide
uguagccacgcucggucag

SEQ ID NO: 914068 - RNA, 19 nt, Artificial Sequence
  Description of Artificial Sequence: Synthetic oligonucleotide
aagagccucagggcaacgg

SEQ ID NO: 914069 - RNA, 19 nt, Artificial Sequence
  Description of Artificial Sequence: Synthetic oligonucleotide
ucuccggaguccaucacaa

SEQ ID NO: 914070 - RNA, 19 nt, Artificial Sequence
  Description of Artificial Sequence: Synthetic oligonucleotide
gcgauaucgucauccaugg

SEQ ID NO: 914071 - RNA, 19 nt, Artificial Sequence
  Description of Artificial Sequence: Synthetic oligonucleotide
aaaacacagcucaguaaca

SEQ ID NO: 914072 - RNA, 19 nt, Artificial Sequence
  Description of Artificial Sequence: Synthetic oligonucleotide
guaaaacacagcucaguaa

SEQ ID NO: 914073 - RNA, 19 nt, Artificial Sequence
  Description of Artificial Sequence: Synthetic oligonucleotide
guuucguggaugccacagg

SEQ ID NO: 914074 - RNA, 19 nt, Artificial Sequence
  Description of Artificial Sequence: Synthetic oligonucleotide
aagccaugccaauguuguc

SEQ ID NO: 914075 - RNA, 19 nt, Artificial Sequence
  Description of Artificial Sequence: Synthetic oligonucleotide
ggagccguugucgacaacg

SEQ ID NO: 914076 - RNA, 19 nt, Artificial Sequence
  Description of Artificial Sequence: Synthetic oligonucleotide
augauggaauugaauguag

SEQ ID NO: 914077 - RNA, 19 nt, Artificial Sequence
  Description of Artificial Sequence: Synthetic oligonucleotide
gaaaggccugugcucgcgg

SEQ ID NO: 914078 - RNA, 19 nt, Artificial Sequence
  Description of Artificial Sequence: Synthetic oligonucleotide
ucgucauccauggcgaacu

SEQ ID NO: 914079 - RNA, 19 nt, Artificial Sequence
  Description of Artificial Sequence: Synthetic oligonucleotide
auaucgucauccauggcga

SEQ ID NO: 914080 - RNA, 19 nt, Artificial Sequence
  Description of Artificial Sequence: Synthetic oligonucleotide
uaucgucccaguuggugac

SEQ ID NO: 914081 - RNA, 19 nt, Artificial Sequence
  Description of Artificial Sequence: Synthetic oligonucleotide
gauggaauugaauguaguu

SEQ ID NO: 914082 - RNA, 19 nt, Artificial Sequence
  Description of Artificial Sequence: Synthetic oligonucleotide
ugggaagacggcccgggga

SEQ ID NO: 914083 - RNA, 19 nt, Artificial Sequence
  Description of Artificial Sequence: Synthetic oligonucleotide
caggauuccauacccagga

SEQ ID NO: 914084 - RNA, 19 nt, Artificial Sequence
  Description of Artificial Sequence: Synthetic oligonucleotide
auaguacaaucaaaguccu

SEQ ID NO: 914085 - RNA, 19 nt, Artificial Sequence
  Description of Artificial Sequence: Synthetic oligonucleotide
ccguugucgacaacgagcg

SEQ ID NO: 914086 - RNA, 19 nt, Artificial Sequence
  Description of Artificial Sequence: Synthetic oligonucleotide
ggucagaauaccucucuug

SEQ ID NO: 914087 - RNA, 19 nt, Artificial Sequence
  Description of Artificial Sequence: Synthetic oligonucleotide
acaacgagcgcagcgauau

SEQ ID NO: 914088 - RNA, 19 nt, Artificial Sequence
  Description of Artificial Sequence: Synthetic oligonucleotide
agcaucgucgcccgcgaag

SEQ ID NO: 914089 - RNA, 19 nt, Artificial Sequence
  Description of Artificial Sequence: Synthetic oligonucleotide
ugggucaucuuuucacggu

SEQ ID NO: 914090 - RNA, 19 nt, Artificial Sequence
  Description of Artificial Sequence: Synthetic oligonucleotide
gaauaccucucuugcucug

SEQ ID NO: 914091 - RNA, 19 nt, Artificial Sequence
  Description of Artificial Sequence: Synthetic oligonucleotide
ggaauugaauguaguuucg

SEQ ID NO: 914092 - RNA, 19 nt, Artificial Sequence
  Description of Artificial Sequence: Synthetic oligonucleotide
aguaacaguccgccuagaa

SEQ ID NO: 914093 - RNA, 19 nt, Artificial Sequence
  Description of Artificial Sequence: Synthetic oligonucleotide
agccaugccaauguugucu

SEQ ID NO: 914094 - RNA, 19 nt, Artificial Sequence
  Description of Artificial Sequence: Synthetic oligonucleotide
agggucagaauaccucucu

SEQ ID NO: 914095 - RNA, 19 nt, Artificial Sequence
  Description of Artificial Sequence: Synthetic oligonucleotide
ugugcucgcggguggacgc

SEQ ID NO: 914096 - RNA, 19 nt, Artificial Sequence
  Description of Artificial Sequence: Synthetic oligonucleotide
cuagggcggcccacgaugg

SEQ ID NO: 914097 - RNA, 19 nt, Artificial Sequence
  Description of Artificial Sequence: Synthetic oligonucleotide
ucgacaacgagcgcagcga

SEQ ID NO: 914098 - RNA, 19 nt, Artificial Sequence
  Description of Artificial Sequence: Synthetic oligonucleotide
caugagggagagcguagcc

SEQ ID NO: 914099 - RNA, 19 nt, Artificial Sequence
  Description of Artificial Sequence: Synthetic oligonucleotide
acgaccagaggcauacagg

SEQ ID NO: 914100 - RNA, 19 nt, Artificial Sequence
  Description of Artificial Sequence: Synthetic oligonucleotide
gguaccaccagacagcacu

SEQ ID NO: 914101 - RNA, 19 nt, Artificial Sequence
  Description of Artificial Sequence: Synthetic oligonucleotide
ugaucugggucaucuuuuc

SEQ ID NO: 914102 - RNA, 19 nt, Artificial Sequence
  Description of Artificial Sequence: Synthetic oligonucleotide
acgcaggauggcaugaggg

SEQ ID NO: 914103 - RNA, 19 nt, Artificial Sequence
  Description of Artificial Sequence: Synthetic oligonucleotide
aucgucauccauggcgaac

SEQ ID NO: 914104 - RNA, 19 nt, Artificial Sequence
  Description of Artificial Sequence: Synthetic oligonucleotide
aggguguaaaacacagcuc

SEQ ID NO: 914105 - RNA, 19 nt, Artificial Sequence
  Description of Artificial Sequence: Synthetic oligonucleotide
agaaaggguguaaaacaca

SEQ ID NO: 914106 - RNA, 19 nt, Artificial Sequence
  Description of Artificial Sequence: Synthetic oligonucleotide
uggacgauggaggggccgg

SEQ ID NO: 914107 - RNA, 19 nt, Artificial Sequence
  Description of Artificial Sequence: Synthetic oligonucleotide
accaccagacagcacugug

SEQ ID NO: 914108 - RNA, 19 nt, Artificial Sequence
  Description of Artificial Sequence: Synthetic oligonucleotide
gccacaggauuccauaccc

SEQ ID NO: 914109 - RNA, 19 nt, Artificial Sequence
  Description of Artificial Sequence: Synthetic oligonucleotide
cgaccagaggcauacaggg

SEQ ID NO: 914110 - RNA, 19 nt, Artificial Sequence
  Description of Artificial Sequence: Synthetic oligonucleotide
auguaguuucguggaugcc

SEQ ID NO: 914111 - RNA, 19 nt, Artificial Sequence
  Description of Artificial Sequence: Synthetic oligonucleotide
agguuuugucaaagaaagg

SEQ ID NO: 914112 - RNA, 19 nt, Artificial Sequence
  Description of Artificial Sequence: Synthetic oligonucleotide
ugugggugaccccgucucc

SEQ ID NO: 914113 - RNA, 19 nt, Artificial Sequence
  Description of Artificial Sequence: Synthetic oligonucleotide
guaguuucguggaugccac

SEQ ID NO: 914114 - RNA, 19 nt, Artificial Sequence
  Description of Artificial Sequence: Synthetic oligonucleotide
augggcacaguguggguga

SEQ ID NO: 914115 - RNA, 19 nt, Artificial Sequence
  Description of Artificial Sequence: Synthetic oligonucleotide
gguacgaccagaggcauac

SEQ ID NO: 914116 - RNA, 19 nt, Artificial Sequence
  Description of Artificial Sequence: Synthetic oligonucleotide
agcgcagcgauaucgucau

SEQ ID NO: 914117 - RNA, 19 nt, Artificial Sequence
  Description of Artificial Sequence: Synthetic oligonucleotide
ccggaguccaucacaaugc

SEQ ID NO: 914118 - RNA, 19 nt, Artificial Sequence
  Description of Artificial Sequence: Synthetic oligonucleotide
aaagagccucagggcaacg

SEQ ID NO: 914119 - RNA, 19 nt, Artificial Sequence
  Description of Artificial Sequence: Synthetic oligonucleotide
cucaguaacaguccgccua

SEQ ID NO: 914120 - RNA, 19 nt, Artificial Sequence
  Description of Artificial Sequence: Synthetic oligonucleotide
ugggugaccccgucuccgg

SEQ ID NO: 914121 - RNA, 19 nt, Artificial Sequence
  Description of Artificial Sequence: Synthetic oligonucleotide
cagagcagugaucuccuuc

SEQ ID NO: 914122 - RNA, 19 nt, Artificial Sequence
  Description of Artificial Sequence: Synthetic oligonucleotide
aagagcugcgaaaggccug

SEQ ID NO: 914123 - RNA, 19 nt, Artificial Sequence
  Description of Artificial Sequence: Synthetic oligonucleotide
uuucacgguuggccuuggg

SEQ ID NO: 914124 - RNA, 19 nt, Artificial Sequence
  Description of Artificial Sequence: Synthetic oligonucleotide
aaacaugaucugggucauc

SEQ ID NO: 914125 - RNA, 19 nt, Artificial Sequence
  Description of Artificial Sequence: Synthetic oligonucleotide
guucaaugggguacuucag

SEQ ID NO: 914126 - RNA, 19 nt, Artificial Sequence
  Description of Artificial Sequence: Synthetic oligonucleotide
agagcguagcccucauaga

SEQ ID NO: 914127 - RNA, 19 nt, Artificial Sequence
  Description of Artificial Sequence: Synthetic oligonucleotide
ggugguaaagcuguagcca

SEQ ID NO: 914128 - RNA, 19 nt, Artificial Sequence
  Description of Artificial Sequence: Synthetic oligonucleotide
gaacugguggcgggugugg

SEQ ID NO: 914129 - RNA, 19 nt, Artificial Sequence
  Description of Artificial Sequence: Synthetic oligonucleotide
gguaaagcuguagccacgc

SEQ ID NO: 914130 - RNA, 19 nt, Artificial Sequence
  Description of Artificial Sequence: Synthetic oligonucleotide
aaggccugugcucgcgggu

SEQ ID NO: 914131 - RNA, 19 nt, Artificial Sequence
  Description of Artificial Sequence: Synthetic oligonucleotide
ucuuuucacgguuggccuu

SEQ ID NO: 914132 - RNA, 19 nt, Artificial Sequence
  Description of Artificial Sequence: Synthetic oligonucleotide
cucuuugaugucacgcaca

SEQ ID NO: 914133 - RNA, 19 nt, Artificial Sequence
  Description of Artificial Sequence: Synthetic oligonucleotide
cauggcgaacugguggcgg

SEQ ID NO: 914134 - RNA, 19 nt, Artificial Sequence
  Description of Artificial Sequence: Synthetic oligonucleotide
auuccauacccaggaagga

SEQ ID NO: 914135 - RNA, 19 nt, Artificial Sequence
  Description of Artificial Sequence: Synthetic oligonucleotide
aucgucgcccgcgaagccg

SEQ ID NO: 914136 - RNA, 19 nt, Artificial Sequence
  Description of Artificial Sequence: Synthetic oligonucleotide
gcggcgaagaaagagcugc

SEQ ID NO: 914137 - RNA, 19 nt, Artificial Sequence
  Description of Artificial Sequence: Synthetic oligonucleotide
agccguugucgacaacgag

SEQ ID NO: 914138 - RNA, 19 nt, Artificial Sequence
  Description of Artificial Sequence: Synthetic oligonucleotide
gccaccgauccacacagag

SEQ ID NO: 914139 - RNA, 19 nt, Artificial Sequence
  Description of Artificial Sequence: Synthetic oligonucleotide
gagcguagcccucauagau

SEQ ID NO: 914140 - RNA, 19 nt, Artificial Sequence
  Description of Artificial Sequence: Synthetic oligonucleotide
augccagugguacgaccag

SEQ ID NO: 914141 - RNA, 19 nt, Artificial Sequence
  Description of Artificial Sequence: Synthetic oligonucleotide
uuucugcgcaaguuagguu

SEQ ID NO: 914142 - RNA, 19 nt, Artificial Sequence
  Description of Artificial Sequence: Synthetic oligonucleotide
auggugguaccaccagaca

SEQ ID NO: 914143 - RNA, 19 nt, Artificial Sequence
  Description of Artificial Sequence: Synthetic oligonucleotide
aggauggcaugagggagag

SEQ ID NO: 914144 - RNA, 19 nt, Artificial Sequence
  Description of Artificial Sequence: Synthetic oligonucleotide
cagcucaguaacaguccgc

SEQ ID NO: 914145 - RNA, 19 nt, Artificial Sequence
  Description of Artificial Sequence: Synthetic oligonucleotide
gccguugucgacaacgagc

SEQ ID NO: 914146 - RNA, 19 nt, Artificial Sequence
  Description of Artificial Sequence: Synthetic oligonucleotide
ucugcgcaaguuagguuuu

SEQ ID NO: 914147 - RNA, 19 nt, Artificial Sequence
  Description of Artificial Sequence: Synthetic oligonucleotide
gaauugaauguaguuucgu

SEQ ID NO: 914148 - RNA, 19 nt, Artificial Sequence
  Description of Artificial Sequence: Synthetic oligonucleotide
ggagcggcgaagaaagagc

SEQ ID NO: 914149 - RNA, 19 nt, Artificial Sequence
  Description of Artificial Sequence: Synthetic oligonucleotide
acaaagccaugccaauguu

SEQ ID NO: 914150 - RNA, 19 nt, Artificial Sequence
  Description of Artificial Sequence: Synthetic oligonucleotide
gagcgcagcgauaucguca

SEQ ID NO: 914151 - RNA, 19 nt, Artificial Sequence
  Description of Artificial Sequence: Synthetic oligonucleotide
gguguaaaacacagcucag

SEQ ID NO: 914152 - RNA, 19 nt, Artificial Sequence
  Description of Artificial Sequence: Synthetic oligonucleotide
agagcugcgaaaggccugu

SEQ ID NO: 914153 - RNA, 19 nt, Artificial Sequence
  Description of Artificial Sequence: Synthetic oligonucleotide
uuuucacgguuggccuugg

SEQ ID NO: 914154 - RNA, 19 nt, Artificial Sequence
  Description of Artificial Sequence: Synthetic oligonucleotide
cugcgaaaggccugugcuc

SEQ ID NO: 914155 - RNA, 19 nt, Artificial Sequence
  Description of Artificial Sequence: Synthetic oligonucleotide
gugggugaccccgucuccg

SEQ ID NO: 914156 - RNA, 19 nt, Artificial Sequence
  Description of Artificial Sequence: Synthetic oligonucleotide
cacacagaguacuugcgcu

SEQ ID NO: 914157 - RNA, 19 nt, Artificial Sequence
  Description of Artificial Sequence: Synthetic oligonucleotide
caggauggcaugagggaga

SEQ ID NO: 914158 - RNA, 19 nt, Artificial Sequence
  Description of Artificial Sequence: Synthetic oligonucleotide
gcaggauggcaugagggag

SEQ ID NO: 914159 - RNA, 19 nt, Artificial Sequence
  Description of Artificial Sequence: Synthetic oligonucleotide
uggcaugagggagagcgua

SEQ ID NO: 914160 - RNA, 19 nt, Artificial Sequence
  Description of Artificial Sequence: Synthetic oligonucleotide
gcuguagccacgcucgguc

SEQ ID NO: 914161 - RNA, 19 nt, Artificial Sequence
  Description of Artificial Sequence: Synthetic oligonucleotide
ugcgcaaguuagguuuugu

SEQ ID NO: 914162 - RNA, 19 nt, Artificial Sequence
  Description of Artificial Sequence: Synthetic oligonucleotide
ccacacagaguacuugcgc

SEQ ID NO: 914163 - RNA, 19 nt, Artificial Sequence
  Description of Artificial Sequence: Synthetic oligonucleotide
augaucugggucaucuuuu

SEQ ID NO: 914164 - RNA, 19 nt, Artificial Sequence
  Description of Artificial Sequence: Synthetic oligonucleotide
ggagccagagcagugaucu

SEQ ID NO: 914165 - RNA, 19 nt, Artificial Sequence
  Description of Artificial Sequence: Synthetic oligonucleotide
uaguuucguggaugccaca

SEQ ID NO: 914166 - RNA, 19 nt, Artificial Sequence
  Description of Artificial Sequence: Synthetic oligonucleotide
aggauuccauacccaggaa

SEQ ID NO: 914167 - RNA, 19 nt, Artificial Sequence
  Description of Artificial Sequence: Synthetic oligonucleotide
aacugguggcgggugugga

SEQ ID NO: 914168 - RNA, 19 nt, Artificial Sequence
  Description of Artificial Sequence: Synthetic oligonucleotide
cgcaaguuagguuuuguca

SEQ ID NO: 914169 - RNA, 19 nt, Artificial Sequence
  Description of Artificial Sequence: Synthetic oligonucleotide
agacgcaggauggcaugag

SEQ ID NO: 914170 - RNA, 19 nt, Artificial Sequence
  Description of Artificial Sequence: Synthetic oligonucleotide
augccaauguugucucauu

SEQ ID NO: 914171 - RNA, 19 nt, Artificial Sequence
  Description of Artificial Sequence: Synthetic oligonucleotide
ccuagggcggcccacgaug

SEQ ID NO: 914172 - RNA, 19 nt, Artificial Sequence
  Description of Artificial Sequence: Synthetic oligonucleotide
guggacgauggaggggccg

SEQ ID NO: 914173 - RNA, 19 nt, Artificial Sequence
  Description of Artificial Sequence: Synthetic oligonucleotide
ugccguguucaauggggua

SEQ ID NO: 914174 - RNA, 19 nt, Artificial Sequence
  Description of Artificial Sequence: Synthetic oligonucleotide
guguaaaacacagcucagu

SEQ ID NO: 914175 - RNA, 19 nt, Artificial Sequence
  Description of Artificial Sequence: Synthetic oligonucleotide
uggcggguguggagcggcg

SEQ ID NO: 914176 - RNA, 19 nt, Artificial Sequence
  Description of Artificial Sequence: Synthetic oligonucleotide
gggagcaucgucgcccgcg

SEQ ID NO: 914177 - RNA, 19 nt, Artificial Sequence
  Description of Artificial Sequence: Synthetic oligonucleotide
ugccagugguacgaccaga

SEQ ID NO: 914178 - RNA, 19 nt, Artificial Sequence
  Description of Artificial Sequence: Synthetic oligonucleotide
gcgaagaaagagcugcgaa

SEQ ID NO: 914179 - RNA, 19 nt, Artificial Sequence
  Description of Artificial Sequence: Synthetic oligonucleotide
ggagccaccgauccacaca

SEQ ID NO: 914180 - RNA, 19 nt, Artificial Sequence
  Description of Artificial Sequence: Synthetic oligonucleotide
gccguguucaaugggguac

SEQ ID NO: 914181 - RNA, 19 nt, Artificial Sequence
  Description of Artificial Sequence: Synthetic oligonucleotide
gagcggcgaagaaagagcu

SEQ ID NO: 914182 - RNA, 19 nt, Artificial Sequence
  Description of Artificial Sequence: Synthetic oligonucleotide
aucacgcccuggugccuag

SEQ ID NO: 914183 - RNA, 19 nt, Artificial Sequence
  Description of Artificial Sequence: Synthetic oligonucleotide
gcugcgaaaggccugugcu

SEQ ID NO: 914184 - RNA, 19 nt, Artificial Sequence
  Description of Artificial Sequence: Synthetic oligonucleotide
ugguacgaccagaggcaua

SEQ ID NO: 914185 - RNA, 19 nt, Artificial Sequence
  Description of Artificial Sequence: Synthetic oligonucleotide
gccacgcucggucaggauc

SEQ ID NO: 914186 - RNA, 19 nt, Artificial Sequence
  Description of Artificial Sequence: Synthetic oligonucleotide
ugccuagggcggcccacga

SEQ ID NO: 914187 - RNA, 19 nt, Artificial Sequence
  Description of Artificial Sequence: Synthetic oligonucleotide
ucucagcuguggugguaaa

SEQ ID NO: 914188 - RNA, 19 nt, Artificial Sequence
  Description of Artificial Sequence: Synthetic oligonucleotide
caucgucgcccgcgaagcc

SEQ ID NO: 914189 - RNA, 19 nt, Artificial Sequence
  Description of Artificial Sequence: Synthetic oligonucleotide
ggcggcccacgauggaugg

SEQ ID NO: 914190 - RNA, 19 nt, Artificial Sequence
  Description of Artificial Sequence: Synthetic oligonucleotide
augccguguucaauggggu

SEQ ID NO: 914191 - RNA, 19 nt, Artificial Sequence
  Description of Artificial Sequence: Synthetic oligonucleotide
agggagagcguagcccuca

SEQ ID NO: 914192 - RNA, 19 nt, Artificial Sequence
  Description of Artificial Sequence: Synthetic oligonucleotide
gccaugccaauguugucuc

SEQ ID NO: 914193 - RNA, 19 nt, Artificial Sequence
  Description of Artificial Sequence: Synthetic oligonucleotide
gcgcaaguuagguuuuguc

SEQ ID NO: 914194 - RNA, 19 nt, Artificial Sequence
  Description of Artificial Sequence: Synthetic oligonucleotide
gcaucgucgcccgcgaagc

SEQ ID NO: 914195 - RNA, 19 nt, Artificial Sequence
  Description of Artificial Sequence: Synthetic oligonucleotide
aggggccggacucaucgua

SEQ ID NO: 914196 - RNA, 19 nt, Artificial Sequence
  Description of Artificial Sequence: Synthetic oligonucleotide
ggcaugagggagagcguag

SEQ ID NO: 914197 - RNA, 19 nt, Artificial Sequence
  Description of Artificial Sequence: Synthetic oligonucleotide
ugucgacaacgagcgcagc

SEQ ID NO: 914198 - RNA, 19 nt, Artificial Sequence
  Description of Artificial Sequence: Synthetic oligonucleotide
gcagcgauaucgucaucca

SEQ ID NO: 914199 - RNA, 19 nt, Artificial Sequence
  Description of Artificial Sequence: Synthetic oligonucleotide
gcgaagccggcuuugcaca

SEQ ID NO: 914200 - RNA, 19 nt, Artificial Sequence
  Description of Artificial Sequence: Synthetic oligonucleotide
aggccugugcucgcgggug

SEQ ID NO: 914201 - RNA, 19 nt, Artificial Sequence
  Description of Artificial Sequence: Synthetic oligonucleotide
gugccuagggcggcccacg

SEQ ID NO: 914202 - RNA, 19 nt, Artificial Sequence
  Description of Artificial Sequence: Synthetic oligonucleotide
gccggacucaucguacucc

SEQ ID NO: 914203 - RNA, 19 nt, Artificial Sequence
  Description of Artificial Sequence: Synthetic oligonucleotide
cuguagccacgcucgguca

SEQ ID NO: 914204 - RNA, 19 nt, Artificial Sequence
  Description of Artificial Sequence: Synthetic oligonucleotide
uagggcggcccacgaugga

SEQ ID NO: 914205 - RNA, 19 nt, Artificial Sequence
  Description of Artificial Sequence: Synthetic oligonucleotide
agacggcccggggagcauc

SEQ ID NO: 914206 - RNA, 19 nt, Artificial Sequence
  Description of Artificial Sequence: Synthetic oligonucleotide
uggugccuagggcggccca

SEQ ID NO: 914207 - RNA, 19 nt, Artificial Sequence
  Description of Artificial Sequence: Synthetic oligonucleotide
guguggagcggcgaagaaa

SEQ ID NO: 914208 - RNA, 19 nt, Artificial Sequence
  Description of Artificial Sequence: Synthetic oligonucleotide
acgagcgcagcgauaucgu

SEQ ID NO: 914209 - RNA, 19 nt, Artificial Sequence
  Description of Artificial Sequence: Synthetic oligonucleotide
gcaugagggagagcguagc

SEQ ID NO: 914210 - RNA, 19 nt, Artificial Sequence
  Description of Artificial Sequence: Synthetic oligonucleotide
uagccacgcucggucagga

SEQ ID NO: 914211 - RNA, 19 nt, Artificial Sequence
  Description of Artificial Sequence: Synthetic oligonucleotide
agcuguagccacgcucggu

SEQ ID NO: 914212 - RNA, 19 nt, Artificial Sequence
  Description of Artificial Sequence: Synthetic oligonucleotide
ugccggagccguugucgac

SEQ ID NO: 914213 - RNA, 19 nt, Artificial Sequence
  Description of Artificial Sequence: Synthetic oligonucleotide
acagugaggccaggaugga

SEQ ID NO: 914214 - RNA, 19 nt, Artificial Sequence
  Description of Artificial Sequence: Synthetic oligonucleotide
guggcggguguggagcggc

SEQ ID NO: 914215 - RNA, 19 nt, Artificial Sequence
  Description of Artificial Sequence: Synthetic oligonucleotide
agcggcgaagaaagagcug

SEQ ID NO: 914216 - RNA, 19 nt, Artificial Sequence
  Description of Artificial Sequence: Synthetic oligonucleotide
ucgcccgcgaagccggcuu

SEQ ID NO: 914217 - RNA, 19 nt, Artificial Sequence
  Description of Artificial Sequence: Synthetic oligonucleotide
uggcgaacugguggcgggu

SEQ ID NO: 914218 - RNA, 19 nt, Artificial Sequence
  Description of Artificial Sequence: Synthetic oligonucleotide
ucacgcccuggugccuagg

SEQ ID NO: 914219 - RNA, 19 nt, Artificial Sequence
  Description of Artificial Sequence: Synthetic oligonucleotide
cgcgaagccggcuuugcac

SEQ ID NO: 914220 - RNA, 19 nt, Artificial Sequence
  Description of Artificial Sequence: Synthetic oligonucleotide
cagcuguggugguaaagcu

SEQ ID NO: 914221 - RNA, 19 nt, Artificial Sequence
  Description of Artificial Sequence: Synthetic oligonucleotide
ggccugugcucgcgggugg

SEQ ID NO: 914222 - RNA, 19 nt, Artificial Sequence
  Description of Artificial Sequence: Synthetic oligonucleotide
auggcaugagggagagcgu

SEQ ID NO: 914223 - RNA, 19 nt, Artificial Sequence
  Description of Artificial Sequence: Synthetic oligonucleotide
ggcgaagaaagagcugcga

SEQ ID NO: 914224 - RNA, 19 nt, Artificial Sequence
  Description of Artificial Sequence: Synthetic oligonucleotide
guaaagcuguagccacgcu

SEQ ID NO: 914225 - RNA, 19 nt, Artificial Sequence
  Description of Artificial Sequence: Synthetic oligonucleotide
caugccaauguugucucau

SEQ ID NO: 914226 - RNA, 19 nt, Artificial Sequence
  Description of Artificial Sequence: Synthetic oligonucleotide
agggcggcccacgauggau

SEQ ID NO: 914227 - RNA, 19 nt, Artificial Sequence
  Description of Artificial Sequence: Synthetic oligonucleotide
ccggggagcaucgucgccc

SEQ ID NO: 914228 - RNA, 19 nt, Artificial Sequence
  Description of Artificial Sequence: Synthetic oligonucleotide
acgcucggucaggaucuuc

SEQ ID NO: 914229 - RNA, 19 nt, Artificial Sequence
  Description of Artificial Sequence: Synthetic oligonucleotide
cugcgcaaguuagguuuug

SEQ ID NO: 914230 - RNA, 19 nt, Artificial Sequence
  Description of Artificial Sequence: Synthetic oligonucleotide
gacaacgagcgcagcgaua

SEQ ID NO: 914231 - RNA, 19 nt, Artificial Sequence
  Description of Artificial Sequence: Synthetic oligonucleotide
cagacgcaggauggcauga

SEQ ID NO: 914232 - RNA, 19 nt, Artificial Sequence
  Description of Artificial Sequence: Synthetic oligonucleotide
cuggugccuagggcggccc

SEQ ID NO: 914233 - RNA, 19 nt, Artificial Sequence
  Description of Artificial Sequence: Synthetic oligonucleotide
ggagcaucgucgcccgcga

SEQ ID NO: 914234 - RNA, 19 nt, Artificial Sequence
  Description of Artificial Sequence: Synthetic oligonucleotide
gugcucgcggguggacgcg

SEQ ID NO: 914235 - RNA, 19 nt, Artificial Sequence
  Description of Artificial Sequence: Synthetic oligonucleotide
cagugugggugaccccguc

SEQ ID NO: 914236 - RNA, 19 nt, Artificial Sequence
  Description of Artificial Sequence: Synthetic oligonucleotide
gagggagagcguagcccuc

SEQ ID NO: 914237 - RNA, 19 nt, Artificial Sequence
  Description of Artificial Sequence: Synthetic oligonucleotide
accccgucuccggagucca

SEQ ID NO: 914238 - RNA, 19 nt, Artificial Sequence
  Description of Artificial Sequence: Synthetic oligonucleotide
caacgagcgcagcgauauc

SEQ ID NO: 914239 - RNA, 19 nt, Artificial Sequence
  Description of Artificial Sequence: Synthetic oligonucleotide
aagacggcccggggagcau

SEQ ID NO: 914240 - RNA, 19 nt, Artificial Sequence
  Description of Artificial Sequence: Synthetic oligonucleotide
gccaauguugucucauuuu

SEQ ID NO: 914241 - RNA, 19 nt, Artificial Sequence
  Description of Artificial Sequence: Synthetic oligonucleotide
cggcgaagaaagagcugcg

SEQ ID NO: 914242 - RNA, 19 nt, Artificial Sequence
  Description of Artificial Sequence: Synthetic oligonucleotide
gcgaaaggccugugcucgc

SEQ ID NO: 914243 - RNA, 19 nt, Artificial Sequence
  Description of Artificial Sequence: Synthetic oligonucleotide
ggggccggacucaucguac

SEQ ID NO: 914244 - RNA, 19 nt, Artificial Sequence
  Description of Artificial Sequence: Synthetic oligonucleotide
ggcgaacugguggcgggug

SEQ ID NO: 914245 - RNA, 19 nt, Artificial Sequence
  Description of Artificial Sequence: Synthetic oligonucleotide
gguguggagcggcgaagaa

SEQ ID NO: 914246 - RNA, 19 nt, Artificial Sequence
  Description of Artificial Sequence: Synthetic oligonucleotide
ccacaggauuccauaccca

SEQ ID NO: 914247 - RNA, 19 nt, Artificial Sequence
  Description of Artificial Sequence: Synthetic oligonucleotide
ggccggacucaucguacuc

SEQ ID NO: 914248 - RNA, 19 nt, Artificial Sequence
  Description of Artificial Sequence: Synthetic oligonucleotide
ggccucggugagcagcaca

SEQ ID NO: 914249 - RNA, 19 nt, Artificial Sequence
  Description of Artificial Sequence: Synthetic oligonucleotide
ccauggcgaacugguggcg

SEQ ID NO: 914250 - RNA, 19 nt, Artificial Sequence
  Description of Artificial Sequence: Synthetic oligonucleotide
gggucaucuuuucacgguu

SEQ ID NO: 914251 - RNA, 19 nt, Artificial Sequence
  Description of Artificial Sequence: Synthetic oligonucleotide
gagcugcgaaaggccugug

SEQ ID NO: 914252 - RNA, 19 nt, Artificial Sequence
  Description of Artificial Sequence: Synthetic oligonucleotide
cgcucggucaggaucuuca

SEQ ID NO: 914253 - RNA, 19 nt, Artificial Sequence
  Description of Artificial Sequence: Synthetic oligonucleotide
gguggcggguguggagcgg

SEQ ID NO: 914254 - RNA, 19 nt, Artificial Sequence
  Description of Artificial Sequence: Synthetic oligonucleotide
cgaaaggccugugcucgcg

SEQ ID NO: 914255 - RNA, 19 nt, Artificial Sequence
  Description of Artificial Sequence: Synthetic oligonucleotide
agccacgcucggucaggau

SEQ ID NO: 914256 - RNA, 19 nt, Artificial Sequence
  Description of Artificial Sequence: Synthetic oligonucleotide
gccggagccguugucgaca

SEQ ID NO: 914257 - RNA, 19 nt, Artificial Sequence
  Description of Artificial Sequence: Synthetic oligonucleotide
gagcaucgucgcccgcgaa

SEQ ID NO: 914258 - RNA, 19 nt, Artificial Sequence
  Description of Artificial Sequence: Synthetic oligonucleotide
ccaccagacagcacugugu

SEQ ID NO: 914259 - RNA, 19 nt, Artificial Sequence
  Description of Artificial Sequence: Synthetic oligonucleotide
cgauaucgucauccauggc

SEQ ID NO: 914260 - RNA, 19 nt, Artificial Sequence
  Description of Artificial Sequence: Synthetic oligonucleotide
ggugccuagggcggcccac

SEQ ID NO: 914261 - RNA, 19 nt, Artificial Sequence
  Description of Artificial Sequence: Synthetic oligonucleotide
cggggagcaucgucgcccg

SEQ ID NO: 914262 - RNA, 19 nt, Artificial Sequence
  Description of Artificial Sequence: Synthetic oligonucleotide
gaggggccggacucaucgu

SEQ ID NO: 914263 - RNA, 19 nt, Artificial Sequence
  Description of Artificial Sequence: Synthetic oligonucleotide
ccacgcucggucaggaucu

SEQ ID NO: 914264 - RNA, 19 nt, Artificial Sequence
  Description of Artificial Sequence: Synthetic oligonucleotide
ccgucuccggaguccauca

SEQ ID NO: 914265 - RNA, 19 nt, Artificial Sequence
  Description of Artificial Sequence: Synthetic oligonucleotide
caguaacaguccgccuaga

SEQ ID NO: 914266 - RNA, 19 nt, Artificial Sequence
  Description of Artificial Sequence: Synthetic oligonucleotide
guggagcggcgaagaaaga

SEQ ID NO: 914267 - RNA, 19 nt, Artificial Sequence
  Description of Artificial Sequence: Synthetic oligonucleotide
guacgaccagaggcauaca

SEQ ID NO: 914268 - RNA, 19 nt, Artificial Sequence
  Description of Artificial Sequence: Synthetic oligonucleotide
cagcgauaucgucauccau

SEQ ID NO: 914269 - RNA, 19 nt, Artificial Sequence
  Description of Artificial Sequence: Synthetic oligonucleotide
caucacgcccuggugccua

SEQ ID NO: 914270 - RNA, 19 nt, Artificial Sequence
  Description of Artificial Sequence: Synthetic oligonucleotide
gggugaccccgucuccgga

SEQ ID NO: 914271 - RNA, 19 nt, Artificial Sequence
  Description of Artificial Sequence: Synthetic oligonucleotide
cgagcgcagcgauaucguc

SEQ ID NO: 914272 - RNA, 19 nt, Artificial Sequence
  Description of Artificial Sequence: Synthetic oligonucleotide
gggucagaauaccucucuu

SEQ ID NO: 914273 - RNA, 19 nt, Artificial Sequence
  Description of Artificial Sequence: Synthetic oligonucleotide
ccuggugccuagggcggcc

SEQ ID NO: 914274 - RNA, 19 nt, Artificial Sequence
  Description of Artificial Sequence: Synthetic oligonucleotide
gcucaguaacaguccgccu

SEQ ID NO: 914275 - RNA, 19 nt, Artificial Sequence
  Description of Artificial Sequence: Synthetic oligonucleotide
cgaacugguggcgggugug

SEQ ID NO: 914276 - RNA, 19 nt, Artificial Sequence
  Description of Artificial Sequence: Synthetic oligonucleotide
ggagagcguagcccucaua

SEQ ID NO: 914277 - RNA, 19 nt, Artificial Sequence
  Description of Artificial Sequence: Synthetic oligonucleotide
gggcacagugugggugacc

SEQ ID NO: 914278 - RNA, 19 nt, Artificial Sequence
  Description of Artificial Sequence: Synthetic oligonucleotide
gcggguguggagcggcgaa

SEQ ID NO: 914279 - RNA, 19 nt, Artificial Sequence
  Description of Artificial Sequence: Synthetic oligonucleotide
cguugucgacaacgagcgc

SEQ ID NO: 914280 - RNA, 19 nt, Artificial Sequence
  Description of Artificial Sequence: Synthetic oligonucleotide
ccgauccacacagaguacu

SEQ ID NO: 914281 - RNA, 19 nt, Artificial Sequence
  Description of Artificial Sequence: Synthetic oligonucleotide
ggauggcaugagggagagc

SEQ ID NO: 914282 - RNA, 19 nt, Artificial Sequence
  Description of Artificial Sequence: Synthetic oligonucleotide
cccgucuccggaguccauc

SEQ ID NO: 914283 - RNA, 19 nt, Artificial Sequence
  Description of Artificial Sequence: Synthetic oligonucleotide
ccaugccaauguugucuca

SEQ ID NO: 914284 - RNA, 19 nt, Artificial Sequence
  Description of Artificial Sequence: Synthetic oligonucleotide
agccaccgauccacacaga

SEQ ID NO: 914285 - RNA, 19 nt, Artificial Sequence
  Description of Artificial Sequence: Synthetic oligonucleotide
cccgcgaagccggcuuugc

SEQ ID NO: 914286 - RNA, 19 nt, Artificial Sequence
  Description of Artificial Sequence: Synthetic oligonucleotide
ccggacucaucguacuccu

SEQ ID NO: 914287 - RNA, 19 nt, Artificial Sequence
  Description of Artificial Sequence: Synthetic oligonucleotide
gggccggacucaucguacu

SEQ ID NO: 914288 - RNA, 19 nt, Artificial Sequence
  Description of Artificial Sequence: Synthetic oligonucleotide
ggacgauggaggggccgga

SEQ ID NO: 914289 - RNA, 19 nt, Artificial Sequence
  Description of Artificial Sequence: Synthetic oligonucleotide
cggacucaucguacuccug

SEQ ID NO: 914290 - RNA, 19 nt, Artificial Sequence
  Description of Artificial Sequence: Synthetic oligonucleotide
ggggagcaucgucgcccgc

SEQ ID NO: 914291 - RNA, 19 nt, Artificial Sequence
  Description of Artificial Sequence: Synthetic oligonucleotide
gcgaacugguggcgggugu

SEQ ID NO: 914292 - RNA, 19 nt, Artificial Sequence
  Description of Artificial Sequence: Synthetic oligonucleotide
ccugugcucgcggguggac

SEQ ID NO: 914293 - RNA, 19 nt, Artificial Sequence
  Description of Artificial Sequence: Synthetic oligonucleotide
cuccggaguccaucacaau

SEQ ID NO: 914294 - RNA, 19 nt, Artificial Sequence
  Description of Artificial Sequence: Synthetic oligonucleotide
ggcggguguggagcggcga

SEQ ID NO: 914295 - RNA, 19 nt, Artificial Sequence
  Description of Artificial Sequence: Synthetic oligonucleotide
cggguguggagcggcgaag

SEQ ID NO: 914296 - RNA, 19 nt, Artificial Sequence
  Description of Artificial Sequence: Synthetic oligonucleotide
acggcccggggagcaucgu

SEQ ID NO: 914297 - RNA, 19 nt, Artificial Sequence
  Description of Artificial Sequence: Synthetic oligonucleotide
cccuggugccuagggcggc

SEQ ID NO: 914298 - RNA, 19 nt, Artificial Sequence
  Description of Artificial Sequence: Synthetic oligonucleotide
gcccgcgaagccggcuuug

SEQ ID NO: 914299 - RNA, 19 nt, Artificial Sequence
  Description of Artificial Sequence: Synthetic oligonucleotide
ccggagccguugucgacaa

SEQ ID NO: 914300 - RNA, 19 nt, Artificial Sequence
  Description of Artificial Sequence: Synthetic oligonucleotide
ccgcgaagccggcuuugca

SEQ ID NO: 914301 - RNA, 19 nt, Artificial Sequence
  Description of Artificial Sequence: Synthetic oligonucleotide
gccugugcucgcgggugga

SEQ ID NO: 914302 - RNA, 19 nt, Artificial Sequence
  Description of Artificial Sequence: Synthetic oligonucleotide
ccguguucaaugggguacu

SEQ ID NO: 914303 - RNA, 19 nt, Artificial Sequence
  Description of Artificial Sequence: Synthetic oligonucleotide
gggagagcguagcccucau

SEQ ID NO: 914304 - RNA, 19 nt, Artificial Sequence
  Description of Artificial Sequence: Synthetic oligonucleotide
gucgcccgcgaagccggcu

SEQ ID NO: 914305 - RNA, 19 nt, Artificial Sequence
  Description of Artificial Sequence: Synthetic oligonucleotide
gcgcagcgauaucgucauc

SEQ ID NO: 914306 - RNA, 19 nt, Artificial Sequence
  Description of Artificial Sequence: Synthetic oligonucleotide
gccuagggcggcccacgau

SEQ ID NO: 914307 - RNA, 19 nt, Artificial Sequence
  Description of Artificial Sequence: Synthetic oligonucleotide
cgucgcccgcgaagccggc

SEQ ID NO: 914308 - RNA, 19 nt, Artificial Sequence
  Description of Artificial Sequence: Synthetic oligonucleotide
cgacaacgagcgcagcgau

SEQ ID NO: 914309 - RNA, 19 nt, Artificial Sequence
  Description of Artificial Sequence: Synthetic oligonucleotide
cgaagccggcuuugcacau

SEQ ID NO: 914310 - RNA, 19 nt, Artificial Sequence
  Description of Artificial Sequence: Synthetic oligonucleotide
cggagccguugucgacaac

SEQ ID NO: 914311 - RNA, 19 nt, Artificial Sequence
  Description of Artificial Sequence: Synthetic oligonucleotide
cacgcucggucaggaucuu

SEQ ID NO: 914312 - RNA, 19 nt, Artificial Sequence
  Description of Artificial Sequence: Synthetic oligonucleotide
ccaucacgcccuggugccu

SEQ ID NO: 914313 - RNA, 19 nt, Artificial Sequence
  Description of Artificial Sequence: Synthetic oligonucleotide
cguguucaaugggguacuu

SEQ ID NO: 914314 - RNA, 19 nt, Artificial Sequence
  Description of Artificial Sequence: Synthetic oligonucleotide
ccccgucuccggaguccau

SEQ ID NO: 914315 - RNA, 19 nt, Artificial Sequence
  Description of Artificial Sequence: Synthetic oligonucleotide
cgcccgcgaagccggcuuu

SEQ ID NO: 914316 - RNA, 19 nt, Artificial Sequence
  Description of Artificial Sequence: Synthetic oligonucleotide
agaauaauaauuuagugcc

SEQ ID NO: 914317 - RNA, 19 nt, Artificial Sequence
  Description of Artificial Sequence: Synthetic oligonucleotide
uuuguagugaguaaugugg

SEQ ID NO: 914318 - RNA, 19 nt, Artificial Sequence
  Description of Artificial Sequence: Synthetic oligonucleotide
aacguauuuguuuagaaag

SEQ ID NO: 914319 - RNA, 19 nt, Artificial Sequence
  Description of Artificial Sequence: Synthetic oligonucleotide
uguaaaacuacucugaagu

SEQ ID NO: 914320 - RNA, 19 nt, Artificial Sequence
  Description of Artificial Sequence: Synthetic oligonucleotide
aaagauuaaucccuuuacc

SEQ ID NO: 914321 - RNA, 19 nt, Artificial Sequence
  Description of Artificial Sequence: Synthetic oligonucleotide
uuuagugccuaaaagaaag

SEQ ID NO: 914322 - RNA, 19 nt, Artificial Sequence
  Description of Artificial Sequence: Synthetic oligonucleotide
uuucauaucugguauaggg

SEQ ID NO: 914323 - RNA, 19 nt, Artificial Sequence
  Description of Artificial Sequence: Synthetic oligonucleotide
uucaguaagaaucuuuccg

SEQ ID NO: 914324 - RNA, 19 nt, Artificial Sequence
  Description of Artificial Sequence: Synthetic oligonucleotide
gauuuguccaacuacaacc

SEQ ID NO: 914325 - RNA, 19 nt, Artificial Sequence
  Description of Artificial Sequence: Synthetic oligonucleotide
uguuuagaaagauuaaucc

SEQ ID NO: 914326 - RNA, 19 nt, Artificial Sequence
  Description of Artificial Sequence: Synthetic oligonucleotide
uuuagaaagauuaaucccu

SEQ ID NO: 914327 - RNA, 19 nt, Artificial Sequence
  Description of Artificial Sequence: Synthetic oligonucleotide
uuauauaaagaugaauugg

SEQ ID NO: 914328 - RNA, 19 nt, Artificial Sequence
  Description of Artificial Sequence: Synthetic oligonucleotide
auagccuagagacuuaagc

SEQ ID NO: 914329 - RNA, 19 nt, Artificial Sequence
  Description of Artificial Sequence: Synthetic oligonucleotide
uauuuguuuagaaagauua

SEQ ID NO: 914330 - RNA, 19 nt, Artificial Sequence
  Description of Artificial Sequence: Synthetic oligonucleotide
uauauaaagaugaauuggu

SEQ ID NO: 914331 - RNA, 19 nt, Artificial Sequence
  Description of Artificial Sequence: Synthetic oligonucleotide
cuuacguggacucugaagg

SEQ ID NO: 914332 - RNA, 19 nt, Artificial Sequence
  Description of Artificial Sequence: Synthetic oligonucleotide
uuuuauacccuaaauguga

SEQ ID NO: 914333 - RNA, 19 nt, Artificial Sequence
  Description of Artificial Sequence: Synthetic oligonucleotide
aauucguccgccauuaccc

SEQ ID NO: 914334 - RNA, 19 nt, Artificial Sequence
  Description of Artificial Sequence: Synthetic oligonucleotide
aauacguagaaccuuuuca

SEQ ID NO: 914335 - RNA, 19 nt, Artificial Sequence
  Description of Artificial Sequence: Synthetic oligonucleotide
aagauuaaucccuuuaccu

SEQ ID NO: 914336 - RNA, 19 nt, Artificial Sequence
  Description of Artificial Sequence: Synthetic oligonucleotide
uuaaauaugucuacauagc

SEQ ID NO: 914337 - RNA, 19 nt, Artificial Sequence
  Description of Artificial Sequence: Synthetic oligonucleotide
uaauuuggaaacuaguaca

SEQ ID NO: 914338 - RNA, 19 nt, Artificial Sequence
  Description of Artificial Sequence: Synthetic oligonucleotide
auaauuuagugccuaaaag

SEQ ID NO: 914339 - RNA, 19 nt, Artificial Sequence
  Description of Artificial Sequence: Synthetic oligonucleotide
uguguuucgaccuagugcu

SEQ ID NO: 914340 - RNA, 19 nt, Artificial Sequence
  Description of Artificial Sequence: Synthetic oligonucleotide
aaguuauauuuucauaucu

SEQ ID NO: 914341 - RNA, 19 nt, Artificial Sequence
  Description of Artificial Sequence: Synthetic oligonucleotide
acuucaacagacuuagggg

SEQ ID NO: 914342 - RNA, 19 nt, Artificial Sequence
  Description of Artificial Sequence: Synthetic oligonucleotide
uucuuuugauuacugaugc

SEQ ID NO: 914343 - RNA, 19 nt, Artificial Sequence
  Description of Artificial Sequence: Synthetic oligonucleotide
acguagaaccuuuucagcc

SEQ ID NO: 914344 - RNA, 19 nt, Artificial Sequence
  Description of Artificial Sequence: Synthetic oligonucleotide
aaguucguuaauucguccg

SEQ ID NO: 914345 - RNA, 19 nt, Artificial Sequence
  Description of Artificial Sequence: Synthetic oligonucleotide
uuuaacucacgauuuaucu

SEQ ID NO: 914346 - RNA, 19 nt, Artificial Sequence
  Description of Artificial Sequence: Synthetic oligonucleotide
aaacaugcccuauaaagga

SEQ ID NO: 914347 - RNA, 19 nt, Artificial Sequence
  Description of Artificial Sequence: Synthetic oligonucleotide
caaacaugcccuauaaagg

SEQ ID NO: 914348 - RNA, 19 nt, Artificial Sequence
  Description of Artificial Sequence: Synthetic oligonucleotide
acuguauugacauccguuc

SEQ ID NO: 914349 - RNA, 19 nt, Artificial Sequence
  Description of Artificial Sequence: Synthetic oligonucleotide
uguuguagcucuaaaauau

SEQ ID NO: 914350 - RNA, 19 nt, Artificial Sequence
  Description of Artificial Sequence: Synthetic oligonucleotide
ucggugauagccuagagac

SEQ ID NO: 914351 - RNA, 19 nt, Artificial Sequence
  Description of Artificial Sequence: Synthetic oligonucleotide
ucugauuuguccaacuaca

SEQ ID NO: 914352 - RNA, 19 nt, Artificial Sequence
  Description of Artificial Sequence: Synthetic oligonucleotide
aguuauuacacuagcaaac

SEQ ID NO: 914353 - RNA, 19 nt, Artificial Sequence
  Description of Artificial Sequence: Synthetic oligonucleotide
aaauacguagaaccuuuuc

SEQ ID NO: 914354 - RNA, 19 nt, Artificial Sequence
  Description of Artificial Sequence: Synthetic oligonucleotide
aguaagaaucuuuccgagc

SEQ ID NO: 914355 - RNA, 19 nt, Artificial Sequence
  Description of Artificial Sequence: Synthetic oligonucleotide
aaucccuuuaccuggguug

SEQ ID NO: 914356 - RNA, 19 nt, Artificial Sequence
  Description of Artificial Sequence: Synthetic oligonucleotide
uguccaacuacaaccaugc

SEQ ID NO: 914357 - RNA, 19 nt, Artificial Sequence
  Description of Artificial Sequence: Synthetic oligonucleotide
uauuaucagcaucauaaga

SEQ ID NO: 914358 - RNA, 19 nt, Artificial Sequence
  Description of Artificial Sequence: Synthetic oligonucleotide
uaacucacgauuuaucucu

SEQ ID NO: 914359 - RNA, 19 nt, Artificial Sequence
  Description of Artificial Sequence: Synthetic oligonucleotide
uuucuguacagguaacggg

SEQ ID NO: 914360 - RNA, 19 nt, Artificial Sequence
  Description of Artificial Sequence: Synthetic oligonucleotide
uagacguucaaagugauac

SEQ ID NO: 914361 - RNA, 19 nt, Artificial Sequence
  Description of Artificial Sequence: Synthetic oligonucleotide
uccuguauggcacucuggg

SEQ ID NO: 914362 - RNA, 19 nt, Artificial Sequence
  Description of Artificial Sequence: Synthetic oligonucleotide
uauacccuaaaugugacca

SEQ ID NO: 914363 - RNA, 19 nt, Artificial Sequence
  Description of Artificial Sequence: Synthetic oligonucleotide
auacguagaaccuuuucag

SEQ ID NO: 914364 - RNA, 19 nt, Artificial Sequence
  Description of Artificial Sequence: Synthetic oligonucleotide
aucagcaucauaagaaccc

SEQ ID NO: 914365 - RNA, 19 nt, Artificial Sequence
  Description of Artificial Sequence: Synthetic oligonucleotide
aguucguuaauucguccgc

SEQ ID NO: 914366 - RNA, 19 nt, Artificial Sequence
  Description of Artificial Sequence: Synthetic oligonucleotide
ucaguaagaaucuuuccga

SEQ ID NO: 914367 - RNA, 19 nt, Artificial Sequence
  Description of Artificial Sequence: Synthetic oligonucleotide
uauagggauggaaacgucc

SEQ ID NO: 914368 - RNA, 19 nt, Artificial Sequence
  Description of Artificial Sequence: Synthetic oligonucleotide
ugaguaaugugguugguga

SEQ ID NO: 914369 - RNA, 19 nt, Artificial Sequence
  Description of Artificial Sequence: Synthetic oligonucleotide
acugaugccaacauuuccc

SEQ ID NO: 914370 - RNA, 19 nt, Artificial Sequence
  Description of Artificial Sequence: Synthetic oligonucleotide
aaauggauuguccggugag

SEQ ID NO: 914371 - RNA, 19 nt, Artificial Sequence
  Description of Artificial Sequence: Synthetic oligonucleotide
gcaaacaugcccuauaaag

SEQ ID NO: 914372 - RNA, 19 nt, Artificial Sequence
  Description of Artificial Sequence: Synthetic oligonucleotide
agcagauuaggucacagga

SEQ ID NO: 914373 - RNA, 19 nt, Artificial Sequence
  Description of Artificial Sequence: Synthetic oligonucleotide
ucugguauagggauggaaa

SEQ ID NO: 914374 - RNA, 19 nt, Artificial Sequence
  Description of Artificial Sequence: Synthetic oligonucleotide
auuaaagagcaaugaguuc

SEQ ID NO: 914375 - RNA, 19 nt, Artificial Sequence
  Description of Artificial Sequence: Synthetic oligonucleotide
aacuaccucuggcugaggg

SEQ ID NO: 914376 - RNA, 19 nt, Artificial Sequence
  Description of Artificial Sequence: Synthetic oligonucleotide
guagagaucauuuccuggc

SEQ ID NO: 914377 - RNA, 19 nt, Artificial Sequence
  Description of Artificial Sequence: Synthetic oligonucleotide
ucugagaguuccuuccugg

SEQ ID NO: 914378 - RNA, 19 nt, Artificial Sequence
  Description of Artificial Sequence: Synthetic oligonucleotide
aaagugaugggcauggcca

SEQ ID NO: 914379 - RNA, 19 nt, Artificial Sequence
  Description of Artificial Sequence: Synthetic oligonucleotide
cuugcgaggaauuugcuuc

SEQ ID NO: 914380 - RNA, 19 nt, Artificial Sequence
  Description of Artificial Sequence: Synthetic oligonucleotide
ugcagaagacacaacaccu

SEQ ID NO: 914381 - RNA, 19 nt, Artificial Sequence
  Description of Artificial Sequence: Synthetic oligonucleotide
uccaaaauacguagaaccu

SEQ ID NO: 914382 - RNA, 19 nt, Artificial Sequence
  Description of Artificial Sequence: Synthetic oligonucleotide
acuaguacaugaaauaucu

SEQ ID NO: 914383 - RNA, 19 nt, Artificial Sequence
  Description of Artificial Sequence: Synthetic oligonucleotide
uucauaucugguauaggga

SEQ ID NO: 914384 - RNA, 19 nt, Artificial Sequence
  Description of Artificial Sequence: Synthetic oligonucleotide
accugcuuauaguuuauac

SEQ ID NO: 914385 - RNA, 19 nt, Artificial Sequence
  Description of Artificial Sequence: Synthetic oligonucleotide
uguauugacauccguucca

SEQ ID NO: 914386 - RNA, 19 nt, Artificial Sequence
  Description of Artificial Sequence: Synthetic oligonucleotide
uuaucagcaucauaagaac

SEQ ID NO: 914387 - RNA, 19 nt, Artificial Sequence
  Description of Artificial Sequence: Synthetic oligonucleotide
aagaguuccuccaacaacu

SEQ ID NO: 914388 - RNA, 19 nt, Artificial Sequence
  Description of Artificial Sequence: Synthetic oligonucleotide
aauggauuguccggugagc

SEQ ID NO: 914389 - RNA, 19 nt, Artificial Sequence
  Description of Artificial Sequence: Synthetic oligonucleotide
uagugaguaaugugguugg

SEQ ID NO: 914390 - RNA, 19 nt, Artificial Sequence
  Description of Artificial Sequence: Synthetic oligonucleotide
cucggaguugguuugaaag

SEQ ID NO: 914391 - RNA, 19 nt, Artificial Sequence
  Description of Artificial Sequence: Synthetic oligonucleotide
ucggaguugguuugaaagg

SEQ ID NO: 914392 - RNA, 19 nt, Artificial Sequence
  Description of Artificial Sequence: Synthetic oligonucleotide
uuuauacccuaaaugugac

SEQ ID NO: 914393 - RNA, 19 nt, Artificial Sequence
  Description of Artificial Sequence: Synthetic oligonucleotide
ucauaucugguauagggau

SEQ ID NO: 914394 - RNA, 19 nt, Artificial Sequence
  Description of Artificial Sequence: Synthetic oligonucleotide
uuuuaacucacgauuuauc

SEQ ID NO: 914395 - RNA, 19 nt, Artificial Sequence
  Description of Artificial Sequence: Synthetic oligonucleotide
uaauucguccgccauuacc

SEQ ID NO: 914396 - RNA, 19 nt, Artificial Sequence
  Description of Artificial Sequence: Synthetic oligonucleotide
aaacuaguacaugaaauau

SEQ ID NO: 914397 - RNA, 19 nt, Artificial Sequence
  Description of Artificial Sequence: Synthetic oligonucleotide
uuugacgcuguaaaacuac

SEQ ID NO: 914398 - RNA, 19 nt, Artificial Sequence
  Description of Artificial Sequence: Synthetic oligonucleotide
agaggugacuucaacagac

SEQ ID NO: 914399 - RNA, 19 nt, Artificial Sequence
  Description of Artificial Sequence: Synthetic oligonucleotide
gaaacuaguacaugaaaua

SEQ ID NO: 914400 - RNA, 19 nt, Artificial Sequence
  Description of Artificial Sequence: Synthetic oligonucleotide
ucugauuggggucgaagug

SEQ ID NO: 914401 - RNA, 19 nt, Artificial Sequence
  Description of Artificial Sequence: Synthetic oligonucleotide
uuuguuuagaaagauuaau

SEQ ID NO: 914402 - RNA, 19 nt, Artificial Sequence
  Description of Artificial Sequence: Synthetic oligonucleotide
ugcccuauaaaggaauggg

SEQ ID NO: 914403 - RNA, 19 nt, Artificial Sequence
  Description of Artificial Sequence: Synthetic oligonucleotide
auuuucauaucugguauag

SEQ ID NO: 914404 - RNA, 19 nt, Artificial Sequence
  Description of Artificial Sequence: Synthetic oligonucleotide
agagacuuaagcuuugcau

SEQ ID NO: 914405 - RNA, 19 nt, Artificial Sequence
  Description of Artificial Sequence: Synthetic oligonucleotide
uagccuagagacuuaagcu

SEQ ID NO: 914406 - RNA, 19 nt, Artificial Sequence
  Description of Artificial Sequence: Synthetic oligonucleotide
agagcaaugaguucucccu

SEQ ID NO: 914407 - RNA, 19 nt, Artificial Sequence
  Description of Artificial Sequence: Synthetic oligonucleotide
uuagcacaaacacugugaa

SEQ ID NO: 914408 - RNA, 19 nt, Artificial Sequence
  Description of Artificial Sequence: Synthetic oligonucleotide
aggacaugcugauuuacag

SEQ ID NO: 914409 - RNA, 19 nt, Artificial Sequence
  Description of Artificial Sequence: Synthetic oligonucleotide
uuuugauuacugaugccaa

SEQ ID NO: 914410 - RNA, 19 nt, Artificial Sequence
  Description of Artificial Sequence: Synthetic oligonucleotide
cuguguuucgaccuagugc

SEQ ID NO: 914411 - RNA, 19 nt, Artificial Sequence
  Description of Artificial Sequence: Synthetic oligonucleotide
ugauuuguccaacuacaac

SEQ ID NO: 914412 - RNA, 19 nt, Artificial Sequence
  Description of Artificial Sequence: Synthetic oligonucleotide
gugacuucaacagacuuag

SEQ ID NO: 914413 - RNA, 19 nt, Artificial Sequence
  Description of Artificial Sequence: Synthetic oligonucleotide
uaaaacuacucugaaguuc

SEQ ID NO: 914414 - RNA, 19 nt, Artificial Sequence
  Description of Artificial Sequence: Synthetic oligonucleotide
agugcagggaagcagauua

SEQ ID NO: 914415 - RNA, 19 nt, Artificial Sequence
  Description of Artificial Sequence: Synthetic oligonucleotide
ucugggaaguacuuuaaau

SEQ ID NO: 914416 - RNA, 19 nt, Artificial Sequence
  Description of Artificial Sequence: Synthetic oligonucleotide
aauuugcuucuccacacau

SEQ ID NO: 914417 - RNA, 19 nt, Artificial Sequence
  Description of Artificial Sequence: Synthetic oligonucleotide
uggacucugaaggacaugc

SEQ ID NO: 914418 - RNA, 19 nt, Artificial Sequence
  Description of Artificial Sequence: Synthetic oligonucleotide
ugguauagggauggaaacg

SEQ ID NO: 914419 - RNA, 19 nt, Artificial Sequence
  Description of Artificial Sequence: Synthetic oligonucleotide
uuaacucacgauuuaucuc

SEQ ID NO: 914420 - RNA, 19 nt, Artificial Sequence
  Description of Artificial Sequence: Synthetic oligonucleotide
aacgggauccaaaauacgu

SEQ ID NO: 914421 - RNA, 19 nt, Artificial Sequence
  Description of Artificial Sequence: Synthetic oligonucleotide
auuuguuguagcucuaaaa

SEQ ID NO: 914422 - RNA, 19 nt, Artificial Sequence
  Description of Artificial Sequence: Synthetic oligonucleotide
uaacguauuuguuuagaaa

SEQ ID NO: 914423 - RNA, 19 nt, Artificial Sequence
  Description of Artificial Sequence: Synthetic oligonucleotide
ucuuuguccugaaguagcc

SEQ ID NO: 914424 - RNA, 19 nt, Artificial Sequence
  Description of Artificial Sequence: Synthetic oligonucleotide
cuuucuguacagguaacgg

SEQ ID NO: 914425 - RNA, 19 nt, Artificial Sequence
  Description of Artificial Sequence: Synthetic oligonucleotide
uacugaugccaacauuucc

SEQ ID NO: 914426 - RNA, 19 nt, Artificial Sequence
  Description of Artificial Sequence: Synthetic oligonucleotide
agaaagauuaaucccuuua

SEQ ID NO: 914427 - RNA, 19 nt, Artificial Sequence
  Description of Artificial Sequence: Synthetic oligonucleotide
uguacucggaguugguuug

SEQ ID NO: 914428 - RNA, 19 nt, Artificial Sequence
  Description of Artificial Sequence: Synthetic oligonucleotide
uugauuacugaugccaaca

SEQ ID NO: 914429 - RNA, 19 nt, Artificial Sequence
  Description of Artificial Sequence: Synthetic oligonucleotide
aauuuggaaacuaguacau

SEQ ID NO: 914430 - RNA, 19 nt, Artificial Sequence
  Description of Artificial Sequence: Synthetic oligonucleotide
uguaacuaccucuggcuga

SEQ ID NO: 914431 - RNA, 19 nt, Artificial Sequence
  Description of Artificial Sequence: Synthetic oligonucleotide
ucacgauuuaucucugucu

SEQ ID NO: 914432 - RNA, 19 nt, Artificial Sequence
  Description of Artificial Sequence: Synthetic oligonucleotide
uaacgggauccaaaauacg

SEQ ID NO: 914433 - RNA, 19 nt, Artificial Sequence
  Description of Artificial Sequence: Synthetic oligonucleotide
uacagcaauugaaaguuau

SEQ ID NO: 914434 - RNA, 19 nt, Artificial Sequence
  Description of Artificial Sequence: Synthetic oligonucleotide
cacgauuuaucucugucug

SEQ ID NO: 914435 - RNA, 19 nt, Artificial Sequence
  Description of Artificial Sequence: Synthetic oligonucleotide
ugauuggggucgaagugag

SEQ ID NO: 914436 - RNA, 19 nt, Artificial Sequence
  Description of Artificial Sequence: Synthetic oligonucleotide
uggguagagaucauuuccu

SEQ ID NO: 914437 - RNA, 19 nt, Artificial Sequence
  Description of Artificial Sequence: Synthetic oligonucleotide
aaauauccucacagcgucc

SEQ ID NO: 914438 - RNA, 19 nt, Artificial Sequence
  Description of Artificial Sequence: Synthetic oligonucleotide
gacguucaaagugauacug

SEQ ID NO: 914439 - RNA, 19 nt, Artificial Sequence
  Description of Artificial Sequence: Synthetic oligonucleotide
uugacauccguuccagcug

SEQ ID NO: 914440 - RNA, 19 nt, Artificial Sequence
  Description of Artificial Sequence: Synthetic oligonucleotide
aggaauuugcuucuccaca

SEQ ID NO: 914441 - RNA, 19 nt, Artificial Sequence
  Description of Artificial Sequence: Synthetic oligonucleotide
cuuuugauuacugaugcca

SEQ ID NO: 914442 - RNA, 19 nt, Artificial Sequence
  Description of Artificial Sequence: Synthetic oligonucleotide
gaugggcauggccacaucc

SEQ ID NO: 914443 - RNA, 19 nt, Artificial Sequence
  Description of Artificial Sequence: Synthetic oligonucleotide
uuuaugcaccaaaaugaaa

SEQ ID NO: 914444 - RNA, 19 nt, Artificial Sequence
  Description of Artificial Sequence: Synthetic oligonucleotide
aaauaugucuacauagcuu

SEQ ID NO: 914445 - RNA, 19 nt, Artificial Sequence
  Description of Artificial Sequence: Synthetic oligonucleotide
gugccuaaaagaaaguuac

SEQ ID NO: 914446 - RNA, 19 nt, Artificial Sequence
  Description of Artificial Sequence: Synthetic oligonucleotide
aauauccucacagcgucca

SEQ ID NO: 914447 - RNA, 19 nt, Artificial Sequence
  Description of Artificial Sequence: Synthetic oligonucleotide
cauggaacacuuuuguuga

SEQ ID NO: 914448 - RNA, 19 nt, Artificial Sequence
  Description of Artificial Sequence: Synthetic oligonucleotide
guaagaaucuuuccgagcu

SEQ ID NO: 914449 - RNA, 19 nt, Artificial Sequence
  Description of Artificial Sequence: Synthetic oligonucleotide
gaaguucguuaauucgucc

SEQ ID NO: 914450 - RNA, 19 nt, Artificial Sequence
  Description of Artificial Sequence: Synthetic oligonucleotide
uuauuacacuagcaaacau

SEQ ID NO: 914451 - RNA, 19 nt, Artificial Sequence
  Description of Artificial Sequence: Synthetic oligonucleotide
agaagacacaacaccuugc

SEQ ID NO: 914452 - RNA, 19 nt, Artificial Sequence
  Description of Artificial Sequence: Synthetic oligonucleotide
uguccggugagcuuucugu

SEQ ID NO: 914453 - RNA, 19 nt, Artificial Sequence
  Description of Artificial Sequence: Synthetic oligonucleotide
guacuuuaaauaugucuac

SEQ ID NO: 914454 - RNA, 19 nt, Artificial Sequence
  Description of Artificial Sequence: Synthetic oligonucleotide
cuauaaaggaaugggcuug

SEQ ID NO: 914455 - RNA, 19 nt, Artificial Sequence
  Description of Artificial Sequence: Synthetic oligonucleotide
agaaaauggauuguccggu

SEQ ID NO: 914456 - RNA, 19 nt, Artificial Sequence
  Description of Artificial Sequence: Synthetic oligonucleotide
ugcuucguuuucuaagaug

SEQ ID NO: 914457 - RNA, 19 nt, Artificial Sequence
  Description of Artificial Sequence: Synthetic oligonucleotide
uuucuuuguagugaguaau

SEQ ID NO: 914458 - RNA, 19 nt, Artificial Sequence
  Description of Artificial Sequence: Synthetic oligonucleotide
gguagagaucauuuccugg

SEQ ID NO: 914459 - RNA, 19 nt, Artificial Sequence
  Description of Artificial Sequence: Synthetic oligonucleotide
guaacgggauccaaaauac

SEQ ID NO: 914460 - RNA, 19 nt, Artificial Sequence
  Description of Artificial Sequence: Synthetic oligonucleotide
augaaaccugcuuauaguu

SEQ ID NO: 914461 - RNA, 19 nt, Artificial Sequence
  Description of Artificial Sequence: Synthetic oligonucleotide
uucucccuugcaaugauua

SEQ ID NO: 914462 - RNA, 19 nt, Artificial Sequence
  Description of Artificial Sequence: Synthetic oligonucleotide
auacccuaaaugugaccac

SEQ ID NO: 914463 - RNA, 19 nt, Artificial Sequence
  Description of Artificial Sequence: Synthetic oligonucleotide
ccuaaaugugaccacaaag

SEQ ID NO: 914464 - RNA, 19 nt, Artificial Sequence
  Description of Artificial Sequence: Synthetic oligonucleotide
caguaagaaucuuuccgag

SEQ ID NO: 914465 - RNA, 19 nt, Artificial Sequence
  Description of Artificial Sequence: Synthetic oligonucleotide
uauuuguuguagcucuaaa

SEQ ID NO: 914466 - RNA, 19 nt, Artificial Sequence
  Description of Artificial Sequence: Synthetic oligonucleotide
uaagaaucuuuccgagcug

SEQ ID NO: 914467 - RNA, 19 nt, Artificial Sequence
  Description of Artificial Sequence: Synthetic oligonucleotide
uuuugacgcuguaaaacua

SEQ ID NO: 914468 - RNA, 19 nt, Artificial Sequence
  Description of Artificial Sequence: Synthetic oligonucleotide
acgcuguaaaacuacucug

SEQ ID NO: 914469 - RNA, 19 nt, Artificial Sequence
  Description of Artificial Sequence: Synthetic oligonucleotide
uaucucugucuguacucgg

SEQ ID NO: 914470 - RNA, 19 nt, Artificial Sequence
  Description of Artificial Sequence: Synthetic oligonucleotide
agcaauugaaaguuauauu

SEQ ID NO: 914471 - RNA, 19 nt, Artificial Sequence
  Description of Artificial Sequence: Synthetic oligonucleotide
gaggaauuugcuucuccac

SEQ ID NO: 914472 - RNA, 19 nt, Artificial Sequence
  Description of Artificial Sequence: Synthetic oligonucleotide
uucuuugccucugagaguu

SEQ ID NO: 914473 - RNA, 19 nt, Artificial Sequence
  Description of Artificial Sequence: Synthetic oligonucleotide
gagggaacuuucuuacgug

SEQ ID NO: 914474 - RNA, 19 nt, Artificial Sequence
  Description of Artificial Sequence: Synthetic oligonucleotide
gcuuuaugcaccaaaauga

SEQ ID NO: 914475 - RNA, 19 nt, Artificial Sequence
  Description of Artificial Sequence: Synthetic oligonucleotide
cagaagacacaacaccuug

SEQ ID NO: 914476 - RNA, 19 nt, Artificial Sequence
  Description of Artificial Sequence: Synthetic oligonucleotide
gauuuaucucugucuguac

SEQ ID NO: 914477 - RNA, 19 nt, Artificial Sequence
  Description of Artificial Sequence: Synthetic oligonucleotide
uagcaaacaugcccuauaa

SEQ ID NO: 914478 - RNA, 19 nt, Artificial Sequence
  Description of Artificial Sequence: Synthetic oligonucleotide
guuucgaccuagugcuucg

SEQ ID NO: 914479 - RNA, 19 nt, Artificial Sequence
  Description of Artificial Sequence: Synthetic oligonucleotide
ugacauccguuccagcugu

SEQ ID NO: 914480 - RNA, 19 nt, Artificial Sequence
  Description of Artificial Sequence: Synthetic oligonucleotide
cauaucugguauagggaug

SEQ ID NO: 914481 - RNA, 19 nt, Artificial Sequence
  Description of Artificial Sequence: Synthetic oligonucleotide
uaaaggaaugggcuugcua

SEQ ID NO: 914482 - RNA, 19 nt, Artificial Sequence
  Description of Artificial Sequence: Synthetic oligonucleotide
ugagcuuucuguacaggua

SEQ ID NO: 914483 - RNA, 19 nt, Artificial Sequence
  Description of Artificial Sequence: Synthetic oligonucleotide
auuucccagaagaugagca

SEQ ID NO: 914484 - RNA, 19 nt, Artificial Sequence
  Description of Artificial Sequence: Synthetic oligonucleotide
gacgcuguaaaacuacucu

SEQ ID NO: 914485 - RNA, 19 nt, Artificial Sequence
  Description of Artificial Sequence: Synthetic oligonucleotide
gaagcagauuaggucacag

SEQ ID NO: 914486 - RNA, 19 nt, Artificial Sequence
  Description of Artificial Sequence: Synthetic oligonucleotide
ugugaccacaaagggaaug

SEQ ID NO: 914487 - RNA, 19 nt, Artificial Sequence
  Description of Artificial Sequence: Synthetic oligonucleotide
agacuuaagcuuugcauuu

SEQ ID NO: 914488 - RNA, 19 nt, Artificial Sequence
  Description of Artificial Sequence: Synthetic oligonucleotide
ucaaagugauacugugggu

SEQ ID NO: 914489 - RNA, 19 nt, Artificial Sequence
  Description of Artificial Sequence: Synthetic oligonucleotide
uugacgcuguaaaacuacu

SEQ ID NO: 914490 - RNA, 19 nt, Artificial Sequence
  Description of Artificial Sequence: Synthetic oligonucleotide
uugcuaaccccacacugaa

SEQ ID NO: 914491 - RNA, 19 nt, Artificial Sequence
  Description of Artificial Sequence: Synthetic oligonucleotide
auuuguccaacuacaacca

SEQ ID NO: 914492 - RNA, 19 nt, Artificial Sequence
  Description of Artificial Sequence: Synthetic oligonucleotide
uucguuaauucguccgcca

SEQ ID NO: 914493 - RNA, 19 nt, Artificial Sequence
  Description of Artificial Sequence: Synthetic oligonucleotide
ugccuaaaagaaaguuaca

SEQ ID NO: 914494 - RNA, 19 nt, Artificial Sequence
  Description of Artificial Sequence: Synthetic oligonucleotide
ugggguacugaagaagucu

SEQ ID NO: 914495 - RNA, 19 nt, Artificial Sequence
  Description of Artificial Sequence: Synthetic oligonucleotide
cugagaguuccuuccuggg

SEQ ID NO: 914496 - RNA, 19 nt, Artificial Sequence
  Description of Artificial Sequence: Synthetic oligonucleotide
guuuugacgcuguaaaacu

SEQ ID NO: 914497 - RNA, 19 nt, Artificial Sequence
  Description of Artificial Sequence: Synthetic oligonucleotide
agccuagagacuuaagcuu

SEQ ID NO: 914498 - RNA, 19 nt, Artificial Sequence
  Description of Artificial Sequence: Synthetic oligonucleotide
gcaauugaaaguuauauuu

SEQ ID NO: 914499 - RNA, 19 nt, Artificial Sequence
  Description of Artificial Sequence: Synthetic oligonucleotide
uaugucuacauagcuucac

SEQ ID NO: 914500 - RNA, 19 nt, Artificial Sequence
  Description of Artificial Sequence: Synthetic oligonucleotide
aaccccacacugaacacug

SEQ ID NO: 914501 - RNA, 19 nt, Artificial Sequence
  Description of Artificial Sequence: Synthetic oligonucleotide
cuuucuuacguggacucug

SEQ ID NO: 914502 - RNA, 19 nt, Artificial Sequence
  Description of Artificial Sequence: Synthetic oligonucleotide
uccuaacguauuuguuuag

SEQ ID NO: 914503 - RNA, 19 nt, Artificial Sequence
  Description of Artificial Sequence: Synthetic oligonucleotide
gguuuugacgcuguaaaac

SEQ ID NO: 914504 - RNA, 19 nt, Artificial Sequence
  Description of Artificial Sequence: Synthetic oligonucleotide
cucacgauuuaucucuguc

SEQ ID NO: 914505 - RNA, 19 nt, Artificial Sequence
  Description of Artificial Sequence: Synthetic oligonucleotide
uuacguggacucugaagga

SEQ ID NO: 914506 - RNA, 19 nt, Artificial Sequence
  Description of Artificial Sequence: Synthetic oligonucleotide
caguuauuacacuagcaaa

SEQ ID NO: 914507 - RNA, 19 nt, Artificial Sequence
  Description of Artificial Sequence: Synthetic oligonucleotide
ugacgcuguaaaacuacuc

SEQ ID NO: 914508 - RNA, 19 nt, Artificial Sequence
  Description of Artificial Sequence: Synthetic oligonucleotide
guaacuaccucuggcugag

SEQ ID NO: 914509 - RNA, 19 nt, Artificial Sequence
  Description of Artificial Sequence: Synthetic oligonucleotide
caugguuguaguugaccug

SEQ ID NO: 914510 - RNA, 19 nt, Artificial Sequence
  Description of Artificial Sequence: Synthetic oligonucleotide
cuaacguauuuguuuagaa

SEQ ID NO: 914511 - RNA, 19 nt, Artificial Sequence
  Description of Artificial Sequence: Synthetic oligonucleotide
cuguaacuaccucuggcug

SEQ ID NO: 914512 - RNA, 19 nt, Artificial Sequence
  Description of Artificial Sequence: Synthetic oligonucleotide
ugcaaugauuacagcaauu

SEQ ID NO: 914513 - RNA, 19 nt, Artificial Sequence
  Description of Artificial Sequence: Synthetic oligonucleotide
ccaacuugugguuugcaag

SEQ ID NO: 914514 - RNA, 19 nt, Artificial Sequence
  Description of Artificial Sequence: Synthetic oligonucleotide
aaaccuucuuugccucuga

SEQ ID NO: 914515 - RNA, 19 nt, Artificial Sequence
  Description of Artificial Sequence: Synthetic oligonucleotide
auccguuccagcuguucag

SEQ ID NO: 914516 - RNA, 19 nt, Artificial Sequence
  Description of Artificial Sequence: Synthetic oligonucleotide
cuugcuaaccccacacuga

SEQ ID NO: 914517 - RNA, 19 nt, Artificial Sequence
  Description of Artificial Sequence: Synthetic oligonucleotide
uacccuaaaugugaccaca

SEQ ID NO: 914518 - RNA, 19 nt, Artificial Sequence
  Description of Artificial Sequence: Synthetic oligonucleotide
aaugggcuugcuaacccca

SEQ ID NO: 914519 - RNA, 19 nt, Artificial Sequence
  Description of Artificial Sequence: Synthetic oligonucleotide
gguaacgggauccaaaaua

SEQ ID NO: 914520 - RNA, 19 nt, Artificial Sequence
  Description of Artificial Sequence: Synthetic oligonucleotide
uaccccaguuauuacacua

SEQ ID NO: 914521 - RNA, 19 nt, Artificial Sequence
  Description of Artificial Sequence: Synthetic oligonucleotide
augcccuauaaaggaaugg

SEQ ID NO: 914522 - RNA, 19 nt, Artificial Sequence
  Description of Artificial Sequence: Synthetic oligonucleotide
uccuguaccccaguuauua

SEQ ID NO: 914523 - RNA, 19 nt, Artificial Sequence
  Description of Artificial Sequence: Synthetic oligonucleotide
gauggaaacguccaauauu

SEQ ID NO: 914524 - RNA, 19 nt, Artificial Sequence
  Description of Artificial Sequence: Synthetic oligonucleotide
guuguagcucuaaaauaug

SEQ ID NO: 914525 - RNA, 19 nt, Artificial Sequence
  Description of Artificial Sequence: Synthetic oligonucleotide
uuuugcuggggaugucaug

SEQ ID NO: 914526 - RNA, 19 nt, Artificial Sequence
  Description of Artificial Sequence: Synthetic oligonucleotide
agacguucaaagugauacu

SEQ ID NO: 914527 - RNA, 19 nt, Artificial Sequence
  Description of Artificial Sequence: Synthetic oligonucleotide
auuugcuucuccacacauc

SEQ ID NO: 914528 - RNA, 19 nt, Artificial Sequence
  Description of Artificial Sequence: Synthetic oligonucleotide
ugaggguggacuucuucuc

SEQ ID NO: 914529 - RNA, 19 nt, Artificial Sequence
  Description of Artificial Sequence: Synthetic oligonucleotide
gaauuugcuucuccacaca

SEQ ID NO: 914530 - RNA, 19 nt, Artificial Sequence
  Description of Artificial Sequence: Synthetic oligonucleotide
cauuacccugcuugcgagg

SEQ ID NO: 914531 - RNA, 19 nt, Artificial Sequence
  Description of Artificial Sequence: Synthetic oligonucleotide
uguagugaguaaugugguu

SEQ ID NO: 914532 - RNA, 19 nt, Artificial Sequence
  Description of Artificial Sequence: Synthetic oligonucleotide
gggcuagacguucaaagug

SEQ ID NO: 914533 - RNA, 19 nt, Artificial Sequence
  Description of Artificial Sequence: Synthetic oligonucleotide
ucguuaauucguccgccau

SEQ ID NO: 914534 - RNA, 19 nt, Artificial Sequence
  Description of Artificial Sequence: Synthetic oligonucleotide
uggggucgaagugaggaug

SEQ ID NO: 914535 - RNA, 19 nt, Artificial Sequence
  Description of Artificial Sequence: Synthetic oligonucleotide
gcuugcuaaccccacacug

SEQ ID NO: 914536 - RNA, 19 nt, Artificial Sequence
  Description of Artificial Sequence: Synthetic oligonucleotide
ccuugcaaugauuacagca

SEQ ID NO: 914537 - RNA, 19 nt, Artificial Sequence
  Description of Artificial Sequence: Synthetic oligonucleotide
uuacccugagacauuucuu

SEQ ID NO: 914538 - RNA, 19 nt, Artificial Sequence
  Description of Artificial Sequence: Synthetic oligonucleotide
uggugcuggaaucuucuuu

SEQ ID NO: 914539 - RNA, 19 nt, Artificial Sequence
  Description of Artificial Sequence: Synthetic oligonucleotide
ugaaggacaugcugauuua

SEQ ID NO: 914540 - RNA, 19 nt, Artificial Sequence
  Description of Artificial Sequence: Synthetic oligonucleotide
acuaccucuggcugagggu

SEQ ID NO: 914541 - RNA, 19 nt, Artificial Sequence
  Description of Artificial Sequence: Synthetic oligonucleotide
gugaguaaugugguuggug

SEQ ID NO: 914542 - RNA, 19 nt, Artificial Sequence
  Description of Artificial Sequence: Synthetic oligonucleotide
uguuucgaccuagugcuuc

SEQ ID NO: 914543 - RNA, 19 nt, Artificial Sequence
  Description of Artificial Sequence: Synthetic oligonucleotide
cuucagaggugacuucaac

SEQ ID NO: 914544 - RNA, 19 nt, Artificial Sequence
  Description of Artificial Sequence: Synthetic oligonucleotide
ucucccuugcaaugauuac

SEQ ID NO: 914545 - RNA, 19 nt, Artificial Sequence
  Description of Artificial Sequence: Synthetic oligonucleotide
uugcgaggaauuugcuucu

SEQ ID NO: 914546 - RNA, 19 nt, Artificial Sequence
  Description of Artificial Sequence: Synthetic oligonucleotide
ucuucucggugauagccua

SEQ ID NO: 914547 - RNA, 19 nt, Artificial Sequence
  Description of Artificial Sequence: Synthetic oligonucleotide
guuaauucguccgccauua

SEQ ID NO: 914548 - RNA, 19 nt, Artificial Sequence
  Description of Artificial Sequence: Synthetic oligonucleotide
auggauuguccggugagcu

SEQ ID NO: 914549 - RNA, 19 nt, Artificial Sequence
  Description of Artificial Sequence: Synthetic oligonucleotide
uccggugagcuuucuguac

SEQ ID NO: 914550 - RNA, 19 nt, Artificial Sequence
  Description of Artificial Sequence: Synthetic oligonucleotide
auuacccugcuugcgagga

SEQ ID NO: 914551 - RNA, 19 nt, Artificial Sequence
  Description of Artificial Sequence: Synthetic oligonucleotide
ucgaccuagugcuucguuu

SEQ ID NO: 914552 - RNA, 19 nt, Artificial Sequence
  Description of Artificial Sequence: Synthetic oligonucleotide
uacguggacucugaaggac

SEQ ID NO: 914553 - RNA, 19 nt, Artificial Sequence
  Description of Artificial Sequence: Synthetic oligonucleotide
guucguuaauucguccgcc

SEQ ID NO: 914554 - RNA, 19 nt, Artificial Sequence
  Description of Artificial Sequence: Synthetic oligonucleotide
gauagccuagagacuuaag

SEQ ID NO: 914555 - RNA, 19 nt, Artificial Sequence
  Description of Artificial Sequence: Synthetic oligonucleotide
ugggcugucggagggaacu

SEQ ID NO: 914556 - RNA, 19 nt, Artificial Sequence
  Description of Artificial Sequence: Synthetic oligonucleotide
gugguuugcaagugccagc

SEQ ID NO: 914557 - RNA, 19 nt, Artificial Sequence
  Description of Artificial Sequence: Synthetic oligonucleotide
cuagagacuuaagcuuugc

SEQ ID NO: 914558 - RNA, 19 nt, Artificial Sequence
  Description of Artificial Sequence: Synthetic oligonucleotide
uuaauucguccgccauuac

SEQ ID NO: 914559 - RNA, 19 nt, Artificial Sequence
  Description of Artificial Sequence: Synthetic oligonucleotide
agggaaugcaaaucccuuu

SEQ ID NO: 914560 - RNA, 19 nt, Artificial Sequence
  Description of Artificial Sequence: Synthetic oligonucleotide
aagggaaugcaaaucccuu

SEQ ID NO: 914561 - RNA, 19 nt, Artificial Sequence
  Description of Artificial Sequence: Synthetic oligonucleotide
agaaccccagcucccaaaa

SEQ ID NO: 914562 - RNA, 19 nt, Artificial Sequence
  Description of Artificial Sequence: Synthetic oligonucleotide
cuguaccccaguuauuaca

SEQ ID NO: 914563 - RNA, 19 nt, Artificial Sequence
  Description of Artificial Sequence: Synthetic oligonucleotide
cugauuuacaggcugcacu

SEQ ID NO: 914564 - RNA, 19 nt, Artificial Sequence
  Description of Artificial Sequence: Synthetic oligonucleotide
ugcugauuuacaggcugca

SEQ ID NO: 914565 - RNA, 19 nt, Artificial Sequence
  Description of Artificial Sequence: Synthetic oligonucleotide
cuuacccugagacauuucu

SEQ ID NO: 914566 - RNA, 19 nt, Artificial Sequence
  Description of Artificial Sequence: Synthetic oligonucleotide
cuacucugaaguucguuaa

SEQ ID NO: 914567 - RNA, 19 nt, Artificial Sequence
  Description of Artificial Sequence: Synthetic oligonucleotide
ugauagccuagagacuuaa

SEQ ID NO: 914568 - RNA, 19 nt, Artificial Sequence
  Description of Artificial Sequence: Synthetic oligonucleotide
agcaaacaugcccuauaaa

SEQ ID NO: 914569 - RNA, 19 nt, Artificial Sequence
  Description of Artificial Sequence: Synthetic oligonucleotide
uccagcgcaugguuguagu

SEQ ID NO: 914570 - RNA, 19 nt, Artificial Sequence
  Description of Artificial Sequence: Synthetic oligonucleotide
acagccucugccaacuugu

SEQ ID NO: 914571 - RNA, 19 nt, Artificial Sequence
  Description of Artificial Sequence: Synthetic oligonucleotide
uagggauggaaacguccaa

SEQ ID NO: 914572 - RNA, 19 nt, Artificial Sequence
  Description of Artificial Sequence: Synthetic oligonucleotide
gaagccaccagcaacuuuu

SEQ ID NO: 914573 - RNA, 19 nt, Artificial Sequence
  Description of Artificial Sequence: Synthetic oligonucleotide
aaaauacguagaaccuuuu

SEQ ID NO: 914574 - RNA, 19 nt, Artificial Sequence
  Description of Artificial Sequence: Synthetic oligonucleotide
gaguaaugugguuggugaa

SEQ ID NO: 914575 - RNA, 19 nt, Artificial Sequence
  Description of Artificial Sequence: Synthetic oligonucleotide
ccugcuuauaguuuauaca

SEQ ID NO: 914576 - RNA, 19 nt, Artificial Sequence
  Description of Artificial Sequence: Synthetic oligonucleotide
aacucacgauuuaucucug

SEQ ID NO: 914577 - RNA, 19 nt, Artificial Sequence
  Description of Artificial Sequence: Synthetic oligonucleotide
uuuccgagcuggagcacuc

SEQ ID NO: 914578 - RNA, 19 nt, Artificial Sequence
  Description of Artificial Sequence: Synthetic oligonucleotide
cucggugauagccuagaga

SEQ ID NO: 914579 - RNA, 19 nt, Artificial Sequence
  Description of Artificial Sequence: Synthetic oligonucleotide
gucuacuggugcuggaauc

SEQ ID NO: 914580 - RNA, 19 nt, Artificial Sequence
  Description of Artificial Sequence: Synthetic oligonucleotide
cagguaacgggauccaaaa

SEQ ID NO: 914581 - RNA, 19 nt, Artificial Sequence
  Description of Artificial Sequence: Synthetic oligonucleotide
auucguccgccauuacccu

SEQ ID NO: 914582 - RNA, 19 nt, Artificial Sequence
  Description of Artificial Sequence: Synthetic oligonucleotide
caauugaaaguuauauuuu

SEQ ID NO: 914583 - RNA, 19 nt, Artificial Sequence
  Description of Artificial Sequence: Synthetic oligonucleotide
agcuuucuguacagguaac

SEQ ID NO: 914584 - RNA, 19 nt, Artificial Sequence
  Description of Artificial Sequence: Synthetic oligonucleotide
ccaguuauuacacuagcaa

SEQ ID NO: 914585 - RNA, 19 nt, Artificial Sequence
  Description of Artificial Sequence: Synthetic oligonucleotide
cugauuggggucgaaguga

SEQ ID NO: 914586 - RNA, 19 nt, Artificial Sequence
  Description of Artificial Sequence: Synthetic oligonucleotide
cuucucggugauagccuag

SEQ ID NO: 914587 - RNA, 19 nt, Artificial Sequence
  Description of Artificial Sequence: Synthetic oligonucleotide
aguucucccuugcaaugau

SEQ ID NO: 914588 - RNA, 19 nt, Artificial Sequence
  Description of Artificial Sequence: Synthetic oligonucleotide
cugauuuguccaacuacaa

SEQ ID NO: 914589 - RNA, 19 nt, Artificial Sequence
  Description of Artificial Sequence: Synthetic oligonucleotide
cagcgcaugguuguaguug

SEQ ID NO: 914590 - RNA, 19 nt, Artificial Sequence
  Description of Artificial Sequence: Synthetic oligonucleotide
uucuuacccugagacauuu

SEQ ID NO: 914591 - RNA, 19 nt, Artificial Sequence
  Description of Artificial Sequence: Synthetic oligonucleotide
ccgggcuagacguucaaag

SEQ ID NO: 914592 - RNA, 19 nt, Artificial Sequence
  Description of Artificial Sequence: Synthetic oligonucleotide
ugcuugcgaggaauuugcu

SEQ ID NO: 914593 - RNA, 19 nt, Artificial Sequence
  Description of Artificial Sequence: Synthetic oligonucleotide
ccgccuuucagaauucuug

SEQ ID NO: 914594 - RNA, 19 nt, Artificial Sequence
  Description of Artificial Sequence: Synthetic oligonucleotide
acucacgauuuaucucugu

SEQ ID NO: 914595 - RNA, 19 nt, Artificial Sequence
  Description of Artificial Sequence: Synthetic oligonucleotide
uucuuacguggacucugaa

SEQ ID NO: 914596 - RNA, 19 nt, Artificial Sequence
  Description of Artificial Sequence: Synthetic oligonucleotide
acguucaaagugauacugu

SEQ ID NO: 914597 - RNA, 19 nt, Artificial Sequence
  Description of Artificial Sequence: Synthetic oligonucleotide
ccugagacauuucuuaaga

SEQ ID NO: 914598 - RNA, 19 nt, Artificial Sequence
  Description of Artificial Sequence: Synthetic oligonucleotide
ggagaccaagaguuccucc

SEQ ID NO: 914599 - RNA, 19 nt, Artificial Sequence
  Description of Artificial Sequence: Synthetic oligonucleotide
acaugcccuauaaaggaau

SEQ ID NO: 914600 - RNA, 19 nt, Artificial Sequence
  Description of Artificial Sequence: Synthetic oligonucleotide
gccauuuucucagcugggg

SEQ ID NO: 914601 - RNA, 19 nt, Artificial Sequence
  Description of Artificial Sequence: Synthetic oligonucleotide
gauuggggucgaagugagg

SEQ ID NO: 914602 - RNA, 19 nt, Artificial Sequence
  Description of Artificial Sequence: Synthetic oligonucleotide
uuggggucgaagugaggau

SEQ ID NO: 914603 - RNA, 19 nt, Artificial Sequence
  Description of Artificial Sequence: Synthetic oligonucleotide
ggaaacuaguacaugaaau

SEQ ID NO: 914604 - RNA, 19 nt, Artificial Sequence
  Description of Artificial Sequence: Synthetic oligonucleotide
agccauuuucucagcuggg

SEQ ID NO: 914605 - RNA, 19 nt, Artificial Sequence
  Description of Artificial Sequence: Synthetic oligonucleotide
guaaggagaccaagaguuc

SEQ ID NO: 914606 - RNA, 19 nt, Artificial Sequence
  Description of Artificial Sequence: Synthetic oligonucleotide
gggucuguaacuaccucug

SEQ ID NO: 914607 - RNA, 19 nt, Artificial Sequence
  Description of Artificial Sequence: Synthetic oligonucleotide
aucccuuuaccuggguugu

SEQ ID NO: 914608 - RNA, 19 nt, Artificial Sequence
  Description of Artificial Sequence: Synthetic oligonucleotide
gaccuagugcuucguuuuc

SEQ ID NO: 914609 - RNA, 19 nt, Artificial Sequence
  Description of Artificial Sequence: Synthetic oligonucleotide
gcuguguuucgaccuagug

SEQ ID NO: 914610 - RNA, 19 nt, Artificial Sequence
  Description of Artificial Sequence: Synthetic oligonucleotide
auaugucuacauagcuuca

SEQ ID NO: 914611 - RNA, 19 nt, Artificial Sequence
  Description of Artificial Sequence: Synthetic oligonucleotide
ggaguugguuugaaaggcc

SEQ ID NO: 914612 - RNA, 19 nt, Artificial Sequence
  Description of Artificial Sequence: Synthetic oligonucleotide
uucgaccuagugcuucguu

SEQ ID NO: 914613 - RNA, 19 nt, Artificial Sequence
  Description of Artificial Sequence: Synthetic oligonucleotide
cagcaauugaaaguuauau

SEQ ID NO: 914614 - RNA, 19 nt, Artificial Sequence
  Description of Artificial Sequence: Synthetic oligonucleotide
gguauagggauggaaacgu

SEQ ID NO: 914615 - RNA, 19 nt, Artificial Sequence
  Description of Artificial Sequence: Synthetic oligonucleotide
gaguugguuugaaaggccu

SEQ ID NO: 914616 - RNA, 19 nt, Artificial Sequence
  Description of Artificial Sequence: Synthetic oligonucleotide
ucgaagugaggaugccuuu

SEQ ID NO: 914617 - RNA, 19 nt, Artificial Sequence
  Description of Artificial Sequence: Synthetic oligonucleotide
ggcuagacguucaaaguga

SEQ ID NO: 914618 - RNA, 19 nt, Artificial Sequence
  Description of Artificial Sequence: Synthetic oligonucleotide
uggggaugucaugagugau

SEQ ID NO: 914619 - RNA, 19 nt, Artificial Sequence
  Description of Artificial Sequence: Synthetic oligonucleotide
ugggcuguguuucgaccua

SEQ ID NO: 914620 - RNA, 19 nt, Artificial Sequence
  Description of Artificial Sequence: Synthetic oligonucleotide
acagcaauugaaaguuaua

SEQ ID NO: 914621 - RNA, 19 nt, Artificial Sequence
  Description of Artificial Sequence: Synthetic oligonucleotide
auaaaggaaugggcuugcu

SEQ ID NO: 914622 - RNA, 19 nt, Artificial Sequence
  Description of Artificial Sequence: Synthetic oligonucleotide
uggauuguccggugagcuu

SEQ ID NO: 914623 - RNA, 19 nt, Artificial Sequence
  Description of Artificial Sequence: Synthetic oligonucleotide
ggcgaaacugcucccguuc

SEQ ID NO: 914624 - RNA, 19 nt, Artificial Sequence
  Description of Artificial Sequence: Synthetic oligonucleotide
accuagugcuucguuuucu

SEQ ID NO: 914625 - RNA, 19 nt, Artificial Sequence
  Description of Artificial Sequence: Synthetic oligonucleotide
cagcaucauaagaacccca

SEQ ID NO: 914626 - RNA, 19 nt, Artificial Sequence
  Description of Artificial Sequence: Synthetic oligonucleotide
ccauuacccugcuugcgag

SEQ ID NO: 914627 - RNA, 19 nt, Artificial Sequence
  Description of Artificial Sequence: Synthetic oligonucleotide
agaucauuuccuggcgaaa

SEQ ID NO: 914628 - RNA, 19 nt, Artificial Sequence
  Description of Artificial Sequence: Synthetic oligonucleotide
acucggaguugguuugaaa

SEQ ID NO: 914629 - RNA, 19 nt, Artificial Sequence
  Description of Artificial Sequence: Synthetic oligonucleotide
acgggauccaaaauacgua

SEQ ID NO: 914630 - RNA, 19 nt, Artificial Sequence
  Description of Artificial Sequence: Synthetic oligonucleotide
ccguucacucaggagaucc

SEQ ID NO: 914631 - RNA, 19 nt, Artificial Sequence
  Description of Artificial Sequence: Synthetic oligonucleotide
guauagggauggaaacguc

SEQ ID NO: 914632 - RNA, 19 nt, Artificial Sequence
  Description of Artificial Sequence: Synthetic oligonucleotide
caaugaguucucccuugca

SEQ ID NO: 914633 - RNA, 19 nt, Artificial Sequence
  Description of Artificial Sequence: Synthetic oligonucleotide
auccagcgcaugguuguag

SEQ ID NO: 914634 - RNA, 19 nt, Artificial Sequence
  Description of Artificial Sequence: Synthetic oligonucleotide
uuacccugcuugcgaggaa

SEQ ID NO: 914635 - RNA, 19 nt, Artificial Sequence
  Description of Artificial Sequence: Synthetic oligonucleotide
gcgaggaauuugcuucucc

SEQ ID NO: 914636 - RNA, 19 nt, Artificial Sequence
  Description of Artificial Sequence: Synthetic oligonucleotide
ggugauagccuagagacuu

SEQ ID NO: 914637 - RNA, 19 nt, Artificial Sequence
  Description of Artificial Sequence: Synthetic oligonucleotide
agaaucuuuccgagcugga

SEQ ID NO: 914638 - RNA, 19 nt, Artificial Sequence
  Description of Artificial Sequence: Synthetic oligonucleotide
gccauuacccugcuugcga

SEQ ID NO: 914639 - RNA, 19 nt, Artificial Sequence
  Description of Artificial Sequence: Synthetic oligonucleotide
uaacuaccucuggcugagg

SEQ ID NO: 914640 - RNA, 19 nt, Artificial Sequence
  Description of Artificial Sequence: Synthetic oligonucleotide
uuucgaccuagugcuucgu

SEQ ID NO: 914641 - RNA, 19 nt, Artificial Sequence
  Description of Artificial Sequence: Synthetic oligonucleotide
ggugacuucaacagacuua

SEQ ID NO: 914642 - RNA, 19 nt, Artificial Sequence
  Description of Artificial Sequence: Synthetic oligonucleotide
cggaguugguuugaaaggc

SEQ ID NO: 914643 - RNA, 19 nt, Artificial Sequence
  Description of Artificial Sequence: Synthetic oligonucleotide
ucuuugccucugagaguuc

SEQ ID NO: 914644 - RNA, 19 nt, Artificial Sequence
  Description of Artificial Sequence: Synthetic oligonucleotide
cuuuaccuggguuguuucu

SEQ ID NO: 914645 - RNA, 19 nt, Artificial Sequence
  Description of Artificial Sequence: Synthetic oligonucleotide
ucucgguuuugacgcugua

SEQ ID NO: 914646 - RNA, 19 nt, Artificial Sequence
  Description of Artificial Sequence: Synthetic oligonucleotide
uuccgagcuggagcacucc

SEQ ID NO: 914647 - RNA, 19 nt, Artificial Sequence
  Description of Artificial Sequence: Synthetic oligonucleotide
gauuguccggugagcuuuc

SEQ ID NO: 914648 - RNA, 19 nt, Artificial Sequence
  Description of Artificial Sequence: Synthetic oligonucleotide
cuagacguucaaagugaua

SEQ ID NO: 914649 - RNA, 19 nt, Artificial Sequence
  Description of Artificial Sequence: Synthetic oligonucleotide
caacuacaaccaugcagaa

SEQ ID NO: 914650 - RNA, 19 nt, Artificial Sequence
  Description of Artificial Sequence: Synthetic oligonucleotide
cugccaacuugugguuugc

SEQ ID NO: 914651 - RNA, 19 nt, Artificial Sequence
  Description of Artificial Sequence: Synthetic oligonucleotide
cuguacucggaguugguuu

SEQ ID NO: 914652 - RNA, 19 nt, Artificial Sequence
  Description of Artificial Sequence: Synthetic oligonucleotide
acccuaaaugugaccacaa

SEQ ID NO: 914653 - RNA, 19 nt, Artificial Sequence
  Description of Artificial Sequence: Synthetic oligonucleotide
gguuugaaaggccuucuuu

SEQ ID NO: 914654 - RNA, 19 nt, Artificial Sequence
  Description of Artificial Sequence: Synthetic oligonucleotide
uggcgaaacugcucccguu

SEQ ID NO: 914655 - RNA, 19 nt, Artificial Sequence
  Description of Artificial Sequence: Synthetic oligonucleotide
ccuuuaccuggguuguuuc

SEQ ID NO: 914656 - RNA, 19 nt, Artificial Sequence
  Description of Artificial Sequence: Synthetic oligonucleotide
cgcuguaaaacuacucuga

SEQ ID NO: 914657 - RNA, 19 nt, Artificial Sequence
  Description of Artificial Sequence: Synthetic oligonucleotide
guuuuagcacaaacacugu

SEQ ID NO: 914658 - RNA, 19 nt, Artificial Sequence
  Description of Artificial Sequence: Synthetic oligonucleotide
cucgguuuugacgcuguaa

SEQ ID NO: 914659 - RNA, 19 nt, Artificial Sequence
  Description of Artificial Sequence: Synthetic oligonucleotide
gcagauuaggucacaggaa

SEQ ID NO: 914660 - RNA, 19 nt, Artificial Sequence
  Description of Artificial Sequence: Synthetic oligonucleotide
ugcgaggaauuugcuucuc

SEQ ID NO: 914661 - RNA, 19 nt, Artificial Sequence
  Description of Artificial Sequence: Synthetic oligonucleotide
gucgaagugaggaugccuu

SEQ ID NO: 914662 - RNA, 19 nt, Artificial Sequence
  Description of Artificial Sequence: Synthetic oligonucleotide
caagugccagcccugcugu

SEQ ID NO: 914663 - RNA, 19 nt, Artificial Sequence
  Description of Artificial Sequence: Synthetic oligonucleotide
ggauggaaacguccaauau

SEQ ID NO: 914664 - RNA, 19 nt, Artificial Sequence
  Description of Artificial Sequence: Synthetic oligonucleotide
ccuaacguauuuguuuaga

SEQ ID NO: 914665 - RNA, 19 nt, Artificial Sequence
  Description of Artificial Sequence: Synthetic oligonucleotide
agcucccaaaacacauuaa

SEQ ID NO: 914666 - RNA, 19 nt, Artificial Sequence
  Description of Artificial Sequence: Synthetic oligonucleotide
guggacucugaaggacaug

SEQ ID NO: 914667 - RNA, 19 nt, Artificial Sequence
  Description of Artificial Sequence: Synthetic oligonucleotide
gaggugacuucaacagacu

SEQ ID NO: 914668 - RNA, 19 nt, Artificial Sequence
  Description of Artificial Sequence: Synthetic oligonucleotide
cgaggaauuugcuucucca

SEQ ID NO: 914669 - RNA, 19 nt, Artificial Sequence
  Description of Artificial Sequence: Synthetic oligonucleotide
ucccgggcuagacguucaa

SEQ ID NO: 914670 - RNA, 19 nt, Artificial Sequence
  Description of Artificial Sequence: Synthetic oligonucleotide
ggggcuguguguuggggaa

SEQ ID NO: 914671 - RNA, 19 nt, Artificial Sequence
  Description of Artificial Sequence: Synthetic oligonucleotide
cuaguacaugaaauaucuu

SEQ ID NO: 914672 - RNA, 19 nt, Artificial Sequence
  Description of Artificial Sequence: Synthetic oligonucleotide
ccgccauuacccugcuugc

SEQ ID NO: 914673 - RNA, 19 nt, Artificial Sequence
  Description of Artificial Sequence: Synthetic oligonucleotide
uucucccgggcuagacguu

SEQ ID NO: 914674 - RNA, 19 nt, Artificial Sequence
  Description of Artificial Sequence: Synthetic oligonucleotide
cugggcugucggagggaac

SEQ ID NO: 914675 - RNA, 19 nt, Artificial Sequence
  Description of Artificial Sequence: Synthetic oligonucleotide
cgcaugguuguaguugacc

SEQ ID NO: 914676 - RNA, 19 nt, Artificial Sequence
  Description of Artificial Sequence: Synthetic oligonucleotide
auuguccggugagcuuucu

SEQ ID NO: 914677 - RNA, 19 nt, Artificial Sequence
  Description of Artificial Sequence: Synthetic oligonucleotide
guaccccaguuauuacacu

SEQ ID NO: 914678 - RNA, 19 nt, Artificial Sequence
  Description of Artificial Sequence: Synthetic oligonucleotide
agccgccuuucagaauucu

SEQ ID NO: 914679 - RNA, 19 nt, Artificial Sequence
  Description of Artificial Sequence: Synthetic oligonucleotide
cggagggaacuuucuuacg

SEQ ID NO: 914680 - RNA, 19 nt, Artificial Sequence
  Description of Artificial Sequence: Synthetic oligonucleotide
gacuuaagcuuugcauuuu

SEQ ID NO: 914681 - RNA, 19 nt, Artificial Sequence
  Description of Artificial Sequence: Synthetic oligonucleotide
cacuagcaaacaugcccua

SEQ ID NO: 914682 - RNA, 19 nt, Artificial Sequence
  Description of Artificial Sequence: Synthetic oligonucleotide
cuuuccgagcuggagcacu

SEQ ID NO: 914683 - RNA, 19 nt, Artificial Sequence
  Description of Artificial Sequence: Synthetic oligonucleotide
gcugucggagggaacuuuc

SEQ ID NO: 914684 - RNA, 19 nt, Artificial Sequence
  Description of Artificial Sequence: Synthetic oligonucleotide
ccgagcuggagcacuccug

SEQ ID NO: 914685 - RNA, 19 nt, Artificial Sequence
  Description of Artificial Sequence: Synthetic oligonucleotide
cugucggagggaacuuucu

SEQ ID NO: 914686 - RNA, 19 nt, Artificial Sequence
  Description of Artificial Sequence: Synthetic oligonucleotide
ggauuguccggugagcuuu

SEQ ID NO: 914687 - RNA, 19 nt, Artificial Sequence
  Description of Artificial Sequence: Synthetic oligonucleotide
gcucuaaaauauguuuuau

SEQ ID NO: 914688 - RNA, 19 nt, Artificial Sequence
  Description of Artificial Sequence: Synthetic oligonucleotide
ggaagcagauuaggucaca

SEQ ID NO: 914689 - RNA, 19 nt, Artificial Sequence
  Description of Artificial Sequence: Synthetic oligonucleotide
augugaccacaaagggaau

SEQ ID NO: 914690 - RNA, 19 nt, Artificial Sequence
  Description of Artificial Sequence: Synthetic oligonucleotide
gugauagccuagagacuua

SEQ ID NO: 914691 - RNA, 19 nt, Artificial Sequence
  Description of Artificial Sequence: Synthetic oligonucleotide
ccuagugcuucguuuucua

SEQ ID NO: 914692 - RNA, 19 nt, Artificial Sequence
  Description of Artificial Sequence: Synthetic oligonucleotide
gggucgaagugaggaugcc

SEQ ID NO: 914693 - RNA, 19 nt, Artificial Sequence
  Description of Artificial Sequence: Synthetic oligonucleotide
gcuugcgaggaauuugcuu

SEQ ID NO: 914694 - RNA, 19 nt, Artificial Sequence
  Description of Artificial Sequence: Synthetic oligonucleotide
cuggcgaaacugcucccgu

SEQ ID NO: 914695 - RNA, 19 nt, Artificial Sequence
  Description of Artificial Sequence: Synthetic oligonucleotide
ccauuuucucagcuggggu

SEQ ID NO: 914696 - RNA, 19 nt, Artificial Sequence
  Description of Artificial Sequence: Synthetic oligonucleotide
ucccuuuaccuggguuguu

SEQ ID NO: 914697 - RNA, 19 nt, Artificial Sequence
  Description of Artificial Sequence: Synthetic oligonucleotide
ggcuugcuaaccccacacu

SEQ ID NO: 914698 - RNA, 19 nt, Artificial Sequence
  Description of Artificial Sequence: Synthetic oligonucleotide
cgccauuacccugcuugcg

SEQ ID NO: 914699 - RNA, 19 nt, Artificial Sequence
  Description of Artificial Sequence: Synthetic oligonucleotide
gcagaagacacaacaccuu

SEQ ID NO: 914700 - RNA, 19 nt, Artificial Sequence
  Description of Artificial Sequence: Synthetic oligonucleotide
gcuagacguucaaagugau

SEQ ID NO: 914701 - RNA, 19 nt, Artificial Sequence
  Description of Artificial Sequence: Synthetic oligonucleotide
cgguuuugacgcuguaaaa

SEQ ID NO: 914702 - RNA, 19 nt, Artificial Sequence
  Description of Artificial Sequence: Synthetic oligonucleotide
cauccagcgcaugguugua

SEQ ID NO: 914703 - RNA, 19 nt, Artificial Sequence
  Description of Artificial Sequence: Synthetic oligonucleotide
guucucccuugcaaugauu

SEQ ID NO: 914704 - RNA, 19 nt, Artificial Sequence
  Description of Artificial Sequence: Synthetic oligonucleotide
gcaucucgguuuugacgcu

SEQ ID NO: 914705 - RNA, 19 nt, Artificial Sequence
  Description of Artificial Sequence: Synthetic oligonucleotide
cgggcuagacguucaaagu

SEQ ID NO: 914706 - RNA, 19 nt, Artificial Sequence
  Description of Artificial Sequence: Synthetic oligonucleotide
cguuaauucguccgccauu

SEQ ID NO: 914707 - RNA, 19 nt, Artificial Sequence
  Description of Artificial Sequence: Synthetic oligonucleotide
guguuucgaccuagugcuu

SEQ ID NO: 914708 - RNA, 19 nt, Artificial Sequence
  Description of Artificial Sequence: Synthetic oligonucleotide
cguucacucaggagauccu

SEQ ID NO: 914709 - RNA, 19 nt, Artificial Sequence
  Description of Artificial Sequence: Synthetic oligonucleotide
gacauccguuccagcuguu

SEQ ID NO: 914710 - RNA, 19 nt, Artificial Sequence
  Description of Artificial Sequence: Synthetic oligonucleotide
cccguucacucaggagauc

SEQ ID NO: 914711 - RNA, 19 nt, Artificial Sequence
  Description of Artificial Sequence: Synthetic oligonucleotide
cggugauagccuagagacu

SEQ ID NO: 914712 - RNA, 19 nt, Artificial Sequence
  Description of Artificial Sequence: Synthetic oligonucleotide
gccgccuuucagaauucuu

SEQ ID NO: 914713 - RNA, 19 nt, Artificial Sequence
  Description of Artificial Sequence: Synthetic oligonucleotide
gcguccacuuccacugcuu

SEQ ID NO: 914714 - RNA, 19 nt, Artificial Sequence
  Description of Artificial Sequence: Synthetic oligonucleotide
cccugcuugcgaggaauuu

SEQ ID NO: 914715 - RNA, 19 nt, Artificial Sequence
  Description of Artificial Sequence: Synthetic oligonucleotide
ggcugaggguggacuucuu

SEQ ID NO: 914716 - RNA, 19 nt, Artificial Sequence
  Description of Artificial Sequence: Synthetic oligonucleotide
agcauguuuaaucugaugc

SEQ ID NO: 914717 - RNA, 19 nt, Artificial Sequence
  Description of Artificial Sequence: Synthetic oligonucleotide
aacucaugaaccuuaaaac

SEQ ID NO: 914718 - RNA, 19 nt, Artificial Sequence
  Description of Artificial Sequence: Synthetic oligonucleotide
uaagauuaaagccaaguag

SEQ ID NO: 914719 - RNA, 19 nt, Artificial Sequence
  Description of Artificial Sequence: Synthetic oligonucleotide
uauaaguuguacaauagcc

SEQ ID NO: 914720 - RNA, 19 nt, Artificial Sequence
  Description of Artificial Sequence: Synthetic oligonucleotide
acaaauaauaccccagucc

SEQ ID NO: 914721 - RNA, 19 nt, Artificial Sequence
  Description of Artificial Sequence: Synthetic oligonucleotide
ugaaccuuaaaacuggacc

SEQ ID NO: 914722 - RNA, 19 nt, Artificial Sequence
  Description of Artificial Sequence: Synthetic oligonucleotide
aaauaagccaccugcaaag

SEQ ID NO: 914723 - RNA, 19 nt, Artificial Sequence
  Description of Artificial Sequence: Synthetic oligonucleotide
ugagcuauacaucaguaag

SEQ ID NO: 914724 - RNA, 19 nt, Artificial Sequence
  Description of Artificial Sequence: Synthetic oligonucleotide
aucacauauaacauaaucc

SEQ ID NO: 914725 - RNA, 19 nt, Artificial Sequence
  Description of Artificial Sequence: Synthetic oligonucleotide
ucuacacagaggcagaggg

SEQ ID NO: 914726 - RNA, 19 nt, Artificial Sequence
  Description of Artificial Sequence: Synthetic oligonucleotide
ucacauauaacauaaucca

SEQ ID NO: 914727 - RNA, 19 nt, Artificial Sequence
  Description of Artificial Sequence: Synthetic oligonucleotide
uccaauguaaauaagccac

SEQ ID NO: 914728 - RNA, 19 nt, Artificial Sequence
  Description of Artificial Sequence: Synthetic oligonucleotide
cagcauacaaauaauaccc

SEQ ID NO: 914729 - RNA, 19 nt, Artificial Sequence
  Description of Artificial Sequence: Synthetic oligonucleotide
uuuaaaucccuccuccccg

SEQ ID NO: 914730 - RNA, 19 nt, Artificial Sequence
  Description of Artificial Sequence: Synthetic oligonucleotide
auuuaaaucccuccucccc

SEQ ID NO: 914731 - RNA, 19 nt, Artificial Sequence
  Description of Artificial Sequence: Synthetic oligonucleotide
ucuaacuauagcaucuucc

SEQ ID NO: 914732 - RNA, 19 nt, Artificial Sequence
  Description of Artificial Sequence: Synthetic oligonucleotide
gucuccauaaaacaugucg

SEQ ID NO: 914733 - RNA, 19 nt, Artificial Sequence
  Description of Artificial Sequence: Synthetic oligonucleotide
ugugauaauuaucacauau

SEQ ID NO: 914734 - RNA, 19 nt, Artificial Sequence
  Description of Artificial Sequence: Synthetic oligonucleotide
cagaacacuacacagaccc

SEQ ID NO: 914735 - RNA, 19 nt, Artificial Sequence
  Description of Artificial Sequence: Synthetic oligonucleotide
uguccuaggaagaacagug

SEQ ID NO: 914736 - RNA, 19 nt, Artificial Sequence
  Description of Artificial Sequence: Synthetic oligonucleotide
ucuaguuucgucaccacug

SEQ ID NO: 914737 - RNA, 19 nt, Artificial Sequence
  Description of Artificial Sequence: Synthetic oligonucleotide
uuagucuccauaaaacaug

SEQ ID NO: 914738 - RNA, 19 nt, Artificial Sequence
  Description of Artificial Sequence: Synthetic oligonucleotide
aagauuaaagccaaguaga

SEQ ID NO: 914739 - RNA, 19 nt, Artificial Sequence
  Description of Artificial Sequence: Synthetic oligonucleotide
ucuuuagucuccauaaaac

SEQ ID NO: 914740 - RNA, 19 nt, Artificial Sequence
  Description of Artificial Sequence: Synthetic oligonucleotide
aauaucuuccgcugcaugu

SEQ ID NO: 914741 - RNA, 19 nt, Artificial Sequence
  Description of Artificial Sequence: Synthetic oligonucleotide
uggauucuagucaagaagu

SEQ ID NO: 914742 - RNA, 19 nt, Artificial Sequence
  Description of Artificial Sequence: Synthetic oligonucleotide
uaaauaagcacugaacaga

SEQ ID NO: 914743 - RNA, 19 nt, Artificial Sequence
  Description of Artificial Sequence: Synthetic oligonucleotide
aacauagucacaagcuccc

SEQ ID NO: 914744 - RNA, 19 nt, Artificial Sequence
  Description of Artificial Sequence: Synthetic oligonucleotide
ugaaguggggaaaacagcu

SEQ ID NO: 914745 - RNA, 19 nt, Artificial Sequence
  Description of Artificial Sequence: Synthetic oligonucleotide
uccaaaauuaagugcauga

SEQ ID NO: 914746 - RNA, 19 nt, Artificial Sequence
  Description of Artificial Sequence: Synthetic oligonucleotide
accucgagguaacagaccc

SEQ ID NO: 914747 - RNA, 19 nt, Artificial Sequence
  Description of Artificial Sequence: Synthetic oligonucleotide
caagcauccaggaacauug

SEQ ID NO: 914748 - RNA, 19 nt, Artificial Sequence
  Description of Artificial Sequence: Synthetic oligonucleotide
aauguaaauaagccaccug

SEQ ID NO: 914749 - RNA, 19 nt, Artificial Sequence
  Description of Artificial Sequence: Synthetic oligonucleotide
uauucagcagcauacaaau

SEQ ID NO: 914750 - RNA, 19 nt, Artificial Sequence
  Description of Artificial Sequence: Synthetic oligonucleotide
ucuuuaccaaaacauaguc

SEQ ID NO: 914751 - RNA, 19 nt, Artificial Sequence
  Description of Artificial Sequence: Synthetic oligonucleotide
gaacauuguacaaagugcc

SEQ ID NO: 914752 - RNA, 19 nt, Artificial Sequence
  Description of Artificial Sequence: Synthetic oligonucleotide
ucuccauaaaacaugucgu

SEQ ID NO: 914753 - RNA, 19 nt, Artificial Sequence
  Description of Artificial Sequence: Synthetic oligonucleotide
cuuuuaacacugauggggc

SEQ ID NO: 914754 - RNA, 19 nt, Artificial Sequence
  Description of Artificial Sequence: Synthetic oligonucleotide
aaaagggccaagaaucuuc

SEQ ID NO: 914755 - RNA, 19 nt, Artificial Sequence
  Description of Artificial Sequence: Synthetic oligonucleotide
augaccuuaggcuuaaugu

SEQ ID NO: 914756 - RNA, 19 nt, Artificial Sequence
  Description of Artificial Sequence: Synthetic oligonucleotide
cucaugaaccuuaaaacug

SEQ ID NO: 914757 - RNA, 19 nt, Artificial Sequence
  Description of Artificial Sequence: Synthetic oligonucleotide
gaaccuuaaaacuggacca

SEQ ID NO: 914758 - RNA, 19 nt, Artificial Sequence
  Description of Artificial Sequence: Synthetic oligonucleotide
uuauauacaggaccaauuu

SEQ ID NO: 914759 - RNA, 19 nt, Artificial Sequence
  Description of Artificial Sequence: Synthetic oligonucleotide
acucaugaaccuuaaaacu

SEQ ID NO: 914760 - RNA, 19 nt, Artificial Sequence
  Description of Artificial Sequence: Synthetic oligonucleotide
acucacugcucccacauac

SEQ ID NO: 914761 - RNA, 19 nt, Artificial Sequence
  Description of Artificial Sequence: Synthetic oligonucleotide
uccugugagaugaagaaaa

SEQ ID NO: 914762 - RNA, 19 nt, Artificial Sequence
  Description of Artificial Sequence: Synthetic oligonucleotide
agaacguuuucacugcuag

SEQ ID NO: 914763 - RNA, 19 nt, Artificial Sequence
  Description of Artificial Sequence: Synthetic oligonucleotide
aaguagaugugauaauuau

SEQ ID NO: 914764 - RNA, 19 nt, Artificial Sequence
  Description of Artificial Sequence: Synthetic oligonucleotide
uuuauauacaggaccaauu

SEQ ID NO: 914765 - RNA, 19 nt, Artificial Sequence
  Description of Artificial Sequence: Synthetic oligonucleotide
acagaauggauucuaguca

SEQ ID NO: 914766 - RNA, 19 nt, Artificial Sequence
  Description of Artificial Sequence: Synthetic oligonucleotide
uguaacugaucugaggaag

SEQ ID NO: 914767 - RNA, 19 nt, Artificial Sequence
  Description of Artificial Sequence: Synthetic oligonucleotide
aauaauaccccagucccca

SEQ ID NO: 914768 - RNA, 19 nt, Artificial Sequence
  Description of Artificial Sequence: Synthetic oligonucleotide
aguucuccauucuuuaguc

SEQ ID NO: 914769 - RNA, 19 nt, Artificial Sequence
  Description of Artificial Sequence: Synthetic oligonucleotide
agcaauggugguuugcuuc

SEQ ID NO: 914770 - RNA, 19 nt, Artificial Sequence
  Description of Artificial Sequence: Synthetic oligonucleotide
agucaagaagucuuuacca

SEQ ID NO: 914771 - RNA, 19 nt, Artificial Sequence
  Description of Artificial Sequence: Synthetic oligonucleotide
ucugguuucaaaugaauuu

SEQ ID NO: 914772 - RNA, 19 nt, Artificial Sequence
  Description of Artificial Sequence: Synthetic oligonucleotide
acacacuaacucaugaacc

SEQ ID NO: 914773 - RNA, 19 nt, Artificial Sequence
  Description of Artificial Sequence: Synthetic oligonucleotide
uuaggcuuaauguucucca

SEQ ID NO: 914774 - RNA, 19 nt, Artificial Sequence
  Description of Artificial Sequence: Synthetic oligonucleotide
augaucaguucauggaggg

SEQ ID NO: 914775 - RNA, 19 nt, Artificial Sequence
  Description of Artificial Sequence: Synthetic oligonucleotide
ugaacagaauggauucuag

SEQ ID NO: 914776 - RNA, 19 nt, Artificial Sequence
  Description of Artificial Sequence: Synthetic oligonucleotide
uaacagacccagcacaaug

SEQ ID NO: 914777 - RNA, 19 nt, Artificial Sequence
  Description of Artificial Sequence: Synthetic oligonucleotide
ucaacuguaccauggaguc

SEQ ID NO: 914778 - RNA, 19 nt, Artificial Sequence
  Description of Artificial Sequence: Synthetic oligonucleotide
ugcuagaauaagaggaaca

SEQ ID NO: 914779 - RNA, 19 nt, Artificial Sequence
  Description of Artificial Sequence: Synthetic oligonucleotide
gaaaaucaaacaugucgug

SEQ ID NO: 914780 - RNA, 19 nt, Artificial Sequence
  Description of Artificial Sequence: Synthetic oligonucleotide
aacguuuucacugcuagaa

SEQ ID NO: 914781 - RNA, 19 nt, Artificial Sequence
  Description of Artificial Sequence: Synthetic oligonucleotide
gacccuacaucacagaaca

SEQ ID NO: 914782 - RNA, 19 nt, Artificial Sequence
  Description of Artificial Sequence: Synthetic oligonucleotide
agucuuuaccaaaacauag

SEQ ID NO: 914783 - RNA, 19 nt, Artificial Sequence
  Description of Artificial Sequence: Synthetic oligonucleotide
uggcucauucuacacagag

SEQ ID NO: 914784 - RNA, 19 nt, Artificial Sequence
  Description of Artificial Sequence: Synthetic oligonucleotide
ugaggauacaugaaucaaa

SEQ ID NO: 914785 - RNA, 19 nt, Artificial Sequence
  Description of Artificial Sequence: Synthetic oligonucleotide
ggauacaugaaucaaacaa

SEQ ID NO: 914786 - RNA, 19 nt, Artificial Sequence
  Description of Artificial Sequence: Synthetic oligonucleotide
cuauuaugcugagacaucc

SEQ ID NO: 914787 - RNA, 19 nt, Artificial Sequence
  Description of Artificial Sequence: Synthetic oligonucleotide
gaccaauuuaaaucccucc

SEQ ID NO: 914788 - RNA, 19 nt, Artificial Sequence
  Description of Artificial Sequence: Synthetic oligonucleotide
cucgccauaucucauacug

SEQ ID NO: 914789 - RNA, 19 nt, Artificial Sequence
  Description of Artificial Sequence: Synthetic oligonucleotide
aagaacagugauaauuuga

SEQ ID NO: 914790 - RNA, 19 nt, Artificial Sequence
  Description of Artificial Sequence: Synthetic oligonucleotide
cuaacuauagcaucuucca

SEQ ID NO: 914791 - RNA, 19 nt, Artificial Sequence
  Description of Artificial Sequence: Synthetic oligonucleotide
guuguuuguuccuacccag

SEQ ID NO: 914792 - RNA, 19 nt, Artificial Sequence
  Description of Artificial Sequence: Synthetic oligonucleotide
aaggauucuguagugccag

SEQ ID NO: 914793 - RNA, 19 nt, Artificial Sequence
  Description of Artificial Sequence: Synthetic oligonucleotide
cagaaugagcuauacauca

SEQ ID NO: 914794 - RNA, 19 nt, Artificial Sequence
  Description of Artificial Sequence: Synthetic oligonucleotide
agcauacaaauaauacccc

SEQ ID NO: 914795 - RNA, 19 nt, Artificial Sequence
  Description of Artificial Sequence: Synthetic oligonucleotide
gaggauacaugaaucaaac

SEQ ID NO: 914796 - RNA, 19 nt, Artificial Sequence
  Description of Artificial Sequence: Synthetic oligonucleotide
ucacuucuaacuauagcau

SEQ ID NO: 914797 - RNA, 19 nt, Artificial Sequence
  Description of Artificial Sequence: Synthetic oligonucleotide
uaccaaaacauagucacaa

SEQ ID NO: 914798 - RNA, 19 nt, Artificial Sequence
  Description of Artificial Sequence: Synthetic oligonucleotide
aaauaagcacugaacagaa

SEQ ID NO: 914799 - RNA, 19 nt, Artificial Sequence
  Description of Artificial Sequence: Synthetic oligonucleotide
auagucacaagcuccccug

SEQ ID NO: 914800 - RNA, 19 nt, Artificial Sequence
  Description of Artificial Sequence: Synthetic oligonucleotide
aacacuacacagacccuac

SEQ ID NO: 914801 - RNA, 19 nt, Artificial Sequence
  Description of Artificial Sequence: Synthetic oligonucleotide
cauauuguacucgugcuug

SEQ ID NO: 914802 - RNA, 19 nt, Artificial Sequence
  Description of Artificial Sequence: Synthetic oligonucleotide
gauuaaagccaaguagaug

SEQ ID NO: 914803 - RNA, 19 nt, Artificial Sequence
  Description of Artificial Sequence: Synthetic oligonucleotide
cuugaauaucuuccgcugc

SEQ ID NO: 914804 - RNA, 19 nt, Artificial Sequence
  Description of Artificial Sequence: Synthetic oligonucleotide
gguguaacugaucugagga

SEQ ID NO: 914805 - RNA, 19 nt, Artificial Sequence
  Description of Artificial Sequence: Synthetic oligonucleotide
cacugaacagaauggauuc

SEQ ID NO: 914806 - RNA, 19 nt, Artificial Sequence
  Description of Artificial Sequence: Synthetic oligonucleotide
acaacacacuaacucauga

SEQ ID NO: 914807 - RNA, 19 nt, Artificial Sequence
  Description of Artificial Sequence: Synthetic oligonucleotide
augaaguggggaaaacagc

SEQ ID NO: 914808 - RNA, 19 nt, Artificial Sequence
  Description of Artificial Sequence: Synthetic oligonucleotide
uuuuaacacugauggggcc

SEQ ID NO: 914809 - RNA, 19 nt, Artificial Sequence
  Description of Artificial Sequence: Synthetic oligonucleotide
aacaugucguguugugucu

SEQ ID NO: 914810 - RNA, 19 nt, Artificial Sequence
  Description of Artificial Sequence: Synthetic oligonucleotide
ucggcagggaaacuuugag

SEQ ID NO: 914811 - RNA, 19 nt, Artificial Sequence
  Description of Artificial Sequence: Synthetic oligonucleotide
ugggcuucucaccucgagg

SEQ ID NO: 914812 - RNA, 19 nt, Artificial Sequence
  Description of Artificial Sequence: Synthetic oligonucleotide
aagcauguuuaaucugaug

SEQ ID NO: 914813 - RNA, 19 nt, Artificial Sequence
  Description of Artificial Sequence: Synthetic oligonucleotide
uuaauguucuccaguucuc

SEQ ID NO: 914814 - RNA, 19 nt, Artificial Sequence
  Description of Artificial Sequence: Synthetic oligonucleotide
uccauaaaacaugucgugu

SEQ ID NO: 914815 - RNA, 19 nt, Artificial Sequence
  Description of Artificial Sequence: Synthetic oligonucleotide
ucaccucgagguaacagac

SEQ ID NO: 914816 - RNA, 19 nt, Artificial Sequence
  Description of Artificial Sequence: Synthetic oligonucleotide
ucgugcuugauguuguccu

SEQ ID NO: 914817 - RNA, 19 nt, Artificial Sequence
  Description of Artificial Sequence: Synthetic oligonucleotide
auauuugagugacaagcau

SEQ ID NO: 914818 - RNA, 19 nt, Artificial Sequence
  Description of Artificial Sequence: Synthetic oligonucleotide
ugaccuuaggcuuaauguu

SEQ ID NO: 914819 - RNA, 19 nt, Artificial Sequence
  Description of Artificial Sequence: Synthetic oligonucleotide
uccccgucaaacauuagau

SEQ ID NO: 914820 - RNA, 19 nt, Artificial Sequence
  Description of Artificial Sequence: Synthetic oligonucleotide
cauauuugagugacaagca

SEQ ID NO: 914821 - RNA, 19 nt, Artificial Sequence
  Description of Artificial Sequence: Synthetic oligonucleotide
acuucuaacuauagcaucu

SEQ ID NO: 914822 - RNA, 19 nt, Artificial Sequence
  Description of Artificial Sequence: Synthetic oligonucleotide
aaccuauuaugcugagaca

SEQ ID NO: 914823 - RNA, 19 nt, Artificial Sequence
  Description of Artificial Sequence: Synthetic oligonucleotide
agcuauacaucaguaaggu

SEQ ID NO: 914824 - RNA, 19 nt, Artificial Sequence
  Description of Artificial Sequence: Synthetic oligonucleotide
ugccuuguauuuauaaguu

SEQ ID NO: 914825 - RNA, 19 nt, Artificial Sequence
  Description of Artificial Sequence: Synthetic oligonucleotide
accaaaacauagucacaag

SEQ ID NO: 914826 - RNA, 19 nt, Artificial Sequence
  Description of Artificial Sequence: Synthetic oligonucleotide
uggaauagcugcuggguuc

SEQ ID NO: 914827 - RNA, 19 nt, Artificial Sequence
  Description of Artificial Sequence: Synthetic oligonucleotide
auucuguagugccaguggu

SEQ ID NO: 914828 - RNA, 19 nt, Artificial Sequence
  Description of Artificial Sequence: Synthetic oligonucleotide
uauaacccuggcaauguuu

SEQ ID NO: 914829 - RNA, 19 nt, Artificial Sequence
  Description of Artificial Sequence: Synthetic oligonucleotide
augaaucaaacaaaacaca

SEQ ID NO: 914830 - RNA, 19 nt, Artificial Sequence
  Description of Artificial Sequence: Synthetic oligonucleotide
ucacaagcuccccugggga

SEQ ID NO: 914831 - RNA, 19 nt, Artificial Sequence
  Description of Artificial Sequence: Synthetic oligonucleotide
agugccuuaagaaaggauu

SEQ ID NO: 914832 - RNA, 19 nt, Artificial Sequence
  Description of Artificial Sequence: Synthetic oligonucleotide
aucaacuguaccauggagu

SEQ ID NO: 914833 - RNA, 19 nt, Artificial Sequence
  Description of Artificial Sequence: Synthetic oligonucleotide
uaggcuuaauguucuccag

SEQ ID NO: 914834 - RNA, 19 nt, Artificial Sequence
  Description of Artificial Sequence: Synthetic oligonucleotide
ucaggagcugaucacgcuc

SEQ ID NO: 914835 - RNA, 19 nt, Artificial Sequence
  Description of Artificial Sequence: Synthetic oligonucleotide
ucauauuguacucgugcuu

SEQ ID NO: 914836 - RNA, 19 nt, Artificial Sequence
  Description of Artificial Sequence: Synthetic oligonucleotide
aaauaagauuaaagccaag

SEQ ID NO: 914837 - RNA, 19 nt, Artificial Sequence
  Description of Artificial Sequence: Synthetic oligonucleotide
auaacccuggcaauguuug

SEQ ID NO: 914838 - RNA, 19 nt, Artificial Sequence
  Description of Artificial Sequence: Synthetic oligonucleotide
gucacaagcuccccugggg

SEQ ID NO: 914839 - RNA, 19 nt, Artificial Sequence
  Description of Artificial Sequence: Synthetic oligonucleotide
cccgucaaacauuagauac

SEQ ID NO: 914840 - RNA, 19 nt, Artificial Sequence
  Description of Artificial Sequence: Synthetic oligonucleotide
acaucaguaaggucauccu

SEQ ID NO: 914841 - RNA, 19 nt, Artificial Sequence
  Description of Artificial Sequence: Synthetic oligonucleotide
uaacuauagcaucuuccau

SEQ ID NO: 914842 - RNA, 19 nt, Artificial Sequence
  Description of Artificial Sequence: Synthetic oligonucleotide
gaacagugauaauuugaca

SEQ ID NO: 914843 - RNA, 19 nt, Artificial Sequence
  Description of Artificial Sequence: Synthetic oligonucleotide
ugauauucagcagcauaca

SEQ ID NO: 914844 - RNA, 19 nt, Artificial Sequence
  Description of Artificial Sequence: Synthetic oligonucleotide
aaugagcucaaugcuucca

SEQ ID NO: 914845 - RNA, 19 nt, Artificial Sequence
  Description of Artificial Sequence: Synthetic oligonucleotide
ugcuuccaauguaaauaag

SEQ ID NO: 914846 - RNA, 19 nt, Artificial Sequence
  Description of Artificial Sequence: Synthetic oligonucleotide
cacuucuaacuauagcauc

SEQ ID NO: 914847 - RNA, 19 nt, Artificial Sequence
  Description of Artificial Sequence: Synthetic oligonucleotide
aaagccaaguagaugugau

SEQ ID NO: 914848 - RNA, 19 nt, Artificial Sequence
  Description of Artificial Sequence: Synthetic oligonucleotide
uucuaacuauagcaucuuc

SEQ ID NO: 914849 - RNA, 19 nt, Artificial Sequence
  Description of Artificial Sequence: Synthetic oligonucleotide
agccaaguagaugugauaa

SEQ ID NO: 914850 - RNA, 19 nt, Artificial Sequence
  Description of Artificial Sequence: Synthetic oligonucleotide
aaaacagcucucgccauau

SEQ ID NO: 914851 - RNA, 19 nt, Artificial Sequence
  Description of Artificial Sequence: Synthetic oligonucleotide
gagguaacagacccagcac

SEQ ID NO: 914852 - RNA, 19 nt, Artificial Sequence
  Description of Artificial Sequence: Synthetic oligonucleotide
agucacaagcuccccuggg

SEQ ID NO: 914853 - RNA, 19 nt, Artificial Sequence
  Description of Artificial Sequence: Synthetic oligonucleotide
cucgagguaacagacccag

SEQ ID NO: 914854 - RNA, 19 nt, Artificial Sequence
  Description of Artificial Sequence: Synthetic oligonucleotide
cagacaugauauucagcag

SEQ ID NO: 914855 - RNA, 19 nt, Artificial Sequence
  Description of Artificial Sequence: Synthetic oligonucleotide
gggaaguucaggcagccug

SEQ ID NO: 914856 - RNA, 19 nt, Artificial Sequence
  Description of Artificial Sequence: Synthetic oligonucleotide
guaaggucauccugagagc

SEQ ID NO: 914857 - RNA, 19 nt, Artificial Sequence
  Description of Artificial Sequence: Synthetic oligonucleotide
aaaucccuccuccccguca

SEQ ID NO: 914858 - RNA, 19 nt, Artificial Sequence
  Description of Artificial Sequence: Synthetic oligonucleotide
agacccuacaucacagaac

SEQ ID NO: 914859 - RNA, 19 nt, Artificial Sequence
  Description of Artificial Sequence: Synthetic oligonucleotide
aggucucagaacacuacac

SEQ ID NO: 914860 - RNA, 19 nt, Artificial Sequence
  Description of Artificial Sequence: Synthetic oligonucleotide
ucuuaaaggguugggcuuc

SEQ ID NO: 914861 - RNA, 19 nt, Artificial Sequence
  Description of Artificial Sequence: Synthetic oligonucleotide
uggggaaaacagcucucgc

SEQ ID NO: 914862 - RNA, 19 nt, Artificial Sequence
  Description of Artificial Sequence: Synthetic oligonucleotide
guaacugaucugaggaagc

SEQ ID NO: 914863 - RNA, 19 nt, Artificial Sequence
  Description of Artificial Sequence: Synthetic oligonucleotide
ucgccauaucucauacugc

SEQ ID NO: 914864 - RNA, 19 nt, Artificial Sequence
  Description of Artificial Sequence: Synthetic oligonucleotide
augaaccuuaaaacuggac

SEQ ID NO: 914865 - RNA, 19 nt, Artificial Sequence
  Description of Artificial Sequence: Synthetic oligonucleotide
uguagugccagugguguaa

SEQ ID NO: 914866 - RNA, 19 nt, Artificial Sequence
  Description of Artificial Sequence: Synthetic oligonucleotide
uacucgugcuugauguugu

SEQ ID NO: 914867 - RNA, 19 nt, Artificial Sequence
  Description of Artificial Sequence: Synthetic oligonucleotide
uaauaccccaguccccaga

SEQ ID NO: 914868 - RNA, 19 nt, Artificial Sequence
  Description of Artificial Sequence: Synthetic oligonucleotide
gaccuuaggcuuaauguuc

SEQ ID NO: 914869 - RNA, 19 nt, Artificial Sequence
  Description of Artificial Sequence: Synthetic oligonucleotide
acaggucucagaacacuac

SEQ ID NO: 914870 - RNA, 19 nt, Artificial Sequence
  Description of Artificial Sequence: Synthetic oligonucleotide
acgggucuauuacagacau

SEQ ID NO: 914871 - RNA, 19 nt, Artificial Sequence
  Description of Artificial Sequence: Synthetic oligonucleotide
aaacagcacguccggcucu

SEQ ID NO: 914872 - RNA, 19 nt, Artificial Sequence
  Description of Artificial Sequence: Synthetic oligonucleotide
uucggcagggaaacuuuga

SEQ ID NO: 914873 - RNA, 19 nt, Artificial Sequence
  Description of Artificial Sequence: Synthetic oligonucleotide
auaucuuccgcugcaugug

SEQ ID NO: 914874 - RNA, 19 nt, Artificial Sequence
  Description of Artificial Sequence: Synthetic oligonucleotide
ucaagcaauggugguuugc

SEQ ID NO: 914875 - RNA, 19 nt, Artificial Sequence
  Description of Artificial Sequence: Synthetic oligonucleotide
ggggaaaacagcucucgcc

SEQ ID NO: 914876 - RNA, 19 nt, Artificial Sequence
  Description of Artificial Sequence: Synthetic oligonucleotide
ucucaccucgagguaacag

SEQ ID NO: 914877 - RNA, 19 nt, Artificial Sequence
  Description of Artificial Sequence: Synthetic oligonucleotide
gggaaaacagcucucgcca

SEQ ID NO: 914878 - RNA, 19 nt, Artificial Sequence
  Description of Artificial Sequence: Synthetic oligonucleotide
uucuagucaagaagucuuu

SEQ ID NO: 914879 - RNA, 19 nt, Artificial Sequence
  Description of Artificial Sequence: Synthetic oligonucleotide
acauagucacaagcucccc

SEQ ID NO: 914880 - RNA, 19 nt, Artificial Sequence
  Description of Artificial Sequence: Synthetic oligonucleotide
agaaugagcuauacaucag

SEQ ID NO: 914881 - RNA, 19 nt, Artificial Sequence
  Description of Artificial Sequence: Synthetic oligonucleotide
agggccaagaaucuucaua

SEQ ID NO: 914882 - RNA, 19 nt, Artificial Sequence
  Description of Artificial Sequence: Synthetic oligonucleotide
cagaauggauucuagucaa

SEQ ID NO: 914883 - RNA, 19 nt, Artificial Sequence
  Description of Artificial Sequence: Synthetic oligonucleotide
gcaauguuuguacaucuca

SEQ ID NO: 914884 - RNA, 19 nt, Artificial Sequence
  Description of Artificial Sequence: Synthetic oligonucleotide
ugucguguugugucucccc

SEQ ID NO: 914885 - RNA, 19 nt, Artificial Sequence
  Description of Artificial Sequence: Synthetic oligonucleotide
ugaucacgcucccuucugu

SEQ ID NO: 914886 - RNA, 19 nt, Artificial Sequence
  Description of Artificial Sequence: Synthetic oligonucleotide
caugucguguugugucucc

SEQ ID NO: 914887 - RNA, 19 nt, Artificial Sequence
  Description of Artificial Sequence: Synthetic oligonucleotide
agcugaucacgcucccuuc

SEQ ID NO: 914888 - RNA, 19 nt, Artificial Sequence
  Description of Artificial Sequence: Synthetic oligonucleotide
cucaccucgagguaacaga

SEQ ID NO: 914889 - RNA, 19 nt, Artificial Sequence
  Description of Artificial Sequence: Synthetic oligonucleotide
cugccuuguauuuauaagu

SEQ ID NO: 914890 - RNA, 19 nt, Artificial Sequence
  Description of Artificial Sequence: Synthetic oligonucleotide
agauuaaagccaaguagau

SEQ ID NO: 914891 - RNA, 19 nt, Artificial Sequence
  Description of Artificial Sequence: Synthetic oligonucleotide
acaggcaaauccccacuca

SEQ ID NO: 914892 - RNA, 19 nt, Artificial Sequence
  Description of Artificial Sequence: Synthetic oligonucleotide
auuuuggccuguggcugcc

SEQ ID NO: 914893 - RNA, 19 nt, Artificial Sequence
  Description of Artificial Sequence: Synthetic oligonucleotide
caucacuagagagucagga

SEQ ID NO: 914894 - RNA, 19 nt, Artificial Sequence
  Description of Artificial Sequence: Synthetic oligonucleotide
ccaauguaaauaagccacc

SEQ ID NO: 914895 - RNA, 19 nt, Artificial Sequence
  Description of Artificial Sequence: Synthetic oligonucleotide
uuguccuaggaagaacagu

SEQ ID NO: 914896 - RNA, 19 nt, Artificial Sequence
  Description of Artificial Sequence: Synthetic oligonucleotide
auaauaccccaguccccag

SEQ ID NO: 914897 - RNA, 19 nt, Artificial Sequence
  Description of Artificial Sequence: Synthetic oligonucleotide
uaagugcaugaagugggga

SEQ ID NO: 914898 - RNA, 19 nt, Artificial Sequence
  Description of Artificial Sequence: Synthetic oligonucleotide
uccugagagcaaugcaacu

SEQ ID NO: 914899 - RNA, 19 nt, Artificial Sequence
  Description of Artificial Sequence: Synthetic oligonucleotide
cugugagaugaagaaaauc

SEQ ID NO: 914900 - RNA, 19 nt, Artificial Sequence
  Description of Artificial Sequence: Synthetic oligonucleotide
gaacagaauggauucuagu

SEQ ID NO: 914901 - RNA, 19 nt, Artificial Sequence
  Description of Artificial Sequence: Synthetic oligonucleotide
agacaacaaugaccuuagg

SEQ ID NO: 914902 - RNA, 19 nt, Artificial Sequence
  Description of Artificial Sequence: Synthetic oligonucleotide
aguuucgucaccacugaaa

SEQ ID NO: 914903 - RNA, 19 nt, Artificial Sequence
  Description of Artificial Sequence: Synthetic oligonucleotide
agucaagcaauggugguuu

SEQ ID NO: 914904 - RNA, 19 nt, Artificial Sequence
  Description of Artificial Sequence: Synthetic oligonucleotide
uagccucgauuccaccugc

SEQ ID NO: 914905 - RNA, 19 nt, Artificial Sequence
  Description of Artificial Sequence: Synthetic oligonucleotide
guuucgucaccacugaaau

SEQ ID NO: 914906 - RNA, 19 nt, Artificial Sequence
  Description of Artificial Sequence: Synthetic oligonucleotide
auggugguuugcuucuccu

SEQ ID NO: 914907 - RNA, 19 nt, Artificial Sequence
  Description of Artificial Sequence: Synthetic oligonucleotide
agcacguccggcucuuugu

SEQ ID NO: 914908 - RNA, 19 nt, Artificial Sequence
  Description of Artificial Sequence: Synthetic oligonucleotide
cccuacaucacagaacacc

SEQ ID NO: 914909 - RNA, 19 nt, Artificial Sequence
  Description of Artificial Sequence: Synthetic oligonucleotide
gggguuugcagaucuuugc

SEQ ID NO: 914910 - RNA, 19 nt, Artificial Sequence
  Description of Artificial Sequence: Synthetic oligonucleotide
augucguguugugucuccc

SEQ ID NO: 914911 - RNA, 19 nt, Artificial Sequence
  Description of Artificial Sequence: Synthetic oligonucleotide
gaacguuuucacugcuaga

SEQ ID NO: 914912 - RNA, 19 nt, Artificial Sequence
  Description of Artificial Sequence: Synthetic oligonucleotide
uuacgcgucugucgcuccc

SEQ ID NO: 914913 - RNA, 19 nt, Artificial Sequence
  Description of Artificial Sequence: Synthetic oligonucleotide
aagcaauggugguuugcuu

SEQ ID NO: 914914 - RNA, 19 nt, Artificial Sequence
  Description of Artificial Sequence: Synthetic oligonucleotide
cauaucucauacugcugca

SEQ ID NO: 914915 - RNA, 19 nt, Artificial Sequence
  Description of Artificial Sequence: Synthetic oligonucleotide
cauucuacacagaggcaga

SEQ ID NO: 914916 - RNA, 19 nt, Artificial Sequence
  Description of Artificial Sequence: Synthetic oligonucleotide
gcacgggucuauuacagac

SEQ ID NO: 914917 - RNA, 19 nt, Artificial Sequence
  Description of Artificial Sequence: Synthetic oligonucleotide
uccccagaacguuuucacu

SEQ ID NO: 914918 - RNA, 19 nt, Artificial Sequence
  Description of Artificial Sequence: Synthetic oligonucleotide
ggucucagaacacuacaca

SEQ ID NO: 914919 - RNA, 19 nt, Artificial Sequence
  Description of Artificial Sequence: Synthetic oligonucleotide
ugcacgggucuauuacaga

SEQ ID NO: 914920 - RNA, 19 nt, Artificial Sequence
  Description of Artificial Sequence: Synthetic oligonucleotide
caugcacgggucuauuaca

SEQ ID NO: 914921 - RNA, 19 nt, Artificial Sequence
  Description of Artificial Sequence: Synthetic oligonucleotide
uguuacgcgucugucgcuc

SEQ ID NO: 914922 - RNA, 19 nt, Artificial Sequence
  Description of Artificial Sequence: Synthetic oligonucleotide
ugucuaguuucgucaccac

SEQ ID NO: 914923 - RNA, 19 nt, Artificial Sequence
  Description of Artificial Sequence: Synthetic oligonucleotide
augcacgggucuauuacag

SEQ ID NO: 914924 - RNA, 19 nt, Artificial Sequence
  Description of Artificial Sequence: Synthetic oligonucleotide
caugaaccuuaaaacugga

SEQ ID NO: 914925 - RNA, 19 nt, Artificial Sequence
  Description of Artificial Sequence: Synthetic oligonucleotide
uuccgcugcauguggaaua

SEQ ID NO: 914926 - RNA, 19 nt, Artificial Sequence
  Description of Artificial Sequence: Synthetic oligonucleotide
cuaguuucgucaccacuga

SEQ ID NO: 914927 - RNA, 19 nt, Artificial Sequence
  Description of Artificial Sequence: Synthetic oligonucleotide
acucgugcuugauguuguc

SEQ ID NO: 914928 - RNA, 19 nt, Artificial Sequence
  Description of Artificial Sequence: Synthetic oligonucleotide
cuccccgucaaacauuaga

SEQ ID NO: 914929 - RNA, 19 nt, Artificial Sequence
  Description of Artificial Sequence: Synthetic oligonucleotide
cagacaggucucagaacac

SEQ ID NO: 914930 - RNA, 19 nt, Artificial Sequence
  Description of Artificial Sequence: Synthetic oligonucleotide
uuucgucaccacugaaaua

SEQ ID NO: 914931 - RNA, 19 nt, Artificial Sequence
  Description of Artificial Sequence: Synthetic oligonucleotide
acugaacagaauggauucu

SEQ ID NO: 914932 - RNA, 19 nt, Artificial Sequence
  Description of Artificial Sequence: Synthetic oligonucleotide
cucgugcuugauguugucc

SEQ ID NO: 914933 - RNA, 19 nt, Artificial Sequence
  Description of Artificial Sequence: Synthetic oligonucleotide
gcguguuacgcgucugucg

SEQ ID NO: 914934 - RNA, 19 nt, Artificial Sequence
  Description of Artificial Sequence: Synthetic oligonucleotide
accuuaggcuuaauguucu

SEQ ID NO: 914935 - RNA, 19 nt, Artificial Sequence
  Description of Artificial Sequence: Synthetic oligonucleotide
ugcggcgucggcguguuac

SEQ ID NO: 914936 - RNA, 19 nt, Artificial Sequence
  Description of Artificial Sequence: Synthetic oligonucleotide
uggugguuugcuucuccuc

SEQ ID NO: 914937 - RNA, 19 nt, Artificial Sequence
  Description of Artificial Sequence: Synthetic oligonucleotide
acaaugauuuuggccugug

SEQ ID NO: 914938 - RNA, 19 nt, Artificial Sequence
  Description of Artificial Sequence: Synthetic oligonucleotide
caccucgagguaacagacc

SEQ ID NO: 914939 - RNA, 19 nt, Artificial Sequence
  Description of Artificial Sequence: Synthetic oligonucleotide
ugcaugaaguggggaaaac

SEQ ID NO: 914940 - RNA, 19 nt, Artificial Sequence
  Description of Artificial Sequence: Synthetic oligonucleotide
gcaugcacgggucuauuac

SEQ ID NO: 914941 - RNA, 19 nt, Artificial Sequence
  Description of Artificial Sequence: Synthetic oligonucleotide
cugaucacgcucccuucug

SEQ ID NO: 914942 - RNA, 19 nt, Artificial Sequence
  Description of Artificial Sequence: Synthetic oligonucleotide
auauaacccuggcaauguu

SEQ ID NO: 914943 - RNA, 19 nt, Artificial Sequence
  Description of Artificial Sequence: Synthetic oligonucleotide
guguaacugaucugaggaa

SEQ ID NO: 914944 - RNA, 19 nt, Artificial Sequence
  Description of Artificial Sequence: Synthetic oligonucleotide
cguguuacgcgucugucgc

SEQ ID NO: 914945 - RNA, 19 nt, Artificial Sequence
  Description of Artificial Sequence: Synthetic oligonucleotide
ucucgccauaucucauacu

SEQ ID NO: 914946 - RNA, 19 nt, Artificial Sequence
  Description of Artificial Sequence: Synthetic oligonucleotide
caaauccccacucacugcu

SEQ ID NO: 914947 - RNA, 19 nt, Artificial Sequence
  Description of Artificial Sequence: Synthetic oligonucleotide
uguacucgugcuugauguu

SEQ ID NO: 914948 - RNA, 19 nt, Artificial Sequence
  Description of Artificial Sequence: Synthetic oligonucleotide
agcacugaacagaauggau

SEQ ID NO: 914949 - RNA, 19 nt, Artificial Sequence
  Description of Artificial Sequence: Synthetic oligonucleotide
ugcaugcacgggucuauua

SEQ ID NO: 914950 - RNA, 19 nt, Artificial Sequence
  Description of Artificial Sequence: Synthetic oligonucleotide
acaucacuagagagucagg

SEQ ID NO: 914951 - RNA, 19 nt, Artificial Sequence
  Description of Artificial Sequence: Synthetic oligonucleotide
cagacccuacaucacagaa

SEQ ID NO: 914952 - RNA, 19 nt, Artificial Sequence
  Description of Artificial Sequence: Synthetic oligonucleotide
uggcauucuuuugucuuaa

SEQ ID NO: 914953 - RNA, 19 nt, Artificial Sequence
  Description of Artificial Sequence: Synthetic oligonucleotide
ggccagucaagcaauggug

SEQ ID NO: 914954 - RNA, 19 nt, Artificial Sequence
  Description of Artificial Sequence: Synthetic oligonucleotide
cucauucuacacagaggca

SEQ ID NO: 914955 - RNA, 19 nt, Artificial Sequence
  Description of Artificial Sequence: Synthetic oligonucleotide
gucuuuaccaaaacauagu

SEQ ID NO: 914956 - RNA, 19 nt, Artificial Sequence
  Description of Artificial Sequence: Synthetic oligonucleotide
gcaaagagaugaaagggaa

SEQ ID NO: 914957 - RNA, 19 nt, Artificial Sequence
  Description of Artificial Sequence: Synthetic oligonucleotide
acuguaccauggagucucc

SEQ ID NO: 914958 - RNA, 19 nt, Artificial Sequence
  Description of Artificial Sequence: Synthetic oligonucleotide
gugguguaacugaucugag

SEQ ID NO: 914959 - RNA, 19 nt, Artificial Sequence
  Description of Artificial Sequence: Synthetic oligonucleotide
aagggccaagaaucuucau

SEQ ID NO: 914960 - RNA, 19 nt, Artificial Sequence
  Description of Artificial Sequence: Synthetic oligonucleotide
cacgggucuauuacagaca

SEQ ID NO: 914961 - RNA, 19 nt, Artificial Sequence
  Description of Artificial Sequence: Synthetic oligonucleotide
cuagagagucaggagcuga

SEQ ID NO: 914962 - RNA, 19 nt, Artificial Sequence
  Description of Artificial Sequence: Synthetic oligonucleotide
guuacgcgucugucgcucc

SEQ ID NO: 914963 - RNA, 19 nt, Artificial Sequence
  Description of Artificial Sequence: Synthetic oligonucleotide
agucuccauaaaacauguc

SEQ ID NO: 914964 - RNA, 19 nt, Artificial Sequence
  Description of Artificial Sequence: Synthetic oligonucleotide
gaucacgcucccuucugua

SEQ ID NO: 914965 - RNA, 19 nt, Artificial Sequence
  Description of Artificial Sequence: Synthetic oligonucleotide
gccuuaagaaaggauucug

SEQ ID NO: 914966 - RNA, 19 nt, Artificial Sequence
  Description of Artificial Sequence: Synthetic oligonucleotide
cacaaacagcacguccggc

SEQ ID NO: 914967 - RNA, 19 nt, Artificial Sequence
  Description of Artificial Sequence: Synthetic oligonucleotide
caacaaugaccuuaggcuu

SEQ ID NO: 914968 - RNA, 19 nt, Artificial Sequence
  Description of Artificial Sequence: Synthetic oligonucleotide
gucaagcaauggugguuug

SEQ ID NO: 914969 - RNA, 19 nt, Artificial Sequence
  Description of Artificial Sequence: Synthetic oligonucleotide
ccuauuaugcugagacauc

SEQ ID NO: 914970 - RNA, 19 nt, Artificial Sequence
  Description of Artificial Sequence: Synthetic oligonucleotide
cagcucucgccauaucuca

SEQ ID NO: 914971 - RNA, 19 nt, Artificial Sequence
  Description of Artificial Sequence: Synthetic oligonucleotide
ugucgcucccuuggucccg

SEQ ID NO: 914972 - RNA, 19 nt, Artificial Sequence
  Description of Artificial Sequence: Synthetic oligonucleotide
acaaugaccuuaggcuuaa

SEQ ID NO: 914973 - RNA, 19 nt, Artificial Sequence
  Description of Artificial Sequence: Synthetic oligonucleotide
cugaacagaauggauucua

SEQ ID NO: 914974 - RNA, 19 nt, Artificial Sequence
  Description of Artificial Sequence: Synthetic oligonucleotide
guuccuacccagacaacaa

SEQ ID NO: 914975 - RNA, 19 nt, Artificial Sequence
  Description of Artificial Sequence: Synthetic oligonucleotide
acguccggcucuuugucuu

SEQ ID NO: 914976 - RNA, 19 nt, Artificial Sequence
  Description of Artificial Sequence: Synthetic oligonucleotide
gcuauacaucaguaagguc

SEQ ID NO: 914977 - RNA, 19 nt, Artificial Sequence
  Description of Artificial Sequence: Synthetic oligonucleotide
cucccuuggucccggcggc

SEQ ID NO: 914978 - RNA, 19 nt, Artificial Sequence
  Description of Artificial Sequence: Synthetic oligonucleotide
cauagucacaagcuccccu

SEQ ID NO: 914979 - RNA, 19 nt, Artificial Sequence
  Description of Artificial Sequence: Synthetic oligonucleotide
agcuucggcagggaaacuu

SEQ ID NO: 914980 - RNA, 19 nt, Artificial Sequence
  Description of Artificial Sequence: Synthetic oligonucleotide
gucuuaaaggguugggcuu

SEQ ID NO: 914981 - RNA, 19 nt, Artificial Sequence
  Description of Artificial Sequence: Synthetic oligonucleotide
agcgcgcguccccuccucg

SEQ ID NO: 914982 - RNA, 19 nt, Artificial Sequence
  Description of Artificial Sequence: Synthetic oligonucleotide
auggcaccguccgagugca

SEQ ID NO: 914983 - RNA, 19 nt, Artificial Sequence
  Description of Artificial Sequence: Synthetic oligonucleotide
ggauucuagucaagaaguc

SEQ ID NO: 914984 - RNA, 19 nt, Artificial Sequence
  Description of Artificial Sequence: Synthetic oligonucleotide
gucccggcggccccguucc

SEQ ID NO: 914985 - RNA, 19 nt, Artificial Sequence
  Description of Artificial Sequence: Synthetic oligonucleotide
uccggcucuuugucuuuac

SEQ ID NO: 914986 - RNA, 19 nt, Artificial Sequence
  Description of Artificial Sequence: Synthetic oligonucleotide
uuugagugacaagcauguu

SEQ ID NO: 914987 - RNA, 19 nt, Artificial Sequence
  Description of Artificial Sequence: Synthetic oligonucleotide
ugguucaccuuggcauucu

SEQ ID NO: 914988 - RNA, 19 nt, Artificial Sequence
  Description of Artificial Sequence: Synthetic oligonucleotide
cgagguaacagacccagca

SEQ ID NO: 914989 - RNA, 19 nt, Artificial Sequence
  Description of Artificial Sequence: Synthetic oligonucleotide
gcucccuucuguaaguguc

SEQ ID NO: 914990 - RNA, 19 nt, Artificial Sequence
  Description of Artificial Sequence: Synthetic oligonucleotide
guagugccagugguguaac

SEQ ID NO: 914991 - RNA, 19 nt, Artificial Sequence
  Description of Artificial Sequence: Synthetic oligonucleotide
ggcugccuuguauuuauaa

SEQ ID NO: 914992 - RNA, 19 nt, Artificial Sequence
  Description of Artificial Sequence: Synthetic oligonucleotide
acaugauauucagcagcau

SEQ ID NO: 914993 - RNA, 19 nt, Artificial Sequence
  Description of Artificial Sequence: Synthetic oligonucleotide
ccgucaaacauuagauaca

SEQ ID NO: 914994 - RNA, 19 nt, Artificial Sequence
  Description of Artificial Sequence: Synthetic oligonucleotide
gucugucgcucccuugguc

SEQ ID NO: 914995 - RNA, 19 nt, Artificial Sequence
  Description of Artificial Sequence: Synthetic oligonucleotide
acccuacaucacagaacac

SEQ ID NO: 914996 - RNA, 19 nt, Artificial Sequence
  Description of Artificial Sequence: Synthetic oligonucleotide
ggggccagucaagcaaugg

SEQ ID NO: 914997 - RNA, 19 nt, Artificial Sequence
  Description of Artificial Sequence: Synthetic oligonucleotide
aggaacaaacucacuucua

SEQ ID NO: 914998 - RNA, 19 nt, Artificial Sequence
  Description of Artificial Sequence: Synthetic oligonucleotide
ugcuggguucgagucuccu

SEQ ID NO: 914999 - RNA, 19 nt, Artificial Sequence
  Description of Artificial Sequence: Synthetic oligonucleotide
uacgcgucugucgcucccu

SEQ ID NO: 915000 - RNA, 19 nt, Artificial Sequence
  Description of Artificial Sequence: Synthetic oligonucleotide
uuaaaggguugggcuucuc

SEQ ID NO: 915001 - RNA, 19 nt, Artificial Sequence
  Description of Artificial Sequence: Synthetic oligonucleotide
caagcauguuuaaucugau

SEQ ID NO: 915002 - RNA, 19 nt, Artificial Sequence
  Description of Artificial Sequence: Synthetic oligonucleotide
acaugucguggcaggagau

SEQ ID NO: 915003 - RNA, 19 nt, Artificial Sequence
  Description of Artificial Sequence: Synthetic oligonucleotide
ggcaauguuuguacaucuc

SEQ ID NO: 915004 - RNA, 19 nt, Artificial Sequence
  Description of Artificial Sequence: Synthetic oligonucleotide
ucggcguguuacgcgucug

SEQ ID NO: 915005 - RNA, 19 nt, Artificial Sequence
  Description of Artificial Sequence: Synthetic oligonucleotide
aaguccccuucugguuuca

SEQ ID NO: 915006 - RNA, 19 nt, Artificial Sequence
  Description of Artificial Sequence: Synthetic oligonucleotide
gcucaaugcuuccaaugua

SEQ ID NO: 915007 - RNA, 19 nt, Artificial Sequence
  Description of Artificial Sequence: Synthetic oligonucleotide
aagcuucggcagggaaacu

SEQ ID NO: 915008 - RNA, 19 nt, Artificial Sequence
  Description of Artificial Sequence: Synthetic oligonucleotide
gguucgagucuccuuggcu

SEQ ID NO: 915009 - RNA, 19 nt, Artificial Sequence
  Description of Artificial Sequence: Synthetic oligonucleotide
cucccuucuguaagugucu

SEQ ID NO: 915010 - RNA, 19 nt, Artificial Sequence
  Description of Artificial Sequence: Synthetic oligonucleotide
gcggcgucggcguguuacg

SEQ ID NO: 915011 - RNA, 19 nt, Artificial Sequence
  Description of Artificial Sequence: Synthetic oligonucleotide
ccauaaaacaugucguguu

SEQ ID NO: 915012 - RNA, 19 nt, Artificial Sequence
  Description of Artificial Sequence: Synthetic oligonucleotide
gggccagucaagcaauggu

SEQ ID NO: 915013 - RNA, 19 nt, Artificial Sequence
  Description of Artificial Sequence: Synthetic oligonucleotide
gcacugaacagaauggauu

SEQ ID NO: 915014 - RNA, 19 nt, Artificial Sequence
  Description of Artificial Sequence: Synthetic oligonucleotide
gaauagcugcuggguucga

SEQ ID NO: 915015 - RNA, 19 nt, Artificial Sequence
  Description of Artificial Sequence: Synthetic oligonucleotide
gcacguccggcucuuuguc

SEQ ID NO: 915016 - RNA, 19 nt, Artificial Sequence
  Description of Artificial Sequence: Synthetic oligonucleotide
cacgcucccuucuguaagu

SEQ ID NO: 915017 - RNA, 19 nt, Artificial Sequence
  Description of Artificial Sequence: Synthetic oligonucleotide
ggaaaacagcucucgccau

SEQ ID NO: 915018 - RNA, 19 nt, Artificial Sequence
  Description of Artificial Sequence: Synthetic oligonucleotide
cuucuaacuauagcaucuu

SEQ ID NO: 915019 - RNA, 19 nt, Artificial Sequence
  Description of Artificial Sequence: Synthetic oligonucleotide
guaacagacccagcacaau

SEQ ID NO: 915020 - RNA, 19 nt, Artificial Sequence
  Description of Artificial Sequence: Synthetic oligonucleotide
cuguagugccaguggugua

SEQ ID NO: 915021 - RNA, 19 nt, Artificial Sequence
  Description of Artificial Sequence: Synthetic oligonucleotide
ggcguguuacgcgucuguc

SEQ ID NO: 915022 - RNA, 19 nt, Artificial Sequence
  Description of Artificial Sequence: Synthetic oligonucleotide
ggcauucuuuugucuuaaa

SEQ ID NO: 915023 - RNA, 19 nt, Artificial Sequence
  Description of Artificial Sequence: Synthetic oligonucleotide
cgaagccaccaucuguauc

SEQ ID NO: 915024 - RNA, 19 nt, Artificial Sequence
  Description of Artificial Sequence: Synthetic oligonucleotide
agccucgauuccaccugcu

SEQ ID NO: 915025 - RNA, 19 nt, Artificial Sequence
  Description of Artificial Sequence: Synthetic oligonucleotide
guguuacgcgucugucgcu

SEQ ID NO: 915026 - RNA, 19 nt, Artificial Sequence
  Description of Artificial Sequence: Synthetic oligonucleotide
cacguccggcucuuugucu

SEQ ID NO: 915027 - RNA, 19 nt, Artificial Sequence
  Description of Artificial Sequence: Synthetic oligonucleotide
acgcgucugucgcucccuu

SEQ ID NO: 915028 - RNA, 19 nt, Artificial Sequence
  Description of Artificial Sequence: Synthetic oligonucleotide
ggccccguuccagcgcgcg

SEQ ID NO: 915029 - RNA, 19 nt, Artificial Sequence
  Description of Artificial Sequence: Synthetic oligonucleotide
caacuguaccauggagucu

SEQ ID NO: 915030 - RNA, 19 nt, Artificial Sequence
  Description of Artificial Sequence: Synthetic oligonucleotide
cggcagggaaacuuugaga

SEQ ID NO: 915031 - RNA, 19 nt, Artificial Sequence
  Description of Artificial Sequence: Synthetic oligonucleotide
ccagucaagcaaugguggu

SEQ ID NO: 915032 - RNA, 19 nt, Artificial Sequence
  Description of Artificial Sequence: Synthetic oligonucleotide
ccccgucaaacauuagaua

SEQ ID NO: 915033 - RNA, 19 nt, Artificial Sequence
  Description of Artificial Sequence: Synthetic oligonucleotide
guuccagcgcgcguccccu

SEQ ID NO: 915034 - RNA, 19 nt, Artificial Sequence
  Description of Artificial Sequence: Synthetic oligonucleotide
ccucgagguaacagaccca

SEQ ID NO: 915035 - RNA, 19 nt, Artificial Sequence
  Description of Artificial Sequence: Synthetic oligonucleotide
uggcaccguccgagugcac

SEQ ID NO: 915036 - RNA, 19 nt, Artificial Sequence
  Description of Artificial Sequence: Synthetic oligonucleotide
gcgucggcguguuacgcgu

SEQ ID NO: 915037 - RNA, 19 nt, Artificial Sequence
  Description of Artificial Sequence: Synthetic oligonucleotide
ccugagagcaaugcaacuu

SEQ ID NO: 915038 - RNA, 19 nt, Artificial Sequence
  Description of Artificial Sequence: Synthetic oligonucleotide
ccuccccgucaaacauuag

SEQ ID NO: 915039 - RNA, 19 nt, Artificial Sequence
  Description of Artificial Sequence: Synthetic oligonucleotide
ggccaagaaucuucauauu

SEQ ID NO: 915040 - RNA, 19 nt, Artificial Sequence
  Description of Artificial Sequence: Synthetic oligonucleotide
cgcucccuuggucccggcg

SEQ ID NO: 915041 - RNA, 19 nt, Artificial Sequence
  Description of Artificial Sequence: Synthetic oligonucleotide
ccagaacguuuucacugcu

SEQ ID NO: 915042 - RNA, 19 nt, Artificial Sequence
  Description of Artificial Sequence: Synthetic oligonucleotide
gcuucggcagggaaacuuu

SEQ ID NO: 915043 - RNA, 19 nt, Artificial Sequence
  Description of Artificial Sequence: Synthetic oligonucleotide
caccguccgagugcacgaa

SEQ ID NO: 915044 - RNA, 19 nt, Artificial Sequence
  Description of Artificial Sequence: Synthetic oligonucleotide
cgcgucugucgcucccuug

SEQ ID NO: 915045 - RNA, 19 nt, Artificial Sequence
  Description of Artificial Sequence: Synthetic oligonucleotide
ccgcugcauguggaauagc

SEQ ID NO: 915046 - RNA, 19 nt, Artificial Sequence
  Description of Artificial Sequence: Synthetic oligonucleotide
cggcgucggcguguuacgc

SEQ ID NO: 915047 - RNA, 19 nt, Artificial Sequence
  Description of Artificial Sequence: Synthetic oligonucleotide
cugcaugcacgggucuauu

SEQ ID NO: 915048 - RNA, 19 nt, Artificial Sequence
  Description of Artificial Sequence: Synthetic oligonucleotide
ggagggguuugcagaucuu

SEQ ID NO: 915049 - RNA, 19 nt, Artificial Sequence
  Description of Artificial Sequence: Synthetic oligonucleotide
cgucugucgcucccuuggu

SEQ ID NO: 915050 - RNA, 19 nt, Artificial Sequence
  Description of Artificial Sequence: Synthetic oligonucleotide
cggcguguuacgcgucugu

SEQ ID NO: 915051 - RNA, 19 nt, Artificial Sequence
  Description of Artificial Sequence: Synthetic oligonucleotide
cggccccguuccagcgcgc

SEQ ID NO: 915052 - RNA, 19 nt, Artificial Sequence
  Description of Artificial Sequence: Synthetic oligonucleotide
cccagacaacaaugaccuu

SEQ ID NO: 915053 - RNA, 19 nt, Artificial Sequence
  Description of Artificial Sequence: Synthetic oligonucleotide
cugcggcgucggcguguua

SEQ ID NO: 915054 - RNA, 19 nt, Artificial Sequence
  Description of Artificial Sequence: Synthetic oligonucleotide
uaaaagaugacuaacaaag

SEQ ID NO: 915055 - RNA, 19 nt, Artificial Sequence
  Description of Artificial Sequence: Synthetic oligonucleotide
aaaauaagaaguuuaguca

SEQ ID NO: 915056 - RNA, 19 nt, Artificial Sequence
  Description of Artificial Sequence: Synthetic oligonucleotide
aguguaauagugcaaauuc

SEQ ID NO: 915057 - RNA, 19 nt, Artificial Sequence
  Description of Artificial Sequence: Synthetic oligonucleotide
accauuugcacguuggugc

SEQ ID NO: 915058 - RNA, 19 nt, Artificial Sequence
  Description of Artificial Sequence: Synthetic oligonucleotide
cuagcaauuaaagugaucc

SEQ ID NO: 915059 - RNA, 19 nt, Artificial Sequence
  Description of Artificial Sequence: Synthetic oligonucleotide
uacaacgguaaccugaucc

SEQ ID NO: 915060 - RNA, 19 nt, Artificial Sequence
  Description of Artificial Sequence: Synthetic oligonucleotide
acaaauuggguauaagguc

SEQ ID NO: 915061 - RNA, 19 nt, Artificial Sequence
  Description of Artificial Sequence: Synthetic oligonucleotide
uagacuauaucuuaaccug

SEQ ID NO: 915062 - RNA, 19 nt, Artificial Sequence
  Description of Artificial Sequence: Synthetic oligonucleotide
uaacuuucaaguguaauag

SEQ ID NO: 915063 - RNA, 19 nt, Artificial Sequence
  Description of Artificial Sequence: Synthetic oligonucleotide
ucuaucuugugccaggucu

SEQ ID NO: 915064 - RNA, 19 nt, Artificial Sequence
  Description of Artificial Sequence: Synthetic oligonucleotide
uuuuacccaauuaaguaca

SEQ ID NO: 915065 - RNA, 19 nt, Artificial Sequence
  Description of Artificial Sequence: Synthetic oligonucleotide
ucuaccauuugcacguugg

SEQ ID NO: 915066 - RNA, 19 nt, Artificial Sequence
  Description of Artificial Sequence: Synthetic oligonucleotide
aguacuaccaugcuuaaaa

SEQ ID NO: 915067 - RNA, 19 nt, Artificial Sequence
  Description of Artificial Sequence: Synthetic oligonucleotide
caaacuauggcacugucac

SEQ ID NO: 915068 - RNA, 19 nt, Artificial Sequence
  Description of Artificial Sequence: Synthetic oligonucleotide
acaacgguaaccugauccc

SEQ ID NO: 915069 - RNA, 19 nt, Artificial Sequence
  Description of Artificial Sequence: Synthetic oligonucleotide
aguuuagucagucuuagaa

SEQ ID NO: 915070 - RNA, 19 nt, Artificial Sequence
  Description of Artificial Sequence: Synthetic oligonucleotide
aagaaguuuagucagucuu

SEQ ID NO: 915071 - RNA, 19 nt, Artificial Sequence
  Description of Artificial Sequence: Synthetic oligonucleotide
cucccuagcaauuaaagug

SEQ ID NO: 915072 - RNA, 19 nt, Artificial Sequence
  Description of Artificial Sequence: Synthetic oligonucleotide
cuuuuacccaauuaaguac

SEQ ID NO: 915073 - RNA, 19 nt, Artificial Sequence
  Description of Artificial Sequence: Synthetic oligonucleotide
caagcuagcaaauguacag

SEQ ID NO: 915074 - RNA, 19 nt, Artificial Sequence
  Description of Artificial Sequence: Synthetic oligonucleotide
aaccugaucccuugcacgg

SEQ ID NO: 915075 - RNA, 19 nt, Artificial Sequence
  Description of Artificial Sequence: Synthetic oligonucleotide
acuacaagcuagcaaaugu

SEQ ID NO: 915076 - RNA, 19 nt, Artificial Sequence
  Description of Artificial Sequence: Synthetic oligonucleotide
aaauuccccugcgagaugg

SEQ ID NO: 915077 - RNA, 19 nt, Artificial Sequence
  Description of Artificial Sequence: Synthetic oligonucleotide
uuuuccuuaaaucgacuga

SEQ ID NO: 915078 - RNA, 19 nt, Artificial Sequence
  Description of Artificial Sequence: Synthetic oligonucleotide
uguacaaauuuacaccagu

SEQ ID NO: 915079 - RNA, 19 nt, Artificial Sequence
  Description of Artificial Sequence: Synthetic oligonucleotide
uggguauaaggucugggag

SEQ ID NO: 915080 - RNA, 19 nt, Artificial Sequence
  Description of Artificial Sequence: Synthetic oligonucleotide
uccauuauaagaugaucca

SEQ ID NO: 915081 - RNA, 19 nt, Artificial Sequence
  Description of Artificial Sequence: Synthetic oligonucleotide
acauuuauacauguaagug

SEQ ID NO: 915082 - RNA, 19 nt, Artificial Sequence
  Description of Artificial Sequence: Synthetic oligonucleotide
uccuuaaaucgacugaugu

SEQ ID NO: 915083 - RNA, 19 nt, Artificial Sequence
  Description of Artificial Sequence: Synthetic oligonucleotide
cauuauaagaugauccauc

SEQ ID NO: 915084 - RNA, 19 nt, Artificial Sequence
  Description of Artificial Sequence: Synthetic oligonucleotide
agagugugaguucacuugg

SEQ ID NO: 915085 - RNA, 19 nt, Artificial Sequence
  Description of Artificial Sequence: Synthetic oligonucleotide
cauagacuauaucuuaacc

SEQ ID NO: 915086 - RNA, 19 nt, Artificial Sequence
  Description of Artificial Sequence: Synthetic oligonucleotide
uccaguacuaccaugcuua

SEQ ID NO: 915087 - RNA, 19 nt, Artificial Sequence
  Description of Artificial Sequence: Synthetic oligonucleotide
auaacuuucaaguguaaua

SEQ ID NO: 915088 - RNA, 19 nt, Artificial Sequence
  Description of Artificial Sequence: Synthetic oligonucleotide
ugaugugacaaauugggua

SEQ ID NO: 915089 - RNA, 19 nt, Artificial Sequence
  Description of Artificial Sequence: Synthetic oligonucleotide
uuuacaccaguucauaauu

SEQ ID NO: 915090 - RNA, 19 nt, Artificial Sequence
  Description of Artificial Sequence: Synthetic oligonucleotide
uuaugguugaugcgaauac

SEQ ID NO: 915091 - RNA, 19 nt, Artificial Sequence
  Description of Artificial Sequence: Synthetic oligonucleotide
guaauguucugccagcagc

SEQ ID NO: 915092 - RNA, 19 nt, Artificial Sequence
  Description of Artificial Sequence: Synthetic oligonucleotide
uuuucaagccaggaggcgg

SEQ ID NO: 915093 - RNA, 19 nt, Artificial Sequence
  Description of Artificial Sequence: Synthetic oligonucleotide
uaccaugcuuaaaacauug

SEQ ID NO: 915094 - RNA, 19 nt, Artificial Sequence
  Description of Artificial Sequence: Synthetic oligonucleotide
acauguaagugcuagguaa

SEQ ID NO: 915095 - RNA, 19 nt, Artificial Sequence
  Description of Artificial Sequence: Synthetic oligonucleotide
aaaucgacugaugugacaa

SEQ ID NO: 915096 - RNA, 19 nt, Artificial Sequence
  Description of Artificial Sequence: Synthetic oligonucleotide
ucccuagcaauuaaaguga

SEQ ID NO: 915097 - RNA, 19 nt, Artificial Sequence
  Description of Artificial Sequence: Synthetic oligonucleotide
cuuuacuuggacucacagg

SEQ ID NO: 915098 - RNA, 19 nt, Artificial Sequence
  Description of Artificial Sequence: Synthetic oligonucleotide
uauaaggucugggagaaac

SEQ ID NO: 915099 - RNA, 19 nt, Artificial Sequence
  Description of Artificial Sequence: Synthetic oligonucleotide
uccauguaaaauuuccagu

SEQ ID NO: 915100 - RNA, 19 nt, Artificial Sequence
  Description of Artificial Sequence: Synthetic oligonucleotide
cuuaaaucgacugauguga

SEQ ID NO: 915101 - RNA, 19 nt, Artificial Sequence
  Description of Artificial Sequence: Synthetic oligonucleotide
auauagaaaucuguacaac

SEQ ID NO: 915102 - RNA, 19 nt, Artificial Sequence
  Description of Artificial Sequence: Synthetic oligonucleotide
cuccauguaaaauuuccag

SEQ ID NO: 915103 - RNA, 19 nt, Artificial Sequence
  Description of Artificial Sequence: Synthetic oligonucleotide
cuuaaaacauugagcuucc

SEQ ID NO: 915104 - RNA, 19 nt, Artificial Sequence
  Description of Artificial Sequence: Synthetic oligonucleotide
uucuucgaaauacagguuu

SEQ ID NO: 915105 - RNA, 19 nt, Artificial Sequence
  Description of Artificial Sequence: Synthetic oligonucleotide
uccuccuuacaacugauuc

SEQ ID NO: 915106 - RNA, 19 nt, Artificial Sequence
  Description of Artificial Sequence: Synthetic oligonucleotide
uaauguucugccagcagcu

SEQ ID NO: 915107 - RNA, 19 nt, Artificial Sequence
  Description of Artificial Sequence: Synthetic oligonucleotide
acggcuacugguucuaggg

SEQ ID NO: 915108 - RNA, 19 nt, Artificial Sequence
  Description of Artificial Sequence: Synthetic oligonucleotide
gaagcgaggacgugaggcg

SEQ ID NO: 915109 - RNA, 19 nt, Artificial Sequence
  Description of Artificial Sequence: Synthetic oligonucleotide
ucgccuaucaugguggcgg

SEQ ID NO: 915110 - RNA, 19 nt, Artificial Sequence
  Description of Artificial Sequence: Synthetic oligonucleotide
auagauggugguuugugga

SEQ ID NO: 915111 - RNA, 19 nt, Artificial Sequence
  Description of Artificial Sequence: Synthetic oligonucleotide
caagaguugcauuuccagc

SEQ ID NO: 915112 - RNA, 19 nt, Artificial Sequence
  Description of Artificial Sequence: Synthetic oligonucleotide
gaaguuuagucagucuuag

SEQ ID NO: 915113 - RNA, 19 nt, Artificial Sequence
  Description of Artificial Sequence: Synthetic oligonucleotide
uuaccacucuaucuugugc

SEQ ID NO: 915114 - RNA, 19 nt, Artificial Sequence
  Description of Artificial Sequence: Synthetic oligonucleotide
gaauacaacgguaaccuga

SEQ ID NO: 915115 - RNA, 19 nt, Artificial Sequence
  Description of Artificial Sequence: Synthetic oligonucleotide
uuggguauaaggucuggga

SEQ ID NO: 915116 - RNA, 19 nt, Artificial Sequence
  Description of Artificial Sequence: Synthetic oligonucleotide
augacuaacaaaguucaca

SEQ ID NO: 915117 - RNA, 19 nt, Artificial Sequence
  Description of Artificial Sequence: Synthetic oligonucleotide
ggucugaccauuuuccccg

SEQ ID NO: 915118 - RNA, 19 nt, Artificial Sequence
  Description of Artificial Sequence: Synthetic oligonucleotide
uuaaaucgacugaugugac

SEQ ID NO: 915119 - RNA, 19 nt, Artificial Sequence
  Description of Artificial Sequence: Synthetic oligonucleotide
agugauccuuuacuuggac

SEQ ID NO: 915120 - RNA, 19 nt, Artificial Sequence
  Description of Artificial Sequence: Synthetic oligonucleotide
gauacagucaucauauugu

SEQ ID NO: 915121 - RNA, 19 nt, Artificial Sequence
  Description of Artificial Sequence: Synthetic oligonucleotide
ugcgaauacaacgguaacc

SEQ ID NO: 915122 - RNA, 19 nt, Artificial Sequence
  Description of Artificial Sequence: Synthetic oligonucleotide
agaugacuaacaaaguuca

SEQ ID NO: 915123 - RNA, 19 nt, Artificial Sequence
  Description of Artificial Sequence: Synthetic oligonucleotide
uuagucagucuuagaaaac

SEQ ID NO: 915124 - RNA, 19 nt, Artificial Sequence
  Description of Artificial Sequence: Synthetic oligonucleotide
uccauagacuauaucuuaa

SEQ ID NO: 915125 - RNA, 19 nt, Artificial Sequence
  Description of Artificial Sequence: Synthetic oligonucleotide
uuuccuuaaaucgacugau

SEQ ID NO: 915126 - RNA, 19 nt, Artificial Sequence
  Description of Artificial Sequence: Synthetic oligonucleotide
gacaaauuggguauaaggu

SEQ ID NO: 915127 - RNA, 19 nt, Artificial Sequence
  Description of Artificial Sequence: Synthetic oligonucleotide
ugcuaacaaccacaguuga

SEQ ID NO: 915128 - RNA, 19 nt, Artificial Sequence
  Description of Artificial Sequence: Synthetic oligonucleotide
ugaacaacucuugacugcu

SEQ ID NO: 915129 - RNA, 19 nt, Artificial Sequence
  Description of Artificial Sequence: Synthetic oligonucleotide
acacaauacaaggucugac

SEQ ID NO: 915130 - RNA, 19 nt, Artificial Sequence
  Description of Artificial Sequence: Synthetic oligonucleotide
aauacaacgguaaccugau

SEQ ID NO: 915131 - RNA, 19 nt, Artificial Sequence
  Description of Artificial Sequence: Synthetic oligonucleotide
uaagaaguuuagucagucu

SEQ ID NO: 915132 - RNA, 19 nt, Artificial Sequence
  Description of Artificial Sequence: Synthetic oligonucleotide
agaguugcauuuccagcuc

SEQ ID NO: 915133 - RNA, 19 nt, Artificial Sequence
  Description of Artificial Sequence: Synthetic oligonucleotide
ugacaugguuuaaauucca

SEQ ID NO: 915134 - RNA, 19 nt, Artificial Sequence
  Description of Artificial Sequence: Synthetic oligonucleotide
aauuggguauaaggucugg

SEQ ID NO: 915135 - RNA, 19 nt, Artificial Sequence
  Description of Artificial Sequence: Synthetic oligonucleotide
caguucauaauuuaccaaa

SEQ ID NO: 915136 - RNA, 19 nt, Artificial Sequence
  Description of Artificial Sequence: Synthetic oligonucleotide
gaugaaggacaccgcggcg

SEQ ID NO: 915137 - RNA, 19 nt, Artificial Sequence
  Description of Artificial Sequence: Synthetic oligonucleotide
ugcaaauuccccugcgaga

SEQ ID NO: 915138 - RNA, 19 nt, Artificial Sequence
  Description of Artificial Sequence: Synthetic oligonucleotide
gguucuucgaaauacaggu

SEQ ID NO: 915139 - RNA, 19 nt, Artificial Sequence
  Description of Artificial Sequence: Synthetic oligonucleotide
aaauuuacaccaguucaua

SEQ ID NO: 915140 - RNA, 19 nt, Artificial Sequence
  Description of Artificial Sequence: Synthetic oligonucleotide
cacucccuagcaauuaaag

SEQ ID NO: 915141 - RNA, 19 nt, Artificial Sequence
  Description of Artificial Sequence: Synthetic oligonucleotide
aagcgaggacgugaggcgc

SEQ ID NO: 915142 - RNA, 19 nt, Artificial Sequence
  Description of Artificial Sequence: Synthetic oligonucleotide
augcgaauacaacgguaac

SEQ ID NO: 915143 - RNA, 19 nt, Artificial Sequence
  Description of Artificial Sequence: Synthetic oligonucleotide
gugcaaauuccccugcgag

SEQ ID NO: 915144 - RNA, 19 nt, Artificial Sequence
  Description of Artificial Sequence: Synthetic oligonucleotide
acucccuagcaauuaaagu

SEQ ID NO: 915145 - RNA, 19 nt, Artificial Sequence
  Description of Artificial Sequence: Synthetic oligonucleotide
aaguuauuuucaagccagg

SEQ ID NO: 915146 - RNA, 19 nt, Artificial Sequence
  Description of Artificial Sequence: Synthetic oligonucleotide
aaguguaauagugcaaauu

SEQ ID NO: 915147 - RNA, 19 nt, Artificial Sequence
  Description of Artificial Sequence: Synthetic oligonucleotide
uugaugcgaauacaacggu

SEQ ID NO: 915148 - RNA, 19 nt, Artificial Sequence
  Description of Artificial Sequence: Synthetic oligonucleotide
uaaaucgacugaugugaca

SEQ ID NO: 915149 - RNA, 19 nt, Artificial Sequence
  Description of Artificial Sequence: Synthetic oligonucleotide
gaugcgaauacaacgguaa

SEQ ID NO: 915150 - RNA, 19 nt, Artificial Sequence
  Description of Artificial Sequence: Synthetic oligonucleotide
guguaauagugcaaauucc

SEQ ID NO: 915151 - RNA, 19 nt, Artificial Sequence
  Description of Artificial Sequence: Synthetic oligonucleotide
aguccaauccgcugggcug

SEQ ID NO: 915152 - RNA, 19 nt, Artificial Sequence
  Description of Artificial Sequence: Synthetic oligonucleotide
auuggguauaaggucuggg

SEQ ID NO: 915153 - RNA, 19 nt, Artificial Sequence
  Description of Artificial Sequence: Synthetic oligonucleotide
caaauuggguauaaggucu

SEQ ID NO: 915154 - RNA, 19 nt, Artificial Sequence
  Description of Artificial Sequence: Synthetic oligonucleotide
ggucaugcguacuaguuug

SEQ ID NO: 915155 - RNA, 19 nt, Artificial Sequence
  Description of Artificial Sequence: Synthetic oligonucleotide
gaguucacuugggagaagc

SEQ ID NO: 915156 - RNA, 19 nt, Artificial Sequence
  Description of Artificial Sequence: Synthetic oligonucleotide
cuguccaaucagaggaucc

SEQ ID NO: 915157 - RNA, 19 nt, Artificial Sequence
  Description of Artificial Sequence: Synthetic oligonucleotide
uaugguugaugcgaauaca

SEQ ID NO: 915158 - RNA, 19 nt, Artificial Sequence
  Description of Artificial Sequence: Synthetic oligonucleotide
acaugguuuaaauuccaua

SEQ ID NO: 915159 - RNA, 19 nt, Artificial Sequence
  Description of Artificial Sequence: Synthetic oligonucleotide
aaauuggguauaaggucug

SEQ ID NO: 915160 - RNA, 19 nt, Artificial Sequence
  Description of Artificial Sequence: Synthetic oligonucleotide
aaacuauggcacugucaca

SEQ ID NO: 915161 - RNA, 19 nt, Artificial Sequence
  Description of Artificial Sequence: Synthetic oligonucleotide
ggcuauuuaaaucacugaa

SEQ ID NO: 915162 - RNA, 19 nt, Artificial Sequence
  Description of Artificial Sequence: Synthetic oligonucleotide
aguuauuuucaagccagga

SEQ ID NO: 915163 - RNA, 19 nt, Artificial Sequence
  Description of Artificial Sequence: Synthetic oligonucleotide
aagcuagcaaauguacaga

SEQ ID NO: 915164 - RNA, 19 nt, Artificial Sequence
  Description of Artificial Sequence: Synthetic oligonucleotide
ugaugcgaauacaacggua

SEQ ID NO: 915165 - RNA, 19 nt, Artificial Sequence
  Description of Artificial Sequence: Synthetic oligonucleotide
augcguacuaguuugucuu

SEQ ID NO: 915166 - RNA, 19 nt, Artificial Sequence
  Description of Artificial Sequence: Synthetic oligonucleotide
cacucuaucuugugccagg

SEQ ID NO: 915167 - RNA, 19 nt, Artificial Sequence
  Description of Artificial Sequence: Synthetic oligonucleotide
aaguuuagucagucuuaga

SEQ ID NO: 915168 - RNA, 19 nt, Artificial Sequence
  Description of Artificial Sequence: Synthetic oligonucleotide
agcaauuaaagugauccuu

SEQ ID NO: 915169 - RNA, 19 nt, Artificial Sequence
  Description of Artificial Sequence: Synthetic oligonucleotide
aggcuauuuaaaucacuga

SEQ ID NO: 915170 - RNA, 19 nt, Artificial Sequence
  Description of Artificial Sequence: Synthetic oligonucleotide
guaaccugaucccuugcac

SEQ ID NO: 915171 - RNA, 19 nt, Artificial Sequence
  Description of Artificial Sequence: Synthetic oligonucleotide
gaggcggcgggagagagag

SEQ ID NO: 915172 - RNA, 19 nt, Artificial Sequence
  Description of Artificial Sequence: Synthetic oligonucleotide
gacggcuacugguucuagg

SEQ ID NO: 915173 - RNA, 19 nt, Artificial Sequence
  Description of Artificial Sequence: Synthetic oligonucleotide
aacccagagugugaguuca

SEQ ID NO: 915174 - RNA, 19 nt, Artificial Sequence
  Description of Artificial Sequence: Synthetic oligonucleotide
uuacccaauuaaguacaag

SEQ ID NO: 915175 - RNA, 19 nt, Artificial Sequence
  Description of Artificial Sequence: Synthetic oligonucleotide
agugcaaauuccccugcga

SEQ ID NO: 915176 - RNA, 19 nt, Artificial Sequence
  Description of Artificial Sequence: Synthetic oligonucleotide
ucgugagccccuuggugcg

SEQ ID NO: 915177 - RNA, 19 nt, Artificial Sequence
  Description of Artificial Sequence: Synthetic oligonucleotide
uuacaccaguucauaauuu

SEQ ID NO: 915178 - RNA, 19 nt, Artificial Sequence
  Description of Artificial Sequence: Synthetic oligonucleotide
uguccaaucagaggaucca

SEQ ID NO: 915179 - RNA, 19 nt, Artificial Sequence
  Description of Artificial Sequence: Synthetic oligonucleotide
ccuugcacggcuuuucugg

SEQ ID NO: 915180 - RNA, 19 nt, Artificial Sequence
  Description of Artificial Sequence: Synthetic oligonucleotide
auccauagacuauaucuua

SEQ ID NO: 915181 - RNA, 19 nt, Artificial Sequence
  Description of Artificial Sequence: Synthetic oligonucleotide
ugaccauuuuccccggguc

SEQ ID NO: 915182 - RNA, 19 nt, Artificial Sequence
  Description of Artificial Sequence: Synthetic oligonucleotide
acccaauuaaguacaagga

SEQ ID NO: 915183 - RNA, 19 nt, Artificial Sequence
  Description of Artificial Sequence: Synthetic oligonucleotide
uagauggugguuuguggaa

SEQ ID NO: 915184 - RNA, 19 nt, Artificial Sequence
  Description of Artificial Sequence: Synthetic oligonucleotide
cugauaacuuucaagugua

SEQ ID NO: 915185 - RNA, 19 nt, Artificial Sequence
  Description of Artificial Sequence: Synthetic oligonucleotide
guacuaccaugcuuaaaac

SEQ ID NO: 915186 - RNA, 19 nt, Artificial Sequence
  Description of Artificial Sequence: Synthetic oligonucleotide
uuuauacauguaagugcua

SEQ ID NO: 915187 - RNA, 19 nt, Artificial Sequence
  Description of Artificial Sequence: Synthetic oligonucleotide
ugauaacuuucaaguguaa

SEQ ID NO: 915188 - RNA, 19 nt, Artificial Sequence
  Description of Artificial Sequence: Synthetic oligonucleotide
acaucgcucggaccucccc

SEQ ID NO: 915189 - RNA, 19 nt, Artificial Sequence
  Description of Artificial Sequence: Synthetic oligonucleotide
aguuacugauaacuuucaa

SEQ ID NO: 915190 - RNA, 19 nt, Artificial Sequence
  Description of Artificial Sequence: Synthetic oligonucleotide
uggugguuuguggaaaaga

SEQ ID NO: 915191 - RNA, 19 nt, Artificial Sequence
  Description of Artificial Sequence: Synthetic oligonucleotide
uuccccugcgagauggacu

SEQ ID NO: 915192 - RNA, 19 nt, Artificial Sequence
  Description of Artificial Sequence: Synthetic oligonucleotide
uccuuacaacugauucugc

SEQ ID NO: 915193 - RNA, 19 nt, Artificial Sequence
  Description of Artificial Sequence: Synthetic oligonucleotide
ggccuggucacaucgcucg

SEQ ID NO: 915194 - RNA, 19 nt, Artificial Sequence
  Description of Artificial Sequence: Synthetic oligonucleotide
aguucauaauuuaccaaau

SEQ ID NO: 915195 - RNA, 19 nt, Artificial Sequence
  Description of Artificial Sequence: Synthetic oligonucleotide
ggugguuuguggaaaagac

SEQ ID NO: 915196 - RNA, 19 nt, Artificial Sequence
  Description of Artificial Sequence: Synthetic oligonucleotide
gacccgacggccgagagga

SEQ ID NO: 915197 - RNA, 19 nt, Artificial Sequence
  Description of Artificial Sequence: Synthetic oligonucleotide
ggaagcgaggacgugaggc

SEQ ID NO: 915198 - RNA, 19 nt, Artificial Sequence
  Description of Artificial Sequence: Synthetic oligonucleotide
aaucgacugaugugacaaa

SEQ ID NO: 915199 - RNA, 19 nt, Artificial Sequence
  Description of Artificial Sequence: Synthetic oligonucleotide
gcgggagagagagagaggg

SEQ ID NO: 915200 - RNA, 19 nt, Artificial Sequence
  Description of Artificial Sequence: Synthetic oligonucleotide
gaccauuuuccccggguca

SEQ ID NO: 915201 - RNA, 19 nt, Artificial Sequence
  Description of Artificial Sequence: Synthetic oligonucleotide
acaagcuagcaaauguaca

SEQ ID NO: 915202 - RNA, 19 nt, Artificial Sequence
  Description of Artificial Sequence: Synthetic oligonucleotide
ccuuaaaucgacugaugug

SEQ ID NO: 915203 - RNA, 19 nt, Artificial Sequence
  Description of Artificial Sequence: Synthetic oligonucleotide
ugaaaccacccugugacuu

SEQ ID NO: 915204 - RNA, 19 nt, Artificial Sequence
  Description of Artificial Sequence: Synthetic oligonucleotide
agaggaagcgaggacguga

SEQ ID NO: 915205 - RNA, 19 nt, Artificial Sequence
  Description of Artificial Sequence: Synthetic oligonucleotide
ccaagaguugcauuuccag

SEQ ID NO: 915206 - RNA, 19 nt, Artificial Sequence
  Description of Artificial Sequence: Synthetic oligonucleotide
acgguaaccugaucccuug

SEQ ID NO: 915207 - RNA, 19 nt, Artificial Sequence
  Description of Artificial Sequence: Synthetic oligonucleotide
uccauccauagacuauauc

SEQ ID NO: 915208 - RNA, 19 nt, Artificial Sequence
  Description of Artificial Sequence: Synthetic oligonucleotide
cucaguccaauccgcuggg

SEQ ID NO: 915209 - RNA, 19 nt, Artificial Sequence
  Description of Artificial Sequence: Synthetic oligonucleotide
ucgacugaugugacaaauu

SEQ ID NO: 915210 - RNA, 19 nt, Artificial Sequence
  Description of Artificial Sequence: Synthetic oligonucleotide
agcgacggcggccugguca

SEQ ID NO: 915211 - RNA, 19 nt, Artificial Sequence
  Description of Artificial Sequence: Synthetic oligonucleotide
acuauaucuuaaccugaua

SEQ ID NO: 915212 - RNA, 19 nt, Artificial Sequence
  Description of Artificial Sequence: Synthetic oligonucleotide
agacuauaucuuaaccuga

SEQ ID NO: 915213 - RNA, 19 nt, Artificial Sequence
  Description of Artificial Sequence: Synthetic oligonucleotide
auuugcacguuggugcugu

SEQ ID NO: 915214 - RNA, 19 nt, Artificial Sequence
  Description of Artificial Sequence: Synthetic oligonucleotide
ccauccauagacuauaucu

SEQ ID NO: 915215 - RNA, 19 nt, Artificial Sequence
  Description of Artificial Sequence: Synthetic oligonucleotide
ucccuauugagcugccaaa

SEQ ID NO: 915216 - RNA, 19 nt, Artificial Sequence
  Description of Artificial Sequence: Synthetic oligonucleotide
agggucuuuuaaaagccug

SEQ ID NO: 915217 - RNA, 19 nt, Artificial Sequence
  Description of Artificial Sequence: Synthetic oligonucleotide
ggugcggaggaacuuggag

SEQ ID NO: 915218 - RNA, 19 nt, Artificial Sequence
  Description of Artificial Sequence: Synthetic oligonucleotide
uggcuggugcuaacaacca

SEQ ID NO: 915219 - RNA, 19 nt, Artificial Sequence
  Description of Artificial Sequence: Synthetic oligonucleotide
agaggaggguucuucgaaa

SEQ ID NO: 915220 - RNA, 19 nt, Artificial Sequence
  Description of Artificial Sequence: Synthetic oligonucleotide
cauguaagugcuagguaaa

SEQ ID NO: 915221 - RNA, 19 nt, Artificial Sequence
  Description of Artificial Sequence: Synthetic oligonucleotide
uuaaaacauugagcuuccc

SEQ ID NO: 915222 - RNA, 19 nt, Artificial Sequence
  Description of Artificial Sequence: Synthetic oligonucleotide
accacucuaucuugugcca

SEQ ID NO: 915223 - RNA, 19 nt, Artificial Sequence
  Description of Artificial Sequence: Synthetic oligonucleotide
auacaacgguaaccugauc

SEQ ID NO: 915224 - RNA, 19 nt, Artificial Sequence
  Description of Artificial Sequence: Synthetic oligonucleotide
aucgcucggaccuccccag

SEQ ID NO: 915225 - RNA, 19 nt, Artificial Sequence
  Description of Artificial Sequence: Synthetic oligonucleotide
agaaguuuagucagucuua

SEQ ID NO: 915226 - RNA, 19 nt, Artificial Sequence
  Description of Artificial Sequence: Synthetic oligonucleotide
aaccagaccuccacuuucu

SEQ ID NO: 915227 - RNA, 19 nt, Artificial Sequence
  Description of Artificial Sequence: Synthetic oligonucleotide
agacccgacggccgagagg

SEQ ID NO: 915228 - RNA, 19 nt, Artificial Sequence
  Description of Artificial Sequence: Synthetic oligonucleotide
aucgacugaugugacaaau

SEQ ID NO: 915229 - RNA, 19 nt, Artificial Sequence
  Description of Artificial Sequence: Synthetic oligonucleotide
gacuucacucccuagcaau

SEQ ID NO: 915230 - RNA, 19 nt, Artificial Sequence
  Description of Artificial Sequence: Synthetic oligonucleotide
cuuaugguugaugcgaaua

SEQ ID NO: 915231 - RNA, 19 nt, Artificial Sequence
  Description of Artificial Sequence: Synthetic oligonucleotide
aagggcuuguucugcccaa

SEQ ID NO: 915232 - RNA, 19 nt, Artificial Sequence
  Description of Artificial Sequence: Synthetic oligonucleotide
gauccuuuacuuggacuca

SEQ ID NO: 915233 - RNA, 19 nt, Artificial Sequence
  Description of Artificial Sequence: Synthetic oligonucleotide
acuauggcacugucacacu

SEQ ID NO: 915234 - RNA, 19 nt, Artificial Sequence
  Description of Artificial Sequence: Synthetic oligonucleotide
aggacgugaggcgcggacg

SEQ ID NO: 915235 - RNA, 19 nt, Artificial Sequence
  Description of Artificial Sequence: Synthetic oligonucleotide
cauugagcuucccuauuga

SEQ ID NO: 915236 - RNA, 19 nt, Artificial Sequence
  Description of Artificial Sequence: Synthetic oligonucleotide
ggacgugaggcgcggacgg

SEQ ID NO: 915237 - RNA, 19 nt, Artificial Sequence
  Description of Artificial Sequence: Synthetic oligonucleotide
ucccuugcacggcuuuucu

SEQ ID NO: 915238 - RNA, 19 nt, Artificial Sequence
  Description of Artificial Sequence: Synthetic oligonucleotide
ggacucacaggcuauuuaa

SEQ ID NO: 915239 - RNA, 19 nt, Artificial Sequence
  Description of Artificial Sequence: Synthetic oligonucleotide
aucccuugcacggcuuuuc

SEQ ID NO: 915240 - RNA, 19 nt, Artificial Sequence
  Description of Artificial Sequence: Synthetic oligonucleotide
cacggcagagucuggucac

SEQ ID NO: 915241 - RNA, 19 nt, Artificial Sequence
  Description of Artificial Sequence: Synthetic oligonucleotide
gaggacgugaggcgcggac

SEQ ID NO: 915242 - RNA, 19 nt, Artificial Sequence
  Description of Artificial Sequence: Synthetic oligonucleotide
ucaugcguacuaguuuguc

SEQ ID NO: 915243 - RNA, 19 nt, Artificial Sequence
  Description of Artificial Sequence: Synthetic oligonucleotide
acaggcuauuuaaaucacu

SEQ ID NO: 915244 - RNA, 19 nt, Artificial Sequence
  Description of Artificial Sequence: Synthetic oligonucleotide
aacgguaaccugaucccuu

SEQ ID NO: 915245 - RNA, 19 nt, Artificial Sequence
  Description of Artificial Sequence: Synthetic oligonucleotide
cuuugccacaaucaauaua

SEQ ID NO: 915246 - RNA, 19 nt, Artificial Sequence
  Description of Artificial Sequence: Synthetic oligonucleotide
gaggguucuucgaaauaca

SEQ ID NO: 915247 - RNA, 19 nt, Artificial Sequence
  Description of Artificial Sequence: Synthetic oligonucleotide
ccgagaggaagcgaggacg

SEQ ID NO: 915248 - RNA, 19 nt, Artificial Sequence
  Description of Artificial Sequence: Synthetic oligonucleotide
gucugaccauuuuccccgg

SEQ ID NO: 915249 - RNA, 19 nt, Artificial Sequence
  Description of Artificial Sequence: Synthetic oligonucleotide
uccgcugggcugccugucc

SEQ ID NO: 915250 - RNA, 19 nt, Artificial Sequence
  Description of Artificial Sequence: Synthetic oligonucleotide
gguauaaggucugggagaa

SEQ ID NO: 915251 - RNA, 19 nt, Artificial Sequence
  Description of Artificial Sequence: Synthetic oligonucleotide
uugcacggcuuuucuggga

SEQ ID NO: 915252 - RNA, 19 nt, Artificial Sequence
  Description of Artificial Sequence: Synthetic oligonucleotide
ggucacaucgcucggaccu

SEQ ID NO: 915253 - RNA, 19 nt, Artificial Sequence
  Description of Artificial Sequence: Synthetic oligonucleotide
cauccauagacuauaucuu

SEQ ID NO: 915254 - RNA, 19 nt, Artificial Sequence
  Description of Artificial Sequence: Synthetic oligonucleotide
ucacaucgcucggaccucc

SEQ ID NO: 915255 - RNA, 19 nt, Artificial Sequence
  Description of Artificial Sequence: Synthetic oligonucleotide
cuccgaggauccccaagag

SEQ ID NO: 915256 - RNA, 19 nt, Artificial Sequence
  Description of Artificial Sequence: Synthetic oligonucleotide
caugcguacuaguuugucu

SEQ ID NO: 915257 - RNA, 19 nt, Artificial Sequence
  Description of Artificial Sequence: Synthetic oligonucleotide
ugcguacuaguuugucuuu

SEQ ID NO: 915258 - RNA, 19 nt, Artificial Sequence
  Description of Artificial Sequence: Synthetic oligonucleotide
ugaucccuugcacggcuuu

SEQ ID NO: 915259 - RNA, 19 nt, Artificial Sequence
  Description of Artificial Sequence: Synthetic oligonucleotide
cucggaccuccccagccgc

SEQ ID NO: 915260 - RNA, 19 nt, Artificial Sequence
  Description of Artificial Sequence: Synthetic oligonucleotide
uuccuccuuacaacugauu

SEQ ID NO: 915261 - RNA, 19 nt, Artificial Sequence
  Description of Artificial Sequence: Synthetic oligonucleotide
ccuaucaugguggcggccc

SEQ ID NO: 915262 - RNA, 19 nt, Artificial Sequence
  Description of Artificial Sequence: Synthetic oligonucleotide
gcgaauacaacgguaaccu

SEQ ID NO: 915263 - RNA, 19 nt, Artificial Sequence
  Description of Artificial Sequence: Synthetic oligonucleotide
agcugugacaugguuuaaa

SEQ ID NO: 915264 - RNA, 19 nt, Artificial Sequence
  Description of Artificial Sequence: Synthetic oligonucleotide
gacuauaucuuaaccugau

SEQ ID NO: 915265 - RNA, 19 nt, Artificial Sequence
  Description of Artificial Sequence: Synthetic oligonucleotide
ugaguucacuugggagaag

SEQ ID NO: 915266 - RNA, 19 nt, Artificial Sequence
  Description of Artificial Sequence: Synthetic oligonucleotide
uacugguucuaggggauuu

SEQ ID NO: 915267 - RNA, 19 nt, Artificial Sequence
  Description of Artificial Sequence: Synthetic oligonucleotide
gccugaacaacucuugacu

SEQ ID NO: 915268 - RNA, 19 nt, Artificial Sequence
  Description of Artificial Sequence: Synthetic oligonucleotide
accgcggcggcgaucucgc

SEQ ID NO: 915269 - RNA, 19 nt, Artificial Sequence
  Description of Artificial Sequence: Synthetic oligonucleotide
caaauuccccugcgagaug

SEQ ID NO: 915270 - RNA, 19 nt, Artificial Sequence
  Description of Artificial Sequence: Synthetic oligonucleotide
cugucgcucgcucgugagc

SEQ ID NO: 915271 - RNA, 19 nt, Artificial Sequence
  Description of Artificial Sequence: Synthetic oligonucleotide
gcgagauggacugcagagg

SEQ ID NO: 915272 - RNA, 19 nt, Artificial Sequence
  Description of Artificial Sequence: Synthetic oligonucleotide
aucuuaugguugaugcgaa

SEQ ID NO: 915273 - RNA, 19 nt, Artificial Sequence
  Description of Artificial Sequence: Synthetic oligonucleotide
accaugcuuaaaacauuga

SEQ ID NO: 915274 - RNA, 19 nt, Artificial Sequence
  Description of Artificial Sequence: Synthetic oligonucleotide
ggggucaacccagagugug

SEQ ID NO: 915275 - RNA, 19 nt, Artificial Sequence
  Description of Artificial Sequence: Synthetic oligonucleotide
agcgaggacgugaggcgcg

SEQ ID NO: 915276 - RNA, 19 nt, Artificial Sequence
  Description of Artificial Sequence: Synthetic oligonucleotide
gaguguagaagggaugcau

SEQ ID NO: 915277 - RNA, 19 nt, Artificial Sequence
  Description of Artificial Sequence: Synthetic oligonucleotide
gaaggacaccgcggcggcg

SEQ ID NO: 915278 - RNA, 19 nt, Artificial Sequence
  Description of Artificial Sequence: Synthetic oligonucleotide
cagaggaggguucuucgaa

SEQ ID NO: 915279 - RNA, 19 nt, Artificial Sequence
  Description of Artificial Sequence: Synthetic oligonucleotide
ucaguccaauccgcugggc

SEQ ID NO: 915280 - RNA, 19 nt, Artificial Sequence
  Description of Artificial Sequence: Synthetic oligonucleotide
cacaaucaauauacaugaa

SEQ ID NO: 915281 - RNA, 19 nt, Artificial Sequence
  Description of Artificial Sequence: Synthetic oligonucleotide
gaggaggguucuucgaaau

SEQ ID NO: 915282 - RNA, 19 nt, Artificial Sequence
  Description of Artificial Sequence: Synthetic oligonucleotide
cucgccuaucaugguggcg

SEQ ID NO: 915283 - RNA, 19 nt, Artificial Sequence
  Description of Artificial Sequence: Synthetic oligonucleotide
gcucgugagccccuuggug

SEQ ID NO: 915284 - RNA, 19 nt, Artificial Sequence
  Description of Artificial Sequence: Synthetic oligonucleotide
ugccacggcagagucuggu

SEQ ID NO: 915285 - RNA, 19 nt, Artificial Sequence
  Description of Artificial Sequence: Synthetic oligonucleotide
agcugucgcucgcucguga

SEQ ID NO: 915286 - RNA, 19 nt, Artificial Sequence
  Description of Artificial Sequence: Synthetic oligonucleotide
caucgcucggaccucccca

SEQ ID NO: 915287 - RNA, 19 nt, Artificial Sequence
  Description of Artificial Sequence: Synthetic oligonucleotide
gagaggaagcgaggacgug

SEQ ID NO: 915288 - RNA, 19 nt, Artificial Sequence
  Description of Artificial Sequence: Synthetic oligonucleotide
gcucggaccuccccagccg

SEQ ID NO: 915289 - RNA, 19 nt, Artificial Sequence
  Description of Artificial Sequence: Synthetic oligonucleotide
uuccccgggucaugcguac

SEQ ID NO: 915290 - RNA, 19 nt, Artificial Sequence
  Description of Artificial Sequence: Synthetic oligonucleotide
gaacaacucuugacugcuc

SEQ ID NO: 915291 - RNA, 19 nt, Artificial Sequence
  Description of Artificial Sequence: Synthetic oligonucleotide
cacaucgcucggaccuccc

SEQ ID NO: 915292 - RNA, 19 nt, Artificial Sequence
  Description of Artificial Sequence: Synthetic oligonucleotide
acuucacucccuagcaauu

SEQ ID NO: 915293 - RNA, 19 nt, Artificial Sequence
  Description of Artificial Sequence: Synthetic oligonucleotide
ccuagcaauuaaagugauc

SEQ ID NO: 915294 - RNA, 19 nt, Artificial Sequence
  Description of Artificial Sequence: Synthetic oligonucleotide
cucccgcccagacccgacg

SEQ ID NO: 915295 - RNA, 19 nt, Artificial Sequence
  Description of Artificial Sequence: Synthetic oligonucleotide
caauacaaggucugaccau

SEQ ID NO: 915296 - RNA, 19 nt, Artificial Sequence
  Description of Artificial Sequence: Synthetic oligonucleotide
aauuccccugcgagaugga

SEQ ID NO: 915297 - RNA, 19 nt, Artificial Sequence
  Description of Artificial Sequence: Synthetic oligonucleotide
acggcuuuucugggaacca

SEQ ID NO: 915298 - RNA, 19 nt, Artificial Sequence
  Description of Artificial Sequence: Synthetic oligonucleotide
aggcgcggacggcuacugg

SEQ ID NO: 915299 - RNA, 19 nt, Artificial Sequence
  Description of Artificial Sequence: Synthetic oligonucleotide
cugcgagauggacugcaga

SEQ ID NO: 915300 - RNA, 19 nt, Artificial Sequence
  Description of Artificial Sequence: Synthetic oligonucleotide
ccgacggccgagaggaagc

SEQ ID NO: 915301 - RNA, 19 nt, Artificial Sequence
  Description of Artificial Sequence: Synthetic oligonucleotide
acgagcgacggcggccugg

SEQ ID NO: 915302 - RNA, 19 nt, Artificial Sequence
  Description of Artificial Sequence: Synthetic oligonucleotide
gacaccgcggcggcgaucu

SEQ ID NO: 915303 - RNA, 19 nt, Artificial Sequence
  Description of Artificial Sequence: Synthetic oligonucleotide
cagacccgacggccgagag

SEQ ID NO: 915304 - RNA, 19 nt, Artificial Sequence
  Description of Artificial Sequence: Synthetic oligonucleotide
gacggcggagcggccaccc

SEQ ID NO: 915305 - RNA, 19 nt, Artificial Sequence
  Description of Artificial Sequence: Synthetic oligonucleotide
gcugugacaugguuuaaau

SEQ ID NO: 915306 - RNA, 19 nt, Artificial Sequence
  Description of Artificial Sequence: Synthetic oligonucleotide
ccaguucauaauuuaccaa

SEQ ID NO: 915307 - RNA, 19 nt, Artificial Sequence
  Description of Artificial Sequence: Synthetic oligonucleotide
ugaggcgcggacggcuacu

SEQ ID NO: 915308 - RNA, 19 nt, Artificial Sequence
  Description of Artificial Sequence: Synthetic oligonucleotide
gcggcgaucucgccuauca

SEQ ID NO: 915309 - RNA, 19 nt, Artificial Sequence
  Description of Artificial Sequence: Synthetic oligonucleotide
cuaccaugcuuaaaacauu

SEQ ID NO: 915310 - RNA, 19 nt, Artificial Sequence
  Description of Artificial Sequence: Synthetic oligonucleotide
gaggcgcggacggcuacug

SEQ ID NO: 915311 - RNA, 19 nt, Artificial Sequence
  Description of Artificial Sequence: Synthetic oligonucleotide
gcaaauuccccugcgagau

SEQ ID NO: 915312 - RNA, 19 nt, Artificial Sequence
  Description of Artificial Sequence: Synthetic oligonucleotide
cuucacucccuagcaauua

SEQ ID NO: 915313 - RNA, 19 nt, Artificial Sequence
  Description of Artificial Sequence: Synthetic oligonucleotide
cagucaucauauuguaguu

SEQ ID NO: 915314 - RNA, 19 nt, Artificial Sequence
  Description of Artificial Sequence: Synthetic oligonucleotide
cugaccauuuuccccgggu

SEQ ID NO: 915315 - RNA, 19 nt, Artificial Sequence
  Description of Artificial Sequence: Synthetic oligonucleotide
gacgugaggcgcggacggc

SEQ ID NO: 915316 - RNA, 19 nt, Artificial Sequence
  Description of Artificial Sequence: Synthetic oligonucleotide
uccaauccgcugggcugcc

SEQ ID NO: 915317 - RNA, 19 nt, Artificial Sequence
  Description of Artificial Sequence: Synthetic oligonucleotide
ccgaggauccccaagaguu

SEQ ID NO: 915318 - RNA, 19 nt, Artificial Sequence
  Description of Artificial Sequence: Synthetic oligonucleotide
cugugacaugguuuaaauu

SEQ ID NO: 915319 - RNA, 19 nt, Artificial Sequence
  Description of Artificial Sequence: Synthetic oligonucleotide
ccuccgaggauccccaaga

SEQ ID NO: 915320 - RNA, 19 nt, Artificial Sequence
  Description of Artificial Sequence: Synthetic oligonucleotide
caguccaauccgcugggcu

SEQ ID NO: 915321 - RNA, 19 nt, Artificial Sequence
  Description of Artificial Sequence: Synthetic oligonucleotide
ccugcgagauggacugcag

SEQ ID NO: 915322 - RNA, 19 nt, Artificial Sequence
  Description of Artificial Sequence: Synthetic oligonucleotide
ggcgggagagagagagagg

SEQ ID NO: 915323 - RNA, 19 nt, Artificial Sequence
  Description of Artificial Sequence: Synthetic oligonucleotide
gugaggcgcggacggcuac

SEQ ID NO: 915324 - RNA, 19 nt, Artificial Sequence
  Description of Artificial Sequence: Synthetic oligonucleotide
ccuccuuacaacugauucu

SEQ ID NO: 915325 - RNA, 19 nt, Artificial Sequence
  Description of Artificial Sequence: Synthetic oligonucleotide
gucacaucgcucggaccuc

SEQ ID NO: 915326 - RNA, 19 nt, Artificial Sequence
  Description of Artificial Sequence: Synthetic oligonucleotide
acggcagagucuggucacu

SEQ ID NO: 915327 - RNA, 19 nt, Artificial Sequence
  Description of Artificial Sequence: Synthetic oligonucleotide
cggcuacugguucuagggg

SEQ ID NO: 915328 - RNA, 19 nt, Artificial Sequence
  Description of Artificial Sequence: Synthetic oligonucleotide
ggcggcccgaguguagaag

SEQ ID NO: 915329 - RNA, 19 nt, Artificial Sequence
  Description of Artificial Sequence: Synthetic oligonucleotide
cucgcucgugagccccuug

SEQ ID NO: 915330 - RNA, 19 nt, Artificial Sequence
  Description of Artificial Sequence: Synthetic oligonucleotide
gcgacggcggccuggucac

SEQ ID NO: 915331 - RNA, 19 nt, Artificial Sequence
  Description of Artificial Sequence: Synthetic oligonucleotide
cggcgggagagagagagag

SEQ ID NO: 915332 - RNA, 19 nt, Artificial Sequence
  Description of Artificial Sequence: Synthetic oligonucleotide
uggcggcccgaguguagaa

SEQ ID NO: 915333 - RNA, 19 nt, Artificial Sequence
  Description of Artificial Sequence: Synthetic oligonucleotide
aggggucaacccagagugu

SEQ ID NO: 915334 - RNA, 19 nt, Artificial Sequence
  Description of Artificial Sequence: Synthetic oligonucleotide
cccuugcacggcuuuucug

SEQ ID NO: 915335 - RNA, 19 nt, Artificial Sequence
  Description of Artificial Sequence: Synthetic oligonucleotide
cgggagagagagagagggg

SEQ ID NO: 915336 - RNA, 19 nt, Artificial Sequence
  Description of Artificial Sequence: Synthetic oligonucleotide
cuucccuauugagcugcca

SEQ ID NO: 915337 - RNA, 19 nt, Artificial Sequence
  Description of Artificial Sequence: Synthetic oligonucleotide
gacgagcgacggcggccug

SEQ ID NO: 915338 - RNA, 19 nt, Artificial Sequence
  Description of Artificial Sequence: Synthetic oligonucleotide
gacggccgagaggaagcga

SEQ ID NO: 915339 - RNA, 19 nt, Artificial Sequence
  Description of Artificial Sequence: Synthetic oligonucleotide
caacgguaaccugaucccu

SEQ ID NO: 915340 - RNA, 19 nt, Artificial Sequence
  Description of Artificial Sequence: Synthetic oligonucleotide
guucuucgaaauacagguu

SEQ ID NO: 915341 - RNA, 19 nt, Artificial Sequence
  Description of Artificial Sequence: Synthetic oligonucleotide
gggucaugcguacuaguuu

SEQ ID NO: 915342 - RNA, 19 nt, Artificial Sequence
  Description of Artificial Sequence: Synthetic oligonucleotide
cuugacugcucaguccaau

SEQ ID NO: 915343 - RNA, 19 nt, Artificial Sequence
  Description of Artificial Sequence: Synthetic oligonucleotide
caguacuaccaugcuuaaa

SEQ ID NO: 915344 - RNA, 19 nt, Artificial Sequence
  Description of Artificial Sequence: Synthetic oligonucleotide
gucaugcguacuaguuugu

SEQ ID NO: 915345 - RNA, 19 nt, Artificial Sequence
  Description of Artificial Sequence: Synthetic oligonucleotide
uccccgggucaugcguacu

SEQ ID NO: 915346 - RNA, 19 nt, Artificial Sequence
  Description of Artificial Sequence: Synthetic oligonucleotide
ggcccgaguguagaaggga

SEQ ID NO: 915347 - RNA, 19 nt, Artificial Sequence
  Description of Artificial Sequence: Synthetic oligonucleotide
cccgacggccgagaggaag

SEQ ID NO: 915348 - RNA, 19 nt, Artificial Sequence
  Description of Artificial Sequence: Synthetic oligonucleotide
gcgaggacgugaggcgcgg

SEQ ID NO: 915349 - RNA, 19 nt, Artificial Sequence
  Description of Artificial Sequence: Synthetic oligonucleotide
ggacggcuacugguucuag

SEQ ID NO: 915350 - RNA, 19 nt, Artificial Sequence
  Description of Artificial Sequence: Synthetic oligonucleotide
cccuauugagcugccaaaa

SEQ ID NO: 915351 - RNA, 19 nt, Artificial Sequence
  Description of Artificial Sequence: Synthetic oligonucleotide
cggcccgaguguagaaggg

SEQ ID NO: 915352 - RNA, 19 nt, Artificial Sequence
  Description of Artificial Sequence: Synthetic oligonucleotide
ccauuugcacguuggugcu

SEQ ID NO: 915353 - RNA, 19 nt, Artificial Sequence
  Description of Artificial Sequence: Synthetic oligonucleotide
cagcugucgcucgcucgug

SEQ ID NO: 915354 - RNA, 19 nt, Artificial Sequence
  Description of Artificial Sequence: Synthetic oligonucleotide
cccgggucaugcguacuag

SEQ ID NO: 915355 - RNA, 19 nt, Artificial Sequence
  Description of Artificial Sequence: Synthetic oligonucleotide
gcuucccuauugagcugcc

SEQ ID NO: 915356 - RNA, 19 nt, Artificial Sequence
  Description of Artificial Sequence: Synthetic oligonucleotide
gccuaucaugguggcggcc

SEQ ID NO: 915357 - RNA, 19 nt, Artificial Sequence
  Description of Artificial Sequence: Synthetic oligonucleotide
ccaguacuaccaugcuuaa

SEQ ID NO: 915358 - RNA, 19 nt, Artificial Sequence
  Description of Artificial Sequence: Synthetic oligonucleotide
cgccuaucaugguggcggc

SEQ ID NO: 915359 - RNA, 19 nt, Artificial Sequence
  Description of Artificial Sequence: Synthetic oligonucleotide
cuuggacucacaggcuauu

SEQ ID NO: 915360 - RNA, 19 nt, Artificial Sequence
  Description of Artificial Sequence: Synthetic oligonucleotide
gacggcggccuggucacau

SEQ ID NO: 915361 - RNA, 19 nt, Artificial Sequence
  Description of Artificial Sequence: Synthetic oligonucleotide
cccgcccagacccgacggc

SEQ ID NO: 915362 - RNA, 19 nt, Artificial Sequence
  Description of Artificial Sequence: Synthetic oligonucleotide
cgagaggaagcgaggacgu

SEQ ID NO: 915363 - RNA, 19 nt, Artificial Sequence
  Description of Artificial Sequence: Synthetic oligonucleotide
ccugaucccuugcacggcu

SEQ ID NO: 915364 - RNA, 19 nt, Artificial Sequence
  Description of Artificial Sequence: Synthetic oligonucleotide
caccccgggcucccgccca

SEQ ID NO: 915365 - RNA, 19 nt, Artificial Sequence
  Description of Artificial Sequence: Synthetic oligonucleotide
gagcgacggcggccugguc

SEQ ID NO: 915366 - RNA, 19 nt, Artificial Sequence
  Description of Artificial Sequence: Synthetic oligonucleotide
gcggacggcuacugguucu

SEQ ID NO: 915367 - RNA, 19 nt, Artificial Sequence
  Description of Artificial Sequence: Synthetic oligonucleotide
cgacggccgagaggaagcg

SEQ ID NO: 915368 - RNA, 19 nt, Artificial Sequence
  Description of Artificial Sequence: Synthetic oligonucleotide
gcggagcggccaccccggg

SEQ ID NO: 915369 - RNA, 19 nt, Artificial Sequence
  Description of Artificial Sequence: Synthetic oligonucleotide
cccuagcaauuaaagugau

SEQ ID NO: 915370 - RNA, 19 nt, Artificial Sequence
  Description of Artificial Sequence: Synthetic oligonucleotide
cugaucccuugcacggcuu

SEQ ID NO: 915371 - RNA, 19 nt, Artificial Sequence
  Description of Artificial Sequence: Synthetic oligonucleotide
cgcggacggcuacugguuc

SEQ ID NO: 915372 - RNA, 19 nt, Artificial Sequence
  Description of Artificial Sequence: Synthetic oligonucleotide
ccaagagaaguuccuccuu

SEQ ID NO: 915373 - RNA, 19 nt, Artificial Sequence
  Description of Artificial Sequence: Synthetic oligonucleotide
cuacugguucuaggggauu

SEQ ID NO: 915374 - RNA, 19 nt, Artificial Sequence
  Description of Artificial Sequence: Synthetic oligonucleotide
cgaguguagaagggaugca

SEQ ID NO: 915375 - RNA, 19 nt, Artificial Sequence
  Description of Artificial Sequence: Synthetic oligonucleotide
gggcucccgcccagacccg

SEQ ID NO: 915376 - RNA, 19 nt, Artificial Sequence
  Description of Artificial Sequence: Synthetic oligonucleotide
ccccgggucaugcguacua

SEQ ID NO: 915377 - RNA, 19 nt, Artificial Sequence
  Description of Artificial Sequence: Synthetic oligonucleotide
cgggucaugcguacuaguu

SEQ ID NO: 915378 - RNA, 19 nt, Artificial Sequence
  Description of Artificial Sequence: Synthetic oligonucleotide
ccgggucaugcguacuagu

SEQ ID NO: 915379 - RNA, 19 nt, Artificial Sequence
  Description of Artificial Sequence: Synthetic oligonucleotide
gccuguccaaucagaggau

SEQ ID NO: 915380 - RNA, 19 nt, Artificial Sequence
  Description of Artificial Sequence: Synthetic oligonucleotide
ggcggcgaucucgccuauc

SEQ ID NO: 915381 - RNA, 19 nt, Artificial Sequence
  Description of Artificial Sequence: Synthetic oligonucleotide
ccagacccgacggccgaga

SEQ ID NO: 915382 - RNA, 19 nt, Artificial Sequence
  Description of Artificial Sequence: Synthetic oligonucleotide
gcggcgggagagagagaga

SEQ ID NO: 915383 - RNA, 19 nt, Artificial Sequence
  Description of Artificial Sequence: Synthetic oligonucleotide
cgugaggcgcggacggcua

SEQ ID NO: 915384 - RNA, 19 nt, Artificial Sequence
  Description of Artificial Sequence: Synthetic oligonucleotide
acccgacggccgagaggaa

SEQ ID NO: 915385 - RNA, 19 nt, Artificial Sequence
  Description of Artificial Sequence: Synthetic oligonucleotide
ccgcggcggcgaucucgcc

SEQ ID NO: 915386 - RNA, 19 nt, Artificial Sequence
  Description of Artificial Sequence: Synthetic oligonucleotide
gcgcggacggcuacugguu

SEQ ID NO: 915387 - RNA, 19 nt, Artificial Sequence
  Description of Artificial Sequence: Synthetic oligonucleotide
cgacggcggagcggccacc

SEQ ID NO: 915388 - RNA, 19 nt, Artificial Sequence
  Description of Artificial Sequence: Synthetic oligonucleotide
cgcucgugagccccuuggu

SEQ ID NO: 915389 - RNA, 19 nt, Artificial Sequence
  Description of Artificial Sequence: Synthetic oligonucleotide
cggacggcuacugguucua

SEQ ID NO: 915390 - RNA, 19 nt, Artificial Sequence
  Description of Artificial Sequence: Synthetic oligonucleotide
cgaggacgugaggcgcgga

SEQ ID NO: 915391 - RNA, 19 nt, Artificial Sequence
  Description of Artificial Sequence: Synthetic oligonucleotide
gcucgcucgugagccccuu

SEQ ID NO: 915392 - RNA, 19 nt, Artificial Sequence
  Description of Artificial Sequence: Synthetic oligonucleotide
cgacggcggccuggucaca

SEQ ID NO: 915393 - RNA, 19 nt, Artificial Sequence
  Description of Artificial Sequence: Synthetic oligonucleotide
cggcggcgaucucgccuau

SEQ ID NO: 915394 - RNA, 19 nt, Artificial Sequence
  Description of Artificial Sequence: Synthetic oligonucleotide
aauaaagacaugaggggcc

SEQ ID NO: 915395 - RNA, 19 nt, Artificial Sequence
  Description of Artificial Sequence: Synthetic oligonucleotide
aacaugucgcuuuuccugc

SEQ ID NO: 915396 - RNA, 19 nt, Artificial Sequence
  Description of Artificial Sequence: Synthetic oligonucleotide
auaaguaucaucaguuugc

SEQ ID NO: 915397 - RNA, 19 nt, Artificial Sequence
  Description of Artificial Sequence: Synthetic oligonucleotide
acugguugugaauaggggc

SEQ ID NO: 915398 - RNA, 19 nt, Artificial Sequence
  Description of Artificial Sequence: Synthetic oligonucleotide
aguaucaucaguuugcuau

SEQ ID NO: 915399 - RNA, 19 nt, Artificial Sequence
  Description of Artificial Sequence: Synthetic oligonucleotide
aaaguaguacacuuagugu

SEQ ID NO: 915400 - RNA, 19 nt, Artificial Sequence
  Description of Artificial Sequence: Synthetic oligonucleotide
aucaguguuagcuggcugc

SEQ ID NO: 915401 - RNA, 19 nt, Artificial Sequence
  Description of Artificial Sequence: Synthetic oligonucleotide
ugaaacuacauacaguaua

SEQ ID NO: 915402 - RNA, 19 nt, Artificial Sequence
  Description of Artificial Sequence: Synthetic oligonucleotide
aaguaguacacuuagugua

SEQ ID NO: 915403 - RNA, 19 nt, Artificial Sequence
  Description of Artificial Sequence: Synthetic oligonucleotide
aucaaaucgaaccagcaga

SEQ ID NO: 915404 - RNA, 19 nt, Artificial Sequence
  Description of Artificial Sequence: Synthetic oligonucleotide
gaacaugcgacccugggcc

SEQ ID NO: 915405 - RNA, 19 nt, Artificial Sequence
  Description of Artificial Sequence: Synthetic oligonucleotide
ucacugauuauauaaagua

SEQ ID NO: 915406 - RNA, 19 nt, Artificial Sequence
  Description of Artificial Sequence: Synthetic oligonucleotide
aaggaugccgagcuggcgg

SEQ ID NO: 915407 - RNA, 19 nt, Artificial Sequence
  Description of Artificial Sequence: Synthetic oligonucleotide
auaagucucuccuagaaaa

SEQ ID NO: 915408 - RNA, 19 nt, Artificial Sequence
  Description of Artificial Sequence: Synthetic oligonucleotide
guaauuugaacauuccaac

SEQ ID NO: 915409 - RNA, 19 nt, Artificial Sequence
  Description of Artificial Sequence: Synthetic oligonucleotide
guagacucggcucaagugg

SEQ ID NO: 915410 - RNA, 19 nt, Artificial Sequence
  Description of Artificial Sequence: Synthetic oligonucleotide
ugcucauaaacgaagggcu

SEQ ID NO: 915411 - RNA, 19 nt, Artificial Sequence
  Description of Artificial Sequence: Synthetic oligonucleotide
uucaguuuguaucacggcu

SEQ ID NO: 915412 - RNA, 19 nt, Artificial Sequence
  Description of Artificial Sequence: Synthetic oligonucleotide
auacauaagucucuccuag

SEQ ID NO: 915413 - RNA, 19 nt, Artificial Sequence
  Description of Artificial Sequence: Synthetic oligonucleotide
ucugaauggaaaccacccg

SEQ ID NO: 915414 - RNA, 19 nt, Artificial Sequence
  Description of Artificial Sequence: Synthetic oligonucleotide
ugccuaugaaacuacauac

SEQ ID NO: 915415 - RNA, 19 nt, Artificial Sequence
  Description of Artificial Sequence: Synthetic oligonucleotide
ugugcauucauccgcaagu

SEQ ID NO: 915416 - RNA, 19 nt, Artificial Sequence
  Description of Artificial Sequence: Synthetic oligonucleotide
ucuagcaauucacugauua

SEQ ID NO: 915417 - RNA, 19 nt, Artificial Sequence
  Description of Artificial Sequence: Synthetic oligonucleotide
gaauaaagacaugaggggc

SEQ ID NO: 915418 - RNA, 19 nt, Artificial Sequence
  Description of Artificial Sequence: Synthetic oligonucleotide
ucaucaguuugcuauagcu

SEQ ID NO: 915419 - RNA, 19 nt, Artificial Sequence
  Description of Artificial Sequence: Synthetic oligonucleotide
aauggaaaccacccgacau

SEQ ID NO: 915420 - RNA, 19 nt, Artificial Sequence
  Description of Artificial Sequence: Synthetic oligonucleotide
aagcaagucucggagacac

SEQ ID NO: 915421 - RNA, 19 nt, Artificial Sequence
  Description of Artificial Sequence: Synthetic oligonucleotide
uacauaacaacgguggcgc

SEQ ID NO: 915422 - RNA, 19 nt, Artificial Sequence
  Description of Artificial Sequence: Synthetic oligonucleotide
accuugugcauucauccgc

SEQ ID NO: 915423 - RNA, 19 nt, Artificial Sequence
  Description of Artificial Sequence: Synthetic oligonucleotide
aaaguaaagcacugcauuu

SEQ ID NO: 915424 - RNA, 19 nt, Artificial Sequence
  Description of Artificial Sequence: Synthetic oligonucleotide
agaacaugcgacccugggc

SEQ ID NO: 915425 - RNA, 19 nt, Artificial Sequence
  Description of Artificial Sequence: Synthetic oligonucleotide
cagagcauaaguaucauca

SEQ ID NO: 915426 - RNA, 19 nt, Artificial Sequence
  Description of Artificial Sequence: Synthetic oligonucleotide
cacugauuauauaaaguag

SEQ ID NO: 915427 - RNA, 19 nt, Artificial Sequence
  Description of Artificial Sequence: Synthetic oligonucleotide
aagguuccgaagaacuucc

SEQ ID NO: 915428 - RNA, 19 nt, Artificial Sequence
  Description of Artificial Sequence: Synthetic oligonucleotide
uguaguacugucuugcaua

SEQ ID NO: 915429 - RNA, 19 nt, Artificial Sequence
  Description of Artificial Sequence: Synthetic oligonucleotide
acaaaagcacaccaccauc

SEQ ID NO: 915430 - RNA, 19 nt, Artificial Sequence
  Description of Artificial Sequence: Synthetic oligonucleotide
cucgguuuaaaguaaagca

SEQ ID NO: 915431 - RNA, 19 nt, Artificial Sequence
  Description of Artificial Sequence: Synthetic oligonucleotide
agguacauaacaacggugg

SEQ ID NO: 915432 - RNA, 19 nt, Artificial Sequence
  Description of Artificial Sequence: Synthetic oligonucleotide
uaguguaauuugaacauuc

SEQ ID NO: 915433 - RNA, 19 nt, Artificial Sequence
  Description of Artificial Sequence: Synthetic oligonucleotide
ugagggauucuucacauua

SEQ ID NO: 915434 - RNA, 19 nt, Artificial Sequence
  Description of Artificial Sequence: Synthetic oligonucleotide
ucaugucuuaguuugugcu

SEQ ID NO: 915435 - RNA, 19 nt, Artificial Sequence
  Description of Artificial Sequence: Synthetic oligonucleotide
acugauuauauaaaguagu

SEQ ID NO: 915436 - RNA, 19 nt, Artificial Sequence
  Description of Artificial Sequence: Synthetic oligonucleotide
ugauuauauaaaguaguac

SEQ ID NO: 915437 - RNA, 19 nt, Artificial Sequence
  Description of Artificial Sequence: Synthetic oligonucleotide
auaaacgaagggcuggucu

SEQ ID NO: 915438 - RNA, 19 nt, Artificial Sequence
  Description of Artificial Sequence: Synthetic oligonucleotide
augaggaaccugcucaggg

SEQ ID NO: 915439 - RNA, 19 nt, Artificial Sequence
  Description of Artificial Sequence: Synthetic oligonucleotide
uaaauuagccucugguccu

SEQ ID NO: 915440 - RNA, 19 nt, Artificial Sequence
  Description of Artificial Sequence: Synthetic oligonucleotide
uaaacgaagggcuggucug

SEQ ID NO: 915441 - RNA, 19 nt, Artificial Sequence
  Description of Artificial Sequence: Synthetic oligonucleotide
aguguaauuugaacauucc

SEQ ID NO: 915442 - RNA, 19 nt, Artificial Sequence
  Description of Artificial Sequence: Synthetic oligonucleotide
uagacucggcucaaguggg

SEQ ID NO: 915443 - RNA, 19 nt, Artificial Sequence
  Description of Artificial Sequence: Synthetic oligonucleotide
uugagauguucucccaucc

SEQ ID NO: 915444 - RNA, 19 nt, Artificial Sequence
  Description of Artificial Sequence: Synthetic oligonucleotide
uuaaaccgucaccugagga

SEQ ID NO: 915445 - RNA, 19 nt, Artificial Sequence
  Description of Artificial Sequence: Synthetic oligonucleotide
uuguaucacggcuucaugu

SEQ ID NO: 915446 - RNA, 19 nt, Artificial Sequence
  Description of Artificial Sequence: Synthetic oligonucleotide
ucaaaucgaaccagcagaa

SEQ ID NO: 915447 - RNA, 19 nt, Artificial Sequence
  Description of Artificial Sequence: Synthetic oligonucleotide
ugucuagcaauucacugau

SEQ ID NO: 915448 - RNA, 19 nt, Artificial Sequence
  Description of Artificial Sequence: Synthetic oligonucleotide
caugucuagcaauucacug

SEQ ID NO: 915449 - RNA, 19 nt, Artificial Sequence
  Description of Artificial Sequence: Synthetic oligonucleotide
aguuugcuauagcuggugg

SEQ ID NO: 915450 - RNA, 19 nt, Artificial Sequence
  Description of Artificial Sequence: Synthetic oligonucleotide
guuugcuauagcugguggg

SEQ ID NO: 915451 - RNA, 19 nt, Artificial Sequence
  Description of Artificial Sequence: Synthetic oligonucleotide
uaaaccgucaccugaggaa

SEQ ID NO: 915452 - RNA, 19 nt, Artificial Sequence
  Description of Artificial Sequence: Synthetic oligonucleotide
aaucgaaccagcagaacca

SEQ ID NO: 915453 - RNA, 19 nt, Artificial Sequence
  Description of Artificial Sequence: Synthetic oligonucleotide
ugaauggaaaccacccgac

SEQ ID NO: 915454 - RNA, 19 nt, Artificial Sequence
  Description of Artificial Sequence: Synthetic oligonucleotide
augucuagcaauucacuga

SEQ ID NO: 915455 - RNA, 19 nt, Artificial Sequence
  Description of Artificial Sequence: Synthetic oligonucleotide
guacauaacaacgguggcg

SEQ ID NO: 915456 - RNA, 19 nt, Artificial Sequence
  Description of Artificial Sequence: Synthetic oligonucleotide
uuuggaagcaagucucgga

SEQ ID NO: 915457 - RNA, 19 nt, Artificial Sequence
  Description of Artificial Sequence: Synthetic oligonucleotide
guuguguagccagagaagc

SEQ ID NO: 915458 - RNA, 19 nt, Artificial Sequence
  Description of Artificial Sequence: Synthetic oligonucleotide
agagcauaaguaucaucag

SEQ ID NO: 915459 - RNA, 19 nt, Artificial Sequence
  Description of Artificial Sequence: Synthetic oligonucleotide
aauucacugauuauauaaa

SEQ ID NO: 915460 - RNA, 19 nt, Artificial Sequence
  Description of Artificial Sequence: Synthetic oligonucleotide
agucuugaagacuagccau

SEQ ID NO: 915461 - RNA, 19 nt, Artificial Sequence
  Description of Artificial Sequence: Synthetic oligonucleotide
uugccuuaaaccgucaccu

SEQ ID NO: 915462 - RNA, 19 nt, Artificial Sequence
  Description of Artificial Sequence: Synthetic oligonucleotide
uguaucacggcuucauguc

SEQ ID NO: 915463 - RNA, 19 nt, Artificial Sequence
  Description of Artificial Sequence: Synthetic oligonucleotide
ucccagaauaaauuagccu

SEQ ID NO: 915464 - RNA, 19 nt, Artificial Sequence
  Description of Artificial Sequence: Synthetic oligonucleotide
guaguacugucuugcauag

SEQ ID NO: 915465 - RNA, 19 nt, Artificial Sequence
  Description of Artificial Sequence: Synthetic oligonucleotide
cuggagucgggguagagac

SEQ ID NO: 915466 - RNA, 19 nt, Artificial Sequence
  Description of Artificial Sequence: Synthetic oligonucleotide
ugccugaucaguguuagcu

SEQ ID NO: 915467 - RNA, 19 nt, Artificial Sequence
  Description of Artificial Sequence: Synthetic oligonucleotide
uauacauaagucucuccua

SEQ ID NO: 915468 - RNA, 19 nt, Artificial Sequence
  Description of Artificial Sequence: Synthetic oligonucleotide
ugaauaggggcuggagucg

SEQ ID NO: 915469 - RNA, 19 nt, Artificial Sequence
  Description of Artificial Sequence: Synthetic oligonucleotide
ggcuucaugucuuaguuug

SEQ ID NO: 915470 - RNA, 19 nt, Artificial Sequence
  Description of Artificial Sequence: Synthetic oligonucleotide
aguguuagcuggcugcucu

SEQ ID NO: 915471 - RNA, 19 nt, Artificial Sequence
  Description of Artificial Sequence: Synthetic oligonucleotide
uccauguacagcacucaug

SEQ ID NO: 915472 - RNA, 19 nt, Artificial Sequence
  Description of Artificial Sequence: Synthetic oligonucleotide
ucggcagcguucaaggaug

SEQ ID NO: 915473 - RNA, 19 nt, Artificial Sequence
  Description of Artificial Sequence: Synthetic oligonucleotide
ucacccucgguuuaaagua

SEQ ID NO: 915474 - RNA, 19 nt, Artificial Sequence
  Description of Artificial Sequence: Synthetic oligonucleotide
augucuuaguuugugcuuc

SEQ ID NO: 915475 - RNA, 19 nt, Artificial Sequence
  Description of Artificial Sequence: Synthetic oligonucleotide
agguuguguagccagagaa

SEQ ID NO: 915476 - RNA, 19 nt, Artificial Sequence
  Description of Artificial Sequence: Synthetic oligonucleotide
cucauaaacgaagggcugg

SEQ ID NO: 915477 - RNA, 19 nt, Artificial Sequence
  Description of Artificial Sequence: Synthetic oligonucleotide
gaaguagaggaugcugagg

SEQ ID NO: 915478 - RNA, 19 nt, Artificial Sequence
  Description of Artificial Sequence: Synthetic oligonucleotide
uugugcauucauccgcaag

SEQ ID NO: 915479 - RNA, 19 nt, Artificial Sequence
  Description of Artificial Sequence: Synthetic oligonucleotide
ggauuaacaaccacuuggg

SEQ ID NO: 915480 - RNA, 19 nt, Artificial Sequence
  Description of Artificial Sequence: Synthetic oligonucleotide
ucaguuuguaucacggcuu

SEQ ID NO: 915481 - RNA, 19 nt, Artificial Sequence
  Description of Artificial Sequence: Synthetic oligonucleotide
agcgacagagcauaaguau

SEQ ID NO: 915482 - RNA, 19 nt, Artificial Sequence
  Description of Artificial Sequence: Synthetic oligonucleotide
ugaggaggaccaucguccg

SEQ ID NO: 915483 - RNA, 19 nt, Artificial Sequence
  Description of Artificial Sequence: Synthetic oligonucleotide
cacuuaguguaauuugaac

SEQ ID NO: 915484 - RNA, 19 nt, Artificial Sequence
  Description of Artificial Sequence: Synthetic oligonucleotide
aagcacaccaccauccugu

SEQ ID NO: 915485 - RNA, 19 nt, Artificial Sequence
  Description of Artificial Sequence: Synthetic oligonucleotide
uggaacgccugcuggacag

SEQ ID NO: 915486 - RNA, 19 nt, Artificial Sequence
  Description of Artificial Sequence: Synthetic oligonucleotide
guuuaaaguaaagcacugc

SEQ ID NO: 915487 - RNA, 19 nt, Artificial Sequence
  Description of Artificial Sequence: Synthetic oligonucleotide
ggcacaaaagcacaccacc

SEQ ID NO: 915488 - RNA, 19 nt, Artificial Sequence
  Description of Artificial Sequence: Synthetic oligonucleotide
uuagcuccaagucgcggug

SEQ ID NO: 915489 - RNA, 19 nt, Artificial Sequence
  Description of Artificial Sequence: Synthetic oligonucleotide
ucggagacacuggugaucc

SEQ ID NO: 915490 - RNA, 19 nt, Artificial Sequence
  Description of Artificial Sequence: Synthetic oligonucleotide
agacuagccaugcugugcu

SEQ ID NO: 915491 - RNA, 19 nt, Artificial Sequence
  Description of Artificial Sequence: Synthetic oligonucleotide
ugugccugaucaguguuag

SEQ ID NO: 915492 - RNA, 19 nt, Artificial Sequence
  Description of Artificial Sequence: Synthetic oligonucleotide
acaugaggggcccuguuca

SEQ ID NO: 915493 - RNA, 19 nt, Artificial Sequence
  Description of Artificial Sequence: Synthetic oligonucleotide
aggcccgaggccuuggaac

SEQ ID NO: 915494 - RNA, 19 nt, Artificial Sequence
  Description of Artificial Sequence: Synthetic oligonucleotide
gccacuuagcuccaagucg

SEQ ID NO: 915495 - RNA, 19 nt, Artificial Sequence
  Description of Artificial Sequence: Synthetic oligonucleotide
aaagacaugaggggcccug

SEQ ID NO: 915496 - RNA, 19 nt, Artificial Sequence
  Description of Artificial Sequence: Synthetic oligonucleotide
cugaggaauccccaggaug

SEQ ID NO: 915497 - RNA, 19 nt, Artificial Sequence
  Description of Artificial Sequence: Synthetic oligonucleotide
uaaguaucaucaguuugcu

SEQ ID NO: 915498 - RNA, 19 nt, Artificial Sequence
  Description of Artificial Sequence: Synthetic oligonucleotide
aaauuagccucugguccuc

SEQ ID NO: 915499 - RNA, 19 nt, Artificial Sequence
  Description of Artificial Sequence: Synthetic oligonucleotide
cauccgcaaguucugauug

SEQ ID NO: 915500 - RNA, 19 nt, Artificial Sequence
  Description of Artificial Sequence: Synthetic oligonucleotide
ugcauagaucugcuggaac

SEQ ID NO: 915501 - RNA, 19 nt, Artificial Sequence
  Description of Artificial Sequence: Synthetic oligonucleotide
ugcagccacccauagguug

SEQ ID NO: 915502 - RNA, 19 nt, Artificial Sequence
  Description of Artificial Sequence: Synthetic oligonucleotide
cuuaaaccgucaccugagg

SEQ ID NO: 915503 - RNA, 19 nt, Artificial Sequence
  Description of Artificial Sequence: Synthetic oligonucleotide
ugcucuguggauucagcac

SEQ ID NO: 915504 - RNA, 19 nt, Artificial Sequence
  Description of Artificial Sequence: Synthetic oligonucleotide
agcauaaguaucaucaguu

SEQ ID NO: 915505 - RNA, 19 nt, Artificial Sequence
  Description of Artificial Sequence: Synthetic oligonucleotide
gucgcggugacgcugguug

SEQ ID NO: 915506 - RNA, 19 nt, Artificial Sequence
  Description of Artificial Sequence: Synthetic oligonucleotide
acauaacaacgguggcgcc

SEQ ID NO: 915507 - RNA, 19 nt, Artificial Sequence
  Description of Artificial Sequence: Synthetic oligonucleotide
cagucauucauagcaaaac

SEQ ID NO: 915508 - RNA, 19 nt, Artificial Sequence
  Description of Artificial Sequence: Synthetic oligonucleotide
aggccuugagauguucucc

SEQ ID NO: 915509 - RNA, 19 nt, Artificial Sequence
  Description of Artificial Sequence: Synthetic oligonucleotide
aguauugcauguaguacug

SEQ ID NO: 915510 - RNA, 19 nt, Artificial Sequence
  Description of Artificial Sequence: Synthetic oligonucleotide
acaacgguggcgcccauga

SEQ ID NO: 915511 - RNA, 19 nt, Artificial Sequence
  Description of Artificial Sequence: Synthetic oligonucleotide
ugccaagucacccucgguu

SEQ ID NO: 915512 - RNA, 19 nt, Artificial Sequence
  Description of Artificial Sequence: Synthetic oligonucleotide
uacauaagucucuccuaga

SEQ ID NO: 915513 - RNA, 19 nt, Artificial Sequence
  Description of Artificial Sequence: Synthetic oligonucleotide
cucaggcagaacaugcgac

SEQ ID NO: 915514 - RNA, 19 nt, Artificial Sequence
  Description of Artificial Sequence: Synthetic oligonucleotide
cauaacaacgguggcgccc

SEQ ID NO: 915515 - RNA, 19 nt, Artificial Sequence
  Description of Artificial Sequence: Synthetic oligonucleotide
cugauuauauaaaguagua

SEQ ID NO: 915516 - RNA, 19 nt, Artificial Sequence
  Description of Artificial Sequence: Synthetic oligonucleotide
aaaccgucaccugaggaau

SEQ ID NO: 915517 - RNA, 19 nt, Artificial Sequence
  Description of Artificial Sequence: Synthetic oligonucleotide
guucugauuggcuccagga

SEQ ID NO: 915518 - RNA, 19 nt, Artificial Sequence
  Description of Artificial Sequence: Synthetic oligonucleotide
guucaguuuguaucacggc

SEQ ID NO: 915519 - RNA, 19 nt, Artificial Sequence
  Description of Artificial Sequence: Synthetic oligonucleotide
guagagcacacaugcacac

SEQ ID NO: 915520 - RNA, 19 nt, Artificial Sequence
  Description of Artificial Sequence: Synthetic oligonucleotide
cuccaagucgcggugacgc

SEQ ID NO: 915521 - RNA, 19 nt, Artificial Sequence
  Description of Artificial Sequence: Synthetic oligonucleotide
cuaugacuuccauguacag

SEQ ID NO: 915522 - RNA, 19 nt, Artificial Sequence
  Description of Artificial Sequence: Synthetic oligonucleotide
uccgaagaacuucccuuug

SEQ ID NO: 915523 - RNA, 19 nt, Artificial Sequence
  Description of Artificial Sequence: Synthetic oligonucleotide
acugcggucgccacuuagc

SEQ ID NO: 915524 - RNA, 19 nt, Artificial Sequence
  Description of Artificial Sequence: Synthetic oligonucleotide
accgucaccugaggaaucc

SEQ ID NO: 915525 - RNA, 19 nt, Artificial Sequence
  Description of Artificial Sequence: Synthetic oligonucleotide
caagucgcggugacgcugg

SEQ ID NO: 915526 - RNA, 19 nt, Artificial Sequence
  Description of Artificial Sequence: Synthetic oligonucleotide
cagaacaugcgacccuggg

SEQ ID NO: 915527 - RNA, 19 nt, Artificial Sequence
  Description of Artificial Sequence: Synthetic oligonucleotide
guuugcggcuuccugagga

SEQ ID NO: 915528 - RNA, 19 nt, Artificial Sequence
  Description of Artificial Sequence: Synthetic oligonucleotide
gcggucgccacuuagcucc

SEQ ID NO: 915529 - RNA, 19 nt, Artificial Sequence
  Description of Artificial Sequence: Synthetic oligonucleotide
uauuguugggguccugguu

SEQ ID NO: 915530 - RNA, 19 nt, Artificial Sequence
  Description of Artificial Sequence: Synthetic oligonucleotide
auccgcaaguucugauugg

SEQ ID NO: 915531 - RNA, 19 nt, Artificial Sequence
  Description of Artificial Sequence: Synthetic oligonucleotide
ugcugugcucauaaacgaa

SEQ ID NO: 915532 - RNA, 19 nt, Artificial Sequence
  Description of Artificial Sequence: Synthetic oligonucleotide
gaauggaaaccacccgaca

SEQ ID NO: 915533 - RNA, 19 nt, Artificial Sequence
  Description of Artificial Sequence: Synthetic oligonucleotide
cccgacaugaugcagguac

SEQ ID NO: 915534 - RNA, 19 nt, Artificial Sequence
  Description of Artificial Sequence: Synthetic oligonucleotide
uuccauguacagcacucau

SEQ ID NO: 915535 - RNA, 19 nt, Artificial Sequence
  Description of Artificial Sequence: Synthetic oligonucleotide
cauucauagcaaaacuuua

SEQ ID NO: 915536 - RNA, 19 nt, Artificial Sequence
  Description of Artificial Sequence: Synthetic oligonucleotide
ugagucacgccaggugagg

SEQ ID NO: 915537 - RNA, 19 nt, Artificial Sequence
  Description of Artificial Sequence: Synthetic oligonucleotide
agcuccaagucgcggugac

SEQ ID NO: 915538 - RNA, 19 nt, Artificial Sequence
  Description of Artificial Sequence: Synthetic oligonucleotide
ugcuauagcuggugggccu

SEQ ID NO: 915539 - RNA, 19 nt, Artificial Sequence
  Description of Artificial Sequence: Synthetic oligonucleotide
ugcauucauccgcaaguuc

SEQ ID NO: 915540 - RNA, 19 nt, Artificial Sequence
  Description of Artificial Sequence: Synthetic oligonucleotide
acggcuucaugucuuaguu

SEQ ID NO: 915541 - RNA, 19 nt, Artificial Sequence
  Description of Artificial Sequence: Synthetic oligonucleotide
auaacaacgguggcgccca

SEQ ID NO: 915542 - RNA, 19 nt, Artificial Sequence
  Description of Artificial Sequence: Synthetic oligonucleotide
uuccgaagaacuucccuuu

SEQ ID NO: 915543 - RNA, 19 nt, Artificial Sequence
  Description of Artificial Sequence: Synthetic oligonucleotide
auguaguacugucuugcau

SEQ ID NO: 915544 - RNA, 19 nt, Artificial Sequence
  Description of Artificial Sequence: Synthetic oligonucleotide
gagcauaaguaucaucagu

SEQ ID NO: 915545 - RNA, 19 nt, Artificial Sequence
  Description of Artificial Sequence: Synthetic oligonucleotide
gacaugaggggcccuguuc

SEQ ID NO: 915546 - RNA, 19 nt, Artificial Sequence
  Description of Artificial Sequence: Synthetic oligonucleotide
uaucacggcuucaugucuu

SEQ ID NO: 915547 - RNA, 19 nt, Artificial Sequence
  Description of Artificial Sequence: Synthetic oligonucleotide
cuuugccuuaaaccgucac

SEQ ID NO: 915548 - RNA, 19 nt, Artificial Sequence
  Description of Artificial Sequence: Synthetic oligonucleotide
aguaguacacuuaguguaa

SEQ ID NO: 915549 - RNA, 19 nt, Artificial Sequence
  Description of Artificial Sequence: Synthetic oligonucleotide
auagaucugcuggaaccag

SEQ ID NO: 915550 - RNA, 19 nt, Artificial Sequence
  Description of Artificial Sequence: Synthetic oligonucleotide
gugccuaugaaacuacaua

SEQ ID NO: 915551 - RNA, 19 nt, Artificial Sequence
  Description of Artificial Sequence: Synthetic oligonucleotide
ucgucggagacuccacaac

SEQ ID NO: 915552 - RNA, 19 nt, Artificial Sequence
  Description of Artificial Sequence: Synthetic oligonucleotide
aacaugcgacccugggccu

SEQ ID NO: 915553 - RNA, 19 nt, Artificial Sequence
  Description of Artificial Sequence: Synthetic oligonucleotide
uuaaggcggcucacacucc

SEQ ID NO: 915554 - RNA, 19 nt, Artificial Sequence
  Description of Artificial Sequence: Synthetic oligonucleotide
cugagucacgccaggugag

SEQ ID NO: 915555 - RNA, 19 nt, Artificial Sequence
  Description of Artificial Sequence: Synthetic oligonucleotide
ugcucagggaggaguagaa

SEQ ID NO: 915556 - RNA, 19 nt, Artificial Sequence
  Description of Artificial Sequence: Synthetic oligonucleotide
cacccauagguuguguagc

SEQ ID NO: 915557 - RNA, 19 nt, Artificial Sequence
  Description of Artificial Sequence: Synthetic oligonucleotide
agucacccucgguuuaaag

SEQ ID NO: 915558 - RNA, 19 nt, Artificial Sequence
  Description of Artificial Sequence: Synthetic oligonucleotide
ucugugccuuccuggaggu

SEQ ID NO: 915559 - RNA, 19 nt, Artificial Sequence
  Description of Artificial Sequence: Synthetic oligonucleotide
uuggaacgccugcuggaca

SEQ ID NO: 915560 - RNA, 19 nt, Artificial Sequence
  Description of Artificial Sequence: Synthetic oligonucleotide
aaguaucaucaguuugcua

SEQ ID NO: 915561 - RNA, 19 nt, Artificial Sequence
  Description of Artificial Sequence: Synthetic oligonucleotide
agcgugaccugcucgggcu

SEQ ID NO: 915562 - RNA, 19 nt, Artificial Sequence
  Description of Artificial Sequence: Synthetic oligonucleotide
aaccacccgacaugaugca

SEQ ID NO: 915563 - RNA, 19 nt, Artificial Sequence
  Description of Artificial Sequence: Synthetic oligonucleotide
accaucguccgggaaguuc

SEQ ID NO: 915564 - RNA, 19 nt, Artificial Sequence
  Description of Artificial Sequence: Synthetic oligonucleotide
cacccuuuguuuuggcuuc

SEQ ID NO: 915565 - RNA, 19 nt, Artificial Sequence
  Description of Artificial Sequence: Synthetic oligonucleotide
ugaucaguguuagcuggcu

SEQ ID NO: 915566 - RNA, 19 nt, Artificial Sequence
  Description of Artificial Sequence: Synthetic oligonucleotide
ggaaguucugaacuggucu

SEQ ID NO: 915567 - RNA, 19 nt, Artificial Sequence
  Description of Artificial Sequence: Synthetic oligonucleotide
cagaauaaauuagccucug

SEQ ID NO: 915568 - RNA, 19 nt, Artificial Sequence
  Description of Artificial Sequence: Synthetic oligonucleotide
ucgccacuuagcuccaagu

SEQ ID NO: 915569 - RNA, 19 nt, Artificial Sequence
  Description of Artificial Sequence: Synthetic oligonucleotide
caguuuguaucacggcuuc

SEQ ID NO: 915570 - RNA, 19 nt, Artificial Sequence
  Description of Artificial Sequence: Synthetic oligonucleotide
cuugugcacuugguguugg

SEQ ID NO: 915571 - RNA, 19 nt, Artificial Sequence
  Description of Artificial Sequence: Synthetic oligonucleotide
aauaggggcuggagucggg

SEQ ID NO: 915572 - RNA, 19 nt, Artificial Sequence
  Description of Artificial Sequence: Synthetic oligonucleotide
cugguugugaauaggggcu

SEQ ID NO: 915573 - RNA, 19 nt, Artificial Sequence
  Description of Artificial Sequence: Synthetic oligonucleotide
cauaagucucuccuagaaa

SEQ ID NO: 915574 - RNA, 19 nt, Artificial Sequence
  Description of Artificial Sequence: Synthetic oligonucleotide
cacuuagcuccaagucgcg

SEQ ID NO: 915575 - RNA, 19 nt, Artificial Sequence
  Description of Artificial Sequence: Synthetic oligonucleotide
gguuguguagccagagaag

SEQ ID NO: 915576 - RNA, 19 nt, Artificial Sequence
  Description of Artificial Sequence: Synthetic oligonucleotide
guccugcuaacaugucuag

SEQ ID NO: 915577 - RNA, 19 nt, Artificial Sequence
  Description of Artificial Sequence: Synthetic oligonucleotide
uugcggcuuccugaggagg

SEQ ID NO: 915578 - RNA, 19 nt, Artificial Sequence
  Description of Artificial Sequence: Synthetic oligonucleotide
ggaaaacggaaaagguugc

SEQ ID NO: 915579 - RNA, 19 nt, Artificial Sequence
  Description of Artificial Sequence: Synthetic oligonucleotide
uccugcuaacaugucuagc

SEQ ID NO: 915580 - RNA, 19 nt, Artificial Sequence
  Description of Artificial Sequence: Synthetic oligonucleotide
cuuggaacgccugcuggac

SEQ ID NO: 915581 - RNA, 19 nt, Artificial Sequence
  Description of Artificial Sequence: Synthetic oligonucleotide
gcuuacagugccuaugaaa

SEQ ID NO: 915582 - RNA, 19 nt, Artificial Sequence
  Description of Artificial Sequence: Synthetic oligonucleotide
ccuagaaaaguccugcuaa

SEQ ID NO: 915583 - RNA, 19 nt, Artificial Sequence
  Description of Artificial Sequence: Synthetic oligonucleotide
gucacccucgguuuaaagu

SEQ ID NO: 915584 - RNA, 19 nt, Artificial Sequence
  Description of Artificial Sequence: Synthetic oligonucleotide
gcaagucucggagacacug

SEQ ID NO: 915585 - RNA, 19 nt, Artificial Sequence
  Description of Artificial Sequence: Synthetic oligonucleotide
ccucgguuuaaaguaaagc

SEQ ID NO: 915586 - RNA, 19 nt, Artificial Sequence
  Description of Artificial Sequence: Synthetic oligonucleotide
ucguccgggaaguucugaa

SEQ ID NO: 915587 - RNA, 19 nt, Artificial Sequence
  Description of Artificial Sequence: Synthetic oligonucleotide
guaucaucaguuugcuaua

SEQ ID NO: 915588 - RNA, 19 nt, Artificial Sequence
  Description of Artificial Sequence: Synthetic oligonucleotide
ggcccgaggccuuggaacg

SEQ ID NO: 915589 - RNA, 19 nt, Artificial Sequence
  Description of Artificial Sequence: Synthetic oligonucleotide
uuccacuagagggccaccu

SEQ ID NO: 915590 - RNA, 19 nt, Artificial Sequence
  Description of Artificial Sequence: Synthetic oligonucleotide
gucgccacuuagcuccaag

SEQ ID NO: 915591 - RNA, 19 nt, Artificial Sequence
  Description of Artificial Sequence: Synthetic oligonucleotide
agcguucaaggaugccgag

SEQ ID NO: 915592 - RNA, 19 nt, Artificial Sequence
  Description of Artificial Sequence: Synthetic oligonucleotide
aagacaugaggggcccugu

SEQ ID NO: 915593 - RNA, 19 nt, Artificial Sequence
  Description of Artificial Sequence: Synthetic oligonucleotide
ccacccgacaugaugcagg

SEQ ID NO: 915594 - RNA, 19 nt, Artificial Sequence
  Description of Artificial Sequence: Synthetic oligonucleotide
gcccuguucaguuuguauc

SEQ ID NO: 915595 - RNA, 19 nt, Artificial Sequence
  Description of Artificial Sequence: Synthetic oligonucleotide
agugccuaugaaacuacau

SEQ ID NO: 915596 - RNA, 19 nt, Artificial Sequence
  Description of Artificial Sequence: Synthetic oligonucleotide
ugacuuccauguagagcac

SEQ ID NO: 915597 - RNA, 19 nt, Artificial Sequence
  Description of Artificial Sequence: Synthetic oligonucleotide
cuuagcuccaagucgcggu

SEQ ID NO: 915598 - RNA, 19 nt, Artificial Sequence
  Description of Artificial Sequence: Synthetic oligonucleotide
ucgcggugacgcugguugg

SEQ ID NO: 915599 - RNA, 19 nt, Artificial Sequence
  Description of Artificial Sequence: Synthetic oligonucleotide
ccacccauagguuguguag

SEQ ID NO: 915600 - RNA, 19 nt, Artificial Sequence
  Description of Artificial Sequence: Synthetic oligonucleotide
ucgggguccagcacuucau

SEQ ID NO: 915601 - RNA, 19 nt, Artificial Sequence
  Description of Artificial Sequence: Synthetic oligonucleotide
uccacuagagggccaccuu

SEQ ID NO: 915602 - RNA, 19 nt, Artificial Sequence
  Description of Artificial Sequence: Synthetic oligonucleotide
gucgggguagagaccacag

SEQ ID NO: 915603 - RNA, 19 nt, Artificial Sequence
  Description of Artificial Sequence: Synthetic oligonucleotide
aacaacgguggcgcccaug

SEQ ID NO: 915604 - RNA, 19 nt, Artificial Sequence
  Description of Artificial Sequence: Synthetic oligonucleotide
acaugucgcuuuuccugcu

SEQ ID NO: 915605 - RNA, 19 nt, Artificial Sequence
  Description of Artificial Sequence: Synthetic oligonucleotide
agguuccgaagaacuuccc

SEQ ID NO: 915606 - RNA, 19 nt, Artificial Sequence
  Description of Artificial Sequence: Synthetic oligonucleotide
acacuccaacugcggucgc

SEQ ID NO: 915607 - RNA, 19 nt, Artificial Sequence
  Description of Artificial Sequence: Synthetic oligonucleotide
agacucggcucaagugggc

SEQ ID NO: 915608 - RNA, 19 nt, Artificial Sequence
  Description of Artificial Sequence: Synthetic oligonucleotide
ccaaguauugcauguagua

SEQ ID NO: 915609 - RNA, 19 nt, Artificial Sequence
  Description of Artificial Sequence: Synthetic oligonucleotide
gccuuaaaccgucaccuga

SEQ ID NO: 915610 - RNA, 19 nt, Artificial Sequence
  Description of Artificial Sequence: Synthetic oligonucleotide
agucacgccaggugaggaa

SEQ ID NO: 915611 - RNA, 19 nt, Artificial Sequence
  Description of Artificial Sequence: Synthetic oligonucleotide
guccgggaaguucugaacu

SEQ ID NO: 915612 - RNA, 19 nt, Artificial Sequence
  Description of Artificial Sequence: Synthetic oligonucleotide
ucacggcuucaugucuuag

SEQ ID NO: 915613 - RNA, 19 nt, Artificial Sequence
  Description of Artificial Sequence: Synthetic oligonucleotide
gaaaacggaaaagguugcu

SEQ ID NO: 915614 - RNA, 19 nt, Artificial Sequence
  Description of Artificial Sequence: Synthetic oligonucleotide
ggcgacgcagccgucgucg

SEQ ID NO: 915615 - RNA, 19 nt, Artificial Sequence
  Description of Artificial Sequence: Synthetic oligonucleotide
cugcuaacaugucuagcaa

SEQ ID NO: 915616 - RNA, 19 nt, Artificial Sequence
  Description of Artificial Sequence: Synthetic oligonucleotide
uugagggauucuucacauu

SEQ ID NO: 915617 - RNA, 19 nt, Artificial Sequence
  Description of Artificial Sequence: Synthetic oligonucleotide
guaucacggcuucaugucu

SEQ ID NO: 915618 - RNA, 19 nt, Artificial Sequence
  Description of Artificial Sequence: Synthetic oligonucleotide
agcuggcggcgacgcagcc

SEQ ID NO: 915619 - RNA, 19 nt, Artificial Sequence
  Description of Artificial Sequence: Synthetic oligonucleotide
augccgagcuggcggcgac

SEQ ID NO: 915620 - RNA, 19 nt, Artificial Sequence
  Description of Artificial Sequence: Synthetic oligonucleotide
uccaagucgcggugacgcu

SEQ ID NO: 915621 - RNA, 19 nt, Artificial Sequence
  Description of Artificial Sequence: Synthetic oligonucleotide
cucggagacacuggugauc

SEQ ID NO: 915622 - RNA, 19 nt, Artificial Sequence
  Description of Artificial Sequence: Synthetic oligonucleotide
gcggcucacacuccaacug

SEQ ID NO: 915623 - RNA, 19 nt, Artificial Sequence
  Description of Artificial Sequence: Synthetic oligonucleotide
augacucugcugagucacg

SEQ ID NO: 915624 - RNA, 19 nt, Artificial Sequence
  Description of Artificial Sequence: Synthetic oligonucleotide
uauagcuggugggccuucu

SEQ ID NO: 915625 - RNA, 19 nt, Artificial Sequence
  Description of Artificial Sequence: Synthetic oligonucleotide
cuagcaauucacugauuau

SEQ ID NO: 915626 - RNA, 19 nt, Artificial Sequence
  Description of Artificial Sequence: Synthetic oligonucleotide
ugcggucgccacuuagcuc

SEQ ID NO: 915627 - RNA, 19 nt, Artificial Sequence
  Description of Artificial Sequence: Synthetic oligonucleotide
ccgaagaacuucccuuugc

SEQ ID NO: 915628 - RNA, 19 nt, Artificial Sequence
  Description of Artificial Sequence: Synthetic oligonucleotide
aguuuguaucacggcuuca

SEQ ID NO: 915629 - RNA, 19 nt, Artificial Sequence
  Description of Artificial Sequence: Synthetic oligonucleotide
gucgucggagacuccacaa

SEQ ID NO: 915630 - RNA, 19 nt, Artificial Sequence
  Description of Artificial Sequence: Synthetic oligonucleotide
ucgaaccagcagaaccauu

SEQ ID NO: 915631 - RNA, 19 nt, Artificial Sequence
  Description of Artificial Sequence: Synthetic oligonucleotide
cagcgugaccugcucgggc

SEQ ID NO: 915632 - RNA, 19 nt, Artificial Sequence
  Description of Artificial Sequence: Synthetic oligonucleotide
acgccaggugaggaaaaug

SEQ ID NO: 915633 - RNA, 19 nt, Artificial Sequence
  Description of Artificial Sequence: Synthetic oligonucleotide
guuuguaucacggcuucau

SEQ ID NO: 915634 - RNA, 19 nt, Artificial Sequence
  Description of Artificial Sequence: Synthetic oligonucleotide
acuugguguugggacaaaa

SEQ ID NO: 915635 - RNA, 19 nt, Artificial Sequence
  Description of Artificial Sequence: Synthetic oligonucleotide
agucgggguagagaccaca

SEQ ID NO: 915636 - RNA, 19 nt, Artificial Sequence
  Description of Artificial Sequence: Synthetic oligonucleotide
accacccgacaugaugcag

SEQ ID NO: 915637 - RNA, 19 nt, Artificial Sequence
  Description of Artificial Sequence: Synthetic oligonucleotide
cacaaaagcacaccaccau

SEQ ID NO: 915638 - RNA, 19 nt, Artificial Sequence
  Description of Artificial Sequence: Synthetic oligonucleotide
gccuaugaaacuacauaca

SEQ ID NO: 915639 - RNA, 19 nt, Artificial Sequence
  Description of Artificial Sequence: Synthetic oligonucleotide
ccugaggaggaccaucguc

SEQ ID NO: 915640 - RNA, 19 nt, Artificial Sequence
  Description of Artificial Sequence: Synthetic oligonucleotide
gcgacagagcauaaguauc

SEQ ID NO: 915641 - RNA, 19 nt, Artificial Sequence
  Description of Artificial Sequence: Synthetic oligonucleotide
agguuauuguugggguccu

SEQ ID NO: 915642 - RNA, 19 nt, Artificial Sequence
  Description of Artificial Sequence: Synthetic oligonucleotide
gccuuaaggcggcucacac

SEQ ID NO: 915643 - RNA, 19 nt, Artificial Sequence
  Description of Artificial Sequence: Synthetic oligonucleotide
cagcgacagagcauaagua

SEQ ID NO: 915644 - RNA, 19 nt, Artificial Sequence
  Description of Artificial Sequence: Synthetic oligonucleotide
aucacggcuucaugucuua

SEQ ID NO: 915645 - RNA, 19 nt, Artificial Sequence
  Description of Artificial Sequence: Synthetic oligonucleotide
gagucacgccaggugagga

SEQ ID NO: 915646 - RNA, 19 nt, Artificial Sequence
  Description of Artificial Sequence: Synthetic oligonucleotide
gguuugcggcuuccugagg

SEQ ID NO: 915647 - RNA, 19 nt, Artificial Sequence
  Description of Artificial Sequence: Synthetic oligonucleotide
aagucacccucgguuuaaa

SEQ ID NO: 915648 - RNA, 19 nt, Artificial Sequence
  Description of Artificial Sequence: Synthetic oligonucleotide
caucguccgggaaguucug

SEQ ID NO: 915649 - RNA, 19 nt, Artificial Sequence
  Description of Artificial Sequence: Synthetic oligonucleotide
cacuccaacugcggucgcc

SEQ ID NO: 915650 - RNA, 19 nt, Artificial Sequence
  Description of Artificial Sequence: Synthetic oligonucleotide
cccucgguuuaaaguaaag

SEQ ID NO: 915651 - RNA, 19 nt, Artificial Sequence
  Description of Artificial Sequence: Synthetic oligonucleotide
gucacgccaggugaggaaa

SEQ ID NO: 915652 - RNA, 19 nt, Artificial Sequence
  Description of Artificial Sequence: Synthetic oligonucleotide
ccgggaaguucugaacugg

SEQ ID NO: 915653 - RNA, 19 nt, Artificial Sequence
  Description of Artificial Sequence: Synthetic oligonucleotide
cagcacccuuuguuuuggc

SEQ ID NO: 915654 - RNA, 19 nt, Artificial Sequence
  Description of Artificial Sequence: Synthetic oligonucleotide
gugccugaucaguguuagc

SEQ ID NO: 915655 - RNA, 19 nt, Artificial Sequence
  Description of Artificial Sequence: Synthetic oligonucleotide
cacccucgguuuaaaguaa

SEQ ID NO: 915656 - RNA, 19 nt, Artificial Sequence
  Description of Artificial Sequence: Synthetic oligonucleotide
cuccaacugcggucgccac

SEQ ID NO: 915657 - RNA, 19 nt, Artificial Sequence
  Description of Artificial Sequence: Synthetic oligonucleotide
gguuccgaagaacuucccu

SEQ ID NO: 915658 - RNA, 19 nt, Artificial Sequence
  Description of Artificial Sequence: Synthetic oligonucleotide
gagcuggcggcgacgcagc

SEQ ID NO: 915659 - RNA, 19 nt, Artificial Sequence
  Description of Artificial Sequence: Synthetic oligonucleotide
cccauccggagggagaaag

SEQ ID NO: 915660 - RNA, 19 nt, Artificial Sequence
  Description of Artificial Sequence: Synthetic oligonucleotide
cacuagagggccaccuugu

SEQ ID NO: 915661 - RNA, 19 nt, Artificial Sequence
  Description of Artificial Sequence: Synthetic oligonucleotide
cucggcagcguucaaggau

SEQ ID NO: 915662 - RNA, 19 nt, Artificial Sequence
  Description of Artificial Sequence: Synthetic oligonucleotide
aagucgcggugacgcuggu

SEQ ID NO: 915663 - RNA, 19 nt, Artificial Sequence
  Description of Artificial Sequence: Synthetic oligonucleotide
aucguccgggaaguucuga

SEQ ID NO: 915664 - RNA, 19 nt, Artificial Sequence
  Description of Artificial Sequence: Synthetic oligonucleotide
cacggcuucaugucuuagu

SEQ ID NO: 915665 - RNA, 19 nt, Artificial Sequence
  Description of Artificial Sequence: Synthetic oligonucleotide
cugugccugaucaguguua

SEQ ID NO: 915666 - RNA, 19 nt, Artificial Sequence
  Description of Artificial Sequence: Synthetic oligonucleotide
cuugugcauucauccgcaa

SEQ ID NO: 915667 - RNA, 19 nt, Artificial Sequence
  Description of Artificial Sequence: Synthetic oligonucleotide
ugcgacccugggccuucug

SEQ ID NO: 915668 - RNA, 19 nt, Artificial Sequence
  Description of Artificial Sequence: Synthetic oligonucleotide
ccaggauuaacaaccacuu

SEQ ID NO: 915669 - RNA, 19 nt, Artificial Sequence
  Description of Artificial Sequence: Synthetic oligonucleotide
gcguucaaggaugccgagc

SEQ ID NO: 915670 - RNA, 19 nt, Artificial Sequence
  Description of Artificial Sequence: Synthetic oligonucleotide
cuauagcuggugggccuuc

SEQ ID NO: 915671 - RNA, 19 nt, Artificial Sequence
  Description of Artificial Sequence: Synthetic oligonucleotide
ggugacgcugguugggacu

SEQ ID NO: 915672 - RNA, 19 nt, Artificial Sequence
  Description of Artificial Sequence: Synthetic oligonucleotide
caagucacccucgguuuaa

SEQ ID NO: 915673 - RNA, 19 nt, Artificial Sequence
  Description of Artificial Sequence: Synthetic oligonucleotide
guaguacacuuaguguaau

SEQ ID NO: 915674 - RNA, 19 nt, Artificial Sequence
  Description of Artificial Sequence: Synthetic oligonucleotide
acccucgguuuaaaguaaa

SEQ ID NO: 915675 - RNA, 19 nt, Artificial Sequence
  Description of Artificial Sequence: Synthetic oligonucleotide
acccuuuguuuuggcuucu

SEQ ID NO: 915676 - RNA, 19 nt, Artificial Sequence
  Description of Artificial Sequence: Synthetic oligonucleotide
ccaagucgcggugacgcug

SEQ ID NO: 915677 - RNA, 19 nt, Artificial Sequence
  Description of Artificial Sequence: Synthetic oligonucleotide
gcuggagucgggguagaga

SEQ ID NO: 915678 - RNA, 19 nt, Artificial Sequence
  Description of Artificial Sequence: Synthetic oligonucleotide
cugcggucgccacuuagcu

SEQ ID NO: 915679 - RNA, 19 nt, Artificial Sequence
  Description of Artificial Sequence: Synthetic oligonucleotide
caguguuagcuggcugcuc

SEQ ID NO: 915680 - RNA, 19 nt, Artificial Sequence
  Description of Artificial Sequence: Synthetic oligonucleotide
ccaucguccgggaaguucu

SEQ ID NO: 915681 - RNA, 19 nt, Artificial Sequence
  Description of Artificial Sequence: Synthetic oligonucleotide
cgccacuuagcuccaaguc

SEQ ID NO: 915682 - RNA, 19 nt, Artificial Sequence
  Description of Artificial Sequence: Synthetic oligonucleotide
cguucaaggaugccgagcu

SEQ ID NO: 915683 - RNA, 19 nt, Artificial Sequence
  Description of Artificial Sequence: Synthetic oligonucleotide
gcuccaagucgcggugacg

SEQ ID NO: 915684 - RNA, 19 nt, Artificial Sequence
  Description of Artificial Sequence: Synthetic oligonucleotide
gccuugagauguucuccca

SEQ ID NO: 915685 - RNA, 19 nt, Artificial Sequence
  Description of Artificial Sequence: Synthetic oligonucleotide
uaacaacgguggcgcccau

SEQ ID NO: 915686 - RNA, 19 nt, Artificial Sequence
  Description of Artificial Sequence: Synthetic oligonucleotide
gaggaauccccaggaugcu

SEQ ID NO: 915687 - RNA, 19 nt, Artificial Sequence
  Description of Artificial Sequence: Synthetic oligonucleotide
cacccgacaugaugcaggu

SEQ ID NO: 915688 - RNA, 19 nt, Artificial Sequence
  Description of Artificial Sequence: Synthetic oligonucleotide
ggguagacucggcucaagu

SEQ ID NO: 915689 - RNA, 19 nt, Artificial Sequence
  Description of Artificial Sequence: Synthetic oligonucleotide
cuagccaugcugugcucau

SEQ ID NO: 915690 - RNA, 19 nt, Artificial Sequence
  Description of Artificial Sequence: Synthetic oligonucleotide
cugcucgggguccagcacu

SEQ ID NO: 915691 - RNA, 19 nt, Artificial Sequence
  Description of Artificial Sequence: Synthetic oligonucleotide
ggugcaaaacaugucgcuu

SEQ ID NO: 915692 - RNA, 19 nt, Artificial Sequence
  Description of Artificial Sequence: Synthetic oligonucleotide
uagccaugcugugcucaua

SEQ ID NO: 915693 - RNA, 19 nt, Artificial Sequence
  Description of Artificial Sequence: Synthetic oligonucleotide
gagucgggguagagaccac

SEQ ID NO: 915694 - RNA, 19 nt, Artificial Sequence
  Description of Artificial Sequence: Synthetic oligonucleotide
gcgcucgggguagacucgg

SEQ ID NO: 915695 - RNA, 19 nt, Artificial Sequence
  Description of Artificial Sequence: Synthetic oligonucleotide
cgaaccagcagaaccauuu

SEQ ID NO: 915696 - RNA, 19 nt, Artificial Sequence
  Description of Artificial Sequence: Synthetic oligonucleotide
gggguagacucggcucaag

SEQ ID NO: 915697 - RNA, 19 nt, Artificial Sequence
  Description of Artificial Sequence: Synthetic oligonucleotide
ggcagcguucaaggaugcc

SEQ ID NO: 915698 - RNA, 19 nt, Artificial Sequence
  Description of Artificial Sequence: Synthetic oligonucleotide
gccaagucacccucgguuu

SEQ ID NO: 915699 - RNA, 19 nt, Artificial Sequence
  Description of Artificial Sequence: Synthetic oligonucleotide
gccagaugauccagucuga

SEQ ID NO: 915700 - RNA, 19 nt, Artificial Sequence
  Description of Artificial Sequence: Synthetic oligonucleotide
ucccauccggagggagaaa

SEQ ID NO: 915701 - RNA, 19 nt, Artificial Sequence
  Description of Artificial Sequence: Synthetic oligonucleotide
ggcggcucggcagcguuca

SEQ ID NO: 915702 - RNA, 19 nt, Artificial Sequence
  Description of Artificial Sequence: Synthetic oligonucleotide
gcagccacccauagguugu

SEQ ID NO: 915703 - RNA, 19 nt, Artificial Sequence
  Description of Artificial Sequence: Synthetic oligonucleotide
cccgaggccuuggaacgcc

SEQ ID NO: 915704 - RNA, 19 nt, Artificial Sequence
  Description of Artificial Sequence: Synthetic oligonucleotide
ggaggugcucaggcagaac

SEQ ID NO: 915705 - RNA, 19 nt, Artificial Sequence
  Description of Artificial Sequence: Synthetic oligonucleotide
ccuuaaggcggcucacacu

SEQ ID NO: 915706 - RNA, 19 nt, Artificial Sequence
  Description of Artificial Sequence: Synthetic oligonucleotide
ccaugucugcggcgucggc

SEQ ID NO: 915707 - RNA, 19 nt, Artificial Sequence
  Description of Artificial Sequence: Synthetic oligonucleotide
ccgucaccugaggaauccc

SEQ ID NO: 915708 - RNA, 19 nt, Artificial Sequence
  Description of Artificial Sequence: Synthetic oligonucleotide
ccaagucacccucgguuua

SEQ ID NO: 915709 - RNA, 19 nt, Artificial Sequence
  Description of Artificial Sequence: Synthetic oligonucleotide
cggcagcguucaaggaugc

SEQ ID NO: 915710 - RNA, 19 nt, Artificial Sequence
  Description of Artificial Sequence: Synthetic oligonucleotide
gcggugacgcugguuggga

SEQ ID NO: 915711 - RNA, 19 nt, Artificial Sequence
  Description of Artificial Sequence: Synthetic oligonucleotide
cugcggcgucggcggcucg

SEQ ID NO: 915712 - RNA, 19 nt, Artificial Sequence
  Description of Artificial Sequence: Synthetic oligonucleotide
gcccgaggccuuggaacgc

SEQ ID NO: 915713 - RNA, 19 nt, Artificial Sequence
  Description of Artificial Sequence: Synthetic oligonucleotide
cggugacgcugguugggac

SEQ ID NO: 915714 - RNA, 19 nt, Artificial Sequence
  Description of Artificial Sequence: Synthetic oligonucleotide
acccgacaugaugcaggua

SEQ ID NO: 915715 - RNA, 19 nt, Artificial Sequence
  Description of Artificial Sequence: Synthetic oligonucleotide
augcgacccugggccuucu

SEQ ID NO: 915716 - RNA, 19 nt, Artificial Sequence
  Description of Artificial Sequence: Synthetic oligonucleotide
ggugggccuucuggaagaa

SEQ ID NO: 915717 - RNA, 19 nt, Artificial Sequence
  Description of Artificial Sequence: Synthetic oligonucleotide
gucuagcaauucacugauu

SEQ ID NO: 915718 - RNA, 19 nt, Artificial Sequence
  Description of Artificial Sequence: Synthetic oligonucleotide
ccgcaaguucugauuggcu

SEQ ID NO: 915719 - RNA, 19 nt, Artificial Sequence
  Description of Artificial Sequence: Synthetic oligonucleotide
gaccaucguccgggaaguu

SEQ ID NO: 915720 - RNA, 19 nt, Artificial Sequence
  Description of Artificial Sequence: Synthetic oligonucleotide
gucggcggcucggcagcgu

SEQ ID NO: 915721 - RNA, 19 nt, Artificial Sequence
  Description of Artificial Sequence: Synthetic oligonucleotide
ggucgccacuuagcuccaa

SEQ ID NO: 915722 - RNA, 19 nt, Artificial Sequence
  Description of Artificial Sequence: Synthetic oligonucleotide
cggcuucaugucuuaguuu

SEQ ID NO: 915723 - RNA, 19 nt, Artificial Sequence
  Description of Artificial Sequence: Synthetic oligonucleotide
ccgaggccuuggaacgccu

SEQ ID NO: 915724 - RNA, 19 nt, Artificial Sequence
  Description of Artificial Sequence: Synthetic oligonucleotide
cggcucgggcuccaugucu

SEQ ID NO: 915725 - RNA, 19 nt, Artificial Sequence
  Description of Artificial Sequence: Synthetic oligonucleotide
gcggcucggcagcguucaa

SEQ ID NO: 915726 - RNA, 19 nt, Artificial Sequence
  Description of Artificial Sequence: Synthetic oligonucleotide
cggucgccacuuagcucca

SEQ ID NO: 915727 - RNA, 19 nt, Artificial Sequence
  Description of Artificial Sequence: Synthetic oligonucleotide
cggcgacgcagccgucguc

SEQ ID NO: 915728 - RNA, 19 nt, Artificial Sequence
  Description of Artificial Sequence: Synthetic oligonucleotide
uguagagagacauacaacg

SEQ ID NO: 915729 - RNA, 19 nt, Artificial Sequence
  Description of Artificial Sequence: Synthetic oligonucleotide
auuacuaaaagcgaagacc

SEQ ID NO: 915730 - RNA, 19 nt, Artificial Sequence
  Description of Artificial Sequence: Synthetic oligonucleotide
uuugaaaagugccucaaag

SEQ ID NO: 915731 - RNA, 19 nt, Artificial Sequence
  Description of Artificial Sequence: Synthetic oligonucleotide
uuacuaaaagcgaagacca

SEQ ID NO: 915732 - RNA, 19 nt, Artificial Sequence
  Description of Artificial Sequence: Synthetic oligonucleotide
uuuauuacuaaaagcgaag

SEQ ID NO: 915733 - RNA, 19 nt, Artificial Sequence
  Description of Artificial Sequence: Synthetic oligonucleotide
ucagaaaaugaaaaccagg

SEQ ID NO: 915734 - RNA, 19 nt, Artificial Sequence
  Description of Artificial Sequence: Synthetic oligonucleotide
uggauaguaagccaugggg

SEQ ID NO: 915735 - RNA, 19 nt, Artificial Sequence
  Description of Artificial Sequence: Synthetic oligonucleotide
cucaaaaugcuuuagggag

SEQ ID NO: 915736 - RNA, 19 nt, Artificial Sequence
  Description of Artificial Sequence: Synthetic oligonucleotide
uuaggaagaucaaaguucc

SEQ ID NO: 915737 - RNA, 19 nt, Artificial Sequence
  Description of Artificial Sequence: Synthetic oligonucleotide
gauuguggagccuaaaggc

SEQ ID NO: 915738 - RNA, 19 nt, Artificial Sequence
  Description of Artificial Sequence: Synthetic oligonucleotide
aaagcuuggacgauagagc

SEQ ID NO: 915739 - RNA, 19 nt, Artificial Sequence
  Description of Artificial Sequence: Synthetic oligonucleotide
auaugacuaaagcaguuac

SEQ ID NO: 915740 - RNA, 19 nt, Artificial Sequence
  Description of Artificial Sequence: Synthetic oligonucleotide
aaaucuggcaccugcauca

SEQ ID NO: 915741 - RNA, 19 nt, Artificial Sequence
  Description of Artificial Sequence: Synthetic oligonucleotide
uguaacaacuacuauaaau

SEQ ID NO: 915742 - RNA, 19 nt, Artificial Sequence
  Description of Artificial Sequence: Synthetic oligonucleotide
accaguaugguacaguauc

SEQ ID NO: 915743 - RNA, 19 nt, Artificial Sequence
  Description of Artificial Sequence: Synthetic oligonucleotide
agacauacaacgcugaacu

SEQ ID NO: 915744 - RNA, 19 nt, Artificial Sequence
  Description of Artificial Sequence: Synthetic oligonucleotide
aaaugcuuuagggagggac

SEQ ID NO: 915745 - RNA, 19 nt, Artificial Sequence
  Description of Artificial Sequence: Synthetic oligonucleotide
cuugcgcugaguuacaagg

SEQ ID NO: 915746 - RNA, 19 nt, Artificial Sequence
  Description of Artificial Sequence: Synthetic oligonucleotide
uaacuaacccaucacagga

SEQ ID NO: 915747 - RNA, 19 nt, Artificial Sequence
  Description of Artificial Sequence: Synthetic oligonucleotide
uuaauaugacuaaagcagu

SEQ ID NO: 915748 - RNA, 19 nt, Artificial Sequence
  Description of Artificial Sequence: Synthetic oligonucleotide
aauauuaaggaucccugaa

SEQ ID NO: 915749 - RNA, 19 nt, Artificial Sequence
  Description of Artificial Sequence: Synthetic oligonucleotide
uccaaaccuaauuugaugu

SEQ ID NO: 915750 - RNA, 19 nt, Artificial Sequence
  Description of Artificial Sequence: Synthetic oligonucleotide
aaaagugccucaaaguuug

SEQ ID NO: 915751 - RNA, 19 nt, Artificial Sequence
  Description of Artificial Sequence: Synthetic oligonucleotide
uccuggauauauaugaaac

SEQ ID NO: 915752 - RNA, 19 nt, Artificial Sequence
  Description of Artificial Sequence: Synthetic oligonucleotide
uagaggauccuuaggaaag

SEQ ID NO: 915753 - RNA, 19 nt, Artificial Sequence
  Description of Artificial Sequence: Synthetic oligonucleotide
guaacaacuacuauaaauc

SEQ ID NO: 915754 - RNA, 19 nt, Artificial Sequence
  Description of Artificial Sequence: Synthetic oligonucleotide
uguaaugcaacuucaucac

SEQ ID NO: 915755 - RNA, 19 nt, Artificial Sequence
  Description of Artificial Sequence: Synthetic oligonucleotide
uauuaaggaucccugaaau

SEQ ID NO: 915756 - RNA, 19 nt, Artificial Sequence
  Description of Artificial Sequence: Synthetic oligonucleotide
aagcuuuugaugugcaucu

SEQ ID NO: 915757 - RNA, 19 nt, Artificial Sequence
  Description of Artificial Sequence: Synthetic oligonucleotide
ugcgauucauguaacaacu

SEQ ID NO: 915758 - RNA, 19 nt, Artificial Sequence
  Description of Artificial Sequence: Synthetic oligonucleotide
uaauuuggcuuuaaagcca

SEQ ID NO: 915759 - RNA, 19 nt, Artificial Sequence
  Description of Artificial Sequence: Synthetic oligonucleotide
ugcaacuucagguuaauau

SEQ ID NO: 915760 - RNA, 19 nt, Artificial Sequence
  Description of Artificial Sequence: Synthetic oligonucleotide
gauucaauggagacuaaag

SEQ ID NO: 915761 - RNA, 19 nt, Artificial Sequence
  Description of Artificial Sequence: Synthetic oligonucleotide
acucacauucauuugaaga

SEQ ID NO: 915762 - RNA, 19 nt, Artificial Sequence
  Description of Artificial Sequence: Synthetic oligonucleotide
uuaaggaucccugaaauau

SEQ ID NO: 915763 - RNA, 19 nt, Artificial Sequence
  Description of Artificial Sequence: Synthetic oligonucleotide
cuaacuaacccaucacagg

SEQ ID NO: 915764 - RNA, 19 nt, Artificial Sequence
  Description of Artificial Sequence: Synthetic oligonucleotide
ugucuaaacugcaacuuca

SEQ ID NO: 915765 - RNA, 19 nt, Artificial Sequence
  Description of Artificial Sequence: Synthetic oligonucleotide
augaacaaagcuuggacga

SEQ ID NO: 915766 - RNA, 19 nt, Artificial Sequence
  Description of Artificial Sequence: Synthetic oligonucleotide
ugaaacgccccuuaauuug

SEQ ID NO: 915767 - RNA, 19 nt, Artificial Sequence
  Description of Artificial Sequence: Synthetic oligonucleotide
augcgauucauguaacaac

SEQ ID NO: 915768 - RNA, 19 nt, Artificial Sequence
  Description of Artificial Sequence: Synthetic oligonucleotide
uacuaacuaacccaucaca

SEQ ID NO: 915769 - RNA, 19 nt, Artificial Sequence
  Description of Artificial Sequence: Synthetic oligonucleotide
aguguagagagacauacaa

SEQ ID NO: 915770 - RNA, 19 nt, Artificial Sequence
  Description of Artificial Sequence: Synthetic oligonucleotide
uucauagugaggcauucac

SEQ ID NO: 915771 - RNA, 19 nt, Artificial Sequence
  Description of Artificial Sequence: Synthetic oligonucleotide
uaccucaaaaugcuuuagg

SEQ ID NO: 915772 - RNA, 19 nt, Artificial Sequence
  Description of Artificial Sequence: Synthetic oligonucleotide
aaggacguuggcucccugc

SEQ ID NO: 915773 - RNA, 19 nt, Artificial Sequence
  Description of Artificial Sequence: Synthetic oligonucleotide
agguuuugaucugaaacgc

SEQ ID NO: 915774 - RNA, 19 nt, Artificial Sequence
  Description of Artificial Sequence: Synthetic oligonucleotide
uagagagacauacaacgcu

SEQ ID NO: 915775 - RNA, 19 nt, Artificial Sequence
  Description of Artificial Sequence: Synthetic oligonucleotide
uugaaaagugccucaaagu

SEQ ID NO: 915776 - RNA, 19 nt, Artificial Sequence
  Description of Artificial Sequence: Synthetic oligonucleotide
uaaggaagagccucggggc

SEQ ID NO: 915777 - RNA, 19 nt, Artificial Sequence
  Description of Artificial Sequence: Synthetic oligonucleotide
agugacuggcuuucugucc

SEQ ID NO: 915778 - RNA, 19 nt, Artificial Sequence
  Description of Artificial Sequence: Synthetic oligonucleotide
uuauuacuaaaagcgaaga

SEQ ID NO: 915779 - RNA, 19 nt, Artificial Sequence
  Description of Artificial Sequence: Synthetic oligonucleotide
aauguugccggcggcagcg

SEQ ID NO: 915780 - RNA, 19 nt, Artificial Sequence
  Description of Artificial Sequence: Synthetic oligonucleotide
acauacaacgcugaacuuc

SEQ ID NO: 915781 - RNA, 19 nt, Artificial Sequence
  Description of Artificial Sequence: Synthetic oligonucleotide
ugaagaaguuucccuugcg

SEQ ID NO: 915782 - RNA, 19 nt, Artificial Sequence
  Description of Artificial Sequence: Synthetic oligonucleotide
ucugaaacgccccuuaauu

SEQ ID NO: 915783 - RNA, 19 nt, Artificial Sequence
  Description of Artificial Sequence: Synthetic oligonucleotide
caaguuaagugcaccacag

SEQ ID NO: 915784 - RNA, 19 nt, Artificial Sequence
  Description of Artificial Sequence: Synthetic oligonucleotide
aauuaaggaagagccucgg

SEQ ID NO: 915785 - RNA, 19 nt, Artificial Sequence
  Description of Artificial Sequence: Synthetic oligonucleotide
gacgauagagcucugagua

SEQ ID NO: 915786 - RNA, 19 nt, Artificial Sequence
  Description of Artificial Sequence: Synthetic oligonucleotide
gaauuaaggaagagccucg

SEQ ID NO: 915787 - RNA, 19 nt, Artificial Sequence
  Description of Artificial Sequence: Synthetic oligonucleotide
cagguuaauaugacuaaag

SEQ ID NO: 915788 - RNA, 19 nt, Artificial Sequence
  Description of Artificial Sequence: Synthetic oligonucleotide
ugacccuacuaacuaaccc

SEQ ID NO: 915789 - RNA, 19 nt, Artificial Sequence
  Description of Artificial Sequence: Synthetic oligonucleotide
uggacgauagagcucugag

SEQ ID NO: 915790 - RNA, 19 nt, Artificial Sequence
  Description of Artificial Sequence: Synthetic oligonucleotide
auaugaaacccaaagaaau

SEQ ID NO: 915791 - RNA, 19 nt, Artificial Sequence
  Description of Artificial Sequence: Synthetic oligonucleotide
acuaacuaacccaucacag

SEQ ID NO: 915792 - RNA, 19 nt, Artificial Sequence
  Description of Artificial Sequence: Synthetic oligonucleotide
ugcaucauauccuccuucc

SEQ ID NO: 915793 - RNA, 19 nt, Artificial Sequence
  Description of Artificial Sequence: Synthetic oligonucleotide
aaugcgauucauguaacaa

SEQ ID NO: 915794 - RNA, 19 nt, Artificial Sequence
  Description of Artificial Sequence: Synthetic oligonucleotide
aauggaugccucccuaccu

SEQ ID NO: 915795 - RNA, 19 nt, Artificial Sequence
  Description of Artificial Sequence: Synthetic oligonucleotide
gaaaugggguuugugcucg

SEQ ID NO: 915796 - RNA, 19 nt, Artificial Sequence
  Description of Artificial Sequence: Synthetic oligonucleotide
acaucacauguacagaaca

SEQ ID NO: 915797 - RNA, 19 nt, Artificial Sequence
  Description of Artificial Sequence: Synthetic oligonucleotide
ggauuguggagccuaaagg

SEQ ID NO: 915798 - RNA, 19 nt, Artificial Sequence
  Description of Artificial Sequence: Synthetic oligonucleotide
uguuguuuaaguucagguu

SEQ ID NO: 915799 - RNA, 19 nt, Artificial Sequence
  Description of Artificial Sequence: Synthetic oligonucleotide
acuuccauaacagucgaug

SEQ ID NO: 915800 - RNA, 19 nt, Artificial Sequence
  Description of Artificial Sequence: Synthetic oligonucleotide
auaacagucgaugguacag

SEQ ID NO: 915801 - RNA, 19 nt, Artificial Sequence
  Description of Artificial Sequence: Synthetic oligonucleotide
uuuagaggauccuuaggaa

SEQ ID NO: 915802 - RNA, 19 nt, Artificial Sequence
  Description of Artificial Sequence: Synthetic oligonucleotide
acaaguuaagugcaccaca

SEQ ID NO: 915803 - RNA, 19 nt, Artificial Sequence
  Description of Artificial Sequence: Synthetic oligonucleotide
gagaggcuguacuagacac

SEQ ID NO: 915804 - RNA, 19 nt, Artificial Sequence
  Description of Artificial Sequence: Synthetic oligonucleotide
gacccuacuaacuaaccca

SEQ ID NO: 915805 - RNA, 19 nt, Artificial Sequence
  Description of Artificial Sequence: Synthetic oligonucleotide
gaugcagagacugucuaug

SEQ ID NO: 915806 - RNA, 19 nt, Artificial Sequence
  Description of Artificial Sequence: Synthetic oligonucleotide
aacccaaagaaaugggguu

SEQ ID NO: 915807 - RNA, 19 nt, Artificial Sequence
  Description of Artificial Sequence: Synthetic oligonucleotide
aguaugguacaguaucacu

SEQ ID NO: 915808 - RNA, 19 nt, Artificial Sequence
  Description of Artificial Sequence: Synthetic oligonucleotide
gaucccugaaauauuaauc

SEQ ID NO: 915809 - RNA, 19 nt, Artificial Sequence
  Description of Artificial Sequence: Synthetic oligonucleotide
auauuaaggaucccugaaa

SEQ ID NO: 915810 - RNA, 19 nt, Artificial Sequence
  Description of Artificial Sequence: Synthetic oligonucleotide
ucaagucauuucauaguga

SEQ ID NO: 915811 - RNA, 19 nt, Artificial Sequence
  Description of Artificial Sequence: Synthetic oligonucleotide
aaggagauuaaagaccaau

SEQ ID NO: 915812 - RNA, 19 nt, Artificial Sequence
  Description of Artificial Sequence: Synthetic oligonucleotide
ggcgaaaagaggcugagug

SEQ ID NO: 915813 - RNA, 19 nt, Artificial Sequence
  Description of Artificial Sequence: Synthetic oligonucleotide
gagccuaaaggcccaacag

SEQ ID NO: 915814 - RNA, 19 nt, Artificial Sequence
  Description of Artificial Sequence: Synthetic oligonucleotide
ugagugacuggcuuucugu

SEQ ID NO: 915815 - RNA, 19 nt, Artificial Sequence
  Description of Artificial Sequence: Synthetic oligonucleotide
gaaacgccccuuaauuugg

SEQ ID NO: 915816 - RNA, 19 nt, Artificial Sequence
  Description of Artificial Sequence: Synthetic oligonucleotide
ggcaacuuuaauucuuagg

SEQ ID NO: 915817 - RNA, 19 nt, Artificial Sequence
  Description of Artificial Sequence: Synthetic oligonucleotide
gcagagacugucuaugagg

SEQ ID NO: 915818 - RNA, 19 nt, Artificial Sequence
  Description of Artificial Sequence: Synthetic oligonucleotide
uucagguuaauaugacuaa

SEQ ID NO: 915819 - RNA, 19 nt, Artificial Sequence
  Description of Artificial Sequence: Synthetic oligonucleotide
uaacccaucacaggaaacu

SEQ ID NO: 915820 - RNA, 19 nt, Artificial Sequence
  Description of Artificial Sequence: Synthetic oligonucleotide
uacuaaaagcgaagaccag

SEQ ID NO: 915821 - RNA, 19 nt, Artificial Sequence
  Description of Artificial Sequence: Synthetic oligonucleotide
gaauggaugccucccuacc

SEQ ID NO: 915822 - RNA, 19 nt, Artificial Sequence
  Description of Artificial Sequence: Synthetic oligonucleotide
augaacugaaauaucagau

SEQ ID NO: 915823 - RNA, 19 nt, Artificial Sequence
  Description of Artificial Sequence: Synthetic oligonucleotide
ugccucaaaguuuggacac

SEQ ID NO: 915824 - RNA, 19 nt, Artificial Sequence
  Description of Artificial Sequence: Synthetic oligonucleotide
caagauuuagaugaacuga

SEQ ID NO: 915825 - RNA, 19 nt, Artificial Sequence
  Description of Artificial Sequence: Synthetic oligonucleotide
caugacccuacuaacuaac

SEQ ID NO: 915826 - RNA, 19 nt, Artificial Sequence
  Description of Artificial Sequence: Synthetic oligonucleotide
cuccaaaccuaauuugaug

SEQ ID NO: 915827 - RNA, 19 nt, Artificial Sequence
  Description of Artificial Sequence: Synthetic oligonucleotide
gcuaaugcgauucauguaa

SEQ ID NO: 915828 - RNA, 19 nt, Artificial Sequence
  Description of Artificial Sequence: Synthetic oligonucleotide
aguuacaaggacguuggcu

SEQ ID NO: 915829 - RNA, 19 nt, Artificial Sequence
  Description of Artificial Sequence: Synthetic oligonucleotide
ucccugaaauauuaauccu

SEQ ID NO: 915830 - RNA, 19 nt, Artificial Sequence
  Description of Artificial Sequence: Synthetic oligonucleotide
uuacaaggacguuggcucc

SEQ ID NO: 915831 - RNA, 19 nt, Artificial Sequence
  Description of Artificial Sequence: Synthetic oligonucleotide
uaaugcgauucauguaaca

SEQ ID NO: 915832 - RNA, 19 nt, Artificial Sequence
  Description of Artificial Sequence: Synthetic oligonucleotide
gguagguaggcuguguugg

SEQ ID NO: 915833 - RNA, 19 nt, Artificial Sequence
  Description of Artificial Sequence: Synthetic oligonucleotide
aaacugcaacuucagguua

SEQ ID NO: 915834 - RNA, 19 nt, Artificial Sequence
  Description of Artificial Sequence: Synthetic oligonucleotide
aggucugaggauauacugg

SEQ ID NO: 915835 - RNA, 19 nt, Artificial Sequence
  Description of Artificial Sequence: Synthetic oligonucleotide
gugcaaggcgaaaagaggc

SEQ ID NO: 915836 - RNA, 19 nt, Artificial Sequence
  Description of Artificial Sequence: Synthetic oligonucleotide
agagagacauacaacgcug

SEQ ID NO: 915837 - RNA, 19 nt, Artificial Sequence
  Description of Artificial Sequence: Synthetic oligonucleotide
ugcaaggcgaaaagaggcu

SEQ ID NO: 915838 - RNA, 19 nt, Artificial Sequence
  Description of Artificial Sequence: Synthetic oligonucleotide
ugggguuugugcucggggc

SEQ ID NO: 915839 - RNA, 19 nt, Artificial Sequence
  Description of Artificial Sequence: Synthetic oligonucleotide
acuagacacucagaaaaug

SEQ ID NO: 915840 - RNA, 19 nt, Artificial Sequence
  Description of Artificial Sequence: Synthetic oligonucleotide
ggcagauacagagaggugc

SEQ ID NO: 915841 - RNA, 19 nt, Artificial Sequence
  Description of Artificial Sequence: Synthetic oligonucleotide
acacaagauuuagaugaac

SEQ ID NO: 915842 - RNA, 19 nt, Artificial Sequence
  Description of Artificial Sequence: Synthetic oligonucleotide
cuacuaacuaacccaucac

SEQ ID NO: 915843 - RNA, 19 nt, Artificial Sequence
  Description of Artificial Sequence: Synthetic oligonucleotide
uacuagacacucagaaaau

SEQ ID NO: 915844 - RNA, 19 nt, Artificial Sequence
  Description of Artificial Sequence: Synthetic oligonucleotide
caaucucggaaaacaaauc

SEQ ID NO: 915845 - RNA, 19 nt, Artificial Sequence
  Description of Artificial Sequence: Synthetic oligonucleotide
aggugcaaggcgaaaagag

SEQ ID NO: 915846 - RNA, 19 nt, Artificial Sequence
  Description of Artificial Sequence: Synthetic oligonucleotide
ggauagaugggaccaacug

SEQ ID NO: 915847 - RNA, 19 nt, Artificial Sequence
  Description of Artificial Sequence: Synthetic oligonucleotide
aguuacauugugagaagug

SEQ ID NO: 915848 - RNA, 19 nt, Artificial Sequence
  Description of Artificial Sequence: Synthetic oligonucleotide
ucgaugguacagucaaaca

SEQ ID NO: 915849 - RNA, 19 nt, Artificial Sequence
  Description of Artificial Sequence: Synthetic oligonucleotide
aauuuggcuuuaaagccaa

SEQ ID NO: 915850 - RNA, 19 nt, Artificial Sequence
  Description of Artificial Sequence: Synthetic oligonucleotide
acuaacccaucacaggaaa

SEQ ID NO: 915851 - RNA, 19 nt, Artificial Sequence
  Description of Artificial Sequence: Synthetic oligonucleotide
auagugaggcauucacaug

SEQ ID NO: 915852 - RNA, 19 nt, Artificial Sequence
  Description of Artificial Sequence: Synthetic oligonucleotide
uggauagaugggaccaacu

SEQ ID NO: 915853 - RNA, 19 nt, Artificial Sequence
  Description of Artificial Sequence: Synthetic oligonucleotide
ggaauuaaggaagagccuc

SEQ ID NO: 915854 - RNA, 19 nt, Artificial Sequence
  Description of Artificial Sequence: Synthetic oligonucleotide
cuaaugcgauucauguaac

SEQ ID NO: 915855 - RNA, 19 nt, Artificial Sequence
  Description of Artificial Sequence: Synthetic oligonucleotide
agauacagagaggugccag

SEQ ID NO: 915856 - RNA, 19 nt, Artificial Sequence
  Description of Artificial Sequence: Synthetic oligonucleotide
ucagguuaauaugacuaaa

SEQ ID NO: 915857 - RNA, 19 nt, Artificial Sequence
  Description of Artificial Sequence: Synthetic oligonucleotide
cuucuagucggcgucgcgg

SEQ ID NO: 915858 - RNA, 19 nt, Artificial Sequence
  Description of Artificial Sequence: Synthetic oligonucleotide
aguaucacuccagaggaau

SEQ ID NO: 915859 - RNA, 19 nt, Artificial Sequence
  Description of Artificial Sequence: Synthetic oligonucleotide
ggcuguacuagacacucag

SEQ ID NO: 915860 - RNA, 19 nt, Artificial Sequence
  Description of Artificial Sequence: Synthetic oligonucleotide
cuaaaagcgaagaccagua

SEQ ID NO: 915861 - RNA, 19 nt, Artificial Sequence
  Description of Artificial Sequence: Synthetic oligonucleotide
augacccuacuaacuaacc

SEQ ID NO: 915862 - RNA, 19 nt, Artificial Sequence
  Description of Artificial Sequence: Synthetic oligonucleotide
cuaaagcaguuacauugug

SEQ ID NO: 915863 - RNA, 19 nt, Artificial Sequence
  Description of Artificial Sequence: Synthetic oligonucleotide
auuaaggaucccugaaaua

SEQ ID NO: 915864 - RNA, 19 nt, Artificial Sequence
  Description of Artificial Sequence: Synthetic oligonucleotide
uggauucccaggaggcugc

SEQ ID NO: 915865 - RNA, 19 nt, Artificial Sequence
  Description of Artificial Sequence: Synthetic oligonucleotide
aagaccaguaugguacagu

SEQ ID NO: 915866 - RNA, 19 nt, Artificial Sequence
  Description of Artificial Sequence: Synthetic oligonucleotide
cagacagcuaaugcgauuc

SEQ ID NO: 915867 - RNA, 19 nt, Artificial Sequence
  Description of Artificial Sequence: Synthetic oligonucleotide
agaccaguaugguacagua

SEQ ID NO: 915868 - RNA, 19 nt, Artificial Sequence
  Description of Artificial Sequence: Synthetic oligonucleotide
aaacgccccuuaauuuggc

SEQ ID NO: 915869 - RNA, 19 nt, Artificial Sequence
  Description of Artificial Sequence: Synthetic oligonucleotide
cugagcagcguugggaggg

SEQ ID NO: 915870 - RNA, 19 nt, Artificial Sequence
  Description of Artificial Sequence: Synthetic oligonucleotide
gauaguaagccauggggau

SEQ ID NO: 915871 - RNA, 19 nt, Artificial Sequence
  Description of Artificial Sequence: Synthetic oligonucleotide
uagucggcgucgcggacgg

SEQ ID NO: 915872 - RNA, 19 nt, Artificial Sequence
  Description of Artificial Sequence: Synthetic oligonucleotide
uaaggaucccugaaauauu

SEQ ID NO: 915873 - RNA, 19 nt, Artificial Sequence
  Description of Artificial Sequence: Synthetic oligonucleotide
aaugggguuugugcucggg

SEQ ID NO: 915874 - RNA, 19 nt, Artificial Sequence
  Description of Artificial Sequence: Synthetic oligonucleotide
ugauucaauggagacuaaa

SEQ ID NO: 915875 - RNA, 19 nt, Artificial Sequence
  Description of Artificial Sequence: Synthetic oligonucleotide
uggcaacuuuaauucuuag

SEQ ID NO: 915876 - RNA, 19 nt, Artificial Sequence
  Description of Artificial Sequence: Synthetic oligonucleotide
gucgaugguacagucaaac

SEQ ID NO: 915877 - RNA, 19 nt, Artificial Sequence
  Description of Artificial Sequence: Synthetic oligonucleotide
guuggauauuguccuuugc

SEQ ID NO: 915878 - RNA, 19 nt, Artificial Sequence
  Description of Artificial Sequence: Synthetic oligonucleotide
uugcgcugaguuacaagga

SEQ ID NO: 915879 - RNA, 19 nt, Artificial Sequence
  Description of Artificial Sequence: Synthetic oligonucleotide
aacuggauaguaagccaug

SEQ ID NO: 915880 - RNA, 19 nt, Artificial Sequence
  Description of Artificial Sequence: Synthetic oligonucleotide
uacaacgcugaacuuccau

SEQ ID NO: 915881 - RNA, 19 nt, Artificial Sequence
  Description of Artificial Sequence: Synthetic oligonucleotide
gcgaagaccaguaugguac

SEQ ID NO: 915882 - RNA, 19 nt, Artificial Sequence
  Description of Artificial Sequence: Synthetic oligonucleotide
aaggaucccugaaauauua

SEQ ID NO: 915883 - RNA, 19 nt, Artificial Sequence
  Description of Artificial Sequence: Synthetic oligonucleotide
uucuagucggcgucgcgga

SEQ ID NO: 915884 - RNA, 19 nt, Artificial Sequence
  Description of Artificial Sequence: Synthetic oligonucleotide
gggauuguggagccuaaag

SEQ ID NO: 915885 - RNA, 19 nt, Artificial Sequence
  Description of Artificial Sequence: Synthetic oligonucleotide
gaucucacuggacucaagu

SEQ ID NO: 915886 - RNA, 19 nt, Artificial Sequence
  Description of Artificial Sequence: Synthetic oligonucleotide
ucugaguaugcagguggag

SEQ ID NO: 915887 - RNA, 19 nt, Artificial Sequence
  Description of Artificial Sequence: Synthetic oligonucleotide
cugggccauaggcagauac

SEQ ID NO: 915888 - RNA, 19 nt, Artificial Sequence
  Description of Artificial Sequence: Synthetic oligonucleotide
gagugacuggcuuucuguc

SEQ ID NO: 915889 - RNA, 19 nt, Artificial Sequence
  Description of Artificial Sequence: Synthetic oligonucleotide
aacgccccuuaauuuggcu

SEQ ID NO: 915890 - RNA, 19 nt, Artificial Sequence
  Description of Artificial Sequence: Synthetic oligonucleotide
gucuaaacugcaacuucag

SEQ ID NO: 915891 - RNA, 19 nt, Artificial Sequence
  Description of Artificial Sequence: Synthetic oligonucleotide
cacgucuggguucauggug

SEQ ID NO: 915892 - RNA, 19 nt, Artificial Sequence
  Description of Artificial Sequence: Synthetic oligonucleotide
ugcggguccgcuucuaguc

SEQ ID NO: 915893 - RNA, 19 nt, Artificial Sequence
  Description of Artificial Sequence: Synthetic oligonucleotide
agguggauagaugggacca

SEQ ID NO: 915894 - RNA, 19 nt, Artificial Sequence
  Description of Artificial Sequence: Synthetic oligonucleotide
agaucaaaguucccuccaa

SEQ ID NO: 915895 - RNA, 19 nt, Artificial Sequence
  Description of Artificial Sequence: Synthetic oligonucleotide
ugacuaaagcaguuacauu

SEQ ID NO: 915896 - RNA, 19 nt, Artificial Sequence
  Description of Artificial Sequence: Synthetic oligonucleotide
aucugaaacgccccuuaau

SEQ ID NO: 915897 - RNA, 19 nt, Artificial Sequence
  Description of Artificial Sequence: Synthetic oligonucleotide
cuguuguuuaaguucaggu

SEQ ID NO: 915898 - RNA, 19 nt, Artificial Sequence
  Description of Artificial Sequence: Synthetic oligonucleotide
ggcuuuagaggauccuuag

SEQ ID NO: 915899 - RNA, 19 nt, Artificial Sequence
  Description of Artificial Sequence: Synthetic oligonucleotide
gcuacccuuacaugguucc

SEQ ID NO: 915900 - RNA, 19 nt, Artificial Sequence
  Description of Artificial Sequence: Synthetic oligonucleotide
aggaggaauguugccggcg

SEQ ID NO: 915901 - RNA, 19 nt, Artificial Sequence
  Description of Artificial Sequence: Synthetic oligonucleotide
accacugauucaauggaga

SEQ ID NO: 915902 - RNA, 19 nt, Artificial Sequence
  Description of Artificial Sequence: Synthetic oligonucleotide
ugcuacccuuacaugguuc

SEQ ID NO: 915903 - RNA, 19 nt, Artificial Sequence
  Description of Artificial Sequence: Synthetic oligonucleotide
ggauaguaagccaugggga

SEQ ID NO: 915904 - RNA, 19 nt, Artificial Sequence
  Description of Artificial Sequence: Synthetic oligonucleotide
cauaacagucgaugguaca

SEQ ID NO: 915905 - RNA, 19 nt, Artificial Sequence
  Description of Artificial Sequence: Synthetic oligonucleotide
acagacugggccauaggca

SEQ ID NO: 915906 - RNA, 19 nt, Artificial Sequence
  Description of Artificial Sequence: Synthetic oligonucleotide
cuaccucaaaaugcuuuag

SEQ ID NO: 915907 - RNA, 19 nt, Artificial Sequence
  Description of Artificial Sequence: Synthetic oligonucleotide
aacuaacccaucacaggaa

SEQ ID NO: 915908 - RNA, 19 nt, Artificial Sequence
  Description of Artificial Sequence: Synthetic oligonucleotide
caguaugguacaguaucac

SEQ ID NO: 915909 - RNA, 19 nt, Artificial Sequence
  Description of Artificial Sequence: Synthetic oligonucleotide
agaugggaccaacuggaua

SEQ ID NO: 915910 - RNA, 19 nt, Artificial Sequence
  Description of Artificial Sequence: Synthetic oligonucleotide
aaagugccucaaaguuugg

SEQ ID NO: 915911 - RNA, 19 nt, Artificial Sequence
  Description of Artificial Sequence: Synthetic oligonucleotide
cuagucggcgucgcggacg

SEQ ID NO: 915912 - RNA, 19 nt, Artificial Sequence
  Description of Artificial Sequence: Synthetic oligonucleotide
ccuacuaacuaacccauca

SEQ ID NO: 915913 - RNA, 19 nt, Artificial Sequence
  Description of Artificial Sequence: Synthetic oligonucleotide
ugaacaaagcuuggacgau

SEQ ID NO: 915914 - RNA, 19 nt, Artificial Sequence
  Description of Artificial Sequence: Synthetic oligonucleotide
uacaaggacguuggcuccc

SEQ ID NO: 915915 - RNA, 19 nt, Artificial Sequence
  Description of Artificial Sequence: Synthetic oligonucleotide
aggaauuaaggaagagccu

SEQ ID NO: 915916 - RNA, 19 nt, Artificial Sequence
  Description of Artificial Sequence: Synthetic oligonucleotide
gguggagcaucaguguagg

SEQ ID NO: 915917 - RNA, 19 nt, Artificial Sequence
  Description of Artificial Sequence: Synthetic oligonucleotide
agcgaagaccaguauggua

SEQ ID NO: 915918 - RNA, 19 nt, Artificial Sequence
  Description of Artificial Sequence: Synthetic oligonucleotide
gaggaauguugccggcggc

SEQ ID NO: 915919 - RNA, 19 nt, Artificial Sequence
  Description of Artificial Sequence: Synthetic oligonucleotide
gaggaggaauguugccggc

SEQ ID NO: 915920 - RNA, 19 nt, Artificial Sequence
  Description of Artificial Sequence: Synthetic oligonucleotide
cagcuaaugcgauucaugu

SEQ ID NO: 915921 - RNA, 19 nt, Artificial Sequence
  Description of Artificial Sequence: Synthetic oligonucleotide
ugucuaugaggugggucca

SEQ ID NO: 915922 - RNA, 19 nt, Artificial Sequence
  Description of Artificial Sequence: Synthetic oligonucleotide
cuuucccggcacaggagug

SEQ ID NO: 915923 - RNA, 19 nt, Artificial Sequence
  Description of Artificial Sequence: Synthetic oligonucleotide
auccacaaguuaagugcac

SEQ ID NO: 915924 - RNA, 19 nt, Artificial Sequence
  Description of Artificial Sequence: Synthetic oligonucleotide
caagcugagcagcguuggg

SEQ ID NO: 915925 - RNA, 19 nt, Artificial Sequence
  Description of Artificial Sequence: Synthetic oligonucleotide
cugcaccacugauucaaug

SEQ ID NO: 915926 - RNA, 19 nt, Artificial Sequence
  Description of Artificial Sequence: Synthetic oligonucleotide
uggcaccacagcacgucug

SEQ ID NO: 915927 - RNA, 19 nt, Artificial Sequence
  Description of Artificial Sequence: Synthetic oligonucleotide
gaguuacaaggacguuggc

SEQ ID NO: 915928 - RNA, 19 nt, Artificial Sequence
  Description of Artificial Sequence: Synthetic oligonucleotide
caaggcgaaaagaggcuga

SEQ ID NO: 915929 - RNA, 19 nt, Artificial Sequence
  Description of Artificial Sequence: Synthetic oligonucleotide
ugcuuuagggagggacugc

SEQ ID NO: 915930 - RNA, 19 nt, Artificial Sequence
  Description of Artificial Sequence: Synthetic oligonucleotide
ggcuguguuggauauuguc

SEQ ID NO: 915931 - RNA, 19 nt, Artificial Sequence
  Description of Artificial Sequence: Synthetic oligonucleotide
acaaagcuuggacgauaga

SEQ ID NO: 915932 - RNA, 19 nt, Artificial Sequence
  Description of Artificial Sequence: Synthetic oligonucleotide
acgucuggguucaugguga

SEQ ID NO: 915933 - RNA, 19 nt, Artificial Sequence
  Description of Artificial Sequence: Synthetic oligonucleotide
ccacugauucaauggagac

SEQ ID NO: 915934 - RNA, 19 nt, Artificial Sequence
  Description of Artificial Sequence: Synthetic oligonucleotide
ggagccuaaaggcccaaca

SEQ ID NO: 915935 - RNA, 19 nt, Artificial Sequence
  Description of Artificial Sequence: Synthetic oligonucleotide
ucuagucggcgucgcggac

SEQ ID NO: 915936 - RNA, 19 nt, Artificial Sequence
  Description of Artificial Sequence: Synthetic oligonucleotide
gagccugaggaagauguaa

SEQ ID NO: 915937 - RNA, 19 nt, Artificial Sequence
  Description of Artificial Sequence: Synthetic oligonucleotide
agcuuggacgauagagcuc

SEQ ID NO: 915938 - RNA, 19 nt, Artificial Sequence
  Description of Artificial Sequence: Synthetic oligonucleotide
acuaaaggaaagggaugaa

SEQ ID NO: 915939 - RNA, 19 nt, Artificial Sequence
  Description of Artificial Sequence: Synthetic oligonucleotide
guggagcaucaguguaggg

SEQ ID NO: 915940 - RNA, 19 nt, Artificial Sequence
  Description of Artificial Sequence: Synthetic oligonucleotide
guggauagaugggaccaac

SEQ ID NO: 915941 - RNA, 19 nt, Artificial Sequence
  Description of Artificial Sequence: Synthetic oligonucleotide
gagagggccgguggggcag

SEQ ID NO: 915942 - RNA, 19 nt, Artificial Sequence
  Description of Artificial Sequence: Synthetic oligonucleotide
cucugaguaugcaggugga

SEQ ID NO: 915943 - RNA, 19 nt, Artificial Sequence
  Description of Artificial Sequence: Synthetic oligonucleotide
ggagaggcuguacuagaca

SEQ ID NO: 915944 - RNA, 19 nt, Artificial Sequence
  Description of Artificial Sequence: Synthetic oligonucleotide
guagguaggcuguguugga

SEQ ID NO: 915945 - RNA, 19 nt, Artificial Sequence
  Description of Artificial Sequence: Synthetic oligonucleotide
caacuggauaguaagccau

SEQ ID NO: 915946 - RNA, 19 nt, Artificial Sequence
  Description of Artificial Sequence: Synthetic oligonucleotide
acccuacuaacuaacccau

SEQ ID NO: 915947 - RNA, 19 nt, Artificial Sequence
  Description of Artificial Sequence: Synthetic oligonucleotide
uggggauuguggagccuaa

SEQ ID NO: 915948 - RNA, 19 nt, Artificial Sequence
  Description of Artificial Sequence: Synthetic oligonucleotide
gcgaaaagaggcugaguga

SEQ ID NO: 915949 - RNA, 19 nt, Artificial Sequence
  Description of Artificial Sequence: Synthetic oligonucleotide
aaucuggcaccugcaucau

SEQ ID NO: 915950 - RNA, 19 nt, Artificial Sequence
  Description of Artificial Sequence: Synthetic oligonucleotide
guaugcagguggagcauca

SEQ ID NO: 915951 - RNA, 19 nt, Artificial Sequence
  Description of Artificial Sequence: Synthetic oligonucleotide
auggggauuguggagccua

SEQ ID NO: 915952 - RNA, 19 nt, Artificial Sequence
  Description of Artificial Sequence: Synthetic oligonucleotide
ugagcagcguugggagggc

SEQ ID NO: 915953 - RNA, 19 nt, Artificial Sequence
  Description of Artificial Sequence: Synthetic oligonucleotide
gcuuggacgauagagcucu

SEQ ID NO: 915954 - RNA, 19 nt, Artificial Sequence
  Description of Artificial Sequence: Synthetic oligonucleotide
aacuuccauaacagucgau

SEQ ID NO: 915955 - RNA, 19 nt, Artificial Sequence
  Description of Artificial Sequence: Synthetic oligonucleotide
ucccuugcgcugaguuaca

SEQ ID NO: 915956 - RNA, 19 nt, Artificial Sequence
  Description of Artificial Sequence: Synthetic oligonucleotide
ucccuaccucaaaaugcuu

SEQ ID NO: 915957 - RNA, 19 nt, Artificial Sequence
  Description of Artificial Sequence: Synthetic oligonucleotide
ccaguaugguacaguauca

SEQ ID NO: 915958 - RNA, 19 nt, Artificial Sequence
  Description of Artificial Sequence: Synthetic oligonucleotide
gcggguccgcuucuagucg

SEQ ID NO: 915959 - RNA, 19 nt, Artificial Sequence
  Description of Artificial Sequence: Synthetic oligonucleotide
auuuggcuuuaaagccaag

SEQ ID NO: 915960 - RNA, 19 nt, Artificial Sequence
  Description of Artificial Sequence: Synthetic oligonucleotide
gcuucuagucggcgucgcg

SEQ ID NO: 915961 - RNA, 19 nt, Artificial Sequence
  Description of Artificial Sequence: Synthetic oligonucleotide
cgauagagcucugaguaug

SEQ ID NO: 915962 - RNA, 19 nt, Artificial Sequence
  Description of Artificial Sequence: Synthetic oligonucleotide
ccuugcgcugaguuacaag

SEQ ID NO: 915963 - RNA, 19 nt, Artificial Sequence
  Description of Artificial Sequence: Synthetic oligonucleotide
ucggcgucgcggacgguua

SEQ ID NO: 915964 - RNA, 19 nt, Artificial Sequence
  Description of Artificial Sequence: Synthetic oligonucleotide
ugggaccaacuggauagua

SEQ ID NO: 915965 - RNA, 19 nt, Artificial Sequence
  Description of Artificial Sequence: Synthetic oligonucleotide
aggcauucacaugacccua

SEQ ID NO: 915966 - RNA, 19 nt, Artificial Sequence
  Description of Artificial Sequence: Synthetic oligonucleotide
caggugcaaggcgaaaaga

SEQ ID NO: 915967 - RNA, 19 nt, Artificial Sequence
  Description of Artificial Sequence: Synthetic oligonucleotide
cuuggacgauagagcucug

SEQ ID NO: 915968 - RNA, 19 nt, Artificial Sequence
  Description of Artificial Sequence: Synthetic oligonucleotide
uggagccuaaaggcccaac

SEQ ID NO: 915969 - RNA, 19 nt, Artificial Sequence
  Description of Artificial Sequence: Synthetic oligonucleotide
ggacgauagagcucugagu

SEQ ID NO: 915970 - RNA, 19 nt, Artificial Sequence
  Description of Artificial Sequence: Synthetic oligonucleotide
aggaucccugaaauauuaa

SEQ ID NO: 915971 - RNA, 19 nt, Artificial Sequence
  Description of Artificial Sequence: Synthetic oligonucleotide
ggcauucacaugacccuac

SEQ ID NO: 915972 - RNA, 19 nt, Artificial Sequence
  Description of Artificial Sequence: Synthetic oligonucleotide
gacagcuaaugcgauucau

SEQ ID NO: 915973 - RNA, 19 nt, Artificial Sequence
  Description of Artificial Sequence: Synthetic oligonucleotide
agccucggggcugcuucac

SEQ ID NO: 915974 - RNA, 19 nt, Artificial Sequence
  Description of Artificial Sequence: Synthetic oligonucleotide
ccuaccucaaaaugcuuua

SEQ ID NO: 915975 - RNA, 19 nt, Artificial Sequence
  Description of Artificial Sequence: Synthetic oligonucleotide
caguaucacuccagaggaa

SEQ ID NO: 915976 - RNA, 19 nt, Artificial Sequence
  Description of Artificial Sequence: Synthetic oligonucleotide
gcagaugaugggaggaaaa

SEQ ID NO: 915977 - RNA, 19 nt, Artificial Sequence
  Description of Artificial Sequence: Synthetic oligonucleotide
gguccgcuucuagucggcg

SEQ ID NO: 915978 - RNA, 19 nt, Artificial Sequence
  Description of Artificial Sequence: Synthetic oligonucleotide
gggaccaacuggauaguaa

SEQ ID NO: 915979 - RNA, 19 nt, Artificial Sequence
  Description of Artificial Sequence: Synthetic oligonucleotide
cagauacagagaggugcca

SEQ ID NO: 915980 - RNA, 19 nt, Artificial Sequence
  Description of Artificial Sequence: Synthetic oligonucleotide
caaggacguuggcucccug

SEQ ID NO: 915981 - RNA, 19 nt, Artificial Sequence
  Description of Artificial Sequence: Synthetic oligonucleotide
gccucaaaguuuggacacc

SEQ ID NO: 915982 - RNA, 19 nt, Artificial Sequence
  Description of Artificial Sequence: Synthetic oligonucleotide
gccgguggggcagaugaug

SEQ ID NO: 915983 - RNA, 19 nt, Artificial Sequence
  Description of Artificial Sequence: Synthetic oligonucleotide
cgaugguacagucaaacau

SEQ ID NO: 915984 - RNA, 19 nt, Artificial Sequence
  Description of Artificial Sequence: Synthetic oligonucleotide
gcaccacagcacgucuggg

SEQ ID NO: 915985 - RNA, 19 nt, Artificial Sequence
  Description of Artificial Sequence: Synthetic oligonucleotide
cggguccgcuucuagucgg

SEQ ID NO: 915986 - RNA, 19 nt, Artificial Sequence
  Description of Artificial Sequence: Synthetic oligonucleotide
cccuacuaacuaacccauc

SEQ ID NO: 915987 - RNA, 19 nt, Artificial Sequence
  Description of Artificial Sequence: Synthetic oligonucleotide
guccugcaccacugauuca

SEQ ID NO: 915988 - RNA, 19 nt, Artificial Sequence
  Description of Artificial Sequence: Synthetic oligonucleotide
gguggauagaugggaccaa

SEQ ID NO: 915989 - RNA, 19 nt, Artificial Sequence
  Description of Artificial Sequence: Synthetic oligonucleotide
cccuuaauuuggcuuuaaa

SEQ ID NO: 915990 - RNA, 19 nt, Artificial Sequence
  Description of Artificial Sequence: Synthetic oligonucleotide
cagcgccagcuccaaaucu

SEQ ID NO: 915991 - RNA, 19 nt, Artificial Sequence
  Description of Artificial Sequence: Synthetic oligonucleotide
ccgcuucuagucggcgucg

SEQ ID NO: 915992 - RNA, 19 nt, Artificial Sequence
  Description of Artificial Sequence: Synthetic oligonucleotide
gcgauucauguaacaacua

SEQ ID NO: 915993 - RNA, 19 nt, Artificial Sequence
  Description of Artificial Sequence: Synthetic oligonucleotide
ccacaguguagagagacau

SEQ ID NO: 915994 - RNA, 19 nt, Artificial Sequence
  Description of Artificial Sequence: Synthetic oligonucleotide
cccuaccucaaaaugcuuu

SEQ ID NO: 915995 - RNA, 19 nt, Artificial Sequence
  Description of Artificial Sequence: Synthetic oligonucleotide
ggguccgcuucuagucggc

SEQ ID NO: 915996 - RNA, 19 nt, Artificial Sequence
  Description of Artificial Sequence: Synthetic oligonucleotide
gcagacagcuaaugcgauu

SEQ ID NO: 915997 - RNA, 19 nt, Artificial Sequence
  Description of Artificial Sequence: Synthetic oligonucleotide
cugcuacccuuacaugguu

SEQ ID NO: 915998 - RNA, 19 nt, Artificial Sequence
  Description of Artificial Sequence: Synthetic oligonucleotide
gucggcgucgcggacgguu

SEQ ID NO: 915999 - RNA, 19 nt, Artificial Sequence
  Description of Artificial Sequence: Synthetic oligonucleotide
ggggauuguggagccuaaa

SEQ ID NO: 916000 - RNA, 19 nt, Artificial Sequence
  Description of Artificial Sequence: Synthetic oligonucleotide
guggagccuaaaggcccaa

SEQ ID NO: 916001 - RNA, 19 nt, Artificial Sequence
  Description of Artificial Sequence: Synthetic oligonucleotide
ggcagacagcuaaugcgau

SEQ ID NO: 916002 - RNA, 19 nt, Artificial Sequence
  Description of Artificial Sequence: Synthetic oligonucleotide
ggacguuggcucccugcau

SEQ ID NO: 916003 - RNA, 19 nt, Artificial Sequence
  Description of Artificial Sequence: Synthetic oligonucleotide
ggagggcauccaggaggug

SEQ ID NO: 916004 - RNA, 19 nt, Artificial Sequence
  Description of Artificial Sequence: Synthetic oligonucleotide
guaggcuguguuggauauu

SEQ ID NO: 916005 - RNA, 19 nt, Artificial Sequence
  Description of Artificial Sequence: Synthetic oligonucleotide
cgcuucuagucggcgucgc

SEQ ID NO: 916006 - RNA, 19 nt, Artificial Sequence
  Description of Artificial Sequence: Synthetic oligonucleotide
gccccuuaauuuggcuuua

SEQ ID NO: 916007 - RNA, 19 nt, Artificial Sequence
  Description of Artificial Sequence: Synthetic oligonucleotide
cgccccuuaauuuggcuuu

SEQ ID NO: 916008 - RNA, 19 nt, Artificial Sequence
  Description of Artificial Sequence: Synthetic oligonucleotide
agucggcgucgcggacggu

SEQ ID NO: 916009 - RNA, 19 nt, Artificial Sequence
  Description of Artificial Sequence: Synthetic oligonucleotide
ccccuuaauuuggcuuuaa

SEQ ID NO: 916010 - RNA, 19 nt, Artificial Sequence
  Description of Artificial Sequence: Synthetic oligonucleotide
gcgucgcggacgguuauuu

SEQ ID NO: 916011 - RNA, 19 nt, Artificial Sequence
  Description of Artificial Sequence: Synthetic oligonucleotide
cccuugcgcugaguuacaa

SEQ ID NO: 916012 - RNA, 19 nt, Artificial Sequence
  Description of Artificial Sequence: Synthetic oligonucleotide
ggcgucgcggacgguuauu

SEQ ID NO: 916013 - RNA, 19 nt, Artificial Sequence
  Description of Artificial Sequence: Synthetic oligonucleotide
cgucgcggacgguuauuuu

SEQ ID NO: 916014 - RNA, 19 nt, Artificial Sequence
  Description of Artificial Sequence: Synthetic oligonucleotide
cggcgucgcggacgguuau

SEQ ID NO: 916015 - RNA, 19 nt, Artificial Sequence
  Description of Artificial Sequence: Synthetic oligonucleotide
auagaauucauuuggugcc

SEQ ID NO: 916016 - RNA, 19 nt, Artificial Sequence
  Description of Artificial Sequence: Synthetic oligonucleotide
aauaucacagaucuuguug

SEQ ID NO: 916017 - RNA, 19 nt, Artificial Sequence
  Description of Artificial Sequence: Synthetic oligonucleotide
ucuuauagagaccauaaug

SEQ ID NO: 916018 - RNA, 19 nt, Artificial Sequence
  Description of Artificial Sequence: Synthetic oligonucleotide
aaacccugcauauuggugg

SEQ ID NO: 916019 - RNA, 19 nt, Artificial Sequence
  Description of Artificial Sequence: Synthetic oligonucleotide
uucacuauagggaaguucc

SEQ ID NO: 916020 - RNA, 19 nt, Artificial Sequence
  Description of Artificial Sequence: Synthetic oligonucleotide
agccuaaucgaucacagcc

SEQ ID NO: 916021 - RNA, 19 nt, Artificial Sequence
  Description of Artificial Sequence: Synthetic oligonucleotide
ucgauaucaauguagagca

SEQ ID NO: 916022 - RNA, 19 nt, Artificial Sequence
  Description of Artificial Sequence: Synthetic oligonucleotide
aauguagagcacccgaggg

SEQ ID NO: 916023 - RNA, 19 nt, Artificial Sequence
  Description of Artificial Sequence: Synthetic oligonucleotide
aaguacucgaaguauucac

SEQ ID NO: 916024 - RNA, 19 nt, Artificial Sequence
  Description of Artificial Sequence: Synthetic oligonucleotide
ugaguuagaagcagggagg

SEQ ID NO: 916025 - RNA, 19 nt, Artificial Sequence
  Description of Artificial Sequence: Synthetic oligonucleotide
ugaagcacgaugcauguag

SEQ ID NO: 916026 - RNA, 19 nt, Artificial Sequence
  Description of Artificial Sequence: Synthetic oligonucleotide
aagacgaucaucuucuuau

SEQ ID NO: 916027 - RNA, 19 nt, Artificial Sequence
  Description of Artificial Sequence: Synthetic oligonucleotide
ugauuuucgauucgggugc

SEQ ID NO: 916028 - RNA, 19 nt, Artificial Sequence
  Description of Artificial Sequence: Synthetic oligonucleotide
agagacgucucguaugucc

SEQ ID NO: 916029 - RNA, 19 nt, Artificial Sequence
  Description of Artificial Sequence: Synthetic oligonucleotide
cauaacgccaguuagagca

SEQ ID NO: 916030 - RNA, 19 nt, Artificial Sequence
  Description of Artificial Sequence: Synthetic oligonucleotide
gaugcauguagguugguag

SEQ ID NO: 916031 - RNA, 19 nt, Artificial Sequence
  Description of Artificial Sequence: Synthetic oligonucleotide
cauugagacaauaguagcg

SEQ ID NO: 916032 - RNA, 19 nt, Artificial Sequence
  Description of Artificial Sequence: Synthetic oligonucleotide
uugaagacgaucaucuucu

SEQ ID NO: 916033 - RNA, 19 nt, Artificial Sequence
  Description of Artificial Sequence: Synthetic oligonucleotide
aaccaauugguuuauuaga

SEQ ID NO: 916034 - RNA, 19 nt, Artificial Sequence
  Description of Artificial Sequence: Synthetic oligonucleotide
ucagaggugacucuaguac

SEQ ID NO: 916035 - RNA, 19 nt, Artificial Sequence
  Description of Artificial Sequence: Synthetic oligonucleotide
gaagguuucagagagccag

SEQ ID NO: 916036 - RNA, 19 nt, Artificial Sequence
  Description of Artificial Sequence: Synthetic oligonucleotide
gucaaauggacauaacgcc

SEQ ID NO: 916037 - RNA, 19 nt, Artificial Sequence
  Description of Artificial Sequence: Synthetic oligonucleotide
aguucguaaaagcacuggg

SEQ ID NO: 916038 - RNA, 19 nt, Artificial Sequence
  Description of Artificial Sequence: Synthetic oligonucleotide
uaugagucaacgccaggcg

SEQ ID NO: 916039 - RNA, 19 nt, Artificial Sequence
  Description of Artificial Sequence: Synthetic oligonucleotide
gauaucaauguagagcacc

SEQ ID NO: 916040 - RNA, 19 nt, Artificial Sequence
  Description of Artificial Sequence: Synthetic oligonucleotide
ugucuggcgaaucuggucc

SEQ ID NO: 916041 - RNA, 19 nt, Artificial Sequence
  Description of Artificial Sequence: Synthetic oligonucleotide
caagacuaggcuaugaguc

SEQ ID NO: 916042 - RNA, 19 nt, Artificial Sequence
  Description of Artificial Sequence: Synthetic oligonucleotide
gaaguauucacuauaggga

SEQ ID NO: 916043 - RNA, 19 nt, Artificial Sequence
  Description of Artificial Sequence: Synthetic oligonucleotide
uagaaauacgccacggucu

SEQ ID NO: 916044 - RNA, 19 nt, Artificial Sequence
  Description of Artificial Sequence: Synthetic oligonucleotide
aaauacgccacggucuugg

SEQ ID NO: 916045 - RNA, 19 nt, Artificial Sequence
  Description of Artificial Sequence: Synthetic oligonucleotide
cugaguuagaagcagggag

SEQ ID NO: 916046 - RNA, 19 nt, Artificial Sequence
  Description of Artificial Sequence: Synthetic oligonucleotide
auagagaccauaaugcaag

SEQ ID NO: 916047 - RNA, 19 nt, Artificial Sequence
  Description of Artificial Sequence: Synthetic oligonucleotide
ugcaguagaagaacccagg

SEQ ID NO: 916048 - RNA, 19 nt, Artificial Sequence
  Description of Artificial Sequence: Synthetic oligonucleotide
uguagguugguagaagucc

SEQ ID NO: 916049 - RNA, 19 nt, Artificial Sequence
  Description of Artificial Sequence: Synthetic oligonucleotide
cauacaugucaccaguucc

SEQ ID NO: 916050 - RNA, 19 nt, Artificial Sequence
  Description of Artificial Sequence: Synthetic oligonucleotide
cugauuuucgauucgggug

SEQ ID NO: 916051 - RNA, 19 nt, Artificial Sequence
  Description of Artificial Sequence: Synthetic oligonucleotide
ucaauguagagcacccgag

SEQ ID NO: 916052 - RNA, 19 nt, Artificial Sequence
  Description of Artificial Sequence: Synthetic oligonucleotide
aaucgaucacagccuaggg

SEQ ID NO: 916053 - RNA, 19 nt, Artificial Sequence
  Description of Artificial Sequence: Synthetic oligonucleotide
agauuaaaacagccuaauc

SEQ ID NO: 916054 - RNA, 19 nt, Artificial Sequence
  Description of Artificial Sequence: Synthetic oligonucleotide
ugagacaauaguagcggcc

SEQ ID NO: 916055 - RNA, 19 nt, Artificial Sequence
  Description of Artificial Sequence: Synthetic oligonucleotide
uaaucgaucacagccuagg

SEQ ID NO: 916056 - RNA, 19 nt, Artificial Sequence
  Description of Artificial Sequence: Synthetic oligonucleotide
uagggaaucagcuccacac

SEQ ID NO: 916057 - RNA, 19 nt, Artificial Sequence
  Description of Artificial Sequence: Synthetic oligonucleotide
ucuuaaaucuccacaucac

SEQ ID NO: 916058 - RNA, 19 nt, Artificial Sequence
  Description of Artificial Sequence: Synthetic oligonucleotide
ucauaugucaggaggucug

SEQ ID NO: 916059 - RNA, 19 nt, Artificial Sequence
  Description of Artificial Sequence: Synthetic oligonucleotide
aacucaaagagcccgggaa

SEQ ID NO: 916060 - RNA, 19 nt, Artificial Sequence
  Description of Artificial Sequence: Synthetic oligonucleotide
gacauaacgccaguuagag

SEQ ID NO: 916061 - RNA, 19 nt, Artificial Sequence
  Description of Artificial Sequence: Synthetic oligonucleotide
aacccuucaccagaguucg

SEQ ID NO: 916062 - RNA, 19 nt, Artificial Sequence
  Description of Artificial Sequence: Synthetic oligonucleotide
ugagauuaaaacagccuaa

SEQ ID NO: 916063 - RNA, 19 nt, Artificial Sequence
  Description of Artificial Sequence: Synthetic oligonucleotide
aauagggaccaucaggcua

SEQ ID NO: 916064 - RNA, 19 nt, Artificial Sequence
  Description of Artificial Sequence: Synthetic oligonucleotide
ugcaagacuaggcuaugag

SEQ ID NO: 916065 - RNA, 19 nt, Artificial Sequence
  Description of Artificial Sequence: Synthetic oligonucleotide
auugucauggucuccguca

SEQ ID NO: 916066 - RNA, 19 nt, Artificial Sequence
  Description of Artificial Sequence: Synthetic oligonucleotide
uaaugcaagacuaggcuau

SEQ ID NO: 916067 - RNA, 19 nt, Artificial Sequence
  Description of Artificial Sequence: Synthetic oligonucleotide
aguccugucauaugucagg

SEQ ID NO: 916068 - RNA, 19 nt, Artificial Sequence
  Description of Artificial Sequence: Synthetic oligonucleotide
uggaugucgauaucaaugu

SEQ ID NO: 916069 - RNA, 19 nt, Artificial Sequence
  Description of Artificial Sequence: Synthetic oligonucleotide
cucauuacccaucauguuc

SEQ ID NO: 916070 - RNA, 19 nt, Artificial Sequence
  Description of Artificial Sequence: Synthetic oligonucleotide
ucuaccagcagagacgucu

SEQ ID NO: 916071 - RNA, 19 nt, Artificial Sequence
  Description of Artificial Sequence: Synthetic oligonucleotide
acuauagggaaguuccuca

SEQ ID NO: 916072 - RNA, 19 nt, Artificial Sequence
  Description of Artificial Sequence: Synthetic oligonucleotide
uccgucauagaauucauuu

SEQ ID NO: 916073 - RNA, 19 nt, Artificial Sequence
  Description of Artificial Sequence: Synthetic oligonucleotide
caugguguagaccaccagc

SEQ ID NO: 916074 - RNA, 19 nt, Artificial Sequence
  Description of Artificial Sequence: Synthetic oligonucleotide
cucgaaguauucacuauag

SEQ ID NO: 916075 - RNA, 19 nt, Artificial Sequence
  Description of Artificial Sequence: Synthetic oligonucleotide
aaagauugucuggcgaauc

SEQ ID NO: 916076 - RNA, 19 nt, Artificial Sequence
  Description of Artificial Sequence: Synthetic oligonucleotide
aagacuaggcuaugaguca

SEQ ID NO: 916077 - RNA, 19 nt, Artificial Sequence
  Description of Artificial Sequence: Synthetic oligonucleotide
augguguagaccaccagcc

SEQ ID NO: 916078 - RNA, 19 nt, Artificial Sequence
  Description of Artificial Sequence: Synthetic oligonucleotide
aacauuucggacaguguag

SEQ ID NO: 916079 - RNA, 19 nt, Artificial Sequence
  Description of Artificial Sequence: Synthetic oligonucleotide
cgaaguauucacuauaggg

SEQ ID NO: 916080 - RNA, 19 nt, Artificial Sequence
  Description of Artificial Sequence: Synthetic oligonucleotide
cuuguaacucuggucaucg

SEQ ID NO: 916081 - RNA, 19 nt, Artificial Sequence
  Description of Artificial Sequence: Synthetic oligonucleotide
uaacucuggucaucgaugc

SEQ ID NO: 916082 - RNA, 19 nt, Artificial Sequence
  Description of Artificial Sequence: Synthetic oligonucleotide
aacccugcauauugguggg

SEQ ID NO: 916083 - RNA, 19 nt, Artificial Sequence
  Description of Artificial Sequence: Synthetic oligonucleotide
guucaccugccauagaagc

SEQ ID NO: 916084 - RNA, 19 nt, Artificial Sequence
  Description of Artificial Sequence: Synthetic oligonucleotide
ugaagcgugaaguccggag

SEQ ID NO: 916085 - RNA, 19 nt, Artificial Sequence
  Description of Artificial Sequence: Synthetic oligonucleotide
aucggggucguagaaauac

SEQ ID NO: 916086 - RNA, 19 nt, Artificial Sequence
  Description of Artificial Sequence: Synthetic oligonucleotide
aucgaugccaucccguaag

SEQ ID NO: 916087 - RNA, 19 nt, Artificial Sequence
  Description of Artificial Sequence: Synthetic oligonucleotide
guagaaauacgccacgguc

SEQ ID NO: 916088 - RNA, 19 nt, Artificial Sequence
  Description of Artificial Sequence: Synthetic oligonucleotide
cucugaguuagaagcaggg

SEQ ID NO: 916089 - RNA, 19 nt, Artificial Sequence
  Description of Artificial Sequence: Synthetic oligonucleotide
accauaaugcaagacuagg

SEQ ID NO: 916090 - RNA, 19 nt, Artificial Sequence
  Description of Artificial Sequence: Synthetic oligonucleotide
acauuucggacaguguagc

SEQ ID NO: 916091 - RNA, 19 nt, Artificial Sequence
  Description of Artificial Sequence: Synthetic oligonucleotide
uacgccacggucuuggcca

SEQ ID NO: 916092 - RNA, 19 nt, Artificial Sequence
  Description of Artificial Sequence: Synthetic oligonucleotide
aacucuggucaucgaugcc

SEQ ID NO: 916093 - RNA, 19 nt, Artificial Sequence
  Description of Artificial Sequence: Synthetic oligonucleotide
gaagcgugaaguccggagc

SEQ ID NO: 916094 - RNA, 19 nt, Artificial Sequence
  Description of Artificial Sequence: Synthetic oligonucleotide
guucguaaaagcacugggg

SEQ ID NO: 916095 - RNA, 19 nt, Artificial Sequence
  Description of Artificial Sequence: Synthetic oligonucleotide
ggugaaacccugcauauug

SEQ ID NO: 916096 - RNA, 19 nt, Artificial Sequence
  Description of Artificial Sequence: Synthetic oligonucleotide
aggcgauggggcuucaucg

SEQ ID NO: 916097 - RNA, 19 nt, Artificial Sequence
  Description of Artificial Sequence: Synthetic oligonucleotide
uguaacgggagcagaacuc

SEQ ID NO: 916098 - RNA, 19 nt, Artificial Sequence
  Description of Artificial Sequence: Synthetic oligonucleotide
aauacgccacggucuuggc

SEQ ID NO: 916099 - RNA, 19 nt, Artificial Sequence
  Description of Artificial Sequence: Synthetic oligonucleotide
uuucggacaguguagccac

SEQ ID NO: 916100 - RNA, 19 nt, Artificial Sequence
  Description of Artificial Sequence: Synthetic oligonucleotide
ucccuaauagggaccauca

SEQ ID NO: 916101 - RNA, 19 nt, Artificial Sequence
  Description of Artificial Sequence: Synthetic oligonucleotide
agagaugcgccuguguaac

SEQ ID NO: 916102 - RNA, 19 nt, Artificial Sequence
  Description of Artificial Sequence: Synthetic oligonucleotide
acuaggugcaugguuuagc

SEQ ID NO: 916103 - RNA, 19 nt, Artificial Sequence
  Description of Artificial Sequence: Synthetic oligonucleotide
gugaagguuucagagagcc

SEQ ID NO: 916104 - RNA, 19 nt, Artificial Sequence
  Description of Artificial Sequence: Synthetic oligonucleotide
ccuaauagggaccaucagg

SEQ ID NO: 916105 - RNA, 19 nt, Artificial Sequence
  Description of Artificial Sequence: Synthetic oligonucleotide
acauaacgccaguuagagc

SEQ ID NO: 916106 - RNA, 19 nt, Artificial Sequence
  Description of Artificial Sequence: Synthetic oligonucleotide
caauguagagcacccgagg

SEQ ID NO: 916107 - RNA, 19 nt, Artificial Sequence
  Description of Artificial Sequence: Synthetic oligonucleotide
auucacuauagggaaguuc

SEQ ID NO: 916108 - RNA, 19 nt, Artificial Sequence
  Description of Artificial Sequence: Synthetic oligonucleotide
aaaagucucugaguuagaa

SEQ ID NO: 916109 - RNA, 19 nt, Artificial Sequence
  Description of Artificial Sequence: Synthetic oligonucleotide
aagcgugaaguccggagca

SEQ ID NO: 916110 - RNA, 19 nt, Artificial Sequence
  Description of Artificial Sequence: Synthetic oligonucleotide
uucgggugcugacaucugg

SEQ ID NO: 916111 - RNA, 19 nt, Artificial Sequence
  Description of Artificial Sequence: Synthetic oligonucleotide
auaaugcaagacuaggcua

SEQ ID NO: 916112 - RNA, 19 nt, Artificial Sequence
  Description of Artificial Sequence: Synthetic oligonucleotide
gacccggucagugagguag

SEQ ID NO: 916113 - RNA, 19 nt, Artificial Sequence
  Description of Artificial Sequence: Synthetic oligonucleotide
aauucauuuggugccucug

SEQ ID NO: 916114 - RNA, 19 nt, Artificial Sequence
  Description of Artificial Sequence: Synthetic oligonucleotide
gagaccauaaugcaagacu

SEQ ID NO: 916115 - RNA, 19 nt, Artificial Sequence
  Description of Artificial Sequence: Synthetic oligonucleotide
uggaugaagcgugaagucc

SEQ ID NO: 916116 - RNA, 19 nt, Artificial Sequence
  Description of Artificial Sequence: Synthetic oligonucleotide
uucacuguucaccugccau

SEQ ID NO: 916117 - RNA, 19 nt, Artificial Sequence
  Description of Artificial Sequence: Synthetic oligonucleotide
ucguaugcugagauuaaaa

SEQ ID NO: 916118 - RNA, 19 nt, Artificial Sequence
  Description of Artificial Sequence: Synthetic oligonucleotide
acgggagcagaacucaaag

SEQ ID NO: 916119 - RNA, 19 nt, Artificial Sequence
  Description of Artificial Sequence: Synthetic oligonucleotide
acaauaguagcggccacuc

SEQ ID NO: 916120 - RNA, 19 nt, Artificial Sequence
  Description of Artificial Sequence: Synthetic oligonucleotide
uauagggaaguuccucacu

SEQ ID NO: 916121 - RNA, 19 nt, Artificial Sequence
  Description of Artificial Sequence: Synthetic oligonucleotide
uugagacaauaguagcggc

SEQ ID NO: 916122 - RNA, 19 nt, Artificial Sequence
  Description of Artificial Sequence: Synthetic oligonucleotide
uccucagaauggaagcggc

SEQ ID NO: 916123 - RNA, 19 nt, Artificial Sequence
  Description of Artificial Sequence: Synthetic oligonucleotide
ggacacaacauccaugcug

SEQ ID NO: 916124 - RNA, 19 nt, Artificial Sequence
  Description of Artificial Sequence: Synthetic oligonucleotide
agugagguagaaggcuucc

SEQ ID NO: 916125 - RNA, 19 nt, Artificial Sequence
  Description of Artificial Sequence: Synthetic oligonucleotide
auacgccacggucuuggcc

SEQ ID NO: 916126 - RNA, 19 nt, Artificial Sequence
  Description of Artificial Sequence: Synthetic oligonucleotide
gaagcggcacaugucaugc

SEQ ID NO: 916127 - RNA, 19 nt, Artificial Sequence
  Description of Artificial Sequence: Synthetic oligonucleotide
gacucuaguacugucaaaa

SEQ ID NO: 916128 - RNA, 19 nt, Artificial Sequence
  Description of Artificial Sequence: Synthetic oligonucleotide
aacagccuaaucgaucaca

SEQ ID NO: 916129 - RNA, 19 nt, Artificial Sequence
  Description of Artificial Sequence: Synthetic oligonucleotide
gaguucguaaaagcacugg

SEQ ID NO: 916130 - RNA, 19 nt, Artificial Sequence
  Description of Artificial Sequence: Synthetic oligonucleotide
agggugguacuugagcagc

SEQ ID NO: 916131 - RNA, 19 nt, Artificial Sequence
  Description of Artificial Sequence: Synthetic oligonucleotide
aggcuaugagaguuugagg

SEQ ID NO: 916132 - RNA, 19 nt, Artificial Sequence
  Description of Artificial Sequence: Synthetic oligonucleotide
uaucaauguagagcacccg

SEQ ID NO: 916133 - RNA, 19 nt, Artificial Sequence
  Description of Artificial Sequence: Synthetic oligonucleotide
aaucuggacacuaggugca

SEQ ID NO: 916134 - RNA, 19 nt, Artificial Sequence
  Description of Artificial Sequence: Synthetic oligonucleotide
uucuuauagagaccauaau

SEQ ID NO: 916135 - RNA, 19 nt, Artificial Sequence
  Description of Artificial Sequence: Synthetic oligonucleotide
aucccguaagggcacauug

SEQ ID NO: 916136 - RNA, 19 nt, Artificial Sequence
  Description of Artificial Sequence: Synthetic oligonucleotide
cuaggcuaugagucaacgc

SEQ ID NO: 916137 - RNA, 19 nt, Artificial Sequence
  Description of Artificial Sequence: Synthetic oligonucleotide
cacgaugcauguagguugg

SEQ ID NO: 916138 - RNA, 19 nt, Artificial Sequence
  Description of Artificial Sequence: Synthetic oligonucleotide
cugagauuaaaacagccua

SEQ ID NO: 916139 - RNA, 19 nt, Artificial Sequence
  Description of Artificial Sequence: Synthetic oligonucleotide
agagaccauaaugcaagac

SEQ ID NO: 916140 - RNA, 19 nt, Artificial Sequence
  Description of Artificial Sequence: Synthetic oligonucleotide
gucguagaaauacgccacg

SEQ ID NO: 916141 - RNA, 19 nt, Artificial Sequence
  Description of Artificial Sequence: Synthetic oligonucleotide
caccagaguucguaaaagc

SEQ ID NO: 916142 - RNA, 19 nt, Artificial Sequence
  Description of Artificial Sequence: Synthetic oligonucleotide
gaugcgccuguguaacggg

SEQ ID NO: 916143 - RNA, 19 nt, Artificial Sequence
  Description of Artificial Sequence: Synthetic oligonucleotide
uccggagcaaaguacucga

SEQ ID NO: 916144 - RNA, 19 nt, Artificial Sequence
  Description of Artificial Sequence: Synthetic oligonucleotide
acuaggcuaugagucaacg

SEQ ID NO: 916145 - RNA, 19 nt, Artificial Sequence
  Description of Artificial Sequence: Synthetic oligonucleotide
ugagucaacgccaggcgau

SEQ ID NO: 916146 - RNA, 19 nt, Artificial Sequence
  Description of Artificial Sequence: Synthetic oligonucleotide
cugguaaggcuugaagacg

SEQ ID NO: 916147 - RNA, 19 nt, Artificial Sequence
  Description of Artificial Sequence: Synthetic oligonucleotide
agguugguagaaguccacc

SEQ ID NO: 916148 - RNA, 19 nt, Artificial Sequence
  Description of Artificial Sequence: Synthetic oligonucleotide
agcagagacgucucguaug

SEQ ID NO: 916149 - RNA, 19 nt, Artificial Sequence
  Description of Artificial Sequence: Synthetic oligonucleotide
cacaugucaugcugggagg

SEQ ID NO: 916150 - RNA, 19 nt, Artificial Sequence
  Description of Artificial Sequence: Synthetic oligonucleotide
cguaagggcacauugagac

SEQ ID NO: 916151 - RNA, 19 nt, Artificial Sequence
  Description of Artificial Sequence: Synthetic oligonucleotide
cuauagggaaguuccucac

SEQ ID NO: 916152 - RNA, 19 nt, Artificial Sequence
  Description of Artificial Sequence: Synthetic oligonucleotide
uguccucguaugcugagau

SEQ ID NO: 916153 - RNA, 19 nt, Artificial Sequence
  Description of Artificial Sequence: Synthetic oligonucleotide
gaagcacgaugcauguagg

SEQ ID NO: 916154 - RNA, 19 nt, Artificial Sequence
  Description of Artificial Sequence: Synthetic oligonucleotide
auuucggacaguguagcca

SEQ ID NO: 916155 - RNA, 19 nt, Artificial Sequence
  Description of Artificial Sequence: Synthetic oligonucleotide
cauaaugcaagacuaggcu

SEQ ID NO: 916156 - RNA, 19 nt, Artificial Sequence
  Description of Artificial Sequence: Synthetic oligonucleotide
ugaagagaugcgccugugu

SEQ ID NO: 916157 - RNA, 19 nt, Artificial Sequence
  Description of Artificial Sequence: Synthetic oligonucleotide
cucaucccuaauagggacc

SEQ ID NO: 916158 - RNA, 19 nt, Artificial Sequence
  Description of Artificial Sequence: Synthetic oligonucleotide
cagaacucaaagagcccgg

SEQ ID NO: 916159 - RNA, 19 nt, Artificial Sequence
  Description of Artificial Sequence: Synthetic oligonucleotide
uccguaguggaaguugccc

SEQ ID NO: 916160 - RNA, 19 nt, Artificial Sequence
  Description of Artificial Sequence: Synthetic oligonucleotide
acucgaaguauucacuaua

SEQ ID NO: 916161 - RNA, 19 nt, Artificial Sequence
  Description of Artificial Sequence: Synthetic oligonucleotide
agaugcgccuguguaacgg

SEQ ID NO: 916162 - RNA, 19 nt, Artificial Sequence
  Description of Artificial Sequence: Synthetic oligonucleotide
agaaauacgccacggucuu

SEQ ID NO: 916163 - RNA, 19 nt, Artificial Sequence
  Description of Artificial Sequence: Synthetic oligonucleotide
ucugaguuagaagcaggga

SEQ ID NO: 916164 - RNA, 19 nt, Artificial Sequence
  Description of Artificial Sequence: Synthetic oligonucleotide
gaccauaaugcaagacuag

SEQ ID NO: 916165 - RNA, 19 nt, Artificial Sequence
  Description of Artificial Sequence: Synthetic oligonucleotide
ccauaaugcaagacuaggc

SEQ ID NO: 916166 - RNA, 19 nt, Artificial Sequence
  Description of Artificial Sequence: Synthetic oligonucleotide
ucaucaguccugucauaug

SEQ ID NO: 916167 - RNA, 19 nt, Artificial Sequence
  Description of Artificial Sequence: Synthetic oligonucleotide
aguauucacuauagggaag

SEQ ID NO: 916168 - RNA, 19 nt, Artificial Sequence
  Description of Artificial Sequence: Synthetic oligonucleotide
gggaccaucaggcuaugag

SEQ ID NO: 916169 - RNA, 19 nt, Artificial Sequence
  Description of Artificial Sequence: Synthetic oligonucleotide
cuaggugcaugguuuagca

SEQ ID NO: 916170 - RNA, 19 nt, Artificial Sequence
  Description of Artificial Sequence: Synthetic oligonucleotide
aaugcaagacuaggcuaug

SEQ ID NO: 916171 - RNA, 19 nt, Artificial Sequence
  Description of Artificial Sequence: Synthetic oligonucleotide
gaaggcauuaaggcucuug

SEQ ID NO: 916172 - RNA, 19 nt, Artificial Sequence
  Description of Artificial Sequence: Synthetic oligonucleotide
acagccuaaucgaucacag

SEQ ID NO: 916173 - RNA, 19 nt, Artificial Sequence
  Description of Artificial Sequence: Synthetic oligonucleotide
accaauugguuuauuagau

SEQ ID NO: 916174 - RNA, 19 nt, Artificial Sequence
  Description of Artificial Sequence: Synthetic oligonucleotide
ucaucccuaaaagucucug

SEQ ID NO: 916175 - RNA, 19 nt, Artificial Sequence
  Description of Artificial Sequence: Synthetic oligonucleotide
augucgauaucaauguaga

SEQ ID NO: 916176 - RNA, 19 nt, Artificial Sequence
  Description of Artificial Sequence: Synthetic oligonucleotide
ucgauucgggugcugacau

SEQ ID NO: 916177 - RNA, 19 nt, Artificial Sequence
  Description of Artificial Sequence: Synthetic oligonucleotide
aguacucgaaguauucacu

SEQ ID NO: 916178 - RNA, 19 nt, Artificial Sequence
  Description of Artificial Sequence: Synthetic oligonucleotide
cauuucggacaguguagcc

SEQ ID NO: 916179 - RNA, 19 nt, Artificial Sequence
  Description of Artificial Sequence: Synthetic oligonucleotide
cuaaucgaucacagccuag

SEQ ID NO: 916180 - RNA, 19 nt, Artificial Sequence
  Description of Artificial Sequence: Synthetic oligonucleotide
ugcgccuguguaacgggag

SEQ ID NO: 916181 - RNA, 19 nt, Artificial Sequence
  Description of Artificial Sequence: Synthetic oligonucleotide
aacgccaggcgauggggcu

SEQ ID NO: 916182 - RNA, 19 nt, Artificial Sequence
  Description of Artificial Sequence: Synthetic oligonucleotide
caacauuucggacagugua

SEQ ID NO: 916183 - RNA, 19 nt, Artificial Sequence
  Description of Artificial Sequence: Synthetic oligonucleotide
cacuaauggccucuucuac

SEQ ID NO: 916184 - RNA, 19 nt, Artificial Sequence
  Description of Artificial Sequence: Synthetic oligonucleotide
agcaaaguacucgaaguau

SEQ ID NO: 916185 - RNA, 19 nt, Artificial Sequence
  Description of Artificial Sequence: Synthetic oligonucleotide
auacaugucaccaguucca

SEQ ID NO: 916186 - RNA, 19 nt, Artificial Sequence
  Description of Artificial Sequence: Synthetic oligonucleotide
ucccguaagggcacauuga

SEQ ID NO: 916187 - RNA, 19 nt, Artificial Sequence
  Description of Artificial Sequence: Synthetic oligonucleotide
uguguaacgggagcagaac

SEQ ID NO: 916188 - RNA, 19 nt, Artificial Sequence
  Description of Artificial Sequence: Synthetic oligonucleotide
augagaguuugaggaaagg

SEQ ID NO: 916189 - RNA, 19 nt, Artificial Sequence
  Description of Artificial Sequence: Synthetic oligonucleotide
auguagguugguagaaguc

SEQ ID NO: 916190 - RNA, 19 nt, Artificial Sequence
  Description of Artificial Sequence: Synthetic oligonucleotide
gugaaacccugcauauugg

SEQ ID NO: 916191 - RNA, 19 nt, Artificial Sequence
  Description of Artificial Sequence: Synthetic oligonucleotide
guagaagaacccaggaaga

SEQ ID NO: 916192 - RNA, 19 nt, Artificial Sequence
  Description of Artificial Sequence: Synthetic oligonucleotide
uuucgauucgggugcugac

SEQ ID NO: 916193 - RNA, 19 nt, Artificial Sequence
  Description of Artificial Sequence: Synthetic oligonucleotide
gaagaacccaggaagaaau

SEQ ID NO: 916194 - RNA, 19 nt, Artificial Sequence
  Description of Artificial Sequence: Synthetic oligonucleotide
uucgauucgggugcugaca

SEQ ID NO: 916195 - RNA, 19 nt, Artificial Sequence
  Description of Artificial Sequence: Synthetic oligonucleotide
guccggagcaaaguacucg

SEQ ID NO: 916196 - RNA, 19 nt, Artificial Sequence
  Description of Artificial Sequence: Synthetic oligonucleotide
uccugucauaugucaggag

SEQ ID NO: 916197 - RNA, 19 nt, Artificial Sequence
  Description of Artificial Sequence: Synthetic oligonucleotide
agggaaucagcuccacacu

SEQ ID NO: 916198 - RNA, 19 nt, Artificial Sequence
  Description of Artificial Sequence: Synthetic oligonucleotide
gacccauacuuuccuuccc

SEQ ID NO: 916199 - RNA, 19 nt, Artificial Sequence
  Description of Artificial Sequence: Synthetic oligonucleotide
uagguugguagaaguccac

SEQ ID NO: 916200 - RNA, 19 nt, Artificial Sequence
  Description of Artificial Sequence: Synthetic oligonucleotide
uaacgccaguuagagcagg

SEQ ID NO: 916201 - RNA, 19 nt, Artificial Sequence
  Description of Artificial Sequence: Synthetic oligonucleotide
gagaugcgccuguguaacg

SEQ ID NO: 916202 - RNA, 19 nt, Artificial Sequence
  Description of Artificial Sequence: Synthetic oligonucleotide
cguaugcugagauuaaaac

SEQ ID NO: 916203 - RNA, 19 nt, Artificial Sequence
  Description of Artificial Sequence: Synthetic oligonucleotide
accgggcaacauuucggac

SEQ ID NO: 916204 - RNA, 19 nt, Artificial Sequence
  Description of Artificial Sequence: Synthetic oligonucleotide
cuuaaaucuccacaucacu

SEQ ID NO: 916205 - RNA, 19 nt, Artificial Sequence
  Description of Artificial Sequence: Synthetic oligonucleotide
acuggcgugaguucugauu

SEQ ID NO: 916206 - RNA, 19 nt, Artificial Sequence
  Description of Artificial Sequence: Synthetic oligonucleotide
agauugucuggcgaaucug

SEQ ID NO: 916207 - RNA, 19 nt, Artificial Sequence
  Description of Artificial Sequence: Synthetic oligonucleotide
gcuguguugcuccuugaag

SEQ ID NO: 916208 - RNA, 19 nt, Artificial Sequence
  Description of Artificial Sequence: Synthetic oligonucleotide
cacuguucaccugccauag

SEQ ID NO: 916209 - RNA, 19 nt, Artificial Sequence
  Description of Artificial Sequence: Synthetic oligonucleotide
ucaggcuaugagaguuuga

SEQ ID NO: 916210 - RNA, 19 nt, Artificial Sequence
  Description of Artificial Sequence: Synthetic oligonucleotide
cauaugucaggaggucugc

SEQ ID NO: 916211 - RNA, 19 nt, Artificial Sequence
  Description of Artificial Sequence: Synthetic oligonucleotide
gggaaucagcuccacacug

SEQ ID NO: 916212 - RNA, 19 nt, Artificial Sequence
  Description of Artificial Sequence: Synthetic oligonucleotide
cuguucaccugccauagaa

SEQ ID NO: 916213 - RNA, 19 nt, Artificial Sequence
  Description of Artificial Sequence: Synthetic oligonucleotide
auagggaccaucaggcuau

SEQ ID NO: 916214 - RNA, 19 nt, Artificial Sequence
  Description of Artificial Sequence: Synthetic oligonucleotide
uugucauggucuccgucau

SEQ ID NO: 916215 - RNA, 19 nt, Artificial Sequence
  Description of Artificial Sequence: Synthetic oligonucleotide
gggucguagaaauacgcca

SEQ ID NO: 916216 - RNA, 19 nt, Artificial Sequence
  Description of Artificial Sequence: Synthetic oligonucleotide
gaacucaaagagcccggga

SEQ ID NO: 916217 - RNA, 19 nt, Artificial Sequence
  Description of Artificial Sequence: Synthetic oligonucleotide
agacgucucguauguccag

SEQ ID NO: 916218 - RNA, 19 nt, Artificial Sequence
  Description of Artificial Sequence: Synthetic oligonucleotide
aucaggcuaugagaguuug

SEQ ID NO: 916219 - RNA, 19 nt, Artificial Sequence
  Description of Artificial Sequence: Synthetic oligonucleotide
guaacgggagcagaacuca

SEQ ID NO: 916220 - RNA, 19 nt, Artificial Sequence
  Description of Artificial Sequence: Synthetic oligonucleotide
guagguugguagaagucca

SEQ ID NO: 916221 - RNA, 19 nt, Artificial Sequence
  Description of Artificial Sequence: Synthetic oligonucleotide
auaguagcggccacucucu

SEQ ID NO: 916222 - RNA, 19 nt, Artificial Sequence
  Description of Artificial Sequence: Synthetic oligonucleotide
agcuccguaguggaaguug

SEQ ID NO: 916223 - RNA, 19 nt, Artificial Sequence
  Description of Artificial Sequence: Synthetic oligonucleotide
cacuauagggaaguuccuc

SEQ ID NO: 916224 - RNA, 19 nt, Artificial Sequence
  Description of Artificial Sequence: Synthetic oligonucleotide
agaguucguaaaagcacug

SEQ ID NO: 916225 - RNA, 19 nt, Artificial Sequence
  Description of Artificial Sequence: Synthetic oligonucleotide
uaguggaaguugcccacau

SEQ ID NO: 916226 - RNA, 19 nt, Artificial Sequence
  Description of Artificial Sequence: Synthetic oligonucleotide
gacgucucguauguccagc

SEQ ID NO: 916227 - RNA, 19 nt, Artificial Sequence
  Description of Artificial Sequence: Synthetic oligonucleotide
acucucugcaggaagucga

SEQ ID NO: 916228 - RNA, 19 nt, Artificial Sequence
  Description of Artificial Sequence: Synthetic oligonucleotide
gagacgucucguaugucca

SEQ ID NO: 916229 - RNA, 19 nt, Artificial Sequence
  Description of Artificial Sequence: Synthetic oligonucleotide
aucaugaaucuggacacua

SEQ ID NO: 916230 - RNA, 19 nt, Artificial Sequence
  Description of Artificial Sequence: Synthetic oligonucleotide
caucccuaaaagucucuga

SEQ ID NO: 916231 - RNA, 19 nt, Artificial Sequence
  Description of Artificial Sequence: Synthetic oligonucleotide
caacgccaggcgauggggc

SEQ ID NO: 916232 - RNA, 19 nt, Artificial Sequence
  Description of Artificial Sequence: Synthetic oligonucleotide
ggcgauggggcuucaucgg

SEQ ID NO: 916233 - RNA, 19 nt, Artificial Sequence
  Description of Artificial Sequence: Synthetic oligonucleotide
cagccuaaucgaucacagc

SEQ ID NO: 916234 - RNA, 19 nt, Artificial Sequence
  Description of Artificial Sequence: Synthetic oligonucleotide
uccagauacuggcgugagu

SEQ ID NO: 916235 - RNA, 19 nt, Artificial Sequence
  Description of Artificial Sequence: Synthetic oligonucleotide
ggucguagaaauacgccac

SEQ ID NO: 916236 - RNA, 19 nt, Artificial Sequence
  Description of Artificial Sequence: Synthetic oligonucleotide
cuccguaguggaaguugcc

SEQ ID NO: 916237 - RNA, 19 nt, Artificial Sequence
  Description of Artificial Sequence: Synthetic oligonucleotide
ucggacaguguagccacca

SEQ ID NO: 916238 - RNA, 19 nt, Artificial Sequence
  Description of Artificial Sequence: Synthetic oligonucleotide
ccauauuuguggaaugaca

SEQ ID NO: 916239 - RNA, 19 nt, Artificial Sequence
  Description of Artificial Sequence: Synthetic oligonucleotide
agucaacgccaggcgaugg

SEQ ID NO: 916240 - RNA, 19 nt, Artificial Sequence
  Description of Artificial Sequence: Synthetic oligonucleotide
auaacgccaguuagagcag

SEQ ID NO: 916241 - RNA, 19 nt, Artificial Sequence
  Description of Artificial Sequence: Synthetic oligonucleotide
acgucucguauguccagca

SEQ ID NO: 916242 - RNA, 19 nt, Artificial Sequence
  Description of Artificial Sequence: Synthetic oligonucleotide
ugcuuguaacucuggucau

SEQ ID NO: 916243 - RNA, 19 nt, Artificial Sequence
  Description of Artificial Sequence: Synthetic oligonucleotide
ggucaucgaugccaucccg

SEQ ID NO: 916244 - RNA, 19 nt, Artificial Sequence
  Description of Artificial Sequence: Synthetic oligonucleotide
uuguaacucuggucaucga

SEQ ID NO: 916245 - RNA, 19 nt, Artificial Sequence
  Description of Artificial Sequence: Synthetic oligonucleotide
ccgucauagaauucauuug

SEQ ID NO: 916246 - RNA, 19 nt, Artificial Sequence
  Description of Artificial Sequence: Synthetic oligonucleotide
uaccaauuacaaugucauu

SEQ ID NO: 916247 - RNA, 19 nt, Artificial Sequence
  Description of Artificial Sequence: Synthetic oligonucleotide
cagauacuggcgugaguuc

SEQ ID NO: 916248 - RNA, 19 nt, Artificial Sequence
  Description of Artificial Sequence: Synthetic oligonucleotide
ugccaucccguaagggcac

SEQ ID NO: 916249 - RNA, 19 nt, Artificial Sequence
  Description of Artificial Sequence: Synthetic oligonucleotide
cagugagguagaaggcuuc

SEQ ID NO: 916250 - RNA, 19 nt, Artificial Sequence
  Description of Artificial Sequence: Synthetic oligonucleotide
ggaagcggcacaugucaug

SEQ ID NO: 916251 - RNA, 19 nt, Artificial Sequence
  Description of Artificial Sequence: Synthetic oligonucleotide
aagcggcacaugucaugcu

SEQ ID NO: 916252 - RNA, 19 nt, Artificial Sequence
  Description of Artificial Sequence: Synthetic oligonucleotide
cccguaagggcacauugag

SEQ ID NO: 916253 - RNA, 19 nt, Artificial Sequence
  Description of Artificial Sequence: Synthetic oligonucleotide
agacuaggcuaugagucaa

SEQ ID NO: 916254 - RNA, 19 nt, Artificial Sequence
  Description of Artificial Sequence: Synthetic oligonucleotide
guaaggcuugaagacgauc

SEQ ID NO: 916255 - RNA, 19 nt, Artificial Sequence
  Description of Artificial Sequence: Synthetic oligonucleotide
caggcgauggggcuucauc

SEQ ID NO: 916256 - RNA, 19 nt, Artificial Sequence
  Description of Artificial Sequence: Synthetic oligonucleotide
aacgccaguuagagcagga

SEQ ID NO: 916257 - RNA, 19 nt, Artificial Sequence
  Description of Artificial Sequence: Synthetic oligonucleotide
guagagcacccgagggugg

SEQ ID NO: 916258 - RNA, 19 nt, Artificial Sequence
  Description of Artificial Sequence: Synthetic oligonucleotide
gagucaacgccaggcgaug

SEQ ID NO: 916259 - RNA, 19 nt, Artificial Sequence
  Description of Artificial Sequence: Synthetic oligonucleotide
ggagcgggauauuaaagcu

SEQ ID NO: 916260 - RNA, 19 nt, Artificial Sequence
  Description of Artificial Sequence: Synthetic oligonucleotide
auaugucaggaggucugca

SEQ ID NO: 916261 - RNA, 19 nt, Artificial Sequence
  Description of Artificial Sequence: Synthetic oligonucleotide
gaaauacgccacggucuug

SEQ ID NO: 916262 - RNA, 19 nt, Artificial Sequence
  Description of Artificial Sequence: Synthetic oligonucleotide
ccacguugaaggcauuaag

SEQ ID NO: 916263 - RNA, 19 nt, Artificial Sequence
  Description of Artificial Sequence: Synthetic oligonucleotide
accaugguggaugucgaua

SEQ ID NO: 916264 - RNA, 19 nt, Artificial Sequence
  Description of Artificial Sequence: Synthetic oligonucleotide
gcuaugagaguuugaggaa

SEQ ID NO: 916265 - RNA, 19 nt, Artificial Sequence
  Description of Artificial Sequence: Synthetic oligonucleotide
ggggucguagaaauacgcc

SEQ ID NO: 916266 - RNA, 19 nt, Artificial Sequence
  Description of Artificial Sequence: Synthetic oligonucleotide
accuuuguccuugucucau

SEQ ID NO: 916267 - RNA, 19 nt, Artificial Sequence
  Description of Artificial Sequence: Synthetic oligonucleotide
cuagggaaucagcuccaca

SEQ ID NO: 916268 - RNA, 19 nt, Artificial Sequence
  Description of Artificial Sequence: Synthetic oligonucleotide
guccugucauaugucagga

SEQ ID NO: 916269 - RNA, 19 nt, Artificial Sequence
  Description of Artificial Sequence: Synthetic oligonucleotide
ugaagacgaucaucuucuu

SEQ ID NO: 916270 - RNA, 19 nt, Artificial Sequence
  Description of Artificial Sequence: Synthetic oligonucleotide
gacuaggcuaugagucaac

SEQ ID NO: 916271 - RNA, 19 nt, Artificial Sequence
  Description of Artificial Sequence: Synthetic oligonucleotide
uccuugucucaucccuaau

SEQ ID NO: 916272 - RNA, 19 nt, Artificial Sequence
  Description of Artificial Sequence: Synthetic oligonucleotide
cagaggugacucuaguacu

SEQ ID NO: 916273 - RNA, 19 nt, Artificial Sequence
  Description of Artificial Sequence: Synthetic oligonucleotide
ggcuaugagucaacgccag

SEQ ID NO: 916274 - RNA, 19 nt, Artificial Sequence
  Description of Artificial Sequence: Synthetic oligonucleotide
augcaagacuaggcuauga

SEQ ID NO: 916275 - RNA, 19 nt, Artificial Sequence
  Description of Artificial Sequence: Synthetic oligonucleotide
guccagauacuggcgugag

SEQ ID NO: 916276 - RNA, 19 nt, Artificial Sequence
  Description of Artificial Sequence: Synthetic oligonucleotide
ggcucauuacccaucaugu

SEQ ID NO: 916277 - RNA, 19 nt, Artificial Sequence
  Description of Artificial Sequence: Synthetic oligonucleotide
cuucuaccagcagagacgu

SEQ ID NO: 916278 - RNA, 19 nt, Artificial Sequence
  Description of Artificial Sequence: Synthetic oligonucleotide
gcaagacuaggcuaugagu

SEQ ID NO: 916279 - RNA, 19 nt, Artificial Sequence
  Description of Artificial Sequence: Synthetic oligonucleotide
ggacauaacgccaguuaga

SEQ ID NO: 916280 - RNA, 19 nt, Artificial Sequence
  Description of Artificial Sequence: Synthetic oligonucleotide
acccgagggugguacuuga

SEQ ID NO: 916281 - RNA, 19 nt, Artificial Sequence
  Description of Artificial Sequence: Synthetic oligonucleotide
cggagcaaaguacucgaag

SEQ ID NO: 916282 - RNA, 19 nt, Artificial Sequence
  Description of Artificial Sequence: Synthetic oligonucleotide
gcuccguaguggaaguugc

SEQ ID NO: 916283 - RNA, 19 nt, Artificial Sequence
  Description of Artificial Sequence: Synthetic oligonucleotide
gcgugaguucugauuuucg

SEQ ID NO: 916284 - RNA, 19 nt, Artificial Sequence
  Description of Artificial Sequence: Synthetic oligonucleotide
cauuacccaucauguucca

SEQ ID NO: 916285 - RNA, 19 nt, Artificial Sequence
  Description of Artificial Sequence: Synthetic oligonucleotide
cauccaugcuguucuuaaa

SEQ ID NO: 916286 - RNA, 19 nt, Artificial Sequence
  Description of Artificial Sequence: Synthetic oligonucleotide
ccgggcaacauuucggaca

SEQ ID NO: 916287 - RNA, 19 nt, Artificial Sequence
  Description of Artificial Sequence: Synthetic oligonucleotide
gggguacccaguucaggac

SEQ ID NO: 916288 - RNA, 19 nt, Artificial Sequence
  Description of Artificial Sequence: Synthetic oligonucleotide
gucuggcgaaucuggucca

SEQ ID NO: 916289 - RNA, 19 nt, Artificial Sequence
  Description of Artificial Sequence: Synthetic oligonucleotide
gcagagacgucucguaugu

SEQ ID NO: 916290 - RNA, 19 nt, Artificial Sequence
  Description of Artificial Sequence: Synthetic oligonucleotide
gggacaucaugaaucugga

SEQ ID NO: 916291 - RNA, 19 nt, Artificial Sequence
  Description of Artificial Sequence: Synthetic oligonucleotide
caauaucacagaucuuguu

SEQ ID NO: 916292 - RNA, 19 nt, Artificial Sequence
  Description of Artificial Sequence: Synthetic oligonucleotide
guggucaaauggacauaac

SEQ ID NO: 916293 - RNA, 19 nt, Artificial Sequence
  Description of Artificial Sequence: Synthetic oligonucleotide
cccuaauagggaccaucag

SEQ ID NO: 916294 - RNA, 19 nt, Artificial Sequence
  Description of Artificial Sequence: Synthetic oligonucleotide
uggcgugaguucugauuuu

SEQ ID NO: 916295 - RNA, 19 nt, Artificial Sequence
  Description of Artificial Sequence: Synthetic oligonucleotide
aagggcacauugagacaau

SEQ ID NO: 916296 - RNA, 19 nt, Artificial Sequence
  Description of Artificial Sequence: Synthetic oligonucleotide
augaagcgugaaguccgga

SEQ ID NO: 916297 - RNA, 19 nt, Artificial Sequence
  Description of Artificial Sequence: Synthetic oligonucleotide
uucuaccagcagagacguc

SEQ ID NO: 916298 - RNA, 19 nt, Artificial Sequence
  Description of Artificial Sequence: Synthetic oligonucleotide
caucgaugccaucccguaa

SEQ ID NO: 916299 - RNA, 19 nt, Artificial Sequence
  Description of Artificial Sequence: Synthetic oligonucleotide
cucguaugcugagauuaaa

SEQ ID NO: 916300 - RNA, 19 nt, Artificial Sequence
  Description of Artificial Sequence: Synthetic oligonucleotide
cgggauauuaaagcucuug

SEQ ID NO: 916301 - RNA, 19 nt, Artificial Sequence
  Description of Artificial Sequence: Synthetic oligonucleotide
gcuucaucgggugcccagc

SEQ ID NO: 916302 - RNA, 19 nt, Artificial Sequence
  Description of Artificial Sequence: Synthetic oligonucleotide
cacccgagggugguacuug

SEQ ID NO: 916303 - RNA, 19 nt, Artificial Sequence
  Description of Artificial Sequence: Synthetic oligonucleotide
ggcgugaguucugauuuuc

SEQ ID NO: 916304 - RNA, 19 nt, Artificial Sequence
  Description of Artificial Sequence: Synthetic oligonucleotide
gccuguguaacgggagcag

SEQ ID NO: 916305 - RNA, 19 nt, Artificial Sequence
  Description of Artificial Sequence: Synthetic oligonucleotide
auucgggugcugacaucug

SEQ ID NO: 916306 - RNA, 19 nt, Artificial Sequence
  Description of Artificial Sequence: Synthetic oligonucleotide
gguccagauacuggcguga

SEQ ID NO: 916307 - RNA, 19 nt, Artificial Sequence
  Description of Artificial Sequence: Synthetic oligonucleotide
gauuuucgauucgggugcu

SEQ ID NO: 916308 - RNA, 19 nt, Artificial Sequence
  Description of Artificial Sequence: Synthetic oligonucleotide
ggugcaugguuuagcaucu

SEQ ID NO: 916309 - RNA, 19 nt, Artificial Sequence
  Description of Artificial Sequence: Synthetic oligonucleotide
ccuugucucaucccuaaua

SEQ ID NO: 916310 - RNA, 19 nt, Artificial Sequence
  Description of Artificial Sequence: Synthetic oligonucleotide
cacaucggggucguagaaa

SEQ ID NO: 916311 - RNA, 19 nt, Artificial Sequence
  Description of Artificial Sequence: Synthetic oligonucleotide
ccaggagcgggauauuaaa

SEQ ID NO: 916312 - RNA, 19 nt, Artificial Sequence
  Description of Artificial Sequence: Synthetic oligonucleotide
cucaucccuaaaagucucu

SEQ ID NO: 916313 - RNA, 19 nt, Artificial Sequence
  Description of Artificial Sequence: Synthetic oligonucleotide
agcgugaaguccggagcaa

SEQ ID NO: 916314 - RNA, 19 nt, Artificial Sequence
  Description of Artificial Sequence: Synthetic oligonucleotide
uccucacuaauggccucuu

SEQ ID NO: 916315 - RNA, 19 nt, Artificial Sequence
  Description of Artificial Sequence: Synthetic oligonucleotide
acccacguugaaggcauua

SEQ ID NO: 916316 - RNA, 19 nt, Artificial Sequence
  Description of Artificial Sequence: Synthetic oligonucleotide
ccuaaucgaucacagccua

SEQ ID NO: 916317 - RNA, 19 nt, Artificial Sequence
  Description of Artificial Sequence: Synthetic oligonucleotide
cagcaccgggcaacauuuc

SEQ ID NO: 916318 - RNA, 19 nt, Artificial Sequence
  Description of Artificial Sequence: Synthetic oligonucleotide
cgauaucaauguagagcac

SEQ ID NO: 916319 - RNA, 19 nt, Artificial Sequence
  Description of Artificial Sequence: Synthetic oligonucleotide
gcaaaguacucgaaguauu

SEQ ID NO: 916320 - RNA, 19 nt, Artificial Sequence
  Description of Artificial Sequence: Synthetic oligonucleotide
caauaguagcggccacucu

SEQ ID NO: 916321 - RNA, 19 nt, Artificial Sequence
  Description of Artificial Sequence: Synthetic oligonucleotide
ccguaagggcacauugaga

SEQ ID NO: 916322 - RNA, 19 nt, Artificial Sequence
  Description of Artificial Sequence: Synthetic oligonucleotide
ccucagaauggaagcggca

SEQ ID NO: 916323 - RNA, 19 nt, Artificial Sequence
  Description of Artificial Sequence: Synthetic oligonucleotide
gccuaaucgaucacagccu

SEQ ID NO: 916324 - RNA, 19 nt, Artificial Sequence
  Description of Artificial Sequence: Synthetic oligonucleotide
ugacccggucagugaggua

SEQ ID NO: 916325 - RNA, 19 nt, Artificial Sequence
  Description of Artificial Sequence: Synthetic oligonucleotide
ccagauacuggcgugaguu

SEQ ID NO: 916326 - RNA, 19 nt, Artificial Sequence
  Description of Artificial Sequence: Synthetic oligonucleotide
cagagacgucucguauguc

SEQ ID NO: 916327 - RNA, 19 nt, Artificial Sequence
  Description of Artificial Sequence: Synthetic oligonucleotide
agggaccaucaggcuauga

SEQ ID NO: 916328 - RNA, 19 nt, Artificial Sequence
  Description of Artificial Sequence: Synthetic oligonucleotide
caucggggucguagaaaua

SEQ ID NO: 916329 - RNA, 19 nt, Artificial Sequence
  Description of Artificial Sequence: Synthetic oligonucleotide
cagcagagacgucucguau

SEQ ID NO: 916330 - RNA, 19 nt, Artificial Sequence
  Description of Artificial Sequence: Synthetic oligonucleotide
acgaugcauguagguuggu

SEQ ID NO: 916331 - RNA, 19 nt, Artificial Sequence
  Description of Artificial Sequence: Synthetic oligonucleotide
acccggucagugagguaga

SEQ ID NO: 916332 - RNA, 19 nt, Artificial Sequence
  Description of Artificial Sequence: Synthetic oligonucleotide
caguggucaaauggacaua

SEQ ID NO: 916333 - RNA, 19 nt, Artificial Sequence
  Description of Artificial Sequence: Synthetic oligonucleotide
ccucguaugcugagauuaa

SEQ ID NO: 916334 - RNA, 19 nt, Artificial Sequence
  Description of Artificial Sequence: Synthetic oligonucleotide
ccaauugguuuauuagauu

SEQ ID NO: 916335 - RNA, 19 nt, Artificial Sequence
  Description of Artificial Sequence: Synthetic oligonucleotide
ccuagggaaucagcuccac

SEQ ID NO: 916336 - RNA, 19 nt, Artificial Sequence
  Description of Artificial Sequence: Synthetic oligonucleotide
gcucauuacccaucauguu

SEQ ID NO: 916337 - RNA, 19 nt, Artificial Sequence
  Description of Artificial Sequence: Synthetic oligonucleotide
ccucacuaauggccucuuc

SEQ ID NO: 916338 - RNA, 19 nt, Artificial Sequence
  Description of Artificial Sequence: Synthetic oligonucleotide
ccagcuccguaguggaagu

SEQ ID NO: 916339 - RNA, 19 nt, Artificial Sequence
  Description of Artificial Sequence: Synthetic oligonucleotide
cgauucgggugcugacauc

SEQ ID NO: 916340 - RNA, 19 nt, Artificial Sequence
  Description of Artificial Sequence: Synthetic oligonucleotide
ggaccucgcucuucugcau

SEQ ID NO: 916341 - RNA, 19 nt, Artificial Sequence
  Description of Artificial Sequence: Synthetic oligonucleotide
caucccguaagggcacauu

SEQ ID NO: 916342 - RNA, 19 nt, Artificial Sequence
  Description of Artificial Sequence: Synthetic oligonucleotide
gggugcccagcuccguagu

SEQ ID NO: 916343 - RNA, 19 nt, Artificial Sequence
  Description of Artificial Sequence: Synthetic oligonucleotide
cgaugcauguagguuggua

SEQ ID NO: 916344 - RNA, 19 nt, Artificial Sequence
  Description of Artificial Sequence: Synthetic oligonucleotide
caucccuaauagggaccau

SEQ ID NO: 916345 - RNA, 19 nt, Artificial Sequence
  Description of Artificial Sequence: Synthetic oligonucleotide
cagcuccguaguggaaguu

SEQ ID NO: 916346 - RNA, 19 nt, Artificial Sequence
  Description of Artificial Sequence: Synthetic oligonucleotide
gcgggauauuaaagcucuu

SEQ ID NO: 916347 - RNA, 19 nt, Artificial Sequence
  Description of Artificial Sequence: Synthetic oligonucleotide
cgccacggucuuggccaug

SEQ ID NO: 916348 - RNA, 19 nt, Artificial Sequence
  Description of Artificial Sequence: Synthetic oligonucleotide
uuaaacuuaagucugauaa

SEQ ID NO: 916349 - RNA, 19 nt, Artificial Sequence
  Description of Artificial Sequence: Synthetic oligonucleotide
gaaucggaaauucagaacg

SEQ ID NO: 916350 - RNA, 19 nt, Artificial Sequence
  Description of Artificial Sequence: Synthetic oligonucleotide
ucaguauuaaauugcaugg

SEQ ID NO: 916351 - RNA, 19 nt, Artificial Sequence
  Description of Artificial Sequence: Synthetic oligonucleotide
auuacaagcuuccagcugc

SEQ ID NO: 916352 - RNA, 19 nt, Artificial Sequence
  Description of Artificial Sequence: Synthetic oligonucleotide
aguauuaaauugcaugggc

SEQ ID NO: 916353 - RNA, 19 nt, Artificial Sequence
  Description of Artificial Sequence: Synthetic oligonucleotide
auggccauuguacacaucc

SEQ ID NO: 916354 - RNA, 19 nt, Artificial Sequence
  Description of Artificial Sequence: Synthetic oligonucleotide
uguagugaccaauaaaucc

SEQ ID NO: 916355 - RNA, 19 nt, Artificial Sequence
  Description of Artificial Sequence: Synthetic oligonucleotide
uaaaccuguaguuacgggg

SEQ ID NO: 916356 - RNA, 19 nt, Artificial Sequence
  Description of Artificial Sequence: Synthetic oligonucleotide
aacucuauaagcugguucu

SEQ ID NO: 916357 - RNA, 19 nt, Artificial Sequence
  Description of Artificial Sequence: Synthetic oligonucleotide
aauacagccacguagucau

SEQ ID NO: 916358 - RNA, 19 nt, Artificial Sequence
  Description of Artificial Sequence: Synthetic oligonucleotide
aacacaaaguugcuugaac

SEQ ID NO: 916359 - RNA, 19 nt, Artificial Sequence
  Description of Artificial Sequence: Synthetic oligonucleotide
uuuggcaugauuuugccac

SEQ ID NO: 916360 - RNA, 19 nt, Artificial Sequence
  Description of Artificial Sequence: Synthetic oligonucleotide
gucauaacgacacagguug

SEQ ID NO: 916361 - RNA, 19 nt, Artificial Sequence
  Description of Artificial Sequence: Synthetic oligonucleotide
ugauaauguaauuuagacc

SEQ ID NO: 916362 - RNA, 19 nt, Artificial Sequence
  Description of Artificial Sequence: Synthetic oligonucleotide
acacauguaaccccuaugg

SEQ ID NO: 916363 - RNA, 19 nt, Artificial Sequence
  Description of Artificial Sequence: Synthetic oligonucleotide
aauuuagaccucuucugag

SEQ ID NO: 916364 - RNA, 19 nt, Artificial Sequence
  Description of Artificial Sequence: Synthetic oligonucleotide
acauguaaccccuaugggg

SEQ ID NO: 916365 - RNA, 19 nt, Artificial Sequence
  Description of Artificial Sequence: Synthetic oligonucleotide
ugcuguuaaacuuaagucu

SEQ ID NO: 916366 - RNA, 19 nt, Artificial Sequence
  Description of Artificial Sequence: Synthetic oligonucleotide
aacaucuugacaaagcugu

SEQ ID NO: 916367 - RNA, 19 nt, Artificial Sequence
  Description of Artificial Sequence: Synthetic oligonucleotide
ucggaaaucauuuguacca

SEQ ID NO: 916368 - RNA, 19 nt, Artificial Sequence
  Description of Artificial Sequence: Synthetic oligonucleotide
cuacaagggauccaggucg

SEQ ID NO: 916369 - RNA, 19 nt, Artificial Sequence
  Description of Artificial Sequence: Synthetic oligonucleotide
cuaugaaucggaaauucag

SEQ ID NO: 916370 - RNA, 19 nt, Artificial Sequence
  Description of Artificial Sequence: Synthetic oligonucleotide
ugaacaauaauugcucucc

SEQ ID NO: 916371 - RNA, 19 nt, Artificial Sequence
  Description of Artificial Sequence: Synthetic oligonucleotide
ugcuugaacaauaauugcu

SEQ ID NO: 916372 - RNA, 19 nt, Artificial Sequence
  Description of Artificial Sequence: Synthetic oligonucleotide
uacauuugcuauucggagg

SEQ ID NO: 916373 - RNA, 19 nt, Artificial Sequence
  Description of Artificial Sequence: Synthetic oligonucleotide
aacaauaauugcucuccag

SEQ ID NO: 916374 - RNA, 19 nt, Artificial Sequence
  Description of Artificial Sequence: Synthetic oligonucleotide
aagguaaccaaauaucauu

SEQ ID NO: 916375 - RNA, 19 nt, Artificial Sequence
  Description of Artificial Sequence: Synthetic oligonucleotide
uugaagguaaccaaauauc

SEQ ID NO: 916376 - RNA, 19 nt, Artificial Sequence
  Description of Artificial Sequence: Synthetic oligonucleotide
uucuacguggggaagaaca

SEQ ID NO: 916377 - RNA, 19 nt, Artificial Sequence
  Description of Artificial Sequence: Synthetic oligonucleotide
ucaugugagaaguaacuug

SEQ ID NO: 916378 - RNA, 19 nt, Artificial Sequence
  Description of Artificial Sequence: Synthetic oligonucleotide
uaugggguaaucucgguca

SEQ ID NO: 916379 - RNA, 19 nt, Artificial Sequence
  Description of Artificial Sequence: Synthetic oligonucleotide
acaauaauugcucuccaga

SEQ ID NO: 916380 - RNA, 19 nt, Artificial Sequence
  Description of Artificial Sequence: Synthetic oligonucleotide
gagaacguggccaugaagc

SEQ ID NO: 916381 - RNA, 19 nt, Artificial Sequence
  Description of Artificial Sequence: Synthetic oligonucleotide
ugaccaauaaauccaucug

SEQ ID NO: 916382 - RNA, 19 nt, Artificial Sequence
  Description of Artificial Sequence: Synthetic oligonucleotide
acacgaucggcacaggugg

SEQ ID NO: 916383 - RNA, 19 nt, Artificial Sequence
  Description of Artificial Sequence: Synthetic oligonucleotide
ccagcuaacacaaaguugc

SEQ ID NO: 916384 - RNA, 19 nt, Artificial Sequence
  Description of Artificial Sequence: Synthetic oligonucleotide
caauaauugcucuccagag

SEQ ID NO: 916385 - RNA, 19 nt, Artificial Sequence
  Description of Artificial Sequence: Synthetic oligonucleotide
agaacguggccaugaagcc

SEQ ID NO: 916386 - RNA, 19 nt, Artificial Sequence
  Description of Artificial Sequence: Synthetic oligonucleotide
cacgaagucauaacgacac

SEQ ID NO: 916387 - RNA, 19 nt, Artificial Sequence
  Description of Artificial Sequence: Synthetic oligonucleotide
aacucaauucuagaauauc

SEQ ID NO: 916388 - RNA, 19 nt, Artificial Sequence
  Description of Artificial Sequence: Synthetic oligonucleotide
cuuuccgauucucuuagcg

SEQ ID NO: 916389 - RNA, 19 nt, Artificial Sequence
  Description of Artificial Sequence: Synthetic oligonucleotide
aggucuaugaaucggaaau

SEQ ID NO: 916390 - RNA, 19 nt, Artificial Sequence
  Description of Artificial Sequence: Synthetic oligonucleotide
aacggaguguagcugaagu

SEQ ID NO: 916391 - RNA, 19 nt, Artificial Sequence
  Description of Artificial Sequence: Synthetic oligonucleotide
gaagucauaacgacacagg

SEQ ID NO: 916392 - RNA, 19 nt, Artificial Sequence
  Description of Artificial Sequence: Synthetic oligonucleotide
ucuccgguaagaaugccgc

SEQ ID NO: 916393 - RNA, 19 nt, Artificial Sequence
  Description of Artificial Sequence: Synthetic oligonucleotide
caauucuagaauaucuuuc

SEQ ID NO: 916394 - RNA, 19 nt, Artificial Sequence
  Description of Artificial Sequence: Synthetic oligonucleotide
guaguuacggggaacgugg

SEQ ID NO: 916395 - RNA, 19 nt, Artificial Sequence
  Description of Artificial Sequence: Synthetic oligonucleotide
guacauuugcuauucggag

SEQ ID NO: 916396 - RNA, 19 nt, Artificial Sequence
  Description of Artificial Sequence: Synthetic oligonucleotide
ucggaaauucagaacgacc

SEQ ID NO: 916397 - RNA, 19 nt, Artificial Sequence
  Description of Artificial Sequence: Synthetic oligonucleotide
cauccacgaagucauaacg

SEQ ID NO: 916398 - RNA, 19 nt, Artificial Sequence
  Description of Artificial Sequence: Synthetic oligonucleotide
auaaauccagacucuccgg

SEQ ID NO: 916399 - RNA, 19 nt, Artificial Sequence
  Description of Artificial Sequence: Synthetic oligonucleotide
uauuaaauugcaugggcuu

SEQ ID NO: 916400 - RNA, 19 nt, Artificial Sequence
  Description of Artificial Sequence: Synthetic oligonucleotide
aauuuguagugaccaauaa

SEQ ID NO: 916401 - RNA, 19 nt, Artificial Sequence
  Description of Artificial Sequence: Synthetic oligonucleotide
cuuagcgucguugacuucg

SEQ ID NO: 916402 - RNA, 19 nt, Artificial Sequence
  Description of Artificial Sequence: Synthetic oligonucleotide
uuuagaccucuucugagaa

SEQ ID NO: 916403 - RNA, 19 nt, Artificial Sequence
  Description of Artificial Sequence: Synthetic oligonucleotide
ucuacacuuuugcugacac

SEQ ID NO: 916404 - RNA, 19 nt, Artificial Sequence
  Description of Artificial Sequence: Synthetic oligonucleotide
uacgaugugccacacacau

SEQ ID NO: 916405 - RNA, 19 nt, Artificial Sequence
  Description of Artificial Sequence: Synthetic oligonucleotide
ugugccacacacauguaac

SEQ ID NO: 916406 - RNA, 19 nt, Artificial Sequence
  Description of Artificial Sequence: Synthetic oligonucleotide
acauccacgaagucauaac

SEQ ID NO: 916407 - RNA, 19 nt, Artificial Sequence
  Description of Artificial Sequence: Synthetic oligonucleotide
caauaaauccagacucucc

SEQ ID NO: 916408 - RNA, 19 nt, Artificial Sequence
  Description of Artificial Sequence: Synthetic oligonucleotide
gcuaacacaaaguugcuug

SEQ ID NO: 916409 - RNA, 19 nt, Artificial Sequence
  Description of Artificial Sequence: Synthetic oligonucleotide
ucuacguggggaagaacag

SEQ ID NO: 916410 - RNA, 19 nt, Artificial Sequence
  Description of Artificial Sequence: Synthetic oligonucleotide
uaaaagagccggaagguuu

SEQ ID NO: 916411 - RNA, 19 nt, Artificial Sequence
  Description of Artificial Sequence: Synthetic oligonucleotide
guuaucacgcucaacauca

SEQ ID NO: 916412 - RNA, 19 nt, Artificial Sequence
  Description of Artificial Sequence: Synthetic oligonucleotide
uuugcuauucggaggguac

SEQ ID NO: 916413 - RNA, 19 nt, Artificial Sequence
  Description of Artificial Sequence: Synthetic oligonucleotide
uuuugaaggcaaucgcggc

SEQ ID NO: 916414 - RNA, 19 nt, Artificial Sequence
  Description of Artificial Sequence: Synthetic oligonucleotide
aaacgcuugaagguaacca

SEQ ID NO: 916415 - RNA, 19 nt, Artificial Sequence
  Description of Artificial Sequence: Synthetic oligonucleotide
aacgcuugaagguaaccaa

SEQ ID NO: 916416 - RNA, 19 nt, Artificial Sequence
  Description of Artificial Sequence: Synthetic oligonucleotide
ugaaucggaaauucagaac

SEQ ID NO: 916417 - RNA, 19 nt, Artificial Sequence
  Description of Artificial Sequence: Synthetic oligonucleotide
auauuacaagcuuccagcu

SEQ ID NO: 916418 - RNA, 19 nt, Artificial Sequence
  Description of Artificial Sequence: Synthetic oligonucleotide
auaacgacacagguugucg

SEQ ID NO: 916419 - RNA, 19 nt, Artificial Sequence
  Description of Artificial Sequence: Synthetic oligonucleotide
uauucggaggguacauucc

SEQ ID NO: 916420 - RNA, 19 nt, Artificial Sequence
  Description of Artificial Sequence: Synthetic oligonucleotide
caaacucccgccucgagug

SEQ ID NO: 916421 - RNA, 19 nt, Artificial Sequence
  Description of Artificial Sequence: Synthetic oligonucleotide
acaaccgucaugugagaag

SEQ ID NO: 916422 - RNA, 19 nt, Artificial Sequence
  Description of Artificial Sequence: Synthetic oligonucleotide
gggacugugauuuuccaag

SEQ ID NO: 916423 - RNA, 19 nt, Artificial Sequence
  Description of Artificial Sequence: Synthetic oligonucleotide
agaacagaucuuccagagg

SEQ ID NO: 916424 - RNA, 19 nt, Artificial Sequence
  Description of Artificial Sequence: Synthetic oligonucleotide
uccacgaagucauaacgac

SEQ ID NO: 916425 - RNA, 19 nt, Artificial Sequence
  Description of Artificial Sequence: Synthetic oligonucleotide
uucuucggggcuacgaugu

SEQ ID NO: 916426 - RNA, 19 nt, Artificial Sequence
  Description of Artificial Sequence: Synthetic oligonucleotide
aaugccgccacaugugaaa

SEQ ID NO: 916427 - RNA, 19 nt, Artificial Sequence
  Description of Artificial Sequence: Synthetic oligonucleotide
cuauaagcugguucuucgg

SEQ ID NO: 916428 - RNA, 19 nt, Artificial Sequence
  Description of Artificial Sequence: Synthetic oligonucleotide
uuuccgauucucuuagcgu

SEQ ID NO: 916429 - RNA, 19 nt, Artificial Sequence
  Description of Artificial Sequence: Synthetic oligonucleotide
ugcacuuuauaaaacccuu

SEQ ID NO: 916430 - RNA, 19 nt, Artificial Sequence
  Description of Artificial Sequence: Synthetic oligonucleotide
uuguagugaccaauaaauc

SEQ ID NO: 916431 - RNA, 19 nt, Artificial Sequence
  Description of Artificial Sequence: Synthetic oligonucleotide
acucaauucuagaauaucu

SEQ ID NO: 916432 - RNA, 19 nt, Artificial Sequence
  Description of Artificial Sequence: Synthetic oligonucleotide
gucgugaugacugugccag

SEQ ID NO: 916433 - RNA, 19 nt, Artificial Sequence
  Description of Artificial Sequence: Synthetic oligonucleotide
uuccgauucucuuagcguc

SEQ ID NO: 916434 - RNA, 19 nt, Artificial Sequence
  Description of Artificial Sequence: Synthetic oligonucleotide
accccuaugggguaaucuc

SEQ ID NO: 916435 - RNA, 19 nt, Artificial Sequence
  Description of Artificial Sequence: Synthetic oligonucleotide
gccaccguuaaauacagcc

SEQ ID NO: 916436 - RNA, 19 nt, Artificial Sequence
  Description of Artificial Sequence: Synthetic oligonucleotide
aguugcuugaacaauaauu

SEQ ID NO: 916437 - RNA, 19 nt, Artificial Sequence
  Description of Artificial Sequence: Synthetic oligonucleotide
uugaacaauaauugcucuc

SEQ ID NO: 916438 - RNA, 19 nt, Artificial Sequence
  Description of Artificial Sequence: Synthetic oligonucleotide
ugacaaagcuguuuggcau

SEQ ID NO: 916439 - RNA, 19 nt, Artificial Sequence
  Description of Artificial Sequence: Synthetic oligonucleotide
guagugaccaauaaaucca

SEQ ID NO: 916440 - RNA, 19 nt, Artificial Sequence
  Description of Artificial Sequence: Synthetic oligonucleotide
ucggaggguacauuccagg

SEQ ID NO: 916441 - RNA, 19 nt, Artificial Sequence
  Description of Artificial Sequence: Synthetic oligonucleotide
gauucucuuagcgucguug

SEQ ID NO: 916442 - RNA, 19 nt, Artificial Sequence
  Description of Artificial Sequence: Synthetic oligonucleotide
aguacauuugcuauucgga

SEQ ID NO: 916443 - RNA, 19 nt, Artificial Sequence
  Description of Artificial Sequence: Synthetic oligonucleotide
uccacgccuaauuuccccg

SEQ ID NO: 916444 - RNA, 19 nt, Artificial Sequence
  Description of Artificial Sequence: Synthetic oligonucleotide
cuauucggaggguacauuc

SEQ ID NO: 916445 - RNA, 19 nt, Artificial Sequence
  Description of Artificial Sequence: Synthetic oligonucleotide
caucggaaaucauuuguac

SEQ ID NO: 916446 - RNA, 19 nt, Artificial Sequence
  Description of Artificial Sequence: Synthetic oligonucleotide
acagaagcgcccgaugcgc

SEQ ID NO: 916447 - RNA, 19 nt, Artificial Sequence
  Description of Artificial Sequence: Synthetic oligonucleotide
uguaguuacggggaacgug

SEQ ID NO: 916448 - RNA, 19 nt, Artificial Sequence
  Description of Artificial Sequence: Synthetic oligonucleotide
caccguuaaauacagccac

SEQ ID NO: 916449 - RNA, 19 nt, Artificial Sequence
  Description of Artificial Sequence: Synthetic oligonucleotide
augaacggaguguagcuga

SEQ ID NO: 916450 - RNA, 19 nt, Artificial Sequence
  Description of Artificial Sequence: Synthetic oligonucleotide
cauccgucuacacuuuugc

SEQ ID NO: 916451 - RNA, 19 nt, Artificial Sequence
  Description of Artificial Sequence: Synthetic oligonucleotide
gacuccacgccuaauuucc

SEQ ID NO: 916452 - RNA, 19 nt, Artificial Sequence
  Description of Artificial Sequence: Synthetic oligonucleotide
uacguggggaagaacagau

SEQ ID NO: 916453 - RNA, 19 nt, Artificial Sequence
  Description of Artificial Sequence: Synthetic oligonucleotide
caguauuaaauugcauggg

SEQ ID NO: 916454 - RNA, 19 nt, Artificial Sequence
  Description of Artificial Sequence: Synthetic oligonucleotide
cacauguaaccccuauggg

SEQ ID NO: 916455 - RNA, 19 nt, Artificial Sequence
  Description of Artificial Sequence: Synthetic oligonucleotide
gaacaucuugacaaagcug

SEQ ID NO: 916456 - RNA, 19 nt, Artificial Sequence
  Description of Artificial Sequence: Synthetic oligonucleotide
uaacgacacagguugucgc

SEQ ID NO: 916457 - RNA, 19 nt, Artificial Sequence
  Description of Artificial Sequence: Synthetic oligonucleotide
cagaacgaccacuuugccc

SEQ ID NO: 916458 - RNA, 19 nt, Artificial Sequence
  Description of Artificial Sequence: Synthetic oligonucleotide
cucuccgguaagaaugccg

SEQ ID NO: 916459 - RNA, 19 nt, Artificial Sequence
  Description of Artificial Sequence: Synthetic oligonucleotide
aaggucuaugaaucggaaa

SEQ ID NO: 916460 - RNA, 19 nt, Artificial Sequence
  Description of Artificial Sequence: Synthetic oligonucleotide
acuguggcgugcaaacucc

SEQ ID NO: 916461 - RNA, 19 nt, Artificial Sequence
  Description of Artificial Sequence: Synthetic oligonucleotide
aucggaaauucagaacgac

SEQ ID NO: 916462 - RNA, 19 nt, Artificial Sequence
  Description of Artificial Sequence: Synthetic oligonucleotide
uguggcgugcaaacucccg

SEQ ID NO: 916463 - RNA, 19 nt, Artificial Sequence
  Description of Artificial Sequence: Synthetic oligonucleotide
uguauauuacaagcuucca

SEQ ID NO: 916464 - RNA, 19 nt, Artificial Sequence
  Description of Artificial Sequence: Synthetic oligonucleotide
uuggcaugauuuugccacg

SEQ ID NO: 916465 - RNA, 19 nt, Artificial Sequence
  Description of Artificial Sequence: Synthetic oligonucleotide
cagccacguagucauaucg

SEQ ID NO: 916466 - RNA, 19 nt, Artificial Sequence
  Description of Artificial Sequence: Synthetic oligonucleotide
cucaggcuaacacugcuug

SEQ ID NO: 916467 - RNA, 19 nt, Artificial Sequence
  Description of Artificial Sequence: Synthetic oligonucleotide
agaaugcucaguauuaaau

SEQ ID NO: 916468 - RNA, 19 nt, Artificial Sequence
  Description of Artificial Sequence: Synthetic oligonucleotide
gguaaucucggucaggcca

SEQ ID NO: 916469 - RNA, 19 nt, Artificial Sequence
  Description of Artificial Sequence: Synthetic oligonucleotide
aaucgcggccgacuccacg

SEQ ID NO: 916470 - RNA, 19 nt, Artificial Sequence
  Description of Artificial Sequence: Synthetic oligonucleotide
gcuacgaugugccacacac

SEQ ID NO: 916471 - RNA, 19 nt, Artificial Sequence
  Description of Artificial Sequence: Synthetic oligonucleotide
ucggaaugugccacagaag

SEQ ID NO: 916472 - RNA, 19 nt, Artificial Sequence
  Description of Artificial Sequence: Synthetic oligonucleotide
uggccggcagcucacugcg

SEQ ID NO: 916473 - RNA, 19 nt, Artificial Sequence
  Description of Artificial Sequence: Synthetic oligonucleotide
ucucuuagcgucguugacu

SEQ ID NO: 916474 - RNA, 19 nt, Artificial Sequence
  Description of Artificial Sequence: Synthetic oligonucleotide
aggcuaacacugcuuguuc

SEQ ID NO: 916475 - RNA, 19 nt, Artificial Sequence
  Description of Artificial Sequence: Synthetic oligonucleotide
uucggaggguacauuccag

SEQ ID NO: 916476 - RNA, 19 nt, Artificial Sequence
  Description of Artificial Sequence: Synthetic oligonucleotide
guaaccaaauaucauuaua

SEQ ID NO: 916477 - RNA, 19 nt, Artificial Sequence
  Description of Artificial Sequence: Synthetic oligonucleotide
gugaccgucgugaugacug

SEQ ID NO: 916478 - RNA, 19 nt, Artificial Sequence
  Description of Artificial Sequence: Synthetic oligonucleotide
cuucgccaccguuaaauac

SEQ ID NO: 916479 - RNA, 19 nt, Artificial Sequence
  Description of Artificial Sequence: Synthetic oligonucleotide
gaugaacggaguguagcug

SEQ ID NO: 916480 - RNA, 19 nt, Artificial Sequence
  Description of Artificial Sequence: Synthetic oligonucleotide
gucggaaugugccacagaa

SEQ ID NO: 916481 - RNA, 19 nt, Artificial Sequence
  Description of Artificial Sequence: Synthetic oligonucleotide
aaucggaaauucagaacga

SEQ ID NO: 916482 - RNA, 19 nt, Artificial Sequence
  Description of Artificial Sequence: Synthetic oligonucleotide
gacacgaucggcacaggug

SEQ ID NO: 916483 - RNA, 19 nt, Artificial Sequence
  Description of Artificial Sequence: Synthetic oligonucleotide
aguaguuaucacgcucaac

SEQ ID NO: 916484 - RNA, 19 nt, Artificial Sequence
  Description of Artificial Sequence: Synthetic oligonucleotide
auaauguaauuuagaccuc

SEQ ID NO: 916485 - RNA, 19 nt, Artificial Sequence
  Description of Artificial Sequence: Synthetic oligonucleotide
uuacaagcuuccagcugcc

SEQ ID NO: 916486 - RNA, 19 nt, Artificial Sequence
  Description of Artificial Sequence: Synthetic oligonucleotide
aaguugcuugaacaauaau

SEQ ID NO: 916487 - RNA, 19 nt, Artificial Sequence
  Description of Artificial Sequence: Synthetic oligonucleotide
uagugaccaauaaauccau

SEQ ID NO: 916488 - RNA, 19 nt, Artificial Sequence
  Description of Artificial Sequence: Synthetic oligonucleotide
uguuaaacuuaagucugau

SEQ ID NO: 916489 - RNA, 19 nt, Artificial Sequence
  Description of Artificial Sequence: Synthetic oligonucleotide
ucauaucggcaguaguuau

SEQ ID NO: 916490 - RNA, 19 nt, Artificial Sequence
  Description of Artificial Sequence: Synthetic oligonucleotide
gaugcaggcgcucgcgccc

SEQ ID NO: 916491 - RNA, 19 nt, Artificial Sequence
  Description of Artificial Sequence: Synthetic oligonucleotide
agaaugccgccacauguga

SEQ ID NO: 916492 - RNA, 19 nt, Artificial Sequence
  Description of Artificial Sequence: Synthetic oligonucleotide
cauguaaccccuauggggu

SEQ ID NO: 916493 - RNA, 19 nt, Artificial Sequence
  Description of Artificial Sequence: Synthetic oligonucleotide
aagugcgccgcggacggcg

SEQ ID NO: 916494 - RNA, 19 nt, Artificial Sequence
  Description of Artificial Sequence: Synthetic oligonucleotide
uccgguaagaaugccgcca

SEQ ID NO: 916495 - RNA, 19 nt, Artificial Sequence
  Description of Artificial Sequence: Synthetic oligonucleotide
gaaguaacuuggcuccauc

SEQ ID NO: 916496 - RNA, 19 nt, Artificial Sequence
  Description of Artificial Sequence: Synthetic oligonucleotide
acggaguguagcugaagug

SEQ ID NO: 916497 - RNA, 19 nt, Artificial Sequence
  Description of Artificial Sequence: Synthetic oligonucleotide
cauaucggcaguaguuauc

SEQ ID NO: 916498 - RNA, 19 nt, Artificial Sequence
  Description of Artificial Sequence: Synthetic oligonucleotide
accgucgugaugacugugc

SEQ ID NO: 916499 - RNA, 19 nt, Artificial Sequence
  Description of Artificial Sequence: Synthetic oligonucleotide
acagccacguagucauauc

SEQ ID NO: 916500 - RNA, 19 nt, Artificial Sequence
  Description of Artificial Sequence: Synthetic oligonucleotide
uuaaaagagccggaagguu

SEQ ID NO: 916501 - RNA, 19 nt, Artificial Sequence
  Description of Artificial Sequence: Synthetic oligonucleotide
agcgucguugacuucgcca

SEQ ID NO: 916502 - RNA, 19 nt, Artificial Sequence
  Description of Artificial Sequence: Synthetic oligonucleotide
cacaugugaaaacaggucu

SEQ ID NO: 916503 - RNA, 19 nt, Artificial Sequence
  Description of Artificial Sequence: Synthetic oligonucleotide
gucuaugaaucggaaauuc

SEQ ID NO: 916504 - RNA, 19 nt, Artificial Sequence
  Description of Artificial Sequence: Synthetic oligonucleotide
uuagcgucguugacuucgc

SEQ ID NO: 916505 - RNA, 19 nt, Artificial Sequence
  Description of Artificial Sequence: Synthetic oligonucleotide
cuaugggguaaucucgguc

SEQ ID NO: 916506 - RNA, 19 nt, Artificial Sequence
  Description of Artificial Sequence: Synthetic oligonucleotide
uaucacgcucaacaucaaa

SEQ ID NO: 916507 - RNA, 19 nt, Artificial Sequence
  Description of Artificial Sequence: Synthetic oligonucleotide
guucuucggggcuacgaug

SEQ ID NO: 916508 - RNA, 19 nt, Artificial Sequence
  Description of Artificial Sequence: Synthetic oligonucleotide
uuuucuacguggggaagaa

SEQ ID NO: 916509 - RNA, 19 nt, Artificial Sequence
  Description of Artificial Sequence: Synthetic oligonucleotide
aaggcaaucgcggccgacu

SEQ ID NO: 916510 - RNA, 19 nt, Artificial Sequence
  Description of Artificial Sequence: Synthetic oligonucleotide
augugccacacacauguaa

SEQ ID NO: 916511 - RNA, 19 nt, Artificial Sequence
  Description of Artificial Sequence: Synthetic oligonucleotide
agaucuuccagaggcgaug

SEQ ID NO: 916512 - RNA, 19 nt, Artificial Sequence
  Description of Artificial Sequence: Synthetic oligonucleotide
acugcggcaucccgcucgc

SEQ ID NO: 916513 - RNA, 19 nt, Artificial Sequence
  Description of Artificial Sequence: Synthetic oligonucleotide
acugucaccacaguacuuu

SEQ ID NO: 916514 - RNA, 19 nt, Artificial Sequence
  Description of Artificial Sequence: Synthetic oligonucleotide
aaccccuaugggguaaucu

SEQ ID NO: 916515 - RNA, 19 nt, Artificial Sequence
  Description of Artificial Sequence: Synthetic oligonucleotide
ggcuuuugaaggcaaucgc

SEQ ID NO: 916516 - RNA, 19 nt, Artificial Sequence
  Description of Artificial Sequence: Synthetic oligonucleotide
acgccuaauuuccccgggg

SEQ ID NO: 916517 - RNA, 19 nt, Artificial Sequence
  Description of Artificial Sequence: Synthetic oligonucleotide
accguuaaauacagccacg

SEQ ID NO: 916518 - RNA, 19 nt, Artificial Sequence
  Description of Artificial Sequence: Synthetic oligonucleotide
cacacauguaaccccuaug

SEQ ID NO: 916519 - RNA, 19 nt, Artificial Sequence
  Description of Artificial Sequence: Synthetic oligonucleotide
cacugcggcaucccgcucg

SEQ ID NO: 916520 - RNA, 19 nt, Artificial Sequence
  Description of Artificial Sequence: Synthetic oligonucleotide
ucggucaggccaguugggg

SEQ ID NO: 916521 - RNA, 19 nt, Artificial Sequence
  Description of Artificial Sequence: Synthetic oligonucleotide
guauuaaauugcaugggcu

SEQ ID NO: 916522 - RNA, 19 nt, Artificial Sequence
  Description of Artificial Sequence: Synthetic oligonucleotide
ucgagugaccgucgugaug

SEQ ID NO: 916523 - RNA, 19 nt, Artificial Sequence
  Description of Artificial Sequence: Synthetic oligonucleotide
gcaugauuuugccacgccc

SEQ ID NO: 916524 - RNA, 19 nt, Artificial Sequence
  Description of Artificial Sequence: Synthetic oligonucleotide
augggguaaucucggucag

SEQ ID NO: 916525 - RNA, 19 nt, Artificial Sequence
  Description of Artificial Sequence: Synthetic oligonucleotide
aguuacggggaacguggug

SEQ ID NO: 916526 - RNA, 19 nt, Artificial Sequence
  Description of Artificial Sequence: Synthetic oligonucleotide
gcuugaacaauaauugcuc

SEQ ID NO: 916527 - RNA, 19 nt, Artificial Sequence
  Description of Artificial Sequence: Synthetic oligonucleotide
guuaaacuuaagucugaua

SEQ ID NO: 916528 - RNA, 19 nt, Artificial Sequence
  Description of Artificial Sequence: Synthetic oligonucleotide
uccaggucggaaugugcca

SEQ ID NO: 916529 - RNA, 19 nt, Artificial Sequence
  Description of Artificial Sequence: Synthetic oligonucleotide
agccacguagucauaucgg

SEQ ID NO: 916530 - RNA, 19 nt, Artificial Sequence
  Description of Artificial Sequence: Synthetic oligonucleotide
agguugucgcucucaaggu

SEQ ID NO: 916531 - RNA, 19 nt, Artificial Sequence
  Description of Artificial Sequence: Synthetic oligonucleotide
aggcaaucgcggccgacuc

SEQ ID NO: 916532 - RNA, 19 nt, Artificial Sequence
  Description of Artificial Sequence: Synthetic oligonucleotide
agacacgaucggcacaggu

SEQ ID NO: 916533 - RNA, 19 nt, Artificial Sequence
  Description of Artificial Sequence: Synthetic oligonucleotide
acagguugucgcucucaag

SEQ ID NO: 916534 - RNA, 19 nt, Artificial Sequence
  Description of Artificial Sequence: Synthetic oligonucleotide
cuccacgccuaauuucccc

SEQ ID NO: 916535 - RNA, 19 nt, Artificial Sequence
  Description of Artificial Sequence: Synthetic oligonucleotide
cauaacgacacagguuguc

SEQ ID NO: 916536 - RNA, 19 nt, Artificial Sequence
  Description of Artificial Sequence: Synthetic oligonucleotide
ugaacggaguguagcugaa

SEQ ID NO: 916537 - RNA, 19 nt, Artificial Sequence
  Description of Artificial Sequence: Synthetic oligonucleotide
aaccuguaguuacggggaa

SEQ ID NO: 916538 - RNA, 19 nt, Artificial Sequence
  Description of Artificial Sequence: Synthetic oligonucleotide
cuugaacaauaauugcucu

SEQ ID NO: 916539 - RNA, 19 nt, Artificial Sequence
  Description of Artificial Sequence: Synthetic oligonucleotide
agugaccaauaaauccauc

SEQ ID NO: 916540 - RNA, 19 nt, Artificial Sequence
  Description of Artificial Sequence: Synthetic oligonucleotide
ugguaacaggcacggcugu

SEQ ID NO: 916541 - RNA, 19 nt, Artificial Sequence
  Description of Artificial Sequence: Synthetic oligonucleotide
acggcuguaguugugggaa

SEQ ID NO: 916542 - RNA, 19 nt, Artificial Sequence
  Description of Artificial Sequence: Synthetic oligonucleotide
uugcuauucggaggguaca

SEQ ID NO: 916543 - RNA, 19 nt, Artificial Sequence
  Description of Artificial Sequence: Synthetic oligonucleotide
aagcgcccgaugcgcuggc

SEQ ID NO: 916544 - RNA, 19 nt, Artificial Sequence
  Description of Artificial Sequence: Synthetic oligonucleotide
gggguaaucucggucaggc

SEQ ID NO: 916545 - RNA, 19 nt, Artificial Sequence
  Description of Artificial Sequence: Synthetic oligonucleotide
aguccccauccgucuacac

SEQ ID NO: 916546 - RNA, 19 nt, Artificial Sequence
  Description of Artificial Sequence: Synthetic oligonucleotide
gccacguagucauaucggc

SEQ ID NO: 916547 - RNA, 19 nt, Artificial Sequence
  Description of Artificial Sequence: Synthetic oligonucleotide
acgaucggcacagguggac

SEQ ID NO: 916548 - RNA, 19 nt, Artificial Sequence
  Description of Artificial Sequence: Synthetic oligonucleotide
ugcggcaucccgcucgcuc

SEQ ID NO: 916549 - RNA, 19 nt, Artificial Sequence
  Description of Artificial Sequence: Synthetic oligonucleotide
acgacacagguugucgcuc

SEQ ID NO: 916550 - RNA, 19 nt, Artificial Sequence
  Description of Artificial Sequence: Synthetic oligonucleotide
uuaucacgcucaacaucaa

SEQ ID NO: 916551 - RNA, 19 nt, Artificial Sequence
  Description of Artificial Sequence: Synthetic oligonucleotide
cacgccuaauuuccccggg

SEQ ID NO: 916552 - RNA, 19 nt, Artificial Sequence
  Description of Artificial Sequence: Synthetic oligonucleotide
aaacucccgccucgaguga

SEQ ID NO: 916553 - RNA, 19 nt, Artificial Sequence
  Description of Artificial Sequence: Synthetic oligonucleotide
uggcaugauuuugccacgc

SEQ ID NO: 916554 - RNA, 19 nt, Artificial Sequence
  Description of Artificial Sequence: Synthetic oligonucleotide
ugggguaaucucggucagg

SEQ ID NO: 916555 - RNA, 19 nt, Artificial Sequence
  Description of Artificial Sequence: Synthetic oligonucleotide
cagguugcccucccuguag

SEQ ID NO: 916556 - RNA, 19 nt, Artificial Sequence
  Description of Artificial Sequence: Synthetic oligonucleotide
accgucaugugagaaguaa

SEQ ID NO: 916557 - RNA, 19 nt, Artificial Sequence
  Description of Artificial Sequence: Synthetic oligonucleotide
gaguguucucagauaucug

SEQ ID NO: 916558 - RNA, 19 nt, Artificial Sequence
  Description of Artificial Sequence: Synthetic oligonucleotide
agguggacugucaccacag

SEQ ID NO: 916559 - RNA, 19 nt, Artificial Sequence
  Description of Artificial Sequence: Synthetic oligonucleotide
uaguuacggggaacguggu

SEQ ID NO: 916560 - RNA, 19 nt, Artificial Sequence
  Description of Artificial Sequence: Synthetic oligonucleotide
cucggucaggccaguuggg

SEQ ID NO: 916561 - RNA, 19 nt, Artificial Sequence
  Description of Artificial Sequence: Synthetic oligonucleotide
ucgcucggagcccgcagcc

SEQ ID NO: 916562 - RNA, 19 nt, Artificial Sequence
  Description of Artificial Sequence: Synthetic oligonucleotide
cuucggggcuacgaugugc

SEQ ID NO: 916563 - RNA, 19 nt, Artificial Sequence
  Description of Artificial Sequence: Synthetic oligonucleotide
ccccuaugggguaaucucg

SEQ ID NO: 916564 - RNA, 19 nt, Artificial Sequence
  Description of Artificial Sequence: Synthetic oligonucleotide
ucuucggggcuacgaugug

SEQ ID NO: 916565 - RNA, 19 nt, Artificial Sequence
  Description of Artificial Sequence: Synthetic oligonucleotide
acgaagucauaacgacaca

SEQ ID NO: 916566 - RNA, 19 nt, Artificial Sequence
  Description of Artificial Sequence: Synthetic oligonucleotide
caaggcguccuccacaaua

SEQ ID NO: 916567 - RNA, 19 nt, Artificial Sequence
  Description of Artificial Sequence: Synthetic oligonucleotide
gaacguggccaugaagcca

SEQ ID NO: 916568 - RNA, 19 nt, Artificial Sequence
  Description of Artificial Sequence: Synthetic oligonucleotide
gaacggaguguagcugaag

SEQ ID NO: 916569 - RNA, 19 nt, Artificial Sequence
  Description of Artificial Sequence: Synthetic oligonucleotide
uguaaccccuaugggguaa

SEQ ID NO: 916570 - RNA, 19 nt, Artificial Sequence
  Description of Artificial Sequence: Synthetic oligonucleotide
uaccaagugcgccgcggac

SEQ ID NO: 916571 - RNA, 19 nt, Artificial Sequence
  Description of Artificial Sequence: Synthetic oligonucleotide
cagaaugcucaguauuaaa

SEQ ID NO: 916572 - RNA, 19 nt, Artificial Sequence
  Description of Artificial Sequence: Synthetic oligonucleotide
cccuaugggguaaucucgg

SEQ ID NO: 916573 - RNA, 19 nt, Artificial Sequence
  Description of Artificial Sequence: Synthetic oligonucleotide
cuccgguaagaaugccgcc

SEQ ID NO: 916574 - RNA, 19 nt, Artificial Sequence
  Description of Artificial Sequence: Synthetic oligonucleotide
acuucgccaccguuaaaua

SEQ ID NO: 916575 - RNA, 19 nt, Artificial Sequence
  Description of Artificial Sequence: Synthetic oligonucleotide
caucccgcucgcucggagc

SEQ ID NO: 916576 - RNA, 19 nt, Artificial Sequence
  Description of Artificial Sequence: Synthetic oligonucleotide
uccagacucuccgguaaga

SEQ ID NO: 916577 - RNA, 19 nt, Artificial Sequence
  Description of Artificial Sequence: Synthetic oligonucleotide
ugcuauucggaggguacau

SEQ ID NO: 916578 - RNA, 19 nt, Artificial Sequence
  Description of Artificial Sequence: Synthetic oligonucleotide
cuguggcgugcaaacuccc

SEQ ID NO: 916579 - RNA, 19 nt, Artificial Sequence
  Description of Artificial Sequence: Synthetic oligonucleotide
agcgggaugcaggcgcucg

SEQ ID NO: 916580 - RNA, 19 nt, Artificial Sequence
  Description of Artificial Sequence: Synthetic oligonucleotide
caaggucuaugaaucggaa

SEQ ID NO: 916581 - RNA, 19 nt, Artificial Sequence
  Description of Artificial Sequence: Synthetic oligonucleotide
ggaguguucucagauaucu

SEQ ID NO: 916582 - RNA, 19 nt, Artificial Sequence
  Description of Artificial Sequence: Synthetic oligonucleotide
agccagguaccaagugcgc

SEQ ID NO: 916583 - RNA, 19 nt, Artificial Sequence
  Description of Artificial Sequence: Synthetic oligonucleotide
cucgcucggagcccgcagc

SEQ ID NO: 916584 - RNA, 19 nt, Artificial Sequence
  Description of Artificial Sequence: Synthetic oligonucleotide
gguaccaagugcgccgcgg

SEQ ID NO: 916585 - RNA, 19 nt, Artificial Sequence
  Description of Artificial Sequence: Synthetic oligonucleotide
cgaagucauaacgacacag

SEQ ID NO: 916586 - RNA, 19 nt, Artificial Sequence
  Description of Artificial Sequence: Synthetic oligonucleotide
ugaccgucgugaugacugu

SEQ ID NO: 916587 - RNA, 19 nt, Artificial Sequence
  Description of Artificial Sequence: Synthetic oligonucleotide
cacuuuauaaaacccuuuu

SEQ ID NO: 916588 - RNA, 19 nt, Artificial Sequence
  Description of Artificial Sequence: Synthetic oligonucleotide
guugucgcucucaaggucu

SEQ ID NO: 916589 - RNA, 19 nt, Artificial Sequence
  Description of Artificial Sequence: Synthetic oligonucleotide
gcgaugaacggaguguagc

SEQ ID NO: 916590 - RNA, 19 nt, Artificial Sequence
  Description of Artificial Sequence: Synthetic oligonucleotide
gagcaaacgcuugaaggua

SEQ ID NO: 916591 - RNA, 19 nt, Artificial Sequence
  Description of Artificial Sequence: Synthetic oligonucleotide
gaagcgggcacugccugca

SEQ ID NO: 916592 - RNA, 19 nt, Artificial Sequence
  Description of Artificial Sequence: Synthetic oligonucleotide
agaaguaacuuggcuccau

SEQ ID NO: 916593 - RNA, 19 nt, Artificial Sequence
  Description of Artificial Sequence: Synthetic oligonucleotide
agcaaacgcuugaagguaa

SEQ ID NO: 916594 - RNA, 19 nt, Artificial Sequence
  Description of Artificial Sequence: Synthetic oligonucleotide
ggcaucggaaaucauuugu

SEQ ID NO: 916595 - RNA, 19 nt, Artificial Sequence
  Description of Artificial Sequence: Synthetic oligonucleotide
uuucuacguggggaagaac

SEQ ID NO: 916596 - RNA, 19 nt, Artificial Sequence
  Description of Artificial Sequence: Synthetic oligonucleotide
ccgucuacacuuuugcuga

SEQ ID NO: 916597 - RNA, 19 nt, Artificial Sequence
  Description of Artificial Sequence: Synthetic oligonucleotide
cacuggcuacaagggaucc

SEQ ID NO: 916598 - RNA, 19 nt, Artificial Sequence
  Description of Artificial Sequence: Synthetic oligonucleotide
agcuaacacaaaguugcuu

SEQ ID NO: 916599 - RNA, 19 nt, Artificial Sequence
  Description of Artificial Sequence: Synthetic oligonucleotide
aggucggaaugugccacag

SEQ ID NO: 916600 - RNA, 19 nt, Artificial Sequence
  Description of Artificial Sequence: Synthetic oligonucleotide
cuacacuuuugcugacaca

SEQ ID NO: 916601 - RNA, 19 nt, Artificial Sequence
  Description of Artificial Sequence: Synthetic oligonucleotide
ucgugaugacugugccagc

SEQ ID NO: 916602 - RNA, 19 nt, Artificial Sequence
  Description of Artificial Sequence: Synthetic oligonucleotide
ccaagugcgccgcggacgg

SEQ ID NO: 916603 - RNA, 19 nt, Artificial Sequence
  Description of Artificial Sequence: Synthetic oligonucleotide
acacaaccgucaugugaga

SEQ ID NO: 916604 - RNA, 19 nt, Artificial Sequence
  Description of Artificial Sequence: Synthetic oligonucleotide
ggcaugauuuugccacgcc

SEQ ID NO: 916605 - RNA, 19 nt, Artificial Sequence
  Description of Artificial Sequence: Synthetic oligonucleotide
uagcgucguugacuucgcc

SEQ ID NO: 916606 - RNA, 19 nt, Artificial Sequence
  Description of Artificial Sequence: Synthetic oligonucleotide
accucagagcaaacgcuug

SEQ ID NO: 916607 - RNA, 19 nt, Artificial Sequence
  Description of Artificial Sequence: Synthetic oligonucleotide
guaccaagugcgccgcgga

SEQ ID NO: 916608 - RNA, 19 nt, Artificial Sequence
  Description of Artificial Sequence: Synthetic oligonucleotide
gguugucgcucucaagguc

SEQ ID NO: 916609 - RNA, 19 nt, Artificial Sequence
  Description of Artificial Sequence: Synthetic oligonucleotide
agguaccaagugcgccgcg

SEQ ID NO: 916610 - RNA, 19 nt, Artificial Sequence
  Description of Artificial Sequence: Synthetic oligonucleotide
cuacgaugugccacacaca

SEQ ID NO: 916611 - RNA, 19 nt, Artificial Sequence
  Description of Artificial Sequence: Synthetic oligonucleotide
cagguaccaagugcgccgc

SEQ ID NO: 916612 - RNA, 19 nt, Artificial Sequence
  Description of Artificial Sequence: Synthetic oligonucleotide
gagaaguaacuuggcucca

SEQ ID NO: 916613 - RNA, 19 nt, Artificial Sequence
  Description of Artificial Sequence: Synthetic oligonucleotide
cgccacaugugaaaacagg

SEQ ID NO: 916614 - RNA, 19 nt, Artificial Sequence
  Description of Artificial Sequence: Synthetic oligonucleotide
gacgcgcccuggcagccgc

SEQ ID NO: 916615 - RNA, 19 nt, Artificial Sequence
  Description of Artificial Sequence: Synthetic oligonucleotide
uugucgcucucaaggucua

SEQ ID NO: 916616 - RNA, 19 nt, Artificial Sequence
  Description of Artificial Sequence: Synthetic oligonucleotide
guuggcaucggaaaucauu

SEQ ID NO: 916617 - RNA, 19 nt, Artificial Sequence
  Description of Artificial Sequence: Synthetic oligonucleotide
acucccgccucgagugacc

SEQ ID NO: 916618 - RNA, 19 nt, Artificial Sequence
  Description of Artificial Sequence: Synthetic oligonucleotide
ccgucaugugagaaguaac

SEQ ID NO: 916619 - RNA, 19 nt, Artificial Sequence
  Description of Artificial Sequence: Synthetic oligonucleotide
caacucaauucuagaauau

SEQ ID NO: 916620 - RNA, 19 nt, Artificial Sequence
  Description of Artificial Sequence: Synthetic oligonucleotide
cgugcaaacucccgccucg

SEQ ID NO: 916621 - RNA, 19 nt, Artificial Sequence
  Description of Artificial Sequence: Synthetic oligonucleotide
caaccgucaugugagaagu

SEQ ID NO: 916622 - RNA, 19 nt, Artificial Sequence
  Description of Artificial Sequence: Synthetic oligonucleotide
aagccacucccagcugugu

SEQ ID NO: 916623 - RNA, 19 nt, Artificial Sequence
  Description of Artificial Sequence: Synthetic oligonucleotide
cucagacacgaucggcaca

SEQ ID NO: 916624 - RNA, 19 nt, Artificial Sequence
  Description of Artificial Sequence: Synthetic oligonucleotide
cucaaacuuuaacucuaua

SEQ ID NO: 916625 - RNA, 19 nt, Artificial Sequence
  Description of Artificial Sequence: Synthetic oligonucleotide
ucuuagcgucguugacuuc

SEQ ID NO: 916626 - RNA, 19 nt, Artificial Sequence
  Description of Artificial Sequence: Synthetic oligonucleotide
agggcguucaugggcuucu

SEQ ID NO: 916627 - RNA, 19 nt, Artificial Sequence
  Description of Artificial Sequence: Synthetic oligonucleotide
agugaccgucgugaugacu

SEQ ID NO: 916628 - RNA, 19 nt, Artificial Sequence
  Description of Artificial Sequence: Synthetic oligonucleotide
ccaccguuaaauacagcca

SEQ ID NO: 916629 - RNA, 19 nt, Artificial Sequence
  Description of Artificial Sequence: Synthetic oligonucleotide
gaccgucgugaugacugug

SEQ ID NO: 916630 - RNA, 19 nt, Artificial Sequence
  Description of Artificial Sequence: Synthetic oligonucleotide
aggcgaugaacggagugua

SEQ ID NO: 916631 - RNA, 19 nt, Artificial Sequence
  Description of Artificial Sequence: Synthetic oligonucleotide
ggggcuacgaugugccaca

SEQ ID NO: 916632 - RNA, 19 nt, Artificial Sequence
  Description of Artificial Sequence: Synthetic oligonucleotide
gucuacacuuuugcugaca

SEQ ID NO: 916633 - RNA, 19 nt, Artificial Sequence
  Description of Artificial Sequence: Synthetic oligonucleotide
ugacuucgccaccguuaaa

SEQ ID NO: 916634 - RNA, 19 nt, Artificial Sequence
  Description of Artificial Sequence: Synthetic oligonucleotide
gaaugccgccacaugugaa

SEQ ID NO: 916635 - RNA, 19 nt, Artificial Sequence
  Description of Artificial Sequence: Synthetic oligonucleotide
gguaaccaaauaucauuau

SEQ ID NO: 916636 - RNA, 19 nt, Artificial Sequence
  Description of Artificial Sequence: Synthetic oligonucleotide
caccacaguacuuuccgau

SEQ ID NO: 916637 - RNA, 19 nt, Artificial Sequence
  Description of Artificial Sequence: Synthetic oligonucleotide
gugggaguguucucagaua

SEQ ID NO: 916638 - RNA, 19 nt, Artificial Sequence
  Description of Artificial Sequence: Synthetic oligonucleotide
ccacgccuaauuuccccgg

SEQ ID NO: 916639 - RNA, 19 nt, Artificial Sequence
  Description of Artificial Sequence: Synthetic oligonucleotide
cucacugcggcaucccgcu

SEQ ID NO: 916640 - RNA, 19 nt, Artificial Sequence
  Description of Artificial Sequence: Synthetic oligonucleotide
ggacugucaccacaguacu

SEQ ID NO: 916641 - RNA, 19 nt, Artificial Sequence
  Description of Artificial Sequence: Synthetic oligonucleotide
ccacgaagucauaacgaca

SEQ ID NO: 916642 - RNA, 19 nt, Artificial Sequence
  Description of Artificial Sequence: Synthetic oligonucleotide
caagggauccaggucggaa

SEQ ID NO: 916643 - RNA, 19 nt, Artificial Sequence
  Description of Artificial Sequence: Synthetic oligonucleotide
caguggguuuuaaaccugu

SEQ ID NO: 916644 - RNA, 19 nt, Artificial Sequence
  Description of Artificial Sequence: Synthetic oligonucleotide
ucggggcuacgaugugcca

SEQ ID NO: 916645 - RNA, 19 nt, Artificial Sequence
  Description of Artificial Sequence: Synthetic oligonucleotide
ggcaaucgcggccgacucc

SEQ ID NO: 916646 - RNA, 19 nt, Artificial Sequence
  Description of Artificial Sequence: Synthetic oligonucleotide
gagugaccgucgugaugac

SEQ ID NO: 916647 - RNA, 19 nt, Artificial Sequence
  Description of Artificial Sequence: Synthetic oligonucleotide
ucggagcccgcagccaggu

SEQ ID NO: 916648 - RNA, 19 nt, Artificial Sequence
  Description of Artificial Sequence: Synthetic oligonucleotide
gcaaucgcggccgacucca

SEQ ID NO: 916649 - RNA, 19 nt, Artificial Sequence
  Description of Artificial Sequence: Synthetic oligonucleotide
ccgucgugaugacugugcc

SEQ ID NO: 916650 - RNA, 19 nt, Artificial Sequence
  Description of Artificial Sequence: Synthetic oligonucleotide
ccacguagucauaucggca

SEQ ID NO: 916651 - RNA, 19 nt, Artificial Sequence
  Description of Artificial Sequence: Synthetic oligonucleotide
ggcgaugaacggaguguag

SEQ ID NO: 916652 - RNA, 19 nt, Artificial Sequence
  Description of Artificial Sequence: Synthetic oligonucleotide
gcucacugcggcaucccgc

SEQ ID NO: 916653 - RNA, 19 nt, Artificial Sequence
  Description of Artificial Sequence: Synthetic oligonucleotide
ggacugugauuuuccaagu

SEQ ID NO: 916654 - RNA, 19 nt, Artificial Sequence
  Description of Artificial Sequence: Synthetic oligonucleotide
gcaaacucccgccucgagu

SEQ ID NO: 916655 - RNA, 19 nt, Artificial Sequence
  Description of Artificial Sequence: Synthetic oligonucleotide
cucauguucuugccagccu

SEQ ID NO: 916656 - RNA, 19 nt, Artificial Sequence
  Description of Artificial Sequence: Synthetic oligonucleotide
acaagggauccaggucgga

SEQ ID NO: 916657 - RNA, 19 nt, Artificial Sequence
  Description of Artificial Sequence: Synthetic oligonucleotide
ucacugcggcaucccgcuc

SEQ ID NO: 916658 - RNA, 19 nt, Artificial Sequence
  Description of Artificial Sequence: Synthetic oligonucleotide
ggggacgcgcccuggcagc

SEQ ID NO: 916659 - RNA, 19 nt, Artificial Sequence
  Description of Artificial Sequence: Synthetic oligonucleotide
cacgaucggcacaggugga

SEQ ID NO: 916660 - RNA, 19 nt, Artificial Sequence
  Description of Artificial Sequence: Synthetic oligonucleotide
cagagaacguggccaugaa

SEQ ID NO: 916661 - RNA, 19 nt, Artificial Sequence
  Description of Artificial Sequence: Synthetic oligonucleotide
gccaauaaauccagacucu

SEQ ID NO: 916662 - RNA, 19 nt, Artificial Sequence
  Description of Artificial Sequence: Synthetic oligonucleotide
gcaaacgcuugaagguaac

SEQ ID NO: 916663 - RNA, 19 nt, Artificial Sequence
  Description of Artificial Sequence: Synthetic oligonucleotide
gccgcggacggcgggaggg

SEQ ID NO: 916664 - RNA, 19 nt, Artificial Sequence
  Description of Artificial Sequence: Synthetic oligonucleotide
cagacacgaucggcacagg

SEQ ID NO: 916665 - RNA, 19 nt, Artificial Sequence
  Description of Artificial Sequence: Synthetic oligonucleotide
gcggcuuuugaaggcaauc

SEQ ID NO: 916666 - RNA, 19 nt, Artificial Sequence
  Description of Artificial Sequence: Synthetic oligonucleotide
ugcgccgcggacggcggga

SEQ ID NO: 916667 - RNA, 19 nt, Artificial Sequence
  Description of Artificial Sequence: Synthetic oligonucleotide
cgucaugugagaaguaacu

SEQ ID NO: 916668 - RNA, 19 nt, Artificial Sequence
  Description of Artificial Sequence: Synthetic oligonucleotide
gcggcggcugaaugucccg

SEQ ID NO: 916669 - RNA, 19 nt, Artificial Sequence
  Description of Artificial Sequence: Synthetic oligonucleotide
guccuccacaauaccuguc

SEQ ID NO: 916670 - RNA, 19 nt, Artificial Sequence
  Description of Artificial Sequence: Synthetic oligonucleotide
caaucgcggccgacuccac

SEQ ID NO: 916671 - RNA, 19 nt, Artificial Sequence
  Description of Artificial Sequence: Synthetic oligonucleotide
cagcuaacacaaaguugcu

SEQ ID NO: 916672 - RNA, 19 nt, Artificial Sequence
  Description of Artificial Sequence: Synthetic oligonucleotide
ggcggcggcugaauguccc

SEQ ID NO: 916673 - RNA, 19 nt, Artificial Sequence
  Description of Artificial Sequence: Synthetic oligonucleotide
cagggcguucaugggcuuc

SEQ ID NO: 916674 - RNA, 19 nt, Artificial Sequence
  Description of Artificial Sequence: Synthetic oligonucleotide
gcucgcucggagcccgcag

SEQ ID NO: 916675 - RNA, 19 nt, Artificial Sequence
  Description of Artificial Sequence: Synthetic oligonucleotide
gcgugcaaacucccgccuc

SEQ ID NO: 916676 - RNA, 19 nt, Artificial Sequence
  Description of Artificial Sequence: Synthetic oligonucleotide
cagcagagaacguggccau

SEQ ID NO: 916677 - RNA, 19 nt, Artificial Sequence
  Description of Artificial Sequence: Synthetic oligonucleotide
cccgccucgagugaccguc

SEQ ID NO: 916678 - RNA, 19 nt, Artificial Sequence
  Description of Artificial Sequence: Synthetic oligonucleotide
ggucuaugaaucggaaauu

SEQ ID NO: 916679 - RNA, 19 nt, Artificial Sequence
  Description of Artificial Sequence: Synthetic oligonucleotide
gcgggaugcaggcgcucgc

SEQ ID NO: 916680 - RNA, 19 nt, Artificial Sequence
  Description of Artificial Sequence: Synthetic oligonucleotide
cgaugaacggaguguagcu

SEQ ID NO: 916681 - RNA, 19 nt, Artificial Sequence
  Description of Artificial Sequence: Synthetic oligonucleotide
cucgagugaccgucgugau

SEQ ID NO: 916682 - RNA, 19 nt, Artificial Sequence
  Description of Artificial Sequence: Synthetic oligonucleotide
ccguuaaauacagccacgu

SEQ ID NO: 916683 - RNA, 19 nt, Artificial Sequence
  Description of Artificial Sequence: Synthetic oligonucleotide
caagugcgccgcggacggc

SEQ ID NO: 916684 - RNA, 19 nt, Artificial Sequence
  Description of Artificial Sequence: Synthetic oligonucleotide
cuguaguuacggggaacgu

SEQ ID NO: 916685 - RNA, 19 nt, Artificial Sequence
  Description of Artificial Sequence: Synthetic oligonucleotide
cccgaugcgcuggccauug

SEQ ID NO: 916686 - RNA, 19 nt, Artificial Sequence
  Description of Artificial Sequence: Synthetic oligonucleotide
gccgacuccacgccuaauu

SEQ ID NO: 916687 - RNA, 19 nt, Artificial Sequence
  Description of Artificial Sequence: Synthetic oligonucleotide
cguuaaauacagccacgua

SEQ ID NO: 916688 - RNA, 19 nt, Artificial Sequence
  Description of Artificial Sequence: Synthetic oligonucleotide
cgucuacacuuuugcugac

SEQ ID NO: 916689 - RNA, 19 nt, Artificial Sequence
  Description of Artificial Sequence: Synthetic oligonucleotide
gguggacugucaccacagu

SEQ ID NO: 916690 - RNA, 19 nt, Artificial Sequence
  Description of Artificial Sequence: Synthetic oligonucleotide
gcgcccgaugcgcuggcca

SEQ ID NO: 916691 - RNA, 19 nt, Artificial Sequence
  Description of Artificial Sequence: Synthetic oligonucleotide
cggggcuacgaugugccac

SEQ ID NO: 916692 - RNA, 19 nt, Artificial Sequence
  Description of Artificial Sequence: Synthetic oligonucleotide
guaaccccuaugggguaau

SEQ ID NO: 916693 - RNA, 19 nt, Artificial Sequence
  Description of Artificial Sequence: Synthetic oligonucleotide
gcucaguauuaaauugcau

SEQ ID NO: 916694 - RNA, 19 nt, Artificial Sequence
  Description of Artificial Sequence: Synthetic oligonucleotide
auacagccacguagucaua

SEQ ID NO: 916695 - RNA, 19 nt, Artificial Sequence
  Description of Artificial Sequence: Synthetic oligonucleotide
ggggaacguggugguaaca

SEQ ID NO: 916696 - RNA, 19 nt, Artificial Sequence
  Description of Artificial Sequence: Synthetic oligonucleotide
ccuaugggguaaucucggu

SEQ ID NO: 916697 - RNA, 19 nt, Artificial Sequence
  Description of Artificial Sequence: Synthetic oligonucleotide
ccgaugcgcuggccauugg

SEQ ID NO: 916698 - RNA, 19 nt, Artificial Sequence
  Description of Artificial Sequence: Synthetic oligonucleotide
gggcggcggcugaaugucc

SEQ ID NO: 916699 - RNA, 19 nt, Artificial Sequence
  Description of Artificial Sequence: Synthetic oligonucleotide
gggcuacgaugugccacac

SEQ ID NO: 916700 - RNA, 19 nt, Artificial Sequence
  Description of Artificial Sequence: Synthetic oligonucleotide
ggccggcagcucacugcgg

SEQ ID NO: 916701 - RNA, 19 nt, Artificial Sequence
  Description of Artificial Sequence: Synthetic oligonucleotide
gcuauucggaggguacauu

SEQ ID NO: 916702 - RNA, 19 nt, Artificial Sequence
  Description of Artificial Sequence: Synthetic oligonucleotide
ccacuugucccaugauaau

SEQ ID NO: 916703 - RNA, 19 nt, Artificial Sequence
  Description of Artificial Sequence: Synthetic oligonucleotide
cgggcggcggcugaauguc

SEQ ID NO: 916704 - RNA, 19 nt, Artificial Sequence
  Description of Artificial Sequence: Synthetic oligonucleotide
cagcugcgcggcggccagc

SEQ ID NO: 916705 - RNA, 19 nt, Artificial Sequence
  Description of Artificial Sequence: Synthetic oligonucleotide
gacggcgggagggcggcuu

SEQ ID NO: 916706 - RNA, 19 nt, Artificial Sequence
  Description of Artificial Sequence: Synthetic oligonucleotide
ccgacuccacgccuaauuu

SEQ ID NO: 916707 - RNA, 19 nt, Artificial Sequence
  Description of Artificial Sequence: Synthetic oligonucleotide
cacccacuugucccaugau

SEQ ID NO: 916708 - RNA, 19 nt, Artificial Sequence
  Description of Artificial Sequence: Synthetic oligonucleotide
gcggcugaaugucccguuu

SEQ ID NO: 916709 - RNA, 19 nt, Artificial Sequence
  Description of Artificial Sequence: Synthetic oligonucleotide
ggcggcugaaugucccguu

SEQ ID NO: 916710 - RNA, 19 nt, Artificial Sequence
  Description of Artificial Sequence: Synthetic oligonucleotide
cgcggacggcgggagggcg

SEQ ID NO: 916711 - RNA, 19 nt, Artificial Sequence
  Description of Artificial Sequence: Synthetic oligonucleotide
gcgccgcggacggcgggag

SEQ ID NO: 916712 - RNA, 19 nt, Artificial Sequence
  Description of Artificial Sequence: Synthetic oligonucleotide
ccgcggacggcgggagggc

SEQ ID NO: 916713 - RNA, 19 nt, Artificial Sequence
  Description of Artificial Sequence: Synthetic oligonucleotide
ccgcucgcucggagcccgc

SEQ ID NO: 916714 - RNA, 19 nt, Artificial Sequence
  Description of Artificial Sequence: Synthetic oligonucleotide
cgaucggcacagguggacu

SEQ ID NO: 916715 - RNA, 19 nt, Artificial Sequence
  Description of Artificial Sequence: Synthetic oligonucleotide
cgccgcggacggcgggagg

SEQ ID NO: 916716 - RNA, 19 nt, Artificial Sequence
  Description of Artificial Sequence: Synthetic oligonucleotide
cccauccgucuacacuuuu

SEQ ID NO: 916717 - RNA, 19 nt, Artificial Sequence
  Description of Artificial Sequence: Synthetic oligonucleotide
ccccauccgucuacacuuu

SEQ ID NO: 916718 - RNA, 19 nt, Artificial Sequence
  Description of Artificial Sequence: Synthetic oligonucleotide
cgcccgaugcgcuggccau

SEQ ID NO: 916719 - RNA, 19 nt, Artificial Sequence
  Description of Artificial Sequence: Synthetic oligonucleotide
cggccgacuccacgccuaa

SEQ ID NO: 916720 - RNA, 19 nt, Artificial Sequence
  Description of Artificial Sequence: Synthetic oligonucleotide
cugcggcaucccgcucgcu

SEQ ID NO: 916721 - RNA, 19 nt, Artificial Sequence
  Description of Artificial Sequence: Synthetic oligonucleotide
ggccgacuccacgccuaau

SEQ ID NO: 916722 - RNA, 19 nt, Artificial Sequence
  Description of Artificial Sequence: Synthetic oligonucleotide
ccauggccggcagcucacu

SEQ ID NO: 916723 - RNA, 19 nt, Artificial Sequence
  Description of Artificial Sequence: Synthetic oligonucleotide
cgcucgcucggagcccgca

SEQ ID NO: 916724 - RNA, 19 nt, Artificial Sequence
  Description of Artificial Sequence: Synthetic oligonucleotide
cggagcccgcagccaggua

SEQ ID NO: 916725 - RNA, 19 nt, Artificial Sequence
  Description of Artificial Sequence: Synthetic oligonucleotide
ccgcgggcggcggcugaau

SEQ ID NO: 916726 - RNA, 19 nt, Artificial Sequence
  Description of Artificial Sequence: Synthetic oligonucleotide
aagaauaaauacgugauuc

SEQ ID NO: 916727 - RNA, 19 nt, Artificial Sequence
  Description of Artificial Sequence: Synthetic oligonucleotide
auaaauacgugauucuacc

SEQ ID NO: 916728 - RNA, 19 nt, Artificial Sequence
  Description of Artificial Sequence: Synthetic oligonucleotide
uauuaauacacuuggaugu

SEQ ID NO: 916729 - RNA, 19 nt, Artificial Sequence
  Description of Artificial Sequence: Synthetic oligonucleotide
uuuauugagacucggaaga

SEQ ID NO: 916730 - RNA, 19 nt, Artificial Sequence
  Description of Artificial Sequence: Synthetic oligonucleotide
uuauuaauacacuuggaug

SEQ ID NO: 916731 - RNA, 19 nt, Artificial Sequence
  Description of Artificial Sequence: Synthetic oligonucleotide
aaauacgugauucuaccug

SEQ ID NO: 916732 - RNA, 19 nt, Artificial Sequence
  Description of Artificial Sequence: Synthetic oligonucleotide
uuuuauugagacucggaag

SEQ ID NO: 916733 - RNA, 19 nt, Artificial Sequence
  Description of Artificial Sequence: Synthetic oligonucleotide
aaugaaguccuuucuucuc

SEQ ID NO: 916734 - RNA, 19 nt, Artificial Sequence
  Description of Artificial Sequence: Synthetic oligonucleotide
agauguggccuuuugaagg

SEQ ID NO: 916735 - RNA, 19 nt, Artificial Sequence
  Description of Artificial Sequence: Synthetic oligonucleotide
ucuucaugaauccgaaaag

SEQ ID NO: 916736 - RNA, 19 nt, Artificial Sequence
  Description of Artificial Sequence: Synthetic oligonucleotide
aauacgugauucuaccuga

SEQ ID NO: 916737 - RNA, 19 nt, Artificial Sequence
  Description of Artificial Sequence: Synthetic oligonucleotide
uccgaaaagagaaugugga

SEQ ID NO: 916738 - RNA, 19 nt, Artificial Sequence
  Description of Artificial Sequence: Synthetic oligonucleotide
aaugcagggccgcucgucc

SEQ ID NO: 916739 - RNA, 19 nt, Artificial Sequence
  Description of Artificial Sequence: Synthetic oligonucleotide
uuuuaagagcacaggugcg

SEQ ID NO: 916740 - RNA, 19 nt, Artificial Sequence
  Description of Artificial Sequence: Synthetic oligonucleotide
gaagacacauuugugagcc

SEQ ID NO: 916741 - RNA, 19 nt, Artificial Sequence
  Description of Artificial Sequence: Synthetic oligonucleotide
gaagcugaccccuggaccg

SEQ ID NO: 916742 - RNA, 19 nt, Artificial Sequence
  Description of Artificial Sequence: Synthetic oligonucleotide
gacuugauggaugucaggg

SEQ ID NO: 916743 - RNA, 19 nt, Artificial Sequence
  Description of Artificial Sequence: Synthetic oligonucleotide
agaagacacauuugugagc

SEQ ID NO: 916744 - RNA, 19 nt, Artificial Sequence
  Description of Artificial Sequence: Synthetic oligonucleotide
cuaaauucaucucccacag

SEQ ID NO: 916745 - RNA, 19 nt, Artificial Sequence
  Description of Artificial Sequence: Synthetic oligonucleotide
uacucaaugacugggaugu

SEQ ID NO: 916746 - RNA, 19 nt, Artificial Sequence
  Description of Artificial Sequence: Synthetic oligonucleotide
aaggaugcuacccggauau

SEQ ID NO: 916747 - RNA, 19 nt, Artificial Sequence
  Description of Artificial Sequence: Synthetic oligonucleotide
ucuuuguacagcuccagcu

SEQ ID NO: 916748 - RNA, 19 nt, Artificial Sequence
  Description of Artificial Sequence: Synthetic oligonucleotide
uucauagccccaaaaccag

SEQ ID NO: 916749 - RNA, 19 nt, Artificial Sequence
  Description of Artificial Sequence: Synthetic oligonucleotide
aauccgaaaagagaaugug

SEQ ID NO: 916750 - RNA, 19 nt, Artificial Sequence
  Description of Artificial Sequence: Synthetic oligonucleotide
auaguggucaugaagcagg

SEQ ID NO: 916751 - RNA, 19 nt, Artificial Sequence
  Description of Artificial Sequence: Synthetic oligonucleotide
gauccauugaucgaugaug

SEQ ID NO: 916752 - RNA, 19 nt, Artificial Sequence
  Description of Artificial Sequence: Synthetic oligonucleotide
ugaauccgaaaagagaaug

SEQ ID NO: 916753 - RNA, 19 nt, Artificial Sequence
  Description of Artificial Sequence: Synthetic oligonucleotide
ugagucugggugaagugag

SEQ ID NO: 916754 - RNA, 19 nt, Artificial Sequence
  Description of Artificial Sequence: Synthetic oligonucleotide
agugaggugaaggagucac

SEQ ID NO: 916755 - RNA, 19 nt, Artificial Sequence
  Description of Artificial Sequence: Synthetic oligonucleotide
ucucaggugaacuccuagg

SEQ ID NO: 916756 - RNA, 19 nt, Artificial Sequence
  Description of Artificial Sequence: Synthetic oligonucleotide
uggauguacaaauggaaaa

SEQ ID NO: 916757 - RNA, 19 nt, Artificial Sequence
  Description of Artificial Sequence: Synthetic oligonucleotide
uuaucagcggcgucugugg

SEQ ID NO: 916758 - RNA, 19 nt, Artificial Sequence
  Description of Artificial Sequence: Synthetic oligonucleotide
agaagguaccgucugcggg

SEQ ID NO: 916759 - RNA, 19 nt, Artificial Sequence
  Description of Artificial Sequence: Synthetic oligonucleotide
ucuaccuuggugcuuggga

SEQ ID NO: 916760 - RNA, 19 nt, Artificial Sequence
  Description of Artificial Sequence: Synthetic oligonucleotide
auauagacaucccugcgga

SEQ ID NO: 916761 - RNA, 19 nt, Artificial Sequence
  Description of Artificial Sequence: Synthetic oligonucleotide
gacaucauacagaagguac

SEQ ID NO: 916762 - RNA, 19 nt, Artificial Sequence
  Description of Artificial Sequence: Synthetic oligonucleotide
gggaauccggacuugaugg

SEQ ID NO: 916763 - RNA, 19 nt, Artificial Sequence
  Description of Artificial Sequence: Synthetic oligonucleotide
ggagauugaagccuucugg

SEQ ID NO: 916764 - RNA, 19 nt, Artificial Sequence
  Description of Artificial Sequence: Synthetic oligonucleotide
aauacacuuggauguacaa

SEQ ID NO: 916765 - RNA, 19 nt, Artificial Sequence
  Description of Artificial Sequence: Synthetic oligonucleotide
aacuggacugcccuggcca

SEQ ID NO: 916766 - RNA, 19 nt, Artificial Sequence
  Description of Artificial Sequence: Synthetic oligonucleotide
augcuacccggauauagac

SEQ ID NO: 916767 - RNA, 19 nt, Artificial Sequence
  Description of Artificial Sequence: Synthetic oligonucleotide
guuguauguugucuugggg

SEQ ID NO: 916768 - RNA, 19 nt, Artificial Sequence
  Description of Artificial Sequence: Synthetic oligonucleotide
uguauguugucuugggguc

SEQ ID NO: 916769 - RNA, 19 nt, Artificial Sequence
  Description of Artificial Sequence: Synthetic oligonucleotide
ucugggugaagugagguga

SEQ ID NO: 916770 - RNA, 19 nt, Artificial Sequence
  Description of Artificial Sequence: Synthetic oligonucleotide
acggcuaucuuaucagcgg

SEQ ID NO: 916771 - RNA, 19 nt, Artificial Sequence
  Description of Artificial Sequence: Synthetic oligonucleotide
auccauugaucgaugaugg

SEQ ID NO: 916772 - RNA, 19 nt, Artificial Sequence
  Description of Artificial Sequence: Synthetic oligonucleotide
aaaccgguuguauguuguc

SEQ ID NO: 916773 - RNA, 19 nt, Artificial Sequence
  Description of Artificial Sequence: Synthetic oligonucleotide
uaucuuaucagcggcgucu

SEQ ID NO: 916774 - RNA, 19 nt, Artificial Sequence
  Description of Artificial Sequence: Synthetic oligonucleotide
uuuaagagcacaggugcga

SEQ ID NO: 916775 - RNA, 19 nt, Artificial Sequence
  Description of Artificial Sequence: Synthetic oligonucleotide
caggacguacaccuggucg

SEQ ID NO: 916776 - RNA, 19 nt, Artificial Sequence
  Description of Artificial Sequence: Synthetic oligonucleotide
uucucaggugaacuccuag

SEQ ID NO: 916777 - RNA, 19 nt, Artificial Sequence
  Description of Artificial Sequence: Synthetic oligonucleotide
uguaccaggucaagggaac

SEQ ID NO: 916778 - RNA, 19 nt, Artificial Sequence
  Description of Artificial Sequence: Synthetic oligonucleotide
cacggcuaucuuaucagcg

SEQ ID NO: 916779 - RNA, 19 nt, Artificial Sequence
  Description of Artificial Sequence: Synthetic oligonucleotide
gguacagacggccccaugg

SEQ ID NO: 916780 - RNA, 19 nt, Artificial Sequence
  Description of Artificial Sequence: Synthetic oligonucleotide
agagcagagggucaaugca

SEQ ID NO: 916781 - RNA, 19 nt, Artificial Sequence
  Description of Artificial Sequence: Synthetic oligonucleotide
gagaccggccgccagaaug

SEQ ID NO: 916782 - RNA, 19 nt, Artificial Sequence
  Description of Artificial Sequence: Synthetic oligonucleotide
uacccggauauagacaucc

SEQ ID NO: 916783 - RNA, 19 nt, Artificial Sequence
  Description of Artificial Sequence: Synthetic oligonucleotide
cauugaucgaugauggcga

SEQ ID NO: 916784 - RNA, 19 nt, Artificial Sequence
  Description of Artificial Sequence: Synthetic oligonucleotide
auccgaaaagagaaugugg

SEQ ID NO: 916785 - RNA, 19 nt, Artificial Sequence
  Description of Artificial Sequence: Synthetic oligonucleotide
gugaccgagugacuggugg

SEQ ID NO: 916786 - RNA, 19 nt, Artificial Sequence
  Description of Artificial Sequence: Synthetic oligonucleotide
uggaccgacaggcaggaaa

SEQ ID NO: 916787 - RNA, 19 nt, Artificial Sequence
  Description of Artificial Sequence: Synthetic oligonucleotide
agacacauuugugagccuc

SEQ ID NO: 916788 - RNA, 19 nt, Artificial Sequence
  Description of Artificial Sequence: Synthetic oligonucleotide
auacagaagguaccgucug

SEQ ID NO: 916789 - RNA, 19 nt, Artificial Sequence
  Description of Artificial Sequence: Synthetic oligonucleotide
aaaaccgguuguauguugu

SEQ ID NO: 916790 - RNA, 19 nt, Artificial Sequence
  Description of Artificial Sequence: Synthetic oligonucleotide
uucuaccugaucagcugag

SEQ ID NO: 916791 - RNA, 19 nt, Artificial Sequence
  Description of Artificial Sequence: Synthetic oligonucleotide
acaggugcgaugauggaag

SEQ ID NO: 916792 - RNA, 19 nt, Artificial Sequence
  Description of Artificial Sequence: Synthetic oligonucleotide
ugaccgagugacugguggg

SEQ ID NO: 916793 - RNA, 19 nt, Artificial Sequence
  Description of Artificial Sequence: Synthetic oligonucleotide
ucggcucgguccaacauca

SEQ ID NO: 916794 - RNA, 19 nt, Artificial Sequence
  Description of Artificial Sequence: Synthetic oligonucleotide
uggaugucagggcuuugcc

SEQ ID NO: 916795 - RNA, 19 nt, Artificial Sequence
  Description of Artificial Sequence: Synthetic oligonucleotide
gaagguaccgucugcggga

SEQ ID NO: 916796 - RNA, 19 nt, Artificial Sequence
  Description of Artificial Sequence: Synthetic oligonucleotide
cuccgcguagccuugcagg

SEQ ID NO: 916797 - RNA, 19 nt, Artificial Sequence
  Description of Artificial Sequence: Synthetic oligonucleotide
ugaguagagcagaggguca

SEQ ID NO: 916798 - RNA, 19 nt, Artificial Sequence
  Description of Artificial Sequence: Synthetic oligonucleotide
accccgaguuucuucauag

SEQ ID NO: 916799 - RNA, 19 nt, Artificial Sequence
  Description of Artificial Sequence: Synthetic oligonucleotide
gugauugggacauggguuc

SEQ ID NO: 916800 - RNA, 19 nt, Artificial Sequence
  Description of Artificial Sequence: Synthetic oligonucleotide
cagauguggccuuuugaag

SEQ ID NO: 916801 - RNA, 19 nt, Artificial Sequence
  Description of Artificial Sequence: Synthetic oligonucleotide
gucgaugaagggcccaccg

SEQ ID NO: 916802 - RNA, 19 nt, Artificial Sequence
  Description of Artificial Sequence: Synthetic oligonucleotide
ucauagccccaaaaccagc

SEQ ID NO: 916803 - RNA, 19 nt, Artificial Sequence
  Description of Artificial Sequence: Synthetic oligonucleotide
accugaucagcugagugag

SEQ ID NO: 916804 - RNA, 19 nt, Artificial Sequence
  Description of Artificial Sequence: Synthetic oligonucleotide
gugauacucgugcuugucc

SEQ ID NO: 916805 - RNA, 19 nt, Artificial Sequence
  Description of Artificial Sequence: Synthetic oligonucleotide
aggacguacaccuggucga

SEQ ID NO: 916806 - RNA, 19 nt, Artificial Sequence
  Description of Artificial Sequence: Synthetic oligonucleotide
guacagacggccccauggg

SEQ ID NO: 916807 - RNA, 19 nt, Artificial Sequence
  Description of Artificial Sequence: Synthetic oligonucleotide
uauagacaucccugcggag

SEQ ID NO: 916808 - RNA, 19 nt, Artificial Sequence
  Description of Artificial Sequence: Synthetic oligonucleotide
ucccacgugggcucaaacc

SEQ ID NO: 916809 - RNA, 19 nt, Artificial Sequence
  Description of Artificial Sequence: Synthetic oligonucleotide
aaaacucggaccagggaau

SEQ ID NO: 916810 - RNA, 19 nt, Artificial Sequence
  Description of Artificial Sequence: Synthetic oligonucleotide
ggucaagggaacuggacug

SEQ ID NO: 916811 - RNA, 19 nt, Artificial Sequence
  Description of Artificial Sequence: Synthetic oligonucleotide
cacggcacccucuaggcug

SEQ ID NO: 916812 - RNA, 19 nt, Artificial Sequence
  Description of Artificial Sequence: Synthetic oligonucleotide
ccauugaucgaugauggcg

SEQ ID NO: 916813 - RNA, 19 nt, Artificial Sequence
  Description of Artificial Sequence: Synthetic oligonucleotide
auagacaucccugcggaga

SEQ ID NO: 916814 - RNA, 19 nt, Artificial Sequence
  Description of Artificial Sequence: Synthetic oligonucleotide
acguacaccuggucgauga

SEQ ID NO: 916815 - RNA, 19 nt, Artificial Sequence
  Description of Artificial Sequence: Synthetic oligonucleotide
gugaagugaggugaaggag

SEQ ID NO: 916816 - RNA, 19 nt, Artificial Sequence
  Description of Artificial Sequence: Synthetic oligonucleotide
ugcuacccggauauagaca

SEQ ID NO: 916817 - RNA, 19 nt, Artificial Sequence
  Description of Artificial Sequence: Synthetic oligonucleotide
gauacucgugcuuguccug

SEQ ID NO: 916818 - RNA, 19 nt, Artificial Sequence
  Description of Artificial Sequence: Synthetic oligonucleotide
gacaucccugcggagauug

SEQ ID NO: 916819 - RNA, 19 nt, Artificial Sequence
  Description of Artificial Sequence: Synthetic oligonucleotide
gccucugugauacucgugc

SEQ ID NO: 916820 - RNA, 19 nt, Artificial Sequence
  Description of Artificial Sequence: Synthetic oligonucleotide
gacuccgccucccauggug

SEQ ID NO: 916821 - RNA, 19 nt, Artificial Sequence
  Description of Artificial Sequence: Synthetic oligonucleotide
uagacaucccugcggagau

SEQ ID NO: 916822 - RNA, 19 nt, Artificial Sequence
  Description of Artificial Sequence: Synthetic oligonucleotide
gguuucauaaagcaguggu

SEQ ID NO: 916823 - RNA, 19 nt, Artificial Sequence
  Description of Artificial Sequence: Synthetic oligonucleotide
cugacuccgccucccaugg

SEQ ID NO: 916824 - RNA, 19 nt, Artificial Sequence
  Description of Artificial Sequence: Synthetic oligonucleotide
uucggaucuucuucacggc

SEQ ID NO: 916825 - RNA, 19 nt, Artificial Sequence
  Description of Artificial Sequence: Synthetic oligonucleotide
agaccggccgccagaaugc

SEQ ID NO: 916826 - RNA, 19 nt, Artificial Sequence
  Description of Artificial Sequence: Synthetic oligonucleotide
ugaagggcccaccggacuc

SEQ ID NO: 916827 - RNA, 19 nt, Artificial Sequence
  Description of Artificial Sequence: Synthetic oligonucleotide
uucggcucgguccaacauc

SEQ ID NO: 916828 - RNA, 19 nt, Artificial Sequence
  Description of Artificial Sequence: Synthetic oligonucleotide
aaccgguuguauguugucu

SEQ ID NO: 916829 - RNA, 19 nt, Artificial Sequence
  Description of Artificial Sequence: Synthetic oligonucleotide
aaugccgcugccagcagca

SEQ ID NO: 916830 - RNA, 19 nt, Artificial Sequence
  Description of Artificial Sequence: Synthetic oligonucleotide
gacacauuugugagccucc

SEQ ID NO: 916831 - RNA, 19 nt, Artificial Sequence
  Description of Artificial Sequence: Synthetic oligonucleotide
aagguaccgucugcgggac

SEQ ID NO: 916832 - RNA, 19 nt, Artificial Sequence
  Description of Artificial Sequence: Synthetic oligonucleotide
uuuucggcucgguccaaca

SEQ ID NO: 916833 - RNA, 19 nt, Artificial Sequence
  Description of Artificial Sequence: Synthetic oligonucleotide
agucuugagcagugucuuc

SEQ ID NO: 916834 - RNA, 19 nt, Artificial Sequence
  Description of Artificial Sequence: Synthetic oligonucleotide
cacaaaaccgguuguaugu

SEQ ID NO: 916835 - RNA, 19 nt, Artificial Sequence
  Description of Artificial Sequence: Synthetic oligonucleotide
ggaaaagaauaaauacgug

SEQ ID NO: 916836 - RNA, 19 nt, Artificial Sequence
  Description of Artificial Sequence: Synthetic oligonucleotide
gaugcuacccggauauaga

SEQ ID NO: 916837 - RNA, 19 nt, Artificial Sequence
  Description of Artificial Sequence: Synthetic oligonucleotide
agauccauugaucgaugau

SEQ ID NO: 916838 - RNA, 19 nt, Artificial Sequence
  Description of Artificial Sequence: Synthetic oligonucleotide
uccuagguaggggccaccg

SEQ ID NO: 916839 - RNA, 19 nt, Artificial Sequence
  Description of Artificial Sequence: Synthetic oligonucleotide
caacaucacagaccgagca

SEQ ID NO: 916840 - RNA, 19 nt, Artificial Sequence
  Description of Artificial Sequence: Synthetic oligonucleotide
ggugcgaugauggaagcug

SEQ ID NO: 916841 - RNA, 19 nt, Artificial Sequence
  Description of Artificial Sequence: Synthetic oligonucleotide
ggaagcugaccccuggacc

SEQ ID NO: 916842 - RNA, 19 nt, Artificial Sequence
  Description of Artificial Sequence: Synthetic oligonucleotide
uacgugauucuaccugauc

SEQ ID NO: 916843 - RNA, 19 nt, Artificial Sequence
  Description of Artificial Sequence: Synthetic oligonucleotide
ucaccauuucugguagcag

SEQ ID NO: 916844 - RNA, 19 nt, Artificial Sequence
  Description of Artificial Sequence: Synthetic oligonucleotide
cacuggcaacucaaggggc

SEQ ID NO: 916845 - RNA, 19 nt, Artificial Sequence
  Description of Artificial Sequence: Synthetic oligonucleotide
ucaagggaacuggacugcc

SEQ ID NO: 916846 - RNA, 19 nt, Artificial Sequence
  Description of Artificial Sequence: Synthetic oligonucleotide
ugggcgacacaugugacau

SEQ ID NO: 916847 - RNA, 19 nt, Artificial Sequence
  Description of Artificial Sequence: Synthetic oligonucleotide
uccacaaaaccgguuguau

SEQ ID NO: 916848 - RNA, 19 nt, Artificial Sequence
  Description of Artificial Sequence: Synthetic oligonucleotide
uccgcguagccuugcagga

SEQ ID NO: 916849 - RNA, 19 nt, Artificial Sequence
  Description of Artificial Sequence: Synthetic oligonucleotide
aggccuaggaaaggguuuc

SEQ ID NO: 916850 - RNA, 19 nt, Artificial Sequence
  Description of Artificial Sequence: Synthetic oligonucleotide
cagcaugaggccuaggaaa

SEQ ID NO: 916851 - RNA, 19 nt, Artificial Sequence
  Description of Artificial Sequence: Synthetic oligonucleotide
gaaggagucacuggcaacu

SEQ ID NO: 916852 - RNA, 19 nt, Artificial Sequence
  Description of Artificial Sequence: Synthetic oligonucleotide
auuaauacacuuggaugua

SEQ ID NO: 916853 - RNA, 19 nt, Artificial Sequence
  Description of Artificial Sequence: Synthetic oligonucleotide
auccggacuugauggaugu

SEQ ID NO: 916854 - RNA, 19 nt, Artificial Sequence
  Description of Artificial Sequence: Synthetic oligonucleotide
ccggauauagacaucccug

SEQ ID NO: 916855 - RNA, 19 nt, Artificial Sequence
  Description of Artificial Sequence: Synthetic oligonucleotide
aacuccuagguaggggcca

SEQ ID NO: 916856 - RNA, 19 nt, Artificial Sequence
  Description of Artificial Sequence: Synthetic oligonucleotide
cgaguuucuucauagcccc

SEQ ID NO: 916857 - RNA, 19 nt, Artificial Sequence
  Description of Artificial Sequence: Synthetic oligonucleotide
gagaccugggcaguagcug

SEQ ID NO: 916858 - RNA, 19 nt, Artificial Sequence
  Description of Artificial Sequence: Synthetic oligonucleotide
uaucagcggcgucugugga

SEQ ID NO: 916859 - RNA, 19 nt, Artificial Sequence
  Description of Artificial Sequence: Synthetic oligonucleotide
ggaugcuacccggauauag

SEQ ID NO: 916860 - RNA, 19 nt, Artificial Sequence
  Description of Artificial Sequence: Synthetic oligonucleotide
cagugguacagacggcccc

SEQ ID NO: 916861 - RNA, 19 nt, Artificial Sequence
  Description of Artificial Sequence: Synthetic oligonucleotide
accgguuguauguugucuu

SEQ ID NO: 916862 - RNA, 19 nt, Artificial Sequence
  Description of Artificial Sequence: Synthetic oligonucleotide
guauguugucuuggggucc

SEQ ID NO: 916863 - RNA, 19 nt, Artificial Sequence
  Description of Artificial Sequence: Synthetic oligonucleotide
gagacucggaagaucaaaa

SEQ ID NO: 916864 - RNA, 19 nt, Artificial Sequence
  Description of Artificial Sequence: Synthetic oligonucleotide
guggccccaaaugaagucc

SEQ ID NO: 916865 - RNA, 19 nt, Artificial Sequence
  Description of Artificial Sequence: Synthetic oligonucleotide
uuucggcucgguccaacau

SEQ ID NO: 916866 - RNA, 19 nt, Artificial Sequence
  Description of Artificial Sequence: Synthetic oligonucleotide
augaagggcccaccggacu

SEQ ID NO: 916867 - RNA, 19 nt, Artificial Sequence
  Description of Artificial Sequence: Synthetic oligonucleotide
ugugauacucgugcuuguc

SEQ ID NO: 916868 - RNA, 19 nt, Artificial Sequence
  Description of Artificial Sequence: Synthetic oligonucleotide
cauacagaagguaccgucu

SEQ ID NO: 916869 - RNA, 19 nt, Artificial Sequence
  Description of Artificial Sequence: Synthetic oligonucleotide
aggguuucauaaagcagug

SEQ ID NO: 916870 - RNA, 19 nt, Artificial Sequence
  Description of Artificial Sequence: Synthetic oligonucleotide
gaauccgaaaagagaaugu

SEQ ID NO: 916871 - RNA, 19 nt, Artificial Sequence
  Description of Artificial Sequence: Synthetic oligonucleotide
cucggaccagggaauccgg

SEQ ID NO: 916872 - RNA, 19 nt, Artificial Sequence
  Description of Artificial Sequence: Synthetic oligonucleotide
gauggcgucuguggccacg

SEQ ID NO: 916873 - RNA, 19 nt, Artificial Sequence
  Description of Artificial Sequence: Synthetic oligonucleotide
ugaagccgagaccggccgc

SEQ ID NO: 916874 - RNA, 19 nt, Artificial Sequence
  Description of Artificial Sequence: Synthetic oligonucleotide
ugugaccgagugacuggug

SEQ ID NO: 916875 - RNA, 19 nt, Artificial Sequence
  Description of Artificial Sequence: Synthetic oligonucleotide
augugacaugugugauugg

SEQ ID NO: 916876 - RNA, 19 nt, Artificial Sequence
  Description of Artificial Sequence: Synthetic oligonucleotide
gaagccgagaccggccgcc

SEQ ID NO: 916877 - RNA, 19 nt, Artificial Sequence
  Description of Artificial Sequence: Synthetic oligonucleotide
gaugaagggcccaccggac

SEQ ID NO: 916878 - RNA, 19 nt, Artificial Sequence
  Description of Artificial Sequence: Synthetic oligonucleotide
cagacgacgcugagcgccg

SEQ ID NO: 916879 - RNA, 19 nt, Artificial Sequence
  Description of Artificial Sequence: Synthetic oligonucleotide
ucuaccugaucagcugagu

SEQ ID NO: 916880 - RNA, 19 nt, Artificial Sequence
  Description of Artificial Sequence: Synthetic oligonucleotide
ucgugcuuguccugugagu

SEQ ID NO: 916881 - RNA, 19 nt, Artificial Sequence
  Description of Artificial Sequence: Synthetic oligonucleotide
auugaucgaugauggcgau

SEQ ID NO: 916882 - RNA, 19 nt, Artificial Sequence
  Description of Artificial Sequence: Synthetic oligonucleotide
augauggcgaugccuccgu

SEQ ID NO: 916883 - RNA, 19 nt, Artificial Sequence
  Description of Artificial Sequence: Synthetic oligonucleotide
gcuccuaaauucaucuccc

SEQ ID NO: 916884 - RNA, 19 nt, Artificial Sequence
  Description of Artificial Sequence: Synthetic oligonucleotide
auaaagcaguggugucuca

SEQ ID NO: 916885 - RNA, 19 nt, Artificial Sequence
  Description of Artificial Sequence: Synthetic oligonucleotide
cuaucuuaucagcggcguc

SEQ ID NO: 916886 - RNA, 19 nt, Artificial Sequence
  Description of Artificial Sequence: Synthetic oligonucleotide
aucuuaucagcggcgucug

SEQ ID NO: 916887 - RNA, 19 nt, Artificial Sequence
  Description of Artificial Sequence: Synthetic oligonucleotide
cggauauagacaucccugc

SEQ ID NO: 916888 - RNA, 19 nt, Artificial Sequence
  Description of Artificial Sequence: Synthetic oligonucleotide
cugaccccuggaccgacag

SEQ ID NO: 916889 - RNA, 19 nt, Artificial Sequence
  Description of Artificial Sequence: Synthetic oligonucleotide
gcagacgacgcugagcgcc

SEQ ID NO: 916890 - RNA, 19 nt, Artificial Sequence
  Description of Artificial Sequence: Synthetic oligonucleotide
cagugugugggcugcucac

SEQ ID NO: 916891 - RNA, 19 nt, Artificial Sequence
  Description of Artificial Sequence: Synthetic oligonucleotide
cgguguaccaggucaaggg

SEQ ID NO: 916892 - RNA, 19 nt, Artificial Sequence
  Description of Artificial Sequence: Synthetic oligonucleotide
agugguacagacggcccca

SEQ ID NO: 916893 - RNA, 19 nt, Artificial Sequence
  Description of Artificial Sequence: Synthetic oligonucleotide
ggcuaucuuaucagcggcg

SEQ ID NO: 916894 - RNA, 19 nt, Artificial Sequence
  Description of Artificial Sequence: Synthetic oligonucleotide
ucacggcacccucuaggcu

SEQ ID NO: 916895 - RNA, 19 nt, Artificial Sequence
  Description of Artificial Sequence: Synthetic oligonucleotide
cgugauucuaccugaucag

SEQ ID NO: 916896 - RNA, 19 nt, Artificial Sequence
  Description of Artificial Sequence: Synthetic oligonucleotide
ccacaaaaccgguuguaug

SEQ ID NO: 916897 - RNA, 19 nt, Artificial Sequence
  Description of Artificial Sequence: Synthetic oligonucleotide
ugauugggacauggguucu

SEQ ID NO: 916898 - RNA, 19 nt, Artificial Sequence
  Description of Artificial Sequence: Synthetic oligonucleotide
acagaccgagcagaugugu

SEQ ID NO: 916899 - RNA, 19 nt, Artificial Sequence
  Description of Artificial Sequence: Synthetic oligonucleotide
acucgugcuuguccuguga

SEQ ID NO: 916900 - RNA, 19 nt, Artificial Sequence
  Description of Artificial Sequence: Synthetic oligonucleotide
uacucgugcuuguccugug

SEQ ID NO: 916901 - RNA, 19 nt, Artificial Sequence
  Description of Artificial Sequence: Synthetic oligonucleotide
gauggcgaugccuccgucu

SEQ ID NO: 916902 - RNA, 19 nt, Artificial Sequence
  Description of Artificial Sequence: Synthetic oligonucleotide
gguguaccaggucaaggga

SEQ ID NO: 916903 - RNA, 19 nt, Artificial Sequence
  Description of Artificial Sequence: Synthetic oligonucleotide
caggugcgaugauggaagc

SEQ ID NO: 916904 - RNA, 19 nt, Artificial Sequence
  Description of Artificial Sequence: Synthetic oligonucleotide
acccggauauagacauccc

SEQ ID NO: 916905 - RNA, 19 nt, Artificial Sequence
  Description of Artificial Sequence: Synthetic oligonucleotide
gguaccgucugcgggacgc

SEQ ID NO: 916906 - RNA, 19 nt, Artificial Sequence
  Description of Artificial Sequence: Synthetic oligonucleotide
uucguccagucuuccucca

SEQ ID NO: 916907 - RNA, 19 nt, Artificial Sequence
  Description of Artificial Sequence: Synthetic oligonucleotide
ccugugaccgagugacugg

SEQ ID NO: 916908 - RNA, 19 nt, Artificial Sequence
  Description of Artificial Sequence: Synthetic oligonucleotide
uguugucuugggguccaac

SEQ ID NO: 916909 - RNA, 19 nt, Artificial Sequence
  Description of Artificial Sequence: Synthetic oligonucleotide
acaaaaccgguuguauguu

SEQ ID NO: 916910 - RNA, 19 nt, Artificial Sequence
  Description of Artificial Sequence: Synthetic oligonucleotide
augaauccgaaaagagaau

SEQ ID NO: 916911 - RNA, 19 nt, Artificial Sequence
  Description of Artificial Sequence: Synthetic oligonucleotide
ucguccagucuuccuccac

SEQ ID NO: 916912 - RNA, 19 nt, Artificial Sequence
  Description of Artificial Sequence: Synthetic oligonucleotide
cuccuaaauucaucuccca

SEQ ID NO: 916913 - RNA, 19 nt, Artificial Sequence
  Description of Artificial Sequence: Synthetic oligonucleotide
ccaacaucacagaccgagc

SEQ ID NO: 916914 - RNA, 19 nt, Artificial Sequence
  Description of Artificial Sequence: Synthetic oligonucleotide
uggucgaugaagggcccac

SEQ ID NO: 916915 - RNA, 19 nt, Artificial Sequence
  Description of Artificial Sequence: Synthetic oligonucleotide
gggguugacaucauacaga

SEQ ID NO: 916916 - RNA, 19 nt, Artificial Sequence
  Description of Artificial Sequence: Synthetic oligonucleotide
gacgcugagcgccgccaug

SEQ ID NO: 916917 - RNA, 19 nt, Artificial Sequence
  Description of Artificial Sequence: Synthetic oligonucleotide
gggucuaccuuggugcuug

SEQ ID NO: 916918 - RNA, 19 nt, Artificial Sequence
  Description of Artificial Sequence: Synthetic oligonucleotide
guaugcaaucuuccagugu

SEQ ID NO: 916919 - RNA, 19 nt, Artificial Sequence
  Description of Artificial Sequence: Synthetic oligonucleotide
caucuucguccagucuucc

SEQ ID NO: 916920 - RNA, 19 nt, Artificial Sequence
  Description of Artificial Sequence: Synthetic oligonucleotide
cgguccaacaucacagacc

SEQ ID NO: 916921 - RNA, 19 nt, Artificial Sequence
  Description of Artificial Sequence: Synthetic oligonucleotide
ccugaagccgagaccggcc

SEQ ID NO: 916922 - RNA, 19 nt, Artificial Sequence
  Description of Artificial Sequence: Synthetic oligonucleotide
gauugggacauggguucuc

SEQ ID NO: 916923 - RNA, 19 nt, Artificial Sequence
  Description of Artificial Sequence: Synthetic oligonucleotide
ugcgccggguuucccagua

SEQ ID NO: 916924 - RNA, 19 nt, Artificial Sequence
  Description of Artificial Sequence: Synthetic oligonucleotide
ucccauggugcagcaugag

SEQ ID NO: 916925 - RNA, 19 nt, Artificial Sequence
  Description of Artificial Sequence: Synthetic oligonucleotide
caggcgcccuccuuccagc

SEQ ID NO: 916926 - RNA, 19 nt, Artificial Sequence
  Description of Artificial Sequence: Synthetic oligonucleotide
guguaccaggucaagggaa

SEQ ID NO: 916927 - RNA, 19 nt, Artificial Sequence
  Description of Artificial Sequence: Synthetic oligonucleotide
ugccuccgucuuuguacag

SEQ ID NO: 916928 - RNA, 19 nt, Artificial Sequence
  Description of Artificial Sequence: Synthetic oligonucleotide
ggguucucaaguccugaca

SEQ ID NO: 916929 - RNA, 19 nt, Artificial Sequence
  Description of Artificial Sequence: Synthetic oligonucleotide
caugcugcgccggguuucc

SEQ ID NO: 916930 - RNA, 19 nt, Artificial Sequence
  Description of Artificial Sequence: Synthetic oligonucleotide
accgagugacuggugggug

SEQ ID NO: 916931 - RNA, 19 nt, Artificial Sequence
  Description of Artificial Sequence: Synthetic oligonucleotide
gacgacgcugagcgccgcc

SEQ ID NO: 916932 - RNA, 19 nt, Artificial Sequence
  Description of Artificial Sequence: Synthetic oligonucleotide
agcaaggaugcuacccgga

SEQ ID NO: 916933 - RNA, 19 nt, Artificial Sequence
  Description of Artificial Sequence: Synthetic oligonucleotide
gacguacaccuggucgaug

SEQ ID NO: 916934 - RNA, 19 nt, Artificial Sequence
  Description of Artificial Sequence: Synthetic oligonucleotide
ccgagugacuggugggugg

SEQ ID NO: 916935 - RNA, 19 nt, Artificial Sequence
  Description of Artificial Sequence: Synthetic oligonucleotide
gggacccugugaccgagug

SEQ ID NO: 916936 - RNA, 19 nt, Artificial Sequence
  Description of Artificial Sequence: Synthetic oligonucleotide
gccgccagaaugccgcugc

SEQ ID NO: 916937 - RNA, 19 nt, Artificial Sequence
  Description of Artificial Sequence: Synthetic oligonucleotide
gucacuucucaauucuguu

SEQ ID NO: 916938 - RNA, 19 nt, Artificial Sequence
  Description of Artificial Sequence: Synthetic oligonucleotide
ccacggcuaucuuaucagc

SEQ ID NO: 916939 - RNA, 19 nt, Artificial Sequence
  Description of Artificial Sequence: Synthetic oligonucleotide
acggcacccucuaggcugg

SEQ ID NO: 916940 - RNA, 19 nt, Artificial Sequence
  Description of Artificial Sequence: Synthetic oligonucleotide
aggugcgaugauggaagcu

SEQ ID NO: 916941 - RNA, 19 nt, Artificial Sequence
  Description of Artificial Sequence: Synthetic oligonucleotide
ggcgaugccuccgucuuug

SEQ ID NO: 916942 - RNA, 19 nt, Artificial Sequence
  Description of Artificial Sequence: Synthetic oligonucleotide
gucugcgggacgccacccc

SEQ ID NO: 916943 - RNA, 19 nt, Artificial Sequence
  Description of Artificial Sequence: Synthetic oligonucleotide
accgucugcgggacgccac

SEQ ID NO: 916944 - RNA, 19 nt, Artificial Sequence
  Description of Artificial Sequence: Synthetic oligonucleotide
ggcucgguccaacaucaca

SEQ ID NO: 916945 - RNA, 19 nt, Artificial Sequence
  Description of Artificial Sequence: Synthetic oligonucleotide
agcugaccccuggaccgac

SEQ ID NO: 916946 - RNA, 19 nt, Artificial Sequence
  Description of Artificial Sequence: Synthetic oligonucleotide
gcgguguaccaggucaagg

SEQ ID NO: 916947 - RNA, 19 nt, Artificial Sequence
  Description of Artificial Sequence: Synthetic oligonucleotide
guuuucggcucgguccaac

SEQ ID NO: 916948 - RNA, 19 nt, Artificial Sequence
  Description of Artificial Sequence: Synthetic oligonucleotide
augcagggccgcucgucca

SEQ ID NO: 916949 - RNA, 19 nt, Artificial Sequence
  Description of Artificial Sequence: Synthetic oligonucleotide
caaggaugcuacccggaua

SEQ ID NO: 916950 - RNA, 19 nt, Artificial Sequence
  Description of Artificial Sequence: Synthetic oligonucleotide
ggauguccgccgccgacug

SEQ ID NO: 916951 - RNA, 19 nt, Artificial Sequence
  Description of Artificial Sequence: Synthetic oligonucleotide
ggcgucuguggaguugagg

SEQ ID NO: 916952 - RNA, 19 nt, Artificial Sequence
  Description of Artificial Sequence: Synthetic oligonucleotide
caaugcagggccgcucguc

SEQ ID NO: 916953 - RNA, 19 nt, Artificial Sequence
  Description of Artificial Sequence: Synthetic oligonucleotide
cgcguagccuugcaggacg

SEQ ID NO: 916954 - RNA, 19 nt, Artificial Sequence
  Description of Artificial Sequence: Synthetic oligonucleotide
agacgacgcugagcgccgc

SEQ ID NO: 916955 - RNA, 19 nt, Artificial Sequence
  Description of Artificial Sequence: Synthetic oligonucleotide
auacgugauucuaccugau

SEQ ID NO: 916956 - RNA, 19 nt, Artificial Sequence
  Description of Artificial Sequence: Synthetic oligonucleotide
gaccccgaguuucuucaua

SEQ ID NO: 916957 - RNA, 19 nt, Artificial Sequence
  Description of Artificial Sequence: Synthetic oligonucleotide
ccgguuguauguugucuug

SEQ ID NO: 916958 - RNA, 19 nt, Artificial Sequence
  Description of Artificial Sequence: Synthetic oligonucleotide
uaccgucugcgggacgcca

SEQ ID NO: 916959 - RNA, 19 nt, Artificial Sequence
  Description of Artificial Sequence: Synthetic oligonucleotide
cuccgucuuuguacagcuc

SEQ ID NO: 916960 - RNA, 19 nt, Artificial Sequence
  Description of Artificial Sequence: Synthetic oligonucleotide
auggcgucuguggccacga

SEQ ID NO: 916961 - RNA, 19 nt, Artificial Sequence
  Description of Artificial Sequence: Synthetic oligonucleotide
agcggcgucuguggaguug

SEQ ID NO: 916962 - RNA, 19 nt, Artificial Sequence
  Description of Artificial Sequence: Synthetic oligonucleotide
agaccccgaguuucuucau

SEQ ID NO: 916963 - RNA, 19 nt, Artificial Sequence
  Description of Artificial Sequence: Synthetic oligonucleotide
cggcuaucuuaucagcggc

SEQ ID NO: 916964 - RNA, 19 nt, Artificial Sequence
  Description of Artificial Sequence: Synthetic oligonucleotide
acgacgcugagcgccgcca

SEQ ID NO: 916965 - RNA, 19 nt, Artificial Sequence
  Description of Artificial Sequence: Synthetic oligonucleotide
aagccgagaccggccgcca

SEQ ID NO: 916966 - RNA, 19 nt, Artificial Sequence
  Description of Artificial Sequence: Synthetic oligonucleotide
ccggacuugauggauguca

SEQ ID NO: 916967 - RNA, 19 nt, Artificial Sequence
  Description of Artificial Sequence: Synthetic oligonucleotide
ccggacucugcaaugaacu

SEQ ID NO: 916968 - RNA, 19 nt, Artificial Sequence
  Description of Artificial Sequence: Synthetic oligonucleotide
acgugggcucaaaccucac

SEQ ID NO: 916969 - RNA, 19 nt, Artificial Sequence
  Description of Artificial Sequence: Synthetic oligonucleotide
caucccugcggagauugaa

SEQ ID NO: 916970 - RNA, 19 nt, Artificial Sequence
  Description of Artificial Sequence: Synthetic oligonucleotide
gccuccgucuuuguacagc

SEQ ID NO: 916971 - RNA, 19 nt, Artificial Sequence
  Description of Artificial Sequence: Synthetic oligonucleotide
cggagauugaagccuucug

SEQ ID NO: 916972 - RNA, 19 nt, Artificial Sequence
  Description of Artificial Sequence: Synthetic oligonucleotide
ccuggucgaugaagggccc

SEQ ID NO: 916973 - RNA, 19 nt, Artificial Sequence
  Description of Artificial Sequence: Synthetic oligonucleotide
uggcgaugccuccgucuuu

SEQ ID NO: 916974 - RNA, 19 nt, Artificial Sequence
  Description of Artificial Sequence: Synthetic oligonucleotide
ccccgaguuucuucauagc

SEQ ID NO: 916975 - RNA, 19 nt, Artificial Sequence
  Description of Artificial Sequence: Synthetic oligonucleotide
augcugcgccggguuuccc

SEQ ID NO: 916976 - RNA, 19 nt, Artificial Sequence
  Description of Artificial Sequence: Synthetic oligonucleotide
ggucgaugaagggcccacc

SEQ ID NO: 916977 - RNA, 19 nt, Artificial Sequence
  Description of Artificial Sequence: Synthetic oligonucleotide
uccggacuugauggauguc

SEQ ID NO: 916978 - RNA, 19 nt, Artificial Sequence
  Description of Artificial Sequence: Synthetic oligonucleotide
gaggccuaggaaaggguuu

SEQ ID NO: 916979 - RNA, 19 nt, Artificial Sequence
  Description of Artificial Sequence: Synthetic oligonucleotide
ccacgugggcucaaaccuc

SEQ ID NO: 916980 - RNA, 19 nt, Artificial Sequence
  Description of Artificial Sequence: Synthetic oligonucleotide
gggguccaaccccaagauc

SEQ ID NO: 916981 - RNA, 19 nt, Artificial Sequence
  Description of Artificial Sequence: Synthetic oligonucleotide
gcuaucuuaucagcggcgu

SEQ ID NO: 916982 - RNA, 19 nt, Artificial Sequence
  Description of Artificial Sequence: Synthetic oligonucleotide
cugcaaugaacugcucaua

SEQ ID NO: 916983 - RNA, 19 nt, Artificial Sequence
  Description of Artificial Sequence: Synthetic oligonucleotide
guaccgucugcgggacgcc

SEQ ID NO: 916984 - RNA, 19 nt, Artificial Sequence
  Description of Artificial Sequence: Synthetic oligonucleotide
gcaaugagucugggugaag

SEQ ID NO: 916985 - RNA, 19 nt, Artificial Sequence
  Description of Artificial Sequence: Synthetic oligonucleotide
cugugauacucgugcuugu

SEQ ID NO: 916986 - RNA, 19 nt, Artificial Sequence
  Description of Artificial Sequence: Synthetic oligonucleotide
cccacgugggcucaaaccu

SEQ ID NO: 916987 - RNA, 19 nt, Artificial Sequence
  Description of Artificial Sequence: Synthetic oligonucleotide
gagcccaguuugaccuuca

SEQ ID NO: 916988 - RNA, 19 nt, Artificial Sequence
  Description of Artificial Sequence: Synthetic oligonucleotide
agcgcggagcccaguuuga

SEQ ID NO: 916989 - RNA, 19 nt, Artificial Sequence
  Description of Artificial Sequence: Synthetic oligonucleotide
cgcggagcccaguuugacc

SEQ ID NO: 916990 - RNA, 19 nt, Artificial Sequence
  Description of Artificial Sequence: Synthetic oligonucleotide
cggguuucccaguacucuc

SEQ ID NO: 916991 - RNA, 19 nt, Artificial Sequence
  Description of Artificial Sequence: Synthetic oligonucleotide
cucaaggggcuguccaaau

SEQ ID NO: 916992 - RNA, 19 nt, Artificial Sequence
  Description of Artificial Sequence: Synthetic oligonucleotide
gcgcacagauccauugauc

SEQ ID NO: 916993 - RNA, 19 nt, Artificial Sequence
  Description of Artificial Sequence: Synthetic oligonucleotide
ccuccgcguagccuugcag

SEQ ID NO: 916994 - RNA, 19 nt, Artificial Sequence
  Description of Artificial Sequence: Synthetic oligonucleotide
cugugaccgagugacuggu

SEQ ID NO: 916995 - RNA, 19 nt, Artificial Sequence
  Description of Artificial Sequence: Synthetic oligonucleotide
gcaaggaugcuacccggau

SEQ ID NO: 916996 - RNA, 19 nt, Artificial Sequence
  Description of Artificial Sequence: Synthetic oligonucleotide
cuggucgaugaagggccca

SEQ ID NO: 916997 - RNA, 19 nt, Artificial Sequence
  Description of Artificial Sequence: Synthetic oligonucleotide
gcccgcaagugcuuugcaa

SEQ ID NO: 916998 - RNA, 19 nt, Artificial Sequence
  Description of Artificial Sequence: Synthetic oligonucleotide
gcggcgucuguggaguuga

SEQ ID NO: 916999 - RNA, 19 nt, Artificial Sequence
  Description of Artificial Sequence: Synthetic oligonucleotide
guccaaccccaagaucucu

SEQ ID NO: 917000 - RNA, 19 nt, Artificial Sequence
  Description of Artificial Sequence: Synthetic oligonucleotide
cagcccuccgcguagccuu

SEQ ID NO: 917001 - RNA, 19 nt, Artificial Sequence
  Description of Artificial Sequence: Synthetic oligonucleotide
accccuggaccgacaggca

SEQ ID NO: 917002 - RNA, 19 nt, Artificial Sequence
  Description of Artificial Sequence: Synthetic oligonucleotide
gggugcaaugagucugggu

SEQ ID NO: 917003 - RNA, 19 nt, Artificial Sequence
  Description of Artificial Sequence: Synthetic oligonucleotide
agacaucccugcggagauu

SEQ ID NO: 917004 - RNA, 19 nt, Artificial Sequence
  Description of Artificial Sequence: Synthetic oligonucleotide
gccggguuucccaguacuc

SEQ ID NO: 917005 - RNA, 19 nt, Artificial Sequence
  Description of Artificial Sequence: Synthetic oligonucleotide
aggaugcuacccggauaua

SEQ ID NO: 917006 - RNA, 19 nt, Artificial Sequence
  Description of Artificial Sequence: Synthetic oligonucleotide
agcccuccgcguagccuug

SEQ ID NO: 917007 - RNA, 19 nt, Artificial Sequence
  Description of Artificial Sequence: Synthetic oligonucleotide
gccgccgacuggccaggcc

SEQ ID NO: 917008 - RNA, 19 nt, Artificial Sequence
  Description of Artificial Sequence: Synthetic oligonucleotide
gcgacacaugugacaugug

SEQ ID NO: 917009 - RNA, 19 nt, Artificial Sequence
  Description of Artificial Sequence: Synthetic oligonucleotide
ggccuaggaaaggguuuca

SEQ ID NO: 917010 - RNA, 19 nt, Artificial Sequence
  Description of Artificial Sequence: Synthetic oligonucleotide
ccuagguaggggccaccga

SEQ ID NO: 917011 - RNA, 19 nt, Artificial Sequence
  Description of Artificial Sequence: Synthetic oligonucleotide
ggcagaacaaggacccauu

SEQ ID NO: 917012 - RNA, 19 nt, Artificial Sequence
  Description of Artificial Sequence: Synthetic oligonucleotide
ccgccagaaugccgcugcc

SEQ ID NO: 917013 - RNA, 19 nt, Artificial Sequence
  Description of Artificial Sequence: Synthetic oligonucleotide
gcggagauugaagccuucu

SEQ ID NO: 917014 - RNA, 19 nt, Artificial Sequence
  Description of Artificial Sequence: Synthetic oligonucleotide
ggccgccagaaugccgcug

SEQ ID NO: 917015 - RNA, 19 nt, Artificial Sequence
  Description of Artificial Sequence: Synthetic oligonucleotide
ccgacaggcaggaaacauu

SEQ ID NO: 917016 - RNA, 19 nt, Artificial Sequence
  Description of Artificial Sequence: Synthetic oligonucleotide
gcgcggagcccaguuugac

SEQ ID NO: 917017 - RNA, 19 nt, Artificial Sequence
  Description of Artificial Sequence: Synthetic oligonucleotide
ccgcguagccuugcaggac

SEQ ID NO: 917018 - RNA, 19 nt, Artificial Sequence
  Description of Artificial Sequence: Synthetic oligonucleotide
gcccaccggacucugcaau

SEQ ID NO: 917019 - RNA, 19 nt, Artificial Sequence
  Description of Artificial Sequence: Synthetic oligonucleotide
ccggguuucccaguacucu

SEQ ID NO: 917020 - RNA, 19 nt, Artificial Sequence
  Description of Artificial Sequence: Synthetic oligonucleotide
gguuuucggcucgguccaa

SEQ ID NO: 917021 - RNA, 19 nt, Artificial Sequence
  Description of Artificial Sequence: Synthetic oligonucleotide
ccgacuggccaggccagaa

SEQ ID NO: 917022 - RNA, 19 nt, Artificial Sequence
  Description of Artificial Sequence: Synthetic oligonucleotide
gcccuccgcguagccuugc

SEQ ID NO: 917023 - RNA, 19 nt, Artificial Sequence
  Description of Artificial Sequence: Synthetic oligonucleotide
cgaugccuccgucuuugua

SEQ ID NO: 917024 - RNA, 19 nt, Artificial Sequence
  Description of Artificial Sequence: Synthetic oligonucleotide
cuggaccgacaggcaggaa

SEQ ID NO: 917025 - RNA, 19 nt, Artificial Sequence
  Description of Artificial Sequence: Synthetic oligonucleotide
gccgacuggccaggccaga

SEQ ID NO: 917026 - RNA, 19 nt, Artificial Sequence
  Description of Artificial Sequence: Synthetic oligonucleotide
cccuccgcguagccuugca

SEQ ID NO: 917027 - RNA, 19 nt, Artificial Sequence
  Description of Artificial Sequence: Synthetic oligonucleotide
cggcucgguccaacaucac

SEQ ID NO: 917028 - RNA, 19 nt, Artificial Sequence
  Description of Artificial Sequence: Synthetic oligonucleotide
cgccggguuucccaguacu

SEQ ID NO: 917029 - RNA, 19 nt, Artificial Sequence
  Description of Artificial Sequence: Synthetic oligonucleotide
ccucccacgugggcucaaa

SEQ ID NO: 917030 - RNA, 19 nt, Artificial Sequence
  Description of Artificial Sequence: Synthetic oligonucleotide
cagcggcgucuguggaguu

SEQ ID NO: 917031 - RNA, 19 nt, Artificial Sequence
  Description of Artificial Sequence: Synthetic oligonucleotide
ccgagcgcggagcccaguu

SEQ ID NO: 917032 - RNA, 19 nt, Artificial Sequence
  Description of Artificial Sequence: Synthetic oligonucleotide
cgagcgcggagcccaguuu

SEQ ID NO: 917033 - RNA, 19 nt, Artificial Sequence
  Description of Artificial Sequence: Synthetic oligonucleotide
cgccgccgacuggccaggc

SEQ ID NO: 917034 - RNA, 19 nt, Artificial Sequence
  Description of Artificial Sequence: Synthetic oligonucleotide
cgacgcugagcgccgccau

SEQ ID NO: 917035 - RNA, 19 nt, Artificial Sequence
  Description of Artificial Sequence: Synthetic oligonucleotide
cggccgccagaaugccgcu

SEQ ID NO: 917036 - RNA, 19 nt, Artificial Sequence
  Description of Artificial Sequence: Synthetic oligonucleotide
aaagucaagauccuucagc

SEQ ID NO: 917037 - RNA, 19 nt, Artificial Sequence
  Description of Artificial Sequence: Synthetic oligonucleotide
aauaccagagcacugccac

SEQ ID NO: 917038 - RNA, 19 nt, Artificial Sequence
  Description of Artificial Sequence: Synthetic oligonucleotide
uuacauaucauguaguggu

SEQ ID NO: 917039 - RNA, 19 nt, Artificial Sequence
  Description of Artificial Sequence: Synthetic oligonucleotide
uuaugcuugcuucaaagcc

SEQ ID NO: 917040 - RNA, 19 nt, Artificial Sequence
  Description of Artificial Sequence: Synthetic oligonucleotide
aaagccaggguuuucccac

SEQ ID NO: 917041 - RNA, 19 nt, Artificial Sequence
  Description of Artificial Sequence: Synthetic oligonucleotide
ucaguaucgauguccaugg

SEQ ID NO: 917042 - RNA, 19 nt, Artificial Sequence
  Description of Artificial Sequence: Synthetic oligonucleotide
uguucguccacaucgaugc

SEQ ID NO: 917043 - RNA, 19 nt, Artificial Sequence
  Description of Artificial Sequence: Synthetic oligonucleotide
auauaugccuccuccaucg

SEQ ID NO: 917044 - RNA, 19 nt, Artificial Sequence
  Description of Artificial Sequence: Synthetic oligonucleotide
aguaucgauguccaugggc

SEQ ID NO: 917045 - RNA, 19 nt, Artificial Sequence
  Description of Artificial Sequence: Synthetic oligonucleotide
uguauuucaucuuuccaug

SEQ ID NO: 917046 - RNA, 19 nt, Artificial Sequence
  Description of Artificial Sequence: Synthetic oligonucleotide
uaguauuccacacaugcac

SEQ ID NO: 917047 - RNA, 19 nt, Artificial Sequence
  Description of Artificial Sequence: Synthetic oligonucleotide
uugaacagagggauugugg

SEQ ID NO: 917048 - RNA, 19 nt, Artificial Sequence
  Description of Artificial Sequence: Synthetic oligonucleotide
cuuugcguaagccuggacg

SEQ ID NO: 917049 - RNA, 19 nt, Artificial Sequence
  Description of Artificial Sequence: Synthetic oligonucleotide
ucugccuuacauaucaugu

SEQ ID NO: 917050 - RNA, 19 nt, Artificial Sequence
  Description of Artificial Sequence: Synthetic oligonucleotide
guugauauaugccuccucc

SEQ ID NO: 917051 - RNA, 19 nt, Artificial Sequence
  Description of Artificial Sequence: Synthetic oligonucleotide
gaagaaucuccacaauggg

SEQ ID NO: 917052 - RNA, 19 nt, Artificial Sequence
  Description of Artificial Sequence: Synthetic oligonucleotide
uccaggauuguguuuaugc

SEQ ID NO: 917053 - RNA, 19 nt, Artificial Sequence
  Description of Artificial Sequence: Synthetic oligonucleotide
uccacaucgaugcacgaag

SEQ ID NO: 917054 - RNA, 19 nt, Artificial Sequence
  Description of Artificial Sequence: Synthetic oligonucleotide
uaagccuggacgaaggaca

SEQ ID NO: 917055 - RNA, 19 nt, Artificial Sequence
  Description of Artificial Sequence: Synthetic oligonucleotide
accucaucgaucugaaugg

SEQ ID NO: 917056 - RNA, 19 nt, Artificial Sequence
  Description of Artificial Sequence: Synthetic oligonucleotide
ucaucgaucugaauggcca

SEQ ID NO: 917057 - RNA, 19 nt, Artificial Sequence
  Description of Artificial Sequence: Synthetic oligonucleotide
uuguauuucaucuuuccau

SEQ ID NO: 917058 - RNA, 19 nt, Artificial Sequence
  Description of Artificial Sequence: Synthetic oligonucleotide
augaagaucuuauugcgcu

SEQ ID NO: 917059 - RNA, 19 nt, Artificial Sequence
  Description of Artificial Sequence: Synthetic oligonucleotide
aauggaaucgugucaguau

SEQ ID NO: 917060 - RNA, 19 nt, Artificial Sequence
  Description of Artificial Sequence: Synthetic oligonucleotide
aaucgugucaguaucgaug

SEQ ID NO: 917061 - RNA, 19 nt, Artificial Sequence
  Description of Artificial Sequence: Synthetic oligonucleotide
uccaauccacaaaaucugg

SEQ ID NO: 917062 - RNA, 19 nt, Artificial Sequence
  Description of Artificial Sequence: Synthetic oligonucleotide
uuugcguaagccuggacga

SEQ ID NO: 917063 - RNA, 19 nt, Artificial Sequence
  Description of Artificial Sequence: Synthetic oligonucleotide
aucgacaucagaauccucg

SEQ ID NO: 917064 - RNA, 19 nt, Artificial Sequence
  Description of Artificial Sequence: Synthetic oligonucleotide
caugcuuugcguaagccug

SEQ ID NO: 917065 - RNA, 19 nt, Artificial Sequence
  Description of Artificial Sequence: Synthetic oligonucleotide
aggaauaccagagcacugc

SEQ ID NO: 917066 - RNA, 19 nt, Artificial Sequence
  Description of Artificial Sequence: Synthetic oligonucleotide
uccgucacauguuccaugg

SEQ ID NO: 917067 - RNA, 19 nt, Artificial Sequence
  Description of Artificial Sequence: Synthetic oligonucleotide
agaaggucuacuguguuuc

SEQ ID NO: 917068 - RNA, 19 nt, Artificial Sequence
  Description of Artificial Sequence: Synthetic oligonucleotide
aacugugggaagugcuucg

SEQ ID NO: 917069 - RNA, 19 nt, Artificial Sequence
  Description of Artificial Sequence: Synthetic oligonucleotide
uauuucaucuuuccaugga

SEQ ID NO: 917070 - RNA, 19 nt, Artificial Sequence
  Description of Artificial Sequence: Synthetic oligonucleotide
ucgagcaaggcuagcaaag

SEQ ID NO: 917071 - RNA, 19 nt, Artificial Sequence
  Description of Artificial Sequence: Synthetic oligonucleotide
aggucugucagcuggacug

SEQ ID NO: 917072 - RNA, 19 nt, Artificial Sequence
  Description of Artificial Sequence: Synthetic oligonucleotide
uccaugggcacaaaaucug

SEQ ID NO: 917073 - RNA, 19 nt, Artificial Sequence
  Description of Artificial Sequence: Synthetic oligonucleotide
gaauccucgucucuuuucc

SEQ ID NO: 917074 - RNA, 19 nt, Artificial Sequence
  Description of Artificial Sequence: Synthetic oligonucleotide
uuaaggaguuccuccaugu

SEQ ID NO: 917075 - RNA, 19 nt, Artificial Sequence
  Description of Artificial Sequence: Synthetic oligonucleotide
ucucaucugccuuacauau

SEQ ID NO: 917076 - RNA, 19 nt, Artificial Sequence
  Description of Artificial Sequence: Synthetic oligonucleotide
uguguuuaugcuugcuuca

SEQ ID NO: 917077 - RNA, 19 nt, Artificial Sequence
  Description of Artificial Sequence: Synthetic oligonucleotide
agaaucuccacaaugggga

SEQ ID NO: 917078 - RNA, 19 nt, Artificial Sequence
  Description of Artificial Sequence: Synthetic oligonucleotide
uguaacacccaguuuacuu

SEQ ID NO: 917079 - RNA, 19 nt, Artificial Sequence
  Description of Artificial Sequence: Synthetic oligonucleotide
uuuccauaguauuccacac

SEQ ID NO: 917080 - RNA, 19 nt, Artificial Sequence
  Description of Artificial Sequence: Synthetic oligonucleotide
auuccacacaugcacaugu

SEQ ID NO: 917081 - RNA, 19 nt, Artificial Sequence
  Description of Artificial Sequence: Synthetic oligonucleotide
ucuaccuuucuuaaacuuu

SEQ ID NO: 917082 - RNA, 19 nt, Artificial Sequence
  Description of Artificial Sequence: Synthetic oligonucleotide
gagccuuguaucguuaagg

SEQ ID NO: 917083 - RNA, 19 nt, Artificial Sequence
  Description of Artificial Sequence: Synthetic oligonucleotide
ucacauguuccauggcgcg

SEQ ID NO: 917084 - RNA, 19 nt, Artificial Sequence
  Description of Artificial Sequence: Synthetic oligonucleotide
ggacgaaggacacaaaggc

SEQ ID NO: 917085 - RNA, 19 nt, Artificial Sequence
  Description of Artificial Sequence: Synthetic oligonucleotide
aacauguccuccaggcggc

SEQ ID NO: 917086 - RNA, 19 nt, Artificial Sequence
  Description of Artificial Sequence: Synthetic oligonucleotide
caucgaugcacgaaggcac

SEQ ID NO: 917087 - RNA, 19 nt, Artificial Sequence
  Description of Artificial Sequence: Synthetic oligonucleotide
aucgugucaguaucgaugu

SEQ ID NO: 917088 - RNA, 19 nt, Artificial Sequence
  Description of Artificial Sequence: Synthetic oligonucleotide
agggucguacuguaacacc

SEQ ID NO: 917089 - RNA, 19 nt, Artificial Sequence
  Description of Artificial Sequence: Synthetic oligonucleotide
ucggacaggguuccggagg

SEQ ID NO: 917090 - RNA, 19 nt, Artificial Sequence
  Description of Artificial Sequence: Synthetic oligonucleotide
uccacacaugcacaugugc

SEQ ID NO: 917091 - RNA, 19 nt, Artificial Sequence
  Description of Artificial Sequence: Synthetic oligonucleotide
aguaggaauaccagagcac

SEQ ID NO: 917092 - RNA, 19 nt, Artificial Sequence
  Description of Artificial Sequence: Synthetic oligonucleotide
aucacgucagugcacacca

SEQ ID NO: 917093 - RNA, 19 nt, Artificial Sequence
  Description of Artificial Sequence: Synthetic oligonucleotide
ugauauaugccuccuccau

SEQ ID NO: 917094 - RNA, 19 nt, Artificial Sequence
  Description of Artificial Sequence: Synthetic oligonucleotide
ucaugcuuugcguaagccu

SEQ ID NO: 917095 - RNA, 19 nt, Artificial Sequence
  Description of Artificial Sequence: Synthetic oligonucleotide
uaucuuuaaauggaaucgu

SEQ ID NO: 917096 - RNA, 19 nt, Artificial Sequence
  Description of Artificial Sequence: Synthetic oligonucleotide
uguggcagacugcaccggg

SEQ ID NO: 917097 - RNA, 19 nt, Artificial Sequence
  Description of Artificial Sequence: Synthetic oligonucleotide
ucugacaccccuaggucug

SEQ ID NO: 917098 - RNA, 19 nt, Artificial Sequence
  Description of Artificial Sequence: Synthetic oligonucleotide
cacacgaggaugcagcggc

SEQ ID NO: 917099 - RNA, 19 nt, Artificial Sequence
  Description of Artificial Sequence: Synthetic oligonucleotide
cacaaaggcuuucaugccc

SEQ ID NO: 917100 - RNA, 19 nt, Artificial Sequence
  Description of Artificial Sequence: Synthetic oligonucleotide
cuggacgaaggacacaaag

SEQ ID NO: 917101 - RNA, 19 nt, Artificial Sequence
  Description of Artificial Sequence: Synthetic oligonucleotide
ugcguggcugagaaaaggc

SEQ ID NO: 917102 - RNA, 19 nt, Artificial Sequence
  Description of Artificial Sequence: Synthetic oligonucleotide
aguugauauaugccuccuc

SEQ ID NO: 917103 - RNA, 19 nt, Artificial Sequence
  Description of Artificial Sequence: Synthetic oligonucleotide
ucgggaguaggaauaccag

SEQ ID NO: 917104 - RNA, 19 nt, Artificial Sequence
  Description of Artificial Sequence: Synthetic oligonucleotide
guaacacccaguuuacuuc

SEQ ID NO: 917105 - RNA, 19 nt, Artificial Sequence
  Description of Artificial Sequence: Synthetic oligonucleotide
uaacacccaguuuacuuca

SEQ ID NO: 917106 - RNA, 19 nt, Artificial Sequence
  Description of Artificial Sequence: Synthetic oligonucleotide
gugugggaaucccagcucg

SEQ ID NO: 917107 - RNA, 19 nt, Artificial Sequence
  Description of Artificial Sequence: Synthetic oligonucleotide
gucaucgacaucagaaucc

SEQ ID NO: 917108 - RNA, 19 nt, Artificial Sequence
  Description of Artificial Sequence: Synthetic oligonucleotide
auaugccuccuccaucggg

SEQ ID NO: 917109 - RNA, 19 nt, Artificial Sequence
  Description of Artificial Sequence: Synthetic oligonucleotide
gucaguaucgauguccaug

SEQ ID NO: 917110 - RNA, 19 nt, Artificial Sequence
  Description of Artificial Sequence: Synthetic oligonucleotide
ugauugaauuucucaucug

SEQ ID NO: 917111 - RNA, 19 nt, Artificial Sequence
  Description of Artificial Sequence: Synthetic oligonucleotide
gaugcagcggcaccugcag

SEQ ID NO: 917112 - RNA, 19 nt, Artificial Sequence
  Description of Artificial Sequence: Synthetic oligonucleotide
agccuuguaucguuaagga

SEQ ID NO: 917113 - RNA, 19 nt, Artificial Sequence
  Description of Artificial Sequence: Synthetic oligonucleotide
uaggaauaccagagcacug

SEQ ID NO: 917114 - RNA, 19 nt, Artificial Sequence
  Description of Artificial Sequence: Synthetic oligonucleotide
acaaaaucuggaaacugcu

SEQ ID NO: 917115 - RNA, 19 nt, Artificial Sequence
  Description of Artificial Sequence: Synthetic oligonucleotide
aggucuacuguguuucucu

SEQ ID NO: 917116 - RNA, 19 nt, Artificial Sequence
  Description of Artificial Sequence: Synthetic oligonucleotide
aaacccucgagcaaggcua

SEQ ID NO: 917117 - RNA, 19 nt, Artificial Sequence
  Description of Artificial Sequence: Synthetic oligonucleotide
uauaugccuccuccaucgg

SEQ ID NO: 917118 - RNA, 19 nt, Artificial Sequence
  Description of Artificial Sequence: Synthetic oligonucleotide
uccaucgggaguaggaaua

SEQ ID NO: 917119 - RNA, 19 nt, Artificial Sequence
  Description of Artificial Sequence: Synthetic oligonucleotide
uccuccaucgggaguagga

SEQ ID NO: 917120 - RNA, 19 nt, Artificial Sequence
  Description of Artificial Sequence: Synthetic oligonucleotide
augguuccggaggaaaugg

SEQ ID NO: 917121 - RNA, 19 nt, Artificial Sequence
  Description of Artificial Sequence: Synthetic oligonucleotide
aaauggaaucgugucagua

SEQ ID NO: 917122 - RNA, 19 nt, Artificial Sequence
  Description of Artificial Sequence: Synthetic oligonucleotide
agcuuucggaacuccauga

SEQ ID NO: 917123 - RNA, 19 nt, Artificial Sequence
  Description of Artificial Sequence: Synthetic oligonucleotide
ucggcagaaggucuacugu

SEQ ID NO: 917124 - RNA, 19 nt, Artificial Sequence
  Description of Artificial Sequence: Synthetic oligonucleotide
gggaguaggaauaccagag

SEQ ID NO: 917125 - RNA, 19 nt, Artificial Sequence
  Description of Artificial Sequence: Synthetic oligonucleotide
uaccuguuacagcuucugc

SEQ ID NO: 917126 - RNA, 19 nt, Artificial Sequence
  Description of Artificial Sequence: Synthetic oligonucleotide
ucaucgacaucagaauccu

SEQ ID NO: 917127 - RNA, 19 nt, Artificial Sequence
  Description of Artificial Sequence: Synthetic oligonucleotide
agagccuuguaucguuaag

SEQ ID NO: 917128 - RNA, 19 nt, Artificial Sequence
  Description of Artificial Sequence: Synthetic oligonucleotide
auccucagcagggcaaacc

SEQ ID NO: 917129 - RNA, 19 nt, Artificial Sequence
  Description of Artificial Sequence: Synthetic oligonucleotide
ucccagcucgcgcagcgcg

SEQ ID NO: 917130 - RNA, 19 nt, Artificial Sequence
  Description of Artificial Sequence: Synthetic oligonucleotide
accaagaucccacucugaa

SEQ ID NO: 917131 - RNA, 19 nt, Artificial Sequence
  Description of Artificial Sequence: Synthetic oligonucleotide
gucaagaagucugucugcc

SEQ ID NO: 917132 - RNA, 19 nt, Artificial Sequence
  Description of Artificial Sequence: Synthetic oligonucleotide
acaauggggaugacaaaag

SEQ ID NO: 917133 - RNA, 19 nt, Artificial Sequence
  Description of Artificial Sequence: Synthetic oligonucleotide
acaucgaugcacgaaggca

SEQ ID NO: 917134 - RNA, 19 nt, Artificial Sequence
  Description of Artificial Sequence: Synthetic oligonucleotide
ugggaaucccagcucgcgc

SEQ ID NO: 917135 - RNA, 19 nt, Artificial Sequence
  Description of Artificial Sequence: Synthetic oligonucleotide
cacagagauucggacaggg

SEQ ID NO: 917136 - RNA, 19 nt, Artificial Sequence
  Description of Artificial Sequence: Synthetic oligonucleotide
aagccuggacgaaggacac

SEQ ID NO: 917137 - RNA, 19 nt, Artificial Sequence
  Description of Artificial Sequence: Synthetic oligonucleotide
auugaacagagggauugug

SEQ ID NO: 917138 - RNA, 19 nt, Artificial Sequence
  Description of Artificial Sequence: Synthetic oligonucleotide
ugcuucgugaagugugaca

SEQ ID NO: 917139 - RNA, 19 nt, Artificial Sequence
  Description of Artificial Sequence: Synthetic oligonucleotide
gaacagagggauuguggca

SEQ ID NO: 917140 - RNA, 19 nt, Artificial Sequence
  Description of Artificial Sequence: Synthetic oligonucleotide
ugaugguuccggaggaaau

SEQ ID NO: 917141 - RNA, 19 nt, Artificial Sequence
  Description of Artificial Sequence: Synthetic oligonucleotide
auaucauguagugguucuc

SEQ ID NO: 917142 - RNA, 19 nt, Artificial Sequence
  Description of Artificial Sequence: Synthetic oligonucleotide
ugcacucaugcuuugcgua

SEQ ID NO: 917143 - RNA, 19 nt, Artificial Sequence
  Description of Artificial Sequence: Synthetic oligonucleotide
guuccggaggaaauggacc

SEQ ID NO: 917144 - RNA, 19 nt, Artificial Sequence
  Description of Artificial Sequence: Synthetic oligonucleotide
gggcacaaaaucuggaaac

SEQ ID NO: 917145 - RNA, 19 nt, Artificial Sequence
  Description of Artificial Sequence: Synthetic oligonucleotide
uucccacuaccuguuacag

SEQ ID NO: 917146 - RNA, 19 nt, Artificial Sequence
  Description of Artificial Sequence: Synthetic oligonucleotide
ccuuacauaucauguagug

SEQ ID NO: 917147 - RNA, 19 nt, Artificial Sequence
  Description of Artificial Sequence: Synthetic oligonucleotide
cacaucgaugcacgaaggc

SEQ ID NO: 917148 - RNA, 19 nt, Artificial Sequence
  Description of Artificial Sequence: Synthetic oligonucleotide
cuguucguccacaucgaug

SEQ ID NO: 917149 - RNA, 19 nt, Artificial Sequence
  Description of Artificial Sequence: Synthetic oligonucleotide
uucggaacuccaugaagau

SEQ ID NO: 917150 - RNA, 19 nt, Artificial Sequence
  Description of Artificial Sequence: Synthetic oligonucleotide
cuucgugaagugugacagg

SEQ ID NO: 917151 - RNA, 19 nt, Artificial Sequence
  Description of Artificial Sequence: Synthetic oligonucleotide
cugauugaauuucucaucu

SEQ ID NO: 917152 - RNA, 19 nt, Artificial Sequence
  Description of Artificial Sequence: Synthetic oligonucleotide
ugugggaaucccagcucgc

SEQ ID NO: 917153 - RNA, 19 nt, Artificial Sequence
  Description of Artificial Sequence: Synthetic oligonucleotide
gagucugacaccccuaggu

SEQ ID NO: 917154 - RNA, 19 nt, Artificial Sequence
  Description of Artificial Sequence: Synthetic oligonucleotide
ucucuucaacagcaccucu

SEQ ID NO: 917155 - RNA, 19 nt, Artificial Sequence
  Description of Artificial Sequence: Synthetic oligonucleotide
ucucaccaaguucuccacu

SEQ ID NO: 917156 - RNA, 19 nt, Artificial Sequence
  Description of Artificial Sequence: Synthetic oligonucleotide
uaaauggaaucgugucagu

SEQ ID NO: 917157 - RNA, 19 nt, Artificial Sequence
  Description of Artificial Sequence: Synthetic oligonucleotide
caucgaucugaauggccag

SEQ ID NO: 917158 - RNA, 19 nt, Artificial Sequence
  Description of Artificial Sequence: Synthetic oligonucleotide
aggaugcagcggcaccugc

SEQ ID NO: 917159 - RNA, 19 nt, Artificial Sequence
  Description of Artificial Sequence: Synthetic oligonucleotide
ugcguaagccuggacgaag

SEQ ID NO: 917160 - RNA, 19 nt, Artificial Sequence
  Description of Artificial Sequence: Synthetic oligonucleotide
ucuagggccuuuccauagu

SEQ ID NO: 917161 - RNA, 19 nt, Artificial Sequence
  Description of Artificial Sequence: Synthetic oligonucleotide
agucaagauccuucagccu

SEQ ID NO: 917162 - RNA, 19 nt, Artificial Sequence
  Description of Artificial Sequence: Synthetic oligonucleotide
auaguauuccacacaugca

SEQ ID NO: 917163 - RNA, 19 nt, Artificial Sequence
  Description of Artificial Sequence: Synthetic oligonucleotide
uaucguuaaggaguuccuc

SEQ ID NO: 917164 - RNA, 19 nt, Artificial Sequence
  Description of Artificial Sequence: Synthetic oligonucleotide
acccaguuuacuucaggaa

SEQ ID NO: 917165 - RNA, 19 nt, Artificial Sequence
  Description of Artificial Sequence: Synthetic oligonucleotide
uucggacaggguuccggag

SEQ ID NO: 917166 - RNA, 19 nt, Artificial Sequence
  Description of Artificial Sequence: Synthetic oligonucleotide
caucacgucagugcacacc

SEQ ID NO: 917167 - RNA, 19 nt, Artificial Sequence
  Description of Artificial Sequence: Synthetic oligonucleotide
cucaugcuuugcguaagcc

SEQ ID NO: 917168 - RNA, 19 nt, Artificial Sequence
  Description of Artificial Sequence: Synthetic oligonucleotide
ggaauaccagagcacugcc

SEQ ID NO: 917169 - RNA, 19 nt, Artificial Sequence
  Description of Artificial Sequence: Synthetic oligonucleotide
ggccgauucgggcuguucg

SEQ ID NO: 917170 - RNA, 19 nt, Artificial Sequence
  Description of Artificial Sequence: Synthetic oligonucleotide
gagggucguacuguaacac

SEQ ID NO: 917171 - RNA, 19 nt, Artificial Sequence
  Description of Artificial Sequence: Synthetic oligonucleotide
gauucgggcuguucgucca

SEQ ID NO: 917172 - RNA, 19 nt, Artificial Sequence
  Description of Artificial Sequence: Synthetic oligonucleotide
ccuuguaucguuaaggagu

SEQ ID NO: 917173 - RNA, 19 nt, Artificial Sequence
  Description of Artificial Sequence: Synthetic oligonucleotide
caugcacaugugcugaaga

SEQ ID NO: 917174 - RNA, 19 nt, Artificial Sequence
  Description of Artificial Sequence: Synthetic oligonucleotide
guaggaauaccagagcacu

SEQ ID NO: 917175 - RNA, 19 nt, Artificial Sequence
  Description of Artificial Sequence: Synthetic oligonucleotide
ucuucccuucucagaagaa

SEQ ID NO: 917176 - RNA, 19 nt, Artificial Sequence
  Description of Artificial Sequence: Synthetic oligonucleotide
caccauggccgauucgggc

SEQ ID NO: 917177 - RNA, 19 nt, Artificial Sequence
  Description of Artificial Sequence: Synthetic oligonucleotide
gccaccauggccgauucgg

SEQ ID NO: 917178 - RNA, 19 nt, Artificial Sequence
  Description of Artificial Sequence: Synthetic oligonucleotide
cauaucauguagugguucu

SEQ ID NO: 917179 - RNA, 19 nt, Artificial Sequence
  Description of Artificial Sequence: Synthetic oligonucleotide
guaagccuggacgaaggac

SEQ ID NO: 917180 - RNA, 19 nt, Artificial Sequence
  Description of Artificial Sequence: Synthetic oligonucleotide
ucgugaagugugacaggac

SEQ ID NO: 917181 - RNA, 19 nt, Artificial Sequence
  Description of Artificial Sequence: Synthetic oligonucleotide
cgucacauguuccauggcg

SEQ ID NO: 917182 - RNA, 19 nt, Artificial Sequence
  Description of Artificial Sequence: Synthetic oligonucleotide
ucacagagauucggacagg

SEQ ID NO: 917183 - RNA, 19 nt, Artificial Sequence
  Description of Artificial Sequence: Synthetic oligonucleotide
cuaccuguuacagcuucug

SEQ ID NO: 917184 - RNA, 19 nt, Artificial Sequence
  Description of Artificial Sequence: Synthetic oligonucleotide
gaccagcugauugaauuuc

SEQ ID NO: 917185 - RNA, 19 nt, Artificial Sequence
  Description of Artificial Sequence: Synthetic oligonucleotide
cuuugaccaagcuuuauuu

SEQ ID NO: 917186 - RNA, 19 nt, Artificial Sequence
  Description of Artificial Sequence: Synthetic oligonucleotide
acuuccuccggaacauguc

SEQ ID NO: 917187 - RNA, 19 nt, Artificial Sequence
  Description of Artificial Sequence: Synthetic oligonucleotide
caugggcacaaaaucugga

SEQ ID NO: 917188 - RNA, 19 nt, Artificial Sequence
  Description of Artificial Sequence: Synthetic oligonucleotide
gggucguacuguaacaccc

SEQ ID NO: 917189 - RNA, 19 nt, Artificial Sequence
  Description of Artificial Sequence: Synthetic oligonucleotide
gugggaaucccagcucgcg

SEQ ID NO: 917190 - RNA, 19 nt, Artificial Sequence
  Description of Artificial Sequence: Synthetic oligonucleotide
acaugcacaugugcugaag

SEQ ID NO: 917191 - RNA, 19 nt, Artificial Sequence
  Description of Artificial Sequence: Synthetic oligonucleotide
ggccuuuccauaguauucc

SEQ ID NO: 917192 - RNA, 19 nt, Artificial Sequence
  Description of Artificial Sequence: Synthetic oligonucleotide
gccuuguaucguuaaggag

SEQ ID NO: 917193 - RNA, 19 nt, Artificial Sequence
  Description of Artificial Sequence: Synthetic oligonucleotide
ccaugggcacaaaaucugg

SEQ ID NO: 917194 - RNA, 19 nt, Artificial Sequence
  Description of Artificial Sequence: Synthetic oligonucleotide
gugucugcguggcugagaa

SEQ ID NO: 917195 - RNA, 19 nt, Artificial Sequence
  Description of Artificial Sequence: Synthetic oligonucleotide
gaagugugacaggaccuca

SEQ ID NO: 917196 - RNA, 19 nt, Artificial Sequence
  Description of Artificial Sequence: Synthetic oligonucleotide
aacccucgagcaaggcuag

SEQ ID NO: 917197 - RNA, 19 nt, Artificial Sequence
  Description of Artificial Sequence: Synthetic oligonucleotide
cugaagcuuucggaacucc

SEQ ID NO: 917198 - RNA, 19 nt, Artificial Sequence
  Description of Artificial Sequence: Synthetic oligonucleotide
agugcuucgugaaguguga

SEQ ID NO: 917199 - RNA, 19 nt, Artificial Sequence
  Description of Artificial Sequence: Synthetic oligonucleotide
uccggaggaaauggaccag

SEQ ID NO: 917200 - RNA, 19 nt, Artificial Sequence
  Description of Artificial Sequence: Synthetic oligonucleotide
gugucaguaucgaugucca

SEQ ID NO: 917201 - RNA, 19 nt, Artificial Sequence
  Description of Artificial Sequence: Synthetic oligonucleotide
ugacaaaagccaggguuuu

SEQ ID NO: 917202 - RNA, 19 nt, Artificial Sequence
  Description of Artificial Sequence: Synthetic oligonucleotide
uggcugaacugugggaagu

SEQ ID NO: 917203 - RNA, 19 nt, Artificial Sequence
  Description of Artificial Sequence: Synthetic oligonucleotide
cacuuccugugucugcgug

SEQ ID NO: 917204 - RNA, 19 nt, Artificial Sequence
  Description of Artificial Sequence: Synthetic oligonucleotide
cgugucaguaucgaugucc

SEQ ID NO: 917205 - RNA, 19 nt, Artificial Sequence
  Description of Artificial Sequence: Synthetic oligonucleotide
gugaggaccuucaccugag

SEQ ID NO: 917206 - RNA, 19 nt, Artificial Sequence
  Description of Artificial Sequence: Synthetic oligonucleotide
accggggucauguguggga

SEQ ID NO: 917207 - RNA, 19 nt, Artificial Sequence
  Description of Artificial Sequence: Synthetic oligonucleotide
aagugugacaggaccucau

SEQ ID NO: 917208 - RNA, 19 nt, Artificial Sequence
  Description of Artificial Sequence: Synthetic oligonucleotide
agggcaaacccucgagcaa

SEQ ID NO: 917209 - RNA, 19 nt, Artificial Sequence
  Description of Artificial Sequence: Synthetic oligonucleotide
gacaccccuaggucuguca

SEQ ID NO: 917210 - RNA, 19 nt, Artificial Sequence
  Description of Artificial Sequence: Synthetic oligonucleotide
cuuguaucguuaaggaguu

SEQ ID NO: 917211 - RNA, 19 nt, Artificial Sequence
  Description of Artificial Sequence: Synthetic oligonucleotide
caguaucgauguccauggg

SEQ ID NO: 917212 - RNA, 19 nt, Artificial Sequence
  Description of Artificial Sequence: Synthetic oligonucleotide
ggcuagcaaagucaagauc

SEQ ID NO: 917213 - RNA, 19 nt, Artificial Sequence
  Description of Artificial Sequence: Synthetic oligonucleotide
ucccaggcacccuccguca

SEQ ID NO: 917214 - RNA, 19 nt, Artificial Sequence
  Description of Artificial Sequence: Synthetic oligonucleotide
gucugacaccccuaggucu

SEQ ID NO: 917215 - RNA, 19 nt, Artificial Sequence
  Description of Artificial Sequence: Synthetic oligonucleotide
gaaggacacaaaggcuuuc

SEQ ID NO: 917216 - RNA, 19 nt, Artificial Sequence
  Description of Artificial Sequence: Synthetic oligonucleotide
cucgucucuuuuccucuug

SEQ ID NO: 917217 - RNA, 19 nt, Artificial Sequence
  Description of Artificial Sequence: Synthetic oligonucleotide
gggcaaacccucgagcaag

SEQ ID NO: 917218 - RNA, 19 nt, Artificial Sequence
  Description of Artificial Sequence: Synthetic oligonucleotide
ugugucugcguggcugaga

SEQ ID NO: 917219 - RNA, 19 nt, Artificial Sequence
  Description of Artificial Sequence: Synthetic oligonucleotide
cucgagcaaggcuagcaaa

SEQ ID NO: 917220 - RNA, 19 nt, Artificial Sequence
  Description of Artificial Sequence: Synthetic oligonucleotide
gacaaaagccaggguuuuc

SEQ ID NO: 917221 - RNA, 19 nt, Artificial Sequence
  Description of Artificial Sequence: Synthetic oligonucleotide
acgucagugcacaccaaga

SEQ ID NO: 917222 - RNA, 19 nt, Artificial Sequence
  Description of Artificial Sequence: Synthetic oligonucleotide
ucgaugcacgaaggcacug

SEQ ID NO: 917223 - RNA, 19 nt, Artificial Sequence
  Description of Artificial Sequence: Synthetic oligonucleotide
guuccggccuccaauccac

SEQ ID NO: 917224 - RNA, 19 nt, Artificial Sequence
  Description of Artificial Sequence: Synthetic oligonucleotide
cacaccaagaucccacucu

SEQ ID NO: 917225 - RNA, 19 nt, Artificial Sequence
  Description of Artificial Sequence: Synthetic oligonucleotide
ggauuguguuuaugcuugc

SEQ ID NO: 917226 - RNA, 19 nt, Artificial Sequence
  Description of Artificial Sequence: Synthetic oligonucleotide
caucgggaguaggaauacc

SEQ ID NO: 917227 - RNA, 19 nt, Artificial Sequence
  Description of Artificial Sequence: Synthetic oligonucleotide
cugccuuacauaucaugua

SEQ ID NO: 917228 - RNA, 19 nt, Artificial Sequence
  Description of Artificial Sequence: Synthetic oligonucleotide
gggaaucccagcucgcgca

SEQ ID NO: 917229 - RNA, 19 nt, Artificial Sequence
  Description of Artificial Sequence: Synthetic oligonucleotide
guuacagcuucugcagcga

SEQ ID NO: 917230 - RNA, 19 nt, Artificial Sequence
  Description of Artificial Sequence: Synthetic oligonucleotide
gaaccucucuacaucuucu

SEQ ID NO: 917231 - RNA, 19 nt, Artificial Sequence
  Description of Artificial Sequence: Synthetic oligonucleotide
ggagggucguacuguaaca

SEQ ID NO: 917232 - RNA, 19 nt, Artificial Sequence
  Description of Artificial Sequence: Synthetic oligonucleotide
ugcuuugcguaagccugga

SEQ ID NO: 917233 - RNA, 19 nt, Artificial Sequence
  Description of Artificial Sequence: Synthetic oligonucleotide
ugucaguaucgauguccau

SEQ ID NO: 917234 - RNA, 19 nt, Artificial Sequence
  Description of Artificial Sequence: Synthetic oligonucleotide
cacccuccgucacauguuc

SEQ ID NO: 917235 - RNA, 19 nt, Artificial Sequence
  Description of Artificial Sequence: Synthetic oligonucleotide
gauuguguuuaugcuugcu

SEQ ID NO: 917236 - RNA, 19 nt, Artificial Sequence
  Description of Artificial Sequence: Synthetic oligonucleotide
agcccaugucaagaagucu

SEQ ID NO: 917237 - RNA, 19 nt, Artificial Sequence
  Description of Artificial Sequence: Synthetic oligonucleotide
ugggagggucguacuguaa

SEQ ID NO: 917238 - RNA, 19 nt, Artificial Sequence
  Description of Artificial Sequence: Synthetic oligonucleotide
cacuggcauugcugggagg

SEQ ID NO: 917239 - RNA, 19 nt, Artificial Sequence
  Description of Artificial Sequence: Synthetic oligonucleotide
uccggaggccugcucucac

SEQ ID NO: 917240 - RNA, 19 nt, Artificial Sequence
  Description of Artificial Sequence: Synthetic oligonucleotide
ggaaucccagcucgcgcag

SEQ ID NO: 917241 - RNA, 19 nt, Artificial Sequence
  Description of Artificial Sequence: Synthetic oligonucleotide
gaaucgugucaguaucgau

SEQ ID NO: 917242 - RNA, 19 nt, Artificial Sequence
  Description of Artificial Sequence: Synthetic oligonucleotide
aucgaugcacgaaggcacu

SEQ ID NO: 917243 - RNA, 19 nt, Artificial Sequence
  Description of Artificial Sequence: Synthetic oligonucleotide
cucucccgagucugacacc

SEQ ID NO: 917244 - RNA, 19 nt, Artificial Sequence
  Description of Artificial Sequence: Synthetic oligonucleotide
cuccggaacauguccucca

SEQ ID NO: 917245 - RNA, 19 nt, Artificial Sequence
  Description of Artificial Sequence: Synthetic oligonucleotide
gcuugcuucaaagcccaug

SEQ ID NO: 917246 - RNA, 19 nt, Artificial Sequence
  Description of Artificial Sequence: Synthetic oligonucleotide
cgggccaucacgucagugc

SEQ ID NO: 917247 - RNA, 19 nt, Artificial Sequence
  Description of Artificial Sequence: Synthetic oligonucleotide
ggaaucgugucaguaucga

SEQ ID NO: 917248 - RNA, 19 nt, Artificial Sequence
  Description of Artificial Sequence: Synthetic oligonucleotide
ucgugucaguaucgauguc

SEQ ID NO: 917249 - RNA, 19 nt, Artificial Sequence
  Description of Artificial Sequence: Synthetic oligonucleotide
aucccagcucgcgcagcgc

SEQ ID NO: 917250 - RNA, 19 nt, Artificial Sequence
  Description of Artificial Sequence: Synthetic oligonucleotide
gggccaucacgucagugca

SEQ ID NO: 917251 - RNA, 19 nt, Artificial Sequence
  Description of Artificial Sequence: Synthetic oligonucleotide
agauucggacaggguuccg

SEQ ID NO: 917252 - RNA, 19 nt, Artificial Sequence
  Description of Artificial Sequence: Synthetic oligonucleotide
uuccggccuccaauccaca

SEQ ID NO: 917253 - RNA, 19 nt, Artificial Sequence
  Description of Artificial Sequence: Synthetic oligonucleotide
ucacgucagugcacaccaa

SEQ ID NO: 917254 - RNA, 19 nt, Artificial Sequence
  Description of Artificial Sequence: Synthetic oligonucleotide
gguuccggccuccaaucca

SEQ ID NO: 917255 - RNA, 19 nt, Artificial Sequence
  Description of Artificial Sequence: Synthetic oligonucleotide
uugcguaagccuggacgaa

SEQ ID NO: 917256 - RNA, 19 nt, Artificial Sequence
  Description of Artificial Sequence: Synthetic oligonucleotide
caccucuagggccuuucca

SEQ ID NO: 917257 - RNA, 19 nt, Artificial Sequence
  Description of Artificial Sequence: Synthetic oligonucleotide
guaucguuaaggaguuccu

SEQ ID NO: 917258 - RNA, 19 nt, Artificial Sequence
  Description of Artificial Sequence: Synthetic oligonucleotide
ccgagucugacaccccuag

SEQ ID NO: 917259 - RNA, 19 nt, Artificial Sequence
  Description of Artificial Sequence: Synthetic oligonucleotide
gcguggcugagaaaaggcc

SEQ ID NO: 917260 - RNA, 19 nt, Artificial Sequence
  Description of Artificial Sequence: Synthetic oligonucleotide
gggccuuuccauaguauuc

SEQ ID NO: 917261 - RNA, 19 nt, Artificial Sequence
  Description of Artificial Sequence: Synthetic oligonucleotide
cucccgagucugacacccc

SEQ ID NO: 917262 - RNA, 19 nt, Artificial Sequence
  Description of Artificial Sequence: Synthetic oligonucleotide
cagggacucccaggcaccc

SEQ ID NO: 917263 - RNA, 19 nt, Artificial Sequence
  Description of Artificial Sequence: Synthetic oligonucleotide
gcuuucggaacuccaugaa

SEQ ID NO: 917264 - RNA, 19 nt, Artificial Sequence
  Description of Artificial Sequence: Synthetic oligonucleotide
caccggggucauguguggg

SEQ ID NO: 917265 - RNA, 19 nt, Artificial Sequence
  Description of Artificial Sequence: Synthetic oligonucleotide
gguuccggaggccugcucu

SEQ ID NO: 917266 - RNA, 19 nt, Artificial Sequence
  Description of Artificial Sequence: Synthetic oligonucleotide
uuguaucguuaaggaguuc

SEQ ID NO: 917267 - RNA, 19 nt, Artificial Sequence
  Description of Artificial Sequence: Synthetic oligonucleotide
guccacaucgaugcacgaa

SEQ ID NO: 917268 - RNA, 19 nt, Artificial Sequence
  Description of Artificial Sequence: Synthetic oligonucleotide
gcacacgaggaugcagcgg

SEQ ID NO: 917269 - RNA, 19 nt, Artificial Sequence
  Description of Artificial Sequence: Synthetic oligonucleotide
gggucaugugugggaaucc

SEQ ID NO: 917270 - RNA, 19 nt, Artificial Sequence
  Description of Artificial Sequence: Synthetic oligonucleotide
ggguuccggccuccaaucc

SEQ ID NO: 917271 - RNA, 19 nt, Artificial Sequence
  Description of Artificial Sequence: Synthetic oligonucleotide
gccugcucucaccaaguuc

SEQ ID NO: 917272 - RNA, 19 nt, Artificial Sequence
  Description of Artificial Sequence: Synthetic oligonucleotide
gugcuucgugaagugugac

SEQ ID NO: 917273 - RNA, 19 nt, Artificial Sequence
  Description of Artificial Sequence: Synthetic oligonucleotide
ggucguacuguaacaccca

SEQ ID NO: 917274 - RNA, 19 nt, Artificial Sequence
  Description of Artificial Sequence: Synthetic oligonucleotide
agccaggguuuucccacua

SEQ ID NO: 917275 - RNA, 19 nt, Artificial Sequence
  Description of Artificial Sequence: Synthetic oligonucleotide
cauccucagcagggcaaac

SEQ ID NO: 917276 - RNA, 19 nt, Artificial Sequence
  Description of Artificial Sequence: Synthetic oligonucleotide
auguucccaccgugcugcu

SEQ ID NO: 917277 - RNA, 19 nt, Artificial Sequence
  Description of Artificial Sequence: Synthetic oligonucleotide
caccgugcugcuugaaccu

SEQ ID NO: 917278 - RNA, 19 nt, Artificial Sequence
  Description of Artificial Sequence: Synthetic oligonucleotide
cugggagggucguacugua

SEQ ID NO: 917279 - RNA, 19 nt, Artificial Sequence
  Description of Artificial Sequence: Synthetic oligonucleotide
gcccucagacuuccuccgg

SEQ ID NO: 917280 - RNA, 19 nt, Artificial Sequence
  Description of Artificial Sequence: Synthetic oligonucleotide
gcacaccaagaucccacuc

SEQ ID NO: 917281 - RNA, 19 nt, Artificial Sequence
  Description of Artificial Sequence: Synthetic oligonucleotide
cgaugcacgaaggcacugg

SEQ ID NO: 917282 - RNA, 19 nt, Artificial Sequence
  Description of Artificial Sequence: Synthetic oligonucleotide
cuccaucgggaguaggaau

SEQ ID NO: 917283 - RNA, 19 nt, Artificial Sequence
  Description of Artificial Sequence: Synthetic oligonucleotide
cugcuuugaccaagcuuua

SEQ ID NO: 917284 - RNA, 19 nt, Artificial Sequence
  Description of Artificial Sequence: Synthetic oligonucleotide
ugacaccccuaggucuguc

SEQ ID NO: 917285 - RNA, 19 nt, Artificial Sequence
  Description of Artificial Sequence: Synthetic oligonucleotide
ccaucgggaguaggaauac

SEQ ID NO: 917286 - RNA, 19 nt, Artificial Sequence
  Description of Artificial Sequence: Synthetic oligonucleotide
cacgcccuucuccuucaca

SEQ ID NO: 917287 - RNA, 19 nt, Artificial Sequence
  Description of Artificial Sequence: Synthetic oligonucleotide
ggaugcagcggcaccugca

SEQ ID NO: 917288 - RNA, 19 nt, Artificial Sequence
  Description of Artificial Sequence: Synthetic oligonucleotide
ccccgggccaucacgucag

SEQ ID NO: 917289 - RNA, 19 nt, Artificial Sequence
  Description of Artificial Sequence: Synthetic oligonucleotide
ggaccagcugauugaauuu

SEQ ID NO: 917290 - RNA, 19 nt, Artificial Sequence
  Description of Artificial Sequence: Synthetic oligonucleotide
acacgaggaugcagcggca

SEQ ID NO: 917291 - RNA, 19 nt, Artificial Sequence
  Description of Artificial Sequence: Synthetic oligonucleotide
cagcgcgcucagcacacga

SEQ ID NO: 917292 - RNA, 19 nt, Artificial Sequence
  Description of Artificial Sequence: Synthetic oligonucleotide
gucagcuggacuguuccuu

SEQ ID NO: 917293 - RNA, 19 nt, Artificial Sequence
  Description of Artificial Sequence: Synthetic oligonucleotide
gcuuugcguaagccuggac

SEQ ID NO: 917294 - RNA, 19 nt, Artificial Sequence
  Description of Artificial Sequence: Synthetic oligonucleotide
ggauuguggcagacugcac

SEQ ID NO: 917295 - RNA, 19 nt, Artificial Sequence
  Description of Artificial Sequence: Synthetic oligonucleotide
caggguuccggccuccaau

SEQ ID NO: 917296 - RNA, 19 nt, Artificial Sequence
  Description of Artificial Sequence: Synthetic oligonucleotide
ccugugucugcguggcuga

SEQ ID NO: 917297 - RNA, 19 nt, Artificial Sequence
  Description of Artificial Sequence: Synthetic oligonucleotide
cagacuuccuccggaacau

SEQ ID NO: 917298 - RNA, 19 nt, Artificial Sequence
  Description of Artificial Sequence: Synthetic oligonucleotide
gccuuacauaucauguagu

SEQ ID NO: 917299 - RNA, 19 nt, Artificial Sequence
  Description of Artificial Sequence: Synthetic oligonucleotide
uucuggcauccugggcauc

SEQ ID NO: 917300 - RNA, 19 nt, Artificial Sequence
  Description of Artificial Sequence: Synthetic oligonucleotide
ggcuguucguccacaucga

SEQ ID NO: 917301 - RNA, 19 nt, Artificial Sequence
  Description of Artificial Sequence: Synthetic oligonucleotide
cugcagggacucccaggca

SEQ ID NO: 917302 - RNA, 19 nt, Artificial Sequence
  Description of Artificial Sequence: Synthetic oligonucleotide
ccgucacauguuccauggc

SEQ ID NO: 917303 - RNA, 19 nt, Artificial Sequence
  Description of Artificial Sequence: Synthetic oligonucleotide
aggcacccuccgucacaug

SEQ ID NO: 917304 - RNA, 19 nt, Artificial Sequence
  Description of Artificial Sequence: Synthetic oligonucleotide
ccaucacgucagugcacac

SEQ ID NO: 917305 - RNA, 19 nt, Artificial Sequence
  Description of Artificial Sequence: Synthetic oligonucleotide
ccucgagcaaggcuagcaa

SEQ ID NO: 917306 - RNA, 19 nt, Artificial Sequence
  Description of Artificial Sequence: Synthetic oligonucleotide
caagauccuucagccugaa

SEQ ID NO: 917307 - RNA, 19 nt, Artificial Sequence
  Description of Artificial Sequence: Synthetic oligonucleotide
ccucagacuuccuccggaa

SEQ ID NO: 917308 - RNA, 19 nt, Artificial Sequence
  Description of Artificial Sequence: Synthetic oligonucleotide
gccgauucgggcuguucgu

SEQ ID NO: 917309 - RNA, 19 nt, Artificial Sequence
  Description of Artificial Sequence: Synthetic oligonucleotide
gcauccucagcagggcaaa

SEQ ID NO: 917310 - RNA, 19 nt, Artificial Sequence
  Description of Artificial Sequence: Synthetic oligonucleotide
caucugccuuacauaucau

SEQ ID NO: 917311 - RNA, 19 nt, Artificial Sequence
  Description of Artificial Sequence: Synthetic oligonucleotide
ccgauucgggcuguucguc

SEQ ID NO: 917312 - RNA, 19 nt, Artificial Sequence
  Description of Artificial Sequence: Synthetic oligonucleotide
ggaggccugcucucaccaa

SEQ ID NO: 917313 - RNA, 19 nt, Artificial Sequence
  Description of Artificial Sequence: Synthetic oligonucleotide
cagcuguccucucccgagu

SEQ ID NO: 917314 - RNA, 19 nt, Artificial Sequence
  Description of Artificial Sequence: Synthetic oligonucleotide
gcuguccucucccgagucu

SEQ ID NO: 917315 - RNA, 19 nt, Artificial Sequence
  Description of Artificial Sequence: Synthetic oligonucleotide
ccuccaucgggaguaggaa

SEQ ID NO: 917316 - RNA, 19 nt, Artificial Sequence
  Description of Artificial Sequence: Synthetic oligonucleotide
cguaagccuggacgaagga

SEQ ID NO: 917317 - RNA, 19 nt, Artificial Sequence
  Description of Artificial Sequence: Synthetic oligonucleotide
ggguuccggaggccugcuc

SEQ ID NO: 917318 - RNA, 19 nt, Artificial Sequence
  Description of Artificial Sequence: Synthetic oligonucleotide
gcggcaccugcagggacuc

SEQ ID NO: 917319 - RNA, 19 nt, Artificial Sequence
  Description of Artificial Sequence: Synthetic oligonucleotide
ccccuaggucugucagcug

SEQ ID NO: 917320 - RNA, 19 nt, Artificial Sequence
  Description of Artificial Sequence: Synthetic oligonucleotide
gcacgaaggcacuggcauu

SEQ ID NO: 917321 - RNA, 19 nt, Artificial Sequence
  Description of Artificial Sequence: Synthetic oligonucleotide
cgggcuguucguccacauc

SEQ ID NO: 917322 - RNA, 19 nt, Artificial Sequence
  Description of Artificial Sequence: Synthetic oligonucleotide
ccgggccaucacgucagug

SEQ ID NO: 917323 - RNA, 19 nt, Artificial Sequence
  Description of Artificial Sequence: Synthetic oligonucleotide
ggaccucaucgaucugaau

SEQ ID NO: 917324 - RNA, 19 nt, Artificial Sequence
  Description of Artificial Sequence: Synthetic oligonucleotide
ccggggucaugugugggaa

SEQ ID NO: 917325 - RNA, 19 nt, Artificial Sequence
  Description of Artificial Sequence: Synthetic oligonucleotide
cauggccgauucgggcugu

SEQ ID NO: 917326 - RNA, 19 nt, Artificial Sequence
  Description of Artificial Sequence: Synthetic oligonucleotide
ggccugcucucaccaaguu

SEQ ID NO: 917327 - RNA, 19 nt, Artificial Sequence
  Description of Artificial Sequence: Synthetic oligonucleotide
cgaggaugcagcggcaccu

SEQ ID NO: 917328 - RNA, 19 nt, Artificial Sequence
  Description of Artificial Sequence: Synthetic oligonucleotide
gcacccuccgucacauguu

SEQ ID NO: 917329 - RNA, 19 nt, Artificial Sequence
  Description of Artificial Sequence: Synthetic oligonucleotide
ccagcucgcgcagcgcgcu

SEQ ID NO: 917330 - RNA, 19 nt, Artificial Sequence
  Description of Artificial Sequence: Synthetic oligonucleotide
cccgggccaucacgucagu

SEQ ID NO: 917331 - RNA, 19 nt, Artificial Sequence
  Description of Artificial Sequence: Synthetic oligonucleotide
aaacugacaaaguugcggc

SEQ ID NO: 917332 - RNA, 19 nt, Artificial Sequence
  Description of Artificial Sequence: Synthetic oligonucleotide
ucacuauucggucugaugg

SEQ ID NO: 917333 - RNA, 19 nt, Artificial Sequence
  Description of Artificial Sequence: Synthetic oligonucleotide
caugcuaccacaaaggguc

SEQ ID NO: 917334 - RNA, 19 nt, Artificial Sequence
  Description of Artificial Sequence: Synthetic oligonucleotide
gaggcuaccguucugaggc

SEQ ID NO: 917335 - RNA, 19 nt, Artificial Sequence
  Description of Artificial Sequence: Synthetic oligonucleotide
aaaacguggguacaggccu

SEQ ID NO: 917336 - RNA, 19 nt, Artificial Sequence
  Description of Artificial Sequence: Synthetic oligonucleotide
auacuugaagcauacacug

SEQ ID NO: 917337 - RNA, 19 nt, Artificial Sequence
  Description of Artificial Sequence: Synthetic oligonucleotide
guugacaaaacccucguug

SEQ ID NO: 917338 - RNA, 19 nt, Artificial Sequence
  Description of Artificial Sequence: Synthetic oligonucleotide
agauucauuugucuacccc

SEQ ID NO: 917339 - RNA, 19 nt, Artificial Sequence
  Description of Artificial Sequence: Synthetic oligonucleotide
uucaacaugaacugccgag

SEQ ID NO: 917340 - RNA, 19 nt, Artificial Sequence
  Description of Artificial Sequence: Synthetic oligonucleotide
aggaacucgcaccaggcgc

SEQ ID NO: 917341 - RNA, 19 nt, Artificial Sequence
  Description of Artificial Sequence: Synthetic oligonucleotide
uccaugcuaccacaaaggg

SEQ ID NO: 917342 - RNA, 19 nt, Artificial Sequence
  Description of Artificial Sequence: Synthetic oligonucleotide
acauugacuacguagggga

SEQ ID NO: 917343 - RNA, 19 nt, Artificial Sequence
  Description of Artificial Sequence: Synthetic oligonucleotide
acugccuugacauaacgga

SEQ ID NO: 917344 - RNA, 19 nt, Artificial Sequence
  Description of Artificial Sequence: Synthetic oligonucleotide
aaaguugcggcugugugug

SEQ ID NO: 917345 - RNA, 19 nt, Artificial Sequence
  Description of Artificial Sequence: Synthetic oligonucleotide
aagagagccguacucucag

SEQ ID NO: 917346 - RNA, 19 nt, Artificial Sequence
  Description of Artificial Sequence: Synthetic oligonucleotide
ucauagcuaccaaagccag

SEQ ID NO: 917347 - RNA, 19 nt, Artificial Sequence
  Description of Artificial Sequence: Synthetic oligonucleotide
aaacuauccaggagcaggg

SEQ ID NO: 917348 - RNA, 19 nt, Artificial Sequence
  Description of Artificial Sequence: Synthetic oligonucleotide
accguucugaggcacaccg

SEQ ID NO: 917349 - RNA, 19 nt, Artificial Sequence
  Description of Artificial Sequence: Synthetic oligonucleotide
ucgugauuauagcagucag

SEQ ID NO: 917350 - RNA, 19 nt, Artificial Sequence
  Description of Artificial Sequence: Synthetic oligonucleotide
auugacuacguaggggacc

SEQ ID NO: 917351 - RNA, 19 nt, Artificial Sequence
  Description of Artificial Sequence: Synthetic oligonucleotide
uaacggaguguauucaaca

SEQ ID NO: 917352 - RNA, 19 nt, Artificial Sequence
  Description of Artificial Sequence: Synthetic oligonucleotide
caaaacguggguacaggcc

SEQ ID NO: 917353 - RNA, 19 nt, Artificial Sequence
  Description of Artificial Sequence: Synthetic oligonucleotide
gggagauccccuuauacgg

SEQ ID NO: 917354 - RNA, 19 nt, Artificial Sequence
  Description of Artificial Sequence: Synthetic oligonucleotide
gacauaacggaguguauuc

SEQ ID NO: 917355 - RNA, 19 nt, Artificial Sequence
  Description of Artificial Sequence: Synthetic oligonucleotide
acuauucggucugauggcc

SEQ ID NO: 917356 - RNA, 19 nt, Artificial Sequence
  Description of Artificial Sequence: Synthetic oligonucleotide
uggacugacaucccaggug

SEQ ID NO: 917357 - RNA, 19 nt, Artificial Sequence
  Description of Artificial Sequence: Synthetic oligonucleotide
ggacacauugacuacguag

SEQ ID NO: 917358 - RNA, 19 nt, Artificial Sequence
  Description of Artificial Sequence: Synthetic oligonucleotide
agagccguacucucagccc

SEQ ID NO: 917359 - RNA, 19 nt, Artificial Sequence
  Description of Artificial Sequence: Synthetic oligonucleotide
guagcauuggcagcgaaag

SEQ ID NO: 917360 - RNA, 19 nt, Artificial Sequence
  Description of Artificial Sequence: Synthetic oligonucleotide
gugauuauagcagucagga

SEQ ID NO: 917361 - RNA, 19 nt, Artificial Sequence
  Description of Artificial Sequence: Synthetic oligonucleotide
agcauuggcagcgaaagug

SEQ ID NO: 917362 - RNA, 19 nt, Artificial Sequence
  Description of Artificial Sequence: Synthetic oligonucleotide
aagacugucgguacacauc

SEQ ID NO: 917363 - RNA, 19 nt, Artificial Sequence
  Description of Artificial Sequence: Synthetic oligonucleotide
guaguugaggucgucauug

SEQ ID NO: 917364 - RNA, 19 nt, Artificial Sequence
  Description of Artificial Sequence: Synthetic oligonucleotide
uguaguuguuuuauauuua

SEQ ID NO: 917365 - RNA, 19 nt, Artificial Sequence
  Description of Artificial Sequence: Synthetic oligonucleotide
ucaacaugaacugccgagc

SEQ ID NO: 917366 - RNA, 19 nt, Artificial Sequence
  Description of Artificial Sequence: Synthetic oligonucleotide
auugcucgccaccccagcc

SEQ ID NO: 917367 - RNA, 19 nt, Artificial Sequence
  Description of Artificial Sequence: Synthetic oligonucleotide
uuucgcacccauacgggcc

SEQ ID NO: 917368 - RNA, 19 nt, Artificial Sequence
  Description of Artificial Sequence: Synthetic oligonucleotide
uagguguacggccaggcac

SEQ ID NO: 917369 - RNA, 19 nt, Artificial Sequence
  Description of Artificial Sequence: Synthetic oligonucleotide
uugaggucgucauugcuga

SEQ ID NO: 917370 - RNA, 19 nt, Artificial Sequence
  Description of Artificial Sequence: Synthetic oligonucleotide
aacggaguguauucaacau

SEQ ID NO: 917371 - RNA, 19 nt, Artificial Sequence
  Description of Artificial Sequence: Synthetic oligonucleotide
uguggcguggggcacauuc

SEQ ID NO: 917372 - RNA, 19 nt, Artificial Sequence
  Description of Artificial Sequence: Synthetic oligonucleotide
guacacagcgcccauggcc

SEQ ID NO: 917373 - RNA, 19 nt, Artificial Sequence
  Description of Artificial Sequence: Synthetic oligonucleotide
guucacuagguguacggcc

SEQ ID NO: 917374 - RNA, 19 nt, Artificial Sequence
  Description of Artificial Sequence: Synthetic oligonucleotide
cacugugggcuuaaguucc

SEQ ID NO: 917375 - RNA, 19 nt, Artificial Sequence
  Description of Artificial Sequence: Synthetic oligonucleotide
cgugugaagacauacacag

SEQ ID NO: 917376 - RNA, 19 nt, Artificial Sequence
  Description of Artificial Sequence: Synthetic oligonucleotide
ugagccgcuucucagggga

SEQ ID NO: 917377 - RNA, 19 nt, Artificial Sequence
  Description of Artificial Sequence: Synthetic oligonucleotide
uucacuauucggucugaug

SEQ ID NO: 917378 - RNA, 19 nt, Artificial Sequence
  Description of Artificial Sequence: Synthetic oligonucleotide
acuacguaggggaccagcc

SEQ ID NO: 917379 - RNA, 19 nt, Artificial Sequence
  Description of Artificial Sequence: Synthetic oligonucleotide
acaaaacccucguugggug

SEQ ID NO: 917380 - RNA, 19 nt, Artificial Sequence
  Description of Artificial Sequence: Synthetic oligonucleotide
aggcggucguaguagaagg

SEQ ID NO: 917381 - RNA, 19 nt, Artificial Sequence
  Description of Artificial Sequence: Synthetic oligonucleotide
uauacgguccagguaagga

SEQ ID NO: 917382 - RNA, 19 nt, Artificial Sequence
  Description of Artificial Sequence: Synthetic oligonucleotide
guaaggaucauagcuacca

SEQ ID NO: 917383 - RNA, 19 nt, Artificial Sequence
  Description of Artificial Sequence: Synthetic oligonucleotide
uauucggucugauggccag

SEQ ID NO: 917384 - RNA, 19 nt, Artificial Sequence
  Description of Artificial Sequence: Synthetic oligonucleotide
ugggugugaauguagcgcu

SEQ ID NO: 917385 - RNA, 19 nt, Artificial Sequence
  Description of Artificial Sequence: Synthetic oligonucleotide
aguagucaggccuucccug

SEQ ID NO: 917386 - RNA, 19 nt, Artificial Sequence
  Description of Artificial Sequence: Synthetic oligonucleotide
uacguaggggaccagccac

SEQ ID NO: 917387 - RNA, 19 nt, Artificial Sequence
  Description of Artificial Sequence: Synthetic oligonucleotide
gagagccguacucucagcc

SEQ ID NO: 917388 - RNA, 19 nt, Artificial Sequence
  Description of Artificial Sequence: Synthetic oligonucleotide
auaacggaguguauucaac

SEQ ID NO: 917389 - RNA, 19 nt, Artificial Sequence
  Description of Artificial Sequence: Synthetic oligonucleotide
uccacgucagggcagcggc

SEQ ID NO: 917390 - RNA, 19 nt, Artificial Sequence
  Description of Artificial Sequence: Synthetic oligonucleotide
ugccuugacauaacggagu

SEQ ID NO: 917391 - RNA, 19 nt, Artificial Sequence
  Description of Artificial Sequence: Synthetic oligonucleotide
aacugacaaaguugcggcu

SEQ ID NO: 917392 - RNA, 19 nt, Artificial Sequence
  Description of Artificial Sequence: Synthetic oligonucleotide
aagccaagauucauuuguc

SEQ ID NO: 917393 - RNA, 19 nt, Artificial Sequence
  Description of Artificial Sequence: Synthetic oligonucleotide
gucauugcgcgccacuucc

SEQ ID NO: 917394 - RNA, 19 nt, Artificial Sequence
  Description of Artificial Sequence: Synthetic oligonucleotide
ugagucgccccagaaaaug

SEQ ID NO: 917395 - RNA, 19 nt, Artificial Sequence
  Description of Artificial Sequence: Synthetic oligonucleotide
acggaguguauucaacaug

SEQ ID NO: 917396 - RNA, 19 nt, Artificial Sequence
  Description of Artificial Sequence: Synthetic oligonucleotide
guccagguaaggaucauag

SEQ ID NO: 917397 - RNA, 19 nt, Artificial Sequence
  Description of Artificial Sequence: Synthetic oligonucleotide
cuuccccucaggucgaagc

SEQ ID NO: 917398 - RNA, 19 nt, Artificial Sequence
  Description of Artificial Sequence: Synthetic oligonucleotide
cucaggaacucgcaccagg

SEQ ID NO: 917399 - RNA, 19 nt, Artificial Sequence
  Description of Artificial Sequence: Synthetic oligonucleotide
acggaaacugacaaaguug

SEQ ID NO: 917400 - RNA, 19 nt, Artificial Sequence
  Description of Artificial Sequence: Synthetic oligonucleotide
ugucgguacacauccuucu

SEQ ID NO: 917401 - RNA, 19 nt, Artificial Sequence
  Description of Artificial Sequence: Synthetic oligonucleotide
gacuaagucccgugagucc

SEQ ID NO: 917402 - RNA, 19 nt, Artificial Sequence
  Description of Artificial Sequence: Synthetic oligonucleotide
aagcauacacugagucgcc

SEQ ID NO: 917403 - RNA, 19 nt, Artificial Sequence
  Description of Artificial Sequence: Synthetic oligonucleotide
ggggagauccccuuauacg

SEQ ID NO: 917404 - RNA, 19 nt, Artificial Sequence
  Description of Artificial Sequence: Synthetic oligonucleotide
ucuccauacuugaagcaua

SEQ ID NO: 917405 - RNA, 19 nt, Artificial Sequence
  Description of Artificial Sequence: Synthetic oligonucleotide
cacuauucggucugauggc

SEQ ID NO: 917406 - RNA, 19 nt, Artificial Sequence
  Description of Artificial Sequence: Synthetic oligonucleotide
uugacuacguaggggacca

SEQ ID NO: 917407 - RNA, 19 nt, Artificial Sequence
  Description of Artificial Sequence: Synthetic oligonucleotide
acuauccaggagcagggga

SEQ ID NO: 917408 - RNA, 19 nt, Artificial Sequence
  Description of Artificial Sequence: Synthetic oligonucleotide
cugccuugacauaacggag

SEQ ID NO: 917409 - RNA, 19 nt, Artificial Sequence
  Description of Artificial Sequence: Synthetic oligonucleotide
guagaagguggugauauuc

SEQ ID NO: 917410 - RNA, 19 nt, Artificial Sequence
  Description of Artificial Sequence: Synthetic oligonucleotide
ugacuaagucccgugaguc

SEQ ID NO: 917411 - RNA, 19 nt, Artificial Sequence
  Description of Artificial Sequence: Synthetic oligonucleotide
uaaggaucauagcuaccaa

SEQ ID NO: 917412 - RNA, 19 nt, Artificial Sequence
  Description of Artificial Sequence: Synthetic oligonucleotide
uuauacgguccagguaagg

SEQ ID NO: 917413 - RNA, 19 nt, Artificial Sequence
  Description of Artificial Sequence: Synthetic oligonucleotide
uggcaggucuccauacuug

SEQ ID NO: 917414 - RNA, 19 nt, Artificial Sequence
  Description of Artificial Sequence: Synthetic oligonucleotide
auacgguccagguaaggau

SEQ ID NO: 917415 - RNA, 19 nt, Artificial Sequence
  Description of Artificial Sequence: Synthetic oligonucleotide
aaagggucggccagugaag

SEQ ID NO: 917416 - RNA, 19 nt, Artificial Sequence
  Description of Artificial Sequence: Synthetic oligonucleotide
ccaagauucauuugucuac

SEQ ID NO: 917417 - RNA, 19 nt, Artificial Sequence
  Description of Artificial Sequence: Synthetic oligonucleotide
uucugaggcacaccgccgu

SEQ ID NO: 917418 - RNA, 19 nt, Artificial Sequence
  Description of Artificial Sequence: Synthetic oligonucleotide
ugucgacuggccaccagcu

SEQ ID NO: 917419 - RNA, 19 nt, Artificial Sequence
  Description of Artificial Sequence: Synthetic oligonucleotide
aagauggguggcacugugg

SEQ ID NO: 917420 - RNA, 19 nt, Artificial Sequence
  Description of Artificial Sequence: Synthetic oligonucleotide
ugacauaacggaguguauu

SEQ ID NO: 917421 - RNA, 19 nt, Artificial Sequence
  Description of Artificial Sequence: Synthetic oligonucleotide
agagagccguacucucagc

SEQ ID NO: 917422 - RNA, 19 nt, Artificial Sequence
  Description of Artificial Sequence: Synthetic oligonucleotide
aacuauccaggagcagggg

SEQ ID NO: 917423 - RNA, 19 nt, Artificial Sequence
  Description of Artificial Sequence: Synthetic oligonucleotide
guuucgcacccauacgggc

SEQ ID NO: 917424 - RNA, 19 nt, Artificial Sequence
  Description of Artificial Sequence: Synthetic oligonucleotide
aacccucguugggugaggc

SEQ ID NO: 917425 - RNA, 19 nt, Artificial Sequence
  Description of Artificial Sequence: Synthetic oligonucleotide
cuuauacgguccagguaag

SEQ ID NO: 917426 - RNA, 19 nt, Artificial Sequence
  Description of Artificial Sequence: Synthetic oligonucleotide
aaagagagccguacucuca

SEQ ID NO: 917427 - RNA, 19 nt, Artificial Sequence
  Description of Artificial Sequence: Synthetic oligonucleotide
auugcgcgccacuuccacg

SEQ ID NO: 917428 - RNA, 19 nt, Artificial Sequence
  Description of Artificial Sequence: Synthetic oligonucleotide
aggccaacuggacugacau

SEQ ID NO: 917429 - RNA, 19 nt, Artificial Sequence
  Description of Artificial Sequence: Synthetic oligonucleotide
guguuagguaguucuugag

SEQ ID NO: 917430 - RNA, 19 nt, Artificial Sequence
  Description of Artificial Sequence: Synthetic oligonucleotide
agcgaaagugcgucugcag

SEQ ID NO: 917431 - RNA, 19 nt, Artificial Sequence
  Description of Artificial Sequence: Synthetic oligonucleotide
agcaugggcaggugugcac

SEQ ID NO: 917432 - RNA, 19 nt, Artificial Sequence
  Description of Artificial Sequence: Synthetic oligonucleotide
uccccuuauacgguccagg

SEQ ID NO: 917433 - RNA, 19 nt, Artificial Sequence
  Description of Artificial Sequence: Synthetic oligonucleotide
aguuccucggcccaugcua

SEQ ID NO: 917434 - RNA, 19 nt, Artificial Sequence
  Description of Artificial Sequence: Synthetic oligonucleotide
cauagcuaccaaagccagc

SEQ ID NO: 917435 - RNA, 19 nt, Artificial Sequence
  Description of Artificial Sequence: Synthetic oligonucleotide
uaggcggucguaguagaag

SEQ ID NO: 917436 - RNA, 19 nt, Artificial Sequence
  Description of Artificial Sequence: Synthetic oligonucleotide
ugauuauagcagucaggaa

SEQ ID NO: 917437 - RNA, 19 nt, Artificial Sequence
  Description of Artificial Sequence: Synthetic oligonucleotide
aguuucgcacccauacggg

SEQ ID NO: 917438 - RNA, 19 nt, Artificial Sequence
  Description of Artificial Sequence: Synthetic oligonucleotide
aguccugcccgcaugcugg

SEQ ID NO: 917439 - RNA, 19 nt, Artificial Sequence
  Description of Artificial Sequence: Synthetic oligonucleotide
ugugcacagaggcuaccgu

SEQ ID NO: 917440 - RNA, 19 nt, Artificial Sequence
  Description of Artificial Sequence: Synthetic oligonucleotide
gggguugcggcguacacag

SEQ ID NO: 917441 - RNA, 19 nt, Artificial Sequence
  Description of Artificial Sequence: Synthetic oligonucleotide
cacaccgccgugcacagac

SEQ ID NO: 917442 - RNA, 19 nt, Artificial Sequence
  Description of Artificial Sequence: Synthetic oligonucleotide
gggugaggccuccacaucg

SEQ ID NO: 917443 - RNA, 19 nt, Artificial Sequence
  Description of Artificial Sequence: Synthetic oligonucleotide
caacacgcucuucaugccc

SEQ ID NO: 917444 - RNA, 19 nt, Artificial Sequence
  Description of Artificial Sequence: Synthetic oligonucleotide
agcauacacugagucgccc

SEQ ID NO: 917445 - RNA, 19 nt, Artificial Sequence
  Description of Artificial Sequence: Synthetic oligonucleotide
acucucaccgaugguagag

SEQ ID NO: 917446 - RNA, 19 nt, Artificial Sequence
  Description of Artificial Sequence: Synthetic oligonucleotide
uugcgcgccacuuccacgu

SEQ ID NO: 917447 - RNA, 19 nt, Artificial Sequence
  Description of Artificial Sequence: Synthetic oligonucleotide
gcccaugcuaccuccagcg

SEQ ID NO: 917448 - RNA, 19 nt, Artificial Sequence
  Description of Artificial Sequence: Synthetic oligonucleotide
ggguucacuagguguacgg

SEQ ID NO: 917449 - RNA, 19 nt, Artificial Sequence
  Description of Artificial Sequence: Synthetic oligonucleotide
agauccccuuauacggucc

SEQ ID NO: 917450 - RNA, 19 nt, Artificial Sequence
  Description of Artificial Sequence: Synthetic oligonucleotide
cugaacacggaaacugaca

SEQ ID NO: 917451 - RNA, 19 nt, Artificial Sequence
  Description of Artificial Sequence: Synthetic oligonucleotide
gugucgacuggccaccagc

SEQ ID NO: 917452 - RNA, 19 nt, Artificial Sequence
  Description of Artificial Sequence: Synthetic oligonucleotide
caaagggucggccagugaa

SEQ ID NO: 917453 - RNA, 19 nt, Artificial Sequence
  Description of Artificial Sequence: Synthetic oligonucleotide
auaaacuauccaggagcag

SEQ ID NO: 917454 - RNA, 19 nt, Artificial Sequence
  Description of Artificial Sequence: Synthetic oligonucleotide
agcugugccuguuucacua

SEQ ID NO: 917455 - RNA, 19 nt, Artificial Sequence
  Description of Artificial Sequence: Synthetic oligonucleotide
agggaaagagagccguacu

SEQ ID NO: 917456 - RNA, 19 nt, Artificial Sequence
  Description of Artificial Sequence: Synthetic oligonucleotide
uugcggcguacacagcgcc

SEQ ID NO: 917457 - RNA, 19 nt, Artificial Sequence
  Description of Artificial Sequence: Synthetic oligonucleotide
agguaguugaggucgucau

SEQ ID NO: 917458 - RNA, 19 nt, Artificial Sequence
  Description of Artificial Sequence: Synthetic oligonucleotide
cauugacuacguaggggac

SEQ ID NO: 917459 - RNA, 19 nt, Artificial Sequence
  Description of Artificial Sequence: Synthetic oligonucleotide
ccuuauacgguccagguaa

SEQ ID NO: 917460 - RNA, 19 nt, Artificial Sequence
  Description of Artificial Sequence: Synthetic oligonucleotide
gauccuugugccagaggcc

SEQ ID NO: 917461 - RNA, 19 nt, Artificial Sequence
  Description of Artificial Sequence: Synthetic oligonucleotide
gagauccccuuauacgguc

SEQ ID NO: 917462 - RNA, 19 nt, Artificial Sequence
  Description of Artificial Sequence: Synthetic oligonucleotide
uuaaguuccucggcccaug

SEQ ID NO: 917463 - RNA, 19 nt, Artificial Sequence
  Description of Artificial Sequence: Synthetic oligonucleotide
gccaguuucgcacccauac

SEQ ID NO: 917464 - RNA, 19 nt, Artificial Sequence
  Description of Artificial Sequence: Synthetic oligonucleotide
uugacauaacggaguguau

SEQ ID NO: 917465 - RNA, 19 nt, Artificial Sequence
  Description of Artificial Sequence: Synthetic oligonucleotide
cuaggcggaagcugcuggc

SEQ ID NO: 917466 - RNA, 19 nt, Artificial Sequence
  Description of Artificial Sequence: Synthetic oligonucleotide
acucucagcccagagccag

SEQ ID NO: 917467 - RNA, 19 nt, Artificial Sequence
  Description of Artificial Sequence: Synthetic oligonucleotide
acauaacggaguguauuca

SEQ ID NO: 917468 - RNA, 19 nt, Artificial Sequence
  Description of Artificial Sequence: Synthetic oligonucleotide
acugucgguacacauccuu

SEQ ID NO: 917469 - RNA, 19 nt, Artificial Sequence
  Description of Artificial Sequence: Synthetic oligonucleotide
ucucaccgaugguagagau

SEQ ID NO: 917470 - RNA, 19 nt, Artificial Sequence
  Description of Artificial Sequence: Synthetic oligonucleotide
agucgugauuauagcaguc

SEQ ID NO: 917471 - RNA, 19 nt, Artificial Sequence
  Description of Artificial Sequence: Synthetic oligonucleotide
cauaacggaguguauucaa

SEQ ID NO: 917472 - RNA, 19 nt, Artificial Sequence
  Description of Artificial Sequence: Synthetic oligonucleotide
ccagcuggcgcgaagacug

SEQ ID NO: 917473 - RNA, 19 nt, Artificial Sequence
  Description of Artificial Sequence: Synthetic oligonucleotide
gacuacguaggggaccagc

SEQ ID NO: 917474 - RNA, 19 nt, Artificial Sequence
  Description of Artificial Sequence: Synthetic oligonucleotide
agucgccccagaaaaugac

SEQ ID NO: 917475 - RNA, 19 nt, Artificial Sequence
  Description of Artificial Sequence: Synthetic oligonucleotide
cugccgagcagcaaacuca

SEQ ID NO: 917476 - RNA, 19 nt, Artificial Sequence
  Description of Artificial Sequence: Synthetic oligonucleotide
aagggucggccagugaaga

SEQ ID NO: 917477 - RNA, 19 nt, Artificial Sequence
  Description of Artificial Sequence: Synthetic oligonucleotide
cugucgguacacauccuuc

SEQ ID NO: 917478 - RNA, 19 nt, Artificial Sequence
  Description of Artificial Sequence: Synthetic oligonucleotide
aaguugcggcugugugugg

SEQ ID NO: 917479 - RNA, 19 nt, Artificial Sequence
  Description of Artificial Sequence: Synthetic oligonucleotide
cuggcgcgaagacugucgg

SEQ ID NO: 917480 - RNA, 19 nt, Artificial Sequence
  Description of Artificial Sequence: Synthetic oligonucleotide
uuccacgucagggcagcgg

SEQ ID NO: 917481 - RNA, 19 nt, Artificial Sequence
  Description of Artificial Sequence: Synthetic oligonucleotide
agccuaaguagcauuggca

SEQ ID NO: 917482 - RNA, 19 nt, Artificial Sequence
  Description of Artificial Sequence: Synthetic oligonucleotide
cuaagucccgugagucccc

SEQ ID NO: 917483 - RNA, 19 nt, Artificial Sequence
  Description of Artificial Sequence: Synthetic oligonucleotide
aacguggguacaggccuag

SEQ ID NO: 917484 - RNA, 19 nt, Artificial Sequence
  Description of Artificial Sequence: Synthetic oligonucleotide
ucugaggcacaccgccgug

SEQ ID NO: 917485 - RNA, 19 nt, Artificial Sequence
  Description of Artificial Sequence: Synthetic oligonucleotide
cugcacauagucgugauua

SEQ ID NO: 917486 - RNA, 19 nt, Artificial Sequence
  Description of Artificial Sequence: Synthetic oligonucleotide
aaguagcauuggcagcgaa

SEQ ID NO: 917487 - RNA, 19 nt, Artificial Sequence
  Description of Artificial Sequence: Synthetic oligonucleotide
aaacccucguugggugagg

SEQ ID NO: 917488 - RNA, 19 nt, Artificial Sequence
  Description of Artificial Sequence: Synthetic oligonucleotide
acccucguugggugaggcc

SEQ ID NO: 917489 - RNA, 19 nt, Artificial Sequence
  Description of Artificial Sequence: Synthetic oligonucleotide
gucgugauuauagcaguca

SEQ ID NO: 917490 - RNA, 19 nt, Artificial Sequence
  Description of Artificial Sequence: Synthetic oligonucleotide
uucugcacauagucgugau

SEQ ID NO: 917491 - RNA, 19 nt, Artificial Sequence
  Description of Artificial Sequence: Synthetic oligonucleotide
uaagucccgugaguccccg

SEQ ID NO: 917492 - RNA, 19 nt, Artificial Sequence
  Description of Artificial Sequence: Synthetic oligonucleotide
cgugauuauagcagucagg

SEQ ID NO: 917493 - RNA, 19 nt, Artificial Sequence
  Description of Artificial Sequence: Synthetic oligonucleotide
ggucggccagugaagaugg

SEQ ID NO: 917494 - RNA, 19 nt, Artificial Sequence
  Description of Artificial Sequence: Synthetic oligonucleotide
auacacagggagggcgugg

SEQ ID NO: 917495 - RNA, 19 nt, Artificial Sequence
  Description of Artificial Sequence: Synthetic oligonucleotide
gcguggggcacauucuugg

SEQ ID NO: 917496 - RNA, 19 nt, Artificial Sequence
  Description of Artificial Sequence: Synthetic oligonucleotide
gggaaagagagccguacuc

SEQ ID NO: 917497 - RNA, 19 nt, Artificial Sequence
  Description of Artificial Sequence: Synthetic oligonucleotide
ucauugcgcgccacuucca

SEQ ID NO: 917498 - RNA, 19 nt, Artificial Sequence
  Description of Artificial Sequence: Synthetic oligonucleotide
cacauuccaugcuaccaca

SEQ ID NO: 917499 - RNA, 19 nt, Artificial Sequence
  Description of Artificial Sequence: Synthetic oligonucleotide
ucugcacauagucgugauu

SEQ ID NO: 917500 - RNA, 19 nt, Artificial Sequence
  Description of Artificial Sequence: Synthetic oligonucleotide
augagccgcuucucagggg

SEQ ID NO: 917501 - RNA, 19 nt, Artificial Sequence
  Description of Artificial Sequence: Synthetic oligonucleotide
guugcggcuguguguggag

SEQ ID NO: 917502 - RNA, 19 nt, Artificial Sequence
  Description of Artificial Sequence: Synthetic oligonucleotide
ugcggcguacacagcgccc

SEQ ID NO: 917503 - RNA, 19 nt, Artificial Sequence
  Description of Artificial Sequence: Synthetic oligonucleotide
ucggccagugaagaugggu

SEQ ID NO: 917504 - RNA, 19 nt, Artificial Sequence
  Description of Artificial Sequence: Synthetic oligonucleotide
gauccccuuauacggucca

SEQ ID NO: 917505 - RNA, 19 nt, Artificial Sequence
  Description of Artificial Sequence: Synthetic oligonucleotide
gccgcacucucaccgaugg

SEQ ID NO: 917506 - RNA, 19 nt, Artificial Sequence
  Description of Artificial Sequence: Synthetic oligonucleotide
cauugcgcgccacuuccac

SEQ ID NO: 917507 - RNA, 19 nt, Artificial Sequence
  Description of Artificial Sequence: Synthetic oligonucleotide
cuacaggaagugucaccug

SEQ ID NO: 917508 - RNA, 19 nt, Artificial Sequence
  Description of Artificial Sequence: Synthetic oligonucleotide
uggcacuuuguggcguggg

SEQ ID NO: 917509 - RNA, 19 nt, Artificial Sequence
  Description of Artificial Sequence: Synthetic oligonucleotide
cagcgcuagggccagugug

SEQ ID NO: 917510 - RNA, 19 nt, Artificial Sequence
  Description of Artificial Sequence: Synthetic oligonucleotide
uccacaucgaaggcccuaa

SEQ ID NO: 917511 - RNA, 19 nt, Artificial Sequence
  Description of Artificial Sequence: Synthetic oligonucleotide
uaaguagcauuggcagcga

SEQ ID NO: 917512 - RNA, 19 nt, Artificial Sequence
  Description of Artificial Sequence: Synthetic oligonucleotide
cauugcucgccaccccagc

SEQ ID NO: 917513 - RNA, 19 nt, Artificial Sequence
  Description of Artificial Sequence: Synthetic oligonucleotide
acccauacgggccuccauu

SEQ ID NO: 917514 - RNA, 19 nt, Artificial Sequence
  Description of Artificial Sequence: Synthetic oligonucleotide
cuauucggucugauggcca

SEQ ID NO: 917515 - RNA, 19 nt, Artificial Sequence
  Description of Artificial Sequence: Synthetic oligonucleotide
ggggcgacagcugguaugg

SEQ ID NO: 917516 - RNA, 19 nt, Artificial Sequence
  Description of Artificial Sequence: Synthetic oligonucleotide
ugggugugagccacacgaa

SEQ ID NO: 917517 - RNA, 19 nt, Artificial Sequence
  Description of Artificial Sequence: Synthetic oligonucleotide
gaacugccgagcagcaaac

SEQ ID NO: 917518 - RNA, 19 nt, Artificial Sequence
  Description of Artificial Sequence: Synthetic oligonucleotide
uucgcguggugggugugag

SEQ ID NO: 917519 - RNA, 19 nt, Artificial Sequence
  Description of Artificial Sequence: Synthetic oligonucleotide
guacaggccuaggcggucg

SEQ ID NO: 917520 - RNA, 19 nt, Artificial Sequence
  Description of Artificial Sequence: Synthetic oligonucleotide
cguucugaggcacaccgcc

SEQ ID NO: 917521 - RNA, 19 nt, Artificial Sequence
  Description of Artificial Sequence: Synthetic oligonucleotide
caccugacuaagucccgug

SEQ ID NO: 917522 - RNA, 19 nt, Artificial Sequence
  Description of Artificial Sequence: Synthetic oligonucleotide
gaguagucaggccuucccu

SEQ ID NO: 917523 - RNA, 19 nt, Artificial Sequence
  Description of Artificial Sequence: Synthetic oligonucleotide
aagugcgucugcagguagu

SEQ ID NO: 917524 - RNA, 19 nt, Artificial Sequence
  Description of Artificial Sequence: Synthetic oligonucleotide
ggaucuaccaagccaagau

SEQ ID NO: 917525 - RNA, 19 nt, Artificial Sequence
  Description of Artificial Sequence: Synthetic oligonucleotide
cacgucagggcagcggccc

SEQ ID NO: 917526 - RNA, 19 nt, Artificial Sequence
  Description of Artificial Sequence: Synthetic oligonucleotide
ccgcuuauggucccauugg

SEQ ID NO: 917527 - RNA, 19 nt, Artificial Sequence
  Description of Artificial Sequence: Synthetic oligonucleotide
ucggucugauggccaguca

SEQ ID NO: 917528 - RNA, 19 nt, Artificial Sequence
  Description of Artificial Sequence: Synthetic oligonucleotide
cggaguguauucaacauga

SEQ ID NO: 917529 - RNA, 19 nt, Artificial Sequence
  Description of Artificial Sequence: Synthetic oligonucleotide
caaaguugcggcugugugu

SEQ ID NO: 917530 - RNA, 19 nt, Artificial Sequence
  Description of Artificial Sequence: Synthetic oligonucleotide
ggaacucgcaccaggcgcc

SEQ ID NO: 917531 - RNA, 19 nt, Artificial Sequence
  Description of Artificial Sequence: Synthetic oligonucleotide
gguucacuagguguacggc

SEQ ID NO: 917532 - RNA, 19 nt, Artificial Sequence
  Description of Artificial Sequence: Synthetic oligonucleotide
agcgcuagggccaguguga

SEQ ID NO: 917533 - RNA, 19 nt, Artificial Sequence
  Description of Artificial Sequence: Synthetic oligonucleotide
uagaagccccagaggugcu

SEQ ID NO: 917534 - RNA, 19 nt, Artificial Sequence
  Description of Artificial Sequence: Synthetic oligonucleotide
aguugcggcugugugugga

SEQ ID NO: 917535 - RNA, 19 nt, Artificial Sequence
  Description of Artificial Sequence: Synthetic oligonucleotide
ugacaaaguugcggcugug

SEQ ID NO: 917536 - RNA, 19 nt, Artificial Sequence
  Description of Artificial Sequence: Synthetic oligonucleotide
caaaacccucguuggguga

SEQ ID NO: 917537 - RNA, 19 nt, Artificial Sequence
  Description of Artificial Sequence: Synthetic oligonucleotide
cuaccguucugaggcacac

SEQ ID NO: 917538 - RNA, 19 nt, Artificial Sequence
  Description of Artificial Sequence: Synthetic oligonucleotide
uggcguggggcacauucuu

SEQ ID NO: 917539 - RNA, 19 nt, Artificial Sequence
  Description of Artificial Sequence: Synthetic oligonucleotide
cggucguaguagaaggugg

SEQ ID NO: 917540 - RNA, 19 nt, Artificial Sequence
  Description of Artificial Sequence: Synthetic oligonucleotide
guugcggcguacacagcgc

SEQ ID NO: 917541 - RNA, 19 nt, Artificial Sequence
  Description of Artificial Sequence: Synthetic oligonucleotide
cuacguaggggaccagcca

SEQ ID NO: 917542 - RNA, 19 nt, Artificial Sequence
  Description of Artificial Sequence: Synthetic oligonucleotide
ugguucgcguggugggugu

SEQ ID NO: 917543 - RNA, 19 nt, Artificial Sequence
  Description of Artificial Sequence: Synthetic oligonucleotide
aacucgcaccaggcgccac

SEQ ID NO: 917544 - RNA, 19 nt, Artificial Sequence
  Description of Artificial Sequence: Synthetic oligonucleotide
cugaggcacaccgccgugc

SEQ ID NO: 917545 - RNA, 19 nt, Artificial Sequence
  Description of Artificial Sequence: Synthetic oligonucleotide
gcgacagcugguauggaug

SEQ ID NO: 917546 - RNA, 19 nt, Artificial Sequence
  Description of Artificial Sequence: Synthetic oligonucleotide
guuccucggcccaugcuac

SEQ ID NO: 917547 - RNA, 19 nt, Artificial Sequence
  Description of Artificial Sequence: Synthetic oligonucleotide
cguacucucagcccagagc

SEQ ID NO: 917548 - RNA, 19 nt, Artificial Sequence
  Description of Artificial Sequence: Synthetic oligonucleotide
uuccucggcccaugcuacc

SEQ ID NO: 917549 - RNA, 19 nt, Artificial Sequence
  Description of Artificial Sequence: Synthetic oligonucleotide
cacaaagggucggccagug

SEQ ID NO: 917550 - RNA, 19 nt, Artificial Sequence
  Description of Artificial Sequence: Synthetic oligonucleotide
ggcgugguucgcguggugg

SEQ ID NO: 917551 - RNA, 19 nt, Artificial Sequence
  Description of Artificial Sequence: Synthetic oligonucleotide
cccagccuaaguagcauug

SEQ ID NO: 917552 - RNA, 19 nt, Artificial Sequence
  Description of Artificial Sequence: Synthetic oligonucleotide
ucgcuguauacaccuccuu

SEQ ID NO: 917553 - RNA, 19 nt, Artificial Sequence
  Description of Artificial Sequence: Synthetic oligonucleotide
gcuggcgcgaagacugucg

SEQ ID NO: 917554 - RNA, 19 nt, Artificial Sequence
  Description of Artificial Sequence: Synthetic oligonucleotide
gguaaggaucauagcuacc

SEQ ID NO: 917555 - RNA, 19 nt, Artificial Sequence
  Description of Artificial Sequence: Synthetic oligonucleotide
gcacucucaccgaugguag

SEQ ID NO: 917556 - RNA, 19 nt, Artificial Sequence
  Description of Artificial Sequence: Synthetic oligonucleotide
cacggaaacugacaaaguu

SEQ ID NO: 917557 - RNA, 19 nt, Artificial Sequence
  Description of Artificial Sequence: Synthetic oligonucleotide
gggucggccagugaagaug

SEQ ID NO: 917558 - RNA, 19 nt, Artificial Sequence
  Description of Artificial Sequence: Synthetic oligonucleotide
aggccuaggcggucguagu

SEQ ID NO: 917559 - RNA, 19 nt, Artificial Sequence
  Description of Artificial Sequence: Synthetic oligonucleotide
guagcgcuccacagauucc

SEQ ID NO: 917560 - RNA, 19 nt, Artificial Sequence
  Description of Artificial Sequence: Synthetic oligonucleotide
cccgcuuauggucccauug

SEQ ID NO: 917561 - RNA, 19 nt, Artificial Sequence
  Description of Artificial Sequence: Synthetic oligonucleotide
ccgccgugcacagacaucc

SEQ ID NO: 917562 - RNA, 19 nt, Artificial Sequence
  Description of Artificial Sequence: Synthetic oligonucleotide
gcuaccacaaagggucggc

SEQ ID NO: 917563 - RNA, 19 nt, Artificial Sequence
  Description of Artificial Sequence: Synthetic oligonucleotide
uggguccaacugcaguauu

SEQ ID NO: 917564 - RNA, 19 nt, Artificial Sequence
  Description of Artificial Sequence: Synthetic oligonucleotide
uccuugugccagaggccaa

SEQ ID NO: 917565 - RNA, 19 nt, Artificial Sequence
  Description of Artificial Sequence: Synthetic oligonucleotide
cugacuaagucccgugagu

SEQ ID NO: 917566 - RNA, 19 nt, Artificial Sequence
  Description of Artificial Sequence: Synthetic oligonucleotide
aaacguggguacaggccua

SEQ ID NO: 917567 - RNA, 19 nt, Artificial Sequence
  Description of Artificial Sequence: Synthetic oligonucleotide
guacuggcaggucuccaua

SEQ ID NO: 917568 - RNA, 19 nt, Artificial Sequence
  Description of Artificial Sequence: Synthetic oligonucleotide
guacggccaggcacuaggc

SEQ ID NO: 917569 - RNA, 19 nt, Artificial Sequence
  Description of Artificial Sequence: Synthetic oligonucleotide
cauacgggccuccauuccu

SEQ ID NO: 917570 - RNA, 19 nt, Artificial Sequence
  Description of Artificial Sequence: Synthetic oligonucleotide
ccaacuggacugacauccc

SEQ ID NO: 917571 - RNA, 19 nt, Artificial Sequence
  Description of Artificial Sequence: Synthetic oligonucleotide
gugguucgcguggugggug

SEQ ID NO: 917572 - RNA, 19 nt, Artificial Sequence
  Description of Artificial Sequence: Synthetic oligonucleotide
auccccuuauacgguccag

SEQ ID NO: 917573 - RNA, 19 nt, Artificial Sequence
  Description of Artificial Sequence: Synthetic oligonucleotide
cguggguacaggccuaggc

SEQ ID NO: 917574 - RNA, 19 nt, Artificial Sequence
  Description of Artificial Sequence: Synthetic oligonucleotide
aagucccgugaguccccgu

SEQ ID NO: 917575 - RNA, 19 nt, Artificial Sequence
  Description of Artificial Sequence: Synthetic oligonucleotide
ccaagccaagauucauuug

SEQ ID NO: 917576 - RNA, 19 nt, Artificial Sequence
  Description of Artificial Sequence: Synthetic oligonucleotide
guccugcccgcaugcuggg

SEQ ID NO: 917577 - RNA, 19 nt, Artificial Sequence
  Description of Artificial Sequence: Synthetic oligonucleotide
uggcgcgaagacugucggu

SEQ ID NO: 917578 - RNA, 19 nt, Artificial Sequence
  Description of Artificial Sequence: Synthetic oligonucleotide
gccuguuucacuauucggu

SEQ ID NO: 917579 - RNA, 19 nt, Artificial Sequence
  Description of Artificial Sequence: Synthetic oligonucleotide
ccagucaaugaccgccagc

SEQ ID NO: 917580 - RNA, 19 nt, Artificial Sequence
  Description of Artificial Sequence: Synthetic oligonucleotide
guggcacuuuguggcgugg

SEQ ID NO: 917581 - RNA, 19 nt, Artificial Sequence
  Description of Artificial Sequence: Synthetic oligonucleotide
cgcuuauggucccauuggc

SEQ ID NO: 917582 - RNA, 19 nt, Artificial Sequence
  Description of Artificial Sequence: Synthetic oligonucleotide
cucguugggugaggccucc

SEQ ID NO: 917583 - RNA, 19 nt, Artificial Sequence
  Description of Artificial Sequence: Synthetic oligonucleotide
agggucggccagugaagau

SEQ ID NO: 917584 - RNA, 19 nt, Artificial Sequence
  Description of Artificial Sequence: Synthetic oligonucleotide
cucgcuguauacaccuccu

SEQ ID NO: 917585 - RNA, 19 nt, Artificial Sequence
  Description of Artificial Sequence: Synthetic oligonucleotide
ucgccaccccagccuaagu

SEQ ID NO: 917586 - RNA, 19 nt, Artificial Sequence
  Description of Artificial Sequence: Synthetic oligonucleotide
agcuggucauugcgcgcca

SEQ ID NO: 917587 - RNA, 19 nt, Artificial Sequence
  Description of Artificial Sequence: Synthetic oligonucleotide
cuaggcggucguaguagaa

SEQ ID NO: 917588 - RNA, 19 nt, Artificial Sequence
  Description of Artificial Sequence: Synthetic oligonucleotide
accgccgugcacagacauc

SEQ ID NO: 917589 - RNA, 19 nt, Artificial Sequence
  Description of Artificial Sequence: Synthetic oligonucleotide
ccauacgggccuccauucc

SEQ ID NO: 917590 - RNA, 19 nt, Artificial Sequence
  Description of Artificial Sequence: Synthetic oligonucleotide
gcgaagacugucgguacac

SEQ ID NO: 917591 - RNA, 19 nt, Artificial Sequence
  Description of Artificial Sequence: Synthetic oligonucleotide
cucucaccgaugguagaga

SEQ ID NO: 917592 - RNA, 19 nt, Artificial Sequence
  Description of Artificial Sequence: Synthetic oligonucleotide
acguaggggaccagccacu

SEQ ID NO: 917593 - RNA, 19 nt, Artificial Sequence
  Description of Artificial Sequence: Synthetic oligonucleotide
ggugucgacuggccaccag

SEQ ID NO: 917594 - RNA, 19 nt, Artificial Sequence
  Description of Artificial Sequence: Synthetic oligonucleotide
cacucucaccgaugguaga

SEQ ID NO: 917595 - RNA, 19 nt, Artificial Sequence
  Description of Artificial Sequence: Synthetic oligonucleotide
acguggguacaggccuagg

SEQ ID NO: 917596 - RNA, 19 nt, Artificial Sequence
  Description of Artificial Sequence: Synthetic oligonucleotide
ggcgcgaagacugucggua

SEQ ID NO: 917597 - RNA, 19 nt, Artificial Sequence
  Description of Artificial Sequence: Synthetic oligonucleotide
ccucaggucgaagcugggg

SEQ ID NO: 917598 - RNA, 19 nt, Artificial Sequence
  Description of Artificial Sequence: Synthetic oligonucleotide
cuaagguccaguggcacuu

SEQ ID NO: 917599 - RNA, 19 nt, Artificial Sequence
  Description of Artificial Sequence: Synthetic oligonucleotide
gggaucuaccaagccaaga

SEQ ID NO: 917600 - RNA, 19 nt, Artificial Sequence
  Description of Artificial Sequence: Synthetic oligonucleotide
cagcgaaagugcgucugca

SEQ ID NO: 917601 - RNA, 19 nt, Artificial Sequence
  Description of Artificial Sequence: Synthetic oligonucleotide
gaacucgcaccaggcgcca

SEQ ID NO: 917602 - RNA, 19 nt, Artificial Sequence
  Description of Artificial Sequence: Synthetic oligonucleotide
gcauugcucgccaccccag

SEQ ID NO: 917603 - RNA, 19 nt, Artificial Sequence
  Description of Artificial Sequence: Synthetic oligonucleotide
ggcguggggcacauucuug

SEQ ID NO: 917604 - RNA, 19 nt, Artificial Sequence
  Description of Artificial Sequence: Synthetic oligonucleotide
gcgcgaagacugucgguac

SEQ ID NO: 917605 - RNA, 19 nt, Artificial Sequence
  Description of Artificial Sequence: Synthetic oligonucleotide
ggagggcgugguucgcgug

SEQ ID NO: 917606 - RNA, 19 nt, Artificial Sequence
  Description of Artificial Sequence: Synthetic oligonucleotide
ccguucugaggcacaccgc

SEQ ID NO: 917607 - RNA, 19 nt, Artificial Sequence
  Description of Artificial Sequence: Synthetic oligonucleotide
gucggccagugaagauggg

SEQ ID NO: 917608 - RNA, 19 nt, Artificial Sequence
  Description of Artificial Sequence: Synthetic oligonucleotide
guucgcgugguggguguga

SEQ ID NO: 917609 - RNA, 19 nt, Artificial Sequence
  Description of Artificial Sequence: Synthetic oligonucleotide
cccaugcuaccuccagcgc

SEQ ID NO: 917610 - RNA, 19 nt, Artificial Sequence
  Description of Artificial Sequence: Synthetic oligonucleotide
ccaugcuaccacaaagggu

SEQ ID NO: 917611 - RNA, 19 nt, Artificial Sequence
  Description of Artificial Sequence: Synthetic oligonucleotide
ggucguaguagaagguggu

SEQ ID NO: 917612 - RNA, 19 nt, Artificial Sequence
  Description of Artificial Sequence: Synthetic oligonucleotide
ccguacucucagcccagag

SEQ ID NO: 917613 - RNA, 19 nt, Artificial Sequence
  Description of Artificial Sequence: Synthetic oligonucleotide
ccagagccgcacucucacc

SEQ ID NO: 917614 - RNA, 19 nt, Artificial Sequence
  Description of Artificial Sequence: Synthetic oligonucleotide
gagcuuccccucaggucga

SEQ ID NO: 917615 - RNA, 19 nt, Artificial Sequence
  Description of Artificial Sequence: Synthetic oligonucleotide
ggugaggccuccacaucga

SEQ ID NO: 917616 - RNA, 19 nt, Artificial Sequence
  Description of Artificial Sequence: Synthetic oligonucleotide
ucguugggugaggccucca

SEQ ID NO: 917617 - RNA, 19 nt, Artificial Sequence
  Description of Artificial Sequence: Synthetic oligonucleotide
ggccaacuggacugacauc

SEQ ID NO: 917618 - RNA, 19 nt, Artificial Sequence
  Description of Artificial Sequence: Synthetic oligonucleotide
ugcccgcuuauggucccau

SEQ ID NO: 917619 - RNA, 19 nt, Artificial Sequence
  Description of Artificial Sequence: Synthetic oligonucleotide
cagcaugggcaggugugca

SEQ ID NO: 917620 - RNA, 19 nt, Artificial Sequence
  Description of Artificial Sequence: Synthetic oligonucleotide
gguggggagauccccuuau

SEQ ID NO: 917621 - RNA, 19 nt, Artificial Sequence
  Description of Artificial Sequence: Synthetic oligonucleotide
cccuaagguccaguggcac

SEQ ID NO: 917622 - RNA, 19 nt, Artificial Sequence
  Description of Artificial Sequence: Synthetic oligonucleotide
ggcgacagcugguauggau

SEQ ID NO: 917623 - RNA, 19 nt, Artificial Sequence
  Description of Artificial Sequence: Synthetic oligonucleotide
cgcgccacuuccacgucag

SEQ ID NO: 917624 - RNA, 19 nt, Artificial Sequence
  Description of Artificial Sequence: Synthetic oligonucleotide
gaguugggguugcggcgua

SEQ ID NO: 917625 - RNA, 19 nt, Artificial Sequence
  Description of Artificial Sequence: Synthetic oligonucleotide
ggagauccccuuauacggu

SEQ ID NO: 917626 - RNA, 19 nt, Artificial Sequence
  Description of Artificial Sequence: Synthetic oligonucleotide
ggcguacacagcgcccaug

SEQ ID NO: 917627 - RNA, 19 nt, Artificial Sequence
  Description of Artificial Sequence: Synthetic oligonucleotide
guaggggaccagccacugu

SEQ ID NO: 917628 - RNA, 19 nt, Artificial Sequence
  Description of Artificial Sequence: Synthetic oligonucleotide
gcuaccguucugaggcaca

SEQ ID NO: 917629 - RNA, 19 nt, Artificial Sequence
  Description of Artificial Sequence: Synthetic oligonucleotide
ggcccguguagcucuccca

SEQ ID NO: 917630 - RNA, 19 nt, Artificial Sequence
  Description of Artificial Sequence: Synthetic oligonucleotide
ccucguugggugaggccuc

SEQ ID NO: 917631 - RNA, 19 nt, Artificial Sequence
  Description of Artificial Sequence: Synthetic oligonucleotide
gcggcguacacagcgccca

SEQ ID NO: 917632 - RNA, 19 nt, Artificial Sequence
  Description of Artificial Sequence: Synthetic oligonucleotide
gggugugaauguagcgcuc

SEQ ID NO: 917633 - RNA, 19 nt, Artificial Sequence
  Description of Artificial Sequence: Synthetic oligonucleotide
cguugggugaggccuccac

SEQ ID NO: 917634 - RNA, 19 nt, Artificial Sequence
  Description of Artificial Sequence: Synthetic oligonucleotide
ggccuaggcggucguagua

SEQ ID NO: 917635 - RNA, 19 nt, Artificial Sequence
  Description of Artificial Sequence: Synthetic oligonucleotide
acaccgccgugcacagaca

SEQ ID NO: 917636 - RNA, 19 nt, Artificial Sequence
  Description of Artificial Sequence: Synthetic oligonucleotide
gcgccacuuccacgucagg

SEQ ID NO: 917637 - RNA, 19 nt, Artificial Sequence
  Description of Artificial Sequence: Synthetic oligonucleotide
cagcgcccauggccauugc

SEQ ID NO: 917638 - RNA, 19 nt, Artificial Sequence
  Description of Artificial Sequence: Synthetic oligonucleotide
ccccuuauacgguccaggu

SEQ ID NO: 917639 - RNA, 19 nt, Artificial Sequence
  Description of Artificial Sequence: Synthetic oligonucleotide
gguucgcguggugggugug

SEQ ID NO: 917640 - RNA, 19 nt, Artificial Sequence
  Description of Artificial Sequence: Synthetic oligonucleotide
guggggcgugugaagacau

SEQ ID NO: 917641 - RNA, 19 nt, Artificial Sequence
  Description of Artificial Sequence: Synthetic oligonucleotide
caccgccgugcacagacau

SEQ ID NO: 917642 - RNA, 19 nt, Artificial Sequence
  Description of Artificial Sequence: Synthetic oligonucleotide
gcccuaagguccaguggca

SEQ ID NO: 917643 - RNA, 19 nt, Artificial Sequence
  Description of Artificial Sequence: Synthetic oligonucleotide
ccuggccucgcuguauaca

SEQ ID NO: 917644 - RNA, 19 nt, Artificial Sequence
  Description of Artificial Sequence: Synthetic oligonucleotide
ggggaguagucaggccuuc

SEQ ID NO: 917645 - RNA, 19 nt, Artificial Sequence
  Description of Artificial Sequence: Synthetic oligonucleotide
cccucguugggugaggccu

SEQ ID NO: 917646 - RNA, 19 nt, Artificial Sequence
  Description of Artificial Sequence: Synthetic oligonucleotide
ucgcacccauacgggccuc

SEQ ID NO: 917647 - RNA, 19 nt, Artificial Sequence
  Description of Artificial Sequence: Synthetic oligonucleotide
ccacuguguuagguaguuc

SEQ ID NO: 917648 - RNA, 19 nt, Artificial Sequence
  Description of Artificial Sequence: Synthetic oligonucleotide
gggagggcgugguucgcgu

SEQ ID NO: 917649 - RNA, 19 nt, Artificial Sequence
  Description of Artificial Sequence: Synthetic oligonucleotide
gcuggucauugcgcgccac

SEQ ID NO: 917650 - RNA, 19 nt, Artificial Sequence
  Description of Artificial Sequence: Synthetic oligonucleotide
agcuuccccucaggucgaa

SEQ ID NO: 917651 - RNA, 19 nt, Artificial Sequence
  Description of Artificial Sequence: Synthetic oligonucleotide
gggcgugguucgcguggug

SEQ ID NO: 917652 - RNA, 19 nt, Artificial Sequence
  Description of Artificial Sequence: Synthetic oligonucleotide
cgcgaagacugucgguaca

SEQ ID NO: 917653 - RNA, 19 nt, Artificial Sequence
  Description of Artificial Sequence: Synthetic oligonucleotide
cggcccguguagcucuccc

SEQ ID NO: 917654 - RNA, 19 nt, Artificial Sequence
  Description of Artificial Sequence: Synthetic oligonucleotide
ccauugcacuggguccaac

SEQ ID NO: 917655 - RNA, 19 nt, Artificial Sequence
  Description of Artificial Sequence: Synthetic oligonucleotide
cacccauacgggccuccau

SEQ ID NO: 917656 - RNA, 19 nt, Artificial Sequence
  Description of Artificial Sequence: Synthetic oligonucleotide
cgaagacugucgguacaca

SEQ ID NO: 917657 - RNA, 19 nt, Artificial Sequence
  Description of Artificial Sequence: Synthetic oligonucleotide
cagcuggcgcgaagacugu

SEQ ID NO: 917658 - RNA, 19 nt, Artificial Sequence
  Description of Artificial Sequence: Synthetic oligonucleotide
uuguggcguggggcacauu

SEQ ID NO: 917659 - RNA, 19 nt, Artificial Sequence
  Description of Artificial Sequence: Synthetic oligonucleotide
ccuugacauaacggagugu

SEQ ID NO: 917660 - RNA, 19 nt, Artificial Sequence
  Description of Artificial Sequence: Synthetic oligonucleotide
gccauugcacuggguccaa

SEQ ID NO: 917661 - RNA, 19 nt, Artificial Sequence
  Description of Artificial Sequence: Synthetic oligonucleotide
cgcacccauacgggccucc

SEQ ID NO: 917662 - RNA, 19 nt, Artificial Sequence
  Description of Artificial Sequence: Synthetic oligonucleotide
cccguguagcucucccagu

SEQ ID NO: 917663 - RNA, 19 nt, Artificial Sequence
  Description of Artificial Sequence: Synthetic oligonucleotide
cgugaguccccguguguau

SEQ ID NO: 917664 - RNA, 19 nt, Artificial Sequence
  Description of Artificial Sequence: Synthetic oligonucleotide
gccgagcagcaaacucaaa

SEQ ID NO: 917665 - RNA, 19 nt, Artificial Sequence
  Description of Artificial Sequence: Synthetic oligonucleotide
ggccaggcacuaggcggaa

SEQ ID NO: 917666 - RNA, 19 nt, Artificial Sequence
  Description of Artificial Sequence: Synthetic oligonucleotide
gcgcuagggccagugugau

SEQ ID NO: 917667 - RNA, 19 nt, Artificial Sequence
  Description of Artificial Sequence: Synthetic oligonucleotide
gcccgcuuauggucccauu

SEQ ID NO: 917668 - RNA, 19 nt, Artificial Sequence
  Description of Artificial Sequence: Synthetic oligonucleotide
cgugguucgcguggugggu

SEQ ID NO: 917669 - RNA, 19 nt, Artificial Sequence
  Description of Artificial Sequence: Synthetic oligonucleotide
ccgcacucucaccgauggu

SEQ ID NO: 917670 - RNA, 19 nt, Artificial Sequence
  Description of Artificial Sequence: Synthetic oligonucleotide
cggcguacacagcgcccau

SEQ ID NO: 917671 - RNA, 19 nt, Artificial Sequence
  Description of Artificial Sequence: Synthetic oligonucleotide
aaggugaucauuuggcugc

SEQ ID NO: 917672 - RNA, 19 nt, Artificial Sequence
  Description of Artificial Sequence: Synthetic oligonucleotide
agggacagcacauauaucc

SEQ ID NO: 917673 - RNA, 19 nt, Artificial Sequence
  Description of Artificial Sequence: Synthetic oligonucleotide
agucaagacaccuuuaccc

SEQ ID NO: 917674 - RNA, 19 nt, Artificial Sequence
  Description of Artificial Sequence: Synthetic oligonucleotide
uuagcaaagguaaagguga

SEQ ID NO: 917675 - RNA, 19 nt, Artificial Sequence
  Description of Artificial Sequence: Synthetic oligonucleotide
aaagucaagacaccuuuac

SEQ ID NO: 917676 - RNA, 19 nt, Artificial Sequence
  Description of Artificial Sequence: Synthetic oligonucleotide
uauaucagagaagagaugc

SEQ ID NO: 917677 - RNA, 19 nt, Artificial Sequence
  Description of Artificial Sequence: Synthetic oligonucleotide
uuucaaaucugccacaugu

SEQ ID NO: 917678 - RNA, 19 nt, Artificial Sequence
  Description of Artificial Sequence: Synthetic oligonucleotide
aaagggacagcacauauau

SEQ ID NO: 917679 - RNA, 19 nt, Artificial Sequence
  Description of Artificial Sequence: Synthetic oligonucleotide
uuuauucggauuuuggcug

SEQ ID NO: 917680 - RNA, 19 nt, Artificial Sequence
  Description of Artificial Sequence: Synthetic oligonucleotide
aagacagauucuugguugc

SEQ ID NO: 917681 - RNA, 19 nt, Artificial Sequence
  Description of Artificial Sequence: Synthetic oligonucleotide
uuuuauucggauuuuggcu

SEQ ID NO: 917682 - RNA, 19 nt, Artificial Sequence
  Description of Artificial Sequence: Synthetic oligonucleotide
aaaauaugaagcuuuggua

SEQ ID NO: 917683 - RNA, 19 nt, Artificial Sequence
  Description of Artificial Sequence: Synthetic oligonucleotide
auaguacuugauuuugggc

SEQ ID NO: 917684 - RNA, 19 nt, Artificial Sequence
  Description of Artificial Sequence: Synthetic oligonucleotide
agaguuucagaugugacac

SEQ ID NO: 917685 - RNA, 19 nt, Artificial Sequence
  Description of Artificial Sequence: Synthetic oligonucleotide
aacuucacgucacucuccc

SEQ ID NO: 917686 - RNA, 19 nt, Artificial Sequence
  Description of Artificial Sequence: Synthetic oligonucleotide
uggcagauaaaauaugaag

SEQ ID NO: 917687 - RNA, 19 nt, Artificial Sequence
  Description of Artificial Sequence: Synthetic oligonucleotide
uaguacuugauuuugggcu

SEQ ID NO: 917688 - RNA, 19 nt, Artificial Sequence
  Description of Artificial Sequence: Synthetic oligonucleotide
uuugaggguacuucgauca

SEQ ID NO: 917689 - RNA, 19 nt, Artificial Sequence
  Description of Artificial Sequence: Synthetic oligonucleotide
ugaaguuaagggauuccgg

SEQ ID NO: 917690 - RNA, 19 nt, Artificial Sequence
  Description of Artificial Sequence: Synthetic oligonucleotide
uugaauggucccuugauca

SEQ ID NO: 917691 - RNA, 19 nt, Artificial Sequence
  Description of Artificial Sequence: Synthetic oligonucleotide
ucuacuagcuguuugguuc

SEQ ID NO: 917692 - RNA, 19 nt, Artificial Sequence
  Description of Artificial Sequence: Synthetic oligonucleotide
auggucaagucauucauuc

SEQ ID NO: 917693 - RNA, 19 nt, Artificial Sequence
  Description of Artificial Sequence: Synthetic oligonucleotide
gacuagcucaucuaguucc

SEQ ID NO: 917694 - RNA, 19 nt, Artificial Sequence
  Description of Artificial Sequence: Synthetic oligonucleotide
uguaaucauauccaaugcu

SEQ ID NO: 917695 - RNA, 19 nt, Artificial Sequence
  Description of Artificial Sequence: Synthetic oligonucleotide
caaaggauaaagucaagac

SEQ ID NO: 917696 - RNA, 19 nt, Artificial Sequence
  Description of Artificial Sequence: Synthetic oligonucleotide
aaucauauccaaugcuuca

SEQ ID NO: 917697 - RNA, 19 nt, Artificial Sequence
  Description of Artificial Sequence: Synthetic oligonucleotide
ucauucauucucgaaaucc

SEQ ID NO: 917698 - RNA, 19 nt, Artificial Sequence
  Description of Artificial Sequence: Synthetic oligonucleotide
agagauuucaaaucugcca

SEQ ID NO: 917699 - RNA, 19 nt, Artificial Sequence
  Description of Artificial Sequence: Synthetic oligonucleotide
ucagaugugacacugugua

SEQ ID NO: 917700 - RNA, 19 nt, Artificial Sequence
  Description of Artificial Sequence: Synthetic oligonucleotide
aaucccagcucccauagga

SEQ ID NO: 917701 - RNA, 19 nt, Artificial Sequence
  Description of Artificial Sequence: Synthetic oligonucleotide
cagguuauacuuuuguggc

SEQ ID NO: 917702 - RNA, 19 nt, Artificial Sequence
  Description of Artificial Sequence: Synthetic oligonucleotide
gauaaaugcagucgcagca

SEQ ID NO: 917703 - RNA, 19 nt, Artificial Sequence
  Description of Artificial Sequence: Synthetic oligonucleotide
ugucuuugaggguacuucg

SEQ ID NO: 917704 - RNA, 19 nt, Artificial Sequence
  Description of Artificial Sequence: Synthetic oligonucleotide
auagccaguuguaaggucc

SEQ ID NO: 917705 - RNA, 19 nt, Artificial Sequence
  Description of Artificial Sequence: Synthetic oligonucleotide
aaacucgccagcucugcac

SEQ ID NO: 917706 - RNA, 19 nt, Artificial Sequence
  Description of Artificial Sequence: Synthetic oligonucleotide
uagaaaacucgccagcucu

SEQ ID NO: 917707 - RNA, 19 nt, Artificial Sequence
  Description of Artificial Sequence: Synthetic oligonucleotide
aaggcaauggcucgcaaga

SEQ ID NO: 917708 - RNA, 19 nt, Artificial Sequence
  Description of Artificial Sequence: Synthetic oligonucleotide
aguacuugauuuugggcuc

SEQ ID NO: 917709 - RNA, 19 nt, Artificial Sequence
  Description of Artificial Sequence: Synthetic oligonucleotide
ugagcucuagcaucgaagc

SEQ ID NO: 917710 - RNA, 19 nt, Artificial Sequence
  Description of Artificial Sequence: Synthetic oligonucleotide
uuauuggagguaaauguaa

SEQ ID NO: 917711 - RNA, 19 nt, Artificial Sequence
  Description of Artificial Sequence: Synthetic oligonucleotide
auagccguuguccugcuuc

SEQ ID NO: 917712 - RNA, 19 nt, Artificial Sequence
  Description of Artificial Sequence: Synthetic oligonucleotide
ugcagucgcagcaagccgg

SEQ ID NO: 917713 - RNA, 19 nt, Artificial Sequence
  Description of Artificial Sequence: Synthetic oligonucleotide
aucugugcuccauuguccc

SEQ ID NO: 917714 - RNA, 19 nt, Artificial Sequence
  Description of Artificial Sequence: Synthetic oligonucleotide
uugaucauggcagauaaaa

SEQ ID NO: 917715 - RNA, 19 nt, Artificial Sequence
  Description of Artificial Sequence: Synthetic oligonucleotide
gaagagaugcacaggaacc

SEQ ID NO: 917716 - RNA, 19 nt, Artificial Sequence
  Description of Artificial Sequence: Synthetic oligonucleotide
gcagguuauacuuuugugg

SEQ ID NO: 917717 - RNA, 19 nt, Artificial Sequence
  Description of Artificial Sequence: Synthetic oligonucleotide
aucauuuggcugcucuugc

SEQ ID NO: 917718 - RNA, 19 nt, Artificial Sequence
  Description of Artificial Sequence: Synthetic oligonucleotide
ugucccaaacuccauccgg

SEQ ID NO: 917719 - RNA, 19 nt, Artificial Sequence
  Description of Artificial Sequence: Synthetic oligonucleotide
uaaucauauccaaugcuuc

SEQ ID NO: 917720 - RNA, 19 nt, Artificial Sequence
  Description of Artificial Sequence: Synthetic oligonucleotide
ccaaguaccugcaaaaucc

SEQ ID NO: 917721 - RNA, 19 nt, Artificial Sequence
  Description of Artificial Sequence: Synthetic oligonucleotide
gguaauaugauagccauac

SEQ ID NO: 917722 - RNA, 19 nt, Artificial Sequence
  Description of Artificial Sequence: Synthetic oligonucleotide
uauccaaugcuucaguauu

SEQ ID NO: 917723 - RNA, 19 nt, Artificial Sequence
  Description of Artificial Sequence: Synthetic oligonucleotide
gguaaaggugaucauuugg

SEQ ID NO: 917724 - RNA, 19 nt, Artificial Sequence
  Description of Artificial Sequence: Synthetic oligonucleotide
uguuucacugacucugaag

SEQ ID NO: 917725 - RNA, 19 nt, Artificial Sequence
  Description of Artificial Sequence: Synthetic oligonucleotide
uucaguauuuuauucggau

SEQ ID NO: 917726 - RNA, 19 nt, Artificial Sequence
  Description of Artificial Sequence: Synthetic oligonucleotide
aaugccucgaucgugugga

SEQ ID NO: 917727 - RNA, 19 nt, Artificial Sequence
  Description of Artificial Sequence: Synthetic oligonucleotide
aauggucccuugaucaugg

SEQ ID NO: 917728 - RNA, 19 nt, Artificial Sequence
  Description of Artificial Sequence: Synthetic oligonucleotide
uuauaucagagaagagaug

SEQ ID NO: 917729 - RNA, 19 nt, Artificial Sequence
  Description of Artificial Sequence: Synthetic oligonucleotide
ggauuuggguauuugacag

SEQ ID NO: 917730 - RNA, 19 nt, Artificial Sequence
  Description of Artificial Sequence: Synthetic oligonucleotide
ucgaucacgguucuuuucu

SEQ ID NO: 917731 - RNA, 19 nt, Artificial Sequence
  Description of Artificial Sequence: Synthetic oligonucleotide
aaagacucaucccaagcuu

SEQ ID NO: 917732 - RNA, 19 nt, Artificial Sequence
  Description of Artificial Sequence: Synthetic oligonucleotide
uuugaauggucccuugauc

SEQ ID NO: 917733 - RNA, 19 nt, Artificial Sequence
  Description of Artificial Sequence: Synthetic oligonucleotide
auuauuaccuucagcaaug

SEQ ID NO: 917734 - RNA, 19 nt, Artificial Sequence
  Description of Artificial Sequence: Synthetic oligonucleotide
uaaaggugaucauuuggcu

SEQ ID NO: 917735 - RNA, 19 nt, Artificial Sequence
  Description of Artificial Sequence: Synthetic oligonucleotide
uaugauagccauacuccac

SEQ ID NO: 917736 - RNA, 19 nt, Artificial Sequence
  Description of Artificial Sequence: Synthetic oligonucleotide
aucauaguuucucagguuu

SEQ ID NO: 917737 - RNA, 19 nt, Artificial Sequence
  Description of Artificial Sequence: Synthetic oligonucleotide
uuuugaauggucccuugau

SEQ ID NO: 917738 - RNA, 19 nt, Artificial Sequence
  Description of Artificial Sequence: Synthetic oligonucleotide
auagcuugagaaaugccuc

SEQ ID NO: 917739 - RNA, 19 nt, Artificial Sequence
  Description of Artificial Sequence: Synthetic oligonucleotide
ugcuagaaaacucgccagc

SEQ ID NO: 917740 - RNA, 19 nt, Artificial Sequence
  Description of Artificial Sequence: Synthetic oligonucleotide
gacaccuuuacccuccuca

SEQ ID NO: 917741 - RNA, 19 nt, Artificial Sequence
  Description of Artificial Sequence: Synthetic oligonucleotide
uccgauagcuucuucaaau

SEQ ID NO: 917742 - RNA, 19 nt, Artificial Sequence
  Description of Artificial Sequence: Synthetic oligonucleotide
acuuuauuggagguaaaug

SEQ ID NO: 917743 - RNA, 19 nt, Artificial Sequence
  Description of Artificial Sequence: Synthetic oligonucleotide
ucuguccgcaucugggucg

SEQ ID NO: 917744 - RNA, 19 nt, Artificial Sequence
  Description of Artificial Sequence: Synthetic oligonucleotide
aaugcaaauaggaccgucu

SEQ ID NO: 917745 - RNA, 19 nt, Artificial Sequence
  Description of Artificial Sequence: Synthetic oligonucleotide
uagucaugacugauggaag

SEQ ID NO: 917746 - RNA, 19 nt, Artificial Sequence
  Description of Artificial Sequence: Synthetic oligonucleotide
ucauucucgaaaucccagc

SEQ ID NO: 917747 - RNA, 19 nt, Artificial Sequence
  Description of Artificial Sequence: Synthetic oligonucleotide
ucauggcagauaaaauaug

SEQ ID NO: 917748 - RNA, 19 nt, Artificial Sequence
  Description of Artificial Sequence: Synthetic oligonucleotide
aaacuucacgucacucucc

SEQ ID NO: 917749 - RNA, 19 nt, Artificial Sequence
  Description of Artificial Sequence: Synthetic oligonucleotide
cugaaguuaagggauuccg

SEQ ID NO: 917750 - RNA, 19 nt, Artificial Sequence
  Description of Artificial Sequence: Synthetic oligonucleotide
ugaucugugcuccauuguc

SEQ ID NO: 917751 - RNA, 19 nt, Artificial Sequence
  Description of Artificial Sequence: Synthetic oligonucleotide
uucgauagcuugagaaaug

SEQ ID NO: 917752 - RNA, 19 nt, Artificial Sequence
  Description of Artificial Sequence: Synthetic oligonucleotide
caggauuuggguauuugac

SEQ ID NO: 917753 - RNA, 19 nt, Artificial Sequence
  Description of Artificial Sequence: Synthetic oligonucleotide
cuugguugcuagaaaacuc

SEQ ID NO: 917754 - RNA, 19 nt, Artificial Sequence
  Description of Artificial Sequence: Synthetic oligonucleotide
aaugaaagcccuccuucaa

SEQ ID NO: 917755 - RNA, 19 nt, Artificial Sequence
  Description of Artificial Sequence: Synthetic oligonucleotide
gcuucaguauuuuauucgg

SEQ ID NO: 917756 - RNA, 19 nt, Artificial Sequence
  Description of Artificial Sequence: Synthetic oligonucleotide
ucccaguagaccuuauagc

SEQ ID NO: 917757 - RNA, 19 nt, Artificial Sequence
  Description of Artificial Sequence: Synthetic oligonucleotide
cuuauagccguuguccugc

SEQ ID NO: 917758 - RNA, 19 nt, Artificial Sequence
  Description of Artificial Sequence: Synthetic oligonucleotide
agccaguuaauguuuccuc

SEQ ID NO: 917759 - RNA, 19 nt, Artificial Sequence
  Description of Artificial Sequence: Synthetic oligonucleotide
cagcacauauauccgauag

SEQ ID NO: 917760 - RNA, 19 nt, Artificial Sequence
  Description of Artificial Sequence: Synthetic oligonucleotide
gcucgcaagaucuuggagg

SEQ ID NO: 917761 - RNA, 19 nt, Artificial Sequence
  Description of Artificial Sequence: Synthetic oligonucleotide
auucucgaaaucccagcuc

SEQ ID NO: 917762 - RNA, 19 nt, Artificial Sequence
  Description of Artificial Sequence: Synthetic oligonucleotide
ugagaaaugccucgaucgu

SEQ ID NO: 917763 - RNA, 19 nt, Artificial Sequence
  Description of Artificial Sequence: Synthetic oligonucleotide
ugggauaauuauucuuccc

SEQ ID NO: 917764 - RNA, 19 nt, Artificial Sequence
  Description of Artificial Sequence: Synthetic oligonucleotide
gaggguacuucgaucacgg

SEQ ID NO: 917765 - RNA, 19 nt, Artificial Sequence
  Description of Artificial Sequence: Synthetic oligonucleotide
uucuugguugcuagaaaac

SEQ ID NO: 917766 - RNA, 19 nt, Artificial Sequence
  Description of Artificial Sequence: Synthetic oligonucleotide
cagagauuucaaaucugcc

SEQ ID NO: 917767 - RNA, 19 nt, Artificial Sequence
  Description of Artificial Sequence: Synthetic oligonucleotide
uccagaucacuguugccag

SEQ ID NO: 917768 - RNA, 19 nt, Artificial Sequence
  Description of Artificial Sequence: Synthetic oligonucleotide
ucgggaacagcuucaggag

SEQ ID NO: 917769 - RNA, 19 nt, Artificial Sequence
  Description of Artificial Sequence: Synthetic oligonucleotide
ucauauccaaugcuucagu

SEQ ID NO: 917770 - RNA, 19 nt, Artificial Sequence
  Description of Artificial Sequence: Synthetic oligonucleotide
guuggcuaagauaauuuug

SEQ ID NO: 917771 - RNA, 19 nt, Artificial Sequence
  Description of Artificial Sequence: Synthetic oligonucleotide
gguuauaucagagaagaga

SEQ ID NO: 917772 - RNA, 19 nt, Artificial Sequence
  Description of Artificial Sequence: Synthetic oligonucleotide
ggcuaagauaauuuuggcc

SEQ ID NO: 917773 - RNA, 19 nt, Artificial Sequence
  Description of Artificial Sequence: Synthetic oligonucleotide
ucgauagcuugagaaaugc

SEQ ID NO: 917774 - RNA, 19 nt, Artificial Sequence
  Description of Artificial Sequence: Synthetic oligonucleotide
ugcgaggcagugaucauga

SEQ ID NO: 917775 - RNA, 19 nt, Artificial Sequence
  Description of Artificial Sequence: Synthetic oligonucleotide
aucaaagacucaucccaag

SEQ ID NO: 917776 - RNA, 19 nt, Artificial Sequence
  Description of Artificial Sequence: Synthetic oligonucleotide
auauccaaugcuucaguau

SEQ ID NO: 917777 - RNA, 19 nt, Artificial Sequence
  Description of Artificial Sequence: Synthetic oligonucleotide
aaauguaaucauauccaau

SEQ ID NO: 917778 - RNA, 19 nt, Artificial Sequence
  Description of Artificial Sequence: Synthetic oligonucleotide
gauagcuugagaaaugccu

SEQ ID NO: 917779 - RNA, 19 nt, Artificial Sequence
  Description of Artificial Sequence: Synthetic oligonucleotide
cucaucccaagcuugcggc

SEQ ID NO: 917780 - RNA, 19 nt, Artificial Sequence
  Description of Artificial Sequence: Synthetic oligonucleotide
ucuguucgggaacagcuuc

SEQ ID NO: 917781 - RNA, 19 nt, Artificial Sequence
  Description of Artificial Sequence: Synthetic oligonucleotide
agucaugacugauggaagu

SEQ ID NO: 917782 - RNA, 19 nt, Artificial Sequence
  Description of Artificial Sequence: Synthetic oligonucleotide
agagaugcacaggaacccc

SEQ ID NO: 917783 - RNA, 19 nt, Artificial Sequence
  Description of Artificial Sequence: Synthetic oligonucleotide
uccacuuuauuggagguaa

SEQ ID NO: 917784 - RNA, 19 nt, Artificial Sequence
  Description of Artificial Sequence: Synthetic oligonucleotide
guguagggcacaaaugggg

SEQ ID NO: 917785 - RNA, 19 nt, Artificial Sequence
  Description of Artificial Sequence: Synthetic oligonucleotide
auuuugucagcuaaggcaa

SEQ ID NO: 917786 - RNA, 19 nt, Artificial Sequence
  Description of Artificial Sequence: Synthetic oligonucleotide
cccaguagaccuuauagcc

SEQ ID NO: 917787 - RNA, 19 nt, Artificial Sequence
  Description of Artificial Sequence: Synthetic oligonucleotide
ugaggguacuucgaucacg

SEQ ID NO: 917788 - RNA, 19 nt, Artificial Sequence
  Description of Artificial Sequence: Synthetic oligonucleotide
uccauugucccaguagacc

SEQ ID NO: 917789 - RNA, 19 nt, Artificial Sequence
  Description of Artificial Sequence: Synthetic oligonucleotide
ucggauuuuggcugcaggu

SEQ ID NO: 917790 - RNA, 19 nt, Artificial Sequence
  Description of Artificial Sequence: Synthetic oligonucleotide
guagucaugacugauggaa

SEQ ID NO: 917791 - RNA, 19 nt, Artificial Sequence
  Description of Artificial Sequence: Synthetic oligonucleotide
agcucuagcaucgaagcug

SEQ ID NO: 917792 - RNA, 19 nt, Artificial Sequence
  Description of Artificial Sequence: Synthetic oligonucleotide
uaaggucccugauagcaga

SEQ ID NO: 917793 - RNA, 19 nt, Artificial Sequence
  Description of Artificial Sequence: Synthetic oligonucleotide
caaacuucacgucacucuc

SEQ ID NO: 917794 - RNA, 19 nt, Artificial Sequence
  Description of Artificial Sequence: Synthetic oligonucleotide
uugugcgaggcagugauca

SEQ ID NO: 917795 - RNA, 19 nt, Artificial Sequence
  Description of Artificial Sequence: Synthetic oligonucleotide
uauccgauagcuucuucaa

SEQ ID NO: 917796 - RNA, 19 nt, Artificial Sequence
  Description of Artificial Sequence: Synthetic oligonucleotide
aagacucaucccaagcuug

SEQ ID NO: 917797 - RNA, 19 nt, Artificial Sequence
  Description of Artificial Sequence: Synthetic oligonucleotide
agccgggcaaaccuccugc

SEQ ID NO: 917798 - RNA, 19 nt, Artificial Sequence
  Description of Artificial Sequence: Synthetic oligonucleotide
aucauauccaaugcuucag

SEQ ID NO: 917799 - RNA, 19 nt, Artificial Sequence
  Description of Artificial Sequence: Synthetic oligonucleotide
aggauaaagucaagacacc

SEQ ID NO: 917800 - RNA, 19 nt, Artificial Sequence
  Description of Artificial Sequence: Synthetic oligonucleotide
ucaguauuuuauucggauu

SEQ ID NO: 917801 - RNA, 19 nt, Artificial Sequence
  Description of Artificial Sequence: Synthetic oligonucleotide
gagaacacucuccacucac

SEQ ID NO: 917802 - RNA, 19 nt, Artificial Sequence
  Description of Artificial Sequence: Synthetic oligonucleotide
uggcuaagauaauuuuggc

SEQ ID NO: 917803 - RNA, 19 nt, Artificial Sequence
  Description of Artificial Sequence: Synthetic oligonucleotide
uaagauaauuuuggccuug

SEQ ID NO: 917804 - RNA, 19 nt, Artificial Sequence
  Description of Artificial Sequence: Synthetic oligonucleotide
ugcugagacaaagacagau

SEQ ID NO: 917805 - RNA, 19 nt, Artificial Sequence
  Description of Artificial Sequence: Synthetic oligonucleotide
agugaucaugaucccagca

SEQ ID NO: 917806 - RNA, 19 nt, Artificial Sequence
  Description of Artificial Sequence: Synthetic oligonucleotide
ugcacuuaugacagcugca

SEQ ID NO: 917807 - RNA, 19 nt, Artificial Sequence
  Description of Artificial Sequence: Synthetic oligonucleotide
cuugcugguaggaagaaua

SEQ ID NO: 917808 - RNA, 19 nt, Artificial Sequence
  Description of Artificial Sequence: Synthetic oligonucleotide
gaagccaguuaauguuucc

SEQ ID NO: 917809 - RNA, 19 nt, Artificial Sequence
  Description of Artificial Sequence: Synthetic oligonucleotide
gggauaauuauucuuccca

SEQ ID NO: 917810 - RNA, 19 nt, Artificial Sequence
  Description of Artificial Sequence: Synthetic oligonucleotide
ugguaggaagaauagcuuu

SEQ ID NO: 917811 - RNA, 19 nt, Artificial Sequence
  Description of Artificial Sequence: Synthetic oligonucleotide
uuaucaggcugacugucau

SEQ ID NO: 917812 - RNA, 19 nt, Artificial Sequence
  Description of Artificial Sequence: Synthetic oligonucleotide
aguaccugcaaaaucccug

SEQ ID NO: 917813 - RNA, 19 nt, Artificial Sequence
  Description of Artificial Sequence: Synthetic oligonucleotide
ugcaaauaggaccgucuuc

SEQ ID NO: 917814 - RNA, 19 nt, Artificial Sequence
  Description of Artificial Sequence: Synthetic oligonucleotide
cugagaacacucuccacuc

SEQ ID NO: 917815 - RNA, 19 nt, Artificial Sequence
  Description of Artificial Sequence: Synthetic oligonucleotide
ugauagcagagauuucaaa

SEQ ID NO: 917816 - RNA, 19 nt, Artificial Sequence
  Description of Artificial Sequence: Synthetic oligonucleotide
agugcuggacaacauguau

SEQ ID NO: 917817 - RNA, 19 nt, Artificial Sequence
  Description of Artificial Sequence: Synthetic oligonucleotide
ucaagucauucauucucga

SEQ ID NO: 917818 - RNA, 19 nt, Artificial Sequence
  Description of Artificial Sequence: Synthetic oligonucleotide
uagaccuuauagccguugu

SEQ ID NO: 917819 - RNA, 19 nt, Artificial Sequence
  Description of Artificial Sequence: Synthetic oligonucleotide
cauaggagcucgaaggcca

SEQ ID NO: 917820 - RNA, 19 nt, Artificial Sequence
  Description of Artificial Sequence: Synthetic oligonucleotide
agauuucaaaucugccaca

SEQ ID NO: 917821 - RNA, 19 nt, Artificial Sequence
  Description of Artificial Sequence: Synthetic oligonucleotide
agaacacucuccacucacc

SEQ ID NO: 917822 - RNA, 19 nt, Artificial Sequence
  Description of Artificial Sequence: Synthetic oligonucleotide
ucguuggcuaagauaauuu

SEQ ID NO: 917823 - RNA, 19 nt, Artificial Sequence
  Description of Artificial Sequence: Synthetic oligonucleotide
uguuugguucuguuuccca

SEQ ID NO: 917824 - RNA, 19 nt, Artificial Sequence
  Description of Artificial Sequence: Synthetic oligonucleotide
ggcugauaaaugcagucgc

SEQ ID NO: 917825 - RNA, 19 nt, Artificial Sequence
  Description of Artificial Sequence: Synthetic oligonucleotide
ggucccuugaucauggcag

SEQ ID NO: 917826 - RNA, 19 nt, Artificial Sequence
  Description of Artificial Sequence: Synthetic oligonucleotide
uaaagucaagacaccuuua

SEQ ID NO: 917827 - RNA, 19 nt, Artificial Sequence
  Description of Artificial Sequence: Synthetic oligonucleotide
aaucaaagacucaucccaa

SEQ ID NO: 917828 - RNA, 19 nt, Artificial Sequence
  Description of Artificial Sequence: Synthetic oligonucleotide
ggucaaaggccuugaaugc

SEQ ID NO: 917829 - RNA, 19 nt, Artificial Sequence
  Description of Artificial Sequence: Synthetic oligonucleotide
gguuauacuuuuguggcug

SEQ ID NO: 917830 - RNA, 19 nt, Artificial Sequence
  Description of Artificial Sequence: Synthetic oligonucleotide
guugugaagaagggaacug

SEQ ID NO: 917831 - RNA, 19 nt, Artificial Sequence
  Description of Artificial Sequence: Synthetic oligonucleotide
agacucaucccaagcuugc

SEQ ID NO: 917832 - RNA, 19 nt, Artificial Sequence
  Description of Artificial Sequence: Synthetic oligonucleotide
gagaaaugccucgaucgug

SEQ ID NO: 917833 - RNA, 19 nt, Artificial Sequence
  Description of Artificial Sequence: Synthetic oligonucleotide
cuuugaggguacuucgauc

SEQ ID NO: 917834 - RNA, 19 nt, Artificial Sequence
  Description of Artificial Sequence: Synthetic oligonucleotide
guuguccugcuucggauug

SEQ ID NO: 917835 - RNA, 19 nt, Artificial Sequence
  Description of Artificial Sequence: Synthetic oligonucleotide
aguuguaaggucccugaua

SEQ ID NO: 917836 - RNA, 19 nt, Artificial Sequence
  Description of Artificial Sequence: Synthetic oligonucleotide
augagcucuagcaucgaag

SEQ ID NO: 917837 - RNA, 19 nt, Artificial Sequence
  Description of Artificial Sequence: Synthetic oligonucleotide
gguacuucgaucacgguuc

SEQ ID NO: 917838 - RNA, 19 nt, Artificial Sequence
  Description of Artificial Sequence: Synthetic oligonucleotide
agaaaugccucgaucgugu

SEQ ID NO: 917839 - RNA, 19 nt, Artificial Sequence
  Description of Artificial Sequence: Synthetic oligonucleotide
gugugcacaaacuucacgu

SEQ ID NO: 917840 - RNA, 19 nt, Artificial Sequence
  Description of Artificial Sequence: Synthetic oligonucleotide
gggguuauaucagagaaga

SEQ ID NO: 917841 - RNA, 19 nt, Artificial Sequence
  Description of Artificial Sequence: Synthetic oligonucleotide
uagccaguuguaagguccc

SEQ ID NO: 917842 - RNA, 19 nt, Artificial Sequence
  Description of Artificial Sequence: Synthetic oligonucleotide
cauguuuugggauaauuau

SEQ ID NO: 917843 - RNA, 19 nt, Artificial Sequence
  Description of Artificial Sequence: Synthetic oligonucleotide
acugguccgaaugguggcc

SEQ ID NO: 917844 - RNA, 19 nt, Artificial Sequence
  Description of Artificial Sequence: Synthetic oligonucleotide
ucucgaaaucccagcuccc

SEQ ID NO: 917845 - RNA, 19 nt, Artificial Sequence
  Description of Artificial Sequence: Synthetic oligonucleotide
gacggaggugugcacaaac

SEQ ID NO: 917846 - RNA, 19 nt, Artificial Sequence
  Description of Artificial Sequence: Synthetic oligonucleotide
auuuggguauuugacaguu

SEQ ID NO: 917847 - RNA, 19 nt, Artificial Sequence
  Description of Artificial Sequence: Synthetic oligonucleotide
cucgcaagaucuuggagga

SEQ ID NO: 917848 - RNA, 19 nt, Artificial Sequence
  Description of Artificial Sequence: Synthetic oligonucleotide
cauacuccacauagauggc

SEQ ID NO: 917849 - RNA, 19 nt, Artificial Sequence
  Description of Artificial Sequence: Synthetic oligonucleotide
gaauggucccuugaucaug

SEQ ID NO: 917850 - RNA, 19 nt, Artificial Sequence
  Description of Artificial Sequence: Synthetic oligonucleotide
agguuauacuuuuguggcu

SEQ ID NO: 917851 - RNA, 19 nt, Artificial Sequence
  Description of Artificial Sequence: Synthetic oligonucleotide
gaaaacucgccagcucugc

SEQ ID NO: 917852 - RNA, 19 nt, Artificial Sequence
  Description of Artificial Sequence: Synthetic oligonucleotide
gauugugcgaggcagugau

SEQ ID NO: 917853 - RNA, 19 nt, Artificial Sequence
  Description of Artificial Sequence: Synthetic oligonucleotide
cuggacaacauguaugugu

SEQ ID NO: 917854 - RNA, 19 nt, Artificial Sequence
  Description of Artificial Sequence: Synthetic oligonucleotide
aagcuugcggccagggcuc

SEQ ID NO: 917855 - RNA, 19 nt, Artificial Sequence
  Description of Artificial Sequence: Synthetic oligonucleotide
cuagaaaacucgccagcuc

SEQ ID NO: 917856 - RNA, 19 nt, Artificial Sequence
  Description of Artificial Sequence: Synthetic oligonucleotide
ugaauggucccuugaucau

SEQ ID NO: 917857 - RNA, 19 nt, Artificial Sequence
  Description of Artificial Sequence: Synthetic oligonucleotide
ccaguagaccuuauagccg

SEQ ID NO: 917858 - RNA, 19 nt, Artificial Sequence
  Description of Artificial Sequence: Synthetic oligonucleotide
ucaucccaagcuugcggcc

SEQ ID NO: 917859 - RNA, 19 nt, Artificial Sequence
  Description of Artificial Sequence: Synthetic oligonucleotide
uucacgucacucucccugu

SEQ ID NO: 917860 - RNA, 19 nt, Artificial Sequence
  Description of Artificial Sequence: Synthetic oligonucleotide
gucaaaggccuugaaugcc

SEQ ID NO: 917861 - RNA, 19 nt, Artificial Sequence
  Description of Artificial Sequence: Synthetic oligonucleotide
uguucgggaacagcuucag

SEQ ID NO: 917862 - RNA, 19 nt, Artificial Sequence
  Description of Artificial Sequence: Synthetic oligonucleotide
acuucgaucacgguucuuu

SEQ ID NO: 917863 - RNA, 19 nt, Artificial Sequence
  Description of Artificial Sequence: Synthetic oligonucleotide
uauauccgauagcuucuuc

SEQ ID NO: 917864 - RNA, 19 nt, Artificial Sequence
  Description of Artificial Sequence: Synthetic oligonucleotide
guaaggucccugauagcag

SEQ ID NO: 917865 - RNA, 19 nt, Artificial Sequence
  Description of Artificial Sequence: Synthetic oligonucleotide
agucuguccgcaucugggu

SEQ ID NO: 917866 - RNA, 19 nt, Artificial Sequence
  Description of Artificial Sequence: Synthetic oligonucleotide
cuggucuacuagcuguuug

SEQ ID NO: 917867 - RNA, 19 nt, Artificial Sequence
  Description of Artificial Sequence: Synthetic oligonucleotide
agucgcagcaagccgggca

SEQ ID NO: 917868 - RNA, 19 nt, Artificial Sequence
  Description of Artificial Sequence: Synthetic oligonucleotide
gguauuugacaguuggaaa

SEQ ID NO: 917869 - RNA, 19 nt, Artificial Sequence
  Description of Artificial Sequence: Synthetic oligonucleotide
uucgaucacgguucuuuuc

SEQ ID NO: 917870 - RNA, 19 nt, Artificial Sequence
  Description of Artificial Sequence: Synthetic oligonucleotide
gucaugacugauggaagug

SEQ ID NO: 917871 - RNA, 19 nt, Artificial Sequence
  Description of Artificial Sequence: Synthetic oligonucleotide
augugacacuguguagggc

SEQ ID NO: 917872 - RNA, 19 nt, Artificial Sequence
  Description of Artificial Sequence: Synthetic oligonucleotide
aguagucaugacugaugga

SEQ ID NO: 917873 - RNA, 19 nt, Artificial Sequence
  Description of Artificial Sequence: Synthetic oligonucleotide
aagggacagcacauauauc

SEQ ID NO: 917874 - RNA, 19 nt, Artificial Sequence
  Description of Artificial Sequence: Synthetic oligonucleotide
ucgaaaucccagcucccau

SEQ ID NO: 917875 - RNA, 19 nt, Artificial Sequence
  Description of Artificial Sequence: Synthetic oligonucleotide
gacucaucccaagcuugcg

SEQ ID NO: 917876 - RNA, 19 nt, Artificial Sequence
  Description of Artificial Sequence: Synthetic oligonucleotide
augcaaauaggaccgucuu

SEQ ID NO: 917877 - RNA, 19 nt, Artificial Sequence
  Description of Artificial Sequence: Synthetic oligonucleotide
cuucaguauuuuauucgga

SEQ ID NO: 917878 - RNA, 19 nt, Artificial Sequence
  Description of Artificial Sequence: Synthetic oligonucleotide
ugagcggucuccugcucca

SEQ ID NO: 917879 - RNA, 19 nt, Artificial Sequence
  Description of Artificial Sequence: Synthetic oligonucleotide
accauggacggaggugugc

SEQ ID NO: 917880 - RNA, 19 nt, Artificial Sequence
  Description of Artificial Sequence: Synthetic oligonucleotide
gggucguuggcuaagauaa

SEQ ID NO: 917881 - RNA, 19 nt, Artificial Sequence
  Description of Artificial Sequence: Synthetic oligonucleotide
uugaggguacuucgaucac

SEQ ID NO: 917882 - RNA, 19 nt, Artificial Sequence
  Description of Artificial Sequence: Synthetic oligonucleotide
cauagccaguuguaagguc

SEQ ID NO: 917883 - RNA, 19 nt, Artificial Sequence
  Description of Artificial Sequence: Synthetic oligonucleotide
acaccccucugcuucaggu

SEQ ID NO: 917884 - RNA, 19 nt, Artificial Sequence
  Description of Artificial Sequence: Synthetic oligonucleotide
gccucgaucguguggagag

SEQ ID NO: 917885 - RNA, 19 nt, Artificial Sequence
  Description of Artificial Sequence: Synthetic oligonucleotide
ugguaauaugauagccaua

SEQ ID NO: 917886 - RNA, 19 nt, Artificial Sequence
  Description of Artificial Sequence: Synthetic oligonucleotide
cugucccaaacuccauccg

SEQ ID NO: 917887 - RNA, 19 nt, Artificial Sequence
  Description of Artificial Sequence: Synthetic oligonucleotide
cauauauccgauagcuucu

SEQ ID NO: 917888 - RNA, 19 nt, Artificial Sequence
  Description of Artificial Sequence: Synthetic oligonucleotide
agaagggaacugcugucaa

SEQ ID NO: 917889 - RNA, 19 nt, Artificial Sequence
  Description of Artificial Sequence: Synthetic oligonucleotide
gucaagacaccuuuacccu

SEQ ID NO: 917890 - RNA, 19 nt, Artificial Sequence
  Description of Artificial Sequence: Synthetic oligonucleotide
uucuguucgggaacagcuu

SEQ ID NO: 917891 - RNA, 19 nt, Artificial Sequence
  Description of Artificial Sequence: Synthetic oligonucleotide
gggcuccagauuuucuucg

SEQ ID NO: 917892 - RNA, 19 nt, Artificial Sequence
  Description of Artificial Sequence: Synthetic oligonucleotide
ucgaucguguggagagaug

SEQ ID NO: 917893 - RNA, 19 nt, Artificial Sequence
  Description of Artificial Sequence: Synthetic oligonucleotide
cauauccaaugcuucagua

SEQ ID NO: 917894 - RNA, 19 nt, Artificial Sequence
  Description of Artificial Sequence: Synthetic oligonucleotide
cuucaaggcaauggcucgc

SEQ ID NO: 917895 - RNA, 19 nt, Artificial Sequence
  Description of Artificial Sequence: Synthetic oligonucleotide
ucggauugugcgaggcagu

SEQ ID NO: 917896 - RNA, 19 nt, Artificial Sequence
  Description of Artificial Sequence: Synthetic oligonucleotide
cagcucauugccugagaac

SEQ ID NO: 917897 - RNA, 19 nt, Artificial Sequence
  Description of Artificial Sequence: Synthetic oligonucleotide
aaggucccugauagcagag

SEQ ID NO: 917898 - RNA, 19 nt, Artificial Sequence
  Description of Artificial Sequence: Synthetic oligonucleotide
agaaaacucgccagcucug

SEQ ID NO: 917899 - RNA, 19 nt, Artificial Sequence
  Description of Artificial Sequence: Synthetic oligonucleotide
gggacagcacauauauccg

SEQ ID NO: 917900 - RNA, 19 nt, Artificial Sequence
  Description of Artificial Sequence: Synthetic oligonucleotide
ccacugguccgaauggugg

SEQ ID NO: 917901 - RNA, 19 nt, Artificial Sequence
  Description of Artificial Sequence: Synthetic oligonucleotide
gaugagcucuagcaucgaa

SEQ ID NO: 917902 - RNA, 19 nt, Artificial Sequence
  Description of Artificial Sequence: Synthetic oligonucleotide
ucugugcuccauuguccca

SEQ ID NO: 917903 - RNA, 19 nt, Artificial Sequence
  Description of Artificial Sequence: Synthetic oligonucleotide
guagaccuuauagccguug

SEQ ID NO: 917904 - RNA, 19 nt, Artificial Sequence
  Description of Artificial Sequence: Synthetic oligonucleotide
gucauucauucucgaaauc

SEQ ID NO: 917905 - RNA, 19 nt, Artificial Sequence
  Description of Artificial Sequence: Synthetic oligonucleotide
auaggaccgucuuccccug

SEQ ID NO: 917906 - RNA, 19 nt, Artificial Sequence
  Description of Artificial Sequence: Synthetic oligonucleotide
auaugaagcuuugguaaua

SEQ ID NO: 917907 - RNA, 19 nt, Artificial Sequence
  Description of Artificial Sequence: Synthetic oligonucleotide
uggacggaggugugcacaa

SEQ ID NO: 917908 - RNA, 19 nt, Artificial Sequence
  Description of Artificial Sequence: Synthetic oligonucleotide
uccgaaugguggccacacc

SEQ ID NO: 917909 - RNA, 19 nt, Artificial Sequence
  Description of Artificial Sequence: Synthetic oligonucleotide
acugagcggucuccugcuc

SEQ ID NO: 917910 - RNA, 19 nt, Artificial Sequence
  Description of Artificial Sequence: Synthetic oligonucleotide
cugauagcagagauuucaa

SEQ ID NO: 917911 - RNA, 19 nt, Artificial Sequence
  Description of Artificial Sequence: Synthetic oligonucleotide
ggguauuugacaguuggaa

SEQ ID NO: 917912 - RNA, 19 nt, Artificial Sequence
  Description of Artificial Sequence: Synthetic oligonucleotide
gugaucauuuggcugcucu

SEQ ID NO: 917913 - RNA, 19 nt, Artificial Sequence
  Description of Artificial Sequence: Synthetic oligonucleotide
caguagaccuuauagccgu

SEQ ID NO: 917914 - RNA, 19 nt, Artificial Sequence
  Description of Artificial Sequence: Synthetic oligonucleotide
uaggaccgucuuccccugg

SEQ ID NO: 917915 - RNA, 19 nt, Artificial Sequence
  Description of Artificial Sequence: Synthetic oligonucleotide
aucccaagcuugcggccag

SEQ ID NO: 917916 - RNA, 19 nt, Artificial Sequence
  Description of Artificial Sequence: Synthetic oligonucleotide
cgauagcuucuucaaaugc

SEQ ID NO: 917917 - RNA, 19 nt, Artificial Sequence
  Description of Artificial Sequence: Synthetic oligonucleotide
uuauagccguuguccugcu

SEQ ID NO: 917918 - RNA, 19 nt, Artificial Sequence
  Description of Artificial Sequence: Synthetic oligonucleotide
uagcaucgaagcugaucac

SEQ ID NO: 917919 - RNA, 19 nt, Artificial Sequence
  Description of Artificial Sequence: Synthetic oligonucleotide
ucugggucguuggcuaaga

SEQ ID NO: 917920 - RNA, 19 nt, Artificial Sequence
  Description of Artificial Sequence: Synthetic oligonucleotide
agcuugagaaaugccucga

SEQ ID NO: 917921 - RNA, 19 nt, Artificial Sequence
  Description of Artificial Sequence: Synthetic oligonucleotide
gcacuuaugacagcugcac

SEQ ID NO: 917922 - RNA, 19 nt, Artificial Sequence
  Description of Artificial Sequence: Synthetic oligonucleotide
caaacuccauccgggcccc

SEQ ID NO: 917923 - RNA, 19 nt, Artificial Sequence
  Description of Artificial Sequence: Synthetic oligonucleotide
cuccauccgggccccaaag

SEQ ID NO: 917924 - RNA, 19 nt, Artificial Sequence
  Description of Artificial Sequence: Synthetic oligonucleotide
uuacccuccucaggauuug

SEQ ID NO: 917925 - RNA, 19 nt, Artificial Sequence
  Description of Artificial Sequence: Synthetic oligonucleotide
uauucggauuuuggcugca

SEQ ID NO: 917926 - RNA, 19 nt, Artificial Sequence
  Description of Artificial Sequence: Synthetic oligonucleotide
aggucacugaacugcuuuu

SEQ ID NO: 917927 - RNA, 19 nt, Artificial Sequence
  Description of Artificial Sequence: Synthetic oligonucleotide
aggaccgucuuccccuggu

SEQ ID NO: 917928 - RNA, 19 nt, Artificial Sequence
  Description of Artificial Sequence: Synthetic oligonucleotide
caaagggacagcacauaua

SEQ ID NO: 917929 - RNA, 19 nt, Artificial Sequence
  Description of Artificial Sequence: Synthetic oligonucleotide
ggacagcacauauauccga

SEQ ID NO: 917930 - RNA, 19 nt, Artificial Sequence
  Description of Artificial Sequence: Synthetic oligonucleotide
caguuaauguuuccucaaa

SEQ ID NO: 917931 - RNA, 19 nt, Artificial Sequence
  Description of Artificial Sequence: Synthetic oligonucleotide
gacagauucuugguugcua

SEQ ID NO: 917932 - RNA, 19 nt, Artificial Sequence
  Description of Artificial Sequence: Synthetic oligonucleotide
gauuccggucccagcgcag

SEQ ID NO: 917933 - RNA, 19 nt, Artificial Sequence
  Description of Artificial Sequence: Synthetic oligonucleotide
cauggacggaggugugcac

SEQ ID NO: 917934 - RNA, 19 nt, Artificial Sequence
  Description of Artificial Sequence: Synthetic oligonucleotide
ggcucgcaagaucuuggag

SEQ ID NO: 917935 - RNA, 19 nt, Artificial Sequence
  Description of Artificial Sequence: Synthetic oligonucleotide
aucugggucguuggcuaag

SEQ ID NO: 917936 - RNA, 19 nt, Artificial Sequence
  Description of Artificial Sequence: Synthetic oligonucleotide
agggcacaaaugggguggg

SEQ ID NO: 917937 - RNA, 19 nt, Artificial Sequence
  Description of Artificial Sequence: Synthetic oligonucleotide
auauauccgauagcuucuu

SEQ ID NO: 917938 - RNA, 19 nt, Artificial Sequence
  Description of Artificial Sequence: Synthetic oligonucleotide
cugacuagcucaucuaguu

SEQ ID NO: 917939 - RNA, 19 nt, Artificial Sequence
  Description of Artificial Sequence: Synthetic oligonucleotide
cacgucacucucccuguuc

SEQ ID NO: 917940 - RNA, 19 nt, Artificial Sequence
  Description of Artificial Sequence: Synthetic oligonucleotide
ccuuauagccguuguccug

SEQ ID NO: 917941 - RNA, 19 nt, Artificial Sequence
  Description of Artificial Sequence: Synthetic oligonucleotide
guaauaugauagccauacu

SEQ ID NO: 917942 - RNA, 19 nt, Artificial Sequence
  Description of Artificial Sequence: Synthetic oligonucleotide
gucgcagcaagccgggcaa

SEQ ID NO: 917943 - RNA, 19 nt, Artificial Sequence
  Description of Artificial Sequence: Synthetic oligonucleotide
ugugcgaggcagugaucau

SEQ ID NO: 917944 - RNA, 19 nt, Artificial Sequence
  Description of Artificial Sequence: Synthetic oligonucleotide
acggaggugugcacaaacu

SEQ ID NO: 917945 - RNA, 19 nt, Artificial Sequence
  Description of Artificial Sequence: Synthetic oligonucleotide
accgucuuccccuggucua

SEQ ID NO: 917946 - RNA, 19 nt, Artificial Sequence
  Description of Artificial Sequence: Synthetic oligonucleotide
guccgaaugguggccacac

SEQ ID NO: 917947 - RNA, 19 nt, Artificial Sequence
  Description of Artificial Sequence: Synthetic oligonucleotide
ccuugauuuugucagcuaa

SEQ ID NO: 917948 - RNA, 19 nt, Artificial Sequence
  Description of Artificial Sequence: Synthetic oligonucleotide
caaagacagauucuugguu

SEQ ID NO: 917949 - RNA, 19 nt, Artificial Sequence
  Description of Artificial Sequence: Synthetic oligonucleotide
gacagcacauauauccgau

SEQ ID NO: 917950 - RNA, 19 nt, Artificial Sequence
  Description of Artificial Sequence: Synthetic oligonucleotide
ucgcaagaucuuggaggag

SEQ ID NO: 917951 - RNA, 19 nt, Artificial Sequence
  Description of Artificial Sequence: Synthetic oligonucleotide
cucgaaaucccagcuccca

SEQ ID NO: 917952 - RNA, 19 nt, Artificial Sequence
  Description of Artificial Sequence: Synthetic oligonucleotide
cccaaacuccauccgggcc

SEQ ID NO: 917953 - RNA, 19 nt, Artificial Sequence
  Description of Artificial Sequence: Synthetic oligonucleotide
gaucacgguucuuuucuuu

SEQ ID NO: 917954 - RNA, 19 nt, Artificial Sequence
  Description of Artificial Sequence: Synthetic oligonucleotide
gaccgucuuccccuggucu

SEQ ID NO: 917955 - RNA, 19 nt, Artificial Sequence
  Description of Artificial Sequence: Synthetic oligonucleotide
cuucggauugugcgaggca

SEQ ID NO: 917956 - RNA, 19 nt, Artificial Sequence
  Description of Artificial Sequence: Synthetic oligonucleotide
ggguuauaucagagaagag

SEQ ID NO: 917957 - RNA, 19 nt, Artificial Sequence
  Description of Artificial Sequence: Synthetic oligonucleotide
ccauaggagcucgaaggcc

SEQ ID NO: 917958 - RNA, 19 nt, Artificial Sequence
  Description of Artificial Sequence: Synthetic oligonucleotide
ugguccgaaugguggccac

SEQ ID NO: 917959 - RNA, 19 nt, Artificial Sequence
  Description of Artificial Sequence: Synthetic oligonucleotide
gaguuucagaugugacacu

SEQ ID NO: 917960 - RNA, 19 nt, Artificial Sequence
  Description of Artificial Sequence: Synthetic oligonucleotide
acucaccacugucuugcuu

SEQ ID NO: 917961 - RNA, 19 nt, Artificial Sequence
  Description of Artificial Sequence: Synthetic oligonucleotide
cgauagcuugagaaaugcc

SEQ ID NO: 917962 - RNA, 19 nt, Artificial Sequence
  Description of Artificial Sequence: Synthetic oligonucleotide
guccgcaucugggucguug

SEQ ID NO: 917963 - RNA, 19 nt, Artificial Sequence
  Description of Artificial Sequence: Synthetic oligonucleotide
agcuaaggcaaaggauaaa

SEQ ID NO: 917964 - RNA, 19 nt, Artificial Sequence
  Description of Artificial Sequence: Synthetic oligonucleotide
gucagcuaaggcaaaggau

SEQ ID NO: 917965 - RNA, 19 nt, Artificial Sequence
  Description of Artificial Sequence: Synthetic oligonucleotide
gagcucuagcaucgaagcu

SEQ ID NO: 917966 - RNA, 19 nt, Artificial Sequence
  Description of Artificial Sequence: Synthetic oligonucleotide
uauagccguuguccugcuu

SEQ ID NO: 917967 - RNA, 19 nt, Artificial Sequence
  Description of Artificial Sequence: Synthetic oligonucleotide
aggguacuucgaucacggu

SEQ ID NO: 917968 - RNA, 19 nt, Artificial Sequence
  Description of Artificial Sequence: Synthetic oligonucleotide
ccagaucacuguugccagg

SEQ ID NO: 917969 - RNA, 19 nt, Artificial Sequence
  Description of Artificial Sequence: Synthetic oligonucleotide
gcuucggauugugcgaggc

SEQ ID NO: 917970 - RNA, 19 nt, Artificial Sequence
  Description of Artificial Sequence: Synthetic oligonucleotide
caaaguagucaugacugau

SEQ ID NO: 917971 - RNA, 19 nt, Artificial Sequence
  Description of Artificial Sequence: Synthetic oligonucleotide
ucacgucacucucccuguu

SEQ ID NO: 917972 - RNA, 19 nt, Artificial Sequence
  Description of Artificial Sequence: Synthetic oligonucleotide
caucccaagcuugcggcca

SEQ ID NO: 917973 - RNA, 19 nt, Artificial Sequence
  Description of Artificial Sequence: Synthetic oligonucleotide
gguugugaagaagggaacu

SEQ ID NO: 917974 - RNA, 19 nt, Artificial Sequence
  Description of Artificial Sequence: Synthetic oligonucleotide
ggguugugaagaagggaac

SEQ ID NO: 917975 - RNA, 19 nt, Artificial Sequence
  Description of Artificial Sequence: Synthetic oligonucleotide
gauggucaagucauucauu

SEQ ID NO: 917976 - RNA, 19 nt, Artificial Sequence
  Description of Artificial Sequence: Synthetic oligonucleotide
gcaagccgggcaaaccucc

SEQ ID NO: 917977 - RNA, 19 nt, Artificial Sequence
  Description of Artificial Sequence: Synthetic oligonucleotide
ggauuccggucccagcgca

SEQ ID NO: 917978 - RNA, 19 nt, Artificial Sequence
  Description of Artificial Sequence: Synthetic oligonucleotide
ucccaagcuugcggccagg

SEQ ID NO: 917979 - RNA, 19 nt, Artificial Sequence
  Description of Artificial Sequence: Synthetic oligonucleotide
gcuccagaucacuguugcc

SEQ ID NO: 917980 - RNA, 19 nt, Artificial Sequence
  Description of Artificial Sequence: Synthetic oligonucleotide
ggaaacucaggauccggau

SEQ ID NO: 917981 - RNA, 19 nt, Artificial Sequence
  Description of Artificial Sequence: Synthetic oligonucleotide
cucauugccugagaacacu

SEQ ID NO: 917982 - RNA, 19 nt, Artificial Sequence
  Description of Artificial Sequence: Synthetic oligonucleotide
ggguacuucgaucacgguu

SEQ ID NO: 917983 - RNA, 19 nt, Artificial Sequence
  Description of Artificial Sequence: Synthetic oligonucleotide
cacuuaugacagcugcacu

SEQ ID NO: 917984 - RNA, 19 nt, Artificial Sequence
  Description of Artificial Sequence: Synthetic oligonucleotide
caucauaguuucucagguu

SEQ ID NO: 917985 - RNA, 19 nt, Artificial Sequence
  Description of Artificial Sequence: Synthetic oligonucleotide
gucguuggcuaagauaauu

SEQ ID NO: 917986 - RNA, 19 nt, Artificial Sequence
  Description of Artificial Sequence: Synthetic oligonucleotide
cugcugagacaaagacaga

SEQ ID NO: 917987 - RNA, 19 nt, Artificial Sequence
  Description of Artificial Sequence: Synthetic oligonucleotide
gccguuguccugcuucgga

SEQ ID NO: 917988 - RNA, 19 nt, Artificial Sequence
  Description of Artificial Sequence: Synthetic oligonucleotide
guacuucgaucacgguucu

SEQ ID NO: 917989 - RNA, 19 nt, Artificial Sequence
  Description of Artificial Sequence: Synthetic oligonucleotide
cugguccgaaugguggcca

SEQ ID NO: 917990 - RNA, 19 nt, Artificial Sequence
  Description of Artificial Sequence: Synthetic oligonucleotide
acucgccagcucugcacuu

SEQ ID NO: 917991 - RNA, 19 nt, Artificial Sequence
  Description of Artificial Sequence: Synthetic oligonucleotide
caucugggucguuggcuaa

SEQ ID NO: 917992 - RNA, 19 nt, Artificial Sequence
  Description of Artificial Sequence: Synthetic oligonucleotide
cgaucguguggagagauga

SEQ ID NO: 917993 - RNA, 19 nt, Artificial Sequence
  Description of Artificial Sequence: Synthetic oligonucleotide
gaucguguggagagaugau

SEQ ID NO: 917994 - RNA, 19 nt, Artificial Sequence
  Description of Artificial Sequence: Synthetic oligonucleotide
gcacugacuagcucaucua

SEQ ID NO: 917995 - RNA, 19 nt, Artificial Sequence
  Description of Artificial Sequence: Synthetic oligonucleotide
cuucgaucacgguucuuuu

SEQ ID NO: 917996 - RNA, 19 nt, Artificial Sequence
  Description of Artificial Sequence: Synthetic oligonucleotide
ggauugugcgaggcaguga

SEQ ID NO: 917997 - RNA, 19 nt, Artificial Sequence
  Description of Artificial Sequence: Synthetic oligonucleotide
cucgaucguguggagagau

SEQ ID NO: 917998 - RNA, 19 nt, Artificial Sequence
  Description of Artificial Sequence: Synthetic oligonucleotide
gggccccaaagcauuucug

SEQ ID NO: 917999 - RNA, 19 nt, Artificial Sequence
  Description of Artificial Sequence: Synthetic oligonucleotide
ggaccgucuuccccugguc

SEQ ID NO: 918000 - RNA, 19 nt, Artificial Sequence
  Description of Artificial Sequence: Synthetic oligonucleotide
aaacuccauccgggcccca

SEQ ID NO: 918001 - RNA, 19 nt, Artificial Sequence
  Description of Artificial Sequence: Synthetic oligonucleotide
gucuuccccuggucuacua

SEQ ID NO: 918002 - RNA, 19 nt, Artificial Sequence
  Description of Artificial Sequence: Synthetic oligonucleotide
ccauggacggaggugugca

SEQ ID NO: 918003 - RNA, 19 nt, Artificial Sequence
  Description of Artificial Sequence: Synthetic oligonucleotide
ccaaugcuucaguauuuua

SEQ ID NO: 918004 - RNA, 19 nt, Artificial Sequence
  Description of Artificial Sequence: Synthetic oligonucleotide
ucgcagcaagccgggcaaa

SEQ ID NO: 918005 - RNA, 19 nt, Artificial Sequence
  Description of Artificial Sequence: Synthetic oligonucleotide
ggcaaaccuccugcugcug

SEQ ID NO: 918006 - RNA, 19 nt, Artificial Sequence
  Description of Artificial Sequence: Synthetic oligonucleotide
gcuugagaaaugccucgau

SEQ ID NO: 918007 - RNA, 19 nt, Artificial Sequence
  Description of Artificial Sequence: Synthetic oligonucleotide
caguuguaaggucccugau

SEQ ID NO: 918008 - RNA, 19 nt, Artificial Sequence
  Description of Artificial Sequence: Synthetic oligonucleotide
gggcaaaccuccugcugcu

SEQ ID NO: 918009 - RNA, 19 nt, Artificial Sequence
  Description of Artificial Sequence: Synthetic oligonucleotide
cccugauagcagagauuuc

SEQ ID NO: 918010 - RNA, 19 nt, Artificial Sequence
  Description of Artificial Sequence: Synthetic oligonucleotide
ccccuggucuacuagcugu

SEQ ID NO: 918011 - RNA, 19 nt, Artificial Sequence
  Description of Artificial Sequence: Synthetic oligonucleotide
gguccgaaugguggccaca

SEQ ID NO: 918012 - RNA, 19 nt, Artificial Sequence
  Description of Artificial Sequence: Synthetic oligonucleotide
gcugaucaccacaccccuc

SEQ ID NO: 918013 - RNA, 19 nt, Artificial Sequence
  Description of Artificial Sequence: Synthetic oligonucleotide
ccggucccagcgcagccac

SEQ ID NO: 918014 - RNA, 19 nt, Artificial Sequence
  Description of Artificial Sequence: Synthetic oligonucleotide
ggugaucauuuggcugcuc

SEQ ID NO: 918015 - RNA, 19 nt, Artificial Sequence
  Description of Artificial Sequence: Synthetic oligonucleotide
agcucccauaggagcucga

SEQ ID NO: 918016 - RNA, 19 nt, Artificial Sequence
  Description of Artificial Sequence: Synthetic oligonucleotide
cacucaccacugucuugcu

SEQ ID NO: 918017 - RNA, 19 nt, Artificial Sequence
  Description of Artificial Sequence: Synthetic oligonucleotide
cugggucguuggcuaagau

SEQ ID NO: 918018 - RNA, 19 nt, Artificial Sequence
  Description of Artificial Sequence: Synthetic oligonucleotide
gccgggcaaaccuccugcu

SEQ ID NO: 918019 - RNA, 19 nt, Artificial Sequence
  Description of Artificial Sequence: Synthetic oligonucleotide
ccguuguccugcuucggau

SEQ ID NO: 918020 - RNA, 19 nt, Artificial Sequence
  Description of Artificial Sequence: Synthetic oligonucleotide
ggacggaggugugcacaaa

SEQ ID NO: 918021 - RNA, 19 nt, Artificial Sequence
  Description of Artificial Sequence: Synthetic oligonucleotide
ccucgaucguguggagaga

SEQ ID NO: 918022 - RNA, 19 nt, Artificial Sequence
  Description of Artificial Sequence: Synthetic oligonucleotide
uguccgcaucugggucguu

SEQ ID NO: 918023 - RNA, 19 nt, Artificial Sequence
  Description of Artificial Sequence: Synthetic oligonucleotide
ggucguuggcuaagauaau

SEQ ID NO: 918024 - RNA, 19 nt, Artificial Sequence
  Description of Artificial Sequence: Synthetic oligonucleotide
cuucagcaaugagcuguuu

SEQ ID NO: 918025 - RNA, 19 nt, Artificial Sequence
  Description of Artificial Sequence: Synthetic oligonucleotide
ccgggccccaaagcauuuc

SEQ ID NO: 918026 - RNA, 19 nt, Artificial Sequence
  Description of Artificial Sequence: Synthetic oligonucleotide
cguuguccugcuucggauu

SEQ ID NO: 918027 - RNA, 19 nt, Artificial Sequence
  Description of Artificial Sequence: Synthetic oligonucleotide
ccaucccagcagggcuccc

SEQ ID NO: 918028 - RNA, 19 nt, Artificial Sequence
  Description of Artificial Sequence: Synthetic oligonucleotide
gcuugcggccagggcucca

SEQ ID NO: 918029 - RNA, 19 nt, Artificial Sequence
  Description of Artificial Sequence: Synthetic oligonucleotide
cgaucacgguucuuuucuu

SEQ ID NO: 918030 - RNA, 19 nt, Artificial Sequence
  Description of Artificial Sequence: Synthetic oligonucleotide
aaaacaguggccuagacug

SEQ ID NO: 918031 - RNA, 19 nt, Artificial Sequence
  Description of Artificial Sequence: Synthetic oligonucleotide
uuaagaacgucuuucaggg

SEQ ID NO: 918032 - RNA, 19 nt, Artificial Sequence
  Description of Artificial Sequence: Synthetic oligonucleotide
uauuucaccacuuagaaaa

SEQ ID NO: 918033 - RNA, 19 nt, Artificial Sequence
  Description of Artificial Sequence: Synthetic oligonucleotide
ucugacauuagcuaugcgg

SEQ ID NO: 918034 - RNA, 19 nt, Artificial Sequence
  Description of Artificial Sequence: Synthetic oligonucleotide
aaauauccgagguucauuc

SEQ ID NO: 918035 - RNA, 19 nt, Artificial Sequence
  Description of Artificial Sequence: Synthetic oligonucleotide
acauggacugcuuuuaucc

SEQ ID NO: 918036 - RNA, 19 nt, Artificial Sequence
  Description of Artificial Sequence: Synthetic oligonucleotide
aauauucucagugauuggg

SEQ ID NO: 918037 - RNA, 19 nt, Artificial Sequence
  Description of Artificial Sequence: Synthetic oligonucleotide
uauaaaagggccgaaauga

SEQ ID NO: 918038 - RNA, 19 nt, Artificial Sequence
  Description of Artificial Sequence: Synthetic oligonucleotide
auaaucaaacuuccgggcc

SEQ ID NO: 918039 - RNA, 19 nt, Artificial Sequence
  Description of Artificial Sequence: Synthetic oligonucleotide
aguaucucauuccaggugg

SEQ ID NO: 918040 - RNA, 19 nt, Artificial Sequence
  Description of Artificial Sequence: Synthetic oligonucleotide
acugcuuuuauccgaaugg

SEQ ID NO: 918041 - RNA, 19 nt, Artificial Sequence
  Description of Artificial Sequence: Synthetic oligonucleotide
aacauuugcgauucacugg

SEQ ID NO: 918042 - RNA, 19 nt, Artificial Sequence
  Description of Artificial Sequence: Synthetic oligonucleotide
gaauccaucugucuggccg

SEQ ID NO: 918043 - RNA, 19 nt, Artificial Sequence
  Description of Artificial Sequence: Synthetic oligonucleotide
aauuccguucacuuguguc

SEQ ID NO: 918044 - RNA, 19 nt, Artificial Sequence
  Description of Artificial Sequence: Synthetic oligonucleotide
gaauccggaguuaagaacg

SEQ ID NO: 918045 - RNA, 19 nt, Artificial Sequence
  Description of Artificial Sequence: Synthetic oligonucleotide
aagcgaugugcucagguac

SEQ ID NO: 918046 - RNA, 19 nt, Artificial Sequence
  Description of Artificial Sequence: Synthetic oligonucleotide
agaugaauccaccacaugu

SEQ ID NO: 918047 - RNA, 19 nt, Artificial Sequence
  Description of Artificial Sequence: Synthetic oligonucleotide
uuuguagucugcaagaauu

SEQ ID NO: 918048 - RNA, 19 nt, Artificial Sequence
  Description of Artificial Sequence: Synthetic oligonucleotide
aagggccgaaaugagaugc

SEQ ID NO: 918049 - RNA, 19 nt, Artificial Sequence
  Description of Artificial Sequence: Synthetic oligonucleotide
auuacauuauuucaccacu

SEQ ID NO: 918050 - RNA, 19 nt, Artificial Sequence
  Description of Artificial Sequence: Synthetic oligonucleotide
cucauagucacuuuaggug

SEQ ID NO: 918051 - RNA, 19 nt, Artificial Sequence
  Description of Artificial Sequence: Synthetic oligonucleotide
aguuucaaguauuuuaccu

SEQ ID NO: 918052 - RNA, 19 nt, Artificial Sequence
  Description of Artificial Sequence: Synthetic oligonucleotide
uguuagggagcacauguag

SEQ ID NO: 918053 - RNA, 19 nt, Artificial Sequence
  Description of Artificial Sequence: Synthetic oligonucleotide
cuugaaucucccuaggcag

SEQ ID NO: 918054 - RNA, 19 nt, Artificial Sequence
  Description of Artificial Sequence: Synthetic oligonucleotide
ugaccaggggcuaaaacag

SEQ ID NO: 918055 - RNA, 19 nt, Artificial Sequence
  Description of Artificial Sequence: Synthetic oligonucleotide
uacagauacagacagcuua

SEQ ID NO: 918056 - RNA, 19 nt, Artificial Sequence
  Description of Artificial Sequence: Synthetic oligonucleotide
auauccgagguucauucac

SEQ ID NO: 918057 - RNA, 19 nt, Artificial Sequence
  Description of Artificial Sequence: Synthetic oligonucleotide
augucaaguauauggcucg

SEQ ID NO: 918058 - RNA, 19 nt, Artificial Sequence
  Description of Artificial Sequence: Synthetic oligonucleotide
aguagaugaauccaccaca

SEQ ID NO: 918059 - RNA, 19 nt, Artificial Sequence
  Description of Artificial Sequence: Synthetic oligonucleotide
acauuagcuaugcgggucc

SEQ ID NO: 918060 - RNA, 19 nt, Artificial Sequence
  Description of Artificial Sequence: Synthetic oligonucleotide
uaagcucacgccuuuguag

SEQ ID NO: 918061 - RNA, 19 nt, Artificial Sequence
  Description of Artificial Sequence: Synthetic oligonucleotide
uuuuauccgaaugggaaag

SEQ ID NO: 918062 - RNA, 19 nt, Artificial Sequence
  Description of Artificial Sequence: Synthetic oligonucleotide
uuauaaauggugacuccca

SEQ ID NO: 918063 - RNA, 19 nt, Artificial Sequence
  Description of Artificial Sequence: Synthetic oligonucleotide
uguguacuaugucaagaag

SEQ ID NO: 918064 - RNA, 19 nt, Artificial Sequence
  Description of Artificial Sequence: Synthetic oligonucleotide
uaaaacaguggccuagacu

SEQ ID NO: 918065 - RNA, 19 nt, Artificial Sequence
  Description of Artificial Sequence: Synthetic oligonucleotide
ugcguaaugauggagcaag

SEQ ID NO: 918066 - RNA, 19 nt, Artificial Sequence
  Description of Artificial Sequence: Synthetic oligonucleotide
gauugcuucagacuuguga

SEQ ID NO: 918067 - RNA, 19 nt, Artificial Sequence
  Description of Artificial Sequence: Synthetic oligonucleotide
auuugcgauucacugggac

SEQ ID NO: 918068 - RNA, 19 nt, Artificial Sequence
  Description of Artificial Sequence: Synthetic oligonucleotide
ucuucugacauuagcuaug

SEQ ID NO: 918069 - RNA, 19 nt, Artificial Sequence
  Description of Artificial Sequence: Synthetic oligonucleotide
ucggaauccaucugucugg

SEQ ID NO: 918070 - RNA, 19 nt, Artificial Sequence
  Description of Artificial Sequence: Synthetic oligonucleotide
cacuuuaggugacugaccc

SEQ ID NO: 918071 - RNA, 19 nt, Artificial Sequence
  Description of Artificial Sequence: Synthetic oligonucleotide
uauccagacuagcaguugc

SEQ ID NO: 918072 - RNA, 19 nt, Artificial Sequence
  Description of Artificial Sequence: Synthetic oligonucleotide
aaaagggccgaaaugagau

SEQ ID NO: 918073 - RNA, 19 nt, Artificial Sequence
  Description of Artificial Sequence: Synthetic oligonucleotide
cuuugcgcaccauaucucg

SEQ ID NO: 918074 - RNA, 19 nt, Artificial Sequence
  Description of Artificial Sequence: Synthetic oligonucleotide
uaaaagggccgaaaugaga

SEQ ID NO: 918075 - RNA, 19 nt, Artificial Sequence
  Description of Artificial Sequence: Synthetic oligonucleotide
cuauaaaagggccgaaaug

SEQ ID NO: 918076 - RNA, 19 nt, Artificial Sequence
  Description of Artificial Sequence: Synthetic oligonucleotide
uuuucggagagcgaggcca

SEQ ID NO: 918077 - RNA, 19 nt, Artificial Sequence
  Description of Artificial Sequence: Synthetic oligonucleotide
gaaugggaaagccauccug

SEQ ID NO: 918078 - RNA, 19 nt, Artificial Sequence
  Description of Artificial Sequence: Synthetic oligonucleotide
uauuuuaccuguugaguuc

SEQ ID NO: 918079 - RNA, 19 nt, Artificial Sequence
  Description of Artificial Sequence: Synthetic oligonucleotide
acuaccgacccgcacuccc

SEQ ID NO: 918080 - RNA, 19 nt, Artificial Sequence
  Description of Artificial Sequence: Synthetic oligonucleotide
gaugaauccaccacaugug

SEQ ID NO: 918081 - RNA, 19 nt, Artificial Sequence
  Description of Artificial Sequence: Synthetic oligonucleotide
aaugggaaagccauccuga

SEQ ID NO: 918082 - RNA, 19 nt, Artificial Sequence
  Description of Artificial Sequence: Synthetic oligonucleotide
uggagcaagacugaggcac

SEQ ID NO: 918083 - RNA, 19 nt, Artificial Sequence
  Description of Artificial Sequence: Synthetic oligonucleotide
gagugcuaauagcaggagg

SEQ ID NO: 918084 - RNA, 19 nt, Artificial Sequence
  Description of Artificial Sequence: Synthetic oligonucleotide
uccggaguuaagaacgucu

SEQ ID NO: 918085 - RNA, 19 nt, Artificial Sequence
  Description of Artificial Sequence: Synthetic oligonucleotide
aguauuuuaccuguugagu

SEQ ID NO: 918086 - RNA, 19 nt, Artificial Sequence
  Description of Artificial Sequence: Synthetic oligonucleotide
cagaagagugcuaauagca

SEQ ID NO: 918087 - RNA, 19 nt, Artificial Sequence
  Description of Artificial Sequence: Synthetic oligonucleotide
aagcucacgccuuuguagu

SEQ ID NO: 918088 - RNA, 19 nt, Artificial Sequence
  Description of Artificial Sequence: Synthetic oligonucleotide
gacccguggagaaagaacc

SEQ ID NO: 918089 - RNA, 19 nt, Artificial Sequence
  Description of Artificial Sequence: Synthetic oligonucleotide
agugcuaauagcaggagga

SEQ ID NO: 918090 - RNA, 19 nt, Artificial Sequence
  Description of Artificial Sequence: Synthetic oligonucleotide
auaguaucucauuccaggu

SEQ ID NO: 918091 - RNA, 19 nt, Artificial Sequence
  Description of Artificial Sequence: Synthetic oligonucleotide
cacugcguaaugauggagc

SEQ ID NO: 918092 - RNA, 19 nt, Artificial Sequence
  Description of Artificial Sequence: Synthetic oligonucleotide
agucaugcauacuaaaauu

SEQ ID NO: 918093 - RNA, 19 nt, Artificial Sequence
  Description of Artificial Sequence: Synthetic oligonucleotide
guaguugaccagcagcugc

SEQ ID NO: 918094 - RNA, 19 nt, Artificial Sequence
  Description of Artificial Sequence: Synthetic oligonucleotide
uuugauaagcucacgccuu

SEQ ID NO: 918095 - RNA, 19 nt, Artificial Sequence
  Description of Artificial Sequence: Synthetic oligonucleotide
gauccagucaugcauacua

SEQ ID NO: 918096 - RNA, 19 nt, Artificial Sequence
  Description of Artificial Sequence: Synthetic oligonucleotide
uauccgaaugggaaagcca

SEQ ID NO: 918097 - RNA, 19 nt, Artificial Sequence
  Description of Artificial Sequence: Synthetic oligonucleotide
aauauccgagguucauuca

SEQ ID NO: 918098 - RNA, 19 nt, Artificial Sequence
  Description of Artificial Sequence: Synthetic oligonucleotide
aguugcaaacauuugcgau

SEQ ID NO: 918099 - RNA, 19 nt, Artificial Sequence
  Description of Artificial Sequence: Synthetic oligonucleotide
cuuuaggugacugacccug

SEQ ID NO: 918100 - RNA, 19 nt, Artificial Sequence
  Description of Artificial Sequence: Synthetic oligonucleotide
aguugcucggaauccaucu

SEQ ID NO: 918101 - RNA, 19 nt, Artificial Sequence
  Description of Artificial Sequence: Synthetic oligonucleotide
ugcuuuuauccgaauggga

SEQ ID NO: 918102 - RNA, 19 nt, Artificial Sequence
  Description of Artificial Sequence: Synthetic oligonucleotide
caguuugaaguaaggaaug

SEQ ID NO: 918103 - RNA, 19 nt, Artificial Sequence
  Description of Artificial Sequence: Synthetic oligonucleotide
gugaccaggggcuaaaaca

SEQ ID NO: 918104 - RNA, 19 nt, Artificial Sequence
  Description of Artificial Sequence: Synthetic oligonucleotide
aagagugcuaauagcagga

SEQ ID NO: 918105 - RNA, 19 nt, Artificial Sequence
  Description of Artificial Sequence: Synthetic oligonucleotide
guacaucugagaucagucc

SEQ ID NO: 918106 - RNA, 19 nt, Artificial Sequence
  Description of Artificial Sequence: Synthetic oligonucleotide
ccacuuaacugccugaugg

SEQ ID NO: 918107 - RNA, 19 nt, Artificial Sequence
  Description of Artificial Sequence: Synthetic oligonucleotide
ucaagcgaugugcucaggu

SEQ ID NO: 918108 - RNA, 19 nt, Artificial Sequence
  Description of Artificial Sequence: Synthetic oligonucleotide
uuauccgaaugggaaagcc

SEQ ID NO: 918109 - RNA, 19 nt, Artificial Sequence
  Description of Artificial Sequence: Synthetic oligonucleotide
uacucuuugcgcaccauau

SEQ ID NO: 918110 - RNA, 19 nt, Artificial Sequence
  Description of Artificial Sequence: Synthetic oligonucleotide
ucacuuuaggugacugacc

SEQ ID NO: 918111 - RNA, 19 nt, Artificial Sequence
  Description of Artificial Sequence: Synthetic oligonucleotide
gcauacuaaaauuacauua

SEQ ID NO: 918112 - RNA, 19 nt, Artificial Sequence
  Description of Artificial Sequence: Synthetic oligonucleotide
uuggcuauaaaagggccga

SEQ ID NO: 918113 - RNA, 19 nt, Artificial Sequence
  Description of Artificial Sequence: Synthetic oligonucleotide
aggaaggcaucgucaagcg

SEQ ID NO: 918114 - RNA, 19 nt, Artificial Sequence
  Description of Artificial Sequence: Synthetic oligonucleotide
uggaauaauccagguagcc

SEQ ID NO: 918115 - RNA, 19 nt, Artificial Sequence
  Description of Artificial Sequence: Synthetic oligonucleotide
ugucuagcucuccagcugu

SEQ ID NO: 918116 - RNA, 19 nt, Artificial Sequence
  Description of Artificial Sequence: Synthetic oligonucleotide
auaaacuuuuggucaaaau

SEQ ID NO: 918117 - RNA, 19 nt, Artificial Sequence
  Description of Artificial Sequence: Synthetic oligonucleotide
uacggguacucuuugcgca

SEQ ID NO: 918118 - RNA, 19 nt, Artificial Sequence
  Description of Artificial Sequence: Synthetic oligonucleotide
gguacggguacucuuugcg

SEQ ID NO: 918119 - RNA, 19 nt, Artificial Sequence
  Description of Artificial Sequence: Synthetic oligonucleotide
cucggaauccaucugucug

SEQ ID NO: 918120 - RNA, 19 nt, Artificial Sequence
  Description of Artificial Sequence: Synthetic oligonucleotide
uccgggagacuaaagcagc

SEQ ID NO: 918121 - RNA, 19 nt, Artificial Sequence
  Description of Artificial Sequence: Synthetic oligonucleotide
gcuaauagcaggaggagag

SEQ ID NO: 918122 - RNA, 19 nt, Artificial Sequence
  Description of Artificial Sequence: Synthetic oligonucleotide
aagauugcuucagacuugu

SEQ ID NO: 918123 - RNA, 19 nt, Artificial Sequence
  Description of Artificial Sequence: Synthetic oligonucleotide
gucagaaggcuguccaagg

SEQ ID NO: 918124 - RNA, 19 nt, Artificial Sequence
  Description of Artificial Sequence: Synthetic oligonucleotide
aaagggccgaaaugagaug

SEQ ID NO: 918125 - RNA, 19 nt, Artificial Sequence
  Description of Artificial Sequence: Synthetic oligonucleotide
acugcguaaugauggagca

SEQ ID NO: 918126 - RNA, 19 nt, Artificial Sequence
  Description of Artificial Sequence: Synthetic oligonucleotide
uucagacuugugaucaauc

SEQ ID NO: 918127 - RNA, 19 nt, Artificial Sequence
  Description of Artificial Sequence: Synthetic oligonucleotide
uugggaguugcucggaauc

SEQ ID NO: 918128 - RNA, 19 nt, Artificial Sequence
  Description of Artificial Sequence: Synthetic oligonucleotide
gcuuuugauaagcucacgc

SEQ ID NO: 918129 - RNA, 19 nt, Artificial Sequence
  Description of Artificial Sequence: Synthetic oligonucleotide
ugaggaauccggaguuaag

SEQ ID NO: 918130 - RNA, 19 nt, Artificial Sequence
  Description of Artificial Sequence: Synthetic oligonucleotide
ggcucgaauauucucagug

SEQ ID NO: 918131 - RNA, 19 nt, Artificial Sequence
  Description of Artificial Sequence: Synthetic oligonucleotide
agacagcuuauccagacua

SEQ ID NO: 918132 - RNA, 19 nt, Artificial Sequence
  Description of Artificial Sequence: Synthetic oligonucleotide
uugcuaccaagauacagau

SEQ ID NO: 918133 - RNA, 19 nt, Artificial Sequence
  Description of Artificial Sequence: Synthetic oligonucleotide
aaagauugcuucagacuug

SEQ ID NO: 918134 - RNA, 19 nt, Artificial Sequence
  Description of Artificial Sequence: Synthetic oligonucleotide
agugucuagcucuccagcu

SEQ ID NO: 918135 - RNA, 19 nt, Artificial Sequence
  Description of Artificial Sequence: Synthetic oligonucleotide
ugcauacuaaaauuacauu

SEQ ID NO: 918136 - RNA, 19 nt, Artificial Sequence
  Description of Artificial Sequence: Synthetic oligonucleotide
cuggaauaauccagguagc

SEQ ID NO: 918137 - RNA, 19 nt, Artificial Sequence
  Description of Artificial Sequence: Synthetic oligonucleotide
augcauacuaaaauuacau

SEQ ID NO: 918138 - RNA, 19 nt, Artificial Sequence
  Description of Artificial Sequence: Synthetic oligonucleotide
ucgucaagcgaugugcuca

SEQ ID NO: 918139 - RNA, 19 nt, Artificial Sequence
  Description of Artificial Sequence: Synthetic oligonucleotide
uauccgagguucauucacu

SEQ ID NO: 918140 - RNA, 19 nt, Artificial Sequence
  Description of Artificial Sequence: Synthetic oligonucleotide
uucaggucagacccgugga

SEQ ID NO: 918141 - RNA, 19 nt, Artificial Sequence
  Description of Artificial Sequence: Synthetic oligonucleotide
gagacuaaagcagccacca

SEQ ID NO: 918142 - RNA, 19 nt, Artificial Sequence
  Description of Artificial Sequence: Synthetic oligonucleotide
gcaguugcaaacauuugcg

SEQ ID NO: 918143 - RNA, 19 nt, Artificial Sequence
  Description of Artificial Sequence: Synthetic oligonucleotide
uaccuguugaguuccugug

SEQ ID NO: 918144 - RNA, 19 nt, Artificial Sequence
  Description of Artificial Sequence: Synthetic oligonucleotide
aaaauauccgagguucauu

SEQ ID NO: 918145 - RNA, 19 nt, Artificial Sequence
  Description of Artificial Sequence: Synthetic oligonucleotide
auaaaagggccgaaaugag

SEQ ID NO: 918146 - RNA, 19 nt, Artificial Sequence
  Description of Artificial Sequence: Synthetic oligonucleotide
guugcuaccaagauacaga

SEQ ID NO: 918147 - RNA, 19 nt, Artificial Sequence
  Description of Artificial Sequence: Synthetic oligonucleotide
uucacugggacaguuuccu

SEQ ID NO: 918148 - RNA, 19 nt, Artificial Sequence
  Description of Artificial Sequence: Synthetic oligonucleotide
aacugccugauggaaaaga

SEQ ID NO: 918149 - RNA, 19 nt, Artificial Sequence
  Description of Artificial Sequence: Synthetic oligonucleotide
ugugaccaggggcuaaaac

SEQ ID NO: 918150 - RNA, 19 nt, Artificial Sequence
  Description of Artificial Sequence: Synthetic oligonucleotide
cugcuuuuauccgaauggg

SEQ ID NO: 918151 - RNA, 19 nt, Artificial Sequence
  Description of Artificial Sequence: Synthetic oligonucleotide
uguagucugcaagaauuac

SEQ ID NO: 918152 - RNA, 19 nt, Artificial Sequence
  Description of Artificial Sequence: Synthetic oligonucleotide
uugcaaacauuugcgauuc

SEQ ID NO: 918153 - RNA, 19 nt, Artificial Sequence
  Description of Artificial Sequence: Synthetic oligonucleotide
ugucuggccggaugcagag

SEQ ID NO: 918154 - RNA, 19 nt, Artificial Sequence
  Description of Artificial Sequence: Synthetic oligonucleotide
uuagcuaugcgggucccug

SEQ ID NO: 918155 - RNA, 19 nt, Artificial Sequence
  Description of Artificial Sequence: Synthetic oligonucleotide
uagaugaauccaccacaug

SEQ ID NO: 918156 - RNA, 19 nt, Artificial Sequence
  Description of Artificial Sequence: Synthetic oligonucleotide
agccaaacugaauuucagu

SEQ ID NO: 918157 - RNA, 19 nt, Artificial Sequence
  Description of Artificial Sequence: Synthetic oligonucleotide
ucccuaggcagccccauca

SEQ ID NO: 918158 - RNA, 19 nt, Artificial Sequence
  Description of Artificial Sequence: Synthetic oligonucleotide
cucugaugccaauaguauc

SEQ ID NO: 918159 - RNA, 19 nt, Artificial Sequence
  Description of Artificial Sequence: Synthetic oligonucleotide
augagaugcuuuugauaag

SEQ ID NO: 918160 - RNA, 19 nt, Artificial Sequence
  Description of Artificial Sequence: Synthetic oligonucleotide
ucgaauauucucagugauu

SEQ ID NO: 918161 - RNA, 19 nt, Artificial Sequence
  Description of Artificial Sequence: Synthetic oligonucleotide
agacuaaagcagccaccac

SEQ ID NO: 918162 - RNA, 19 nt, Artificial Sequence
  Description of Artificial Sequence: Synthetic oligonucleotide
guuagggagcacauguagc

SEQ ID NO: 918163 - RNA, 19 nt, Artificial Sequence
  Description of Artificial Sequence: Synthetic oligonucleotide
auggacugcuuuuauccga

SEQ ID NO: 918164 - RNA, 19 nt, Artificial Sequence
  Description of Artificial Sequence: Synthetic oligonucleotide
ugcuaauagcaggaggaga

SEQ ID NO: 918165 - RNA, 19 nt, Artificial Sequence
  Description of Artificial Sequence: Synthetic oligonucleotide
aggaauccggaguuaagaa

SEQ ID NO: 918166 - RNA, 19 nt, Artificial Sequence
  Description of Artificial Sequence: Synthetic oligonucleotide
ucagguacggguacucuuu

SEQ ID NO: 918167 - RNA, 19 nt, Artificial Sequence
  Description of Artificial Sequence: Synthetic oligonucleotide
ucagauagcaguggcuggu

SEQ ID NO: 918168 - RNA, 19 nt, Artificial Sequence
  Description of Artificial Sequence: Synthetic oligonucleotide
uuugcgcaccauaucucga

SEQ ID NO: 918169 - RNA, 19 nt, Artificial Sequence
  Description of Artificial Sequence: Synthetic oligonucleotide
gaggaauccggaguuaaga

SEQ ID NO: 918170 - RNA, 19 nt, Artificial Sequence
  Description of Artificial Sequence: Synthetic oligonucleotide
uuuauccgaaugggaaagc

SEQ ID NO: 918171 - RNA, 19 nt, Artificial Sequence
  Description of Artificial Sequence: Synthetic oligonucleotide
auucacuacauggacugcu

SEQ ID NO: 918172 - RNA, 19 nt, Artificial Sequence
  Description of Artificial Sequence: Synthetic oligonucleotide
ugcgcaccauaucucgaag

SEQ ID NO: 918173 - RNA, 19 nt, Artificial Sequence
  Description of Artificial Sequence: Synthetic oligonucleotide
uggggaggauauuccuugg

SEQ ID NO: 918174 - RNA, 19 nt, Artificial Sequence
  Description of Artificial Sequence: Synthetic oligonucleotide
ucuucggacuggauugagu

SEQ ID NO: 918175 - RNA, 19 nt, Artificial Sequence
  Description of Artificial Sequence: Synthetic oligonucleotide
cacccuugaaucucccuag

SEQ ID NO: 918176 - RNA, 19 nt, Artificial Sequence
  Description of Artificial Sequence: Synthetic oligonucleotide
agacccguggagaaagaac

SEQ ID NO: 918177 - RNA, 19 nt, Artificial Sequence
  Description of Artificial Sequence: Synthetic oligonucleotide
cauagucacuuuaggugac

SEQ ID NO: 918178 - RNA, 19 nt, Artificial Sequence
  Description of Artificial Sequence: Synthetic oligonucleotide
uaugcgggucccugcagcc

SEQ ID NO: 918179 - RNA, 19 nt, Artificial Sequence
  Description of Artificial Sequence: Synthetic oligonucleotide
acggguacucuuugcgcac

SEQ ID NO: 918180 - RNA, 19 nt, Artificial Sequence
  Description of Artificial Sequence: Synthetic oligonucleotide
uagcaguugcaaacauuug

SEQ ID NO: 918181 - RNA, 19 nt, Artificial Sequence
  Description of Artificial Sequence: Synthetic oligonucleotide
ugacauuagcuaugcgggu

SEQ ID NO: 918182 - RNA, 19 nt, Artificial Sequence
  Description of Artificial Sequence: Synthetic oligonucleotide
ggaguuaagaacgucuuuc

SEQ ID NO: 918183 - RNA, 19 nt, Artificial Sequence
  Description of Artificial Sequence: Synthetic oligonucleotide
gacauuagcuaugcggguc

SEQ ID NO: 918184 - RNA, 19 nt, Artificial Sequence
  Description of Artificial Sequence: Synthetic oligonucleotide
guauuuuaccuguugaguu

SEQ ID NO: 918185 - RNA, 19 nt, Artificial Sequence
  Description of Artificial Sequence: Synthetic oligonucleotide
caaguauauggcucgaaua

SEQ ID NO: 918186 - RNA, 19 nt, Artificial Sequence
  Description of Artificial Sequence: Synthetic oligonucleotide
uaagaacgucuuucagggc

SEQ ID NO: 918187 - RNA, 19 nt, Artificial Sequence
  Description of Artificial Sequence: Synthetic oligonucleotide
ggaaagccauccugaaagg

SEQ ID NO: 918188 - RNA, 19 nt, Artificial Sequence
  Description of Artificial Sequence: Synthetic oligonucleotide
ggaauccggaguuaagaac

SEQ ID NO: 918189 - RNA, 19 nt, Artificial Sequence
  Description of Artificial Sequence: Synthetic oligonucleotide
gacccugguugcuaccaag

SEQ ID NO: 918190 - RNA, 19 nt, Artificial Sequence
  Description of Artificial Sequence: Synthetic oligonucleotide
cuaugcgggucccugcagc

SEQ ID NO: 918191 - RNA, 19 nt, Artificial Sequence
  Description of Artificial Sequence: Synthetic oligonucleotide
caugugccucuacuaaaag

SEQ ID NO: 918192 - RNA, 19 nt, Artificial Sequence
  Description of Artificial Sequence: Synthetic oligonucleotide
aaggucuuggccacugaga

SEQ ID NO: 918193 - RNA, 19 nt, Artificial Sequence
  Description of Artificial Sequence: Synthetic oligonucleotide
cuaaaacaguggccuagac

SEQ ID NO: 918194 - RNA, 19 nt, Artificial Sequence
  Description of Artificial Sequence: Synthetic oligonucleotide
ccggucauaaucaaacuuc

SEQ ID NO: 918195 - RNA, 19 nt, Artificial Sequence
  Description of Artificial Sequence: Synthetic oligonucleotide
guagucugcaagaauuaca

SEQ ID NO: 918196 - RNA, 19 nt, Artificial Sequence
  Description of Artificial Sequence: Synthetic oligonucleotide
uccugaaaggaugccaauc

SEQ ID NO: 918197 - RNA, 19 nt, Artificial Sequence
  Description of Artificial Sequence: Synthetic oligonucleotide
ucggacuggauugaguuuu

SEQ ID NO: 918198 - RNA, 19 nt, Artificial Sequence
  Description of Artificial Sequence: Synthetic oligonucleotide
cucagugauugggaguugc

SEQ ID NO: 918199 - RNA, 19 nt, Artificial Sequence
  Description of Artificial Sequence: Synthetic oligonucleotide
uucacuacauggacugcuu

SEQ ID NO: 918200 - RNA, 19 nt, Artificial Sequence
  Description of Artificial Sequence: Synthetic oligonucleotide
aaagaaccuguuugcuauu

SEQ ID NO: 918201 - RNA, 19 nt, Artificial Sequence
  Description of Artificial Sequence: Synthetic oligonucleotide
gguugcuaccaagauacag

SEQ ID NO: 918202 - RNA, 19 nt, Artificial Sequence
  Description of Artificial Sequence: Synthetic oligonucleotide
cucgcauggagucaucaca

SEQ ID NO: 918203 - RNA, 19 nt, Artificial Sequence
  Description of Artificial Sequence: Synthetic oligonucleotide
cagacuugugaucaaucca

SEQ ID NO: 918204 - RNA, 19 nt, Artificial Sequence
  Description of Artificial Sequence: Synthetic oligonucleotide
caugguaguugaccagcag

SEQ ID NO: 918205 - RNA, 19 nt, Artificial Sequence
  Description of Artificial Sequence: Synthetic oligonucleotide
accacuuaacugccugaug

SEQ ID NO: 918206 - RNA, 19 nt, Artificial Sequence
  Description of Artificial Sequence: Synthetic oligonucleotide
uccguguggggcagcacug

SEQ ID NO: 918207 - RNA, 19 nt, Artificial Sequence
  Description of Artificial Sequence: Synthetic oligonucleotide
acuaaagcagccaccacuu

SEQ ID NO: 918208 - RNA, 19 nt, Artificial Sequence
  Description of Artificial Sequence: Synthetic oligonucleotide
guugcucggaauccaucug

SEQ ID NO: 918209 - RNA, 19 nt, Artificial Sequence
  Description of Artificial Sequence: Synthetic oligonucleotide
uuucggagagcgaggccac

SEQ ID NO: 918210 - RNA, 19 nt, Artificial Sequence
  Description of Artificial Sequence: Synthetic oligonucleotide
gugucuagcucuccagcug

SEQ ID NO: 918211 - RNA, 19 nt, Artificial Sequence
  Description of Artificial Sequence: Synthetic oligonucleotide
aaugugaccaggggcuaaa

SEQ ID NO: 918212 - RNA, 19 nt, Artificial Sequence
  Description of Artificial Sequence: Synthetic oligonucleotide
agcucacgccuuuguaguc

SEQ ID NO: 918213 - RNA, 19 nt, Artificial Sequence
  Description of Artificial Sequence: Synthetic oligonucleotide
ugcucggaauccaucuguc

SEQ ID NO: 918214 - RNA, 19 nt, Artificial Sequence
  Description of Artificial Sequence: Synthetic oligonucleotide
uugcgcaccauaucucgaa

SEQ ID NO: 918215 - RNA, 19 nt, Artificial Sequence
  Description of Artificial Sequence: Synthetic oligonucleotide
acuuuaggugacugacccu

SEQ ID NO: 918216 - RNA, 19 nt, Artificial Sequence
  Description of Artificial Sequence: Synthetic oligonucleotide
aauccggaguuaagaacgu

SEQ ID NO: 918217 - RNA, 19 nt, Artificial Sequence
  Description of Artificial Sequence: Synthetic oligonucleotide
guugcaaacauuugcgauu

SEQ ID NO: 918218 - RNA, 19 nt, Artificial Sequence
  Description of Artificial Sequence: Synthetic oligonucleotide
auccgaaugggaaagccau

SEQ ID NO: 918219 - RNA, 19 nt, Artificial Sequence
  Description of Artificial Sequence: Synthetic oligonucleotide
acuaaaagccaaacugaau

SEQ ID NO: 918220 - RNA, 19 nt, Artificial Sequence
  Description of Artificial Sequence: Synthetic oligonucleotide
uuuuaccuguugaguuccu

SEQ ID NO: 918221 - RNA, 19 nt, Artificial Sequence
  Description of Artificial Sequence: Synthetic oligonucleotide
gauaagcucacgccuuugu

SEQ ID NO: 918222 - RNA, 19 nt, Artificial Sequence
  Description of Artificial Sequence: Synthetic oligonucleotide
uucgcuuucuagagauuuu

SEQ ID NO: 918223 - RNA, 19 nt, Artificial Sequence
  Description of Artificial Sequence: Synthetic oligonucleotide
agcaagacugaggcacugg

SEQ ID NO: 918224 - RNA, 19 nt, Artificial Sequence
  Description of Artificial Sequence: Synthetic oligonucleotide
guagccgggccgcucaggc

SEQ ID NO: 918225 - RNA, 19 nt, Artificial Sequence
  Description of Artificial Sequence: Synthetic oligonucleotide
cacuugugucucuucggac

SEQ ID NO: 918226 - RNA, 19 nt, Artificial Sequence
  Description of Artificial Sequence: Synthetic oligonucleotide
acuuaacugccugauggaa

SEQ ID NO: 918227 - RNA, 19 nt, Artificial Sequence
  Description of Artificial Sequence: Synthetic oligonucleotide
uucuguuagggagcacaug

SEQ ID NO: 918228 - RNA, 19 nt, Artificial Sequence
  Description of Artificial Sequence: Synthetic oligonucleotide
gaucaguccuucagauagc

SEQ ID NO: 918229 - RNA, 19 nt, Artificial Sequence
  Description of Artificial Sequence: Synthetic oligonucleotide
ucacuacauggacugcuuu

SEQ ID NO: 918230 - RNA, 19 nt, Artificial Sequence
  Description of Artificial Sequence: Synthetic oligonucleotide
auucgggcuucuccugaag

SEQ ID NO: 918231 - RNA, 19 nt, Artificial Sequence
  Description of Artificial Sequence: Synthetic oligonucleotide
agcuaugcgggucccugca

SEQ ID NO: 918232 - RNA, 19 nt, Artificial Sequence
  Description of Artificial Sequence: Synthetic oligonucleotide
cuuccgggcccgcaggaag

SEQ ID NO: 918233 - RNA, 19 nt, Artificial Sequence
  Description of Artificial Sequence: Synthetic oligonucleotide
gggagacuaaagcagccac

SEQ ID NO: 918234 - RNA, 19 nt, Artificial Sequence
  Description of Artificial Sequence: Synthetic oligonucleotide
gcuuuuauccgaaugggaa

SEQ ID NO: 918235 - RNA, 19 nt, Artificial Sequence
  Description of Artificial Sequence: Synthetic oligonucleotide
caguugcaaacauuugcga

SEQ ID NO: 918236 - RNA, 19 nt, Artificial Sequence
  Description of Artificial Sequence: Synthetic oligonucleotide
uccgaaugggaaagccauc

SEQ ID NO: 918237 - RNA, 19 nt, Artificial Sequence
  Description of Artificial Sequence: Synthetic oligonucleotide
ugucaaguauauggcucga

SEQ ID NO: 918238 - RNA, 19 nt, Artificial Sequence
  Description of Artificial Sequence: Synthetic oligonucleotide
ggaauaauccagguagcca

SEQ ID NO: 918239 - RNA, 19 nt, Artificial Sequence
  Description of Artificial Sequence: Synthetic oligonucleotide
uccuaagccuguguauuuc

SEQ ID NO: 918240 - RNA, 19 nt, Artificial Sequence
  Description of Artificial Sequence: Synthetic oligonucleotide
ccaauaguaucucauucca

SEQ ID NO: 918241 - RNA, 19 nt, Artificial Sequence
  Description of Artificial Sequence: Synthetic oligonucleotide
ugggacuucauggcucgca

SEQ ID NO: 918242 - RNA, 19 nt, Artificial Sequence
  Description of Artificial Sequence: Synthetic oligonucleotide
gugacucccagaagagugc

SEQ ID NO: 918243 - RNA, 19 nt, Artificial Sequence
  Description of Artificial Sequence: Synthetic oligonucleotide
aggucagacccguggagaa

SEQ ID NO: 918244 - RNA, 19 nt, Artificial Sequence
  Description of Artificial Sequence: Synthetic oligonucleotide
cacauccgggagacuaaag

SEQ ID NO: 918245 - RNA, 19 nt, Artificial Sequence
  Description of Artificial Sequence: Synthetic oligonucleotide
cucacgccuuuguagucug

SEQ ID NO: 918246 - RNA, 19 nt, Artificial Sequence
  Description of Artificial Sequence: Synthetic oligonucleotide
cacuuaacugccugaugga

SEQ ID NO: 918247 - RNA, 19 nt, Artificial Sequence
  Description of Artificial Sequence: Synthetic oligonucleotide
gcaaacauuugcgauucac

SEQ ID NO: 918248 - RNA, 19 nt, Artificial Sequence
  Description of Artificial Sequence: Synthetic oligonucleotide
acugccugauggaaaagau

SEQ ID NO: 918249 - RNA, 19 nt, Artificial Sequence
  Description of Artificial Sequence: Synthetic oligonucleotide
gcgcaccauaucucgaagg

SEQ ID NO: 918250 - RNA, 19 nt, Artificial Sequence
  Description of Artificial Sequence: Synthetic oligonucleotide
auccuaagccuguguauuu

SEQ ID NO: 918251 - RNA, 19 nt, Artificial Sequence
  Description of Artificial Sequence: Synthetic oligonucleotide
ggagacuaaagcagccacc

SEQ ID NO: 918252 - RNA, 19 nt, Artificial Sequence
  Description of Artificial Sequence: Synthetic oligonucleotide
cagucaugcauacuaaaau

SEQ ID NO: 918253 - RNA, 19 nt, Artificial Sequence
  Description of Artificial Sequence: Synthetic oligonucleotide
ccgaaugggaaagccaucc

SEQ ID NO: 918254 - RNA, 19 nt, Artificial Sequence
  Description of Artificial Sequence: Synthetic oligonucleotide
cauucacuacauggacugc

SEQ ID NO: 918255 - RNA, 19 nt, Artificial Sequence
  Description of Artificial Sequence: Synthetic oligonucleotide
ccggaugcagaggacaugg

SEQ ID NO: 918256 - RNA, 19 nt, Artificial Sequence
  Description of Artificial Sequence: Synthetic oligonucleotide
cacaugugccucuacuaaa

SEQ ID NO: 918257 - RNA, 19 nt, Artificial Sequence
  Description of Artificial Sequence: Synthetic oligonucleotide
auggagcaagacugaggca

SEQ ID NO: 918258 - RNA, 19 nt, Artificial Sequence
  Description of Artificial Sequence: Synthetic oligonucleotide
aacgucuuucagggcugag

SEQ ID NO: 918259 - RNA, 19 nt, Artificial Sequence
  Description of Artificial Sequence: Synthetic oligonucleotide
gcucgaauauucucaguga

SEQ ID NO: 918260 - RNA, 19 nt, Artificial Sequence
  Description of Artificial Sequence: Synthetic oligonucleotide
cgcaccauaucucgaaggg

SEQ ID NO: 918261 - RNA, 19 nt, Artificial Sequence
  Description of Artificial Sequence: Synthetic oligonucleotide
ggcccggucauaaucaaac

SEQ ID NO: 918262 - RNA, 19 nt, Artificial Sequence
  Description of Artificial Sequence: Synthetic oligonucleotide
ugauugggaguugcucgga

SEQ ID NO: 918263 - RNA, 19 nt, Artificial Sequence
  Description of Artificial Sequence: Synthetic oligonucleotide
auagucacuuuaggugacu

SEQ ID NO: 918264 - RNA, 19 nt, Artificial Sequence
  Description of Artificial Sequence: Synthetic oligonucleotide
auccgagguucauucacua

SEQ ID NO: 918265 - RNA, 19 nt, Artificial Sequence
  Description of Artificial Sequence: Synthetic oligonucleotide
agcgcgcgcacuaccgacc

SEQ ID NO: 918266 - RNA, 19 nt, Artificial Sequence
  Description of Artificial Sequence: Synthetic oligonucleotide
auccggaguuaagaacguc

SEQ ID NO: 918267 - RNA, 19 nt, Artificial Sequence
  Description of Artificial Sequence: Synthetic oligonucleotide
cuaaggaaugaaggaauua

SEQ ID NO: 918268 - RNA, 19 nt, Artificial Sequence
  Description of Artificial Sequence: Synthetic oligonucleotide
ugguugcuaccaagauaca

SEQ ID NO: 918269 - RNA, 19 nt, Artificial Sequence
  Description of Artificial Sequence: Synthetic oligonucleotide
cucgaauauucucagugau

SEQ ID NO: 918270 - RNA, 19 nt, Artificial Sequence
  Description of Artificial Sequence: Synthetic oligonucleotide
cauuagcuaugcggguccc

SEQ ID NO: 918271 - RNA, 19 nt, Artificial Sequence
  Description of Artificial Sequence: Synthetic oligonucleotide
cccggagucuccauucggg

SEQ ID NO: 918272 - RNA, 19 nt, Artificial Sequence
  Description of Artificial Sequence: Synthetic oligonucleotide
guuugugugcagagaguuc

SEQ ID NO: 918273 - RNA, 19 nt, Artificial Sequence
  Description of Artificial Sequence: Synthetic oligonucleotide
ucacgccuuuguagucugc

SEQ ID NO: 918274 - RNA, 19 nt, Artificial Sequence
  Description of Artificial Sequence: Synthetic oligonucleotide
ugacccugguugcuaccaa

SEQ ID NO: 918275 - RNA, 19 nt, Artificial Sequence
  Description of Artificial Sequence: Synthetic oligonucleotide
aggcacauccgggagacua

SEQ ID NO: 918276 - RNA, 19 nt, Artificial Sequence
  Description of Artificial Sequence: Synthetic oligonucleotide
uggcucgaauauucucagu

SEQ ID NO: 918277 - RNA, 19 nt, Artificial Sequence
  Description of Artificial Sequence: Synthetic oligonucleotide
gagcaagacugaggcacug

SEQ ID NO: 918278 - RNA, 19 nt, Artificial Sequence
  Description of Artificial Sequence: Synthetic oligonucleotide
ugugaggaauccggaguua

SEQ ID NO: 918279 - RNA, 19 nt, Artificial Sequence
  Description of Artificial Sequence: Synthetic oligonucleotide
cacggcggcaggagccucg

SEQ ID NO: 918280 - RNA, 19 nt, Artificial Sequence
  Description of Artificial Sequence: Synthetic oligonucleotide
guagaugaauccaccacau

SEQ ID NO: 918281 - RNA, 19 nt, Artificial Sequence
  Description of Artificial Sequence: Synthetic oligonucleotide
auuagcuaugcgggucccu

SEQ ID NO: 918282 - RNA, 19 nt, Artificial Sequence
  Description of Artificial Sequence: Synthetic oligonucleotide
gugaggaauccggaguuaa

SEQ ID NO: 918283 - RNA, 19 nt, Artificial Sequence
  Description of Artificial Sequence: Synthetic oligonucleotide
agauccagucaugcauacu

SEQ ID NO: 918284 - RNA, 19 nt, Artificial Sequence
  Description of Artificial Sequence: Synthetic oligonucleotide
auggcucgcauggagucau

SEQ ID NO: 918285 - RNA, 19 nt, Artificial Sequence
  Description of Artificial Sequence: Synthetic oligonucleotide
ccagucaugcauacuaaaa

SEQ ID NO: 918286 - RNA, 19 nt, Artificial Sequence
  Description of Artificial Sequence: Synthetic oligonucleotide
cucuucggacuggauugag

SEQ ID NO: 918287 - RNA, 19 nt, Artificial Sequence
  Description of Artificial Sequence: Synthetic oligonucleotide
acccugguugcuaccaaga

SEQ ID NO: 918288 - RNA, 19 nt, Artificial Sequence
  Description of Artificial Sequence: Synthetic oligonucleotide
ugacugacccugguugcua

SEQ ID NO: 918289 - RNA, 19 nt, Artificial Sequence
  Description of Artificial Sequence: Synthetic oligonucleotide
ccugucagaaggcugucca

SEQ ID NO: 918290 - RNA, 19 nt, Artificial Sequence
  Description of Artificial Sequence: Synthetic oligonucleotide
cagcgcgcgcacuaccgac

SEQ ID NO: 918291 - RNA, 19 nt, Artificial Sequence
  Description of Artificial Sequence: Synthetic oligonucleotide
ggacuucauggcucgcaug

SEQ ID NO: 918292 - RNA, 19 nt, Artificial Sequence
  Description of Artificial Sequence: Synthetic oligonucleotide
gcaccauaucucgaagggc

SEQ ID NO: 918293 - RNA, 19 nt, Artificial Sequence
  Description of Artificial Sequence: Synthetic oligonucleotide
auccagucaugcauacuaa

SEQ ID NO: 918294 - RNA, 19 nt, Artificial Sequence
  Description of Artificial Sequence: Synthetic oligonucleotide
caguggccuagacugcuca

SEQ ID NO: 918295 - RNA, 19 nt, Artificial Sequence
  Description of Artificial Sequence: Synthetic oligonucleotide
ccucuacuaaaagccaaac

SEQ ID NO: 918296 - RNA, 19 nt, Artificial Sequence
  Description of Artificial Sequence: Synthetic oligonucleotide
cauuugcgauucacuggga

SEQ ID NO: 918297 - RNA, 19 nt, Artificial Sequence
  Description of Artificial Sequence: Synthetic oligonucleotide
gcuaaaacaguggccuaga

SEQ ID NO: 918298 - RNA, 19 nt, Artificial Sequence
  Description of Artificial Sequence: Synthetic oligonucleotide
cugacccugguugcuacca

SEQ ID NO: 918299 - RNA, 19 nt, Artificial Sequence
  Description of Artificial Sequence: Synthetic oligonucleotide
gcacauguagccgggccgc

SEQ ID NO: 918300 - RNA, 19 nt, Artificial Sequence
  Description of Artificial Sequence: Synthetic oligonucleotide
gucaagcgaugugcucagg

SEQ ID NO: 918301 - RNA, 19 nt, Artificial Sequence
  Description of Artificial Sequence: Synthetic oligonucleotide
gcucgcauggagucaucac

SEQ ID NO: 918302 - RNA, 19 nt, Artificial Sequence
  Description of Artificial Sequence: Synthetic oligonucleotide
acccguggagaaagaaccu

SEQ ID NO: 918303 - RNA, 19 nt, Artificial Sequence
  Description of Artificial Sequence: Synthetic oligonucleotide
gucaaguauauggcucgaa

SEQ ID NO: 918304 - RNA, 19 nt, Artificial Sequence
  Description of Artificial Sequence: Synthetic oligonucleotide
gaguucaggucagacccgu

SEQ ID NO: 918305 - RNA, 19 nt, Artificial Sequence
  Description of Artificial Sequence: Synthetic oligonucleotide
gcuaugcgggucccugcag

SEQ ID NO: 918306 - RNA, 19 nt, Artificial Sequence
  Description of Artificial Sequence: Synthetic oligonucleotide
ucgggcggcagcgcgcgca

SEQ ID NO: 918307 - RNA, 19 nt, Artificial Sequence
  Description of Artificial Sequence: Synthetic oligonucleotide
cauucgggcuucuccugaa

SEQ ID NO: 918308 - RNA, 19 nt, Artificial Sequence
  Description of Artificial Sequence: Synthetic oligonucleotide
cacuacauggacugcuuuu

SEQ ID NO: 918309 - RNA, 19 nt, Artificial Sequence
  Description of Artificial Sequence: Synthetic oligonucleotide
aggcaucgucaagcgaugu

SEQ ID NO: 918310 - RNA, 19 nt, Artificial Sequence
  Description of Artificial Sequence: Synthetic oligonucleotide
cauccuaagccuguguauu

SEQ ID NO: 918311 - RNA, 19 nt, Artificial Sequence
  Description of Artificial Sequence: Synthetic oligonucleotide
ccgaaaugagaugcuuuug

SEQ ID NO: 918312 - RNA, 19 nt, Artificial Sequence
  Description of Artificial Sequence: Synthetic oligonucleotide
cuaaagcagccaccacuua

SEQ ID NO: 918313 - RNA, 19 nt, Artificial Sequence
  Description of Artificial Sequence: Synthetic oligonucleotide
ggcggagcgcgggucacgg

SEQ ID NO: 918314 - RNA, 19 nt, Artificial Sequence
  Description of Artificial Sequence: Synthetic oligonucleotide
ccacaugugccucuacuaa

SEQ ID NO: 918315 - RNA, 19 nt, Artificial Sequence
  Description of Artificial Sequence: Synthetic oligonucleotide
cgucaagcgaugugcucag

SEQ ID NO: 918316 - RNA, 19 nt, Artificial Sequence
  Description of Artificial Sequence: Synthetic oligonucleotide
ccagacuagcaguugcaaa

SEQ ID NO: 918317 - RNA, 19 nt, Artificial Sequence
  Description of Artificial Sequence: Synthetic oligonucleotide
gggaguugcucggaaucca

SEQ ID NO: 918318 - RNA, 19 nt, Artificial Sequence
  Description of Artificial Sequence: Synthetic oligonucleotide
ccauccugaaaggaugcca

SEQ ID NO: 918319 - RNA, 19 nt, Artificial Sequence
  Description of Artificial Sequence: Synthetic oligonucleotide
ccauaucucgaagggccug

SEQ ID NO: 918320 - RNA, 19 nt, Artificial Sequence
  Description of Artificial Sequence: Synthetic oligonucleotide
gcgcgcacuaccgacccgc

SEQ ID NO: 918321 - RNA, 19 nt, Artificial Sequence
  Description of Artificial Sequence: Synthetic oligonucleotide
caauuccguucacuugugu

SEQ ID NO: 918322 - RNA, 19 nt, Artificial Sequence
  Description of Artificial Sequence: Synthetic oligonucleotide
cagacccguggagaaagaa

SEQ ID NO: 918323 - RNA, 19 nt, Artificial Sequence
  Description of Artificial Sequence: Synthetic oligonucleotide
cacuaccgacccgcacucc

SEQ ID NO: 918324 - RNA, 19 nt, Artificial Sequence
  Description of Artificial Sequence: Synthetic oligonucleotide
augugaccaggggcuaaaa

SEQ ID NO: 918325 - RNA, 19 nt, Artificial Sequence
  Description of Artificial Sequence: Synthetic oligonucleotide
gcauccuaagccuguguau

SEQ ID NO: 918326 - RNA, 19 nt, Artificial Sequence
  Description of Artificial Sequence: Synthetic oligonucleotide
aggcggagcgcgggucacg

SEQ ID NO: 918327 - RNA, 19 nt, Artificial Sequence
  Description of Artificial Sequence: Synthetic oligonucleotide
ggccuagacugcucaggga

SEQ ID NO: 918328 - RNA, 19 nt, Artificial Sequence
  Description of Artificial Sequence: Synthetic oligonucleotide
gccucuacuaaaagccaaa

SEQ ID NO: 918329 - RNA, 19 nt, Artificial Sequence
  Description of Artificial Sequence: Synthetic oligonucleotide
uggcucgcauggagucauc

SEQ ID NO: 918330 - RNA, 19 nt, Artificial Sequence
  Description of Artificial Sequence: Synthetic oligonucleotide
cugcguaaugauggagcaa

SEQ ID NO: 918331 - RNA, 19 nt, Artificial Sequence
  Description of Artificial Sequence: Synthetic oligonucleotide
gcgcgcgcacuaccgaccc

SEQ ID NO: 918332 - RNA, 19 nt, Artificial Sequence
  Description of Artificial Sequence: Synthetic oligonucleotide
ggcucgcauggagucauca

SEQ ID NO: 918333 - RNA, 19 nt, Artificial Sequence
  Description of Artificial Sequence: Synthetic oligonucleotide
ccuagacugcucagggaaa

SEQ ID NO: 918334 - RNA, 19 nt, Artificial Sequence
  Description of Artificial Sequence: Synthetic oligonucleotide
gggacuucauggcucgcau

SEQ ID NO: 918335 - RNA, 19 nt, Artificial Sequence
  Description of Artificial Sequence: Synthetic oligonucleotide
gucuucuguuagggagcac

SEQ ID NO: 918336 - RNA, 19 nt, Artificial Sequence
  Description of Artificial Sequence: Synthetic oligonucleotide
caccacuuaacugccugau

SEQ ID NO: 918337 - RNA, 19 nt, Artificial Sequence
  Description of Artificial Sequence: Synthetic oligonucleotide
gggcuaaaacaguggccua

SEQ ID NO: 918338 - RNA, 19 nt, Artificial Sequence
  Description of Artificial Sequence: Synthetic oligonucleotide
gcucauuuucggagagcga

SEQ ID NO: 918339 - RNA, 19 nt, Artificial Sequence
  Description of Artificial Sequence: Synthetic oligonucleotide
gcagcgcgcgcacuaccga

SEQ ID NO: 918340 - RNA, 19 nt, Artificial Sequence
  Description of Artificial Sequence: Synthetic oligonucleotide
ggagcaagacugaggcacu

SEQ ID NO: 918341 - RNA, 19 nt, Artificial Sequence
  Description of Artificial Sequence: Synthetic oligonucleotide
cagcccggcggcaggcgga

SEQ ID NO: 918342 - RNA, 19 nt, Artificial Sequence
  Description of Artificial Sequence: Synthetic oligonucleotide
gcucacgccuuuguagucu

SEQ ID NO: 918343 - RNA, 19 nt, Artificial Sequence
  Description of Artificial Sequence: Synthetic oligonucleotide
gcccggucauaaucaaacu

SEQ ID NO: 918344 - RNA, 19 nt, Artificial Sequence
  Description of Artificial Sequence: Synthetic oligonucleotide
gcacauccgggagacuaaa

SEQ ID NO: 918345 - RNA, 19 nt, Artificial Sequence
  Description of Artificial Sequence: Synthetic oligonucleotide
cccggucauaaucaaacuu

SEQ ID NO: 918346 - RNA, 19 nt, Artificial Sequence
  Description of Artificial Sequence: Synthetic oligonucleotide
gcgcacuaccgacccgcac

SEQ ID NO: 918347 - RNA, 19 nt, Artificial Sequence
  Description of Artificial Sequence: Synthetic oligonucleotide
ccggaguuaagaacgucuu

SEQ ID NO: 918348 - RNA, 19 nt, Artificial Sequence
  Description of Artificial Sequence: Synthetic oligonucleotide
ggaguugcucggaauccau

SEQ ID NO: 918349 - RNA, 19 nt, Artificial Sequence
  Description of Artificial Sequence: Synthetic oligonucleotide
cgagguucauucacuacau

SEQ ID NO: 918350 - RNA, 19 nt, Artificial Sequence
  Description of Artificial Sequence: Synthetic oligonucleotide
cgcacuaccgacccgcacu

SEQ ID NO: 918351 - RNA, 19 nt, Artificial Sequence
  Description of Artificial Sequence: Synthetic oligonucleotide
agcgcgggucacggcggca

SEQ ID NO: 918352 - RNA, 19 nt, Artificial Sequence
  Description of Artificial Sequence: Synthetic oligonucleotide
ggguccguguggggcagca

SEQ ID NO: 918353 - RNA, 19 nt, Artificial Sequence
  Description of Artificial Sequence: Synthetic oligonucleotide
gguccguguggggcagcac

SEQ ID NO: 918354 - RNA, 19 nt, Artificial Sequence
  Description of Artificial Sequence: Synthetic oligonucleotide
gcggagcgcgggucacggc

SEQ ID NO: 918355 - RNA, 19 nt, Artificial Sequence
  Description of Artificial Sequence: Synthetic oligonucleotide
ccacggaggggcugguucu

SEQ ID NO: 918356 - RNA, 19 nt, Artificial Sequence
  Description of Artificial Sequence: Synthetic oligonucleotide
gguacucuuugcgcaccau

SEQ ID NO: 918357 - RNA, 19 nt, Artificial Sequence
  Description of Artificial Sequence: Synthetic oligonucleotide
gcgauucacugggacaguu

SEQ ID NO: 918358 - RNA, 19 nt, Artificial Sequence
  Description of Artificial Sequence: Synthetic oligonucleotide
cacauguagccgggccgcu

SEQ ID NO: 918359 - RNA, 19 nt, Artificial Sequence
  Description of Artificial Sequence: Synthetic oligonucleotide
gcgggucacggcggcagga

SEQ ID NO: 918360 - RNA, 19 nt, Artificial Sequence
  Description of Artificial Sequence: Synthetic oligonucleotide
cggcagcgcgcgcacuacc

SEQ ID NO: 918361 - RNA, 19 nt, Artificial Sequence
  Description of Artificial Sequence: Synthetic oligonucleotide
cgcgggucacggcggcagg

SEQ ID NO: 918362 - RNA, 19 nt, Artificial Sequence
  Description of Artificial Sequence: Synthetic oligonucleotide
cccugguugcuaccaagau

SEQ ID NO: 918363 - RNA, 19 nt, Artificial Sequence
  Description of Artificial Sequence: Synthetic oligonucleotide
gggguccguguggggcagc

SEQ ID NO: 918364 - RNA, 19 nt, Artificial Sequence
  Description of Artificial Sequence: Synthetic oligonucleotide
cgggcggcagcgcgcgcac

SEQ ID NO: 918365 - RNA, 19 nt, Artificial Sequence
  Description of Artificial Sequence: Synthetic oligonucleotide
cgcgcacuaccgacccgca

SEQ ID NO: 918366 - RNA, 19 nt, Artificial Sequence
  Description of Artificial Sequence: Synthetic oligonucleotide
ccguguggggcagcacugu

SEQ ID NO: 918367 - RNA, 19 nt, Artificial Sequence
  Description of Artificial Sequence: Synthetic oligonucleotide
gcccggcggcaggcggagc

SEQ ID NO: 918368 - RNA, 19 nt, Artificial Sequence
  Description of Artificial Sequence: Synthetic oligonucleotide
cuccgccggcagccauggu

SEQ ID NO: 918369 - RNA, 19 nt, Artificial Sequence
  Description of Artificial Sequence: Synthetic oligonucleotide
uuguuuauaaccaagagua

SEQ ID NO: 918370 - RNA, 19 nt, Artificial Sequence
  Description of Artificial Sequence: Synthetic oligonucleotide
ugugguucaaucaugaugu

SEQ ID NO: 918371 - RNA, 19 nt, Artificial Sequence
  Description of Artificial Sequence: Synthetic oligonucleotide
uguaacaagcaccuggacg

SEQ ID NO: 918372 - RNA, 19 nt, Artificial Sequence
  Description of Artificial Sequence: Synthetic oligonucleotide
uuugccaugccacucaagg

SEQ ID NO: 918373 - RNA, 19 nt, Artificial Sequence
  Description of Artificial Sequence: Synthetic oligonucleotide
gauacuguccucugcaugg

SEQ ID NO: 918374 - RNA, 19 nt, Artificial Sequence
  Description of Artificial Sequence: Synthetic oligonucleotide
uacuuuauagaauucacgu

SEQ ID NO: 918375 - RNA, 19 nt, Artificial Sequence
  Description of Artificial Sequence: Synthetic oligonucleotide
uauuguuuauaaccaagag

SEQ ID NO: 918376 - RNA, 19 nt, Artificial Sequence
  Description of Artificial Sequence: Synthetic oligonucleotide
ugucaauguaacaagcacc

SEQ ID NO: 918377 - RNA, 19 nt, Artificial Sequence
  Description of Artificial Sequence: Synthetic oligonucleotide
aaggaauauguucuaagcu

SEQ ID NO: 918378 - RNA, 19 nt, Artificial Sequence
  Description of Artificial Sequence: Synthetic oligonucleotide
ucuaucuuuagccacuaca

SEQ ID NO: 918379 - RNA, 19 nt, Artificial Sequence
  Description of Artificial Sequence: Synthetic oligonucleotide
aacaugguagaauacugug

SEQ ID NO: 918380 - RNA, 19 nt, Artificial Sequence
  Description of Artificial Sequence: Synthetic oligonucleotide
aaccugaggaaauuccugg

SEQ ID NO: 918381 - RNA, 19 nt, Artificial Sequence
  Description of Artificial Sequence: Synthetic oligonucleotide
auuguuuauaaccaagagu

SEQ ID NO: 918382 - RNA, 19 nt, Artificial Sequence
  Description of Artificial Sequence: Synthetic oligonucleotide
caaaagacccauuggaggg

SEQ ID NO: 918383 - RNA, 19 nt, Artificial Sequence
  Description of Artificial Sequence: Synthetic oligonucleotide
aggaauauguucuaagcug

SEQ ID NO: 918384 - RNA, 19 nt, Artificial Sequence
  Description of Artificial Sequence: Synthetic oligonucleotide
uagucugcaagcuucaacc

SEQ ID NO: 918385 - RNA, 19 nt, Artificial Sequence
  Description of Artificial Sequence: Synthetic oligonucleotide
ugccaugccacucaaggcg

SEQ ID NO: 918386 - RNA, 19 nt, Artificial Sequence
  Description of Artificial Sequence: Synthetic oligonucleotide
gaaacgacaaggcauacuc

SEQ ID NO: 918387 - RNA, 19 nt, Artificial Sequence
  Description of Artificial Sequence: Synthetic oligonucleotide
uggaccagaaacgacaagg

SEQ ID NO: 918388 - RNA, 19 nt, Artificial Sequence
  Description of Artificial Sequence: Synthetic oligonucleotide
acuugcgucuuccagaguc

SEQ ID NO: 918389 - RNA, 19 nt, Artificial Sequence
  Description of Artificial Sequence: Synthetic oligonucleotide
uucacguuccccuggaggg

SEQ ID NO: 918390 - RNA, 19 nt, Artificial Sequence
  Description of Artificial Sequence: Synthetic oligonucleotide
uggacgaugacuuuagcac

SEQ ID NO: 918391 - RNA, 19 nt, Artificial Sequence
  Description of Artificial Sequence: Synthetic oligonucleotide
cucgcuuacuauaaaacag

SEQ ID NO: 918392 - RNA, 19 nt, Artificial Sequence
  Description of Artificial Sequence: Synthetic oligonucleotide
aagaguaugauuggcaagu

SEQ ID NO: 918393 - RNA, 19 nt, Artificial Sequence
  Description of Artificial Sequence: Synthetic oligonucleotide
uaucaacuaauuuauucac

SEQ ID NO: 918394 - RNA, 19 nt, Artificial Sequence
  Description of Artificial Sequence: Synthetic oligonucleotide
aauguaauauccaguuuag

SEQ ID NO: 918395 - RNA, 19 nt, Artificial Sequence
  Description of Artificial Sequence: Synthetic oligonucleotide
auuucggucacggggaugc

SEQ ID NO: 918396 - RNA, 19 nt, Artificial Sequence
  Description of Artificial Sequence: Synthetic oligonucleotide
aucccgauguaucggaugc

SEQ ID NO: 918397 - RNA, 19 nt, Artificial Sequence
  Description of Artificial Sequence: Synthetic oligonucleotide
guaacaagcaccuggacga

SEQ ID NO: 918398 - RNA, 19 nt, Artificial Sequence
  Description of Artificial Sequence: Synthetic oligonucleotide
uuggcaaaagacccauugg

SEQ ID NO: 918399 - RNA, 19 nt, Artificial Sequence
  Description of Artificial Sequence: Synthetic oligonucleotide
uugguagauuccauuauug

SEQ ID NO: 918400 - RNA, 19 nt, Artificial Sequence
  Description of Artificial Sequence: Synthetic oligonucleotide
ccaaucacaaucaagggcc

SEQ ID NO: 918401 - RNA, 19 nt, Artificial Sequence
  Description of Artificial Sequence: Synthetic oligonucleotide
guaauaauucauagggagg

SEQ ID NO: 918402 - RNA, 19 nt, Artificial Sequence
  Description of Artificial Sequence: Synthetic oligonucleotide
auuuugcguuuucagggcc

SEQ ID NO: 918403 - RNA, 19 nt, Artificial Sequence
  Description of Artificial Sequence: Synthetic oligonucleotide
uucaaccugaggaaauucc

SEQ ID NO: 918404 - RNA, 19 nt, Artificial Sequence
  Description of Artificial Sequence: Synthetic oligonucleotide
uacuauaaaacagucucug

SEQ ID NO: 918405 - RNA, 19 nt, Artificial Sequence
  Description of Artificial Sequence: Synthetic oligonucleotide
uggcaaaagacccauugga

SEQ ID NO: 918406 - RNA, 19 nt, Artificial Sequence
  Description of Artificial Sequence: Synthetic oligonucleotide
ugcgaguuuggcaaaagac

SEQ ID NO: 918407 - RNA, 19 nt, Artificial Sequence
  Description of Artificial Sequence: Synthetic oligonucleotide
ucacauguuagaacgggug

SEQ ID NO: 918408 - RNA, 19 nt, Artificial Sequence
  Description of Artificial Sequence: Synthetic oligonucleotide
uggacgaccauagauacug

SEQ ID NO: 918409 - RNA, 19 nt, Artificial Sequence
  Description of Artificial Sequence: Synthetic oligonucleotide
acacagacgacccguuucc

SEQ ID NO: 918410 - RNA, 19 nt, Artificial Sequence
  Description of Artificial Sequence: Synthetic oligonucleotide
uacgacgccgaacauauac

SEQ ID NO: 918411 - RNA, 19 nt, Artificial Sequence
  Description of Artificial Sequence: Synthetic oligonucleotide
aucaugauguugauaagac

SEQ ID NO: 918412 - RNA, 19 nt, Artificial Sequence
  Description of Artificial Sequence: Synthetic oligonucleotide
ucucgcaccaaauaacaca

SEQ ID NO: 918413 - RNA, 19 nt, Artificial Sequence
  Description of Artificial Sequence: Synthetic oligonucleotide
uccaguuuagucucgcacc

SEQ ID NO: 918414 - RNA, 19 nt, Artificial Sequence
  Description of Artificial Sequence: Synthetic oligonucleotide
aaccaagaguaugauuggc

SEQ ID NO: 918415 - RNA, 19 nt, Artificial Sequence
  Description of Artificial Sequence: Synthetic oligonucleotide
aaaccaacucccauuguuc

SEQ ID NO: 918416 - RNA, 19 nt, Artificial Sequence
  Description of Artificial Sequence: Synthetic oligonucleotide
uuacuugcgucuuccagag

SEQ ID NO: 918417 - RNA, 19 nt, Artificial Sequence
  Description of Artificial Sequence: Synthetic oligonucleotide
uaaccaagaguaugauugg

SEQ ID NO: 918418 - RNA, 19 nt, Artificial Sequence
  Description of Artificial Sequence: Synthetic oligonucleotide
cauaaugcgaguuuggcaa

SEQ ID NO: 918419 - RNA, 19 nt, Artificial Sequence
  Description of Artificial Sequence: Synthetic oligonucleotide
caccaaauaacacaaucac

SEQ ID NO: 918420 - RNA, 19 nt, Artificial Sequence
  Description of Artificial Sequence: Synthetic oligonucleotide
auguugauaagacaggguu

SEQ ID NO: 918421 - RNA, 19 nt, Artificial Sequence
  Description of Artificial Sequence: Synthetic oligonucleotide
aguaugauuggcaaguugu

SEQ ID NO: 918422 - RNA, 19 nt, Artificial Sequence
  Description of Artificial Sequence: Synthetic oligonucleotide
uauagaauucacguucccc

SEQ ID NO: 918423 - RNA, 19 nt, Artificial Sequence
  Description of Artificial Sequence: Synthetic oligonucleotide
uucgcauuugccaugccac

SEQ ID NO: 918424 - RNA, 19 nt, Artificial Sequence
  Description of Artificial Sequence: Synthetic oligonucleotide
agcauagcaagccgcuugc

SEQ ID NO: 918425 - RNA, 19 nt, Artificial Sequence
  Description of Artificial Sequence: Synthetic oligonucleotide
ucauaaugcgaguuuggca

SEQ ID NO: 918426 - RNA, 19 nt, Artificial Sequence
  Description of Artificial Sequence: Synthetic oligonucleotide
guuagaacgggugagccag

SEQ ID NO: 918427 - RNA, 19 nt, Artificial Sequence
  Description of Artificial Sequence: Synthetic oligonucleotide
ucgcuuacuauaaaacagu

SEQ ID NO: 918428 - RNA, 19 nt, Artificial Sequence
  Description of Artificial Sequence: Synthetic oligonucleotide
ugguaauuuugcuagggaa

SEQ ID NO: 918429 - RNA, 19 nt, Artificial Sequence
  Description of Artificial Sequence: Synthetic oligonucleotide
acaaucaagggccaacagu

SEQ ID NO: 918430 - RNA, 19 nt, Artificial Sequence
  Description of Artificial Sequence: Synthetic oligonucleotide
gcaaaagacccauuggagg

SEQ ID NO: 918431 - RNA, 19 nt, Artificial Sequence
  Description of Artificial Sequence: Synthetic oligonucleotide
aacuugcuaaauagucugc

SEQ ID NO: 918432 - RNA, 19 nt, Artificial Sequence
  Description of Artificial Sequence: Synthetic oligonucleotide
uagauacugcuccucacug

SEQ ID NO: 918433 - RNA, 19 nt, Artificial Sequence
  Description of Artificial Sequence: Synthetic oligonucleotide
uccucaucccgauguaucg

SEQ ID NO: 918434 - RNA, 19 nt, Artificial Sequence
  Description of Artificial Sequence: Synthetic oligonucleotide
ugagcuuacacaguuugga

SEQ ID NO: 918435 - RNA, 19 nt, Artificial Sequence
  Description of Artificial Sequence: Synthetic oligonucleotide
aggaaugucaauguaacaa

SEQ ID NO: 918436 - RNA, 19 nt, Artificial Sequence
  Description of Artificial Sequence: Synthetic oligonucleotide
agcugcaauagcaaauccc

SEQ ID NO: 918437 - RNA, 19 nt, Artificial Sequence
  Description of Artificial Sequence: Synthetic oligonucleotide
auucacauguuagaacggg

SEQ ID NO: 918438 - RNA, 19 nt, Artificial Sequence
  Description of Artificial Sequence: Synthetic oligonucleotide
gaagcuaauuccuuggaua

SEQ ID NO: 918439 - RNA, 19 nt, Artificial Sequence
  Description of Artificial Sequence: Synthetic oligonucleotide
guaucggaugcccaguucc

SEQ ID NO: 918440 - RNA, 19 nt, Artificial Sequence
  Description of Artificial Sequence: Synthetic oligonucleotide
auaagacaggguuuacuug

SEQ ID NO: 918441 - RNA, 19 nt, Artificial Sequence
  Description of Artificial Sequence: Synthetic oligonucleotide
auacaauuuuggcagugug

SEQ ID NO: 918442 - RNA, 19 nt, Artificial Sequence
  Description of Artificial Sequence: Synthetic oligonucleotide
agaauucacguuccccugg

SEQ ID NO: 918443 - RNA, 19 nt, Artificial Sequence
  Description of Artificial Sequence: Synthetic oligonucleotide
auguuagaacgggugagcc

SEQ ID NO: 918444 - RNA, 19 nt, Artificial Sequence
  Description of Artificial Sequence: Synthetic oligonucleotide
ugcaauagcaaaucccaaa

SEQ ID NO: 918445 - RNA, 19 nt, Artificial Sequence
  Description of Artificial Sequence: Synthetic oligonucleotide
uuuagucucgcaccaaaua

SEQ ID NO: 918446 - RNA, 19 nt, Artificial Sequence
  Description of Artificial Sequence: Synthetic oligonucleotide
augggguuuuaucaaacug

SEQ ID NO: 918447 - RNA, 19 nt, Artificial Sequence
  Description of Artificial Sequence: Synthetic oligonucleotide
ggaauauguucuaagcugg

SEQ ID NO: 918448 - RNA, 19 nt, Artificial Sequence
  Description of Artificial Sequence: Synthetic oligonucleotide
auagauacugcuccucacu

SEQ ID NO: 918449 - RNA, 19 nt, Artificial Sequence
  Description of Artificial Sequence: Synthetic oligonucleotide
uggguaacuguucuugaac

SEQ ID NO: 918450 - RNA, 19 nt, Artificial Sequence
  Description of Artificial Sequence: Synthetic oligonucleotide
ugacgaggaagguaguucu

SEQ ID NO: 918451 - RNA, 19 nt, Artificial Sequence
  Description of Artificial Sequence: Synthetic oligonucleotide
ggcgauuucggucacgggg

SEQ ID NO: 918452 - RNA, 19 nt, Artificial Sequence
  Description of Artificial Sequence: Synthetic oligonucleotide
uucuaagcugguuggccgg

SEQ ID NO: 918453 - RNA, 19 nt, Artificial Sequence
  Description of Artificial Sequence: Synthetic oligonucleotide
cauuuugcguuuucagggc

SEQ ID NO: 918454 - RNA, 19 nt, Artificial Sequence
  Description of Artificial Sequence: Synthetic oligonucleotide
cagaugcugccuuacauac

SEQ ID NO: 918455 - RNA, 19 nt, Artificial Sequence
  Description of Artificial Sequence: Synthetic oligonucleotide
gacuucuaucuuuagccac

SEQ ID NO: 918456 - RNA, 19 nt, Artificial Sequence
  Description of Artificial Sequence: Synthetic oligonucleotide
uguaccugcagaugguuuc

SEQ ID NO: 918457 - RNA, 19 nt, Artificial Sequence
  Description of Artificial Sequence: Synthetic oligonucleotide
ugguagauuccauuauugu

SEQ ID NO: 918458 - RNA, 19 nt, Artificial Sequence
  Description of Artificial Sequence: Synthetic oligonucleotide
uagucucgcaccaaauaac

SEQ ID NO: 918459 - RNA, 19 nt, Artificial Sequence
  Description of Artificial Sequence: Synthetic oligonucleotide
augccuacgacgccgaaca

SEQ ID NO: 918460 - RNA, 19 nt, Artificial Sequence
  Description of Artificial Sequence: Synthetic oligonucleotide
uguucuaagcugguuggcc

SEQ ID NO: 918461 - RNA, 19 nt, Artificial Sequence
  Description of Artificial Sequence: Synthetic oligonucleotide
uguugauaagacaggguuu

SEQ ID NO: 918462 - RNA, 19 nt, Artificial Sequence
  Description of Artificial Sequence: Synthetic oligonucleotide
ucauguucgcauuugccau

SEQ ID NO: 918463 - RNA, 19 nt, Artificial Sequence
  Description of Artificial Sequence: Synthetic oligonucleotide
uucacauguuagaacgggu

SEQ ID NO: 918464 - RNA, 19 nt, Artificial Sequence
  Description of Artificial Sequence: Synthetic oligonucleotide
ugaccugcucauaaugcga

SEQ ID NO: 918465 - RNA, 19 nt, Artificial Sequence
  Description of Artificial Sequence: Synthetic oligonucleotide
acuuuauagaauucacguu

SEQ ID NO: 918466 - RNA, 19 nt, Artificial Sequence
  Description of Artificial Sequence: Synthetic oligonucleotide
gacuuuagcaccagacacc

SEQ ID NO: 918467 - RNA, 19 nt, Artificial Sequence
  Description of Artificial Sequence: Synthetic oligonucleotide
uguuuauaaccaagaguau

SEQ ID NO: 918468 - RNA, 19 nt, Artificial Sequence
  Description of Artificial Sequence: Synthetic oligonucleotide
auuucuaauaacagaugcu

SEQ ID NO: 918469 - RNA, 19 nt, Artificial Sequence
  Description of Artificial Sequence: Synthetic oligonucleotide
caaaggaaccagcaucgag

SEQ ID NO: 918470 - RNA, 19 nt, Artificial Sequence
  Description of Artificial Sequence: Synthetic oligonucleotide
cuugaacaugguagaauac

SEQ ID NO: 918471 - RNA, 19 nt, Artificial Sequence
  Description of Artificial Sequence: Synthetic oligonucleotide
ggagggaucuuuuggaagc

SEQ ID NO: 918472 - RNA, 19 nt, Artificial Sequence
  Description of Artificial Sequence: Synthetic oligonucleotide
cucaaggcguggaugagac

SEQ ID NO: 918473 - RNA, 19 nt, Artificial Sequence
  Description of Artificial Sequence: Synthetic oligonucleotide
gguucaaucaugauguuga

SEQ ID NO: 918474 - RNA, 19 nt, Artificial Sequence
  Description of Artificial Sequence: Synthetic oligonucleotide
gauaagacaggguuuacuu

SEQ ID NO: 918475 - RNA, 19 nt, Artificial Sequence
  Description of Artificial Sequence: Synthetic oligonucleotide
cucauaaugcgaguuuggc

SEQ ID NO: 918476 - RNA, 19 nt, Artificial Sequence
  Description of Artificial Sequence: Synthetic oligonucleotide
acggggaugccuacgacgc

SEQ ID NO: 918477 - RNA, 19 nt, Artificial Sequence
  Description of Artificial Sequence: Synthetic oligonucleotide
uaguauuugcucccucgcu

SEQ ID NO: 918478 - RNA, 19 nt, Artificial Sequence
  Description of Artificial Sequence: Synthetic oligonucleotide
acauguuagaacgggugag

SEQ ID NO: 918479 - RNA, 19 nt, Artificial Sequence
  Description of Artificial Sequence: Synthetic oligonucleotide
ugauaagacaggguuuacu

SEQ ID NO: 918480 - RNA, 19 nt, Artificial Sequence
  Description of Artificial Sequence: Synthetic oligonucleotide
acaucugcccgguaucuug

SEQ ID NO: 918481 - RNA, 19 nt, Artificial Sequence
  Description of Artificial Sequence: Synthetic oligonucleotide
accuuucccgaugaugagc

SEQ ID NO: 918482 - RNA, 19 nt, Artificial Sequence
  Description of Artificial Sequence: Synthetic oligonucleotide
caucuccuagcaaagucac

SEQ ID NO: 918483 - RNA, 19 nt, Artificial Sequence
  Description of Artificial Sequence: Synthetic oligonucleotide
auguucgcauuugccaugc

SEQ ID NO: 918484 - RNA, 19 nt, Artificial Sequence
  Description of Artificial Sequence: Synthetic oligonucleotide
cugcccgguaucuuggagg

SEQ ID NO: 918485 - RNA, 19 nt, Artificial Sequence
  Description of Artificial Sequence: Synthetic oligonucleotide
cacggggaugccuacgacg

SEQ ID NO: 918486 - RNA, 19 nt, Artificial Sequence
  Description of Artificial Sequence: Synthetic oligonucleotide
ugguucaaucaugauguug

SEQ ID NO: 918487 - RNA, 19 nt, Artificial Sequence
  Description of Artificial Sequence: Synthetic oligonucleotide
aguuuagucucgcaccaaa

SEQ ID NO: 918488 - RNA, 19 nt, Artificial Sequence
  Description of Artificial Sequence: Synthetic oligonucleotide
accagaaacgacaaggcau

SEQ ID NO: 918489 - RNA, 19 nt, Artificial Sequence
  Description of Artificial Sequence: Synthetic oligonucleotide
ucuggguaacuguucuuga

SEQ ID NO: 918490 - RNA, 19 nt, Artificial Sequence
  Description of Artificial Sequence: Synthetic oligonucleotide
cugcauagauaucaaucug

SEQ ID NO: 918491 - RNA, 19 nt, Artificial Sequence
  Description of Artificial Sequence: Synthetic oligonucleotide
aauacccuuugccuccaaa

SEQ ID NO: 918492 - RNA, 19 nt, Artificial Sequence
  Description of Artificial Sequence: Synthetic oligonucleotide
auacccuuugccuccaaau

SEQ ID NO: 918493 - RNA, 19 nt, Artificial Sequence
  Description of Artificial Sequence: Synthetic oligonucleotide
ugcccgguaucuuggaggc

SEQ ID NO: 918494 - RNA, 19 nt, Artificial Sequence
  Description of Artificial Sequence: Synthetic oligonucleotide
cauguuagaacgggugagc

SEQ ID NO: 918495 - RNA, 19 nt, Artificial Sequence
  Description of Artificial Sequence: Synthetic oligonucleotide
auaauucauagggagggau

SEQ ID NO: 918496 - RNA, 19 nt, Artificial Sequence
  Description of Artificial Sequence: Synthetic oligonucleotide
gggucacaaaaucugcagg

SEQ ID NO: 918497 - RNA, 19 nt, Artificial Sequence
  Description of Artificial Sequence: Synthetic oligonucleotide
ugccgcaagggcgauuucg

SEQ ID NO: 918498 - RNA, 19 nt, Artificial Sequence
  Description of Artificial Sequence: Synthetic oligonucleotide
ucccauuguuccaaaggaa

SEQ ID NO: 918499 - RNA, 19 nt, Artificial Sequence
  Description of Artificial Sequence: Synthetic oligonucleotide
cagacgacccguuucccag

SEQ ID NO: 918500 - RNA, 19 nt, Artificial Sequence
  Description of Artificial Sequence: Synthetic oligonucleotide
ggaaccagcaucgagccug

SEQ ID NO: 918501 - RNA, 19 nt, Artificial Sequence
  Description of Artificial Sequence: Synthetic oligonucleotide
cucaaaacuaucaacuaau

SEQ ID NO: 918502 - RNA, 19 nt, Artificial Sequence
  Description of Artificial Sequence: Synthetic oligonucleotide
uccugauacuguccucugc

SEQ ID NO: 918503 - RNA, 19 nt, Artificial Sequence
  Description of Artificial Sequence: Synthetic oligonucleotide
auguucuaagcugguuggc

SEQ ID NO: 918504 - RNA, 19 nt, Artificial Sequence
  Description of Artificial Sequence: Synthetic oligonucleotide
cauagggagggaucuuuug

SEQ ID NO: 918505 - RNA, 19 nt, Artificial Sequence
  Description of Artificial Sequence: Synthetic oligonucleotide
ucugcccgguaucuuggag

SEQ ID NO: 918506 - RNA, 19 nt, Artificial Sequence
  Description of Artificial Sequence: Synthetic oligonucleotide
acggccaauguccauagua

SEQ ID NO: 918507 - RNA, 19 nt, Artificial Sequence
  Description of Artificial Sequence: Synthetic oligonucleotide
cuggacgaugacuuuagca

SEQ ID NO: 918508 - RNA, 19 nt, Artificial Sequence
  Description of Artificial Sequence: Synthetic oligonucleotide
cucgcaccaaauaacacaa

SEQ ID NO: 918509 - RNA, 19 nt, Artificial Sequence
  Description of Artificial Sequence: Synthetic oligonucleotide
auacuccacauuuugcguu

SEQ ID NO: 918510 - RNA, 19 nt, Artificial Sequence
  Description of Artificial Sequence: Synthetic oligonucleotide
aucaacuaauuuauucaca

SEQ ID NO: 918511 - RNA, 19 nt, Artificial Sequence
  Description of Artificial Sequence: Synthetic oligonucleotide
uuauaaccaagaguaugau

SEQ ID NO: 918512 - RNA, 19 nt, Artificial Sequence
  Description of Artificial Sequence: Synthetic oligonucleotide
cucccauuguuccaaagga

SEQ ID NO: 918513 - RNA, 19 nt, Artificial Sequence
  Description of Artificial Sequence: Synthetic oligonucleotide
caucugcccgguaucuugg

SEQ ID NO: 918514 - RNA, 19 nt, Artificial Sequence
  Description of Artificial Sequence: Synthetic oligonucleotide
guugauaagacaggguuua

SEQ ID NO: 918515 - RNA, 19 nt, Artificial Sequence
  Description of Artificial Sequence: Synthetic oligonucleotide
cugccaugggguuuuauca

SEQ ID NO: 918516 - RNA, 19 nt, Artificial Sequence
  Description of Artificial Sequence: Synthetic oligonucleotide
gucugcaagcuucaaccug

SEQ ID NO: 918517 - RNA, 19 nt, Artificial Sequence
  Description of Artificial Sequence: Synthetic oligonucleotide
uaucggaugcccaguuccu

SEQ ID NO: 918518 - RNA, 19 nt, Artificial Sequence
  Description of Artificial Sequence: Synthetic oligonucleotide
ccauuguuccaaaggaacc

SEQ ID NO: 918519 - RNA, 19 nt, Artificial Sequence
  Description of Artificial Sequence: Synthetic oligonucleotide
ugcuaacuggagguggcag

SEQ ID NO: 918520 - RNA, 19 nt, Artificial Sequence
  Description of Artificial Sequence: Synthetic oligonucleotide
agggcgauuucggucacgg

SEQ ID NO: 918521 - RNA, 19 nt, Artificial Sequence
  Description of Artificial Sequence: Synthetic oligonucleotide
aagcacaguacggccaaug

SEQ ID NO: 918522 - RNA, 19 nt, Artificial Sequence
  Description of Artificial Sequence: Synthetic oligonucleotide
uccugugccgcaagggcga

SEQ ID NO: 918523 - RNA, 19 nt, Artificial Sequence
  Description of Artificial Sequence: Synthetic oligonucleotide
uggccugcccguuagguau

SEQ ID NO: 918524 - RNA, 19 nt, Artificial Sequence
  Description of Artificial Sequence: Synthetic oligonucleotide
uguaucggaugcccaguuc

SEQ ID NO: 918525 - RNA, 19 nt, Artificial Sequence
  Description of Artificial Sequence: Synthetic oligonucleotide
cauguucgcauuugccaug

SEQ ID NO: 918526 - RNA, 19 nt, Artificial Sequence
  Description of Artificial Sequence: Synthetic oligonucleotide
gacgccgaacauauacucc

SEQ ID NO: 918527 - RNA, 19 nt, Artificial Sequence
  Description of Artificial Sequence: Synthetic oligonucleotide
cuagggaaaguaaauucua

SEQ ID NO: 918528 - RNA, 19 nt, Artificial Sequence
  Description of Artificial Sequence: Synthetic oligonucleotide
ucccucgcuuacuauaaaa

SEQ ID NO: 918529 - RNA, 19 nt, Artificial Sequence
  Description of Artificial Sequence: Synthetic oligonucleotide
agcaucgagccugugacga

SEQ ID NO: 918530 - RNA, 19 nt, Artificial Sequence
  Description of Artificial Sequence: Synthetic oligonucleotide
cccauuguuccaaaggaac

SEQ ID NO: 918531 - RNA, 19 nt, Artificial Sequence
  Description of Artificial Sequence: Synthetic oligonucleotide
guucgcauuugccaugcca

SEQ ID NO: 918532 - RNA, 19 nt, Artificial Sequence
  Description of Artificial Sequence: Synthetic oligonucleotide
agucucgcaccaaauaaca

SEQ ID NO: 918533 - RNA, 19 nt, Artificial Sequence
  Description of Artificial Sequence: Synthetic oligonucleotide
gaauucacguuccccugga

SEQ ID NO: 918534 - RNA, 19 nt, Artificial Sequence
  Description of Artificial Sequence: Synthetic oligonucleotide
acacccuuccccaucgggg

SEQ ID NO: 918535 - RNA, 19 nt, Artificial Sequence
  Description of Artificial Sequence: Synthetic oligonucleotide
accaagaguaugauuggca

SEQ ID NO: 918536 - RNA, 19 nt, Artificial Sequence
  Description of Artificial Sequence: Synthetic oligonucleotide
cacacagacgacccguuuc

SEQ ID NO: 918537 - RNA, 19 nt, Artificial Sequence
  Description of Artificial Sequence: Synthetic oligonucleotide
augcgaguuuggcaaaaga

SEQ ID NO: 918538 - RNA, 19 nt, Artificial Sequence
  Description of Artificial Sequence: Synthetic oligonucleotide
ugccaugggguuuuaucaa

SEQ ID NO: 918539 - RNA, 19 nt, Artificial Sequence
  Description of Artificial Sequence: Synthetic oligonucleotide
aggguuuacuugcgucuuc

SEQ ID NO: 918540 - RNA, 19 nt, Artificial Sequence
  Description of Artificial Sequence: Synthetic oligonucleotide
agucacagaaggccuuaca

SEQ ID NO: 918541 - RNA, 19 nt, Artificial Sequence
  Description of Artificial Sequence: Synthetic oligonucleotide
cacauguuagaacggguga

SEQ ID NO: 918542 - RNA, 19 nt, Artificial Sequence
  Description of Artificial Sequence: Synthetic oligonucleotide
guguaauaauucauaggga

SEQ ID NO: 918543 - RNA, 19 nt, Artificial Sequence
  Description of Artificial Sequence: Synthetic oligonucleotide
caucgagccugugacgagg

SEQ ID NO: 918544 - RNA, 19 nt, Artificial Sequence
  Description of Artificial Sequence: Synthetic oligonucleotide
guuagguauccaacugcag

SEQ ID NO: 918545 - RNA, 19 nt, Artificial Sequence
  Description of Artificial Sequence: Synthetic oligonucleotide
caucccgauguaucggaug

SEQ ID NO: 918546 - RNA, 19 nt, Artificial Sequence
  Description of Artificial Sequence: Synthetic oligonucleotide
cuacuuugcuggaaagaga

SEQ ID NO: 918547 - RNA, 19 nt, Artificial Sequence
  Description of Artificial Sequence: Synthetic oligonucleotide
agaccuggaccagaaacga

SEQ ID NO: 918548 - RNA, 19 nt, Artificial Sequence
  Description of Artificial Sequence: Synthetic oligonucleotide
augguagaauacuguguaa

SEQ ID NO: 918549 - RNA, 19 nt, Artificial Sequence
  Description of Artificial Sequence: Synthetic oligonucleotide
auaaugcgaguuuggcaaa

SEQ ID NO: 918550 - RNA, 19 nt, Artificial Sequence
  Description of Artificial Sequence: Synthetic oligonucleotide
gggagggaucuuuuggaag

SEQ ID NO: 918551 - RNA, 19 nt, Artificial Sequence
  Description of Artificial Sequence: Synthetic oligonucleotide
uucuaucuuuagccacuac

SEQ ID NO: 918552 - RNA, 19 nt, Artificial Sequence
  Description of Artificial Sequence: Synthetic oligonucleotide
agaaacgacaaggcauacu

SEQ ID NO: 918553 - RNA, 19 nt, Artificial Sequence
  Description of Artificial Sequence: Synthetic oligonucleotide
aggcaacacuccuuguacu

SEQ ID NO: 918554 - RNA, 19 nt, Artificial Sequence
  Description of Artificial Sequence: Synthetic oligonucleotide
ggaauaagcagcaccuuuc

SEQ ID NO: 918555 - RNA, 19 nt, Artificial Sequence
  Description of Artificial Sequence: Synthetic oligonucleotide
ugcucccucgcuuacuaua

SEQ ID NO: 918556 - RNA, 19 nt, Artificial Sequence
  Description of Artificial Sequence: Synthetic oligonucleotide
cagcugcaauagcaaaucc

SEQ ID NO: 918557 - RNA, 19 nt, Artificial Sequence
  Description of Artificial Sequence: Synthetic oligonucleotide
gcaagggcgauuucgguca

SEQ ID NO: 918558 - RNA, 19 nt, Artificial Sequence
  Description of Artificial Sequence: Synthetic oligonucleotide
ccuggacgaccauagauac

SEQ ID NO: 918559 - RNA, 19 nt, Artificial Sequence
  Description of Artificial Sequence: Synthetic oligonucleotide
gaugccuacgacgccgaac

SEQ ID NO: 918560 - RNA, 19 nt, Artificial Sequence
  Description of Artificial Sequence: Synthetic oligonucleotide
aguacggccaauguccaua

SEQ ID NO: 918561 - RNA, 19 nt, Artificial Sequence
  Description of Artificial Sequence: Synthetic oligonucleotide
agggccaacaguucauguu

SEQ ID NO: 918562 - RNA, 19 nt, Artificial Sequence
  Description of Artificial Sequence: Synthetic oligonucleotide
ucgcauuugccaugccacu

SEQ ID NO: 918563 - RNA, 19 nt, Artificial Sequence
  Description of Artificial Sequence: Synthetic oligonucleotide
aggcauacuccuggccugc

SEQ ID NO: 918564 - RNA, 19 nt, Artificial Sequence
  Description of Artificial Sequence: Synthetic oligonucleotide
augcagucaugaccugcuc

SEQ ID NO: 918565 - RNA, 19 nt, Artificial Sequence
  Description of Artificial Sequence: Synthetic oligonucleotide
acgaggaagguaguucuga

SEQ ID NO: 918566 - RNA, 19 nt, Artificial Sequence
  Description of Artificial Sequence: Synthetic oligonucleotide
ugugccgcaagggcgauuu

SEQ ID NO: 918567 - RNA, 19 nt, Artificial Sequence
  Description of Artificial Sequence: Synthetic oligonucleotide
gaacaugguagaauacugu

SEQ ID NO: 918568 - RNA, 19 nt, Artificial Sequence
  Description of Artificial Sequence: Synthetic oligonucleotide
agacaccugcuccucgcug

SEQ ID NO: 918569 - RNA, 19 nt, Artificial Sequence
  Description of Artificial Sequence: Synthetic oligonucleotide
gccagugaaaguccugggc

SEQ ID NO: 918570 - RNA, 19 nt, Artificial Sequence
  Description of Artificial Sequence: Synthetic oligonucleotide
ggaccagaaacgacaaggc

SEQ ID NO: 918571 - RNA, 19 nt, Artificial Sequence
  Description of Artificial Sequence: Synthetic oligonucleotide
cucaucccgauguaucgga

SEQ ID NO: 918572 - RNA, 19 nt, Artificial Sequence
  Description of Artificial Sequence: Synthetic oligonucleotide
uugauaagacaggguuuac

SEQ ID NO: 918573 - RNA, 19 nt, Artificial Sequence
  Description of Artificial Sequence: Synthetic oligonucleotide
uagaacgggugagccagug

SEQ ID NO: 918574 - RNA, 19 nt, Artificial Sequence
  Description of Artificial Sequence: Synthetic oligonucleotide
uaaugcgaguuuggcaaaa

SEQ ID NO: 918575 - RNA, 19 nt, Artificial Sequence
  Description of Artificial Sequence: Synthetic oligonucleotide
agaacgggugagccaguga

SEQ ID NO: 918576 - RNA, 19 nt, Artificial Sequence
  Description of Artificial Sequence: Synthetic oligonucleotide
caaggcauacuccuggccu

SEQ ID NO: 918577 - RNA, 19 nt, Artificial Sequence
  Description of Artificial Sequence: Synthetic oligonucleotide
ucaucccgauguaucggau

SEQ ID NO: 918578 - RNA, 19 nt, Artificial Sequence
  Description of Artificial Sequence: Synthetic oligonucleotide
ucaaggcguggaugagacc

SEQ ID NO: 918579 - RNA, 19 nt, Artificial Sequence
  Description of Artificial Sequence: Synthetic oligonucleotide
cccucgcuuacuauaaaac

SEQ ID NO: 918580 - RNA, 19 nt, Artificial Sequence
  Description of Artificial Sequence: Synthetic oligonucleotide
guaccugcagaugguuucc

SEQ ID NO: 918581 - RNA, 19 nt, Artificial Sequence
  Description of Artificial Sequence: Synthetic oligonucleotide
ggacuucuaucuuuagcca

SEQ ID NO: 918582 - RNA, 19 nt, Artificial Sequence
  Description of Artificial Sequence: Synthetic oligonucleotide
cagcaucgagccugugacg

SEQ ID NO: 918583 - RNA, 19 nt, Artificial Sequence
  Description of Artificial Sequence: Synthetic oligonucleotide
uuagaacgggugagccagu

SEQ ID NO: 918584 - RNA, 19 nt, Artificial Sequence
  Description of Artificial Sequence: Synthetic oligonucleotide
uggaugagaccuggaccag

SEQ ID NO: 918585 - RNA, 19 nt, Artificial Sequence
  Description of Artificial Sequence: Synthetic oligonucleotide
ccguuagguauccaacugc

SEQ ID NO: 918586 - RNA, 19 nt, Artificial Sequence
  Description of Artificial Sequence: Synthetic oligonucleotide
ggagggucacaaaaucugc

SEQ ID NO: 918587 - RNA, 19 nt, Artificial Sequence
  Description of Artificial Sequence: Synthetic oligonucleotide
cuaauaacagaugcugccu

SEQ ID NO: 918588 - RNA, 19 nt, Artificial Sequence
  Description of Artificial Sequence: Synthetic oligonucleotide
gcucauaaugcgaguuugg

SEQ ID NO: 918589 - RNA, 19 nt, Artificial Sequence
  Description of Artificial Sequence: Synthetic oligonucleotide
uugcgucuuccagagucug

SEQ ID NO: 918590 - RNA, 19 nt, Artificial Sequence
  Description of Artificial Sequence: Synthetic oligonucleotide
auguaucggaugcccaguu

SEQ ID NO: 918591 - RNA, 19 nt, Artificial Sequence
  Description of Artificial Sequence: Synthetic oligonucleotide
caaucacaaucaagggcca

SEQ ID NO: 918592 - RNA, 19 nt, Artificial Sequence
  Description of Artificial Sequence: Synthetic oligonucleotide
aagggcgauuucggucacg

SEQ ID NO: 918593 - RNA, 19 nt, Artificial Sequence
  Description of Artificial Sequence: Synthetic oligonucleotide
ccucgcuuacuauaaaaca

SEQ ID NO: 918594 - RNA, 19 nt, Artificial Sequence
  Description of Artificial Sequence: Synthetic oligonucleotide
agcuaauuccuuggauaca

SEQ ID NO: 918595 - RNA, 19 nt, Artificial Sequence
  Description of Artificial Sequence: Synthetic oligonucleotide
accuggacgaccauagaua

SEQ ID NO: 918596 - RNA, 19 nt, Artificial Sequence
  Description of Artificial Sequence: Synthetic oligonucleotide
uguucgcauuugccaugcc

SEQ ID NO: 918597 - RNA, 19 nt, Artificial Sequence
  Description of Artificial Sequence: Synthetic oligonucleotide
ucacggggaugccuacgac

SEQ ID NO: 918598 - RNA, 19 nt, Artificial Sequence
  Description of Artificial Sequence: Synthetic oligonucleotide
uggccgggcagagaacuug

SEQ ID NO: 918599 - RNA, 19 nt, Artificial Sequence
  Description of Artificial Sequence: Synthetic oligonucleotide
agcuguuuagaaacagcau

SEQ ID NO: 918600 - RNA, 19 nt, Artificial Sequence
  Description of Artificial Sequence: Synthetic oligonucleotide
gauuucggucacggggaug

SEQ ID NO: 918601 - RNA, 19 nt, Artificial Sequence
  Description of Artificial Sequence: Synthetic oligonucleotide
uuccccuggagggucacaa

SEQ ID NO: 918602 - RNA, 19 nt, Artificial Sequence
  Description of Artificial Sequence: Synthetic oligonucleotide
uaacaagcaccuggacgac

SEQ ID NO: 918603 - RNA, 19 nt, Artificial Sequence
  Description of Artificial Sequence: Synthetic oligonucleotide
ggguuuacuugcgucuucc

SEQ ID NO: 918604 - RNA, 19 nt, Artificial Sequence
  Description of Artificial Sequence: Synthetic oligonucleotide
cgcaccaaauaacacaauc

SEQ ID NO: 918605 - RNA, 19 nt, Artificial Sequence
  Description of Artificial Sequence: Synthetic oligonucleotide
cuggguaacuguucuugaa

SEQ ID NO: 918606 - RNA, 19 nt, Artificial Sequence
  Description of Artificial Sequence: Synthetic oligonucleotide
gacccauuggaggggcagc

SEQ ID NO: 918607 - RNA, 19 nt, Artificial Sequence
  Description of Artificial Sequence: Synthetic oligonucleotide
ccaugcuaacuggaggugg

SEQ ID NO: 918608 - RNA, 19 nt, Artificial Sequence
  Description of Artificial Sequence: Synthetic oligonucleotide
acgacaaggcauacuccug

SEQ ID NO: 918609 - RNA, 19 nt, Artificial Sequence
  Description of Artificial Sequence: Synthetic oligonucleotide
uucggucacggggaugccu

SEQ ID NO: 918610 - RNA, 19 nt, Artificial Sequence
  Description of Artificial Sequence: Synthetic oligonucleotide
caacacuccuuguacuuua

SEQ ID NO: 918611 - RNA, 19 nt, Artificial Sequence
  Description of Artificial Sequence: Synthetic oligonucleotide
ccaugggguuuuaucaaac

SEQ ID NO: 918612 - RNA, 19 nt, Artificial Sequence
  Description of Artificial Sequence: Synthetic oligonucleotide
gaugauugucagggacaac

SEQ ID NO: 918613 - RNA, 19 nt, Artificial Sequence
  Description of Artificial Sequence: Synthetic oligonucleotide
ugccacucaaggcguggau

SEQ ID NO: 918614 - RNA, 19 nt, Artificial Sequence
  Description of Artificial Sequence: Synthetic oligonucleotide
gucucgcaccaaauaacac

SEQ ID NO: 918615 - RNA, 19 nt, Artificial Sequence
  Description of Artificial Sequence: Synthetic oligonucleotide
acgacgccgaacauauacu

SEQ ID NO: 918616 - RNA, 19 nt, Artificial Sequence
  Description of Artificial Sequence: Synthetic oligonucleotide
cuugguagauuccauuauu

SEQ ID NO: 918617 - RNA, 19 nt, Artificial Sequence
  Description of Artificial Sequence: Synthetic oligonucleotide
caugggguuuuaucaaacu

SEQ ID NO: 918618 - RNA, 19 nt, Artificial Sequence
  Description of Artificial Sequence: Synthetic oligonucleotide
gauguaucggaugcccagu

SEQ ID NO: 918619 - RNA, 19 nt, Artificial Sequence
  Description of Artificial Sequence: Synthetic oligonucleotide
ccucaaaacuaucaacuaa

SEQ ID NO: 918620 - RNA, 19 nt, Artificial Sequence
  Description of Artificial Sequence: Synthetic oligonucleotide
acgacccguuucccaggac

SEQ ID NO: 918621 - RNA, 19 nt, Artificial Sequence
  Description of Artificial Sequence: Synthetic oligonucleotide
ucgcaccaaauaacacaau

SEQ ID NO: 918622 - RNA, 19 nt, Artificial Sequence
  Description of Artificial Sequence: Synthetic oligonucleotide
ucccgauguaucggaugcc

SEQ ID NO: 918623 - RNA, 19 nt, Artificial Sequence
  Description of Artificial Sequence: Synthetic oligonucleotide
gcacaguacggccaauguc

SEQ ID NO: 918624 - RNA, 19 nt, Artificial Sequence
  Description of Artificial Sequence: Synthetic oligonucleotide
cccgguaucuuggaggcag

SEQ ID NO: 918625 - RNA, 19 nt, Artificial Sequence
  Description of Artificial Sequence: Synthetic oligonucleotide
agaguaugauuggcaaguu

SEQ ID NO: 918626 - RNA, 19 nt, Artificial Sequence
  Description of Artificial Sequence: Synthetic oligonucleotide
gaccuggaccagaaacgac

SEQ ID NO: 918627 - RNA, 19 nt, Artificial Sequence
  Description of Artificial Sequence: Synthetic oligonucleotide
cccguuagguauccaacug

SEQ ID NO: 918628 - RNA, 19 nt, Artificial Sequence
  Description of Artificial Sequence: Synthetic oligonucleotide
gcguggaugagaccuggac

SEQ ID NO: 918629 - RNA, 19 nt, Artificial Sequence
  Description of Artificial Sequence: Synthetic oligonucleotide
ccucugcaugggaauaagc

SEQ ID NO: 918630 - RNA, 19 nt, Artificial Sequence
  Description of Artificial Sequence: Synthetic oligonucleotide
gccgcaagggcgauuucgg

SEQ ID NO: 918631 - RNA, 19 nt, Artificial Sequence
  Description of Artificial Sequence: Synthetic oligonucleotide
ugggaauaagcagcaccuu

SEQ ID NO: 918632 - RNA, 19 nt, Artificial Sequence
  Description of Artificial Sequence: Synthetic oligonucleotide
gggguuucggccaugcuaa

SEQ ID NO: 918633 - RNA, 19 nt, Artificial Sequence
  Description of Artificial Sequence: Synthetic oligonucleotide
cgcuuacuauaaaacaguc

SEQ ID NO: 918634 - RNA, 19 nt, Artificial Sequence
  Description of Artificial Sequence: Synthetic oligonucleotide
agugaaaguccugggccuu

SEQ ID NO: 918635 - RNA, 19 nt, Artificial Sequence
  Description of Artificial Sequence: Synthetic oligonucleotide
cucagagaguuuuggaguu

SEQ ID NO: 918636 - RNA, 19 nt, Artificial Sequence
  Description of Artificial Sequence: Synthetic oligonucleotide
uggaguucuucugguguuu

SEQ ID NO: 918637 - RNA, 19 nt, Artificial Sequence
  Description of Artificial Sequence: Synthetic oligonucleotide
ccagaaacgacaaggcaua

SEQ ID NO: 918638 - RNA, 19 nt, Artificial Sequence
  Description of Artificial Sequence: Synthetic oligonucleotide
ggcaguccaaaauguaaua

SEQ ID NO: 918639 - RNA, 19 nt, Artificial Sequence
  Description of Artificial Sequence: Synthetic oligonucleotide
uccuuggauacagcuucau

SEQ ID NO: 918640 - RNA, 19 nt, Artificial Sequence
  Description of Artificial Sequence: Synthetic oligonucleotide
cacagacgacccguuuccc

SEQ ID NO: 918641 - RNA, 19 nt, Artificial Sequence
  Description of Artificial Sequence: Synthetic oligonucleotide
agaugcugccuuacauaca

SEQ ID NO: 918642 - RNA, 19 nt, Artificial Sequence
  Description of Artificial Sequence: Synthetic oligonucleotide
gccaacaguucauguucgc

SEQ ID NO: 918643 - RNA, 19 nt, Artificial Sequence
  Description of Artificial Sequence: Synthetic oligonucleotide
uacggccaauguccauagu

SEQ ID NO: 918644 - RNA, 19 nt, Artificial Sequence
  Description of Artificial Sequence: Synthetic oligonucleotide
ccauagauacugcuccuca

SEQ ID NO: 918645 - RNA, 19 nt, Artificial Sequence
  Description of Artificial Sequence: Synthetic oligonucleotide
ccaguuuagucucgcacca

SEQ ID NO: 918646 - RNA, 19 nt, Artificial Sequence
  Description of Artificial Sequence: Synthetic oligonucleotide
guuggccgggcagagaacu

SEQ ID NO: 918647 - RNA, 19 nt, Artificial Sequence
  Description of Artificial Sequence: Synthetic oligonucleotide
caauuuuggcaguguggua

SEQ ID NO: 918648 - RNA, 19 nt, Artificial Sequence
  Description of Artificial Sequence: Synthetic oligonucleotide
gguuuacuugcgucuucca

SEQ ID NO: 918649 - RNA, 19 nt, Artificial Sequence
  Description of Artificial Sequence: Synthetic oligonucleotide
gguaacuguucuugaacau

SEQ ID NO: 918650 - RNA, 19 nt, Artificial Sequence
  Description of Artificial Sequence: Synthetic oligonucleotide
gcgauuucggucacgggga

SEQ ID NO: 918651 - RNA, 19 nt, Artificial Sequence
  Description of Artificial Sequence: Synthetic oligonucleotide
cuugcgucuuccagagucu

SEQ ID NO: 918652 - RNA, 19 nt, Artificial Sequence
  Description of Artificial Sequence: Synthetic oligonucleotide
ccuuacauacagcaggggu

SEQ ID NO: 918653 - RNA, 19 nt, Artificial Sequence
  Description of Artificial Sequence: Synthetic oligonucleotide
ucgagccugugacgaggaa

SEQ ID NO: 918654 - RNA, 19 nt, Artificial Sequence
  Description of Artificial Sequence: Synthetic oligonucleotide
gcuuacuauaaaacagucu

SEQ ID NO: 918655 - RNA, 19 nt, Artificial Sequence
  Description of Artificial Sequence: Synthetic oligonucleotide
aucgagccugugacgagga

SEQ ID NO: 918656 - RNA, 19 nt, Artificial Sequence
  Description of Artificial Sequence: Synthetic oligonucleotide
guucaaucaugauguugau

SEQ ID NO: 918657 - RNA, 19 nt, Artificial Sequence
  Description of Artificial Sequence: Synthetic oligonucleotide
uuggccgggcagagaacuu

SEQ ID NO: 918658 - RNA, 19 nt, Artificial Sequence
  Description of Artificial Sequence: Synthetic oligonucleotide
caccuggacgaccauagau

SEQ ID NO: 918659 - RNA, 19 nt, Artificial Sequence
  Description of Artificial Sequence: Synthetic oligonucleotide
ccuacgacgccgaacauau

SEQ ID NO: 918660 - RNA, 19 nt, Artificial Sequence
  Description of Artificial Sequence: Synthetic oligonucleotide
caagggcgauuucggucac

SEQ ID NO: 918661 - RNA, 19 nt, Artificial Sequence
  Description of Artificial Sequence: Synthetic oligonucleotide
uccccuggagggucacaaa

SEQ ID NO: 918662 - RNA, 19 nt, Artificial Sequence
  Description of Artificial Sequence: Synthetic oligonucleotide
gcaucgagccugugacgag

SEQ ID NO: 918663 - RNA, 19 nt, Artificial Sequence
  Description of Artificial Sequence: Synthetic oligonucleotide
ggucacggggaugccuacg

SEQ ID NO: 918664 - RNA, 19 nt, Artificial Sequence
  Description of Artificial Sequence: Synthetic oligonucleotide
cgacgccgaacauauacuc

SEQ ID NO: 918665 - RNA, 19 nt, Artificial Sequence
  Description of Artificial Sequence: Synthetic oligonucleotide
cuucuaucuuuagccacua

SEQ ID NO: 918666 - RNA, 19 nt, Artificial Sequence
  Description of Artificial Sequence: Synthetic oligonucleotide
gggcgauuucggucacggg

SEQ ID NO: 918667 - RNA, 19 nt, Artificial Sequence
  Description of Artificial Sequence: Synthetic oligonucleotide
ugccuacgacgccgaacau

SEQ ID NO: 918668 - RNA, 19 nt, Artificial Sequence
  Description of Artificial Sequence: Synthetic oligonucleotide
acuccuggccugcccguua

SEQ ID NO: 918669 - RNA, 19 nt, Artificial Sequence
  Description of Artificial Sequence: Synthetic oligonucleotide
gccaugcuaacuggaggug

SEQ ID NO: 918670 - RNA, 19 nt, Artificial Sequence
  Description of Artificial Sequence: Synthetic oligonucleotide
ccaacaguucauguucgca

SEQ ID NO: 918671 - RNA, 19 nt, Artificial Sequence
  Description of Artificial Sequence: Synthetic oligonucleotide
ccuggaccagaaacgacaa

SEQ ID NO: 918672 - RNA, 19 nt, Artificial Sequence
  Description of Artificial Sequence: Synthetic oligonucleotide
ggaugagaccuggaccaga

SEQ ID NO: 918673 - RNA, 19 nt, Artificial Sequence
  Description of Artificial Sequence: Synthetic oligonucleotide
cuggcugagcuuacacagu

SEQ ID NO: 918674 - RNA, 19 nt, Artificial Sequence
  Description of Artificial Sequence: Synthetic oligonucleotide
aaccagcaucgagccugug

SEQ ID NO: 918675 - RNA, 19 nt, Artificial Sequence
  Description of Artificial Sequence: Synthetic oligonucleotide
gcccguuagguauccaacu

SEQ ID NO: 918676 - RNA, 19 nt, Artificial Sequence
  Description of Artificial Sequence: Synthetic oligonucleotide
gggguuuuaucaaacuguu

SEQ ID NO: 918677 - RNA, 19 nt, Artificial Sequence
  Description of Artificial Sequence: Synthetic oligonucleotide
cuggacgaccauagauacu

SEQ ID NO: 918678 - RNA, 19 nt, Artificial Sequence
  Description of Artificial Sequence: Synthetic oligonucleotide
gcucccucgcuuacuauaa

SEQ ID NO: 918679 - RNA, 19 nt, Artificial Sequence
  Description of Artificial Sequence: Synthetic oligonucleotide
gaaccagcaucgagccugu

SEQ ID NO: 918680 - RNA, 19 nt, Artificial Sequence
  Description of Artificial Sequence: Synthetic oligonucleotide
gacccguuucccaggacuu

SEQ ID NO: 918681 - RNA, 19 nt, Artificial Sequence
  Description of Artificial Sequence: Synthetic oligonucleotide
ccgauguaucggaugccca

SEQ ID NO: 918682 - RNA, 19 nt, Artificial Sequence
  Description of Artificial Sequence: Synthetic oligonucleotide
cucccucgcuuacuauaaa

SEQ ID NO: 918683 - RNA, 19 nt, Artificial Sequence
  Description of Artificial Sequence: Synthetic oligonucleotide
ggaucuggcugagcuuaca

SEQ ID NO: 918684 - RNA, 19 nt, Artificial Sequence
  Description of Artificial Sequence: Synthetic oligonucleotide
caguuuagucucgcaccaa

SEQ ID NO: 918685 - RNA, 19 nt, Artificial Sequence
  Description of Artificial Sequence: Synthetic oligonucleotide
ggaacugccaugggguuuu

SEQ ID NO: 918686 - RNA, 19 nt, Artificial Sequence
  Description of Artificial Sequence: Synthetic oligonucleotide
cugggccuuccgugugcuc

SEQ ID NO: 918687 - RNA, 19 nt, Artificial Sequence
  Description of Artificial Sequence: Synthetic oligonucleotide
cgcauuugccaugccacuc

SEQ ID NO: 918688 - RNA, 19 nt, Artificial Sequence
  Description of Artificial Sequence: Synthetic oligonucleotide
cugugacgaggaagguagu

SEQ ID NO: 918689 - RNA, 19 nt, Artificial Sequence
  Description of Artificial Sequence: Synthetic oligonucleotide
gccuacgacgccgaacaua

SEQ ID NO: 918690 - RNA, 19 nt, Artificial Sequence
  Description of Artificial Sequence: Synthetic oligonucleotide
cuacgacgccgaacauaua

SEQ ID NO: 918691 - RNA, 19 nt, Artificial Sequence
  Description of Artificial Sequence: Synthetic oligonucleotide
gccuuacauuauuccccaa

SEQ ID NO: 918692 - RNA, 19 nt, Artificial Sequence
  Description of Artificial Sequence: Synthetic oligonucleotide
gugccgcaagggcgauuuc

SEQ ID NO: 918693 - RNA, 19 nt, Artificial Sequence
  Description of Artificial Sequence: Synthetic oligonucleotide
ggaugccuacgacgccgaa

SEQ ID NO: 918694 - RNA, 19 nt, Artificial Sequence
  Description of Artificial Sequence: Synthetic oligonucleotide
cggggaugccuacgacgcc

SEQ ID NO: 918695 - RNA, 19 nt, Artificial Sequence
  Description of Artificial Sequence: Synthetic oligonucleotide
gaacugccaugggguuuua

SEQ ID NO: 918696 - RNA, 19 nt, Artificial Sequence
  Description of Artificial Sequence: Synthetic oligonucleotide
cacaucugcccgguaucuu

SEQ ID NO: 918697 - RNA, 19 nt, Artificial Sequence
  Description of Artificial Sequence: Synthetic oligonucleotide
gcauagcaagccgcuugcu

SEQ ID NO: 918698 - RNA, 19 nt, Artificial Sequence
  Description of Artificial Sequence: Synthetic oligonucleotide
cggucacggggaugccuac

SEQ ID NO: 918699 - RNA, 19 nt, Artificial Sequence
  Description of Artificial Sequence: Synthetic oligonucleotide
ccgcaagggcgauuucggu

SEQ ID NO: 918700 - RNA, 19 nt, Artificial Sequence
  Description of Artificial Sequence: Synthetic oligonucleotide
ccgguaucuuggaggcagu

SEQ ID NO: 918701 - RNA, 19 nt, Artificial Sequence
  Description of Artificial Sequence: Synthetic oligonucleotide
ccugcccguuagguaucca

SEQ ID NO: 918702 - RNA, 19 nt, Artificial Sequence
  Description of Artificial Sequence: Synthetic oligonucleotide
cgauuucggucacggggau

SEQ ID NO: 918703 - RNA, 19 nt, Artificial Sequence
  Description of Artificial Sequence: Synthetic oligonucleotide
cugugccgcaagggcgauu

SEQ ID NO: 918704 - RNA, 19 nt, Artificial Sequence
  Description of Artificial Sequence: Synthetic oligonucleotide
ccccaucggggugggcaaa

SEQ ID NO: 918705 - RNA, 19 nt, Artificial Sequence
  Description of Artificial Sequence: Synthetic oligonucleotide
ccugugccgcaagggcgau

SEQ ID NO: 918706 - RNA, 19 nt, Artificial Sequence
  Description of Artificial Sequence: Synthetic oligonucleotide
uuuaguacaugaaacagag

SEQ ID NO: 918707 - RNA, 19 nt, Artificial Sequence
  Description of Artificial Sequence: Synthetic oligonucleotide
uggaguauuacauagacca

SEQ ID NO: 918708 - RNA, 19 nt, Artificial Sequence
  Description of Artificial Sequence: Synthetic oligonucleotide
aucaauaccuaacauggcc

SEQ ID NO: 918709 - RNA, 19 nt, Artificial Sequence
  Description of Artificial Sequence: Synthetic oligonucleotide
uucaacacuggauuuaucg

SEQ ID NO: 918710 - RNA, 19 nt, Artificial Sequence
  Description of Artificial Sequence: Synthetic oligonucleotide
aauacuuggugugagaauc

SEQ ID NO: 918711 - RNA, 19 nt, Artificial Sequence
  Description of Artificial Sequence: Synthetic oligonucleotide
aaaauuaccuucaaaauga

SEQ ID NO: 918712 - RNA, 19 nt, Artificial Sequence
  Description of Artificial Sequence: Synthetic oligonucleotide
aagcauaauguauagaggu

SEQ ID NO: 918713 - RNA, 19 nt, Artificial Sequence
  Description of Artificial Sequence: Synthetic oligonucleotide
gauuuaucgaaugacauag

SEQ ID NO: 918714 - RNA, 19 nt, Artificial Sequence
  Description of Artificial Sequence: Synthetic oligonucleotide
acauuugucaguuacaagu

SEQ ID NO: 918715 - RNA, 19 nt, Artificial Sequence
  Description of Artificial Sequence: Synthetic oligonucleotide
agaaguuacauuuaaugug

SEQ ID NO: 918716 - RNA, 19 nt, Artificial Sequence
  Description of Artificial Sequence: Synthetic oligonucleotide
uacuuucuacacaagaggg

SEQ ID NO: 918717 - RNA, 19 nt, Artificial Sequence
  Description of Artificial Sequence: Synthetic oligonucleotide
acauccuauaaccuguucc

SEQ ID NO: 918718 - RNA, 19 nt, Artificial Sequence
  Description of Artificial Sequence: Synthetic oligonucleotide
ucaauaccuaacauggccg

SEQ ID NO: 918719 - RNA, 19 nt, Artificial Sequence
  Description of Artificial Sequence: Synthetic oligonucleotide
augaugauaggugagaacg

SEQ ID NO: 918720 - RNA, 19 nt, Artificial Sequence
  Description of Artificial Sequence: Synthetic oligonucleotide
cuagaaguuacauuuaaug

SEQ ID NO: 918721 - RNA, 19 nt, Artificial Sequence
  Description of Artificial Sequence: Synthetic oligonucleotide
aauguauagagguucauua

SEQ ID NO: 918722 - RNA, 19 nt, Artificial Sequence
  Description of Artificial Sequence: Synthetic oligonucleotide
aggauugccaacuucugcc

SEQ ID NO: 918723 - RNA, 19 nt, Artificial Sequence
  Description of Artificial Sequence: Synthetic oligonucleotide
uacgcugaaauuuuagagg

SEQ ID NO: 918724 - RNA, 19 nt, Artificial Sequence
  Description of Artificial Sequence: Synthetic oligonucleotide
uaagcauaauguauagagg

SEQ ID NO: 918725 - RNA, 19 nt, Artificial Sequence
  Description of Artificial Sequence: Synthetic oligonucleotide
aguucuaucuuguugaggu

SEQ ID NO: 918726 - RNA, 19 nt, Artificial Sequence
  Description of Artificial Sequence: Synthetic oligonucleotide
aaccuauuuacacuaagga

SEQ ID NO: 918727 - RNA, 19 nt, Artificial Sequence
  Description of Artificial Sequence: Synthetic oligonucleotide
uuacguuuaauacuuggug

SEQ ID NO: 918728 - RNA, 19 nt, Artificial Sequence
  Description of Artificial Sequence: Synthetic oligonucleotide
aacgaauucugagaugacc

SEQ ID NO: 918729 - RNA, 19 nt, Artificial Sequence
  Description of Artificial Sequence: Synthetic oligonucleotide
aaggauugccaacuucugc

SEQ ID NO: 918730 - RNA, 19 nt, Artificial Sequence
  Description of Artificial Sequence: Synthetic oligonucleotide
  modified_base (3)..(3): a, c, u, g, unknown or other
ucngcauucuuucuuagca

SEQ ID NO: 918731 - RNA, 19 nt, Artificial Sequence
  Description of Artificial Sequence: Synthetic oligonucleotide
auuaccuucaaaaugaagu

SEQ ID NO: 918732 - RNA, 19 nt, Artificial Sequence
  Description of Artificial Sequence: Synthetic oligonucleotide
ucuaucaugauuagugaga

SEQ ID NO: 918733 - RNA, 19 nt, Artificial Sequence
  Description of Artificial Sequence: Synthetic oligonucleotide
ucguuuguaaaccuccagg

SEQ ID NO: 918734 - RNA, 19 nt, Artificial Sequence
  Description of Artificial Sequence: Synthetic oligonucleotide
uauaaccuguuccagcuag

SEQ ID NO: 918735 - RNA, 19 nt, Artificial Sequence
  Description of Artificial Sequence: Synthetic oligonucleotide
aggauaaacuaucagauaa

SEQ ID NO: 918736 - RNA, 19 nt, Artificial Sequence
  Description of Artificial Sequence: Synthetic oligonucleotide
uagaaguuacauuuaaugu

SEQ ID NO: 918737 - RNA, 19 nt, Artificial Sequence
  Description of Artificial Sequence: Synthetic oligonucleotide
cuuggugugagaaucaaug

SEQ ID NO: 918738 - RNA, 19 nt, Artificial Sequence
  Description of Artificial Sequence: Synthetic oligonucleotide
uacacuaaggacaaacacu

SEQ ID NO: 918739 - RNA, 19 nt, Artificial Sequence
  Description of Artificial Sequence: Synthetic oligonucleotide
uuaaauuuauuuagggcuc

SEQ ID NO: 918740 - RNA, 19 nt, Artificial Sequence
  Description of Artificial Sequence: Synthetic oligonucleotide
augauuagugagaucaucc

SEQ ID NO: 918741 - RNA, 19 nt, Artificial Sequence
  Description of Artificial Sequence: Synthetic oligonucleotide
uguaugcuaaauaaauaac

SEQ ID NO: 918742 - RNA, 19 nt, Artificial Sequence
  Description of Artificial Sequence: Synthetic oligonucleotide
aaaccuauuuacacuaagg

SEQ ID NO: 918743 - RNA, 19 nt, Artificial Sequence
  Description of Artificial Sequence: Synthetic oligonucleotide
agauaaacuaucuaagcau

SEQ ID NO: 918744 - RNA, 19 nt, Artificial Sequence
  Description of Artificial Sequence: Synthetic oligonucleotide
gaagagaugacuuggcaac

SEQ ID NO: 918745 - RNA, 19 nt, Artificial Sequence
  Description of Artificial Sequence: Synthetic oligonucleotide
gauggaguauuacauagac

SEQ ID NO: 918746 - RNA, 19 nt, Artificial Sequence
  Description of Artificial Sequence: Synthetic oligonucleotide
uuuacguuuaauacuuggu

SEQ ID NO: 918747 - RNA, 19 nt, Artificial Sequence
  Description of Artificial Sequence: Synthetic oligonucleotide
aaucuaucaugauuaguga

SEQ ID NO: 918748 - RNA, 19 nt, Artificial Sequence
  Description of Artificial Sequence: Synthetic oligonucleotide
agaaccuuuguaccagacc

SEQ ID NO: 918749 - RNA, 19 nt, Artificial Sequence
  Description of Artificial Sequence: Synthetic oligonucleotide
acgaauucugagaugaccc

SEQ ID NO: 918750 - RNA, 19 nt, Artificial Sequence
  Description of Artificial Sequence: Synthetic oligonucleotide
aacuaucuaagcauaaugu

SEQ ID NO: 918751 - RNA, 19 nt, Artificial Sequence
  Description of Artificial Sequence: Synthetic oligonucleotide
aaguuaauucaacacugga

SEQ ID NO: 918752 - RNA, 19 nt, Artificial Sequence
  Description of Artificial Sequence: Synthetic oligonucleotide
guaacaucggacuccaaag

SEQ ID NO: 918753 - RNA, 19 nt, Artificial Sequence
  Description of Artificial Sequence: Synthetic oligonucleotide
uuaucgaaugacauagacu

SEQ ID NO: 918754 - RNA, 19 nt, Artificial Sequence
  Description of Artificial Sequence: Synthetic oligonucleotide
agaaucaauggugauacag

SEQ ID NO: 918755 - RNA, 19 nt, Artificial Sequence
  Description of Artificial Sequence: Synthetic oligonucleotide
uaucuaagcauaauguaua

SEQ ID NO: 918756 - RNA, 19 nt, Artificial Sequence
  Description of Artificial Sequence: Synthetic oligonucleotide
uacguuuaauacuuggugu

SEQ ID NO: 918757 - RNA, 19 nt, Artificial Sequence
  Description of Artificial Sequence: Synthetic oligonucleotide
uucugcuagauuuaaauuu

SEQ ID NO: 918758 - RNA, 19 nt, Artificial Sequence
  Description of Artificial Sequence: Synthetic oligonucleotide
uguuuuaccuguauugauc

SEQ ID NO: 918759 - RNA, 19 nt, Artificial Sequence
  Description of Artificial Sequence: Synthetic oligonucleotide
guacgcugaaauuuuagag

SEQ ID NO: 918760 - RNA, 19 nt, Artificial Sequence
  Description of Artificial Sequence: Synthetic oligonucleotide
aaagucuaguaguuccaag

SEQ ID NO: 918761 - RNA, 19 nt, Artificial Sequence
  Description of Artificial Sequence: Synthetic oligonucleotide
acuaaggacaaacacuaca

SEQ ID NO: 918762 - RNA, 19 nt, Artificial Sequence
  Description of Artificial Sequence: Synthetic oligonucleotide
uucaccucaagauuucuca

SEQ ID NO: 918763 - RNA, 19 nt, Artificial Sequence
  Description of Artificial Sequence: Synthetic oligonucleotide
aaaacuugaauuaccgggu

SEQ ID NO: 918764 - RNA, 19 nt, Artificial Sequence
  Description of Artificial Sequence: Synthetic oligonucleotide
agaacgaauucugagauga

SEQ ID NO: 918765 - RNA, 19 nt, Artificial Sequence
  Description of Artificial Sequence: Synthetic oligonucleotide
uuggcaacaguucaaaguu

SEQ ID NO: 918766 - RNA, 19 nt, Artificial Sequence
  Description of Artificial Sequence: Synthetic oligonucleotide
acuuaauuugaccaucaga

SEQ ID NO: 918767 - RNA, 19 nt, Artificial Sequence
  Description of Artificial Sequence: Synthetic oligonucleotide
uuaccucaaaauucaagug

SEQ ID NO: 918768 - RNA, 19 nt, Artificial Sequence
  Description of Artificial Sequence: Synthetic oligonucleotide
uggugguuuccuaagaacu

SEQ ID NO: 918769 - RNA, 19 nt, Artificial Sequence
  Description of Artificial Sequence: Synthetic oligonucleotide
ugagguguaacagacggug

SEQ ID NO: 918770 - RNA, 19 nt, Artificial Sequence
  Description of Artificial Sequence: Synthetic oligonucleotide
uuuacuuguugguaguagu

SEQ ID NO: 918771 - RNA, 19 nt, Artificial Sequence
  Description of Artificial Sequence: Synthetic oligonucleotide
aacuuagucaucauucuga

SEQ ID NO: 918772 - RNA, 19 nt, Artificial Sequence
  Description of Artificial Sequence: Synthetic oligonucleotide
gugguuuccacucaugaug

SEQ ID NO: 918773 - RNA, 19 nt, Artificial Sequence
  Description of Artificial Sequence: Synthetic oligonucleotide
agucuaguaguuccaagag

SEQ ID NO: 918774 - RNA, 19 nt, Artificial Sequence
  Description of Artificial Sequence: Synthetic oligonucleotide
ugcuuagcgagccucuggg

SEQ ID NO: 918775 - RNA, 19 nt, Artificial Sequence
  Description of Artificial Sequence: Synthetic oligonucleotide
cuuguaucaaagugaacug

SEQ ID NO: 918776 - RNA, 19 nt, Artificial Sequence
  Description of Artificial Sequence: Synthetic oligonucleotide
aacuuaauuugaccaucag

SEQ ID NO: 918777 - RNA, 19 nt, Artificial Sequence
  Description of Artificial Sequence: Synthetic oligonucleotide
gaaguuaauucaacacugg

SEQ ID NO: 918778 - RNA, 19 nt, Artificial Sequence
  Description of Artificial Sequence: Synthetic oligonucleotide
uguagaauugcugcugaag

SEQ ID NO: 918779 - RNA, 19 nt, Artificial Sequence
  Description of Artificial Sequence: Synthetic oligonucleotide
ugauaggugagaacgaauu

SEQ ID NO: 918780 - RNA, 19 nt, Artificial Sequence
  Description of Artificial Sequence: Synthetic oligonucleotide
acacuuuccggccacugac

SEQ ID NO: 918781 - RNA, 19 nt, Artificial Sequence
  Description of Artificial Sequence: Synthetic oligonucleotide
  modified_base (16)..(16): a, c, u, g, unknown or other
uugcucauucuuuucngca

SEQ ID NO: 918782 - RNA, 19 nt, Artificial Sequence
  Description of Artificial Sequence: Synthetic oligonucleotide
uuauuuagggcuccauuaa

SEQ ID NO: 918783 - RNA, 19 nt, Artificial Sequence
  Description of Artificial Sequence: Synthetic oligonucleotide
uggauuuaucgaaugacau

SEQ ID NO: 918784 - RNA, 19 nt, Artificial Sequence
  Description of Artificial Sequence: Synthetic oligonucleotide
guaugaaugcaacuuaguc

SEQ ID NO: 918785 - RNA, 19 nt, Artificial Sequence
  Description of Artificial Sequence: Synthetic oligonucleotide
  modified_base (9)..(9): a, c, u, g, unknown or other
uucuuuucngcauucuuuc

SEQ ID NO: 918786 - RNA, 19 nt, Artificial Sequence
  Description of Artificial Sequence: Synthetic oligonucleotide
acguuuaauacuuggugug

SEQ ID NO: 918787 - RNA, 19 nt, Artificial Sequence
  Description of Artificial Sequence: Synthetic oligonucleotide
ucauccaagggaaacuuaa

SEQ ID NO: 918788 - RNA, 19 nt, Artificial Sequence
  Description of Artificial Sequence: Synthetic oligonucleotide
uaggugagaacgaauucug

SEQ ID NO: 918789 - RNA, 19 nt, Artificial Sequence
  Description of Artificial Sequence: Synthetic oligonucleotide
aaguuuaauuauuccuccu

SEQ ID NO: 918790 - RNA, 19 nt, Artificial Sequence
  Description of Artificial Sequence: Synthetic oligonucleotide
  modified_base (18)..(18): a, c, u, g, unknown or other
auuugcucauucuuuucng

SEQ ID NO: 918791 - RNA, 19 nt, Artificial Sequence
  Description of Artificial Sequence: Synthetic oligonucleotide
gaccuaauuuaguacauga

SEQ ID NO: 918792 - RNA, 19 nt, Artificial Sequence
  Description of Artificial Sequence: Synthetic oligonucleotide
uuaauacuuggugugagaa

SEQ ID NO: 918793 - RNA, 19 nt, Artificial Sequence
  Description of Artificial Sequence: Synthetic oligonucleotide
uggugugagaaucaauggu

SEQ ID NO: 918794 - RNA, 19 nt, Artificial Sequence
  Description of Artificial Sequence: Synthetic oligonucleotide
acgcugaaauuuuagaggu

SEQ ID NO: 918795 - RNA, 19 nt, Artificial Sequence
  Description of Artificial Sequence: Synthetic oligonucleotide
ccuauuuacacuaaggaca

SEQ ID NO: 918796 - RNA, 19 nt, Artificial Sequence
  Description of Artificial Sequence: Synthetic oligonucleotide
aacaucggacuccaaagaa

SEQ ID NO: 918797 - RNA, 19 nt, Artificial Sequence
  Description of Artificial Sequence: Synthetic oligonucleotide
ucgaaugacauagacuucu

SEQ ID NO: 918798 - RNA, 19 nt, Artificial Sequence
  Description of Artificial Sequence: Synthetic oligonucleotide
uucacgaccuaauuuagua

SEQ ID NO: 918799 - RNA, 19 nt, Artificial Sequence
  Description of Artificial Sequence: Synthetic oligonucleotide
uuuaauacuuggugugaga

SEQ ID NO: 918800 - RNA, 19 nt, Artificial Sequence
  Description of Artificial Sequence: Synthetic oligonucleotide
aguaacaucggacuccaaa

SEQ ID NO: 918801 - RNA, 19 nt, Artificial Sequence
  Description of Artificial Sequence: Synthetic oligonucleotide
auucaagugaaaccuauuu

SEQ ID NO: 918802 - RNA, 19 nt, Artificial Sequence
  Description of Artificial Sequence: Synthetic oligonucleotide
guagaauugcugcugaaga

SEQ ID NO: 918803 - RNA, 19 nt, Artificial Sequence
  Description of Artificial Sequence: Synthetic oligonucleotide
ugcuucacgaccuaauuua

SEQ ID NO: 918804 - RNA, 19 nt, Artificial Sequence
  Description of Artificial Sequence: Synthetic oligonucleotide
gauacugguguagaauugc

SEQ ID NO: 918805 - RNA, 19 nt, Artificial Sequence
  Description of Artificial Sequence: Synthetic oligonucleotide
aauuaccggguucugucca

SEQ ID NO: 918806 - RNA, 19 nt, Artificial Sequence
  Description of Artificial Sequence: Synthetic oligonucleotide
uuuagaggugacuucacuu

SEQ ID NO: 918807 - RNA, 19 nt, Artificial Sequence
  Description of Artificial Sequence: Synthetic oligonucleotide
uuuuagaggugacuucacu

SEQ ID NO: 918808 - RNA, 19 nt, Artificial Sequence
  Description of Artificial Sequence: Synthetic oligonucleotide
ugacugauuuuaccagagg

SEQ ID NO: 918809 - RNA, 19 nt, Artificial Sequence
  Description of Artificial Sequence: Synthetic oligonucleotide
ugcccuuaccucaaaauuc

SEQ ID NO: 918810 - RNA, 19 nt, Artificial Sequence
  Description of Artificial Sequence: Synthetic oligonucleotide
aguacgcugaaauuuuaga

SEQ ID NO: 918811 - RNA, 19 nt, Artificial Sequence
  Description of Artificial Sequence: Synthetic oligonucleotide
ugauuuuaccagaggagaa

SEQ ID NO: 918812 - RNA, 19 nt, Artificial Sequence
  Description of Artificial Sequence: Synthetic oligonucleotide
uuccagcuaguccaucugg

SEQ ID NO: 918813 - RNA, 19 nt, Artificial Sequence
  Description of Artificial Sequence: Synthetic oligonucleotide
uauuuagggcuccauuaac

SEQ ID NO: 918814 - RNA, 19 nt, Artificial Sequence
  Description of Artificial Sequence: Synthetic oligonucleotide
cagguuuacuuguugguag

SEQ ID NO: 918815 - RNA, 19 nt, Artificial Sequence
  Description of Artificial Sequence: Synthetic oligonucleotide
aacauggccgguaucuuuc

SEQ ID NO: 918816 - RNA, 19 nt, Artificial Sequence
  Description of Artificial Sequence: Synthetic oligonucleotide
aaacuaucagauaaacuau

SEQ ID NO: 918817 - RNA, 19 nt, Artificial Sequence
  Description of Artificial Sequence: Synthetic oligonucleotide
caauaccuaacauggccgg

SEQ ID NO: 918818 - RNA, 19 nt, Artificial Sequence
  Description of Artificial Sequence: Synthetic oligonucleotide
acuaucuaagcauaaugua

SEQ ID NO: 918819 - RNA, 19 nt, Artificial Sequence
  Description of Artificial Sequence: Synthetic oligonucleotide
aguuucauauucuccuucu

SEQ ID NO: 918820 - RNA, 19 nt, Artificial Sequence
  Description of Artificial Sequence: Synthetic oligonucleotide
uaacaucggacuccaaaga

SEQ ID NO: 918821 - RNA, 19 nt, Artificial Sequence
  Description of Artificial Sequence: Synthetic oligonucleotide
accucaagauuucucauga

SEQ ID NO: 918822 - RNA, 19 nt, Artificial Sequence
  Description of Artificial Sequence: Synthetic oligonucleotide
ugauguaugaaugcaacuu

SEQ ID NO: 918823 - RNA, 19 nt, Artificial Sequence
  Description of Artificial Sequence: Synthetic oligonucleotide
uuucuacacaagagggaag

SEQ ID NO: 918824 - RNA, 19 nt, Artificial Sequence
  Description of Artificial Sequence: Synthetic oligonucleotide
uccuauaaccuguuccagc

SEQ ID NO: 918825 - RNA, 19 nt, Artificial Sequence
  Description of Artificial Sequence: Synthetic oligonucleotide
cuuaccucaaaauucaagu

SEQ ID NO: 918826 - RNA, 19 nt, Artificial Sequence
  Description of Artificial Sequence: Synthetic oligonucleotide
uucuacacaagagggaaga

SEQ ID NO: 918827 - RNA, 19 nt, Artificial Sequence
  Description of Artificial Sequence: Synthetic oligonucleotide
cuuagcgagccucuggggc

SEQ ID NO: 918828 - RNA, 19 nt, Artificial Sequence
  Description of Artificial Sequence: Synthetic oligonucleotide
gaaacuuaauuugaccauc

SEQ ID NO: 918829 - RNA, 19 nt, Artificial Sequence
  Description of Artificial Sequence: Synthetic oligonucleotide
cauuugucaguuacaaguc

SEQ ID NO: 918830 - RNA, 19 nt, Artificial Sequence
  Description of Artificial Sequence: Synthetic oligonucleotide
  modified_base (6)..(6): a, c, u, g, unknown or other
uuuucngcauucuuucuua

SEQ ID NO: 918831 - RNA, 19 nt, Artificial Sequence
  Description of Artificial Sequence: Synthetic oligonucleotide
  modified_base (4)..(4): a, c, u, g, unknown or other
uucngcauucuuucuuagc

SEQ ID NO: 918832 - RNA, 19 nt, Artificial Sequence
  Description of Artificial Sequence: Synthetic oligonucleotide
acauuuaauguguaugcua

SEQ ID NO: 918833 - RNA, 19 nt, Artificial Sequence
  Description of Artificial Sequence: Synthetic oligonucleotide
ugaugauaggugagaacga

SEQ ID NO: 918834 - RNA, 19 nt, Artificial Sequence
  Description of Artificial Sequence: Synthetic oligonucleotide
uuagaggugacuucacuuu

SEQ ID NO: 918835 - RNA, 19 nt, Artificial Sequence
  Description of Artificial Sequence: Synthetic oligonucleotide
ggugagaacgaauucugag

SEQ ID NO: 918836 - RNA, 19 nt, Artificial Sequence
  Description of Artificial Sequence: Synthetic oligonucleotide
agcugacugauuuuaccag

SEQ ID NO: 918837 - RNA, 19 nt, Artificial Sequence
  Description of Artificial Sequence: Synthetic oligonucleotide
uccuagaaguuacauuuaa

SEQ ID NO: 918838 - RNA, 19 nt, Artificial Sequence
  Description of Artificial Sequence: Synthetic oligonucleotide
uggaguuaguaaguguucc

SEQ ID NO: 918839 - RNA, 19 nt, Artificial Sequence
  Description of Artificial Sequence: Synthetic oligonucleotide
gggaaacuuaauuugacca

SEQ ID NO: 918840 - RNA, 19 nt, Artificial Sequence
  Description of Artificial Sequence: Synthetic oligonucleotide
acagacgguguucugcuag

SEQ ID NO: 918841 - RNA, 19 nt, Artificial Sequence
  Description of Artificial Sequence: Synthetic oligonucleotide
uucuaucuuguugaggugu

SEQ ID NO: 918842 - RNA, 19 nt, Artificial Sequence
  Description of Artificial Sequence: Synthetic oligonucleotide
ugagaagacucuccuggca

SEQ ID NO: 918843 - RNA, 19 nt, Artificial Sequence
  Description of Artificial Sequence: Synthetic oligonucleotide
uucucaugacuggagaagc

SEQ ID NO: 918844 - RNA, 19 nt, Artificial Sequence
  Description of Artificial Sequence: Synthetic oligonucleotide
uguccaagacauccuauaa

SEQ ID NO: 918845 - RNA, 19 nt, Artificial Sequence
  Description of Artificial Sequence: Synthetic oligonucleotide
aggccguauuauuauuuac

SEQ ID NO: 918846 - RNA, 19 nt, Artificial Sequence
  Description of Artificial Sequence: Synthetic oligonucleotide
gaauuaccggguucugucc

SEQ ID NO: 918847 - RNA, 19 nt, Artificial Sequence
  Description of Artificial Sequence: Synthetic oligonucleotide
  modified_base (5)..(5): a, c, u, g, unknown or other
uuucngcauucuuucuuag

SEQ ID NO: 918848 - RNA, 19 nt, Artificial Sequence
  Description of Artificial Sequence: Synthetic oligonucleotide
uuguaucaaagugaacuga

SEQ ID NO: 918849 - RNA, 19 nt, Artificial Sequence
  Description of Artificial Sequence: Synthetic oligonucleotide
acacaggauaaacuaucag

SEQ ID NO: 918850 - RNA, 19 nt, Artificial Sequence
  Description of Artificial Sequence: Synthetic oligonucleotide
uacagguuuacuuguuggu

SEQ ID NO: 918851 - RNA, 19 nt, Artificial Sequence
  Description of Artificial Sequence: Synthetic oligonucleotide
uuaaucuaucaugauuagu

SEQ ID NO: 918852 - RNA, 19 nt, Artificial Sequence
  Description of Artificial Sequence: Synthetic oligonucleotide
auggaguauuacauagacc

SEQ ID NO: 918853 - RNA, 19 nt, Artificial Sequence
  Description of Artificial Sequence: Synthetic oligonucleotide
gaaucaauggugauacaga

SEQ ID NO: 918854 - RNA, 19 nt, Artificial Sequence
  Description of Artificial Sequence: Synthetic oligonucleotide
augauguaugaaugcaacu

SEQ ID NO: 918855 - RNA, 19 nt, Artificial Sequence
  Description of Artificial Sequence: Synthetic oligonucleotide
aguaguuccaagagaagca

SEQ ID NO: 918856 - RNA, 19 nt, Artificial Sequence
  Description of Artificial Sequence: Synthetic oligonucleotide
uaacagacgguguucugcu

SEQ ID NO: 918857 - RNA, 19 nt, Artificial Sequence
  Description of Artificial Sequence: Synthetic oligonucleotide
uuaaaccauuguaugugau

SEQ ID NO: 918858 - RNA, 19 nt, Artificial Sequence
  Description of Artificial Sequence: Synthetic oligonucleotide
aacacaggauaaacuauca

SEQ ID NO: 918859 - RNA, 19 nt, Artificial Sequence
  Description of Artificial Sequence: Synthetic oligonucleotide
uuaauuugaccaucagauu

SEQ ID NO: 918860 - RNA, 19 nt, Artificial Sequence
  Description of Artificial Sequence: Synthetic oligonucleotide
auguguaugcuaaauaaau

SEQ ID NO: 918861 - RNA, 19 nt, Artificial Sequence
  Description of Artificial Sequence: Synthetic oligonucleotide
uuacuuguugguaguaguu

SEQ ID NO: 918862 - RNA, 19 nt, Artificial Sequence
  Description of Artificial Sequence: Synthetic oligonucleotide
ucacgaccuaauuuaguac

SEQ ID NO: 918863 - RNA, 19 nt, Artificial Sequence
  Description of Artificial Sequence: Synthetic oligonucleotide
guaacagacgguguucugc

SEQ ID NO: 918864 - RNA, 19 nt, Artificial Sequence
  Description of Artificial Sequence: Synthetic oligonucleotide
uucaucaguaucugggcua

SEQ ID NO: 918865 - RNA, 19 nt, Artificial Sequence
  Description of Artificial Sequence: Synthetic oligonucleotide
guaaguguuccucagauuu

SEQ ID NO: 918866 - RNA, 19 nt, Artificial Sequence
  Description of Artificial Sequence: Synthetic oligonucleotide
auguaugaaugcaacuuag

SEQ ID NO: 918867 - RNA, 19 nt, Artificial Sequence
  Description of Artificial Sequence: Synthetic oligonucleotide
aaaaggccguauuauuauu

SEQ ID NO: 918868 - RNA, 19 nt, Artificial Sequence
  Description of Artificial Sequence: Synthetic oligonucleotide
aaacuugaauuaccggguu

SEQ ID NO: 918869 - RNA, 19 nt, Artificial Sequence
  Description of Artificial Sequence: Synthetic oligonucleotide
uggcaguuuacguuuaaua

SEQ ID NO: 918870 - RNA, 19 nt, Artificial Sequence
  Description of Artificial Sequence: Synthetic oligonucleotide
ucaccaaggauugccaacu

SEQ ID NO: 918871 - RNA, 19 nt, Artificial Sequence
  Description of Artificial Sequence: Synthetic oligonucleotide
cuggauuuaucgaaugaca

SEQ ID NO: 918872 - RNA, 19 nt, Artificial Sequence
  Description of Artificial Sequence: Synthetic oligonucleotide
guuuacuuguugguaguag

SEQ ID NO: 918873 - RNA, 19 nt, Artificial Sequence
  Description of Artificial Sequence: Synthetic oligonucleotide
cauacuccaacaaagaauu

SEQ ID NO: 918874 - RNA, 19 nt, Artificial Sequence
  Description of Artificial Sequence: Synthetic oligonucleotide
ucuaagcauaauguauaga

SEQ ID NO: 918875 - RNA, 19 nt, Artificial Sequence
  Description of Artificial Sequence: Synthetic oligonucleotide
cacgaccuaauuuaguaca

SEQ ID NO: 918876 - RNA, 19 nt, Artificial Sequence
  Description of Artificial Sequence: Synthetic oligonucleotide
auguauagagguucauuaa

SEQ ID NO: 918877 - RNA, 19 nt, Artificial Sequence
  Description of Artificial Sequence: Synthetic oligonucleotide
ggugugagaaucaauggug

SEQ ID NO: 918878 - RNA, 19 nt, Artificial Sequence
  Description of Artificial Sequence: Synthetic oligonucleotide
cuaguaguuccaagagaag

SEQ ID NO: 918879 - RNA, 19 nt, Artificial Sequence
  Description of Artificial Sequence: Synthetic oligonucleotide
acacuaaggacaaacacua

SEQ ID NO: 918880 - RNA, 19 nt, Artificial Sequence
  Description of Artificial Sequence: Synthetic oligonucleotide
cuuguugagguguaacaga

SEQ ID NO: 918881 - RNA, 19 nt, Artificial Sequence
  Description of Artificial Sequence: Synthetic oligonucleotide
uccagcuaguccaucugga

SEQ ID NO: 918882 - RNA, 19 nt, Artificial Sequence
  Description of Artificial Sequence: Synthetic oligonucleotide
aaauuuauuuagggcucca

SEQ ID NO: 918883 - RNA, 19 nt, Artificial Sequence
  Description of Artificial Sequence: Synthetic oligonucleotide
acauggccgguaucuuucc

SEQ ID NO: 918884 - RNA, 19 nt, Artificial Sequence
  Description of Artificial Sequence: Synthetic oligonucleotide
uccacucaugaugauaggu

SEQ ID NO: 918885 - RNA, 19 nt, Artificial Sequence
  Description of Artificial Sequence: Synthetic oligonucleotide
aucaacccucuucauagga

SEQ ID NO: 918886 - RNA, 19 nt, Artificial Sequence
  Description of Artificial Sequence: Synthetic oligonucleotide
uuagcgagccucuggggcu

SEQ ID NO: 918887 - RNA, 19 nt, Artificial Sequence
  Description of Artificial Sequence: Synthetic oligonucleotide
  modified_base (8)..(8): a, c, u, g, unknown or other
ucuuuucngcauucuuucu

SEQ ID NO: 918888 - RNA, 19 nt, Artificial Sequence
  Description of Artificial Sequence: Synthetic oligonucleotide
agagcaccaucacagcuga

SEQ ID NO: 918889 - RNA, 19 nt, Artificial Sequence
  Description of Artificial Sequence: Synthetic oligonucleotide
gaggaaucuuuugauguac

SEQ ID NO: 918890 - RNA, 19 nt, Artificial Sequence
  Description of Artificial Sequence: Synthetic oligonucleotide
cuggugguuuccuaagaac

SEQ ID NO: 918891 - RNA, 19 nt, Artificial Sequence
  Description of Artificial Sequence: Synthetic oligonucleotide
auggccgguaucuuuccag

SEQ ID NO: 918892 - RNA, 19 nt, Artificial Sequence
  Description of Artificial Sequence: Synthetic oligonucleotide
cugaaauuuuagaggugac

SEQ ID NO: 918893 - RNA, 19 nt, Artificial Sequence
  Description of Artificial Sequence: Synthetic oligonucleotide
ucaacccucuucauaggau

SEQ ID NO: 918894 - RNA, 19 nt, Artificial Sequence
  Description of Artificial Sequence: Synthetic oligonucleotide
ugcuagauuuaaauuuauu

SEQ ID NO: 918895 - RNA, 19 nt, Artificial Sequence
  Description of Artificial Sequence: Synthetic oligonucleotide
acacuggauuuaucgaaug

SEQ ID NO: 918896 - RNA, 19 nt, Artificial Sequence
  Description of Artificial Sequence: Synthetic oligonucleotide
gaguacgcugaaauuuuag

SEQ ID NO: 918897 - RNA, 19 nt, Artificial Sequence
  Description of Artificial Sequence: Synthetic oligonucleotide
guccaagacauccuauaac

SEQ ID NO: 918898 - RNA, 19 nt, Artificial Sequence
  Description of Artificial Sequence: Synthetic oligonucleotide
aguuguguuugauggacuu

SEQ ID NO: 918899 - RNA, 19 nt, Artificial Sequence
  Description of Artificial Sequence: Synthetic oligonucleotide
aacacuggauuuaucgaau

SEQ ID NO: 918900 - RNA, 19 nt, Artificial Sequence
  Description of Artificial Sequence: Synthetic oligonucleotide
cacucaugaugauagguga

SEQ ID NO: 918901 - RNA, 19 nt, Artificial Sequence
  Description of Artificial Sequence: Synthetic oligonucleotide
acuuuccggccacugacug

SEQ ID NO: 918902 - RNA, 19 nt, Artificial Sequence
  Description of Artificial Sequence: Synthetic oligonucleotide
gaaaaggccguauuauuau

SEQ ID NO: 918903 - RNA, 19 nt, Artificial Sequence
  Description of Artificial Sequence: Synthetic oligonucleotide
gcuuguaucaaagugaacu

SEQ ID NO: 918904 - RNA, 19 nt, Artificial Sequence
  Description of Artificial Sequence: Synthetic oligonucleotide
ucuacacaagagggaagag

SEQ ID NO: 918905 - RNA, 19 nt, Artificial Sequence
  Description of Artificial Sequence: Synthetic oligonucleotide
cuuucuacacaagagggaa

SEQ ID NO: 918906 - RNA, 19 nt, Artificial Sequence
  Description of Artificial Sequence: Synthetic oligonucleotide
agugguuuccacucaugau

SEQ ID NO: 918907 - RNA, 19 nt, Artificial Sequence
  Description of Artificial Sequence: Synthetic oligonucleotide
agccggugaguuuucaaca

SEQ ID NO: 918908 - RNA, 19 nt, Artificial Sequence
  Description of Artificial Sequence: Synthetic oligonucleotide
aucuggaguuaguaagugu

SEQ ID NO: 918909 - RNA, 19 nt, Artificial Sequence
  Description of Artificial Sequence: Synthetic oligonucleotide
gucguuuguaaaccuccag

SEQ ID NO: 918910 - RNA, 19 nt, Artificial Sequence
  Description of Artificial Sequence: Synthetic oligonucleotide
agaucauccaagggaaacu

SEQ ID NO: 918911 - RNA, 19 nt, Artificial Sequence
  Description of Artificial Sequence: Synthetic oligonucleotide
caucggacuccaaagaaaa

SEQ ID NO: 918912 - RNA, 19 nt, Artificial Sequence
  Description of Artificial Sequence: Synthetic oligonucleotide
caugauuagugagaucauc

SEQ ID NO: 918913 - RNA, 19 nt, Artificial Sequence
  Description of Artificial Sequence: Synthetic oligonucleotide
aauaccuaacauggccggu

SEQ ID NO: 918914 - RNA, 19 nt, Artificial Sequence
  Description of Artificial Sequence: Synthetic oligonucleotide
caaggauugccaacuucug

SEQ ID NO: 918915 - RNA, 19 nt, Artificial Sequence
  Description of Artificial Sequence: Synthetic oligonucleotide
agauuucucaugacuggag

SEQ ID NO: 918916 - RNA, 19 nt, Artificial Sequence
  Description of Artificial Sequence: Synthetic oligonucleotide
uuccacucaugaugauagg

SEQ ID NO: 918917 - RNA, 19 nt, Artificial Sequence
  Description of Artificial Sequence: Synthetic oligonucleotide
gaugauaggugagaacgaa

SEQ ID NO: 918918 - RNA, 19 nt, Artificial Sequence
  Description of Artificial Sequence: Synthetic oligonucleotide
uaccuguauugaucaagug

SEQ ID NO: 918919 - RNA, 19 nt, Artificial Sequence
  Description of Artificial Sequence: Synthetic oligonucleotide
ucaugauuagugagaucau

SEQ ID NO: 918920 - RNA, 19 nt, Artificial Sequence
  Description of Artificial Sequence: Synthetic oligonucleotide
cuaaggacaaacacuacau

SEQ ID NO: 918921 - RNA, 19 nt, Artificial Sequence
  Description of Artificial Sequence: Synthetic oligonucleotide
uuguugguaguaguugagu

SEQ ID NO: 918922 - RNA, 19 nt, Artificial Sequence
  Description of Artificial Sequence: Synthetic oligonucleotide
agaggaaucuuuugaugua

SEQ ID NO: 918923 - RNA, 19 nt, Artificial Sequence
  Description of Artificial Sequence: Synthetic oligonucleotide
uugagguguaacagacggu

SEQ ID NO: 918924 - RNA, 19 nt, Artificial Sequence
  Description of Artificial Sequence: Synthetic oligonucleotide
cuuacuugagaaggcauga

SEQ ID NO: 918925 - RNA, 19 nt, Artificial Sequence
  Description of Artificial Sequence: Synthetic oligonucleotide
cagcugacugauuuuacca

SEQ ID NO: 918926 - RNA, 19 nt, Artificial Sequence
  Description of Artificial Sequence: Synthetic oligonucleotide
caacaguaacaucggacuc

SEQ ID NO: 918927 - RNA, 19 nt, Artificial Sequence
  Description of Artificial Sequence: Synthetic oligonucleotide
uagaggugacuucacuuuu

SEQ ID NO: 918928 - RNA, 19 nt, Artificial Sequence
  Description of Artificial Sequence: Synthetic oligonucleotide
uuugaccaucagauuugcu

SEQ ID NO: 918929 - RNA, 19 nt, Artificial Sequence
  Description of Artificial Sequence: Synthetic oligonucleotide
ccuaauuuaguacaugaaa

SEQ ID NO: 918930 - RNA, 19 nt, Artificial Sequence
  Description of Artificial Sequence: Synthetic oligonucleotide
acuacauuugucaguuaca

SEQ ID NO: 918931 - RNA, 19 nt, Artificial Sequence
  Description of Artificial Sequence: Synthetic oligonucleotide
uccgucguuuguaaaccuc

SEQ ID NO: 918932 - RNA, 19 nt, Artificial Sequence
  Description of Artificial Sequence: Synthetic oligonucleotide
acuuucuacacaagaggga

SEQ ID NO: 918933 - RNA, 19 nt, Artificial Sequence
  Description of Artificial Sequence: Synthetic oligonucleotide
auagaccaucaauaccuaa

SEQ ID NO: 918934 - RNA, 19 nt, Artificial Sequence
  Description of Artificial Sequence: Synthetic oligonucleotide
uuccuagaaguuacauuua

SEQ ID NO: 918935 - RNA, 19 nt, Artificial Sequence
  Description of Artificial Sequence: Synthetic oligonucleotide
agguguaacagacgguguu

SEQ ID NO: 918936 - RNA, 19 nt, Artificial Sequence
  Description of Artificial Sequence: Synthetic oligonucleotide
ucaucaguaucugggcuaa

SEQ ID NO: 918937 - RNA, 19 nt, Artificial Sequence
  Description of Artificial Sequence: Synthetic oligonucleotide
uuuuaccuguauugaucaa

SEQ ID NO: 918938 - RNA, 19 nt, Artificial Sequence
  Description of Artificial Sequence: Synthetic oligonucleotide
augugaucagaaaccuuuc

SEQ ID NO: 918939 - RNA, 19 nt, Artificial Sequence
  Description of Artificial Sequence: Synthetic oligonucleotide
ccuuaccucaaaauucaag

SEQ ID NO: 918940 - RNA, 19 nt, Artificial Sequence
  Description of Artificial Sequence: Synthetic oligonucleotide
cuucugacagauuggcgga

SEQ ID NO: 918941 - RNA, 19 nt, Artificial Sequence
  Description of Artificial Sequence: Synthetic oligonucleotide
gaacugauacugguguaga

SEQ ID NO: 918942 - RNA, 19 nt, Artificial Sequence
  Description of Artificial Sequence: Synthetic oligonucleotide
auucugagaugacccuucu

SEQ ID NO: 918943 - RNA, 19 nt, Artificial Sequence
  Description of Artificial Sequence: Synthetic oligonucleotide
aguaaguguuccucagauu

SEQ ID NO: 918944 - RNA, 19 nt, Artificial Sequence
  Description of Artificial Sequence: Synthetic oligonucleotide
auccuauaaccuguuccag

SEQ ID NO: 918945 - RNA, 19 nt, Artificial Sequence
  Description of Artificial Sequence: Synthetic oligonucleotide
uaccuaacauggccgguau

SEQ ID NO: 918946 - RNA, 19 nt, Artificial Sequence
  Description of Artificial Sequence: Synthetic oligonucleotide
ggaaggacuaccacacugc

SEQ ID NO: 918947 - RNA, 19 nt, Artificial Sequence
  Description of Artificial Sequence: Synthetic oligonucleotide
ccacucaugaugauaggug

SEQ ID NO: 918948 - RNA, 19 nt, Artificial Sequence
  Description of Artificial Sequence: Synthetic oligonucleotide
cugcuuagcgagccucugg

SEQ ID NO: 918949 - RNA, 19 nt, Artificial Sequence
  Description of Artificial Sequence: Synthetic oligonucleotide
cugaagagaugacuuggca

SEQ ID NO: 918950 - RNA, 19 nt, Artificial Sequence
  Description of Artificial Sequence: Synthetic oligonucleotide
cuuuccggccacugacugc

SEQ ID NO: 918951 - RNA, 19 nt, Artificial Sequence
  Description of Artificial Sequence: Synthetic oligonucleotide
caagugguuuccacucaug

SEQ ID NO: 918952 - RNA, 19 nt, Artificial Sequence
  Description of Artificial Sequence: Synthetic oligonucleotide
aucaguaucugggcuaaaa

SEQ ID NO: 918953 - RNA, 19 nt, Artificial Sequence
  Description of Artificial Sequence: Synthetic oligonucleotide
acucuccuggcaguuuacg

SEQ ID NO: 918954 - RNA, 19 nt, Artificial Sequence
  Description of Artificial Sequence: Synthetic oligonucleotide
gacauccuauaaccuguuc

SEQ ID NO: 918955 - RNA, 19 nt, Artificial Sequence
  Description of Artificial Sequence: Synthetic oligonucleotide
acagguuuacuuguuggua

SEQ ID NO: 918956 - RNA, 19 nt, Artificial Sequence
  Description of Artificial Sequence: Synthetic oligonucleotide
cacuaaggacaaacacuac

SEQ ID NO: 918957 - RNA, 19 nt, Artificial Sequence
  Description of Artificial Sequence: Synthetic oligonucleotide
guaucuggauaugucuuca

SEQ ID NO: 918958 - RNA, 19 nt, Artificial Sequence
  Description of Artificial Sequence: Synthetic oligonucleotide
gccguauuauuauuuacaa

SEQ ID NO: 918959 - RNA, 19 nt, Artificial Sequence
  Description of Artificial Sequence: Synthetic oligonucleotide
accuaacauggccgguauc

SEQ ID NO: 918960 - RNA, 19 nt, Artificial Sequence
  Description of Artificial Sequence: Synthetic oligonucleotide
aguauggcuuaaaauuaau

SEQ ID NO: 918961 - RNA, 19 nt, Artificial Sequence
  Description of Artificial Sequence: Synthetic oligonucleotide
gagaaccuuuguaccagac

SEQ ID NO: 918962 - RNA, 19 nt, Artificial Sequence
  Description of Artificial Sequence: Synthetic oligonucleotide
ccgucguuuguaaaccucc

SEQ ID NO: 918963 - RNA, 19 nt, Artificial Sequence
  Description of Artificial Sequence: Synthetic oligonucleotide
cacuggauuuaucgaauga

SEQ ID NO: 918964 - RNA, 19 nt, Artificial Sequence
  Description of Artificial Sequence: Synthetic oligonucleotide
agaugacuuggcaacaguu

SEQ ID NO: 918965 - RNA, 19 nt, Artificial Sequence
  Description of Artificial Sequence: Synthetic oligonucleotide
gggcaguucuaucuuguug

SEQ ID NO: 918966 - RNA, 19 nt, Artificial Sequence
  Description of Artificial Sequence: Synthetic oligonucleotide
ggauuuaucgaaugacaua

SEQ ID NO: 918967 - RNA, 19 nt, Artificial Sequence
  Description of Artificial Sequence: Synthetic oligonucleotide
ugacugcugcuuagcgagc

SEQ ID NO: 918968 - RNA, 19 nt, Artificial Sequence
  Description of Artificial Sequence: Synthetic oligonucleotide
caagucuacagguuuacuu

SEQ ID NO: 918969 - RNA, 19 nt, Artificial Sequence
  Description of Artificial Sequence: Synthetic oligonucleotide
auucaacacuggauuuauc

SEQ ID NO: 918970 - RNA, 19 nt, Artificial Sequence
  Description of Artificial Sequence: Synthetic oligonucleotide
auuuaucgaaugacauaga

SEQ ID NO: 918971 - RNA, 19 nt, Artificial Sequence
  Description of Artificial Sequence: Synthetic oligonucleotide
gugagaaucaauggugaua

SEQ ID NO: 918972 - RNA, 19 nt, Artificial Sequence
  Description of Artificial Sequence: Synthetic oligonucleotide
cuugaauuaccggguucug

SEQ ID NO: 918973 - RNA, 19 nt, Artificial Sequence
  Description of Artificial Sequence: Synthetic oligonucleotide
  modified_base (7)..(7): a, c, u, g, unknown or other
cuuuucngcauucuuucuu

SEQ ID NO: 918974 - RNA, 19 nt, Artificial Sequence
  Description of Artificial Sequence: Synthetic oligonucleotide
uuaccggguucuguccaag

SEQ ID NO: 918975 - RNA, 19 nt, Artificial Sequence
  Description of Artificial Sequence: Synthetic oligonucleotide
ccguauuauuauuuacaac

SEQ ID NO: 918976 - RNA, 19 nt, Artificial Sequence
  Description of Artificial Sequence: Synthetic oligonucleotide
auuaccggguucuguccaa

SEQ ID NO: 918977 - RNA, 19 nt, Artificial Sequence
  Description of Artificial Sequence: Synthetic oligonucleotide
ugguucauuuagggaaagu

SEQ ID NO: 918978 - RNA, 19 nt, Artificial Sequence
  Description of Artificial Sequence: Synthetic oligonucleotide
uccagggauggaguauuac

SEQ ID NO: 918979 - RNA, 19 nt, Artificial Sequence
  Description of Artificial Sequence: Synthetic oligonucleotide
gacuuggcaacaguucaaa

SEQ ID NO: 918980 - RNA, 19 nt, Artificial Sequence
  Description of Artificial Sequence: Synthetic oligonucleotide
auaccuaacauggccggua

SEQ ID NO: 918981 - RNA, 19 nt, Artificial Sequence
  Description of Artificial Sequence: Synthetic oligonucleotide
aacagacgguguucugcua

SEQ ID NO: 918982 - RNA, 19 nt, Artificial Sequence
  Description of Artificial Sequence: Synthetic oligonucleotide
ggaaacuuaauuugaccau

SEQ ID NO: 918983 - RNA, 19 nt, Artificial Sequence
  Description of Artificial Sequence: Synthetic oligonucleotide
caggauaaacuaucagaua

SEQ ID NO: 918984 - RNA, 19 nt, Artificial Sequence
  Description of Artificial Sequence: Synthetic oligonucleotide
aggaguacgcugaaauuuu

SEQ ID NO: 918985 - RNA, 19 nt, Artificial Sequence
  Description of Artificial Sequence: Synthetic oligonucleotide
guucugcuagauuuaaauu

SEQ ID NO: 918986 - RNA, 19 nt, Artificial Sequence
  Description of Artificial Sequence: Synthetic oligonucleotide
uaccggguucuguccaaga

SEQ ID NO: 918987 - RNA, 19 nt, Artificial Sequence
  Description of Artificial Sequence: Synthetic oligonucleotide
cucuuacauucaccuggag

SEQ ID NO: 918988 - RNA, 19 nt, Artificial Sequence
  Description of Artificial Sequence: Synthetic oligonucleotide
  modified_base (2)..(2): a, c, u, g, unknown or other
cngcauucuuucuuagcaa

SEQ ID NO: 918989 - RNA, 19 nt, Artificial Sequence
  Description of Artificial Sequence: Synthetic oligonucleotide
ggugguuuccuaagaacuc

SEQ ID NO: 918990 - RNA, 19 nt, Artificial Sequence
  Description of Artificial Sequence: Synthetic oligonucleotide
ggacaaacacuacauuugu

SEQ ID NO: 918991 - RNA, 19 nt, Artificial Sequence
  Description of Artificial Sequence: Synthetic oligonucleotide
gcuuagcgagccucugggg

SEQ ID NO: 918992 - RNA, 19 nt, Artificial Sequence
  Description of Artificial Sequence: Synthetic oligonucleotide
caugcuccgucguuuguaa

SEQ ID NO: 918993 - RNA, 19 nt, Artificial Sequence
  Description of Artificial Sequence: Synthetic oligonucleotide
gcuucacgaccuaauuuag

SEQ ID NO: 918994 - RNA, 19 nt, Artificial Sequence
  Description of Artificial Sequence: Synthetic oligonucleotide
gauuggcggacaggaguac

SEQ ID NO: 918995 - RNA, 19 nt, Artificial Sequence
  Description of Artificial Sequence: Synthetic oligonucleotide
gcuccgucguuuguaaacc

SEQ ID NO: 918996 - RNA, 19 nt, Artificial Sequence
  Description of Artificial Sequence: Synthetic oligonucleotide
acgaccuaauuuaguacau

SEQ ID NO: 918997 - RNA, 19 nt, Artificial Sequence
  Description of Artificial Sequence: Synthetic oligonucleotide
ccaaggauugccaacuucu

SEQ ID NO: 918998 - RNA, 19 nt, Artificial Sequence
  Description of Artificial Sequence: Synthetic oligonucleotide
caaagucuaguaguuccaa

SEQ ID NO: 918999 - RNA, 19 nt, Artificial Sequence
  Description of Artificial Sequence: Synthetic oligonucleotide
uuccagggauggaguauua

SEQ ID NO: 919000 - RNA, 19 nt, Artificial Sequence
  Description of Artificial Sequence: Synthetic oligonucleotide
auaaccuguuccagcuagu

SEQ ID NO: 919001 - RNA, 19 nt, Artificial Sequence
  Description of Artificial Sequence: Synthetic oligonucleotide
gugaacugauacuggugua

SEQ ID NO: 919002 - RNA, 19 nt, Artificial Sequence
  Description of Artificial Sequence: Synthetic oligonucleotide
ugggcaguucuaucuuguu

SEQ ID NO: 919003 - RNA, 19 nt, Artificial Sequence
  Description of Artificial Sequence: Synthetic oligonucleotide
uggcggacaggaguacgcu

SEQ ID NO: 919004 - RNA, 19 nt, Artificial Sequence
  Description of Artificial Sequence: Synthetic oligonucleotide
agcuccauuugcacccaug

SEQ ID NO: 919005 - RNA, 19 nt, Artificial Sequence
  Description of Artificial Sequence: Synthetic oligonucleotide
ccuguuuuaccuguauuga

SEQ ID NO: 919006 - RNA, 19 nt, Artificial Sequence
  Description of Artificial Sequence: Synthetic oligonucleotide
cuucacgaccuaauuuagu

SEQ ID NO: 919007 - RNA, 19 nt, Artificial Sequence
  Description of Artificial Sequence: Synthetic oligonucleotide
gcccuuaccucaaaauuca

SEQ ID NO: 919008 - RNA, 19 nt, Artificial Sequence
  Description of Artificial Sequence: Synthetic oligonucleotide
ggauggaguauuacauaga

SEQ ID NO: 919009 - RNA, 19 nt, Artificial Sequence
  Description of Artificial Sequence: Synthetic oligonucleotide
cagacgguguucugcuaga

SEQ ID NO: 919010 - RNA, 19 nt, Artificial Sequence
  Description of Artificial Sequence: Synthetic oligonucleotide
ggaguuaguaaguguuccu

SEQ ID NO: 919011 - RNA, 19 nt, Artificial Sequence
  Description of Artificial Sequence: Synthetic oligonucleotide
gaagcuccauuugcaccca

SEQ ID NO: 919012 - RNA, 19 nt, Artificial Sequence
  Description of Artificial Sequence: Synthetic oligonucleotide
ggcggacaggaguacgcug

SEQ ID NO: 919013 - RNA, 19 nt, Artificial Sequence
  Description of Artificial Sequence: Synthetic oligonucleotide
cagcuaguccaucuggagu

SEQ ID NO: 919014 - RNA, 19 nt, Artificial Sequence
  Description of Artificial Sequence: Synthetic oligonucleotide
ugccaacuucugccucaca

SEQ ID NO: 919015 - RNA, 19 nt, Artificial Sequence
  Description of Artificial Sequence: Synthetic oligonucleotide
ggagaaccuuuguaccaga

SEQ ID NO: 919016 - RNA, 19 nt, Artificial Sequence
  Description of Artificial Sequence: Synthetic oligonucleotide
gacccuucugggcuuguau

SEQ ID NO: 919017 - RNA, 19 nt, Artificial Sequence
  Description of Artificial Sequence: Synthetic oligonucleotide
cugcccuuaccucaaaauu

SEQ ID NO: 919018 - RNA, 19 nt, Artificial Sequence
  Description of Artificial Sequence: Synthetic oligonucleotide
cuauaaccuguuccagcua

SEQ ID NO: 919019 - RNA, 19 nt, Artificial Sequence
  Description of Artificial Sequence: Synthetic oligonucleotide
gugcuucacgaccuaauuu

SEQ ID NO: 919020 - RNA, 19 nt, Artificial Sequence
  Description of Artificial Sequence: Synthetic oligonucleotide
ccucaagauuucucaugac

SEQ ID NO: 919021 - RNA, 19 nt, Artificial Sequence
  Description of Artificial Sequence: Synthetic oligonucleotide
cugcuagauuuaaauuuau

SEQ ID NO: 919022 - RNA, 19 nt, Artificial Sequence
  Description of Artificial Sequence: Synthetic oligonucleotide
gagguguaacagacggugu

SEQ ID NO: 919023 - RNA, 19 nt, Artificial Sequence
  Description of Artificial Sequence: Synthetic oligonucleotide
cauggccgguaucuuucca

SEQ ID NO: 919024 - RNA, 19 nt, Artificial Sequence
  Description of Artificial Sequence: Synthetic oligonucleotide
agacgguguucugcuagau

SEQ ID NO: 919025 - RNA, 19 nt, Artificial Sequence
  Description of Artificial Sequence: Synthetic oligonucleotide
gacuaccacacugcaugua

SEQ ID NO: 919026 - RNA, 19 nt, Artificial Sequence
  Description of Artificial Sequence: Synthetic oligonucleotide
agggcuccauuaacaaaau

SEQ ID NO: 919027 - RNA, 19 nt, Artificial Sequence
  Description of Artificial Sequence: Synthetic oligonucleotide
gcggacaggaguacgcuga

SEQ ID NO: 919028 - RNA, 19 nt, Artificial Sequence
  Description of Artificial Sequence: Synthetic oligonucleotide
agacauccuauaaccuguu

SEQ ID NO: 919029 - RNA, 19 nt, Artificial Sequence
  Description of Artificial Sequence: Synthetic oligonucleotide
cugcaucaccaaggauugc

SEQ ID NO: 919030 - RNA, 19 nt, Artificial Sequence
  Description of Artificial Sequence: Synthetic oligonucleotide
gggcuccauuaacaaaauc

SEQ ID NO: 919031 - RNA, 19 nt, Artificial Sequence
  Description of Artificial Sequence: Synthetic oligonucleotide
ccggguucuguccaagaca

SEQ ID NO: 919032 - RNA, 19 nt, Artificial Sequence
  Description of Artificial Sequence: Synthetic oligonucleotide
cacccaugucuugaaaacu

SEQ ID NO: 919033 - RNA, 19 nt, Artificial Sequence
  Description of Artificial Sequence: Synthetic oligonucleotide
ccaagacauccuauaaccu

SEQ ID NO: 919034 - RNA, 19 nt, Artificial Sequence
  Description of Artificial Sequence: Synthetic oligonucleotide
cacuuuccggccacugacu

SEQ ID NO: 919035 - RNA, 19 nt, Artificial Sequence
  Description of Artificial Sequence: Synthetic oligonucleotide
cuguauugaucaagugguu

SEQ ID NO: 919036 - RNA, 19 nt, Artificial Sequence
  Description of Artificial Sequence: Synthetic oligonucleotide
gcugcuuagcgagccucug

SEQ ID NO: 919037 - RNA, 19 nt, Artificial Sequence
  Description of Artificial Sequence: Synthetic oligonucleotide
cuuuccaugcuccgucguu

SEQ ID NO: 919038 - RNA, 19 nt, Artificial Sequence
  Description of Artificial Sequence: Synthetic oligonucleotide
guaugugaucagaaaccuu

SEQ ID NO: 919039 - RNA, 19 nt, Artificial Sequence
  Description of Artificial Sequence: Synthetic oligonucleotide
cguuuaauacuugguguga

SEQ ID NO: 919040 - RNA, 19 nt, Artificial Sequence
  Description of Artificial Sequence: Synthetic oligonucleotide
ccuagaaguuacauuuaau

SEQ ID NO: 919041 - RNA, 19 nt, Artificial Sequence
  Description of Artificial Sequence: Synthetic oligonucleotide
cuccgucguuuguaaaccu

SEQ ID NO: 919042 - RNA, 19 nt, Artificial Sequence
  Description of Artificial Sequence: Synthetic oligonucleotide
ggaguacgcugaaauuuua

SEQ ID NO: 919043 - RNA, 19 nt, Artificial Sequence
  Description of Artificial Sequence: Synthetic oligonucleotide
ggacuaccacacugcaugu

SEQ ID NO: 919044 - RNA, 19 nt, Artificial Sequence
  Description of Artificial Sequence: Synthetic oligonucleotide
cccucuucauaggauaaaa

SEQ ID NO: 919045 - RNA, 19 nt, Artificial Sequence
  Description of Artificial Sequence: Synthetic oligonucleotide
cggugaguuuucaacagua

SEQ ID NO: 919046 - RNA, 19 nt, Artificial Sequence
  Description of Artificial Sequence: Synthetic oligonucleotide
ggaguauuacauagaccau

SEQ ID NO: 919047 - RNA, 19 nt, Artificial Sequence
  Description of Artificial Sequence: Synthetic oligonucleotide
cgucguuuguaaaccucca

SEQ ID NO: 919048 - RNA, 19 nt, Artificial Sequence
  Description of Artificial Sequence: Synthetic oligonucleotide
cuaacauggccgguaucuu

SEQ ID NO: 919049 - RNA, 19 nt, Artificial Sequence
  Description of Artificial Sequence: Synthetic oligonucleotide
cuggcaguuuacguuuaau

SEQ ID NO: 919050 - RNA, 19 nt, Artificial Sequence
  Description of Artificial Sequence: Synthetic oligonucleotide
cacagccggugaguuuuca

SEQ ID NO: 919051 - RNA, 19 nt, Artificial Sequence
  Description of Artificial Sequence: Synthetic oligonucleotide
gucuacagguuuacuuguu

SEQ ID NO: 919052 - RNA, 19 nt, Artificial Sequence
  Description of Artificial Sequence: Synthetic oligonucleotide
cccuuaccucaaaauucaa

SEQ ID NO: 919053 - RNA, 19 nt, Artificial Sequence
  Description of Artificial Sequence: Synthetic oligonucleotide
gcuaguccaucuggaguua

SEQ ID NO: 919054 - RNA, 19 nt, Artificial Sequence
  Description of Artificial Sequence: Synthetic oligonucleotide
caucaguaucugggcuaaa

SEQ ID NO: 919055 - RNA, 19 nt, Artificial Sequence
  Description of Artificial Sequence: Synthetic oligonucleotide
ccaugcuccgucguuugua

SEQ ID NO: 919056 - RNA, 19 nt, Artificial Sequence
  Description of Artificial Sequence: Synthetic oligonucleotide
augaucauugggcagaggc

SEQ ID NO: 919057 - RNA, 19 nt, Artificial Sequence
  Description of Artificial Sequence: Synthetic oligonucleotide
ugagguuagagucagucag

SEQ ID NO: 919058 - RNA, 19 nt, Artificial Sequence
  Description of Artificial Sequence: Synthetic oligonucleotide
acagacgucacccacaguc

SEQ ID NO: 919059 - RNA, 19 nt, Artificial Sequence
  Description of Artificial Sequence: Synthetic oligonucleotide
aacaugaucacagcccgcc

SEQ ID NO: 919060 - RNA, 19 nt, Artificial Sequence
  Description of Artificial Sequence: Synthetic oligonucleotide
uucaucgaagaccacgacg

SEQ ID NO: 919061 - RNA, 19 nt, Artificial Sequence
  Description of Artificial Sequence: Synthetic oligonucleotide
cuguaaaccaccacguugg

SEQ ID NO: 919062 - RNA, 19 nt, Artificial Sequence
  Description of Artificial Sequence: Synthetic oligonucleotide
uaucgagccaggaaguagg

SEQ ID NO: 919063 - RNA, 19 nt, Artificial Sequence
  Description of Artificial Sequence: Synthetic oligonucleotide
ugagacuuugccccgagcc

SEQ ID NO: 919064 - RNA, 19 nt, Artificial Sequence
  Description of Artificial Sequence: Synthetic oligonucleotide
ugaguguagacguagggga

SEQ ID NO: 919065 - RNA, 19 nt, Artificial Sequence
  Description of Artificial Sequence: Synthetic oligonucleotide
uguacaaggagauccucag

SEQ ID NO: 919066 - RNA, 19 nt, Artificial Sequence
  Description of Artificial Sequence: Synthetic oligonucleotide
accgaacaugaucacagcc

SEQ ID NO: 919067 - RNA, 19 nt, Artificial Sequence
  Description of Artificial Sequence: Synthetic oligonucleotide
agggauucggcucugagug

SEQ ID NO: 919068 - RNA, 19 nt, Artificial Sequence
  Description of Artificial Sequence: Synthetic oligonucleotide
ucugaguguagacguaggg

SEQ ID NO: 919069 - RNA, 19 nt, Artificial Sequence
  Description of Artificial Sequence: Synthetic oligonucleotide
guaguugcggauuacagca

SEQ ID NO: 919070 - RNA, 19 nt, Artificial Sequence
  Description of Artificial Sequence: Synthetic oligonucleotide
auucucgcggaucuggaac

SEQ ID NO: 919071 - RNA, 19 nt, Artificial Sequence
  Description of Artificial Sequence: Synthetic oligonucleotide
agguaagcaggcuccaccc

SEQ ID NO: 919072 - RNA, 19 nt, Artificial Sequence
  Description of Artificial Sequence: Synthetic oligonucleotide
aagucauucucgcggaucu

SEQ ID NO: 919073 - RNA, 19 nt, Artificial Sequence
  Description of Artificial Sequence: Synthetic oligonucleotide
ugugcgaucugcucaaccc

SEQ ID NO: 919074 - RNA, 19 nt, Artificial Sequence
  Description of Artificial Sequence: Synthetic oligonucleotide
ugcaggaucgaguaucgag

SEQ ID NO: 919075 - RNA, 19 nt, Artificial Sequence
  Description of Artificial Sequence: Synthetic oligonucleotide
aagaccaugagaccauagu

SEQ ID NO: 919076 - RNA, 19 nt, Artificial Sequence
  Description of Artificial Sequence: Synthetic oligonucleotide
cauggcaucaaaaggugag

SEQ ID NO: 919077 - RNA, 19 nt, Artificial Sequence
  Description of Artificial Sequence: Synthetic oligonucleotide
aagacuguacucugggacu

SEQ ID NO: 919078 - RNA, 19 nt, Artificial Sequence
  Description of Artificial Sequence: Synthetic oligonucleotide
accacgacggccuugcggg

SEQ ID NO: 919079 - RNA, 19 nt, Artificial Sequence
  Description of Artificial Sequence: Synthetic oligonucleotide
aagcuucgagaguccaucc

SEQ ID NO: 919080 - RNA, 19 nt, Artificial Sequence
  Description of Artificial Sequence: Synthetic oligonucleotide
aagaccacgacggccuugc

SEQ ID NO: 919081 - RNA, 19 nt, Artificial Sequence
  Description of Artificial Sequence: Synthetic oligonucleotide
uggugcacaaagucaaucc

SEQ ID NO: 919082 - RNA, 19 nt, Artificial Sequence
  Description of Artificial Sequence: Synthetic oligonucleotide
accgagagcagaauggccc

SEQ ID NO: 919083 - RNA, 19 nt, Artificial Sequence
  Description of Artificial Sequence: Synthetic oligonucleotide
acguuugucagcccgagca

SEQ ID NO: 919084 - RNA, 19 nt, Artificial Sequence
  Description of Artificial Sequence: Synthetic oligonucleotide
uccgugggcaucaaacucc

SEQ ID NO: 919085 - RNA, 19 nt, Artificial Sequence
  Description of Artificial Sequence: Synthetic oligonucleotide
ugagaagcuggucucgcgc

SEQ ID NO: 919086 - RNA, 19 nt, Artificial Sequence
  Description of Artificial Sequence: Synthetic oligonucleotide
ugcucaacccgccguagcg

SEQ ID NO: 919087 - RNA, 19 nt, Artificial Sequence
  Description of Artificial Sequence: Synthetic oligonucleotide
aguggugucaccucgggau

SEQ ID NO: 919088 - RNA, 19 nt, Artificial Sequence
  Description of Artificial Sequence: Synthetic oligonucleotide
auggagucgaugcagacau

SEQ ID NO: 919089 - RNA, 19 nt, Artificial Sequence
  Description of Artificial Sequence: Synthetic oligonucleotide
acggccaaugaucauuggg

SEQ ID NO: 919090 - RNA, 19 nt, Artificial Sequence
  Description of Artificial Sequence: Synthetic oligonucleotide
uggucucaaauuuggagcu

SEQ ID NO: 919091 - RNA, 19 nt, Artificial Sequence
  Description of Artificial Sequence: Synthetic oligonucleotide
uaguggugcacaaagucaa

SEQ ID NO: 919092 - RNA, 19 nt, Artificial Sequence
  Description of Artificial Sequence: Synthetic oligonucleotide
guagacguaggggacaccg

SEQ ID NO: 919093 - RNA, 19 nt, Artificial Sequence
  Description of Artificial Sequence: Synthetic oligonucleotide
aucgaagaccacgacggcc

SEQ ID NO: 919094 - RNA, 19 nt, Artificial Sequence
  Description of Artificial Sequence: Synthetic oligonucleotide
caccuggucauuaccacgg

SEQ ID NO: 919095 - RNA, 19 nt, Artificial Sequence
  Description of Artificial Sequence: Synthetic oligonucleotide
ucccacguuugucagcccg

SEQ ID NO: 919096 - RNA, 19 nt, Artificial Sequence
  Description of Artificial Sequence: Synthetic oligonucleotide
guagcgucuccucugacug

SEQ ID NO: 919097 - RNA, 19 nt, Artificial Sequence
  Description of Artificial Sequence: Synthetic oligonucleotide
agaccauagucugucuugc

SEQ ID NO: 919098 - RNA, 19 nt, Artificial Sequence
  Description of Artificial Sequence: Synthetic oligonucleotide
uguagaugccugccgggag

SEQ ID NO: 919099 - RNA, 19 nt, Artificial Sequence
  Description of Artificial Sequence: Synthetic oligonucleotide
uggcgcauggcaucaaaag

SEQ ID NO: 919100 - RNA, 19 nt, Artificial Sequence
  Description of Artificial Sequence: Synthetic oligonucleotide
uagcuguaaaccaccacgu

SEQ ID NO: 919101 - RNA, 19 nt, Artificial Sequence
  Description of Artificial Sequence: Synthetic oligonucleotide
caugcaggaucgaguaucg

SEQ ID NO: 919102 - RNA, 19 nt, Artificial Sequence
  Description of Artificial Sequence: Synthetic oligonucleotide
ucuccaagcuucgagaguc

SEQ ID NO: 919103 - RNA, 19 nt, Artificial Sequence
  Description of Artificial Sequence: Synthetic oligonucleotide
cuaccugaaacagaacaag

SEQ ID NO: 919104 - RNA, 19 nt, Artificial Sequence
  Description of Artificial Sequence: Synthetic oligonucleotide
ugggcccgcacauaugagg

SEQ ID NO: 919105 - RNA, 19 nt, Artificial Sequence
  Description of Artificial Sequence: Synthetic oligonucleotide
acaccgaacaugaucacag

SEQ ID NO: 919106 - RNA, 19 nt, Artificial Sequence
  Description of Artificial Sequence: Synthetic oligonucleotide
cugcaauuaaagacuguac

SEQ ID NO: 919107 - RNA, 19 nt, Artificial Sequence
  Description of Artificial Sequence: Synthetic oligonucleotide
ucggcucugaguguagacg

SEQ ID NO: 919108 - RNA, 19 nt, Artificial Sequence
  Description of Artificial Sequence: Synthetic oligonucleotide
aggagauagugguagcugu

SEQ ID NO: 919109 - RNA, 19 nt, Artificial Sequence
  Description of Artificial Sequence: Synthetic oligonucleotide
guagaugccugccgggagg

SEQ ID NO: 919110 - RNA, 19 nt, Artificial Sequence
  Description of Artificial Sequence: Synthetic oligonucleotide
agugaggcaggcuggcauc

SEQ ID NO: 919111 - RNA, 19 nt, Artificial Sequence
  Description of Artificial Sequence: Synthetic oligonucleotide
caggaucgaguaucgagcc

SEQ ID NO: 919112 - RNA, 19 nt, Artificial Sequence
  Description of Artificial Sequence: Synthetic oligonucleotide
gucaccucgggaugaaugc

SEQ ID NO: 919113 - RNA, 19 nt, Artificial Sequence
  Description of Artificial Sequence: Synthetic oligonucleotide
cuuggcgaccugcacaccc

SEQ ID NO: 919114 - RNA, 19 nt, Artificial Sequence
  Description of Artificial Sequence: Synthetic oligonucleotide
agcuucgagaguccauccg

SEQ ID NO: 919115 - RNA, 19 nt, Artificial Sequence
  Description of Artificial Sequence: Synthetic oligonucleotide
uguggcgcuugucacgccc

SEQ ID NO: 919116 - RNA, 19 nt, Artificial Sequence
  Description of Artificial Sequence: Synthetic oligonucleotide
ucgaguaucgagccaggaa

SEQ ID NO: 919117 - RNA, 19 nt, Artificial Sequence
  Description of Artificial Sequence: Synthetic oligonucleotide
cucuagacugagcagugac

SEQ ID NO: 919118 - RNA, 19 nt, Artificial Sequence
  Description of Artificial Sequence: Synthetic oligonucleotide
uggcacgacccacacacug

SEQ ID NO: 919119 - RNA, 19 nt, Artificial Sequence
  Description of Artificial Sequence: Synthetic oligonucleotide
aaagaccaugagaccauag

SEQ ID NO: 919120 - RNA, 19 nt, Artificial Sequence
  Description of Artificial Sequence: Synthetic oligonucleotide
auaguggugcacaaaguca

SEQ ID NO: 919121 - RNA, 19 nt, Artificial Sequence
  Description of Artificial Sequence: Synthetic oligonucleotide
ggugacgcacaacagcagg

SEQ ID NO: 919122 - RNA, 19 nt, Artificial Sequence
  Description of Artificial Sequence: Synthetic oligonucleotide
ugagugcaccccuacugcc

SEQ ID NO: 919123 - RNA, 19 nt, Artificial Sequence
  Description of Artificial Sequence: Synthetic oligonucleotide
cuucgagaguccauccggc

SEQ ID NO: 919124 - RNA, 19 nt, Artificial Sequence
  Description of Artificial Sequence: Synthetic oligonucleotide
guaagcaggcuccacccug

SEQ ID NO: 919125 - RNA, 19 nt, Artificial Sequence
  Description of Artificial Sequence: Synthetic oligonucleotide
acguaggggacaccgaaca

SEQ ID NO: 919126 - RNA, 19 nt, Artificial Sequence
  Description of Artificial Sequence: Synthetic oligonucleotide
gagcaaagcgcuugucggc

SEQ ID NO: 919127 - RNA, 19 nt, Artificial Sequence
  Description of Artificial Sequence: Synthetic oligonucleotide
ggugcacaaagucaauccc

SEQ ID NO: 919128 - RNA, 19 nt, Artificial Sequence
  Description of Artificial Sequence: Synthetic oligonucleotide
acgacccacacacugggcu

SEQ ID NO: 919129 - RNA, 19 nt, Artificial Sequence
  Description of Artificial Sequence: Synthetic oligonucleotide
gggaugaaugcacagguuc

SEQ ID NO: 919130 - RNA, 19 nt, Artificial Sequence
  Description of Artificial Sequence: Synthetic oligonucleotide
gcuucgagaguccauccgg

SEQ ID NO: 919131 - RNA, 19 nt, Artificial Sequence
  Description of Artificial Sequence: Synthetic oligonucleotide
gugagugcaccccuacugc

SEQ ID NO: 919132 - RNA, 19 nt, Artificial Sequence
  Description of Artificial Sequence: Synthetic oligonucleotide
uucucgcggaucuggaacu

SEQ ID NO: 919133 - RNA, 19 nt, Artificial Sequence
  Description of Artificial Sequence: Synthetic oligonucleotide
ugcggauuacagcaauauc

SEQ ID NO: 919134 - RNA, 19 nt, Artificial Sequence
  Description of Artificial Sequence: Synthetic oligonucleotide
ggugagugcaccccuacug

SEQ ID NO: 919135 - RNA, 19 nt, Artificial Sequence
  Description of Artificial Sequence: Synthetic oligonucleotide
cucgggaugaaugcacagg

SEQ ID NO: 919136 - RNA, 19 nt, Artificial Sequence
  Description of Artificial Sequence: Synthetic oligonucleotide
ccgaacaugaucacagccc

SEQ ID NO: 919137 - RNA, 19 nt, Artificial Sequence
  Description of Artificial Sequence: Synthetic oligonucleotide
aaugaucauugggcagagg

SEQ ID NO: 919138 - RNA, 19 nt, Artificial Sequence
  Description of Artificial Sequence: Synthetic oligonucleotide
cagacgucacccacagucc

SEQ ID NO: 919139 - RNA, 19 nt, Artificial Sequence
  Description of Artificial Sequence: Synthetic oligonucleotide
cugagcaagaugcccgcgc

SEQ ID NO: 919140 - RNA, 19 nt, Artificial Sequence
  Description of Artificial Sequence: Synthetic oligonucleotide
caauuaaagacuguacucu

SEQ ID NO: 919141 - RNA, 19 nt, Artificial Sequence
  Description of Artificial Sequence: Synthetic oligonucleotide
ggaucgaguaucgagccag

SEQ ID NO: 919142 - RNA, 19 nt, Artificial Sequence
  Description of Artificial Sequence: Synthetic oligonucleotide
guaucgagccaggaaguag

SEQ ID NO: 919143 - RNA, 19 nt, Artificial Sequence
  Description of Artificial Sequence: Synthetic oligonucleotide
ucauuaccacggccaauga

SEQ ID NO: 919144 - RNA, 19 nt, Artificial Sequence
  Description of Artificial Sequence: Synthetic oligonucleotide
uccaucgaggcaguuuccc

SEQ ID NO: 919145 - RNA, 19 nt, Artificial Sequence
  Description of Artificial Sequence: Synthetic oligonucleotide
gagacuuugccccgagcca

SEQ ID NO: 919146 - RNA, 19 nt, Artificial Sequence
  Description of Artificial Sequence: Synthetic oligonucleotide
caagcuucgagaguccauc

SEQ ID NO: 919147 - RNA, 19 nt, Artificial Sequence
  Description of Artificial Sequence: Synthetic oligonucleotide
agacguaggggacaccgaa

SEQ ID NO: 919148 - RNA, 19 nt, Artificial Sequence
  Description of Artificial Sequence: Synthetic oligonucleotide
uugcggauuacagcaauau

SEQ ID NO: 919149 - RNA, 19 nt, Artificial Sequence
  Description of Artificial Sequence: Synthetic oligonucleotide
aguugcggauuacagcaau

SEQ ID NO: 919150 - RNA, 19 nt, Artificial Sequence
  Description of Artificial Sequence: Synthetic oligonucleotide
agguugagguuagagucag

SEQ ID NO: 919151 - RNA, 19 nt, Artificial Sequence
  Description of Artificial Sequence: Synthetic oligonucleotide
ugccccgagccaccgagag

SEQ ID NO: 919152 - RNA, 19 nt, Artificial Sequence
  Description of Artificial Sequence: Synthetic oligonucleotide
gccuaccugaaacagaaca

SEQ ID NO: 919153 - RNA, 19 nt, Artificial Sequence
  Description of Artificial Sequence: Synthetic oligonucleotide
gaguccauccggcggggag

SEQ ID NO: 919154 - RNA, 19 nt, Artificial Sequence
  Description of Artificial Sequence: Synthetic oligonucleotide
gaccaugagaccauagucu

SEQ ID NO: 919155 - RNA, 19 nt, Artificial Sequence
  Description of Artificial Sequence: Synthetic oligonucleotide
ucggccuaccugaaacaga

SEQ ID NO: 919156 - RNA, 19 nt, Artificial Sequence
  Description of Artificial Sequence: Synthetic oligonucleotide
gaagucauucucgcggauc

SEQ ID NO: 919157 - RNA, 19 nt, Artificial Sequence
  Description of Artificial Sequence: Synthetic oligonucleotide
uggucucgcgccuccgagg

SEQ ID NO: 919158 - RNA, 19 nt, Artificial Sequence
  Description of Artificial Sequence: Synthetic oligonucleotide
cgaacaugaucacagcccg

SEQ ID NO: 919159 - RNA, 19 nt, Artificial Sequence
  Description of Artificial Sequence: Synthetic oligonucleotide
agacgucacccacaguccu

SEQ ID NO: 919160 - RNA, 19 nt, Artificial Sequence
  Description of Artificial Sequence: Synthetic oligonucleotide
acguuggcaugcaggaucg

SEQ ID NO: 919161 - RNA, 19 nt, Artificial Sequence
  Description of Artificial Sequence: Synthetic oligonucleotide
ucacacgccucuugguacu

SEQ ID NO: 919162 - RNA, 19 nt, Artificial Sequence
  Description of Artificial Sequence: Synthetic oligonucleotide
ucuugccccucgauggcac

SEQ ID NO: 919163 - RNA, 19 nt, Artificial Sequence
  Description of Artificial Sequence: Synthetic oligonucleotide
gggacaccgaacaugauca

SEQ ID NO: 919164 - RNA, 19 nt, Artificial Sequence
  Description of Artificial Sequence: Synthetic oligonucleotide
agccaccgagagcagaaug

SEQ ID NO: 919165 - RNA, 19 nt, Artificial Sequence
  Description of Artificial Sequence: Synthetic oligonucleotide
uucggcucugaguguagac

SEQ ID NO: 919166 - RNA, 19 nt, Artificial Sequence
  Description of Artificial Sequence: Synthetic oligonucleotide
cacguccuucccaaagcgc

SEQ ID NO: 919167 - RNA, 19 nt, Artificial Sequence
  Description of Artificial Sequence: Synthetic oligonucleotide
aguguagacguaggggaca

SEQ ID NO: 919168 - RNA, 19 nt, Artificial Sequence
  Description of Artificial Sequence: Synthetic oligonucleotide
uagacguaggggacaccga

SEQ ID NO: 919169 - RNA, 19 nt, Artificial Sequence
  Description of Artificial Sequence: Synthetic oligonucleotide
gcaggaucgaguaucgagc

SEQ ID NO: 919170 - RNA, 19 nt, Artificial Sequence
  Description of Artificial Sequence: Synthetic oligonucleotide
gaucgaguaucgagccagg

SEQ ID NO: 919171 - RNA, 19 nt, Artificial Sequence
  Description of Artificial Sequence: Synthetic oligonucleotide
gacgcucuggcagcggucc

SEQ ID NO: 919172 - RNA, 19 nt, Artificial Sequence
  Description of Artificial Sequence: Synthetic oligonucleotide
caucaaaaggugaggaagu

SEQ ID NO: 919173 - RNA, 19 nt, Artificial Sequence
  Description of Artificial Sequence: Synthetic oligonucleotide
cuuugcccgccccacucgg

SEQ ID NO: 919174 - RNA, 19 nt, Artificial Sequence
  Description of Artificial Sequence: Synthetic oligonucleotide
gcuugucacgcccacuucc

SEQ ID NO: 919175 - RNA, 19 nt, Artificial Sequence
  Description of Artificial Sequence: Synthetic oligonucleotide
auguugugggcuucaucga

SEQ ID NO: 919176 - RNA, 19 nt, Artificial Sequence
  Description of Artificial Sequence: Synthetic oligonucleotide
acggugcuuuccauguggc

SEQ ID NO: 919177 - RNA, 19 nt, Artificial Sequence
  Description of Artificial Sequence: Synthetic oligonucleotide
cugugcgaucugcucaacc

SEQ ID NO: 919178 - RNA, 19 nt, Artificial Sequence
  Description of Artificial Sequence: Synthetic oligonucleotide
gucagguugagguuagagu

SEQ ID NO: 919179 - RNA, 19 nt, Artificial Sequence
  Description of Artificial Sequence: Synthetic oligonucleotide
ggucucgcgccuccgaggg

SEQ ID NO: 919180 - RNA, 19 nt, Artificial Sequence
  Description of Artificial Sequence: Synthetic oligonucleotide
gaguguagacguaggggac

SEQ ID NO: 919181 - RNA, 19 nt, Artificial Sequence
  Description of Artificial Sequence: Synthetic oligonucleotide
caugaucacagcccgccca

SEQ ID NO: 919182 - RNA, 19 nt, Artificial Sequence
  Description of Artificial Sequence: Synthetic oligonucleotide
uuggcgaccugcacacccu

SEQ ID NO: 919183 - RNA, 19 nt, Artificial Sequence
  Description of Artificial Sequence: Synthetic oligonucleotide
acguccuucccaaagcgca

SEQ ID NO: 919184 - RNA, 19 nt, Artificial Sequence
  Description of Artificial Sequence: Synthetic oligonucleotide
gacaccgaacaugaucaca

SEQ ID NO: 919185 - RNA, 19 nt, Artificial Sequence
  Description of Artificial Sequence: Synthetic oligonucleotide
agcaaagcgcuugucggca

SEQ ID NO: 919186 - RNA, 19 nt, Artificial Sequence
  Description of Artificial Sequence: Synthetic oligonucleotide
acagcccgcccauaguggu

SEQ ID NO: 919187 - RNA, 19 nt, Artificial Sequence
  Description of Artificial Sequence: Synthetic oligonucleotide
cggccaaugaucauugggc

SEQ ID NO: 919188 - RNA, 19 nt, Artificial Sequence
  Description of Artificial Sequence: Synthetic oligonucleotide
gcggauuacagcaauaucu

SEQ ID NO: 919189 - RNA, 19 nt, Artificial Sequence
  Description of Artificial Sequence: Synthetic oligonucleotide
cucggccuaccugaaacag

SEQ ID NO: 919190 - RNA, 19 nt, Artificial Sequence
  Description of Artificial Sequence: Synthetic oligonucleotide
ucggugagugcaccccuac

SEQ ID NO: 919191 - RNA, 19 nt, Artificial Sequence
  Description of Artificial Sequence: Synthetic oligonucleotide
gucagcccgagcaaagcgc

SEQ ID NO: 919192 - RNA, 19 nt, Artificial Sequence
  Description of Artificial Sequence: Synthetic oligonucleotide
cuucaucgaagaccacgac

SEQ ID NO: 919193 - RNA, 19 nt, Artificial Sequence
  Description of Artificial Sequence: Synthetic oligonucleotide
cuugucacgcccacuucca

SEQ ID NO: 919194 - RNA, 19 nt, Artificial Sequence
  Description of Artificial Sequence: Synthetic oligonucleotide
gacacuugccguccacguc

SEQ ID NO: 919195 - RNA, 19 nt, Artificial Sequence
  Description of Artificial Sequence: Synthetic oligonucleotide
uugcccgccccacucggug

SEQ ID NO: 919196 - RNA, 19 nt, Artificial Sequence
  Description of Artificial Sequence: Synthetic oligonucleotide
guccgugggcaucaaacuc

SEQ ID NO: 919197 - RNA, 19 nt, Artificial Sequence
  Description of Artificial Sequence: Synthetic oligonucleotide
uaguugcggauuacagcaa

SEQ ID NO: 919198 - RNA, 19 nt, Artificial Sequence
  Description of Artificial Sequence: Synthetic oligonucleotide
gcggcagugaggcaggcug

SEQ ID NO: 919199 - RNA, 19 nt, Artificial Sequence
  Description of Artificial Sequence: Synthetic oligonucleotide
ucaccucgggaugaaugca

SEQ ID NO: 919200 - RNA, 19 nt, Artificial Sequence
  Description of Artificial Sequence: Synthetic oligonucleotide
caucgaagaccacgacggc

SEQ ID NO: 919201 - RNA, 19 nt, Artificial Sequence
  Description of Artificial Sequence: Synthetic oligonucleotide
gacgcacaacagcagguaa

SEQ ID NO: 919202 - RNA, 19 nt, Artificial Sequence
  Description of Artificial Sequence: Synthetic oligonucleotide
cucaacccgccguagcguc

SEQ ID NO: 919203 - RNA, 19 nt, Artificial Sequence
  Description of Artificial Sequence: Synthetic oligonucleotide
aggaucgaguaucgagcca

SEQ ID NO: 919204 - RNA, 19 nt, Artificial Sequence
  Description of Artificial Sequence: Synthetic oligonucleotide
aggcugugacacuugccgu

SEQ ID NO: 919205 - RNA, 19 nt, Artificial Sequence
  Description of Artificial Sequence: Synthetic oligonucleotide
uugccguaguugcggauua

SEQ ID NO: 919206 - RNA, 19 nt, Artificial Sequence
  Description of Artificial Sequence: Synthetic oligonucleotide
guggugucaccucgggaug

SEQ ID NO: 919207 - RNA, 19 nt, Artificial Sequence
  Description of Artificial Sequence: Synthetic oligonucleotide
cuucccgguggaaggguug

SEQ ID NO: 919208 - RNA, 19 nt, Artificial Sequence
  Description of Artificial Sequence: Synthetic oligonucleotide
acucggugagugcaccccu

SEQ ID NO: 919209 - RNA, 19 nt, Artificial Sequence
  Description of Artificial Sequence: Synthetic oligonucleotide
gagggauucggcucugagu

SEQ ID NO: 919210 - RNA, 19 nt, Artificial Sequence
  Description of Artificial Sequence: Synthetic oligonucleotide
auccaucgaggcaguuucc

SEQ ID NO: 919211 - RNA, 19 nt, Artificial Sequence
  Description of Artificial Sequence: Synthetic oligonucleotide
cuugccccucgauggcacg

SEQ ID NO: 919212 - RNA, 19 nt, Artificial Sequence
  Description of Artificial Sequence: Synthetic oligonucleotide
ucaacccgccguagcgucu

SEQ ID NO: 919213 - RNA, 19 nt, Artificial Sequence
  Description of Artificial Sequence: Synthetic oligonucleotide
gggagauugccugaggguc

SEQ ID NO: 919214 - RNA, 19 nt, Artificial Sequence
  Description of Artificial Sequence: Synthetic oligonucleotide
cuccccagguccugcguag

SEQ ID NO: 919215 - RNA, 19 nt, Artificial Sequence
  Description of Artificial Sequence: Synthetic oligonucleotide
cuggucucgcgccuccgag

SEQ ID NO: 919216 - RNA, 19 nt, Artificial Sequence
  Description of Artificial Sequence: Synthetic oligonucleotide
agcuguaaaccaccacguu

SEQ ID NO: 919217 - RNA, 19 nt, Artificial Sequence
  Description of Artificial Sequence: Synthetic oligonucleotide
ccaccuggucauuaccacg

SEQ ID NO: 919218 - RNA, 19 nt, Artificial Sequence
  Description of Artificial Sequence: Synthetic oligonucleotide
ccuuugagggauucggcuc

SEQ ID NO: 919219 - RNA, 19 nt, Artificial Sequence
  Description of Artificial Sequence: Synthetic oligonucleotide
ccguaguugcggauuacag

SEQ ID NO: 919220 - RNA, 19 nt, Artificial Sequence
  Description of Artificial Sequence: Synthetic oligonucleotide
gacguaggggacaccgaac

SEQ ID NO: 919221 - RNA, 19 nt, Artificial Sequence
  Description of Artificial Sequence: Synthetic oligonucleotide
aagcgcuugucggcaaaga

SEQ ID NO: 919222 - RNA, 19 nt, Artificial Sequence
  Description of Artificial Sequence: Synthetic oligonucleotide
ucuucccgguggaaggguu

SEQ ID NO: 919223 - RNA, 19 nt, Artificial Sequence
  Description of Artificial Sequence: Synthetic oligonucleotide
gcaugcaggaucgaguauc

SEQ ID NO: 919224 - RNA, 19 nt, Artificial Sequence
  Description of Artificial Sequence: Synthetic oligonucleotide
uggugucaccucgggauga

SEQ ID NO: 919225 - RNA, 19 nt, Artificial Sequence
  Description of Artificial Sequence: Synthetic oligonucleotide
uuacacucauggagucgau

SEQ ID NO: 919226 - RNA, 19 nt, Artificial Sequence
  Description of Artificial Sequence: Synthetic oligonucleotide
agaguccugcgggugaggu

SEQ ID NO: 919227 - RNA, 19 nt, Artificial Sequence
  Description of Artificial Sequence: Synthetic oligonucleotide
gcgggucugagacauuccc

SEQ ID NO: 919228 - RNA, 19 nt, Artificial Sequence
  Description of Artificial Sequence: Synthetic oligonucleotide
agcccgagcaaagcgcuug

SEQ ID NO: 919229 - RNA, 19 nt, Artificial Sequence
  Description of Artificial Sequence: Synthetic oligonucleotide
cugagacuuugccccgagc

SEQ ID NO: 919230 - RNA, 19 nt, Artificial Sequence
  Description of Artificial Sequence: Synthetic oligonucleotide
gacgucacccacaguccug

SEQ ID NO: 919231 - RNA, 19 nt, Artificial Sequence
  Description of Artificial Sequence: Synthetic oligonucleotide
cacggccaaugaucauugg

SEQ ID NO: 919232 - RNA, 19 nt, Artificial Sequence
  Description of Artificial Sequence: Synthetic oligonucleotide
ugcguggcgcauggcauca

SEQ ID NO: 919233 - RNA, 19 nt, Artificial Sequence
  Description of Artificial Sequence: Synthetic oligonucleotide
gcaguggugucaccucggg

SEQ ID NO: 919234 - RNA, 19 nt, Artificial Sequence
  Description of Artificial Sequence: Synthetic oligonucleotide
uucccgguggaaggguuga

SEQ ID NO: 919235 - RNA, 19 nt, Artificial Sequence
  Description of Artificial Sequence: Synthetic oligonucleotide
aucugcucaacccgccgua

SEQ ID NO: 919236 - RNA, 19 nt, Artificial Sequence
  Description of Artificial Sequence: Synthetic oligonucleotide
ccauguccccacauguccc

SEQ ID NO: 919237 - RNA, 19 nt, Artificial Sequence
  Description of Artificial Sequence: Synthetic oligonucleotide
gccucggccuaccugaaac

SEQ ID NO: 919238 - RNA, 19 nt, Artificial Sequence
  Description of Artificial Sequence: Synthetic oligonucleotide
uaggcgggccuuugaggga

SEQ ID NO: 919239 - RNA, 19 nt, Artificial Sequence
  Description of Artificial Sequence: Synthetic oligonucleotide
gcgcuugucggcaaagacc

SEQ ID NO: 919240 - RNA, 19 nt, Artificial Sequence
  Description of Artificial Sequence: Synthetic oligonucleotide
uguccccgugcccucccca

SEQ ID NO: 919241 - RNA, 19 nt, Artificial Sequence
  Description of Artificial Sequence: Synthetic oligonucleotide
gcuucaucgaagaccacga

SEQ ID NO: 919242 - RNA, 19 nt, Artificial Sequence
  Description of Artificial Sequence: Synthetic oligonucleotide
gaagaccacgacggccuug

SEQ ID NO: 919243 - RNA, 19 nt, Artificial Sequence
  Description of Artificial Sequence: Synthetic oligonucleotide
cucgcggaucuggaacugg

SEQ ID NO: 919244 - RNA, 19 nt, Artificial Sequence
  Description of Artificial Sequence: Synthetic oligonucleotide
aguaucgagccaggaagua

SEQ ID NO: 919245 - RNA, 19 nt, Artificial Sequence
  Description of Artificial Sequence: Synthetic oligonucleotide
acucuaggcgggccuuuga

SEQ ID NO: 919246 - RNA, 19 nt, Artificial Sequence
  Description of Artificial Sequence: Synthetic oligonucleotide
ucucgcggaucuggaacug

SEQ ID NO: 919247 - RNA, 19 nt, Artificial Sequence
  Description of Artificial Sequence: Synthetic oligonucleotide
cacguuugucagcccgagc

SEQ ID NO: 919248 - RNA, 19 nt, Artificial Sequence
  Description of Artificial Sequence: Synthetic oligonucleotide
agguugccguaguugcgga

SEQ ID NO: 919249 - RNA, 19 nt, Artificial Sequence
  Description of Artificial Sequence: Synthetic oligonucleotide
aucgaguaucgagccagga

SEQ ID NO: 919250 - RNA, 19 nt, Artificial Sequence
  Description of Artificial Sequence: Synthetic oligonucleotide
cacgacccacacacugggc

SEQ ID NO: 919251 - RNA, 19 nt, Artificial Sequence
  Description of Artificial Sequence: Synthetic oligonucleotide
cucauaccaggaggccacg

SEQ ID NO: 919252 - RNA, 19 nt, Artificial Sequence
  Description of Artificial Sequence: Synthetic oligonucleotide
ccaaugaucauugggcaga

SEQ ID NO: 919253 - RNA, 19 nt, Artificial Sequence
  Description of Artificial Sequence: Synthetic oligonucleotide
uccccagguccugcguagg

SEQ ID NO: 919254 - RNA, 19 nt, Artificial Sequence
  Description of Artificial Sequence: Synthetic oligonucleotide
ccggcggggagugagaagc

SEQ ID NO: 919255 - RNA, 19 nt, Artificial Sequence
  Description of Artificial Sequence: Synthetic oligonucleotide
agcauggcgggcgcugcag

SEQ ID NO: 919256 - RNA, 19 nt, Artificial Sequence
  Description of Artificial Sequence: Synthetic oligonucleotide
gugcacaaagucaaucccu

SEQ ID NO: 919257 - RNA, 19 nt, Artificial Sequence
  Description of Artificial Sequence: Synthetic oligonucleotide
ggaaggguugagccaucug

SEQ ID NO: 919258 - RNA, 19 nt, Artificial Sequence
  Description of Artificial Sequence: Synthetic oligonucleotide
ccgagagcagaauggcccc

SEQ ID NO: 919259 - RNA, 19 nt, Artificial Sequence
  Description of Artificial Sequence: Synthetic oligonucleotide
cugcguggcgcauggcauc

SEQ ID NO: 919260 - RNA, 19 nt, Artificial Sequence
  Description of Artificial Sequence: Synthetic oligonucleotide
gcugugacacuugccgucc

SEQ ID NO: 919261 - RNA, 19 nt, Artificial Sequence
  Description of Artificial Sequence: Synthetic oligonucleotide
acggucagguugagguuag

SEQ ID NO: 919262 - RNA, 19 nt, Artificial Sequence
  Description of Artificial Sequence: Synthetic oligonucleotide
agaccacgacggccuugcg

SEQ ID NO: 919263 - RNA, 19 nt, Artificial Sequence
  Description of Artificial Sequence: Synthetic oligonucleotide
cauucucgcggaucuggaa

SEQ ID NO: 919264 - RNA, 19 nt, Artificial Sequence
  Description of Artificial Sequence: Synthetic oligonucleotide
uggcgaccugcacacccuc

SEQ ID NO: 919265 - RNA, 19 nt, Artificial Sequence
  Description of Artificial Sequence: Synthetic oligonucleotide
ccugcaauuaaagacugua

SEQ ID NO: 919266 - RNA, 19 nt, Artificial Sequence
  Description of Artificial Sequence: Synthetic oligonucleotide
cacgacggccuugcgggcc

SEQ ID NO: 919267 - RNA, 19 nt, Artificial Sequence
  Description of Artificial Sequence: Synthetic oligonucleotide
uugccccucgauggcacga

SEQ ID NO: 919268 - RNA, 19 nt, Artificial Sequence
  Description of Artificial Sequence: Synthetic oligonucleotide
cugcucuagacugagcagu

SEQ ID NO: 919269 - RNA, 19 nt, Artificial Sequence
  Description of Artificial Sequence: Synthetic oligonucleotide
gcguccgugggcaucaaac

SEQ ID NO: 919270 - RNA, 19 nt, Artificial Sequence
  Description of Artificial Sequence: Synthetic oligonucleotide
acgacggccuugcgggcca

SEQ ID NO: 919271 - RNA, 19 nt, Artificial Sequence
  Description of Artificial Sequence: Synthetic oligonucleotide
cccacuuccaugucccguc

SEQ ID NO: 919272 - RNA, 19 nt, Artificial Sequence
  Description of Artificial Sequence: Synthetic oligonucleotide
agcgucuccucugacugua

SEQ ID NO: 919273 - RNA, 19 nt, Artificial Sequence
  Description of Artificial Sequence: Synthetic oligonucleotide
cauaugaggcugugaggcu

SEQ ID NO: 919274 - RNA, 19 nt, Artificial Sequence
  Description of Artificial Sequence: Synthetic oligonucleotide
uccuggugccacagacguc

SEQ ID NO: 919275 - RNA, 19 nt, Artificial Sequence
  Description of Artificial Sequence: Synthetic oligonucleotide
ugcaccccuacugccuccu

SEQ ID NO: 919276 - RNA, 19 nt, Artificial Sequence
  Description of Artificial Sequence: Synthetic oligonucleotide
ccgaggggagagcauggcg

SEQ ID NO: 919277 - RNA, 19 nt, Artificial Sequence
  Description of Artificial Sequence: Synthetic oligonucleotide
ugcccgccccacucgguga

SEQ ID NO: 919278 - RNA, 19 nt, Artificial Sequence
  Description of Artificial Sequence: Synthetic oligonucleotide
cgcacaacagcagguaagc

SEQ ID NO: 919279 - RNA, 19 nt, Artificial Sequence
  Description of Artificial Sequence: Synthetic oligonucleotide
uucccacguuugucagccc

SEQ ID NO: 919280 - RNA, 19 nt, Artificial Sequence
  Description of Artificial Sequence: Synthetic oligonucleotide
ggaugaaugcacagguucu

SEQ ID NO: 919281 - RNA, 19 nt, Artificial Sequence
  Description of Artificial Sequence: Synthetic oligonucleotide
gucaaucccuucugagacu

SEQ ID NO: 919282 - RNA, 19 nt, Artificial Sequence
  Description of Artificial Sequence: Synthetic oligonucleotide
ggucucaaauuuggagcug

SEQ ID NO: 919283 - RNA, 19 nt, Artificial Sequence
  Description of Artificial Sequence: Synthetic oligonucleotide
ccucgggaugaaugcacag

SEQ ID NO: 919284 - RNA, 19 nt, Artificial Sequence
  Description of Artificial Sequence: Synthetic oligonucleotide
uccugcguaggagcagcuc

SEQ ID NO: 919285 - RNA, 19 nt, Artificial Sequence
  Description of Artificial Sequence: Synthetic oligonucleotide
gucggggaccacagcagac

SEQ ID NO: 919286 - RNA, 19 nt, Artificial Sequence
  Description of Artificial Sequence: Synthetic oligonucleotide
ccccucgauggcacgaccc

SEQ ID NO: 919287 - RNA, 19 nt, Artificial Sequence
  Description of Artificial Sequence: Synthetic oligonucleotide
caucugccgcaggaaguac

SEQ ID NO: 919288 - RNA, 19 nt, Artificial Sequence
  Description of Artificial Sequence: Synthetic oligonucleotide
guugcggauuacagcaaua

SEQ ID NO: 919289 - RNA, 19 nt, Artificial Sequence
  Description of Artificial Sequence: Synthetic oligonucleotide
gcgcauggcaucaaaaggu

SEQ ID NO: 919290 - RNA, 19 nt, Artificial Sequence
  Description of Artificial Sequence: Synthetic oligonucleotide
gccguuuucacacgccucu

SEQ ID NO: 919291 - RNA, 19 nt, Artificial Sequence
  Description of Artificial Sequence: Synthetic oligonucleotide
ucccgguggaaggguugag

SEQ ID NO: 919292 - RNA, 19 nt, Artificial Sequence
  Description of Artificial Sequence: Synthetic oligonucleotide
uaccacggccaaugaucau

SEQ ID NO: 919293 - RNA, 19 nt, Artificial Sequence
  Description of Artificial Sequence: Synthetic oligonucleotide
ggacaccgaacaugaucac

SEQ ID NO: 919294 - RNA, 19 nt, Artificial Sequence
  Description of Artificial Sequence: Synthetic oligonucleotide
acacuggucucugccccgu

SEQ ID NO: 919295 - RNA, 19 nt, Artificial Sequence
  Description of Artificial Sequence: Synthetic oligonucleotide
ugccguaguugcggauuac

SEQ ID NO: 919296 - RNA, 19 nt, Artificial Sequence
  Description of Artificial Sequence: Synthetic oligonucleotide
cagcccgcccauaguggug

SEQ ID NO: 919297 - RNA, 19 nt, Artificial Sequence
  Description of Artificial Sequence: Synthetic oligonucleotide
gucucgcgccuccgagggg

SEQ ID NO: 919298 - RNA, 19 nt, Artificial Sequence
  Description of Artificial Sequence: Synthetic oligonucleotide
gagauugccugaggguccu

SEQ ID NO: 919299 - RNA, 19 nt, Artificial Sequence
  Description of Artificial Sequence: Synthetic oligonucleotide
gccgcaggaaguacuuggc

SEQ ID NO: 919300 - RNA, 19 nt, Artificial Sequence
  Description of Artificial Sequence: Synthetic oligonucleotide
gugacgcacaacagcaggu

SEQ ID NO: 919301 - RNA, 19 nt, Artificial Sequence
  Description of Artificial Sequence: Synthetic oligonucleotide
ccccgagccaccgagagca

SEQ ID NO: 919302 - RNA, 19 nt, Artificial Sequence
  Description of Artificial Sequence: Synthetic oligonucleotide
gcaccuggcguccgugggc

SEQ ID NO: 919303 - RNA, 19 nt, Artificial Sequence
  Description of Artificial Sequence: Synthetic oligonucleotide
caacccgccguagcgucuc

SEQ ID NO: 919304 - RNA, 19 nt, Artificial Sequence
  Description of Artificial Sequence: Synthetic oligonucleotide
ccgucggggaccacagcag

SEQ ID NO: 919305 - RNA, 19 nt, Artificial Sequence
  Description of Artificial Sequence: Synthetic oligonucleotide
guugccguaguugcggauu

SEQ ID NO: 919306 - RNA, 19 nt, Artificial Sequence
  Description of Artificial Sequence: Synthetic oligonucleotide
cacgccucuugguacuucu

SEQ ID NO: 919307 - RNA, 19 nt, Artificial Sequence
  Description of Artificial Sequence: Synthetic oligonucleotide
ggauucggcucugagugua

SEQ ID NO: 919308 - RNA, 19 nt, Artificial Sequence
  Description of Artificial Sequence: Synthetic oligonucleotide
gcuguacaaggagauccuc

SEQ ID NO: 919309 - RNA, 19 nt, Artificial Sequence
  Description of Artificial Sequence: Synthetic oligonucleotide
cucgcgccuccgaggggag

SEQ ID NO: 919310 - RNA, 19 nt, Artificial Sequence
  Description of Artificial Sequence: Synthetic oligonucleotide
gaggggcaccuggcguccg

SEQ ID NO: 919311 - RNA, 19 nt, Artificial Sequence
  Description of Artificial Sequence: Synthetic oligonucleotide
caugucccgucugcuccac

SEQ ID NO: 919312 - RNA, 19 nt, Artificial Sequence
  Description of Artificial Sequence: Synthetic oligonucleotide
caaagaccaugagaccaua

SEQ ID NO: 919313 - RNA, 19 nt, Artificial Sequence
  Description of Artificial Sequence: Synthetic oligonucleotide
gggcgggucugagacauuc

SEQ ID NO: 919314 - RNA, 19 nt, Artificial Sequence
  Description of Artificial Sequence: Synthetic oligonucleotide
gccguaguugcggauuaca

SEQ ID NO: 919315 - RNA, 19 nt, Artificial Sequence
  Description of Artificial Sequence: Synthetic oligonucleotide
cgcaguggugucaccucgg

SEQ ID NO: 919316 - RNA, 19 nt, Artificial Sequence
  Description of Artificial Sequence: Synthetic oligonucleotide
cauccggcggggagugaga

SEQ ID NO: 919317 - RNA, 19 nt, Artificial Sequence
  Description of Artificial Sequence: Synthetic oligonucleotide
gcaagaugcccgcgcccug

SEQ ID NO: 919318 - RNA, 19 nt, Artificial Sequence
  Description of Artificial Sequence: Synthetic oligonucleotide
caccuggcguccgugggca

SEQ ID NO: 919319 - RNA, 19 nt, Artificial Sequence
  Description of Artificial Sequence: Synthetic oligonucleotide
ccauccggcggggagugag

SEQ ID NO: 919320 - RNA, 19 nt, Artificial Sequence
  Description of Artificial Sequence: Synthetic oligonucleotide
cccgguggaaggguugagc

SEQ ID NO: 919321 - RNA, 19 nt, Artificial Sequence
  Description of Artificial Sequence: Synthetic oligonucleotide
ccaucgaggcaguuuccca

SEQ ID NO: 919322 - RNA, 19 nt, Artificial Sequence
  Description of Artificial Sequence: Synthetic oligonucleotide
cggccuaccugaaacagaa

SEQ ID NO: 919323 - RNA, 19 nt, Artificial Sequence
  Description of Artificial Sequence: Synthetic oligonucleotide
cccaaagcgcagugguguc

SEQ ID NO: 919324 - RNA, 19 nt, Artificial Sequence
  Description of Artificial Sequence: Synthetic oligonucleotide
gguaagcaggcuccacccu

SEQ ID NO: 919325 - RNA, 19 nt, Artificial Sequence
  Description of Artificial Sequence: Synthetic oligonucleotide
cccgccauguccccacaug

SEQ ID NO: 919326 - RNA, 19 nt, Artificial Sequence
  Description of Artificial Sequence: Synthetic oligonucleotide
cacccucguccacggucag

SEQ ID NO: 919327 - RNA, 19 nt, Artificial Sequence
  Description of Artificial Sequence: Synthetic oligonucleotide
ccggccguuuucacacgcc

SEQ ID NO: 919328 - RNA, 19 nt, Artificial Sequence
  Description of Artificial Sequence: Synthetic oligonucleotide
cugugacacuugccgucca

SEQ ID NO: 919329 - RNA, 19 nt, Artificial Sequence
  Description of Artificial Sequence: Synthetic oligonucleotide
cccggccguuuucacacgc

SEQ ID NO: 919330 - RNA, 19 nt, Artificial Sequence
  Description of Artificial Sequence: Synthetic oligonucleotide
gccguagcgucuccucuga

SEQ ID NO: 919331 - RNA, 19 nt, Artificial Sequence
  Description of Artificial Sequence: Synthetic oligonucleotide
ggcgggucugagacauucc

SEQ ID NO: 919332 - RNA, 19 nt, Artificial Sequence
  Description of Artificial Sequence: Synthetic oligonucleotide
ugccccguccugggucuca

SEQ ID NO: 919333 - RNA, 19 nt, Artificial Sequence
  Description of Artificial Sequence: Synthetic oligonucleotide
agauugccugaggguccug

SEQ ID NO: 919334 - RNA, 19 nt, Artificial Sequence
  Description of Artificial Sequence: Synthetic oligonucleotide
auggcacgacccacacacu

SEQ ID NO: 919335 - RNA, 19 nt, Artificial Sequence
  Description of Artificial Sequence: Synthetic oligonucleotide
gcagcucccugcaauuaaa

SEQ ID NO: 919336 - RNA, 19 nt, Artificial Sequence
  Description of Artificial Sequence: Synthetic oligonucleotide
ggccguuuucacacgccuc

SEQ ID NO: 919337 - RNA, 19 nt, Artificial Sequence
  Description of Artificial Sequence: Synthetic oligonucleotide
gcaaagaccaugagaccau

SEQ ID NO: 919338 - RNA, 19 nt, Artificial Sequence
  Description of Artificial Sequence: Synthetic oligonucleotide
guggaaggguugagccauc

SEQ ID NO: 919339 - RNA, 19 nt, Artificial Sequence
  Description of Artificial Sequence: Synthetic oligonucleotide
gcccgccccacucggugag

SEQ ID NO: 919340 - RNA, 19 nt, Artificial Sequence
  Description of Artificial Sequence: Synthetic oligonucleotide
ucgcgccuccgaggggaga

SEQ ID NO: 919341 - RNA, 19 nt, Artificial Sequence
  Description of Artificial Sequence: Synthetic oligonucleotide
cccgccguagcgucuccuc

SEQ ID NO: 919342 - RNA, 19 nt, Artificial Sequence
  Description of Artificial Sequence: Synthetic oligonucleotide
ggugucaccucgggaugaa

SEQ ID NO: 919343 - RNA, 19 nt, Artificial Sequence
  Description of Artificial Sequence: Synthetic oligonucleotide
gggauucggcucugagugu

SEQ ID NO: 919344 - RNA, 19 nt, Artificial Sequence
  Description of Artificial Sequence: Synthetic oligonucleotide
gcgcuugucacgcccacuu

SEQ ID NO: 919345 - RNA, 19 nt, Artificial Sequence
  Description of Artificial Sequence: Synthetic oligonucleotide
ggccuaccugaaacagaac

SEQ ID NO: 919346 - RNA, 19 nt, Artificial Sequence
  Description of Artificial Sequence: Synthetic oligonucleotide
ccacgacggccuugcgggc

SEQ ID NO: 919347 - RNA, 19 nt, Artificial Sequence
  Description of Artificial Sequence: Synthetic oligonucleotide
ccgcccauaguggugcaca

SEQ ID NO: 919348 - RNA, 19 nt, Artificial Sequence
  Description of Artificial Sequence: Synthetic oligonucleotide
cguagcgucuccucugacu

SEQ ID NO: 919349 - RNA, 19 nt, Artificial Sequence
  Description of Artificial Sequence: Synthetic oligonucleotide
cggcucugaguguagacgu

SEQ ID NO: 919350 - RNA, 19 nt, Artificial Sequence
  Description of Artificial Sequence: Synthetic oligonucleotide
ccccggccguuuucacacg

SEQ ID NO: 919351 - RNA, 19 nt, Artificial Sequence
  Description of Artificial Sequence: Synthetic oligonucleotide
ccgcacauaugaggcugug

SEQ ID NO: 919352 - RNA, 19 nt, Artificial Sequence
  Description of Artificial Sequence: Synthetic oligonucleotide
ccguagcgucuccucugac

SEQ ID NO: 919353 - RNA, 19 nt, Artificial Sequence
  Description of Artificial Sequence: Synthetic oligonucleotide
gcucaacccgccguagcgu

SEQ ID NO: 919354 - RNA, 19 nt, Artificial Sequence
  Description of Artificial Sequence: Synthetic oligonucleotide
cguccgugggcaucaaacu

SEQ ID NO: 919355 - RNA, 19 nt, Artificial Sequence
  Description of Artificial Sequence: Synthetic oligonucleotide
cgucggggaccacagcaga

SEQ ID NO: 919356 - RNA, 19 nt, Artificial Sequence
  Description of Artificial Sequence: Synthetic oligonucleotide
cgcccacuuccaugucccg

SEQ ID NO: 919357 - RNA, 19 nt, Artificial Sequence
  Description of Artificial Sequence: Synthetic oligonucleotide
cgcuugucacgcccacuuc

SEQ ID NO: 919358 - RNA, 19 nt, Artificial Sequence
  Description of Artificial Sequence: Synthetic oligonucleotide
ggcguccgugggcaucaaa

SEQ ID NO: 919359 - RNA, 19 nt, Artificial Sequence
  Description of Artificial Sequence: Synthetic oligonucleotide
cccgagccaccgagagcag

SEQ ID NO: 919360 - RNA, 19 nt, Artificial Sequence
  Description of Artificial Sequence: Synthetic oligonucleotide
ccgccccacucggugagug

SEQ ID NO: 919361 - RNA, 19 nt, Artificial Sequence
  Description of Artificial Sequence: Synthetic oligonucleotide
gcgggccuuugagggauuc

SEQ ID NO: 919362 - RNA, 19 nt, Artificial Sequence
  Description of Artificial Sequence: Synthetic oligonucleotide
ccugcgggugagguuuaca

SEQ ID NO: 919363 - RNA, 19 nt, Artificial Sequence
  Description of Artificial Sequence: Synthetic oligonucleotide
cgcacauaugaggcuguga

SEQ ID NO: 919364 - RNA, 19 nt, Artificial Sequence
  Description of Artificial Sequence: Synthetic oligonucleotide
ggccucggccuaccugaaa

SEQ ID NO: 919365 - RNA, 19 nt, Artificial Sequence
  Description of Artificial Sequence: Synthetic oligonucleotide
guccugcguaggagcagcu

SEQ ID NO: 919366 - RNA, 19 nt, Artificial Sequence
  Description of Artificial Sequence: Synthetic oligonucleotide
uggcguccgugggcaucaa

SEQ ID NO: 919367 - RNA, 19 nt, Artificial Sequence
  Description of Artificial Sequence: Synthetic oligonucleotide
gcccgagcaaagcgcuugu

SEQ ID NO: 919368 - RNA, 19 nt, Artificial Sequence
  Description of Artificial Sequence: Synthetic oligonucleotide
gcgccuccgaggggagagc

SEQ ID NO: 919369 - RNA, 19 nt, Artificial Sequence
  Description of Artificial Sequence: Synthetic oligonucleotide
cugccccguccugggucuc

SEQ ID NO: 919370 - RNA, 19 nt, Artificial Sequence
  Description of Artificial Sequence: Synthetic oligonucleotide
ggcgggcgcugcaggguga

SEQ ID NO: 919371 - RNA, 19 nt, Artificial Sequence
  Description of Artificial Sequence: Synthetic oligonucleotide
ggcgcuugucacgcccacu

SEQ ID NO: 919372 - RNA, 19 nt, Artificial Sequence
  Description of Artificial Sequence: Synthetic oligonucleotide
cagcccgagcaaagcgcuu

SEQ ID NO: 919373 - RNA, 19 nt, Artificial Sequence
  Description of Artificial Sequence: Synthetic oligonucleotide
cggccguuuucacacgccu

SEQ ID NO: 919374 - RNA, 19 nt, Artificial Sequence
  Description of Artificial Sequence: Synthetic oligonucleotide
ccgcaggccucggccuacc

SEQ ID NO: 919375 - RNA, 19 nt, Artificial Sequence
  Description of Artificial Sequence: Synthetic oligonucleotide
cguaggggacaccgaacau

SEQ ID NO: 919376 - RNA, 19 nt, Artificial Sequence
  Description of Artificial Sequence: Synthetic oligonucleotide
cgccuccgaggggagagca

SEQ ID NO: 919377 - RNA, 19 nt, Artificial Sequence
  Description of Artificial Sequence: Synthetic oligonucleotide
cggugagugcaccccuacu

SEQ ID NO: 919378 - RNA, 19 nt, Artificial Sequence
  Description of Artificial Sequence: Synthetic oligonucleotide
gcuugucggcaaagaccau

SEQ ID NO: 919379 - RNA, 19 nt, Artificial Sequence
  Description of Artificial Sequence: Synthetic oligonucleotide
ccacguuggcaugcaggau

SEQ ID NO: 919380 - RNA, 19 nt, Artificial Sequence
  Description of Artificial Sequence: Synthetic oligonucleotide
gcguggcgcauggcaucaa

SEQ ID NO: 919381 - RNA, 19 nt, Artificial Sequence
  Description of Artificial Sequence: Synthetic oligonucleotide
gcgcccugccccggcccuc

SEQ ID NO: 919382 - RNA, 19 nt, Artificial Sequence
  Description of Artificial Sequence: Synthetic oligonucleotide
cgacggccuugcgggccag

SEQ ID NO: 919383 - RNA, 19 nt, Artificial Sequence
  Description of Artificial Sequence: Synthetic oligonucleotide
cggcggggagugagaagcu

SEQ ID NO: 919384 - RNA, 19 nt, Artificial Sequence
  Description of Artificial Sequence: Synthetic oligonucleotide
ccccgccauguccccacau

SEQ ID NO: 919385 - RNA, 19 nt, Artificial Sequence
  Description of Artificial Sequence: Synthetic oligonucleotide
ggcgggccuuugagggauu

SEQ ID NO: 919386 - RNA, 19 nt, Artificial Sequence
  Description of Artificial Sequence: Synthetic oligonucleotide
cgggcgggucugagacauu

SEQ ID NO: 919387 - RNA, 19 nt, Artificial Sequence
  Description of Artificial Sequence: Synthetic oligonucleotide
aaugcgaccaagucaaugc

SEQ ID NO: 919388 - RNA, 19 nt, Artificial Sequence
  Description of Artificial Sequence: Synthetic oligonucleotide
gauaauuccauccaaagac

SEQ ID NO: 919389 - RNA, 19 nt, Artificial Sequence
  Description of Artificial Sequence: Synthetic oligonucleotide
uuuuguacccaacagaucu

SEQ ID NO: 919390 - RNA, 19 nt, Artificial Sequence
  Description of Artificial Sequence: Synthetic oligonucleotide
uguuugauagugaugaccc

SEQ ID NO: 919391 - RNA, 19 nt, Artificial Sequence
  Description of Artificial Sequence: Synthetic oligonucleotide
ugugacaugaggaacaucu

SEQ ID NO: 919392 - RNA, 19 nt, Artificial Sequence
  Description of Artificial Sequence: Synthetic oligonucleotide
uauuccgucugccagaggg

SEQ ID NO: 919393 - RNA, 19 nt, Artificial Sequence
  Description of Artificial Sequence: Synthetic oligonucleotide
aaucugaaguacaagaaac

SEQ ID NO: 919394 - RNA, 19 nt, Artificial Sequence
  Description of Artificial Sequence: Synthetic oligonucleotide
uugaauaucucacugguga

SEQ ID NO: 919395 - RNA, 19 nt, Artificial Sequence
  Description of Artificial Sequence: Synthetic oligonucleotide
ugaaguacaagaaaccucu

SEQ ID NO: 919396 - RNA, 19 nt, Artificial Sequence
  Description of Artificial Sequence: Synthetic oligonucleotide
agagacgauaauuccaucc

SEQ ID NO: 919397 - RNA, 19 nt, Artificial Sequence
  Description of Artificial Sequence: Synthetic oligonucleotide
auagugaugacccugguug

SEQ ID NO: 919398 - RNA, 19 nt, Artificial Sequence
  Description of Artificial Sequence: Synthetic oligonucleotide
auuacaguuguccacuugg

SEQ ID NO: 919399 - RNA, 19 nt, Artificial Sequence
  Description of Artificial Sequence: Synthetic oligonucleotide
uugugcaguauuaacaugc

SEQ ID NO: 919400 - RNA, 19 nt, Artificial Sequence
  Description of Artificial Sequence: Synthetic oligonucleotide
uccuaaaucaguaauuagu

SEQ ID NO: 919401 - RNA, 19 nt, Artificial Sequence
  Description of Artificial Sequence: Synthetic oligonucleotide
aaguacaagaaaccucugg

SEQ ID NO: 919402 - RNA, 19 nt, Artificial Sequence
  Description of Artificial Sequence: Synthetic oligonucleotide
ugcaguauuaacaugcuuc

SEQ ID NO: 919403 - RNA, 19 nt, Artificial Sequence
  Description of Artificial Sequence: Synthetic oligonucleotide
uuaaagugaagaucuuccg

SEQ ID NO: 919404 - RNA, 19 nt, Artificial Sequence
  Description of Artificial Sequence: Synthetic oligonucleotide
ugugaauccaugcaggagu

SEQ ID NO: 919405 - RNA, 19 nt, Artificial Sequence
  Description of Artificial Sequence: Synthetic oligonucleotide
agagccucaaguuauuccg

SEQ ID NO: 919406 - RNA, 19 nt, Artificial Sequence
  Description of Artificial Sequence: Synthetic oligonucleotide
uaggaguacagacugacug

SEQ ID NO: 919407 - RNA, 19 nt, Artificial Sequence
  Description of Artificial Sequence: Synthetic oligonucleotide
ggaauauccacucaucugg

SEQ ID NO: 919408 - RNA, 19 nt, Artificial Sequence
  Description of Artificial Sequence: Synthetic oligonucleotide
uggucaaccagucucgagg

SEQ ID NO: 919409 - RNA, 19 nt, Artificial Sequence
  Description of Artificial Sequence: Synthetic oligonucleotide
aaaacugcucccuugaaua

SEQ ID NO: 919410 - RNA, 19 nt, Artificial Sequence
  Description of Artificial Sequence: Synthetic oligonucleotide
uccaggauuaaauacaaaa

SEQ ID NO: 919411 - RNA, 19 nt, Artificial Sequence
  Description of Artificial Sequence: Synthetic oligonucleotide
gauugcaccaaauuuucgc

SEQ ID NO: 919412 - RNA, 19 nt, Artificial Sequence
  Description of Artificial Sequence: Synthetic oligonucleotide
aggauuugcuuauuucucc

SEQ ID NO: 919413 - RNA, 19 nt, Artificial Sequence
  Description of Artificial Sequence: Synthetic oligonucleotide
aaguuauuccgucugccag

SEQ ID NO: 919414 - RNA, 19 nt, Artificial Sequence
  Description of Artificial Sequence: Synthetic oligonucleotide
uugacuuuuacuguuccgg

SEQ ID NO: 919415 - RNA, 19 nt, Artificial Sequence
  Description of Artificial Sequence: Synthetic oligonucleotide
ucaguaauuaguaguucag

SEQ ID NO: 919416 - RNA, 19 nt, Artificial Sequence
  Description of Artificial Sequence: Synthetic oligonucleotide
aauugaaauucuguugguc

SEQ ID NO: 919417 - RNA, 19 nt, Artificial Sequence
  Description of Artificial Sequence: Synthetic oligonucleotide
uuaacaugcuucucuauug

SEQ ID NO: 919418 - RNA, 19 nt, Artificial Sequence
  Description of Artificial Sequence: Synthetic oligonucleotide
guaaaucugaaguacaaga

SEQ ID NO: 919419 - RNA, 19 nt, Artificial Sequence
  Description of Artificial Sequence: Synthetic oligonucleotide
aaggcaauauggcagacau

SEQ ID NO: 919420 - RNA, 19 nt, Artificial Sequence
  Description of Artificial Sequence: Synthetic oligonucleotide
aaagugaagaucuuccgua

SEQ ID NO: 919421 - RNA, 19 nt, Artificial Sequence
  Description of Artificial Sequence: Synthetic oligonucleotide
aaaugggugccccuuuggg

SEQ ID NO: 919422 - RNA, 19 nt, Artificial Sequence
  Description of Artificial Sequence: Synthetic oligonucleotide
acuugggaugcacucaggc

SEQ ID NO: 919423 - RNA, 19 nt, Artificial Sequence
  Description of Artificial Sequence: Synthetic oligonucleotide
uuggucuagaugaaaaggu

SEQ ID NO: 919424 - RNA, 19 nt, Artificial Sequence
  Description of Artificial Sequence: Synthetic oligonucleotide
accaacucguaguauuucc

SEQ ID NO: 919425 - RNA, 19 nt, Artificial Sequence
  Description of Artificial Sequence: Synthetic oligonucleotide
uacccaacagaucuuacug

SEQ ID NO: 919426 - RNA, 19 nt, Artificial Sequence
  Description of Artificial Sequence: Synthetic oligonucleotide
caugauucuucccaugagg

SEQ ID NO: 919427 - RNA, 19 nt, Artificial Sequence
  Description of Artificial Sequence: Synthetic oligonucleotide
uucagaauaaaugggugcc

SEQ ID NO: 919428 - RNA, 19 nt, Artificial Sequence
  Description of Artificial Sequence: Synthetic oligonucleotide
ugauuguacucgaugaccu

SEQ ID NO: 919429 - RNA, 19 nt, Artificial Sequence
  Description of Artificial Sequence: Synthetic oligonucleotide
uuuucgcuugaucaugaag

SEQ ID NO: 919430 - RNA, 19 nt, Artificial Sequence
  Description of Artificial Sequence: Synthetic oligonucleotide
ugggucauacaacagaguc

SEQ ID NO: 919431 - RNA, 19 nt, Artificial Sequence
  Description of Artificial Sequence: Synthetic oligonucleotide
uauccacucaucugguugg

SEQ ID NO: 919432 - RNA, 19 nt, Artificial Sequence
  Description of Artificial Sequence: Synthetic oligonucleotide
gacauaucaugauucuucc

SEQ ID NO: 919433 - RNA, 19 nt, Artificial Sequence
  Description of Artificial Sequence: Synthetic oligonucleotide
aagugaagaucuuccguag

SEQ ID NO: 919434 - RNA, 19 nt, Artificial Sequence
  Description of Artificial Sequence: Synthetic oligonucleotide
aucaguaauuaguaguuca

SEQ ID NO: 919435 - RNA, 19 nt, Artificial Sequence
  Description of Artificial Sequence: Synthetic oligonucleotide
uacaagaaaccucuggauc

SEQ ID NO: 919436 - RNA, 19 nt, Artificial Sequence
  Description of Artificial Sequence: Synthetic oligonucleotide
acgauaauuccauccaaag

SEQ ID NO: 919437 - RNA, 19 nt, Artificial Sequence
  Description of Artificial Sequence: Synthetic oligonucleotide
aaagaucuuccauuuugcu

SEQ ID NO: 919438 - RNA, 19 nt, Artificial Sequence
  Description of Artificial Sequence: Synthetic oligonucleotide
ugguuaauugaaauucugu

SEQ ID NO: 919439 - RNA, 19 nt, Artificial Sequence
  Description of Artificial Sequence: Synthetic oligonucleotide
uguuuccuaaaucaguaau

SEQ ID NO: 919440 - RNA, 19 nt, Artificial Sequence
  Description of Artificial Sequence: Synthetic oligonucleotide
uugcuuauuucuccuuugg

SEQ ID NO: 919441 - RNA, 19 nt, Artificial Sequence
  Description of Artificial Sequence: Synthetic oligonucleotide
aacauuacaguuguccacu

SEQ ID NO: 919442 - RNA, 19 nt, Artificial Sequence
  Description of Artificial Sequence: Synthetic oligonucleotide
aaauuuucgcuugaucaug

SEQ ID NO: 919443 - RNA, 19 nt, Artificial Sequence
  Description of Artificial Sequence: Synthetic oligonucleotide
ucuuccguaguuuacaguu

SEQ ID NO: 919444 - RNA, 19 nt, Artificial Sequence
  Description of Artificial Sequence: Synthetic oligonucleotide
aacucguaguauuucccag

SEQ ID NO: 919445 - RNA, 19 nt, Artificial Sequence
  Description of Artificial Sequence: Synthetic oligonucleotide
aaucaguaauuaguaguuc

SEQ ID NO: 919446 - RNA, 19 nt, Artificial Sequence
  Description of Artificial Sequence: Synthetic oligonucleotide
cauucacucaucuggcugg

SEQ ID NO: 919447 - RNA, 19 nt, Artificial Sequence
  Description of Artificial Sequence: Synthetic oligonucleotide
cauaucaugauucuuccca

SEQ ID NO: 919448 - RNA, 19 nt, Artificial Sequence
  Description of Artificial Sequence: Synthetic oligonucleotide
uuccguaguuuacaguuag

SEQ ID NO: 919449 - RNA, 19 nt, Artificial Sequence
  Description of Artificial Sequence: Synthetic oligonucleotide
accguugucuucuuugggg

SEQ ID NO: 919450 - RNA, 19 nt, Artificial Sequence
  Description of Artificial Sequence: Synthetic oligonucleotide
ugcugauuguacucgauga

SEQ ID NO: 919451 - RNA, 19 nt, Artificial Sequence
  Description of Artificial Sequence: Synthetic oligonucleotide
aguuccacguaguuguguc

SEQ ID NO: 919452 - RNA, 19 nt, Artificial Sequence
  Description of Artificial Sequence: Synthetic oligonucleotide
uuacaguuguccacuuggg

SEQ ID NO: 919453 - RNA, 19 nt, Artificial Sequence
  Description of Artificial Sequence: Synthetic oligonucleotide
uacuguuccggauacugcc

SEQ ID NO: 919454 - RNA, 19 nt, Artificial Sequence
  Description of Artificial Sequence: Synthetic oligonucleotide
acauaucaugauucuuccc

SEQ ID NO: 919455 - RNA, 19 nt, Artificial Sequence
  Description of Artificial Sequence: Synthetic oligonucleotide
guggaaucauaucuguggg

SEQ ID NO: 919456 - RNA, 19 nt, Artificial Sequence
  Description of Artificial Sequence: Synthetic oligonucleotide
aguagcaguugagacaugg

SEQ ID NO: 919457 - RNA, 19 nt, Artificial Sequence
  Description of Artificial Sequence: Synthetic oligonucleotide
uacucgaugaccuccaaau

SEQ ID NO: 919458 - RNA, 19 nt, Artificial Sequence
  Description of Artificial Sequence: Synthetic oligonucleotide
uauuuccugaggcacugcc

SEQ ID NO: 919459 - RNA, 19 nt, Artificial Sequence
  Description of Artificial Sequence: Synthetic oligonucleotide
guuuacaguuagcagagac

SEQ ID NO: 919460 - RNA, 19 nt, Artificial Sequence
  Description of Artificial Sequence: Synthetic oligonucleotide
uggucuagaugaaaaggug

SEQ ID NO: 919461 - RNA, 19 nt, Artificial Sequence
  Description of Artificial Sequence: Synthetic oligonucleotide
agauugcuggcacaacugg

SEQ ID NO: 919462 - RNA, 19 nt, Artificial Sequence
  Description of Artificial Sequence: Synthetic oligonucleotide
aaaucaguaauuaguaguu

SEQ ID NO: 919463 - RNA, 19 nt, Artificial Sequence
  Description of Artificial Sequence: Synthetic oligonucleotide
ugagggucaaaguagcagu

SEQ ID NO: 919464 - RNA, 19 nt, Artificial Sequence
  Description of Artificial Sequence: Synthetic oligonucleotide
aaucauaucuguggguuca

SEQ ID NO: 919465 - RNA, 19 nt, Artificial Sequence
  Description of Artificial Sequence: Synthetic oligonucleotide
ucuugacuuuuacuguucc

SEQ ID NO: 919466 - RNA, 19 nt, Artificial Sequence
  Description of Artificial Sequence: Synthetic oligonucleotide
gugaaaacguccucgggag

SEQ ID NO: 919467 - RNA, 19 nt, Artificial Sequence
  Description of Artificial Sequence: Synthetic oligonucleotide
agacaagaguuccacguag

SEQ ID NO: 919468 - RNA, 19 nt, Artificial Sequence
  Description of Artificial Sequence: Synthetic oligonucleotide
uuccuaaaucaguaauuag

SEQ ID NO: 919469 - RNA, 19 nt, Artificial Sequence
  Description of Artificial Sequence: Synthetic oligonucleotide
auacaacagagucagcacu

SEQ ID NO: 919470 - RNA, 19 nt, Artificial Sequence
  Description of Artificial Sequence: Synthetic oligonucleotide
uucgcuugaucaugaagag

SEQ ID NO: 919471 - RNA, 19 nt, Artificial Sequence
  Description of Artificial Sequence: Synthetic oligonucleotide
uaacaugcuucucuauuga

SEQ ID NO: 919472 - RNA, 19 nt, Artificial Sequence
  Description of Artificial Sequence: Synthetic oligonucleotide
uuccaguuauuuccugagg

SEQ ID NO: 919473 - RNA, 19 nt, Artificial Sequence
  Description of Artificial Sequence: Synthetic oligonucleotide
ucagggaauauccacucau

SEQ ID NO: 919474 - RNA, 19 nt, Artificial Sequence
  Description of Artificial Sequence: Synthetic oligonucleotide
ugaugcuaacauuacaguu

SEQ ID NO: 919475 - RNA, 19 nt, Artificial Sequence
  Description of Artificial Sequence: Synthetic oligonucleotide
gauacugccuccugcuuug

SEQ ID NO: 919476 - RNA, 19 nt, Artificial Sequence
  Description of Artificial Sequence: Synthetic oligonucleotide
acaguuguccacuugggau

SEQ ID NO: 919477 - RNA, 19 nt, Artificial Sequence
  Description of Artificial Sequence: Synthetic oligonucleotide
acaugggucauacaacaga

SEQ ID NO: 919478 - RNA, 19 nt, Artificial Sequence
  Description of Artificial Sequence: Synthetic oligonucleotide
uuauggacuguugauaaau

SEQ ID NO: 919479 - RNA, 19 nt, Artificial Sequence
  Description of Artificial Sequence: Synthetic oligonucleotide
gaucuuccguaguuuacag

SEQ ID NO: 919480 - RNA, 19 nt, Artificial Sequence
  Description of Artificial Sequence: Synthetic oligonucleotide
gagacgauaauuccaucca

SEQ ID NO: 919481 - RNA, 19 nt, Artificial Sequence
  Description of Artificial Sequence: Synthetic oligonucleotide
acaugaggaacaucuguug

SEQ ID NO: 919482 - RNA, 19 nt, Artificial Sequence
  Description of Artificial Sequence: Synthetic oligonucleotide
uuuagcagcugugugacau

SEQ ID NO: 919483 - RNA, 19 nt, Artificial Sequence
  Description of Artificial Sequence: Synthetic oligonucleotide
gcuaacauuacaguugucc

SEQ ID NO: 919484 - RNA, 19 nt, Artificial Sequence
  Description of Artificial Sequence: Synthetic oligonucleotide
cuugacuuuuacuguuccg

SEQ ID NO: 919485 - RNA, 19 nt, Artificial Sequence
  Description of Artificial Sequence: Synthetic oligonucleotide
gagagccucaaguuauucc

SEQ ID NO: 919486 - RNA, 19 nt, Artificial Sequence
  Description of Artificial Sequence: Synthetic oligonucleotide
agggaauauccacucaucu

SEQ ID NO: 919487 - RNA, 19 nt, Artificial Sequence
  Description of Artificial Sequence: Synthetic oligonucleotide
ucucgaggguucaauggag

SEQ ID NO: 919488 - RNA, 19 nt, Artificial Sequence
  Description of Artificial Sequence: Synthetic oligonucleotide
agcuacaccaacucguagu

SEQ ID NO: 919489 - RNA, 19 nt, Artificial Sequence
  Description of Artificial Sequence: Synthetic oligonucleotide
caugaggugccgaucuugg

SEQ ID NO: 919490 - RNA, 19 nt, Artificial Sequence
  Description of Artificial Sequence: Synthetic oligonucleotide
gaauccaugcaggaguccc

SEQ ID NO: 919491 - RNA, 19 nt, Artificial Sequence
  Description of Artificial Sequence: Synthetic oligonucleotide
uguuuagcagcugugugac

SEQ ID NO: 919492 - RNA, 19 nt, Artificial Sequence
  Description of Artificial Sequence: Synthetic oligonucleotide
ucuaggaguacagacugac

SEQ ID NO: 919493 - RNA, 19 nt, Artificial Sequence
  Description of Artificial Sequence: Synthetic oligonucleotide
agaccguugucuucuuugg

SEQ ID NO: 919494 - RNA, 19 nt, Artificial Sequence
  Description of Artificial Sequence: Synthetic oligonucleotide
aauccaugcaggagucccc

SEQ ID NO: 919495 - RNA, 19 nt, Artificial Sequence
  Description of Artificial Sequence: Synthetic oligonucleotide
cuugggaugcacucaggcc

SEQ ID NO: 919496 - RNA, 19 nt, Artificial Sequence
  Description of Artificial Sequence: Synthetic oligonucleotide
ucaaguuauuccgucugcc

SEQ ID NO: 919497 - RNA, 19 nt, Artificial Sequence
  Description of Artificial Sequence: Synthetic oligonucleotide
acaauuggugggcucagca

SEQ ID NO: 919498 - RNA, 19 nt, Artificial Sequence
  Description of Artificial Sequence: Synthetic oligonucleotide
agauggacugccaaagauc

SEQ ID NO: 919499 - RNA, 19 nt, Artificial Sequence
  Description of Artificial Sequence: Synthetic oligonucleotide
gucaauggcugagugaugc

SEQ ID NO: 919500 - RNA, 19 nt, Artificial Sequence
  Description of Artificial Sequence: Synthetic oligonucleotide
caaaguagcaguugagaca

SEQ ID NO: 919501 - RNA, 19 nt, Artificial Sequence
  Description of Artificial Sequence: Synthetic oligonucleotide
cuucguggaaucauaucug

SEQ ID NO: 919502 - RNA, 19 nt, Artificial Sequence
  Description of Artificial Sequence: Synthetic oligonucleotide
gaacaucuguugcaaguug

SEQ ID NO: 919503 - RNA, 19 nt, Artificial Sequence
  Description of Artificial Sequence: Synthetic oligonucleotide
cuuuuacuguuccggauac

SEQ ID NO: 919504 - RNA, 19 nt, Artificial Sequence
  Description of Artificial Sequence: Synthetic oligonucleotide
acaggugugaauccaugca

SEQ ID NO: 919505 - RNA, 19 nt, Artificial Sequence
  Description of Artificial Sequence: Synthetic oligonucleotide
ugcacuugcagaagacucu

SEQ ID NO: 919506 - RNA, 19 nt, Artificial Sequence
  Description of Artificial Sequence: Synthetic oligonucleotide
uauuccucuucgcugcugu

SEQ ID NO: 919507 - RNA, 19 nt, Artificial Sequence
  Description of Artificial Sequence: Synthetic oligonucleotide
uccuuugguuaauugaaau

SEQ ID NO: 919508 - RNA, 19 nt, Artificial Sequence
  Description of Artificial Sequence: Synthetic oligonucleotide
acuugcagaagacucuaga

SEQ ID NO: 919509 - RNA, 19 nt, Artificial Sequence
  Description of Artificial Sequence: Synthetic oligonucleotide
uacaguuguccacuuggga

SEQ ID NO: 919510 - RNA, 19 nt, Artificial Sequence
  Description of Artificial Sequence: Synthetic oligonucleotide
aagauugcuggcacaacug

SEQ ID NO: 919511 - RNA, 19 nt, Artificial Sequence
  Description of Artificial Sequence: Synthetic oligonucleotide
uaauugaaauucuguuggu

SEQ ID NO: 919512 - RNA, 19 nt, Artificial Sequence
  Description of Artificial Sequence: Synthetic oligonucleotide
uuccccugagcacuaaaga

SEQ ID NO: 919513 - RNA, 19 nt, Artificial Sequence
  Description of Artificial Sequence: Synthetic oligonucleotide
ugugcaguauuaacaugcu

SEQ ID NO: 919514 - RNA, 19 nt, Artificial Sequence
  Description of Artificial Sequence: Synthetic oligonucleotide
uucguggaaucauaucugu

SEQ ID NO: 919515 - RNA, 19 nt, Artificial Sequence
  Description of Artificial Sequence: Synthetic oligonucleotide
aguuguccacuugggaugc

SEQ ID NO: 919516 - RNA, 19 nt, Artificial Sequence
  Description of Artificial Sequence: Synthetic oligonucleotide
aauuuucgcuugaucauga

SEQ ID NO: 919517 - RNA, 19 nt, Artificial Sequence
  Description of Artificial Sequence: Synthetic oligonucleotide
ugaucaugaagagugggau

SEQ ID NO: 919518 - RNA, 19 nt, Artificial Sequence
  Description of Artificial Sequence: Synthetic oligonucleotide
cagauugcaccaaauuuuc

SEQ ID NO: 919519 - RNA, 19 nt, Artificial Sequence
  Description of Artificial Sequence: Synthetic oligonucleotide
ucgaugaccuccaaauuuu

SEQ ID NO: 919520 - RNA, 19 nt, Artificial Sequence
  Description of Artificial Sequence: Synthetic oligonucleotide
cauguuuagcagcugugug

SEQ ID NO: 919521 - RNA, 19 nt, Artificial Sequence
  Description of Artificial Sequence: Synthetic oligonucleotide
gaagauggauucauuucug

SEQ ID NO: 919522 - RNA, 19 nt, Artificial Sequence
  Description of Artificial Sequence: Synthetic oligonucleotide
gauguuuccuaaaucagua

SEQ ID NO: 919523 - RNA, 19 nt, Artificial Sequence
  Description of Artificial Sequence: Synthetic oligonucleotide
auaaaugggugccccuuug

SEQ ID NO: 919524 - RNA, 19 nt, Artificial Sequence
  Description of Artificial Sequence: Synthetic oligonucleotide
cuagaugaaaaggugaaaa

SEQ ID NO: 919525 - RNA, 19 nt, Artificial Sequence
  Description of Artificial Sequence: Synthetic oligonucleotide
cuugaauaucucacuggug

SEQ ID NO: 919526 - RNA, 19 nt, Artificial Sequence
  Description of Artificial Sequence: Synthetic oligonucleotide
acuuuuacuguuccggaua

SEQ ID NO: 919527 - RNA, 19 nt, Artificial Sequence
  Description of Artificial Sequence: Synthetic oligonucleotide
ucagaauaaaugggugccc

SEQ ID NO: 919528 - RNA, 19 nt, Artificial Sequence
  Description of Artificial Sequence: Synthetic oligonucleotide
guuuggcagacuuuuguca

SEQ ID NO: 919529 - RNA, 19 nt, Artificial Sequence
  Description of Artificial Sequence: Synthetic oligonucleotide
aacaugcuucucuauugaa

SEQ ID NO: 919530 - RNA, 19 nt, Artificial Sequence
  Description of Artificial Sequence: Synthetic oligonucleotide
acugccaaagaucuuccau

SEQ ID NO: 919531 - RNA, 19 nt, Artificial Sequence
  Description of Artificial Sequence: Synthetic oligonucleotide
aguugugucaucacugcug

SEQ ID NO: 919532 - RNA, 19 nt, Artificial Sequence
  Description of Artificial Sequence: Synthetic oligonucleotide
caguuguccacuugggaug

SEQ ID NO: 919533 - RNA, 19 nt, Artificial Sequence
  Description of Artificial Sequence: Synthetic oligonucleotide
uauggacuguugauaaaua

SEQ ID NO: 919534 - RNA, 19 nt, Artificial Sequence
  Description of Artificial Sequence: Synthetic oligonucleotide
cguggaaucauaucugugg

SEQ ID NO: 919535 - RNA, 19 nt, Artificial Sequence
  Description of Artificial Sequence: Synthetic oligonucleotide
acagauugcaccaaauuuu

SEQ ID NO: 919536 - RNA, 19 nt, Artificial Sequence
  Description of Artificial Sequence: Synthetic oligonucleotide
ucccaugaggugccgaucu

SEQ ID NO: 919537 - RNA, 19 nt, Artificial Sequence
  Description of Artificial Sequence: Synthetic oligonucleotide
aaacugcucccuugaauau

SEQ ID NO: 919538 - RNA, 19 nt, Artificial Sequence
  Description of Artificial Sequence: Synthetic oligonucleotide
agacaucuugacuuuuacu

SEQ ID NO: 919539 - RNA, 19 nt, Artificial Sequence
  Description of Artificial Sequence: Synthetic oligonucleotide
auaauuccauccaaagacu

SEQ ID NO: 919540 - RNA, 19 nt, Artificial Sequence
  Description of Artificial Sequence: Synthetic oligonucleotide
auaucaugauucuucccau

SEQ ID NO: 919541 - RNA, 19 nt, Artificial Sequence
  Description of Artificial Sequence: Synthetic oligonucleotide
gugaaugcgaccaagucaa

SEQ ID NO: 919542 - RNA, 19 nt, Artificial Sequence
  Description of Artificial Sequence: Synthetic oligonucleotide
uccggauacugccuccugc

SEQ ID NO: 919543 - RNA, 19 nt, Artificial Sequence
  Description of Artificial Sequence: Synthetic oligonucleotide
agccucaaguuauuccguc

SEQ ID NO: 919544 - RNA, 19 nt, Artificial Sequence
  Description of Artificial Sequence: Synthetic oligonucleotide
cagaccguugucuucuuug

SEQ ID NO: 919545 - RNA, 19 nt, Artificial Sequence
  Description of Artificial Sequence: Synthetic oligonucleotide
ugcugucaguaccauaaaa

SEQ ID NO: 919546 - RNA, 19 nt, Artificial Sequence
  Description of Artificial Sequence: Synthetic oligonucleotide
agcuucguggaaucauauc

SEQ ID NO: 919547 - RNA, 19 nt, Artificial Sequence
  Description of Artificial Sequence: Synthetic oligonucleotide
ucuggagugcuggaguuca

SEQ ID NO: 919548 - RNA, 19 nt, Artificial Sequence
  Description of Artificial Sequence: Synthetic oligonucleotide
agaauaaaugggugccccu

SEQ ID NO: 919549 - RNA, 19 nt, Artificial Sequence
  Description of Artificial Sequence: Synthetic oligonucleotide
cucaaguuauuccgucugc

SEQ ID NO: 919550 - RNA, 19 nt, Artificial Sequence
  Description of Artificial Sequence: Synthetic oligonucleotide
agaaaccucuggaucaguc

SEQ ID NO: 919551 - RNA, 19 nt, Artificial Sequence
  Description of Artificial Sequence: Synthetic oligonucleotide
acucguaguauuucccagu

SEQ ID NO: 919552 - RNA, 19 nt, Artificial Sequence
  Description of Artificial Sequence: Synthetic oligonucleotide
augauucuucccaugaggu

SEQ ID NO: 919553 - RNA, 19 nt, Artificial Sequence
  Description of Artificial Sequence: Synthetic oligonucleotide
gaaaacguccucgggaguc

SEQ ID NO: 919554 - RNA, 19 nt, Artificial Sequence
  Description of Artificial Sequence: Synthetic oligonucleotide
gaaugcgaccaagucaaug

SEQ ID NO: 919555 - RNA, 19 nt, Artificial Sequence
  Description of Artificial Sequence: Synthetic oligonucleotide
ggucaaccagucucgaggg

SEQ ID NO: 919556 - RNA, 19 nt, Artificial Sequence
  Description of Artificial Sequence: Synthetic oligonucleotide
cgcuugaucaugaagagug

SEQ ID NO: 919557 - RNA, 19 nt, Artificial Sequence
  Description of Artificial Sequence: Synthetic oligonucleotide
aggugaaaacguccucggg

SEQ ID NO: 919558 - RNA, 19 nt, Artificial Sequence
  Description of Artificial Sequence: Synthetic oligonucleotide
ggugaaaacguccucggga

SEQ ID NO: 919559 - RNA, 19 nt, Artificial Sequence
  Description of Artificial Sequence: Synthetic oligonucleotide
gaccguugucuucuuuggg

SEQ ID NO: 919560 - RNA, 19 nt, Artificial Sequence
  Description of Artificial Sequence: Synthetic oligonucleotide
acucuagaggcugcucugc

SEQ ID NO: 919561 - RNA, 19 nt, Artificial Sequence
  Description of Artificial Sequence: Synthetic oligonucleotide
guuauuuccugaggcacug

SEQ ID NO: 919562 - RNA, 19 nt, Artificial Sequence
  Description of Artificial Sequence: Synthetic oligonucleotide
guugagacaugggucauac

SEQ ID NO: 919563 - RNA, 19 nt, Artificial Sequence
  Description of Artificial Sequence: Synthetic oligonucleotide
aucuuacugucucacugga

SEQ ID NO: 919564 - RNA, 19 nt, Artificial Sequence
  Description of Artificial Sequence: Synthetic oligonucleotide
ugcgaccaagucaaugcac

SEQ ID NO: 919565 - RNA, 19 nt, Artificial Sequence
  Description of Artificial Sequence: Synthetic oligonucleotide
agugaagaucuuccguagu

SEQ ID NO: 919566 - RNA, 19 nt, Artificial Sequence
  Description of Artificial Sequence: Synthetic oligonucleotide
acaguuagcagagacgaua

SEQ ID NO: 919567 - RNA, 19 nt, Artificial Sequence
  Description of Artificial Sequence: Synthetic oligonucleotide
uaguugugucaucacugcu

SEQ ID NO: 919568 - RNA, 19 nt, Artificial Sequence
  Description of Artificial Sequence: Synthetic oligonucleotide
uguacccaacagaucuuac

SEQ ID NO: 919569 - RNA, 19 nt, Artificial Sequence
  Description of Artificial Sequence: Synthetic oligonucleotide
ugggcugauaguuccucca

SEQ ID NO: 919570 - RNA, 19 nt, Artificial Sequence
  Description of Artificial Sequence: Synthetic oligonucleotide
gguaaaucugaaguacaag

SEQ ID NO: 919571 - RNA, 19 nt, Artificial Sequence
  Description of Artificial Sequence: Synthetic oligonucleotide
uccaaggauuugcuuauuu

SEQ ID NO: 919572 - RNA, 19 nt, Artificial Sequence
  Description of Artificial Sequence: Synthetic oligonucleotide
ucauuccaguuauuuccug

SEQ ID NO: 919573 - RNA, 19 nt, Artificial Sequence
  Description of Artificial Sequence: Synthetic oligonucleotide
agugaugacccugguugac

SEQ ID NO: 919574 - RNA, 19 nt, Artificial Sequence
  Description of Artificial Sequence: Synthetic oligonucleotide
guuauuccgucugccagag

SEQ ID NO: 919575 - RNA, 19 nt, Artificial Sequence
  Description of Artificial Sequence: Synthetic oligonucleotide
ugacugggagggacaauug

SEQ ID NO: 919576 - RNA, 19 nt, Artificial Sequence
  Description of Artificial Sequence: Synthetic oligonucleotide
cucguaguauuucccaguc

SEQ ID NO: 919577 - RNA, 19 nt, Artificial Sequence
  Description of Artificial Sequence: Synthetic oligonucleotide
ggacauaucaugauucuuc

SEQ ID NO: 919578 - RNA, 19 nt, Artificial Sequence
  Description of Artificial Sequence: Synthetic oligonucleotide
cugauaguuccuccaguug

SEQ ID NO: 919579 - RNA, 19 nt, Artificial Sequence
  Description of Artificial Sequence: Synthetic oligonucleotide
ucacagauggacugccaaa

SEQ ID NO: 919580 - RNA, 19 nt, Artificial Sequence
  Description of Artificial Sequence: Synthetic oligonucleotide
uccguaguuuacaguuagc

SEQ ID NO: 919581 - RNA, 19 nt, Artificial Sequence
  Description of Artificial Sequence: Synthetic oligonucleotide
gguacugaugcuaacauua

SEQ ID NO: 919582 - RNA, 19 nt, Artificial Sequence
  Description of Artificial Sequence: Synthetic oligonucleotide
uagugaugacccugguuga

SEQ ID NO: 919583 - RNA, 19 nt, Artificial Sequence
  Description of Artificial Sequence: Synthetic oligonucleotide
ugcacagauugcaccaaau

SEQ ID NO: 919584 - RNA, 19 nt, Artificial Sequence
  Description of Artificial Sequence: Synthetic oligonucleotide
gacccgaaggcaauauggc

SEQ ID NO: 919585 - RNA, 19 nt, Artificial Sequence
  Description of Artificial Sequence: Synthetic oligonucleotide
gguucagaauaaaugggug

SEQ ID NO: 919586 - RNA, 19 nt, Artificial Sequence
  Description of Artificial Sequence: Synthetic oligonucleotide
uccuuauggacuguugaua

SEQ ID NO: 919587 - RNA, 19 nt, Artificial Sequence
  Description of Artificial Sequence: Synthetic oligonucleotide
agacgauaauuccauccaa

SEQ ID NO: 919588 - RNA, 19 nt, Artificial Sequence
  Description of Artificial Sequence: Synthetic oligonucleotide
uuagcagcugugugacaug

SEQ ID NO: 919589 - RNA, 19 nt, Artificial Sequence
  Description of Artificial Sequence: Synthetic oligonucleotide
uguuccggauacugccucc

SEQ ID NO: 919590 - RNA, 19 nt, Artificial Sequence
  Description of Artificial Sequence: Synthetic oligonucleotide
agauugcaccaaauuuucg

SEQ ID NO: 919591 - RNA, 19 nt, Artificial Sequence
  Description of Artificial Sequence: Synthetic oligonucleotide
ugaaaacguccucgggagu

SEQ ID NO: 919592 - RNA, 19 nt, Artificial Sequence
  Description of Artificial Sequence: Synthetic oligonucleotide
gggguucagaauaaauggg

SEQ ID NO: 919593 - RNA, 19 nt, Artificial Sequence
  Description of Artificial Sequence: Synthetic oligonucleotide
uuggcagacuuuugucaug

SEQ ID NO: 919594 - RNA, 19 nt, Artificial Sequence
  Description of Artificial Sequence: Synthetic oligonucleotide
aaaacguccucgggaguca

SEQ ID NO: 919595 - RNA, 19 nt, Artificial Sequence
  Description of Artificial Sequence: Synthetic oligonucleotide
uuuguacccaacagaucuu

SEQ ID NO: 919596 - RNA, 19 nt, Artificial Sequence
  Description of Artificial Sequence: Synthetic oligonucleotide
guagcaguugagacauggg

SEQ ID NO: 919597 - RNA, 19 nt, Artificial Sequence
  Description of Artificial Sequence: Synthetic oligonucleotide
cccgaaggcaauauggcag

SEQ ID NO: 919598 - RNA, 19 nt, Artificial Sequence
  Description of Artificial Sequence: Synthetic oligonucleotide
cuauugaagauugcuggca

SEQ ID NO: 919599 - RNA, 19 nt, Artificial Sequence
  Description of Artificial Sequence: Synthetic oligonucleotide
acccgaaggcaauauggca

SEQ ID NO: 919600 - RNA, 19 nt, Artificial Sequence
  Description of Artificial Sequence: Synthetic oligonucleotide
caaguuauuccgucugcca

SEQ ID NO: 919601 - RNA, 19 nt, Artificial Sequence
  Description of Artificial Sequence: Synthetic oligonucleotide
uggacccgaaggcaauaug

SEQ ID NO: 919602 - RNA, 19 nt, Artificial Sequence
  Description of Artificial Sequence: Synthetic oligonucleotide
ggguagguaaaucugaagu

SEQ ID NO: 919603 - RNA, 19 nt, Artificial Sequence
  Description of Artificial Sequence: Synthetic oligonucleotide
ugaagaucuuccguaguuu

SEQ ID NO: 919604 - RNA, 19 nt, Artificial Sequence
  Description of Artificial Sequence: Synthetic oligonucleotide
uggcagacuuuugucaugu

SEQ ID NO: 919605 - RNA, 19 nt, Artificial Sequence
  Description of Artificial Sequence: Synthetic oligonucleotide
gagcuacaccaacucguag

SEQ ID NO: 919606 - RNA, 19 nt, Artificial Sequence
  Description of Artificial Sequence: Synthetic oligonucleotide
auggucaaccagucucgag

SEQ ID NO: 919607 - RNA, 19 nt, Artificial Sequence
  Description of Artificial Sequence: Synthetic oligonucleotide
gacgauaauuccauccaaa

SEQ ID NO: 919608 - RNA, 19 nt, Artificial Sequence
  Description of Artificial Sequence: Synthetic oligonucleotide
ggacuguugauaaauacaa

SEQ ID NO: 919609 - RNA, 19 nt, Artificial Sequence
  Description of Artificial Sequence: Synthetic oligonucleotide
cauuacaguuguccacuug

SEQ ID NO: 919610 - RNA, 19 nt, Artificial Sequence
  Description of Artificial Sequence: Synthetic oligonucleotide
acugcucccuugaauaucu

SEQ ID NO: 919611 - RNA, 19 nt, Artificial Sequence
  Description of Artificial Sequence: Synthetic oligonucleotide
ucaguggagaaguccuguc

SEQ ID NO: 919612 - RNA, 19 nt, Artificial Sequence
  Description of Artificial Sequence: Synthetic oligonucleotide
gcuucguggaaucauaucu

SEQ ID NO: 919613 - RNA, 19 nt, Artificial Sequence
  Description of Artificial Sequence: Synthetic oligonucleotide
ucuccuugucagaccguug

SEQ ID NO: 919614 - RNA, 19 nt, Artificial Sequence
  Description of Artificial Sequence: Synthetic oligonucleotide
aguuauuuccugaggcacu

SEQ ID NO: 919615 - RNA, 19 nt, Artificial Sequence
  Description of Artificial Sequence: Synthetic oligonucleotide
gucucgaggguucaaugga

SEQ ID NO: 919616 - RNA, 19 nt, Artificial Sequence
  Description of Artificial Sequence: Synthetic oligonucleotide
caacucguaguauuuccca

SEQ ID NO: 919617 - RNA, 19 nt, Artificial Sequence
  Description of Artificial Sequence: Synthetic oligonucleotide
ccuaaaucaguaauuagua

SEQ ID NO: 919618 - RNA, 19 nt, Artificial Sequence
  Description of Artificial Sequence: Synthetic oligonucleotide
ucugcugauuguacucgau

SEQ ID NO: 919619 - RNA, 19 nt, Artificial Sequence
  Description of Artificial Sequence: Synthetic oligonucleotide
caguccaaggauuugcuua

SEQ ID NO: 919620 - RNA, 19 nt, Artificial Sequence
  Description of Artificial Sequence: Synthetic oligonucleotide
augcgaccaagucaaugca

SEQ ID NO: 919621 - RNA, 19 nt, Artificial Sequence
  Description of Artificial Sequence: Synthetic oligonucleotide
ugucucacuggagagccuc

SEQ ID NO: 919622 - RNA, 19 nt, Artificial Sequence
  Description of Artificial Sequence: Synthetic oligonucleotide
cagggaauauccacucauc

SEQ ID NO: 919623 - RNA, 19 nt, Artificial Sequence
  Description of Artificial Sequence: Synthetic oligonucleotide
caucucuccuugucagacc

SEQ ID NO: 919624 - RNA, 19 nt, Artificial Sequence
  Description of Artificial Sequence: Synthetic oligonucleotide
cucauucugcugccgucgg

SEQ ID NO: 919625 - RNA, 19 nt, Artificial Sequence
  Description of Artificial Sequence: Synthetic oligonucleotide
gugugaauccaugcaggag

SEQ ID NO: 919626 - RNA, 19 nt, Artificial Sequence
  Description of Artificial Sequence: Synthetic oligonucleotide
aucuuccguaguuuacagu

SEQ ID NO: 919627 - RNA, 19 nt, Artificial Sequence
  Description of Artificial Sequence: Synthetic oligonucleotide
cguaguugugucaucacug

SEQ ID NO: 919628 - RNA, 19 nt, Artificial Sequence
  Description of Artificial Sequence: Synthetic oligonucleotide
cagucucgaggguucaaug

SEQ ID NO: 919629 - RNA, 19 nt, Artificial Sequence
  Description of Artificial Sequence: Synthetic oligonucleotide
uuauuccgucugccagagg

SEQ ID NO: 919630 - RNA, 19 nt, Artificial Sequence
  Description of Artificial Sequence: Synthetic oligonucleotide
uuccaggauuaaauacaaa

SEQ ID NO: 919631 - RNA, 19 nt, Artificial Sequence
  Description of Artificial Sequence: Synthetic oligonucleotide
uggcagacaagaguuccac

SEQ ID NO: 919632 - RNA, 19 nt, Artificial Sequence
  Description of Artificial Sequence: Synthetic oligonucleotide
caguuguauuccucuucgc

SEQ ID NO: 919633 - RNA, 19 nt, Artificial Sequence
  Description of Artificial Sequence: Synthetic oligonucleotide
ccaacucguaguauuuccc

SEQ ID NO: 919634 - RNA, 19 nt, Artificial Sequence
  Description of Artificial Sequence: Synthetic oligonucleotide
caaauuuucgcuugaucau

SEQ ID NO: 919635 - RNA, 19 nt, Artificial Sequence
  Description of Artificial Sequence: Synthetic oligonucleotide
ggaguacagacugacuggc

SEQ ID NO: 919636 - RNA, 19 nt, Artificial Sequence
  Description of Artificial Sequence: Synthetic oligonucleotide
caguuagcagagacgauaa

SEQ ID NO: 919637 - RNA, 19 nt, Artificial Sequence
  Description of Artificial Sequence: Synthetic oligonucleotide
ugguacugaugcuaacauu

SEQ ID NO: 919638 - RNA, 19 nt, Artificial Sequence
  Description of Artificial Sequence: Synthetic oligonucleotide
acuggaaaacugcucccuu

SEQ ID NO: 919639 - RNA, 19 nt, Artificial Sequence
  Description of Artificial Sequence: Synthetic oligonucleotide
ugugugacaugaggaacau

SEQ ID NO: 919640 - RNA, 19 nt, Artificial Sequence
  Description of Artificial Sequence: Synthetic oligonucleotide
ugaagauugcuggcacaac

SEQ ID NO: 919641 - RNA, 19 nt, Artificial Sequence
  Description of Artificial Sequence: Synthetic oligonucleotide
uacaguuagcagagacgau

SEQ ID NO: 919642 - RNA, 19 nt, Artificial Sequence
  Description of Artificial Sequence: Synthetic oligonucleotide
uugucagaccguugucuuc

SEQ ID NO: 919643 - RNA, 19 nt, Artificial Sequence
  Description of Artificial Sequence: Synthetic oligonucleotide
cuuuucuccgcugguguuc

SEQ ID NO: 919644 - RNA, 19 nt, Artificial Sequence
  Description of Artificial Sequence: Synthetic oligonucleotide
aguuccuuauggacuguug

SEQ ID NO: 919645 - RNA, 19 nt, Artificial Sequence
  Description of Artificial Sequence: Synthetic oligonucleotide
acguccucgggagucaucu

SEQ ID NO: 919646 - RNA, 19 nt, Artificial Sequence
  Description of Artificial Sequence: Synthetic oligonucleotide
cugcuuuguugaugaacug

SEQ ID NO: 919647 - RNA, 19 nt, Artificial Sequence
  Description of Artificial Sequence: Synthetic oligonucleotide
cacguaguugugucaucac

SEQ ID NO: 919648 - RNA, 19 nt, Artificial Sequence
  Description of Artificial Sequence: Synthetic oligonucleotide
gggguagguaaaucugaag

SEQ ID NO: 919649 - RNA, 19 nt, Artificial Sequence
  Description of Artificial Sequence: Synthetic oligonucleotide
cacagauugcaccaaauuu

SEQ ID NO: 919650 - RNA, 19 nt, Artificial Sequence
  Description of Artificial Sequence: Synthetic oligonucleotide
uuauuuccugaggcacugc

SEQ ID NO: 919651 - RNA, 19 nt, Artificial Sequence
  Description of Artificial Sequence: Synthetic oligonucleotide
guccacuugggaugcacuc

SEQ ID NO: 919652 - RNA, 19 nt, Artificial Sequence
  Description of Artificial Sequence: Synthetic oligonucleotide
guagcucacauucacucau

SEQ ID NO: 919653 - RNA, 19 nt, Artificial Sequence
  Description of Artificial Sequence: Synthetic oligonucleotide
aucaguccaaggauuugcu

SEQ ID NO: 919654 - RNA, 19 nt, Artificial Sequence
  Description of Artificial Sequence: Synthetic oligonucleotide
uuccggauacugccuccug

SEQ ID NO: 919655 - RNA, 19 nt, Artificial Sequence
  Description of Artificial Sequence: Synthetic oligonucleotide
ucgcuugaucaugaagagu

SEQ ID NO: 919656 - RNA, 19 nt, Artificial Sequence
  Description of Artificial Sequence: Synthetic oligonucleotide
cacuugggaugcacucagg

SEQ ID NO: 919657 - RNA, 19 nt, Artificial Sequence
  Description of Artificial Sequence: Synthetic oligonucleotide
gcaguauuaacaugcuucu

SEQ ID NO: 919658 - RNA, 19 nt, Artificial Sequence
  Description of Artificial Sequence: Synthetic oligonucleotide
accuugcacacuugcacuu

SEQ ID NO: 919659 - RNA, 19 nt, Artificial Sequence
  Description of Artificial Sequence: Synthetic oligonucleotide
acacuugcacuugcagaag

SEQ ID NO: 919660 - RNA, 19 nt, Artificial Sequence
  Description of Artificial Sequence: Synthetic oligonucleotide
gugacaugaggaacaucug

SEQ ID NO: 919661 - RNA, 19 nt, Artificial Sequence
  Description of Artificial Sequence: Synthetic oligonucleotide
cucgaggguucaauggaga

SEQ ID NO: 919662 - RNA, 19 nt, Artificial Sequence
  Description of Artificial Sequence: Synthetic oligonucleotide
gacaauuggugggcucagc

SEQ ID NO: 919663 - RNA, 19 nt, Artificial Sequence
  Description of Artificial Sequence: Synthetic oligonucleotide
cuuauggacuguugauaaa

SEQ ID NO: 919664 - RNA, 19 nt, Artificial Sequence
  Description of Artificial Sequence: Synthetic oligonucleotide
ccuuauggacuguugauaa

SEQ ID NO: 919665 - RNA, 19 nt, Artificial Sequence
  Description of Artificial Sequence: Synthetic oligonucleotide
gauagugaugacccugguu

SEQ ID NO: 919666 - RNA, 19 nt, Artificial Sequence
  Description of Artificial Sequence: Synthetic oligonucleotide
ccugguugacaggaggugg

SEQ ID NO: 919667 - RNA, 19 nt, Artificial Sequence
  Description of Artificial Sequence: Synthetic oligonucleotide
gugaauccaugcaggaguc

SEQ ID NO: 919668 - RNA, 19 nt, Artificial Sequence
  Description of Artificial Sequence: Synthetic oligonucleotide
augcacagauugcaccaaa

SEQ ID NO: 919669 - RNA, 19 nt, Artificial Sequence
  Description of Artificial Sequence: Synthetic oligonucleotide
uugucauguuuagcagcug

SEQ ID NO: 919670 - RNA, 19 nt, Artificial Sequence
  Description of Artificial Sequence: Synthetic oligonucleotide
gaauaucucacuggugaau

SEQ ID NO: 919671 - RNA, 19 nt, Artificial Sequence
  Description of Artificial Sequence: Synthetic oligonucleotide
cagagacgauaauuccauc

SEQ ID NO: 919672 - RNA, 19 nt, Artificial Sequence
  Description of Artificial Sequence: Synthetic oligonucleotide
ugcugguacugaugcuaac

SEQ ID NO: 919673 - RNA, 19 nt, Artificial Sequence
  Description of Artificial Sequence: Synthetic oligonucleotide
gaucaugaagagugggauu

SEQ ID NO: 919674 - RNA, 19 nt, Artificial Sequence
  Description of Artificial Sequence: Synthetic oligonucleotide
gccgucggaggcuugcuag

SEQ ID NO: 919675 - RNA, 19 nt, Artificial Sequence
  Description of Artificial Sequence: Synthetic oligonucleotide
uggcacaugaugggucaga

SEQ ID NO: 919676 - RNA, 19 nt, Artificial Sequence
  Description of Artificial Sequence: Synthetic oligonucleotide
auaguuccuccaguuguau

SEQ ID NO: 919677 - RNA, 19 nt, Artificial Sequence
  Description of Artificial Sequence: Synthetic oligonucleotide
gggcugauaguuccuccag

SEQ ID NO: 919678 - RNA, 19 nt, Artificial Sequence
  Description of Artificial Sequence: Synthetic oligonucleotide
cuguucagggugguggcuc

SEQ ID NO: 919679 - RNA, 19 nt, Artificial Sequence
  Description of Artificial Sequence: Synthetic oligonucleotide
gaauauccacucaucuggu

SEQ ID NO: 919680 - RNA, 19 nt, Artificial Sequence
  Description of Artificial Sequence: Synthetic oligonucleotide
gugaagaucuuccguaguu

SEQ ID NO: 919681 - RNA, 19 nt, Artificial Sequence
  Description of Artificial Sequence: Synthetic oligonucleotide
uggagagccucaaguuauu

SEQ ID NO: 919682 - RNA, 19 nt, Artificial Sequence
  Description of Artificial Sequence: Synthetic oligonucleotide
caucuguugcaaguugaca

SEQ ID NO: 919683 - RNA, 19 nt, Artificial Sequence
  Description of Artificial Sequence: Synthetic oligonucleotide
gcucacauucacucaucug

SEQ ID NO: 919684 - RNA, 19 nt, Artificial Sequence
  Description of Artificial Sequence: Synthetic oligonucleotide
ugacagcuucguggaauca

SEQ ID NO: 919685 - RNA, 19 nt, Artificial Sequence
  Description of Artificial Sequence: Synthetic oligonucleotide
ugcuaacauuacaguuguc

SEQ ID NO: 919686 - RNA, 19 nt, Artificial Sequence
  Description of Artificial Sequence: Synthetic oligonucleotide
cuggagagccucaaguuau

SEQ ID NO: 919687 - RNA, 19 nt, Artificial Sequence
  Description of Artificial Sequence: Synthetic oligonucleotide
caguauuaacaugcuucuc

SEQ ID NO: 919688 - RNA, 19 nt, Artificial Sequence
  Description of Artificial Sequence: Synthetic oligonucleotide
ugccacagugugccucugu

SEQ ID NO: 919689 - RNA, 19 nt, Artificial Sequence
  Description of Artificial Sequence: Synthetic oligonucleotide
ucagaccguugucuucuuu

SEQ ID NO: 919690 - RNA, 19 nt, Artificial Sequence
  Description of Artificial Sequence: Synthetic oligonucleotide
gcugugugacaugaggaac

SEQ ID NO: 919691 - RNA, 19 nt, Artificial Sequence
  Description of Artificial Sequence: Synthetic oligonucleotide
uucuggagugcuggaguuc

SEQ ID NO: 919692 - RNA, 19 nt, Artificial Sequence
  Description of Artificial Sequence: Synthetic oligonucleotide
ccacuugggaugcacucag

SEQ ID NO: 919693 - RNA, 19 nt, Artificial Sequence
  Description of Artificial Sequence: Synthetic oligonucleotide
gaauaaaugggugccccuu

SEQ ID NO: 919694 - RNA, 19 nt, Artificial Sequence
  Description of Artificial Sequence: Synthetic oligonucleotide
ccccucuaggaguacagac

SEQ ID NO: 919695 - RNA, 19 nt, Artificial Sequence
  Description of Artificial Sequence: Synthetic oligonucleotide
ugaaugcgaccaagucaau

SEQ ID NO: 919696 - RNA, 19 nt, Artificial Sequence
  Description of Artificial Sequence: Synthetic oligonucleotide
gccgaucuuggucuagaug

SEQ ID NO: 919697 - RNA, 19 nt, Artificial Sequence
  Description of Artificial Sequence: Synthetic oligonucleotide
guacucgaugaccuccaaa

SEQ ID NO: 919698 - RNA, 19 nt, Artificial Sequence
  Description of Artificial Sequence: Synthetic oligonucleotide
aggcaauauggcagacauc

SEQ ID NO: 919699 - RNA, 19 nt, Artificial Sequence
  Description of Artificial Sequence: Synthetic oligonucleotide
caucuugacuuuuacuguu

SEQ ID NO: 919700 - RNA, 19 nt, Artificial Sequence
  Description of Artificial Sequence: Synthetic oligonucleotide
gcacaugaugggucagaag

SEQ ID NO: 919701 - RNA, 19 nt, Artificial Sequence
  Description of Artificial Sequence: Synthetic oligonucleotide
ccacucaucugguugguca

SEQ ID NO: 919702 - RNA, 19 nt, Artificial Sequence
  Description of Artificial Sequence: Synthetic oligonucleotide
gcuacaccaacucguagua

SEQ ID NO: 919703 - RNA, 19 nt, Artificial Sequence
  Description of Artificial Sequence: Synthetic oligonucleotide
cuuccguaguuuacaguua

SEQ ID NO: 919704 - RNA, 19 nt, Artificial Sequence
  Description of Artificial Sequence: Synthetic oligonucleotide
ugccgaucuuggucuagau

SEQ ID NO: 919705 - RNA, 19 nt, Artificial Sequence
  Description of Artificial Sequence: Synthetic oligonucleotide
agggguagguaaaucugaa

SEQ ID NO: 919706 - RNA, 19 nt, Artificial Sequence
  Description of Artificial Sequence: Synthetic oligonucleotide
aguuuacaguuagcagaga

SEQ ID NO: 919707 - RNA, 19 nt, Artificial Sequence
  Description of Artificial Sequence: Synthetic oligonucleotide
acagugugccucugucuuu

SEQ ID NO: 919708 - RNA, 19 nt, Artificial Sequence
  Description of Artificial Sequence: Synthetic oligonucleotide
acagcuucguggaaucaua

SEQ ID NO: 919709 - RNA, 19 nt, Artificial Sequence
  Description of Artificial Sequence: Synthetic oligonucleotide
caccaacucguaguauuuc

SEQ ID NO: 919710 - RNA, 19 nt, Artificial Sequence
  Description of Artificial Sequence: Synthetic oligonucleotide
ucucggggcuuugauuuua

SEQ ID NO: 919711 - RNA, 19 nt, Artificial Sequence
  Description of Artificial Sequence: Synthetic oligonucleotide
ccguaguuuacaguuagca

SEQ ID NO: 919712 - RNA, 19 nt, Artificial Sequence
  Description of Artificial Sequence: Synthetic oligonucleotide
ucugcacucggguccucuu

SEQ ID NO: 919713 - RNA, 19 nt, Artificial Sequence
  Description of Artificial Sequence: Synthetic oligonucleotide
gggacaauuggugggcuca

SEQ ID NO: 919714 - RNA, 19 nt, Artificial Sequence
  Description of Artificial Sequence: Synthetic oligonucleotide
aaacguccucgggagucau

SEQ ID NO: 919715 - RNA, 19 nt, Artificial Sequence
  Description of Artificial Sequence: Synthetic oligonucleotide
ucggggcuuugauuuuaaa

SEQ ID NO: 919716 - RNA, 19 nt, Artificial Sequence
  Description of Artificial Sequence: Synthetic oligonucleotide
caguaauuaguaguucagu

SEQ ID NO: 919717 - RNA, 19 nt, Artificial Sequence
  Description of Artificial Sequence: Synthetic oligonucleotide
ggguucagaauaaaugggu

SEQ ID NO: 919718 - RNA, 19 nt, Artificial Sequence
  Description of Artificial Sequence: Synthetic oligonucleotide
cgauaauuccauccaaaga

SEQ ID NO: 919719 - RNA, 19 nt, Artificial Sequence
  Description of Artificial Sequence: Synthetic oligonucleotide
auuccgucugccagagggu

SEQ ID NO: 919720 - RNA, 19 nt, Artificial Sequence
  Description of Artificial Sequence: Synthetic oligonucleotide
cugguacugaugcuaacau

SEQ ID NO: 919721 - RNA, 19 nt, Artificial Sequence
  Description of Artificial Sequence: Synthetic oligonucleotide
gcgaccaagucaaugcaca

SEQ ID NO: 919722 - RNA, 19 nt, Artificial Sequence
  Description of Artificial Sequence: Synthetic oligonucleotide
ccuugaauaucucacuggu

SEQ ID NO: 919723 - RNA, 19 nt, Artificial Sequence
  Description of Artificial Sequence: Synthetic oligonucleotide
guaguucaguggagaaguc

SEQ ID NO: 919724 - RNA, 19 nt, Artificial Sequence
  Description of Artificial Sequence: Synthetic oligonucleotide
uucucggggcuuugauuuu

SEQ ID NO: 919725 - RNA, 19 nt, Artificial Sequence
  Description of Artificial Sequence: Synthetic oligonucleotide
cuggugaaugcgaccaagu

SEQ ID NO: 919726 - RNA, 19 nt, Artificial Sequence
  Description of Artificial Sequence: Synthetic oligonucleotide
cuugucagaccguugucuu

SEQ ID NO: 919727 - RNA, 19 nt, Artificial Sequence
  Description of Artificial Sequence: Synthetic oligonucleotide
uucccaugaggugccgauc

SEQ ID NO: 919728 - RNA, 19 nt, Artificial Sequence
  Description of Artificial Sequence: Synthetic oligonucleotide
cuaggaguacagacugacu

SEQ ID NO: 919729 - RNA, 19 nt, Artificial Sequence
  Description of Artificial Sequence: Synthetic oligonucleotide
aguugagacaugggucaua

SEQ ID NO: 919730 - RNA, 19 nt, Artificial Sequence
  Description of Artificial Sequence: Synthetic oligonucleotide
ugccgucggaggcuugcua

SEQ ID NO: 919731 - RNA, 19 nt, Artificial Sequence
  Description of Artificial Sequence: Synthetic oligonucleotide
ucccagggguagguaaauc

SEQ ID NO: 919732 - RNA, 19 nt, Artificial Sequence
  Description of Artificial Sequence: Synthetic oligonucleotide
aggcuugcuagcaucugua

SEQ ID NO: 919733 - RNA, 19 nt, Artificial Sequence
  Description of Artificial Sequence: Synthetic oligonucleotide
aaguagcaguugagacaug

SEQ ID NO: 919734 - RNA, 19 nt, Artificial Sequence
  Description of Artificial Sequence: Synthetic oligonucleotide
ggacaauuggugggcucag

SEQ ID NO: 919735 - RNA, 19 nt, Artificial Sequence
  Description of Artificial Sequence: Synthetic oligonucleotide
caauuggugggcucagcau

SEQ ID NO: 919736 - RNA, 19 nt, Artificial Sequence
  Description of Artificial Sequence: Synthetic oligonucleotide
ggaaaacugcucccuugaa

SEQ ID NO: 919737 - RNA, 19 nt, Artificial Sequence
  Description of Artificial Sequence: Synthetic oligonucleotide
agacugacuggcacaugau

SEQ ID NO: 919738 - RNA, 19 nt, Artificial Sequence
  Description of Artificial Sequence: Synthetic oligonucleotide
ggggacauaucaugauucu

SEQ ID NO: 919739 - RNA, 19 nt, Artificial Sequence
  Description of Artificial Sequence: Synthetic oligonucleotide
cgaccaagucaaugcacag

SEQ ID NO: 919740 - RNA, 19 nt, Artificial Sequence
  Description of Artificial Sequence: Synthetic oligonucleotide
auccacucaucugguuggu

SEQ ID NO: 919741 - RNA, 19 nt, Artificial Sequence
  Description of Artificial Sequence: Synthetic oligonucleotide
cagaucuuacugucucacu

SEQ ID NO: 919742 - RNA, 19 nt, Artificial Sequence
  Description of Artificial Sequence: Synthetic oligonucleotide
ccaugaggugccgaucuug

SEQ ID NO: 919743 - RNA, 19 nt, Artificial Sequence
  Description of Artificial Sequence: Synthetic oligonucleotide
ggagagccucaaguuauuc

SEQ ID NO: 919744 - RNA, 19 nt, Artificial Sequence
  Description of Artificial Sequence: Synthetic oligonucleotide
cacuggagagccucaaguu

SEQ ID NO: 919745 - RNA, 19 nt, Artificial Sequence
  Description of Artificial Sequence: Synthetic oligonucleotide
gagccucaaguuauuccgu

SEQ ID NO: 919746 - RNA, 19 nt, Artificial Sequence
  Description of Artificial Sequence: Synthetic oligonucleotide
cucggggcuuugauuuuaa

SEQ ID NO: 919747 - RNA, 19 nt, Artificial Sequence
  Description of Artificial Sequence: Synthetic oligonucleotide
ccgcugguguucuucagca

SEQ ID NO: 919748 - RNA, 19 nt, Artificial Sequence
  Description of Artificial Sequence: Synthetic oligonucleotide
ggcacaugaugggucagaa

SEQ ID NO: 919749 - RNA, 19 nt, Artificial Sequence
  Description of Artificial Sequence: Synthetic oligonucleotide
ggauacugccuccugcuuu

SEQ ID NO: 919750 - RNA, 19 nt, Artificial Sequence
  Description of Artificial Sequence: Synthetic oligonucleotide
ggugccgaucuuggucuag

SEQ ID NO: 919751 - RNA, 19 nt, Artificial Sequence
  Description of Artificial Sequence: Synthetic oligonucleotide
ggagcuacaccaacucgua

SEQ ID NO: 919752 - RNA, 19 nt, Artificial Sequence
  Description of Artificial Sequence: Synthetic oligonucleotide
ccgucggaggcuugcuagc

SEQ ID NO: 919753 - RNA, 19 nt, Artificial Sequence
  Description of Artificial Sequence: Synthetic oligonucleotide
gugcaguauuaacaugcuu

SEQ ID NO: 919754 - RNA, 19 nt, Artificial Sequence
  Description of Artificial Sequence: Synthetic oligonucleotide
ugcugccgucggaggcuug

SEQ ID NO: 919755 - RNA, 19 nt, Artificial Sequence
  Description of Artificial Sequence: Synthetic oligonucleotide
cugcugucaguaccauaaa

SEQ ID NO: 919756 - RNA, 19 nt, Artificial Sequence
  Description of Artificial Sequence: Synthetic oligonucleotide
cccagggguagguaaaucu

SEQ ID NO: 919757 - RNA, 19 nt, Artificial Sequence
  Description of Artificial Sequence: Synthetic oligonucleotide
cagcuucguggaaucauau

SEQ ID NO: 919758 - RNA, 19 nt, Artificial Sequence
  Description of Artificial Sequence: Synthetic oligonucleotide
gucaaccagucucgagggu

SEQ ID NO: 919759 - RNA, 19 nt, Artificial Sequence
  Description of Artificial Sequence: Synthetic oligonucleotide
cucaggccaugaggauccc

SEQ ID NO: 919760 - RNA, 19 nt, Artificial Sequence
  Description of Artificial Sequence: Synthetic oligonucleotide
ucgcugcugucaguaccau

SEQ ID NO: 919761 - RNA, 19 nt, Artificial Sequence
  Description of Artificial Sequence: Synthetic oligonucleotide
cacuggugaaugcgaccaa

SEQ ID NO: 919762 - RNA, 19 nt, Artificial Sequence
  Description of Artificial Sequence: Synthetic oligonucleotide
ccuugucagaccguugucu

SEQ ID NO: 919763 - RNA, 19 nt, Artificial Sequence
  Description of Artificial Sequence: Synthetic oligonucleotide
gaggcgguccaaggacucu

SEQ ID NO: 919764 - RNA, 19 nt, Artificial Sequence
  Description of Artificial Sequence: Synthetic oligonucleotide
ccggauacugccuccugcu

SEQ ID NO: 919765 - RNA, 19 nt, Artificial Sequence
  Description of Artificial Sequence: Synthetic oligonucleotide
gggacauaucaugauucuu

SEQ ID NO: 919766 - RNA, 19 nt, Artificial Sequence
  Description of Artificial Sequence: Synthetic oligonucleotide
gccuggucagguucacugu

SEQ ID NO: 919767 - RNA, 19 nt, Artificial Sequence
  Description of Artificial Sequence: Synthetic oligonucleotide
cugccacagugugccucug

SEQ ID NO: 919768 - RNA, 19 nt, Artificial Sequence
  Description of Artificial Sequence: Synthetic oligonucleotide
cagugugccucugucuuuu

SEQ ID NO: 919769 - RNA, 19 nt, Artificial Sequence
  Description of Artificial Sequence: Synthetic oligonucleotide
ggguugaggacaguuccuu

SEQ ID NO: 919770 - RNA, 19 nt, Artificial Sequence
  Description of Artificial Sequence: Synthetic oligonucleotide
gggguugaggacaguuccu

SEQ ID NO: 919771 - RNA, 19 nt, Artificial Sequence
  Description of Artificial Sequence: Synthetic oligonucleotide
cuggacccgaaggcaauau

SEQ ID NO: 919772 - RNA, 19 nt, Artificial Sequence
  Description of Artificial Sequence: Synthetic oligonucleotide
cgucggaggcuugcuagca

SEQ ID NO: 919773 - RNA, 19 nt, Artificial Sequence
  Description of Artificial Sequence: Synthetic oligonucleotide
gcaauauggcagacaucuu

SEQ ID NO: 919774 - RNA, 19 nt, Artificial Sequence
  Description of Artificial Sequence: Synthetic oligonucleotide
cuggcacaacuggcuauuu

SEQ ID NO: 919775 - RNA, 19 nt, Artificial Sequence
  Description of Artificial Sequence: Synthetic oligonucleotide
ccagucucgaggguucaau

SEQ ID NO: 919776 - RNA, 19 nt, Artificial Sequence
  Description of Artificial Sequence: Synthetic oligonucleotide
cagcaguuucucggggcuu

SEQ ID NO: 919777 - RNA, 19 nt, Artificial Sequence
  Description of Artificial Sequence: Synthetic oligonucleotide
cucaucuggcugggcugau

SEQ ID NO: 919778 - RNA, 19 nt, Artificial Sequence
  Description of Artificial Sequence: Synthetic oligonucleotide
gcugacugggagggacaau

SEQ ID NO: 919779 - RNA, 19 nt, Artificial Sequence
  Description of Artificial Sequence: Synthetic oligonucleotide
cugcugccgucggaggcuu

SEQ ID NO: 919780 - RNA, 19 nt, Artificial Sequence
  Description of Artificial Sequence: Synthetic oligonucleotide
cggauacugccuccugcuu

SEQ ID NO: 919781 - RNA, 19 nt, Artificial Sequence
  Description of Artificial Sequence: Synthetic oligonucleotide
aauaaugugaccgaguccc

SEQ ID NO: 919782 - RNA, 19 nt, Artificial Sequence
  Description of Artificial Sequence: Synthetic oligonucleotide
aauaagacgagacugaagu

SEQ ID NO: 919783 - RNA, 19 nt, Artificial Sequence
  Description of Artificial Sequence: Synthetic oligonucleotide
uauuaaaacugcuuuaggg

SEQ ID NO: 919784 - RNA, 19 nt, Artificial Sequence
  Description of Artificial Sequence: Synthetic oligonucleotide
aaggcuguaaaauaaguag

SEQ ID NO: 919785 - RNA, 19 nt, Artificial Sequence
  Description of Artificial Sequence: Synthetic oligonucleotide
aaggccaaaaguuguaugc

SEQ ID NO: 919786 - RNA, 19 nt, Artificial Sequence
  Description of Artificial Sequence: Synthetic oligonucleotide
aaauggagcaccuauucuc

SEQ ID NO: 919787 - RNA, 19 nt, Artificial Sequence
  Description of Artificial Sequence: Synthetic oligonucleotide
ucucauaaggaauaagacg

SEQ ID NO: 919788 - RNA, 19 nt, Artificial Sequence
  Description of Artificial Sequence: Synthetic oligonucleotide
aaacggaaaacuuaauuug

SEQ ID NO: 919789 - RNA, 19 nt, Artificial Sequence
  Description of Artificial Sequence: Synthetic oligonucleotide
auaagguucaacuuuacug

SEQ ID NO: 919790 - RNA, 19 nt, Artificial Sequence
  Description of Artificial Sequence: Synthetic oligonucleotide
aagaacguagucuuucugg

SEQ ID NO: 919791 - RNA, 19 nt, Artificial Sequence
  Description of Artificial Sequence: Synthetic oligonucleotide
uuugcggugacuuuggaag

SEQ ID NO: 919792 - RNA, 19 nt, Artificial Sequence
  Description of Artificial Sequence: Synthetic oligonucleotide
aacugagucucacuaaaac

SEQ ID NO: 919793 - RNA, 19 nt, Artificial Sequence
  Description of Artificial Sequence: Synthetic oligonucleotide
uuuagguagaacuuggaga

SEQ ID NO: 919794 - RNA, 19 nt, Artificial Sequence
  Description of Artificial Sequence: Synthetic oligonucleotide
ugucagauccuuuagguag

SEQ ID NO: 919795 - RNA, 19 nt, Artificial Sequence
  Description of Artificial Sequence: Synthetic oligonucleotide
gagguaaugaaccaguuac

SEQ ID NO: 919796 - RNA, 19 nt, Artificial Sequence
  Description of Artificial Sequence: Synthetic oligonucleotide
uguauuaaaacugcuuuag

SEQ ID NO: 919797 - RNA, 19 nt, Artificial Sequence
  Description of Artificial Sequence: Synthetic oligonucleotide
gaaccauugaucugguugg

SEQ ID NO: 919798 - RNA, 19 nt, Artificial Sequence
  Description of Artificial Sequence: Synthetic oligonucleotide
uuuccgaggacuaaguucu

SEQ ID NO: 919799 - RNA, 19 nt, Artificial Sequence
  Description of Artificial Sequence: Synthetic oligonucleotide
cucauaaggaauaagacga

SEQ ID NO: 919800 - RNA, 19 nt, Artificial Sequence
  Description of Artificial Sequence: Synthetic oligonucleotide
aauuucuagaagaacguag

SEQ ID NO: 919801 - RNA, 19 nt, Artificial Sequence
  Description of Artificial Sequence: Synthetic oligonucleotide
aaagguaagaccugaaguu

SEQ ID NO: 919802 - RNA, 19 nt, Artificial Sequence
  Description of Artificial Sequence: Synthetic oligonucleotide
uaaaauaccuagugaaggc

SEQ ID NO: 919803 - RNA, 19 nt, Artificial Sequence
  Description of Artificial Sequence: Synthetic oligonucleotide
agaacguagucuuucuggc

SEQ ID NO: 919804 - RNA, 19 nt, Artificial Sequence
  Description of Artificial Sequence: Synthetic oligonucleotide
gaaaacuuaauuuggcuuc

SEQ ID NO: 919805 - RNA, 19 nt, Artificial Sequence
  Description of Artificial Sequence: Synthetic oligonucleotide
aagaccugaaguuuccgag

SEQ ID NO: 919806 - RNA, 19 nt, Artificial Sequence
  Description of Artificial Sequence: Synthetic oligonucleotide
aggugaaauauuuuaguag

SEQ ID NO: 919807 - RNA, 19 nt, Artificial Sequence
  Description of Artificial Sequence: Synthetic oligonucleotide
augaacgagguaaugaacc

SEQ ID NO: 919808 - RNA, 19 nt, Artificial Sequence
  Description of Artificial Sequence: Synthetic oligonucleotide
augucgaagagucucuggc

SEQ ID NO: 919809 - RNA, 19 nt, Artificial Sequence
  Description of Artificial Sequence: Synthetic oligonucleotide
ugcuuugaugguuuggacg

SEQ ID NO: 919810 - RNA, 19 nt, Artificial Sequence
  Description of Artificial Sequence: Synthetic oligonucleotide
ugcaacuuguuugagacag

SEQ ID NO: 919811 - RNA, 19 nt, Artificial Sequence
  Description of Artificial Sequence: Synthetic oligonucleotide
uguugucagauccuuuagg

SEQ ID NO: 919812 - RNA, 19 nt, Artificial Sequence
  Description of Artificial Sequence: Synthetic oligonucleotide
aaugugaccgagucccggg

SEQ ID NO: 919813 - RNA, 19 nt, Artificial Sequence
  Description of Artificial Sequence: Synthetic oligonucleotide
cuuauccuccccaacaccc

SEQ ID NO: 919814 - RNA, 19 nt, Artificial Sequence
  Description of Artificial Sequence: Synthetic oligonucleotide
uggaaaacugucucuagug

SEQ ID NO: 919815 - RNA, 19 nt, Artificial Sequence
  Description of Artificial Sequence: Synthetic oligonucleotide
ucacuaaaacucuauaaau

SEQ ID NO: 919816 - RNA, 19 nt, Artificial Sequence
  Description of Artificial Sequence: Synthetic oligonucleotide
aagacgagacugaaguucg

SEQ ID NO: 919817 - RNA, 19 nt, Artificial Sequence
  Description of Artificial Sequence: Synthetic oligonucleotide
aaugagacugagugcgaag

SEQ ID NO: 919818 - RNA, 19 nt, Artificial Sequence
  Description of Artificial Sequence: Synthetic oligonucleotide
aaugacuaccgcugcaacu

SEQ ID NO: 919819 - RNA, 19 nt, Artificial Sequence
  Description of Artificial Sequence: Synthetic oligonucleotide
ucucacuaaaacucuauaa

SEQ ID NO: 919820 - RNA, 19 nt, Artificial Sequence
  Description of Artificial Sequence: Synthetic oligonucleotide
uguagugcuucuccgucgg

SEQ ID NO: 919821 - RNA, 19 nt, Artificial Sequence
  Description of Artificial Sequence: Synthetic oligonucleotide
aaugggagcauuggcuuac

SEQ ID NO: 919822 - RNA, 19 nt, Artificial Sequence
  Description of Artificial Sequence: Synthetic oligonucleotide
cuuuagguagaacuuggag

SEQ ID NO: 919823 - RNA, 19 nt, Artificial Sequence
  Description of Artificial Sequence: Synthetic oligonucleotide
ucauaaggaauaagacgag

SEQ ID NO: 919824 - RNA, 19 nt, Artificial Sequence
  Description of Artificial Sequence: Synthetic oligonucleotide
gaaguggaagcaaugacac

SEQ ID NO: 919825 - RNA, 19 nt, Artificial Sequence
  Description of Artificial Sequence: Synthetic oligonucleotide
gguaauggcauucggaggc

SEQ ID NO: 919826 - RNA, 19 nt, Artificial Sequence
  Description of Artificial Sequence: Synthetic oligonucleotide
uuguaugcuggcuagcugu

SEQ ID NO: 919827 - RNA, 19 nt, Artificial Sequence
  Description of Artificial Sequence: Synthetic oligonucleotide
agaaugaccuaggaagcgc

SEQ ID NO: 919828 - RNA, 19 nt, Artificial Sequence
  Description of Artificial Sequence: Synthetic oligonucleotide
aggaacuucaguucggagu

SEQ ID NO: 919829 - RNA, 19 nt, Artificial Sequence
  Description of Artificial Sequence: Synthetic oligonucleotide
aucuggaacacuaauuguc

SEQ ID NO: 919830 - RNA, 19 nt, Artificial Sequence
  Description of Artificial Sequence: Synthetic oligonucleotide
ugcgucacguuguuguugg

SEQ ID NO: 919831 - RNA, 19 nt, Artificial Sequence
  Description of Artificial Sequence: Synthetic oligonucleotide
cucuuuacggcccagcaac

SEQ ID NO: 919832 - RNA, 19 nt, Artificial Sequence
  Description of Artificial Sequence: Synthetic oligonucleotide
aggacuaaguucugguguc

SEQ ID NO: 919833 - RNA, 19 nt, Artificial Sequence
  Description of Artificial Sequence: Synthetic oligonucleotide
uuuuggucauccaagcaau

SEQ ID NO: 919834 - RNA, 19 nt, Artificial Sequence
  Description of Artificial Sequence: Synthetic oligonucleotide
uuccuaaagaaugggagca

SEQ ID NO: 919835 - RNA, 19 nt, Artificial Sequence
  Description of Artificial Sequence: Synthetic oligonucleotide
gagaggacucaacacagug

SEQ ID NO: 919836 - RNA, 19 nt, Artificial Sequence
  Description of Artificial Sequence: Synthetic oligonucleotide
uaagacgagacugaaguuc

SEQ ID NO: 919837 - RNA, 19 nt, Artificial Sequence
  Description of Artificial Sequence: Synthetic oligonucleotide
ucggaguucgcuuuguagu

SEQ ID NO: 919838 - RNA, 19 nt, Artificial Sequence
  Description of Artificial Sequence: Synthetic oligonucleotide
aaauaccuagugaaggcug

SEQ ID NO: 919839 - RNA, 19 nt, Artificial Sequence
  Description of Artificial Sequence: Synthetic oligonucleotide
uugcuuauccuccccaaca

SEQ ID NO: 919840 - RNA, 19 nt, Artificial Sequence
  Description of Artificial Sequence: Synthetic oligonucleotide
cuaaagaaugggagcauug

SEQ ID NO: 919841 - RNA, 19 nt, Artificial Sequence
  Description of Artificial Sequence: Synthetic oligonucleotide
caccuauucuccaaguaag

SEQ ID NO: 919842 - RNA, 19 nt, Artificial Sequence
  Description of Artificial Sequence: Synthetic oligonucleotide
ugaccauaccagcagcugc

SEQ ID NO: 919843 - RNA, 19 nt, Artificial Sequence
  Description of Artificial Sequence: Synthetic oligonucleotide
guauguuucugugaccgcg

SEQ ID NO: 919844 - RNA, 19 nt, Artificial Sequence
  Description of Artificial Sequence: Synthetic oligonucleotide
agaugaacgagguaaugaa

SEQ ID NO: 919845 - RNA, 19 nt, Artificial Sequence
  Description of Artificial Sequence: Synthetic oligonucleotide
ccaugaaugagacugagug

SEQ ID NO: 919846 - RNA, 19 nt, Artificial Sequence
  Description of Artificial Sequence: Synthetic oligonucleotide
caaguaaggcuuacaggcg

SEQ ID NO: 919847 - RNA, 19 nt, Artificial Sequence
  Description of Artificial Sequence: Synthetic oligonucleotide
gaugucgaagagucucugg

SEQ ID NO: 919848 - RNA, 19 nt, Artificial Sequence
  Description of Artificial Sequence: Synthetic oligonucleotide
uuuguagugcuucuccguc

SEQ ID NO: 919849 - RNA, 19 nt, Artificial Sequence
  Description of Artificial Sequence: Synthetic oligonucleotide
guuucugugaccgcgauuc

SEQ ID NO: 919850 - RNA, 19 nt, Artificial Sequence
  Description of Artificial Sequence: Synthetic oligonucleotide
agaccugaaguuuccgagg

SEQ ID NO: 919851 - RNA, 19 nt, Artificial Sequence
  Description of Artificial Sequence: Synthetic oligonucleotide
acggaaaacuuaauuuggc

SEQ ID NO: 919852 - RNA, 19 nt, Artificial Sequence
  Description of Artificial Sequence: Synthetic oligonucleotide
gguaauggcagcuuggauc

SEQ ID NO: 919853 - RNA, 19 nt, Artificial Sequence
  Description of Artificial Sequence: Synthetic oligonucleotide
uccgaggugaaauauuuua

SEQ ID NO: 919854 - RNA, 19 nt, Artificial Sequence
  Description of Artificial Sequence: Synthetic oligonucleotide
uaccgcugcaacuuguuug

SEQ ID NO: 919855 - RNA, 19 nt, Artificial Sequence
  Description of Artificial Sequence: Synthetic oligonucleotide
uuguagugcuucuccgucg

SEQ ID NO: 919856 - RNA, 19 nt, Artificial Sequence
  Description of Artificial Sequence: Synthetic oligonucleotide
gguugagagcaucagaaug

SEQ ID NO: 919857 - RNA, 19 nt, Artificial Sequence
  Description of Artificial Sequence: Synthetic oligonucleotide
guuuccgaggacuaaguuc

SEQ ID NO: 919858 - RNA, 19 nt, Artificial Sequence
  Description of Artificial Sequence: Synthetic oligonucleotide
uuuacggcccagcaacugu

SEQ ID NO: 919859 - RNA, 19 nt, Artificial Sequence
  Description of Artificial Sequence: Synthetic oligonucleotide
uccaauaaugugaccgagu

SEQ ID NO: 919860 - RNA, 19 nt, Artificial Sequence
  Description of Artificial Sequence: Synthetic oligonucleotide
acgggagaggacucaacac

SEQ ID NO: 919861 - RNA, 19 nt, Artificial Sequence
  Description of Artificial Sequence: Synthetic oligonucleotide
gacuuuggaagcuucgcga

SEQ ID NO: 919862 - RNA, 19 nt, Artificial Sequence
  Description of Artificial Sequence: Synthetic oligonucleotide
gagauaguagcuggaauac

SEQ ID NO: 919863 - RNA, 19 nt, Artificial Sequence
  Description of Artificial Sequence: Synthetic oligonucleotide
aaggcuuacaggcggugga

SEQ ID NO: 919864 - RNA, 19 nt, Artificial Sequence
  Description of Artificial Sequence: Synthetic oligonucleotide
aaaaccacauuaacugagu

SEQ ID NO: 919865 - RNA, 19 nt, Artificial Sequence
  Description of Artificial Sequence: Synthetic oligonucleotide
uauguuucugugaccgcga

SEQ ID NO: 919866 - RNA, 19 nt, Artificial Sequence
  Description of Artificial Sequence: Synthetic oligonucleotide
gaagaacguagucuuucug

SEQ ID NO: 919867 - RNA, 19 nt, Artificial Sequence
  Description of Artificial Sequence: Synthetic oligonucleotide
gaggugaaauauuuuagua

SEQ ID NO: 919868 - RNA, 19 nt, Artificial Sequence
  Description of Artificial Sequence: Synthetic oligonucleotide
acaggcgguggacagguuc

SEQ ID NO: 919869 - RNA, 19 nt, Artificial Sequence
  Description of Artificial Sequence: Synthetic oligonucleotide
gcaauauucaaaucccgug

SEQ ID NO: 919870 - RNA, 19 nt, Artificial Sequence
  Description of Artificial Sequence: Synthetic oligonucleotide
gguuccuaaagaaugggag

SEQ ID NO: 919871 - RNA, 19 nt, Artificial Sequence
  Description of Artificial Sequence: Synthetic oligonucleotide
ggaauacuccccuuucacg

SEQ ID NO: 919872 - RNA, 19 nt, Artificial Sequence
  Description of Artificial Sequence: Synthetic oligonucleotide
aaguuguaugcuggcuagc

SEQ ID NO: 919873 - RNA, 19 nt, Artificial Sequence
  Description of Artificial Sequence: Synthetic oligonucleotide
gacacuccgaggcucagac

SEQ ID NO: 919874 - RNA, 19 nt, Artificial Sequence
  Description of Artificial Sequence: Synthetic oligonucleotide
caauaaugugaccgagucc

SEQ ID NO: 919875 - RNA, 19 nt, Artificial Sequence
  Description of Artificial Sequence: Synthetic oligonucleotide
gcuuacuucuugcuuaucc

SEQ ID NO: 919876 - RNA, 19 nt, Artificial Sequence
  Description of Artificial Sequence: Synthetic oligonucleotide
ucuaaagccuuuuggucau

SEQ ID NO: 919877 - RNA, 19 nt, Artificial Sequence
  Description of Artificial Sequence: Synthetic oligonucleotide
ggugaaauauuuuaguagu

SEQ ID NO: 919878 - RNA, 19 nt, Artificial Sequence
  Description of Artificial Sequence: Synthetic oligonucleotide
accgcgauuccuuaaucug

SEQ ID NO: 919879 - RNA, 19 nt, Artificial Sequence
  Description of Artificial Sequence: Synthetic oligonucleotide
gaacguagucuuucuggcc

SEQ ID NO: 919880 - RNA, 19 nt, Artificial Sequence
  Description of Artificial Sequence: Synthetic oligonucleotide
agucuuucuggccauucca

SEQ ID NO: 919881 - RNA, 19 nt, Artificial Sequence
  Description of Artificial Sequence: Synthetic oligonucleotide
ugcuuauccuccccaacac

SEQ ID NO: 919882 - RNA, 19 nt, Artificial Sequence
  Description of Artificial Sequence: Synthetic oligonucleotide
ggguauguuucugugaccg

SEQ ID NO: 919883 - RNA, 19 nt, Artificial Sequence
  Description of Artificial Sequence: Synthetic oligonucleotide
ugguguauuaaaacugcuu

SEQ ID NO: 919884 - RNA, 19 nt, Artificial Sequence
  Description of Artificial Sequence: Synthetic oligonucleotide
aaagagaccccuugauguu

SEQ ID NO: 919885 - RNA, 19 nt, Artificial Sequence
  Description of Artificial Sequence: Synthetic oligonucleotide
accugcgucacguuguugu

SEQ ID NO: 919886 - RNA, 19 nt, Artificial Sequence
  Description of Artificial Sequence: Synthetic oligonucleotide
gucucauaaggaauaagac

SEQ ID NO: 919887 - RNA, 19 nt, Artificial Sequence
  Description of Artificial Sequence: Synthetic oligonucleotide
uagucuuucuggccauucc

SEQ ID NO: 919888 - RNA, 19 nt, Artificial Sequence
  Description of Artificial Sequence: Synthetic oligonucleotide
caaagagaccccuugaugu

SEQ ID NO: 919889 - RNA, 19 nt, Artificial Sequence
  Description of Artificial Sequence: Synthetic oligonucleotide
ugguuuggacgcaugugca

SEQ ID NO: 919890 - RNA, 19 nt, Artificial Sequence
  Description of Artificial Sequence: Synthetic oligonucleotide
auacaggacacuagggguc

SEQ ID NO: 919891 - RNA, 19 nt, Artificial Sequence
  Description of Artificial Sequence: Synthetic oligonucleotide
aauaccuagugaaggcugu

SEQ ID NO: 919892 - RNA, 19 nt, Artificial Sequence
  Description of Artificial Sequence: Synthetic oligonucleotide
uuaggguugagagcaucag

SEQ ID NO: 919893 - RNA, 19 nt, Artificial Sequence
  Description of Artificial Sequence: Synthetic oligonucleotide
gucggggacacuccgaggc

SEQ ID NO: 919894 - RNA, 19 nt, Artificial Sequence
  Description of Artificial Sequence: Synthetic oligonucleotide
ugugagcagcaacagacuu

SEQ ID NO: 919895 - RNA, 19 nt, Artificial Sequence
  Description of Artificial Sequence: Synthetic oligonucleotide
gaugaacgagguaaugaac

SEQ ID NO: 919896 - RNA, 19 nt, Artificial Sequence
  Description of Artificial Sequence: Synthetic oligonucleotide
uagugcuucuccgucgggg

SEQ ID NO: 919897 - RNA, 19 nt, Artificial Sequence
  Description of Artificial Sequence: Synthetic oligonucleotide
uacaaauggagcaccuauu

SEQ ID NO: 919898 - RNA, 19 nt, Artificial Sequence
  Description of Artificial Sequence: Synthetic oligonucleotide
agugcgaaggaaccauuga

SEQ ID NO: 919899 - RNA, 19 nt, Artificial Sequence
  Description of Artificial Sequence: Synthetic oligonucleotide
aagagaccccuugauguug

SEQ ID NO: 919900 - RNA, 19 nt, Artificial Sequence
  Description of Artificial Sequence: Synthetic oligonucleotide
gacgggagaggacucaaca

SEQ ID NO: 919901 - RNA, 19 nt, Artificial Sequence
  Description of Artificial Sequence: Synthetic oligonucleotide
cauuaacugagucucacua

SEQ ID NO: 919902 - RNA, 19 nt, Artificial Sequence
  Description of Artificial Sequence: Synthetic oligonucleotide
agguaagaccugaaguuuc

SEQ ID NO: 919903 - RNA, 19 nt, Artificial Sequence
  Description of Artificial Sequence: Synthetic oligonucleotide
caaacggaaaacuuaauuu

SEQ ID NO: 919904 - RNA, 19 nt, Artificial Sequence
  Description of Artificial Sequence: Synthetic oligonucleotide
agucaaacggaaaacuuaa

SEQ ID NO: 919905 - RNA, 19 nt, Artificial Sequence
  Description of Artificial Sequence: Synthetic oligonucleotide
acgguaaugacuaccgcug

SEQ ID NO: 919906 - RNA, 19 nt, Artificial Sequence
  Description of Artificial Sequence: Synthetic oligonucleotide
aaugaccuaggaagcgcuc

SEQ ID NO: 919907 - RNA, 19 nt, Artificial Sequence
  Description of Artificial Sequence: Synthetic oligonucleotide
caaggccaaaaguuguaug

SEQ ID NO: 919908 - RNA, 19 nt, Artificial Sequence
  Description of Artificial Sequence: Synthetic oligonucleotide
cagaaugaccuaggaagcg

SEQ ID NO: 919909 - RNA, 19 nt, Artificial Sequence
  Description of Artificial Sequence: Synthetic oligonucleotide
gacugagugcgaaggaacc

SEQ ID NO: 919910 - RNA, 19 nt, Artificial Sequence
  Description of Artificial Sequence: Synthetic oligonucleotide
gacgguaaugacuaccgcu

SEQ ID NO: 919911 - RNA, 19 nt, Artificial Sequence
  Description of Artificial Sequence: Synthetic oligonucleotide
uuaaucugcuuugaugguu

SEQ ID NO: 919912 - RNA, 19 nt, Artificial Sequence
  Description of Artificial Sequence: Synthetic oligonucleotide
ggucucauaaggaauaaga

SEQ ID NO: 919913 - RNA, 19 nt, Artificial Sequence
  Description of Artificial Sequence: Synthetic oligonucleotide
cacucgaucaccugcguca

SEQ ID NO: 919914 - RNA, 19 nt, Artificial Sequence
  Description of Artificial Sequence: Synthetic oligonucleotide
aguuguaugcuggcuagcu

SEQ ID NO: 919915 - RNA, 19 nt, Artificial Sequence
  Description of Artificial Sequence: Synthetic oligonucleotide
uccgaggacuaaguucugg

SEQ ID NO: 919916 - RNA, 19 nt, Artificial Sequence
  Description of Artificial Sequence: Synthetic oligonucleotide
accuauucuccaaguaagg

SEQ ID NO: 919917 - RNA, 19 nt, Artificial Sequence
  Description of Artificial Sequence: Synthetic oligonucleotide
ucgaucaccugcgucacgu

SEQ ID NO: 919918 - RNA, 19 nt, Artificial Sequence
  Description of Artificial Sequence: Synthetic oligonucleotide
guuguaugcuggcuagcug

SEQ ID NO: 919919 - RNA, 19 nt, Artificial Sequence
  Description of Artificial Sequence: Synthetic oligonucleotide
ccaauaaugugaccgaguc

SEQ ID NO: 919920 - RNA, 19 nt, Artificial Sequence
  Description of Artificial Sequence: Synthetic oligonucleotide
uuacaggcgguggacaggu

SEQ ID NO: 919921 - RNA, 19 nt, Artificial Sequence
  Description of Artificial Sequence: Synthetic oligonucleotide
caaaucccgugguaauggc

SEQ ID NO: 919922 - RNA, 19 nt, Artificial Sequence
  Description of Artificial Sequence: Synthetic oligonucleotide
agcaucagaaugaccuagg

SEQ ID NO: 919923 - RNA, 19 nt, Artificial Sequence
  Description of Artificial Sequence: Synthetic oligonucleotide
ggagauaguagcuggaaua

SEQ ID NO: 919924 - RNA, 19 nt, Artificial Sequence
  Description of Artificial Sequence: Synthetic oligonucleotide
auccaauaaugugaccgag

SEQ ID NO: 919925 - RNA, 19 nt, Artificial Sequence
  Description of Artificial Sequence: Synthetic oligonucleotide
aggagauaguagcuggaau

SEQ ID NO: 919926 - RNA, 19 nt, Artificial Sequence
  Description of Artificial Sequence: Synthetic oligonucleotide
uucccaugaaugagacuga

SEQ ID NO: 919927 - RNA, 19 nt, Artificial Sequence
  Description of Artificial Sequence: Synthetic oligonucleotide
ucuugcuuauccuccccaa

SEQ ID NO: 919928 - RNA, 19 nt, Artificial Sequence
  Description of Artificial Sequence: Synthetic oligonucleotide
gguaaugaaccaguuacuc

SEQ ID NO: 919929 - RNA, 19 nt, Artificial Sequence
  Description of Artificial Sequence: Synthetic oligonucleotide
ucuuuacggcccagcaacu

SEQ ID NO: 919930 - RNA, 19 nt, Artificial Sequence
  Description of Artificial Sequence: Synthetic oligonucleotide
ggagcauuggcuuacuucu

SEQ ID NO: 919931 - RNA, 19 nt, Artificial Sequence
  Description of Artificial Sequence: Synthetic oligonucleotide
cauccaauaaugugaccga

SEQ ID NO: 919932 - RNA, 19 nt, Artificial Sequence
  Description of Artificial Sequence: Synthetic oligonucleotide
aaaucccgugguaauggca

SEQ ID NO: 919933 - RNA, 19 nt, Artificial Sequence
  Description of Artificial Sequence: Synthetic oligonucleotide
cuguaauggcuguagaucu

SEQ ID NO: 919934 - RNA, 19 nt, Artificial Sequence
  Description of Artificial Sequence: Synthetic oligonucleotide
cuugcuuauccuccccaac

SEQ ID NO: 919935 - RNA, 19 nt, Artificial Sequence
  Description of Artificial Sequence: Synthetic oligonucleotide
auauucaaaucccguggua

SEQ ID NO: 919936 - RNA, 19 nt, Artificial Sequence
  Description of Artificial Sequence: Synthetic oligonucleotide
ucaguucggaguucgcuuu

SEQ ID NO: 919937 - RNA, 19 nt, Artificial Sequence
  Description of Artificial Sequence: Synthetic oligonucleotide
uguucagaugaacgaggua

SEQ ID NO: 919938 - RNA, 19 nt, Artificial Sequence
  Description of Artificial Sequence: Synthetic oligonucleotide
gccgagugaagcaaugugg

SEQ ID NO: 919939 - RNA, 19 nt, Artificial Sequence
  Description of Artificial Sequence: Synthetic oligonucleotide
acgagacugaaguucggaa

SEQ ID NO: 919940 - RNA, 19 nt, Artificial Sequence
  Description of Artificial Sequence: Synthetic oligonucleotide
augacuaccgcugcaacuu

SEQ ID NO: 919941 - RNA, 19 nt, Artificial Sequence
  Description of Artificial Sequence: Synthetic oligonucleotide
ucaaggccaaaaguuguau

SEQ ID NO: 919942 - RNA, 19 nt, Artificial Sequence
  Description of Artificial Sequence: Synthetic oligonucleotide
accuagugaaggcuguaaa

SEQ ID NO: 919943 - RNA, 19 nt, Artificial Sequence
  Description of Artificial Sequence: Synthetic oligonucleotide
ccgagugaagcaauguggc

SEQ ID NO: 919944 - RNA, 19 nt, Artificial Sequence
  Description of Artificial Sequence: Synthetic oligonucleotide
uuucugugaccgcgauucc

SEQ ID NO: 919945 - RNA, 19 nt, Artificial Sequence
  Description of Artificial Sequence: Synthetic oligonucleotide
ugacuaccgcugcaacuug

SEQ ID NO: 919946 - RNA, 19 nt, Artificial Sequence
  Description of Artificial Sequence: Synthetic oligonucleotide
gagugcgaaggaaccauug

SEQ ID NO: 919947 - RNA, 19 nt, Artificial Sequence
  Description of Artificial Sequence: Synthetic oligonucleotide
ccaacuggcaauccauccg

SEQ ID NO: 919948 - RNA, 19 nt, Artificial Sequence
  Description of Artificial Sequence: Synthetic oligonucleotide
ccgaggugaaauauuuuag

SEQ ID NO: 919949 - RNA, 19 nt, Artificial Sequence
  Description of Artificial Sequence: Synthetic oligonucleotide
gggacuggaaaacugucuc

SEQ ID NO: 919950 - RNA, 19 nt, Artificial Sequence
  Description of Artificial Sequence: Synthetic oligonucleotide
agcaaugacacaggucgcu

SEQ ID NO: 919951 - RNA, 19 nt, Artificial Sequence
  Description of Artificial Sequence: Synthetic oligonucleotide
cuucgcgaugaggaagugg

SEQ ID NO: 919952 - RNA, 19 nt, Artificial Sequence
  Description of Artificial Sequence: Synthetic oligonucleotide
ucuccgucggggacacucc

SEQ ID NO: 919953 - RNA, 19 nt, Artificial Sequence
  Description of Artificial Sequence: Synthetic oligonucleotide
ccaaaaguuguaugcuggc

SEQ ID NO: 919954 - RNA, 19 nt, Artificial Sequence
  Description of Artificial Sequence: Synthetic oligonucleotide
cucaugggacgguaaugac

SEQ ID NO: 919955 - RNA, 19 nt, Artificial Sequence
  Description of Artificial Sequence: Synthetic oligonucleotide
uucugugaccgcgauuccu

SEQ ID NO: 919956 - RNA, 19 nt, Artificial Sequence
  Description of Artificial Sequence: Synthetic oligonucleotide
agggguccucuuuacaaau

SEQ ID NO: 919957 - RNA, 19 nt, Artificial Sequence
  Description of Artificial Sequence: Synthetic oligonucleotide
uccauccgaggugaaauau

SEQ ID NO: 919958 - RNA, 19 nt, Artificial Sequence
  Description of Artificial Sequence: Synthetic oligonucleotide
guagcuggaauacuccccu

SEQ ID NO: 919959 - RNA, 19 nt, Artificial Sequence
  Description of Artificial Sequence: Synthetic oligonucleotide
agauaguagcuggaauacu

SEQ ID NO: 919960 - RNA, 19 nt, Artificial Sequence
  Description of Artificial Sequence: Synthetic oligonucleotide
auaaugugaccgagucccg

SEQ ID NO: 919961 - RNA, 19 nt, Artificial Sequence
  Description of Artificial Sequence: Synthetic oligonucleotide
uuuggacgcaugugcacuu

SEQ ID NO: 919962 - RNA, 19 nt, Artificial Sequence
  Description of Artificial Sequence: Synthetic oligonucleotide
uuacggcccagcaacuguu

SEQ ID NO: 919963 - RNA, 19 nt, Artificial Sequence
  Description of Artificial Sequence: Synthetic oligonucleotide
aacuggcaauccauccgag

SEQ ID NO: 919964 - RNA, 19 nt, Artificial Sequence
  Description of Artificial Sequence: Synthetic oligonucleotide
cauugaucugguuggccga

SEQ ID NO: 919965 - RNA, 19 nt, Artificial Sequence
  Description of Artificial Sequence: Synthetic oligonucleotide
gguaagaccugaaguuucc

SEQ ID NO: 919966 - RNA, 19 nt, Artificial Sequence
  Description of Artificial Sequence: Synthetic oligonucleotide
ugaccgcgauuccuuaauc

SEQ ID NO: 919967 - RNA, 19 nt, Artificial Sequence
  Description of Artificial Sequence: Synthetic oligonucleotide
gggagcauuggcuuacuuc

SEQ ID NO: 919968 - RNA, 19 nt, Artificial Sequence
  Description of Artificial Sequence: Synthetic oligonucleotide
ugggaguguugagaaguca

SEQ ID NO: 919969 - RNA, 19 nt, Artificial Sequence
  Description of Artificial Sequence: Synthetic oligonucleotide
gcuuacaggcgguggacag

SEQ ID NO: 919970 - RNA, 19 nt, Artificial Sequence
  Description of Artificial Sequence: Synthetic oligonucleotide
agaugucgaagagucucug

SEQ ID NO: 919971 - RNA, 19 nt, Artificial Sequence
  Description of Artificial Sequence: Synthetic oligonucleotide
gaaugagacugagugcgaa

SEQ ID NO: 919972 - RNA, 19 nt, Artificial Sequence
  Description of Artificial Sequence: Synthetic oligonucleotide
ugagugcgaaggaaccauu

SEQ ID NO: 919973 - RNA, 19 nt, Artificial Sequence
  Description of Artificial Sequence: Synthetic oligonucleotide
gacgagacugaaguucgga

SEQ ID NO: 919974 - RNA, 19 nt, Artificial Sequence
  Description of Artificial Sequence: Synthetic oligonucleotide
ugaaucuguaauggcugua

SEQ ID NO: 919975 - RNA, 19 nt, Artificial Sequence
  Description of Artificial Sequence: Synthetic oligonucleotide
acugaccauaccagcagcu

SEQ ID NO: 919976 - RNA, 19 nt, Artificial Sequence
  Description of Artificial Sequence: Synthetic oligonucleotide
cuuuaggguugagagcauc

SEQ ID NO: 919977 - RNA, 19 nt, Artificial Sequence
  Description of Artificial Sequence: Synthetic oligonucleotide
cuuucagcauccggguaug

SEQ ID NO: 919978 - RNA, 19 nt, Artificial Sequence
  Description of Artificial Sequence: Synthetic oligonucleotide
uguuucugugaccgcgauu

SEQ ID NO: 919979 - RNA, 19 nt, Artificial Sequence
  Description of Artificial Sequence: Synthetic oligonucleotide
ugccguugccuugcaacag

SEQ ID NO: 919980 - RNA, 19 nt, Artificial Sequence
  Description of Artificial Sequence: Synthetic oligonucleotide
cuuuacggcccagcaacug

SEQ ID NO: 919981 - RNA, 19 nt, Artificial Sequence
  Description of Artificial Sequence: Synthetic oligonucleotide
cuuugcggugacuuuggaa

SEQ ID NO: 919982 - RNA, 19 nt, Artificial Sequence
  Description of Artificial Sequence: Synthetic oligonucleotide
agucucacuaaaacucuau

SEQ ID NO: 919983 - RNA, 19 nt, Artificial Sequence
  Description of Artificial Sequence: Synthetic oligonucleotide
gaccgcgauuccuuaaucu

SEQ ID NO: 919984 - RNA, 19 nt, Artificial Sequence
  Description of Artificial Sequence: Synthetic oligonucleotide
gcacucgugggccucgggg

SEQ ID NO: 919985 - RNA, 19 nt, Artificial Sequence
  Description of Artificial Sequence: Synthetic oligonucleotide
uccuaaagaaugggagcau

SEQ ID NO: 919986 - RNA, 19 nt, Artificial Sequence
  Description of Artificial Sequence: Synthetic oligonucleotide
ggccgagugaagcaaugug

SEQ ID NO: 919987 - RNA, 19 nt, Artificial Sequence
  Description of Artificial Sequence: Synthetic oligonucleotide
gguaaugacuaccgcugca

SEQ ID NO: 919988 - RNA, 19 nt, Artificial Sequence
  Description of Artificial Sequence: Synthetic oligonucleotide
agcuucgcgaugaggaagu

SEQ ID NO: 919989 - RNA, 19 nt, Artificial Sequence
  Description of Artificial Sequence: Synthetic oligonucleotide
aauggcauucggaggcuuu

SEQ ID NO: 919990 - RNA, 19 nt, Artificial Sequence
  Description of Artificial Sequence: Synthetic oligonucleotide
guucaacuuuacuggcauc

SEQ ID NO: 919991 - RNA, 19 nt, Artificial Sequence
  Description of Artificial Sequence: Synthetic oligonucleotide
agguucaacuuuacuggca

SEQ ID NO: 919992 - RNA, 19 nt, Artificial Sequence
  Description of Artificial Sequence: Synthetic oligonucleotide
ccgcgauuccuuaaucugc

SEQ ID NO: 919993 - RNA, 19 nt, Artificial Sequence
  Description of Artificial Sequence: Synthetic oligonucleotide
guagugcuucuccgucggg

SEQ ID NO: 919994 - RNA, 19 nt, Artificial Sequence
  Description of Artificial Sequence: Synthetic oligonucleotide
gguuuggacgcaugugcac

SEQ ID NO: 919995 - RNA, 19 nt, Artificial Sequence
  Description of Artificial Sequence: Synthetic oligonucleotide
guaguucuuuagcauccaa

SEQ ID NO: 919996 - RNA, 19 nt, Artificial Sequence
  Description of Artificial Sequence: Synthetic oligonucleotide
ucggggacacuccgaggcu

SEQ ID NO: 919997 - RNA, 19 nt, Artificial Sequence
  Description of Artificial Sequence: Synthetic oligonucleotide
aguaaggcuuacaggcggu

SEQ ID NO: 919998 - RNA, 19 nt, Artificial Sequence
  Description of Artificial Sequence: Synthetic oligonucleotide
gcagcuuggauccuuagau

SEQ ID NO: 919999 - RNA, 19 nt, Artificial Sequence
  Description of Artificial Sequence: Synthetic oligonucleotide
gccguugccuugcaacagg

SEQ ID NO: 920000 - RNA, 19 nt, Artificial Sequence
  Description of Artificial Sequence: Synthetic oligonucleotide
guaaggcuuacaggcggug

SEQ ID NO: 920001 - RNA, 19 nt, Artificial Sequence
  Description of Artificial Sequence: Synthetic oligonucleotide
auguuucugugaccgcgau

SEQ ID NO: 920002 - RNA, 19 nt, Artificial Sequence
  Description of Artificial Sequence: Synthetic oligonucleotide
uccgucggggacacuccga

SEQ ID NO: 920003 - RNA, 19 nt, Artificial Sequence
  Description of Artificial Sequence: Synthetic oligonucleotide
uuccgaggacuaaguucug

SEQ ID NO: 920004 - RNA, 19 nt, Artificial Sequence
  Description of Artificial Sequence: Synthetic oligonucleotide
cuccgucggggacacuccg

SEQ ID NO: 920005 - RNA, 19 nt, Artificial Sequence
  Description of Artificial Sequence: Synthetic oligonucleotide
ccuuagaucuccuuuucaa

SEQ ID NO: 920006 - RNA, 19 nt, Artificial Sequence
  Description of Artificial Sequence: Synthetic oligonucleotide
acaggagauaguagcugga

SEQ ID NO: 920007 - RNA, 19 nt, Artificial Sequence
  Description of Artificial Sequence: Synthetic oligonucleotide
uggauccuuagaucuccuu

SEQ ID NO: 920008 - RNA, 19 nt, Artificial Sequence
  Description of Artificial Sequence: Synthetic oligonucleotide
uacggcccagcaacuguuc

SEQ ID NO: 920009 - RNA, 19 nt, Artificial Sequence
  Description of Artificial Sequence: Synthetic oligonucleotide
auccauccgaggugaaaua

SEQ ID NO: 920010 - RNA, 19 nt, Artificial Sequence
  Description of Artificial Sequence: Synthetic oligonucleotide
cuggaaaacugucucuagu

SEQ ID NO: 920011 - RNA, 19 nt, Artificial Sequence
  Description of Artificial Sequence: Synthetic oligonucleotide
ugaccacuucuuucagcau

SEQ ID NO: 920012 - RNA, 19 nt, Artificial Sequence
  Description of Artificial Sequence: Synthetic oligonucleotide
gaacuggccuuugcgguga

SEQ ID NO: 920013 - RNA, 19 nt, Artificial Sequence
  Description of Artificial Sequence: Synthetic oligonucleotide
acggcccagcaacuguuca

SEQ ID NO: 920014 - RNA, 19 nt, Artificial Sequence
  Description of Artificial Sequence: Synthetic oligonucleotide
gaccgagucccggggaccc

SEQ ID NO: 920015 - RNA, 19 nt, Artificial Sequence
  Description of Artificial Sequence: Synthetic oligonucleotide
uggccgagugaagcaaugu

SEQ ID NO: 920016 - RNA, 19 nt, Artificial Sequence
  Description of Artificial Sequence: Synthetic oligonucleotide
ugaccgagucccggggacc

SEQ ID NO: 920017 - RNA, 19 nt, Artificial Sequence
  Description of Artificial Sequence: Synthetic oligonucleotide
gacacuagggguccucuuu

SEQ ID NO: 920018 - RNA, 19 nt, Artificial Sequence
  Description of Artificial Sequence: Synthetic oligonucleotide
agacgagacugaaguucgg

SEQ ID NO: 920019 - RNA, 19 nt, Artificial Sequence
  Description of Artificial Sequence: Synthetic oligonucleotide
caacacccacucgaucacc

SEQ ID NO: 920020 - RNA, 19 nt, Artificial Sequence
  Description of Artificial Sequence: Synthetic oligonucleotide
ggcaauccauccgagguga

SEQ ID NO: 920021 - RNA, 19 nt, Artificial Sequence
  Description of Artificial Sequence: Synthetic oligonucleotide
gugcgaaggaaccauugau

SEQ ID NO: 920022 - RNA, 19 nt, Artificial Sequence
  Description of Artificial Sequence: Synthetic oligonucleotide
guuuggacgcaugugcacu

SEQ ID NO: 920023 - RNA, 19 nt, Artificial Sequence
  Description of Artificial Sequence: Synthetic oligonucleotide
ggaguucgcuuuguagugc

SEQ ID NO: 920024 - RNA, 19 nt, Artificial Sequence
  Description of Artificial Sequence: Synthetic oligonucleotide
caguucggaguucgcuuug

SEQ ID NO: 920025 - RNA, 19 nt, Artificial Sequence
  Description of Artificial Sequence: Synthetic oligonucleotide
cugcgucacguuguuguug

SEQ ID NO: 920026 - RNA, 19 nt, Artificial Sequence
  Description of Artificial Sequence: Synthetic oligonucleotide
ucaccugcgucacguuguu

SEQ ID NO: 920027 - RNA, 19 nt, Artificial Sequence
  Description of Artificial Sequence: Synthetic oligonucleotide
gagaugucgaagagucucu

SEQ ID NO: 920028 - RNA, 19 nt, Artificial Sequence
  Description of Artificial Sequence: Synthetic oligonucleotide
gggucucauaaggaauaag

SEQ ID NO: 920029 - RNA, 19 nt, Artificial Sequence
  Description of Artificial Sequence: Synthetic oligonucleotide
caacuuuacuggcaucacu

SEQ ID NO: 920030 - RNA, 19 nt, Artificial Sequence
  Description of Artificial Sequence: Synthetic oligonucleotide
gagucucacuaaaacucua

SEQ ID NO: 920031 - RNA, 19 nt, Artificial Sequence
  Description of Artificial Sequence: Synthetic oligonucleotide
uggccucaugggacgguaa

SEQ ID NO: 920032 - RNA, 19 nt, Artificial Sequence
  Description of Artificial Sequence: Synthetic oligonucleotide
gggaguguugagaagucaa

SEQ ID NO: 920033 - RNA, 19 nt, Artificial Sequence
  Description of Artificial Sequence: Synthetic oligonucleotide
uuucagcauccggguaugu

SEQ ID NO: 920034 - RNA, 19 nt, Artificial Sequence
  Description of Artificial Sequence: Synthetic oligonucleotide
agcagacaaucagaacuuu

SEQ ID NO: 920035 - RNA, 19 nt, Artificial Sequence
  Description of Artificial Sequence: Synthetic oligonucleotide
gccuugcaacaggagauag

SEQ ID NO: 920036 - RNA, 19 nt, Artificial Sequence
  Description of Artificial Sequence: Synthetic oligonucleotide
ggauccuuagaucuccuuu

SEQ ID NO: 920037 - RNA, 19 nt, Artificial Sequence
  Description of Artificial Sequence: Synthetic oligonucleotide
gagcaccuauucuccaagu

SEQ ID NO: 920038 - RNA, 19 nt, Artificial Sequence
  Description of Artificial Sequence: Synthetic oligonucleotide
cugaucugcagccugucuu

SEQ ID NO: 920039 - RNA, 19 nt, Artificial Sequence
  Description of Artificial Sequence: Synthetic oligonucleotide
caggagauaguagcuggaa

SEQ ID NO: 920040 - RNA, 19 nt, Artificial Sequence
  Description of Artificial Sequence: Synthetic oligonucleotide
gccuuugcggugacuuugg

SEQ ID NO: 920041 - RNA, 19 nt, Artificial Sequence
  Description of Artificial Sequence: Synthetic oligonucleotide
cggaguucgcuuuguagug

SEQ ID NO: 920042 - RNA, 19 nt, Artificial Sequence
  Description of Artificial Sequence: Synthetic oligonucleotide
cuucaguucggaguucgcu

SEQ ID NO: 920043 - RNA, 19 nt, Artificial Sequence
  Description of Artificial Sequence: Synthetic oligonucleotide
ccucaugggacgguaauga

SEQ ID NO: 920044 - RNA, 19 nt, Artificial Sequence
  Description of Artificial Sequence: Synthetic oligonucleotide
ucccggggacccucuuuac

SEQ ID NO: 920045 - RNA, 19 nt, Artificial Sequence
  Description of Artificial Sequence: Synthetic oligonucleotide
acuaccgcugcaacuuguu

SEQ ID NO: 920046 - RNA, 19 nt, Artificial Sequence
  Description of Artificial Sequence: Synthetic oligonucleotide
aggaaccauugaucugguu

SEQ ID NO: 920047 - RNA, 19 nt, Artificial Sequence
  Description of Artificial Sequence: Synthetic oligonucleotide
guuugagacagcagacaau

SEQ ID NO: 920048 - RNA, 19 nt, Artificial Sequence
  Description of Artificial Sequence: Synthetic oligonucleotide
gagaagcacucgugggccu

SEQ ID NO: 920049 - RNA, 19 nt, Artificial Sequence
  Description of Artificial Sequence: Synthetic oligonucleotide
gugaccgcgauuccuuaau

SEQ ID NO: 920050 - RNA, 19 nt, Artificial Sequence
  Description of Artificial Sequence: Synthetic oligonucleotide
gggacccucuuuacggccc

SEQ ID NO: 920051 - RNA, 19 nt, Artificial Sequence
  Description of Artificial Sequence: Synthetic oligonucleotide
gcaacaggagauaguagcu

SEQ ID NO: 920052 - RNA, 19 nt, Artificial Sequence
  Description of Artificial Sequence: Synthetic oligonucleotide
ccgucggggacacuccgag

SEQ ID NO: 920053 - RNA, 19 nt, Artificial Sequence
  Description of Artificial Sequence: Synthetic oligonucleotide
gccucaugggacgguaaug

SEQ ID NO: 920054 - RNA, 19 nt, Artificial Sequence
  Description of Artificial Sequence: Synthetic oligonucleotide
cgguaaugacuaccgcugc

SEQ ID NO: 920055 - RNA, 19 nt, Artificial Sequence
  Description of Artificial Sequence: Synthetic oligonucleotide
cgaggugaaauauuuuagu

SEQ ID NO: 920056 - RNA, 19 nt, Artificial Sequence
  Description of Artificial Sequence: Synthetic oligonucleotide
gacuaccgcugcaacuugu

SEQ ID NO: 920057 - RNA, 19 nt, Artificial Sequence
  Description of Artificial Sequence: Synthetic oligonucleotide
guaauggcauucggaggcu

SEQ ID NO: 920058 - RNA, 19 nt, Artificial Sequence
  Description of Artificial Sequence: Synthetic oligonucleotide
ccccuuuugaaucuguaau

SEQ ID NO: 920059 - RNA, 19 nt, Artificial Sequence
  Description of Artificial Sequence: Synthetic oligonucleotide
gguuggccgagugaagcaa

SEQ ID NO: 920060 - RNA, 19 nt, Artificial Sequence
  Description of Artificial Sequence: Synthetic oligonucleotide
cugugaccgcgauuccuua

SEQ ID NO: 920061 - RNA, 19 nt, Artificial Sequence
  Description of Artificial Sequence: Synthetic oligonucleotide
ccacucgaucaccugcguc

SEQ ID NO: 920062 - RNA, 19 nt, Artificial Sequence
  Description of Artificial Sequence: Synthetic oligonucleotide
uacaggcgguggacagguu

SEQ ID NO: 920063 - RNA, 19 nt, Artificial Sequence
  Description of Artificial Sequence: Synthetic oligonucleotide
cggguauguuucugugacc

SEQ ID NO: 920064 - RNA, 19 nt, Artificial Sequence
  Description of Artificial Sequence: Synthetic oligonucleotide
cccucuuuacggcccagca

SEQ ID NO: 920065 - RNA, 19 nt, Artificial Sequence
  Description of Artificial Sequence: Synthetic oligonucleotide
gaccuaggaagcgcucccu

SEQ ID NO: 920066 - RNA, 19 nt, Artificial Sequence
  Description of Artificial Sequence: Synthetic oligonucleotide
ggggacuggaaaacugucu

SEQ ID NO: 920067 - RNA, 19 nt, Artificial Sequence
  Description of Artificial Sequence: Synthetic oligonucleotide
ggacccucuuuacggccca

SEQ ID NO: 920068 - RNA, 19 nt, Artificial Sequence
  Description of Artificial Sequence: Synthetic oligonucleotide
ccucuuuacggcccagcaa

SEQ ID NO: 920069 - RNA, 19 nt, Artificial Sequence
  Description of Artificial Sequence: Synthetic oligonucleotide
caggucgcucgggcugcgg

SEQ ID NO: 920070 - RNA, 19 nt, Artificial Sequence
  Description of Artificial Sequence: Synthetic oligonucleotide
ccgaggacuaaguucuggu

SEQ ID NO: 920071 - RNA, 19 nt, Artificial Sequence
  Description of Artificial Sequence: Synthetic oligonucleotide
caccugcgucacguuguug

SEQ ID NO: 920072 - RNA, 19 nt, Artificial Sequence
  Description of Artificial Sequence: Synthetic oligonucleotide
cggggacccucuuuacggc

SEQ ID NO: 920073 - RNA, 19 nt, Artificial Sequence
  Description of Artificial Sequence: Synthetic oligonucleotide
ggacgggagaggacucaac

SEQ ID NO: 920074 - RNA, 19 nt, Artificial Sequence
  Description of Artificial Sequence: Synthetic oligonucleotide
cggugacuuuggaagcuuc

SEQ ID NO: 920075 - RNA, 19 nt, Artificial Sequence
  Description of Artificial Sequence: Synthetic oligonucleotide
cgucggggacacuccgagg

SEQ ID NO: 920076 - RNA, 19 nt, Artificial Sequence
  Description of Artificial Sequence: Synthetic oligonucleotide
gcuucgcgaugaggaagug

SEQ ID NO: 920077 - RNA, 19 nt, Artificial Sequence
  Description of Artificial Sequence: Synthetic oligonucleotide
gcgucacguuguuguuggc

SEQ ID NO: 920078 - RNA, 19 nt, Artificial Sequence
  Description of Artificial Sequence: Synthetic oligonucleotide
ggacacuccgaggcucaga

SEQ ID NO: 920079 - RNA, 19 nt, Artificial Sequence
  Description of Artificial Sequence: Synthetic oligonucleotide
cgcgauuccuuaaucugcu

SEQ ID NO: 920080 - RNA, 19 nt, Artificial Sequence
  Description of Artificial Sequence: Synthetic oligonucleotide
ccuuugcggugacuuugga

SEQ ID NO: 920081 - RNA, 19 nt, Artificial Sequence
  Description of Artificial Sequence: Synthetic oligonucleotide
cgaagagucucuggcugca

SEQ ID NO: 920082 - RNA, 19 nt, Artificial Sequence
  Description of Artificial Sequence: Synthetic oligonucleotide
ccauccgaggugaaauauu

SEQ ID NO: 920083 - RNA, 19 nt, Artificial Sequence
  Description of Artificial Sequence: Synthetic oligonucleotide
cgagugaagcaauguggcu

SEQ ID NO: 920084 - RNA, 19 nt, Artificial Sequence
  Description of Artificial Sequence: Synthetic oligonucleotide
gcgauuccuuaaucugcuu

SEQ ID NO: 920085 - RNA, 19 nt, Artificial Sequence
  Description of Artificial Sequence: Synthetic oligonucleotide
ccugcgucacguuguuguu

SEQ ID NO: 920086 - RNA, 19 nt, Artificial Sequence
  Description of Artificial Sequence: Synthetic oligonucleotide
gcggugacuuuggaagcuu

SEQ ID NO: 920087 - RNA, 19 nt, Artificial Sequence
  Description of Artificial Sequence: Synthetic oligonucleotide
cggggaugcggugccucuu

SEQ ID NO: 920088 - RNA, 19 nt, Artificial Sequence
  Description of Artificial Sequence: Synthetic oligonucleotide
aauaaccauaacaauaugc

SEQ ID NO: 920089 - RNA, 19 nt, Artificial Sequence
  Description of Artificial Sequence: Synthetic oligonucleotide
uucauaacaaguaauaaau

SEQ ID NO: 920090 - RNA, 19 nt, Artificial Sequence
  Description of Artificial Sequence: Synthetic oligonucleotide
ggugcuaacaaauucaugg

SEQ ID NO: 920091 - RNA, 19 nt, Artificial Sequence
  Description of Artificial Sequence: Synthetic oligonucleotide
uacaacaacgcuaacucgg

SEQ ID NO: 920092 - RNA, 19 nt, Artificial Sequence
  Description of Artificial Sequence: Synthetic oligonucleotide
uggacagaaugaaagagcg

SEQ ID NO: 920093 - RNA, 19 nt, Artificial Sequence
  Description of Artificial Sequence: Synthetic oligonucleotide
ugaugauucauacaggaac

SEQ ID NO: 920094 - RNA, 19 nt, Artificial Sequence
  Description of Artificial Sequence: Synthetic oligonucleotide
acaaagauucuguaugggc

SEQ ID NO: 920095 - RNA, 19 nt, Artificial Sequence
  Description of Artificial Sequence: Synthetic oligonucleotide
uccaaugaaauuuucauaa

SEQ ID NO: 920096 - RNA, 19 nt, Artificial Sequence
  Description of Artificial Sequence: Synthetic oligonucleotide
acuuucaugaaucuuucuc

SEQ ID NO: 920097 - RNA, 19 nt, Artificial Sequence
  Description of Artificial Sequence: Synthetic oligonucleotide
cuuacucugacaaaagaag

SEQ ID NO: 920098 - RNA, 19 nt, Artificial Sequence
  Description of Artificial Sequence: Synthetic oligonucleotide
auagacgucccuccgaagc

SEQ ID NO: 920099 - RNA, 19 nt, Artificial Sequence
  Description of Artificial Sequence: Synthetic oligonucleotide
ugaugaaaggccaaagaga

SEQ ID NO: 920100 - RNA, 19 nt, Artificial Sequence
  Description of Artificial Sequence: Synthetic oligonucleotide
gaacaaagauucuguaugg

SEQ ID NO: 920101 - RNA, 19 nt, Artificial Sequence
  Description of Artificial Sequence: Synthetic oligonucleotide
augaaauuuucauaacaag

SEQ ID NO: 920102 - RNA, 19 nt, Artificial Sequence
  Description of Artificial Sequence: Synthetic oligonucleotide
acagaugaaucuucucucc

SEQ ID NO: 920103 - RNA, 19 nt, Artificial Sequence
  Description of Artificial Sequence: Synthetic oligonucleotide
ucuacacacccagagaugg

SEQ ID NO: 920104 - RNA, 19 nt, Artificial Sequence
  Description of Artificial Sequence: Synthetic oligonucleotide
aauagguaagucacaugcc

SEQ ID NO: 920105 - RNA, 19 nt, Artificial Sequence
  Description of Artificial Sequence: Synthetic oligonucleotide
ucgacaaugagcuccagga

SEQ ID NO: 920106 - RNA, 19 nt, Artificial Sequence
  Description of Artificial Sequence: Synthetic oligonucleotide
aauaauagguaagucacau

SEQ ID NO: 920107 - RNA, 19 nt, Artificial Sequence
  Description of Artificial Sequence: Synthetic oligonucleotide
gaaucauggaguuuccagc

SEQ ID NO: 920108 - RNA, 19 nt, Artificial Sequence
  Description of Artificial Sequence: Synthetic oligonucleotide
aaucauggaguuuccagcu

SEQ ID NO: 920109 - RNA, 19 nt, Artificial Sequence
  Description of Artificial Sequence: Synthetic oligonucleotide
ucuguauuagacaccuucc

SEQ ID NO: 920110 - RNA, 19 nt, Artificial Sequence
  Description of Artificial Sequence: Synthetic oligonucleotide
uuguaccacaacuggaugg

SEQ ID NO: 920111 - RNA, 19 nt, Artificial Sequence
  Description of Artificial Sequence: Synthetic oligonucleotide
ugcuaacaaauucauggag

SEQ ID NO: 920112 - RNA, 19 nt, Artificial Sequence
  Description of Artificial Sequence: Synthetic oligonucleotide
cauacaggaaccuuucgag

SEQ ID NO: 920113 - RNA, 19 nt, Artificial Sequence
  Description of Artificial Sequence: Synthetic oligonucleotide
uuacucugacaaaagaaga

SEQ ID NO: 920114 - RNA, 19 nt, Artificial Sequence
  Description of Artificial Sequence: Synthetic oligonucleotide
uuuacccacagccagguaa

SEQ ID NO: 920115 - RNA, 19 nt, Artificial Sequence
  Description of Artificial Sequence: Synthetic oligonucleotide
cuuaucucaaccacgggug

SEQ ID NO: 920116 - RNA, 19 nt, Artificial Sequence
  Description of Artificial Sequence: Synthetic oligonucleotide
uguauuagacaccuuccga

SEQ ID NO: 920117 - RNA, 19 nt, Artificial Sequence
  Description of Artificial Sequence: Synthetic oligonucleotide
gaugauucauacaggaacc

SEQ ID NO: 920118 - RNA, 19 nt, Artificial Sequence
  Description of Artificial Sequence: Synthetic oligonucleotide
uuuaccacucuccaucucu

SEQ ID NO: 920119 - RNA, 19 nt, Artificial Sequence
  Description of Artificial Sequence: Synthetic oligonucleotide
uucuguaugggcuaauggu

SEQ ID NO: 920120 - RNA, 19 nt, Artificial Sequence
  Description of Artificial Sequence: Synthetic oligonucleotide
uuucgcucaagauggacag

SEQ ID NO: 920121 - RNA, 19 nt, Artificial Sequence
  Description of Artificial Sequence: Synthetic oligonucleotide
aauauguuccaaugaaauu

SEQ ID NO: 920122 - RNA, 19 nt, Artificial Sequence
  Description of Artificial Sequence: Synthetic oligonucleotide
uggaauacuuccuggacug

SEQ ID NO: 920123 - RNA, 19 nt, Artificial Sequence
  Description of Artificial Sequence: Synthetic oligonucleotide
agacucaagaagugauucc

SEQ ID NO: 920124 - RNA, 19 nt, Artificial Sequence
  Description of Artificial Sequence: Synthetic oligonucleotide
uauuagacaccuuccgaag

SEQ ID NO: 920125 - RNA, 19 nt, Artificial Sequence
  Description of Artificial Sequence: Synthetic oligonucleotide
cuaaugguagcccugauga

SEQ ID NO: 920126 - RNA, 19 nt, Artificial Sequence
  Description of Artificial Sequence: Synthetic oligonucleotide
acuuaucucaaccacgggu

SEQ ID NO: 920127 - RNA, 19 nt, Artificial Sequence
  Description of Artificial Sequence: Synthetic oligonucleotide
uggcacuuuacguuuagag

SEQ ID NO: 920128 - RNA, 19 nt, Artificial Sequence
  Description of Artificial Sequence: Synthetic oligonucleotide
auucuguaugggcuaaugg

SEQ ID NO: 920129 - RNA, 19 nt, Artificial Sequence
  Description of Artificial Sequence: Synthetic oligonucleotide
ucucauugaugauucauac

SEQ ID NO: 920130 - RNA, 19 nt, Artificial Sequence
  Description of Artificial Sequence: Synthetic oligonucleotide
auagguaagucacaugcca

SEQ ID NO: 920131 - RNA, 19 nt, Artificial Sequence
  Description of Artificial Sequence: Synthetic oligonucleotide
cucucgauucuuuggaugg

SEQ ID NO: 920132 - RNA, 19 nt, Artificial Sequence
  Description of Artificial Sequence: Synthetic oligonucleotide
gaaauuuucauaacaagua

SEQ ID NO: 920133 - RNA, 19 nt, Artificial Sequence
  Description of Artificial Sequence: Synthetic oligonucleotide
accaugacaacgucuuuac

SEQ ID NO: 920134 - RNA, 19 nt, Artificial Sequence
  Description of Artificial Sequence: Synthetic oligonucleotide
gcacuuuacguuuagaggc

SEQ ID NO: 920135 - RNA, 19 nt, Artificial Sequence
  Description of Artificial Sequence: Synthetic oligonucleotide
uguccuuguaccacaacug

SEQ ID NO: 920136 - RNA, 19 nt, Artificial Sequence
  Description of Artificial Sequence: Synthetic oligonucleotide
acagauggcaguaaaaugu

SEQ ID NO: 920137 - RNA, 19 nt, Artificial Sequence
  Description of Artificial Sequence: Synthetic oligonucleotide
ucauuauuccgagacuccg

SEQ ID NO: 920138 - RNA, 19 nt, Artificial Sequence
  Description of Artificial Sequence: Synthetic oligonucleotide
gaacguguacugaaggugg

SEQ ID NO: 920139 - RNA, 19 nt, Artificial Sequence
  Description of Artificial Sequence: Synthetic oligonucleotide
gcuaacucggguuucaccg

SEQ ID NO: 920140 - RNA, 19 nt, Artificial Sequence
  Description of Artificial Sequence: Synthetic oligonucleotide
uuauuauccccaguaaaca

SEQ ID NO: 920141 - RNA, 19 nt, Artificial Sequence
  Description of Artificial Sequence: Synthetic oligonucleotide
uguaugguagagcaccaga

SEQ ID NO: 920142 - RNA, 19 nt, Artificial Sequence
  Description of Artificial Sequence: Synthetic oligonucleotide
ucuucuggggugcagcgag

SEQ ID NO: 920143 - RNA, 19 nt, Artificial Sequence
  Description of Artificial Sequence: Synthetic oligonucleotide
auacaggaaccuuucgagg

SEQ ID NO: 920144 - RNA, 19 nt, Artificial Sequence
  Description of Artificial Sequence: Synthetic oligonucleotide
uauuccgagacuccgcugu

SEQ ID NO: 920145 - RNA, 19 nt, Artificial Sequence
  Description of Artificial Sequence: Synthetic oligonucleotide
agagcgguaggcuuucuuc

SEQ ID NO: 920146 - RNA, 19 nt, Artificial Sequence
  Description of Artificial Sequence: Synthetic oligonucleotide
aguagaaaggaugccgugg

SEQ ID NO: 920147 - RNA, 19 nt, Artificial Sequence
  Description of Artificial Sequence: Synthetic oligonucleotide
uucauuauuccgagacucc

SEQ ID NO: 920148 - RNA, 19 nt, Artificial Sequence
  Description of Artificial Sequence: Synthetic oligonucleotide
uccauguacaacaacgcua

SEQ ID NO: 920149 - RNA, 19 nt, Artificial Sequence
  Description of Artificial Sequence: Synthetic oligonucleotide
uaaccauaacaauaugcac

SEQ ID NO: 920150 - RNA, 19 nt, Artificial Sequence
  Description of Artificial Sequence: Synthetic oligonucleotide
cuguauuagacaccuuccg

SEQ ID NO: 920151 - RNA, 19 nt, Artificial Sequence
  Description of Artificial Sequence: Synthetic oligonucleotide
aaugaccugaccacauccg

SEQ ID NO: 920152 - RNA, 19 nt, Artificial Sequence
  Description of Artificial Sequence: Synthetic oligonucleotide
agaccaaaggcgugcaggg

SEQ ID NO: 920153 - RNA, 19 nt, Artificial Sequence
  Description of Artificial Sequence: Synthetic oligonucleotide
agcugugaggcacacaaug

SEQ ID NO: 920154 - RNA, 19 nt, Artificial Sequence
  Description of Artificial Sequence: Synthetic oligonucleotide
augacaacgucuuuaccca

SEQ ID NO: 920155 - RNA, 19 nt, Artificial Sequence
  Description of Artificial Sequence: Synthetic oligonucleotide
ucagaaugccaagaaguag

SEQ ID NO: 920156 - RNA, 19 nt, Artificial Sequence
  Description of Artificial Sequence: Synthetic oligonucleotide
ucuggaauacuuccuggac

SEQ ID NO: 920157 - RNA, 19 nt, Artificial Sequence
  Description of Artificial Sequence: Synthetic oligonucleotide
auuauuccgagacuccgcu

SEQ ID NO: 920158 - RNA, 19 nt, Artificial Sequence
  Description of Artificial Sequence: Synthetic oligonucleotide
uaagucacaugccaaugaa

SEQ ID NO: 920159 - RNA, 19 nt, Artificial Sequence
  Description of Artificial Sequence: Synthetic oligonucleotide
ggcacuuuacguuuagagg

SEQ ID NO: 920160 - RNA, 19 nt, Artificial Sequence
  Description of Artificial Sequence: Synthetic oligonucleotide
aaguaauaaauaauaggua

SEQ ID NO: 920161 - RNA, 19 nt, Artificial Sequence
  Description of Artificial Sequence: Synthetic oligonucleotide
cacugauuggcacuuuacg

SEQ ID NO: 920162 - RNA, 19 nt, Artificial Sequence
  Description of Artificial Sequence: Synthetic oligonucleotide
aacaacgcuaacucggguu

SEQ ID NO: 920163 - RNA, 19 nt, Artificial Sequence
  Description of Artificial Sequence: Synthetic oligonucleotide
acugcuuucauuauuccga

SEQ ID NO: 920164 - RNA, 19 nt, Artificial Sequence
  Description of Artificial Sequence: Synthetic oligonucleotide
cacuuggagacucaagaag

SEQ ID NO: 920165 - RNA, 19 nt, Artificial Sequence
  Description of Artificial Sequence: Synthetic oligonucleotide
caagauggacagaugaauc

SEQ ID NO: 920166 - RNA, 19 nt, Artificial Sequence
  Description of Artificial Sequence: Synthetic oligonucleotide
uccgaagacuucauuauua

SEQ ID NO: 920167 - RNA, 19 nt, Artificial Sequence
  Description of Artificial Sequence: Synthetic oligonucleotide
cuguaugggcuaaugguag

SEQ ID NO: 920168 - RNA, 19 nt, Artificial Sequence
  Description of Artificial Sequence: Synthetic oligonucleotide
aaccuuucgaggcuauccu

SEQ ID NO: 920169 - RNA, 19 nt, Artificial Sequence
  Description of Artificial Sequence: Synthetic oligonucleotide
cucucuauuucuacacacc

SEQ ID NO: 920170 - RNA, 19 nt, Artificial Sequence
  Description of Artificial Sequence: Synthetic oligonucleotide
aagacguuguggugugguc

SEQ ID NO: 920171 - RNA, 19 nt, Artificial Sequence
  Description of Artificial Sequence: Synthetic oligonucleotide
acguuuagaggccaaauua

SEQ ID NO: 920172 - RNA, 19 nt, Artificial Sequence
  Description of Artificial Sequence: Synthetic oligonucleotide
cuggugacuuaucucaacc

SEQ ID NO: 920173 - RNA, 19 nt, Artificial Sequence
  Description of Artificial Sequence: Synthetic oligonucleotide
uacacacgccuuuaguuca

SEQ ID NO: 920174 - RNA, 19 nt, Artificial Sequence
  Description of Artificial Sequence: Synthetic oligonucleotide
cuggacugagucaaagagc

SEQ ID NO: 920175 - RNA, 19 nt, Artificial Sequence
  Description of Artificial Sequence: Synthetic oligonucleotide
agucacaugccaaugaagu

SEQ ID NO: 920176 - RNA, 19 nt, Artificial Sequence
  Description of Artificial Sequence: Synthetic oligonucleotide
guguguaugguagagcacc

SEQ ID NO: 920177 - RNA, 19 nt, Artificial Sequence
  Description of Artificial Sequence: Synthetic oligonucleotide
auaauagguaagucacaug

SEQ ID NO: 920178 - RNA, 19 nt, Artificial Sequence
  Description of Artificial Sequence: Synthetic oligonucleotide
guacaacaacgcuaacucg

SEQ ID NO: 920179 - RNA, 19 nt, Artificial Sequence
  Description of Artificial Sequence: Synthetic oligonucleotide
gaagguggacacucagccg

SEQ ID NO: 920180 - RNA, 19 nt, Artificial Sequence
  Description of Artificial Sequence: Synthetic oligonucleotide
ucaagauggacagaugaau

SEQ ID NO: 920181 - RNA, 19 nt, Artificial Sequence
  Description of Artificial Sequence: Synthetic oligonucleotide
uuaucucaaccacgggugc

SEQ ID NO: 920182 - RNA, 19 nt, Artificial Sequence
  Description of Artificial Sequence: Synthetic oligonucleotide
acacgccuuuaguucaucc

SEQ ID NO: 920183 - RNA, 19 nt, Artificial Sequence
  Description of Artificial Sequence: Synthetic oligonucleotide
agaacguguacugaaggug

SEQ ID NO: 920184 - RNA, 19 nt, Artificial Sequence
  Description of Artificial Sequence: Synthetic oligonucleotide
gaccugaccacauccgaag

SEQ ID NO: 920185 - RNA, 19 nt, Artificial Sequence
  Description of Artificial Sequence: Synthetic oligonucleotide
aaauaauagguaagucaca

SEQ ID NO: 920186 - RNA, 19 nt, Artificial Sequence
  Description of Artificial Sequence: Synthetic oligonucleotide
auuuucauaacaaguaaua

SEQ ID NO: 920187 - RNA, 19 nt, Artificial Sequence
  Description of Artificial Sequence: Synthetic oligonucleotide
gguuuugucaugaauucag

SEQ ID NO: 920188 - RNA, 19 nt, Artificial Sequence
  Description of Artificial Sequence: Synthetic oligonucleotide
uaucacuggagguuacaca

SEQ ID NO: 920189 - RNA, 19 nt, Artificial Sequence
  Description of Artificial Sequence: Synthetic oligonucleotide
cauuauuccgagacuccgc

SEQ ID NO: 920190 - RNA, 19 nt, Artificial Sequence
  Description of Artificial Sequence: Synthetic oligonucleotide
ucggguuucaccgggcacg

SEQ ID NO: 920191 - RNA, 19 nt, Artificial Sequence
  Description of Artificial Sequence: Synthetic oligonucleotide
ugauagacgucccuccgaa

SEQ ID NO: 920192 - RNA, 19 nt, Artificial Sequence
  Description of Artificial Sequence: Synthetic oligonucleotide
auucauacaggaaccuuuc

SEQ ID NO: 920193 - RNA, 19 nt, Artificial Sequence
  Description of Artificial Sequence: Synthetic oligonucleotide
agcucuucuguauuagaca

SEQ ID NO: 920194 - RNA, 19 nt, Artificial Sequence
  Description of Artificial Sequence: Synthetic oligonucleotide
uuuggaugggucagcaaau

SEQ ID NO: 920195 - RNA, 19 nt, Artificial Sequence
  Description of Artificial Sequence: Synthetic oligonucleotide
uugaugauucauacaggaa

SEQ ID NO: 920196 - RNA, 19 nt, Artificial Sequence
  Description of Artificial Sequence: Synthetic oligonucleotide
cagccagucgacaaugagc

SEQ ID NO: 920197 - RNA, 19 nt, Artificial Sequence
  Description of Artificial Sequence: Synthetic oligonucleotide
uccaaggcccaccaugaca

SEQ ID NO: 920198 - RNA, 19 nt, Artificial Sequence
  Description of Artificial Sequence: Synthetic oligonucleotide
agcacugcaacuucuucgu

SEQ ID NO: 920199 - RNA, 19 nt, Artificial Sequence
  Description of Artificial Sequence: Synthetic oligonucleotide
aagaaguagugaaauguaa

SEQ ID NO: 920200 - RNA, 19 nt, Artificial Sequence
  Description of Artificial Sequence: Synthetic oligonucleotide
cacuuuacguuuagaggcc

SEQ ID NO: 920201 - RNA, 19 nt, Artificial Sequence
  Description of Artificial Sequence: Synthetic oligonucleotide
acaacgucuuuacccacag

SEQ ID NO: 920202 - RNA, 19 nt, Artificial Sequence
  Description of Artificial Sequence: Synthetic oligonucleotide
acucucgauucuuuggaug

SEQ ID NO: 920203 - RNA, 19 nt, Artificial Sequence
  Description of Artificial Sequence: Synthetic oligonucleotide
ugaaagagcgguaggcuuu

SEQ ID NO: 920204 - RNA, 19 nt, Artificial Sequence
  Description of Artificial Sequence: Synthetic oligonucleotide
uucuacacacccagagaug

SEQ ID NO: 920205 - RNA, 19 nt, Artificial Sequence
  Description of Artificial Sequence: Synthetic oligonucleotide
gacguugugguguggucag

SEQ ID NO: 920206 - RNA, 19 nt, Artificial Sequence
  Description of Artificial Sequence: Synthetic oligonucleotide
aagucacaugccaaugaag

SEQ ID NO: 920207 - RNA, 19 nt, Artificial Sequence
  Description of Artificial Sequence: Synthetic oligonucleotide
gaggaaggucagcaagacg

SEQ ID NO: 920208 - RNA, 19 nt, Artificial Sequence
  Description of Artificial Sequence: Synthetic oligonucleotide
guaagucuggaugaccugc

SEQ ID NO: 920209 - RNA, 19 nt, Artificial Sequence
  Description of Artificial Sequence: Synthetic oligonucleotide
uuaccacucuccaucucug

SEQ ID NO: 920210 - RNA, 19 nt, Artificial Sequence
  Description of Artificial Sequence: Synthetic oligonucleotide
uggugacuuaucucaacca

SEQ ID NO: 920211 - RNA, 19 nt, Artificial Sequence
  Description of Artificial Sequence: Synthetic oligonucleotide
acacucucgauucuuugga

SEQ ID NO: 920212 - RNA, 19 nt, Artificial Sequence
  Description of Artificial Sequence: Synthetic oligonucleotide
uccccaguaaacaccuuga

SEQ ID NO: 920213 - RNA, 19 nt, Artificial Sequence
  Description of Artificial Sequence: Synthetic oligonucleotide
uacguuuagaggccaaauu

SEQ ID NO: 920214 - RNA, 19 nt, Artificial Sequence
  Description of Artificial Sequence: Synthetic oligonucleotide
ucacugauuggcacuuuac

SEQ ID NO: 920215 - RNA, 19 nt, Artificial Sequence
  Description of Artificial Sequence: Synthetic oligonucleotide
aauaugcacaacagcugug

SEQ ID NO: 920216 - RNA, 19 nt, Artificial Sequence
  Description of Artificial Sequence: Synthetic oligonucleotide
gugguuuugucaugaauuc

SEQ ID NO: 920217 - RNA, 19 nt, Artificial Sequence
  Description of Artificial Sequence: Synthetic oligonucleotide
acgugucacugauuggcac

SEQ ID NO: 920218 - RNA, 19 nt, Artificial Sequence
  Description of Artificial Sequence: Synthetic oligonucleotide
aaccaagacccgguuucgc

SEQ ID NO: 920219 - RNA, 19 nt, Artificial Sequence
  Description of Artificial Sequence: Synthetic oligonucleotide
ucagcaagacguuguggug

SEQ ID NO: 920220 - RNA, 19 nt, Artificial Sequence
  Description of Artificial Sequence: Synthetic oligonucleotide
cuaacucggguuucaccgg

SEQ ID NO: 920221 - RNA, 19 nt, Artificial Sequence
  Description of Artificial Sequence: Synthetic oligonucleotide
ugauuggcacuuuacguuu

SEQ ID NO: 920222 - RNA, 19 nt, Artificial Sequence
  Description of Artificial Sequence: Synthetic oligonucleotide
aaggaugccgugguggacu

SEQ ID NO: 920223 - RNA, 19 nt, Artificial Sequence
  Description of Artificial Sequence: Synthetic oligonucleotide
cagaccaaaggcgugcagg

SEQ ID NO: 920224 - RNA, 19 nt, Artificial Sequence
  Description of Artificial Sequence: Synthetic oligonucleotide
uggaugggucagcaaauac

SEQ ID NO: 920225 - RNA, 19 nt, Artificial Sequence
  Description of Artificial Sequence: Synthetic oligonucleotide
gaugaccugcugauagacg

SEQ ID NO: 920226 - RNA, 19 nt, Artificial Sequence
  Description of Artificial Sequence: Synthetic oligonucleotide
gucgacaaugagcuccagg

SEQ ID NO: 920227 - RNA, 19 nt, Artificial Sequence
  Description of Artificial Sequence: Synthetic oligonucleotide
agccagucgacaaugagcu

SEQ ID NO: 920228 - RNA, 19 nt, Artificial Sequence
  Description of Artificial Sequence: Synthetic oligonucleotide
gauucuguaugggcuaaug

SEQ ID NO: 920229 - RNA, 19 nt, Artificial Sequence
  Description of Artificial Sequence: Synthetic oligonucleotide
guaagucacaugccaauga

SEQ ID NO: 920230 - RNA, 19 nt, Artificial Sequence
  Description of Artificial Sequence: Synthetic oligonucleotide
gacuuaucucaaccacggg

SEQ ID NO: 920231 - RNA, 19 nt, Artificial Sequence
  Description of Artificial Sequence: Synthetic oligonucleotide
acaacaacgcuaacucggg

SEQ ID NO: 920232 - RNA, 19 nt, Artificial Sequence
  Description of Artificial Sequence: Synthetic oligonucleotide
cugcuuucauuauuccgag

SEQ ID NO: 920233 - RNA, 19 nt, Artificial Sequence
  Description of Artificial Sequence: Synthetic oligonucleotide
gaguagaaaggaugccgug

SEQ ID NO: 920234 - RNA, 19 nt, Artificial Sequence
  Description of Artificial Sequence: Synthetic oligonucleotide
uuggagacucaagaaguga

SEQ ID NO: 920235 - RNA, 19 nt, Artificial Sequence
  Description of Artificial Sequence: Synthetic oligonucleotide
augguagcccugaugaaag

SEQ ID NO: 920236 - RNA, 19 nt, Artificial Sequence
  Description of Artificial Sequence: Synthetic oligonucleotide
uagacgucccuccgaagcu

SEQ ID NO: 920237 - RNA, 19 nt, Artificial Sequence
  Description of Artificial Sequence: Synthetic oligonucleotide
uaugggcuaaugguagccc

SEQ ID NO: 920238 - RNA, 19 nt, Artificial Sequence
  Description of Artificial Sequence: Synthetic oligonucleotide
ucuuuacccacagccaggu

SEQ ID NO: 920239 - RNA, 19 nt, Artificial Sequence
  Description of Artificial Sequence: Synthetic oligonucleotide
uucgucugaaucuguuuuc

SEQ ID NO: 920240 - RNA, 19 nt, Artificial Sequence
  Description of Artificial Sequence: Synthetic oligonucleotide
uccugacuccucagaacag

SEQ ID NO: 920241 - RNA, 19 nt, Artificial Sequence
  Description of Artificial Sequence: Synthetic oligonucleotide
ucucgauucuuuggauggg

SEQ ID NO: 920242 - RNA, 19 nt, Artificial Sequence
  Description of Artificial Sequence: Synthetic oligonucleotide
guuaaaggcacagugugua

SEQ ID NO: 920243 - RNA, 19 nt, Artificial Sequence
  Description of Artificial Sequence: Synthetic oligonucleotide
acaacgcuaacucggguuu

SEQ ID NO: 920244 - RNA, 19 nt, Artificial Sequence
  Description of Artificial Sequence: Synthetic oligonucleotide
acgggugcagcaaucagag

SEQ ID NO: 920245 - RNA, 19 nt, Artificial Sequence
  Description of Artificial Sequence: Synthetic oligonucleotide
ugaccugaccacauccgaa

SEQ ID NO: 920246 - RNA, 19 nt, Artificial Sequence
  Description of Artificial Sequence: Synthetic oligonucleotide
agguaagucacaugccaau

SEQ ID NO: 920247 - RNA, 19 nt, Artificial Sequence
  Description of Artificial Sequence: Synthetic oligonucleotide
gugcuaacaaauucaugga

SEQ ID NO: 920248 - RNA, 19 nt, Artificial Sequence
  Description of Artificial Sequence: Synthetic oligonucleotide
uccuccugacuccucagaa

SEQ ID NO: 920249 - RNA, 19 nt, Artificial Sequence
  Description of Artificial Sequence: Synthetic oligonucleotide
ugguuuugucaugaauuca

SEQ ID NO: 920250 - RNA, 19 nt, Artificial Sequence
  Description of Artificial Sequence: Synthetic oligonucleotide
uuuacguuuagaggccaaa

SEQ ID NO: 920251 - RNA, 19 nt, Artificial Sequence
  Description of Artificial Sequence: Synthetic oligonucleotide
acgccuuuaguucauccaa

SEQ ID NO: 920252 - RNA, 19 nt, Artificial Sequence
  Description of Artificial Sequence: Synthetic oligonucleotide
gauagacgucccuccgaag

SEQ ID NO: 920253 - RNA, 19 nt, Artificial Sequence
  Description of Artificial Sequence: Synthetic oligonucleotide
ugugguguccuuguaccac

SEQ ID NO: 920254 - RNA, 19 nt, Artificial Sequence
  Description of Artificial Sequence: Synthetic oligonucleotide
uggacacucagccggcagu

SEQ ID NO: 920255 - RNA, 19 nt, Artificial Sequence
  Description of Artificial Sequence: Synthetic oligonucleotide
uggugguuuugucaugaau

SEQ ID NO: 920256 - RNA, 19 nt, Artificial Sequence
  Description of Artificial Sequence: Synthetic oligonucleotide
augaccugaccacauccga

SEQ ID NO: 920257 - RNA, 19 nt, Artificial Sequence
  Description of Artificial Sequence: Synthetic oligonucleotide
aguguguaugguagagcac

SEQ ID NO: 920258 - RNA, 19 nt, Artificial Sequence
  Description of Artificial Sequence: Synthetic oligonucleotide
ugguagcccugaugaaagg

SEQ ID NO: 920259 - RNA, 19 nt, Artificial Sequence
  Description of Artificial Sequence: Synthetic oligonucleotide
uuauuccgagacuccgcug

SEQ ID NO: 920260 - RNA, 19 nt, Artificial Sequence
  Description of Artificial Sequence: Synthetic oligonucleotide
aguugaggggauucccacu

SEQ ID NO: 920261 - RNA, 19 nt, Artificial Sequence
  Description of Artificial Sequence: Synthetic oligonucleotide
guaugggcuaaugguagcc

SEQ ID NO: 920262 - RNA, 19 nt, Artificial Sequence
  Description of Artificial Sequence: Synthetic oligonucleotide
accaagacccgguuucgcu

SEQ ID NO: 920263 - RNA, 19 nt, Artificial Sequence
  Description of Artificial Sequence: Synthetic oligonucleotide
acuccgcuguaaaagcugg

SEQ ID NO: 920264 - RNA, 19 nt, Artificial Sequence
  Description of Artificial Sequence: Synthetic oligonucleotide
ucgucugaaucuguuuucu

SEQ ID NO: 920265 - RNA, 19 nt, Artificial Sequence
  Description of Artificial Sequence: Synthetic oligonucleotide
uuccuggacugagucaaag

SEQ ID NO: 920266 - RNA, 19 nt, Artificial Sequence
  Description of Artificial Sequence: Synthetic oligonucleotide
uggauggugcuaacaaauu

SEQ ID NO: 920267 - RNA, 19 nt, Artificial Sequence
  Description of Artificial Sequence: Synthetic oligonucleotide
ucccucaagggcuuuuaaa

SEQ ID NO: 920268 - RNA, 19 nt, Artificial Sequence
  Description of Artificial Sequence: Synthetic oligonucleotide
uuacguuuagaggccaaau

SEQ ID NO: 920269 - RNA, 19 nt, Artificial Sequence
  Description of Artificial Sequence: Synthetic oligonucleotide
guuucgcucaagauggaca

SEQ ID NO: 920270 - RNA, 19 nt, Artificial Sequence
  Description of Artificial Sequence: Synthetic oligonucleotide
gacuccgcuguaaaagcug

SEQ ID NO: 920271 - RNA, 19 nt, Artificial Sequence
  Description of Artificial Sequence: Synthetic oligonucleotide
uggaugaccugcugauaga

SEQ ID NO: 920272 - RNA, 19 nt, Artificial Sequence
  Description of Artificial Sequence: Synthetic oligonucleotide
uaccuuuguuaauaaccau

SEQ ID NO: 920273 - RNA, 19 nt, Artificial Sequence
  Description of Artificial Sequence: Synthetic oligonucleotide
agguuacacacgccuuuag

SEQ ID NO: 920274 - RNA, 19 nt, Artificial Sequence
  Description of Artificial Sequence: Synthetic oligonucleotide
ggauggugcuaacaaauuc

SEQ ID NO: 920275 - RNA, 19 nt, Artificial Sequence
  Description of Artificial Sequence: Synthetic oligonucleotide
aucucaaccacgggugcag

SEQ ID NO: 920276 - RNA, 19 nt, Artificial Sequence
  Description of Artificial Sequence: Synthetic oligonucleotide
ccagucgacaaugagcucc

SEQ ID NO: 920277 - RNA, 19 nt, Artificial Sequence
  Description of Artificial Sequence: Synthetic oligonucleotide
ccaaauuacucuuggccug

SEQ ID NO: 920278 - RNA, 19 nt, Artificial Sequence
  Description of Artificial Sequence: Synthetic oligonucleotide
gucuuuacccacagccagg

SEQ ID NO: 920279 - RNA, 19 nt, Artificial Sequence
  Description of Artificial Sequence: Synthetic oligonucleotide
acucaagaagugauuccag

SEQ ID NO: 920280 - RNA, 19 nt, Artificial Sequence
  Description of Artificial Sequence: Synthetic oligonucleotide
uuguaggcagccagucgac

SEQ ID NO: 920281 - RNA, 19 nt, Artificial Sequence
  Description of Artificial Sequence: Synthetic oligonucleotide
aacgcuaacucggguuuca

SEQ ID NO: 920282 - RNA, 19 nt, Artificial Sequence
  Description of Artificial Sequence: Synthetic oligonucleotide
guuacacacgccuuuaguu

SEQ ID NO: 920283 - RNA, 19 nt, Artificial Sequence
  Description of Artificial Sequence: Synthetic oligonucleotide
gggcacgugucacugauug

SEQ ID NO: 920284 - RNA, 19 nt, Artificial Sequence
  Description of Artificial Sequence: Synthetic oligonucleotide
gcaguaaaaugucuuggca

SEQ ID NO: 920285 - RNA, 19 nt, Artificial Sequence
  Description of Artificial Sequence: Synthetic oligonucleotide
agagacaauccagcaaggu

SEQ ID NO: 920286 - RNA, 19 nt, Artificial Sequence
  Description of Artificial Sequence: Synthetic oligonucleotide
augauucauacaggaaccu

SEQ ID NO: 920287 - RNA, 19 nt, Artificial Sequence
  Description of Artificial Sequence: Synthetic oligonucleotide
agacguuguggugugguca

SEQ ID NO: 920288 - RNA, 19 nt, Artificial Sequence
  Description of Artificial Sequence: Synthetic oligonucleotide
ggugcagcaaucagaguag

SEQ ID NO: 920289 - RNA, 19 nt, Artificial Sequence
  Description of Artificial Sequence: Synthetic oligonucleotide
acacucagccggcaguaca

SEQ ID NO: 920290 - RNA, 19 nt, Artificial Sequence
  Description of Artificial Sequence: Synthetic oligonucleotide
gcuaaugguagcccugaug

SEQ ID NO: 920291 - RNA, 19 nt, Artificial Sequence
  Description of Artificial Sequence: Synthetic oligonucleotide
gcugauagacgucccuccg

SEQ ID NO: 920292 - RNA, 19 nt, Artificial Sequence
  Description of Artificial Sequence: Synthetic oligonucleotide
uugaggggauucccacuug

SEQ ID NO: 920293 - RNA, 19 nt, Artificial Sequence
  Description of Artificial Sequence: Synthetic oligonucleotide
gauucauacaggaaccuuu

SEQ ID NO: 920294 - RNA, 19 nt, Artificial Sequence
  Description of Artificial Sequence: Synthetic oligonucleotide
caauaucacuggagguuac

SEQ ID NO: 920295 - RNA, 19 nt, Artificial Sequence
  Description of Artificial Sequence: Synthetic oligonucleotide
agucaagagcuggccaagg

SEQ ID NO: 920296 - RNA, 19 nt, Artificial Sequence
  Description of Artificial Sequence: Synthetic oligonucleotide
ugauucauacaggaaccuu

SEQ ID NO: 920297 - RNA, 19 nt, Artificial Sequence
  Description of Artificial Sequence: Synthetic oligonucleotide
ugacaacgucuuuacccac

SEQ ID NO: 920298 - RNA, 19 nt, Artificial Sequence
  Description of Artificial Sequence: Synthetic oligonucleotide
uuccagcuaucuccuucag

SEQ ID NO: 920299 - RNA, 19 nt, Artificial Sequence
  Description of Artificial Sequence: Synthetic oligonucleotide
acguguacugaagguggac

SEQ ID NO: 920300 - RNA, 19 nt, Artificial Sequence
  Description of Artificial Sequence: Synthetic oligonucleotide
guagaaaggaugccguggu

SEQ ID NO: 920301 - RNA, 19 nt, Artificial Sequence
  Description of Artificial Sequence: Synthetic oligonucleotide
ucaaccacgggugcagcaa

SEQ ID NO: 920302 - RNA, 19 nt, Artificial Sequence
  Description of Artificial Sequence: Synthetic oligonucleotide
aagagcgguaggcuuucuu

SEQ ID NO: 920303 - RNA, 19 nt, Artificial Sequence
  Description of Artificial Sequence: Synthetic oligonucleotide
agacaccuuccgaagcugg

SEQ ID NO: 920304 - RNA, 19 nt, Artificial Sequence
  Description of Artificial Sequence: Synthetic oligonucleotide
ugcuuucauuauuccgaga

SEQ ID NO: 920305 - RNA, 19 nt, Artificial Sequence
  Description of Artificial Sequence: Synthetic oligonucleotide
caccauuugaacaaagauu

SEQ ID NO: 920306 - RNA, 19 nt, Artificial Sequence
  Description of Artificial Sequence: Synthetic oligonucleotide
uccaaccaagacccgguuu

SEQ ID NO: 920307 - RNA, 19 nt, Artificial Sequence
  Description of Artificial Sequence: Synthetic oligonucleotide
gguaagucacaugccaaug

SEQ ID NO: 920308 - RNA, 19 nt, Artificial Sequence
  Description of Artificial Sequence: Synthetic oligonucleotide
caagguacaguagcuccug

SEQ ID NO: 920309 - RNA, 19 nt, Artificial Sequence
  Description of Artificial Sequence: Synthetic oligonucleotide
aaaggcgugcagggcagcu

SEQ ID NO: 920310 - RNA, 19 nt, Artificial Sequence
  Description of Artificial Sequence: Synthetic oligonucleotide
ggacaugccccacuugccc

SEQ ID NO: 920311 - RNA, 19 nt, Artificial Sequence
  Description of Artificial Sequence: Synthetic oligonucleotide
uggagguuacacacgccuu

SEQ ID NO: 920312 - RNA, 19 nt, Artificial Sequence
  Description of Artificial Sequence: Synthetic oligonucleotide
cuucaauaucacuggaggu

SEQ ID NO: 920313 - RNA, 19 nt, Artificial Sequence
  Description of Artificial Sequence: Synthetic oligonucleotide
ccaaccaagacccgguuuc

SEQ ID NO: 920314 - RNA, 19 nt, Artificial Sequence
  Description of Artificial Sequence: Synthetic oligonucleotide
auccgaagacuucauuauu

SEQ ID NO: 920315 - RNA, 19 nt, Artificial Sequence
  Description of Artificial Sequence: Synthetic oligonucleotide
cagguaagucuggaugacc

SEQ ID NO: 920316 - RNA, 19 nt, Artificial Sequence
  Description of Artificial Sequence: Synthetic oligonucleotide
gccuguggcacucuccucc

SEQ ID NO: 920317 - RNA, 19 nt, Artificial Sequence
  Description of Artificial Sequence: Synthetic oligonucleotide
ugccgugguggacuguggu

SEQ ID NO: 920318 - RNA, 19 nt, Artificial Sequence
  Description of Artificial Sequence: Synthetic oligonucleotide
acaacagauggcaguaaaa

SEQ ID NO: 920319 - RNA, 19 nt, Artificial Sequence
  Description of Artificial Sequence: Synthetic oligonucleotide
cccgguuucgcucaagaug

SEQ ID NO: 920320 - RNA, 19 nt, Artificial Sequence
  Description of Artificial Sequence: Synthetic oligonucleotide
caaccaagacccgguuucg

SEQ ID NO: 920321 - RNA, 19 nt, Artificial Sequence
  Description of Artificial Sequence: Synthetic oligonucleotide
cucagccggcaguacagac

SEQ ID NO: 920322 - RNA, 19 nt, Artificial Sequence
  Description of Artificial Sequence: Synthetic oligonucleotide
cacgggugcagcaaucaga

SEQ ID NO: 920323 - RNA, 19 nt, Artificial Sequence
  Description of Artificial Sequence: Synthetic oligonucleotide
cacgccuuuaguucaucca

SEQ ID NO: 920324 - RNA, 19 nt, Artificial Sequence
  Description of Artificial Sequence: Synthetic oligonucleotide
cagccggcaguacagacca

SEQ ID NO: 920325 - RNA, 19 nt, Artificial Sequence
  Description of Artificial Sequence: Synthetic oligonucleotide
acuuuacguuuagaggcca

SEQ ID NO: 920326 - RNA, 19 nt, Artificial Sequence
  Description of Artificial Sequence: Synthetic oligonucleotide
gccaaauuacucuuggccu

SEQ ID NO: 920327 - RNA, 19 nt, Artificial Sequence
  Description of Artificial Sequence: Synthetic oligonucleotide
gaaagagcgguaggcuuuc

SEQ ID NO: 920328 - RNA, 19 nt, Artificial Sequence
  Description of Artificial Sequence: Synthetic oligonucleotide
agugaucuccaugaauguu

SEQ ID NO: 920329 - RNA, 19 nt, Artificial Sequence
  Description of Artificial Sequence: Synthetic oligonucleotide
uguaggcagccagucgaca

SEQ ID NO: 920330 - RNA, 19 nt, Artificial Sequence
  Description of Artificial Sequence: Synthetic oligonucleotide
gcuuacucugacaaaagaa

SEQ ID NO: 920331 - RNA, 19 nt, Artificial Sequence
  Description of Artificial Sequence: Synthetic oligonucleotide
guggacacucagccggcag

SEQ ID NO: 920332 - RNA, 19 nt, Artificial Sequence
  Description of Artificial Sequence: Synthetic oligonucleotide
ccauguacaacaacgcuaa

SEQ ID NO: 920333 - RNA, 19 nt, Artificial Sequence
  Description of Artificial Sequence: Synthetic oligonucleotide
agauggcaguaaaaugucu

SEQ ID NO: 920334 - RNA, 19 nt, Artificial Sequence
  Description of Artificial Sequence: Synthetic oligonucleotide
ggcuuacucugacaaaaga

SEQ ID NO: 920335 - RNA, 19 nt, Artificial Sequence
  Description of Artificial Sequence: Synthetic oligonucleotide
ucgaggcuauccucuucca

SEQ ID NO: 920336 - RNA, 19 nt, Artificial Sequence
  Description of Artificial Sequence: Synthetic oligonucleotide
cugauuggcacuuuacguu

SEQ ID NO: 920337 - RNA, 19 nt, Artificial Sequence
  Description of Artificial Sequence: Synthetic oligonucleotide
acaauccagcaagguacag

SEQ ID NO: 920338 - RNA, 19 nt, Artificial Sequence
  Description of Artificial Sequence: Synthetic oligonucleotide
cuggagguuacacacgccu

SEQ ID NO: 920339 - RNA, 19 nt, Artificial Sequence
  Description of Artificial Sequence: Synthetic oligonucleotide
caaauuacucuuggccuga

SEQ ID NO: 920340 - RNA, 19 nt, Artificial Sequence
  Description of Artificial Sequence: Synthetic oligonucleotide
aagcuggaucugaaacuca

SEQ ID NO: 920341 - RNA, 19 nt, Artificial Sequence
  Description of Artificial Sequence: Synthetic oligonucleotide
aaggcgugcagggcagcug

SEQ ID NO: 920342 - RNA, 19 nt, Artificial Sequence
  Description of Artificial Sequence: Synthetic oligonucleotide
guuuuccaaccaagacccg

SEQ ID NO: 920343 - RNA, 19 nt, Artificial Sequence
  Description of Artificial Sequence: Synthetic oligonucleotide
uuggaugggucagcaaaua

SEQ ID NO: 920344 - RNA, 19 nt, Artificial Sequence
  Description of Artificial Sequence: Synthetic oligonucleotide
acgucuuuacccacagcca

SEQ ID NO: 920345 - RNA, 19 nt, Artificial Sequence
  Description of Artificial Sequence: Synthetic oligonucleotide
uuggaucccucaagggcuu

SEQ ID NO: 920346 - RNA, 19 nt, Artificial Sequence
  Description of Artificial Sequence: Synthetic oligonucleotide
agcagacacucucgauucu

SEQ ID NO: 920347 - RNA, 19 nt, Artificial Sequence
  Description of Artificial Sequence: Synthetic oligonucleotide
guguaugguagagcaccag

SEQ ID NO: 920348 - RNA, 19 nt, Artificial Sequence
  Description of Artificial Sequence: Synthetic oligonucleotide
aucauggaguuuccagcua

SEQ ID NO: 920349 - RNA, 19 nt, Artificial Sequence
  Description of Artificial Sequence: Synthetic oligonucleotide
accugcugauagacguccc

SEQ ID NO: 920350 - RNA, 19 nt, Artificial Sequence
  Description of Artificial Sequence: Synthetic oligonucleotide
ggcagaacguguacugaag

SEQ ID NO: 920351 - RNA, 19 nt, Artificial Sequence
  Description of Artificial Sequence: Synthetic oligonucleotide
cugauagacgucccuccga

SEQ ID NO: 920352 - RNA, 19 nt, Artificial Sequence
  Description of Artificial Sequence: Synthetic oligonucleotide
ucucaaccacgggugcagc

SEQ ID NO: 920353 - RNA, 19 nt, Artificial Sequence
  Description of Artificial Sequence: Synthetic oligonucleotide
cacaacuggauggugcuaa

SEQ ID NO: 920354 - RNA, 19 nt, Artificial Sequence
  Description of Artificial Sequence: Synthetic oligonucleotide
cccucaagggcuuuuaaaa

SEQ ID NO: 920355 - RNA, 19 nt, Artificial Sequence
  Description of Artificial Sequence: Synthetic oligonucleotide
cgagacuccgcuguaaaag

SEQ ID NO: 920356 - RNA, 19 nt, Artificial Sequence
  Description of Artificial Sequence: Synthetic oligonucleotide
caacgucuuuacccacagc

SEQ ID NO: 920357 - RNA, 19 nt, Artificial Sequence
  Description of Artificial Sequence: Synthetic oligonucleotide
cacgugucacugauuggca

SEQ ID NO: 920358 - RNA, 19 nt, Artificial Sequence
  Description of Artificial Sequence: Synthetic oligonucleotide
cagaacguguacugaaggu

SEQ ID NO: 920359 - RNA, 19 nt, Artificial Sequence
  Description of Artificial Sequence: Synthetic oligonucleotide
acgcuaacucggguuucac

SEQ ID NO: 920360 - RNA, 19 nt, Artificial Sequence
  Description of Artificial Sequence: Synthetic oligonucleotide
ccugaugaaaggccaaaga

SEQ ID NO: 920361 - RNA, 19 nt, Artificial Sequence
  Description of Artificial Sequence: Synthetic oligonucleotide
cugaaacucagggucucca

SEQ ID NO: 920362 - RNA, 19 nt, Artificial Sequence
  Description of Artificial Sequence: Synthetic oligonucleotide
acagaaugaaagagcggua

SEQ ID NO: 920363 - RNA, 19 nt, Artificial Sequence
  Description of Artificial Sequence: Synthetic oligonucleotide
augccaagaaguagugaaa

SEQ ID NO: 920364 - RNA, 19 nt, Artificial Sequence
  Description of Artificial Sequence: Synthetic oligonucleotide
cuuuacguuuagaggccaa

SEQ ID NO: 920365 - RNA, 19 nt, Artificial Sequence
  Description of Artificial Sequence: Synthetic oligonucleotide
cagcaagguacaguagcuc

SEQ ID NO: 920366 - RNA, 19 nt, Artificial Sequence
  Description of Artificial Sequence: Synthetic oligonucleotide
ggggcuuacucugacaaaa

SEQ ID NO: 920367 - RNA, 19 nt, Artificial Sequence
  Description of Artificial Sequence: Synthetic oligonucleotide
gguuucaccgggcacgugu

SEQ ID NO: 920368 - RNA, 19 nt, Artificial Sequence
  Description of Artificial Sequence: Synthetic oligonucleotide
cacaguucccauuugcauu

SEQ ID NO: 920369 - RNA, 19 nt, Artificial Sequence
  Description of Artificial Sequence: Synthetic oligonucleotide
acccgguuucgcucaagau

SEQ ID NO: 920370 - RNA, 19 nt, Artificial Sequence
  Description of Artificial Sequence: Synthetic oligonucleotide
aaagagcgguaggcuuucu

SEQ ID NO: 920371 - RNA, 19 nt, Artificial Sequence
  Description of Artificial Sequence: Synthetic oligonucleotide
gaggggauucccacuugga

SEQ ID NO: 920372 - RNA, 19 nt, Artificial Sequence
  Description of Artificial Sequence: Synthetic oligonucleotide
cugugguguccuuguacca

SEQ ID NO: 920373 - RNA, 19 nt, Artificial Sequence
  Description of Artificial Sequence: Synthetic oligonucleotide
ggaugggucagcaaauacu

SEQ ID NO: 920374 - RNA, 19 nt, Artificial Sequence
  Description of Artificial Sequence: Synthetic oligonucleotide
guaccacaacuggauggug

SEQ ID NO: 920375 - RNA, 19 nt, Artificial Sequence
  Description of Artificial Sequence: Synthetic oligonucleotide
guuucaccgggcacguguc

SEQ ID NO: 920376 - RNA, 19 nt, Artificial Sequence
  Description of Artificial Sequence: Synthetic oligonucleotide
gccuuuaguucauccaaaa

SEQ ID NO: 920377 - RNA, 19 nt, Artificial Sequence
  Description of Artificial Sequence: Synthetic oligonucleotide
caccaugacaacgucuuua

SEQ ID NO: 920378 - RNA, 19 nt, Artificial Sequence
  Description of Artificial Sequence: Synthetic oligonucleotide
gagguuacacacgccuuua

SEQ ID NO: 920379 - RNA, 19 nt, Artificial Sequence
  Description of Artificial Sequence: Synthetic oligonucleotide
cugaccacauccgaagacu

SEQ ID NO: 920380 - RNA, 19 nt, Artificial Sequence
  Description of Artificial Sequence: Synthetic oligonucleotide
gguuucgcucaagauggac

SEQ ID NO: 920381 - RNA, 19 nt, Artificial Sequence
  Description of Artificial Sequence: Synthetic oligonucleotide
ccaagacccgguuucgcuc

SEQ ID NO: 920382 - RNA, 19 nt, Artificial Sequence
  Description of Artificial Sequence: Synthetic oligonucleotide
gauuggcacuuuacguuua

SEQ ID NO: 920383 - RNA, 19 nt, Artificial Sequence
  Description of Artificial Sequence: Synthetic oligonucleotide
gugauuccagaucugccuu

SEQ ID NO: 920384 - RNA, 19 nt, Artificial Sequence
  Description of Artificial Sequence: Synthetic oligonucleotide
ccaugacaacgucuuuacc

SEQ ID NO: 920385 - RNA, 19 nt, Artificial Sequence
  Description of Artificial Sequence: Synthetic oligonucleotide
gacacucagccggcaguac

SEQ ID NO: 920386 - RNA, 19 nt, Artificial Sequence
  Description of Artificial Sequence: Synthetic oligonucleotide
ccggcaguacagaccaaag

SEQ ID NO: 920387 - RNA, 19 nt, Artificial Sequence
  Description of Artificial Sequence: Synthetic oligonucleotide
uuccgaagcuggugacuua

SEQ ID NO: 920388 - RNA, 19 nt, Artificial Sequence
  Description of Artificial Sequence: Synthetic oligonucleotide
caacuggauggugcuaaca

SEQ ID NO: 920389 - RNA, 19 nt, Artificial Sequence
  Description of Artificial Sequence: Synthetic oligonucleotide
uauccccaguaaacaccuu

SEQ ID NO: 920390 - RNA, 19 nt, Artificial Sequence
  Description of Artificial Sequence: Synthetic oligonucleotide
ccgcuguaaaagcuggauc

SEQ ID NO: 920391 - RNA, 19 nt, Artificial Sequence
  Description of Artificial Sequence: Synthetic oligonucleotide
gaucccucaagggcuuuua

SEQ ID NO: 920392 - RNA, 19 nt, Artificial Sequence
  Description of Artificial Sequence: Synthetic oligonucleotide
caacgcuaacucggguuuc

SEQ ID NO: 920393 - RNA, 19 nt, Artificial Sequence
  Description of Artificial Sequence: Synthetic oligonucleotide
cagcaagacguuguggugu

SEQ ID NO: 920394 - RNA, 19 nt, Artificial Sequence
  Description of Artificial Sequence: Synthetic oligonucleotide
caaaggcgugcagggcagc

SEQ ID NO: 920395 - RNA, 19 nt, Artificial Sequence
  Description of Artificial Sequence: Synthetic oligonucleotide
caccgggcacgugucacug

SEQ ID NO: 920396 - RNA, 19 nt, Artificial Sequence
  Description of Artificial Sequence: Synthetic oligonucleotide
ccuuguaccacaacuggau

SEQ ID NO: 920397 - RNA, 19 nt, Artificial Sequence
  Description of Artificial Sequence: Synthetic oligonucleotide
cccugaugaaaggccaaag

SEQ ID NO: 920398 - RNA, 19 nt, Artificial Sequence
  Description of Artificial Sequence: Synthetic oligonucleotide
cuccgcuguaaaagcugga

SEQ ID NO: 920399 - RNA, 19 nt, Artificial Sequence
  Description of Artificial Sequence: Synthetic oligonucleotide
aagguccaggcaacacauu

SEQ ID NO: 920400 - RNA, 19 nt, Artificial Sequence
  Description of Artificial Sequence: Synthetic oligonucleotide
gguggccuuguaggcagcc

SEQ ID NO: 920401 - RNA, 19 nt, Artificial Sequence
  Description of Artificial Sequence: Synthetic oligonucleotide
agacgucccuccgaagcuu

SEQ ID NO: 920402 - RNA, 19 nt, Artificial Sequence
  Description of Artificial Sequence: Synthetic oligonucleotide
accgggcacgugucacuga

SEQ ID NO: 920403 - RNA, 19 nt, Artificial Sequence
  Description of Artificial Sequence: Synthetic oligonucleotide
cucgauucuuuggaugggu

SEQ ID NO: 920404 - RNA, 19 nt, Artificial Sequence
  Description of Artificial Sequence: Synthetic oligonucleotide
ggagguuacacacgccuuu

SEQ ID NO: 920405 - RNA, 19 nt, Artificial Sequence
  Description of Artificial Sequence: Synthetic oligonucleotide
augucuuggcaaagugauu

SEQ ID NO: 920406 - RNA, 19 nt, Artificial Sequence
  Description of Artificial Sequence: Synthetic oligonucleotide
ccuuucgaggcuauccucu

SEQ ID NO: 920407 - RNA, 19 nt, Artificial Sequence
  Description of Artificial Sequence: Synthetic oligonucleotide
cuucuucgucugaaucugu

SEQ ID NO: 920408 - RNA, 19 nt, Artificial Sequence
  Description of Artificial Sequence: Synthetic oligonucleotide
ccacgggugcagcaaucag

SEQ ID NO: 920409 - RNA, 19 nt, Artificial Sequence
  Description of Artificial Sequence: Synthetic oligonucleotide
gggcuaaugguagcccuga

SEQ ID NO: 920410 - RNA, 19 nt, Artificial Sequence
  Description of Artificial Sequence: Synthetic oligonucleotide
cuuccgaagcuggugacuu

SEQ ID NO: 920411 - RNA, 19 nt, Artificial Sequence
  Description of Artificial Sequence: Synthetic oligonucleotide
cuacacacccagagauggu

SEQ ID NO: 920412 - RNA, 19 nt, Artificial Sequence
  Description of Artificial Sequence: Synthetic oligonucleotide
cacacgccuuuaguucauc

SEQ ID NO: 920413 - RNA, 19 nt, Artificial Sequence
  Description of Artificial Sequence: Synthetic oligonucleotide
cacucucgauucuuuggau

SEQ ID NO: 920414 - RNA, 19 nt, Artificial Sequence
  Description of Artificial Sequence: Synthetic oligonucleotide
caacaacgcuaacucgggu

SEQ ID NO: 920415 - RNA, 19 nt, Artificial Sequence
  Description of Artificial Sequence: Synthetic oligonucleotide
cuuucgaggcuauccucuu

SEQ ID NO: 920416 - RNA, 19 nt, Artificial Sequence
  Description of Artificial Sequence: Synthetic oligonucleotide
aggaaccuuucgaggcuau

SEQ ID NO: 920417 - RNA, 19 nt, Artificial Sequence
  Description of Artificial Sequence: Synthetic oligonucleotide
ggacugagucaaagagcac

SEQ ID NO: 920418 - RNA, 19 nt, Artificial Sequence
  Description of Artificial Sequence: Synthetic oligonucleotide
ggugcagcgagcagacacu

SEQ ID NO: 920419 - RNA, 19 nt, Artificial Sequence
  Description of Artificial Sequence: Synthetic oligonucleotide
ccgaagacuucauuauuau

SEQ ID NO: 920420 - RNA, 19 nt, Artificial Sequence
  Description of Artificial Sequence: Synthetic oligonucleotide
gccggcaguacagaccaaa

SEQ ID NO: 920421 - RNA, 19 nt, Artificial Sequence
  Description of Artificial Sequence: Synthetic oligonucleotide
ggacacucagccggcagua

SEQ ID NO: 920422 - RNA, 19 nt, Artificial Sequence
  Description of Artificial Sequence: Synthetic oligonucleotide
cgcucaagauggacagaug

SEQ ID NO: 920423 - RNA, 19 nt, Artificial Sequence
  Description of Artificial Sequence: Synthetic oligonucleotide
gccagucgacaaugagcuc

SEQ ID NO: 920424 - RNA, 19 nt, Artificial Sequence
  Description of Artificial Sequence: Synthetic oligonucleotide
gguggacacucagccggca

SEQ ID NO: 920425 - RNA, 19 nt, Artificial Sequence
  Description of Artificial Sequence: Synthetic oligonucleotide
ggcacacaaugccuucaau

SEQ ID NO: 920426 - RNA, 19 nt, Artificial Sequence
  Description of Artificial Sequence: Synthetic oligonucleotide
cagccagguaagucuggau

SEQ ID NO: 920427 - RNA, 19 nt, Artificial Sequence
  Description of Artificial Sequence: Synthetic oligonucleotide
cgagcagacacucucgauu

SEQ ID NO: 920428 - RNA, 19 nt, Artificial Sequence
  Description of Artificial Sequence: Synthetic oligonucleotide
ccgagacuccgcuguaaaa

SEQ ID NO: 920429 - RNA, 19 nt, Artificial Sequence
  Description of Artificial Sequence: Synthetic oligonucleotide
cuucuguauuagacaccuu

SEQ ID NO: 920430 - RNA, 19 nt, Artificial Sequence
  Description of Artificial Sequence: Synthetic oligonucleotide
ggacugugguguccuugua

SEQ ID NO: 920431 - RNA, 19 nt, Artificial Sequence
  Description of Artificial Sequence: Synthetic oligonucleotide
ccgugguggacuguggugu

SEQ ID NO: 920432 - RNA, 19 nt, Artificial Sequence
  Description of Artificial Sequence: Synthetic oligonucleotide
gcagacacucucgauucuu

SEQ ID NO: 920433 - RNA, 19 nt, Artificial Sequence
  Description of Artificial Sequence: Synthetic oligonucleotide
cgucccuccgaagcuucag

SEQ ID NO: 920434 - RNA, 19 nt, Artificial Sequence
  Description of Artificial Sequence: Synthetic oligonucleotide
cgaggcuauccucuuccaa

SEQ ID NO: 920435 - RNA, 19 nt, Artificial Sequence
  Description of Artificial Sequence: Synthetic oligonucleotide
gcgagcagacacucucgau

SEQ ID NO: 920436 - RNA, 19 nt, Artificial Sequence
  Description of Artificial Sequence: Synthetic oligonucleotide
ggcuaaugguagcccugau

SEQ ID NO: 920437 - RNA, 19 nt, Artificial Sequence
  Description of Artificial Sequence: Synthetic oligonucleotide
ggccuuguaggcagccagu

SEQ ID NO: 920438 - RNA, 19 nt, Artificial Sequence
  Description of Artificial Sequence: Synthetic oligonucleotide
ggguuucaccgggcacgug

SEQ ID NO: 920439 - RNA, 19 nt, Artificial Sequence
  Description of Artificial Sequence: Synthetic oligonucleotide
agccggcaguacagaccaa

SEQ ID NO: 920440 - RNA, 19 nt, Artificial Sequence
  Description of Artificial Sequence: Synthetic oligonucleotide
ccgggcacgugucacugau

SEQ ID NO: 920441 - RNA, 19 nt, Artificial Sequence
  Description of Artificial Sequence: Synthetic oligonucleotide
ccacaacuggauggugcua

SEQ ID NO: 920442 - RNA, 19 nt, Artificial Sequence
  Description of Artificial Sequence: Synthetic oligonucleotide
cgguuucgcucaagaugga

SEQ ID NO: 920443 - RNA, 19 nt, Artificial Sequence
  Description of Artificial Sequence: Synthetic oligonucleotide
ggcgugcagggcagcugcu

SEQ ID NO: 920444 - RNA, 19 nt, Artificial Sequence
  Description of Artificial Sequence: Synthetic oligonucleotide
ggaugccgugguggacugu

SEQ ID NO: 920445 - RNA, 19 nt, Artificial Sequence
  Description of Artificial Sequence: Synthetic oligonucleotide
aacaaaauggacauggagc

SEQ ID NO: 920446 - RNA, 19 nt, Artificial Sequence
  Description of Artificial Sequence: Synthetic oligonucleotide
aaaugccuaaccuuaaugg

SEQ ID NO: 920447 - RNA, 19 nt, Artificial Sequence
  Description of Artificial Sequence: Synthetic oligonucleotide
ucaacaaggagucugagcc

SEQ ID NO: 920448 - RNA, 19 nt, Artificial Sequence
  Description of Artificial Sequence: Synthetic oligonucleotide
uuuuagaaggucaacauug

SEQ ID NO: 920449 - RNA, 19 nt, Artificial Sequence
  Description of Artificial Sequence: Synthetic oligonucleotide
acaaaagcagggcagagcc

SEQ ID NO: 920450 - RNA, 19 nt, Artificial Sequence
  Description of Artificial Sequence: Synthetic oligonucleotide
aaugaaagccacuugacgu

SEQ ID NO: 920451 - RNA, 19 nt, Artificial Sequence
  Description of Artificial Sequence: Synthetic oligonucleotide
gaauguaaggcccagcugg

SEQ ID NO: 920452 - RNA, 19 nt, Artificial Sequence
  Description of Artificial Sequence: Synthetic oligonucleotide
acguguaagagucauauac

SEQ ID NO: 920453 - RNA, 19 nt, Artificial Sequence
  Description of Artificial Sequence: Synthetic oligonucleotide
agaacauacaccauguucc

SEQ ID NO: 920454 - RNA, 19 nt, Artificial Sequence
  Description of Artificial Sequence: Synthetic oligonucleotide
ucuuucauccugaagaaag

SEQ ID NO: 920455 - RNA, 19 nt, Artificial Sequence
  Description of Artificial Sequence: Synthetic oligonucleotide
uguuuacaaauucagagca

SEQ ID NO: 920456 - RNA, 19 nt, Artificial Sequence
  Description of Artificial Sequence: Synthetic oligonucleotide
aagugcaacgugucgaucc

SEQ ID NO: 920457 - RNA, 19 nt, Artificial Sequence
  Description of Artificial Sequence: Synthetic oligonucleotide
gauuugaucguccacacug

SEQ ID NO: 920458 - RNA, 19 nt, Artificial Sequence
  Description of Artificial Sequence: Synthetic oligonucleotide
aauuguacuuucuguaguc

SEQ ID NO: 920459 - RNA, 19 nt, Artificial Sequence
  Description of Artificial Sequence: Synthetic oligonucleotide
gucauauacauuuuacugg

SEQ ID NO: 920460 - RNA, 19 nt, Artificial Sequence
  Description of Artificial Sequence: Synthetic oligonucleotide
uucgaaauucaccaauugg

SEQ ID NO: 920461 - RNA, 19 nt, Artificial Sequence
  Description of Artificial Sequence: Synthetic oligonucleotide
agucauauacauuuuacug

SEQ ID NO: 920462 - RNA, 19 nt, Artificial Sequence
  Description of Artificial Sequence: Synthetic oligonucleotide
ucgaaauucaccaauuggu

SEQ ID NO: 920463 - RNA, 19 nt, Artificial Sequence
  Description of Artificial Sequence: Synthetic oligonucleotide
aaaaugccuaaccuuaaug

SEQ ID NO: 920464 - RNA, 19 nt, Artificial Sequence
  Description of Artificial Sequence: Synthetic oligonucleotide
cuggaucuaaaauaaaggc

SEQ ID NO: 920465 - RNA, 19 nt, Artificial Sequence
  Description of Artificial Sequence: Synthetic oligonucleotide
agcucuuucauccugaaga

SEQ ID NO: 920466 - RNA, 19 nt, Artificial Sequence
  Description of Artificial Sequence: Synthetic oligonucleotide
uggaucuaaaauaaaggca

SEQ ID NO: 920467 - RNA, 19 nt, Artificial Sequence
  Description of Artificial Sequence: Synthetic oligonucleotide
ugcauguuguugaucaugg

SEQ ID NO: 920468 - RNA, 19 nt, Artificial Sequence
  Description of Artificial Sequence: Synthetic oligonucleotide
aucaguaagcaacuuuacc

SEQ ID NO: 920469 - RNA, 19 nt, Artificial Sequence
  Description of Artificial Sequence: Synthetic oligonucleotide
aauaguugacauuuuguaa

SEQ ID NO: 920470 - RNA, 19 nt, Artificial Sequence
  Description of Artificial Sequence: Synthetic oligonucleotide
auacugguaaucuauggag

SEQ ID NO: 920471 - RNA, 19 nt, Artificial Sequence
  Description of Artificial Sequence: Synthetic oligonucleotide
agaaguuugacaaaagcag

SEQ ID NO: 920472 - RNA, 19 nt, Artificial Sequence
  Description of Artificial Sequence: Synthetic oligonucleotide
aaacuaaggugacuugagg

SEQ ID NO: 920473 - RNA, 19 nt, Artificial Sequence
  Description of Artificial Sequence: Synthetic oligonucleotide
aagcuaagagaacacagcu

SEQ ID NO: 920474 - RNA, 19 nt, Artificial Sequence
  Description of Artificial Sequence: Synthetic oligonucleotide
aaugccuaaccuuaaugga

SEQ ID NO: 920475 - RNA, 19 nt, Artificial Sequence
  Description of Artificial Sequence: Synthetic oligonucleotide
aagcuuuuaagauguaaga

SEQ ID NO: 920476 - RNA, 19 nt, Artificial Sequence
  Description of Artificial Sequence: Synthetic oligonucleotide
uuugauuugaucguccaca

SEQ ID NO: 920477 - RNA, 19 nt, Artificial Sequence
  Description of Artificial Sequence: Synthetic oligonucleotide
augacaacguguaagaguc

SEQ ID NO: 920478 - RNA, 19 nt, Artificial Sequence
  Description of Artificial Sequence: Synthetic oligonucleotide
aacugccaaguguugauuc

SEQ ID NO: 920479 - RNA, 19 nt, Artificial Sequence
  Description of Artificial Sequence: Synthetic oligonucleotide
agacucagaacuuuccagg

SEQ ID NO: 920480 - RNA, 19 nt, Artificial Sequence
  Description of Artificial Sequence: Synthetic oligonucleotide
ugauacugguaaucuaugg

SEQ ID NO: 920481 - RNA, 19 nt, Artificial Sequence
  Description of Artificial Sequence: Synthetic oligonucleotide
ucaaagaauagcucuuuca

SEQ ID NO: 920482 - RNA, 19 nt, Artificial Sequence
  Description of Artificial Sequence: Synthetic oligonucleotide
uuacaagcaucuuaaauau

SEQ ID NO: 920483 - RNA, 19 nt, Artificial Sequence
  Description of Artificial Sequence: Synthetic oligonucleotide
ucguuugugaauguaaggc

SEQ ID NO: 920484 - RNA, 19 nt, Artificial Sequence
  Description of Artificial Sequence: Synthetic oligonucleotide
agcuuuuaagauguaagac

SEQ ID NO: 920485 - RNA, 19 nt, Artificial Sequence
  Description of Artificial Sequence: Synthetic oligonucleotide
aagauguaagaccacuccu

SEQ ID NO: 920486 - RNA, 19 nt, Artificial Sequence
  Description of Artificial Sequence: Synthetic oligonucleotide
uuuagaaggucaacauugc

SEQ ID NO: 920487 - RNA, 19 nt, Artificial Sequence
  Description of Artificial Sequence: Synthetic oligonucleotide
auuccagaaggguacuccc

SEQ ID NO: 920488 - RNA, 19 nt, Artificial Sequence
  Description of Artificial Sequence: Synthetic oligonucleotide
ucucguuugugaauguaag

SEQ ID NO: 920489 - RNA, 19 nt, Artificial Sequence
  Description of Artificial Sequence: Synthetic oligonucleotide
aauaucagcuuuaauaguu

SEQ ID NO: 920490 - RNA, 19 nt, Artificial Sequence
  Description of Artificial Sequence: Synthetic oligonucleotide
acuacgugagcgaacaagc

SEQ ID NO: 920491 - RNA, 19 nt, Artificial Sequence
  Description of Artificial Sequence: Synthetic oligonucleotide
cucugcuuagagcagaugc

SEQ ID NO: 920492 - RNA, 19 nt, Artificial Sequence
  Description of Artificial Sequence: Synthetic oligonucleotide
auuuacaagcaucuuaaau

SEQ ID NO: 920493 - RNA, 19 nt, Artificial Sequence
  Description of Artificial Sequence: Synthetic oligonucleotide
cauccgaaaacuaagguga

SEQ ID NO: 920494 - RNA, 19 nt, Artificial Sequence
  Description of Artificial Sequence: Synthetic oligonucleotide
aaaagaaugacaacgugua

SEQ ID NO: 920495 - RNA, 19 nt, Artificial Sequence
  Description of Artificial Sequence: Synthetic oligonucleotide
aggacaaucucucggaucu

SEQ ID NO: 920496 - RNA, 19 nt, Artificial Sequence
  Description of Artificial Sequence: Synthetic oligonucleotide
aaggaggucuauggaaucc

SEQ ID NO: 920497 - RNA, 19 nt, Artificial Sequence
  Description of Artificial Sequence: Synthetic oligonucleotide
agaaugacaacguguaaga

SEQ ID NO: 920498 - RNA, 19 nt, Artificial Sequence
  Description of Artificial Sequence: Synthetic oligonucleotide
uuuaagauguaagaccacu

SEQ ID NO: 920499 - RNA, 19 nt, Artificial Sequence
  Description of Artificial Sequence: Synthetic oligonucleotide
gauguaagaccacuccugc

SEQ ID NO: 920500 - RNA, 19 nt, Artificial Sequence
  Description of Artificial Sequence: Synthetic oligonucleotide
aaaacuaaggugacuugag

SEQ ID NO: 920501 - RNA, 19 nt, Artificial Sequence
  Description of Artificial Sequence: Synthetic oligonucleotide
aauacuguccucaaagaau

SEQ ID NO: 920502 - RNA, 19 nt, Artificial Sequence
  Description of Artificial Sequence: Synthetic oligonucleotide
gugaguuacuacgugagcg

SEQ ID NO: 920503 - RNA, 19 nt, Artificial Sequence
  Description of Artificial Sequence: Synthetic oligonucleotide
ugccuaaccuuaauggaag

SEQ ID NO: 920504 - RNA, 19 nt, Artificial Sequence
  Description of Artificial Sequence: Synthetic oligonucleotide
agcaucuuaaauaucagcu

SEQ ID NO: 920505 - RNA, 19 nt, Artificial Sequence
  Description of Artificial Sequence: Synthetic oligonucleotide
uacugguaaucuauggagc

SEQ ID NO: 920506 - RNA, 19 nt, Artificial Sequence
  Description of Artificial Sequence: Synthetic oligonucleotide
ggcaucuuuaaacagaaac

SEQ ID NO: 920507 - RNA, 19 nt, Artificial Sequence
  Description of Artificial Sequence: Synthetic oligonucleotide
agucgagggcaguucaucc

SEQ ID NO: 920508 - RNA, 19 nt, Artificial Sequence
  Description of Artificial Sequence: Synthetic oligonucleotide
ucauaaauggacggaaaga

SEQ ID NO: 920509 - RNA, 19 nt, Artificial Sequence
  Description of Artificial Sequence: Synthetic oligonucleotide
acauacaccauguucccug

SEQ ID NO: 920510 - RNA, 19 nt, Artificial Sequence
  Description of Artificial Sequence: Synthetic oligonucleotide
uggagcuucgaaauucacc

SEQ ID NO: 920511 - RNA, 19 nt, Artificial Sequence
  Description of Artificial Sequence: Synthetic oligonucleotide
ugguuuguuucagacaucc

SEQ ID NO: 920512 - RNA, 19 nt, Artificial Sequence
  Description of Artificial Sequence: Synthetic oligonucleotide
uguaagaccacuccugcuu

SEQ ID NO: 920513 - RNA, 19 nt, Artificial Sequence
  Description of Artificial Sequence: Synthetic oligonucleotide
ucugcuuagagcagaugca

SEQ ID NO: 920514 - RNA, 19 nt, Artificial Sequence
  Description of Artificial Sequence: Synthetic oligonucleotide
cagagaaccacucccgacg

SEQ ID NO: 920515 - RNA, 19 nt, Artificial Sequence
  Description of Artificial Sequence: Synthetic oligonucleotide
cauugcaccgcaaaagcug

SEQ ID NO: 920516 - RNA, 19 nt, Artificial Sequence
  Description of Artificial Sequence: Synthetic oligonucleotide
uucauccgaaaacuaaggu

SEQ ID NO: 920517 - RNA, 19 nt, Artificial Sequence
  Description of Artificial Sequence: Synthetic oligonucleotide
gaagcuaagagaacacagc

SEQ ID NO: 920518 - RNA, 19 nt, Artificial Sequence
  Description of Artificial Sequence: Synthetic oligonucleotide
acaagugccgcaggcaucc

SEQ ID NO: 920519 - RNA, 19 nt, Artificial Sequence
  Description of Artificial Sequence: Synthetic oligonucleotide
agugcaacgugucgauccc

SEQ ID NO: 920520 - RNA, 19 nt, Artificial Sequence
  Description of Artificial Sequence: Synthetic oligonucleotide
ucaauacuguccucaaaga

SEQ ID NO: 920521 - RNA, 19 nt, Artificial Sequence
  Description of Artificial Sequence: Synthetic oligonucleotide
ucaccaauuggucguacca

SEQ ID NO: 920522 - RNA, 19 nt, Artificial Sequence
  Description of Artificial Sequence: Synthetic oligonucleotide
cuuuccagguuucagaaca

SEQ ID NO: 920523 - RNA, 19 nt, Artificial Sequence
  Description of Artificial Sequence: Synthetic oligonucleotide
ugcuuagagcagaugcagg

SEQ ID NO: 920524 - RNA, 19 nt, Artificial Sequence
  Description of Artificial Sequence: Synthetic oligonucleotide
caaguguugauuccagaag

SEQ ID NO: 920525 - RNA, 19 nt, Artificial Sequence
  Description of Artificial Sequence: Synthetic oligonucleotide
auucucugcaaauccaacu

SEQ ID NO: 920526 - RNA, 19 nt, Artificial Sequence
  Description of Artificial Sequence: Synthetic oligonucleotide
ugaguuacuacgugagcga

SEQ ID NO: 920527 - RNA, 19 nt, Artificial Sequence
  Description of Artificial Sequence: Synthetic oligonucleotide
ugaauguaaggcccagcug

SEQ ID NO: 920528 - RNA, 19 nt, Artificial Sequence
  Description of Artificial Sequence: Synthetic oligonucleotide
cucguuugugaauguaagg

SEQ ID NO: 920529 - RNA, 19 nt, Artificial Sequence
  Description of Artificial Sequence: Synthetic oligonucleotide
agucaggacugcucugucc

SEQ ID NO: 920530 - RNA, 19 nt, Artificial Sequence
  Description of Artificial Sequence: Synthetic oligonucleotide
gacauuuuguaaucauuuc

SEQ ID NO: 920531 - RNA, 19 nt, Artificial Sequence
  Description of Artificial Sequence: Synthetic oligonucleotide
uacuacgugagcgaacaag

SEQ ID NO: 920532 - RNA, 19 nt, Artificial Sequence
  Description of Artificial Sequence: Synthetic oligonucleotide
gaaaacuaaggugacuuga

SEQ ID NO: 920533 - RNA, 19 nt, Artificial Sequence
  Description of Artificial Sequence: Synthetic oligonucleotide
ggagcuucgaaauucacca

SEQ ID NO: 920534 - RNA, 19 nt, Artificial Sequence
  Description of Artificial Sequence: Synthetic oligonucleotide
acagagaaccacucccgac

SEQ ID NO: 920535 - RNA, 19 nt, Artificial Sequence
  Description of Artificial Sequence: Synthetic oligonucleotide
aguucauccgaaaacuaag

SEQ ID NO: 920536 - RNA, 19 nt, Artificial Sequence
  Description of Artificial Sequence: Synthetic oligonucleotide
uggucguaccacaacaccu

SEQ ID NO: 920537 - RNA, 19 nt, Artificial Sequence
  Description of Artificial Sequence: Synthetic oligonucleotide
uacgugagcgaacaagccu

SEQ ID NO: 920538 - RNA, 19 nt, Artificial Sequence
  Description of Artificial Sequence: Synthetic oligonucleotide
gcaaccgagaaucaguaag

SEQ ID NO: 920539 - RNA, 19 nt, Artificial Sequence
  Description of Artificial Sequence: Synthetic oligonucleotide
uuggucguaccacaacacc

SEQ ID NO: 920540 - RNA, 19 nt, Artificial Sequence
  Description of Artificial Sequence: Synthetic oligonucleotide
acugugaguuacuacguga

SEQ ID NO: 920541 - RNA, 19 nt, Artificial Sequence
  Description of Artificial Sequence: Synthetic oligonucleotide
uccucaagauugcuggccc

SEQ ID NO: 920542 - RNA, 19 nt, Artificial Sequence
  Description of Artificial Sequence: Synthetic oligonucleotide
aaauccaacuggucagcca

SEQ ID NO: 920543 - RNA, 19 nt, Artificial Sequence
  Description of Artificial Sequence: Synthetic oligonucleotide
guugauuccagaaggguac

SEQ ID NO: 920544 - RNA, 19 nt, Artificial Sequence
  Description of Artificial Sequence: Synthetic oligonucleotide
aguaagcaacuuuaccaug

SEQ ID NO: 920545 - RNA, 19 nt, Artificial Sequence
  Description of Artificial Sequence: Synthetic oligonucleotide
gauggcacggugcacgcgc

SEQ ID NO: 920546 - RNA, 19 nt, Artificial Sequence
  Description of Artificial Sequence: Synthetic oligonucleotide
ugugaguuacuacgugagc

SEQ ID NO: 920547 - RNA, 19 nt, Artificial Sequence
  Description of Artificial Sequence: Synthetic oligonucleotide
uuuuaagauguaagaccac

SEQ ID NO: 920548 - RNA, 19 nt, Artificial Sequence
  Description of Artificial Sequence: Synthetic oligonucleotide
gaauagcucuuucauccug

SEQ ID NO: 920549 - RNA, 19 nt, Artificial Sequence
  Description of Artificial Sequence: Synthetic oligonucleotide
gaaucaguaagcaacuuua

SEQ ID NO: 920550 - RNA, 19 nt, Artificial Sequence
  Description of Artificial Sequence: Synthetic oligonucleotide
agcaaucuuuauuuuacaa

SEQ ID NO: 920551 - RNA, 19 nt, Artificial Sequence
  Description of Artificial Sequence: Synthetic oligonucleotide
aaagaaugacaacguguaa

SEQ ID NO: 920552 - RNA, 19 nt, Artificial Sequence
  Description of Artificial Sequence: Synthetic oligonucleotide
aauccugggaguacauauc

SEQ ID NO: 920553 - RNA, 19 nt, Artificial Sequence
  Description of Artificial Sequence: Synthetic oligonucleotide
guucauccgaaaacuaagg

SEQ ID NO: 920554 - RNA, 19 nt, Artificial Sequence
  Description of Artificial Sequence: Synthetic oligonucleotide
ccgagaaucaguaagcaac

SEQ ID NO: 920555 - RNA, 19 nt, Artificial Sequence
  Description of Artificial Sequence: Synthetic oligonucleotide
uugauuugaucguccacac

SEQ ID NO: 920556 - RNA, 19 nt, Artificial Sequence
  Description of Artificial Sequence: Synthetic oligonucleotide
agaaucaguaagcaacuuu

SEQ ID NO: 920557 - RNA, 19 nt, Artificial Sequence
  Description of Artificial Sequence: Synthetic oligonucleotide
uuugaucguccacacugug

SEQ ID NO: 920558 - RNA, 19 nt, Artificial Sequence
  Description of Artificial Sequence: Synthetic oligonucleotide
cagcugauugagaucaccc

SEQ ID NO: 920559 - RNA, 19 nt, Artificial Sequence
  Description of Artificial Sequence: Synthetic oligonucleotide
uguagcugaggacaaucuc

SEQ ID NO: 920560 - RNA, 19 nt, Artificial Sequence
  Description of Artificial Sequence: Synthetic oligonucleotide
uaaggugacuugaggugag

SEQ ID NO: 920561 - RNA, 19 nt, Artificial Sequence
  Description of Artificial Sequence: Synthetic oligonucleotide
ugcugagaacaaaauggac

SEQ ID NO: 920562 - RNA, 19 nt, Artificial Sequence
  Description of Artificial Sequence: Synthetic oligonucleotide
aaggagacucagaacuuuc

SEQ ID NO: 920563 - RNA, 19 nt, Artificial Sequence
  Description of Artificial Sequence: Synthetic oligonucleotide
aacgugucgaucccuuccu

SEQ ID NO: 920564 - RNA, 19 nt, Artificial Sequence
  Description of Artificial Sequence: Synthetic oligonucleotide
uggacggaaagaaaagguu

SEQ ID NO: 920565 - RNA, 19 nt, Artificial Sequence
  Description of Artificial Sequence: Synthetic oligonucleotide
caacauugcaccgcaaaag

SEQ ID NO: 920566 - RNA, 19 nt, Artificial Sequence
  Description of Artificial Sequence: Synthetic oligonucleotide
cuucgaaauucaccaauug

SEQ ID NO: 920567 - RNA, 19 nt, Artificial Sequence
  Description of Artificial Sequence: Synthetic oligonucleotide
aagcugauacugguaaucu

SEQ ID NO: 920568 - RNA, 19 nt, Artificial Sequence
  Description of Artificial Sequence: Synthetic oligonucleotide
aguguugauuccagaaggg

SEQ ID NO: 920569 - RNA, 19 nt, Artificial Sequence
  Description of Artificial Sequence: Synthetic oligonucleotide
aaacccaaagucucugcuu

SEQ ID NO: 920570 - RNA, 19 nt, Artificial Sequence
  Description of Artificial Sequence: Synthetic oligonucleotide
auggagcaugaccuagucg

SEQ ID NO: 920571 - RNA, 19 nt, Artificial Sequence
  Description of Artificial Sequence: Synthetic oligonucleotide
agaaggguacuccccuuuc

SEQ ID NO: 920572 - RNA, 19 nt, Artificial Sequence
  Description of Artificial Sequence: Synthetic oligonucleotide
ucccacaagcuuuuaagau

SEQ ID NO: 920573 - RNA, 19 nt, Artificial Sequence
  Description of Artificial Sequence: Synthetic oligonucleotide
auuggucguaccacaacac

SEQ ID NO: 920574 - RNA, 19 nt, Artificial Sequence
  Description of Artificial Sequence: Synthetic oligonucleotide
guuacuacgugagcgaaca

SEQ ID NO: 920575 - RNA, 19 nt, Artificial Sequence
  Description of Artificial Sequence: Synthetic oligonucleotide
uucaccaauuggucguacc

SEQ ID NO: 920576 - RNA, 19 nt, Artificial Sequence
  Description of Artificial Sequence: Synthetic oligonucleotide
agauguaagaccacuccug

SEQ ID NO: 920577 - RNA, 19 nt, Artificial Sequence
  Description of Artificial Sequence: Synthetic oligonucleotide
gagaucacccugcugagaa

SEQ ID NO: 920578 - RNA, 19 nt, Artificial Sequence
  Description of Artificial Sequence: Synthetic oligonucleotide
uugaucguccacacugugu

SEQ ID NO: 920579 - RNA, 19 nt, Artificial Sequence
  Description of Artificial Sequence: Synthetic oligonucleotide
cuguugcggaccuacuucc

SEQ ID NO: 920580 - RNA, 19 nt, Artificial Sequence
  Description of Artificial Sequence: Synthetic oligonucleotide
uugagaucacccugcugag

SEQ ID NO: 920581 - RNA, 19 nt, Artificial Sequence
  Description of Artificial Sequence: Synthetic oligonucleotide
cugaagaccucccuuaaga

SEQ ID NO: 920582 - RNA, 19 nt, Artificial Sequence
  Description of Artificial Sequence: Synthetic oligonucleotide
gaggucuauggaauccugg

SEQ ID NO: 920583 - RNA, 19 nt, Artificial Sequence
  Description of Artificial Sequence: Synthetic oligonucleotide
ggaagcuaagagaacacag

SEQ ID NO: 920584 - RNA, 19 nt, Artificial Sequence
  Description of Artificial Sequence: Synthetic oligonucleotide
ucucggaucuuccgcauuc

SEQ ID NO: 920585 - RNA, 19 nt, Artificial Sequence
  Description of Artificial Sequence: Synthetic oligonucleotide
acgugagcgaacaagccuc

SEQ ID NO: 920586 - RNA, 19 nt, Artificial Sequence
  Description of Artificial Sequence: Synthetic oligonucleotide
uuccagaaggguacucccc

SEQ ID NO: 920587 - RNA, 19 nt, Artificial Sequence
  Description of Artificial Sequence: Synthetic oligonucleotide
gacggaaagaaaagguuca

SEQ ID NO: 920588 - RNA, 19 nt, Artificial Sequence
  Description of Artificial Sequence: Synthetic oligonucleotide
cuacgugagcgaacaagcc

SEQ ID NO: 920589 - RNA, 19 nt, Artificial Sequence
  Description of Artificial Sequence: Synthetic oligonucleotide
uuccacaagugccgcaggc

SEQ ID NO: 920590 - RNA, 19 nt, Artificial Sequence
  Description of Artificial Sequence: Synthetic oligonucleotide
ucgagggcaguucauccga

SEQ ID NO: 920591 - RNA, 19 nt, Artificial Sequence
  Description of Artificial Sequence: Synthetic oligonucleotide
agcugauugagaucacccu

SEQ ID NO: 920592 - RNA, 19 nt, Artificial Sequence
  Description of Artificial Sequence: Synthetic oligonucleotide
agcuucgaaauucaccaau

SEQ ID NO: 920593 - RNA, 19 nt, Artificial Sequence
  Description of Artificial Sequence: Synthetic oligonucleotide
ugccaaguguugauuccag

SEQ ID NO: 920594 - RNA, 19 nt, Artificial Sequence
  Description of Artificial Sequence: Synthetic oligonucleotide
gcuuccaaaaugccuaacc

SEQ ID NO: 920595 - RNA, 19 nt, Artificial Sequence
  Description of Artificial Sequence: Synthetic oligonucleotide
aaagugcaacgugucgauc

SEQ ID NO: 920596 - RNA, 19 nt, Artificial Sequence
  Description of Artificial Sequence: Synthetic oligonucleotide
auggaagcuaagagaacac

SEQ ID NO: 920597 - RNA, 19 nt, Artificial Sequence
  Description of Artificial Sequence: Synthetic oligonucleotide
caacgugucgaucccuucc

SEQ ID NO: 920598 - RNA, 19 nt, Artificial Sequence
  Description of Artificial Sequence: Synthetic oligonucleotide
ugaaagccacuugacguug

SEQ ID NO: 920599 - RNA, 19 nt, Artificial Sequence
  Description of Artificial Sequence: Synthetic oligonucleotide
ucagacauccuggagguuu

SEQ ID NO: 920600 - RNA, 19 nt, Artificial Sequence
  Description of Artificial Sequence: Synthetic oligonucleotide
uguccaauccuggcuggcg

SEQ ID NO: 920601 - RNA, 19 nt, Artificial Sequence
  Description of Artificial Sequence: Synthetic oligonucleotide
aaauggacauggagcauga

SEQ ID NO: 920602 - RNA, 19 nt, Artificial Sequence
  Description of Artificial Sequence: Synthetic oligonucleotide
uggaagcuaagagaacaca

SEQ ID NO: 920603 - RNA, 19 nt, Artificial Sequence
  Description of Artificial Sequence: Synthetic oligonucleotide
auacaccauguucccuggc

SEQ ID NO: 920604 - RNA, 19 nt, Artificial Sequence
  Description of Artificial Sequence: Synthetic oligonucleotide
gaauccugggaguacauau

SEQ ID NO: 920605 - RNA, 19 nt, Artificial Sequence
  Description of Artificial Sequence: Synthetic oligonucleotide
ugauuugaucguccacacu

SEQ ID NO: 920606 - RNA, 19 nt, Artificial Sequence
  Description of Artificial Sequence: Synthetic oligonucleotide
auccccgucaacaaggagu

SEQ ID NO: 920607 - RNA, 19 nt, Artificial Sequence
  Description of Artificial Sequence: Synthetic oligonucleotide
agacuuguuuacaaauuca

SEQ ID NO: 920608 - RNA, 19 nt, Artificial Sequence
  Description of Artificial Sequence: Synthetic oligonucleotide
uacaagcaucuuaaauauc

SEQ ID NO: 920609 - RNA, 19 nt, Artificial Sequence
  Description of Artificial Sequence: Synthetic oligonucleotide
ucagaacuuuccagguuuc

SEQ ID NO: 920610 - RNA, 19 nt, Artificial Sequence
  Description of Artificial Sequence: Synthetic oligonucleotide
aggucaacauugcaccgca

SEQ ID NO: 920611 - RNA, 19 nt, Artificial Sequence
  Description of Artificial Sequence: Synthetic oligonucleotide
agcuuuaauaguugacauu

SEQ ID NO: 920612 - RNA, 19 nt, Artificial Sequence
  Description of Artificial Sequence: Synthetic oligonucleotide
gucguaccacaacaccugg

SEQ ID NO: 920613 - RNA, 19 nt, Artificial Sequence
  Description of Artificial Sequence: Synthetic oligonucleotide
aauguaaggcccagcugga

SEQ ID NO: 920614 - RNA, 19 nt, Artificial Sequence
  Description of Artificial Sequence: Synthetic oligonucleotide
gaucuaaaauaaaggcauc

SEQ ID NO: 920615 - RNA, 19 nt, Artificial Sequence
  Description of Artificial Sequence: Synthetic oligonucleotide
agagaaccacucccgacgu

SEQ ID NO: 920616 - RNA, 19 nt, Artificial Sequence
  Description of Artificial Sequence: Synthetic oligonucleotide
aguuacuacgugagcgaac

SEQ ID NO: 920617 - RNA, 19 nt, Artificial Sequence
  Description of Artificial Sequence: Synthetic oligonucleotide
gaucacccugcugagaaca

SEQ ID NO: 920618 - RNA, 19 nt, Artificial Sequence
  Description of Artificial Sequence: Synthetic oligonucleotide
gagcaugaccuagucgagg

SEQ ID NO: 920619 - RNA, 19 nt, Artificial Sequence
  Description of Artificial Sequence: Synthetic oligonucleotide
cauagaggcgcccacagua

SEQ ID NO: 920620 - RNA, 19 nt, Artificial Sequence
  Description of Artificial Sequence: Synthetic oligonucleotide
gacgucaugagcagcucug

SEQ ID NO: 920621 - RNA, 19 nt, Artificial Sequence
  Description of Artificial Sequence: Synthetic oligonucleotide
acucccgacgucaugagca

SEQ ID NO: 920622 - RNA, 19 nt, Artificial Sequence
  Description of Artificial Sequence: Synthetic oligonucleotide
auagaggcgcccacaguac

SEQ ID NO: 920623 - RNA, 19 nt, Artificial Sequence
  Description of Artificial Sequence: Synthetic oligonucleotide
uggcaaccgagaaucagua

SEQ ID NO: 920624 - RNA, 19 nt, Artificial Sequence
  Description of Artificial Sequence: Synthetic oligonucleotide
uguugcggaccuacuuccc

SEQ ID NO: 920625 - RNA, 19 nt, Artificial Sequence
  Description of Artificial Sequence: Synthetic oligonucleotide
caauuggucguaccacaac

SEQ ID NO: 920626 - RNA, 19 nt, Artificial Sequence
  Description of Artificial Sequence: Synthetic oligonucleotide
auguaagaccacuccugcu

SEQ ID NO: 920627 - RNA, 19 nt, Artificial Sequence
  Description of Artificial Sequence: Synthetic oligonucleotide
cuaaggugacuugagguga

SEQ ID NO: 920628 - RNA, 19 nt, Artificial Sequence
  Description of Artificial Sequence: Synthetic oligonucleotide
uggcgauguagcuguagcu

SEQ ID NO: 920629 - RNA, 19 nt, Artificial Sequence
  Description of Artificial Sequence: Synthetic oligonucleotide
uccgcauucucuuccucaa

SEQ ID NO: 920630 - RNA, 19 nt, Artificial Sequence
  Description of Artificial Sequence: Synthetic oligonucleotide
gaucguccacacugugucc

SEQ ID NO: 920631 - RNA, 19 nt, Artificial Sequence
  Description of Artificial Sequence: Synthetic oligonucleotide
acgucaugagcagcucugc

SEQ ID NO: 920632 - RNA, 19 nt, Artificial Sequence
  Description of Artificial Sequence: Synthetic oligonucleotide
aacguguaagagucauaua

SEQ ID NO: 920633 - RNA, 19 nt, Artificial Sequence
  Description of Artificial Sequence: Synthetic oligonucleotide
cugucuccgccuuccaaag

SEQ ID NO: 920634 - RNA, 19 nt, Artificial Sequence
  Description of Artificial Sequence: Synthetic oligonucleotide
ggaccuacuucccaagaac

SEQ ID NO: 920635 - RNA, 19 nt, Artificial Sequence
  Description of Artificial Sequence: Synthetic oligonucleotide
cuaaccuuaauggaagcua

SEQ ID NO: 920636 - RNA, 19 nt, Artificial Sequence
  Description of Artificial Sequence: Synthetic oligonucleotide
augaccugacuguuuucca

SEQ ID NO: 920637 - RNA, 19 nt, Artificial Sequence
  Description of Artificial Sequence: Synthetic oligonucleotide
ugcggaccuacuucccaag

SEQ ID NO: 920638 - RNA, 19 nt, Artificial Sequence
  Description of Artificial Sequence: Synthetic oligonucleotide
auccgaaaacuaaggugac

SEQ ID NO: 920639 - RNA, 19 nt, Artificial Sequence
  Description of Artificial Sequence: Synthetic oligonucleotide
ucguaccacaacaccugga

SEQ ID NO: 920640 - RNA, 19 nt, Artificial Sequence
  Description of Artificial Sequence: Synthetic oligonucleotide
auugcaccgcaaaagcuga

SEQ ID NO: 920641 - RNA, 19 nt, Artificial Sequence
  Description of Artificial Sequence: Synthetic oligonucleotide
caguucauccgaaaacuaa

SEQ ID NO: 920642 - RNA, 19 nt, Artificial Sequence
  Description of Artificial Sequence: Synthetic oligonucleotide
guuugcaaggaggucuaug

SEQ ID NO: 920643 - RNA, 19 nt, Artificial Sequence
  Description of Artificial Sequence: Synthetic oligonucleotide
cacgcgcuaucacugcugc

SEQ ID NO: 920644 - RNA, 19 nt, Artificial Sequence
  Description of Artificial Sequence: Synthetic oligonucleotide
accacucccgacgucauga

SEQ ID NO: 920645 - RNA, 19 nt, Artificial Sequence
  Description of Artificial Sequence: Synthetic oligonucleotide
uccacaagugccgcaggca

SEQ ID NO: 920646 - RNA, 19 nt, Artificial Sequence
  Description of Artificial Sequence: Synthetic oligonucleotide
ggacggaaagaaaagguuc

SEQ ID NO: 920647 - RNA, 19 nt, Artificial Sequence
  Description of Artificial Sequence: Synthetic oligonucleotide
guaagcaacuuuaccaugu

SEQ ID NO: 920648 - RNA, 19 nt, Artificial Sequence
  Description of Artificial Sequence: Synthetic oligonucleotide
augccuaaccuuaauggaa

SEQ ID NO: 920649 - RNA, 19 nt, Artificial Sequence
  Description of Artificial Sequence: Synthetic oligonucleotide
cacugugaguuacuacgug

SEQ ID NO: 920650 - RNA, 19 nt, Artificial Sequence
  Description of Artificial Sequence: Synthetic oligonucleotide
uguugaucauggccaggau

SEQ ID NO: 920651 - RNA, 19 nt, Artificial Sequence
  Description of Artificial Sequence: Synthetic oligonucleotide
gagggacgugggcaugagg

SEQ ID NO: 920652 - RNA, 19 nt, Artificial Sequence
  Description of Artificial Sequence: Synthetic oligonucleotide
caugaccuagucgagggca

SEQ ID NO: 920653 - RNA, 19 nt, Artificial Sequence
  Description of Artificial Sequence: Synthetic oligonucleotide
agaacaaaauggacaugga

SEQ ID NO: 920654 - RNA, 19 nt, Artificial Sequence
  Description of Artificial Sequence: Synthetic oligonucleotide
auuugaucguccacacugu

SEQ ID NO: 920655 - RNA, 19 nt, Artificial Sequence
  Description of Artificial Sequence: Synthetic oligonucleotide
ugcaacgugucgaucccuu

SEQ ID NO: 920656 - RNA, 19 nt, Artificial Sequence
  Description of Artificial Sequence: Synthetic oligonucleotide
uccgccuuccaaagaaguu

SEQ ID NO: 920657 - RNA, 19 nt, Artificial Sequence
  Description of Artificial Sequence: Synthetic oligonucleotide
acauugcaccgcaaaagcu

SEQ ID NO: 920658 - RNA, 19 nt, Artificial Sequence
  Description of Artificial Sequence: Synthetic oligonucleotide
ucaagauugcuggcccaca

SEQ ID NO: 920659 - RNA, 19 nt, Artificial Sequence
  Description of Artificial Sequence: Synthetic oligonucleotide
aauucaccaauuggucgua

SEQ ID NO: 920660 - RNA, 19 nt, Artificial Sequence
  Description of Artificial Sequence: Synthetic oligonucleotide
uugcggaccuacuucccaa

SEQ ID NO: 920661 - RNA, 19 nt, Artificial Sequence
  Description of Artificial Sequence: Synthetic oligonucleotide
caccaauuggucguaccac

SEQ ID NO: 920662 - RNA, 19 nt, Artificial Sequence
  Description of Artificial Sequence: Synthetic oligonucleotide
cucaagauugcuggcccac

SEQ ID NO: 920663 - RNA, 19 nt, Artificial Sequence
  Description of Artificial Sequence: Synthetic oligonucleotide
ugucuccgccuuccaaaga

SEQ ID NO: 920664 - RNA, 19 nt, Artificial Sequence
  Description of Artificial Sequence: Synthetic oligonucleotide
accuagucgagggcaguuc

SEQ ID NO: 920665 - RNA, 19 nt, Artificial Sequence
  Description of Artificial Sequence: Synthetic oligonucleotide
ugccgcaggcauccugaag

SEQ ID NO: 920666 - RNA, 19 nt, Artificial Sequence
  Description of Artificial Sequence: Synthetic oligonucleotide
acggugcacgcgcuaucac

SEQ ID NO: 920667 - RNA, 19 nt, Artificial Sequence
  Description of Artificial Sequence: Synthetic oligonucleotide
gggcaguucauccgaaaac

SEQ ID NO: 920668 - RNA, 19 nt, Artificial Sequence
  Description of Artificial Sequence: Synthetic oligonucleotide
gccauccccgucaacaagg

SEQ ID NO: 920669 - RNA, 19 nt, Artificial Sequence
  Description of Artificial Sequence: Synthetic oligonucleotide
cauguucccuggcagccuc

SEQ ID NO: 920670 - RNA, 19 nt, Artificial Sequence
  Description of Artificial Sequence: Synthetic oligonucleotide
ugucgaucccuuccuccuc

SEQ ID NO: 920671 - RNA, 19 nt, Artificial Sequence
  Description of Artificial Sequence: Synthetic oligonucleotide
ccugggaguacauauccuc

SEQ ID NO: 920672 - RNA, 19 nt, Artificial Sequence
  Description of Artificial Sequence: Synthetic oligonucleotide
cagauggcacggugcacgc

SEQ ID NO: 920673 - RNA, 19 nt, Artificial Sequence
  Description of Artificial Sequence: Synthetic oligonucleotide
guugcggaccuacuuccca

SEQ ID NO: 920674 - RNA, 19 nt, Artificial Sequence
  Description of Artificial Sequence: Synthetic oligonucleotide
acuugaggugaggcucagc

SEQ ID NO: 920675 - RNA, 19 nt, Artificial Sequence
  Description of Artificial Sequence: Synthetic oligonucleotide
acgugucgaucccuuccuc

SEQ ID NO: 920676 - RNA, 19 nt, Artificial Sequence
  Description of Artificial Sequence: Synthetic oligonucleotide
ccuuucucguuugugaaug

SEQ ID NO: 920677 - RNA, 19 nt, Artificial Sequence
  Description of Artificial Sequence: Synthetic oligonucleotide
uggaauccugggaguacau

SEQ ID NO: 920678 - RNA, 19 nt, Artificial Sequence
  Description of Artificial Sequence: Synthetic oligonucleotide
agcgaacaagccuccuccu

SEQ ID NO: 920679 - RNA, 19 nt, Artificial Sequence
  Description of Artificial Sequence: Synthetic oligonucleotide
gcaccgcaaaagcugauac

SEQ ID NO: 920680 - RNA, 19 nt, Artificial Sequence
  Description of Artificial Sequence: Synthetic oligonucleotide
ggucguaccacaacaccug

SEQ ID NO: 920681 - RNA, 19 nt, Artificial Sequence
  Description of Artificial Sequence: Synthetic oligonucleotide
uagucgagggcaguucauc

SEQ ID NO: 920682 - RNA, 19 nt, Artificial Sequence
  Description of Artificial Sequence: Synthetic oligonucleotide
gcuguugcggaccuacuuc

SEQ ID NO: 920683 - RNA, 19 nt, Artificial Sequence
  Description of Artificial Sequence: Synthetic oligonucleotide
gcaaagugcaacgugucga

SEQ ID NO: 920684 - RNA, 19 nt, Artificial Sequence
  Description of Artificial Sequence: Synthetic oligonucleotide
agugccgcaggcauccuga

SEQ ID NO: 920685 - RNA, 19 nt, Artificial Sequence
  Description of Artificial Sequence: Synthetic oligonucleotide
ggugcacgcgcuaucacug

SEQ ID NO: 920686 - RNA, 19 nt, Artificial Sequence
  Description of Artificial Sequence: Synthetic oligonucleotide
cucccgacgucaugagcag

SEQ ID NO: 920687 - RNA, 19 nt, Artificial Sequence
  Description of Artificial Sequence: Synthetic oligonucleotide
gaggcgcccacaguacuug

SEQ ID NO: 920688 - RNA, 19 nt, Artificial Sequence
  Description of Artificial Sequence: Synthetic oligonucleotide
agaaaagguucaggaugug

SEQ ID NO: 920689 - RNA, 19 nt, Artificial Sequence
  Description of Artificial Sequence: Synthetic oligonucleotide
ggaguacauauccucuguc

SEQ ID NO: 920690 - RNA, 19 nt, Artificial Sequence
  Description of Artificial Sequence: Synthetic oligonucleotide
augaccuagucgagggcag

SEQ ID NO: 920691 - RNA, 19 nt, Artificial Sequence
  Description of Artificial Sequence: Synthetic oligonucleotide
uuacuacgugagcgaacaa

SEQ ID NO: 920692 - RNA, 19 nt, Artificial Sequence
  Description of Artificial Sequence: Synthetic oligonucleotide
cucagaacuuuccagguuu

SEQ ID NO: 920693 - RNA, 19 nt, Artificial Sequence
  Description of Artificial Sequence: Synthetic oligonucleotide
caacguguaagagucauau

SEQ ID NO: 920694 - RNA, 19 nt, Artificial Sequence
  Description of Artificial Sequence: Synthetic oligonucleotide
gacaacguguaagagucau

SEQ ID NO: 920695 - RNA, 19 nt, Artificial Sequence
  Description of Artificial Sequence: Synthetic oligonucleotide
gucgaucccuuccuccuca

SEQ ID NO: 920696 - RNA, 19 nt, Artificial Sequence
  Description of Artificial Sequence: Synthetic oligonucleotide
gaguuacuacgugagcgaa

SEQ ID NO: 920697 - RNA, 19 nt, Artificial Sequence
  Description of Artificial Sequence: Synthetic oligonucleotide
cuggcaaccgagaaucagu

SEQ ID NO: 920698 - RNA, 19 nt, Artificial Sequence
  Description of Artificial Sequence: Synthetic oligonucleotide
ugcaccgcaaaagcugaua

SEQ ID NO: 920699 - RNA, 19 nt, Artificial Sequence
  Description of Artificial Sequence: Synthetic oligonucleotide
gcugccgucugucuccgcc

SEQ ID NO: 920700 - RNA, 19 nt, Artificial Sequence
  Description of Artificial Sequence: Synthetic oligonucleotide
cagcuuuaauaguugacau

SEQ ID NO: 920701 - RNA, 19 nt, Artificial Sequence
  Description of Artificial Sequence: Synthetic oligonucleotide
cacucccgacgucaugagc

SEQ ID NO: 920702 - RNA, 19 nt, Artificial Sequence
  Description of Artificial Sequence: Synthetic oligonucleotide
ggcacagauggcacggugc

SEQ ID NO: 920703 - RNA, 19 nt, Artificial Sequence
  Description of Artificial Sequence: Synthetic oligonucleotide
gcuuagagcagaugcaggu

SEQ ID NO: 920704 - RNA, 19 nt, Artificial Sequence
  Description of Artificial Sequence: Synthetic oligonucleotide
ccagcuuaaugccacaaaa

SEQ ID NO: 920705 - RNA, 19 nt, Artificial Sequence
  Description of Artificial Sequence: Synthetic oligonucleotide
guaaucuauggagcuucga

SEQ ID NO: 920706 - RNA, 19 nt, Artificial Sequence
  Description of Artificial Sequence: Synthetic oligonucleotide
gagcuucgaaauucaccaa

SEQ ID NO: 920707 - RNA, 19 nt, Artificial Sequence
  Description of Artificial Sequence: Synthetic oligonucleotide
gccuaaccuuaauggaagc

SEQ ID NO: 920708 - RNA, 19 nt, Artificial Sequence
  Description of Artificial Sequence: Synthetic oligonucleotide
ucacccugcugagaacaaa

SEQ ID NO: 920709 - RNA, 19 nt, Artificial Sequence
  Description of Artificial Sequence: Synthetic oligonucleotide
caucaauacuguccucaaa

SEQ ID NO: 920710 - RNA, 19 nt, Artificial Sequence
  Description of Artificial Sequence: Synthetic oligonucleotide
ccacaagcuuuuaagaugu

SEQ ID NO: 920711 - RNA, 19 nt, Artificial Sequence
  Description of Artificial Sequence: Synthetic oligonucleotide
gugcacgcgcuaucacugc

SEQ ID NO: 920712 - RNA, 19 nt, Artificial Sequence
  Description of Artificial Sequence: Synthetic oligonucleotide
ugaccuagucgagggcagu

SEQ ID NO: 920713 - RNA, 19 nt, Artificial Sequence
  Description of Artificial Sequence: Synthetic oligonucleotide
cccgucaacaaggagucug

SEQ ID NO: 920714 - RNA, 19 nt, Artificial Sequence
  Description of Artificial Sequence: Synthetic oligonucleotide
gagggcaguucauccgaaa

SEQ ID NO: 920715 - RNA, 19 nt, Artificial Sequence
  Description of Artificial Sequence: Synthetic oligonucleotide
gauugcuggcccacaccuc

SEQ ID NO: 920716 - RNA, 19 nt, Artificial Sequence
  Description of Artificial Sequence: Synthetic oligonucleotide
cugccaaguguugauucca

SEQ ID NO: 920717 - RNA, 19 nt, Artificial Sequence
  Description of Artificial Sequence: Synthetic oligonucleotide
cuauggaauccugggagua

SEQ ID NO: 920718 - RNA, 19 nt, Artificial Sequence
  Description of Artificial Sequence: Synthetic oligonucleotide
caaagugcaacgugucgau

SEQ ID NO: 920719 - RNA, 19 nt, Artificial Sequence
  Description of Artificial Sequence: Synthetic oligonucleotide
gugucgaucccuuccuccu

SEQ ID NO: 920720 - RNA, 19 nt, Artificial Sequence
  Description of Artificial Sequence: Synthetic oligonucleotide
agagggacgugggcaugag

SEQ ID NO: 920721 - RNA, 19 nt, Artificial Sequence
  Description of Artificial Sequence: Synthetic oligonucleotide
cacuugacguugucacaga

SEQ ID NO: 920722 - RNA, 19 nt, Artificial Sequence
  Description of Artificial Sequence: Synthetic oligonucleotide
cagaacuuuccagguuuca

SEQ ID NO: 920723 - RNA, 19 nt, Artificial Sequence
  Description of Artificial Sequence: Synthetic oligonucleotide
gggaguacauauccucugu

SEQ ID NO: 920724 - RNA, 19 nt, Artificial Sequence
  Description of Artificial Sequence: Synthetic oligonucleotide
cucuuucauccugaagaaa

SEQ ID NO: 920725 - RNA, 19 nt, Artificial Sequence
  Description of Artificial Sequence: Synthetic oligonucleotide
acaacguguaagagucaua

SEQ ID NO: 920726 - RNA, 19 nt, Artificial Sequence
  Description of Artificial Sequence: Synthetic oligonucleotide
gccacucccgugcccaggc

SEQ ID NO: 920727 - RNA, 19 nt, Artificial Sequence
  Description of Artificial Sequence: Synthetic oligonucleotide
gccaaguguugauuccaga

SEQ ID NO: 920728 - RNA, 19 nt, Artificial Sequence
  Description of Artificial Sequence: Synthetic oligonucleotide
ccuagucgagggcaguuca

SEQ ID NO: 920729 - RNA, 19 nt, Artificial Sequence
  Description of Artificial Sequence: Synthetic oligonucleotide
cacggugcacgcgcuauca

SEQ ID NO: 920730 - RNA, 19 nt, Artificial Sequence
  Description of Artificial Sequence: Synthetic oligonucleotide
ccgugcccaggccauagag

SEQ ID NO: 920731 - RNA, 19 nt, Artificial Sequence
  Description of Artificial Sequence: Synthetic oligonucleotide
cugcugccgucugucuccg

SEQ ID NO: 920732 - RNA, 19 nt, Artificial Sequence
  Description of Artificial Sequence: Synthetic oligonucleotide
gcgcccacaguacuuggca

SEQ ID NO: 920733 - RNA, 19 nt, Artificial Sequence
  Description of Artificial Sequence: Synthetic oligonucleotide
caaaagcagggcagagccu

SEQ ID NO: 920734 - RNA, 19 nt, Artificial Sequence
  Description of Artificial Sequence: Synthetic oligonucleotide
gcuggggcggauggcacag

SEQ ID NO: 920735 - RNA, 19 nt, Artificial Sequence
  Description of Artificial Sequence: Synthetic oligonucleotide
acgcgcuaucacugcugca

SEQ ID NO: 920736 - RNA, 19 nt, Artificial Sequence
  Description of Artificial Sequence: Synthetic oligonucleotide
cauauacauuuuacugguu

SEQ ID NO: 920737 - RNA, 19 nt, Artificial Sequence
  Description of Artificial Sequence: Synthetic oligonucleotide
ccaauuggucguaccacaa

SEQ ID NO: 920738 - RNA, 19 nt, Artificial Sequence
  Description of Artificial Sequence: Synthetic oligonucleotide
cgugagcgaacaagccucc

SEQ ID NO: 920739 - RNA, 19 nt, Artificial Sequence
  Description of Artificial Sequence: Synthetic oligonucleotide
aguuugcaaggaggucuau

SEQ ID NO: 920740 - RNA, 19 nt, Artificial Sequence
  Description of Artificial Sequence: Synthetic oligonucleotide
gcaaggaggucuauggaau

SEQ ID NO: 920741 - RNA, 19 nt, Artificial Sequence
  Description of Artificial Sequence: Synthetic oligonucleotide
aggugaggcucagcugcca

SEQ ID NO: 920742 - RNA, 19 nt, Artificial Sequence
  Description of Artificial Sequence: Synthetic oligonucleotide
cguugucacagagaaccac

SEQ ID NO: 920743 - RNA, 19 nt, Artificial Sequence
  Description of Artificial Sequence: Synthetic oligonucleotide
ggcaaccgagaaucaguaa

SEQ ID NO: 920744 - RNA, 19 nt, Artificial Sequence
  Description of Artificial Sequence: Synthetic oligonucleotide
gaacugccaaguguugauu

SEQ ID NO: 920745 - RNA, 19 nt, Artificial Sequence
  Description of Artificial Sequence: Synthetic oligonucleotide
uucagacauccuggagguu

SEQ ID NO: 920746 - RNA, 19 nt, Artificial Sequence
  Description of Artificial Sequence: Synthetic oligonucleotide
ccgucaacaaggagucuga

SEQ ID NO: 920747 - RNA, 19 nt, Artificial Sequence
  Description of Artificial Sequence: Synthetic oligonucleotide
cuagucgagggcaguucau

SEQ ID NO: 920748 - RNA, 19 nt, Artificial Sequence
  Description of Artificial Sequence: Synthetic oligonucleotide
caaaauggacauggagcau

SEQ ID NO: 920749 - RNA, 19 nt, Artificial Sequence
  Description of Artificial Sequence: Synthetic oligonucleotide
gcggaccuacuucccaaga

SEQ ID NO: 920750 - RNA, 19 nt, Artificial Sequence
  Description of Artificial Sequence: Synthetic oligonucleotide
ccacucccgacgucaugag

SEQ ID NO: 920751 - RNA, 19 nt, Artificial Sequence
  Description of Artificial Sequence: Synthetic oligonucleotide
ugcugccgucugucuccgc

SEQ ID NO: 920752 - RNA, 19 nt, Artificial Sequence
  Description of Artificial Sequence: Synthetic oligonucleotide
cagaacagucaggacugcu

SEQ ID NO: 920753 - RNA, 19 nt, Artificial Sequence
  Description of Artificial Sequence: Synthetic oligonucleotide
ccccuuucucguuugugaa

SEQ ID NO: 920754 - RNA, 19 nt, Artificial Sequence
  Description of Artificial Sequence: Synthetic oligonucleotide
ccucaagauugcuggccca

SEQ ID NO: 920755 - RNA, 19 nt, Artificial Sequence
  Description of Artificial Sequence: Synthetic oligonucleotide
gcuucgaaauucaccaauu

SEQ ID NO: 920756 - RNA, 19 nt, Artificial Sequence
  Description of Artificial Sequence: Synthetic oligonucleotide
gaccuagucgagggcaguu

SEQ ID NO: 920757 - RNA, 19 nt, Artificial Sequence
  Description of Artificial Sequence: Synthetic oligonucleotide
ggggcggauggcacagaug

SEQ ID NO: 920758 - RNA, 19 nt, Artificial Sequence
  Description of Artificial Sequence: Synthetic oligonucleotide
cugguaaucuauggagcuu

SEQ ID NO: 920759 - RNA, 19 nt, Artificial Sequence
  Description of Artificial Sequence: Synthetic oligonucleotide
ccacugugaguuacuacgu

SEQ ID NO: 920760 - RNA, 19 nt, Artificial Sequence
  Description of Artificial Sequence: Synthetic oligonucleotide
cgucaacaaggagucugag

SEQ ID NO: 920761 - RNA, 19 nt, Artificial Sequence
  Description of Artificial Sequence: Synthetic oligonucleotide
cccgacgucaugagcagcu

SEQ ID NO: 920762 - RNA, 19 nt, Artificial Sequence
  Description of Artificial Sequence: Synthetic oligonucleotide
cgaacaagccuccuccugu

SEQ ID NO: 920763 - RNA, 19 nt, Artificial Sequence
  Description of Artificial Sequence: Synthetic oligonucleotide
cccaggccauagaggcgcc

SEQ ID NO: 920764 - RNA, 19 nt, Artificial Sequence
  Description of Artificial Sequence: Synthetic oligonucleotide
cgaggagccacugugaguu

SEQ ID NO: 920765 - RNA, 19 nt, Artificial Sequence
  Description of Artificial Sequence: Synthetic oligonucleotide
ggcccacaccucacagaug

SEQ ID NO: 920766 - RNA, 19 nt, Artificial Sequence
  Description of Artificial Sequence: Synthetic oligonucleotide
gugcaacgugucgaucccu

SEQ ID NO: 920767 - RNA, 19 nt, Artificial Sequence
  Description of Artificial Sequence: Synthetic oligonucleotide
gugagcgaacaagccuccu

SEQ ID NO: 920768 - RNA, 19 nt, Artificial Sequence
  Description of Artificial Sequence: Synthetic oligonucleotide
ccacucccgugcccaggcc

SEQ ID NO: 920769 - RNA, 19 nt, Artificial Sequence
  Description of Artificial Sequence: Synthetic oligonucleotide
ggucaacauugcaccgcaa

SEQ ID NO: 920770 - RNA, 19 nt, Artificial Sequence
  Description of Artificial Sequence: Synthetic oligonucleotide
ccgacgucaugagcagcuc

SEQ ID NO: 920771 - RNA, 19 nt, Artificial Sequence
  Description of Artificial Sequence: Synthetic oligonucleotide
ccgccuuccaaagaaguuu

SEQ ID NO: 920772 - RNA, 19 nt, Artificial Sequence
  Description of Artificial Sequence: Synthetic oligonucleotide
ggcacggugcacgcgcuau

SEQ ID NO: 920773 - RNA, 19 nt, Artificial Sequence
  Description of Artificial Sequence: Synthetic oligonucleotide
cggugcacgcgcuaucacu

SEQ ID NO: 920774 - RNA, 19 nt, Artificial Sequence
  Description of Artificial Sequence: Synthetic oligonucleotide
ccgcaggcauccugaaggu

SEQ ID NO: 920775 - RNA, 19 nt, Artificial Sequence
  Description of Artificial Sequence: Synthetic oligonucleotide
ccagaaggguacuccccuu

SEQ ID NO: 920776 - RNA, 19 nt, Artificial Sequence
  Description of Artificial Sequence: Synthetic oligonucleotide
caagugccgcaggcauccu

SEQ ID NO: 920777 - RNA, 19 nt, Artificial Sequence
  Description of Artificial Sequence: Synthetic oligonucleotide
ccauguucccuggcagccu

SEQ ID NO: 920778 - RNA, 19 nt, Artificial Sequence
  Description of Artificial Sequence: Synthetic oligonucleotide
cucccgugcccaggccaua

SEQ ID NO: 920779 - RNA, 19 nt, Artificial Sequence
  Description of Artificial Sequence: Synthetic oligonucleotide
ccccgucaacaaggagucu

SEQ ID NO: 920780 - RNA, 19 nt, Artificial Sequence
  Description of Artificial Sequence: Synthetic oligonucleotide
uaaacuucaggucugagca

SEQ ID NO: 920781 - RNA, 19 nt, Artificial Sequence
  Description of Artificial Sequence: Synthetic oligonucleotide
ugauuaaaugacuagagcu

SEQ ID NO: 920782 - RNA, 19 nt, Artificial Sequence
  Description of Artificial Sequence: Synthetic oligonucleotide
gaagucacggacuugaaag

SEQ ID NO: 920783 - RNA, 19 nt, Artificial Sequence
  Description of Artificial Sequence: Synthetic oligonucleotide
ucagauaucucccacagac

SEQ ID NO: 920784 - RNA, 19 nt, Artificial Sequence
  Description of Artificial Sequence: Synthetic oligonucleotide
uccuuuagcaagaaguccg

SEQ ID NO: 920785 - RNA, 19 nt, Artificial Sequence
  Description of Artificial Sequence: Synthetic oligonucleotide
uguauuucaugauuaaaug

SEQ ID NO: 920786 - RNA, 19 nt, Artificial Sequence
  Description of Artificial Sequence: Synthetic oligonucleotide
agaacaucugucuucugcc

SEQ ID NO: 920787 - RNA, 19 nt, Artificial Sequence
  Description of Artificial Sequence: Synthetic oligonucleotide
uuccuuuacacuauuggcc

SEQ ID NO: 920788 - RNA, 19 nt, Artificial Sequence
  Description of Artificial Sequence: Synthetic oligonucleotide
acuauuggccauuauaucu

SEQ ID NO: 920789 - RNA, 19 nt, Artificial Sequence
  Description of Artificial Sequence: Synthetic oligonucleotide
ugguaaaacacacaucaca

SEQ ID NO: 920790 - RNA, 19 nt, Artificial Sequence
  Description of Artificial Sequence: Synthetic oligonucleotide
agguuaaugaagcugagca

SEQ ID NO: 920791 - RNA, 19 nt, Artificial Sequence
  Description of Artificial Sequence: Synthetic oligonucleotide
ugaaauguagaacaucgaa

SEQ ID NO: 920792 - RNA, 19 nt, Artificial Sequence
  Description of Artificial Sequence: Synthetic oligonucleotide
gaaauguagaacaucgaag

SEQ ID NO: 920793 - RNA, 19 nt, Artificial Sequence
  Description of Artificial Sequence: Synthetic oligonucleotide
uucauauacuuugagaaca

SEQ ID NO: 920794 - RNA, 19 nt, Artificial Sequence
  Description of Artificial Sequence: Synthetic oligonucleotide
acacacaucacaucacuac

SEQ ID NO: 920795 - RNA, 19 nt, Artificial Sequence
  Description of Artificial Sequence: Synthetic oligonucleotide
aauuggguacuugaagugg

SEQ ID NO: 920796 - RNA, 19 nt, Artificial Sequence
  Description of Artificial Sequence: Synthetic oligonucleotide
gaguauggcaaacagcagc

SEQ ID NO: 920797 - RNA, 19 nt, Artificial Sequence
  Description of Artificial Sequence: Synthetic oligonucleotide
cuuaucuguguaccgaugg

SEQ ID NO: 920798 - RNA, 19 nt, Artificial Sequence
  Description of Artificial Sequence: Synthetic oligonucleotide
ucagacuugaaauguagaa

SEQ ID NO: 920799 - RNA, 19 nt, Artificial Sequence
  Description of Artificial Sequence: Synthetic oligonucleotide
gauuaaaugacuagagcuc

SEQ ID NO: 920800 - RNA, 19 nt, Artificial Sequence
  Description of Artificial Sequence: Synthetic oligonucleotide
acgaacaguguguagauga

SEQ ID NO: 920801 - RNA, 19 nt, Artificial Sequence
  Description of Artificial Sequence: Synthetic oligonucleotide
uccuuuacacuauuggcca

SEQ ID NO: 920802 - RNA, 19 nt, Artificial Sequence
  Description of Artificial Sequence: Synthetic oligonucleotide
uuuguuguagugucacugc

SEQ ID NO: 920803 - RNA, 19 nt, Artificial Sequence
  Description of Artificial Sequence: Synthetic oligonucleotide
cuagcuacagacccaacag

SEQ ID NO: 920804 - RNA, 19 nt, Artificial Sequence
  Description of Artificial Sequence: Synthetic oligonucleotide
aggaguauggcaaacagca

SEQ ID NO: 920805 - RNA, 19 nt, Artificial Sequence
  Description of Artificial Sequence: Synthetic oligonucleotide
gccauuauaucuauuaggg

SEQ ID NO: 920806 - RNA, 19 nt, Artificial Sequence
  Description of Artificial Sequence: Synthetic oligonucleotide
gucguuguagccuucagac

SEQ ID NO: 920807 - RNA, 19 nt, Artificial Sequence
  Description of Artificial Sequence: Synthetic oligonucleotide
gcaguaugaauccacaaag

SEQ ID NO: 920808 - RNA, 19 nt, Artificial Sequence
  Description of Artificial Sequence: Synthetic oligonucleotide
ucuauuagggccugguaaa

SEQ ID NO: 920809 - RNA, 19 nt, Artificial Sequence
  Description of Artificial Sequence: Synthetic oligonucleotide
agaaacucgucugauagug

SEQ ID NO: 920810 - RNA, 19 nt, Artificial Sequence
  Description of Artificial Sequence: Synthetic oligonucleotide
gaugccgacagcaaugagc

SEQ ID NO: 920811 - RNA, 19 nt, Artificial Sequence
  Description of Artificial Sequence: Synthetic oligonucleotide
acaggaguauggcaaacag

SEQ ID NO: 920812 - RNA, 19 nt, Artificial Sequence
  Description of Artificial Sequence: Synthetic oligonucleotide
auuaaaugacuagagcucu

SEQ ID NO: 920813 - RNA, 19 nt, Artificial Sequence
  Description of Artificial Sequence: Synthetic oligonucleotide
caguaugaauccacaaagg

SEQ ID NO: 920814 - RNA, 19 nt, Artificial Sequence
  Description of Artificial Sequence: Synthetic oligonucleotide
aaaugacuagagcucuucu

SEQ ID NO: 920815 - RNA, 19 nt, Artificial Sequence
  Description of Artificial Sequence: Synthetic oligonucleotide
uuggccauuauaucuauua

SEQ ID NO: 920816 - RNA, 19 nt, Artificial Sequence
  Description of Artificial Sequence: Synthetic oligonucleotide
agcccagcaguaugaaucc

SEQ ID NO: 920817 - RNA, 19 nt, Artificial Sequence
  Description of Artificial Sequence: Synthetic oligonucleotide
uggccauuauaucuauuag

SEQ ID NO: 920818 - RNA, 19 nt, Artificial Sequence
  Description of Artificial Sequence: Synthetic oligonucleotide
auuagggccugguaaaaca

SEQ ID NO: 920819 - RNA, 19 nt, Artificial Sequence
  Description of Artificial Sequence: Synthetic oligonucleotide
uguguaccgauggagaucu

SEQ ID NO: 920820 - RNA, 19 nt, Artificial Sequence
  Description of Artificial Sequence: Synthetic oligonucleotide
aguccgagaacacguacuc

SEQ ID NO: 920821 - RNA, 19 nt, Artificial Sequence
  Description of Artificial Sequence: Synthetic oligonucleotide
auuggguacuugaaguggc

SEQ ID NO: 920822 - RNA, 19 nt, Artificial Sequence
  Description of Artificial Sequence: Synthetic oligonucleotide
aaugacuagagcucuucuu

SEQ ID NO: 920823 - RNA, 19 nt, Artificial Sequence
  Description of Artificial Sequence: Synthetic oligonucleotide
acgguuguagacuuuguca

SEQ ID NO: 920824 - RNA, 19 nt, Artificial Sequence
  Description of Artificial Sequence: Synthetic oligonucleotide
aacaggggugcuucagccg

SEQ ID NO: 920825 - RNA, 19 nt, Artificial Sequence
  Description of Artificial Sequence: Synthetic oligonucleotide
augacugcaaaugucacca

SEQ ID NO: 920826 - RNA, 19 nt, Artificial Sequence
  Description of Artificial Sequence: Synthetic oligonucleotide
aaguuucaucuuaugggac

SEQ ID NO: 920827 - RNA, 19 nt, Artificial Sequence
  Description of Artificial Sequence: Synthetic oligonucleotide
auuauaucuauuagggccu

SEQ ID NO: 920828 - RNA, 19 nt, Artificial Sequence
  Description of Artificial Sequence: Synthetic oligonucleotide
ggccauuauaucuauuagg

SEQ ID NO: 920829 - RNA, 19 nt, Artificial Sequence
  Description of Artificial Sequence: Synthetic oligonucleotide
aaaccauuagcaugaugaa

SEQ ID NO: 920830 - RNA, 19 nt, Artificial Sequence
  Description of Artificial Sequence: Synthetic oligonucleotide
gaagcgaucgggaauggug

SEQ ID NO: 920831 - RNA, 19 nt, Artificial Sequence
  Description of Artificial Sequence: Synthetic oligonucleotide
accuuaagacacuuguaug

SEQ ID NO: 920832 - RNA, 19 nt, Artificial Sequence
  Description of Artificial Sequence: Synthetic oligonucleotide
caucgcaccgccuuggcag

SEQ ID NO: 920833 - RNA, 19 nt, Artificial Sequence
  Description of Artificial Sequence: Synthetic oligonucleotide
agaacaucgaaggugggca

SEQ ID NO: 920834 - RNA, 19 nt, Artificial Sequence
  Description of Artificial Sequence: Synthetic oligonucleotide
cuugcacuggaagcgaucg

SEQ ID NO: 920835 - RNA, 19 nt, Artificial Sequence
  Description of Artificial Sequence: Synthetic oligonucleotide
agcaguaugaauccacaaa

SEQ ID NO: 920836 - RNA, 19 nt, Artificial Sequence
  Description of Artificial Sequence: Synthetic oligonucleotide
ucuucugccggaacgggac

SEQ ID NO: 920837 - RNA, 19 nt, Artificial Sequence
  Description of Artificial Sequence: Synthetic oligonucleotide
uagaugaccacaggaacca

SEQ ID NO: 920838 - RNA, 19 nt, Artificial Sequence
  Description of Artificial Sequence: Synthetic oligonucleotide
uccgcuuucccuucccggg

SEQ ID NO: 920839 - RNA, 19 nt, Artificial Sequence
  Description of Artificial Sequence: Synthetic oligonucleotide
uuaucuguguaccgaugga

SEQ ID NO: 920840 - RNA, 19 nt, Artificial Sequence
  Description of Artificial Sequence: Synthetic oligonucleotide
gacacaugccagcaguaug

SEQ ID NO: 920841 - RNA, 19 nt, Artificial Sequence
  Description of Artificial Sequence: Synthetic oligonucleotide
ucgucugauagugaggaga

SEQ ID NO: 920842 - RNA, 19 nt, Artificial Sequence
  Description of Artificial Sequence: Synthetic oligonucleotide
augacuagagcucuucuuu

SEQ ID NO: 920843 - RNA, 19 nt, Artificial Sequence
  Description of Artificial Sequence: Synthetic oligonucleotide
gaacgggacgaacagugug

SEQ ID NO: 920844 - RNA, 19 nt, Artificial Sequence
  Description of Artificial Sequence: Synthetic oligonucleotide
cuuauguucucuuccagaa

SEQ ID NO: 920845 - RNA, 19 nt, Artificial Sequence
  Description of Artificial Sequence: Synthetic oligonucleotide
uuguuguagugucacugcu

SEQ ID NO: 920846 - RNA, 19 nt, Artificial Sequence
  Description of Artificial Sequence: Synthetic oligonucleotide
aacaucgaaggugggcagg

SEQ ID NO: 920847 - RNA, 19 nt, Artificial Sequence
  Description of Artificial Sequence: Synthetic oligonucleotide
auaucucccacagacuuug

SEQ ID NO: 920848 - RNA, 19 nt, Artificial Sequence
  Description of Artificial Sequence: Synthetic oligonucleotide
uccucguagggaccgcacg

SEQ ID NO: 920849 - RNA, 19 nt, Artificial Sequence
  Description of Artificial Sequence: Synthetic oligonucleotide
ugggacauuccuaauccau

SEQ ID NO: 920850 - RNA, 19 nt, Artificial Sequence
  Description of Artificial Sequence: Synthetic oligonucleotide
uagaacaucgaaggugggc

SEQ ID NO: 920851 - RNA, 19 nt, Artificial Sequence
  Description of Artificial Sequence: Synthetic oligonucleotide
gguuaaugaagcugagcag

SEQ ID NO: 920852 - RNA, 19 nt, Artificial Sequence
  Description of Artificial Sequence: Synthetic oligonucleotide
cuugaaguggcuuucagau

SEQ ID NO: 920853 - RNA, 19 nt, Artificial Sequence
  Description of Artificial Sequence: Synthetic oligonucleotide
aaguacugcuccacaauug

SEQ ID NO: 920854 - RNA, 19 nt, Artificial Sequence
  Description of Artificial Sequence: Synthetic oligonucleotide
augccagcaguaugacugc

SEQ ID NO: 920855 - RNA, 19 nt, Artificial Sequence
  Description of Artificial Sequence: Synthetic oligonucleotide
gaagcgccagaacagcgug

SEQ ID NO: 920856 - RNA, 19 nt, Artificial Sequence
  Description of Artificial Sequence: Synthetic oligonucleotide
aagaacuuggggagaagca

SEQ ID NO: 920857 - RNA, 19 nt, Artificial Sequence
  Description of Artificial Sequence: Synthetic oligonucleotide
ucgaaggugggcaggauuu

SEQ ID NO: 920858 - RNA, 19 nt, Artificial Sequence
  Description of Artificial Sequence: Synthetic oligonucleotide
caacaggggugcuucagcc

SEQ ID NO: 920859 - RNA, 19 nt, Artificial Sequence
  Description of Artificial Sequence: Synthetic oligonucleotide
aguauggcaaacagcagca

SEQ ID NO: 920860 - RNA, 19 nt, Artificial Sequence
  Description of Artificial Sequence: Synthetic oligonucleotide
ucgagaguucuucucucca

SEQ ID NO: 920861 - RNA, 19 nt, Artificial Sequence
  Description of Artificial Sequence: Synthetic oligonucleotide
aguagacacaugccagcag

SEQ ID NO: 920862 - RNA, 19 nt, Artificial Sequence
  Description of Artificial Sequence: Synthetic oligonucleotide
ucguuuugcagggagcucu

SEQ ID NO: 920863 - RNA, 19 nt, Artificial Sequence
  Description of Artificial Sequence: Synthetic oligonucleotide
ucuguguaccgauggagau

SEQ ID NO: 920864 - RNA, 19 nt, Artificial Sequence
  Description of Artificial Sequence: Synthetic oligonucleotide
acucgucugauagugagga

SEQ ID NO: 920865 - RNA, 19 nt, Artificial Sequence
  Description of Artificial Sequence: Synthetic oligonucleotide
agucacggacuugaaaguc

SEQ ID NO: 920866 - RNA, 19 nt, Artificial Sequence
  Description of Artificial Sequence: Synthetic oligonucleotide
ugggagguuuccagacucg

SEQ ID NO: 920867 - RNA, 19 nt, Artificial Sequence
  Description of Artificial Sequence: Synthetic oligonucleotide
aagucguuguagccuucag

SEQ ID NO: 920868 - RNA, 19 nt, Artificial Sequence
  Description of Artificial Sequence: Synthetic oligonucleotide
uuccgcuuucccuucccgg

SEQ ID NO: 920869 - RNA, 19 nt, Artificial Sequence
  Description of Artificial Sequence: Synthetic oligonucleotide
gaaguccgagaacacguac

SEQ ID NO: 920870 - RNA, 19 nt, Artificial Sequence
  Description of Artificial Sequence: Synthetic oligonucleotide
ucgggaauggugcugucau

SEQ ID NO: 920871 - RNA, 19 nt, Artificial Sequence
  Description of Artificial Sequence: Synthetic oligonucleotide
gaacaucgaaggugggcag

SEQ ID NO: 920872 - RNA, 19 nt, Artificial Sequence
  Description of Artificial Sequence: Synthetic oligonucleotide
ucggugggcuccuuuagca

SEQ ID NO: 920873 - RNA, 19 nt, Artificial Sequence
  Description of Artificial Sequence: Synthetic oligonucleotide
agucguuguagccuucaga

SEQ ID NO: 920874 - RNA, 19 nt, Artificial Sequence
  Description of Artificial Sequence: Synthetic oligonucleotide
cuuguaugauuugagcuca

SEQ ID NO: 920875 - RNA, 19 nt, Artificial Sequence
  Description of Artificial Sequence: Synthetic oligonucleotide
augccgacagcaaugagcu

SEQ ID NO: 920876 - RNA, 19 nt, Artificial Sequence
  Description of Artificial Sequence: Synthetic oligonucleotide
cuuggcagucgcuggggcg

SEQ ID NO: 920877 - RNA, 19 nt, Artificial Sequence
  Description of Artificial Sequence: Synthetic oligonucleotide
uuaagacacuuguaugauu

SEQ ID NO: 920878 - RNA, 19 nt, Artificial Sequence
  Description of Artificial Sequence: Synthetic oligonucleotide
cuccuuuagcaagaagucc

SEQ ID NO: 920879 - RNA, 19 nt, Artificial Sequence
  Description of Artificial Sequence: Synthetic oligonucleotide
aaguccgagaacacguacu

SEQ ID NO: 920880 - RNA, 19 nt, Artificial Sequence
  Description of Artificial Sequence: Synthetic oligonucleotide
gacuuugccccacauucuc

SEQ ID NO: 920881 - RNA, 19 nt, Artificial Sequence
  Description of Artificial Sequence: Synthetic oligonucleotide
uucagauaucucccacaga

SEQ ID NO: 920882 - RNA, 19 nt, Artificial Sequence
  Description of Artificial Sequence: Synthetic oligonucleotide
acauuccuaauccauucuu

SEQ ID NO: 920883 - RNA, 19 nt, Artificial Sequence
  Description of Artificial Sequence: Synthetic oligonucleotide
uucagccgcagaagucacg

SEQ ID NO: 920884 - RNA, 19 nt, Artificial Sequence
  Description of Artificial Sequence: Synthetic oligonucleotide
guagggaccgcacgggagc

SEQ ID NO: 920885 - RNA, 19 nt, Artificial Sequence
  Description of Artificial Sequence: Synthetic oligonucleotide
agcuaauguauuucaugau

SEQ ID NO: 920886 - RNA, 19 nt, Artificial Sequence
  Description of Artificial Sequence: Synthetic oligonucleotide
uagaggcucaagucguugu

SEQ ID NO: 920887 - RNA, 19 nt, Artificial Sequence
  Description of Artificial Sequence: Synthetic oligonucleotide
uuaaaugacuagagcucuu

SEQ ID NO: 920888 - RNA, 19 nt, Artificial Sequence
  Description of Artificial Sequence: Synthetic oligonucleotide
uuauaucuauuagggccug

SEQ ID NO: 920889 - RNA, 19 nt, Artificial Sequence
  Description of Artificial Sequence: Synthetic oligonucleotide
ugccggaacgggacgaaca

SEQ ID NO: 920890 - RNA, 19 nt, Artificial Sequence
  Description of Artificial Sequence: Synthetic oligonucleotide
guacuccguggccaggugg

SEQ ID NO: 920891 - RNA, 19 nt, Artificial Sequence
  Description of Artificial Sequence: Synthetic oligonucleotide
acggcgaugcaugugacca

SEQ ID NO: 920892 - RNA, 19 nt, Artificial Sequence
  Description of Artificial Sequence: Synthetic oligonucleotide
gaacacguacuccguggcc

SEQ ID NO: 920893 - RNA, 19 nt, Artificial Sequence
  Description of Artificial Sequence: Synthetic oligonucleotide
uauuagggccugguaaaac

SEQ ID NO: 920894 - RNA, 19 nt, Artificial Sequence
  Description of Artificial Sequence: Synthetic oligonucleotide
uggggcgaccuccucguag

SEQ ID NO: 920895 - RNA, 19 nt, Artificial Sequence
  Description of Artificial Sequence: Synthetic oligonucleotide
cuggaagcgaucgggaaug

SEQ ID NO: 920896 - RNA, 19 nt, Artificial Sequence
  Description of Artificial Sequence: Synthetic oligonucleotide
cugcgaagcgccagaacag

SEQ ID NO: 920897 - RNA, 19 nt, Artificial Sequence
  Description of Artificial Sequence: Synthetic oligonucleotide
uguaugauuugagcucacu

SEQ ID NO: 920898 - RNA, 19 nt, Artificial Sequence
  Description of Artificial Sequence: Synthetic oligonucleotide
gaggcucaagucguuguag

SEQ ID NO: 920899 - RNA, 19 nt, Artificial Sequence
  Description of Artificial Sequence: Synthetic oligonucleotide
agcgccagaacagcguggg

SEQ ID NO: 920900 - RNA, 19 nt, Artificial Sequence
  Description of Artificial Sequence: Synthetic oligonucleotide
cagguccaagucccgagcg

SEQ ID NO: 920901 - RNA, 19 nt, Artificial Sequence
  Description of Artificial Sequence: Synthetic oligonucleotide
acucguuuugcagggagcu

SEQ ID NO: 920902 - RNA, 19 nt, Artificial Sequence
  Description of Artificial Sequence: Synthetic oligonucleotide
ucucugcgcgcgcaggagc

SEQ ID NO: 920903 - RNA, 19 nt, Artificial Sequence
  Description of Artificial Sequence: Synthetic oligonucleotide
cuauuggccauuauaucua

SEQ ID NO: 920904 - RNA, 19 nt, Artificial Sequence
  Description of Artificial Sequence: Synthetic oligonucleotide
gucgagaguucuucucucc

SEQ ID NO: 920905 - RNA, 19 nt, Artificial Sequence
  Description of Artificial Sequence: Synthetic oligonucleotide
agcuuaucuguguaccgau

SEQ ID NO: 920906 - RNA, 19 nt, Artificial Sequence
  Description of Artificial Sequence: Synthetic oligonucleotide
gcugcgaagcgccagaaca

SEQ ID NO: 920907 - RNA, 19 nt, Artificial Sequence
  Description of Artificial Sequence: Synthetic oligonucleotide
uucucaggacgcccgauuu

SEQ ID NO: 920908 - RNA, 19 nt, Artificial Sequence
  Description of Artificial Sequence: Synthetic oligonucleotide
ugucgagaguucuucucuc

SEQ ID NO: 920909 - RNA, 19 nt, Artificial Sequence
  Description of Artificial Sequence: Synthetic oligonucleotide
gucgccaggagaaagaacu

SEQ ID NO: 920910 - RNA, 19 nt, Artificial Sequence
  Description of Artificial Sequence: Synthetic oligonucleotide
caaacuagcuacagaccca

SEQ ID NO: 920911 - RNA, 19 nt, Artificial Sequence
  Description of Artificial Sequence: Synthetic oligonucleotide
guagacacaugccagcagu

SEQ ID NO: 920912 - RNA, 19 nt, Artificial Sequence
  Description of Artificial Sequence: Synthetic oligonucleotide
caucuuaugggacauuccu

SEQ ID NO: 920913 - RNA, 19 nt, Artificial Sequence
  Description of Artificial Sequence: Synthetic oligonucleotide
uaccgauggagaucuccug

SEQ ID NO: 920914 - RNA, 19 nt, Artificial Sequence
  Description of Artificial Sequence: Synthetic oligonucleotide
ucucugucgagaguucuuc

SEQ ID NO: 920915 - RNA, 19 nt, Artificial Sequence
  Description of Artificial Sequence: Synthetic oligonucleotide
gcagcuuaucuguguaccg

SEQ ID NO: 920916 - RNA, 19 nt, Artificial Sequence
  Description of Artificial Sequence: Synthetic oligonucleotide
agcucuagagcugcggcug

SEQ ID NO: 920917 - RNA, 19 nt, Artificial Sequence
  Description of Artificial Sequence: Synthetic oligonucleotide
uuuacacuauuggccauua

SEQ ID NO: 920918 - RNA, 19 nt, Artificial Sequence
  Description of Artificial Sequence: Synthetic oligonucleotide
ugcgaagcgccagaacagc

SEQ ID NO: 920919 - RNA, 19 nt, Artificial Sequence
  Description of Artificial Sequence: Synthetic oligonucleotide
ugucgccaggagaaagaac

SEQ ID NO: 920920 - RNA, 19 nt, Artificial Sequence
  Description of Artificial Sequence: Synthetic oligonucleotide
ucuagagcugcggcugcag

SEQ ID NO: 920921 - RNA, 19 nt, Artificial Sequence
  Description of Artificial Sequence: Synthetic oligonucleotide
guaugacugcaaaugucac

SEQ ID NO: 920922 - RNA, 19 nt, Artificial Sequence
  Description of Artificial Sequence: Synthetic oligonucleotide
uuguaugauuugagcucac

SEQ ID NO: 920923 - RNA, 19 nt, Artificial Sequence
  Description of Artificial Sequence: Synthetic oligonucleotide
gccgacagcaaugagcuug

SEQ ID NO: 920924 - RNA, 19 nt, Artificial Sequence
  Description of Artificial Sequence: Synthetic oligonucleotide
cuuccgcuuucccuucccg

SEQ ID NO: 920925 - RNA, 19 nt, Artificial Sequence
  Description of Artificial Sequence: Synthetic oligonucleotide
gaccuccucguagggaccg

SEQ ID NO: 920926 - RNA, 19 nt, Artificial Sequence
  Description of Artificial Sequence: Synthetic oligonucleotide
ucguagggaccgcacggga

SEQ ID NO: 920927 - RNA, 19 nt, Artificial Sequence
  Description of Artificial Sequence: Synthetic oligonucleotide
auguaggggaagaacuugu

SEQ ID NO: 920928 - RNA, 19 nt, Artificial Sequence
  Description of Artificial Sequence: Synthetic oligonucleotide
aacuagcuacagacccaac

SEQ ID NO: 920929 - RNA, 19 nt, Artificial Sequence
  Description of Artificial Sequence: Synthetic oligonucleotide
cucggugggcuccuuuagc

SEQ ID NO: 920930 - RNA, 19 nt, Artificial Sequence
  Description of Artificial Sequence: Synthetic oligonucleotide
guuguagacuuugucaagu

SEQ ID NO: 920931 - RNA, 19 nt, Artificial Sequence
  Description of Artificial Sequence: Synthetic oligonucleotide
gacauuccuaauccauucu

SEQ ID NO: 920932 - RNA, 19 nt, Artificial Sequence
  Description of Artificial Sequence: Synthetic oligonucleotide
agacccacggcgaugcaug

SEQ ID NO: 920933 - RNA, 19 nt, Artificial Sequence
  Description of Artificial Sequence: Synthetic oligonucleotide
acaugccagcaguaugacu

SEQ ID NO: 920934 - RNA, 19 nt, Artificial Sequence
  Description of Artificial Sequence: Synthetic oligonucleotide
cuucugccggaacgggacg

SEQ ID NO: 920935 - RNA, 19 nt, Artificial Sequence
  Description of Artificial Sequence: Synthetic oligonucleotide
gguaaaacacacaucacau

SEQ ID NO: 920936 - RNA, 19 nt, Artificial Sequence
  Description of Artificial Sequence: Synthetic oligonucleotide
cuucagccgcagaagucac

SEQ ID NO: 920937 - RNA, 19 nt, Artificial Sequence
  Description of Artificial Sequence: Synthetic oligonucleotide
caccgcuagcuccagccgc

SEQ ID NO: 920938 - RNA, 19 nt, Artificial Sequence
  Description of Artificial Sequence: Synthetic oligonucleotide
acgagcucuagagcugcgg

SEQ ID NO: 920939 - RNA, 19 nt, Artificial Sequence
  Description of Artificial Sequence: Synthetic oligonucleotide
guaugauuugagcucacuu

SEQ ID NO: 920940 - RNA, 19 nt, Artificial Sequence
  Description of Artificial Sequence: Synthetic oligonucleotide
ggggcgaccuccucguagg

SEQ ID NO: 920941 - RNA, 19 nt, Artificial Sequence
  Description of Artificial Sequence: Synthetic oligonucleotide
cucguagggaccgcacggg

SEQ ID NO: 920942 - RNA, 19 nt, Artificial Sequence
  Description of Artificial Sequence: Synthetic oligonucleotide
gacuagagcucuucuuugu

SEQ ID NO: 920943 - RNA, 19 nt, Artificial Sequence
  Description of Artificial Sequence: Synthetic oligonucleotide
agaugccgacagcaaugag

SEQ ID NO: 920944 - RNA, 19 nt, Artificial Sequence
  Description of Artificial Sequence: Synthetic oligonucleotide
gaaacucgucugauaguga

SEQ ID NO: 920945 - RNA, 19 nt, Artificial Sequence
  Description of Artificial Sequence: Synthetic oligonucleotide
gcuacagacccaacagggg

SEQ ID NO: 920946 - RNA, 19 nt, Artificial Sequence
  Description of Artificial Sequence: Synthetic oligonucleotide
caucuugaucaugccuagg

SEQ ID NO: 920947 - RNA, 19 nt, Artificial Sequence
  Description of Artificial Sequence: Synthetic oligonucleotide
cuacagacccaacaggggu

SEQ ID NO: 920948 - RNA, 19 nt, Artificial Sequence
  Description of Artificial Sequence: Synthetic oligonucleotide
cacggcgaugcaugugacc

SEQ ID NO: 920949 - RNA, 19 nt, Artificial Sequence
  Description of Artificial Sequence: Synthetic oligonucleotide
guauggcaaacagcagcag

SEQ ID NO: 920950 - RNA, 19 nt, Artificial Sequence
  Description of Artificial Sequence: Synthetic oligonucleotide
agcgaucgggaauggugcu

SEQ ID NO: 920951 - RNA, 19 nt, Artificial Sequence
  Description of Artificial Sequence: Synthetic oligonucleotide
auucacuccuggcggucca

SEQ ID NO: 920952 - RNA, 19 nt, Artificial Sequence
  Description of Artificial Sequence: Synthetic oligonucleotide
cucgucugauagugaggag

SEQ ID NO: 920953 - RNA, 19 nt, Artificial Sequence
  Description of Artificial Sequence: Synthetic oligonucleotide
ucaagucguuguagccuuc

SEQ ID NO: 920954 - RNA, 19 nt, Artificial Sequence
  Description of Artificial Sequence: Synthetic oligonucleotide
ucgaugcccugcccauugc

SEQ ID NO: 920955 - RNA, 19 nt, Artificial Sequence
  Description of Artificial Sequence: Synthetic oligonucleotide
ugcugcgaagcgccagaac

SEQ ID NO: 920956 - RNA, 19 nt, Artificial Sequence
  Description of Artificial Sequence: Synthetic oligonucleotide
acgcccgauuugaugcugc

SEQ ID NO: 920957 - RNA, 19 nt, Artificial Sequence
  Description of Artificial Sequence: Synthetic oligonucleotide
uucugccggaacgggacga

SEQ ID NO: 920958 - RNA, 19 nt, Artificial Sequence
  Description of Artificial Sequence: Synthetic oligonucleotide
cuguguaccgauggagauc

SEQ ID NO: 920959 - RNA, 19 nt, Artificial Sequence
  Description of Artificial Sequence: Synthetic oligonucleotide
gcgaccuccucguagggac

SEQ ID NO: 920960 - RNA, 19 nt, Artificial Sequence
  Description of Artificial Sequence: Synthetic oligonucleotide
cggaacgggacgaacagug

SEQ ID NO: 920961 - RNA, 19 nt, Artificial Sequence
  Description of Artificial Sequence: Synthetic oligonucleotide
ugggcuucucugcgcgcgc

SEQ ID NO: 920962 - RNA, 19 nt, Artificial Sequence
  Description of Artificial Sequence: Synthetic oligonucleotide
cacggacuugaaagucaag

SEQ ID NO: 920963 - RNA, 19 nt, Artificial Sequence
  Description of Artificial Sequence: Synthetic oligonucleotide
ucauucacuccuggcgguc

SEQ ID NO: 920964 - RNA, 19 nt, Artificial Sequence
  Description of Artificial Sequence: Synthetic oligonucleotide
ggcacgguuguagacuuug

SEQ ID NO: 920965 - RNA, 19 nt, Artificial Sequence
  Description of Artificial Sequence: Synthetic oligonucleotide
ugaucaugccuagguuggu

SEQ ID NO: 920966 - RNA, 19 nt, Artificial Sequence
  Description of Artificial Sequence: Synthetic oligonucleotide
ucgccaggagaaagaacuu

SEQ ID NO: 920967 - RNA, 19 nt, Artificial Sequence
  Description of Artificial Sequence: Synthetic oligonucleotide
ggcaggauuucauauacuu

SEQ ID NO: 920968 - RNA, 19 nt, Artificial Sequence
  Description of Artificial Sequence: Synthetic oligonucleotide
gccggaacgggacgaacag

SEQ ID NO: 920969 - RNA, 19 nt, Artificial Sequence
  Description of Artificial Sequence: Synthetic oligonucleotide
cucgcgggucccuggcgcg

SEQ ID NO: 920970 - RNA, 19 nt, Artificial Sequence
  Description of Artificial Sequence: Synthetic oligonucleotide
cgcgacaccaguacuuggg

SEQ ID NO: 920971 - RNA, 19 nt, Artificial Sequence
  Description of Artificial Sequence: Synthetic oligonucleotide
uagggaccgcacgggagcc

SEQ ID NO: 920972 - RNA, 19 nt, Artificial Sequence
  Description of Artificial Sequence: Synthetic oligonucleotide
cacgagcucuagagcugcg

SEQ ID NO: 920973 - RNA, 19 nt, Artificial Sequence
  Description of Artificial Sequence: Synthetic oligonucleotide
ggaguauggcaaacagcag

SEQ ID NO: 920974 - RNA, 19 nt, Artificial Sequence
  Description of Artificial Sequence: Synthetic oligonucleotide
guccgagaacacguacucc

SEQ ID NO: 920975 - RNA, 19 nt, Artificial Sequence
  Description of Artificial Sequence: Synthetic oligonucleotide
aucgcaccgccuuggcagu

SEQ ID NO: 920976 - RNA, 19 nt, Artificial Sequence
  Description of Artificial Sequence: Synthetic oligonucleotide
gugggcaggauuucauaua

SEQ ID NO: 920977 - RNA, 19 nt, Artificial Sequence
  Description of Artificial Sequence: Synthetic oligonucleotide
uuugccccacauucucauu

SEQ ID NO: 920978 - RNA, 19 nt, Artificial Sequence
  Description of Artificial Sequence: Synthetic oligonucleotide
caccaucgcaccgccuugg

SEQ ID NO: 920979 - RNA, 19 nt, Artificial Sequence
  Description of Artificial Sequence: Synthetic oligonucleotide
cagcuuaucuguguaccga

SEQ ID NO: 920980 - RNA, 19 nt, Artificial Sequence
  Description of Artificial Sequence: Synthetic oligonucleotide
gcgacaccaguacuugggc

SEQ ID NO: 920981 - RNA, 19 nt, Artificial Sequence
  Description of Artificial Sequence: Synthetic oligonucleotide
ccgacagcaaugagcuugc

SEQ ID NO: 920982 - RNA, 19 nt, Artificial Sequence
  Description of Artificial Sequence: Synthetic oligonucleotide
uucccuucccgggcucccg

SEQ ID NO: 920983 - RNA, 19 nt, Artificial Sequence
  Description of Artificial Sequence: Synthetic oligonucleotide
gacgcccgauuugaugcug

SEQ ID NO: 920984 - RNA, 19 nt, Artificial Sequence
  Description of Artificial Sequence: Synthetic oligonucleotide
cagcaguaugaauccacaa

SEQ ID NO: 920985 - RNA, 19 nt, Artificial Sequence
  Description of Artificial Sequence: Synthetic oligonucleotide
cuccucguagggaccgcac

SEQ ID NO: 920986 - RNA, 19 nt, Artificial Sequence
  Description of Artificial Sequence: Synthetic oligonucleotide
gaaguggcuuucagauauc

SEQ ID NO: 920987 - RNA, 19 nt, Artificial Sequence
  Description of Artificial Sequence: Synthetic oligonucleotide
ggcgcacgagcucuagagc

SEQ ID NO: 920988 - RNA, 19 nt, Artificial Sequence
  Description of Artificial Sequence: Synthetic oligonucleotide
ccgggcaggcccaccaucg

SEQ ID NO: 920989 - RNA, 19 nt, Artificial Sequence
  Description of Artificial Sequence: Synthetic oligonucleotide
cuucucugcgcgcgcagga

SEQ ID NO: 920990 - RNA, 19 nt, Artificial Sequence
  Description of Artificial Sequence: Synthetic oligonucleotide
cucugcgcgcgcaggagca

SEQ ID NO: 920991 - RNA, 19 nt, Artificial Sequence
  Description of Artificial Sequence: Synthetic oligonucleotide
gagcuugcacuggaagcga

SEQ ID NO: 920992 - RNA, 19 nt, Artificial Sequence
  Description of Artificial Sequence: Synthetic oligonucleotide
cuauuagggccugguaaaa

SEQ ID NO: 920993 - RNA, 19 nt, Artificial Sequence
  Description of Artificial Sequence: Synthetic oligonucleotide
agaaguccgagaacacgua

SEQ ID NO: 920994 - RNA, 19 nt, Artificial Sequence
  Description of Artificial Sequence: Synthetic oligonucleotide
caagucguuguagccuuca

SEQ ID NO: 920995 - RNA, 19 nt, Artificial Sequence
  Description of Artificial Sequence: Synthetic oligonucleotide
gaccgcacgggagccgcag

SEQ ID NO: 920996 - RNA, 19 nt, Artificial Sequence
  Description of Artificial Sequence: Synthetic oligonucleotide
agcccucgcgggucccugg

SEQ ID NO: 920997 - RNA, 19 nt, Artificial Sequence
  Description of Artificial Sequence: Synthetic oligonucleotide
caagucccgagcgcucuug

SEQ ID NO: 920998 - RNA, 19 nt, Artificial Sequence
  Description of Artificial Sequence: Synthetic oligonucleotide
gcuuaucuguguaccgaug

SEQ ID NO: 920999 - RNA, 19 nt, Artificial Sequence
  Description of Artificial Sequence: Synthetic oligonucleotide
uggcgcgcgcgacaccagu

SEQ ID NO: 921000 - RNA, 19 nt, Artificial Sequence
  Description of Artificial Sequence: Synthetic oligonucleotide
gaucgggaauggugcuguc

SEQ ID NO: 921001 - RNA, 19 nt, Artificial Sequence
  Description of Artificial Sequence: Synthetic oligonucleotide
cagauaucucccacagacu

SEQ ID NO: 921002 - RNA, 19 nt, Artificial Sequence
  Description of Artificial Sequence: Synthetic oligonucleotide
gagcauacaccaugagguu

SEQ ID NO: 921003 - RNA, 19 nt, Artificial Sequence
  Description of Artificial Sequence: Synthetic oligonucleotide
accuccucguagggaccgc

SEQ ID NO: 921004 - RNA, 19 nt, Artificial Sequence
  Description of Artificial Sequence: Synthetic oligonucleotide
ucugccggaacgggacgaa

SEQ ID NO: 921005 - RNA, 19 nt, Artificial Sequence
  Description of Artificial Sequence: Synthetic oligonucleotide
agggcgcacgagcucuaga

SEQ ID NO: 921006 - RNA, 19 nt, Artificial Sequence
  Description of Artificial Sequence: Synthetic oligonucleotide
cucguuuugcagggagcuc

SEQ ID NO: 921007 - RNA, 19 nt, Artificial Sequence
  Description of Artificial Sequence: Synthetic oligonucleotide
accgcuagcuccagccgca

SEQ ID NO: 921008 - RNA, 19 nt, Artificial Sequence
  Description of Artificial Sequence: Synthetic oligonucleotide
uguccaccgcuagcuccag

SEQ ID NO: 921009 - RNA, 19 nt, Artificial Sequence
  Description of Artificial Sequence: Synthetic oligonucleotide
cuccaauguuuguuguagu

SEQ ID NO: 921010 - RNA, 19 nt, Artificial Sequence
  Description of Artificial Sequence: Synthetic oligonucleotide
cucauucacuccuggcggu

SEQ ID NO: 921011 - RNA, 19 nt, Artificial Sequence
  Description of Artificial Sequence: Synthetic oligonucleotide
ggcgaugcaugugaccauc

SEQ ID NO: 921012 - RNA, 19 nt, Artificial Sequence
  Description of Artificial Sequence: Synthetic oligonucleotide
gcgcgacaccaguacuugg

SEQ ID NO: 921013 - RNA, 19 nt, Artificial Sequence
  Description of Artificial Sequence: Synthetic oligonucleotide
gcgcacgagcucuagagcu

SEQ ID NO: 921014 - RNA, 19 nt, Artificial Sequence
  Description of Artificial Sequence: Synthetic oligonucleotide
gcucacacccugugcccag

SEQ ID NO: 921015 - RNA, 19 nt, Artificial Sequence
  Description of Artificial Sequence: Synthetic oligonucleotide
cccacggcgaugcauguga

SEQ ID NO: 921016 - RNA, 19 nt, Artificial Sequence
  Description of Artificial Sequence: Synthetic oligonucleotide
cagccggcagcuaauguau

SEQ ID NO: 921017 - RNA, 19 nt, Artificial Sequence
  Description of Artificial Sequence: Synthetic oligonucleotide
ccugucgccaggagaaaga

SEQ ID NO: 921018 - RNA, 19 nt, Artificial Sequence
  Description of Artificial Sequence: Synthetic oligonucleotide
cagaagucacggacuugaa

SEQ ID NO: 921019 - RNA, 19 nt, Artificial Sequence
  Description of Artificial Sequence: Synthetic oligonucleotide
ccagcaguaugacugcaaa

SEQ ID NO: 921020 - RNA, 19 nt, Artificial Sequence
  Description of Artificial Sequence: Synthetic oligonucleotide
gccugucgccaggagaaag

SEQ ID NO: 921021 - RNA, 19 nt, Artificial Sequence
  Description of Artificial Sequence: Synthetic oligonucleotide
cugucgccaggagaaagaa

SEQ ID NO: 921022 - RNA, 19 nt, Artificial Sequence
  Description of Artificial Sequence: Synthetic oligonucleotide
ggggcgaggcgccgggucc

SEQ ID NO: 921023 - RNA, 19 nt, Artificial Sequence
  Description of Artificial Sequence: Synthetic oligonucleotide
cuucccgggcucccgggca

SEQ ID NO: 921024 - RNA, 19 nt, Artificial Sequence
  Description of Artificial Sequence: Synthetic oligonucleotide
cagcgugggcagguacagg

SEQ ID NO: 921025 - RNA, 19 nt, Artificial Sequence
  Description of Artificial Sequence: Synthetic oligonucleotide
aggcagacccacggcgaug

SEQ ID NO: 921026 - RNA, 19 nt, Artificial Sequence
  Description of Artificial Sequence: Synthetic oligonucleotide
ggcuucucugcgcgcgcag

SEQ ID NO: 921027 - RNA, 19 nt, Artificial Sequence
  Description of Artificial Sequence: Synthetic oligonucleotide
gcgcucacacccugugccc

SEQ ID NO: 921028 - RNA, 19 nt, Artificial Sequence
  Description of Artificial Sequence: Synthetic oligonucleotide
ucucggcgcgccgggugcc

SEQ ID NO: 921029 - RNA, 19 nt, Artificial Sequence
  Description of Artificial Sequence: Synthetic oligonucleotide
agcuugcacuggaagcgau

SEQ ID NO: 921030 - RNA, 19 nt, Artificial Sequence
  Description of Artificial Sequence: Synthetic oligonucleotide
ccaauguuuguuguagugu

SEQ ID NO: 921031 - RNA, 19 nt, Artificial Sequence
  Description of Artificial Sequence: Synthetic oligonucleotide
ccucgcgggucccuggcgc

SEQ ID NO: 921032 - RNA, 19 nt, Artificial Sequence
  Description of Artificial Sequence: Synthetic oligonucleotide
cugccggaacgggacgaac

SEQ ID NO: 921033 - RNA, 19 nt, Artificial Sequence
  Description of Artificial Sequence: Synthetic oligonucleotide
acccacggcgaugcaugug

SEQ ID NO: 921034 - RNA, 19 nt, Artificial Sequence
  Description of Artificial Sequence: Synthetic oligonucleotide
gggcgaccuccucguaggg

SEQ ID NO: 921035 - RNA, 19 nt, Artificial Sequence
  Description of Artificial Sequence: Synthetic oligonucleotide
cuggcgcgcgcgacaccag

SEQ ID NO: 921036 - RNA, 19 nt, Artificial Sequence
  Description of Artificial Sequence: Synthetic oligonucleotide
ggccagcgagaugagcagc

SEQ ID NO: 921037 - RNA, 19 nt, Artificial Sequence
  Description of Artificial Sequence: Synthetic oligonucleotide
gcgaucgggaauggugcug

SEQ ID NO: 921038 - RNA, 19 nt, Artificial Sequence
  Description of Artificial Sequence: Synthetic oligonucleotide
gggaccgcacgggagccgc

SEQ ID NO: 921039 - RNA, 19 nt, Artificial Sequence
  Description of Artificial Sequence: Synthetic oligonucleotide
cagguccgucucucagguc

SEQ ID NO: 921040 - RNA, 19 nt, Artificial Sequence
  Description of Artificial Sequence: Synthetic oligonucleotide
cucuagagcugcggcugca

SEQ ID NO: 921041 - RNA, 19 nt, Artificial Sequence
  Description of Artificial Sequence: Synthetic oligonucleotide
gacccacggcgaugcaugu

SEQ ID NO: 921042 - RNA, 19 nt, Artificial Sequence
  Description of Artificial Sequence: Synthetic oligonucleotide
cgcacgagcucuagagcug

SEQ ID NO: 921043 - RNA, 19 nt, Artificial Sequence
  Description of Artificial Sequence: Synthetic oligonucleotide
cagaacagcgugggcaggu

SEQ ID NO: 921044 - RNA, 19 nt, Artificial Sequence
  Description of Artificial Sequence: Synthetic oligonucleotide
ugccgacagcaaugagcuu

SEQ ID NO: 921045 - RNA, 19 nt, Artificial Sequence
  Description of Artificial Sequence: Synthetic oligonucleotide
uggcagucgcuggggcgac

SEQ ID NO: 921046 - RNA, 19 nt, Artificial Sequence
  Description of Artificial Sequence: Synthetic oligonucleotide
gggucaccggccgggcgcg

SEQ ID NO: 921047 - RNA, 19 nt, Artificial Sequence
  Description of Artificial Sequence: Synthetic oligonucleotide
gcgcgcgcgacaccaguac

SEQ ID NO: 921048 - RNA, 19 nt, Artificial Sequence
  Description of Artificial Sequence: Synthetic oligonucleotide
gcaccuuaagacacuugua

SEQ ID NO: 921049 - RNA, 19 nt, Artificial Sequence
  Description of Artificial Sequence: Synthetic oligonucleotide
ccaccaucgcaccgccuug

SEQ ID NO: 921050 - RNA, 19 nt, Artificial Sequence
  Description of Artificial Sequence: Synthetic oligonucleotide
gggacauuccuaauccauu

SEQ ID NO: 921051 - RNA, 19 nt, Artificial Sequence
  Description of Artificial Sequence: Synthetic oligonucleotide
gcuggggcgaccuccucgu

SEQ ID NO: 921052 - RNA, 19 nt, Artificial Sequence
  Description of Artificial Sequence: Synthetic oligonucleotide
ccacggcgaugcaugugac

SEQ ID NO: 921053 - RNA, 19 nt, Artificial Sequence
  Description of Artificial Sequence: Synthetic oligonucleotide
cgggucaccggccgggcgc

SEQ ID NO: 921054 - RNA, 19 nt, Artificial Sequence
  Description of Artificial Sequence: Synthetic oligonucleotide
cacagacuuugccccacau

SEQ ID NO: 921055 - RNA, 19 nt, Artificial Sequence
  Description of Artificial Sequence: Synthetic oligonucleotide
cccgagcgcucuuggcagc

SEQ ID NO: 921056 - RNA, 19 nt, Artificial Sequence
  Description of Artificial Sequence: Synthetic oligonucleotide
gccggggcgaggcgccggg

SEQ ID NO: 921057 - RNA, 19 nt, Artificial Sequence
  Description of Artificial Sequence: Synthetic oligonucleotide
ggcgaccuccucguaggga

SEQ ID NO: 921058 - RNA, 19 nt, Artificial Sequence
  Description of Artificial Sequence: Synthetic oligonucleotide
agccugucgccaggagaaa

SEQ ID NO: 921059 - RNA, 19 nt, Artificial Sequence
  Description of Artificial Sequence: Synthetic oligonucleotide
ucgcaccgccuuggcaguc

SEQ ID NO: 921060 - RNA, 19 nt, Artificial Sequence
  Description of Artificial Sequence: Synthetic oligonucleotide
cgaccuccucguagggacc

SEQ ID NO: 921061 - RNA, 19 nt, Artificial Sequence
  Description of Artificial Sequence: Synthetic oligonucleotide
gccagcaguaugacugcaa

SEQ ID NO: 921062 - RNA, 19 nt, Artificial Sequence
  Description of Artificial Sequence: Synthetic oligonucleotide
cagucgcuggggcgaccuc

SEQ ID NO: 921063 - RNA, 19 nt, Artificial Sequence
  Description of Artificial Sequence: Synthetic oligonucleotide
ccagguccgucucucaggu

SEQ ID NO: 921064 - RNA, 19 nt, Artificial Sequence
  Description of Artificial Sequence: Synthetic oligonucleotide
ccgagcgcucuuggcagcc

SEQ ID NO: 921065 - RNA, 19 nt, Artificial Sequence
  Description of Artificial Sequence: Synthetic oligonucleotide
ccuggcgcgcgcgacacca

SEQ ID NO: 921066 - RNA, 19 nt, Artificial Sequence
  Description of Artificial Sequence: Synthetic oligonucleotide
gcccucgcgggucccuggc

SEQ ID NO: 921067 - RNA, 19 nt, Artificial Sequence
  Description of Artificial Sequence: Synthetic oligonucleotide
accggccgggcgcguggcu

SEQ ID NO: 921068 - RNA, 19 nt, Artificial Sequence
  Description of Artificial Sequence: Synthetic oligonucleotide
ggaacgggacgaacagugu

SEQ ID NO: 921069 - RNA, 19 nt, Artificial Sequence
  Description of Artificial Sequence: Synthetic oligonucleotide
gcgccagaacagcgugggc

SEQ ID NO: 921070 - RNA, 19 nt, Artificial Sequence
  Description of Artificial Sequence: Synthetic oligonucleotide
cagcccucgcgggucccug

SEQ ID NO: 921071 - RNA, 19 nt, Artificial Sequence
  Description of Artificial Sequence: Synthetic oligonucleotide
cgcgcgacaccaguacuug

SEQ ID NO: 921072 - RNA, 19 nt, Artificial Sequence
  Description of Artificial Sequence: Synthetic oligonucleotide
agccggcagcuaauguauu

SEQ ID NO: 921073 - RNA, 19 nt, Artificial Sequence
  Description of Artificial Sequence: Synthetic oligonucleotide
ggacgcccgauuugaugcu

SEQ ID NO: 921074 - RNA, 19 nt, Artificial Sequence
  Description of Artificial Sequence: Synthetic oligonucleotide
ccaucgcaccgccuuggca

SEQ ID NO: 921075 - RNA, 19 nt, Artificial Sequence
  Description of Artificial Sequence: Synthetic oligonucleotide
cccucgcgggucccuggcg

SEQ ID NO: 921076 - RNA, 19 nt, Artificial Sequence
  Description of Artificial Sequence: Synthetic oligonucleotide
caccggccgggcgcguggc

SEQ ID NO: 921077 - RNA, 19 nt, Artificial Sequence
  Description of Artificial Sequence: Synthetic oligonucleotide
gucgcuggggcgaccuccu

SEQ ID NO: 921078 - RNA, 19 nt, Artificial Sequence
  Description of Artificial Sequence: Synthetic oligonucleotide
ggaagcgaucgggaauggu

SEQ ID NO: 921079 - RNA, 19 nt, Artificial Sequence
  Description of Artificial Sequence: Synthetic oligonucleotide
gccgggugccgcgggacug

SEQ ID NO: 921080 - RNA, 19 nt, Artificial Sequence
  Description of Artificial Sequence: Synthetic oligonucleotide
cgcgggacuggcagccgag

SEQ ID NO: 921081 - RNA, 19 nt, Artificial Sequence
  Description of Artificial Sequence: Synthetic oligonucleotide
gcgcgggugcugcgggcag

SEQ ID NO: 921082 - RNA, 19 nt, Artificial Sequence
  Description of Artificial Sequence: Synthetic oligonucleotide
ccgagggcaggcgcgggug

SEQ ID NO: 921083 - RNA, 19 nt, Artificial Sequence
  Description of Artificial Sequence: Synthetic oligonucleotide
ccgggugccgcgggacugg

SEQ ID NO: 921084 - RNA, 19 nt, Artificial Sequence
  Description of Artificial Sequence: Synthetic oligonucleotide
cgaagcgccagaacagcgu

SEQ ID NO: 921085 - RNA, 19 nt, Artificial Sequence
  Description of Artificial Sequence: Synthetic oligonucleotide
ggcgcgccgggugccgcgg

SEQ ID NO: 921086 - RNA, 19 nt, Artificial Sequence
  Description of Artificial Sequence: Synthetic oligonucleotide
gcccagcaguaugaaucca

SEQ ID NO: 921087 - RNA, 19 nt, Artificial Sequence
  Description of Artificial Sequence: Synthetic oligonucleotide
ccgggcgcguggcuuccgc

SEQ ID NO: 921088 - RNA, 19 nt, Artificial Sequence
  Description of Artificial Sequence: Synthetic oligonucleotide
gguuggucaggagcagcau

SEQ ID NO: 921089 - RNA, 19 nt, Artificial Sequence
  Description of Artificial Sequence: Synthetic oligonucleotide
cccaccaucgcaccgccuu

SEQ ID NO: 921090 - RNA, 19 nt, Artificial Sequence
  Description of Artificial Sequence: Synthetic oligonucleotide
gcagucgcuggggcgaccu

SEQ ID NO: 921091 - RNA, 19 nt, Artificial Sequence
  Description of Artificial Sequence: Synthetic oligonucleotide
gcgcguggcuuccgcuuuc

SEQ ID NO: 921092 - RNA, 19 nt, Artificial Sequence
  Description of Artificial Sequence: Synthetic oligonucleotide
gggaugccccaggcugcgc

SEQ ID NO: 921093 - RNA, 19 nt, Artificial Sequence
  Description of Artificial Sequence: Synthetic oligonucleotide
caucgaaggugggcaggau

SEQ ID NO: 921094 - RNA, 19 nt, Artificial Sequence
  Description of Artificial Sequence: Synthetic oligonucleotide
ccuccucguagggaccgca

SEQ ID NO: 921095 - RNA, 19 nt, Artificial Sequence
  Description of Artificial Sequence: Synthetic oligonucleotide
ggcgcguggcuuccgcuuu

SEQ ID NO: 921096 - RNA, 19 nt, Artificial Sequence
  Description of Artificial Sequence: Synthetic oligonucleotide
cgaucgggaauggugcugu

SEQ ID NO: 921097 - RNA, 19 nt, Artificial Sequence
  Description of Artificial Sequence: Synthetic oligonucleotide
gcgcgccgggugccgcggg

SEQ ID NO: 921098 - RNA, 19 nt, Artificial Sequence
  Description of Artificial Sequence: Synthetic oligonucleotide
cgcccgauuugaugcugca

SEQ ID NO: 921099 - RNA, 19 nt, Artificial Sequence
  Description of Artificial Sequence: Synthetic oligonucleotide
cgcacgggagccgcagcug

SEQ ID NO: 921100 - RNA, 19 nt, Artificial Sequence
  Description of Artificial Sequence: Synthetic oligonucleotide
cuggggcgaccuccucgua

SEQ ID NO: 921101 - RNA, 19 nt, Artificial Sequence
  Description of Artificial Sequence: Synthetic oligonucleotide
gggcgcguggcuuccgcuu

SEQ ID NO: 921102 - RNA, 19 nt, Artificial Sequence
  Description of Artificial Sequence: Synthetic oligonucleotide
ccgcagaagucacggacuu

SEQ ID NO: 921103 - RNA, 19 nt, Artificial Sequence
  Description of Artificial Sequence: Synthetic oligonucleotide
gccgggcgcguggcuuccg

SEQ ID NO: 921104 - RNA, 19 nt, Artificial Sequence
  Description of Artificial Sequence: Synthetic oligonucleotide
cccuggcgcgcgcgacacc

SEQ ID NO: 921105 - RNA, 19 nt, Artificial Sequence
  Description of Artificial Sequence: Synthetic oligonucleotide
gcgcgcgacaccaguacuu

SEQ ID NO: 921106 - RNA, 19 nt, Artificial Sequence
  Description of Artificial Sequence: Synthetic oligonucleotide
ccgcacgggagccgcagcu

SEQ ID NO: 921107 - RNA, 19 nt, Artificial Sequence
  Description of Artificial Sequence: Synthetic oligonucleotide
cgggucccuggcgcgcgcg

SEQ ID NO: 921108 - RNA, 19 nt, Artificial Sequence
  Description of Artificial Sequence: Synthetic oligonucleotide
ggcgaggcgccggguccuc

SEQ ID NO: 921109 - RNA, 19 nt, Artificial Sequence
  Description of Artificial Sequence: Synthetic oligonucleotide
cgcagggcgcacgagcucu

SEQ ID NO: 921110 - RNA, 19 nt, Artificial Sequence
  Description of Artificial Sequence: Synthetic oligonucleotide
ccggaacgggacgaacagu

SEQ ID NO: 921111 - RNA, 19 nt, Artificial Sequence
  Description of Artificial Sequence: Synthetic oligonucleotide
gcagggcgcacgagcucua

SEQ ID NO: 921112 - RNA, 19 nt, Artificial Sequence
  Description of Artificial Sequence: Synthetic oligonucleotide
cgcgcgcgacaccaguacu

SEQ ID NO: 921113 - RNA, 19 nt, Artificial Sequence
  Description of Artificial Sequence: Synthetic oligonucleotide
ccagcccucgcgggucccu

SEQ ID NO: 921114 - RNA, 19 nt, Artificial Sequence
  Description of Artificial Sequence: Synthetic oligonucleotide
ggucaccggccgggcgcgu

SEQ ID NO: 921115 - RNA, 19 nt, Artificial Sequence
  Description of Artificial Sequence: Synthetic oligonucleotide
aauucaagcagucaguccc

SEQ ID NO: 921116 - RNA, 19 nt, Artificial Sequence
  Description of Artificial Sequence: Synthetic oligonucleotide
aaaacuacugauuacuggc

SEQ ID NO: 921117 - RNA, 19 nt, Artificial Sequence
  Description of Artificial Sequence: Synthetic oligonucleotide
aaacauaguagguauacac

SEQ ID NO: 921118 - RNA, 19 nt, Artificial Sequence
  Description of Artificial Sequence: Synthetic oligonucleotide
aauaguagugaguugagag

SEQ ID NO: 921119 - RNA, 19 nt, Artificial Sequence
  Description of Artificial Sequence: Synthetic oligonucleotide
aauagaaucaaugauuauc

SEQ ID NO: 921120 - RNA, 19 nt, Artificial Sequence
  Description of Artificial Sequence: Synthetic oligonucleotide
aaaugggugaaauaaaaug

SEQ ID NO: 921121 - RNA, 19 nt, Artificial Sequence
  Description of Artificial Sequence: Synthetic oligonucleotide
ucuuaauuugguaaguccg

SEQ ID NO: 921122 - RNA, 19 nt, Artificial Sequence
  Description of Artificial Sequence: Synthetic oligonucleotide
aagaauguuaaugugagag

SEQ ID NO: 921123 - RNA, 19 nt, Artificial Sequence
  Description of Artificial Sequence: Synthetic oligonucleotide
aguguuaccauaauuaggc

SEQ ID NO: 921124 - RNA, 19 nt, Artificial Sequence
  Description of Artificial Sequence: Synthetic oligonucleotide
aacaaaugcaugaauaaac

SEQ ID NO: 921125 - RNA, 19 nt, Artificial Sequence
  Description of Artificial Sequence: Synthetic oligonucleotide
agaaaauucaagcagucag

SEQ ID NO: 921126 - RNA, 19 nt, Artificial Sequence
  Description of Artificial Sequence: Synthetic oligonucleotide
aauucgucuggguagcugc

SEQ ID NO: 921127 - RNA, 19 nt, Artificial Sequence
  Description of Artificial Sequence: Synthetic oligonucleotide
aaugcuaauucccaaaaga

SEQ ID NO: 921128 - RNA, 19 nt, Artificial Sequence
  Description of Artificial Sequence: Synthetic oligonucleotide
uaacgcaucgccauaaugg

SEQ ID NO: 921129 - RNA, 19 nt, Artificial Sequence
  Description of Artificial Sequence: Synthetic oligonucleotide
ugcaagaaaauucaagcag

SEQ ID NO: 921130 - RNA, 19 nt, Artificial Sequence
  Description of Artificial Sequence: Synthetic oligonucleotide
uuaauacuacaaaauacag

SEQ ID NO: 921131 - RNA, 19 nt, Artificial Sequence
  Description of Artificial Sequence: Synthetic oligonucleotide
augauuaucuguuuuggac

SEQ ID NO: 921132 - RNA, 19 nt, Artificial Sequence
  Description of Artificial Sequence: Synthetic oligonucleotide
uaacacaugucaaaguagg

SEQ ID NO: 921133 - RNA, 19 nt, Artificial Sequence
  Description of Artificial Sequence: Synthetic oligonucleotide
aauaaagggagaacggacc

SEQ ID NO: 921134 - RNA, 19 nt, Artificial Sequence
  Description of Artificial Sequence: Synthetic oligonucleotide
aauacgaugccuccuauga

SEQ ID NO: 921135 - RNA, 19 nt, Artificial Sequence
  Description of Artificial Sequence: Synthetic oligonucleotide
acauauaaacaccauagug

SEQ ID NO: 921136 - RNA, 19 nt, Artificial Sequence
  Description of Artificial Sequence: Synthetic oligonucleotide
aacgcaucgccauaauggc

SEQ ID NO: 921137 - RNA, 19 nt, Artificial Sequence
  Description of Artificial Sequence: Synthetic oligonucleotide
auaguagugaguugagagc

SEQ ID NO: 921138 - RNA, 19 nt, Artificial Sequence
  Description of Artificial Sequence: Synthetic oligonucleotide
aagauaaaacuacugauua

SEQ ID NO: 921139 - RNA, 19 nt, Artificial Sequence
  Description of Artificial Sequence: Synthetic oligonucleotide
aaauaaagggagaacggac

SEQ ID NO: 921140 - RNA, 19 nt, Artificial Sequence
  Description of Artificial Sequence: Synthetic oligonucleotide
agaauguuaaugugagagc

SEQ ID NO: 921141 - RNA, 19 nt, Artificial Sequence
  Description of Artificial Sequence: Synthetic oligonucleotide
uuaguuguaauguacacua

SEQ ID NO: 921142 - RNA, 19 nt, Artificial Sequence
  Description of Artificial Sequence: Synthetic oligonucleotide
aacaauaguagugaguuga

SEQ ID NO: 921143 - RNA, 19 nt, Artificial Sequence
  Description of Artificial Sequence: Synthetic oligonucleotide
uauggcauguuauugauaa

SEQ ID NO: 921144 - RNA, 19 nt, Artificial Sequence
  Description of Artificial Sequence: Synthetic oligonucleotide
cauaucuuaagcugaauac

SEQ ID NO: 921145 - RNA, 19 nt, Artificial Sequence
  Description of Artificial Sequence: Synthetic oligonucleotide
ucgguuauaacgcaucgcc

SEQ ID NO: 921146 - RNA, 19 nt, Artificial Sequence
  Description of Artificial Sequence: Synthetic oligonucleotide
gaaguguuaccauaauuag

SEQ ID NO: 921147 - RNA, 19 nt, Artificial Sequence
  Description of Artificial Sequence: Synthetic oligonucleotide
cagucagucgguuauaacg

SEQ ID NO: 921148 - RNA, 19 nt, Artificial Sequence
  Description of Artificial Sequence: Synthetic oligonucleotide
uucucuguugguaugaacu

SEQ ID NO: 921149 - RNA, 19 nt, Artificial Sequence
  Description of Artificial Sequence: Synthetic oligonucleotide
aaggaaauguuuaagagau

SEQ ID NO: 921150 - RNA, 19 nt, Artificial Sequence
  Description of Artificial Sequence: Synthetic oligonucleotide
cauuuaagaguuugguucg

SEQ ID NO: 921151 - RNA, 19 nt, Artificial Sequence
  Description of Artificial Sequence: Synthetic oligonucleotide
uaguagugaguugagagcg

SEQ ID NO: 921152 - RNA, 19 nt, Artificial Sequence
  Description of Artificial Sequence: Synthetic oligonucleotide
ggugaaauaaaaugcaacc

SEQ ID NO: 921153 - RNA, 19 nt, Artificial Sequence
  Description of Artificial Sequence: Synthetic oligonucleotide
agugaguugagagcgaucg

SEQ ID NO: 921154 - RNA, 19 nt, Artificial Sequence
  Description of Artificial Sequence: Synthetic oligonucleotide
aaaugcuaauucccaaaag

SEQ ID NO: 921155 - RNA, 19 nt, Artificial Sequence
  Description of Artificial Sequence: Synthetic oligonucleotide
agugcauaagcaauguccc

SEQ ID NO: 921156 - RNA, 19 nt, Artificial Sequence
  Description of Artificial Sequence: Synthetic oligonucleotide
guuuaagagauacauauaa

SEQ ID NO: 921157 - RNA, 19 nt, Artificial Sequence
  Description of Artificial Sequence: Synthetic oligonucleotide
aaugucuugucaccaagcu

SEQ ID NO: 921158 - RNA, 19 nt, Artificial Sequence
  Description of Artificial Sequence: Synthetic oligonucleotide
guuaccauaauuaggcuag

SEQ ID NO: 921159 - RNA, 19 nt, Artificial Sequence
  Description of Artificial Sequence: Synthetic oligonucleotide
cacaugucaaaguaggggc

SEQ ID NO: 921160 - RNA, 19 nt, Artificial Sequence
  Description of Artificial Sequence: Synthetic oligonucleotide
ugcaauggauaacacaugu

SEQ ID NO: 921161 - RNA, 19 nt, Artificial Sequence
  Description of Artificial Sequence: Synthetic oligonucleotide
aaugggucaaacuuacaaa

SEQ ID NO: 921162 - RNA, 19 nt, Artificial Sequence
  Description of Artificial Sequence: Synthetic oligonucleotide
aaugauuaucuguuuugga

SEQ ID NO: 921163 - RNA, 19 nt, Artificial Sequence
  Description of Artificial Sequence: Synthetic oligonucleotide
uauauuggguguccuaccc

SEQ ID NO: 921164 - RNA, 19 nt, Artificial Sequence
  Description of Artificial Sequence: Synthetic oligonucleotide
ugcuaauucccaaaagaca

SEQ ID NO: 921165 - RNA, 19 nt, Artificial Sequence
  Description of Artificial Sequence: Synthetic oligonucleotide
ucucucuuaauuugguaag

SEQ ID NO: 921166 - RNA, 19 nt, Artificial Sequence
  Description of Artificial Sequence: Synthetic oligonucleotide
aaaaccagaaucugggcuu

SEQ ID NO: 921167 - RNA, 19 nt, Artificial Sequence
  Description of Artificial Sequence: Synthetic oligonucleotide
auagaaucaaugauuaucu

SEQ ID NO: 921168 - RNA, 19 nt, Artificial Sequence
  Description of Artificial Sequence: Synthetic oligonucleotide
accgggacagacuagccgc

SEQ ID NO: 921169 - RNA, 19 nt, Artificial Sequence
  Description of Artificial Sequence: Synthetic oligonucleotide
gauaacacaugucaaagua

SEQ ID NO: 921170 - RNA, 19 nt, Artificial Sequence
  Description of Artificial Sequence: Synthetic oligonucleotide
aguuguaauguacacuaug

SEQ ID NO: 921171 - RNA, 19 nt, Artificial Sequence
  Description of Artificial Sequence: Synthetic oligonucleotide
uuuauauuggguguccuac

SEQ ID NO: 921172 - RNA, 19 nt, Artificial Sequence
  Description of Artificial Sequence: Synthetic oligonucleotide
aaguguuaccauaauuagg

SEQ ID NO: 921173 - RNA, 19 nt, Artificial Sequence
  Description of Artificial Sequence: Synthetic oligonucleotide
acuuuuaguuguaauguac

SEQ ID NO: 921174 - RNA, 19 nt, Artificial Sequence
  Description of Artificial Sequence: Synthetic oligonucleotide
ugaauacagaugaacggcu

SEQ ID NO: 921175 - RNA, 19 nt, Artificial Sequence
  Description of Artificial Sequence: Synthetic oligonucleotide
auaaaccccaaauucgucu

SEQ ID NO: 921176 - RNA, 19 nt, Artificial Sequence
  Description of Artificial Sequence: Synthetic oligonucleotide
uuuuaguuguaauguacac

SEQ ID NO: 921177 - RNA, 19 nt, Artificial Sequence
  Description of Artificial Sequence: Synthetic oligonucleotide
agggagaacggaccuagcc

SEQ ID NO: 921178 - RNA, 19 nt, Artificial Sequence
  Description of Artificial Sequence: Synthetic oligonucleotide
uggauaacacaugucaaag

SEQ ID NO: 921179 - RNA, 19 nt, Artificial Sequence
  Description of Artificial Sequence: Synthetic oligonucleotide
auaguauucucucuuaauu

SEQ ID NO: 921180 - RNA, 19 nt, Artificial Sequence
  Description of Artificial Sequence: Synthetic oligonucleotide
agucagucgguuauaacgc

SEQ ID NO: 921181 - RNA, 19 nt, Artificial Sequence
  Description of Artificial Sequence: Synthetic oligonucleotide
ugaaacauaguagguauac

SEQ ID NO: 921182 - RNA, 19 nt, Artificial Sequence
  Description of Artificial Sequence: Synthetic oligonucleotide
caauggauaacacauguca

SEQ ID NO: 921183 - RNA, 19 nt, Artificial Sequence
  Description of Artificial Sequence: Synthetic oligonucleotide
gcugcaagaaaauucaagc

SEQ ID NO: 921184 - RNA, 19 nt, Artificial Sequence
  Description of Artificial Sequence: Synthetic oligonucleotide
auaauuaggcuagagaaaa

SEQ ID NO: 921185 - RNA, 19 nt, Artificial Sequence
  Description of Artificial Sequence: Synthetic oligonucleotide
acugcuacaccauagggau

SEQ ID NO: 921186 - RNA, 19 nt, Artificial Sequence
  Description of Artificial Sequence: Synthetic oligonucleotide
aaaacucauaagucagacu

SEQ ID NO: 921187 - RNA, 19 nt, Artificial Sequence
  Description of Artificial Sequence: Synthetic oligonucleotide
uuaagaguuugguucguug

SEQ ID NO: 921188 - RNA, 19 nt, Artificial Sequence
  Description of Artificial Sequence: Synthetic oligonucleotide
augcuaauucccaaaagac

SEQ ID NO: 921189 - RNA, 19 nt, Artificial Sequence
  Description of Artificial Sequence: Synthetic oligonucleotide
gauuaaaugggucaaacuu

SEQ ID NO: 921190 - RNA, 19 nt, Artificial Sequence
  Description of Artificial Sequence: Synthetic oligonucleotide
aauuugguaaguccguguu

SEQ ID NO: 921191 - RNA, 19 nt, Artificial Sequence
  Description of Artificial Sequence: Synthetic oligonucleotide
ugcgcuaucauccuuccuc

SEQ ID NO: 921192 - RNA, 19 nt, Artificial Sequence
  Description of Artificial Sequence: Synthetic oligonucleotide
aacggaccuagccaacaac

SEQ ID NO: 921193 - RNA, 19 nt, Artificial Sequence
  Description of Artificial Sequence: Synthetic oligonucleotide
acacaugucaaaguagggg

SEQ ID NO: 921194 - RNA, 19 nt, Artificial Sequence
  Description of Artificial Sequence: Synthetic oligonucleotide
ugacuguuguggcauagcc

SEQ ID NO: 921195 - RNA, 19 nt, Artificial Sequence
  Description of Artificial Sequence: Synthetic oligonucleotide
auguacacuauguacagaa

SEQ ID NO: 921196 - RNA, 19 nt, Artificial Sequence
  Description of Artificial Sequence: Synthetic oligonucleotide
cugaauacagaugaacggc

SEQ ID NO: 921197 - RNA, 19 nt, Artificial Sequence
  Description of Artificial Sequence: Synthetic oligonucleotide
uuuaguuguaauguacacu

SEQ ID NO: 921198 - RNA, 19 nt, Artificial Sequence
  Description of Artificial Sequence: Synthetic oligonucleotide
aguagguauacacccuggg

SEQ ID NO: 921199 - RNA, 19 nt, Artificial Sequence
  Description of Artificial Sequence: Synthetic oligonucleotide
aaauacgaugccuccuaug

SEQ ID NO: 921200 - RNA, 19 nt, Artificial Sequence
  Description of Artificial Sequence: Synthetic oligonucleotide
ugcuacaccauagggaucc

SEQ ID NO: 921201 - RNA, 19 nt, Artificial Sequence
  Description of Artificial Sequence: Synthetic oligonucleotide
guagguauacacccugggg

SEQ ID NO: 921202 - RNA, 19 nt, Artificial Sequence
  Description of Artificial Sequence: Synthetic oligonucleotide
uuggacaugauacuugauu

SEQ ID NO: 921203 - RNA, 19 nt, Artificial Sequence
  Description of Artificial Sequence: Synthetic oligonucleotide
aauaaaccccaaauucguc

SEQ ID NO: 921204 - RNA, 19 nt, Artificial Sequence
  Description of Artificial Sequence: Synthetic oligonucleotide
guaucguugugcuuguacc

SEQ ID NO: 921205 - RNA, 19 nt, Artificial Sequence
  Description of Artificial Sequence: Synthetic oligonucleotide
auaguagguauacacccug

SEQ ID NO: 921206 - RNA, 19 nt, Artificial Sequence
  Description of Artificial Sequence: Synthetic oligonucleotide
ugaguugagagcgaucgcc

SEQ ID NO: 921207 - RNA, 19 nt, Artificial Sequence
  Description of Artificial Sequence: Synthetic oligonucleotide
ucauaagucagacuuucuu

SEQ ID NO: 921208 - RNA, 19 nt, Artificial Sequence
  Description of Artificial Sequence: Synthetic oligonucleotide
ugugcuuguaccaguuuca

SEQ ID NO: 921209 - RNA, 19 nt, Artificial Sequence
  Description of Artificial Sequence: Synthetic oligonucleotide
uguuaccauaauuaggcua

SEQ ID NO: 921210 - RNA, 19 nt, Artificial Sequence
  Description of Artificial Sequence: Synthetic oligonucleotide
caaugauuaucuguuuugg

SEQ ID NO: 921211 - RNA, 19 nt, Artificial Sequence
  Description of Artificial Sequence: Synthetic oligonucleotide
auagggauccucucuagcu

SEQ ID NO: 921212 - RNA, 19 nt, Artificial Sequence
  Description of Artificial Sequence: Synthetic oligonucleotide
uaccaguuucaacaucggg

SEQ ID NO: 921213 - RNA, 19 nt, Artificial Sequence
  Description of Artificial Sequence: Synthetic oligonucleotide
augggucaaacuuacaaau

SEQ ID NO: 921214 - RNA, 19 nt, Artificial Sequence
  Description of Artificial Sequence: Synthetic oligonucleotide
aucggguccauuuaagagu

SEQ ID NO: 921215 - RNA, 19 nt, Artificial Sequence
  Description of Artificial Sequence: Synthetic oligonucleotide
ggaaauguuuaagagauac

SEQ ID NO: 921216 - RNA, 19 nt, Artificial Sequence
  Description of Artificial Sequence: Synthetic oligonucleotide
aaaccccaaauucgucugg

SEQ ID NO: 921217 - RNA, 19 nt, Artificial Sequence
  Description of Artificial Sequence: Synthetic oligonucleotide
uuauauuggguguccuacc

SEQ ID NO: 921218 - RNA, 19 nt, Artificial Sequence
  Description of Artificial Sequence: Synthetic oligonucleotide
auaucuuaagcugaauaca

SEQ ID NO: 921219 - RNA, 19 nt, Artificial Sequence
  Description of Artificial Sequence: Synthetic oligonucleotide
acucauaagucagacuuuc

SEQ ID NO: 921220 - RNA, 19 nt, Artificial Sequence
  Description of Artificial Sequence: Synthetic oligonucleotide
auaaagggagaacggaccu

SEQ ID NO: 921221 - RNA, 19 nt, Artificial Sequence
  Description of Artificial Sequence: Synthetic oligonucleotide
acugauuacuggcucagga

SEQ ID NO: 921222 - RNA, 19 nt, Artificial Sequence
  Description of Artificial Sequence: Synthetic oligonucleotide
agucgguuauaacgcaucg

SEQ ID NO: 921223 - RNA, 19 nt, Artificial Sequence
  Description of Artificial Sequence: Synthetic oligonucleotide
gauauggcagcaacaaaug

SEQ ID NO: 921224 - RNA, 19 nt, Artificial Sequence
  Description of Artificial Sequence: Synthetic oligonucleotide
auacuaugaugacugauau

SEQ ID NO: 921225 - RNA, 19 nt, Artificial Sequence
  Description of Artificial Sequence: Synthetic oligonucleotide
uuuugcgcuaucauccuuc

SEQ ID NO: 921226 - RNA, 19 nt, Artificial Sequence
  Description of Artificial Sequence: Synthetic oligonucleotide
uaguagguauacacccugg

SEQ ID NO: 921227 - RNA, 19 nt, Artificial Sequence
  Description of Artificial Sequence: Synthetic oligonucleotide
uuuaacucugcuugaacuu

SEQ ID NO: 921228 - RNA, 19 nt, Artificial Sequence
  Description of Artificial Sequence: Synthetic oligonucleotide
aauacagaugaacggcuuu

SEQ ID NO: 921229 - RNA, 19 nt, Artificial Sequence
  Description of Artificial Sequence: Synthetic oligonucleotide
ucuuuaacucugcuugaac

SEQ ID NO: 921230 - RNA, 19 nt, Artificial Sequence
  Description of Artificial Sequence: Synthetic oligonucleotide
caucggguccauuuaagag

SEQ ID NO: 921231 - RNA, 19 nt, Artificial Sequence
  Description of Artificial Sequence: Synthetic oligonucleotide
ugucaaauauugacuauuu

SEQ ID NO: 921232 - RNA, 19 nt, Artificial Sequence
  Description of Artificial Sequence: Synthetic oligonucleotide
aaacugacaagcaugucau

SEQ ID NO: 921233 - RNA, 19 nt, Artificial Sequence
  Description of Artificial Sequence: Synthetic oligonucleotide
cacuauguacagaaaguug

SEQ ID NO: 921234 - RNA, 19 nt, Artificial Sequence
  Description of Artificial Sequence: Synthetic oligonucleotide
aaagggucaugcugcaaga

SEQ ID NO: 921235 - RNA, 19 nt, Artificial Sequence
  Description of Artificial Sequence: Synthetic oligonucleotide
augaugacugauauggcag

SEQ ID NO: 921236 - RNA, 19 nt, Artificial Sequence
  Description of Artificial Sequence: Synthetic oligonucleotide
uuaauuugguaaguccgug

SEQ ID NO: 921237 - RNA, 19 nt, Artificial Sequence
  Description of Artificial Sequence: Synthetic oligonucleotide
ugacugauauggcagcaac

SEQ ID NO: 921238 - RNA, 19 nt, Artificial Sequence
  Description of Artificial Sequence: Synthetic oligonucleotide
auguuaaugugagagcuug

SEQ ID NO: 921239 - RNA, 19 nt, Artificial Sequence
  Description of Artificial Sequence: Synthetic oligonucleotide
auaacacaugucaaaguag

SEQ ID NO: 921240 - RNA, 19 nt, Artificial Sequence
  Description of Artificial Sequence: Synthetic oligonucleotide
accaagcucagauacuaug

SEQ ID NO: 921241 - RNA, 19 nt, Artificial Sequence
  Description of Artificial Sequence: Synthetic oligonucleotide
uucaacaucggguccauuu

SEQ ID NO: 921242 - RNA, 19 nt, Artificial Sequence
  Description of Artificial Sequence: Synthetic oligonucleotide
uaucguugugcuuguacca

SEQ ID NO: 921243 - RNA, 19 nt, Artificial Sequence
  Description of Artificial Sequence: Synthetic oligonucleotide
uaauuugguaaguccgugu

SEQ ID NO: 921244 - RNA, 19 nt, Artificial Sequence
  Description of Artificial Sequence: Synthetic oligonucleotide
ucauaguauucucucuuaa

SEQ ID NO: 921245 - RNA, 19 nt, Artificial Sequence
  Description of Artificial Sequence: Synthetic oligonucleotide
uucacugccgcggacugcg

SEQ ID NO: 921246 - RNA, 19 nt, Artificial Sequence
  Description of Artificial Sequence: Synthetic oligonucleotide
ugcauaagcaaugucccac

SEQ ID NO: 921247 - RNA, 19 nt, Artificial Sequence
  Description of Artificial Sequence: Synthetic oligonucleotide
cugggcuuauaaauagugc

SEQ ID NO: 921248 - RNA, 19 nt, Artificial Sequence
  Description of Artificial Sequence: Synthetic oligonucleotide
uguuuaagagauacauaua

SEQ ID NO: 921249 - RNA, 19 nt, Artificial Sequence
  Description of Artificial Sequence: Synthetic oligonucleotide
caagcaugucaucaaggcc

SEQ ID NO: 921250 - RNA, 19 nt, Artificial Sequence
  Description of Artificial Sequence: Synthetic oligonucleotide
aggcgcgucccucagggcc

SEQ ID NO: 921251 - RNA, 19 nt, Artificial Sequence
  Description of Artificial Sequence: Synthetic oligonucleotide
acuguucuaacagauauuu

SEQ ID NO: 921252 - RNA, 19 nt, Artificial Sequence
  Description of Artificial Sequence: Synthetic oligonucleotide
aaaauggcgaagagugcag

SEQ ID NO: 921253 - RNA, 19 nt, Artificial Sequence
  Description of Artificial Sequence: Synthetic oligonucleotide
aauggauaacacaugucaa

SEQ ID NO: 921254 - RNA, 19 nt, Artificial Sequence
  Description of Artificial Sequence: Synthetic oligonucleotide
uagggauccucucuagcug

SEQ ID NO: 921255 - RNA, 19 nt, Artificial Sequence
  Description of Artificial Sequence: Synthetic oligonucleotide
uagaaucaaugauuaucug

SEQ ID NO: 921256 - RNA, 19 nt, Artificial Sequence
  Description of Artificial Sequence: Synthetic oligonucleotide
auacuugauuaaauggguc

SEQ ID NO: 921257 - RNA, 19 nt, Artificial Sequence
  Description of Artificial Sequence: Synthetic oligonucleotide
acuacugauuacuggcuca

SEQ ID NO: 921258 - RNA, 19 nt, Artificial Sequence
  Description of Artificial Sequence: Synthetic oligonucleotide
aacucuuauggcauguuau

SEQ ID NO: 921259 - RNA, 19 nt, Artificial Sequence
  Description of Artificial Sequence: Synthetic oligonucleotide
aaaauacgaugccuccuau

SEQ ID NO: 921260 - RNA, 19 nt, Artificial Sequence
  Description of Artificial Sequence: Synthetic oligonucleotide
uauuggguguccuacccaa

SEQ ID NO: 921261 - RNA, 19 nt, Artificial Sequence
  Description of Artificial Sequence: Synthetic oligonucleotide
aacugacaagcaugucauc

SEQ ID NO: 921262 - RNA, 19 nt, Artificial Sequence
  Description of Artificial Sequence: Synthetic oligonucleotide
uucccgaagcauucuaaug

SEQ ID NO: 921263 - RNA, 19 nt, Artificial Sequence
  Description of Artificial Sequence: Synthetic oligonucleotide
acugauauggcagcaacaa

SEQ ID NO: 921264 - RNA, 19 nt, Artificial Sequence
  Description of Artificial Sequence: Synthetic oligonucleotide
agagcgaucgccccauucu

SEQ ID NO: 921265 - RNA, 19 nt, Artificial Sequence
  Description of Artificial Sequence: Synthetic oligonucleotide
gaccgggacagacuagccg

SEQ ID NO: 921266 - RNA, 19 nt, Artificial Sequence
  Description of Artificial Sequence: Synthetic oligonucleotide
guugaaacauaguagguau

SEQ ID NO: 921267 - RNA, 19 nt, Artificial Sequence
  Description of Artificial Sequence: Synthetic oligonucleotide
aaccccaaauucgucuggg

SEQ ID NO: 921268 - RNA, 19 nt, Artificial Sequence
  Description of Artificial Sequence: Synthetic oligonucleotide
cauagccaaacaaaacuga

SEQ ID NO: 921269 - RNA, 19 nt, Artificial Sequence
  Description of Artificial Sequence: Synthetic oligonucleotide
uggcgaagagugcaguuga

SEQ ID NO: 921270 - RNA, 19 nt, Artificial Sequence
  Description of Artificial Sequence: Synthetic oligonucleotide
uacuaugaugacugauaug

SEQ ID NO: 921271 - RNA, 19 nt, Artificial Sequence
  Description of Artificial Sequence: Synthetic oligonucleotide
ccauaauuaggcuagagaa

SEQ ID NO: 921272 - RNA, 19 nt, Artificial Sequence
  Description of Artificial Sequence: Synthetic oligonucleotide
uuuacauaucuguuacauu

SEQ ID NO: 921273 - RNA, 19 nt, Artificial Sequence
  Description of Artificial Sequence: Synthetic oligonucleotide
cauaauuaggcuagagaaa

SEQ ID NO: 921274 - RNA, 19 nt, Artificial Sequence
  Description of Artificial Sequence: Synthetic oligonucleotide
ucaacaucggguccauuua

SEQ ID NO: 921275 - RNA, 19 nt, Artificial Sequence
  Description of Artificial Sequence: Synthetic oligonucleotide
agcacgagcagccgucgcg

SEQ ID NO: 921276 - RNA, 19 nt, Artificial Sequence
  Description of Artificial Sequence: Synthetic oligonucleotide
ggaagugucgagccgggcg

SEQ ID NO: 921277 - RNA, 19 nt, Artificial Sequence
  Description of Artificial Sequence: Synthetic oligonucleotide
uuugguucguuggaauucu

SEQ ID NO: 921278 - RNA, 19 nt, Artificial Sequence
  Description of Artificial Sequence: Synthetic oligonucleotide
uuugcgcuaucauccuucc

SEQ ID NO: 921279 - RNA, 19 nt, Artificial Sequence
  Description of Artificial Sequence: Synthetic oligonucleotide
uuguggcauagccaaacaa

SEQ ID NO: 921280 - RNA, 19 nt, Artificial Sequence
  Description of Artificial Sequence: Synthetic oligonucleotide
aacaucggguccauuuaag

SEQ ID NO: 921281 - RNA, 19 nt, Artificial Sequence
  Description of Artificial Sequence: Synthetic oligonucleotide
aaauucgucuggguagcug

SEQ ID NO: 921282 - RNA, 19 nt, Artificial Sequence
  Description of Artificial Sequence: Synthetic oligonucleotide
gauacuugauuaaaugggu

SEQ ID NO: 921283 - RNA, 19 nt, Artificial Sequence
  Description of Artificial Sequence: Synthetic oligonucleotide
agacaagauaaaacuacug

SEQ ID NO: 921284 - RNA, 19 nt, Artificial Sequence
  Description of Artificial Sequence: Synthetic oligonucleotide
uuauaacgcaucgccauaa

SEQ ID NO: 921285 - RNA, 19 nt, Artificial Sequence
  Description of Artificial Sequence: Synthetic oligonucleotide
cuuuaacucugcuugaacu

SEQ ID NO: 921286 - RNA, 19 nt, Artificial Sequence
  Description of Artificial Sequence: Synthetic oligonucleotide
aauggcgaagagugcaguu

SEQ ID NO: 921287 - RNA, 19 nt, Artificial Sequence
  Description of Artificial Sequence: Synthetic oligonucleotide
ucucuuaauuugguaaguc

SEQ ID NO: 921288 - RNA, 19 nt, Artificial Sequence
  Description of Artificial Sequence: Synthetic oligonucleotide
ugauugucacuguucuaac

SEQ ID NO: 921289 - RNA, 19 nt, Artificial Sequence
  Description of Artificial Sequence: Synthetic oligonucleotide
aguuucaacaucgggucca

SEQ ID NO: 921290 - RNA, 19 nt, Artificial Sequence
  Description of Artificial Sequence: Synthetic oligonucleotide
acaucggguccauuuaaga

SEQ ID NO: 921291 - RNA, 19 nt, Artificial Sequence
  Description of Artificial Sequence: Synthetic oligonucleotide
uugcauaucuuaagcugaa

SEQ ID NO: 921292 - RNA, 19 nt, Artificial Sequence
  Description of Artificial Sequence: Synthetic oligonucleotide
ucggguccauuuaagaguu

SEQ ID NO: 921293 - RNA, 19 nt, Artificial Sequence
  Description of Artificial Sequence: Synthetic oligonucleotide
gacagacuagccgcgggcg

SEQ ID NO: 921294 - RNA, 19 nt, Artificial Sequence
  Description of Artificial Sequence: Synthetic oligonucleotide
gcugccagaacaauaguag

SEQ ID NO: 921295 - RNA, 19 nt, Artificial Sequence
  Description of Artificial Sequence: Synthetic oligonucleotide
agguauacacccuggggau

SEQ ID NO: 921296 - RNA, 19 nt, Artificial Sequence
  Description of Artificial Sequence: Synthetic oligonucleotide
aguccguguugucaaauau

SEQ ID NO: 921297 - RNA, 19 nt, Artificial Sequence
  Description of Artificial Sequence: Synthetic oligonucleotide
ccuccuaugauugucacug

SEQ ID NO: 921298 - RNA, 19 nt, Artificial Sequence
  Description of Artificial Sequence: Synthetic oligonucleotide
gaaacauaguagguauaca

SEQ ID NO: 921299 - RNA, 19 nt, Artificial Sequence
  Description of Artificial Sequence: Synthetic oligonucleotide
ugguucguuggaauucuuc

SEQ ID NO: 921300 - RNA, 19 nt, Artificial Sequence
  Description of Artificial Sequence: Synthetic oligonucleotide
acucuuauggcauguuauu

SEQ ID NO: 921301 - RNA, 19 nt, Artificial Sequence
  Description of Artificial Sequence: Synthetic oligonucleotide
ucagucgguuauaacgcau

SEQ ID NO: 921302 - RNA, 19 nt, Artificial Sequence
  Description of Artificial Sequence: Synthetic oligonucleotide
uggggaugacuguuguggc

SEQ ID NO: 921303 - RNA, 19 nt, Artificial Sequence
  Description of Artificial Sequence: Synthetic oligonucleotide
ucaccaagcucagauacua

SEQ ID NO: 921304 - RNA, 19 nt, Artificial Sequence
  Description of Artificial Sequence: Synthetic oligonucleotide
ugggucaaacuuacaaauu

SEQ ID NO: 921305 - RNA, 19 nt, Artificial Sequence
  Description of Artificial Sequence: Synthetic oligonucleotide
auauuggguguccuaccca

SEQ ID NO: 921306 - RNA, 19 nt, Artificial Sequence
  Description of Artificial Sequence: Synthetic oligonucleotide
aaauggcgaagagugcagu

SEQ ID NO: 921307 - RNA, 19 nt, Artificial Sequence
  Description of Artificial Sequence: Synthetic oligonucleotide
acaauaguagugaguugag

SEQ ID NO: 921308 - RNA, 19 nt, Artificial Sequence
  Description of Artificial Sequence: Synthetic oligonucleotide
ggcauagccaaacaaaacu

SEQ ID NO: 921309 - RNA, 19 nt, Artificial Sequence
  Description of Artificial Sequence: Synthetic oligonucleotide
aaguccguguugucaaaua

SEQ ID NO: 921310 - RNA, 19 nt, Artificial Sequence
  Description of Artificial Sequence: Synthetic oligonucleotide
aauguuaaugugagagcuu

SEQ ID NO: 921311 - RNA, 19 nt, Artificial Sequence
  Description of Artificial Sequence: Synthetic oligonucleotide
cuaugauugucacuguucu

SEQ ID NO: 921312 - RNA, 19 nt, Artificial Sequence
  Description of Artificial Sequence: Synthetic oligonucleotide
cuuaauuugguaaguccgu

SEQ ID NO: 921313 - RNA, 19 nt, Artificial Sequence
  Description of Artificial Sequence: Synthetic oligonucleotide
gguaucguugugcuuguac

SEQ ID NO: 921314 - RNA, 19 nt, Artificial Sequence
  Description of Artificial Sequence: Synthetic oligonucleotide
uauaacgcaucgccauaau

SEQ ID NO: 921315 - RNA, 19 nt, Artificial Sequence
  Description of Artificial Sequence: Synthetic oligonucleotide
uccccaaggaaauguuuaa

SEQ ID NO: 921316 - RNA, 19 nt, Artificial Sequence
  Description of Artificial Sequence: Synthetic oligonucleotide
caugucaaaguaggggcug

SEQ ID NO: 921317 - RNA, 19 nt, Artificial Sequence
  Description of Artificial Sequence: Synthetic oligonucleotide
ggaggcgcgucccucaggg

SEQ ID NO: 921318 - RNA, 19 nt, Artificial Sequence
  Description of Artificial Sequence: Synthetic oligonucleotide
gggcuuauaaauagugcag

SEQ ID NO: 921319 - RNA, 19 nt, Artificial Sequence
  Description of Artificial Sequence: Synthetic oligonucleotide
gggugaaauaaaaugcaac

SEQ ID NO: 921320 - RNA, 19 nt, Artificial Sequence
  Description of Artificial Sequence: Synthetic oligonucleotide
guguaacccuuucucggcc

SEQ ID NO: 921321 - RNA, 19 nt, Artificial Sequence
  Description of Artificial Sequence: Synthetic oligonucleotide
uaguuguaauguacacuau

SEQ ID NO: 921322 - RNA, 19 nt, Artificial Sequence
  Description of Artificial Sequence: Synthetic oligonucleotide
aagggagaacggaccuagc

SEQ ID NO: 921323 - RNA, 19 nt, Artificial Sequence
  Description of Artificial Sequence: Synthetic oligonucleotide
uacugauuacuggcucagg

SEQ ID NO: 921324 - RNA, 19 nt, Artificial Sequence
  Description of Artificial Sequence: Synthetic oligonucleotide
cagucgguuauaacgcauc

SEQ ID NO: 921325 - RNA, 19 nt, Artificial Sequence
  Description of Artificial Sequence: Synthetic oligonucleotide
cugacccucaucugggcuc

SEQ ID NO: 921326 - RNA, 19 nt, Artificial Sequence
  Description of Artificial Sequence: Synthetic oligonucleotide
ugucgagccgggcgugccg

SEQ ID NO: 921327 - RNA, 19 nt, Artificial Sequence
  Description of Artificial Sequence: Synthetic oligonucleotide
ucuucgucggggccggcgu

SEQ ID NO: 921328 - RNA, 19 nt, Artificial Sequence
  Description of Artificial Sequence: Synthetic oligonucleotide
caguuucaacaucgggucc

SEQ ID NO: 921329 - RNA, 19 nt, Artificial Sequence
  Description of Artificial Sequence: Synthetic oligonucleotide
gaugacugauauggcagca

SEQ ID NO: 921330 - RNA, 19 nt, Artificial Sequence
  Description of Artificial Sequence: Synthetic oligonucleotide
cgaagagugcaguugaaac

SEQ ID NO: 921331 - RNA, 19 nt, Artificial Sequence
  Description of Artificial Sequence: Synthetic oligonucleotide
acggaccuagccaacaacu

SEQ ID NO: 921332 - RNA, 19 nt, Artificial Sequence
  Description of Artificial Sequence: Synthetic oligonucleotide
gguccauuuaagaguuugg

SEQ ID NO: 921333 - RNA, 19 nt, Artificial Sequence
  Description of Artificial Sequence: Synthetic oligonucleotide
gguaaguccguguugucaa

SEQ ID NO: 921334 - RNA, 19 nt, Artificial Sequence
  Description of Artificial Sequence: Synthetic oligonucleotide
ucgaggcccuucacugccg

SEQ ID NO: 921335 - RNA, 19 nt, Artificial Sequence
  Description of Artificial Sequence: Synthetic oligonucleotide
aucuuaagcugaauacaga

SEQ ID NO: 921336 - RNA, 19 nt, Artificial Sequence
  Description of Artificial Sequence: Synthetic oligonucleotide
ucguugugcuuguaccagu

SEQ ID NO: 921337 - RNA, 19 nt, Artificial Sequence
  Description of Artificial Sequence: Synthetic oligonucleotide
uuuaagaguuugguucguu

SEQ ID NO: 921338 - RNA, 19 nt, Artificial Sequence
  Description of Artificial Sequence: Synthetic oligonucleotide
acaugucaaaguaggggcu

SEQ ID NO: 921339 - RNA, 19 nt, Artificial Sequence
  Description of Artificial Sequence: Synthetic oligonucleotide
gacugauauggcagcaaca

SEQ ID NO: 921340 - RNA, 19 nt, Artificial Sequence
  Description of Artificial Sequence: Synthetic oligonucleotide
ggcucgaggcccuucacug

SEQ ID NO: 921341 - RNA, 19 nt, Artificial Sequence
  Description of Artificial Sequence: Synthetic oligonucleotide
ucgccauaauggcugcuau

SEQ ID NO: 921342 - RNA, 19 nt, Artificial Sequence
  Description of Artificial Sequence: Synthetic oligonucleotide
guauacacccuggggauga

SEQ ID NO: 921343 - RNA, 19 nt, Artificial Sequence
  Description of Artificial Sequence: Synthetic oligonucleotide
gaagugucgagccgggcgu

SEQ ID NO: 921344 - RNA, 19 nt, Artificial Sequence
  Description of Artificial Sequence: Synthetic oligonucleotide
guuauaacgcaucgccaua

SEQ ID NO: 921345 - RNA, 19 nt, Artificial Sequence
  Description of Artificial Sequence: Synthetic oligonucleotide
ucgucuggguagcugcauc

SEQ ID NO: 921346 - RNA, 19 nt, Artificial Sequence
  Description of Artificial Sequence: Synthetic oligonucleotide
agaacggaccuagccaaca

SEQ ID NO: 921347 - RNA, 19 nt, Artificial Sequence
  Description of Artificial Sequence: Synthetic oligonucleotide
auuuaagaguuugguucgu

SEQ ID NO: 921348 - RNA, 19 nt, Artificial Sequence
  Description of Artificial Sequence: Synthetic oligonucleotide
ggcuuauaaauagugcaga

SEQ ID NO: 921349 - RNA, 19 nt, Artificial Sequence
  Description of Artificial Sequence: Synthetic oligonucleotide
cugacaagcaugucaucaa

SEQ ID NO: 921350 - RNA, 19 nt, Artificial Sequence
  Description of Artificial Sequence: Synthetic oligonucleotide
acugccgcggacugcgacu

SEQ ID NO: 921351 - RNA, 19 nt, Artificial Sequence
  Description of Artificial Sequence: Synthetic oligonucleotide
gucgguuauaacgcaucgc

SEQ ID NO: 921352 - RNA, 19 nt, Artificial Sequence
  Description of Artificial Sequence: Synthetic oligonucleotide
aaaccagaaucugggcuua

SEQ ID NO: 921353 - RNA, 19 nt, Artificial Sequence
  Description of Artificial Sequence: Synthetic oligonucleotide
ggguccauuuaagaguuug

SEQ ID NO: 921354 - RNA, 19 nt, Artificial Sequence
  Description of Artificial Sequence: Synthetic oligonucleotide
uuaccauaauuaggcuaga

SEQ ID NO: 921355 - RNA, 19 nt, Artificial Sequence
  Description of Artificial Sequence: Synthetic oligonucleotide
cuuauggcauguuauugau

SEQ ID NO: 921356 - RNA, 19 nt, Artificial Sequence
  Description of Artificial Sequence: Synthetic oligonucleotide
gucagucgguuauaacgca

SEQ ID NO: 921357 - RNA, 19 nt, Artificial Sequence
  Description of Artificial Sequence: Synthetic oligonucleotide
gagagcgaucgccccauuc

SEQ ID NO: 921358 - RNA, 19 nt, Artificial Sequence
  Description of Artificial Sequence: Synthetic oligonucleotide
gguuauaacgcaucgccau

SEQ ID NO: 921359 - RNA, 19 nt, Artificial Sequence
  Description of Artificial Sequence: Synthetic oligonucleotide
gugaguugagagcgaucgc

SEQ ID NO: 921360 - RNA, 19 nt, Artificial Sequence
  Description of Artificial Sequence: Synthetic oligonucleotide
guuccacccacugcuacac

SEQ ID NO: 921361 - RNA, 19 nt, Artificial Sequence
  Description of Artificial Sequence: Synthetic oligonucleotide
cuguuccacccacugcuac

SEQ ID NO: 921362 - RNA, 19 nt, Artificial Sequence
  Description of Artificial Sequence: Synthetic oligonucleotide
accggaccgggacagacua

SEQ ID NO: 921363 - RNA, 19 nt, Artificial Sequence
  Description of Artificial Sequence: Synthetic oligonucleotide
cauaguagguauacacccu

SEQ ID NO: 921364 - RNA, 19 nt, Artificial Sequence
  Description of Artificial Sequence: Synthetic oligonucleotide
agucccacugcaauggaua

SEQ ID NO: 921365 - RNA, 19 nt, Artificial Sequence
  Description of Artificial Sequence: Synthetic oligonucleotide
ucgcguuggcgcccggcag

SEQ ID NO: 921366 - RNA, 19 nt, Artificial Sequence
  Description of Artificial Sequence: Synthetic oligonucleotide
cauaguauucucucuuaau

SEQ ID NO: 921367 - RNA, 19 nt, Artificial Sequence
  Description of Artificial Sequence: Synthetic oligonucleotide
ugacccucaucugggcuca

SEQ ID NO: 921368 - RNA, 19 nt, Artificial Sequence
  Description of Artificial Sequence: Synthetic oligonucleotide
gaacggaccuagccaacaa

SEQ ID NO: 921369 - RNA, 19 nt, Artificial Sequence
  Description of Artificial Sequence: Synthetic oligonucleotide
agugcgggcgaagggaagu

SEQ ID NO: 921370 - RNA, 19 nt, Artificial Sequence
  Description of Artificial Sequence: Synthetic oligonucleotide
guagcugcaucuucucugu

SEQ ID NO: 921371 - RNA, 19 nt, Artificial Sequence
  Description of Artificial Sequence: Synthetic oligonucleotide
caauaguagugaguugaga

SEQ ID NO: 921372 - RNA, 19 nt, Artificial Sequence
  Description of Artificial Sequence: Synthetic oligonucleotide
auucaagcagucaguccca

SEQ ID NO: 921373 - RNA, 19 nt, Artificial Sequence
  Description of Artificial Sequence: Synthetic oligonucleotide
cugccgggcaggagaaccc

SEQ ID NO: 921374 - RNA, 19 nt, Artificial Sequence
  Description of Artificial Sequence: Synthetic oligonucleotide
cugcgacuucagcugcugg

SEQ ID NO: 921375 - RNA, 19 nt, Artificial Sequence
  Description of Artificial Sequence: Synthetic oligonucleotide
cgcaucgccauaauggcug

SEQ ID NO: 921376 - RNA, 19 nt, Artificial Sequence
  Description of Artificial Sequence: Synthetic oligonucleotide
uugagagcgaucgccccau

SEQ ID NO: 921377 - RNA, 19 nt, Artificial Sequence
  Description of Artificial Sequence: Synthetic oligonucleotide
ggacgcggcgaccggaccg

SEQ ID NO: 921378 - RNA, 19 nt, Artificial Sequence
  Description of Artificial Sequence: Synthetic oligonucleotide
accccaaauucgucugggu

SEQ ID NO: 921379 - RNA, 19 nt, Artificial Sequence
  Description of Artificial Sequence: Synthetic oligonucleotide
ugcauaucuuaagcugaau

SEQ ID NO: 921380 - RNA, 19 nt, Artificial Sequence
  Description of Artificial Sequence: Synthetic oligonucleotide
ugucaaaguaggggcugaa

SEQ ID NO: 921381 - RNA, 19 nt, Artificial Sequence
  Description of Artificial Sequence: Synthetic oligonucleotide
aagugcgggcgaagggaag

SEQ ID NO: 921382 - RNA, 19 nt, Artificial Sequence
  Description of Artificial Sequence: Synthetic oligonucleotide
aguagugaguugagagcga

SEQ ID NO: 921383 - RNA, 19 nt, Artificial Sequence
  Description of Artificial Sequence: Synthetic oligonucleotide
caacucuuauggcauguua

SEQ ID NO: 921384 - RNA, 19 nt, Artificial Sequence
  Description of Artificial Sequence: Synthetic oligonucleotide
gaagugcgggcgaagggaa

SEQ ID NO: 921385 - RNA, 19 nt, Artificial Sequence
  Description of Artificial Sequence: Synthetic oligonucleotide
uugcgcuaucauccuuccu

SEQ ID NO: 921386 - RNA, 19 nt, Artificial Sequence
  Description of Artificial Sequence: Synthetic oligonucleotide
caacaucggguccauuuaa

SEQ ID NO: 921387 - RNA, 19 nt, Artificial Sequence
  Description of Artificial Sequence: Synthetic oligonucleotide
ggaagugcgggcgaaggga

SEQ ID NO: 921388 - RNA, 19 nt, Artificial Sequence
  Description of Artificial Sequence: Synthetic oligonucleotide
gcucagauacuaugaugac

SEQ ID NO: 921389 - RNA, 19 nt, Artificial Sequence
  Description of Artificial Sequence: Synthetic oligonucleotide
ggcgaagggaagugucgag

SEQ ID NO: 921390 - RNA, 19 nt, Artificial Sequence
  Description of Artificial Sequence: Synthetic oligonucleotide
gcgaucgccccauucugcc

SEQ ID NO: 921391 - RNA, 19 nt, Artificial Sequence
  Description of Artificial Sequence: Synthetic oligonucleotide
cagauacuaugaugacuga

SEQ ID NO: 921392 - RNA, 19 nt, Artificial Sequence
  Description of Artificial Sequence: Synthetic oligonucleotide
ucccacugcaauggauaac

SEQ ID NO: 921393 - RNA, 19 nt, Artificial Sequence
  Description of Artificial Sequence: Synthetic oligonucleotide
gucuucgucggggccggcg

SEQ ID NO: 921394 - RNA, 19 nt, Artificial Sequence
  Description of Artificial Sequence: Synthetic oligonucleotide
gagaacggaccuagccaac

SEQ ID NO: 921395 - RNA, 19 nt, Artificial Sequence
  Description of Artificial Sequence: Synthetic oligonucleotide
gcuaucauccuuccuccaa

SEQ ID NO: 921396 - RNA, 19 nt, Artificial Sequence
  Description of Artificial Sequence: Synthetic oligonucleotide
gagcacgagcagccgucgc

SEQ ID NO: 921397 - RNA, 19 nt, Artificial Sequence
  Description of Artificial Sequence: Synthetic oligonucleotide
guguuaccauaauuaggcu

SEQ ID NO: 921398 - RNA, 19 nt, Artificial Sequence
  Description of Artificial Sequence: Synthetic oligonucleotide
uugguucguuggaauucuu

SEQ ID NO: 921399 - RNA, 19 nt, Artificial Sequence
  Description of Artificial Sequence: Synthetic oligonucleotide
gucgagccgggcgugccgg

SEQ ID NO: 921400 - RNA, 19 nt, Artificial Sequence
  Description of Artificial Sequence: Synthetic oligonucleotide
cagccgucgcguuggcgcc

SEQ ID NO: 921401 - RNA, 19 nt, Artificial Sequence
  Description of Artificial Sequence: Synthetic oligonucleotide
accuucccgaagcauucua

SEQ ID NO: 921402 - RNA, 19 nt, Artificial Sequence
  Description of Artificial Sequence: Synthetic oligonucleotide
uuggcgcccggcagcuccc

SEQ ID NO: 921403 - RNA, 19 nt, Artificial Sequence
  Description of Artificial Sequence: Synthetic oligonucleotide
ggaccuagccaacaacucu

SEQ ID NO: 921404 - RNA, 19 nt, Artificial Sequence
  Description of Artificial Sequence: Synthetic oligonucleotide
guaaguccguguugucaaa

SEQ ID NO: 921405 - RNA, 19 nt, Artificial Sequence
  Description of Artificial Sequence: Synthetic oligonucleotide
gcugccgggcaggagaacc

SEQ ID NO: 921406 - RNA, 19 nt, Artificial Sequence
  Description of Artificial Sequence: Synthetic oligonucleotide
acuggcucaggaacacggu

SEQ ID NO: 921407 - RNA, 19 nt, Artificial Sequence
  Description of Artificial Sequence: Synthetic oligonucleotide
acaacucuuauggcauguu

SEQ ID NO: 921408 - RNA, 19 nt, Artificial Sequence
  Description of Artificial Sequence: Synthetic oligonucleotide
acgcgggacgcggcgaccg

SEQ ID NO: 921409 - RNA, 19 nt, Artificial Sequence
  Description of Artificial Sequence: Synthetic oligonucleotide
gaccuagccaacaacucuu

SEQ ID NO: 921410 - RNA, 19 nt, Artificial Sequence
  Description of Artificial Sequence: Synthetic oligonucleotide
gcaauggauaacacauguc

SEQ ID NO: 921411 - RNA, 19 nt, Artificial Sequence
  Description of Artificial Sequence: Synthetic oligonucleotide
uauacacccuggggaugac

SEQ ID NO: 921412 - RNA, 19 nt, Artificial Sequence
  Description of Artificial Sequence: Synthetic oligonucleotide
gguuccgauggcucagguc

SEQ ID NO: 921413 - RNA, 19 nt, Artificial Sequence
  Description of Artificial Sequence: Synthetic oligonucleotide
gucgcguuggcgcccggca

SEQ ID NO: 921414 - RNA, 19 nt, Artificial Sequence
  Description of Artificial Sequence: Synthetic oligonucleotide
gcggcuucugguuccgaug

SEQ ID NO: 921415 - RNA, 19 nt, Artificial Sequence
  Description of Artificial Sequence: Synthetic oligonucleotide
ggaauacauucauaguauu

SEQ ID NO: 921416 - RNA, 19 nt, Artificial Sequence
  Description of Artificial Sequence: Synthetic oligonucleotide
ccaacugccuccgcggccc

SEQ ID NO: 921417 - RNA, 19 nt, Artificial Sequence
  Description of Artificial Sequence: Synthetic oligonucleotide
cuucccgaagcauucuaau

SEQ ID NO: 921418 - RNA, 19 nt, Artificial Sequence
  Description of Artificial Sequence: Synthetic oligonucleotide
gagguaucguugugcuugu

SEQ ID NO: 921419 - RNA, 19 nt, Artificial Sequence
  Description of Artificial Sequence: Synthetic oligonucleotide
acgcaucgccauaauggcu

SEQ ID NO: 921420 - RNA, 19 nt, Artificial Sequence
  Description of Artificial Sequence: Synthetic oligonucleotide
ggagcacgagcagccgucg

SEQ ID NO: 921421 - RNA, 19 nt, Artificial Sequence
  Description of Artificial Sequence: Synthetic oligonucleotide
uccgauggcucaggucuuc

SEQ ID NO: 921422 - RNA, 19 nt, Artificial Sequence
  Description of Artificial Sequence: Synthetic oligonucleotide
aaccagaaucugggcuuau

SEQ ID NO: 921423 - RNA, 19 nt, Artificial Sequence
  Description of Artificial Sequence: Synthetic oligonucleotide
gaggcgcgucccucagggc

SEQ ID NO: 921424 - RNA, 19 nt, Artificial Sequence
  Description of Artificial Sequence: Synthetic oligonucleotide
cucucuuaauuugguaagu

SEQ ID NO: 921425 - RNA, 19 nt, Artificial Sequence
  Description of Artificial Sequence: Synthetic oligonucleotide
caccauagggauccucucu

SEQ ID NO: 921426 - RNA, 19 nt, Artificial Sequence
  Description of Artificial Sequence: Synthetic oligonucleotide
cuucgucggggccggcgug

SEQ ID NO: 921427 - RNA, 19 nt, Artificial Sequence
  Description of Artificial Sequence: Synthetic oligonucleotide
gcucgaggcccuucacugc

SEQ ID NO: 921428 - RNA, 19 nt, Artificial Sequence
  Description of Artificial Sequence: Synthetic oligonucleotide
guagugaguugagagcgau

SEQ ID NO: 921429 - RNA, 19 nt, Artificial Sequence
  Description of Artificial Sequence: Synthetic oligonucleotide
aggaaauguuuaagagaua

SEQ ID NO: 921430 - RNA, 19 nt, Artificial Sequence
  Description of Artificial Sequence: Synthetic oligonucleotide
cgaagcauucuaaugccaa

SEQ ID NO: 921431 - RNA, 19 nt, Artificial Sequence
  Description of Artificial Sequence: Synthetic oligonucleotide
ccgggacagacuagccgcg

SEQ ID NO: 921432 - RNA, 19 nt, Artificial Sequence
  Description of Artificial Sequence: Synthetic oligonucleotide
gguguccuacccaauuaaa

SEQ ID NO: 921433 - RNA, 19 nt, Artificial Sequence
  Description of Artificial Sequence: Synthetic oligonucleotide
auuggguguccuacccaau

SEQ ID NO: 921434 - RNA, 19 nt, Artificial Sequence
  Description of Artificial Sequence: Synthetic oligonucleotide
ggcgaccggaccgggacag

SEQ ID NO: 921435 - RNA, 19 nt, Artificial Sequence
  Description of Artificial Sequence: Synthetic oligonucleotide
gggcugaaguguuaccaua

SEQ ID NO: 921436 - RNA, 19 nt, Artificial Sequence
  Description of Artificial Sequence: Synthetic oligonucleotide
gcggcgaccggaccgggac

SEQ ID NO: 921437 - RNA, 19 nt, Artificial Sequence
  Description of Artificial Sequence: Synthetic oligonucleotide
gugucgagccgggcgugcc

SEQ ID NO: 921438 - RNA, 19 nt, Artificial Sequence
  Description of Artificial Sequence: Synthetic oligonucleotide
cgagcagccgucgcguugg

SEQ ID NO: 921439 - RNA, 19 nt, Artificial Sequence
  Description of Artificial Sequence: Synthetic oligonucleotide
cacuguucuaacagauauu

SEQ ID NO: 921440 - RNA, 19 nt, Artificial Sequence
  Description of Artificial Sequence: Synthetic oligonucleotide
ugagagcgaucgccccauu

SEQ ID NO: 921441 - RNA, 19 nt, Artificial Sequence
  Description of Artificial Sequence: Synthetic oligonucleotide
gcgaagagugcaguugaaa

SEQ ID NO: 921442 - RNA, 19 nt, Artificial Sequence
  Description of Artificial Sequence: Synthetic oligonucleotide
gccggcguggaccccggcc

SEQ ID NO: 921443 - RNA, 19 nt, Artificial Sequence
  Description of Artificial Sequence: Synthetic oligonucleotide
cggaccuagccaacaacuc

SEQ ID NO: 921444 - RNA, 19 nt, Artificial Sequence
  Description of Artificial Sequence: Synthetic oligonucleotide
ggaccgggacagacuagcc

SEQ ID NO: 921445 - RNA, 19 nt, Artificial Sequence
  Description of Artificial Sequence: Synthetic oligonucleotide
ccguguugucaaauauuga

SEQ ID NO: 921446 - RNA, 19 nt, Artificial Sequence
  Description of Artificial Sequence: Synthetic oligonucleotide
guccguguugucaaauauu

SEQ ID NO: 921447 - RNA, 19 nt, Artificial Sequence
  Description of Artificial Sequence: Synthetic oligonucleotide
gggcgaagggaagugucga

SEQ ID NO: 921448 - RNA, 19 nt, Artificial Sequence
  Description of Artificial Sequence: Synthetic oligonucleotide
gacuagccgcgggcgcacc

SEQ ID NO: 921449 - RNA, 19 nt, Artificial Sequence
  Description of Artificial Sequence: Synthetic oligonucleotide
ccuucccgaagcauucuaa

SEQ ID NO: 921450 - RNA, 19 nt, Artificial Sequence
  Description of Artificial Sequence: Synthetic oligonucleotide
cgguuauaacgcaucgcca

SEQ ID NO: 921451 - RNA, 19 nt, Artificial Sequence
  Description of Artificial Sequence: Synthetic oligonucleotide
cgccauaauggcugcuaug

SEQ ID NO: 921452 - RNA, 19 nt, Artificial Sequence
  Description of Artificial Sequence: Synthetic oligonucleotide
caccgcgcugcagcaggag

SEQ ID NO: 921453 - RNA, 19 nt, Artificial Sequence
  Description of Artificial Sequence: Synthetic oligonucleotide
cuccuaugauugucacugu

SEQ ID NO: 921454 - RNA, 19 nt, Artificial Sequence
  Description of Artificial Sequence: Synthetic oligonucleotide
guuucaacaucggguccau

SEQ ID NO: 921455 - RNA, 19 nt, Artificial Sequence
  Description of Artificial Sequence: Synthetic oligonucleotide
ccauaauggcugcuaugaa

SEQ ID NO: 921456 - RNA, 19 nt, Artificial Sequence
  Description of Artificial Sequence: Synthetic oligonucleotide
cagucccacugcaauggau

SEQ ID NO: 921457 - RNA, 19 nt, Artificial Sequence
  Description of Artificial Sequence: Synthetic oligonucleotide
cacgcgggacgcggcgacc

SEQ ID NO: 921458 - RNA, 19 nt, Artificial Sequence
  Description of Artificial Sequence: Synthetic oligonucleotide
ugccgcggacugcgacuuc

SEQ ID NO: 921459 - RNA, 19 nt, Artificial Sequence
  Description of Artificial Sequence: Synthetic oligonucleotide
ggcccuucacugccgcgga

SEQ ID NO: 921460 - RNA, 19 nt, Artificial Sequence
  Description of Artificial Sequence: Synthetic oligonucleotide
gaccggaccgggacagacu

SEQ ID NO: 921461 - RNA, 19 nt, Artificial Sequence
  Description of Artificial Sequence: Synthetic oligonucleotide
cgugccgggaggcgcgucc

SEQ ID NO: 921462 - RNA, 19 nt, Artificial Sequence
  Description of Artificial Sequence: Synthetic oligonucleotide
caaauucgucuggguagcu

SEQ ID NO: 921463 - RNA, 19 nt, Artificial Sequence
  Description of Artificial Sequence: Synthetic oligonucleotide
ccggaccgggacagacuag

SEQ ID NO: 921464 - RNA, 19 nt, Artificial Sequence
  Description of Artificial Sequence: Synthetic oligonucleotide
gcguggaccccggccgggg

SEQ ID NO: 921465 - RNA, 19 nt, Artificial Sequence
  Description of Artificial Sequence: Synthetic oligonucleotide
ggcgaagagugcaguugaa

SEQ ID NO: 921466 - RNA, 19 nt, Artificial Sequence
  Description of Artificial Sequence: Synthetic oligonucleotide
agguaucguugugcuugua

SEQ ID NO: 921467 - RNA, 19 nt, Artificial Sequence
  Description of Artificial Sequence: Synthetic oligonucleotide
gccgucgcguuggcgcccg

SEQ ID NO: 921468 - RNA, 19 nt, Artificial Sequence
  Description of Artificial Sequence: Synthetic oligonucleotide
cccggccggggcccaaagc

SEQ ID NO: 921469 - RNA, 19 nt, Artificial Sequence
  Description of Artificial Sequence: Synthetic oligonucleotide
ccugacccucaucugggcu

SEQ ID NO: 921470 - RNA, 19 nt, Artificial Sequence
  Description of Artificial Sequence: Synthetic oligonucleotide
cgggacgcggcgaccggac

SEQ ID NO: 921471 - RNA, 19 nt, Artificial Sequence
  Description of Artificial Sequence: Synthetic oligonucleotide
caucgccauaauggcugcu

SEQ ID NO: 921472 - RNA, 19 nt, Artificial Sequence
  Description of Artificial Sequence: Synthetic oligonucleotide
ccggcucgaggcccuucac

SEQ ID NO: 921473 - RNA, 19 nt, Artificial Sequence
  Description of Artificial Sequence: Synthetic oligonucleotide
gggcccgccgccgcucagc

SEQ ID NO: 921474 - RNA, 19 nt, Artificial Sequence
  Description of Artificial Sequence: Synthetic oligonucleotide
gcgcgucccucagggcccg

SEQ ID NO: 921475 - RNA, 19 nt, Artificial Sequence
  Description of Artificial Sequence: Synthetic oligonucleotide
ccgggaggcgcgucccuca

SEQ ID NO: 921476 - RNA, 19 nt, Artificial Sequence
  Description of Artificial Sequence: Synthetic oligonucleotide
cagccggcaccgcgcugca

SEQ ID NO: 921477 - RNA, 19 nt, Artificial Sequence
  Description of Artificial Sequence: Synthetic oligonucleotide
cgaucgccccauucugcca

SEQ ID NO: 921478 - RNA, 19 nt, Artificial Sequence
  Description of Artificial Sequence: Synthetic oligonucleotide
cugccuccgcggcccaacu

SEQ ID NO: 921479 - RNA, 19 nt, Artificial Sequence
  Description of Artificial Sequence: Synthetic oligonucleotide
cguugugcuuguaccaguu

SEQ ID NO: 921480 - RNA, 19 nt, Artificial Sequence
  Description of Artificial Sequence: Synthetic oligonucleotide
cgggaggcgcgucccucag

SEQ ID NO: 921481 - RNA, 19 nt, Artificial Sequence
  Description of Artificial Sequence: Synthetic oligonucleotide
gccgggaggcgcgucccuc

SEQ ID NO: 921482 - RNA, 19 nt, Artificial Sequence
  Description of Artificial Sequence: Synthetic oligonucleotide
cccuggggaugacuguugu

SEQ ID NO: 921483 - RNA, 19 nt, Artificial Sequence
  Description of Artificial Sequence: Synthetic oligonucleotide
cugccgcggacugcgacuu

SEQ ID NO: 921484 - RNA, 19 nt, Artificial Sequence
  Description of Artificial Sequence: Synthetic oligonucleotide
cccuucacugccgcggacu

SEQ ID NO: 921485 - RNA, 19 nt, Artificial Sequence
  Description of Artificial Sequence: Synthetic oligonucleotide
cgucgcguuggcgcccggc

SEQ ID NO: 921486 - RNA, 19 nt, Artificial Sequence
  Description of Artificial Sequence: Synthetic oligonucleotide
gcaccgcgcugcagcagga

SEQ ID NO: 921487 - RNA, 19 nt, Artificial Sequence
  Description of Artificial Sequence: Synthetic oligonucleotide
ggccggcguggaccccggc

SEQ ID NO: 921488 - RNA, 19 nt, Artificial Sequence
  Description of Artificial Sequence: Synthetic oligonucleotide
gcguuggcgcccggcagcu

SEQ ID NO: 921489 - RNA, 19 nt, Artificial Sequence
  Description of Artificial Sequence: Synthetic oligonucleotide
gcgaccggaccgggacaga

SEQ ID NO: 921490 - RNA, 19 nt, Artificial Sequence
  Description of Artificial Sequence: Synthetic oligonucleotide
cggcucgaggcccuucacu

SEQ ID NO: 921491 - RNA, 19 nt, Artificial Sequence
  Description of Artificial Sequence: Synthetic oligonucleotide
ccgucgcguuggcgcccgg

SEQ ID NO: 921492 - RNA, 19 nt, Artificial Sequence
  Description of Artificial Sequence: Synthetic oligonucleotide
cgucggggccggcguggac

SEQ ID NO: 921493 - RNA, 19 nt, Artificial Sequence
  Description of Artificial Sequence: Synthetic oligonucleotide
cgcggcgaccggaccggga

SEQ ID NO: 921494 - RNA, 19 nt, Artificial Sequence
  Description of Artificial Sequence: Synthetic oligonucleotide
ucuuauaagacauacagcu

SEQ ID NO: 921495 - RNA, 19 nt, Artificial Sequence
  Description of Artificial Sequence: Synthetic oligonucleotide
ugugaauacagacacaugc

SEQ ID NO: 921496 - RNA, 19 nt, Artificial Sequence
  Description of Artificial Sequence: Synthetic oligonucleotide
aauagaucacaugaaaugg

SEQ ID NO: 921497 - RNA, 19 nt, Artificial Sequence
  Description of Artificial Sequence: Synthetic oligonucleotide
aauauagucccuugagugg

SEQ ID NO: 921498 - RNA, 19 nt, Artificial Sequence
  Description of Artificial Sequence: Synthetic oligonucleotide
uaaauaaacgucuuggaac

SEQ ID NO: 921499 - RNA, 19 nt, Artificial Sequence
  Description of Artificial Sequence: Synthetic oligonucleotide
aaauggaccaugugguacc

SEQ ID NO: 921500 - RNA, 19 nt, Artificial Sequence
  Description of Artificial Sequence: Synthetic oligonucleotide
aacguugauguacggaugc

SEQ ID NO: 921501 - RNA, 19 nt, Artificial Sequence
  Description of Artificial Sequence: Synthetic oligonucleotide
uaauagaucacaugaaaug

SEQ ID NO: 921502 - RNA, 19 nt, Artificial Sequence
  Description of Artificial Sequence: Synthetic oligonucleotide
ggcaauauguuacagaugg

SEQ ID NO: 921503 - RNA, 19 nt, Artificial Sequence
  Description of Artificial Sequence: Synthetic oligonucleotide
uuugacaacaaaucccugg

SEQ ID NO: 921504 - RNA, 19 nt, Artificial Sequence
  Description of Artificial Sequence: Synthetic oligonucleotide
guagaugcaagauagagac

SEQ ID NO: 921505 - RNA, 19 nt, Artificial Sequence
  Description of Artificial Sequence: Synthetic oligonucleotide
auuuaucugaauuuuaggu

SEQ ID NO: 921506 - RNA, 19 nt, Artificial Sequence
  Description of Artificial Sequence: Synthetic oligonucleotide
uuuauugugcucagagucg

SEQ ID NO: 921507 - RNA, 19 nt, Artificial Sequence
  Description of Artificial Sequence: Synthetic oligonucleotide
uguaucuacauccaucuga

SEQ ID NO: 921508 - RNA, 19 nt, Artificial Sequence
  Description of Artificial Sequence: Synthetic oligonucleotide
uuagcugugauagagaacu

SEQ ID NO: 921509 - RNA, 19 nt, Artificial Sequence
  Description of Artificial Sequence: Synthetic oligonucleotide
uuugcagccauuuaaauua

SEQ ID NO: 921510 - RNA, 19 nt, Artificial Sequence
  Description of Artificial Sequence: Synthetic oligonucleotide
agaugcaagauagagacac

SEQ ID NO: 921511 - RNA, 19 nt, Artificial Sequence
  Description of Artificial Sequence: Synthetic oligonucleotide
ucugacuaggccaaaagga

SEQ ID NO: 921512 - RNA, 19 nt, Artificial Sequence
  Description of Artificial Sequence: Synthetic oligonucleotide
uacagauggauuuauguca

SEQ ID NO: 921513 - RNA, 19 nt, Artificial Sequence
  Description of Artificial Sequence: Synthetic oligonucleotide
  modified_base (10)..(10): a, c, u, g, unknown or other
aguaagcacnguuggaagg

SEQ ID NO: 921514 - RNA, 19 nt, Artificial Sequence
  Description of Artificial Sequence: Synthetic oligonucleotide
ugucguauaucugaggagg

SEQ ID NO: 921515 - RNA, 19 nt, Artificial Sequence
  Description of Artificial Sequence: Synthetic oligonucleotide
ugaauucuggacaaggagu

SEQ ID NO: 921516 - RNA, 19 nt, Artificial Sequence
  Description of Artificial Sequence: Synthetic oligonucleotide
caauauagucccuugagug

SEQ ID NO: 921517 - RNA, 19 nt, Artificial Sequence
  Description of Artificial Sequence: Synthetic oligonucleotide
uguccacuggucaauauag

SEQ ID NO: 921518 - RNA, 19 nt, Artificial Sequence
  Description of Artificial Sequence: Synthetic oligonucleotide
  modified_base (15)..(15): a, c, u, g, unknown or other
uguguaguaagcacnguug

SEQ ID NO: 921519 - RNA, 19 nt, Artificial Sequence
  Description of Artificial Sequence: Synthetic oligonucleotide
guuuauugugcucagaguc

SEQ ID NO: 921520 - RNA, 19 nt, Artificial Sequence
  Description of Artificial Sequence: Synthetic oligonucleotide
aauacagacacaugcggau

SEQ ID NO: 921521 - RNA, 19 nt, Artificial Sequence
  Description of Artificial Sequence: Synthetic oligonucleotide
accgauauucucuuagccg

SEQ ID NO: 921522 - RNA, 19 nt, Artificial Sequence
  Description of Artificial Sequence: Synthetic oligonucleotide
cacuaaauaaacgucuugg

SEQ ID NO: 921523 - RNA, 19 nt, Artificial Sequence
  Description of Artificial Sequence: Synthetic oligonucleotide
uguaaggcgucauccaccg

SEQ ID NO: 921524 - RNA, 19 nt, Artificial Sequence
  Description of Artificial Sequence: Synthetic oligonucleotide
ucgaucacuaacaucuuug

SEQ ID NO: 921525 - RNA, 19 nt, Artificial Sequence
  Description of Artificial Sequence: Synthetic oligonucleotide
aguaauagaucacaugaaa

SEQ ID NO: 921526 - RNA, 19 nt, Artificial Sequence
  Description of Artificial Sequence: Synthetic oligonucleotide
aguagugcugugugaauac

SEQ ID NO: 921527 - RNA, 19 nt, Artificial Sequence
  Description of Artificial Sequence: Synthetic oligonucleotide
uaucugaauuuuagguugg

SEQ ID NO: 921528 - RNA, 19 nt, Artificial Sequence
  Description of Artificial Sequence: Synthetic oligonucleotide
auucuggacaaggaguucc

SEQ ID NO: 921529 - RNA, 19 nt, Artificial Sequence
  Description of Artificial Sequence: Synthetic oligonucleotide
aucugacuaggccaaaagg

SEQ ID NO: 921530 - RNA, 19 nt, Artificial Sequence
  Description of Artificial Sequence: Synthetic oligonucleotide
gaguggagaugcuugaugc

SEQ ID NO: 921531 - RNA, 19 nt, Artificial Sequence
  Description of Artificial Sequence: Synthetic oligonucleotide
auggauuuaugucagagua

SEQ ID NO: 921532 - RNA, 19 nt, Artificial Sequence
  Description of Artificial Sequence: Synthetic oligonucleotide
uuuagguucugguagcgcu

SEQ ID NO: 921533 - RNA, 19 nt, Artificial Sequence
  Description of Artificial Sequence: Synthetic oligonucleotide
aaggagaccaaagcaagag

SEQ ID NO: 921534 - RNA, 19 nt, Artificial Sequence
  Description of Artificial Sequence: Synthetic oligonucleotide
uuuagguuggaucucucuc

SEQ ID NO: 921535 - RNA, 19 nt, Artificial Sequence
  Description of Artificial Sequence: Synthetic oligonucleotide
uccaccgauauucucuuag

SEQ ID NO: 921536 - RNA, 19 nt, Artificial Sequence
  Description of Artificial Sequence: Synthetic oligonucleotide
acuaaauaaacgucuugga

SEQ ID NO: 921537 - RNA, 19 nt, Artificial Sequence
  Description of Artificial Sequence: Synthetic oligonucleotide
uuuagggaaaggcuucucu

SEQ ID NO: 921538 - RNA, 19 nt, Artificial Sequence
  Description of Artificial Sequence: Synthetic oligonucleotide
caaacuauucccugagccc

SEQ ID NO: 921539 - RNA, 19 nt, Artificial Sequence
  Description of Artificial Sequence: Synthetic oligonucleotide
ucauugacagacgaggaug

SEQ ID NO: 921540 - RNA, 19 nt, Artificial Sequence
  Description of Artificial Sequence: Synthetic oligonucleotide
aucaauuaacaaacuaaac

SEQ ID NO: 921541 - RNA, 19 nt, Artificial Sequence
  Description of Artificial Sequence: Synthetic oligonucleotide
uagaucacaugaaauggac

SEQ ID NO: 921542 - RNA, 19 nt, Artificial Sequence
  Description of Artificial Sequence: Synthetic oligonucleotide
cacacuguagaacugguug

SEQ ID NO: 921543 - RNA, 19 nt, Artificial Sequence
  Description of Artificial Sequence: Synthetic oligonucleotide
uguucuaucacgucaucuc

SEQ ID NO: 921544 - RNA, 19 nt, Artificial Sequence
  Description of Artificial Sequence: Synthetic oligonucleotide
uaugucagaguaauagauc

SEQ ID NO: 921545 - RNA, 19 nt, Artificial Sequence
  Description of Artificial Sequence: Synthetic oligonucleotide
acacaugcggaucuguauc

SEQ ID NO: 921546 - RNA, 19 nt, Artificial Sequence
  Description of Artificial Sequence: Synthetic oligonucleotide
aacccaacgguccugcuga

SEQ ID NO: 921547 - RNA, 19 nt, Artificial Sequence
  Description of Artificial Sequence: Synthetic oligonucleotide
agggcuguccuuuuacuac

SEQ ID NO: 921548 - RNA, 19 nt, Artificial Sequence
  Description of Artificial Sequence: Synthetic oligonucleotide
aggagaccaaagcaagagc

SEQ ID NO: 921549 - RNA, 19 nt, Artificial Sequence
  Description of Artificial Sequence: Synthetic oligonucleotide
cuugggucgauucuccacg

SEQ ID NO: 921550 - RNA, 19 nt, Artificial Sequence
  Description of Artificial Sequence: Synthetic oligonucleotide
aauuuuagguuggaucucu

SEQ ID NO: 921551 - RNA, 19 nt, Artificial Sequence
  Description of Artificial Sequence: Synthetic oligonucleotide
  modified_base (11)..(11): a, c, u, g, unknown or other
uaguaagcacnguuggaag

SEQ ID NO: 921552 - RNA, 19 nt, Artificial Sequence
  Description of Artificial Sequence: Synthetic oligonucleotide
  modified_base (16)..(16): a, c, u, g, unknown or other
uuguguaguaagcacnguu

SEQ ID NO: 921553 - RNA, 19 nt, Artificial Sequence
  Description of Artificial Sequence: Synthetic oligonucleotide
ucacuaaauaaacgucuug

SEQ ID NO: 921554 - RNA, 19 nt, Artificial Sequence
  Description of Artificial Sequence: Synthetic oligonucleotide
agcuacaucuucaaggguc

SEQ ID NO: 921555 - RNA, 19 nt, Artificial Sequence
  Description of Artificial Sequence: Synthetic oligonucleotide
uguacggaugcuguaaggc

SEQ ID NO: 921556 - RNA, 19 nt, Artificial Sequence
  Description of Artificial Sequence: Synthetic oligonucleotide
ugacuaggccaaaaggagc

SEQ ID NO: 921557 - RNA, 19 nt, Artificial Sequence
  Description of Artificial Sequence: Synthetic oligonucleotide
ucguaccaaacguugaugu

SEQ ID NO: 921558 - RNA, 19 nt, Artificial Sequence
  Description of Artificial Sequence: Synthetic oligonucleotide
gauguacggaugcuguaag

SEQ ID NO: 921559 - RNA, 19 nt, Artificial Sequence
  Description of Artificial Sequence: Synthetic oligonucleotide
uggacaaggaguuccuagc

SEQ ID NO: 921560 - RNA, 19 nt, Artificial Sequence
  Description of Artificial Sequence: Synthetic oligonucleotide
agcaacuagaaguuaagua

SEQ ID NO: 921561 - RNA, 19 nt, Artificial Sequence
  Description of Artificial Sequence: Synthetic oligonucleotide
guacggaugcuguaaggcg

SEQ ID NO: 921562 - RNA, 19 nt, Artificial Sequence
  Description of Artificial Sequence: Synthetic oligonucleotide
agaucacaugaaauggacc

SEQ ID NO: 921563 - RNA, 19 nt, Artificial Sequence
  Description of Artificial Sequence: Synthetic oligonucleotide
uaugcagcacaaacuauuc

SEQ ID NO: 921564 - RNA, 19 nt, Artificial Sequence
  Description of Artificial Sequence: Synthetic oligonucleotide
uauauacuggcaauauguu

SEQ ID NO: 921565 - RNA, 19 nt, Artificial Sequence
  Description of Artificial Sequence: Synthetic oligonucleotide
agguagaugcaagauagag

SEQ ID NO: 921566 - RNA, 19 nt, Artificial Sequence
  Description of Artificial Sequence: Synthetic oligonucleotide
augcuguaaggcgucaucc

SEQ ID NO: 921567 - RNA, 19 nt, Artificial Sequence
  Description of Artificial Sequence: Synthetic oligonucleotide
uguuacagauggauuuaug

SEQ ID NO: 921568 - RNA, 19 nt, Artificial Sequence
  Description of Artificial Sequence: Synthetic oligonucleotide
agaacgcuggguuucgaag

SEQ ID NO: 921569 - RNA, 19 nt, Artificial Sequence
  Description of Artificial Sequence: Synthetic oligonucleotide
gguuggaucucucucuugg

SEQ ID NO: 921570 - RNA, 19 nt, Artificial Sequence
  Description of Artificial Sequence: Synthetic oligonucleotide
acuugggucgauucuccac

SEQ ID NO: 921571 - RNA, 19 nt, Artificial Sequence
  Description of Artificial Sequence: Synthetic oligonucleotide
ucagugucggaugcaaggg

SEQ ID NO: 921572 - RNA, 19 nt, Artificial Sequence
  Description of Artificial Sequence: Synthetic oligonucleotide
aauauguuacagauggauu

SEQ ID NO: 921573 - RNA, 19 nt, Artificial Sequence
  Description of Artificial Sequence: Synthetic oligonucleotide
ggcagaaagauuuaucuga

SEQ ID NO: 921574 - RNA, 19 nt, Artificial Sequence
  Description of Artificial Sequence: Synthetic oligonucleotide
augaaauggaccauguggu

SEQ ID NO: 921575 - RNA, 19 nt, Artificial Sequence
  Description of Artificial Sequence: Synthetic oligonucleotide
aauaagacacuccgcucau

SEQ ID NO: 921576 - RNA, 19 nt, Artificial Sequence
  Description of Artificial Sequence: Synthetic oligonucleotide
gaaauggaccaugugguac

SEQ ID NO: 921577 - RNA, 19 nt, Artificial Sequence
  Description of Artificial Sequence: Synthetic oligonucleotide
agucccgcauacuuggguc

SEQ ID NO: 921578 - RNA, 19 nt, Artificial Sequence
  Description of Artificial Sequence: Synthetic oligonucleotide
cuaaauaaacgucuuggaa

SEQ ID NO: 921579 - RNA, 19 nt, Artificial Sequence
  Description of Artificial Sequence: Synthetic oligonucleotide
uuuuagguuggaucucucu

SEQ ID NO: 921580 - RNA, 19 nt, Artificial Sequence
  Description of Artificial Sequence: Synthetic oligonucleotide
ugcacaccuugucaugccg

SEQ ID NO: 921581 - RNA, 19 nt, Artificial Sequence
  Description of Artificial Sequence: Synthetic oligonucleotide
uacggaugcuguaaggcgu

SEQ ID NO: 921582 - RNA, 19 nt, Artificial Sequence
  Description of Artificial Sequence: Synthetic oligonucleotide
  modified_base (6)..(6): a, c, u, g, unknown or other
agcacnguuggaaggagac

SEQ ID NO: 921583 - RNA, 19 nt, Artificial Sequence
  Description of Artificial Sequence: Synthetic oligonucleotide
ccgauauucucuuagccgg

SEQ ID NO: 921584 - RNA, 19 nt, Artificial Sequence
  Description of Artificial Sequence: Synthetic oligonucleotide
ggcaguuaaggguugcugg

SEQ ID NO: 921585 - RNA, 19 nt, Artificial Sequence
  Description of Artificial Sequence: Synthetic oligonucleotide
aaucgugugcucccuuuca

SEQ ID NO: 921586 - RNA, 19 nt, Artificial Sequence
  Description of Artificial Sequence: Synthetic oligonucleotide
acuggcaauauguuacaga

SEQ ID NO: 921587 - RNA, 19 nt, Artificial Sequence
  Description of Artificial Sequence: Synthetic oligonucleotide
ggugugaaaacauuuaaua

SEQ ID NO: 921588 - RNA, 19 nt, Artificial Sequence
  Description of Artificial Sequence: Synthetic oligonucleotide
gcagguagaugcaagauag

SEQ ID NO: 921589 - RNA, 19 nt, Artificial Sequence
  Description of Artificial Sequence: Synthetic oligonucleotide
ugugguaccccagugcaug

SEQ ID NO: 921590 - RNA, 19 nt, Artificial Sequence
  Description of Artificial Sequence: Synthetic oligonucleotide
cagaguaauagaucacaug

SEQ ID NO: 921591 - RNA, 19 nt, Artificial Sequence
  Description of Artificial Sequence: Synthetic oligonucleotide
guauaucugaggaggaggc

SEQ ID NO: 921592 - RNA, 19 nt, Artificial Sequence
  Description of Artificial Sequence: Synthetic oligonucleotide
gacaaauaagacacuccgc

SEQ ID NO: 921593 - RNA, 19 nt, Artificial Sequence
  Description of Artificial Sequence: Synthetic oligonucleotide
uuuaugguucacacacuuc

SEQ ID NO: 921594 - RNA, 19 nt, Artificial Sequence
  Description of Artificial Sequence: Synthetic oligonucleotide
guuugucguauaucugagg

SEQ ID NO: 921595 - RNA, 19 nt, Artificial Sequence
  Description of Artificial Sequence: Synthetic oligonucleotide
ucuucaagggucugagagu

SEQ ID NO: 921596 - RNA, 19 nt, Artificial Sequence
  Description of Artificial Sequence: Synthetic oligonucleotide
guaccaaacguugauguac

SEQ ID NO: 921597 - RNA, 19 nt, Artificial Sequence
  Description of Artificial Sequence: Synthetic oligonucleotide
gaaggugagucccgcauac

SEQ ID NO: 921598 - RNA, 19 nt, Artificial Sequence
  Description of Artificial Sequence: Synthetic oligonucleotide
uguguguguguguauuugu

SEQ ID NO: 921599 - RNA, 19 nt, Artificial Sequence
  Description of Artificial Sequence: Synthetic oligonucleotide
gaaguuaaguauacauuuc

SEQ ID NO: 921600 - RNA, 19 nt, Artificial Sequence
  Description of Artificial Sequence: Synthetic oligonucleotide
gacaaggaguuccuagcug

SEQ ID NO: 921601 - RNA, 19 nt, Artificial Sequence
  Description of Artificial Sequence: Synthetic oligonucleotide
uaucacgucaucuccugaa

SEQ ID NO: 921602 - RNA, 19 nt, Artificial Sequence
  Description of Artificial Sequence: Synthetic oligonucleotide
uuagggaaaggcuucucua

SEQ ID NO: 921603 - RNA, 19 nt, Artificial Sequence
  Description of Artificial Sequence: Synthetic oligonucleotide
cucagagucggcugggaag

SEQ ID NO: 921604 - RNA, 19 nt, Artificial Sequence
  Description of Artificial Sequence: Synthetic oligonucleotide
ugucagaguaauagaucac

SEQ ID NO: 921605 - RNA, 19 nt, Artificial Sequence
  Description of Artificial Sequence: Synthetic oligonucleotide
cuagaaguuaaguauacau

SEQ ID NO: 921606 - RNA, 19 nt, Artificial Sequence
  Description of Artificial Sequence: Synthetic oligonucleotide
caccgauauucucuuagcc

SEQ ID NO: 921607 - RNA, 19 nt, Artificial Sequence
  Description of Artificial Sequence: Synthetic oligonucleotide
auguacggaugcuguaagg

SEQ ID NO: 921608 - RNA, 19 nt, Artificial Sequence
  Description of Artificial Sequence: Synthetic oligonucleotide
agccgggucgaucacuaac

SEQ ID NO: 921609 - RNA, 19 nt, Artificial Sequence
  Description of Artificial Sequence: Synthetic oligonucleotide
aucacgucaucuccugaag

SEQ ID NO: 921610 - RNA, 19 nt, Artificial Sequence
  Description of Artificial Sequence: Synthetic oligonucleotide
ucagagucggcugggaaga

SEQ ID NO: 921611 - RNA, 19 nt, Artificial Sequence
  Description of Artificial Sequence: Synthetic oligonucleotide
acaucugguacagacaaau

SEQ ID NO: 921612 - RNA, 19 nt, Artificial Sequence
  Description of Artificial Sequence: Synthetic oligonucleotide
ggccaaaaggagcagguag

SEQ ID NO: 921613 - RNA, 19 nt, Artificial Sequence
  Description of Artificial Sequence: Synthetic oligonucleotide
acaaguuggcauccaucag

SEQ ID NO: 921614 - RNA, 19 nt, Artificial Sequence
  Description of Artificial Sequence: Synthetic oligonucleotide
  modified_base (4)..(4): a, c, u, g, unknown or other
cacnguuggaaggagacca

SEQ ID NO: 921615 - RNA, 19 nt, Artificial Sequence
  Description of Artificial Sequence: Synthetic oligonucleotide
cagacgaggauggagggag

SEQ ID NO: 921616 - RNA, 19 nt, Artificial Sequence
  Description of Artificial Sequence: Synthetic oligonucleotide
uauagucccuugaguggag

SEQ ID NO: 921617 - RNA, 19 nt, Artificial Sequence
  Description of Artificial Sequence: Synthetic oligonucleotide
aagggcaguuaaggguugc

SEQ ID NO: 921618 - RNA, 19 nt, Artificial Sequence
  Description of Artificial Sequence: Synthetic oligonucleotide
caucacuaaauaaacgucu

SEQ ID NO: 921619 - RNA, 19 nt, Artificial Sequence
  Description of Artificial Sequence: Synthetic oligonucleotide
acacacaugcuggaugggg

SEQ ID NO: 921620 - RNA, 19 nt, Artificial Sequence
  Description of Artificial Sequence: Synthetic oligonucleotide
aaacguugauguacggaug

SEQ ID NO: 921621 - RNA, 19 nt, Artificial Sequence
  Description of Artificial Sequence: Synthetic oligonucleotide
auagaucacaugaaaugga

SEQ ID NO: 921622 - RNA, 19 nt, Artificial Sequence
  Description of Artificial Sequence: Synthetic oligonucleotide
agugucggaugcaaggguc

SEQ ID NO: 921623 - RNA, 19 nt, Artificial Sequence
  Description of Artificial Sequence: Synthetic oligonucleotide
cauacuugggucgauucuc

SEQ ID NO: 921624 - RNA, 19 nt, Artificial Sequence
  Description of Artificial Sequence: Synthetic oligonucleotide
ucguauaucugaggaggag

SEQ ID NO: 921625 - RNA, 19 nt, Artificial Sequence
  Description of Artificial Sequence: Synthetic oligonucleotide
gucagaguaauagaucaca

SEQ ID NO: 921626 - RNA, 19 nt, Artificial Sequence
  Description of Artificial Sequence: Synthetic oligonucleotide
uagugugugugugugugug

SEQ ID NO: 921627 - RNA, 19 nt, Artificial Sequence
  Description of Artificial Sequence: Synthetic oligonucleotide
ugauguacggaugcuguaa

SEQ ID NO: 921628 - RNA, 19 nt, Artificial Sequence
  Description of Artificial Sequence: Synthetic oligonucleotide
gugugugugugugugugcg

SEQ ID NO: 921629 - RNA, 19 nt, Artificial Sequence
  Description of Artificial Sequence: Synthetic oligonucleotide
aagaacgcuggguuucgaa

SEQ ID NO: 921630 - RNA, 19 nt, Artificial Sequence
  Description of Artificial Sequence: Synthetic oligonucleotide
gaguucauuacuuccuugu

SEQ ID NO: 921631 - RNA, 19 nt, Artificial Sequence
  Description of Artificial Sequence: Synthetic oligonucleotide
auacagacacaugcggauc

SEQ ID NO: 921632 - RNA, 19 nt, Artificial Sequence
  Description of Artificial Sequence: Synthetic oligonucleotide
cuuggugugugugugugug

SEQ ID NO: 921633 - RNA, 19 nt, Artificial Sequence
  Description of Artificial Sequence: Synthetic oligonucleotide
cacacaacaucugguacag

SEQ ID NO: 921634 - RNA, 19 nt, Artificial Sequence
  Description of Artificial Sequence: Synthetic oligonucleotide
cacuuuagggaaaggcuuc

SEQ ID NO: 921635 - RNA, 19 nt, Artificial Sequence
  Description of Artificial Sequence: Synthetic oligonucleotide
aaguagugcugugugaaua

SEQ ID NO: 921636 - RNA, 19 nt, Artificial Sequence
  Description of Artificial Sequence: Synthetic oligonucleotide
agagcaacuagaaguuaag

SEQ ID NO: 921637 - RNA, 19 nt, Artificial Sequence
  Description of Artificial Sequence: Synthetic oligonucleotide
agaugcuugaugccacaca

SEQ ID NO: 921638 - RNA, 19 nt, Artificial Sequence
  Description of Artificial Sequence: Synthetic oligonucleotide
caggcagaaagauuuaucu

SEQ ID NO: 921639 - RNA, 19 nt, Artificial Sequence
  Description of Artificial Sequence: Synthetic oligonucleotide
ugugugugugugugugugc

SEQ ID NO: 921640 - RNA, 19 nt, Artificial Sequence
  Description of Artificial Sequence: Synthetic oligonucleotide
  modified_base (8)..(8): a, c, u, g, unknown or other
uaagcacnguuggaaggag

SEQ ID NO: 921641 - RNA, 19 nt, Artificial Sequence
  Description of Artificial Sequence: Synthetic oligonucleotide
aguuaaggguugcugguuu

SEQ ID NO: 921642 - RNA, 19 nt, Artificial Sequence
  Description of Artificial Sequence: Synthetic oligonucleotide
gugugugugugcgugugcg

SEQ ID NO: 921643 - RNA, 19 nt, Artificial Sequence
  Description of Artificial Sequence: Synthetic oligonucleotide
uagaugcaagauagagaca

SEQ ID NO: 921644 - RNA, 19 nt, Artificial Sequence
  Description of Artificial Sequence: Synthetic oligonucleotide
agcagguagaugcaagaua

SEQ ID NO: 921645 - RNA, 19 nt, Artificial Sequence
  Description of Artificial Sequence: Synthetic oligonucleotide
caacuagaaguuaaguaua

SEQ ID NO: 921646 - RNA, 19 nt, Artificial Sequence
  Description of Artificial Sequence: Synthetic oligonucleotide
uggugugugugugugugug

SEQ ID NO: 921647 - RNA, 19 nt, Artificial Sequence
  Description of Artificial Sequence: Synthetic oligonucleotide
caggcggcuagucaccugc

SEQ ID NO: 921648 - RNA, 19 nt, Artificial Sequence
  Description of Artificial Sequence: Synthetic oligonucleotide
cguaguuucugacuguggg

SEQ ID NO: 921649 - RNA, 19 nt, Artificial Sequence
  Description of Artificial Sequence: Synthetic oligonucleotide
uuagccgggucgaucacua

SEQ ID NO: 921650 - RNA, 19 nt, Artificial Sequence
  Description of Artificial Sequence: Synthetic oligonucleotide
ugugugugugugcgugugc

SEQ ID NO: 921651 - RNA, 19 nt, Artificial Sequence
  Description of Artificial Sequence: Synthetic oligonucleotide
caugcggaucuguaucuac

SEQ ID NO: 921652 - RNA, 19 nt, Artificial Sequence
  Description of Artificial Sequence: Synthetic oligonucleotide
uagaugaguucuuuccauu

SEQ ID NO: 921653 - RNA, 19 nt, Artificial Sequence
  Description of Artificial Sequence: Synthetic oligonucleotide
uccagcguuuucuggggug

SEQ ID NO: 921654 - RNA, 19 nt, Artificial Sequence
  Description of Artificial Sequence: Synthetic oligonucleotide
cuuugacaacaaaucccug

SEQ ID NO: 921655 - RNA, 19 nt, Artificial Sequence
  Description of Artificial Sequence: Synthetic oligonucleotide
  modified_base (9)..(9): a, c, u, g, unknown or other
guaagcacnguuggaagga

SEQ ID NO: 921656 - RNA, 19 nt, Artificial Sequence
  Description of Artificial Sequence: Synthetic oligonucleotide
caugccguuugaagggcag

SEQ ID NO: 921657 - RNA, 19 nt, Artificial Sequence
  Description of Artificial Sequence: Synthetic oligonucleotide
gggucgaucacuaacaucu

SEQ ID NO: 921658 - RNA, 19 nt, Artificial Sequence
  Description of Artificial Sequence: Synthetic oligonucleotide
gucccgcauacuugggucg

SEQ ID NO: 921659 - RNA, 19 nt, Artificial Sequence
  Description of Artificial Sequence: Synthetic oligonucleotide
cagaagcuacaucuucaag

SEQ ID NO: 921660 - RNA, 19 nt, Artificial Sequence
  Description of Artificial Sequence: Synthetic oligonucleotide
uuacuuccuuguagaugag

SEQ ID NO: 921661 - RNA, 19 nt, Artificial Sequence
  Description of Artificial Sequence: Synthetic oligonucleotide
gcuguguucuaucacguca

SEQ ID NO: 921662 - RNA, 19 nt, Artificial Sequence
  Description of Artificial Sequence: Synthetic oligonucleotide
gaguaauagaucacaugaa

SEQ ID NO: 921663 - RNA, 19 nt, Artificial Sequence
  Description of Artificial Sequence: Synthetic oligonucleotide
ccaucacuaaauaaacguc

SEQ ID NO: 921664 - RNA, 19 nt, Artificial Sequence
  Description of Artificial Sequence: Synthetic oligonucleotide
guaauagaucacaugaaau

SEQ ID NO: 921665 - RNA, 19 nt, Artificial Sequence
  Description of Artificial Sequence: Synthetic oligonucleotide
cagcuuaaucaauuaacaa

SEQ ID NO: 921666 - RNA, 19 nt, Artificial Sequence
  Description of Artificial Sequence: Synthetic oligonucleotide
cugacacaaguuggcaucc

SEQ ID NO: 921667 - RNA, 19 nt, Artificial Sequence
  Description of Artificial Sequence: Synthetic oligonucleotide
  modified_base (7)..(7): a, c, u, g, unknown or other
aagcacnguuggaaggaga

SEQ ID NO: 921668 - RNA, 19 nt, Artificial Sequence
  Description of Artificial Sequence: Synthetic oligonucleotide
cuugaguggagaugcuuga

SEQ ID NO: 921669 - RNA, 19 nt, Artificial Sequence
  Description of Artificial Sequence: Synthetic oligonucleotide
acauacagcuuaaucaauu

SEQ ID NO: 921670 - RNA, 19 nt, Artificial Sequence
  Description of Artificial Sequence: Synthetic oligonucleotide
cugaagaacgcuggguuuc

SEQ ID NO: 921671 - RNA, 19 nt, Artificial Sequence
  Description of Artificial Sequence: Synthetic oligonucleotide
cuaauugugucugauuugu

SEQ ID NO: 921672 - RNA, 19 nt, Artificial Sequence
  Description of Artificial Sequence: Synthetic oligonucleotide
agagggcuguccuuuuacu

SEQ ID NO: 921673 - RNA, 19 nt, Artificial Sequence
  Description of Artificial Sequence: Synthetic oligonucleotide
acaucucuaaguagugcug

SEQ ID NO: 921674 - RNA, 19 nt, Artificial Sequence
  Description of Artificial Sequence: Synthetic oligonucleotide
ucaaucgugugcucccuuu

SEQ ID NO: 921675 - RNA, 19 nt, Artificial Sequence
  Description of Artificial Sequence: Synthetic oligonucleotide
ugugugugugugugugugu

SEQ ID NO: 921676 - RNA, 19 nt, Artificial Sequence
  Description of Artificial Sequence: Synthetic oligonucleotide
uuuguccacuggucaauau

SEQ ID NO: 921677 - RNA, 19 nt, Artificial Sequence
  Description of Artificial Sequence: Synthetic oligonucleotide
uguguguguguguguauuu

SEQ ID NO: 921678 - RNA, 19 nt, Artificial Sequence
  Description of Artificial Sequence: Synthetic oligonucleotide
auuuuagguuggaucucuc

SEQ ID NO: 921679 - RNA, 19 nt, Artificial Sequence
  Description of Artificial Sequence: Synthetic oligonucleotide
agggucguaccaaacguug

SEQ ID NO: 921680 - RNA, 19 nt, Artificial Sequence
  Description of Artificial Sequence: Synthetic oligonucleotide
ccuugaguggagaugcuug

SEQ ID NO: 921681 - RNA, 19 nt, Artificial Sequence
  Description of Artificial Sequence: Synthetic oligonucleotide
  modified_base (17)..(17): a, c, u, g, unknown or other
uuuguguaguaagcacngu

SEQ ID NO: 921682 - RNA, 19 nt, Artificial Sequence
  Description of Artificial Sequence: Synthetic oligonucleotide
ugugugugugugugcgugu

SEQ ID NO: 921683 - RNA, 19 nt, Artificial Sequence
  Description of Artificial Sequence: Synthetic oligonucleotide
cuggauggggccacugcac

SEQ ID NO: 921684 - RNA, 19 nt, Artificial Sequence
  Description of Artificial Sequence: Synthetic oligonucleotide
gcagccauuuaaauuacac

SEQ ID NO: 921685 - RNA, 19 nt, Artificial Sequence
  Description of Artificial Sequence: Synthetic oligonucleotide
gugugugugugugugugug

SEQ ID NO: 921686 - RNA, 19 nt, Artificial Sequence
  Description of Artificial Sequence: Synthetic oligonucleotide
gguagaugcaagauagaga

SEQ ID NO: 921687 - RNA, 19 nt, Artificial Sequence
  Description of Artificial Sequence: Synthetic oligonucleotide
agugugugugugugugugu

SEQ ID NO: 921688 - RNA, 19 nt, Artificial Sequence
  Description of Artificial Sequence: Synthetic oligonucleotide
cacguaguuucugacugug

SEQ ID NO: 921689 - RNA, 19 nt, Artificial Sequence
  Description of Artificial Sequence: Synthetic oligonucleotide
aucacuaaauaaacgucuu

SEQ ID NO: 921690 - RNA, 19 nt, Artificial Sequence
  Description of Artificial Sequence: Synthetic oligonucleotide
cuggucgguggacauggag

SEQ ID NO: 921691 - RNA, 19 nt, Artificial Sequence
  Description of Artificial Sequence: Synthetic oligonucleotide
caauauguuacagauggau

SEQ ID NO: 921692 - RNA, 19 nt, Artificial Sequence
  Description of Artificial Sequence: Synthetic oligonucleotide
ucucuuggugugugugugu

SEQ ID NO: 921693 - RNA, 19 nt, Artificial Sequence
  Description of Artificial Sequence: Synthetic oligonucleotide
ucuuggugugugugugugu

SEQ ID NO: 921694 - RNA, 19 nt, Artificial Sequence
  Description of Artificial Sequence: Synthetic oligonucleotide
gugguaccccagugcaugg

SEQ ID NO: 921695 - RNA, 19 nt, Artificial Sequence
  Description of Artificial Sequence: Synthetic oligonucleotide
guguguguguguguauuug

SEQ ID NO: 921696 - RNA, 19 nt, Artificial Sequence
  Description of Artificial Sequence: Synthetic oligonucleotide
caccugugcugaaggagag

SEQ ID NO: 921697 - RNA, 19 nt, Artificial Sequence
  Description of Artificial Sequence: Synthetic oligonucleotide
gucguaccaaacguugaug

SEQ ID NO: 921698 - RNA, 19 nt, Artificial Sequence
  Description of Artificial Sequence: Synthetic oligonucleotide
ucggaugcaagggucuggu

SEQ ID NO: 921699 - RNA, 19 nt, Artificial Sequence
  Description of Artificial Sequence: Synthetic oligonucleotide
gugugugugugugugcgug

SEQ ID NO: 921700 - RNA, 19 nt, Artificial Sequence
  Description of Artificial Sequence: Synthetic oligonucleotide
ccugacacaaguuggcauc

SEQ ID NO: 921701 - RNA, 19 nt, Artificial Sequence
  Description of Artificial Sequence: Synthetic oligonucleotide
ugugugugugugugugcgu

SEQ ID NO: 921702 - RNA, 19 nt, Artificial Sequence
  Description of Artificial Sequence: Synthetic oligonucleotide
cucuuggugugugugugug

SEQ ID NO: 921703 - RNA, 19 nt, Artificial Sequence
  Description of Artificial Sequence: Synthetic oligonucleotide
cguauaucugaggaggagg

SEQ ID NO: 921704 - RNA, 19 nt, Artificial Sequence
  Description of Artificial Sequence: Synthetic oligonucleotide
uugggucgauucuccacgu

SEQ ID NO: 921705 - RNA, 19 nt, Artificial Sequence
  Description of Artificial Sequence: Synthetic oligonucleotide
uguguguguguguguguau

SEQ ID NO: 921706 - RNA, 19 nt, Artificial Sequence
  Description of Artificial Sequence: Synthetic oligonucleotide
aacgguccugcugaggcuu

SEQ ID NO: 921707 - RNA, 19 nt, Artificial Sequence
  Description of Artificial Sequence: Synthetic oligonucleotide
cugcacaccuugucaugcc

SEQ ID NO: 921708 - RNA, 19 nt, Artificial Sequence
  Description of Artificial Sequence: Synthetic oligonucleotide
gucaccugcaacaacccaa

SEQ ID NO: 921709 - RNA, 19 nt, Artificial Sequence
  Description of Artificial Sequence: Synthetic oligonucleotide
ugucggaugcaagggucug

SEQ ID NO: 921710 - RNA, 19 nt, Artificial Sequence
  Description of Artificial Sequence: Synthetic oligonucleotide
ugcuguguucuaucacguc

SEQ ID NO: 921711 - RNA, 19 nt, Artificial Sequence
  Description of Artificial Sequence: Synthetic oligonucleotide
caaucgugugcucccuuuc

SEQ ID NO: 921712 - RNA, 19 nt, Artificial Sequence
  Description of Artificial Sequence: Synthetic oligonucleotide
aucgugugcucccuuucau

SEQ ID NO: 921713 - RNA, 19 nt, Artificial Sequence
  Description of Artificial Sequence: Synthetic oligonucleotide
uuggugugugugugugugu

SEQ ID NO: 921714 - RNA, 19 nt, Artificial Sequence
  Description of Artificial Sequence: Synthetic oligonucleotide
acguaguuucugacugugg

SEQ ID NO: 921715 - RNA, 19 nt, Artificial Sequence
  Description of Artificial Sequence: Synthetic oligonucleotide
agcugugauagagaacuuu

SEQ ID NO: 921716 - RNA, 19 nt, Artificial Sequence
  Description of Artificial Sequence: Synthetic oligonucleotide
auguuacagauggauuuau

SEQ ID NO: 921717 - RNA, 19 nt, Artificial Sequence
  Description of Artificial Sequence: Synthetic oligonucleotide
acggaugcuguaaggcguc

SEQ ID NO: 921718 - RNA, 19 nt, Artificial Sequence
  Description of Artificial Sequence: Synthetic oligonucleotide
gguaccccagugcauggug

SEQ ID NO: 921719 - RNA, 19 nt, Artificial Sequence
  Description of Artificial Sequence: Synthetic oligonucleotide
acuuuguccacuggucaau

SEQ ID NO: 921720 - RNA, 19 nt, Artificial Sequence
  Description of Artificial Sequence: Synthetic oligonucleotide
uucaaucgugugcucccuu

SEQ ID NO: 921721 - RNA, 19 nt, Artificial Sequence
  Description of Artificial Sequence: Synthetic oligonucleotide
gucggaugcaagggucugg

SEQ ID NO: 921722 - RNA, 19 nt, Artificial Sequence
  Description of Artificial Sequence: Synthetic oligonucleotide
ucucuuagccgggucgauc

SEQ ID NO: 921723 - RNA, 19 nt, Artificial Sequence
  Description of Artificial Sequence: Synthetic oligonucleotide
uaccccagugcaugguguc

SEQ ID NO: 921724 - RNA, 19 nt, Artificial Sequence
  Description of Artificial Sequence: Synthetic oligonucleotide
gugcaugugugcuguguuc

SEQ ID NO: 921725 - RNA, 19 nt, Artificial Sequence
  Description of Artificial Sequence: Synthetic oligonucleotide
gugugaauacagacacaug

SEQ ID NO: 921726 - RNA, 19 nt, Artificial Sequence
  Description of Artificial Sequence: Synthetic oligonucleotide
gucgaggacagcaucauau

SEQ ID NO: 921727 - RNA, 19 nt, Artificial Sequence
  Description of Artificial Sequence: Synthetic oligonucleotide
auaagacacuccgcucaug

SEQ ID NO: 921728 - RNA, 19 nt, Artificial Sequence
  Description of Artificial Sequence: Synthetic oligonucleotide
caccugcaacaacccaacg

SEQ ID NO: 921729 - RNA, 19 nt, Artificial Sequence
  Description of Artificial Sequence: Synthetic oligonucleotide
agcuuagcugugauagaga

SEQ ID NO: 921730 - RNA, 19 nt, Artificial Sequence
  Description of Artificial Sequence: Synthetic oligonucleotide
ccaccgauauucucuuagc

SEQ ID NO: 921731 - RNA, 19 nt, Artificial Sequence
  Description of Artificial Sequence: Synthetic oligonucleotide
gugugugugugugcgugug

SEQ ID NO: 921732 - RNA, 19 nt, Artificial Sequence
  Description of Artificial Sequence: Synthetic oligonucleotide
gucguauaucugaggagga

SEQ ID NO: 921733 - RNA, 19 nt, Artificial Sequence
  Description of Artificial Sequence: Synthetic oligonucleotide
augccacacaacaucuggu

SEQ ID NO: 921734 - RNA, 19 nt, Artificial Sequence
  Description of Artificial Sequence: Synthetic oligonucleotide
gagcaacuagaaguuaagu

SEQ ID NO: 921735 - RNA, 19 nt, Artificial Sequence
  Description of Artificial Sequence: Synthetic oligonucleotide
ugccguuugaagggcaguu

SEQ ID NO: 921736 - RNA, 19 nt, Artificial Sequence
  Description of Artificial Sequence: Synthetic oligonucleotide
gccacugcacaccuuguca

SEQ ID NO: 921737 - RNA, 19 nt, Artificial Sequence
  Description of Artificial Sequence: Synthetic oligonucleotide
gucauugacagacgaggau

SEQ ID NO: 921738 - RNA, 19 nt, Artificial Sequence
  Description of Artificial Sequence: Synthetic oligonucleotide
gauauucucuuagccgggu

SEQ ID NO: 921739 - RNA, 19 nt, Artificial Sequence
  Description of Artificial Sequence: Synthetic oligonucleotide
gaggaggcgccuccacuuc

SEQ ID NO: 921740 - RNA, 19 nt, Artificial Sequence
  Description of Artificial Sequence: Synthetic oligonucleotide
ucuggucgguggacaugga

SEQ ID NO: 921741 - RNA, 19 nt, Artificial Sequence
  Description of Artificial Sequence: Synthetic oligonucleotide
cuaucacgucaucuccuga

SEQ ID NO: 921742 - RNA, 19 nt, Artificial Sequence
  Description of Artificial Sequence: Synthetic oligonucleotide
ucccgcauacuugggucga

SEQ ID NO: 921743 - RNA, 19 nt, Artificial Sequence
  Description of Artificial Sequence: Synthetic oligonucleotide
agcguuuucugggguguga

SEQ ID NO: 921744 - RNA, 19 nt, Artificial Sequence
  Description of Artificial Sequence: Synthetic oligonucleotide
acguugauguacggaugcu

SEQ ID NO: 921745 - RNA, 19 nt, Artificial Sequence
  Description of Artificial Sequence: Synthetic oligonucleotide
acaacccaacgguccugcu

SEQ ID NO: 921746 - RNA, 19 nt, Artificial Sequence
  Description of Artificial Sequence: Synthetic oligonucleotide
cacaugcggaucuguaucu

SEQ ID NO: 921747 - RNA, 19 nt, Artificial Sequence
  Description of Artificial Sequence: Synthetic oligonucleotide
cuguguucuaucacgucau

SEQ ID NO: 921748 - RNA, 19 nt, Artificial Sequence
  Description of Artificial Sequence: Synthetic oligonucleotide
caucugguacagacaaaua

SEQ ID NO: 921749 - RNA, 19 nt, Artificial Sequence
  Description of Artificial Sequence: Synthetic oligonucleotide
gcggcuagucaccugcaac

SEQ ID NO: 921750 - RNA, 19 nt, Artificial Sequence
  Description of Artificial Sequence: Synthetic oligonucleotide
agggagacucucacugcug

SEQ ID NO: 921751 - RNA, 19 nt, Artificial Sequence
  Description of Artificial Sequence: Synthetic oligonucleotide
gcaggcagaaagauuuauc

SEQ ID NO: 921752 - RNA, 19 nt, Artificial Sequence
  Description of Artificial Sequence: Synthetic oligonucleotide
cuacaucuucaagggucug

SEQ ID NO: 921753 - RNA, 19 nt, Artificial Sequence
  Description of Artificial Sequence: Synthetic oligonucleotide
caagggucuggucggugga

SEQ ID NO: 921754 - RNA, 19 nt, Artificial Sequence
  Description of Artificial Sequence: Synthetic oligonucleotide
agggcaguuaaggguugcu

SEQ ID NO: 921755 - RNA, 19 nt, Artificial Sequence
  Description of Artificial Sequence: Synthetic oligonucleotide
  modified_base (3)..(3): a, c, u, g, unknown or other
acnguuggaaggagaccaa

SEQ ID NO: 921756 - RNA, 19 nt, Artificial Sequence
  Description of Artificial Sequence: Synthetic oligonucleotide
gccauuuaaucaguucaga

SEQ ID NO: 921757 - RNA, 19 nt, Artificial Sequence
  Description of Artificial Sequence: Synthetic oligonucleotide
gugugugugugugugugua

SEQ ID NO: 921758 - RNA, 19 nt, Artificial Sequence
  Description of Artificial Sequence: Synthetic oligonucleotide
ucgaaggcaggcggcuagu

SEQ ID NO: 921759 - RNA, 19 nt, Artificial Sequence
  Description of Artificial Sequence: Synthetic oligonucleotide
ggacaaggaguuccuagcu

SEQ ID NO: 921760 - RNA, 19 nt, Artificial Sequence
  Description of Artificial Sequence: Synthetic oligonucleotide
gcaguuaaggguugcuggu

SEQ ID NO: 921761 - RNA, 19 nt, Artificial Sequence
  Description of Artificial Sequence: Synthetic oligonucleotide
acacuccgcucauggucca

SEQ ID NO: 921762 - RNA, 19 nt, Artificial Sequence
  Description of Artificial Sequence: Synthetic oligonucleotide
gaagaacgcuggguuucga

SEQ ID NO: 921763 - RNA, 19 nt, Artificial Sequence
  Description of Artificial Sequence: Synthetic oligonucleotide
acccaacgguccugcugag

SEQ ID NO: 921764 - RNA, 19 nt, Artificial Sequence
  Description of Artificial Sequence: Synthetic oligonucleotide
guagugugugugugugugu

SEQ ID NO: 921765 - RNA, 19 nt, Artificial Sequence
  Description of Artificial Sequence: Synthetic oligonucleotide
ggaguuccuagcugcucga

SEQ ID NO: 921766 - RNA, 19 nt, Artificial Sequence
  Description of Artificial Sequence: Synthetic oligonucleotide
augccguuugaagggcagu

SEQ ID NO: 921767 - RNA, 19 nt, Artificial Sequence
  Description of Artificial Sequence: Synthetic oligonucleotide
cugguuuugcagccauuua

SEQ ID NO: 921768 - RNA, 19 nt, Artificial Sequence
  Description of Artificial Sequence: Synthetic oligonucleotide
gcaacaacccaacgguccu

SEQ ID NO: 921769 - RNA, 19 nt, Artificial Sequence
  Description of Artificial Sequence: Synthetic oligonucleotide
guaagcccucuuggcauga

SEQ ID NO: 921770 - RNA, 19 nt, Artificial Sequence
  Description of Artificial Sequence: Synthetic oligonucleotide
acaugcggaucuguaucua

SEQ ID NO: 921771 - RNA, 19 nt, Artificial Sequence
  Description of Artificial Sequence: Synthetic oligonucleotide
gucgauucuccacguaguu

SEQ ID NO: 921772 - RNA, 19 nt, Artificial Sequence
  Description of Artificial Sequence: Synthetic oligonucleotide
ccaaacguugauguacgga

SEQ ID NO: 921773 - RNA, 19 nt, Artificial Sequence
  Description of Artificial Sequence: Synthetic oligonucleotide
gcauacuugggucgauucu

SEQ ID NO: 921774 - RNA, 19 nt, Artificial Sequence
  Description of Artificial Sequence: Synthetic oligonucleotide
  modified_base (2)..(2): a, c, u, g, unknown or other
cnguuggaaggagaccaaa

SEQ ID NO: 921775 - RNA, 19 nt, Artificial Sequence
  Description of Artificial Sequence: Synthetic oligonucleotide
gccgggucgaucacuaaca

SEQ ID NO: 921776 - RNA, 19 nt, Artificial Sequence
  Description of Artificial Sequence: Synthetic oligonucleotide
cgcauacuugggucgauuc

SEQ ID NO: 921777 - RNA, 19 nt, Artificial Sequence
  Description of Artificial Sequence: Synthetic oligonucleotide
ggcuguccuuuuacuacgc

SEQ ID NO: 921778 - RNA, 19 nt, Artificial Sequence
  Description of Artificial Sequence: Synthetic oligonucleotide
ggucguaccaaacguugau

SEQ ID NO: 921779 - RNA, 19 nt, Artificial Sequence
  Description of Artificial Sequence: Synthetic oligonucleotide
ccgguaagcccucuuggca

SEQ ID NO: 921780 - RNA, 19 nt, Artificial Sequence
  Description of Artificial Sequence: Synthetic oligonucleotide
ccagugcauggugucuugg

SEQ ID NO: 921781 - RNA, 19 nt, Artificial Sequence
  Description of Artificial Sequence: Synthetic oligonucleotide
uagccgggucgaucacuaa

SEQ ID NO: 921782 - RNA, 19 nt, Artificial Sequence
  Description of Artificial Sequence: Synthetic oligonucleotide
cagagucggcugggaagag

SEQ ID NO: 921783 - RNA, 19 nt, Artificial Sequence
  Description of Artificial Sequence: Synthetic oligonucleotide
guaaggcgucauccaccga

SEQ ID NO: 921784 - RNA, 19 nt, Artificial Sequence
  Description of Artificial Sequence: Synthetic oligonucleotide
aagggucggcugagcuucu

SEQ ID NO: 921785 - RNA, 19 nt, Artificial Sequence
  Description of Artificial Sequence: Synthetic oligonucleotide
cagcguuuucuggggugug

SEQ ID NO: 921786 - RNA, 19 nt, Artificial Sequence
  Description of Artificial Sequence: Synthetic oligonucleotide
guguguguguguauuuguu

SEQ ID NO: 921787 - RNA, 19 nt, Artificial Sequence
  Description of Artificial Sequence: Synthetic oligonucleotide
gggucguaccaaacguuga

SEQ ID NO: 921788 - RNA, 19 nt, Artificial Sequence
  Description of Artificial Sequence: Synthetic oligonucleotide
gugucggaugcaagggucu

SEQ ID NO: 921789 - RNA, 19 nt, Artificial Sequence
  Description of Artificial Sequence: Synthetic oligonucleotide
ggucuggucgguggacaug

SEQ ID NO: 921790 - RNA, 19 nt, Artificial Sequence
  Description of Artificial Sequence: Synthetic oligonucleotide
cagagccaauuggcuuuag

SEQ ID NO: 921791 - RNA, 19 nt, Artificial Sequence
  Description of Artificial Sequence: Synthetic oligonucleotide
gucggcugagcuucuuaau

SEQ ID NO: 921792 - RNA, 19 nt, Artificial Sequence
  Description of Artificial Sequence: Synthetic oligonucleotide
guguguguguguguguauu

SEQ ID NO: 921793 - RNA, 19 nt, Artificial Sequence
  Description of Artificial Sequence: Synthetic oligonucleotide
ggucgauucuccacguagu

SEQ ID NO: 921794 - RNA, 19 nt, Artificial Sequence
  Description of Artificial Sequence: Synthetic oligonucleotide
cuuagccgggucgaucacu

SEQ ID NO: 921795 - RNA, 19 nt, Artificial Sequence
  Description of Artificial Sequence: Synthetic oligonucleotide
cccagugcauggugucuug

SEQ ID NO: 921796 - RNA, 19 nt, Artificial Sequence
  Description of Artificial Sequence: Synthetic oligonucleotide
cagggucguaccaaacguu

SEQ ID NO: 921797 - RNA, 19 nt, Artificial Sequence
  Description of Artificial Sequence: Synthetic oligonucleotide
ggugugugugugugugugu

SEQ ID NO: 921798 - RNA, 19 nt, Artificial Sequence
  Description of Artificial Sequence: Synthetic oligonucleotide
gcguuuucuggggugugaa

SEQ ID NO: 921799 - RNA, 19 nt, Artificial Sequence
  Description of Artificial Sequence: Synthetic oligonucleotide
cccaacgguccugcugagg

SEQ ID NO: 921800 - RNA, 19 nt, Artificial Sequence
  Description of Artificial Sequence: Synthetic oligonucleotide
aggcggcuagucaccugca

SEQ ID NO: 921801 - RNA, 19 nt, Artificial Sequence
  Description of Artificial Sequence: Synthetic oligonucleotide
gaguuccuagcugcucgau

SEQ ID NO: 921802 - RNA, 19 nt, Artificial Sequence
  Description of Artificial Sequence: Synthetic oligonucleotide
ggcggcuagucaccugcaa

SEQ ID NO: 921803 - RNA, 19 nt, Artificial Sequence
  Description of Artificial Sequence: Synthetic oligonucleotide
cguaccaaacguugaugua

SEQ ID NO: 921804 - RNA, 19 nt, Artificial Sequence
  Description of Artificial Sequence: Synthetic oligonucleotide
caguuaaggguugcugguu

SEQ ID NO: 921805 - RNA, 19 nt, Artificial Sequence
  Description of Artificial Sequence: Synthetic oligonucleotide
cuccagcguuuucuggggu

SEQ ID NO: 921806 - RNA, 19 nt, Artificial Sequence
  Description of Artificial Sequence: Synthetic oligonucleotide
ccaucugacuaggccaaaa

SEQ ID NO: 921807 - RNA, 19 nt, Artificial Sequence
  Description of Artificial Sequence: Synthetic oligonucleotide
gccguuugaagggcaguua

SEQ ID NO: 921808 - RNA, 19 nt, Artificial Sequence
  Description of Artificial Sequence: Synthetic oligonucleotide
gcgugugcaugugugcugu

SEQ ID NO: 921809 - RNA, 19 nt, Artificial Sequence
  Description of Artificial Sequence: Synthetic oligonucleotide
ggagacucucacugcuguu

SEQ ID NO: 921810 - RNA, 19 nt, Artificial Sequence
  Description of Artificial Sequence: Synthetic oligonucleotide
gcuucuuaauggccacauu

SEQ ID NO: 921811 - RNA, 19 nt, Artificial Sequence
  Description of Artificial Sequence: Synthetic oligonucleotide
gggucuggucgguggacau

SEQ ID NO: 921812 - RNA, 19 nt, Artificial Sequence
  Description of Artificial Sequence: Synthetic oligonucleotide
gcccucuuggcaugaguuu

SEQ ID NO: 921813 - RNA, 19 nt, Artificial Sequence
  Description of Artificial Sequence: Synthetic oligonucleotide
agggucggcugagcuucuu

SEQ ID NO: 921814 - RNA, 19 nt, Artificial Sequence
  Description of Artificial Sequence: Synthetic oligonucleotide
cgguaagcccucuuggcau

SEQ ID NO: 921815 - RNA, 19 nt, Artificial Sequence
  Description of Artificial Sequence: Synthetic oligonucleotide
ccagcguuuucuggggugu

SEQ ID NO: 921816 - RNA, 19 nt, Artificial Sequence
  Description of Artificial Sequence: Synthetic oligonucleotide
ccgggucgaucacuaacau

SEQ ID NO: 921817 - RNA, 19 nt, Artificial Sequence
  Description of Artificial Sequence: Synthetic oligonucleotide
ccgcauacuugggucgauu

SEQ ID NO: 921818 - RNA, 19 nt, Artificial Sequence
  Description of Artificial Sequence: Synthetic oligonucleotide
cccgcauacuugggucgau

SEQ ID NO: 921819 - RNA, 19 nt, Artificial Sequence
  Description of Artificial Sequence: Synthetic oligonucleotide
auuuauaaaggcuuuaggc

SEQ ID NO: 921820 - RNA, 19 nt, Artificial Sequence
  Description of Artificial Sequence: Synthetic oligonucleotide
aaacucucaauucucagac

SEQ ID NO: 921821 - RNA, 19 nt, Artificial Sequence
  Description of Artificial Sequence: Synthetic oligonucleotide
aauaacaacagcaccacgg

SEQ ID NO: 921822 - RNA, 19 nt, Artificial Sequence
  Description of Artificial Sequence: Synthetic oligonucleotide
aaucagaguagugacaggc

SEQ ID NO: 921823 - RNA, 19 nt, Artificial Sequence
  Description of Artificial Sequence: Synthetic oligonucleotide
uuaguaugaguuauaacag

SEQ ID NO: 921824 - RNA, 19 nt, Artificial Sequence
  Description of Artificial Sequence: Synthetic oligonucleotide
caaacgauggauuaggggc

SEQ ID NO: 921825 - RNA, 19 nt, Artificial Sequence
  Description of Artificial Sequence: Synthetic oligonucleotide
gaguugauacccuugaagg

SEQ ID NO: 921826 - RNA, 19 nt, Artificial Sequence
  Description of Artificial Sequence: Synthetic oligonucleotide
uucgaauugguucaucugg

SEQ ID NO: 921827 - RNA, 19 nt, Artificial Sequence
  Description of Artificial Sequence: Synthetic oligonucleotide
aaggcuuuaggcaagcucc

SEQ ID NO: 921828 - RNA, 19 nt, Artificial Sequence
  Description of Artificial Sequence: Synthetic oligonucleotide
ugaguuauaacagugcuag

SEQ ID NO: 921829 - RNA, 19 nt, Artificial Sequence
  Description of Artificial Sequence: Synthetic oligonucleotide
uguacaaaaguaaguuugg

SEQ ID NO: 921830 - RNA, 19 nt, Artificial Sequence
  Description of Artificial Sequence: Synthetic oligonucleotide
aagacuaugaggcuuuucu

SEQ ID NO: 921831 - RNA, 19 nt, Artificial Sequence
  Description of Artificial Sequence: Synthetic oligonucleotide
uauaacagugcuaggaagc

SEQ ID NO: 921832 - RNA, 19 nt, Artificial Sequence
  Description of Artificial Sequence: Synthetic oligonucleotide
aguagugacaggcaguuuc

SEQ ID NO: 921833 - RNA, 19 nt, Artificial Sequence
  Description of Artificial Sequence: Synthetic oligonucleotide
aguccuuacucccaguacc

SEQ ID NO: 921834 - RNA, 19 nt, Artificial Sequence
  Description of Artificial Sequence: Synthetic oligonucleotide
aagauagagagacauuugu

SEQ ID NO: 921835 - RNA, 19 nt, Artificial Sequence
  Description of Artificial Sequence: Synthetic oligonucleotide
guuagugaccaccagaccc

SEQ ID NO: 921836 - RNA, 19 nt, Artificial Sequence
  Description of Artificial Sequence: Synthetic oligonucleotide
aauucucagacagaauggg

SEQ ID NO: 921837 - RNA, 19 nt, Artificial Sequence
  Description of Artificial Sequence: Synthetic oligonucleotide
uuauaaaggcuuuaggcaa

SEQ ID NO: 921838 - RNA, 19 nt, Artificial Sequence
  Description of Artificial Sequence: Synthetic oligonucleotide
ucaguacgaguucagacag

SEQ ID NO: 921839 - RNA, 19 nt, Artificial Sequence
  Description of Artificial Sequence: Synthetic oligonucleotide
uuguucuagguccugaggc

SEQ ID NO: 921840 - RNA, 19 nt, Artificial Sequence
  Description of Artificial Sequence: Synthetic oligonucleotide
uuuauuuggaaauggccac

SEQ ID NO: 921841 - RNA, 19 nt, Artificial Sequence
  Description of Artificial Sequence: Synthetic oligonucleotide
uuauaacagugcuaggaag

SEQ ID NO: 921842 - RNA, 19 nt, Artificial Sequence
  Description of Artificial Sequence: Synthetic oligonucleotide
uggaguuuggcuaugucca

SEQ ID NO: 921843 - RNA, 19 nt, Artificial Sequence
  Description of Artificial Sequence: Synthetic oligonucleotide
auuuguacaagcacagggc

SEQ ID NO: 921844 - RNA, 19 nt, Artificial Sequence
  Description of Artificial Sequence: Synthetic oligonucleotide
caaaaguaaguuuggagac

SEQ ID NO: 921845 - RNA, 19 nt, Artificial Sequence
  Description of Artificial Sequence: Synthetic oligonucleotide
uacgaguucagacagcgga

SEQ ID NO: 921846 - RNA, 19 nt, Artificial Sequence
  Description of Artificial Sequence: Synthetic oligonucleotide
ugugacuuuauuuggaaau

SEQ ID NO: 921847 - RNA, 19 nt, Artificial Sequence
  Description of Artificial Sequence: Synthetic oligonucleotide
cuacuuucuaucuggagag

SEQ ID NO: 921848 - RNA, 19 nt, Artificial Sequence
  Description of Artificial Sequence: Synthetic oligonucleotide
caucccacauuuauaaagg

SEQ ID NO: 921849 - RNA, 19 nt, Artificial Sequence
  Description of Artificial Sequence: Synthetic oligonucleotide
uaugaggcuuuucugcagg

SEQ ID NO: 921850 - RNA, 19 nt, Artificial Sequence
  Description of Artificial Sequence: Synthetic oligonucleotide
gacuaugaggcuuuucugc

SEQ ID NO: 921851 - RNA, 19 nt, Artificial Sequence
  Description of Artificial Sequence: Synthetic oligonucleotide
auuaggggcagcccagucc

SEQ ID NO: 921852 - RNA, 19 nt, Artificial Sequence
  Description of Artificial Sequence: Synthetic oligonucleotide
aaaucggcggaagaggcgg

SEQ ID NO: 921853 - RNA, 19 nt, Artificial Sequence
  Description of Artificial Sequence: Synthetic oligonucleotide
uccauaaccgugucaaugc

SEQ ID NO: 921854 - RNA, 19 nt, Artificial Sequence
  Description of Artificial Sequence: Synthetic oligonucleotide
acacauaagacuucuguga

SEQ ID NO: 921855 - RNA, 19 nt, Artificial Sequence
  Description of Artificial Sequence: Synthetic oligonucleotide
aaguccuuacucccaguac

SEQ ID NO: 921856 - RNA, 19 nt, Artificial Sequence
  Description of Artificial Sequence: Synthetic oligonucleotide
uccuuuggagccaagacuc

SEQ ID NO: 921857 - RNA, 19 nt, Artificial Sequence
  Description of Artificial Sequence: Synthetic oligonucleotide
aaccaauccuguugacacc

SEQ ID NO: 921858 - RNA, 19 nt, Artificial Sequence
  Description of Artificial Sequence: Synthetic oligonucleotide
agaaguuggacacuaccug

SEQ ID NO: 921859 - RNA, 19 nt, Artificial Sequence
  Description of Artificial Sequence: Synthetic oligonucleotide
acauaagacuucugugagc

SEQ ID NO: 921860 - RNA, 19 nt, Artificial Sequence
  Description of Artificial Sequence: Synthetic oligonucleotide
aguuauaacagugcuagga

SEQ ID NO: 921861 - RNA, 19 nt, Artificial Sequence
  Description of Artificial Sequence: Synthetic oligonucleotide
uauuagaagagccuauguu

SEQ ID NO: 921862 - RNA, 19 nt, Artificial Sequence
  Description of Artificial Sequence: Synthetic oligonucleotide
aguaaguuuggagacugac

SEQ ID NO: 921863 - RNA, 19 nt, Artificial Sequence
  Description of Artificial Sequence: Synthetic oligonucleotide
ucucagacagaauggguag

SEQ ID NO: 921864 - RNA, 19 nt, Artificial Sequence
  Description of Artificial Sequence: Synthetic oligonucleotide
  modified_base (16)..(16): a, c, u, g, unknown or other
gcagggacuagcuugnggg

SEQ ID NO: 921865 - RNA, 19 nt, Artificial Sequence
  Description of Artificial Sequence: Synthetic oligonucleotide
gaauugguucaucuggggc

SEQ ID NO: 921866 - RNA, 19 nt, Artificial Sequence
  Description of Artificial Sequence: Synthetic oligonucleotide
guggcuacuuucuaucugg

SEQ ID NO: 921867 - RNA, 19 nt, Artificial Sequence
  Description of Artificial Sequence: Synthetic oligonucleotide
gaauggguaggaaucagag

SEQ ID NO: 921868 - RNA, 19 nt, Artificial Sequence
  Description of Artificial Sequence: Synthetic oligonucleotide
aucaguacgaguucagaca

SEQ ID NO: 921869 - RNA, 19 nt, Artificial Sequence
  Description of Artificial Sequence: Synthetic oligonucleotide
gaucaguacgaguucagac

SEQ ID NO: 921870 - RNA, 19 nt, Artificial Sequence
  Description of Artificial Sequence: Synthetic oligonucleotide
ugggguucucuccaggagg

SEQ ID NO: 921871 - RNA, 19 nt, Artificial Sequence
  Description of Artificial Sequence: Synthetic oligonucleotide
uccuguugacaccagaccu

SEQ ID NO: 921872 - RNA, 19 nt, Artificial Sequence
  Description of Artificial Sequence: Synthetic oligonucleotide
ugcugcuauuagaagagcc

SEQ ID NO: 921873 - RNA, 19 nt, Artificial Sequence
  Description of Artificial Sequence: Synthetic oligonucleotide
cucgccaucgucaaucacc

SEQ ID NO: 921874 - RNA, 19 nt, Artificial Sequence
  Description of Artificial Sequence: Synthetic oligonucleotide
uuagugaccaccagaccca

SEQ ID NO: 921875 - RNA, 19 nt, Artificial Sequence
  Description of Artificial Sequence: Synthetic oligonucleotide
ugucaaugccaccugcugc

SEQ ID NO: 921876 - RNA, 19 nt, Artificial Sequence
  Description of Artificial Sequence: Synthetic oligonucleotide
aguaugaguuauaacagug

SEQ ID NO: 921877 - RNA, 19 nt, Artificial Sequence
  Description of Artificial Sequence: Synthetic oligonucleotide
uauguuuaguaugaguuau

SEQ ID NO: 921878 - RNA, 19 nt, Artificial Sequence
  Description of Artificial Sequence: Synthetic oligonucleotide
acuauacacaccccgccuc

SEQ ID NO: 921879 - RNA, 19 nt, Artificial Sequence
  Description of Artificial Sequence: Synthetic oligonucleotide
uucucagacagaaugggua

SEQ ID NO: 921880 - RNA, 19 nt, Artificial Sequence
  Description of Artificial Sequence: Synthetic oligonucleotide
auaaccgugucaaugccac

SEQ ID NO: 921881 - RNA, 19 nt, Artificial Sequence
  Description of Artificial Sequence: Synthetic oligonucleotide
aauggguaggaaucagagu

SEQ ID NO: 921882 - RNA, 19 nt, Artificial Sequence
  Description of Artificial Sequence: Synthetic oligonucleotide
uugagugagugccaccugc

SEQ ID NO: 921883 - RNA, 19 nt, Artificial Sequence
  Description of Artificial Sequence: Synthetic oligonucleotide
uggguuggaagacuaugag

SEQ ID NO: 921884 - RNA, 19 nt, Artificial Sequence
  Description of Artificial Sequence: Synthetic oligonucleotide
ucggacacacauaagacuu

SEQ ID NO: 921885 - RNA, 19 nt, Artificial Sequence
  Description of Artificial Sequence: Synthetic oligonucleotide
uagagagacauuuguacaa

SEQ ID NO: 921886 - RNA, 19 nt, Artificial Sequence
  Description of Artificial Sequence: Synthetic oligonucleotide
aguuuggcuauguccacuc

SEQ ID NO: 921887 - RNA, 19 nt, Artificial Sequence
  Description of Artificial Sequence: Synthetic oligonucleotide
acugacacaguggagauga

SEQ ID NO: 921888 - RNA, 19 nt, Artificial Sequence
  Description of Artificial Sequence: Synthetic oligonucleotide
uccaaacgauggauuaggg

SEQ ID NO: 921889 - RNA, 19 nt, Artificial Sequence
  Description of Artificial Sequence: Synthetic oligonucleotide
cugacauucguucuuguuc

SEQ ID NO: 921890 - RNA, 19 nt, Artificial Sequence
  Description of Artificial Sequence: Synthetic oligonucleotide
aaacugggauccuuguaca

SEQ ID NO: 921891 - RNA, 19 nt, Artificial Sequence
  Description of Artificial Sequence: Synthetic oligonucleotide
ucugcuuaggagcccuagg

SEQ ID NO: 921892 - RNA, 19 nt, Artificial Sequence
  Description of Artificial Sequence: Synthetic oligonucleotide
agaacuggacagcacgauc

SEQ ID NO: 921893 - RNA, 19 nt, Artificial Sequence
  Description of Artificial Sequence: Synthetic oligonucleotide
aaaaguaaguuuggagacu

SEQ ID NO: 921894 - RNA, 19 nt, Artificial Sequence
  Description of Artificial Sequence: Synthetic oligonucleotide
uguuuaguaugaguuauaa

SEQ ID NO: 921895 - RNA, 19 nt, Artificial Sequence
  Description of Artificial Sequence: Synthetic oligonucleotide
cugguagcgaaaucggcgg

SEQ ID NO: 921896 - RNA, 19 nt, Artificial Sequence
  Description of Artificial Sequence: Synthetic oligonucleotide
uucggacacacauaagacu

SEQ ID NO: 921897 - RNA, 19 nt, Artificial Sequence
  Description of Artificial Sequence: Synthetic oligonucleotide
guaugggcuauguugggag

SEQ ID NO: 921898 - RNA, 19 nt, Artificial Sequence
  Description of Artificial Sequence: Synthetic oligonucleotide
  modified_base (7)..(7): a, c, u, g, unknown or other
agcuugngggccacgaccc

SEQ ID NO: 921899 - RNA, 19 nt, Artificial Sequence
  Description of Artificial Sequence: Synthetic oligonucleotide
  modified_base (8)..(8): a, c, u, g, unknown or other
uagcuugngggccacgacc

SEQ ID NO: 921900 - RNA, 19 nt, Artificial Sequence
  Description of Artificial Sequence: Synthetic oligonucleotide
aagaaccaauccuguugac

SEQ ID NO: 921901 - RNA, 19 nt, Artificial Sequence
  Description of Artificial Sequence: Synthetic oligonucleotide
uucgugugccuuucgagcc

SEQ ID NO: 921902 - RNA, 19 nt, Artificial Sequence
  Description of Artificial Sequence: Synthetic oligonucleotide
aagucuaagcaggagggcu

SEQ ID NO: 921903 - RNA, 19 nt, Artificial Sequence
  Description of Artificial Sequence: Synthetic oligonucleotide
ugccuuucgagccgaagcc

SEQ ID NO: 921904 - RNA, 19 nt, Artificial Sequence
  Description of Artificial Sequence: Synthetic oligonucleotide
aguugauacccuugaagga

SEQ ID NO: 921905 - RNA, 19 nt, Artificial Sequence
  Description of Artificial Sequence: Synthetic oligonucleotide
gacaaggacuuugagugag

SEQ ID NO: 921906 - RNA, 19 nt, Artificial Sequence
  Description of Artificial Sequence: Synthetic oligonucleotide
cuggaguuaccucaccucc

SEQ ID NO: 921907 - RNA, 19 nt, Artificial Sequence
  Description of Artificial Sequence: Synthetic oligonucleotide
ggaguugauacccuugaag

SEQ ID NO: 921908 - RNA, 19 nt, Artificial Sequence
  Description of Artificial Sequence: Synthetic oligonucleotide
agcaccacggaauuaucug

SEQ ID NO: 921909 - RNA, 19 nt, Artificial Sequence
  Description of Artificial Sequence: Synthetic oligonucleotide
uggacacuaccugagagca

SEQ ID NO: 921910 - RNA, 19 nt, Artificial Sequence
  Description of Artificial Sequence: Synthetic oligonucleotide
auaaaggcuuuaggcaagc

SEQ ID NO: 921911 - RNA, 19 nt, Artificial Sequence
  Description of Artificial Sequence: Synthetic oligonucleotide
guaggaaucagaguaguga

SEQ ID NO: 921912 - RNA, 19 nt, Artificial Sequence
  Description of Artificial Sequence: Synthetic oligonucleotide
caagcuccccacuauacac

SEQ ID NO: 921913 - RNA, 19 nt, Artificial Sequence
  Description of Artificial Sequence: Synthetic oligonucleotide
acuuugagugagugccacc

SEQ ID NO: 921914 - RNA, 19 nt, Artificial Sequence
  Description of Artificial Sequence: Synthetic oligonucleotide
gagagacauuuguacaagc

SEQ ID NO: 921915 - RNA, 19 nt, Artificial Sequence
  Description of Artificial Sequence: Synthetic oligonucleotide
cagugcuugagccaccugc

SEQ ID NO: 921916 - RNA, 19 nt, Artificial Sequence
  Description of Artificial Sequence: Synthetic oligonucleotide
cuuguucuagguccugagg

SEQ ID NO: 921917 - RNA, 19 nt, Artificial Sequence
  Description of Artificial Sequence: Synthetic oligonucleotide
agacauuuguacaagcaca

SEQ ID NO: 921918 - RNA, 19 nt, Artificial Sequence
  Description of Artificial Sequence: Synthetic oligonucleotide
aacagugcuaggaagcuaa

SEQ ID NO: 921919 - RNA, 19 nt, Artificial Sequence
  Description of Artificial Sequence: Synthetic oligonucleotide
ugcuaggaagcuaaacaaa

SEQ ID NO: 921920 - RNA, 19 nt, Artificial Sequence
  Description of Artificial Sequence: Synthetic oligonucleotide
guaugaguuauaacagugc

SEQ ID NO: 921921 - RNA, 19 nt, Artificial Sequence
  Description of Artificial Sequence: Synthetic oligonucleotide
uguuagugaccaccagacc

SEQ ID NO: 921922 - RNA, 19 nt, Artificial Sequence
  Description of Artificial Sequence: Synthetic oligonucleotide
aaccgugucaaugccaccu

SEQ ID NO: 921923 - RNA, 19 nt, Artificial Sequence
  Description of Artificial Sequence: Synthetic oligonucleotide
gaaucagaguagugacagg

SEQ ID NO: 921924 - RNA, 19 nt, Artificial Sequence
  Description of Artificial Sequence: Synthetic oligonucleotide
cugcuuaggagcccuaggc

SEQ ID NO: 921925 - RNA, 19 nt, Artificial Sequence
  Description of Artificial Sequence: Synthetic oligonucleotide
agugcuugagccaccugcc

SEQ ID NO: 921926 - RNA, 19 nt, Artificial Sequence
  Description of Artificial Sequence: Synthetic oligonucleotide
gaugugacuuuauuuggaa

SEQ ID NO: 921927 - RNA, 19 nt, Artificial Sequence
  Description of Artificial Sequence: Synthetic oligonucleotide
aaacgauggauuaggggca

SEQ ID NO: 921928 - RNA, 19 nt, Artificial Sequence
  Description of Artificial Sequence: Synthetic oligonucleotide
uauguccacucaaacccca

SEQ ID NO: 921929 - RNA, 19 nt, Artificial Sequence
  Description of Artificial Sequence: Synthetic oligonucleotide
agacaaguguuagugacca

SEQ ID NO: 921930 - RNA, 19 nt, Artificial Sequence
  Description of Artificial Sequence: Synthetic oligonucleotide
gacagcggaagaucuuucc

SEQ ID NO: 921931 - RNA, 19 nt, Artificial Sequence
  Description of Artificial Sequence: Synthetic oligonucleotide
uccacucaaaccccagugu

SEQ ID NO: 921932 - RNA, 19 nt, Artificial Sequence
  Description of Artificial Sequence: Synthetic oligonucleotide
ugccuuggaguugauaccc

SEQ ID NO: 921933 - RNA, 19 nt, Artificial Sequence
  Description of Artificial Sequence: Synthetic oligonucleotide
ggaugauucccucuucuag

SEQ ID NO: 921934 - RNA, 19 nt, Artificial Sequence
  Description of Artificial Sequence: Synthetic oligonucleotide
cuauguccacucaaacccc

SEQ ID NO: 921935 - RNA, 19 nt, Artificial Sequence
  Description of Artificial Sequence: Synthetic oligonucleotide
ucugggacucugcugacau

SEQ ID NO: 921936 - RNA, 19 nt, Artificial Sequence
  Description of Artificial Sequence: Synthetic oligonucleotide
ucuugggauggcuggagac

SEQ ID NO: 921937 - RNA, 19 nt, Artificial Sequence
  Description of Artificial Sequence: Synthetic oligonucleotide
agagagacauuuguacaag

SEQ ID NO: 921938 - RNA, 19 nt, Artificial Sequence
  Description of Artificial Sequence: Synthetic oligonucleotide
agcgaaaucggcggaagag

SEQ ID NO: 921939 - RNA, 19 nt, Artificial Sequence
  Description of Artificial Sequence: Synthetic oligonucleotide
uggaguuaccucaccuccc

SEQ ID NO: 921940 - RNA, 19 nt, Artificial Sequence
  Description of Artificial Sequence: Synthetic oligonucleotide
guguuagugaccaccagac

SEQ ID NO: 921941 - RNA, 19 nt, Artificial Sequence
  Description of Artificial Sequence: Synthetic oligonucleotide
acgcacccagcucugaauc

SEQ ID NO: 921942 - RNA, 19 nt, Artificial Sequence
  Description of Artificial Sequence: Synthetic oligonucleotide
ucagacagaauggguagga

SEQ ID NO: 921943 - RNA, 19 nt, Artificial Sequence
  Description of Artificial Sequence: Synthetic oligonucleotide
ugaggggccaaacucucaa

SEQ ID NO: 921944 - RNA, 19 nt, Artificial Sequence
  Description of Artificial Sequence: Synthetic oligonucleotide
ugcuauuagaagagccuau

SEQ ID NO: 921945 - RNA, 19 nt, Artificial Sequence
  Description of Artificial Sequence: Synthetic oligonucleotide
cgagaugugacuuuauuug

SEQ ID NO: 921946 - RNA, 19 nt, Artificial Sequence
  Description of Artificial Sequence: Synthetic oligonucleotide
gugccuuucgagccgaagc

SEQ ID NO: 921947 - RNA, 19 nt, Artificial Sequence
  Description of Artificial Sequence: Synthetic oligonucleotide
uuauuuggaaauggccacu

SEQ ID NO: 921948 - RNA, 19 nt, Artificial Sequence
  Description of Artificial Sequence: Synthetic oligonucleotide
ugggauccuuguacaaaag

SEQ ID NO: 921949 - RNA, 19 nt, Artificial Sequence
  Description of Artificial Sequence: Synthetic oligonucleotide
uuuggcucaccuggcaaag

SEQ ID NO: 921950 - RNA, 19 nt, Artificial Sequence
  Description of Artificial Sequence: Synthetic oligonucleotide
agaucuuuccacaguucgg

SEQ ID NO: 921951 - RNA, 19 nt, Artificial Sequence
  Description of Artificial Sequence: Synthetic oligonucleotide
uuaggcaagcuccccacua

SEQ ID NO: 921952 - RNA, 19 nt, Artificial Sequence
  Description of Artificial Sequence: Synthetic oligonucleotide
uccugguagcgaaaucggc

SEQ ID NO: 921953 - RNA, 19 nt, Artificial Sequence
  Description of Artificial Sequence: Synthetic oligonucleotide
cuguugacaccagaccucg

SEQ ID NO: 921954 - RNA, 19 nt, Artificial Sequence
  Description of Artificial Sequence: Synthetic oligonucleotide
ucugcugacauucguucuu

SEQ ID NO: 921955 - RNA, 19 nt, Artificial Sequence
  Description of Artificial Sequence: Synthetic oligonucleotide
ggcuauguccacucaaacc

SEQ ID NO: 921956 - RNA, 19 nt, Artificial Sequence
  Description of Artificial Sequence: Synthetic oligonucleotide
ucgugugccuuucgagccg

SEQ ID NO: 921957 - RNA, 19 nt, Artificial Sequence
  Description of Artificial Sequence: Synthetic oligonucleotide
uugcaguuuccauaaccgu

SEQ ID NO: 921958 - RNA, 19 nt, Artificial Sequence
  Description of Artificial Sequence: Synthetic oligonucleotide
uucgagccgaagccaaccc

SEQ ID NO: 921959 - RNA, 19 nt, Artificial Sequence
  Description of Artificial Sequence: Synthetic oligonucleotide
cuaugaggcuuuucugcag

SEQ ID NO: 921960 - RNA, 19 nt, Artificial Sequence
  Description of Artificial Sequence: Synthetic oligonucleotide
agaaccaauccuguugaca

SEQ ID NO: 921961 - RNA, 19 nt, Artificial Sequence
  Description of Artificial Sequence: Synthetic oligonucleotide
uaacaacagcaccacggaa

SEQ ID NO: 921962 - RNA, 19 nt, Artificial Sequence
  Description of Artificial Sequence: Synthetic oligonucleotide
acucaaaccccaguguuga

SEQ ID NO: 921963 - RNA, 19 nt, Artificial Sequence
  Description of Artificial Sequence: Synthetic oligonucleotide
  modified_base (4)..(4): a, c, u, g, unknown or other
uugngggccacgacccuga

SEQ ID NO: 921964 - RNA, 19 nt, Artificial Sequence
  Description of Artificial Sequence: Synthetic oligonucleotide
cacgacccugaucaguacg

SEQ ID NO: 921965 - RNA, 19 nt, Artificial Sequence
  Description of Artificial Sequence: Synthetic oligonucleotide
uauuuggaaauggccacuc

SEQ ID NO: 921966 - RNA, 19 nt, Artificial Sequence
  Description of Artificial Sequence: Synthetic oligonucleotide
accucggccuugcaguuuc

SEQ ID NO: 921967 - RNA, 19 nt, Artificial Sequence
  Description of Artificial Sequence: Synthetic oligonucleotide
aacgauggauuaggggcag

SEQ ID NO: 921968 - RNA, 19 nt, Artificial Sequence
  Description of Artificial Sequence: Synthetic oligonucleotide
uggcuauguccacucaaac

SEQ ID NO: 921969 - RNA, 19 nt, Artificial Sequence
  Description of Artificial Sequence: Synthetic oligonucleotide
aucgucaaucaccaccgga

SEQ ID NO: 921970 - RNA, 19 nt, Artificial Sequence
  Description of Artificial Sequence: Synthetic oligonucleotide
uuuaggcaagcuccccacu

SEQ ID NO: 921971 - RNA, 19 nt, Artificial Sequence
  Description of Artificial Sequence: Synthetic oligonucleotide
uggaagacuaugaggcuuu

SEQ ID NO: 921972 - RNA, 19 nt, Artificial Sequence
  Description of Artificial Sequence: Synthetic oligonucleotide
gagccuauguuuaguauga

SEQ ID NO: 921973 - RNA, 19 nt, Artificial Sequence
  Description of Artificial Sequence: Synthetic oligonucleotide
gaagagccuauguuuagua

SEQ ID NO: 921974 - RNA, 19 nt, Artificial Sequence
  Description of Artificial Sequence: Synthetic oligonucleotide
cacucaaaccccaguguug

SEQ ID NO: 921975 - RNA, 19 nt, Artificial Sequence
  Description of Artificial Sequence: Synthetic oligonucleotide
ccaaacgauggauuagggg

SEQ ID NO: 921976 - RNA, 19 nt, Artificial Sequence
  Description of Artificial Sequence: Synthetic oligonucleotide
acaacagcaccacggaauu

SEQ ID NO: 921977 - RNA, 19 nt, Artificial Sequence
  Description of Artificial Sequence: Synthetic oligonucleotide
ucgagccgaagccaacccc

SEQ ID NO: 921978 - RNA, 19 nt, Artificial Sequence
  Description of Artificial Sequence: Synthetic oligonucleotide
cugaucaguacgaguucag

SEQ ID NO: 921979 - RNA, 19 nt, Artificial Sequence
  Description of Artificial Sequence: Synthetic oligonucleotide
ugaucaguacgaguucaga

SEQ ID NO: 921980 - RNA, 19 nt, Artificial Sequence
  Description of Artificial Sequence: Synthetic oligonucleotide
cuaccucaaguucgaauug

SEQ ID NO: 921981 - RNA, 19 nt, Artificial Sequence
  Description of Artificial Sequence: Synthetic oligonucleotide
uuguacaagcacagggcua

SEQ ID NO: 921982 - RNA, 19 nt, Artificial Sequence
  Description of Artificial Sequence: Synthetic oligonucleotide
caccaccggaucuucacag

SEQ ID NO: 921983 - RNA, 19 nt, Artificial Sequence
  Description of Artificial Sequence: Synthetic oligonucleotide
gauggauuaggggcagccc

SEQ ID NO: 921984 - RNA, 19 nt, Artificial Sequence
  Description of Artificial Sequence: Synthetic oligonucleotide
cauaagacuucugugagcu

SEQ ID NO: 921985 - RNA, 19 nt, Artificial Sequence
  Description of Artificial Sequence: Synthetic oligonucleotide
aacugggauccuuguacaa

SEQ ID NO: 921986 - RNA, 19 nt, Artificial Sequence
  Description of Artificial Sequence: Synthetic oligonucleotide
gcaccacggaauuaucugg

SEQ ID NO: 921987 - RNA, 19 nt, Artificial Sequence
  Description of Artificial Sequence: Synthetic oligonucleotide
acauucguucuuguucuag

SEQ ID NO: 921988 - RNA, 19 nt, Artificial Sequence
  Description of Artificial Sequence: Synthetic oligonucleotide
uccuucgugugccuuucga

SEQ ID NO: 921989 - RNA, 19 nt, Artificial Sequence
  Description of Artificial Sequence: Synthetic oligonucleotide
uguccacucaaaccccagu

SEQ ID NO: 921990 - RNA, 19 nt, Artificial Sequence
  Description of Artificial Sequence: Synthetic oligonucleotide
aaagggcaggugguuuggg

SEQ ID NO: 921991 - RNA, 19 nt, Artificial Sequence
  Description of Artificial Sequence: Synthetic oligonucleotide
ucaccaccggaucuucaca

SEQ ID NO: 921992 - RNA, 19 nt, Artificial Sequence
  Description of Artificial Sequence: Synthetic oligonucleotide
cuagccucagaaagaacca

SEQ ID NO: 921993 - RNA, 19 nt, Artificial Sequence
  Description of Artificial Sequence: Synthetic oligonucleotide
ugaaucucccacggcagga

SEQ ID NO: 921994 - RNA, 19 nt, Artificial Sequence
  Description of Artificial Sequence: Synthetic oligonucleotide
gagggaaugcucagguggc

SEQ ID NO: 921995 - RNA, 19 nt, Artificial Sequence
  Description of Artificial Sequence: Synthetic oligonucleotide
uuggaagacuaugaggcuu

SEQ ID NO: 921996 - RNA, 19 nt, Artificial Sequence
  Description of Artificial Sequence: Synthetic oligonucleotide
aguuuccauaaccguguca

SEQ ID NO: 921997 - RNA, 19 nt, Artificial Sequence
  Description of Artificial Sequence: Synthetic oligonucleotide
guaaguuuggagacugaca

SEQ ID NO: 921998 - RNA, 19 nt, Artificial Sequence
  Description of Artificial Sequence: Synthetic oligonucleotide
cuugaggggccaaacucuc

SEQ ID NO: 921999 - RNA, 19 nt, Artificial Sequence
  Description of Artificial Sequence: Synthetic oligonucleotide
uguugacaccagaccucgg

SEQ ID NO: 922000 - RNA, 19 nt, Artificial Sequence
  Description of Artificial Sequence: Synthetic oligonucleotide
acaggcaguuuccauccca

SEQ ID NO: 922001 - RNA, 19 nt, Artificial Sequence
  Description of Artificial Sequence: Synthetic oligonucleotide
agaugugacuuuauuugga

SEQ ID NO: 922002 - RNA, 19 nt, Artificial Sequence
  Description of Artificial Sequence: Synthetic oligonucleotide
augggcuauguugggaguc

SEQ ID NO: 922003 - RNA, 19 nt, Artificial Sequence
  Description of Artificial Sequence: Synthetic oligonucleotide
acucccaguacccgagaug

SEQ ID NO: 922004 - RNA, 19 nt, Artificial Sequence
  Description of Artificial Sequence: Synthetic oligonucleotide
aagccaaccccggcacagc

SEQ ID NO: 922005 - RNA, 19 nt, Artificial Sequence
  Description of Artificial Sequence: Synthetic oligonucleotide
uaugggcuauguugggagu

SEQ ID NO: 922006 - RNA, 19 nt, Artificial Sequence
  Description of Artificial Sequence: Synthetic oligonucleotide
uccgcauuuuccugggcuc

SEQ ID NO: 922007 - RNA, 19 nt, Artificial Sequence
  Description of Artificial Sequence: Synthetic oligonucleotide
gcuaaacaaacugccuugg

SEQ ID NO: 922008 - RNA, 19 nt, Artificial Sequence
  Description of Artificial Sequence: Synthetic oligonucleotide
cauaaccgugucaaugcca

SEQ ID NO: 922009 - RNA, 19 nt, Artificial Sequence
  Description of Artificial Sequence: Synthetic oligonucleotide
agaagagccuauguuuagu

SEQ ID NO: 922010 - RNA, 19 nt, Artificial Sequence
  Description of Artificial Sequence: Synthetic oligonucleotide
gagcucuguaccucacccc

SEQ ID NO: 922011 - RNA, 19 nt, Artificial Sequence
  Description of Artificial Sequence: Synthetic oligonucleotide
agggcuacagacaaguguu

SEQ ID NO: 922012 - RNA, 19 nt, Artificial Sequence
  Description of Artificial Sequence: Synthetic oligonucleotide
uagcgaaaucggcggaaga

SEQ ID NO: 922013 - RNA, 19 nt, Artificial Sequence
  Description of Artificial Sequence: Synthetic oligonucleotide
ggacuccgcauuuuccugg

SEQ ID NO: 922014 - RNA, 19 nt, Artificial Sequence
  Description of Artificial Sequence: Synthetic oligonucleotide
aaucggcggaagaggcggc

SEQ ID NO: 922015 - RNA, 19 nt, Artificial Sequence
  Description of Artificial Sequence: Synthetic oligonucleotide
gacuuugagugagugccac

SEQ ID NO: 922016 - RNA, 19 nt, Artificial Sequence
  Description of Artificial Sequence: Synthetic oligonucleotide
ccuccugguagcgaaaucg

SEQ ID NO: 922017 - RNA, 19 nt, Artificial Sequence
  Description of Artificial Sequence: Synthetic oligonucleotide
caguaugggcuauguuggg

SEQ ID NO: 922018 - RNA, 19 nt, Artificial Sequence
  Description of Artificial Sequence: Synthetic oligonucleotide
caggcaguuuccaucccac

SEQ ID NO: 922019 - RNA, 19 nt, Artificial Sequence
  Description of Artificial Sequence: Synthetic oligonucleotide
ugcaggagacaggaugagc

SEQ ID NO: 922020 - RNA, 19 nt, Artificial Sequence
  Description of Artificial Sequence: Synthetic oligonucleotide
aguaugggcuauguuggga

SEQ ID NO: 922021 - RNA, 19 nt, Artificial Sequence
  Description of Artificial Sequence: Synthetic oligonucleotide
ucaaucaccaccggaucuu

SEQ ID NO: 922022 - RNA, 19 nt, Artificial Sequence
  Description of Artificial Sequence: Synthetic oligonucleotide
guagagggaaugcucaggu

SEQ ID NO: 922023 - RNA, 19 nt, Artificial Sequence
  Description of Artificial Sequence: Synthetic oligonucleotide
gaagaggcauggcaccaga

SEQ ID NO: 922024 - RNA, 19 nt, Artificial Sequence
  Description of Artificial Sequence: Synthetic oligonucleotide
  modified_base (15)..(15): a, c, u, g, unknown or other
cagggacuagcuugngggc

SEQ ID NO: 922025 - RNA, 19 nt, Artificial Sequence
  Description of Artificial Sequence: Synthetic oligonucleotide
agaauggguaggaaucaga

SEQ ID NO: 922026 - RNA, 19 nt, Artificial Sequence
  Description of Artificial Sequence: Synthetic oligonucleotide
uggcuacuuucuaucugga

SEQ ID NO: 922027 - RNA, 19 nt, Artificial Sequence
  Description of Artificial Sequence: Synthetic oligonucleotide
agguggcuacuuucuaucu

SEQ ID NO: 922028 - RNA, 19 nt, Artificial Sequence
  Description of Artificial Sequence: Synthetic oligonucleotide
guagcgaaaucggcggaag

SEQ ID NO: 922029 - RNA, 19 nt, Artificial Sequence
  Description of Artificial Sequence: Synthetic oligonucleotide
acuccgcauuuuccugggc

SEQ ID NO: 922030 - RNA, 19 nt, Artificial Sequence
  Description of Artificial Sequence: Synthetic oligonucleotide
cugggauccuuguacaaaa

SEQ ID NO: 922031 - RNA, 19 nt, Artificial Sequence
  Description of Artificial Sequence: Synthetic oligonucleotide
ugguagcgaaaucggcgga

SEQ ID NO: 922032 - RNA, 19 nt, Artificial Sequence
  Description of Artificial Sequence: Synthetic oligonucleotide
acucgccaucgucaaucac

SEQ ID NO: 922033 - RNA, 19 nt, Artificial Sequence
  Description of Artificial Sequence: Synthetic oligonucleotide
auucucagacagaaugggu

SEQ ID NO: 922034 - RNA, 19 nt, Artificial Sequence
  Description of Artificial Sequence: Synthetic oligonucleotide
ugugccuuucgagccgaag

SEQ ID NO: 922035 - RNA, 19 nt, Artificial Sequence
  Description of Artificial Sequence: Synthetic oligonucleotide
uccaucccacauuuauaaa

SEQ ID NO: 922036 - RNA, 19 nt, Artificial Sequence
  Description of Artificial Sequence: Synthetic oligonucleotide
gaagcuaaacaaacugccu

SEQ ID NO: 922037 - RNA, 19 nt, Artificial Sequence
  Description of Artificial Sequence: Synthetic oligonucleotide
  modified_base (9)..(9): a, c, u, g, unknown or other
cuagcuugngggccacgac

SEQ ID NO: 922038 - RNA, 19 nt, Artificial Sequence
  Description of Artificial Sequence: Synthetic oligonucleotide
guccuuacucccaguaccc

SEQ ID NO: 922039 - RNA, 19 nt, Artificial Sequence
  Description of Artificial Sequence: Synthetic oligonucleotide
ccaaacucucaauucucag

SEQ ID NO: 922040 - RNA, 19 nt, Artificial Sequence
  Description of Artificial Sequence: Synthetic oligonucleotide
gcgaaaucggcggaagagg

SEQ ID NO: 922041 - RNA, 19 nt, Artificial Sequence
  Description of Artificial Sequence: Synthetic oligonucleotide
acaccccgccucuccaaac

SEQ ID NO: 922042 - RNA, 19 nt, Artificial Sequence
  Description of Artificial Sequence: Synthetic oligonucleotide
uuacucccaguacccgaga

SEQ ID NO: 922043 - RNA, 19 nt, Artificial Sequence
  Description of Artificial Sequence: Synthetic oligonucleotide
uacucccaguacccgagau

SEQ ID NO: 922044 - RNA, 19 nt, Artificial Sequence
  Description of Artificial Sequence: Synthetic oligonucleotide
cuauuagaagagccuaugu

SEQ ID NO: 922045 - RNA, 19 nt, Artificial Sequence
  Description of Artificial Sequence: Synthetic oligonucleotide
accgugucaaugccaccug

SEQ ID NO: 922046 - RNA, 19 nt, Artificial Sequence
  Description of Artificial Sequence: Synthetic oligonucleotide
cuucuugggauggcuggag

SEQ ID NO: 922047 - RNA, 19 nt, Artificial Sequence
  Description of Artificial Sequence: Synthetic oligonucleotide
aucagaguagugacaggca

SEQ ID NO: 922048 - RNA, 19 nt, Artificial Sequence
  Description of Artificial Sequence: Synthetic oligonucleotide
aaugcucagguggcuacuu

SEQ ID NO: 922049 - RNA, 19 nt, Artificial Sequence
  Description of Artificial Sequence: Synthetic oligonucleotide
uaaccgugucaaugccacc

SEQ ID NO: 922050 - RNA, 19 nt, Artificial Sequence
  Description of Artificial Sequence: Synthetic oligonucleotide
ggcuacuuucuaucuggag

SEQ ID NO: 922051 - RNA, 19 nt, Artificial Sequence
  Description of Artificial Sequence: Synthetic oligonucleotide
gugagcucuguaccucacc

SEQ ID NO: 922052 - RNA, 19 nt, Artificial Sequence
  Description of Artificial Sequence: Synthetic oligonucleotide
ucacagugcuugagccacc

SEQ ID NO: 922053 - RNA, 19 nt, Artificial Sequence
  Description of Artificial Sequence: Synthetic oligonucleotide
caguacgaguucagacagc

SEQ ID NO: 922054 - RNA, 19 nt, Artificial Sequence
  Description of Artificial Sequence: Synthetic oligonucleotide
ggaaugcucagguggcuac

SEQ ID NO: 922055 - RNA, 19 nt, Artificial Sequence
  Description of Artificial Sequence: Synthetic oligonucleotide
aaguaaguuuggagacuga

SEQ ID NO: 922056 - RNA, 19 nt, Artificial Sequence
  Description of Artificial Sequence: Synthetic oligonucleotide
caccacggaauuaucugga

SEQ ID NO: 922057 - RNA, 19 nt, Artificial Sequence
  Description of Artificial Sequence: Synthetic oligonucleotide
ggggcaggaauaacaacag

SEQ ID NO: 922058 - RNA, 19 nt, Artificial Sequence
  Description of Artificial Sequence: Synthetic oligonucleotide
gaguuaccucaccucccug

SEQ ID NO: 922059 - RNA, 19 nt, Artificial Sequence
  Description of Artificial Sequence: Synthetic oligonucleotide
agacagcggaagaucuuuc

SEQ ID NO: 922060 - RNA, 19 nt, Artificial Sequence
  Description of Artificial Sequence: Synthetic oligonucleotide
gguggucugcuuaggagcc

SEQ ID NO: 922061 - RNA, 19 nt, Artificial Sequence
  Description of Artificial Sequence: Synthetic oligonucleotide
  modified_base (5)..(5): a, c, u, g, unknown or other
cuugngggccacgacccug

SEQ ID NO: 922062 - RNA, 19 nt, Artificial Sequence
  Description of Artificial Sequence: Synthetic oligonucleotide
gacaaguguuagugaccac

SEQ ID NO: 922063 - RNA, 19 nt, Artificial Sequence
  Description of Artificial Sequence: Synthetic oligonucleotide
augaguuauaacagugcua

SEQ ID NO: 922064 - RNA, 19 nt, Artificial Sequence
  Description of Artificial Sequence: Synthetic oligonucleotide
aagaggcggcgagaggacu

SEQ ID NO: 922065 - RNA, 19 nt, Artificial Sequence
  Description of Artificial Sequence: Synthetic oligonucleotide
caucgucaaucaccaccgg

SEQ ID NO: 922066 - RNA, 19 nt, Artificial Sequence
  Description of Artificial Sequence: Synthetic oligonucleotide
uggucugcuuaggagcccu

SEQ ID NO: 922067 - RNA, 19 nt, Artificial Sequence
  Description of Artificial Sequence: Synthetic oligonucleotide
ugcugacauucguucuugu

SEQ ID NO: 922068 - RNA, 19 nt, Artificial Sequence
  Description of Artificial Sequence: Synthetic oligonucleotide
ccccacuauacacaccccg

SEQ ID NO: 922069 - RNA, 19 nt, Artificial Sequence
  Description of Artificial Sequence: Synthetic oligonucleotide
ucggccuugcaguuuccau

SEQ ID NO: 922070 - RNA, 19 nt, Artificial Sequence
  Description of Artificial Sequence: Synthetic oligonucleotide
uuagggguggugggucacc

SEQ ID NO: 922071 - RNA, 19 nt, Artificial Sequence
  Description of Artificial Sequence: Synthetic oligonucleotide
ccacuauacacaccccgcc

SEQ ID NO: 922072 - RNA, 19 nt, Artificial Sequence
  Description of Artificial Sequence: Synthetic oligonucleotide
ccuucgugugccuuucgag

SEQ ID NO: 922073 - RNA, 19 nt, Artificial Sequence
  Description of Artificial Sequence: Synthetic oligonucleotide
accaccggaucuucacagu

SEQ ID NO: 922074 - RNA, 19 nt, Artificial Sequence
  Description of Artificial Sequence: Synthetic oligonucleotide
guacgaguucagacagcgg

SEQ ID NO: 922075 - RNA, 19 nt, Artificial Sequence
  Description of Artificial Sequence: Synthetic oligonucleotide
ggcgagaggacucugggcu

SEQ ID NO: 922076 - RNA, 19 nt, Artificial Sequence
  Description of Artificial Sequence: Synthetic oligonucleotide
gagccgaagccaaccccgg

SEQ ID NO: 922077 - RNA, 19 nt, Artificial Sequence
  Description of Artificial Sequence: Synthetic oligonucleotide
ggagacugggaagucuaag

SEQ ID NO: 922078 - RNA, 19 nt, Artificial Sequence
  Description of Artificial Sequence: Synthetic oligonucleotide
gacccaggaugauucccuc

SEQ ID NO: 922079 - RNA, 19 nt, Artificial Sequence
  Description of Artificial Sequence: Synthetic oligonucleotide
cgagccgaagccaaccccg

SEQ ID NO: 922080 - RNA, 19 nt, Artificial Sequence
  Description of Artificial Sequence: Synthetic oligonucleotide
acgacccugaucaguacga

SEQ ID NO: 922081 - RNA, 19 nt, Artificial Sequence
  Description of Artificial Sequence: Synthetic oligonucleotide
gucugcuuaggagcccuag

SEQ ID NO: 922082 - RNA, 19 nt, Artificial Sequence
  Description of Artificial Sequence: Synthetic oligonucleotide
accucaaguucgaauuggu

SEQ ID NO: 922083 - RNA, 19 nt, Artificial Sequence
  Description of Artificial Sequence: Synthetic oligonucleotide
ucuccggcuccugggcacg

SEQ ID NO: 922084 - RNA, 19 nt, Artificial Sequence
  Description of Artificial Sequence: Synthetic oligonucleotide
ccauaaccgugucaaugcc

SEQ ID NO: 922085 - RNA, 19 nt, Artificial Sequence
  Description of Artificial Sequence: Synthetic oligonucleotide
uaucuggaguuuggcuaug

SEQ ID NO: 922086 - RNA, 19 nt, Artificial Sequence
  Description of Artificial Sequence: Synthetic oligonucleotide
uaacagugcuaggaagcua

SEQ ID NO: 922087 - RNA, 19 nt, Artificial Sequence
  Description of Artificial Sequence: Synthetic oligonucleotide
agccuauguuuaguaugag

SEQ ID NO: 922088 - RNA, 19 nt, Artificial Sequence
  Description of Artificial Sequence: Synthetic oligonucleotide
ccuguugacaccagaccuc

SEQ ID NO: 922089 - RNA, 19 nt, Artificial Sequence
  Description of Artificial Sequence: Synthetic oligonucleotide
aggcaguuuccaucccaca

SEQ ID NO: 922090 - RNA, 19 nt, Artificial Sequence
  Description of Artificial Sequence: Synthetic oligonucleotide
gcuggagggcuccaagaug

SEQ ID NO: 922091 - RNA, 19 nt, Artificial Sequence
  Description of Artificial Sequence: Synthetic oligonucleotide
cagggcuacagacaagugu

SEQ ID NO: 922092 - RNA, 19 nt, Artificial Sequence
  Description of Artificial Sequence: Synthetic oligonucleotide
gcuauguugggaguccuca

SEQ ID NO: 922093 - RNA, 19 nt, Artificial Sequence
  Description of Artificial Sequence: Synthetic oligonucleotide
ucccaguacccgagaugug

SEQ ID NO: 922094 - RNA, 19 nt, Artificial Sequence
  Description of Artificial Sequence: Synthetic oligonucleotide
aggaugagccccaacccaa

SEQ ID NO: 922095 - RNA, 19 nt, Artificial Sequence
  Description of Artificial Sequence: Synthetic oligonucleotide
gcuuuaggcaagcucccca

SEQ ID NO: 922096 - RNA, 19 nt, Artificial Sequence
  Description of Artificial Sequence: Synthetic oligonucleotide
gguugcucuuuaggggugg

SEQ ID NO: 922097 - RNA, 19 nt, Artificial Sequence
  Description of Artificial Sequence: Synthetic oligonucleotide
aggcucacccugugggcug

SEQ ID NO: 922098 - RNA, 19 nt, Artificial Sequence
  Description of Artificial Sequence: Synthetic oligonucleotide
gcggcgagaggacucuggg

SEQ ID NO: 922099 - RNA, 19 nt, Artificial Sequence
  Description of Artificial Sequence: Synthetic oligonucleotide
cucccaguacccgagaugu

SEQ ID NO: 922100 - RNA, 19 nt, Artificial Sequence
  Description of Artificial Sequence: Synthetic oligonucleotide
uacccgagaugugacuuua

SEQ ID NO: 922101 - RNA, 19 nt, Artificial Sequence
  Description of Artificial Sequence: Synthetic oligonucleotide
guuuggcuauguccacuca

SEQ ID NO: 922102 - RNA, 19 nt, Artificial Sequence
  Description of Artificial Sequence: Synthetic oligonucleotide
cugcuauuagaagagccua

SEQ ID NO: 922103 - RNA, 19 nt, Artificial Sequence
  Description of Artificial Sequence: Synthetic oligonucleotide
cuuaggagcccuaggcccu

SEQ ID NO: 922104 - RNA, 19 nt, Artificial Sequence
  Description of Artificial Sequence: Synthetic oligonucleotide
caggguugcucugggacuc

SEQ ID NO: 922105 - RNA, 19 nt, Artificial Sequence
  Description of Artificial Sequence: Synthetic oligonucleotide
gggcaggaauaacaacagc

SEQ ID NO: 922106 - RNA, 19 nt, Artificial Sequence
  Description of Artificial Sequence: Synthetic oligonucleotide
cacaguucggacacacaua

SEQ ID NO: 922107 - RNA, 19 nt, Artificial Sequence
  Description of Artificial Sequence: Synthetic oligonucleotide
  modified_base (11)..(11): a, c, u, g, unknown or other
gacuagcuugngggccacg

SEQ ID NO: 922108 - RNA, 19 nt, Artificial Sequence
  Description of Artificial Sequence: Synthetic oligonucleotide
gcaagcuccccacuauaca

SEQ ID NO: 922109 - RNA, 19 nt, Artificial Sequence
  Description of Artificial Sequence: Synthetic oligonucleotide
acggaauuaucuggaguuu

SEQ ID NO: 922110 - RNA, 19 nt, Artificial Sequence
  Description of Artificial Sequence: Synthetic oligonucleotide
aaccccggcacagcuccca

SEQ ID NO: 922111 - RNA, 19 nt, Artificial Sequence
  Description of Artificial Sequence: Synthetic oligonucleotide
aggcaagcuccccacuaua

SEQ ID NO: 922112 - RNA, 19 nt, Artificial Sequence
  Description of Artificial Sequence: Synthetic oligonucleotide
acgaguucagacagcggaa

SEQ ID NO: 922113 - RNA, 19 nt, Artificial Sequence
  Description of Artificial Sequence: Synthetic oligonucleotide
ggaucuucacagugcuuga

SEQ ID NO: 922114 - RNA, 19 nt, Artificial Sequence
  Description of Artificial Sequence: Synthetic oligonucleotide
ggacucugggcugggaggc

SEQ ID NO: 922115 - RNA, 19 nt, Artificial Sequence
  Description of Artificial Sequence: Synthetic oligonucleotide
acaaggacuuugagugagu

SEQ ID NO: 922116 - RNA, 19 nt, Artificial Sequence
  Description of Artificial Sequence: Synthetic oligonucleotide
cccacauuuauaaaggcuu

SEQ ID NO: 922117 - RNA, 19 nt, Artificial Sequence
  Description of Artificial Sequence: Synthetic oligonucleotide
cagaguagugacaggcagu

SEQ ID NO: 922118 - RNA, 19 nt, Artificial Sequence
  Description of Artificial Sequence: Synthetic oligonucleotide
acacuaccugagagcaaag

SEQ ID NO: 922119 - RNA, 19 nt, Artificial Sequence
  Description of Artificial Sequence: Synthetic oligonucleotide
cuccuucgugugccuuucg

SEQ ID NO: 922120 - RNA, 19 nt, Artificial Sequence
  Description of Artificial Sequence: Synthetic oligonucleotide
gggauccuuguacaaaagu

SEQ ID NO: 922121 - RNA, 19 nt, Artificial Sequence
  Description of Artificial Sequence: Synthetic oligonucleotide
gggccaaacucucaauucu

SEQ ID NO: 922122 - RNA, 19 nt, Artificial Sequence
  Description of Artificial Sequence: Synthetic oligonucleotide
ccaccugcugcuauuagaa

SEQ ID NO: 922123 - RNA, 19 nt, Artificial Sequence
  Description of Artificial Sequence: Synthetic oligonucleotide
cucggugcaguaugggcua

SEQ ID NO: 922124 - RNA, 19 nt, Artificial Sequence
  Description of Artificial Sequence: Synthetic oligonucleotide
ggcaagcuccccacuauac

SEQ ID NO: 922125 - RNA, 19 nt, Artificial Sequence
  Description of Artificial Sequence: Synthetic oligonucleotide
agaccucggccuugcaguu

SEQ ID NO: 922126 - RNA, 19 nt, Artificial Sequence
  Description of Artificial Sequence: Synthetic oligonucleotide
ggacaaggacuuugaguga

SEQ ID NO: 922127 - RNA, 19 nt, Artificial Sequence
  Description of Artificial Sequence: Synthetic oligonucleotide
ggcucaccuggcaaaggag

SEQ ID NO: 922128 - RNA, 19 nt, Artificial Sequence
  Description of Artificial Sequence: Synthetic oligonucleotide
cacuauacacaccccgccu

SEQ ID NO: 922129 - RNA, 19 nt, Artificial Sequence
  Description of Artificial Sequence: Synthetic oligonucleotide
agggaaugcucagguggcu

SEQ ID NO: 922130 - RNA, 19 nt, Artificial Sequence
  Description of Artificial Sequence: Synthetic oligonucleotide
cuccgcauuuuccugggcu

SEQ ID NO: 922131 - RNA, 19 nt, Artificial Sequence
  Description of Artificial Sequence: Synthetic oligonucleotide
gaguuuggcuauguccacu

SEQ ID NO: 922132 - RNA, 19 nt, Artificial Sequence
  Description of Artificial Sequence: Synthetic oligonucleotide
  modified_base (2)..(2): a, c, u, g, unknown or other
gngggccacgacccugauc

SEQ ID NO: 922133 - RNA, 19 nt, Artificial Sequence
  Description of Artificial Sequence: Synthetic oligonucleotide
agcccuaggcccugugcua

SEQ ID NO: 922134 - RNA, 19 nt, Artificial Sequence
  Description of Artificial Sequence: Synthetic oligonucleotide
ucggcggaagaggcggcga

SEQ ID NO: 922135 - RNA, 19 nt, Artificial Sequence
  Description of Artificial Sequence: Synthetic oligonucleotide
gccuauguuuaguaugagu

SEQ ID NO: 922136 - RNA, 19 nt, Artificial Sequence
  Description of Artificial Sequence: Synthetic oligonucleotide
ggaguuaccucaccucccu

SEQ ID NO: 922137 - RNA, 19 nt, Artificial Sequence
  Description of Artificial Sequence: Synthetic oligonucleotide
acacaccccgccucuccaa

SEQ ID NO: 922138 - RNA, 19 nt, Artificial Sequence
  Description of Artificial Sequence: Synthetic oligonucleotide
gaggcucacccugugggcu

SEQ ID NO: 922139 - RNA, 19 nt, Artificial Sequence
  Description of Artificial Sequence: Synthetic oligonucleotide
gcgagaggacucugggcug

SEQ ID NO: 922140 - RNA, 19 nt, Artificial Sequence
  Description of Artificial Sequence: Synthetic oligonucleotide
cacggcaggauggccaaga

SEQ ID NO: 922141 - RNA, 19 nt, Artificial Sequence
  Description of Artificial Sequence: Synthetic oligonucleotide
ggguuuggugcuggggcag

SEQ ID NO: 922142 - RNA, 19 nt, Artificial Sequence
  Description of Artificial Sequence: Synthetic oligonucleotide
  modified_base (3)..(3): a, c, u, g, unknown or other
ugngggccacgacccugau

SEQ ID NO: 922143 - RNA, 19 nt, Artificial Sequence
  Description of Artificial Sequence: Synthetic oligonucleotide
cucaauucucagacagaau

SEQ ID NO: 922144 - RNA, 19 nt, Artificial Sequence
  Description of Artificial Sequence: Synthetic oligonucleotide
ccugaucaguacgaguuca

SEQ ID NO: 922145 - RNA, 19 nt, Artificial Sequence
  Description of Artificial Sequence: Synthetic oligonucleotide
guggucugcuuaggagccc

SEQ ID NO: 922146 - RNA, 19 nt, Artificial Sequence
  Description of Artificial Sequence: Synthetic oligonucleotide
ggcggcgagaggacucugg

SEQ ID NO: 922147 - RNA, 19 nt, Artificial Sequence
  Description of Artificial Sequence: Synthetic oligonucleotide
agccuccugguagcgaaau

SEQ ID NO: 922148 - RNA, 19 nt, Artificial Sequence
  Description of Artificial Sequence: Synthetic oligonucleotide
cuuuggagccaagacucgu

SEQ ID NO: 922149 - RNA, 19 nt, Artificial Sequence
  Description of Artificial Sequence: Synthetic oligonucleotide
ggagaggaagaggcauggc

SEQ ID NO: 922150 - RNA, 19 nt, Artificial Sequence
  Description of Artificial Sequence: Synthetic oligonucleotide
ccgugucaaugccaccugc

SEQ ID NO: 922151 - RNA, 19 nt, Artificial Sequence
  Description of Artificial Sequence: Synthetic oligonucleotide
cucagguggcuacuuucua

SEQ ID NO: 922152 - RNA, 19 nt, Artificial Sequence
  Description of Artificial Sequence: Synthetic oligonucleotide
gguagcgaaaucggcggaa

SEQ ID NO: 922153 - RNA, 19 nt, Artificial Sequence
  Description of Artificial Sequence: Synthetic oligonucleotide
cccaguacccgagauguga

SEQ ID NO: 922154 - RNA, 19 nt, Artificial Sequence
  Description of Artificial Sequence: Synthetic oligonucleotide
gaaucucccacggcaggau

SEQ ID NO: 922155 - RNA, 19 nt, Artificial Sequence
  Description of Artificial Sequence: Synthetic oligonucleotide
ccuuucgagccgaagccaa

SEQ ID NO: 922156 - RNA, 19 nt, Artificial Sequence
  Description of Artificial Sequence: Synthetic oligonucleotide
acagugcuaggaagcuaaa

SEQ ID NO: 922157 - RNA, 19 nt, Artificial Sequence
  Description of Artificial Sequence: Synthetic oligonucleotide
cgucaaucaccaccggauc

SEQ ID NO: 922158 - RNA, 19 nt, Artificial Sequence
  Description of Artificial Sequence: Synthetic oligonucleotide
ucuccgcucuccggcuccu

SEQ ID NO: 922159 - RNA, 19 nt, Artificial Sequence
  Description of Artificial Sequence: Synthetic oligonucleotide
cucuuuagggguggugggu

SEQ ID NO: 922160 - RNA, 19 nt, Artificial Sequence
  Description of Artificial Sequence: Synthetic oligonucleotide
ggugcaguaugggcuaugu

SEQ ID NO: 922161 - RNA, 19 nt, Artificial Sequence
  Description of Artificial Sequence: Synthetic oligonucleotide
ggcucacccugugggcugg

SEQ ID NO: 922162 - RNA, 19 nt, Artificial Sequence
  Description of Artificial Sequence: Synthetic oligonucleotide
gccacgacccugaucagua

SEQ ID NO: 922163 - RNA, 19 nt, Artificial Sequence
  Description of Artificial Sequence: Synthetic oligonucleotide
ucggugcaguaugggcuau

SEQ ID NO: 922164 - RNA, 19 nt, Artificial Sequence
  Description of Artificial Sequence: Synthetic oligonucleotide
ccgagaugugacuuuauuu

SEQ ID NO: 922165 - RNA, 19 nt, Artificial Sequence
  Description of Artificial Sequence: Synthetic oligonucleotide
guacccgagaugugacuuu

SEQ ID NO: 922166 - RNA, 19 nt, Artificial Sequence
  Description of Artificial Sequence: Synthetic oligonucleotide
cacaccccgccucuccaaa

SEQ ID NO: 922167 - RNA, 19 nt, Artificial Sequence
  Description of Artificial Sequence: Synthetic oligonucleotide
cggacacacauaagacuuc

SEQ ID NO: 922168 - RNA, 19 nt, Artificial Sequence
  Description of Artificial Sequence: Synthetic oligonucleotide
agccucuacugcagccaca

SEQ ID NO: 922169 - RNA, 19 nt, Artificial Sequence
  Description of Artificial Sequence: Synthetic oligonucleotide
cacgcacccagcucugaau

SEQ ID NO: 922170 - RNA, 19 nt, Artificial Sequence
  Description of Artificial Sequence: Synthetic oligonucleotide
gaggcggcgagaggacucu

SEQ ID NO: 922171 - RNA, 19 nt, Artificial Sequence
  Description of Artificial Sequence: Synthetic oligonucleotide
gcacaguagagggaaugcu

SEQ ID NO: 922172 - RNA, 19 nt, Artificial Sequence
  Description of Artificial Sequence: Synthetic oligonucleotide
gggaaugcucagguggcua

SEQ ID NO: 922173 - RNA, 19 nt, Artificial Sequence
  Description of Artificial Sequence: Synthetic oligonucleotide
ggcuauguugggaguccuc

SEQ ID NO: 922174 - RNA, 19 nt, Artificial Sequence
  Description of Artificial Sequence: Synthetic oligonucleotide
ccacgacccugaucaguac

SEQ ID NO: 922175 - RNA, 19 nt, Artificial Sequence
  Description of Artificial Sequence: Synthetic oligonucleotide
gcaaguggcuggagggcuc

SEQ ID NO: 922176 - RNA, 19 nt, Artificial Sequence
  Description of Artificial Sequence: Synthetic oligonucleotide
cagaacuggacagcacgau

SEQ ID NO: 922177 - RNA, 19 nt, Artificial Sequence
  Description of Artificial Sequence: Synthetic oligonucleotide
  modified_base (12)..(12): a, c, u, g, unknown or other
ggacuagcuugngggccac

SEQ ID NO: 922178 - RNA, 19 nt, Artificial Sequence
  Description of Artificial Sequence: Synthetic oligonucleotide
cggcgagaggacucugggc

SEQ ID NO: 922179 - RNA, 19 nt, Artificial Sequence
  Description of Artificial Sequence: Synthetic oligonucleotide
ccacggaauuaucuggagu

SEQ ID NO: 922180 - RNA, 19 nt, Artificial Sequence
  Description of Artificial Sequence: Synthetic oligonucleotide
acccgagaugugacuuuau

SEQ ID NO: 922181 - RNA, 19 nt, Artificial Sequence
  Description of Artificial Sequence: Synthetic oligonucleotide
gccuccugguagcgaaauc

SEQ ID NO: 922182 - RNA, 19 nt, Artificial Sequence
  Description of Artificial Sequence: Synthetic oligonucleotide
ggagccuugaggggccaaa

SEQ ID NO: 922183 - RNA, 19 nt, Artificial Sequence
  Description of Artificial Sequence: Synthetic oligonucleotide
gcacgcacccagcucugaa

SEQ ID NO: 922184 - RNA, 19 nt, Artificial Sequence
  Description of Artificial Sequence: Synthetic oligonucleotide
caacagcaccacggaauua

SEQ ID NO: 922185 - RNA, 19 nt, Artificial Sequence
  Description of Artificial Sequence: Synthetic oligonucleotide
gugcaguaugggcuauguu

SEQ ID NO: 922186 - RNA, 19 nt, Artificial Sequence
  Description of Artificial Sequence: Synthetic oligonucleotide
caaccucagugcugcuccu

SEQ ID NO: 922187 - RNA, 19 nt, Artificial Sequence
  Description of Artificial Sequence: Synthetic oligonucleotide
aggcggcgagaggacucug

SEQ ID NO: 922188 - RNA, 19 nt, Artificial Sequence
  Description of Artificial Sequence: Synthetic oligonucleotide
ggcggaagaggcggcgaga

SEQ ID NO: 922189 - RNA, 19 nt, Artificial Sequence
  Description of Artificial Sequence: Synthetic oligonucleotide
cgacccugaucaguacgag

SEQ ID NO: 922190 - RNA, 19 nt, Artificial Sequence
  Description of Artificial Sequence: Synthetic oligonucleotide
gcucuccgcucuccggcuc

SEQ ID NO: 922191 - RNA, 19 nt, Artificial Sequence
  Description of Artificial Sequence: Synthetic oligonucleotide
cgugucaaugccaccugcu

SEQ ID NO: 922192 - RNA, 19 nt, Artificial Sequence
  Description of Artificial Sequence: Synthetic oligonucleotide
ccucaaguucgaauugguu

SEQ ID NO: 922193 - RNA, 19 nt, Artificial Sequence
  Description of Artificial Sequence: Synthetic oligonucleotide
ggauuaggggcagcccagu

SEQ ID NO: 922194 - RNA, 19 nt, Artificial Sequence
  Description of Artificial Sequence: Synthetic oligonucleotide
ggacacuaccugagagcaa

SEQ ID NO: 922195 - RNA, 19 nt, Artificial Sequence
  Description of Artificial Sequence: Synthetic oligonucleotide
gggcuacagacaaguguua

SEQ ID NO: 922196 - RNA, 19 nt, Artificial Sequence
  Description of Artificial Sequence: Synthetic oligonucleotide
cggcggaagaggcggcgag

SEQ ID NO: 922197 - RNA, 19 nt, Artificial Sequence
  Description of Artificial Sequence: Synthetic oligonucleotide
ccucuccaaacgauggauu

SEQ ID NO: 922198 - RNA, 19 nt, Artificial Sequence
  Description of Artificial Sequence: Synthetic oligonucleotide
gccaaccccggcacagcuc

SEQ ID NO: 922199 - RNA, 19 nt, Artificial Sequence
  Description of Artificial Sequence: Synthetic oligonucleotide
cuccgcucuccggcuccug

SEQ ID NO: 922200 - RNA, 19 nt, Artificial Sequence
  Description of Artificial Sequence: Synthetic oligonucleotide
gggcacgcacccagcucug

SEQ ID NO: 922201 - RNA, 19 nt, Artificial Sequence
  Description of Artificial Sequence: Synthetic oligonucleotide
  modified_base (6)..(6): a, c, u, g, unknown or other
gcuugngggccacgacccu

SEQ ID NO: 922202 - RNA, 19 nt, Artificial Sequence
  Description of Artificial Sequence: Synthetic oligonucleotide
ggccacgacccugaucagu

SEQ ID NO: 922203 - RNA, 19 nt, Artificial Sequence
  Description of Artificial Sequence: Synthetic oligonucleotide
ccguucccagagccucuac

SEQ ID NO: 922204 - RNA, 19 nt, Artificial Sequence
  Description of Artificial Sequence: Synthetic oligonucleotide
gcugggaggcucacccugu

SEQ ID NO: 922205 - RNA, 19 nt, Artificial Sequence
  Description of Artificial Sequence: Synthetic oligonucleotide
cugggacucugcugacauu

SEQ ID NO: 922206 - RNA, 19 nt, Artificial Sequence
  Description of Artificial Sequence: Synthetic oligonucleotide
gggcuauguugggaguccu

SEQ ID NO: 922207 - RNA, 19 nt, Artificial Sequence
  Description of Artificial Sequence: Synthetic oligonucleotide
cguucccagagccucuacu

SEQ ID NO: 922208 - RNA, 19 nt, Artificial Sequence
  Description of Artificial Sequence: Synthetic oligonucleotide
cgccucuccaaacgaugga

SEQ ID NO: 922209 - RNA, 19 nt, Artificial Sequence
  Description of Artificial Sequence: Synthetic oligonucleotide
gugugccuuucgagccgaa

SEQ ID NO: 922210 - RNA, 19 nt, Artificial Sequence
  Description of Artificial Sequence: Synthetic oligonucleotide
caggaggacuccgcauuuu

SEQ ID NO: 922211 - RNA, 19 nt, Artificial Sequence
  Description of Artificial Sequence: Synthetic oligonucleotide
cgugugccuuucgagccga

SEQ ID NO: 922212 - RNA, 19 nt, Artificial Sequence
  Description of Artificial Sequence: Synthetic oligonucleotide
ggucugcuuaggagcccua

SEQ ID NO: 922213 - RNA, 19 nt, Artificial Sequence
  Description of Artificial Sequence: Synthetic oligonucleotide
gcucccguucccagagccu

SEQ ID NO: 922214 - RNA, 19 nt, Artificial Sequence
  Description of Artificial Sequence: Synthetic oligonucleotide
ggucucccuggcucccguu

SEQ ID NO: 922215 - RNA, 19 nt, Artificial Sequence
  Description of Artificial Sequence: Synthetic oligonucleotide
ccccgccucuccaaacgau

SEQ ID NO: 922216 - RNA, 19 nt, Artificial Sequence
  Description of Artificial Sequence: Synthetic oligonucleotide
ccggaucuucacagugcuu

SEQ ID NO: 922217 - RNA, 19 nt, Artificial Sequence
  Description of Artificial Sequence: Synthetic oligonucleotide
  modified_base (1)..(1): a, c, u, g, unknown or other
ngggccacgacccugauca

SEQ ID NO: 922218 - RNA, 19 nt, Artificial Sequence
  Description of Artificial Sequence: Synthetic oligonucleotide
aauagaguuaaccagccac

SEQ ID NO: 922219 - RNA, 19 nt, Artificial Sequence
  Description of Artificial Sequence: Synthetic oligonucleotide
aauaauagaguuaaccagc

SEQ ID NO: 922220 - RNA, 19 nt, Artificial Sequence
  Description of Artificial Sequence: Synthetic oligonucleotide
uguguauucaaucuugugg

SEQ ID NO: 922221 - RNA, 19 nt, Artificial Sequence
  Description of Artificial Sequence: Synthetic oligonucleotide
agcaauaguacucacaucg

SEQ ID NO: 922222 - RNA, 19 nt, Artificial Sequence
  Description of Artificial Sequence: Synthetic oligonucleotide
gaaaauucgagccuggagg

SEQ ID NO: 922223 - RNA, 19 nt, Artificial Sequence
  Description of Artificial Sequence: Synthetic oligonucleotide
ugugacaugucgaagaucc

SEQ ID NO: 922224 - RNA, 19 nt, Artificial Sequence
  Description of Artificial Sequence: Synthetic oligonucleotide
uaauaauagaguuaaccag

SEQ ID NO: 922225 - RNA, 19 nt, Artificial Sequence
  Description of Artificial Sequence: Synthetic oligonucleotide
uccauauccacgcaggugg

SEQ ID NO: 922226 - RNA, 19 nt, Artificial Sequence
  Description of Artificial Sequence: Synthetic oligonucleotide
uuagaauaacaucaguaag

SEQ ID NO: 922227 - RNA, 19 nt, Artificial Sequence
  Description of Artificial Sequence: Synthetic oligonucleotide
aaaauucgagccuggaggg

SEQ ID NO: 922228 - RNA, 19 nt, Artificial Sequence
  Description of Artificial Sequence: Synthetic oligonucleotide
aaaacauugugccaauucu

SEQ ID NO: 922229 - RNA, 19 nt, Artificial Sequence
  Description of Artificial Sequence: Synthetic oligonucleotide
auuguaacagcacaucagg

SEQ ID NO: 922230 - RNA, 19 nt, Artificial Sequence
  Description of Artificial Sequence: Synthetic oligonucleotide
aauacguucuuuuacacuu

SEQ ID NO: 922231 - RNA, 19 nt, Artificial Sequence
  Description of Artificial Sequence: Synthetic oligonucleotide
uuuagaauaacaucaguaa

SEQ ID NO: 922232 - RNA, 19 nt, Artificial Sequence
  Description of Artificial Sequence: Synthetic oligonucleotide
uuaacucggaacuugcagg

SEQ ID NO: 922233 - RNA, 19 nt, Artificial Sequence
  Description of Artificial Sequence: Synthetic oligonucleotide
auuggauuggcauacucgg

SEQ ID NO: 922234 - RNA, 19 nt, Artificial Sequence
  Description of Artificial Sequence: Synthetic oligonucleotide
ucuaggagguuccauaucc

SEQ ID NO: 922235 - RNA, 19 nt, Artificial Sequence
  Description of Artificial Sequence: Synthetic oligonucleotide
aguuagaaagaguagauau

SEQ ID NO: 922236 - RNA, 19 nt, Artificial Sequence
  Description of Artificial Sequence: Synthetic oligonucleotide
auaguacucacaucgagag

SEQ ID NO: 922237 - RNA, 19 nt, Artificial Sequence
  Description of Artificial Sequence: Synthetic oligonucleotide
uguaguuucuaauaauaga

SEQ ID NO: 922238 - RNA, 19 nt, Artificial Sequence
  Description of Artificial Sequence: Synthetic oligonucleotide
ucuucuuuucucaagggga

SEQ ID NO: 922239 - RNA, 19 nt, Artificial Sequence
  Description of Artificial Sequence: Synthetic oligonucleotide
ugucacuagggacacauag

SEQ ID NO: 922240 - RNA, 19 nt, Artificial Sequence
  Description of Artificial Sequence: Synthetic oligonucleotide
uucauagccaccgauacag

SEQ ID NO: 922241 - RNA, 19 nt, Artificial Sequence
  Description of Artificial Sequence: Synthetic oligonucleotide
cuaauaauagaguuaacca

SEQ ID NO: 922242 - RNA, 19 nt, Artificial Sequence
  Description of Artificial Sequence: Synthetic oligonucleotide
uuucuaauaauagaguuaa

SEQ ID NO: 922243 - RNA, 19 nt, Artificial Sequence
  Description of Artificial Sequence: Synthetic oligonucleotide
ucauguaaccauucucugg

SEQ ID NO: 922244 - RNA, 19 nt, Artificial Sequence
  Description of Artificial Sequence: Synthetic oligonucleotide
uguugcacaaugaauaaua

SEQ ID NO: 922245 - RNA, 19 nt, Artificial Sequence
  Description of Artificial Sequence: Synthetic oligonucleotide
aguuaaaguaggcaccauc

SEQ ID NO: 922246 - RNA, 19 nt, Artificial Sequence
  Description of Artificial Sequence: Synthetic oligonucleotide
aguagagugggauucgaag

SEQ ID NO: 922247 - RNA, 19 nt, Artificial Sequence
  Description of Artificial Sequence: Synthetic oligonucleotide
ucuuacuuuaacucggaac

SEQ ID NO: 922248 - RNA, 19 nt, Artificial Sequence
  Description of Artificial Sequence: Synthetic oligonucleotide
ucugacaccgacauugaca

SEQ ID NO: 922249 - RNA, 19 nt, Artificial Sequence
  Description of Artificial Sequence: Synthetic oligonucleotide
ugucuuauauaaacaauaa

SEQ ID NO: 922250 - RNA, 19 nt, Artificial Sequence
  Description of Artificial Sequence: Synthetic oligonucleotide
ugugccaauucuuaagggc

SEQ ID NO: 922251 - RNA, 19 nt, Artificial Sequence
  Description of Artificial Sequence: Synthetic oligonucleotide
auaauagaguuaaccagcc

SEQ ID NO: 922252 - RNA, 19 nt, Artificial Sequence
  Description of Artificial Sequence: Synthetic oligonucleotide
ugaguuuuaguaaguuugc

SEQ ID NO: 922253 - RNA, 19 nt, Artificial Sequence
  Description of Artificial Sequence: Synthetic oligonucleotide
uugcagaugacuuuaucug

SEQ ID NO: 922254 - RNA, 19 nt, Artificial Sequence
  Description of Artificial Sequence: Synthetic oligonucleotide
gauuggauuggcauacucg

SEQ ID NO: 922255 - RNA, 19 nt, Artificial Sequence
  Description of Artificial Sequence: Synthetic oligonucleotide
agaucagcugggaagagcc

SEQ ID NO: 922256 - RNA, 19 nt, Artificial Sequence
  Description of Artificial Sequence: Synthetic oligonucleotide
acaugucgaagauccaggc

SEQ ID NO: 922257 - RNA, 19 nt, Artificial Sequence
  Description of Artificial Sequence: Synthetic oligonucleotide
uggauuggcauacucgggc

SEQ ID NO: 922258 - RNA, 19 nt, Artificial Sequence
  Description of Artificial Sequence: Synthetic oligonucleotide
uauucgguucagcaauacg

SEQ ID NO: 922259 - RNA, 19 nt, Artificial Sequence
  Description of Artificial Sequence: Synthetic oligonucleotide
auauagagagugugaguac

SEQ ID NO: 922260 - RNA, 19 nt, Artificial Sequence
  Description of Artificial Sequence: Synthetic oligonucleotide
ugggauucgaagcaacagc

SEQ ID NO: 922261 - RNA, 19 nt, Artificial Sequence
  Description of Artificial Sequence: Synthetic oligonucleotide
uuuaaggccuucccaaaga

SEQ ID NO: 922262 - RNA, 19 nt, Artificial Sequence
  Description of Artificial Sequence: Synthetic oligonucleotide
aauaguacucacaucgaga

SEQ ID NO: 922263 - RNA, 19 nt, Artificial Sequence
  Description of Artificial Sequence: Synthetic oligonucleotide
uaguuucuaauaauagagu

SEQ ID NO: 922264 - RNA, 19 nt, Artificial Sequence
  Description of Artificial Sequence: Synthetic oligonucleotide
uauagagagugugaguacc

SEQ ID NO: 922265 - RNA, 19 nt, Artificial Sequence
  Description of Artificial Sequence: Synthetic oligonucleotide
guagagugggauucgaagc

SEQ ID NO: 922266 - RNA, 19 nt, Artificial Sequence
  Description of Artificial Sequence: Synthetic oligonucleotide
agcaauacguucuuuuaca

SEQ ID NO: 922267 - RNA, 19 nt, Artificial Sequence
  Description of Artificial Sequence: Synthetic oligonucleotide
cuuacuuuaacucggaacu

SEQ ID NO: 922268 - RNA, 19 nt, Artificial Sequence
  Description of Artificial Sequence: Synthetic oligonucleotide
ugacuuuaucugaccagcg

SEQ ID NO: 922269 - RNA, 19 nt, Artificial Sequence
  Description of Artificial Sequence: Synthetic oligonucleotide
aagucuggcccaucucagc

SEQ ID NO: 922270 - RNA, 19 nt, Artificial Sequence
  Description of Artificial Sequence: Synthetic oligonucleotide
aggacaucgcuuuuguuug

SEQ ID NO: 922271 - RNA, 19 nt, Artificial Sequence
  Description of Artificial Sequence: Synthetic oligonucleotide
guucuuuuacacuugggca

SEQ ID NO: 922272 - RNA, 19 nt, Artificial Sequence
  Description of Artificial Sequence: Synthetic oligonucleotide
cucacaucgagaguuaaag

SEQ ID NO: 922273 - RNA, 19 nt, Artificial Sequence
  Description of Artificial Sequence: Synthetic oligonucleotide
uuuacacuugggcacuuga

SEQ ID NO: 922274 - RNA, 19 nt, Artificial Sequence
  Description of Artificial Sequence: Synthetic oligonucleotide
guaaguuugcuucaaaaua

SEQ ID NO: 922275 - RNA, 19 nt, Artificial Sequence
  Description of Artificial Sequence: Synthetic oligonucleotide
acaauuguaacagcacauc

SEQ ID NO: 922276 - RNA, 19 nt, Artificial Sequence
  Description of Artificial Sequence: Synthetic oligonucleotide
uaggacaucgcuuuuguuu

SEQ ID NO: 922277 - RNA, 19 nt, Artificial Sequence
  Description of Artificial Sequence: Synthetic oligonucleotide
uggagugucuuuauauaga

SEQ ID NO: 922278 - RNA, 19 nt, Artificial Sequence
  Description of Artificial Sequence: Synthetic oligonucleotide
cagagcuagagcuggaggc

SEQ ID NO: 922279 - RNA, 19 nt, Artificial Sequence
  Description of Artificial Sequence: Synthetic oligonucleotide
ucuuuucucaaggggaaag

SEQ ID NO: 922280 - RNA, 19 nt, Artificial Sequence
  Description of Artificial Sequence: Synthetic oligonucleotide
aaggguaggacaucgcuuu

SEQ ID NO: 922281 - RNA, 19 nt, Artificial Sequence
  Description of Artificial Sequence: Synthetic oligonucleotide
acuuuaacucggaacuugc

SEQ ID NO: 922282 - RNA, 19 nt, Artificial Sequence
  Description of Artificial Sequence: Synthetic oligonucleotide
aaugucuuauauaaacaau

SEQ ID NO: 922283 - RNA, 19 nt, Artificial Sequence
  Description of Artificial Sequence: Synthetic oligonucleotide
uucauguaaccauucucug

SEQ ID NO: 922284 - RNA, 19 nt, Artificial Sequence
  Description of Artificial Sequence: Synthetic oligonucleotide
gguguugcaagucuggccc

SEQ ID NO: 922285 - RNA, 19 nt, Artificial Sequence
  Description of Artificial Sequence: Synthetic oligonucleotide
auguauauccuggugagca

SEQ ID NO: 922286 - RNA, 19 nt, Artificial Sequence
  Description of Artificial Sequence: Synthetic oligonucleotide
ugcagaugacuuuaucuga

SEQ ID NO: 922287 - RNA, 19 nt, Artificial Sequence
  Description of Artificial Sequence: Synthetic oligonucleotide
agauuggauuggcauacuc

SEQ ID NO: 922288 - RNA, 19 nt, Artificial Sequence
  Description of Artificial Sequence: Synthetic oligonucleotide
acaucgagaguuaaaguag

SEQ ID NO: 922289 - RNA, 19 nt, Artificial Sequence
  Description of Artificial Sequence: Synthetic oligonucleotide
caauaguacucacaucgag

SEQ ID NO: 922290 - RNA, 19 nt, Artificial Sequence
  Description of Artificial Sequence: Synthetic oligonucleotide
auucgguucagcaauacgu

SEQ ID NO: 922291 - RNA, 19 nt, Artificial Sequence
  Description of Artificial Sequence: Synthetic oligonucleotide
uuggauuggcauacucggg

SEQ ID NO: 922292 - RNA, 19 nt, Artificial Sequence
  Description of Artificial Sequence: Synthetic oligonucleotide
uugggaacacuccuaccag

SEQ ID NO: 922293 - RNA, 19 nt, Artificial Sequence
  Description of Artificial Sequence: Synthetic oligonucleotide
aguacucacaucgagaguu

SEQ ID NO: 922294 - RNA, 19 nt, Artificial Sequence
  Description of Artificial Sequence: Synthetic oligonucleotide
ugugguuguaguuucuaau

SEQ ID NO: 922295 - RNA, 19 nt, Artificial Sequence
  Description of Artificial Sequence: Synthetic oligonucleotide
uugacuggcagaucagcug

SEQ ID NO: 922296 - RNA, 19 nt, Artificial Sequence
  Description of Artificial Sequence: Synthetic oligonucleotide
aguaagaaugccaucugcu

SEQ ID NO: 922297 - RNA, 19 nt, Artificial Sequence
  Description of Artificial Sequence: Synthetic oligonucleotide
ucuucuaguggugagucuc

SEQ ID NO: 922298 - RNA, 19 nt, Artificial Sequence
  Description of Artificial Sequence: Synthetic oligonucleotide
ucgagaguuaaaguaggca

SEQ ID NO: 922299 - RNA, 19 nt, Artificial Sequence
  Description of Artificial Sequence: Synthetic oligonucleotide
gauucuaggagguuccaua

SEQ ID NO: 922300 - RNA, 19 nt, Artificial Sequence
  Description of Artificial Sequence: Synthetic oligonucleotide
aguggugagucuccagauc

SEQ ID NO: 922301 - RNA, 19 nt, Artificial Sequence
  Description of Artificial Sequence: Synthetic oligonucleotide
uggucguccacuccaggcc

SEQ ID NO: 922302 - RNA, 19 nt, Artificial Sequence
  Description of Artificial Sequence: Synthetic oligonucleotide
gacauugaguuugccacag

SEQ ID NO: 922303 - RNA, 19 nt, Artificial Sequence
  Description of Artificial Sequence: Synthetic oligonucleotide
aggagaauucacagguagc

SEQ ID NO: 922304 - RNA, 19 nt, Artificial Sequence
  Description of Artificial Sequence: Synthetic oligonucleotide
augaggaaccaccacaauu

SEQ ID NO: 922305 - RNA, 19 nt, Artificial Sequence
  Description of Artificial Sequence: Synthetic oligonucleotide
caguaagaaugccaucugc

SEQ ID NO: 922306 - RNA, 19 nt, Artificial Sequence
  Description of Artificial Sequence: Synthetic oligonucleotide
accaagccagauuggauug

SEQ ID NO: 922307 - RNA, 19 nt, Artificial Sequence
  Description of Artificial Sequence: Synthetic oligonucleotide
gaguagauauauucaaaua

SEQ ID NO: 922308 - RNA, 19 nt, Artificial Sequence
  Description of Artificial Sequence: Synthetic oligonucleotide
ucccaaagagaugaggaac

SEQ ID NO: 922309 - RNA, 19 nt, Artificial Sequence
  Description of Artificial Sequence: Synthetic oligonucleotide
cacaucgagaguuaaagua

SEQ ID NO: 922310 - RNA, 19 nt, Artificial Sequence
  Description of Artificial Sequence: Synthetic oligonucleotide
agcuccauaguugucacca

SEQ ID NO: 922311 - RNA, 19 nt, Artificial Sequence
  Description of Artificial Sequence: Synthetic oligonucleotide
ucccaaggcuguuuuguag

SEQ ID NO: 922312 - RNA, 19 nt, Artificial Sequence
  Description of Artificial Sequence: Synthetic oligonucleotide
ugcagcggaugucacaccu

SEQ ID NO: 922313 - RNA, 19 nt, Artificial Sequence
  Description of Artificial Sequence: Synthetic oligonucleotide
agaguuaaaguaggcacca

SEQ ID NO: 922314 - RNA, 19 nt, Artificial Sequence
  Description of Artificial Sequence: Synthetic oligonucleotide
gauuggcauacucgggcag

SEQ ID NO: 922315 - RNA, 19 nt, Artificial Sequence
  Description of Artificial Sequence: Synthetic oligonucleotide
ggaaaauucgagccuggag

SEQ ID NO: 922316 - RNA, 19 nt, Artificial Sequence
  Description of Artificial Sequence: Synthetic oligonucleotide
cuggugagcaauaguacuc

SEQ ID NO: 922317 - RNA, 19 nt, Artificial Sequence
  Description of Artificial Sequence: Synthetic oligonucleotide
ugaguuugccacagcgucu

SEQ ID NO: 922318 - RNA, 19 nt, Artificial Sequence
  Description of Artificial Sequence: Synthetic oligonucleotide
uccuggugagcaauaguac

SEQ ID NO: 922319 - RNA, 19 nt, Artificial Sequence
  Description of Artificial Sequence: Synthetic oligonucleotide
caauuguaacagcacauca

SEQ ID NO: 922320 - RNA, 19 nt, Artificial Sequence
  Description of Artificial Sequence: Synthetic oligonucleotide
ucacaucgagaguuaaagu

SEQ ID NO: 922321 - RNA, 19 nt, Artificial Sequence
  Description of Artificial Sequence: Synthetic oligonucleotide
ucauagccaccgauacagg

SEQ ID NO: 922322 - RNA, 19 nt, Artificial Sequence
  Description of Artificial Sequence: Synthetic oligonucleotide
guauacauccccauacuuc

SEQ ID NO: 922323 - RNA, 19 nt, Artificial Sequence
  Description of Artificial Sequence: Synthetic oligonucleotide
uuuaguaaguuugcuucaa

SEQ ID NO: 922324 - RNA, 19 nt, Artificial Sequence
  Description of Artificial Sequence: Synthetic oligonucleotide
uuuguccaugccaugcuua

SEQ ID NO: 922325 - RNA, 19 nt, Artificial Sequence
  Description of Artificial Sequence: Synthetic oligonucleotide
agccacaauaaaaggagag

SEQ ID NO: 922326 - RNA, 19 nt, Artificial Sequence
  Description of Artificial Sequence: Synthetic oligonucleotide
aucgagaguuaaaguaggc

SEQ ID NO: 922327 - RNA, 19 nt, Artificial Sequence
  Description of Artificial Sequence: Synthetic oligonucleotide
guuuauucgguucagcaau

SEQ ID NO: 922328 - RNA, 19 nt, Artificial Sequence
  Description of Artificial Sequence: Synthetic oligonucleotide
caguuuauucgguucagca

SEQ ID NO: 922329 - RNA, 19 nt, Artificial Sequence
  Description of Artificial Sequence: Synthetic oligonucleotide
cuacccugaaguucauagc

SEQ ID NO: 922330 - RNA, 19 nt, Artificial Sequence
  Description of Artificial Sequence: Synthetic oligonucleotide
ucuaguggugagucuccag

SEQ ID NO: 922331 - RNA, 19 nt, Artificial Sequence
  Description of Artificial Sequence: Synthetic oligonucleotide
uucgguucagcaauacguu

SEQ ID NO: 922332 - RNA, 19 nt, Artificial Sequence
  Description of Artificial Sequence: Synthetic oligonucleotide
uuuauucgguucagcaaua

SEQ ID NO: 922333 - RNA, 19 nt, Artificial Sequence
  Description of Artificial Sequence: Synthetic oligonucleotide
uauccacgcagguggcugg

SEQ ID NO: 922334 - RNA, 19 nt, Artificial Sequence
  Description of Artificial Sequence: Synthetic oligonucleotide
acauugaguuugccacagc

SEQ ID NO: 922335 - RNA, 19 nt, Artificial Sequence
  Description of Artificial Sequence: Synthetic oligonucleotide
accgauacaggagaauuca

SEQ ID NO: 922336 - RNA, 19 nt, Artificial Sequence
  Description of Artificial Sequence: Synthetic oligonucleotide
agccaugggugucacuagg

SEQ ID NO: 922337 - RNA, 19 nt, Artificial Sequence
  Description of Artificial Sequence: Synthetic oligonucleotide
aggacuacccugaaguuca

SEQ ID NO: 922338 - RNA, 19 nt, Artificial Sequence
  Description of Artificial Sequence: Synthetic oligonucleotide
uagagcuggaggcauuauc

SEQ ID NO: 922339 - RNA, 19 nt, Artificial Sequence
  Description of Artificial Sequence: Synthetic oligonucleotide
ggacacauagcguucuuug

SEQ ID NO: 922340 - RNA, 19 nt, Artificial Sequence
  Description of Artificial Sequence: Synthetic oligonucleotide
auagaguuaaccagccaca

SEQ ID NO: 922341 - RNA, 19 nt, Artificial Sequence
  Description of Artificial Sequence: Synthetic oligonucleotide
ccuuuuagaauaacaucag

SEQ ID NO: 922342 - RNA, 19 nt, Artificial Sequence
  Description of Artificial Sequence: Synthetic oligonucleotide
cagcggaugucacaccugg

SEQ ID NO: 922343 - RNA, 19 nt, Artificial Sequence
  Description of Artificial Sequence: Synthetic oligonucleotide
cuggaaaauucgagccugg

SEQ ID NO: 922344 - RNA, 19 nt, Artificial Sequence
  Description of Artificial Sequence: Synthetic oligonucleotide
agcguucuuuguccaugcc

SEQ ID NO: 922345 - RNA, 19 nt, Artificial Sequence
  Description of Artificial Sequence: Synthetic oligonucleotide
ggaguggacacaaugagga

SEQ ID NO: 922346 - RNA, 19 nt, Artificial Sequence
  Description of Artificial Sequence: Synthetic oligonucleotide
cgagaguuaaaguaggcac

SEQ ID NO: 922347 - RNA, 19 nt, Artificial Sequence
  Description of Artificial Sequence: Synthetic oligonucleotide
uugcaagucuggcccaucu

SEQ ID NO: 922348 - RNA, 19 nt, Artificial Sequence
  Description of Artificial Sequence: Synthetic oligonucleotide
ucgggcaggacuacccuga

SEQ ID NO: 922349 - RNA, 19 nt, Artificial Sequence
  Description of Artificial Sequence: Synthetic oligonucleotide
cuucccucguucagcaggc

SEQ ID NO: 922350 - RNA, 19 nt, Artificial Sequence
  Description of Artificial Sequence: Synthetic oligonucleotide
uguauauccuggugagcaa

SEQ ID NO: 922351 - RNA, 19 nt, Artificial Sequence
  Description of Artificial Sequence: Synthetic oligonucleotide
auagcguucuuuguccaug

SEQ ID NO: 922352 - RNA, 19 nt, Artificial Sequence
  Description of Artificial Sequence: Synthetic oligonucleotide
ugucgaagauccaggccac

SEQ ID NO: 922353 - RNA, 19 nt, Artificial Sequence
  Description of Artificial Sequence: Synthetic oligonucleotide
uagcguucuuuguccaugc

SEQ ID NO: 922354 - RNA, 19 nt, Artificial Sequence
  Description of Artificial Sequence: Synthetic oligonucleotide
uuaucugaccagcgcuugu

SEQ ID NO: 922355 - RNA, 19 nt, Artificial Sequence
  Description of Artificial Sequence: Synthetic oligonucleotide
uguccguuccccuuucaau

SEQ ID NO: 922356 - RNA, 19 nt, Artificial Sequence
  Description of Artificial Sequence: Synthetic oligonucleotide
uauccacuagcaccaugcu

SEQ ID NO: 922357 - RNA, 19 nt, Artificial Sequence
  Description of Artificial Sequence: Synthetic oligonucleotide
gucaccaucgcuggaacac

SEQ ID NO: 922358 - RNA, 19 nt, Artificial Sequence
  Description of Artificial Sequence: Synthetic oligonucleotide
ggaaccaccacaauuguaa

SEQ ID NO: 922359 - RNA, 19 nt, Artificial Sequence
  Description of Artificial Sequence: Synthetic oligonucleotide
gugccaauucuuaagggca

SEQ ID NO: 922360 - RNA, 19 nt, Artificial Sequence
  Description of Artificial Sequence: Synthetic oligonucleotide
ucgguucagcaauacguuc

SEQ ID NO: 922361 - RNA, 19 nt, Artificial Sequence
  Description of Artificial Sequence: Synthetic oligonucleotide
acaucgcuuuuguuugcag

SEQ ID NO: 922362 - RNA, 19 nt, Artificial Sequence
  Description of Artificial Sequence: Synthetic oligonucleotide
ugugccagaccaagccaga

SEQ ID NO: 922363 - RNA, 19 nt, Artificial Sequence
  Description of Artificial Sequence: Synthetic oligonucleotide
acugucaguuuauucgguu

SEQ ID NO: 922364 - RNA, 19 nt, Artificial Sequence
  Description of Artificial Sequence: Synthetic oligonucleotide
uagaguuaaccagccacaa

SEQ ID NO: 922365 - RNA, 19 nt, Artificial Sequence
  Description of Artificial Sequence: Synthetic oligonucleotide
uuauucgguucagcaauac

SEQ ID NO: 922366 - RNA, 19 nt, Artificial Sequence
  Description of Artificial Sequence: Synthetic oligonucleotide
agaagggcggcugcuguuc

SEQ ID NO: 922367 - RNA, 19 nt, Artificial Sequence
  Description of Artificial Sequence: Synthetic oligonucleotide
cugggguuucccaggacac

SEQ ID NO: 922368 - RNA, 19 nt, Artificial Sequence
  Description of Artificial Sequence: Synthetic oligonucleotide
guuagaaagaguagauaua

SEQ ID NO: 922369 - RNA, 19 nt, Artificial Sequence
  Description of Artificial Sequence: Synthetic oligonucleotide
caccgauacaggagaauuc

SEQ ID NO: 922370 - RNA, 19 nt, Artificial Sequence
  Description of Artificial Sequence: Synthetic oligonucleotide
uccccauacuucaccuuga

SEQ ID NO: 922371 - RNA, 19 nt, Artificial Sequence
  Description of Artificial Sequence: Synthetic oligonucleotide
caaagagaugaggaaccac

SEQ ID NO: 922372 - RNA, 19 nt, Artificial Sequence
  Description of Artificial Sequence: Synthetic oligonucleotide
uggaaaauucgagccugga

SEQ ID NO: 922373 - RNA, 19 nt, Artificial Sequence
  Description of Artificial Sequence: Synthetic oligonucleotide
cuuuaacucggaacuugca

SEQ ID NO: 922374 - RNA, 19 nt, Artificial Sequence
  Description of Artificial Sequence: Synthetic oligonucleotide
agaguuaaccagccacaau

SEQ ID NO: 922375 - RNA, 19 nt, Artificial Sequence
  Description of Artificial Sequence: Synthetic oligonucleotide
caagccagauuggauuggc

SEQ ID NO: 922376 - RNA, 19 nt, Artificial Sequence
  Description of Artificial Sequence: Synthetic oligonucleotide
auacucgggcaggacuacc

SEQ ID NO: 922377 - RNA, 19 nt, Artificial Sequence
  Description of Artificial Sequence: Synthetic oligonucleotide
caauucuuaagggcaaaga

SEQ ID NO: 922378 - RNA, 19 nt, Artificial Sequence
  Description of Artificial Sequence: Synthetic oligonucleotide
gcaauacguucuuuuacac

SEQ ID NO: 922379 - RNA, 19 nt, Artificial Sequence
  Description of Artificial Sequence: Synthetic oligonucleotide
cauggagugucuuuauaua

SEQ ID NO: 922380 - RNA, 19 nt, Artificial Sequence
  Description of Artificial Sequence: Synthetic oligonucleotide
caucaguaagaaugccauc

SEQ ID NO: 922381 - RNA, 19 nt, Artificial Sequence
  Description of Artificial Sequence: Synthetic oligonucleotide
ugcgcuucccucguucagc

SEQ ID NO: 922382 - RNA, 19 nt, Artificial Sequence
  Description of Artificial Sequence: Synthetic oligonucleotide
cugacaccgacauugacau

SEQ ID NO: 922383 - RNA, 19 nt, Artificial Sequence
  Description of Artificial Sequence: Synthetic oligonucleotide
gucaguuuauucgguucag

SEQ ID NO: 922384 - RNA, 19 nt, Artificial Sequence
  Description of Artificial Sequence: Synthetic oligonucleotide
gaacuugcaggugcccuug

SEQ ID NO: 922385 - RNA, 19 nt, Artificial Sequence
  Description of Artificial Sequence: Synthetic oligonucleotide
gagcaauaguacucacauc

SEQ ID NO: 922386 - RNA, 19 nt, Artificial Sequence
  Description of Artificial Sequence: Synthetic oligonucleotide
auacacgugacuguccguu

SEQ ID NO: 922387 - RNA, 19 nt, Artificial Sequence
  Description of Artificial Sequence: Synthetic oligonucleotide
guuaaccagccacaauaaa

SEQ ID NO: 922388 - RNA, 19 nt, Artificial Sequence
  Description of Artificial Sequence: Synthetic oligonucleotide
ugccgaugaggguugggaa

SEQ ID NO: 922389 - RNA, 19 nt, Artificial Sequence
  Description of Artificial Sequence: Synthetic oligonucleotide
guugcacaaugaauaauaa

SEQ ID NO: 922390 - RNA, 19 nt, Artificial Sequence
  Description of Artificial Sequence: Synthetic oligonucleotide
aucagguguugcaagucug

SEQ ID NO: 922391 - RNA, 19 nt, Artificial Sequence
  Description of Artificial Sequence: Synthetic oligonucleotide
gaccaagccagauuggauu

SEQ ID NO: 922392 - RNA, 19 nt, Artificial Sequence
  Description of Artificial Sequence: Synthetic oligonucleotide
uuacuuuaacucggaacuu

SEQ ID NO: 922393 - RNA, 19 nt, Artificial Sequence
  Description of Artificial Sequence: Synthetic oligonucleotide
ugugaguaccagacuccau

SEQ ID NO: 922394 - RNA, 19 nt, Artificial Sequence
  Description of Artificial Sequence: Synthetic oligonucleotide
cugcuguucugacaccgac

SEQ ID NO: 922395 - RNA, 19 nt, Artificial Sequence
  Description of Artificial Sequence: Synthetic oligonucleotide
agcgcuugaggcaggaaca

SEQ ID NO: 922396 - RNA, 19 nt, Artificial Sequence
  Description of Artificial Sequence: Synthetic oligonucleotide
ucgcuuuuguuugcagaug

SEQ ID NO: 922397 - RNA, 19 nt, Artificial Sequence
  Description of Artificial Sequence: Synthetic oligonucleotide
acgugacuguccguucccc

SEQ ID NO: 922398 - RNA, 19 nt, Artificial Sequence
  Description of Artificial Sequence: Synthetic oligonucleotide
caggacuacccugaaguuc

SEQ ID NO: 922399 - RNA, 19 nt, Artificial Sequence
  Description of Artificial Sequence: Synthetic oligonucleotide
cugaccagcgcuuguuuga

SEQ ID NO: 922400 - RNA, 19 nt, Artificial Sequence
  Description of Artificial Sequence: Synthetic oligonucleotide
guucauagccaccgauaca

SEQ ID NO: 922401 - RNA, 19 nt, Artificial Sequence
  Description of Artificial Sequence: Synthetic oligonucleotide
gcggcugcuguucugacac

SEQ ID NO: 922402 - RNA, 19 nt, Artificial Sequence
  Description of Artificial Sequence: Synthetic oligonucleotide
gagguuccgagcuguggga

SEQ ID NO: 922403 - RNA, 19 nt, Artificial Sequence
  Description of Artificial Sequence: Synthetic oligonucleotide
gaagagagccauggguguc

SEQ ID NO: 922404 - RNA, 19 nt, Artificial Sequence
  Description of Artificial Sequence: Synthetic oligonucleotide
auacguucuuuuacacuug

SEQ ID NO: 922405 - RNA, 19 nt, Artificial Sequence
  Description of Artificial Sequence: Synthetic oligonucleotide
cacgugacuguccguuccc

SEQ ID NO: 922406 - RNA, 19 nt, Artificial Sequence
  Description of Artificial Sequence: Synthetic oligonucleotide
uacacgugacuguccguuc

SEQ ID NO: 922407 - RNA, 19 nt, Artificial Sequence
  Description of Artificial Sequence: Synthetic oligonucleotide
uuggcauacucgggcagga

SEQ ID NO: 922408 - RNA, 19 nt, Artificial Sequence
  Description of Artificial Sequence: Synthetic oligonucleotide
cagauccugggaagccccg

SEQ ID NO: 922409 - RNA, 19 nt, Artificial Sequence
  Description of Artificial Sequence: Synthetic oligonucleotide
uucuuuucucaaggggaaa

SEQ ID NO: 922410 - RNA, 19 nt, Artificial Sequence
  Description of Artificial Sequence: Synthetic oligonucleotide
agcgcuuaaggggcgggag

SEQ ID NO: 922411 - RNA, 19 nt, Artificial Sequence
  Description of Artificial Sequence: Synthetic oligonucleotide
uucccaaggcuguuuugua

SEQ ID NO: 922412 - RNA, 19 nt, Artificial Sequence
  Description of Artificial Sequence: Synthetic oligonucleotide
ugaccagcgcuuguuugac

SEQ ID NO: 922413 - RNA, 19 nt, Artificial Sequence
  Description of Artificial Sequence: Synthetic oligonucleotide
accgacccgaguccccggg

SEQ ID NO: 922414 - RNA, 19 nt, Artificial Sequence
  Description of Artificial Sequence: Synthetic oligonucleotide
uaucugaccagcgcuuguu

SEQ ID NO: 922415 - RNA, 19 nt, Artificial Sequence
  Description of Artificial Sequence: Synthetic oligonucleotide
gacacgcagcaggaguacc

SEQ ID NO: 922416 - RNA, 19 nt, Artificial Sequence
  Description of Artificial Sequence: Synthetic oligonucleotide
ucaccaucgcuggaacacu

SEQ ID NO: 922417 - RNA, 19 nt, Artificial Sequence
  Description of Artificial Sequence: Synthetic oligonucleotide
aagggcggcugcuguucug

SEQ ID NO: 922418 - RNA, 19 nt, Artificial Sequence
  Description of Artificial Sequence: Synthetic oligonucleotide
gacaucgcuuuuguuugca

SEQ ID NO: 922419 - RNA, 19 nt, Artificial Sequence
  Description of Artificial Sequence: Synthetic oligonucleotide
agcgucugacucuuacuuu

SEQ ID NO: 922420 - RNA, 19 nt, Artificial Sequence
  Description of Artificial Sequence: Synthetic oligonucleotide
uacucacaucgagaguuaa

SEQ ID NO: 922421 - RNA, 19 nt, Artificial Sequence
  Description of Artificial Sequence: Synthetic oligonucleotide
acccgaguccccgggcucc

SEQ ID NO: 922422 - RNA, 19 nt, Artificial Sequence
  Description of Artificial Sequence: Synthetic oligonucleotide
agguuccgagcugugggag

SEQ ID NO: 922423 - RNA, 19 nt, Artificial Sequence
  Description of Artificial Sequence: Synthetic oligonucleotide
agagcgcuuaaggggcggg

SEQ ID NO: 922424 - RNA, 19 nt, Artificial Sequence
  Description of Artificial Sequence: Synthetic oligonucleotide
gugugguuguaguuucuaa

SEQ ID NO: 922425 - RNA, 19 nt, Artificial Sequence
  Description of Artificial Sequence: Synthetic oligonucleotide
gguugggaacacuccuacc

SEQ ID NO: 922426 - RNA, 19 nt, Artificial Sequence
  Description of Artificial Sequence: Synthetic oligonucleotide
uaaggggcgggaggaggcc

SEQ ID NO: 922427 - RNA, 19 nt, Artificial Sequence
  Description of Artificial Sequence: Synthetic oligonucleotide
gcgcuuguuugacuggcag

SEQ ID NO: 922428 - RNA, 19 nt, Artificial Sequence
  Description of Artificial Sequence: Synthetic oligonucleotide
cagaccaagccagauugga

SEQ ID NO: 922429 - RNA, 19 nt, Artificial Sequence
  Description of Artificial Sequence: Synthetic oligonucleotide
cagguagcuccauaguugu

SEQ ID NO: 922430 - RNA, 19 nt, Artificial Sequence
  Description of Artificial Sequence: Synthetic oligonucleotide
gcguucuuuguccaugcca

SEQ ID NO: 922431 - RNA, 19 nt, Artificial Sequence
  Description of Artificial Sequence: Synthetic oligonucleotide
ggugagcaauaguacucac

SEQ ID NO: 922432 - RNA, 19 nt, Artificial Sequence
  Description of Artificial Sequence: Synthetic oligonucleotide
ccaauucuuaagggcaaag

SEQ ID NO: 922433 - RNA, 19 nt, Artificial Sequence
  Description of Artificial Sequence: Synthetic oligonucleotide
uguugcaagucuggcccau

SEQ ID NO: 922434 - RNA, 19 nt, Artificial Sequence
  Description of Artificial Sequence: Synthetic oligonucleotide
agaccaagccagauuggau

SEQ ID NO: 922435 - RNA, 19 nt, Artificial Sequence
  Description of Artificial Sequence: Synthetic oligonucleotide
gccaugggugucacuaggg

SEQ ID NO: 922436 - RNA, 19 nt, Artificial Sequence
  Description of Artificial Sequence: Synthetic oligonucleotide
caucagguguugcaagucu

SEQ ID NO: 922437 - RNA, 19 nt, Artificial Sequence
  Description of Artificial Sequence: Synthetic oligonucleotide
acucacaucgagaguuaaa

SEQ ID NO: 922438 - RNA, 19 nt, Artificial Sequence
  Description of Artificial Sequence: Synthetic oligonucleotide
ccagaccaagccagauugg

SEQ ID NO: 922439 - RNA, 19 nt, Artificial Sequence
  Description of Artificial Sequence: Synthetic oligonucleotide
gguaggacaucgcuuuugu

SEQ ID NO: 922440 - RNA, 19 nt, Artificial Sequence
  Description of Artificial Sequence: Synthetic oligonucleotide
ggacaucgcuuuuguuugc

SEQ ID NO: 922441 - RNA, 19 nt, Artificial Sequence
  Description of Artificial Sequence: Synthetic oligonucleotide
cugcgcuucccucguucag

SEQ ID NO: 922442 - RNA, 19 nt, Artificial Sequence
  Description of Artificial Sequence: Synthetic oligonucleotide
cucggcgggacacgcagca

SEQ ID NO: 922443 - RNA, 19 nt, Artificial Sequence
  Description of Artificial Sequence: Synthetic oligonucleotide
cugccgaugaggguuggga

SEQ ID NO: 922444 - RNA, 19 nt, Artificial Sequence
  Description of Artificial Sequence: Synthetic oligonucleotide
gcauggcaaggguaggaca

SEQ ID NO: 922445 - RNA, 19 nt, Artificial Sequence
  Description of Artificial Sequence: Synthetic oligonucleotide
cuuuucucaaggggaaagu

SEQ ID NO: 922446 - RNA, 19 nt, Artificial Sequence
  Description of Artificial Sequence: Synthetic oligonucleotide
ggguaggacaucgcuuuug

SEQ ID NO: 922447 - RNA, 19 nt, Artificial Sequence
  Description of Artificial Sequence: Synthetic oligonucleotide
ccgauacaggagaauucac

SEQ ID NO: 922448 - RNA, 19 nt, Artificial Sequence
  Description of Artificial Sequence: Synthetic oligonucleotide
gaagcauucccagcugcau

SEQ ID NO: 922449 - RNA, 19 nt, Artificial Sequence
  Description of Artificial Sequence: Synthetic oligonucleotide
cugggaagccccggcucgg

SEQ ID NO: 922450 - RNA, 19 nt, Artificial Sequence
  Description of Artificial Sequence: Synthetic oligonucleotide
gccagauuggauuggcaua

SEQ ID NO: 922451 - RNA, 19 nt, Artificial Sequence
  Description of Artificial Sequence: Synthetic oligonucleotide
gcaauaguacucacaucga

SEQ ID NO: 922452 - RNA, 19 nt, Artificial Sequence
  Description of Artificial Sequence: Synthetic oligonucleotide
guauauccuggugagcaau

SEQ ID NO: 922453 - RNA, 19 nt, Artificial Sequence
  Description of Artificial Sequence: Synthetic oligonucleotide
gcuggucguccacuccagg

SEQ ID NO: 922454 - RNA, 19 nt, Artificial Sequence
  Description of Artificial Sequence: Synthetic oligonucleotide
ccauauccacgcagguggc

SEQ ID NO: 922455 - RNA, 19 nt, Artificial Sequence
  Description of Artificial Sequence: Synthetic oligonucleotide
uccccgggcuccccauggc

SEQ ID NO: 922456 - RNA, 19 nt, Artificial Sequence
  Description of Artificial Sequence: Synthetic oligonucleotide
acgcagguggcuggucguc

SEQ ID NO: 922457 - RNA, 19 nt, Artificial Sequence
  Description of Artificial Sequence: Synthetic oligonucleotide
cugggacauugaguuugcc

SEQ ID NO: 922458 - RNA, 19 nt, Artificial Sequence
  Description of Artificial Sequence: Synthetic oligonucleotide
ccaugaagcucauagcccu

SEQ ID NO: 922459 - RNA, 19 nt, Artificial Sequence
  Description of Artificial Sequence: Synthetic oligonucleotide
caaggguaggacaucgcuu

SEQ ID NO: 922460 - RNA, 19 nt, Artificial Sequence
  Description of Artificial Sequence: Synthetic oligonucleotide
gacccgaguccccgggcuc

SEQ ID NO: 922461 - RNA, 19 nt, Artificial Sequence
  Description of Artificial Sequence: Synthetic oligonucleotide
ccggacugucaguuuauuc

SEQ ID NO: 922462 - RNA, 19 nt, Artificial Sequence
  Description of Artificial Sequence: Synthetic oligonucleotide
gacacccggacugucaguu

SEQ ID NO: 922463 - RNA, 19 nt, Artificial Sequence
  Description of Artificial Sequence: Synthetic oligonucleotide
gacugucaguuuauucggu

SEQ ID NO: 922464 - RNA, 19 nt, Artificial Sequence
  Description of Artificial Sequence: Synthetic oligonucleotide
uggcauacucgggcaggac

SEQ ID NO: 922465 - RNA, 19 nt, Artificial Sequence
  Description of Artificial Sequence: Synthetic oligonucleotide
cuguccguuccccuuucaa

SEQ ID NO: 922466 - RNA, 19 nt, Artificial Sequence
  Description of Artificial Sequence: Synthetic oligonucleotide
gaguaccagacuccaucau

SEQ ID NO: 922467 - RNA, 19 nt, Artificial Sequence
  Description of Artificial Sequence: Synthetic oligonucleotide
ccaagccagauuggauugg

SEQ ID NO: 922468 - RNA, 19 nt, Artificial Sequence
  Description of Artificial Sequence: Synthetic oligonucleotide
agggacacauagcguucuu

SEQ ID NO: 922469 - RNA, 19 nt, Artificial Sequence
  Description of Artificial Sequence: Synthetic oligonucleotide
cagcgucugacucuuacuu

SEQ ID NO: 922470 - RNA, 19 nt, Artificial Sequence
  Description of Artificial Sequence: Synthetic oligonucleotide
ucggcgggacacgcagcag

SEQ ID NO: 922471 - RNA, 19 nt, Artificial Sequence
  Description of Artificial Sequence: Synthetic oligonucleotide
caccgacccgaguccccgg

SEQ ID NO: 922472 - RNA, 19 nt, Artificial Sequence
  Description of Artificial Sequence: Synthetic oligonucleotide
agcgcuuguuugacuggca

SEQ ID NO: 922473 - RNA, 19 nt, Artificial Sequence
  Description of Artificial Sequence: Synthetic oligonucleotide
gcaccgacccgaguccccg

SEQ ID NO: 922474 - RNA, 19 nt, Artificial Sequence
  Description of Artificial Sequence: Synthetic oligonucleotide
ggaguagagugggauucga

SEQ ID NO: 922475 - RNA, 19 nt, Artificial Sequence
  Description of Artificial Sequence: Synthetic oligonucleotide
guugcaagucuggcccauc

SEQ ID NO: 922476 - RNA, 19 nt, Artificial Sequence
  Description of Artificial Sequence: Synthetic oligonucleotide
gagcgcuuaaggggcggga

SEQ ID NO: 922477 - RNA, 19 nt, Artificial Sequence
  Description of Artificial Sequence: Synthetic oligonucleotide
aagagccaugaagcucaua

SEQ ID NO: 922478 - RNA, 19 nt, Artificial Sequence
  Description of Artificial Sequence: Synthetic oligonucleotide
gugacaugucgaagaucca

SEQ ID NO: 922479 - RNA, 19 nt, Artificial Sequence
  Description of Artificial Sequence: Synthetic oligonucleotide
gcauacucgggcaggacua

SEQ ID NO: 922480 - RNA, 19 nt, Artificial Sequence
  Description of Artificial Sequence: Synthetic oligonucleotide
guacucacaucgagaguua

SEQ ID NO: 922481 - RNA, 19 nt, Artificial Sequence
  Description of Artificial Sequence: Synthetic oligonucleotide
gcgcuugaggcaggaacag

SEQ ID NO: 922482 - RNA, 19 nt, Artificial Sequence
  Description of Artificial Sequence: Synthetic oligonucleotide
acacccggacugucaguuu

SEQ ID NO: 922483 - RNA, 19 nt, Artificial Sequence
  Description of Artificial Sequence: Synthetic oligonucleotide
gugacuguccguuccccuu

SEQ ID NO: 922484 - RNA, 19 nt, Artificial Sequence
  Description of Artificial Sequence: Synthetic oligonucleotide
ugacaccgacauugacauu

SEQ ID NO: 922485 - RNA, 19 nt, Artificial Sequence
  Description of Artificial Sequence: Synthetic oligonucleotide
cauagcguucuuuguccau

SEQ ID NO: 922486 - RNA, 19 nt, Artificial Sequence
  Description of Artificial Sequence: Synthetic oligonucleotide
cacaaugaggagucuccuu

SEQ ID NO: 922487 - RNA, 19 nt, Artificial Sequence
  Description of Artificial Sequence: Synthetic oligonucleotide
gcugugggaguggacacaa

SEQ ID NO: 922488 - RNA, 19 nt, Artificial Sequence
  Description of Artificial Sequence: Synthetic oligonucleotide
gacuacccugaaguucaua

SEQ ID NO: 922489 - RNA, 19 nt, Artificial Sequence
  Description of Artificial Sequence: Synthetic oligonucleotide
agcggaugucacaccuggu

SEQ ID NO: 922490 - RNA, 19 nt, Artificial Sequence
  Description of Artificial Sequence: Synthetic oligonucleotide
uucccucguucagcaggcu

SEQ ID NO: 922491 - RNA, 19 nt, Artificial Sequence
  Description of Artificial Sequence: Synthetic oligonucleotide
gaccagcgcuuguuugacu

SEQ ID NO: 922492 - RNA, 19 nt, Artificial Sequence
  Description of Artificial Sequence: Synthetic oligonucleotide
ggcuggucguccacuccag

SEQ ID NO: 922493 - RNA, 19 nt, Artificial Sequence
  Description of Artificial Sequence: Synthetic oligonucleotide
guaggacaucgcuuuuguu

SEQ ID NO: 922494 - RNA, 19 nt, Artificial Sequence
  Description of Artificial Sequence: Synthetic oligonucleotide
gaguuaaaguaggcaccau

SEQ ID NO: 922495 - RNA, 19 nt, Artificial Sequence
  Description of Artificial Sequence: Synthetic oligonucleotide
gcagcggaugucacaccug

SEQ ID NO: 922496 - RNA, 19 nt, Artificial Sequence
  Description of Artificial Sequence: Synthetic oligonucleotide
gagccugcgcuucccucgu

SEQ ID NO: 922497 - RNA, 19 nt, Artificial Sequence
  Description of Artificial Sequence: Synthetic oligonucleotide
gcggaugucacaccugguu

SEQ ID NO: 922498 - RNA, 19 nt, Artificial Sequence
  Description of Artificial Sequence: Synthetic oligonucleotide
gccugcgcuucccucguuc

SEQ ID NO: 922499 - RNA, 19 nt, Artificial Sequence
  Description of Artificial Sequence: Synthetic oligonucleotide
ccccgggcuccccauggcg

SEQ ID NO: 922500 - RNA, 19 nt, Artificial Sequence
  Description of Artificial Sequence: Synthetic oligonucleotide
agcuagagcuggaggcauu

SEQ ID NO: 922501 - RNA, 19 nt, Artificial Sequence
  Description of Artificial Sequence: Synthetic oligonucleotide
acccggacugucaguuuau

SEQ ID NO: 922502 - RNA, 19 nt, Artificial Sequence
  Description of Artificial Sequence: Synthetic oligonucleotide
ccaaggcuguuuuguagua

SEQ ID NO: 922503 - RNA, 19 nt, Artificial Sequence
  Description of Artificial Sequence: Synthetic oligonucleotide
ggcgggacacgcagcagga

SEQ ID NO: 922504 - RNA, 19 nt, Artificial Sequence
  Description of Artificial Sequence: Synthetic oligonucleotide
cgguucagcaauacguucu

SEQ ID NO: 922505 - RNA, 19 nt, Artificial Sequence
  Description of Artificial Sequence: Synthetic oligonucleotide
gccaauucuuaagggcaaa

SEQ ID NO: 922506 - RNA, 19 nt, Artificial Sequence
  Description of Artificial Sequence: Synthetic oligonucleotide
ccugcgcuucccucguuca

SEQ ID NO: 922507 - RNA, 19 nt, Artificial Sequence
  Description of Artificial Sequence: Synthetic oligonucleotide
caccauggagugucuuuau

SEQ ID NO: 922508 - RNA, 19 nt, Artificial Sequence
  Description of Artificial Sequence: Synthetic oligonucleotide
cacgcagguggcuggucgu

SEQ ID NO: 922509 - RNA, 19 nt, Artificial Sequence
  Description of Artificial Sequence: Synthetic oligonucleotide
caccaucgcuggaacacuu

SEQ ID NO: 922510 - RNA, 19 nt, Artificial Sequence
  Description of Artificial Sequence: Synthetic oligonucleotide
cauccccauacuucaccuu

SEQ ID NO: 922511 - RNA, 19 nt, Artificial Sequence
  Description of Artificial Sequence: Synthetic oligonucleotide
ccccauuugcuggcauggc

SEQ ID NO: 922512 - RNA, 19 nt, Artificial Sequence
  Description of Artificial Sequence: Synthetic oligonucleotide
gagcucgugugugguugua

SEQ ID NO: 922513 - RNA, 19 nt, Artificial Sequence
  Description of Artificial Sequence: Synthetic oligonucleotide
cagauuggauuggcauacu

SEQ ID NO: 922514 - RNA, 19 nt, Artificial Sequence
  Description of Artificial Sequence: Synthetic oligonucleotide
ccgacccgaguccccgggc

SEQ ID NO: 922515 - RNA, 19 nt, Artificial Sequence
  Description of Artificial Sequence: Synthetic oligonucleotide
cgcuuaaggggcgggagga

SEQ ID NO: 922516 - RNA, 19 nt, Artificial Sequence
  Description of Artificial Sequence: Synthetic oligonucleotide
cccuuucaauguauauccu

SEQ ID NO: 922517 - RNA, 19 nt, Artificial Sequence
  Description of Artificial Sequence: Synthetic oligonucleotide
ccaccgauacaggagaauu

SEQ ID NO: 922518 - RNA, 19 nt, Artificial Sequence
  Description of Artificial Sequence: Synthetic oligonucleotide
gcucggcgggacacgcagc

SEQ ID NO: 922519 - RNA, 19 nt, Artificial Sequence
  Description of Artificial Sequence: Synthetic oligonucleotide
agccugcgcuucccucguu

SEQ ID NO: 922520 - RNA, 19 nt, Artificial Sequence
  Description of Artificial Sequence: Synthetic oligonucleotide
ccaggacacccggacuguc

SEQ ID NO: 922521 - RNA, 19 nt, Artificial Sequence
  Description of Artificial Sequence: Synthetic oligonucleotide
gccacagcgucugacucuu

SEQ ID NO: 922522 - RNA, 19 nt, Artificial Sequence
  Description of Artificial Sequence: Synthetic oligonucleotide
ccguuccccuuucaaugua

SEQ ID NO: 922523 - RNA, 19 nt, Artificial Sequence
  Description of Artificial Sequence: Synthetic oligonucleotide
gccaccgauacaggagaau

SEQ ID NO: 922524 - RNA, 19 nt, Artificial Sequence
  Description of Artificial Sequence: Synthetic oligonucleotide
cguuccccuuucaauguau

SEQ ID NO: 922525 - RNA, 19 nt, Artificial Sequence
  Description of Artificial Sequence: Synthetic oligonucleotide
cccgaguccccgggcuccc

SEQ ID NO: 922526 - RNA, 19 nt, Artificial Sequence
  Description of Artificial Sequence: Synthetic oligonucleotide
cgugacuguccguuccccu

SEQ ID NO: 922527 - RNA, 19 nt, Artificial Sequence
  Description of Artificial Sequence: Synthetic oligonucleotide
ccccggcucggcgggacac

SEQ ID NO: 922528 - RNA, 19 nt, Artificial Sequence
  Description of Artificial Sequence: Synthetic oligonucleotide
ccgaguccccgggcucccc

SEQ ID NO: 922529 - RNA, 19 nt, Artificial Sequence
  Description of Artificial Sequence: Synthetic oligonucleotide
gccccggcucggcgggaca

SEQ ID NO: 922530 - RNA, 19 nt, Artificial Sequence
  Description of Artificial Sequence: Synthetic oligonucleotide
ggacuacccugaaguucau

SEQ ID NO: 922531 - RNA, 19 nt, Artificial Sequence
  Description of Artificial Sequence: Synthetic oligonucleotide
ccacagcgucugacucuua

SEQ ID NO: 922532 - RNA, 19 nt, Artificial Sequence
  Description of Artificial Sequence: Synthetic oligonucleotide
cccggacugucaguuuauu

SEQ ID NO: 922533 - RNA, 19 nt, Artificial Sequence
  Description of Artificial Sequence: Synthetic oligonucleotide
aaauaaauaggcuccaagc

SEQ ID NO: 922534 - RNA, 19 nt, Artificial Sequence
  Description of Artificial Sequence: Synthetic oligonucleotide
aaauaaagaaauucuuccc

SEQ ID NO: 922535 - RNA, 19 nt, Artificial Sequence
  Description of Artificial Sequence: Synthetic oligonucleotide
aauaaguauggucaugagc

SEQ ID NO: 922536 - RNA, 19 nt, Artificial Sequence
  Description of Artificial Sequence: Synthetic oligonucleotide
acaaaguccaguuacagcg

SEQ ID NO: 922537 - RNA, 19 nt, Artificial Sequence
  Description of Artificial Sequence: Synthetic oligonucleotide
acucuguucaaauaaauac

SEQ ID NO: 922538 - RNA, 19 nt, Artificial Sequence
  Description of Artificial Sequence: Synthetic oligonucleotide
aaauccuuuauccagugag

SEQ ID NO: 922539 - RNA, 19 nt, Artificial Sequence
  Description of Artificial Sequence: Synthetic oligonucleotide
ugcucuuuggaccagaggg

SEQ ID NO: 922540 - RNA, 19 nt, Artificial Sequence
  Description of Artificial Sequence: Synthetic oligonucleotide
aaauaguuaggacauaacu

SEQ ID NO: 922541 - RNA, 19 nt, Artificial Sequence
  Description of Artificial Sequence: Synthetic oligonucleotide
uuuauuagaaggcugcuug

SEQ ID NO: 922542 - RNA, 19 nt, Artificial Sequence
  Description of Artificial Sequence: Synthetic oligonucleotide
aauaaauaggcuccaagca

SEQ ID NO: 922543 - RNA, 19 nt, Artificial Sequence
  Description of Artificial Sequence: Synthetic oligonucleotide
aauaguuaggacauaacuc

SEQ ID NO: 922544 - RNA, 19 nt, Artificial Sequence
  Description of Artificial Sequence: Synthetic oligonucleotide
ugagugagaaagaugagag

SEQ ID NO: 922545 - RNA, 19 nt, Artificial Sequence
  Description of Artificial Sequence: Synthetic oligonucleotide
uaggacauaacucuguuca

SEQ ID NO: 922546 - RNA, 19 nt, Artificial Sequence
  Description of Artificial Sequence: Synthetic oligonucleotide
uauuaauuaaacaaaucua

SEQ ID NO: 922547 - RNA, 19 nt, Artificial Sequence
  Description of Artificial Sequence: Synthetic oligonucleotide
auaguuaggacauaacucu

SEQ ID NO: 922548 - RNA, 19 nt, Artificial Sequence
  Description of Artificial Sequence: Synthetic oligonucleotide
aguagcuuucagcaaagcc

SEQ ID NO: 922549 - RNA, 19 nt, Artificial Sequence
  Description of Artificial Sequence: Synthetic oligonucleotide
augauuaaggccuucagca

SEQ ID NO: 922550 - RNA, 19 nt, Artificial Sequence
  Description of Artificial Sequence: Synthetic oligonucleotide
auaaguauggucaugagcu

SEQ ID NO: 922551 - RNA, 19 nt, Artificial Sequence
  Description of Artificial Sequence: Synthetic oligonucleotide
uggaaugugaggcuggucc

SEQ ID NO: 922552 - RNA, 19 nt, Artificial Sequence
  Description of Artificial Sequence: Synthetic oligonucleotide
uucagcaaagccaugcacc

SEQ ID NO: 922553 - RNA, 19 nt, Artificial Sequence
  Description of Artificial Sequence: Synthetic oligonucleotide
augcaggcagcacaaaucc

SEQ ID NO: 922554 - RNA, 19 nt, Artificial Sequence
  Description of Artificial Sequence: Synthetic oligonucleotide
gaacuugacaaugacaggc

SEQ ID NO: 922555 - RNA, 19 nt, Artificial Sequence
  Description of Artificial Sequence: Synthetic oligonucleotide
ugaacgagauggaagaacu

SEQ ID NO: 922556 - RNA, 19 nt, Artificial Sequence
  Description of Artificial Sequence: Synthetic oligonucleotide
acuaagcuggccuccaagc

SEQ ID NO: 922557 - RNA, 19 nt, Artificial Sequence
  Description of Artificial Sequence: Synthetic oligonucleotide
ucguauaccacguagcuaa

SEQ ID NO: 922558 - RNA, 19 nt, Artificial Sequence
  Description of Artificial Sequence: Synthetic oligonucleotide
ugggaagguacaauaaacc

SEQ ID NO: 922559 - RNA, 19 nt, Artificial Sequence
  Description of Artificial Sequence: Synthetic oligonucleotide
aaaauaguuaggacauaac

SEQ ID NO: 922560 - RNA, 19 nt, Artificial Sequence
  Description of Artificial Sequence: Synthetic oligonucleotide
agaaucuguuugaagaggc

SEQ ID NO: 922561 - RNA, 19 nt, Artificial Sequence
  Description of Artificial Sequence: Synthetic oligonucleotide
acaugagugagaaagauga

SEQ ID NO: 922562 - RNA, 19 nt, Artificial Sequence
  Description of Artificial Sequence: Synthetic oligonucleotide
cuguauagcccaaaggccc

SEQ ID NO: 922563 - RNA, 19 nt, Artificial Sequence
  Description of Artificial Sequence: Synthetic oligonucleotide
accaugaacauaaaauacg

SEQ ID NO: 922564 - RNA, 19 nt, Artificial Sequence
  Description of Artificial Sequence: Synthetic oligonucleotide
agcuaaugcucacagcugg

SEQ ID NO: 922565 - RNA, 19 nt, Artificial Sequence
  Description of Artificial Sequence: Synthetic oligonucleotide
cuuuggacaguguaggcag

SEQ ID NO: 922566 - RNA, 19 nt, Artificial Sequence
  Description of Artificial Sequence: Synthetic oligonucleotide
cauaccacaaaauggaaca

SEQ ID NO: 922567 - RNA, 19 nt, Artificial Sequence
  Description of Artificial Sequence: Synthetic oligonucleotide
aaauucccagugaagcacc

SEQ ID NO: 922568 - RNA, 19 nt, Artificial Sequence
  Description of Artificial Sequence: Synthetic oligonucleotide
gacauuaggcccaugcagg

SEQ ID NO: 922569 - RNA, 19 nt, Artificial Sequence
  Description of Artificial Sequence: Synthetic oligonucleotide
gaagcuugugccugcaucc

SEQ ID NO: 922570 - RNA, 19 nt, Artificial Sequence
  Description of Artificial Sequence: Synthetic oligonucleotide
aagaacuaagcuggccucc

SEQ ID NO: 922571 - RNA, 19 nt, Artificial Sequence
  Description of Artificial Sequence: Synthetic oligonucleotide
ucauaccacaaaauggaac

SEQ ID NO: 922572 - RNA, 19 nt, Artificial Sequence
  Description of Artificial Sequence: Synthetic oligonucleotide
gguaaggucacucuguggc

SEQ ID NO: 922573 - RNA, 19 nt, Artificial Sequence
  Description of Artificial Sequence: Synthetic oligonucleotide
uuucccacgacccuuccug

SEQ ID NO: 922574 - RNA, 19 nt, Artificial Sequence
  Description of Artificial Sequence: Synthetic oligonucleotide
aaucuguuugaagaggcug

SEQ ID NO: 922575 - RNA, 19 nt, Artificial Sequence
  Description of Artificial Sequence: Synthetic oligonucleotide
ugcgugaacgagauggaag

SEQ ID NO: 922576 - RNA, 19 nt, Artificial Sequence
  Description of Artificial Sequence: Synthetic oligonucleotide
uagaguagcuuucagcaaa

SEQ ID NO: 922577 - RNA, 19 nt, Artificial Sequence
  Description of Artificial Sequence: Synthetic oligonucleotide
gaugccaguccugacaggg

SEQ ID NO: 922578 - RNA, 19 nt, Artificial Sequence
  Description of Artificial Sequence: Synthetic oligonucleotide
aggcacugcagaaacaucc

SEQ ID NO: 922579 - RNA, 19 nt, Artificial Sequence
  Description of Artificial Sequence: Synthetic oligonucleotide
aacauccugguucuaggug

SEQ ID NO: 922580 - RNA, 19 nt, Artificial Sequence
  Description of Artificial Sequence: Synthetic oligonucleotide
aaaaugaacuugacaauga

SEQ ID NO: 922581 - RNA, 19 nt, Artificial Sequence
  Description of Artificial Sequence: Synthetic oligonucleotide
uuccuagcacaucacauga

SEQ ID NO: 922582 - RNA, 19 nt, Artificial Sequence
  Description of Artificial Sequence: Synthetic oligonucleotide
acaauugccaaguggccag

SEQ ID NO: 922583 - RNA, 19 nt, Artificial Sequence
  Description of Artificial Sequence: Synthetic oligonucleotide
aacuaagcuggccuccaag

SEQ ID NO: 922584 - RNA, 19 nt, Artificial Sequence
  Description of Artificial Sequence: Synthetic oligonucleotide
auuaggcccaugcaggcag

SEQ ID NO: 922585 - RNA, 19 nt, Artificial Sequence
  Description of Artificial Sequence: Synthetic oligonucleotide
acaauaaguauggucauga

SEQ ID NO: 922586 - RNA, 19 nt, Artificial Sequence
  Description of Artificial Sequence: Synthetic oligonucleotide
ugucauuccaaaagggcaa

SEQ ID NO: 922587 - RNA, 19 nt, Artificial Sequence
  Description of Artificial Sequence: Synthetic oligonucleotide
uuuuccuacuuccuagcac

SEQ ID NO: 922588 - RNA, 19 nt, Artificial Sequence
  Description of Artificial Sequence: Synthetic oligonucleotide
uucucguauaccacguagc

SEQ ID NO: 922589 - RNA, 19 nt, Artificial Sequence
  Description of Artificial Sequence: Synthetic oligonucleotide
augggaagguacaauaaac

SEQ ID NO: 922590 - RNA, 19 nt, Artificial Sequence
  Description of Artificial Sequence: Synthetic oligonucleotide
accagagggagguuauggc

SEQ ID NO: 922591 - RNA, 19 nt, Artificial Sequence
  Description of Artificial Sequence: Synthetic oligonucleotide
uuauuagaaggcugcuugc

SEQ ID NO: 922592 - RNA, 19 nt, Artificial Sequence
  Description of Artificial Sequence: Synthetic oligonucleotide
guagcuuucagcaaagcca

SEQ ID NO: 922593 - RNA, 19 nt, Artificial Sequence
  Description of Artificial Sequence: Synthetic oligonucleotide
uauccagugagacaugauu

SEQ ID NO: 922594 - RNA, 19 nt, Artificial Sequence
  Description of Artificial Sequence: Synthetic oligonucleotide
ugaucuuugcauccuauuu

SEQ ID NO: 922595 - RNA, 19 nt, Artificial Sequence
  Description of Artificial Sequence: Synthetic oligonucleotide
ucucguauaccacguagcu

SEQ ID NO: 922596 - RNA, 19 nt, Artificial Sequence
  Description of Artificial Sequence: Synthetic oligonucleotide
gagauagugccacaggcca

SEQ ID NO: 922597 - RNA, 19 nt, Artificial Sequence
  Description of Artificial Sequence: Synthetic oligonucleotide
aguccaguuacagcgauag

SEQ ID NO: 922598 - RNA, 19 nt, Artificial Sequence
  Description of Artificial Sequence: Synthetic oligonucleotide
gauuaaggccuucagcauc

SEQ ID NO: 922599 - RNA, 19 nt, Artificial Sequence
  Description of Artificial Sequence: Synthetic oligonucleotide
uagcacaucacaugaguga

SEQ ID NO: 922600 - RNA, 19 nt, Artificial Sequence
  Description of Artificial Sequence: Synthetic oligonucleotide
aacacaccaggucugcacu

SEQ ID NO: 922601 - RNA, 19 nt, Artificial Sequence
  Description of Artificial Sequence: Synthetic oligonucleotide
uguauagcccaaaggcccc

SEQ ID NO: 922602 - RNA, 19 nt, Artificial Sequence
  Description of Artificial Sequence: Synthetic oligonucleotide
guagcuaaugcucacagcu

SEQ ID NO: 922603 - RNA, 19 nt, Artificial Sequence
  Description of Artificial Sequence: Synthetic oligonucleotide
auccuuuauccagugagac

SEQ ID NO: 922604 - RNA, 19 nt, Artificial Sequence
  Description of Artificial Sequence: Synthetic oligonucleotide
uccuacugaccucuggacc

SEQ ID NO: 922605 - RNA, 19 nt, Artificial Sequence
  Description of Artificial Sequence: Synthetic oligonucleotide
caaggcuagugguagcugg

SEQ ID NO: 922606 - RNA, 19 nt, Artificial Sequence
  Description of Artificial Sequence: Synthetic oligonucleotide
auggcuacacgucccgggc

SEQ ID NO: 922607 - RNA, 19 nt, Artificial Sequence
  Description of Artificial Sequence: Synthetic oligonucleotide
guuacagcgauagacuaug

SEQ ID NO: 922608 - RNA, 19 nt, Artificial Sequence
  Description of Artificial Sequence: Synthetic oligonucleotide
gauagacuaugcagaacgg

SEQ ID NO: 922609 - RNA, 19 nt, Artificial Sequence
  Description of Artificial Sequence: Synthetic oligonucleotide
ugagauggcuacacguccc

SEQ ID NO: 922610 - RNA, 19 nt, Artificial Sequence
  Description of Artificial Sequence: Synthetic oligonucleotide
uaugggguacuccuucagc

SEQ ID NO: 922611 - RNA, 19 nt, Artificial Sequence
  Description of Artificial Sequence: Synthetic oligonucleotide
aacgagauggaagaacuaa

SEQ ID NO: 922612 - RNA, 19 nt, Artificial Sequence
  Description of Artificial Sequence: Synthetic oligonucleotide
uauuagaaggcugcuugcc

SEQ ID NO: 922613 - RNA, 19 nt, Artificial Sequence
  Description of Artificial Sequence: Synthetic oligonucleotide
aacaauaaguauggucaug

SEQ ID NO: 922614 - RNA, 19 nt, Artificial Sequence
  Description of Artificial Sequence: Synthetic oligonucleotide
ugauacgccguguggaaug

SEQ ID NO: 922615 - RNA, 19 nt, Artificial Sequence
  Description of Artificial Sequence: Synthetic oligonucleotide
acaggcuauuaauuaaaca

SEQ ID NO: 922616 - RNA, 19 nt, Artificial Sequence
  Description of Artificial Sequence: Synthetic oligonucleotide
auaccaaauucccagugaa

SEQ ID NO: 922617 - RNA, 19 nt, Artificial Sequence
  Description of Artificial Sequence: Synthetic oligonucleotide
uacagcgauagacuaugca

SEQ ID NO: 922618 - RNA, 19 nt, Artificial Sequence
  Description of Artificial Sequence: Synthetic oligonucleotide
uuuauccagugagacauga

SEQ ID NO: 922619 - RNA, 19 nt, Artificial Sequence
  Description of Artificial Sequence: Synthetic oligonucleotide
cacaaauccucugggaucc

SEQ ID NO: 922620 - RNA, 19 nt, Artificial Sequence
  Description of Artificial Sequence: Synthetic oligonucleotide
cuagcacaucacaugagug

SEQ ID NO: 922621 - RNA, 19 nt, Artificial Sequence
  Description of Artificial Sequence: Synthetic oligonucleotide
uaacucuguucaaauaaau

SEQ ID NO: 922622 - RNA, 19 nt, Artificial Sequence
  Description of Artificial Sequence: Synthetic oligonucleotide
agaaacauccugguucuag

SEQ ID NO: 922623 - RNA, 19 nt, Artificial Sequence
  Description of Artificial Sequence: Synthetic oligonucleotide
auuagaaggcugcuugccu

SEQ ID NO: 922624 - RNA, 19 nt, Artificial Sequence
  Description of Artificial Sequence: Synthetic oligonucleotide
gugguagcuggccagcugg

SEQ ID NO: 922625 - RNA, 19 nt, Artificial Sequence
  Description of Artificial Sequence: Synthetic oligonucleotide
cgauagacuaugcagaacg

SEQ ID NO: 922626 - RNA, 19 nt, Artificial Sequence
  Description of Artificial Sequence: Synthetic oligonucleotide
ugaugggaagguacaauaa

SEQ ID NO: 922627 - RNA, 19 nt, Artificial Sequence
  Description of Artificial Sequence: Synthetic oligonucleotide
uccugaccaaggcuagugg

SEQ ID NO: 922628 - RNA, 19 nt, Artificial Sequence
  Description of Artificial Sequence: Synthetic oligonucleotide
cucacugucgggcaggcac

SEQ ID NO: 922629 - RNA, 19 nt, Artificial Sequence
  Description of Artificial Sequence: Synthetic oligonucleotide
agcacaaauccucugggau

SEQ ID NO: 922630 - RNA, 19 nt, Artificial Sequence
  Description of Artificial Sequence: Synthetic oligonucleotide
gacaaugacaggcuauuaa

SEQ ID NO: 922631 - RNA, 19 nt, Artificial Sequence
  Description of Artificial Sequence: Synthetic oligonucleotide
acguagcuaaugcucacag

SEQ ID NO: 922632 - RNA, 19 nt, Artificial Sequence
  Description of Artificial Sequence: Synthetic oligonucleotide
agcucacaggacauuaggc

SEQ ID NO: 922633 - RNA, 19 nt, Artificial Sequence
  Description of Artificial Sequence: Synthetic oligonucleotide
ucagcuuaguguuggcaca

SEQ ID NO: 922634 - RNA, 19 nt, Artificial Sequence
  Description of Artificial Sequence: Synthetic oligonucleotide
aaaguccaguuacagcgau

SEQ ID NO: 922635 - RNA, 19 nt, Artificial Sequence
  Description of Artificial Sequence: Synthetic oligonucleotide
gaugggaagguacaauaaa

SEQ ID NO: 922636 - RNA, 19 nt, Artificial Sequence
  Description of Artificial Sequence: Synthetic oligonucleotide
ggacauuaggcccaugcag

SEQ ID NO: 922637 - RNA, 19 nt, Artificial Sequence
  Description of Artificial Sequence: Synthetic oligonucleotide
agauugcacgcccagugug

SEQ ID NO: 922638 - RNA, 19 nt, Artificial Sequence
  Description of Artificial Sequence: Synthetic oligonucleotide
uacuuccuagcacaucaca

SEQ ID NO: 922639 - RNA, 19 nt, Artificial Sequence
  Description of Artificial Sequence: Synthetic oligonucleotide
caaauucccagugaagcac

SEQ ID NO: 922640 - RNA, 19 nt, Artificial Sequence
  Description of Artificial Sequence: Synthetic oligonucleotide
acguaugggguacuccuuc

SEQ ID NO: 922641 - RNA, 19 nt, Artificial Sequence
  Description of Artificial Sequence: Synthetic oligonucleotide
uaaguauggucaugagcug

SEQ ID NO: 922642 - RNA, 19 nt, Artificial Sequence
  Description of Artificial Sequence: Synthetic oligonucleotide
uaagcuggccuccaagcuc

SEQ ID NO: 922643 - RNA, 19 nt, Artificial Sequence
  Description of Artificial Sequence: Synthetic oligonucleotide
gauagugccacaggccaag

SEQ ID NO: 922644 - RNA, 19 nt, Artificial Sequence
  Description of Artificial Sequence: Synthetic oligonucleotide
agccaugcaccauggugcc

SEQ ID NO: 922645 - RNA, 19 nt, Artificial Sequence
  Description of Artificial Sequence: Synthetic oligonucleotide
gaccagagggagguuaugg

SEQ ID NO: 922646 - RNA, 19 nt, Artificial Sequence
  Description of Artificial Sequence: Synthetic oligonucleotide
cacccucauaccaaauucc

SEQ ID NO: 922647 - RNA, 19 nt, Artificial Sequence
  Description of Artificial Sequence: Synthetic oligonucleotide
cagaaucuguuugaagagg

SEQ ID NO: 922648 - RNA, 19 nt, Artificial Sequence
  Description of Artificial Sequence: Synthetic oligonucleotide
agaggcaaggacguauggg

SEQ ID NO: 922649 - RNA, 19 nt, Artificial Sequence
  Description of Artificial Sequence: Synthetic oligonucleotide
cacaugagugagaaagaug

SEQ ID NO: 922650 - RNA, 19 nt, Artificial Sequence
  Description of Artificial Sequence: Synthetic oligonucleotide
uaguguuggcacauucaca

SEQ ID NO: 922651 - RNA, 19 nt, Artificial Sequence
  Description of Artificial Sequence: Synthetic oligonucleotide
aauccuuuauccagugaga

SEQ ID NO: 922652 - RNA, 19 nt, Artificial Sequence
  Description of Artificial Sequence: Synthetic oligonucleotide
uccaagcucacugucgggc

SEQ ID NO: 922653 - RNA, 19 nt, Artificial Sequence
  Description of Artificial Sequence: Synthetic oligonucleotide
caauaaguauggucaugag

SEQ ID NO: 922654 - RNA, 19 nt, Artificial Sequence
  Description of Artificial Sequence: Synthetic oligonucleotide
uuaggacauaacucuguuc

SEQ ID NO: 922655 - RNA, 19 nt, Artificial Sequence
  Description of Artificial Sequence: Synthetic oligonucleotide
aacuugacaaugacaggcu

SEQ ID NO: 922656 - RNA, 19 nt, Artificial Sequence
  Description of Artificial Sequence: Synthetic oligonucleotide
ucaccgagauugcacgccc

SEQ ID NO: 922657 - RNA, 19 nt, Artificial Sequence
  Description of Artificial Sequence: Synthetic oligonucleotide
uacgccguguggaauguga

SEQ ID NO: 922658 - RNA, 19 nt, Artificial Sequence
  Description of Artificial Sequence: Synthetic oligonucleotide
cacagccuggguaagucag

SEQ ID NO: 922659 - RNA, 19 nt, Artificial Sequence
  Description of Artificial Sequence: Synthetic oligonucleotide
gcucacaggacauuaggcc

SEQ ID NO: 922660 - RNA, 19 nt, Artificial Sequence
  Description of Artificial Sequence: Synthetic oligonucleotide
ucgggcgcacccucaaugg

SEQ ID NO: 922661 - RNA, 19 nt, Artificial Sequence
  Description of Artificial Sequence: Synthetic oligonucleotide
cagcucacaggacauuagg

SEQ ID NO: 922662 - RNA, 19 nt, Artificial Sequence
  Description of Artificial Sequence: Synthetic oligonucleotide
uccuagcacaucacaugag

SEQ ID NO: 922663 - RNA, 19 nt, Artificial Sequence
  Description of Artificial Sequence: Synthetic oligonucleotide
gccuugucauuccaaaagg

SEQ ID NO: 922664 - RNA, 19 nt, Artificial Sequence
  Description of Artificial Sequence: Synthetic oligonucleotide
ccuagaguagcuuucagca

SEQ ID NO: 922665 - RNA, 19 nt, Artificial Sequence
  Description of Artificial Sequence: Synthetic oligonucleotide
caugagugagaaagaugag

SEQ ID NO: 922666 - RNA, 19 nt, Artificial Sequence
  Description of Artificial Sequence: Synthetic oligonucleotide
agguaaggucacucugugg

SEQ ID NO: 922667 - RNA, 19 nt, Artificial Sequence
  Description of Artificial Sequence: Synthetic oligonucleotide
ugugauacgccguguggaa

SEQ ID NO: 922668 - RNA, 19 nt, Artificial Sequence
  Description of Artificial Sequence: Synthetic oligonucleotide
ucugggauccagguccuag

SEQ ID NO: 922669 - RNA, 19 nt, Artificial Sequence
  Description of Artificial Sequence: Synthetic oligonucleotide
auaccacguagcuaaugcu

SEQ ID NO: 922670 - RNA, 19 nt, Artificial Sequence
  Description of Artificial Sequence: Synthetic oligonucleotide
uggucaugagcugaugcca

SEQ ID NO: 922671 - RNA, 19 nt, Artificial Sequence
  Description of Artificial Sequence: Synthetic oligonucleotide
gggaagguacaauaaacca

SEQ ID NO: 922672 - RNA, 19 nt, Artificial Sequence
  Description of Artificial Sequence: Synthetic oligonucleotide
aggacauuaggcccaugca

SEQ ID NO: 922673 - RNA, 19 nt, Artificial Sequence
  Description of Artificial Sequence: Synthetic oligonucleotide
auagacuaugcagaacggu

SEQ ID NO: 922674 - RNA, 19 nt, Artificial Sequence
  Description of Artificial Sequence: Synthetic oligonucleotide
ccuacugaccucuggaccc

SEQ ID NO: 922675 - RNA, 19 nt, Artificial Sequence
  Description of Artificial Sequence: Synthetic oligonucleotide
cuggagauagugccacagg

SEQ ID NO: 922676 - RNA, 19 nt, Artificial Sequence
  Description of Artificial Sequence: Synthetic oligonucleotide
gaagaggcaaggacguaug

SEQ ID NO: 922677 - RNA, 19 nt, Artificial Sequence
  Description of Artificial Sequence: Synthetic oligonucleotide
gacaggcuauuaauuaaac

SEQ ID NO: 922678 - RNA, 19 nt, Artificial Sequence
  Description of Artificial Sequence: Synthetic oligonucleotide
uccaagcagugugauacgc

SEQ ID NO: 922679 - RNA, 19 nt, Artificial Sequence
  Description of Artificial Sequence: Synthetic oligonucleotide
agcgauagacuaugcagaa

SEQ ID NO: 922680 - RNA, 19 nt, Artificial Sequence
  Description of Artificial Sequence: Synthetic oligonucleotide
uggaagaacuaagcuggcc

SEQ ID NO: 922681 - RNA, 19 nt, Artificial Sequence
  Description of Artificial Sequence: Synthetic oligonucleotide
aggacguaugggguacucc

SEQ ID NO: 922682 - RNA, 19 nt, Artificial Sequence
  Description of Artificial Sequence: Synthetic oligonucleotide
acgcauggggcagauacuc

SEQ ID NO: 922683 - RNA, 19 nt, Artificial Sequence
  Description of Artificial Sequence: Synthetic oligonucleotide
uuacagcgauagacuaugc

SEQ ID NO: 922684 - RNA, 19 nt, Artificial Sequence
  Description of Artificial Sequence: Synthetic oligonucleotide
aggcuauuaauuaaacaaa

SEQ ID NO: 922685 - RNA, 19 nt, Artificial Sequence
  Description of Artificial Sequence: Synthetic oligonucleotide
cagcgauagacuaugcaga

SEQ ID NO: 922686 - RNA, 19 nt, Artificial Sequence
  Description of Artificial Sequence: Synthetic oligonucleotide
uugacaaugacaggcuauu

SEQ ID NO: 922687 - RNA, 19 nt, Artificial Sequence
  Description of Artificial Sequence: Synthetic oligonucleotide
aaggacguaugggguacuc

SEQ ID NO: 922688 - RNA, 19 nt, Artificial Sequence
  Description of Artificial Sequence: Synthetic oligonucleotide
uuauggcugaggucuggcu

SEQ ID NO: 922689 - RNA, 19 nt, Artificial Sequence
  Description of Artificial Sequence: Synthetic oligonucleotide
gcagcacaaauccucuggg

SEQ ID NO: 922690 - RNA, 19 nt, Artificial Sequence
  Description of Artificial Sequence: Synthetic oligonucleotide
gcacgcauggggcagauac

SEQ ID NO: 922691 - RNA, 19 nt, Artificial Sequence
  Description of Artificial Sequence: Synthetic oligonucleotide
ggauccagguccuagagua

SEQ ID NO: 922692 - RNA, 19 nt, Artificial Sequence
  Description of Artificial Sequence: Synthetic oligonucleotide
ugcccuucugaaccaaauc

SEQ ID NO: 922693 - RNA, 19 nt, Artificial Sequence
  Description of Artificial Sequence: Synthetic oligonucleotide
gguucuaggugcaggagcc

SEQ ID NO: 922694 - RNA, 19 nt, Artificial Sequence
  Description of Artificial Sequence: Synthetic oligonucleotide
guaugggguacuccuucag

SEQ ID NO: 922695 - RNA, 19 nt, Artificial Sequence
  Description of Artificial Sequence: Synthetic oligonucleotide
aagguacaauaaaccauga

SEQ ID NO: 922696 - RNA, 19 nt, Artificial Sequence
  Description of Artificial Sequence: Synthetic oligonucleotide
auugccaaguggccagcug

SEQ ID NO: 922697 - RNA, 19 nt, Artificial Sequence
  Description of Artificial Sequence: Synthetic oligonucleotide
aggaccagccuagagcuug

SEQ ID NO: 922698 - RNA, 19 nt, Artificial Sequence
  Description of Artificial Sequence: Synthetic oligonucleotide
gugaacgagauggaagaac

SEQ ID NO: 922699 - RNA, 19 nt, Artificial Sequence
  Description of Artificial Sequence: Synthetic oligonucleotide
accgagauugcacgcccag

SEQ ID NO: 922700 - RNA, 19 nt, Artificial Sequence
  Description of Artificial Sequence: Synthetic oligonucleotide
caauggaagcuugugccug

SEQ ID NO: 922701 - RNA, 19 nt, Artificial Sequence
  Description of Artificial Sequence: Synthetic oligonucleotide
uuauccagugagacaugau

SEQ ID NO: 922702 - RNA, 19 nt, Artificial Sequence
  Description of Artificial Sequence: Synthetic oligonucleotide
uucuaggugcaggagccca

SEQ ID NO: 922703 - RNA, 19 nt, Artificial Sequence
  Description of Artificial Sequence: Synthetic oligonucleotide
uccggguccugaccaaggc

SEQ ID NO: 922704 - RNA, 19 nt, Artificial Sequence
  Description of Artificial Sequence: Synthetic oligonucleotide
ugucgggcaggcacugcag

SEQ ID NO: 922705 - RNA, 19 nt, Artificial Sequence
  Description of Artificial Sequence: Synthetic oligonucleotide
cugggcacauccagguagc

SEQ ID NO: 922706 - RNA, 19 nt, Artificial Sequence
  Description of Artificial Sequence: Synthetic oligonucleotide
ugccucacccucauaccac

SEQ ID NO: 922707 - RNA, 19 nt, Artificial Sequence
  Description of Artificial Sequence: Synthetic oligonucleotide
auugagcaagggcagccau

SEQ ID NO: 922708 - RNA, 19 nt, Artificial Sequence
  Description of Artificial Sequence: Synthetic oligonucleotide
uucccguaccacagguccc

SEQ ID NO: 922709 - RNA, 19 nt, Artificial Sequence
  Description of Artificial Sequence: Synthetic oligonucleotide
cauccuacugaccucugga

SEQ ID NO: 922710 - RNA, 19 nt, Artificial Sequence
  Description of Artificial Sequence: Synthetic oligonucleotide
ggaagaacuaagcuggccu

SEQ ID NO: 922711 - RNA, 19 nt, Artificial Sequence
  Description of Artificial Sequence: Synthetic oligonucleotide
cgagauggaagaacuaagc

SEQ ID NO: 922712 - RNA, 19 nt, Artificial Sequence
  Description of Artificial Sequence: Synthetic oligonucleotide
uuggacaguguaggcagca

SEQ ID NO: 922713 - RNA, 19 nt, Artificial Sequence
  Description of Artificial Sequence: Synthetic oligonucleotide
acuugacaaugacaggcua

SEQ ID NO: 922714 - RNA, 19 nt, Artificial Sequence
  Description of Artificial Sequence: Synthetic oligonucleotide
guacuggagauagugccac

SEQ ID NO: 922715 - RNA, 19 nt, Artificial Sequence
  Description of Artificial Sequence: Synthetic oligonucleotide
agcugaugccaguccugac

SEQ ID NO: 922716 - RNA, 19 nt, Artificial Sequence
  Description of Artificial Sequence: Synthetic oligonucleotide
cuuuauccagugagacaug

SEQ ID NO: 922717 - RNA, 19 nt, Artificial Sequence
  Description of Artificial Sequence: Synthetic oligonucleotide
ccucaauggaagcuugugc

SEQ ID NO: 922718 - RNA, 19 nt, Artificial Sequence
  Description of Artificial Sequence: Synthetic oligonucleotide
gcuagugguagcuggccag

SEQ ID NO: 922719 - RNA, 19 nt, Artificial Sequence
  Description of Artificial Sequence: Synthetic oligonucleotide
auccagugagacaugauua

SEQ ID NO: 922720 - RNA, 19 nt, Artificial Sequence
  Description of Artificial Sequence: Synthetic oligonucleotide
aauugccaaguggccagcu

SEQ ID NO: 922721 - RNA, 19 nt, Artificial Sequence
  Description of Artificial Sequence: Synthetic oligonucleotide
cagguuuggaggaccagca

SEQ ID NO: 922722 - RNA, 19 nt, Artificial Sequence
  Description of Artificial Sequence: Synthetic oligonucleotide
agguccuagaguagcuuuc

SEQ ID NO: 922723 - RNA, 19 nt, Artificial Sequence
  Description of Artificial Sequence: Synthetic oligonucleotide
gguaagucagcuuaguguu

SEQ ID NO: 922724 - RNA, 19 nt, Artificial Sequence
  Description of Artificial Sequence: Synthetic oligonucleotide
agacuaugcagaacgguaa

SEQ ID NO: 922725 - RNA, 19 nt, Artificial Sequence
  Description of Artificial Sequence: Synthetic oligonucleotide
accacguagcuaaugcuca

SEQ ID NO: 922726 - RNA, 19 nt, Artificial Sequence
  Description of Artificial Sequence: Synthetic oligonucleotide
ggguaagucagcuuagugu

SEQ ID NO: 922727 - RNA, 19 nt, Artificial Sequence
  Description of Artificial Sequence: Synthetic oligonucleotide
cucgggcgcacccucaaug

SEQ ID NO: 922728 - RNA, 19 nt, Artificial Sequence
  Description of Artificial Sequence: Synthetic oligonucleotide
gccguguggaaugugaggc

SEQ ID NO: 922729 - RNA, 19 nt, Artificial Sequence
  Description of Artificial Sequence: Synthetic oligonucleotide
uggguuucacagccugggu

SEQ ID NO: 922730 - RNA, 19 nt, Artificial Sequence
  Description of Artificial Sequence: Synthetic oligonucleotide
gcgugaacgagauggaaga

SEQ ID NO: 922731 - RNA, 19 nt, Artificial Sequence
  Description of Artificial Sequence: Synthetic oligonucleotide
cagugugauacgccgugug

SEQ ID NO: 922732 - RNA, 19 nt, Artificial Sequence
  Description of Artificial Sequence: Synthetic oligonucleotide
cuagugguagcuggccagc

SEQ ID NO: 922733 - RNA, 19 nt, Artificial Sequence
  Description of Artificial Sequence: Synthetic oligonucleotide
augguuaccucgggcgcac

SEQ ID NO: 922734 - RNA, 19 nt, Artificial Sequence
  Description of Artificial Sequence: Synthetic oligonucleotide
gauugcacgcccaguguga

SEQ ID NO: 922735 - RNA, 19 nt, Artificial Sequence
  Description of Artificial Sequence: Synthetic oligonucleotide
cacaauugccaaguggcca

SEQ ID NO: 922736 - RNA, 19 nt, Artificial Sequence
  Description of Artificial Sequence: Synthetic oligonucleotide
accaaggcuagugguagcu

SEQ ID NO: 922737 - RNA, 19 nt, Artificial Sequence
  Description of Artificial Sequence: Synthetic oligonucleotide
ccuccaagcucacugucgg

SEQ ID NO: 922738 - RNA, 19 nt, Artificial Sequence
  Description of Artificial Sequence: Synthetic oligonucleotide
ugguagcuggccagcuggc

SEQ ID NO: 922739 - RNA, 19 nt, Artificial Sequence
  Description of Artificial Sequence: Synthetic oligonucleotide
gaggcacaauugccaagug

SEQ ID NO: 922740 - RNA, 19 nt, Artificial Sequence
  Description of Artificial Sequence: Synthetic oligonucleotide
guaagucagcuuaguguug

SEQ ID NO: 922741 - RNA, 19 nt, Artificial Sequence
  Description of Artificial Sequence: Synthetic oligonucleotide
agcacccacugccuuguca

SEQ ID NO: 922742 - RNA, 19 nt, Artificial Sequence
  Description of Artificial Sequence: Synthetic oligonucleotide
gucaccgagauugcacgcc

SEQ ID NO: 922743 - RNA, 19 nt, Artificial Sequence
  Description of Artificial Sequence: Synthetic oligonucleotide
uccucuccgccuuucccac

SEQ ID NO: 922744 - RNA, 19 nt, Artificial Sequence
  Description of Artificial Sequence: Synthetic oligonucleotide
guccuagaguagcuuucag

SEQ ID NO: 922745 - RNA, 19 nt, Artificial Sequence
  Description of Artificial Sequence: Synthetic oligonucleotide
agaacuaagcuggccucca

SEQ ID NO: 922746 - RNA, 19 nt, Artificial Sequence
  Description of Artificial Sequence: Synthetic oligonucleotide
uggcuacacgucccgggca

SEQ ID NO: 922747 - RNA, 19 nt, Artificial Sequence
  Description of Artificial Sequence: Synthetic oligonucleotide
gugugauacgccgugugga

SEQ ID NO: 922748 - RNA, 19 nt, Artificial Sequence
  Description of Artificial Sequence: Synthetic oligonucleotide
cacccucaauggaagcuug

SEQ ID NO: 922749 - RNA, 19 nt, Artificial Sequence
  Description of Artificial Sequence: Synthetic oligonucleotide
guccugaccaaggcuagug

SEQ ID NO: 922750 - RNA, 19 nt, Artificial Sequence
  Description of Artificial Sequence: Synthetic oligonucleotide
gcacaaauccucugggauc

SEQ ID NO: 922751 - RNA, 19 nt, Artificial Sequence
  Description of Artificial Sequence: Synthetic oligonucleotide
uuaccucgggcgcacccuc

SEQ ID NO: 922752 - RNA, 19 nt, Artificial Sequence
  Description of Artificial Sequence: Synthetic oligonucleotide
gaguagcuuucagcaaagc

SEQ ID NO: 922753 - RNA, 19 nt, Artificial Sequence
  Description of Artificial Sequence: Synthetic oligonucleotide
agauggcuacacgucccgg

SEQ ID NO: 922754 - RNA, 19 nt, Artificial Sequence
  Description of Artificial Sequence: Synthetic oligonucleotide
caguuacagcgauagacua

SEQ ID NO: 922755 - RNA, 19 nt, Artificial Sequence
  Description of Artificial Sequence: Synthetic oligonucleotide
ccgucaccgagauugcacg

SEQ ID NO: 922756 - RNA, 19 nt, Artificial Sequence
  Description of Artificial Sequence: Synthetic oligonucleotide
augccaguccugacagggc

SEQ ID NO: 922757 - RNA, 19 nt, Artificial Sequence
  Description of Artificial Sequence: Synthetic oligonucleotide
cuugacaaugacaggcuau

SEQ ID NO: 922758 - RNA, 19 nt, Artificial Sequence
  Description of Artificial Sequence: Synthetic oligonucleotide
gcuuaguguuggcacauuc

SEQ ID NO: 922759 - RNA, 19 nt, Artificial Sequence
  Description of Artificial Sequence: Synthetic oligonucleotide
caacccaggaucaccaagu

SEQ ID NO: 922760 - RNA, 19 nt, Artificial Sequence
  Description of Artificial Sequence: Synthetic oligonucleotide
guccgcagaaucuguuuga

SEQ ID NO: 922761 - RNA, 19 nt, Artificial Sequence
  Description of Artificial Sequence: Synthetic oligonucleotide
acuaugcagaacgguaauu

SEQ ID NO: 922762 - RNA, 19 nt, Artificial Sequence
  Description of Artificial Sequence: Synthetic oligonucleotide
ggcuacacgucccgggcag

SEQ ID NO: 922763 - RNA, 19 nt, Artificial Sequence
  Description of Artificial Sequence: Synthetic oligonucleotide
cacgucccgggcagcaacc

SEQ ID NO: 922764 - RNA, 19 nt, Artificial Sequence
  Description of Artificial Sequence: Synthetic oligonucleotide
cacgacccuuccuggacug

SEQ ID NO: 922765 - RNA, 19 nt, Artificial Sequence
  Description of Artificial Sequence: Synthetic oligonucleotide
cuacugaccucuggacccc

SEQ ID NO: 922766 - RNA, 19 nt, Artificial Sequence
  Description of Artificial Sequence: Synthetic oligonucleotide
guagccuugcuggugagcu

SEQ ID NO: 922767 - RNA, 19 nt, Artificial Sequence
  Description of Artificial Sequence: Synthetic oligonucleotide
cugaccaaggcuaguggua

SEQ ID NO: 922768 - RNA, 19 nt, Artificial Sequence
  Description of Artificial Sequence: Synthetic oligonucleotide
ccgaggaggcacaauugcc

SEQ ID NO: 922769 - RNA, 19 nt, Artificial Sequence
  Description of Artificial Sequence: Synthetic oligonucleotide
aagcacccacugccuuguc

SEQ ID NO: 922770 - RNA, 19 nt, Artificial Sequence
  Description of Artificial Sequence: Synthetic oligonucleotide
gagauugcacgcccagugu

SEQ ID NO: 922771 - RNA, 19 nt, Artificial Sequence
  Description of Artificial Sequence: Synthetic oligonucleotide
ggccaagagaacaaacaca

SEQ ID NO: 922772 - RNA, 19 nt, Artificial Sequence
  Description of Artificial Sequence: Synthetic oligonucleotide
ccaaauucccagugaagca

SEQ ID NO: 922773 - RNA, 19 nt, Artificial Sequence
  Description of Artificial Sequence: Synthetic oligonucleotide
cuccgccuuucccacgacc

SEQ ID NO: 922774 - RNA, 19 nt, Artificial Sequence
  Description of Artificial Sequence: Synthetic oligonucleotide
acugucgggcaggcacugc

SEQ ID NO: 922775 - RNA, 19 nt, Artificial Sequence
  Description of Artificial Sequence: Synthetic oligonucleotide
cagcacaaauccucuggga

SEQ ID NO: 922776 - RNA, 19 nt, Artificial Sequence
  Description of Artificial Sequence: Synthetic oligonucleotide
gcuggugagcucagaagag

SEQ ID NO: 922777 - RNA, 19 nt, Artificial Sequence
  Description of Artificial Sequence: Synthetic oligonucleotide
cauccugguucuaggugca

SEQ ID NO: 922778 - RNA, 19 nt, Artificial Sequence
  Description of Artificial Sequence: Synthetic oligonucleotide
cgagauugcacgcccagug

SEQ ID NO: 922779 - RNA, 19 nt, Artificial Sequence
  Description of Artificial Sequence: Synthetic oligonucleotide
caauugccaaguggccagc

SEQ ID NO: 922780 - RNA, 19 nt, Artificial Sequence
  Description of Artificial Sequence: Synthetic oligonucleotide
uguuuccagcugggagagg

SEQ ID NO: 922781 - RNA, 19 nt, Artificial Sequence
  Description of Artificial Sequence: Synthetic oligonucleotide
ggacguaugggguacuccu

SEQ ID NO: 922782 - RNA, 19 nt, Artificial Sequence
  Description of Artificial Sequence: Synthetic oligonucleotide
gguuaccucgggcgcaccc

SEQ ID NO: 922783 - RNA, 19 nt, Artificial Sequence
  Description of Artificial Sequence: Synthetic oligonucleotide
ccccuguauagcccaaagg

SEQ ID NO: 922784 - RNA, 19 nt, Artificial Sequence
  Description of Artificial Sequence: Synthetic oligonucleotide
cuaugcagaacgguaauuu

SEQ ID NO: 922785 - RNA, 19 nt, Artificial Sequence
  Description of Artificial Sequence: Synthetic oligonucleotide
gccuggguaagucagcuua

SEQ ID NO: 922786 - RNA, 19 nt, Artificial Sequence
  Description of Artificial Sequence: Synthetic oligonucleotide
acgacccuuccuggacugc

SEQ ID NO: 922787 - RNA, 19 nt, Artificial Sequence
  Description of Artificial Sequence: Synthetic oligonucleotide
cuaagcuggccuccaagcu

SEQ ID NO: 922788 - RNA, 19 nt, Artificial Sequence
  Description of Artificial Sequence: Synthetic oligonucleotide
uaggugcaggagcccacau

SEQ ID NO: 922789 - RNA, 19 nt, Artificial Sequence
  Description of Artificial Sequence: Synthetic oligonucleotide
uggaagcuugugccugcau

SEQ ID NO: 922790 - RNA, 19 nt, Artificial Sequence
  Description of Artificial Sequence: Synthetic oligonucleotide
uccuacuuccuagcacauc

SEQ ID NO: 922791 - RNA, 19 nt, Artificial Sequence
  Description of Artificial Sequence: Synthetic oligonucleotide
auugcacgcccagugugau

SEQ ID NO: 922792 - RNA, 19 nt, Artificial Sequence
  Description of Artificial Sequence: Synthetic oligonucleotide
gaacuaagcuggccuccaa

SEQ ID NO: 922793 - RNA, 19 nt, Artificial Sequence
  Description of Artificial Sequence: Synthetic oligonucleotide
cauugaucuuugcauccua

SEQ ID NO: 922794 - RNA, 19 nt, Artificial Sequence
  Description of Artificial Sequence: Synthetic oligonucleotide
guucuaggugcaggagccc

SEQ ID NO: 922795 - RNA, 19 nt, Artificial Sequence
  Description of Artificial Sequence: Synthetic oligonucleotide
gcauccuauuuggauuucc

SEQ ID NO: 922796 - RNA, 19 nt, Artificial Sequence
  Description of Artificial Sequence: Synthetic oligonucleotide
cugucgggcaggcacugca

SEQ ID NO: 922797 - RNA, 19 nt, Artificial Sequence
  Description of Artificial Sequence: Synthetic oligonucleotide
acgccguguggaaugugag

SEQ ID NO: 922798 - RNA, 19 nt, Artificial Sequence
  Description of Artificial Sequence: Synthetic oligonucleotide
gaacgagauggaagaacua

SEQ ID NO: 922799 - RNA, 19 nt, Artificial Sequence
  Description of Artificial Sequence: Synthetic oligonucleotide
cugccuugucauuccaaaa

SEQ ID NO: 922800 - RNA, 19 nt, Artificial Sequence
  Description of Artificial Sequence: Synthetic oligonucleotide
uaccucgggcgcacccuca

SEQ ID NO: 922801 - RNA, 19 nt, Artificial Sequence
  Description of Artificial Sequence: Synthetic oligonucleotide
agcaacccaggaucaccaa

SEQ ID NO: 922802 - RNA, 19 nt, Artificial Sequence
  Description of Artificial Sequence: Synthetic oligonucleotide
cucuccgccuuucccacga

SEQ ID NO: 922803 - RNA, 19 nt, Artificial Sequence
  Description of Artificial Sequence: Synthetic oligonucleotide
caugguuaccucgggcgca

SEQ ID NO: 922804 - RNA, 19 nt, Artificial Sequence
  Description of Artificial Sequence: Synthetic oligonucleotide
cccgucaccgagauugcac

SEQ ID NO: 922805 - RNA, 19 nt, Artificial Sequence
  Description of Artificial Sequence: Synthetic oligonucleotide
gcaaggacguaugggguac

SEQ ID NO: 922806 - RNA, 19 nt, Artificial Sequence
  Description of Artificial Sequence: Synthetic oligonucleotide
cauugagcaagggcagcca

SEQ ID NO: 922807 - RNA, 19 nt, Artificial Sequence
  Description of Artificial Sequence: Synthetic oligonucleotide
ggcgcacccucaauggaag

SEQ ID NO: 922808 - RNA, 19 nt, Artificial Sequence
  Description of Artificial Sequence: Synthetic oligonucleotide
gaagcacccacugccuugu

SEQ ID NO: 922809 - RNA, 19 nt, Artificial Sequence
  Description of Artificial Sequence: Synthetic oligonucleotide
ugcauccuauuuggauuuc

SEQ ID NO: 922810 - RNA, 19 nt, Artificial Sequence
  Description of Artificial Sequence: Synthetic oligonucleotide
caccacccucccgucaccg

SEQ ID NO: 922811 - RNA, 19 nt, Artificial Sequence
  Description of Artificial Sequence: Synthetic oligonucleotide
aaguccaguuacagcgaua

SEQ ID NO: 922812 - RNA, 19 nt, Artificial Sequence
  Description of Artificial Sequence: Synthetic oligonucleotide
cguagcuaaugcucacagc

SEQ ID NO: 922813 - RNA, 19 nt, Artificial Sequence
  Description of Artificial Sequence: Synthetic oligonucleotide
ccugguucuaggugcagga

SEQ ID NO: 922814 - RNA, 19 nt, Artificial Sequence
  Description of Artificial Sequence: Synthetic oligonucleotide
agauagugccacaggccaa

SEQ ID NO: 922815 - RNA, 19 nt, Artificial Sequence
  Description of Artificial Sequence: Synthetic oligonucleotide
cacguagcuaaugcucaca

SEQ ID NO: 922816 - RNA, 19 nt, Artificial Sequence
  Description of Artificial Sequence: Synthetic oligonucleotide
cauuaggcccaugcaggca

SEQ ID NO: 922817 - RNA, 19 nt, Artificial Sequence
  Description of Artificial Sequence: Synthetic oligonucleotide
cugaguaccugggcacauc

SEQ ID NO: 922818 - RNA, 19 nt, Artificial Sequence
  Description of Artificial Sequence: Synthetic oligonucleotide
gaguaccugggcacaucca

SEQ ID NO: 922819 - RNA, 19 nt, Artificial Sequence
  Description of Artificial Sequence: Synthetic oligonucleotide
ucccgucaccgagauugca

SEQ ID NO: 922820 - RNA, 19 nt, Artificial Sequence
  Description of Artificial Sequence: Synthetic oligonucleotide
gguccuagaguagcuuuca

SEQ ID NO: 922821 - RNA, 19 nt, Artificial Sequence
  Description of Artificial Sequence: Synthetic oligonucleotide
uucugggaccgaggaggca

SEQ ID NO: 922822 - RNA, 19 nt, Artificial Sequence
  Description of Artificial Sequence: Synthetic oligonucleotide
gauacgccguguggaaugu

SEQ ID NO: 922823 - RNA, 19 nt, Artificial Sequence
  Description of Artificial Sequence: Synthetic oligonucleotide
ucuccgccuuucccacgac

SEQ ID NO: 922824 - RNA, 19 nt, Artificial Sequence
  Description of Artificial Sequence: Synthetic oligonucleotide
cuggcugcgugaacgagau

SEQ ID NO: 922825 - RNA, 19 nt, Artificial Sequence
  Description of Artificial Sequence: Synthetic oligonucleotide
cucguauaccacguagcua

SEQ ID NO: 922826 - RNA, 19 nt, Artificial Sequence
  Description of Artificial Sequence: Synthetic oligonucleotide
uacugaccucuggacccca

SEQ ID NO: 922827 - RNA, 19 nt, Artificial Sequence
  Description of Artificial Sequence: Synthetic oligonucleotide
cuaggugcaggagcccaca

SEQ ID NO: 922828 - RNA, 19 nt, Artificial Sequence
  Description of Artificial Sequence: Synthetic oligonucleotide
cucacccucauaccaaauu

SEQ ID NO: 922829 - RNA, 19 nt, Artificial Sequence
  Description of Artificial Sequence: Synthetic oligonucleotide
ggaaugcucuuuggaccag

SEQ ID NO: 922830 - RNA, 19 nt, Artificial Sequence
  Description of Artificial Sequence: Synthetic oligonucleotide
acccucccgucaccgagau

SEQ ID NO: 922831 - RNA, 19 nt, Artificial Sequence
  Description of Artificial Sequence: Synthetic oligonucleotide
gucaugagcugaugccagu

SEQ ID NO: 922832 - RNA, 19 nt, Artificial Sequence
  Description of Artificial Sequence: Synthetic oligonucleotide
gguagccuugcuggugagc

SEQ ID NO: 922833 - RNA, 19 nt, Artificial Sequence
  Description of Artificial Sequence: Synthetic oligonucleotide
acgcccagugugaucuuca

SEQ ID NO: 922834 - RNA, 19 nt, Artificial Sequence
  Description of Artificial Sequence: Synthetic oligonucleotide
uacacgucccgggcagcaa

SEQ ID NO: 922835 - RNA, 19 nt, Artificial Sequence
  Description of Artificial Sequence: Synthetic oligonucleotide
ccacguagcuaaugcucac

SEQ ID NO: 922836 - RNA, 19 nt, Artificial Sequence
  Description of Artificial Sequence: Synthetic oligonucleotide
cccacgacccuuccuggac

SEQ ID NO: 922837 - RNA, 19 nt, Artificial Sequence
  Description of Artificial Sequence: Synthetic oligonucleotide
auacgccguguggaaugug

SEQ ID NO: 922838 - RNA, 19 nt, Artificial Sequence
  Description of Artificial Sequence: Synthetic oligonucleotide
ggguccugaccaaggcuag

SEQ ID NO: 922839 - RNA, 19 nt, Artificial Sequence
  Description of Artificial Sequence: Synthetic oligonucleotide
agccuggguaagucagcuu

SEQ ID NO: 922840 - RNA, 19 nt, Artificial Sequence
  Description of Artificial Sequence: Synthetic oligonucleotide
cacgcccagugugaucuuc

SEQ ID NO: 922841 - RNA, 19 nt, Artificial Sequence
  Description of Artificial Sequence: Synthetic oligonucleotide
cacccucauaccacaaaau

SEQ ID NO: 922842 - RNA, 19 nt, Artificial Sequence
  Description of Artificial Sequence: Synthetic oligonucleotide
cgccguguggaaugugagg

SEQ ID NO: 922843 - RNA, 19 nt, Artificial Sequence
  Description of Artificial Sequence: Synthetic oligonucleotide
gcgauagacuaugcagaac

SEQ ID NO: 922844 - RNA, 19 nt, Artificial Sequence
  Description of Artificial Sequence: Synthetic oligonucleotide
caccgagauugcacgccca

SEQ ID NO: 922845 - RNA, 19 nt, Artificial Sequence
  Description of Artificial Sequence: Synthetic oligonucleotide
cagccuagagcuugccagu

SEQ ID NO: 922846 - RNA, 19 nt, Artificial Sequence
  Description of Artificial Sequence: Synthetic oligonucleotide
guuaccucgggcgcacccu

SEQ ID NO: 922847 - RNA, 19 nt, Artificial Sequence
  Description of Artificial Sequence: Synthetic oligonucleotide
gcagguaaggucacucugu

SEQ ID NO: 922848 - RNA, 19 nt, Artificial Sequence
  Description of Artificial Sequence: Synthetic oligonucleotide
ugguuaccucgggcgcacc

SEQ ID NO: 922849 - RNA, 19 nt, Artificial Sequence
  Description of Artificial Sequence: Synthetic oligonucleotide
cacccucccgucaccgaga

SEQ ID NO: 922850 - RNA, 19 nt, Artificial Sequence
  Description of Artificial Sequence: Synthetic oligonucleotide
cugcgugaacgagauggaa

SEQ ID NO: 922851 - RNA, 19 nt, Artificial Sequence
  Description of Artificial Sequence: Synthetic oligonucleotide
cgucaccgagauugcacgc

SEQ ID NO: 922852 - RNA, 19 nt, Artificial Sequence
  Description of Artificial Sequence: Synthetic oligonucleotide
agcuuaguguuggcacauu

SEQ ID NO: 922853 - RNA, 19 nt, Artificial Sequence
  Description of Artificial Sequence: Synthetic oligonucleotide
ccugaccaaggcuaguggu

SEQ ID NO: 922854 - RNA, 19 nt, Artificial Sequence
  Description of Artificial Sequence: Synthetic oligonucleotide
cuuucccacgacccuuccu

SEQ ID NO: 922855 - RNA, 19 nt, Artificial Sequence
  Description of Artificial Sequence: Synthetic oligonucleotide
cacgcauggggcagauacu

SEQ ID NO: 922856 - RNA, 19 nt, Artificial Sequence
  Description of Artificial Sequence: Synthetic oligonucleotide
ggaccagagggagguuaug

SEQ ID NO: 922857 - RNA, 19 nt, Artificial Sequence
  Description of Artificial Sequence: Synthetic oligonucleotide
gacguaugggguacuccuu

SEQ ID NO: 922858 - RNA, 19 nt, Artificial Sequence
  Description of Artificial Sequence: Synthetic oligonucleotide
ggcagcaacccaggaucac

SEQ ID NO: 922859 - RNA, 19 nt, Artificial Sequence
  Description of Artificial Sequence: Synthetic oligonucleotide
gcacaucacaugagugaga

SEQ ID NO: 922860 - RNA, 19 nt, Artificial Sequence
  Description of Artificial Sequence: Synthetic oligonucleotide
ccucuccgccuuucccacg

SEQ ID NO: 922861 - RNA, 19 nt, Artificial Sequence
  Description of Artificial Sequence: Synthetic oligonucleotide
cguaugggguacuccuuca

SEQ ID NO: 922862 - RNA, 19 nt, Artificial Sequence
  Description of Artificial Sequence: Synthetic oligonucleotide
gugauacgccguguggaau

SEQ ID NO: 922863 - RNA, 19 nt, Artificial Sequence
  Description of Artificial Sequence: Synthetic oligonucleotide
gggcgcacccucaauggaa

SEQ ID NO: 922864 - RNA, 19 nt, Artificial Sequence
  Description of Artificial Sequence: Synthetic oligonucleotide
ggauuucccucaucagguu

SEQ ID NO: 922865 - RNA, 19 nt, Artificial Sequence
  Description of Artificial Sequence: Synthetic oligonucleotide
gccugaguaccugggcaca

SEQ ID NO: 922866 - RNA, 19 nt, Artificial Sequence
  Description of Artificial Sequence: Synthetic oligonucleotide
cagcuuaguguuggcacau

SEQ ID NO: 922867 - RNA, 19 nt, Artificial Sequence
  Description of Artificial Sequence: Synthetic oligonucleotide
caaggacguaugggguacu

SEQ ID NO: 922868 - RNA, 19 nt, Artificial Sequence
  Description of Artificial Sequence: Synthetic oligonucleotide
cugcggcauccuggguuuc

SEQ ID NO: 922869 - RNA, 19 nt, Artificial Sequence
  Description of Artificial Sequence: Synthetic oligonucleotide
gcacccucaauggaagcuu

SEQ ID NO: 922870 - RNA, 19 nt, Artificial Sequence
  Description of Artificial Sequence: Synthetic oligonucleotide
agcacgcauggggcagaua

SEQ ID NO: 922871 - RNA, 19 nt, Artificial Sequence
  Description of Artificial Sequence: Synthetic oligonucleotide
cacaggacauuaggcccau

SEQ ID NO: 922872 - RNA, 19 nt, Artificial Sequence
  Description of Artificial Sequence: Synthetic oligonucleotide
cagcuggaaucaccuucau

SEQ ID NO: 922873 - RNA, 19 nt, Artificial Sequence
  Description of Artificial Sequence: Synthetic oligonucleotide
gguccugaccaaggcuagu

SEQ ID NO: 922874 - RNA, 19 nt, Artificial Sequence
  Description of Artificial Sequence: Synthetic oligonucleotide
cgugaacgagauggaagaa

SEQ ID NO: 922875 - RNA, 19 nt, Artificial Sequence
  Description of Artificial Sequence: Synthetic oligonucleotide
ccggguccugaccaaggcu

SEQ ID NO: 922876 - RNA, 19 nt, Artificial Sequence
  Description of Artificial Sequence: Synthetic oligonucleotide
ccccuccccugcggcaucc

SEQ ID NO: 922877 - RNA, 19 nt, Artificial Sequence
  Description of Artificial Sequence: Synthetic oligonucleotide
ccgggcagcaacccaggau

SEQ ID NO: 922878 - RNA, 19 nt, Artificial Sequence
  Description of Artificial Sequence: Synthetic oligonucleotide
cgggcgcacccucaaugga

SEQ ID NO: 922879 - RNA, 19 nt, Artificial Sequence
  Description of Artificial Sequence: Synthetic oligonucleotide
ccucacccucauaccaaau

SEQ ID NO: 922880 - RNA, 19 nt, Artificial Sequence
  Description of Artificial Sequence: Synthetic oligonucleotide
ccgagauugcacgcccagu

SEQ ID NO: 922881 - RNA, 19 nt, Artificial Sequence
  Description of Artificial Sequence: Synthetic oligonucleotide
ccgccuuucccacgacccu

SEQ ID NO: 922882 - RNA, 19 nt, Artificial Sequence
  Description of Artificial Sequence: Synthetic oligonucleotide
cguauaccacguagcuaau

SEQ ID NO: 922883 - RNA, 19 nt, Artificial Sequence
  Description of Artificial Sequence: Synthetic oligonucleotide
cagcacgcauggggcagau

SEQ ID NO: 922884 - RNA, 19 nt, Artificial Sequence
  Description of Artificial Sequence: Synthetic oligonucleotide
ccguaccacagguccccau

SEQ ID NO: 922885 - RNA, 19 nt, Artificial Sequence
  Description of Artificial Sequence: Synthetic oligonucleotide
ccucgggcgcacccucaau

SEQ ID NO: 922886 - RNA, 19 nt, Artificial Sequence
  Description of Artificial Sequence: Synthetic oligonucleotide
aacguuuaaaggcaaaguc

SEQ ID NO: 922887 - RNA, 19 nt, Artificial Sequence
  Description of Artificial Sequence: Synthetic oligonucleotide
uaaaagucggggaagacag

SEQ ID NO: 922888 - RNA, 19 nt, Artificial Sequence
  Description of Artificial Sequence: Synthetic oligonucleotide
aauagcaccggcucugggc

SEQ ID NO: 922889 - RNA, 19 nt, Artificial Sequence
  Description of Artificial Sequence: Synthetic oligonucleotide
ucuacugacuccaaguuag

SEQ ID NO: 922890 - RNA, 19 nt, Artificial Sequence
  Description of Artificial Sequence: Synthetic oligonucleotide
gaguuaauaacccaggaac

SEQ ID NO: 922891 - RNA, 19 nt, Artificial Sequence
  Description of Artificial Sequence: Synthetic oligonucleotide
gugauaaacguuuaaaggc

SEQ ID NO: 922892 - RNA, 19 nt, Artificial Sequence
  Description of Artificial Sequence: Synthetic oligonucleotide
aggagugucaaauucugcc

SEQ ID NO: 922893 - RNA, 19 nt, Artificial Sequence
  Description of Artificial Sequence: Synthetic oligonucleotide
aaguuaggaaacucguuac

SEQ ID NO: 922894 - RNA, 19 nt, Artificial Sequence
  Description of Artificial Sequence: Synthetic oligonucleotide
ucaaggacgacgcagcccg

SEQ ID NO: 922895 - RNA, 19 nt, Artificial Sequence
  Description of Artificial Sequence: Synthetic oligonucleotide
aaacucguuacauucagcu

SEQ ID NO: 922896 - RNA, 19 nt, Artificial Sequence
  Description of Artificial Sequence: Synthetic oligonucleotide
ugauaaacguuuaaaggca

SEQ ID NO: 922897 - RNA, 19 nt, Artificial Sequence
  Description of Artificial Sequence: Synthetic oligonucleotide
gauaaagaauguucccucg

SEQ ID NO: 922898 - RNA, 19 nt, Artificial Sequence
  Description of Artificial Sequence: Synthetic oligonucleotide
uguuacucgguucagguac

SEQ ID NO: 922899 - RNA, 19 nt, Artificial Sequence
  Description of Artificial Sequence: Synthetic oligonucleotide
guaaugacgagauguaucc

SEQ ID NO: 922900 - RNA, 19 nt, Artificial Sequence
  Description of Artificial Sequence: Synthetic oligonucleotide
guuacgguaacgucgaaag

SEQ ID NO: 922901 - RNA, 19 nt, Artificial Sequence
  Description of Artificial Sequence: Synthetic oligonucleotide
agagguaccaugaaaugcc

SEQ ID NO: 922902 - RNA, 19 nt, Artificial Sequence
  Description of Artificial Sequence: Synthetic oligonucleotide
guaugauugugucuggacg

SEQ ID NO: 922903 - RNA, 19 nt, Artificial Sequence
  Description of Artificial Sequence: Synthetic oligonucleotide
uugaauuuauuguacgcca

SEQ ID NO: 922904 - RNA, 19 nt, Artificial Sequence
  Description of Artificial Sequence: Synthetic oligonucleotide
uuauaggaccccuuucugg

SEQ ID NO: 922905 - RNA, 19 nt, Artificial Sequence
  Description of Artificial Sequence: Synthetic oligonucleotide
acguuuaaaggcaaagucc

SEQ ID NO: 922906 - RNA, 19 nt, Artificial Sequence
  Description of Artificial Sequence: Synthetic oligonucleotide
uuauugaacaccagugcca

SEQ ID NO: 922907 - RNA, 19 nt, Artificial Sequence
  Description of Artificial Sequence: Synthetic oligonucleotide
cucaugaagucauagguac

SEQ ID NO: 922908 - RNA, 19 nt, Artificial Sequence
  Description of Artificial Sequence: Synthetic oligonucleotide
aaggccucgauauuggggu

SEQ ID NO: 922909 - RNA, 19 nt, Artificial Sequence
  Description of Artificial Sequence: Synthetic oligonucleotide
uucagagguaccaugaaau

SEQ ID NO: 922910 - RNA, 19 nt, Artificial Sequence
  Description of Artificial Sequence: Synthetic oligonucleotide
uacgccaugacauccagug

SEQ ID NO: 922911 - RNA, 19 nt, Artificial Sequence
  Description of Artificial Sequence: Synthetic oligonucleotide
cauaugggaaggaagaguc

SEQ ID NO: 922912 - RNA, 19 nt, Artificial Sequence
  Description of Artificial Sequence: Synthetic oligonucleotide
ugugaugacggagacaacc

SEQ ID NO: 922913 - RNA, 19 nt, Artificial Sequence
  Description of Artificial Sequence: Synthetic oligonucleotide
auuuauuguacgccaugac

SEQ ID NO: 922914 - RNA, 19 nt, Artificial Sequence
  Description of Artificial Sequence: Synthetic oligonucleotide
gaugcuagacaauggcagg

SEQ ID NO: 922915 - RNA, 19 nt, Artificial Sequence
  Description of Artificial Sequence: Synthetic oligonucleotide
uaaacguuuaaaggcaaag

SEQ ID NO: 922916 - RNA, 19 nt, Artificial Sequence
  Description of Artificial Sequence: Synthetic oligonucleotide
aauuuauuguacgccauga

SEQ ID NO: 922917 - RNA, 19 nt, Artificial Sequence
  Description of Artificial Sequence: Synthetic oligonucleotide
agguuacugcuccacagcc

SEQ ID NO: 922918 - RNA, 19 nt, Artificial Sequence
  Description of Artificial Sequence: Synthetic oligonucleotide
uacgguaacgucgaaaggc

SEQ ID NO: 922919 - RNA, 19 nt, Artificial Sequence
  Description of Artificial Sequence: Synthetic oligonucleotide
caaacgagcugacugaaag

SEQ ID NO: 922920 - RNA, 19 nt, Artificial Sequence
  Description of Artificial Sequence: Synthetic oligonucleotide
aagauaaaagucggggaag

SEQ ID NO: 922921 - RNA, 19 nt, Artificial Sequence
  Description of Artificial Sequence: Synthetic oligonucleotide
uauguuacucgguucaggu

SEQ ID NO: 922922 - RNA, 19 nt, Artificial Sequence
  Description of Artificial Sequence: Synthetic oligonucleotide
auuguacgccaugacaucc

SEQ ID NO: 922923 - RNA, 19 nt, Artificial Sequence
  Description of Artificial Sequence: Synthetic oligonucleotide
gaagauaaaagucggggaa

SEQ ID NO: 922924 - RNA, 19 nt, Artificial Sequence
  Description of Artificial Sequence: Synthetic oligonucleotide
guugauaaagaauguuccc

SEQ ID NO: 922925 - RNA, 19 nt, Artificial Sequence
  Description of Artificial Sequence: Synthetic oligonucleotide
guugaauuuauuguacgcc

SEQ ID NO: 922926 - RNA, 19 nt, Artificial Sequence
  Description of Artificial Sequence: Synthetic oligonucleotide
uugauaaagaauguucccu

SEQ ID NO: 922927 - RNA, 19 nt, Artificial Sequence
  Description of Artificial Sequence: Synthetic oligonucleotide
uccauauuaguugucaggu

SEQ ID NO: 922928 - RNA, 19 nt, Artificial Sequence
  Description of Artificial Sequence: Synthetic oligonucleotide
ugauaaagaauguucccuc

SEQ ID NO: 922929 - RNA, 19 nt, Artificial Sequence
  Description of Artificial Sequence: Synthetic oligonucleotide
gauucuagcugcuugaagu

SEQ ID NO: 922930 - RNA, 19 nt, Artificial Sequence
  Description of Artificial Sequence: Synthetic oligonucleotide
auacucuccccacauacag

SEQ ID NO: 922931 - RNA, 19 nt, Artificial Sequence
  Description of Artificial Sequence: Synthetic oligonucleotide
aaccuuuacuuuauuauca

SEQ ID NO: 922932 - RNA, 19 nt, Artificial Sequence
  Description of Artificial Sequence: Synthetic oligonucleotide
gaaccuuuacuuuauuauc

SEQ ID NO: 922933 - RNA, 19 nt, Artificial Sequence
  Description of Artificial Sequence: Synthetic oligonucleotide
aaaacguucuuccccaaua

SEQ ID NO: 922934 - RNA, 19 nt, Artificial Sequence
  Description of Artificial Sequence: Synthetic oligonucleotide
agaaugugcucaugaaguc

SEQ ID NO: 922935 - RNA, 19 nt, Artificial Sequence
  Description of Artificial Sequence: Synthetic oligonucleotide
uauaggaccccuuucuggu

SEQ ID NO: 922936 - RNA, 19 nt, Artificial Sequence
  Description of Artificial Sequence: Synthetic oligonucleotide
uauaguuaggguguaauuu

SEQ ID NO: 922937 - RNA, 19 nt, Artificial Sequence
  Description of Artificial Sequence: Synthetic oligonucleotide
gaauuuauuguacgccaug

SEQ ID NO: 922938 - RNA, 19 nt, Artificial Sequence
  Description of Artificial Sequence: Synthetic oligonucleotide
ucagguuacugcuccacag

SEQ ID NO: 922939 - RNA, 19 nt, Artificial Sequence
  Description of Artificial Sequence: Synthetic oligonucleotide
agcaaggaguuaauaaccc

SEQ ID NO: 922940 - RNA, 19 nt, Artificial Sequence
  Description of Artificial Sequence: Synthetic oligonucleotide
auauuagcuguuuucuuga

SEQ ID NO: 922941 - RNA, 19 nt, Artificial Sequence
  Description of Artificial Sequence: Synthetic oligonucleotide
guccauauuaguugucagg

SEQ ID NO: 922942 - RNA, 19 nt, Artificial Sequence
  Description of Artificial Sequence: Synthetic oligonucleotide
uucgucuuguugauaaaga

SEQ ID NO: 922943 - RNA, 19 nt, Artificial Sequence
  Description of Artificial Sequence: Synthetic oligonucleotide
acacggauaccccgaagcc

SEQ ID NO: 922944 - RNA, 19 nt, Artificial Sequence
  Description of Artificial Sequence: Synthetic oligonucleotide
aaacguuuaaaggcaaagu

SEQ ID NO: 922945 - RNA, 19 nt, Artificial Sequence
  Description of Artificial Sequence: Synthetic oligonucleotide
cucagacacaaguaaacac

SEQ ID NO: 922946 - RNA, 19 nt, Artificial Sequence
  Description of Artificial Sequence: Synthetic oligonucleotide
gguaccaugaaaugccagg

SEQ ID NO: 922947 - RNA, 19 nt, Artificial Sequence
  Description of Artificial Sequence: Synthetic oligonucleotide
gagugucaaauucugccag

SEQ ID NO: 922948 - RNA, 19 nt, Artificial Sequence
  Description of Artificial Sequence: Synthetic oligonucleotide
caguagccuacacugaugg

SEQ ID NO: 922949 - RNA, 19 nt, Artificial Sequence
  Description of Artificial Sequence: Synthetic oligonucleotide
uaccaugaaaugccagggg

SEQ ID NO: 922950 - RNA, 19 nt, Artificial Sequence
  Description of Artificial Sequence: Synthetic oligonucleotide
agagccggaaccgaagagc

SEQ ID NO: 922951 - RNA, 19 nt, Artificial Sequence
  Description of Artificial Sequence: Synthetic oligonucleotide
auauuaguugucagguuac

SEQ ID NO: 922952 - RNA, 19 nt, Artificial Sequence
  Description of Artificial Sequence: Synthetic oligonucleotide
auuuucuacugacuccaag

SEQ ID NO: 922953 - RNA, 19 nt, Artificial Sequence
  Description of Artificial Sequence: Synthetic oligonucleotide
uuacgguaacgucgaaagg

SEQ ID NO: 922954 - RNA, 19 nt, Artificial Sequence
  Description of Artificial Sequence: Synthetic oligonucleotide
cucgguucagguaccaggg

SEQ ID NO: 922955 - RNA, 19 nt, Artificial Sequence
  Description of Artificial Sequence: Synthetic oligonucleotide
auaguuaggguguaauuuu

SEQ ID NO: 922956 - RNA, 19 nt, Artificial Sequence
  Description of Artificial Sequence: Synthetic oligonucleotide
ggaagagucguccaccagg

SEQ ID NO: 922957 - RNA, 19 nt, Artificial Sequence
  Description of Artificial Sequence: Synthetic oligonucleotide
uguacuggggccagggcca

SEQ ID NO: 922958 - RNA, 19 nt, Artificial Sequence
  Description of Artificial Sequence: Synthetic oligonucleotide
cauguaaucuacugguauc

SEQ ID NO: 922959 - RNA, 19 nt, Artificial Sequence
  Description of Artificial Sequence: Synthetic oligonucleotide
ugugcucaugaagucauag

SEQ ID NO: 922960 - RNA, 19 nt, Artificial Sequence
  Description of Artificial Sequence: Synthetic oligonucleotide
ucuaucccauggcagggag

SEQ ID NO: 922961 - RNA, 19 nt, Artificial Sequence
  Description of Artificial Sequence: Synthetic oligonucleotide
aaacguucuuccccaauau

SEQ ID NO: 922962 - RNA, 19 nt, Artificial Sequence
  Description of Artificial Sequence: Synthetic oligonucleotide
auaaaagucggggaagaca

SEQ ID NO: 922963 - RNA, 19 nt, Artificial Sequence
  Description of Artificial Sequence: Synthetic oligonucleotide
ugaauuuauuguacgccau

SEQ ID NO: 922964 - RNA, 19 nt, Artificial Sequence
  Description of Artificial Sequence: Synthetic oligonucleotide
uauagaugugggugacagg

SEQ ID NO: 922965 - RNA, 19 nt, Artificial Sequence
  Description of Artificial Sequence: Synthetic oligonucleotide
agcggaaaugugauaaacg

SEQ ID NO: 922966 - RNA, 19 nt, Artificial Sequence
  Description of Artificial Sequence: Synthetic oligonucleotide
guaccaugaaaugccaggg

SEQ ID NO: 922967 - RNA, 19 nt, Artificial Sequence
  Description of Artificial Sequence: Synthetic oligonucleotide
caggguguagcgccgaugg

SEQ ID NO: 922968 - RNA, 19 nt, Artificial Sequence
  Description of Artificial Sequence: Synthetic oligonucleotide
uuccaaacgagcugacuga

SEQ ID NO: 922969 - RNA, 19 nt, Artificial Sequence
  Description of Artificial Sequence: Synthetic oligonucleotide
uauuagcuguuuucuugag

SEQ ID NO: 922970 - RNA, 19 nt, Artificial Sequence
  Description of Artificial Sequence: Synthetic oligonucleotide
gaaggccucgauauugggg

SEQ ID NO: 922971 - RNA, 19 nt, Artificial Sequence
  Description of Artificial Sequence: Synthetic oligonucleotide
ucgucaaggacgacgcagc

SEQ ID NO: 922972 - RNA, 19 nt, Artificial Sequence
  Description of Artificial Sequence: Synthetic oligonucleotide
acgguaacgucgaaaggcc

SEQ ID NO: 922973 - RNA, 19 nt, Artificial Sequence
  Description of Artificial Sequence: Synthetic oligonucleotide
aacgucgaaaggccucguc

SEQ ID NO: 922974 - RNA, 19 nt, Artificial Sequence
  Description of Artificial Sequence: Synthetic oligonucleotide
aguuaauaacccaggaaca

SEQ ID NO: 922975 - RNA, 19 nt, Artificial Sequence
  Description of Artificial Sequence: Synthetic oligonucleotide
ucgucuuguugauaaagaa

SEQ ID NO: 922976 - RNA, 19 nt, Artificial Sequence
  Description of Artificial Sequence: Synthetic oligonucleotide
uacucuccccacauacagg

SEQ ID NO: 922977 - RNA, 19 nt, Artificial Sequence
  Description of Artificial Sequence: Synthetic oligonucleotide
aguuaggaaacucguuaca

SEQ ID NO: 922978 - RNA, 19 nt, Artificial Sequence
  Description of Artificial Sequence: Synthetic oligonucleotide
cauauuaguugucagguua

SEQ ID NO: 922979 - RNA, 19 nt, Artificial Sequence
  Description of Artificial Sequence: Synthetic oligonucleotide
aauucugccagcacacgga

SEQ ID NO: 922980 - RNA, 19 nt, Artificial Sequence
  Description of Artificial Sequence: Synthetic oligonucleotide
agcagguuacgguaacguc

SEQ ID NO: 922981 - RNA, 19 nt, Artificial Sequence
  Description of Artificial Sequence: Synthetic oligonucleotide
aggugaagauaaaagucgg

SEQ ID NO: 922982 - RNA, 19 nt, Artificial Sequence
  Description of Artificial Sequence: Synthetic oligonucleotide
uggacgaaccuuuacuuua

SEQ ID NO: 922983 - RNA, 19 nt, Artificial Sequence
  Description of Artificial Sequence: Synthetic oligonucleotide
guuauaggaccccuuucug

SEQ ID NO: 922984 - RNA, 19 nt, Artificial Sequence
  Description of Artificial Sequence: Synthetic oligonucleotide
uuauaguuaggguguaauu

SEQ ID NO: 922985 - RNA, 19 nt, Artificial Sequence
  Description of Artificial Sequence: Synthetic oligonucleotide
agucauagguacuguugag

SEQ ID NO: 922986 - RNA, 19 nt, Artificial Sequence
  Description of Artificial Sequence: Synthetic oligonucleotide
uguacgccaugacauccag

SEQ ID NO: 922987 - RNA, 19 nt, Artificial Sequence
  Description of Artificial Sequence: Synthetic oligonucleotide
uggaacacguugaauuuau

SEQ ID NO: 922988 - RNA, 19 nt, Artificial Sequence
  Description of Artificial Sequence: Synthetic oligonucleotide
uagccuacacugaugggcu

SEQ ID NO: 922989 - RNA, 19 nt, Artificial Sequence
  Description of Artificial Sequence: Synthetic oligonucleotide
uucuggugagcucugggaa

SEQ ID NO: 922990 - RNA, 19 nt, Artificial Sequence
  Description of Artificial Sequence: Synthetic oligonucleotide
ucggcaauagcaccggcuc

SEQ ID NO: 922991 - RNA, 19 nt, Artificial Sequence
  Description of Artificial Sequence: Synthetic oligonucleotide
ucuggacgaaccuuuacuu

SEQ ID NO: 922992 - RNA, 19 nt, Artificial Sequence
  Description of Artificial Sequence: Synthetic oligonucleotide
auauguuacucgguucagg

SEQ ID NO: 922993 - RNA, 19 nt, Artificial Sequence
  Description of Artificial Sequence: Synthetic oligonucleotide
caucacucuuuauugaaca

SEQ ID NO: 922994 - RNA, 19 nt, Artificial Sequence
  Description of Artificial Sequence: Synthetic oligonucleotide
auauugggguuggaucucc

SEQ ID NO: 922995 - RNA, 19 nt, Artificial Sequence
  Description of Artificial Sequence: Synthetic oligonucleotide
acaucacucuuuauugaac

SEQ ID NO: 922996 - RNA, 19 nt, Artificial Sequence
  Description of Artificial Sequence: Synthetic oligonucleotide
uuuggauguacuggggcca

SEQ ID NO: 922997 - RNA, 19 nt, Artificial Sequence
  Description of Artificial Sequence: Synthetic oligonucleotide
gcagguuacgguaacgucg

SEQ ID NO: 922998 - RNA, 19 nt, Artificial Sequence
  Description of Artificial Sequence: Synthetic oligonucleotide
guaacgucgaaaggccucg

SEQ ID NO: 922999 - RNA, 19 nt, Artificial Sequence
  Description of Artificial Sequence: Synthetic oligonucleotide
auuaguugucagguuacug

SEQ ID NO: 923000 - RNA, 19 nt, Artificial Sequence
  Description of Artificial Sequence: Synthetic oligonucleotide
ugggaaggaagagucgucc

SEQ ID NO: 923001 - RNA, 19 nt, Artificial Sequence
  Description of Artificial Sequence: Synthetic oligonucleotide
caaguuaggaaacucguua

SEQ ID NO: 923002 - RNA, 19 nt, Artificial Sequence
  Description of Artificial Sequence: Synthetic oligonucleotide
aguggaacacguugaauuu

SEQ ID NO: 923003 - RNA, 19 nt, Artificial Sequence
  Description of Artificial Sequence: Synthetic oligonucleotide
aaggacgacgcagcccgcc

SEQ ID NO: 923004 - RNA, 19 nt, Artificial Sequence
  Description of Artificial Sequence: Synthetic oligonucleotide
uauuguacgccaugacauc

SEQ ID NO: 923005 - RNA, 19 nt, Artificial Sequence
  Description of Artificial Sequence: Synthetic oligonucleotide
uggcagguaaugacgagau

SEQ ID NO: 923006 - RNA, 19 nt, Artificial Sequence
  Description of Artificial Sequence: Synthetic oligonucleotide
ugacuccaaguuaggaaac

SEQ ID NO: 923007 - RNA, 19 nt, Artificial Sequence
  Description of Artificial Sequence: Synthetic oligonucleotide
ggaaagucuuuaaucuucg

SEQ ID NO: 923008 - RNA, 19 nt, Artificial Sequence
  Description of Artificial Sequence: Synthetic oligonucleotide
agagggacgagagccagag

SEQ ID NO: 923009 - RNA, 19 nt, Artificial Sequence
  Description of Artificial Sequence: Synthetic oligonucleotide
uaccggaacuggaaguugu

SEQ ID NO: 923010 - RNA, 19 nt, Artificial Sequence
  Description of Artificial Sequence: Synthetic oligonucleotide
gaaccgaagagcagguuac

SEQ ID NO: 923011 - RNA, 19 nt, Artificial Sequence
  Description of Artificial Sequence: Synthetic oligonucleotide
agauaaaagucggggaaga

SEQ ID NO: 923012 - RNA, 19 nt, Artificial Sequence
  Description of Artificial Sequence: Synthetic oligonucleotide
acgucgaaaggccucguca

SEQ ID NO: 923013 - RNA, 19 nt, Artificial Sequence
  Description of Artificial Sequence: Synthetic oligonucleotide
agucagggccauauguuac

SEQ ID NO: 923014 - RNA, 19 nt, Artificial Sequence
  Description of Artificial Sequence: Synthetic oligonucleotide
uguucagagguaccaugaa

SEQ ID NO: 923015 - RNA, 19 nt, Artificial Sequence
  Description of Artificial Sequence: Synthetic oligonucleotide
uuguacgccaugacaucca

SEQ ID NO: 923016 - RNA, 19 nt, Artificial Sequence
  Description of Artificial Sequence: Synthetic oligonucleotide
ugaugacggagacaaccaa

SEQ ID NO: 923017 - RNA, 19 nt, Artificial Sequence
  Description of Artificial Sequence: Synthetic oligonucleotide
gguagguuuggauguacug

SEQ ID NO: 923018 - RNA, 19 nt, Artificial Sequence
  Description of Artificial Sequence: Synthetic oligonucleotide
gguuuggauguacuggggc

SEQ ID NO: 923019 - RNA, 19 nt, Artificial Sequence
  Description of Artificial Sequence: Synthetic oligonucleotide
aacguucuuccccaauauu

SEQ ID NO: 923020 - RNA, 19 nt, Artificial Sequence
  Description of Artificial Sequence: Synthetic oligonucleotide
gauaaaagucggggaagac

SEQ ID NO: 923021 - RNA, 19 nt, Artificial Sequence
  Description of Artificial Sequence: Synthetic oligonucleotide
cucgucaaggacgacgcag

SEQ ID NO: 923022 - RNA, 19 nt, Artificial Sequence
  Description of Artificial Sequence: Synthetic oligonucleotide
cccuccaaugaccagaccc

SEQ ID NO: 923023 - RNA, 19 nt, Artificial Sequence
  Description of Artificial Sequence: Synthetic oligonucleotide
aggcaaaguccauauuagu

SEQ ID NO: 923024 - RNA, 19 nt, Artificial Sequence
  Description of Artificial Sequence: Synthetic oligonucleotide
gauaaacguuuaaaggcaa

SEQ ID NO: 923025 - RNA, 19 nt, Artificial Sequence
  Description of Artificial Sequence: Synthetic oligonucleotide
auaugggaaggaagagucg

SEQ ID NO: 923026 - RNA, 19 nt, Artificial Sequence
  Description of Artificial Sequence: Synthetic oligonucleotide
ugguaccggaacuggaagu

SEQ ID NO: 923027 - RNA, 19 nt, Artificial Sequence
  Description of Artificial Sequence: Synthetic oligonucleotide
cucguuacauucagcugug

SEQ ID NO: 923028 - RNA, 19 nt, Artificial Sequence
  Description of Artificial Sequence: Synthetic oligonucleotide
ugucuggacgaaccuuuac

SEQ ID NO: 923029 - RNA, 19 nt, Artificial Sequence
  Description of Artificial Sequence: Synthetic oligonucleotide
acgaaccuuuacuuuauua

SEQ ID NO: 923030 - RNA, 19 nt, Artificial Sequence
  Description of Artificial Sequence: Synthetic oligonucleotide
cacggauaccccgaagccg

SEQ ID NO: 923031 - RNA, 19 nt, Artificial Sequence
  Description of Artificial Sequence: Synthetic oligonucleotide
caggagugucaaauucugc

SEQ ID NO: 923032 - RNA, 19 nt, Artificial Sequence
  Description of Artificial Sequence: Synthetic oligonucleotide
uaugccccggugagggaag

SEQ ID NO: 923033 - RNA, 19 nt, Artificial Sequence
  Description of Artificial Sequence: Synthetic oligonucleotide
caugaaaugccaggggcuc

SEQ ID NO: 923034 - RNA, 19 nt, Artificial Sequence
  Description of Artificial Sequence: Synthetic oligonucleotide
uguagcgccgaugguaggu

SEQ ID NO: 923035 - RNA, 19 nt, Artificial Sequence
  Description of Artificial Sequence: Synthetic oligonucleotide
gguaaugacgagauguauc

SEQ ID NO: 923036 - RNA, 19 nt, Artificial Sequence
  Description of Artificial Sequence: Synthetic oligonucleotide
ugaccagacccuucuguuc

SEQ ID NO: 923037 - RNA, 19 nt, Artificial Sequence
  Description of Artificial Sequence: Synthetic oligonucleotide
caaaguccauauuaguugu

SEQ ID NO: 923038 - RNA, 19 nt, Artificial Sequence
  Description of Artificial Sequence: Synthetic oligonucleotide
uggggaccagguuugugcu

SEQ ID NO: 923039 - RNA, 19 nt, Artificial Sequence
  Description of Artificial Sequence: Synthetic oligonucleotide
cagggccauauguuacucg

SEQ ID NO: 923040 - RNA, 19 nt, Artificial Sequence
  Description of Artificial Sequence: Synthetic oligonucleotide
uccaaugaccagacccuuc

SEQ ID NO: 923041 - RNA, 19 nt, Artificial Sequence
  Description of Artificial Sequence: Synthetic oligonucleotide
aaggccucgucaaggacga

SEQ ID NO: 923042 - RNA, 19 nt, Artificial Sequence
  Description of Artificial Sequence: Synthetic oligonucleotide
uggcccaccggcgagcucc

SEQ ID NO: 923043 - RNA, 19 nt, Artificial Sequence
  Description of Artificial Sequence: Synthetic oligonucleotide
gauaccccgaagccgugca

SEQ ID NO: 923044 - RNA, 19 nt, Artificial Sequence
  Description of Artificial Sequence: Synthetic oligonucleotide
cguugaauuuauuguacgc

SEQ ID NO: 923045 - RNA, 19 nt, Artificial Sequence
  Description of Artificial Sequence: Synthetic oligonucleotide
gaugacggagacaaccaaa

SEQ ID NO: 923046 - RNA, 19 nt, Artificial Sequence
  Description of Artificial Sequence: Synthetic oligonucleotide
aggguuauaggaccccuuu

SEQ ID NO: 923047 - RNA, 19 nt, Artificial Sequence
  Description of Artificial Sequence: Synthetic oligonucleotide
cagaguagcaaggaguuaa

SEQ ID NO: 923048 - RNA, 19 nt, Artificial Sequence
  Description of Artificial Sequence: Synthetic oligonucleotide
acguucuuccccaauauua

SEQ ID NO: 923049 - RNA, 19 nt, Artificial Sequence
  Description of Artificial Sequence: Synthetic oligonucleotide
ggaguuaauaacccaggaa

SEQ ID NO: 923050 - RNA, 19 nt, Artificial Sequence
  Description of Artificial Sequence: Synthetic oligonucleotide
cacagcggaaaugugauaa

SEQ ID NO: 923051 - RNA, 19 nt, Artificial Sequence
  Description of Artificial Sequence: Synthetic oligonucleotide
gcuguauagauguggguga

SEQ ID NO: 923052 - RNA, 19 nt, Artificial Sequence
  Description of Artificial Sequence: Synthetic oligonucleotide
agcgaaacccagagccugc

SEQ ID NO: 923053 - RNA, 19 nt, Artificial Sequence
  Description of Artificial Sequence: Synthetic oligonucleotide
cagguuacgguaacgucga

SEQ ID NO: 923054 - RNA, 19 nt, Artificial Sequence
  Description of Artificial Sequence: Synthetic oligonucleotide
ggaaaugugauaaacguuu

SEQ ID NO: 923055 - RNA, 19 nt, Artificial Sequence
  Description of Artificial Sequence: Synthetic oligonucleotide
aagagucguccaccaggug

SEQ ID NO: 923056 - RNA, 19 nt, Artificial Sequence
  Description of Artificial Sequence: Synthetic oligonucleotide
cagccucucggcaauagca

SEQ ID NO: 923057 - RNA, 19 nt, Artificial Sequence
  Description of Artificial Sequence: Synthetic oligonucleotide
agcggggaaagucuuuaau

SEQ ID NO: 923058 - RNA, 19 nt, Artificial Sequence
  Description of Artificial Sequence: Synthetic oligonucleotide
gauauugggguuggaucuc

SEQ ID NO: 923059 - RNA, 19 nt, Artificial Sequence
  Description of Artificial Sequence: Synthetic oligonucleotide
ugucagguuacugcuccac

SEQ ID NO: 923060 - RNA, 19 nt, Artificial Sequence
  Description of Artificial Sequence: Synthetic oligonucleotide
augacggagacaaccaaaa

SEQ ID NO: 923061 - RNA, 19 nt, Artificial Sequence
  Description of Artificial Sequence: Synthetic oligonucleotide
ccgaugguagguuuggaug

SEQ ID NO: 923062 - RNA, 19 nt, Artificial Sequence
  Description of Artificial Sequence: Synthetic oligonucleotide
cgccauaccuguaugauug

SEQ ID NO: 923063 - RNA, 19 nt, Artificial Sequence
  Description of Artificial Sequence: Synthetic oligonucleotide
cagcggaaaugugauaaac

SEQ ID NO: 923064 - RNA, 19 nt, Artificial Sequence
  Description of Artificial Sequence: Synthetic oligonucleotide
gggaaagucuuuaaucuuc

SEQ ID NO: 923065 - RNA, 19 nt, Artificial Sequence
  Description of Artificial Sequence: Synthetic oligonucleotide
uuccccaauauuagcuguu

SEQ ID NO: 923066 - RNA, 19 nt, Artificial Sequence
  Description of Artificial Sequence: Synthetic oligonucleotide
cauacucuccccacauaca

SEQ ID NO: 923067 - RNA, 19 nt, Artificial Sequence
  Description of Artificial Sequence: Synthetic oligonucleotide
gguuauaggaccccuuucu

SEQ ID NO: 923068 - RNA, 19 nt, Artificial Sequence
  Description of Artificial Sequence: Synthetic oligonucleotide
uguguccaggaugcuagac

SEQ ID NO: 923069 - RNA, 19 nt, Artificial Sequence
  Description of Artificial Sequence: Synthetic oligonucleotide
acggauaccccgaagccgu

SEQ ID NO: 923070 - RNA, 19 nt, Artificial Sequence
  Description of Artificial Sequence: Synthetic oligonucleotide
accccuuucuggugagcuc

SEQ ID NO: 923071 - RNA, 19 nt, Artificial Sequence
  Description of Artificial Sequence: Synthetic oligonucleotide
ucgguucagguaccaggga

SEQ ID NO: 923072 - RNA, 19 nt, Artificial Sequence
  Description of Artificial Sequence: Synthetic oligonucleotide
uccaaacgagcugacugaa

SEQ ID NO: 923073 - RNA, 19 nt, Artificial Sequence
  Description of Artificial Sequence: Synthetic oligonucleotide
ggcugagcccacgugaggg

SEQ ID NO: 923074 - RNA, 19 nt, Artificial Sequence
  Description of Artificial Sequence: Synthetic oligonucleotide
gcggaaaugugauaaacgu

SEQ ID NO: 923075 - RNA, 19 nt, Artificial Sequence
  Description of Artificial Sequence: Synthetic oligonucleotide
ucccgccauaccuguauga

SEQ ID NO: 923076 - RNA, 19 nt, Artificial Sequence
  Description of Artificial Sequence: Synthetic oligonucleotide
augggaaggaagagucguc

SEQ ID NO: 923077 - RNA, 19 nt, Artificial Sequence
  Description of Artificial Sequence: Synthetic oligonucleotide
auaaacguuuaaaggcaaa

SEQ ID NO: 923078 - RNA, 19 nt, Artificial Sequence
  Description of Artificial Sequence: Synthetic oligonucleotide
gcagguaaugacgagaugu

SEQ ID NO: 923079 - RNA, 19 nt, Artificial Sequence
  Description of Artificial Sequence: Synthetic oligonucleotide
guggccgaggaagccaacg

SEQ ID NO: 923080 - RNA, 19 nt, Artificial Sequence
  Description of Artificial Sequence: Synthetic oligonucleotide
aagcggggaaagucuuuaa

SEQ ID NO: 923081 - RNA, 19 nt, Artificial Sequence
  Description of Artificial Sequence: Synthetic oligonucleotide
acagcggaaaugugauaaa

SEQ ID NO: 923082 - RNA, 19 nt, Artificial Sequence
  Description of Artificial Sequence: Synthetic oligonucleotide
gucuggacgaaccuuuacu

SEQ ID NO: 923083 - RNA, 19 nt, Artificial Sequence
  Description of Artificial Sequence: Synthetic oligonucleotide
ccauauguuacucgguuca

SEQ ID NO: 923084 - RNA, 19 nt, Artificial Sequence
  Description of Artificial Sequence: Synthetic oligonucleotide
ggcugauuuccaaacgagc

SEQ ID NO: 923085 - RNA, 19 nt, Artificial Sequence
  Description of Artificial Sequence: Synthetic oligonucleotide
aaaagucggggaagacaga

SEQ ID NO: 923086 - RNA, 19 nt, Artificial Sequence
  Description of Artificial Sequence: Synthetic oligonucleotide
cacgugagggcccggucag

SEQ ID NO: 923087 - RNA, 19 nt, Artificial Sequence
  Description of Artificial Sequence: Synthetic oligonucleotide
auuuauaguuaggguguaa

SEQ ID NO: 923088 - RNA, 19 nt, Artificial Sequence
  Description of Artificial Sequence: Synthetic oligonucleotide
acaguagccuacacugaug

SEQ ID NO: 923089 - RNA, 19 nt, Artificial Sequence
  Description of Artificial Sequence: Synthetic oligonucleotide
guuaggaaacucguuacau

SEQ ID NO: 923090 - RNA, 19 nt, Artificial Sequence
  Description of Artificial Sequence: Synthetic oligonucleotide
ggcgagcucccucagagca

SEQ ID NO: 923091 - RNA, 19 nt, Artificial Sequence
  Description of Artificial Sequence: Synthetic oligonucleotide
auguuacucgguucaggua

SEQ ID NO: 923092 - RNA, 19 nt, Artificial Sequence
  Description of Artificial Sequence: Synthetic oligonucleotide
agguaaugacgagauguau

SEQ ID NO: 923093 - RNA, 19 nt, Artificial Sequence
  Description of Artificial Sequence: Synthetic oligonucleotide
ggguguaauuuucuacuga

SEQ ID NO: 923094 - RNA, 19 nt, Artificial Sequence
  Description of Artificial Sequence: Synthetic oligonucleotide
gucagguuacugcuccaca

SEQ ID NO: 923095 - RNA, 19 nt, Artificial Sequence
  Description of Artificial Sequence: Synthetic oligonucleotide
gaagagucguccaccaggu

SEQ ID NO: 923096 - RNA, 19 nt, Artificial Sequence
  Description of Artificial Sequence: Synthetic oligonucleotide
ggccacaccgccguggccg

SEQ ID NO: 923097 - RNA, 19 nt, Artificial Sequence
  Description of Artificial Sequence: Synthetic oligonucleotide
uacucgguucagguaccag

SEQ ID NO: 923098 - RNA, 19 nt, Artificial Sequence
  Description of Artificial Sequence: Synthetic oligonucleotide
cagguaaugacgagaugua

SEQ ID NO: 923099 - RNA, 19 nt, Artificial Sequence
  Description of Artificial Sequence: Synthetic oligonucleotide
ggccucgucaaggacgacg

SEQ ID NO: 923100 - RNA, 19 nt, Artificial Sequence
  Description of Artificial Sequence: Synthetic oligonucleotide
gaagcggggaaagucuuua

SEQ ID NO: 923101 - RNA, 19 nt, Artificial Sequence
  Description of Artificial Sequence: Synthetic oligonucleotide
gagguaccaugaaaugcca

SEQ ID NO: 923102 - RNA, 19 nt, Artificial Sequence
  Description of Artificial Sequence: Synthetic oligonucleotide
gcaggugaagucaacuuca

SEQ ID NO: 923103 - RNA, 19 nt, Artificial Sequence
  Description of Artificial Sequence: Synthetic oligonucleotide
cagcaauaugccccgguga

SEQ ID NO: 923104 - RNA, 19 nt, Artificial Sequence
  Description of Artificial Sequence: Synthetic oligonucleotide
caagucugcucaaauuccu

SEQ ID NO: 923105 - RNA, 19 nt, Artificial Sequence
  Description of Artificial Sequence: Synthetic oligonucleotide
uuacucgguucagguacca

SEQ ID NO: 923106 - RNA, 19 nt, Artificial Sequence
  Description of Artificial Sequence: Synthetic oligonucleotide
guaccggaacuggaaguug

SEQ ID NO: 923107 - RNA, 19 nt, Artificial Sequence
  Description of Artificial Sequence: Synthetic oligonucleotide
gguaacgucgaaaggccuc

SEQ ID NO: 923108 - RNA, 19 nt, Artificial Sequence
  Description of Artificial Sequence: Synthetic oligonucleotide
auucagcugugaugacgga

SEQ ID NO: 923109 - RNA, 19 nt, Artificial Sequence
  Description of Artificial Sequence: Synthetic oligonucleotide
ggcggcaugguaccggaac

SEQ ID NO: 923110 - RNA, 19 nt, Artificial Sequence
  Description of Artificial Sequence: Synthetic oligonucleotide
ugagugcaccccagacagu

SEQ ID NO: 923111 - RNA, 19 nt, Artificial Sequence
  Description of Artificial Sequence: Synthetic oligonucleotide
gaggcggcaugguaccgga

SEQ ID NO: 923112 - RNA, 19 nt, Artificial Sequence
  Description of Artificial Sequence: Synthetic oligonucleotide
uucccucggcugauuucca

SEQ ID NO: 923113 - RNA, 19 nt, Artificial Sequence
  Description of Artificial Sequence: Synthetic oligonucleotide
gccauauguuacucgguuc

SEQ ID NO: 923114 - RNA, 19 nt, Artificial Sequence
  Description of Artificial Sequence: Synthetic oligonucleotide
cuuccccaauauuagcugu

SEQ ID NO: 923115 - RNA, 19 nt, Artificial Sequence
  Description of Artificial Sequence: Synthetic oligonucleotide
ucacagcggaaaugugaua

SEQ ID NO: 923116 - RNA, 19 nt, Artificial Sequence
  Description of Artificial Sequence: Synthetic oligonucleotide
aggacgacgcagcccgccu

SEQ ID NO: 923117 - RNA, 19 nt, Artificial Sequence
  Description of Artificial Sequence: Synthetic oligonucleotide
gcaggcugagcccacguga

SEQ ID NO: 923118 - RNA, 19 nt, Artificial Sequence
  Description of Artificial Sequence: Synthetic oligonucleotide
gcaauaugccccggugagg

SEQ ID NO: 923119 - RNA, 19 nt, Artificial Sequence
  Description of Artificial Sequence: Synthetic oligonucleotide
ccagcaauaugccccggug

SEQ ID NO: 923120 - RNA, 19 nt, Artificial Sequence
  Description of Artificial Sequence: Synthetic oligonucleotide
cuguagucacaggggcacg

SEQ ID NO: 923121 - RNA, 19 nt, Artificial Sequence
  Description of Artificial Sequence: Synthetic oligonucleotide
gagcagguuacgguaacgu

SEQ ID NO: 923122 - RNA, 19 nt, Artificial Sequence
  Description of Artificial Sequence: Synthetic oligonucleotide
agccuacacugaugggcug

SEQ ID NO: 923123 - RNA, 19 nt, Artificial Sequence
  Description of Artificial Sequence: Synthetic oligonucleotide
auguucccucggcugauuu

SEQ ID NO: 923124 - RNA, 19 nt, Artificial Sequence
  Description of Artificial Sequence: Synthetic oligonucleotide
ggacgagagccagaguagc

SEQ ID NO: 923125 - RNA, 19 nt, Artificial Sequence
  Description of Artificial Sequence: Synthetic oligonucleotide
gaugugggugacaggguua

SEQ ID NO: 923126 - RNA, 19 nt, Artificial Sequence
  Description of Artificial Sequence: Synthetic oligonucleotide
accccgaagccgugcauau

SEQ ID NO: 923127 - RNA, 19 nt, Artificial Sequence
  Description of Artificial Sequence: Synthetic oligonucleotide
acaggguguagcgccgaug

SEQ ID NO: 923128 - RNA, 19 nt, Artificial Sequence
  Description of Artificial Sequence: Synthetic oligonucleotide
agaguagcaaggaguuaau

SEQ ID NO: 923129 - RNA, 19 nt, Artificial Sequence
  Description of Artificial Sequence: Synthetic oligonucleotide
gagcccacgugagggcccg

SEQ ID NO: 923130 - RNA, 19 nt, Artificial Sequence
  Description of Artificial Sequence: Synthetic oligonucleotide
gccuacacugaugggcugg

SEQ ID NO: 923131 - RNA, 19 nt, Artificial Sequence
  Description of Artificial Sequence: Synthetic oligonucleotide
ggguuauaggaccccuuuc

SEQ ID NO: 923132 - RNA, 19 nt, Artificial Sequence
  Description of Artificial Sequence: Synthetic oligonucleotide
aauguucccucggcugauu

SEQ ID NO: 923133 - RNA, 19 nt, Artificial Sequence
  Description of Artificial Sequence: Synthetic oligonucleotide
gaagccgugcauauucaau

SEQ ID NO: 923134 - RNA, 19 nt, Artificial Sequence
  Description of Artificial Sequence: Synthetic oligonucleotide
uaccccgaagccgugcaua

SEQ ID NO: 923135 - RNA, 19 nt, Artificial Sequence
  Description of Artificial Sequence: Synthetic oligonucleotide
ggggcucuaucccauggca

SEQ ID NO: 923136 - RNA, 19 nt, Artificial Sequence
  Description of Artificial Sequence: Synthetic oligonucleotide
gccucgucaaggacgacgc

SEQ ID NO: 923137 - RNA, 19 nt, Artificial Sequence
  Description of Artificial Sequence: Synthetic oligonucleotide
ggcaaggggcucuauccca

SEQ ID NO: 923138 - RNA, 19 nt, Artificial Sequence
  Description of Artificial Sequence: Synthetic oligonucleotide
gcaucucacagcggaaaug

SEQ ID NO: 923139 - RNA, 19 nt, Artificial Sequence
  Description of Artificial Sequence: Synthetic oligonucleotide
ccggcgagcucccucagag

SEQ ID NO: 923140 - RNA, 19 nt, Artificial Sequence
  Description of Artificial Sequence: Synthetic oligonucleotide
gggaaggaagagucgucca

SEQ ID NO: 923141 - RNA, 19 nt, Artificial Sequence
  Description of Artificial Sequence: Synthetic oligonucleotide
ucccucggcugauuuccaa

SEQ ID NO: 923142 - RNA, 19 nt, Artificial Sequence
  Description of Artificial Sequence: Synthetic oligonucleotide
gccgugcauauucaauaac

SEQ ID NO: 923143 - RNA, 19 nt, Artificial Sequence
  Description of Artificial Sequence: Synthetic oligonucleotide
ucguuacauucagcuguga

SEQ ID NO: 923144 - RNA, 19 nt, Artificial Sequence
  Description of Artificial Sequence: Synthetic oligonucleotide
agcgccgaugguagguuug

SEQ ID NO: 923145 - RNA, 19 nt, Artificial Sequence
  Description of Artificial Sequence: Synthetic oligonucleotide
cacaguagccuacacugau

SEQ ID NO: 923146 - RNA, 19 nt, Artificial Sequence
  Description of Artificial Sequence: Synthetic oligonucleotide
ucuucccgccauaccugua

SEQ ID NO: 923147 - RNA, 19 nt, Artificial Sequence
  Description of Artificial Sequence: Synthetic oligonucleotide
cucggcaauagcaccggcu

SEQ ID NO: 923148 - RNA, 19 nt, Artificial Sequence
  Description of Artificial Sequence: Synthetic oligonucleotide
guggaacacguugaauuua

SEQ ID NO: 923149 - RNA, 19 nt, Artificial Sequence
  Description of Artificial Sequence: Synthetic oligonucleotide
aggguguagcgccgauggu

SEQ ID NO: 923150 - RNA, 19 nt, Artificial Sequence
  Description of Artificial Sequence: Synthetic oligonucleotide
gagauguauccagcaauau

SEQ ID NO: 923151 - RNA, 19 nt, Artificial Sequence
  Description of Artificial Sequence: Synthetic oligonucleotide
augccccggugagggaagc

SEQ ID NO: 923152 - RNA, 19 nt, Artificial Sequence
  Description of Artificial Sequence: Synthetic oligonucleotide
gaccccuuucuggugagcu

SEQ ID NO: 923153 - RNA, 19 nt, Artificial Sequence
  Description of Artificial Sequence: Synthetic oligonucleotide
cauuuauaguuagggugua

SEQ ID NO: 923154 - RNA, 19 nt, Artificial Sequence
  Description of Artificial Sequence: Synthetic oligonucleotide
gguuacgguaacgucgaaa

SEQ ID NO: 923155 - RNA, 19 nt, Artificial Sequence
  Description of Artificial Sequence: Synthetic oligonucleotide
gccucgauauugggguugg

SEQ ID NO: 923156 - RNA, 19 nt, Artificial Sequence
  Description of Artificial Sequence: Synthetic oligonucleotide
caaggacgacgcagcccgc

SEQ ID NO: 923157 - RNA, 19 nt, Artificial Sequence
  Description of Artificial Sequence: Synthetic oligonucleotide
gccgaggcggcaugguacc

SEQ ID NO: 923158 - RNA, 19 nt, Artificial Sequence
  Description of Artificial Sequence: Synthetic oligonucleotide
auaccccgaagccgugcau

SEQ ID NO: 923159 - RNA, 19 nt, Artificial Sequence
  Description of Artificial Sequence: Synthetic oligonucleotide
uaacgucgaaaggccucgu

SEQ ID NO: 923160 - RNA, 19 nt, Artificial Sequence
  Description of Artificial Sequence: Synthetic oligonucleotide
gguuggaucuccagcaggu

SEQ ID NO: 923161 - RNA, 19 nt, Artificial Sequence
  Description of Artificial Sequence: Synthetic oligonucleotide
uagcgccgaugguagguuu

SEQ ID NO: 923162 - RNA, 19 nt, Artificial Sequence
  Description of Artificial Sequence: Synthetic oligonucleotide
cucgauauugggguuggau

SEQ ID NO: 923163 - RNA, 19 nt, Artificial Sequence
  Description of Artificial Sequence: Synthetic oligonucleotide
ccauaccuguaugauugug

SEQ ID NO: 923164 - RNA, 19 nt, Artificial Sequence
  Description of Artificial Sequence: Synthetic oligonucleotide
cuggacgaaccuuuacuuu

SEQ ID NO: 923165 - RNA, 19 nt, Artificial Sequence
  Description of Artificial Sequence: Synthetic oligonucleotide
ccccggugagggaagcggg

SEQ ID NO: 923166 - RNA, 19 nt, Artificial Sequence
  Description of Artificial Sequence: Synthetic oligonucleotide
agccggaaccgaagagcag

SEQ ID NO: 923167 - RNA, 19 nt, Artificial Sequence
  Description of Artificial Sequence: Synthetic oligonucleotide
gcacacggauaccccgaag

SEQ ID NO: 923168 - RNA, 19 nt, Artificial Sequence
  Description of Artificial Sequence: Synthetic oligonucleotide
accggcgagcucccucaga

SEQ ID NO: 923169 - RNA, 19 nt, Artificial Sequence
  Description of Artificial Sequence: Synthetic oligonucleotide
cucuaucccauggcaggga

SEQ ID NO: 923170 - RNA, 19 nt, Artificial Sequence
  Description of Artificial Sequence: Synthetic oligonucleotide
cuucccgccauaccuguau

SEQ ID NO: 923171 - RNA, 19 nt, Artificial Sequence
  Description of Artificial Sequence: Synthetic oligonucleotide
ccgugacuguucucuuagg

SEQ ID NO: 923172 - RNA, 19 nt, Artificial Sequence
  Description of Artificial Sequence: Synthetic oligonucleotide
ggguguagcgccgauggua

SEQ ID NO: 923173 - RNA, 19 nt, Artificial Sequence
  Description of Artificial Sequence: Synthetic oligonucleotide
agacgauguccagcagcgu

SEQ ID NO: 923174 - RNA, 19 nt, Artificial Sequence
  Description of Artificial Sequence: Synthetic oligonucleotide
aggccucgauauugggguu

SEQ ID NO: 923175 - RNA, 19 nt, Artificial Sequence
  Description of Artificial Sequence: Synthetic oligonucleotide
gcgccgaugguagguuugg

SEQ ID NO: 923176 - RNA, 19 nt, Artificial Sequence
  Description of Artificial Sequence: Synthetic oligonucleotide
ccaugaaaugccaggggcu

SEQ ID NO: 923177 - RNA, 19 nt, Artificial Sequence
  Description of Artificial Sequence: Synthetic oligonucleotide
gccaguggaacacguugaa

SEQ ID NO: 923178 - RNA, 19 nt, Artificial Sequence
  Description of Artificial Sequence: Synthetic oligonucleotide
cuguucucuuagggccagc

SEQ ID NO: 923179 - RNA, 19 nt, Artificial Sequence
  Description of Artificial Sequence: Synthetic oligonucleotide
gacgaaccuuuacuuuauu

SEQ ID NO: 923180 - RNA, 19 nt, Artificial Sequence
  Description of Artificial Sequence: Synthetic oligonucleotide
gaauguucccucggcugau

SEQ ID NO: 923181 - RNA, 19 nt, Artificial Sequence
  Description of Artificial Sequence: Synthetic oligonucleotide
agguuacgguaacgucgaa

SEQ ID NO: 923182 - RNA, 19 nt, Artificial Sequence
  Description of Artificial Sequence: Synthetic oligonucleotide
accggaacuggaaguuguu

SEQ ID NO: 923183 - RNA, 19 nt, Artificial Sequence
  Description of Artificial Sequence: Synthetic oligonucleotide
gguuugugcuguccacaua

SEQ ID NO: 923184 - RNA, 19 nt, Artificial Sequence
  Description of Artificial Sequence: Synthetic oligonucleotide
gguaccggaacuggaaguu

SEQ ID NO: 923185 - RNA, 19 nt, Artificial Sequence
  Description of Artificial Sequence: Synthetic oligonucleotide
ccgaagagcagguuacggu

SEQ ID NO: 923186 - RNA, 19 nt, Artificial Sequence
  Description of Artificial Sequence: Synthetic oligonucleotide
ccacgugagggcccgguca

SEQ ID NO: 923187 - RNA, 19 nt, Artificial Sequence
  Description of Artificial Sequence: Synthetic oligonucleotide
gccgaugguagguuuggau

SEQ ID NO: 923188 - RNA, 19 nt, Artificial Sequence
  Description of Artificial Sequence: Synthetic oligonucleotide
gcgucuggauguagaagga

SEQ ID NO: 923189 - RNA, 19 nt, Artificial Sequence
  Description of Artificial Sequence: Synthetic oligonucleotide
caccggcgagcucccucag

SEQ ID NO: 923190 - RNA, 19 nt, Artificial Sequence
  Description of Artificial Sequence: Synthetic oligonucleotide
ggccccgugacuguucucu

SEQ ID NO: 923191 - RNA, 19 nt, Artificial Sequence
  Description of Artificial Sequence: Synthetic oligonucleotide
ccaaacgagcugacugaaa

SEQ ID NO: 923192 - RNA, 19 nt, Artificial Sequence
  Description of Artificial Sequence: Synthetic oligonucleotide
aggccucgucaaggacgac

SEQ ID NO: 923193 - RNA, 19 nt, Artificial Sequence
  Description of Artificial Sequence: Synthetic oligonucleotide
gagggacgagagccagagu

SEQ ID NO: 923194 - RNA, 19 nt, Artificial Sequence
  Description of Artificial Sequence: Synthetic oligonucleotide
uggccccgugacuguucuc

SEQ ID NO: 923195 - RNA, 19 nt, Artificial Sequence
  Description of Artificial Sequence: Synthetic oligonucleotide
ggacgaaccuuuacuuuau

SEQ ID NO: 923196 - RNA, 19 nt, Artificial Sequence
  Description of Artificial Sequence: Synthetic oligonucleotide
caggguuauaggaccccuu

SEQ ID NO: 923197 - RNA, 19 nt, Artificial Sequence
  Description of Artificial Sequence: Synthetic oligonucleotide
ggaccagguuugugcuguc

SEQ ID NO: 923198 - RNA, 19 nt, Artificial Sequence
  Description of Artificial Sequence: Synthetic oligonucleotide
acccuucuguucagaggua

SEQ ID NO: 923199 - RNA, 19 nt, Artificial Sequence
  Description of Artificial Sequence: Synthetic oligonucleotide
gccugccauggcccaccgg

SEQ ID NO: 923200 - RNA, 19 nt, Artificial Sequence
  Description of Artificial Sequence: Synthetic oligonucleotide
ggaccccuuucuggugagc

SEQ ID NO: 923201 - RNA, 19 nt, Artificial Sequence
  Description of Artificial Sequence: Synthetic oligonucleotide
ccaaaacguucuuccccaa

SEQ ID NO: 923202 - RNA, 19 nt, Artificial Sequence
  Description of Artificial Sequence: Synthetic oligonucleotide
guagcgccgaugguagguu

SEQ ID NO: 923203 - RNA, 19 nt, Artificial Sequence
  Description of Artificial Sequence: Synthetic oligonucleotide
ccauauuaguugucagguu

SEQ ID NO: 923204 - RNA, 19 nt, Artificial Sequence
  Description of Artificial Sequence: Synthetic oligonucleotide
cggaaaugugauaaacguu

SEQ ID NO: 923205 - RNA, 19 nt, Artificial Sequence
  Description of Artificial Sequence: Synthetic oligonucleotide
cgaagccgugcauauucaa

SEQ ID NO: 923206 - RNA, 19 nt, Artificial Sequence
  Description of Artificial Sequence: Synthetic oligonucleotide
cuccaaugaccagacccuu

SEQ ID NO: 923207 - RNA, 19 nt, Artificial Sequence
  Description of Artificial Sequence: Synthetic oligonucleotide
agcccacgugagggcccgg

SEQ ID NO: 923208 - RNA, 19 nt, Artificial Sequence
  Description of Artificial Sequence: Synthetic oligonucleotide
cccacgugagggcccgguc

SEQ ID NO: 923209 - RNA, 19 nt, Artificial Sequence
  Description of Artificial Sequence: Synthetic oligonucleotide
acgugggcaaggggcucua

SEQ ID NO: 923210 - RNA, 19 nt, Artificial Sequence
  Description of Artificial Sequence: Synthetic oligonucleotide
ccgaggcggcaugguaccg

SEQ ID NO: 923211 - RNA, 19 nt, Artificial Sequence
  Description of Artificial Sequence: Synthetic oligonucleotide
cggcgagcucccucagagc

SEQ ID NO: 923212 - RNA, 19 nt, Artificial Sequence
  Description of Artificial Sequence: Synthetic oligonucleotide
gggccauauguuacucggu

SEQ ID NO: 923213 - RNA, 19 nt, Artificial Sequence
  Description of Artificial Sequence: Synthetic oligonucleotide
ccucccaggugaagauaaa

SEQ ID NO: 923214 - RNA, 19 nt, Artificial Sequence
  Description of Artificial Sequence: Synthetic oligonucleotide
ggaacacguugaauuuauu

SEQ ID NO: 923215 - RNA, 19 nt, Artificial Sequence
  Description of Artificial Sequence: Synthetic oligonucleotide
ccggaaccgaagagcaggu

SEQ ID NO: 923216 - RNA, 19 nt, Artificial Sequence
  Description of Artificial Sequence: Synthetic oligonucleotide
aggcggcaugguaccggaa

SEQ ID NO: 923217 - RNA, 19 nt, Artificial Sequence
  Description of Artificial Sequence: Synthetic oligonucleotide
ccagaguagcaaggaguua

SEQ ID NO: 923218 - RNA, 19 nt, Artificial Sequence
  Description of Artificial Sequence: Synthetic oligonucleotide
ccccgugacuguucucuua

SEQ ID NO: 923219 - RNA, 19 nt, Artificial Sequence
  Description of Artificial Sequence: Synthetic oligonucleotide
ggcccaccggcgagcuccc

SEQ ID NO: 923220 - RNA, 19 nt, Artificial Sequence
  Description of Artificial Sequence: Synthetic oligonucleotide
cccgccauaccuguaugau

SEQ ID NO: 923221 - RNA, 19 nt, Artificial Sequence
  Description of Artificial Sequence: Synthetic oligonucleotide
ccgccauaccuguaugauu

SEQ ID NO: 923222 - RNA, 19 nt, Artificial Sequence
  Description of Artificial Sequence: Synthetic oligonucleotide
cgguaacgucgaaaggccu

SEQ ID NO: 923223 - RNA, 19 nt, Artificial Sequence
  Description of Artificial Sequence: Synthetic oligonucleotide
caccgccguggccgaggaa

SEQ ID NO: 923224 - RNA, 19 nt, Artificial Sequence
  Description of Artificial Sequence: Synthetic oligonucleotide
ccucgauauugggguugga

SEQ ID NO: 923225 - RNA, 19 nt, Artificial Sequence
  Description of Artificial Sequence: Synthetic oligonucleotide
gcccacgugagggcccggu

SEQ ID NO: 923226 - RNA, 19 nt, Artificial Sequence
  Description of Artificial Sequence: Synthetic oligonucleotide
cgccgaugguagguuugga

SEQ ID NO: 923227 - RNA, 19 nt, Artificial Sequence
  Description of Artificial Sequence: Synthetic oligonucleotide
gcggccgaggcggcauggu

SEQ ID NO: 923228 - RNA, 19 nt, Artificial Sequence
  Description of Artificial Sequence: Synthetic oligonucleotide
ccccgaagccgugcauauu

SEQ ID NO: 923229 - RNA, 19 nt, Artificial Sequence
  Description of Artificial Sequence: Synthetic oligonucleotide
aaauaauucucccuuagag

SEQ ID NO: 923230 - RNA, 19 nt, Artificial Sequence
  Description of Artificial Sequence: Synthetic oligonucleotide
aauuauaccagccauugga

SEQ ID NO: 923231 - RNA, 19 nt, Artificial Sequence
  Description of Artificial Sequence: Synthetic oligonucleotide
aaugccucaaggcauacuc

SEQ ID NO: 923232 - RNA, 19 nt, Artificial Sequence
  Description of Artificial Sequence: Synthetic oligonucleotide
guagagauagauuuguucc

SEQ ID NO: 923233 - RNA, 19 nt, Artificial Sequence
  Description of Artificial Sequence: Synthetic oligonucleotide
aaugucgucguacaucauc

SEQ ID NO: 923234 - RNA, 19 nt, Artificial Sequence
  Description of Artificial Sequence: Synthetic oligonucleotide
uauucaguagugacuaagg

SEQ ID NO: 923235 - RNA, 19 nt, Artificial Sequence
  Description of Artificial Sequence: Synthetic oligonucleotide
uacacauuccaauggaccg

SEQ ID NO: 923236 - RNA, 19 nt, Artificial Sequence
  Description of Artificial Sequence: Synthetic oligonucleotide
acuuucaugguagagauag

SEQ ID NO: 923237 - RNA, 19 nt, Artificial Sequence
  Description of Artificial Sequence: Synthetic oligonucleotide
ucuuccauccaauugacac

SEQ ID NO: 923238 - RNA, 19 nt, Artificial Sequence
  Description of Artificial Sequence: Synthetic oligonucleotide
acacaagaaguccaguagc

SEQ ID NO: 923239 - RNA, 19 nt, Artificial Sequence
  Description of Artificial Sequence: Synthetic oligonucleotide
ucuuuauccugucaaucgg

SEQ ID NO: 923240 - RNA, 19 nt, Artificial Sequence
  Description of Artificial Sequence: Synthetic oligonucleotide
aguuaaagcagugugugcg

SEQ ID NO: 923241 - RNA, 19 nt, Artificial Sequence
  Description of Artificial Sequence: Synthetic oligonucleotide
ucguacaucaucacuauga

SEQ ID NO: 923242 - RNA, 19 nt, Artificial Sequence
  Description of Artificial Sequence: Synthetic oligonucleotide
acuaaggcacaccuugucc

SEQ ID NO: 923243 - RNA, 19 nt, Artificial Sequence
  Description of Artificial Sequence: Synthetic oligonucleotide
ucauacauguagcgaaugg

SEQ ID NO: 923244 - RNA, 19 nt, Artificial Sequence
  Description of Artificial Sequence: Synthetic oligonucleotide
aaugacgugccuggcaucc

SEQ ID NO: 923245 - RNA, 19 nt, Artificial Sequence
  Description of Artificial Sequence: Synthetic oligonucleotide
uguaccauuaggucgguug

SEQ ID NO: 923246 - RNA, 19 nt, Artificial Sequence
  Description of Artificial Sequence: Synthetic oligonucleotide
uauccugucaaucggauau

SEQ ID NO: 923247 - RNA, 19 nt, Artificial Sequence
  Description of Artificial Sequence: Synthetic oligonucleotide
uucucaaugacgugccugg

SEQ ID NO: 923248 - RNA, 19 nt, Artificial Sequence
  Description of Artificial Sequence: Synthetic oligonucleotide
uucaguagugacuaaggca

SEQ ID NO: 923249 - RNA, 19 nt, Artificial Sequence
  Description of Artificial Sequence: Synthetic oligonucleotide
uccuaaacagcaaaaguuc

SEQ ID NO: 923250 - RNA, 19 nt, Artificial Sequence
  Description of Artificial Sequence: Synthetic oligonucleotide
uccuuugcccuucacagcc

SEQ ID NO: 923251 - RNA, 19 nt, Artificial Sequence
  Description of Artificial Sequence: Synthetic oligonucleotide
ucuuagugggucaguaucc

SEQ ID NO: 923252 - RNA, 19 nt, Artificial Sequence
  Description of Artificial Sequence: Synthetic oligonucleotide
ugcgucaccucucaacacg

SEQ ID NO: 923253 - RNA, 19 nt, Artificial Sequence
  Description of Artificial Sequence: Synthetic oligonucleotide
uagcgaauggucuuguuca

SEQ ID NO: 923254 - RNA, 19 nt, Artificial Sequence
  Description of Artificial Sequence: Synthetic oligonucleotide
auuccaauggaccguguuc

SEQ ID NO: 923255 - RNA, 19 nt, Artificial Sequence
  Description of Artificial Sequence: Synthetic oligonucleotide
uaauuauaccagccauugg

SEQ ID NO: 923256 - RNA, 19 nt, Artificial Sequence
  Description of Artificial Sequence: Synthetic oligonucleotide
accguguucacucuuccgg

SEQ ID NO: 923257 - RNA, 19 nt, Artificial Sequence
  Description of Artificial Sequence: Synthetic oligonucleotide
cauuagggaacacaagaag

SEQ ID NO: 923258 - RNA, 19 nt, Artificial Sequence
  Description of Artificial Sequence: Synthetic oligonucleotide
gagacgaucuuaugcacag

SEQ ID NO: 923259 - RNA, 19 nt, Artificial Sequence
  Description of Artificial Sequence: Synthetic oligonucleotide
uucuuagugggucaguauc

SEQ ID NO: 923260 - RNA, 19 nt, Artificial Sequence
  Description of Artificial Sequence: Synthetic oligonucleotide
aacuccuaaacagcaaaag

SEQ ID NO: 923261 - RNA, 19 nt, Artificial Sequence
  Description of Artificial Sequence: Synthetic oligonucleotide
ucugcgucaccucucaaca

SEQ ID NO: 923262 - RNA, 19 nt, Artificial Sequence
  Description of Artificial Sequence: Synthetic oligonucleotide
aguugcauaaacauugaug

SEQ ID NO: 923263 - RNA, 19 nt, Artificial Sequence
  Description of Artificial Sequence: Synthetic oligonucleotide
ugggauuucaccagguggu

SEQ ID NO: 923264 - RNA, 19 nt, Artificial Sequence
  Description of Artificial Sequence: Synthetic oligonucleotide
uacauguagcgaauggucu

SEQ ID NO: 923265 - RNA, 19 nt, Artificial Sequence
  Description of Artificial Sequence: Synthetic oligonucleotide
gagucuuccauccaauuga

SEQ ID NO: 923266 - RNA, 19 nt, Artificial Sequence
  Description of Artificial Sequence: Synthetic oligonucleotide
gaaccggcuucuuaguggg

SEQ ID NO: 923267 - RNA, 19 nt, Artificial Sequence
  Description of Artificial Sequence: Synthetic oligonucleotide
acuaugaucugcucaucag

SEQ ID NO: 923268 - RNA, 19 nt, Artificial Sequence
  Description of Artificial Sequence: Synthetic oligonucleotide
uggagcgucucuuugguca

SEQ ID NO: 923269 - RNA, 19 nt, Artificial Sequence
  Description of Artificial Sequence: Synthetic oligonucleotide
caugacauggcuaguguug

SEQ ID NO: 923270 - RNA, 19 nt, Artificial Sequence
  Description of Artificial Sequence: Synthetic oligonucleotide
augaagguccucauuaggg

SEQ ID NO: 923271 - RNA, 19 nt, Artificial Sequence
  Description of Artificial Sequence: Synthetic oligonucleotide
ucggauauggcuucucaca

SEQ ID NO: 923272 - RNA, 19 nt, Artificial Sequence
  Description of Artificial Sequence: Synthetic oligonucleotide
agagcuuugccacccgaac

SEQ ID NO: 923273 - RNA, 19 nt, Artificial Sequence
  Description of Artificial Sequence: Synthetic oligonucleotide
auacauguagcgaaugguc

SEQ ID NO: 923274 - RNA, 19 nt, Artificial Sequence
  Description of Artificial Sequence: Synthetic oligonucleotide
cacuguaccagucacccag

SEQ ID NO: 923275 - RNA, 19 nt, Artificial Sequence
  Description of Artificial Sequence: Synthetic oligonucleotide
aaucggauauggcuucuca

SEQ ID NO: 923276 - RNA, 19 nt, Artificial Sequence
  Description of Artificial Sequence: Synthetic oligonucleotide
aucggauauggcuucucac

SEQ ID NO: 923277 - RNA, 19 nt, Artificial Sequence
  Description of Artificial Sequence: Synthetic oligonucleotide
auaguagcaggcguaagag

SEQ ID NO: 923278 - RNA, 19 nt, Artificial Sequence
  Description of Artificial Sequence: Synthetic oligonucleotide
uuaugcacagacuucucaa

SEQ ID NO: 923279 - RNA, 19 nt, Artificial Sequence
  Description of Artificial Sequence: Synthetic oligonucleotide
ucaaugacgugccuggcau

SEQ ID NO: 923280 - RNA, 19 nt, Artificial Sequence
  Description of Artificial Sequence: Synthetic oligonucleotide
ugucaaucggauauggcuu

SEQ ID NO: 923281 - RNA, 19 nt, Artificial Sequence
  Description of Artificial Sequence: Synthetic oligonucleotide
guuccggugaaugaucugg

SEQ ID NO: 923282 - RNA, 19 nt, Artificial Sequence
  Description of Artificial Sequence: Synthetic oligonucleotide
agggagacgaucuuaugca

SEQ ID NO: 923283 - RNA, 19 nt, Artificial Sequence
  Description of Artificial Sequence: Synthetic oligonucleotide
cacccuuucagucuccagg

SEQ ID NO: 923284 - RNA, 19 nt, Artificial Sequence
  Description of Artificial Sequence: Synthetic oligonucleotide
ucgucguacaucaucacua

SEQ ID NO: 923285 - RNA, 19 nt, Artificial Sequence
  Description of Artificial Sequence: Synthetic oligonucleotide
aggucgguugaucacaaug

SEQ ID NO: 923286 - RNA, 19 nt, Artificial Sequence
  Description of Artificial Sequence: Synthetic oligonucleotide
uccaauugacacuguacca

SEQ ID NO: 923287 - RNA, 19 nt, Artificial Sequence
  Description of Artificial Sequence: Synthetic oligonucleotide
auacccugaaacugcauca

SEQ ID NO: 923288 - RNA, 19 nt, Artificial Sequence
  Description of Artificial Sequence: Synthetic oligonucleotide
aacuccgggaauugcgcag

SEQ ID NO: 923289 - RNA, 19 nt, Artificial Sequence
  Description of Artificial Sequence: Synthetic oligonucleotide
acagacuucucaaugacgu

SEQ ID NO: 923290 - RNA, 19 nt, Artificial Sequence
  Description of Artificial Sequence: Synthetic oligonucleotide
uuguggagcgucucuuugg

SEQ ID NO: 923291 - RNA, 19 nt, Artificial Sequence
  Description of Artificial Sequence: Synthetic oligonucleotide
caagucgcagugaauuugc

SEQ ID NO: 923292 - RNA, 19 nt, Artificial Sequence
  Description of Artificial Sequence: Synthetic oligonucleotide
uccgugaaguaaacaaaca

SEQ ID NO: 923293 - RNA, 19 nt, Artificial Sequence
  Description of Artificial Sequence: Synthetic oligonucleotide
agcgcagcuauucaguagu

SEQ ID NO: 923294 - RNA, 19 nt, Artificial Sequence
  Description of Artificial Sequence: Synthetic oligonucleotide
agucgcagugaauuugcuc

SEQ ID NO: 923295 - RNA, 19 nt, Artificial Sequence
  Description of Artificial Sequence: Synthetic oligonucleotide
uuccaauggaccguguuca

SEQ ID NO: 923296 - RNA, 19 nt, Artificial Sequence
  Description of Artificial Sequence: Synthetic oligonucleotide
guccuugacaugaaggucc

SEQ ID NO: 923297 - RNA, 19 nt, Artificial Sequence
  Description of Artificial Sequence: Synthetic oligonucleotide
caugcaucugccuggugcc

SEQ ID NO: 923298 - RNA, 19 nt, Artificial Sequence
  Description of Artificial Sequence: Synthetic oligonucleotide
caauggaccguguucacuc

SEQ ID NO: 923299 - RNA, 19 nt, Artificial Sequence
  Description of Artificial Sequence: Synthetic oligonucleotide
cauacccugaaacugcauc

SEQ ID NO: 923300 - RNA, 19 nt, Artificial Sequence
  Description of Artificial Sequence: Synthetic oligonucleotide
acggcgaggaaguucuccg

SEQ ID NO: 923301 - RNA, 19 nt, Artificial Sequence
  Description of Artificial Sequence: Synthetic oligonucleotide
uucauacccugaaacugca

SEQ ID NO: 923302 - RNA, 19 nt, Artificial Sequence
  Description of Artificial Sequence: Synthetic oligonucleotide
ucugguaagcguggcaugc

SEQ ID NO: 923303 - RNA, 19 nt, Artificial Sequence
  Description of Artificial Sequence: Synthetic oligonucleotide
caauggcuacacaagucgc

SEQ ID NO: 923304 - RNA, 19 nt, Artificial Sequence
  Description of Artificial Sequence: Synthetic oligonucleotide
ugcaugacauggcuagugu

SEQ ID NO: 923305 - RNA, 19 nt, Artificial Sequence
  Description of Artificial Sequence: Synthetic oligonucleotide
ucgguugaucacaaugccu

SEQ ID NO: 923306 - RNA, 19 nt, Artificial Sequence
  Description of Artificial Sequence: Synthetic oligonucleotide
uguggagcgucucuuuggu

SEQ ID NO: 923307 - RNA, 19 nt, Artificial Sequence
  Description of Artificial Sequence: Synthetic oligonucleotide
uccugucaaucggauaugg

SEQ ID NO: 923308 - RNA, 19 nt, Artificial Sequence
  Description of Artificial Sequence: Synthetic oligonucleotide
uccucaagacuuuucccga

SEQ ID NO: 923309 - RNA, 19 nt, Artificial Sequence
  Description of Artificial Sequence: Synthetic oligonucleotide
guagcgaauggucuuguuc

SEQ ID NO: 923310 - RNA, 19 nt, Artificial Sequence
  Description of Artificial Sequence: Synthetic oligonucleotide
ucucaacacggcgaggaag

SEQ ID NO: 923311 - RNA, 19 nt, Artificial Sequence
  Description of Artificial Sequence: Synthetic oligonucleotide
gucgcagugaauuugcucu

SEQ ID NO: 923312 - RNA, 19 nt, Artificial Sequence
  Description of Artificial Sequence: Synthetic oligonucleotide
cuuagguagcgccucuggc

SEQ ID NO: 923313 - RNA, 19 nt, Artificial Sequence
  Description of Artificial Sequence: Synthetic oligonucleotide
auuaggucgguugaucaca

SEQ ID NO: 923314 - RNA, 19 nt, Artificial Sequence
  Description of Artificial Sequence: Synthetic oligonucleotide
cagucaugugccaugagca

SEQ ID NO: 923315 - RNA, 19 nt, Artificial Sequence
  Description of Artificial Sequence: Synthetic oligonucleotide
aucgucagcuacagaaggc

SEQ ID NO: 923316 - RNA, 19 nt, Artificial Sequence
  Description of Artificial Sequence: Synthetic oligonucleotide
aauggguuucagcuucaaa

SEQ ID NO: 923317 - RNA, 19 nt, Artificial Sequence
  Description of Artificial Sequence: Synthetic oligonucleotide
gaacccugccagcagggag

SEQ ID NO: 923318 - RNA, 19 nt, Artificial Sequence
  Description of Artificial Sequence: Synthetic oligonucleotide
guauguguuucucuccuca

SEQ ID NO: 923319 - RNA, 19 nt, Artificial Sequence
  Description of Artificial Sequence: Synthetic oligonucleotide
ccuaaacagcaaaaguucc

SEQ ID NO: 923320 - RNA, 19 nt, Artificial Sequence
  Description of Artificial Sequence: Synthetic oligonucleotide
ggugccgguaauuauacca

SEQ ID NO: 923321 - RNA, 19 nt, Artificial Sequence
  Description of Artificial Sequence: Synthetic oligonucleotide
cauaguagcaggcguaaga

SEQ ID NO: 923322 - RNA, 19 nt, Artificial Sequence
  Description of Artificial Sequence: Synthetic oligonucleotide
uuugccacccgaaccggcu

SEQ ID NO: 923323 - RNA, 19 nt, Artificial Sequence
  Description of Artificial Sequence: Synthetic oligonucleotide
uuuuguguucauacaugua

SEQ ID NO: 923324 - RNA, 19 nt, Artificial Sequence
  Description of Artificial Sequence: Synthetic oligonucleotide
gugaccgccuugcagacug

SEQ ID NO: 923325 - RNA, 19 nt, Artificial Sequence
  Description of Artificial Sequence: Synthetic oligonucleotide
aauggaccguguucacucu

SEQ ID NO: 923326 - RNA, 19 nt, Artificial Sequence
  Description of Artificial Sequence: Synthetic oligonucleotide
caguaaaaucacugugaag

SEQ ID NO: 923327 - RNA, 19 nt, Artificial Sequence
  Description of Artificial Sequence: Synthetic oligonucleotide
guagcagucaugugccaug

SEQ ID NO: 923328 - RNA, 19 nt, Artificial Sequence
  Description of Artificial Sequence: Synthetic oligonucleotide
ggcguaagaggacucgugg

SEQ ID NO: 923329 - RNA, 19 nt, Artificial Sequence
  Description of Artificial Sequence: Synthetic oligonucleotide
agagauagauuuguuccca

SEQ ID NO: 923330 - RNA, 19 nt, Artificial Sequence
  Description of Artificial Sequence: Synthetic oligonucleotide
acaagucgcagugaauuug

SEQ ID NO: 923331 - RNA, 19 nt, Artificial Sequence
  Description of Artificial Sequence: Synthetic oligonucleotide
uuggagcccgccacaauca

SEQ ID NO: 923332 - RNA, 19 nt, Artificial Sequence
  Description of Artificial Sequence: Synthetic oligonucleotide
cauuaggucgguugaucac

SEQ ID NO: 923333 - RNA, 19 nt, Artificial Sequence
  Description of Artificial Sequence: Synthetic oligonucleotide
cugcccgacaagauucugg

SEQ ID NO: 923334 - RNA, 19 nt, Artificial Sequence
  Description of Artificial Sequence: Synthetic oligonucleotide
agcuauucaguagugacua

SEQ ID NO: 923335 - RNA, 19 nt, Artificial Sequence
  Description of Artificial Sequence: Synthetic oligonucleotide
gcagcuauucaguagugac

SEQ ID NO: 923336 - RNA, 19 nt, Artificial Sequence
  Description of Artificial Sequence: Synthetic oligonucleotide
cagguauguguuucucucc

SEQ ID NO: 923337 - RNA, 19 nt, Artificial Sequence
  Description of Artificial Sequence: Synthetic oligonucleotide
ggagucuuccauccaauug

SEQ ID NO: 923338 - RNA, 19 nt, Artificial Sequence
  Description of Artificial Sequence: Synthetic oligonucleotide
gcaugcaucugccuggugc

SEQ ID NO: 923339 - RNA, 19 nt, Artificial Sequence
  Description of Artificial Sequence: Synthetic oligonucleotide
uccacaccgaccgcaagag

SEQ ID NO: 923340 - RNA, 19 nt, Artificial Sequence
  Description of Artificial Sequence: Synthetic oligonucleotide
acacaagucgcagugaauu

SEQ ID NO: 923341 - RNA, 19 nt, Artificial Sequence
  Description of Artificial Sequence: Synthetic oligonucleotide
ugacgugccuggcauccag

SEQ ID NO: 923342 - RNA, 19 nt, Artificial Sequence
  Description of Artificial Sequence: Synthetic oligonucleotide
ugacuaaggcacaccuugu

SEQ ID NO: 923343 - RNA, 19 nt, Artificial Sequence
  Description of Artificial Sequence: Synthetic oligonucleotide
accauuaggucgguugauc

SEQ ID NO: 923344 - RNA, 19 nt, Artificial Sequence
  Description of Artificial Sequence: Synthetic oligonucleotide
cuuuauccugucaaucgga

SEQ ID NO: 923345 - RNA, 19 nt, Artificial Sequence
  Description of Artificial Sequence: Synthetic oligonucleotide
cuuaugcacagacuucuca

SEQ ID NO: 923346 - RNA, 19 nt, Artificial Sequence
  Description of Artificial Sequence: Synthetic oligonucleotide
cuggugccgguaauuauac

SEQ ID NO: 923347 - RNA, 19 nt, Artificial Sequence
  Description of Artificial Sequence: Synthetic oligonucleotide
uuaggucgguugaucacaa

SEQ ID NO: 923348 - RNA, 19 nt, Artificial Sequence
  Description of Artificial Sequence: Synthetic oligonucleotide
cugucaaucggauauggcu

SEQ ID NO: 923349 - RNA, 19 nt, Artificial Sequence
  Description of Artificial Sequence: Synthetic oligonucleotide
auggcuacacaagucgcag

SEQ ID NO: 923350 - RNA, 19 nt, Artificial Sequence
  Description of Artificial Sequence: Synthetic oligonucleotide
ugccgguaauuauaccagc

SEQ ID NO: 923351 - RNA, 19 nt, Artificial Sequence
  Description of Artificial Sequence: Synthetic oligonucleotide
gcagucaugugccaugagc

SEQ ID NO: 923352 - RNA, 19 nt, Artificial Sequence
  Description of Artificial Sequence: Synthetic oligonucleotide
guccgugaaguaaacaaac

SEQ ID NO: 923353 - RNA, 19 nt, Artificial Sequence
  Description of Artificial Sequence: Synthetic oligonucleotide
guucccauacugcaugaca

SEQ ID NO: 923354 - RNA, 19 nt, Artificial Sequence
  Description of Artificial Sequence: Synthetic oligonucleotide
ccuucaauggcuacacaag

SEQ ID NO: 923355 - RNA, 19 nt, Artificial Sequence
  Description of Artificial Sequence: Synthetic oligonucleotide
gacuaaggcacaccuuguc

SEQ ID NO: 923356 - RNA, 19 nt, Artificial Sequence
  Description of Artificial Sequence: Synthetic oligonucleotide
acuccgggaauugcgcagc

SEQ ID NO: 923357 - RNA, 19 nt, Artificial Sequence
  Description of Artificial Sequence: Synthetic oligonucleotide
cuacagaaggcugggcggg

SEQ ID NO: 923358 - RNA, 19 nt, Artificial Sequence
  Description of Artificial Sequence: Synthetic oligonucleotide
guaccauuaggucgguuga

SEQ ID NO: 923359 - RNA, 19 nt, Artificial Sequence
  Description of Artificial Sequence: Synthetic oligonucleotide
cauccaucaccacagaaua

SEQ ID NO: 923360 - RNA, 19 nt, Artificial Sequence
  Description of Artificial Sequence: Synthetic oligonucleotide
aguucuccggagucacauc

SEQ ID NO: 923361 - RNA, 19 nt, Artificial Sequence
  Description of Artificial Sequence: Synthetic oligonucleotide
guuggcaaugucgucguac

SEQ ID NO: 923362 - RNA, 19 nt, Artificial Sequence
  Description of Artificial Sequence: Synthetic oligonucleotide
augucgucguacaucauca

SEQ ID NO: 923363 - RNA, 19 nt, Artificial Sequence
  Description of Artificial Sequence: Synthetic oligonucleotide
uccuugacaugaagguccu

SEQ ID NO: 923364 - RNA, 19 nt, Artificial Sequence
  Description of Artificial Sequence: Synthetic oligonucleotide
uugacaugaagguccucau

SEQ ID NO: 923365 - RNA, 19 nt, Artificial Sequence
  Description of Artificial Sequence: Synthetic oligonucleotide
agcaguuuccccgaacccu

SEQ ID NO: 923366 - RNA, 19 nt, Artificial Sequence
  Description of Artificial Sequence: Synthetic oligonucleotide
gcucuugaaagcuaaugga

SEQ ID NO: 923367 - RNA, 19 nt, Artificial Sequence
  Description of Artificial Sequence: Synthetic oligonucleotide
guaagcguggcaugcaucu

SEQ ID NO: 923368 - RNA, 19 nt, Artificial Sequence
  Description of Artificial Sequence: Synthetic oligonucleotide
uccagagagcuuugccacc

SEQ ID NO: 923369 - RNA, 19 nt, Artificial Sequence
  Description of Artificial Sequence: Synthetic oligonucleotide
uuccggugaaugaucuggu

SEQ ID NO: 923370 - RNA, 19 nt, Artificial Sequence
  Description of Artificial Sequence: Synthetic oligonucleotide
ccaauugacacuguaccag

SEQ ID NO: 923371 - RNA, 19 nt, Artificial Sequence
  Description of Artificial Sequence: Synthetic oligonucleotide
agauagauuuguucccaua

SEQ ID NO: 923372 - RNA, 19 nt, Artificial Sequence
  Description of Artificial Sequence: Synthetic oligonucleotide
ccgugaaguaaacaaacac

SEQ ID NO: 923373 - RNA, 19 nt, Artificial Sequence
  Description of Artificial Sequence: Synthetic oligonucleotide
uuauccugucaaucggaua

SEQ ID NO: 923374 - RNA, 19 nt, Artificial Sequence
  Description of Artificial Sequence: Synthetic oligonucleotide
uuuccgacagaagucucuc

SEQ ID NO: 923375 - RNA, 19 nt, Artificial Sequence
  Description of Artificial Sequence: Synthetic oligonucleotide
cacucuuccggaagcgcag

SEQ ID NO: 923376 - RNA, 19 nt, Artificial Sequence
  Description of Artificial Sequence: Synthetic oligonucleotide
aucugguaagcguggcaug

SEQ ID NO: 923377 - RNA, 19 nt, Artificial Sequence
  Description of Artificial Sequence: Synthetic oligonucleotide
gagcccgccacaaucacca

SEQ ID NO: 923378 - RNA, 19 nt, Artificial Sequence
  Description of Artificial Sequence: Synthetic oligonucleotide
ucuuuccgacagaagucuc

SEQ ID NO: 923379 - RNA, 19 nt, Artificial Sequence
  Description of Artificial Sequence: Synthetic oligonucleotide
cacauccucuccuguguag

SEQ ID NO: 923380 - RNA, 19 nt, Artificial Sequence
  Description of Artificial Sequence: Synthetic oligonucleotide
agcguggcaugcaucugcc

SEQ ID NO: 923381 - RNA, 19 nt, Artificial Sequence
  Description of Artificial Sequence: Synthetic oligonucleotide
gcguaagaggacucguggg

SEQ ID NO: 923382 - RNA, 19 nt, Artificial Sequence
  Description of Artificial Sequence: Synthetic oligonucleotide
uuagugggucaguauccuc

SEQ ID NO: 923383 - RNA, 19 nt, Artificial Sequence
  Description of Artificial Sequence: Synthetic oligonucleotide
uggaccguguucacucuuc

SEQ ID NO: 923384 - RNA, 19 nt, Artificial Sequence
  Description of Artificial Sequence: Synthetic oligonucleotide
cucaagacuuuucccgauc

SEQ ID NO: 923385 - RNA, 19 nt, Artificial Sequence
  Description of Artificial Sequence: Synthetic oligonucleotide
cagguugguacacauucca

SEQ ID NO: 923386 - RNA, 19 nt, Artificial Sequence
  Description of Artificial Sequence: Synthetic oligonucleotide
ugguaagcguggcaugcau

SEQ ID NO: 923387 - RNA, 19 nt, Artificial Sequence
  Description of Artificial Sequence: Synthetic oligonucleotide
cuuugccacccgaaccggc

SEQ ID NO: 923388 - RNA, 19 nt, Artificial Sequence
  Description of Artificial Sequence: Synthetic oligonucleotide
aaaugccucaaggcauacu

SEQ ID NO: 923389 - RNA, 19 nt, Artificial Sequence
  Description of Artificial Sequence: Synthetic oligonucleotide
ugggauugcuucaggucau

SEQ ID NO: 923390 - RNA, 19 nt, Artificial Sequence
  Description of Artificial Sequence: Synthetic oligonucleotide
caugguccgugaaguaaac

SEQ ID NO: 923391 - RNA, 19 nt, Artificial Sequence
  Description of Artificial Sequence: Synthetic oligonucleotide
cauacugcaugacauggcu

SEQ ID NO: 923392 - RNA, 19 nt, Artificial Sequence
  Description of Artificial Sequence: Synthetic oligonucleotide
gaccgcaagagcaccagca

SEQ ID NO: 923393 - RNA, 19 nt, Artificial Sequence
  Description of Artificial Sequence: Synthetic oligonucleotide
gaacuccgggaauugcgca

SEQ ID NO: 923394 - RNA, 19 nt, Artificial Sequence
  Description of Artificial Sequence: Synthetic oligonucleotide
cccgccacaaucaccaccc

SEQ ID NO: 923395 - RNA, 19 nt, Artificial Sequence
  Description of Artificial Sequence: Synthetic oligonucleotide
gggaacuccgggaauugcg

SEQ ID NO: 923396 - RNA, 19 nt, Artificial Sequence
  Description of Artificial Sequence: Synthetic oligonucleotide
gaagcgcagcuauucagua

SEQ ID NO: 923397 - RNA, 19 nt, Artificial Sequence
  Description of Artificial Sequence: Synthetic oligonucleotide
agggcuuagguagcgccuc

SEQ ID NO: 923398 - RNA, 19 nt, Artificial Sequence
  Description of Artificial Sequence: Synthetic oligonucleotide
cgguugaucacaaugccug

SEQ ID NO: 923399 - RNA, 19 nt, Artificial Sequence
  Description of Artificial Sequence: Synthetic oligonucleotide
cagacuucucaaugacgug

SEQ ID NO: 923400 - RNA, 19 nt, Artificial Sequence
  Description of Artificial Sequence: Synthetic oligonucleotide
gcuuagguagcgccucugg

SEQ ID NO: 923401 - RNA, 19 nt, Artificial Sequence
  Description of Artificial Sequence: Synthetic oligonucleotide
agagagcuuugccacccga

SEQ ID NO: 923402 - RNA, 19 nt, Artificial Sequence
  Description of Artificial Sequence: Synthetic oligonucleotide
acaccgaccgcaagagcac

SEQ ID NO: 923403 - RNA, 19 nt, Artificial Sequence
  Description of Artificial Sequence: Synthetic oligonucleotide
cuucaauggcuacacaagu

SEQ ID NO: 923404 - RNA, 19 nt, Artificial Sequence
  Description of Artificial Sequence: Synthetic oligonucleotide
uucaggaccccugcauaca

SEQ ID NO: 923405 - RNA, 19 nt, Artificial Sequence
  Description of Artificial Sequence: Synthetic oligonucleotide
gucguacaucaucacuaug

SEQ ID NO: 923406 - RNA, 19 nt, Artificial Sequence
  Description of Artificial Sequence: Synthetic oligonucleotide
caucauaguagcaggcgua

SEQ ID NO: 923407 - RNA, 19 nt, Artificial Sequence
  Description of Artificial Sequence: Synthetic oligonucleotide
cccauacugcaugacaugg

SEQ ID NO: 923408 - RNA, 19 nt, Artificial Sequence
  Description of Artificial Sequence: Synthetic oligonucleotide
cuucagaguuggcaauguc

SEQ ID NO: 923409 - RNA, 19 nt, Artificial Sequence
  Description of Artificial Sequence: Synthetic oligonucleotide
acccugaaacugcaucacu

SEQ ID NO: 923410 - RNA, 19 nt, Artificial Sequence
  Description of Artificial Sequence: Synthetic oligonucleotide
uccaauggaccguguucac

SEQ ID NO: 923411 - RNA, 19 nt, Artificial Sequence
  Description of Artificial Sequence: Synthetic oligonucleotide
uuccgacagaagucucuca

SEQ ID NO: 923412 - RNA, 19 nt, Artificial Sequence
  Description of Artificial Sequence: Synthetic oligonucleotide
accgugggaacuccgggaa

SEQ ID NO: 923413 - RNA, 19 nt, Artificial Sequence
  Description of Artificial Sequence: Synthetic oligonucleotide
gaccgugggaacuccggga

SEQ ID NO: 923414 - RNA, 19 nt, Artificial Sequence
  Description of Artificial Sequence: Synthetic oligonucleotide
ggggagugccaguuaaagc

SEQ ID NO: 923415 - RNA, 19 nt, Artificial Sequence
  Description of Artificial Sequence: Synthetic oligonucleotide
cucaacacggcgaggaagu

SEQ ID NO: 923416 - RNA, 19 nt, Artificial Sequence
  Description of Artificial Sequence: Synthetic oligonucleotide
gcaguaguugcauaaacau

SEQ ID NO: 923417 - RNA, 19 nt, Artificial Sequence
  Description of Artificial Sequence: Synthetic oligonucleotide
cucaaugacgugccuggca

SEQ ID NO: 923418 - RNA, 19 nt, Artificial Sequence
  Description of Artificial Sequence: Synthetic oligonucleotide
ucauacccugaaacugcau

SEQ ID NO: 923419 - RNA, 19 nt, Artificial Sequence
  Description of Artificial Sequence: Synthetic oligonucleotide
gaucugguaagcguggcau

SEQ ID NO: 923420 - RNA, 19 nt, Artificial Sequence
  Description of Artificial Sequence: Synthetic oligonucleotide
cggugaaugaucugguaag

SEQ ID NO: 923421 - RNA, 19 nt, Artificial Sequence
  Description of Artificial Sequence: Synthetic oligonucleotide
ccuugcagacugcaggacc

SEQ ID NO: 923422 - RNA, 19 nt, Artificial Sequence
  Description of Artificial Sequence: Synthetic oligonucleotide
ugggaacuccgggaauugc

SEQ ID NO: 923423 - RNA, 19 nt, Artificial Sequence
  Description of Artificial Sequence: Synthetic oligonucleotide
uggcuacacaagucgcagu

SEQ ID NO: 923424 - RNA, 19 nt, Artificial Sequence
  Description of Artificial Sequence: Synthetic oligonucleotide
cauccucuccuguguaguc

SEQ ID NO: 923425 - RNA, 19 nt, Artificial Sequence
  Description of Artificial Sequence: Synthetic oligonucleotide
cgaaccggcuucuuagugg

SEQ ID NO: 923426 - RNA, 19 nt, Artificial Sequence
  Description of Artificial Sequence: Synthetic oligonucleotide
aggaccgugggaacuccgg

SEQ ID NO: 923427 - RNA, 19 nt, Artificial Sequence
  Description of Artificial Sequence: Synthetic oligonucleotide
uggugccgguaauuauacc

SEQ ID NO: 923428 - RNA, 19 nt, Artificial Sequence
  Description of Artificial Sequence: Synthetic oligonucleotide
aaauggguuucagcuucaa

SEQ ID NO: 923429 - RNA, 19 nt, Artificial Sequence
  Description of Artificial Sequence: Synthetic oligonucleotide
ggaccgugggaacuccggg

SEQ ID NO: 923430 - RNA, 19 nt, Artificial Sequence
  Description of Artificial Sequence: Synthetic oligonucleotide
ugguacauuuuguguucau

SEQ ID NO: 923431 - RNA, 19 nt, Artificial Sequence
  Description of Artificial Sequence: Synthetic oligonucleotide
ggaacuccgggaauugcgc

SEQ ID NO: 923432 - RNA, 19 nt, Artificial Sequence
  Description of Artificial Sequence: Synthetic oligonucleotide
cacggcgaggaaguucucc

SEQ ID NO: 923433 - RNA, 19 nt, Artificial Sequence
  Description of Artificial Sequence: Synthetic oligonucleotide
acccagguauguguuucuc

SEQ ID NO: 923434 - RNA, 19 nt, Artificial Sequence
  Description of Artificial Sequence: Synthetic oligonucleotide
acgaucuuaugcacagacu

SEQ ID NO: 923435 - RNA, 19 nt, Artificial Sequence
  Description of Artificial Sequence: Synthetic oligonucleotide
uccggugaaugaucuggua

SEQ ID NO: 923436 - RNA, 19 nt, Artificial Sequence
  Description of Artificial Sequence: Synthetic oligonucleotide
gguuggccgcaguaguugc

SEQ ID NO: 923437 - RNA, 19 nt, Artificial Sequence
  Description of Artificial Sequence: Synthetic oligonucleotide
ggcaaugucgucguacauc

SEQ ID NO: 923438 - RNA, 19 nt, Artificial Sequence
  Description of Artificial Sequence: Synthetic oligonucleotide
uggccccacccuuucaguc

SEQ ID NO: 923439 - RNA, 19 nt, Artificial Sequence
  Description of Artificial Sequence: Synthetic oligonucleotide
guaggguugucuucagagu

SEQ ID NO: 923440 - RNA, 19 nt, Artificial Sequence
  Description of Artificial Sequence: Synthetic oligonucleotide
cagaguuggcaaugucguc

SEQ ID NO: 923441 - RNA, 19 nt, Artificial Sequence
  Description of Artificial Sequence: Synthetic oligonucleotide
gccgguaauuauaccagcc

SEQ ID NO: 923442 - RNA, 19 nt, Artificial Sequence
  Description of Artificial Sequence: Synthetic oligonucleotide
caggaccgugggaacuccg

SEQ ID NO: 923443 - RNA, 19 nt, Artificial Sequence
  Description of Artificial Sequence: Synthetic oligonucleotide
aagucgcagugaauuugcu

SEQ ID NO: 923444 - RNA, 19 nt, Artificial Sequence
  Description of Artificial Sequence: Synthetic oligonucleotide
ccugucaaucggauauggc

SEQ ID NO: 923445 - RNA, 19 nt, Artificial Sequence
  Description of Artificial Sequence: Synthetic oligonucleotide
cuuuccgacagaagucucu

SEQ ID NO: 923446 - RNA, 19 nt, Artificial Sequence
  Description of Artificial Sequence: Synthetic oligonucleotide
gggagacgaucuuaugcac

SEQ ID NO: 923447 - RNA, 19 nt, Artificial Sequence
  Description of Artificial Sequence: Synthetic oligonucleotide
cugcgucaccucucaacac

SEQ ID NO: 923448 - RNA, 19 nt, Artificial Sequence
  Description of Artificial Sequence: Synthetic oligonucleotide
agcaggcguaagaggacuc

SEQ ID NO: 923449 - RNA, 19 nt, Artificial Sequence
  Description of Artificial Sequence: Synthetic oligonucleotide
acacuguaccagucaccca

SEQ ID NO: 923450 - RNA, 19 nt, Artificial Sequence
  Description of Artificial Sequence: Synthetic oligonucleotide
gcgaggaaguucuccggag

SEQ ID NO: 923451 - RNA, 19 nt, Artificial Sequence
  Description of Artificial Sequence: Synthetic oligonucleotide
auccugucaaucggauaug

SEQ ID NO: 923452 - RNA, 19 nt, Artificial Sequence
  Description of Artificial Sequence: Synthetic oligonucleotide
acgugccuggcauccagaa

SEQ ID NO: 923453 - RNA, 19 nt, Artificial Sequence
  Description of Artificial Sequence: Synthetic oligonucleotide
caaugacgugccuggcauc

SEQ ID NO: 923454 - RNA, 19 nt, Artificial Sequence
  Description of Artificial Sequence: Synthetic oligonucleotide
cggauauggcuucucacag

SEQ ID NO: 923455 - RNA, 19 nt, Artificial Sequence
  Description of Artificial Sequence: Synthetic oligonucleotide
caacacggcgaggaaguuc

SEQ ID NO: 923456 - RNA, 19 nt, Artificial Sequence
  Description of Artificial Sequence: Synthetic oligonucleotide
ucgcagugaauuugcucuu

SEQ ID NO: 923457 - RNA, 19 nt, Artificial Sequence
  Description of Artificial Sequence: Synthetic oligonucleotide
uucccgauccuuugcccuu

SEQ ID NO: 923458 - RNA, 19 nt, Artificial Sequence
  Description of Artificial Sequence: Synthetic oligonucleotide
ccauuaggucgguugauca

SEQ ID NO: 923459 - RNA, 19 nt, Artificial Sequence
  Description of Artificial Sequence: Synthetic oligonucleotide
uaccauuaggucgguugau

SEQ ID NO: 923460 - RNA, 19 nt, Artificial Sequence
  Description of Artificial Sequence: Synthetic oligonucleotide
gagauagauuuguucccau

SEQ ID NO: 923461 - RNA, 19 nt, Artificial Sequence
  Description of Artificial Sequence: Synthetic oligonucleotide
gcaggcguaagaggacucg

SEQ ID NO: 923462 - RNA, 19 nt, Artificial Sequence
  Description of Artificial Sequence: Synthetic oligonucleotide
gccgcuuuccagaucauuc

SEQ ID NO: 923463 - RNA, 19 nt, Artificial Sequence
  Description of Artificial Sequence: Synthetic oligonucleotide
ggaguaggguugucuucag

SEQ ID NO: 923464 - RNA, 19 nt, Artificial Sequence
  Description of Artificial Sequence: Synthetic oligonucleotide
gucaaggcgugugacugga

SEQ ID NO: 923465 - RNA, 19 nt, Artificial Sequence
  Description of Artificial Sequence: Synthetic oligonucleotide
aggcguaagaggacucgug

SEQ ID NO: 923466 - RNA, 19 nt, Artificial Sequence
  Description of Artificial Sequence: Synthetic oligonucleotide
gcaguuuccccgaacccug

SEQ ID NO: 923467 - RNA, 19 nt, Artificial Sequence
  Description of Artificial Sequence: Synthetic oligonucleotide
ggagacgaucuuaugcaca

SEQ ID NO: 923468 - RNA, 19 nt, Artificial Sequence
  Description of Artificial Sequence: Synthetic oligonucleotide
gcgaauggucuuguucagg

SEQ ID NO: 923469 - RNA, 19 nt, Artificial Sequence
  Description of Artificial Sequence: Synthetic oligonucleotide
cucuuuccgacagaagucu

SEQ ID NO: 923470 - RNA, 19 nt, Artificial Sequence
  Description of Artificial Sequence: Synthetic oligonucleotide
ugccuggugccgguaauua

SEQ ID NO: 923471 - RNA, 19 nt, Artificial Sequence
  Description of Artificial Sequence: Synthetic oligonucleotide
ugggaggggcuuacagcau

SEQ ID NO: 923472 - RNA, 19 nt, Artificial Sequence
  Description of Artificial Sequence: Synthetic oligonucleotide
auguagcgaauggucuugu

SEQ ID NO: 923473 - RNA, 19 nt, Artificial Sequence
  Description of Artificial Sequence: Synthetic oligonucleotide
gggaauugcgcagccucag

SEQ ID NO: 923474 - RNA, 19 nt, Artificial Sequence
  Description of Artificial Sequence: Synthetic oligonucleotide
ggauuucaccaggugguac

SEQ ID NO: 923475 - RNA, 19 nt, Artificial Sequence
  Description of Artificial Sequence: Synthetic oligonucleotide
acugcaugacauggcuagu

SEQ ID NO: 923476 - RNA, 19 nt, Artificial Sequence
  Description of Artificial Sequence: Synthetic oligonucleotide
gcgucaccucucaacacgg

SEQ ID NO: 923477 - RNA, 19 nt, Artificial Sequence
  Description of Artificial Sequence: Synthetic oligonucleotide
ccgcaagagcaccagcacc

SEQ ID NO: 923478 - RNA, 19 nt, Artificial Sequence
  Description of Artificial Sequence: Synthetic oligonucleotide
gguacauuuuguguucaua

SEQ ID NO: 923479 - RNA, 19 nt, Artificial Sequence
  Description of Artificial Sequence: Synthetic oligonucleotide
ugaccgccuugcagacugc

SEQ ID NO: 923480 - RNA, 19 nt, Artificial Sequence
  Description of Artificial Sequence: Synthetic oligonucleotide
ggcgaggaaguucuccgga

SEQ ID NO: 923481 - RNA, 19 nt, Artificial Sequence
  Description of Artificial Sequence: Synthetic oligonucleotide
auggaccguguucacucuu

SEQ ID NO: 923482 - RNA, 19 nt, Artificial Sequence
  Description of Artificial Sequence: Synthetic oligonucleotide
ggagugaggucaaggcgug

SEQ ID NO: 923483 - RNA, 19 nt, Artificial Sequence
  Description of Artificial Sequence: Synthetic oligonucleotide
uagcuccaugguccgugaa

SEQ ID NO: 923484 - RNA, 19 nt, Artificial Sequence
  Description of Artificial Sequence: Synthetic oligonucleotide
auacugcaugacauggcua

SEQ ID NO: 923485 - RNA, 19 nt, Artificial Sequence
  Description of Artificial Sequence: Synthetic oligonucleotide
accucucaacacggcgagg

SEQ ID NO: 923486 - RNA, 19 nt, Artificial Sequence
  Description of Artificial Sequence: Synthetic oligonucleotide
cgcaguaguugcauaaaca

SEQ ID NO: 923487 - RNA, 19 nt, Artificial Sequence
  Description of Artificial Sequence: Synthetic oligonucleotide
ggguuggccgcaguaguug

SEQ ID NO: 923488 - RNA, 19 nt, Artificial Sequence
  Description of Artificial Sequence: Synthetic oligonucleotide
ccgcaguaguugcauaaac

SEQ ID NO: 923489 - RNA, 19 nt, Artificial Sequence
  Description of Artificial Sequence: Synthetic oligonucleotide
cuuagugggucaguauccu

SEQ ID NO: 923490 - RNA, 19 nt, Artificial Sequence
  Description of Artificial Sequence: Synthetic oligonucleotide
caccgaccgcaagagcacc

SEQ ID NO: 923491 - RNA, 19 nt, Artificial Sequence
  Description of Artificial Sequence: Synthetic oligonucleotide
cuucuuagugggucaguau

SEQ ID NO: 923492 - RNA, 19 nt, Artificial Sequence
  Description of Artificial Sequence: Synthetic oligonucleotide
ggaauugcgcagccucaga

SEQ ID NO: 923493 - RNA, 19 nt, Artificial Sequence
  Description of Artificial Sequence: Synthetic oligonucleotide
guacugcuuguggagcguc

SEQ ID NO: 923494 - RNA, 19 nt, Artificial Sequence
  Description of Artificial Sequence: Synthetic oligonucleotide
cuccugguagcagucaugu

SEQ ID NO: 923495 - RNA, 19 nt, Artificial Sequence
  Description of Artificial Sequence: Synthetic oligonucleotide
uaggucgguugaucacaau

SEQ ID NO: 923496 - RNA, 19 nt, Artificial Sequence
  Description of Artificial Sequence: Synthetic oligonucleotide
guucauacauguagcgaau

SEQ ID NO: 923497 - RNA, 19 nt, Artificial Sequence
  Description of Artificial Sequence: Synthetic oligonucleotide
guggagcgucucuuugguc

SEQ ID NO: 923498 - RNA, 19 nt, Artificial Sequence
  Description of Artificial Sequence: Synthetic oligonucleotide
ggcgugugacuggaggcag

SEQ ID NO: 923499 - RNA, 19 nt, Artificial Sequence
  Description of Artificial Sequence: Synthetic oligonucleotide
gguaagcguggcaugcauc

SEQ ID NO: 923500 - RNA, 19 nt, Artificial Sequence
  Description of Artificial Sequence: Synthetic oligonucleotide
ccggugaaugaucugguaa

SEQ ID NO: 923501 - RNA, 19 nt, Artificial Sequence
  Description of Artificial Sequence: Synthetic oligonucleotide
ucaacacggcgaggaaguu

SEQ ID NO: 923502 - RNA, 19 nt, Artificial Sequence
  Description of Artificial Sequence: Synthetic oligonucleotide
gcccgccacaaucaccacc

SEQ ID NO: 923503 - RNA, 19 nt, Artificial Sequence
  Description of Artificial Sequence: Synthetic oligonucleotide
gugugcggaagugggucac

SEQ ID NO: 923504 - RNA, 19 nt, Artificial Sequence
  Description of Artificial Sequence: Synthetic oligonucleotide
caagacuuuucccgauccu

SEQ ID NO: 923505 - RNA, 19 nt, Artificial Sequence
  Description of Artificial Sequence: Synthetic oligonucleotide
ccuggugccgguaauuaua

SEQ ID NO: 923506 - RNA, 19 nt, Artificial Sequence
  Description of Artificial Sequence: Synthetic oligonucleotide
ccucucaacacggcgagga

SEQ ID NO: 923507 - RNA, 19 nt, Artificial Sequence
  Description of Artificial Sequence: Synthetic oligonucleotide
ucccgauccuuugcccuuc

SEQ ID NO: 923508 - RNA, 19 nt, Artificial Sequence
  Description of Artificial Sequence: Synthetic oligonucleotide
caucggagucuuccaucca

SEQ ID NO: 923509 - RNA, 19 nt, Artificial Sequence
  Description of Artificial Sequence: Synthetic oligonucleotide
ggaagcgcagcuauucagu

SEQ ID NO: 923510 - RNA, 19 nt, Artificial Sequence
  Description of Artificial Sequence: Synthetic oligonucleotide
cauuccaauggaccguguu

SEQ ID NO: 923511 - RNA, 19 nt, Artificial Sequence
  Description of Artificial Sequence: Synthetic oligonucleotide
guuggccgcaguaguugca

SEQ ID NO: 923512 - RNA, 19 nt, Artificial Sequence
  Description of Artificial Sequence: Synthetic oligonucleotide
ggagcccgccacaaucacc

SEQ ID NO: 923513 - RNA, 19 nt, Artificial Sequence
  Description of Artificial Sequence: Synthetic oligonucleotide
ccggagucacauccucucc

SEQ ID NO: 923514 - RNA, 19 nt, Artificial Sequence
  Description of Artificial Sequence: Synthetic oligonucleotide
uggccgcaguaguugcaua

SEQ ID NO: 923515 - RNA, 19 nt, Artificial Sequence
  Description of Artificial Sequence: Synthetic oligonucleotide
cugguaagcguggcaugca

SEQ ID NO: 923516 - RNA, 19 nt, Artificial Sequence
  Description of Artificial Sequence: Synthetic oligonucleotide
accgaccgcaagagcacca

SEQ ID NO: 923517 - RNA, 19 nt, Artificial Sequence
  Description of Artificial Sequence: Synthetic oligonucleotide
cacaagucgcagugaauuu

SEQ ID NO: 923518 - RNA, 19 nt, Artificial Sequence
  Description of Artificial Sequence: Synthetic oligonucleotide
gcuacacaagucgcaguga

SEQ ID NO: 923519 - RNA, 19 nt, Artificial Sequence
  Description of Artificial Sequence: Synthetic oligonucleotide
cacuuucaugguagagaua

SEQ ID NO: 923520 - RNA, 19 nt, Artificial Sequence
  Description of Artificial Sequence: Synthetic oligonucleotide
augacgugccuggcaucca

SEQ ID NO: 923521 - RNA, 19 nt, Artificial Sequence
  Description of Artificial Sequence: Synthetic oligonucleotide
gcuauucaguagugacuaa

SEQ ID NO: 923522 - RNA, 19 nt, Artificial Sequence
  Description of Artificial Sequence: Synthetic oligonucleotide
ccguguucacucuuccgga

SEQ ID NO: 923523 - RNA, 19 nt, Artificial Sequence
  Description of Artificial Sequence: Synthetic oligonucleotide
acccagugcuugccagcau

SEQ ID NO: 923524 - RNA, 19 nt, Artificial Sequence
  Description of Artificial Sequence: Synthetic oligonucleotide
cuccggagucacauccucu

SEQ ID NO: 923525 - RNA, 19 nt, Artificial Sequence
  Description of Artificial Sequence: Synthetic oligonucleotide
cauuggugcucaucagcuu

SEQ ID NO: 923526 - RNA, 19 nt, Artificial Sequence
  Description of Artificial Sequence: Synthetic oligonucleotide
ggaaucccguuccggugaa

SEQ ID NO: 923527 - RNA, 19 nt, Artificial Sequence
  Description of Artificial Sequence: Synthetic oligonucleotide
gcaugacauggcuaguguu

SEQ ID NO: 923528 - RNA, 19 nt, Artificial Sequence
  Description of Artificial Sequence: Synthetic oligonucleotide
gcaggaccgugggaacucc

SEQ ID NO: 923529 - RNA, 19 nt, Artificial Sequence
  Description of Artificial Sequence: Synthetic oligonucleotide
gugugggauuucaccaggu

SEQ ID NO: 923530 - RNA, 19 nt, Artificial Sequence
  Description of Artificial Sequence: Synthetic oligonucleotide
ccacaccgaccgcaagagc

SEQ ID NO: 923531 - RNA, 19 nt, Artificial Sequence
  Description of Artificial Sequence: Synthetic oligonucleotide
ccggcuucuuaguggguca

SEQ ID NO: 923532 - RNA, 19 nt, Artificial Sequence
  Description of Artificial Sequence: Synthetic oligonucleotide
cgucaccucucaacacggc

SEQ ID NO: 923533 - RNA, 19 nt, Artificial Sequence
  Description of Artificial Sequence: Synthetic oligonucleotide
ggccccacccuuucagucu

SEQ ID NO: 923534 - RNA, 19 nt, Artificial Sequence
  Description of Artificial Sequence: Synthetic oligonucleotide
ggcaugcaucugccuggug

SEQ ID NO: 923535 - RNA, 19 nt, Artificial Sequence
  Description of Artificial Sequence: Synthetic oligonucleotide
ccgaccgcaagagcaccag

SEQ ID NO: 923536 - RNA, 19 nt, Artificial Sequence
  Description of Artificial Sequence: Synthetic oligonucleotide
caggcguaagaggacucgu

SEQ ID NO: 923537 - RNA, 19 nt, Artificial Sequence
  Description of Artificial Sequence: Synthetic oligonucleotide
gcgcagcuauucaguagug

SEQ ID NO: 923538 - RNA, 19 nt, Artificial Sequence
  Description of Artificial Sequence: Synthetic oligonucleotide
ggcuaguguugguguggga

SEQ ID NO: 923539 - RNA, 19 nt, Artificial Sequence
  Description of Artificial Sequence: Synthetic oligonucleotide
cguuccggugaaugaucug

SEQ ID NO: 923540 - RNA, 19 nt, Artificial Sequence
  Description of Artificial Sequence: Synthetic oligonucleotide
ccgcuuuccagaucauucu

SEQ ID NO: 923541 - RNA, 19 nt, Artificial Sequence
  Description of Artificial Sequence: Synthetic oligonucleotide
cgguaauuauaccagccau

SEQ ID NO: 923542 - RNA, 19 nt, Artificial Sequence
  Description of Artificial Sequence: Synthetic oligonucleotide
ccggaagcgcagcuauuca

SEQ ID NO: 923543 - RNA, 19 nt, Artificial Sequence
  Description of Artificial Sequence: Synthetic oligonucleotide
gcgucucuuuggucagauc

SEQ ID NO: 923544 - RNA, 19 nt, Artificial Sequence
  Description of Artificial Sequence: Synthetic oligonucleotide
ccccgaacccugccagcag

SEQ ID NO: 923545 - RNA, 19 nt, Artificial Sequence
  Description of Artificial Sequence: Synthetic oligonucleotide
cauuggagcccgccacaau

SEQ ID NO: 923546 - RNA, 19 nt, Artificial Sequence
  Description of Artificial Sequence: Synthetic oligonucleotide
gggaggggcuuacagcauu

SEQ ID NO: 923547 - RNA, 19 nt, Artificial Sequence
  Description of Artificial Sequence: Synthetic oligonucleotide
gcuuguggagcgucucuuu

SEQ ID NO: 923548 - RNA, 19 nt, Artificial Sequence
  Description of Artificial Sequence: Synthetic oligonucleotide
ccguuccggugaaugaucu

SEQ ID NO: 923549 - RNA, 19 nt, Artificial Sequence
  Description of Artificial Sequence: Synthetic oligonucleotide
caaugucgucguacaucau

SEQ ID NO: 923550 - RNA, 19 nt, Artificial Sequence
  Description of Artificial Sequence: Synthetic oligonucleotide
gccuggaguaggguugucu

SEQ ID NO: 923551 - RNA, 19 nt, Artificial Sequence
  Description of Artificial Sequence: Synthetic oligonucleotide
ggaccccugcauacacauc

SEQ ID NO: 923552 - RNA, 19 nt, Artificial Sequence
  Description of Artificial Sequence: Synthetic oligonucleotide
cgcagcuauucaguaguga

SEQ ID NO: 923553 - RNA, 19 nt, Artificial Sequence
  Description of Artificial Sequence: Synthetic oligonucleotide
ccucaagacuuuucccgau

SEQ ID NO: 923554 - RNA, 19 nt, Artificial Sequence
  Description of Artificial Sequence: Synthetic oligonucleotide
ccaauggaccguguucacu

SEQ ID NO: 923555 - RNA, 19 nt, Artificial Sequence
  Description of Artificial Sequence: Synthetic oligonucleotide
gccuggugccgguaauuau

SEQ ID NO: 923556 - RNA, 19 nt, Artificial Sequence
  Description of Artificial Sequence: Synthetic oligonucleotide
gggcuuagguagcgccucu

SEQ ID NO: 923557 - RNA, 19 nt, Artificial Sequence
  Description of Artificial Sequence: Synthetic oligonucleotide
guagcgccucuggccccac

SEQ ID NO: 923558 - RNA, 19 nt, Artificial Sequence
  Description of Artificial Sequence: Synthetic oligonucleotide
gcgugugacuggaggcaga

SEQ ID NO: 923559 - RNA, 19 nt, Artificial Sequence
  Description of Artificial Sequence: Synthetic oligonucleotide
gaaucccguuccggugaau

SEQ ID NO: 923560 - RNA, 19 nt, Artificial Sequence
  Description of Artificial Sequence: Synthetic oligonucleotide
ggcuucuuagugggucagu

SEQ ID NO: 923561 - RNA, 19 nt, Artificial Sequence
  Description of Artificial Sequence: Synthetic oligonucleotide
cccgaaccggcuucuuagu

SEQ ID NO: 923562 - RNA, 19 nt, Artificial Sequence
  Description of Artificial Sequence: Synthetic oligonucleotide
cugccuggugccgguaauu

SEQ ID NO: 923563 - RNA, 19 nt, Artificial Sequence
  Description of Artificial Sequence: Synthetic oligonucleotide
gcguggcaugcaucugccu

SEQ ID NO: 923564 - RNA, 19 nt, Artificial Sequence
  Description of Artificial Sequence: Synthetic oligonucleotide
cuguaccauuaggucgguu

SEQ ID NO: 923565 - RNA, 19 nt, Artificial Sequence
  Description of Artificial Sequence: Synthetic oligonucleotide
ccgccacaaucaccaccca

SEQ ID NO: 923566 - RNA, 19 nt, Artificial Sequence
  Description of Artificial Sequence: Synthetic oligonucleotide
ccgugggaacuccgggaau

SEQ ID NO: 923567 - RNA, 19 nt, Artificial Sequence
  Description of Artificial Sequence: Synthetic oligonucleotide
aaaguauagugacacaggc

SEQ ID NO: 923568 - RNA, 19 nt, Artificial Sequence
  Description of Artificial Sequence: Synthetic oligonucleotide
uaugucaucacccauaaga

SEQ ID NO: 923569 - RNA, 19 nt, Artificial Sequence
  Description of Artificial Sequence: Synthetic oligonucleotide
aacguuuugggauuucugc

SEQ ID NO: 923570 - RNA, 19 nt, Artificial Sequence
  Description of Artificial Sequence: Synthetic oligonucleotide
aguauagugacacaggcuc

SEQ ID NO: 923571 - RNA, 19 nt, Artificial Sequence
  Description of Artificial Sequence: Synthetic oligonucleotide
uuaacagucaccaacagau

SEQ ID NO: 923572 - RNA, 19 nt, Artificial Sequence
  Description of Artificial Sequence: Synthetic oligonucleotide
cugaacauuuacaagaccg

SEQ ID NO: 923573 - RNA, 19 nt, Artificial Sequence
  Description of Artificial Sequence: Synthetic oligonucleotide
aaugcaaacgugcuaagug

SEQ ID NO: 923574 - RNA, 19 nt, Artificial Sequence
  Description of Artificial Sequence: Synthetic oligonucleotide
uguaaauuggcauagcccu

SEQ ID NO: 923575 - RNA, 19 nt, Artificial Sequence
  Description of Artificial Sequence: Synthetic oligonucleotide
uccaugaaaauccuaaagc

SEQ ID NO: 923576 - RNA, 19 nt, Artificial Sequence
  Description of Artificial Sequence: Synthetic oligonucleotide
ugagauuuuaaccuggaac

SEQ ID NO: 923577 - RNA, 19 nt, Artificial Sequence
  Description of Artificial Sequence: Synthetic oligonucleotide
uucuaguuaaagaaaguag

SEQ ID NO: 923578 - RNA, 19 nt, Artificial Sequence
  Description of Artificial Sequence: Synthetic oligonucleotide
ucguguuuaaagaagaaga

SEQ ID NO: 923579 - RNA, 19 nt, Artificial Sequence
  Description of Artificial Sequence: Synthetic oligonucleotide
uuaaugucuaucuucagac

SEQ ID NO: 923580 - RNA, 19 nt, Artificial Sequence
  Description of Artificial Sequence: Synthetic oligonucleotide
gaauuuaacagucaccaac

SEQ ID NO: 923581 - RNA, 19 nt, Artificial Sequence
  Description of Artificial Sequence: Synthetic oligonucleotide
cuugauauacaccuuauug

SEQ ID NO: 923582 - RNA, 19 nt, Artificial Sequence
  Description of Artificial Sequence: Synthetic oligonucleotide
uaaaguauagugacacagg

SEQ ID NO: 923583 - RNA, 19 nt, Artificial Sequence
  Description of Artificial Sequence: Synthetic oligonucleotide
aagaaaguaguauggcauc

SEQ ID NO: 923584 - RNA, 19 nt, Artificial Sequence
  Description of Artificial Sequence: Synthetic oligonucleotide
ugcauaagaagaaacacuc

SEQ ID NO: 923585 - RNA, 19 nt, Artificial Sequence
  Description of Artificial Sequence: Synthetic oligonucleotide
uuuucggucuaauaccugg

SEQ ID NO: 923586 - RNA, 19 nt, Artificial Sequence
  Description of Artificial Sequence: Synthetic oligonucleotide
aggaauacugcauaagaag

SEQ ID NO: 923587 - RNA, 19 nt, Artificial Sequence
  Description of Artificial Sequence: Synthetic oligonucleotide
augaauagaagguauuuug

SEQ ID NO: 923588 - RNA, 19 nt, Artificial Sequence
  Description of Artificial Sequence: Synthetic oligonucleotide
aaacgugcuaaguggacgg

SEQ ID NO: 923589 - RNA, 19 nt, Artificial Sequence
  Description of Artificial Sequence: Synthetic oligonucleotide
ugauguuuaaugucuaucu

SEQ ID NO: 923590 - RNA, 19 nt, Artificial Sequence
  Description of Artificial Sequence: Synthetic oligonucleotide
uuguaaauuggcauagccc

SEQ ID NO: 923591 - RNA, 19 nt, Artificial Sequence
  Description of Artificial Sequence: Synthetic oligonucleotide
aagaagugucuucagagca

SEQ ID NO: 923592 - RNA, 19 nt, Artificial Sequence
  Description of Artificial Sequence: Synthetic oligonucleotide
aagaccgacucucagaaga

SEQ ID NO: 923593 - RNA, 19 nt, Artificial Sequence
  Description of Artificial Sequence: Synthetic oligonucleotide
aaucuguggagccacacca

SEQ ID NO: 923594 - RNA, 19 nt, Artificial Sequence
  Description of Artificial Sequence: Synthetic oligonucleotide
uccuuuaaaguauagugac

SEQ ID NO: 923595 - RNA, 19 nt, Artificial Sequence
  Description of Artificial Sequence: Synthetic oligonucleotide
agaaauagcgggcuggaag

SEQ ID NO: 923596 - RNA, 19 nt, Artificial Sequence
  Description of Artificial Sequence: Synthetic oligonucleotide
uugaccgugauguuuaaug

SEQ ID NO: 923597 - RNA, 19 nt, Artificial Sequence
  Description of Artificial Sequence: Synthetic oligonucleotide
agaaauuggugaaagcagc

SEQ ID NO: 923598 - RNA, 19 nt, Artificial Sequence
  Description of Artificial Sequence: Synthetic oligonucleotide
ucauauccagacuuacucg

SEQ ID NO: 923599 - RNA, 19 nt, Artificial Sequence
  Description of Artificial Sequence: Synthetic oligonucleotide
aauuuaacagucaccaaca

SEQ ID NO: 923600 - RNA, 19 nt, Artificial Sequence
  Description of Artificial Sequence: Synthetic oligonucleotide
cauauccagacuuacucgg

SEQ ID NO: 923601 - RNA, 19 nt, Artificial Sequence
  Description of Artificial Sequence: Synthetic oligonucleotide
cuuguaaauuggcauagcc

SEQ ID NO: 923602 - RNA, 19 nt, Artificial Sequence
  Description of Artificial Sequence: Synthetic oligonucleotide
aaccguagggaaaugugcc

SEQ ID NO: 923603 - RNA, 19 nt, Artificial Sequence
  Description of Artificial Sequence: Synthetic oligonucleotide
ucuuuugcccacuuaagcu

SEQ ID NO: 923604 - RNA, 19 nt, Artificial Sequence
  Description of Artificial Sequence: Synthetic oligonucleotide
augcaaacgugcuaagugg

SEQ ID NO: 923605 - RNA, 19 nt, Artificial Sequence
  Description of Artificial Sequence: Synthetic oligonucleotide
uguagaaauagcgggcugg

SEQ ID NO: 923606 - RNA, 19 nt, Artificial Sequence
  Description of Artificial Sequence: Synthetic oligonucleotide
ucaucguguuuaaagaaga

SEQ ID NO: 923607 - RNA, 19 nt, Artificial Sequence
  Description of Artificial Sequence: Synthetic oligonucleotide
ucuagucucucuuugcggc

SEQ ID NO: 923608 - RNA, 19 nt, Artificial Sequence
  Description of Artificial Sequence: Synthetic oligonucleotide
aaagcagcgaaaaugcuga

SEQ ID NO: 923609 - RNA, 19 nt, Artificial Sequence
  Description of Artificial Sequence: Synthetic oligonucleotide
uguaaaggacaguuacagg

SEQ ID NO: 923610 - RNA, 19 nt, Artificial Sequence
  Description of Artificial Sequence: Synthetic oligonucleotide
ucauaugaauagaagguau

SEQ ID NO: 923611 - RNA, 19 nt, Artificial Sequence
  Description of Artificial Sequence: Synthetic oligonucleotide
agaaaguaguauggcaucc

SEQ ID NO: 923612 - RNA, 19 nt, Artificial Sequence
  Description of Artificial Sequence: Synthetic oligonucleotide
gaaaagaucggcuggaugu

SEQ ID NO: 923613 - RNA, 19 nt, Artificial Sequence
  Description of Artificial Sequence: Synthetic oligonucleotide
acucucagaagauccacgg

SEQ ID NO: 923614 - RNA, 19 nt, Artificial Sequence
  Description of Artificial Sequence: Synthetic oligonucleotide
ccaucauaugaauagaagg

SEQ ID NO: 923615 - RNA, 19 nt, Artificial Sequence
  Description of Artificial Sequence: Synthetic oligonucleotide
auuggugaaagcagcaucg

SEQ ID NO: 923616 - RNA, 19 nt, Artificial Sequence
  Description of Artificial Sequence: Synthetic oligonucleotide
uuuucuggacaguucaucu

SEQ ID NO: 923617 - RNA, 19 nt, Artificial Sequence
  Description of Artificial Sequence: Synthetic oligonucleotide
uaaauuggcauagcccugg

SEQ ID NO: 923618 - RNA, 19 nt, Artificial Sequence
  Description of Artificial Sequence: Synthetic oligonucleotide
aaacggguccuuguaagac

SEQ ID NO: 923619 - RNA, 19 nt, Artificial Sequence
  Description of Artificial Sequence: Synthetic oligonucleotide
ucuuuucggucuaauaccu

SEQ ID NO: 923620 - RNA, 19 nt, Artificial Sequence
  Description of Artificial Sequence: Synthetic oligonucleotide
cuguccaaaacguuuuggg

SEQ ID NO: 923621 - RNA, 19 nt, Artificial Sequence
  Description of Artificial Sequence: Synthetic oligonucleotide
uuacaguuaagaagugucu

SEQ ID NO: 923622 - RNA, 19 nt, Artificial Sequence
  Description of Artificial Sequence: Synthetic oligonucleotide
agauuuuaaccuggaacgc

SEQ ID NO: 923623 - RNA, 19 nt, Artificial Sequence
  Description of Artificial Sequence: Synthetic oligonucleotide
uaucccuggaaucugugga

SEQ ID NO: 923624 - RNA, 19 nt, Artificial Sequence
  Description of Artificial Sequence: Synthetic oligonucleotide
auaaaugcaaacgugcuaa

SEQ ID NO: 923625 - RNA, 19 nt, Artificial Sequence
  Description of Artificial Sequence: Synthetic oligonucleotide
auaagauuauuucuugcaa

SEQ ID NO: 923626 - RNA, 19 nt, Artificial Sequence
  Description of Artificial Sequence: Synthetic oligonucleotide
uauuucgcucuucucuggg

SEQ ID NO: 923627 - RNA, 19 nt, Artificial Sequence
  Description of Artificial Sequence: Synthetic oligonucleotide
gagucagucaggucguagg

SEQ ID NO: 923628 - RNA, 19 nt, Artificial Sequence
  Description of Artificial Sequence: Synthetic oligonucleotide
agguauuuugcauaucaga

SEQ ID NO: 923629 - RNA, 19 nt, Artificial Sequence
  Description of Artificial Sequence: Synthetic oligonucleotide
uuuucaggaucaaccguag

SEQ ID NO: 923630 - RNA, 19 nt, Artificial Sequence
  Description of Artificial Sequence: Synthetic oligonucleotide
accaagagucuugauauac

SEQ ID NO: 923631 - RNA, 19 nt, Artificial Sequence
  Description of Artificial Sequence: Synthetic oligonucleotide
ucucaugguaaacgggucc

SEQ ID NO: 923632 - RNA, 19 nt, Artificial Sequence
  Description of Artificial Sequence: Synthetic oligonucleotide
gaauguagaaauagcgggc

SEQ ID NO: 923633 - RNA, 19 nt, Artificial Sequence
  Description of Artificial Sequence: Synthetic oligonucleotide
cauauuucgcucuucucug

SEQ ID NO: 923634 - RNA, 19 nt, Artificial Sequence
  Description of Artificial Sequence: Synthetic oligonucleotide
gucgccuaccaguagauag

SEQ ID NO: 923635 - RNA, 19 nt, Artificial Sequence
  Description of Artificial Sequence: Synthetic oligonucleotide
uguccaaaacguuuuggga

SEQ ID NO: 923636 - RNA, 19 nt, Artificial Sequence
  Description of Artificial Sequence: Synthetic oligonucleotide
uucugcuaaguuuuaccag

SEQ ID NO: 923637 - RNA, 19 nt, Artificial Sequence
  Description of Artificial Sequence: Synthetic oligonucleotide
guaaacggguccuuguaag

SEQ ID NO: 923638 - RNA, 19 nt, Artificial Sequence
  Description of Artificial Sequence: Synthetic oligonucleotide
cauucuguaucucacuaug

SEQ ID NO: 923639 - RNA, 19 nt, Artificial Sequence
  Description of Artificial Sequence: Synthetic oligonucleotide
cuggacaccaacucuagug

SEQ ID NO: 923640 - RNA, 19 nt, Artificial Sequence
  Description of Artificial Sequence: Synthetic oligonucleotide
uguaucucacuaugaagga

SEQ ID NO: 923641 - RNA, 19 nt, Artificial Sequence
  Description of Artificial Sequence: Synthetic oligonucleotide
uggacaccaacucuaguga

SEQ ID NO: 923642 - RNA, 19 nt, Artificial Sequence
  Description of Artificial Sequence: Synthetic oligonucleotide
accuggaacgccuuuucac

SEQ ID NO: 923643 - RNA, 19 nt, Artificial Sequence
  Description of Artificial Sequence: Synthetic oligonucleotide
ugcccuuuaacccgggccc

SEQ ID NO: 923644 - RNA, 19 nt, Artificial Sequence
  Description of Artificial Sequence: Synthetic oligonucleotide
uugcauacauucuguaucu

SEQ ID NO: 923645 - RNA, 19 nt, Artificial Sequence
  Description of Artificial Sequence: Synthetic oligonucleotide
aaaguaguauggcauccau

SEQ ID NO: 923646 - RNA, 19 nt, Artificial Sequence
  Description of Artificial Sequence: Synthetic oligonucleotide
cagcagaucgcucagguug

SEQ ID NO: 923647 - RNA, 19 nt, Artificial Sequence
  Description of Artificial Sequence: Synthetic oligonucleotide
ucgccuaccaguagauagg

SEQ ID NO: 923648 - RNA, 19 nt, Artificial Sequence
  Description of Artificial Sequence: Synthetic oligonucleotide
ucgcucacuuguaaauugg

SEQ ID NO: 923649 - RNA, 19 nt, Artificial Sequence
  Description of Artificial Sequence: Synthetic oligonucleotide
uuuaccagcucuagucucu

SEQ ID NO: 923650 - RNA, 19 nt, Artificial Sequence
  Description of Artificial Sequence: Synthetic oligonucleotide
uguagcuugcauacauucu

SEQ ID NO: 923651 - RNA, 19 nt, Artificial Sequence
  Description of Artificial Sequence: Synthetic oligonucleotide
uugauacuugugcuugaag

SEQ ID NO: 923652 - RNA, 19 nt, Artificial Sequence
  Description of Artificial Sequence: Synthetic oligonucleotide
uuacaagaccgacucucag

SEQ ID NO: 923653 - RNA, 19 nt, Artificial Sequence
  Description of Artificial Sequence: Synthetic oligonucleotide
auaucccuggaaucugugg

SEQ ID NO: 923654 - RNA, 19 nt, Artificial Sequence
  Description of Artificial Sequence: Synthetic oligonucleotide
ugagugauguuuucuggac

SEQ ID NO: 923655 - RNA, 19 nt, Artificial Sequence
  Description of Artificial Sequence: Synthetic oligonucleotide
caaccguagggaaaugugc

SEQ ID NO: 923656 - RNA, 19 nt, Artificial Sequence
  Description of Artificial Sequence: Synthetic oligonucleotide
agaagauccacggauaaau

SEQ ID NO: 923657 - RNA, 19 nt, Artificial Sequence
  Description of Artificial Sequence: Synthetic oligonucleotide
acaagaccgacucucagaa

SEQ ID NO: 923658 - RNA, 19 nt, Artificial Sequence
  Description of Artificial Sequence: Synthetic oligonucleotide
ucguagguaggcaucacaa

SEQ ID NO: 923659 - RNA, 19 nt, Artificial Sequence
  Description of Artificial Sequence: Synthetic oligonucleotide
acaucauauccagacuuac

SEQ ID NO: 923660 - RNA, 19 nt, Artificial Sequence
  Description of Artificial Sequence: Synthetic oligonucleotide
ucucaucguguuuaaagaa

SEQ ID NO: 923661 - RNA, 19 nt, Artificial Sequence
  Description of Artificial Sequence: Synthetic oligonucleotide
ccuuucuaguuaaagaaag

SEQ ID NO: 923662 - RNA, 19 nt, Artificial Sequence
  Description of Artificial Sequence: Synthetic oligonucleotide
auauuucgcucuucucugg

SEQ ID NO: 923663 - RNA, 19 nt, Artificial Sequence
  Description of Artificial Sequence: Synthetic oligonucleotide
uacaagaccgacucucaga

SEQ ID NO: 923664 - RNA, 19 nt, Artificial Sequence
  Description of Artificial Sequence: Synthetic oligonucleotide
aaggauccaucuuuucggu

SEQ ID NO: 923665 - RNA, 19 nt, Artificial Sequence
  Description of Artificial Sequence: Synthetic oligonucleotide
guaccgacaucauauccag

SEQ ID NO: 923666 - RNA, 19 nt, Artificial Sequence
  Description of Artificial Sequence: Synthetic oligonucleotide
auuguuaaauuguucugua

SEQ ID NO: 923667 - RNA, 19 nt, Artificial Sequence
  Description of Artificial Sequence: Synthetic oligonucleotide
ucggucuaauaccuggaca

SEQ ID NO: 923668 - RNA, 19 nt, Artificial Sequence
  Description of Artificial Sequence: Synthetic oligonucleotide
aguagauagggcaagcggu

SEQ ID NO: 923669 - RNA, 19 nt, Artificial Sequence
  Description of Artificial Sequence: Synthetic oligonucleotide
cccgaauguagaaauagcg

SEQ ID NO: 923670 - RNA, 19 nt, Artificial Sequence
  Description of Artificial Sequence: Synthetic oligonucleotide
cacgucugcccuuuaaccc

SEQ ID NO: 923671 - RNA, 19 nt, Artificial Sequence
  Description of Artificial Sequence: Synthetic oligonucleotide
aucucacuaugaaggaucc

SEQ ID NO: 923672 - RNA, 19 nt, Artificial Sequence
  Description of Artificial Sequence: Synthetic oligonucleotide
aacggguccuuguaagaca

SEQ ID NO: 923673 - RNA, 19 nt, Artificial Sequence
  Description of Artificial Sequence: Synthetic oligonucleotide
aguggacggagcuagccug

SEQ ID NO: 923674 - RNA, 19 nt, Artificial Sequence
  Description of Artificial Sequence: Synthetic oligonucleotide
uuugcggcugucucggccc

SEQ ID NO: 923675 - RNA, 19 nt, Artificial Sequence
  Description of Artificial Sequence: Synthetic oligonucleotide
agacauaaggagacuuggc

SEQ ID NO: 923676 - RNA, 19 nt, Artificial Sequence
  Description of Artificial Sequence: Synthetic oligonucleotide
cuuuagaaccacgcugucg

SEQ ID NO: 923677 - RNA, 19 nt, Artificial Sequence
  Description of Artificial Sequence: Synthetic oligonucleotide
uccacggauaaaugcaaac

SEQ ID NO: 923678 - RNA, 19 nt, Artificial Sequence
  Description of Artificial Sequence: Synthetic oligonucleotide
aaguggacggagcuagccu

SEQ ID NO: 923679 - RNA, 19 nt, Artificial Sequence
  Description of Artificial Sequence: Synthetic oligonucleotide
uugcauaucagaguucauc

SEQ ID NO: 923680 - RNA, 19 nt, Artificial Sequence
  Description of Artificial Sequence: Synthetic oligonucleotide
agucaggucguagguaggc

SEQ ID NO: 923681 - RNA, 19 nt, Artificial Sequence
  Description of Artificial Sequence: Synthetic oligonucleotide
gauaaaugcaaacgugcua

SEQ ID NO: 923682 - RNA, 19 nt, Artificial Sequence
  Description of Artificial Sequence: Synthetic oligonucleotide
uaacagaauaugucaucac

SEQ ID NO: 923683 - RNA, 19 nt, Artificial Sequence
  Description of Artificial Sequence: Synthetic oligonucleotide
ucgaauuuguggcucgcuc

SEQ ID NO: 923684 - RNA, 19 nt, Artificial Sequence
  Description of Artificial Sequence: Synthetic oligonucleotide
accaucauaugaauagaag

SEQ ID NO: 923685 - RNA, 19 nt, Artificial Sequence
  Description of Artificial Sequence: Synthetic oligonucleotide
agguaggcaucacaauauc

SEQ ID NO: 923686 - RNA, 19 nt, Artificial Sequence
  Description of Artificial Sequence: Synthetic oligonucleotide
gauagggcaagcgguacgc

SEQ ID NO: 923687 - RNA, 19 nt, Artificial Sequence
  Description of Artificial Sequence: Synthetic oligonucleotide
ccgaauguagaaauagcgg

SEQ ID NO: 923688 - RNA, 19 nt, Artificial Sequence
  Description of Artificial Sequence: Synthetic oligonucleotide
uuggcauagcccuggaaaa

SEQ ID NO: 923689 - RNA, 19 nt, Artificial Sequence
  Description of Artificial Sequence: Synthetic oligonucleotide
acguuuugggauuucugcu

SEQ ID NO: 923690 - RNA, 19 nt, Artificial Sequence
  Description of Artificial Sequence: Synthetic oligonucleotide
uucuaggacagagucaguc

SEQ ID NO: 923691 - RNA, 19 nt, Artificial Sequence
  Description of Artificial Sequence: Synthetic oligonucleotide
auagcgggcuggaaggacc

SEQ ID NO: 923692 - RNA, 19 nt, Artificial Sequence
  Description of Artificial Sequence: Synthetic oligonucleotide
cucgcucacuuguaaauug

SEQ ID NO: 923693 - RNA, 19 nt, Artificial Sequence
  Description of Artificial Sequence: Synthetic oligonucleotide
gucaucacccauaagauua

SEQ ID NO: 923694 - RNA, 19 nt, Artificial Sequence
  Description of Artificial Sequence: Synthetic oligonucleotide
ccuguguuagcuuguaccg

SEQ ID NO: 923695 - RNA, 19 nt, Artificial Sequence
  Description of Artificial Sequence: Synthetic oligonucleotide
gacucucagaagauccacg

SEQ ID NO: 923696 - RNA, 19 nt, Artificial Sequence
  Description of Artificial Sequence: Synthetic oligonucleotide
aaguauagugacacaggcu

SEQ ID NO: 923697 - RNA, 19 nt, Artificial Sequence
  Description of Artificial Sequence: Synthetic oligonucleotide
uguuagcuuguaccgacau

SEQ ID NO: 923698 - RNA, 19 nt, Artificial Sequence
  Description of Artificial Sequence: Synthetic oligonucleotide
auauccagacuuacucggc

SEQ ID NO: 923699 - RNA, 19 nt, Artificial Sequence
  Description of Artificial Sequence: Synthetic oligonucleotide
agauccacggauaaaugca

SEQ ID NO: 923700 - RNA, 19 nt, Artificial Sequence
  Description of Artificial Sequence: Synthetic oligonucleotide
uccaaaacguuuugggauu

SEQ ID NO: 923701 - RNA, 19 nt, Artificial Sequence
  Description of Artificial Sequence: Synthetic oligonucleotide
ucacuaugaaggauccauc

SEQ ID NO: 923702 - RNA, 19 nt, Artificial Sequence
  Description of Artificial Sequence: Synthetic oligonucleotide
agugccaucaauauuuauu

SEQ ID NO: 923703 - RNA, 19 nt, Artificial Sequence
  Description of Artificial Sequence: Synthetic oligonucleotide
cacuuguaaauuggcauag

SEQ ID NO: 923704 - RNA, 19 nt, Artificial Sequence
  Description of Artificial Sequence: Synthetic oligonucleotide
acuuacucggcccaugguu

SEQ ID NO: 923705 - RNA, 19 nt, Artificial Sequence
  Description of Artificial Sequence: Synthetic oligonucleotide
gaaauuggugaaagcagca

SEQ ID NO: 923706 - RNA, 19 nt, Artificial Sequence
  Description of Artificial Sequence: Synthetic oligonucleotide
gcagcgaaaaugcugaaca

SEQ ID NO: 923707 - RNA, 19 nt, Artificial Sequence
  Description of Artificial Sequence: Synthetic oligonucleotide
acucauuguaaaaguguuc

SEQ ID NO: 923708 - RNA, 19 nt, Artificial Sequence
  Description of Artificial Sequence: Synthetic oligonucleotide
uaaguggacggagcuagcc

SEQ ID NO: 923709 - RNA, 19 nt, Artificial Sequence
  Description of Artificial Sequence: Synthetic oligonucleotide
ccuaaagccaacaugcuca

SEQ ID NO: 923710 - RNA, 19 nt, Artificial Sequence
  Description of Artificial Sequence: Synthetic oligonucleotide
ugccaucaauauuuauuug

SEQ ID NO: 923711 - RNA, 19 nt, Artificial Sequence
  Description of Artificial Sequence: Synthetic oligonucleotide
uggacaguucaucucccgu

SEQ ID NO: 923712 - RNA, 19 nt, Artificial Sequence
  Description of Artificial Sequence: Synthetic oligonucleotide
agggcaagcgguacgcugc

SEQ ID NO: 923713 - RNA, 19 nt, Artificial Sequence
  Description of Artificial Sequence: Synthetic oligonucleotide
aaguaguauggcauccaug

SEQ ID NO: 923714 - RNA, 19 nt, Artificial Sequence
  Description of Artificial Sequence: Synthetic oligonucleotide
ucuuucuccgauggcaugu

SEQ ID NO: 923715 - RNA, 19 nt, Artificial Sequence
  Description of Artificial Sequence: Synthetic oligonucleotide
accgugauguuuaaugucu

SEQ ID NO: 923716 - RNA, 19 nt, Artificial Sequence
  Description of Artificial Sequence: Synthetic oligonucleotide
guugacacaguccccagaa

SEQ ID NO: 923717 - RNA, 19 nt, Artificial Sequence
  Description of Artificial Sequence: Synthetic oligonucleotide
agcagcgaaaaugcugaac

SEQ ID NO: 923718 - RNA, 19 nt, Artificial Sequence
  Description of Artificial Sequence: Synthetic oligonucleotide
uguaagacauaaggagacu

SEQ ID NO: 923719 - RNA, 19 nt, Artificial Sequence
  Description of Artificial Sequence: Synthetic oligonucleotide
gaccgugauguuuaauguc

SEQ ID NO: 923720 - RNA, 19 nt, Artificial Sequence
  Description of Artificial Sequence: Synthetic oligonucleotide
acggauaaaugcaaacgug

SEQ ID NO: 923721 - RNA, 19 nt, Artificial Sequence
  Description of Artificial Sequence: Synthetic oligonucleotide
agcagaucgcucagguugc

SEQ ID NO: 923722 - RNA, 19 nt, Artificial Sequence
  Description of Artificial Sequence: Synthetic oligonucleotide
ugccacagugccaucaaua

SEQ ID NO: 923723 - RNA, 19 nt, Artificial Sequence
  Description of Artificial Sequence: Synthetic oligonucleotide
gccuguguuagcuuguacc

SEQ ID NO: 923724 - RNA, 19 nt, Artificial Sequence
  Description of Artificial Sequence: Synthetic oligonucleotide
cucucgaauuuguggcucg

SEQ ID NO: 923725 - RNA, 19 nt, Artificial Sequence
  Description of Artificial Sequence: Synthetic oligonucleotide
uucucaugguaaacggguc

SEQ ID NO: 923726 - RNA, 19 nt, Artificial Sequence
  Description of Artificial Sequence: Synthetic oligonucleotide
gagugauguuuucuggaca

SEQ ID NO: 923727 - RNA, 19 nt, Artificial Sequence
  Description of Artificial Sequence: Synthetic oligonucleotide
uacaguuaagaagugucuu

SEQ ID NO: 923728 - RNA, 19 nt, Artificial Sequence
  Description of Artificial Sequence: Synthetic oligonucleotide
agcuagccuggguagguag

SEQ ID NO: 923729 - RNA, 19 nt, Artificial Sequence
  Description of Artificial Sequence: Synthetic oligonucleotide
agaauuuaacagucaccaa

SEQ ID NO: 923730 - RNA, 19 nt, Artificial Sequence
  Description of Artificial Sequence: Synthetic oligonucleotide
cugcccuuuaacccgggcc

SEQ ID NO: 923731 - RNA, 19 nt, Artificial Sequence
  Description of Artificial Sequence: Synthetic oligonucleotide
augguaaacggguccuugu

SEQ ID NO: 923732 - RNA, 19 nt, Artificial Sequence
  Description of Artificial Sequence: Synthetic oligonucleotide
gcuaaguggacggagcuag

SEQ ID NO: 923733 - RNA, 19 nt, Artificial Sequence
  Description of Artificial Sequence: Synthetic oligonucleotide
cuuguaccgacaucauauc

SEQ ID NO: 923734 - RNA, 19 nt, Artificial Sequence
  Description of Artificial Sequence: Synthetic oligonucleotide
agaauguggcucgacccuc

SEQ ID NO: 923735 - RNA, 19 nt, Artificial Sequence
  Description of Artificial Sequence: Synthetic oligonucleotide
uagggcaagcgguacgcug

SEQ ID NO: 923736 - RNA, 19 nt, Artificial Sequence
  Description of Artificial Sequence: Synthetic oligonucleotide
ucaggucguagguaggcau

SEQ ID NO: 923737 - RNA, 19 nt, Artificial Sequence
  Description of Artificial Sequence: Synthetic oligonucleotide
cuaaguuuuaccagcucua

SEQ ID NO: 923738 - RNA, 19 nt, Artificial Sequence
  Description of Artificial Sequence: Synthetic oligonucleotide
aagaucggcuggauguuug

SEQ ID NO: 923739 - RNA, 19 nt, Artificial Sequence
  Description of Artificial Sequence: Synthetic oligonucleotide
ccuaccaguagauagggca

SEQ ID NO: 923740 - RNA, 19 nt, Artificial Sequence
  Description of Artificial Sequence: Synthetic oligonucleotide
aagcgguacgcugccacag

SEQ ID NO: 923741 - RNA, 19 nt, Artificial Sequence
  Description of Artificial Sequence: Synthetic oligonucleotide
acggagcuagccuggguag

SEQ ID NO: 923742 - RNA, 19 nt, Artificial Sequence
  Description of Artificial Sequence: Synthetic oligonucleotide
uucauacccucucgaauuu

SEQ ID NO: 923743 - RNA, 19 nt, Artificial Sequence
  Description of Artificial Sequence: Synthetic oligonucleotide
uuagaaccacgcugucgcc

SEQ ID NO: 923744 - RNA, 19 nt, Artificial Sequence
  Description of Artificial Sequence: Synthetic oligonucleotide
aaaagaucggcuggauguu

SEQ ID NO: 923745 - RNA, 19 nt, Artificial Sequence
  Description of Artificial Sequence: Synthetic oligonucleotide
ugguaaacggguccuugua

SEQ ID NO: 923746 - RNA, 19 nt, Artificial Sequence
  Description of Artificial Sequence: Synthetic oligonucleotide
uuuaaccuggaacgccuuu

SEQ ID NO: 923747 - RNA, 19 nt, Artificial Sequence
  Description of Artificial Sequence: Synthetic oligonucleotide
uccucaccuuucuaguuaa

SEQ ID NO: 923748 - RNA, 19 nt, Artificial Sequence
  Description of Artificial Sequence: Synthetic oligonucleotide
cucaccaagagucuugaua

SEQ ID NO: 923749 - RNA, 19 nt, Artificial Sequence
  Description of Artificial Sequence: Synthetic oligonucleotide
ggaaaagaucggcuggaug

SEQ ID NO: 923750 - RNA, 19 nt, Artificial Sequence
  Description of Artificial Sequence: Synthetic oligonucleotide
uggaacgccuuuucaccug

SEQ ID NO: 923751 - RNA, 19 nt, Artificial Sequence
  Description of Artificial Sequence: Synthetic oligonucleotide
ucggcccaugguuucuagg

SEQ ID NO: 923752 - RNA, 19 nt, Artificial Sequence
  Description of Artificial Sequence: Synthetic oligonucleotide
gaaaugugccagaucuuuc

SEQ ID NO: 923753 - RNA, 19 nt, Artificial Sequence
  Description of Artificial Sequence: Synthetic oligonucleotide
ugcuaaguuuuaccagcuc

SEQ ID NO: 923754 - RNA, 19 nt, Artificial Sequence
  Description of Artificial Sequence: Synthetic oligonucleotide
caacucuagugaauugcuc

SEQ ID NO: 923755 - RNA, 19 nt, Artificial Sequence
  Description of Artificial Sequence: Synthetic oligonucleotide
guaaauuggcauagcccug

SEQ ID NO: 923756 - RNA, 19 nt, Artificial Sequence
  Description of Artificial Sequence: Synthetic oligonucleotide
caguuaagaagugucuuca

SEQ ID NO: 923757 - RNA, 19 nt, Artificial Sequence
  Description of Artificial Sequence: Synthetic oligonucleotide
cugcauaagaagaaacacu

SEQ ID NO: 923758 - RNA, 19 nt, Artificial Sequence
  Description of Artificial Sequence: Synthetic oligonucleotide
auaugucaucacccauaag

SEQ ID NO: 923759 - RNA, 19 nt, Artificial Sequence
  Description of Artificial Sequence: Synthetic oligonucleotide
ucgacccucuucauacccu

SEQ ID NO: 923760 - RNA, 19 nt, Artificial Sequence
  Description of Artificial Sequence: Synthetic oligonucleotide
accguagggaaaugugcca

SEQ ID NO: 923761 - RNA, 19 nt, Artificial Sequence
  Description of Artificial Sequence: Synthetic oligonucleotide
uuuuaaccuggaacgccuu

SEQ ID NO: 923762 - RNA, 19 nt, Artificial Sequence
  Description of Artificial Sequence: Synthetic oligonucleotide
aucaaccguagggaaaugu

SEQ ID NO: 923763 - RNA, 19 nt, Artificial Sequence
  Description of Artificial Sequence: Synthetic oligonucleotide
gucuaauaccuggacacca

SEQ ID NO: 923764 - RNA, 19 nt, Artificial Sequence
  Description of Artificial Sequence: Synthetic oligonucleotide
uacaccuuauuguccuuua

SEQ ID NO: 923765 - RNA, 19 nt, Artificial Sequence
  Description of Artificial Sequence: Synthetic oligonucleotide
caugguaaacggguccuug

SEQ ID NO: 923766 - RNA, 19 nt, Artificial Sequence
  Description of Artificial Sequence: Synthetic oligonucleotide
acccauaagauuauuucuu

SEQ ID NO: 923767 - RNA, 19 nt, Artificial Sequence
  Description of Artificial Sequence: Synthetic oligonucleotide
auccucaccuuucuaguua

SEQ ID NO: 923768 - RNA, 19 nt, Artificial Sequence
  Description of Artificial Sequence: Synthetic oligonucleotide
gguauccacggcccgaaug

SEQ ID NO: 923769 - RNA, 19 nt, Artificial Sequence
  Description of Artificial Sequence: Synthetic oligonucleotide
cccauaagauuauuucuug

SEQ ID NO: 923770 - RNA, 19 nt, Artificial Sequence
  Description of Artificial Sequence: Synthetic oligonucleotide
cacggauaaaugcaaacgu

SEQ ID NO: 923771 - RNA, 19 nt, Artificial Sequence
  Description of Artificial Sequence: Synthetic oligonucleotide
cuaaguggacggagcuagc

SEQ ID NO: 923772 - RNA, 19 nt, Artificial Sequence
  Description of Artificial Sequence: Synthetic oligonucleotide
ucugcccuuuaacccgggc

SEQ ID NO: 923773 - RNA, 19 nt, Artificial Sequence
  Description of Artificial Sequence: Synthetic oligonucleotide
ugagguauccacggcccga

SEQ ID NO: 923774 - RNA, 19 nt, Artificial Sequence
  Description of Artificial Sequence: Synthetic oligonucleotide
guuagcuuguaccgacauc

SEQ ID NO: 923775 - RNA, 19 nt, Artificial Sequence
  Description of Artificial Sequence: Synthetic oligonucleotide
uuggugaaagcagcaucga

SEQ ID NO: 923776 - RNA, 19 nt, Artificial Sequence
  Description of Artificial Sequence: Synthetic oligonucleotide
cuaugaaggauccaucuuu

SEQ ID NO: 923777 - RNA, 19 nt, Artificial Sequence
  Description of Artificial Sequence: Synthetic oligonucleotide
cuaccaguagauagggcaa

SEQ ID NO: 923778 - RNA, 19 nt, Artificial Sequence
  Description of Artificial Sequence: Synthetic oligonucleotide
uagaaccacgcugucgccu

SEQ ID NO: 923779 - RNA, 19 nt, Artificial Sequence
  Description of Artificial Sequence: Synthetic oligonucleotide
ggcccgaauguagaaauag

SEQ ID NO: 923780 - RNA, 19 nt, Artificial Sequence
  Description of Artificial Sequence: Synthetic oligonucleotide
uagauagggcaagcgguac

SEQ ID NO: 923781 - RNA, 19 nt, Artificial Sequence
  Description of Artificial Sequence: Synthetic oligonucleotide
caccaucauaugaauagaa

SEQ ID NO: 923782 - RNA, 19 nt, Artificial Sequence
  Description of Artificial Sequence: Synthetic oligonucleotide
cggucuaauaccuggacac

SEQ ID NO: 923783 - RNA, 19 nt, Artificial Sequence
  Description of Artificial Sequence: Synthetic oligonucleotide
cuggguguuuucugcuaag

SEQ ID NO: 923784 - RNA, 19 nt, Artificial Sequence
  Description of Artificial Sequence: Synthetic oligonucleotide
acaccaacucuagugaauu

SEQ ID NO: 923785 - RNA, 19 nt, Artificial Sequence
  Description of Artificial Sequence: Synthetic oligonucleotide
ucauacccucucgaauuug

SEQ ID NO: 923786 - RNA, 19 nt, Artificial Sequence
  Description of Artificial Sequence: Synthetic oligonucleotide
cacuaugaaggauccaucu

SEQ ID NO: 923787 - RNA, 19 nt, Artificial Sequence
  Description of Artificial Sequence: Synthetic oligonucleotide
uugacacaguccccagaaa

SEQ ID NO: 923788 - RNA, 19 nt, Artificial Sequence
  Description of Artificial Sequence: Synthetic oligonucleotide
gauccacggauaaaugcaa

SEQ ID NO: 923789 - RNA, 19 nt, Artificial Sequence
  Description of Artificial Sequence: Synthetic oligonucleotide
cacccauaagauuauuucu

SEQ ID NO: 923790 - RNA, 19 nt, Artificial Sequence
  Description of Artificial Sequence: Synthetic oligonucleotide
uagcgggcuggaaggacca

SEQ ID NO: 923791 - RNA, 19 nt, Artificial Sequence
  Description of Artificial Sequence: Synthetic oligonucleotide
cacaauaucccuggaaucu

SEQ ID NO: 923792 - RNA, 19 nt, Artificial Sequence
  Description of Artificial Sequence: Synthetic oligonucleotide
ccugagguauccacggccc

SEQ ID NO: 923793 - RNA, 19 nt, Artificial Sequence
  Description of Artificial Sequence: Synthetic oligonucleotide
cuguucuccugagguaucc

SEQ ID NO: 923794 - RNA, 19 nt, Artificial Sequence
  Description of Artificial Sequence: Synthetic oligonucleotide
ucucgaauuuguggcucgc

SEQ ID NO: 923795 - RNA, 19 nt, Artificial Sequence
  Description of Artificial Sequence: Synthetic oligonucleotide
cagucaggucguagguagg

SEQ ID NO: 923796 - RNA, 19 nt, Artificial Sequence
  Description of Artificial Sequence: Synthetic oligonucleotide
gucguagguaggcaucaca

SEQ ID NO: 923797 - RNA, 19 nt, Artificial Sequence
  Description of Artificial Sequence: Synthetic oligonucleotide
agaaccacgcugucgccua

SEQ ID NO: 923798 - RNA, 19 nt, Artificial Sequence
  Description of Artificial Sequence: Synthetic oligonucleotide
guagaaauagcgggcugga

SEQ ID NO: 923799 - RNA, 19 nt, Artificial Sequence
  Description of Artificial Sequence: Synthetic oligonucleotide
caccaacucuagugaauug

SEQ ID NO: 923800 - RNA, 19 nt, Artificial Sequence
  Description of Artificial Sequence: Synthetic oligonucleotide
cuccacaucuggcauccuc

SEQ ID NO: 923801 - RNA, 19 nt, Artificial Sequence
  Description of Artificial Sequence: Synthetic oligonucleotide
acgugcuaaguggacggag

SEQ ID NO: 923802 - RNA, 19 nt, Artificial Sequence
  Description of Artificial Sequence: Synthetic oligonucleotide
caggucguagguaggcauc

SEQ ID NO: 923803 - RNA, 19 nt, Artificial Sequence
  Description of Artificial Sequence: Synthetic oligonucleotide
acaccuuauuguccuuuaa

SEQ ID NO: 923804 - RNA, 19 nt, Artificial Sequence
  Description of Artificial Sequence: Synthetic oligonucleotide
caagaccgacucucagaag

SEQ ID NO: 923805 - RNA, 19 nt, Artificial Sequence
  Description of Artificial Sequence: Synthetic oligonucleotide
cauaugaauagaagguauu

SEQ ID NO: 923806 - RNA, 19 nt, Artificial Sequence
  Description of Artificial Sequence: Synthetic oligonucleotide
aacgugcuaaguggacgga

SEQ ID NO: 923807 - RNA, 19 nt, Artificial Sequence
  Description of Artificial Sequence: Synthetic oligonucleotide
uaccgacaucauauccaga

SEQ ID NO: 923808 - RNA, 19 nt, Artificial Sequence
  Description of Artificial Sequence: Synthetic oligonucleotide
augaucuuuugcccacuua

SEQ ID NO: 923809 - RNA, 19 nt, Artificial Sequence
  Description of Artificial Sequence: Synthetic oligonucleotide
agcuuguaccgacaucaua

SEQ ID NO: 923810 - RNA, 19 nt, Artificial Sequence
  Description of Artificial Sequence: Synthetic oligonucleotide
cacgcugucgccuaccagu

SEQ ID NO: 923811 - RNA, 19 nt, Artificial Sequence
  Description of Artificial Sequence: Synthetic oligonucleotide
cuggaaggaccacgucugc

SEQ ID NO: 923812 - RNA, 19 nt, Artificial Sequence
  Description of Artificial Sequence: Synthetic oligonucleotide
aagcagcgaaaaugcugaa

SEQ ID NO: 923813 - RNA, 19 nt, Artificial Sequence
  Description of Artificial Sequence: Synthetic oligonucleotide
cucacuaugaaggauccau

SEQ ID NO: 923814 - RNA, 19 nt, Artificial Sequence
  Description of Artificial Sequence: Synthetic oligonucleotide
auacaggcucucaucgugu

SEQ ID NO: 923815 - RNA, 19 nt, Artificial Sequence
  Description of Artificial Sequence: Synthetic oligonucleotide
ucucacuaugaaggaucca

SEQ ID NO: 923816 - RNA, 19 nt, Artificial Sequence
  Description of Artificial Sequence: Synthetic oligonucleotide
uggcucgcucacuuguaaa

SEQ ID NO: 923817 - RNA, 19 nt, Artificial Sequence
  Description of Artificial Sequence: Synthetic oligonucleotide
cuuuugcccacuuaagcuu

SEQ ID NO: 923818 - RNA, 19 nt, Artificial Sequence
  Description of Artificial Sequence: Synthetic oligonucleotide
gcccacuuaagcuuuucca

SEQ ID NO: 923819 - RNA, 19 nt, Artificial Sequence
  Description of Artificial Sequence: Synthetic oligonucleotide
aggucguagguaggcauca

SEQ ID NO: 923820 - RNA, 19 nt, Artificial Sequence
  Description of Artificial Sequence: Synthetic oligonucleotide
uguugaccgugauguuuaa

SEQ ID NO: 923821 - RNA, 19 nt, Artificial Sequence
  Description of Artificial Sequence: Synthetic oligonucleotide
guggacggagcuagccugg

SEQ ID NO: 923822 - RNA, 19 nt, Artificial Sequence
  Description of Artificial Sequence: Synthetic oligonucleotide
uggacggagcuagccuggg

SEQ ID NO: 923823 - RNA, 19 nt, Artificial Sequence
  Description of Artificial Sequence: Synthetic oligonucleotide
guaggggcgacgguggcca

SEQ ID NO: 923824 - RNA, 19 nt, Artificial Sequence
  Description of Artificial Sequence: Synthetic oligonucleotide
caggaucaaccguagggaa

SEQ ID NO: 923825 - RNA, 19 nt, Artificial Sequence
  Description of Artificial Sequence: Synthetic oligonucleotide
uacaggcucucaucguguu

SEQ ID NO: 923826 - RNA, 19 nt, Artificial Sequence
  Description of Artificial Sequence: Synthetic oligonucleotide
guagauagggcaagcggua

SEQ ID NO: 923827 - RNA, 19 nt, Artificial Sequence
  Description of Artificial Sequence: Synthetic oligonucleotide
gcuuguaccgacaucauau

SEQ ID NO: 923828 - RNA, 19 nt, Artificial Sequence
  Description of Artificial Sequence: Synthetic oligonucleotide
ggucuaauaccuggacacc

SEQ ID NO: 923829 - RNA, 19 nt, Artificial Sequence
  Description of Artificial Sequence: Synthetic oligonucleotide
caucauauccagacuuacu

SEQ ID NO: 923830 - RNA, 19 nt, Artificial Sequence
  Description of Artificial Sequence: Synthetic oligonucleotide
guaagacauaaggagacuu

SEQ ID NO: 923831 - RNA, 19 nt, Artificial Sequence
  Description of Artificial Sequence: Synthetic oligonucleotide
cuccgauggcaugugcaag

SEQ ID NO: 923832 - RNA, 19 nt, Artificial Sequence
  Description of Artificial Sequence: Synthetic oligonucleotide
agaguucaucuuuggucuu

SEQ ID NO: 923833 - RNA, 19 nt, Artificial Sequence
  Description of Artificial Sequence: Synthetic oligonucleotide
ccauauuucgcucuucucu

SEQ ID NO: 923834 - RNA, 19 nt, Artificial Sequence
  Description of Artificial Sequence: Synthetic oligonucleotide
gaucaaccguagggaaaug

SEQ ID NO: 923835 - RNA, 19 nt, Artificial Sequence
  Description of Artificial Sequence: Synthetic oligonucleotide
aggaucaaccguagggaaa

SEQ ID NO: 923836 - RNA, 19 nt, Artificial Sequence
  Description of Artificial Sequence: Synthetic oligonucleotide
cgugcuaaguggacggagc

SEQ ID NO: 923837 - RNA, 19 nt, Artificial Sequence
  Description of Artificial Sequence: Synthetic oligonucleotide
gaaggaccacgucugcccu

SEQ ID NO: 923838 - RNA, 19 nt, Artificial Sequence
  Description of Artificial Sequence: Synthetic oligonucleotide
aaggaccacgucugcccuu

SEQ ID NO: 923839 - RNA, 19 nt, Artificial Sequence
  Description of Artificial Sequence: Synthetic oligonucleotide
agcgguacgcugccacagu

SEQ ID NO: 923840 - RNA, 19 nt, Artificial Sequence
  Description of Artificial Sequence: Synthetic oligonucleotide
gguuucuaggacagaguca

SEQ ID NO: 923841 - RNA, 19 nt, Artificial Sequence
  Description of Artificial Sequence: Synthetic oligonucleotide
acggguccuuguaagacau

SEQ ID NO: 923842 - RNA, 19 nt, Artificial Sequence
  Description of Artificial Sequence: Synthetic oligonucleotide
acauguugaccgugauguu

SEQ ID NO: 923843 - RNA, 19 nt, Artificial Sequence
  Description of Artificial Sequence: Synthetic oligonucleotide
uuccuuucccagggagggc

SEQ ID NO: 923844 - RNA, 19 nt, Artificial Sequence
  Description of Artificial Sequence: Synthetic oligonucleotide
ucggcggucugggcaagug

SEQ ID NO: 923845 - RNA, 19 nt, Artificial Sequence
  Description of Artificial Sequence: Synthetic oligonucleotide
cccuggaaucuguggagcc

SEQ ID NO: 923846 - RNA, 19 nt, Artificial Sequence
  Description of Artificial Sequence: Synthetic oligonucleotide
cuguguuagcuuguaccga

SEQ ID NO: 923847 - RNA, 19 nt, Artificial Sequence
  Description of Artificial Sequence: Synthetic oligonucleotide
ucgaugagcucuggguguu

SEQ ID NO: 923848 - RNA, 19 nt, Artificial Sequence
  Description of Artificial Sequence: Synthetic oligonucleotide
caagcgguacgcugccaca

SEQ ID NO: 923849 - RNA, 19 nt, Artificial Sequence
  Description of Artificial Sequence: Synthetic oligonucleotide
cagaauguggcucgacccu

SEQ ID NO: 923850 - RNA, 19 nt, Artificial Sequence
  Description of Artificial Sequence: Synthetic oligonucleotide
ucaugguaaacggguccuu

SEQ ID NO: 923851 - RNA, 19 nt, Artificial Sequence
  Description of Artificial Sequence: Synthetic oligonucleotide
cuggaacgccuuuucaccu

SEQ ID NO: 923852 - RNA, 19 nt, Artificial Sequence
  Description of Artificial Sequence: Synthetic oligonucleotide
gaccacgucugcccuuuaa

SEQ ID NO: 923853 - RNA, 19 nt, Artificial Sequence
  Description of Artificial Sequence: Synthetic oligonucleotide
gcccgaauguagaaauagc

SEQ ID NO: 923854 - RNA, 19 nt, Artificial Sequence
  Description of Artificial Sequence: Synthetic oligonucleotide
ucggccccuccagacagcu

SEQ ID NO: 923855 - RNA, 19 nt, Artificial Sequence
  Description of Artificial Sequence: Synthetic oligonucleotide
gagguauccacggcccgaa

SEQ ID NO: 923856 - RNA, 19 nt, Artificial Sequence
  Description of Artificial Sequence: Synthetic oligonucleotide
auagggcaagcgguacgcu

SEQ ID NO: 923857 - RNA, 19 nt, Artificial Sequence
  Description of Artificial Sequence: Synthetic oligonucleotide
uacucggcccaugguuucu

SEQ ID NO: 923858 - RNA, 19 nt, Artificial Sequence
  Description of Artificial Sequence: Synthetic oligonucleotide
agaccgacucucagaagau

SEQ ID NO: 923859 - RNA, 19 nt, Artificial Sequence
  Description of Artificial Sequence: Synthetic oligonucleotide
ccguagggaaaugugccag

SEQ ID NO: 923860 - RNA, 19 nt, Artificial Sequence
  Description of Artificial Sequence: Synthetic oligonucleotide
gcgaaaaugcugaacauuu

SEQ ID NO: 923861 - RNA, 19 nt, Artificial Sequence
  Description of Artificial Sequence: Synthetic oligonucleotide
guggcucgcucacuuguaa

SEQ ID NO: 923862 - RNA, 19 nt, Artificial Sequence
  Description of Artificial Sequence: Synthetic oligonucleotide
guauagugacacaggcucu

SEQ ID NO: 923863 - RNA, 19 nt, Artificial Sequence
  Description of Artificial Sequence: Synthetic oligonucleotide
gacuuacucggcccauggu

SEQ ID NO: 923864 - RNA, 19 nt, Artificial Sequence
  Description of Artificial Sequence: Synthetic oligonucleotide
gucaggucguagguaggca

SEQ ID NO: 923865 - RNA, 19 nt, Artificial Sequence
  Description of Artificial Sequence: Synthetic oligonucleotide
cucaugguaaacggguccu

SEQ ID NO: 923866 - RNA, 19 nt, Artificial Sequence
  Description of Artificial Sequence: Synthetic oligonucleotide
gcgguacgcugccacagug

SEQ ID NO: 923867 - RNA, 19 nt, Artificial Sequence
  Description of Artificial Sequence: Synthetic oligonucleotide
gcaaacgugcuaaguggac

SEQ ID NO: 923868 - RNA, 19 nt, Artificial Sequence
  Description of Artificial Sequence: Synthetic oligonucleotide
gucuaucuucagacuucug

SEQ ID NO: 923869 - RNA, 19 nt, Artificial Sequence
  Description of Artificial Sequence: Synthetic oligonucleotide
guguuagcuuguaccgaca

SEQ ID NO: 923870 - RNA, 19 nt, Artificial Sequence
  Description of Artificial Sequence: Synthetic oligonucleotide
cuagucucucuuugcggcu

SEQ ID NO: 923871 - RNA, 19 nt, Artificial Sequence
  Description of Artificial Sequence: Synthetic oligonucleotide
cauguugaccgugauguuu

SEQ ID NO: 923872 - RNA, 19 nt, Artificial Sequence
  Description of Artificial Sequence: Synthetic oligonucleotide
ugucgccuaccaguagaua

SEQ ID NO: 923873 - RNA, 19 nt, Artificial Sequence
  Description of Artificial Sequence: Synthetic oligonucleotide
cccauauuucgcucuucuc

SEQ ID NO: 923874 - RNA, 19 nt, Artificial Sequence
  Description of Artificial Sequence: Synthetic oligonucleotide
ggaucaaccguagggaaau

SEQ ID NO: 923875 - RNA, 19 nt, Artificial Sequence
  Description of Artificial Sequence: Synthetic oligonucleotide
gaucgcucagguugcuuuu

SEQ ID NO: 923876 - RNA, 19 nt, Artificial Sequence
  Description of Artificial Sequence: Synthetic oligonucleotide
aggcucucaucguguuuaa

SEQ ID NO: 923877 - RNA, 19 nt, Artificial Sequence
  Description of Artificial Sequence: Synthetic oligonucleotide
cagaagauccacggauaaa

SEQ ID NO: 923878 - RNA, 19 nt, Artificial Sequence
  Description of Artificial Sequence: Synthetic oligonucleotide
aggaccacgucugcccuuu

SEQ ID NO: 923879 - RNA, 19 nt, Artificial Sequence
  Description of Artificial Sequence: Synthetic oligonucleotide
cucggccccuccagacagc

SEQ ID NO: 923880 - RNA, 19 nt, Artificial Sequence
  Description of Artificial Sequence: Synthetic oligonucleotide
gguaggggcgacgguggcc

SEQ ID NO: 923881 - RNA, 19 nt, Artificial Sequence
  Description of Artificial Sequence: Synthetic oligonucleotide
caaugggcccauacaggcu

SEQ ID NO: 923882 - RNA, 19 nt, Artificial Sequence
  Description of Artificial Sequence: Synthetic oligonucleotide
gcucgacccucuucauacc

SEQ ID NO: 923883 - RNA, 19 nt, Artificial Sequence
  Description of Artificial Sequence: Synthetic oligonucleotide
gggcaagcgguacgcugcc

SEQ ID NO: 923884 - RNA, 19 nt, Artificial Sequence
  Description of Artificial Sequence: Synthetic oligonucleotide
ggcucgcucacuuguaaau

SEQ ID NO: 923885 - RNA, 19 nt, Artificial Sequence
  Description of Artificial Sequence: Synthetic oligonucleotide
ggccuguguuagcuuguac

SEQ ID NO: 923886 - RNA, 19 nt, Artificial Sequence
  Description of Artificial Sequence: Synthetic oligonucleotide
ggcgacgguggccaguucu

SEQ ID NO: 923887 - RNA, 19 nt, Artificial Sequence
  Description of Artificial Sequence: Synthetic oligonucleotide
ccgacucucagaagaucca

SEQ ID NO: 923888 - RNA, 19 nt, Artificial Sequence
  Description of Artificial Sequence: Synthetic oligonucleotide
uucggcggucugggcaagu

SEQ ID NO: 923889 - RNA, 19 nt, Artificial Sequence
  Description of Artificial Sequence: Synthetic oligonucleotide
cacggcccgaauguagaaa

SEQ ID NO: 923890 - RNA, 19 nt, Artificial Sequence
  Description of Artificial Sequence: Synthetic oligonucleotide
cggcccaugguuucuagga

SEQ ID NO: 923891 - RNA, 19 nt, Artificial Sequence
  Description of Artificial Sequence: Synthetic oligonucleotide
cugucgccuaccaguagau

SEQ ID NO: 923892 - RNA, 19 nt, Artificial Sequence
  Description of Artificial Sequence: Synthetic oligonucleotide
cuucggcggucugggcaag

SEQ ID NO: 923893 - RNA, 19 nt, Artificial Sequence
  Description of Artificial Sequence: Synthetic oligonucleotide
gagcuagccuggguaggua

SEQ ID NO: 923894 - RNA, 19 nt, Artificial Sequence
  Description of Artificial Sequence: Synthetic oligonucleotide
gcggucugggcaaguguug

SEQ ID NO: 923895 - RNA, 19 nt, Artificial Sequence
  Description of Artificial Sequence: Synthetic oligonucleotide
gccuaccaguagauagggc

SEQ ID NO: 923896 - RNA, 19 nt, Artificial Sequence
  Description of Artificial Sequence: Synthetic oligonucleotide
ccguagccaggcugcacug

SEQ ID NO: 923897 - RNA, 19 nt, Artificial Sequence
  Description of Artificial Sequence: Synthetic oligonucleotide
cucgaauuuguggcucgcu

SEQ ID NO: 923898 - RNA, 19 nt, Artificial Sequence
  Description of Artificial Sequence: Synthetic oligonucleotide
gcccuuuaacccgggcccc

SEQ ID NO: 923899 - RNA, 19 nt, Artificial Sequence
  Description of Artificial Sequence: Synthetic oligonucleotide
guugaccgugauguuuaau

SEQ ID NO: 923900 - RNA, 19 nt, Artificial Sequence
  Description of Artificial Sequence: Synthetic oligonucleotide
cagugccaucaauauuuau

SEQ ID NO: 923901 - RNA, 19 nt, Artificial Sequence
  Description of Artificial Sequence: Synthetic oligonucleotide
aggggcgacgguggccagu

SEQ ID NO: 923902 - RNA, 19 nt, Artificial Sequence
  Description of Artificial Sequence: Synthetic oligonucleotide
ggagacuuggccacauguu

SEQ ID NO: 923903 - RNA, 19 nt, Artificial Sequence
  Description of Artificial Sequence: Synthetic oligonucleotide
cuggauguuuggguuugau

SEQ ID NO: 923904 - RNA, 19 nt, Artificial Sequence
  Description of Artificial Sequence: Synthetic oligonucleotide
ccgugauguuuaaugucua

SEQ ID NO: 923905 - RNA, 19 nt, Artificial Sequence
  Description of Artificial Sequence: Synthetic oligonucleotide
ccgacaucauauccagacu

SEQ ID NO: 923906 - RNA, 19 nt, Artificial Sequence
  Description of Artificial Sequence: Synthetic oligonucleotide
gugcaaggaaagagaucau

SEQ ID NO: 923907 - RNA, 19 nt, Artificial Sequence
  Description of Artificial Sequence: Synthetic oligonucleotide
ggcggucugggcaaguguu

SEQ ID NO: 923908 - RNA, 19 nt, Artificial Sequence
  Description of Artificial Sequence: Synthetic oligonucleotide
gccacauguugaccgugau

SEQ ID NO: 923909 - RNA, 19 nt, Artificial Sequence
  Description of Artificial Sequence: Synthetic oligonucleotide
cgugauguuuaaugucuau

SEQ ID NO: 923910 - RNA, 19 nt, Artificial Sequence
  Description of Artificial Sequence: Synthetic oligonucleotide
gcucgcucacuuguaaauu

SEQ ID NO: 923911 - RNA, 19 nt, Artificial Sequence
  Description of Artificial Sequence: Synthetic oligonucleotide
caucacccauaagauuauu

SEQ ID NO: 923912 - RNA, 19 nt, Artificial Sequence
  Description of Artificial Sequence: Synthetic oligonucleotide
ggacggagcuagccugggu

SEQ ID NO: 923913 - RNA, 19 nt, Artificial Sequence
  Description of Artificial Sequence: Synthetic oligonucleotide
gcgacgguggccaguucua

SEQ ID NO: 923914 - RNA, 19 nt, Artificial Sequence
  Description of Artificial Sequence: Synthetic oligonucleotide
ccacggcccgaauguagaa

SEQ ID NO: 923915 - RNA, 19 nt, Artificial Sequence
  Description of Artificial Sequence: Synthetic oligonucleotide
ggcaagcgguacgcugcca

SEQ ID NO: 923916 - RNA, 19 nt, Artificial Sequence
  Description of Artificial Sequence: Synthetic oligonucleotide
ccuggacaccaacucuagu

SEQ ID NO: 923917 - RNA, 19 nt, Artificial Sequence
  Description of Artificial Sequence: Synthetic oligonucleotide
gggccuguguuagcuugua

SEQ ID NO: 923918 - RNA, 19 nt, Artificial Sequence
  Description of Artificial Sequence: Synthetic oligonucleotide
gggcaaguguugacacagu

SEQ ID NO: 923919 - RNA, 19 nt, Artificial Sequence
  Description of Artificial Sequence: Synthetic oligonucleotide
cagaucgcucagguugcuu

SEQ ID NO: 923920 - RNA, 19 nt, Artificial Sequence
  Description of Artificial Sequence: Synthetic oligonucleotide
cgggcuggaaggaccacgu

SEQ ID NO: 923921 - RNA, 19 nt, Artificial Sequence
  Description of Artificial Sequence: Synthetic oligonucleotide
ccaaaacguuuugggauuu

SEQ ID NO: 923922 - RNA, 19 nt, Artificial Sequence
  Description of Artificial Sequence: Synthetic oligonucleotide
gggcgacgguggccaguuc

SEQ ID NO: 923923 - RNA, 19 nt, Artificial Sequence
  Description of Artificial Sequence: Synthetic oligonucleotide
ggaccacgucugcccuuua

SEQ ID NO: 923924 - RNA, 19 nt, Artificial Sequence
  Description of Artificial Sequence: Synthetic oligonucleotide
cggcccgaauguagaaaua

SEQ ID NO: 923925 - RNA, 19 nt, Artificial Sequence
  Description of Artificial Sequence: Synthetic oligonucleotide
auguccaaugaauagaggc

SEQ ID NO: 923926 - RNA, 19 nt, Artificial Sequence
  Description of Artificial Sequence: Synthetic oligonucleotide
uuuugauagugcuagacag

SEQ ID NO: 923927 - RNA, 19 nt, Artificial Sequence
  Description of Artificial Sequence: Synthetic oligonucleotide
uccaugaggauauaggagg

SEQ ID NO: 923928 - RNA, 19 nt, Artificial Sequence
  Description of Artificial Sequence: Synthetic oligonucleotide
uuguagauaucaaagagac

SEQ ID NO: 923929 - RNA, 19 nt, Artificial Sequence
  Description of Artificial Sequence: Synthetic oligonucleotide
aucugagcgauucaggccc

SEQ ID NO: 923930 - RNA, 19 nt, Artificial Sequence
  Description of Artificial Sequence: Synthetic oligonucleotide
uuauuuagggcagagcugg

SEQ ID NO: 923931 - RNA, 19 nt, Artificial Sequence
  Description of Artificial Sequence: Synthetic oligonucleotide
aaucugagcgauucaggcc

SEQ ID NO: 923932 - RNA, 19 nt, Artificial Sequence
  Description of Artificial Sequence: Synthetic oligonucleotide
aaagucuaugcccuccuac

SEQ ID NO: 923933 - RNA, 19 nt, Artificial Sequence
  Description of Artificial Sequence: Synthetic oligonucleotide
ucuaauggaagcauaacuc

SEQ ID NO: 923934 - RNA, 19 nt, Artificial Sequence
  Description of Artificial Sequence: Synthetic oligonucleotide
uuugguccgaagcagaugc

SEQ ID NO: 923935 - RNA, 19 nt, Artificial Sequence
  Description of Artificial Sequence: Synthetic oligonucleotide
ucggaaguaaaccacagca

SEQ ID NO: 923936 - RNA, 19 nt, Artificial Sequence
  Description of Artificial Sequence: Synthetic oligonucleotide
uuuucgccggauuacaugg

SEQ ID NO: 923937 - RNA, 19 nt, Artificial Sequence
  Description of Artificial Sequence: Synthetic oligonucleotide
uuagcugagccauagagcu

SEQ ID NO: 923938 - RNA, 19 nt, Artificial Sequence
  Description of Artificial Sequence: Synthetic oligonucleotide
auaguguugauuucaaucu

SEQ ID NO: 923939 - RNA, 19 nt, Artificial Sequence
  Description of Artificial Sequence: Synthetic oligonucleotide
uagagaaccccuuucagag

SEQ ID NO: 923940 - RNA, 19 nt, Artificial Sequence
  Description of Artificial Sequence: Synthetic oligonucleotide
aagacaaguuccccuaagg

SEQ ID NO: 923941 - RNA, 19 nt, Artificial Sequence
  Description of Artificial Sequence: Synthetic oligonucleotide
uucuaauggaagcauaacu

SEQ ID NO: 923942 - RNA, 19 nt, Artificial Sequence
  Description of Artificial Sequence: Synthetic oligonucleotide
ucgguuuuggucuagagaa

SEQ ID NO: 923943 - RNA, 19 nt, Artificial Sequence
  Description of Artificial Sequence: Synthetic oligonucleotide
ucauuguugcuuuauuuag

SEQ ID NO: 923944 - RNA, 19 nt, Artificial Sequence
  Description of Artificial Sequence: Synthetic oligonucleotide
uguccaaugaauagaggcc

SEQ ID NO: 923945 - RNA, 19 nt, Artificial Sequence
  Description of Artificial Sequence: Synthetic oligonucleotide
gauacacuggaccacucgg

SEQ ID NO: 923946 - RNA, 19 nt, Artificial Sequence
  Description of Artificial Sequence: Synthetic oligonucleotide
aagcauaacucuucugguc

SEQ ID NO: 923947 - RNA, 19 nt, Artificial Sequence
  Description of Artificial Sequence: Synthetic oligonucleotide
auaucaaagagacgggcag

SEQ ID NO: 923948 - RNA, 19 nt, Artificial Sequence
  Description of Artificial Sequence: Synthetic oligonucleotide
uaaucugagcgauucaggc

SEQ ID NO: 923949 - RNA, 19 nt, Artificial Sequence
  Description of Artificial Sequence: Synthetic oligonucleotide
ugaauuauacugacugggc

SEQ ID NO: 923950 - RNA, 19 nt, Artificial Sequence
  Description of Artificial Sequence: Synthetic oligonucleotide
aacaugucggugcacagca

SEQ ID NO: 923951 - RNA, 19 nt, Artificial Sequence
  Description of Artificial Sequence: Synthetic oligonucleotide
aaauacccaguucugagau

SEQ ID NO: 923952 - RNA, 19 nt, Artificial Sequence
  Description of Artificial Sequence: Synthetic oligonucleotide
gacaaguuccccuaaggug

SEQ ID NO: 923953 - RNA, 19 nt, Artificial Sequence
  Description of Artificial Sequence: Synthetic oligonucleotide
gacguugagaacaugucgg

SEQ ID NO: 923954 - RNA, 19 nt, Artificial Sequence
  Description of Artificial Sequence: Synthetic oligonucleotide
gugaauuauacugacuggg

SEQ ID NO: 923955 - RNA, 19 nt, Artificial Sequence
  Description of Artificial Sequence: Synthetic oligonucleotide
uguaaucugagcgauucag

SEQ ID NO: 923956 - RNA, 19 nt, Artificial Sequence
  Description of Artificial Sequence: Synthetic oligonucleotide
auaggucaccacuugagag

SEQ ID NO: 923957 - RNA, 19 nt, Artificial Sequence
  Description of Artificial Sequence: Synthetic oligonucleotide
agauaucaaagagacgggc

SEQ ID NO: 923958 - RNA, 19 nt, Artificial Sequence
  Description of Artificial Sequence: Synthetic oligonucleotide
auuacauggauguuccugu

SEQ ID NO: 923959 - RNA, 19 nt, Artificial Sequence
  Description of Artificial Sequence: Synthetic oligonucleotide
ugggcauguagccaucucg

SEQ ID NO: 923960 - RNA, 19 nt, Artificial Sequence
  Description of Artificial Sequence: Synthetic oligonucleotide
ucugacauagacuccaaaa

SEQ ID NO: 923961 - RNA, 19 nt, Artificial Sequence
  Description of Artificial Sequence: Synthetic oligonucleotide
uagauaucaaagagacggg

SEQ ID NO: 923962 - RNA, 19 nt, Artificial Sequence
  Description of Artificial Sequence: Synthetic oligonucleotide
uguagauaucaaagagacg

SEQ ID NO: 923963 - RNA, 19 nt, Artificial Sequence
  Description of Artificial Sequence: Synthetic oligonucleotide
uugauagugcuagacagag

SEQ ID NO: 923964 - RNA, 19 nt, Artificial Sequence
  Description of Artificial Sequence: Synthetic oligonucleotide
cuccauacagguuauuacc

SEQ ID NO: 923965 - RNA, 19 nt, Artificial Sequence
  Description of Artificial Sequence: Synthetic oligonucleotide
aauuaggagaggaauguca

SEQ ID NO: 923966 - RNA, 19 nt, Artificial Sequence
  Description of Artificial Sequence: Synthetic oligonucleotide
acagguuauuaccuccacc

SEQ ID NO: 923967 - RNA, 19 nt, Artificial Sequence
  Description of Artificial Sequence: Synthetic oligonucleotide
uuucaggacguugagaaca

SEQ ID NO: 923968 - RNA, 19 nt, Artificial Sequence
  Description of Artificial Sequence: Synthetic oligonucleotide
auuagcugagccauagagc

SEQ ID NO: 923969 - RNA, 19 nt, Artificial Sequence
  Description of Artificial Sequence: Synthetic oligonucleotide
ucuugagcgaucaguagca

SEQ ID NO: 923970 - RNA, 19 nt, Artificial Sequence
  Description of Artificial Sequence: Synthetic oligonucleotide
agugguuaggagcagcaag

SEQ ID NO: 923971 - RNA, 19 nt, Artificial Sequence
  Description of Artificial Sequence: Synthetic oligonucleotide
ucuagagaaccccuuucag

SEQ ID NO: 923972 - RNA, 19 nt, Artificial Sequence
  Description of Artificial Sequence: Synthetic oligonucleotide
acaagaggguaauaagauc

SEQ ID NO: 923973 - RNA, 19 nt, Artificial Sequence
  Description of Artificial Sequence: Synthetic oligonucleotide
augaggauauaggaggccc

SEQ ID NO: 923974 - RNA, 19 nt, Artificial Sequence
  Description of Artificial Sequence: Synthetic oligonucleotide
ucuucuaauggaagcauaa

SEQ ID NO: 923975 - RNA, 19 nt, Artificial Sequence
  Description of Artificial Sequence: Synthetic oligonucleotide
uuuggcgauucccagggcc

SEQ ID NO: 923976 - RNA, 19 nt, Artificial Sequence
  Description of Artificial Sequence: Synthetic oligonucleotide
acgcuggucaaauauguuc

SEQ ID NO: 923977 - RNA, 19 nt, Artificial Sequence
  Description of Artificial Sequence: Synthetic oligonucleotide
uaauaagaucugcagggcu

SEQ ID NO: 923978 - RNA, 19 nt, Artificial Sequence
  Description of Artificial Sequence: Synthetic oligonucleotide
gaauuauacugacugggca

SEQ ID NO: 923979 - RNA, 19 nt, Artificial Sequence
  Description of Artificial Sequence: Synthetic oligonucleotide
gauuacauggauguuccug

SEQ ID NO: 923980 - RNA, 19 nt, Artificial Sequence
  Description of Artificial Sequence: Synthetic oligonucleotide
uccaugaacagccuucggu

SEQ ID NO: 923981 - RNA, 19 nt, Artificial Sequence
  Description of Artificial Sequence: Synthetic oligonucleotide
agggcuuauggccuuuacc

SEQ ID NO: 923982 - RNA, 19 nt, Artificial Sequence
  Description of Artificial Sequence: Synthetic oligonucleotide
aaugaauagaggccagcaa

SEQ ID NO: 923983 - RNA, 19 nt, Artificial Sequence
  Description of Artificial Sequence: Synthetic oligonucleotide
uucgguuuuggucuagaga

SEQ ID NO: 923984 - RNA, 19 nt, Artificial Sequence
  Description of Artificial Sequence: Synthetic oligonucleotide
aggaugugcccucauacag

SEQ ID NO: 923985 - RNA, 19 nt, Artificial Sequence
  Description of Artificial Sequence: Synthetic oligonucleotide
uaucacucaguccuacccc

SEQ ID NO: 923986 - RNA, 19 nt, Artificial Sequence
  Description of Artificial Sequence: Synthetic oligonucleotide
ucaaguacaggggauagaa

SEQ ID NO: 923987 - RNA, 19 nt, Artificial Sequence
  Description of Artificial Sequence: Synthetic oligonucleotide
cucacaagaggguaauaag

SEQ ID NO: 923988 - RNA, 19 nt, Artificial Sequence
  Description of Artificial Sequence: Synthetic oligonucleotide
cucuugagcgaucaguagc

SEQ ID NO: 923989 - RNA, 19 nt, Artificial Sequence
  Description of Artificial Sequence: Synthetic oligonucleotide
aggucuauggaaaagacaa

SEQ ID NO: 923990 - RNA, 19 nt, Artificial Sequence
  Description of Artificial Sequence: Synthetic oligonucleotide
aacucuucuaauggaagca

SEQ ID NO: 923991 - RNA, 19 nt, Artificial Sequence
  Description of Artificial Sequence: Synthetic oligonucleotide
uagugcuagacagaguuug

SEQ ID NO: 923992 - RNA, 19 nt, Artificial Sequence
  Description of Artificial Sequence: Synthetic oligonucleotide
acaaguguuguucccuguc

SEQ ID NO: 923993 - RNA, 19 nt, Artificial Sequence
  Description of Artificial Sequence: Synthetic oligonucleotide
uguucccugucugacauag

SEQ ID NO: 923994 - RNA, 19 nt, Artificial Sequence
  Description of Artificial Sequence: Synthetic oligonucleotide
gaacauguaaucugagcga

SEQ ID NO: 923995 - RNA, 19 nt, Artificial Sequence
  Description of Artificial Sequence: Synthetic oligonucleotide
uaguguugauuucaaucug

SEQ ID NO: 923996 - RNA, 19 nt, Artificial Sequence
  Description of Artificial Sequence: Synthetic oligonucleotide
uuuggagccaucugcgcug

SEQ ID NO: 923997 - RNA, 19 nt, Artificial Sequence
  Description of Artificial Sequence: Synthetic oligonucleotide
ucucggaaguaaaccacag

SEQ ID NO: 923998 - RNA, 19 nt, Artificial Sequence
  Description of Artificial Sequence: Synthetic oligonucleotide
cuuccuaucacucaguccu

SEQ ID NO: 923999 - RNA, 19 nt, Artificial Sequence
  Description of Artificial Sequence: Synthetic oligonucleotide
ggguaauaagaucugcagg

SEQ ID NO: 924000 - RNA, 19 nt, Artificial Sequence
  Description of Artificial Sequence: Synthetic oligonucleotide
uuuggucuagagaaccccu

SEQ ID NO: 924001 - RNA, 19 nt, Artificial Sequence
  Description of Artificial Sequence: Synthetic oligonucleotide
auuuucgccggauuacaug

SEQ ID NO: 924002 - RNA, 19 nt, Artificial Sequence
  Description of Artificial Sequence: Synthetic oligonucleotide
ggaaaggcucacaagaggg

SEQ ID NO: 924003 - RNA, 19 nt, Artificial Sequence
  Description of Artificial Sequence: Synthetic oligonucleotide
aaauuuucgccggauuaca

SEQ ID NO: 924004 - RNA, 19 nt, Artificial Sequence
  Description of Artificial Sequence: Synthetic oligonucleotide
agagauaguguugauuuca

SEQ ID NO: 924005 - RNA, 19 nt, Artificial Sequence
  Description of Artificial Sequence: Synthetic oligonucleotide
agacaaguuccccuaaggu

SEQ ID NO: 924006 - RNA, 19 nt, Artificial Sequence
  Description of Artificial Sequence: Synthetic oligonucleotide
cuccaugaggauauaggag

SEQ ID NO: 924007 - RNA, 19 nt, Artificial Sequence
  Description of Artificial Sequence: Synthetic oligonucleotide
gagacgggcaguguagucg

SEQ ID NO: 924008 - RNA, 19 nt, Artificial Sequence
  Description of Artificial Sequence: Synthetic oligonucleotide
aacauguaaucugagcgau

SEQ ID NO: 924009 - RNA, 19 nt, Artificial Sequence
  Description of Artificial Sequence: Synthetic oligonucleotide
aucugcgcugcacuggaac

SEQ ID NO: 924010 - RNA, 19 nt, Artificial Sequence
  Description of Artificial Sequence: Synthetic oligonucleotide
cauguaaucugagcgauuc

SEQ ID NO: 924011 - RNA, 19 nt, Artificial Sequence
  Description of Artificial Sequence: Synthetic oligonucleotide
uuaggagaggaaugucaag

SEQ ID NO: 924012 - RNA, 19 nt, Artificial Sequence
  Description of Artificial Sequence: Synthetic oligonucleotide
gaaaagacaaguuccccua

SEQ ID NO: 924013 - RNA, 19 nt, Artificial Sequence
  Description of Artificial Sequence: Synthetic oligonucleotide
uucucuauggcacgcuggu

SEQ ID NO: 924014 - RNA, 19 nt, Artificial Sequence
  Description of Artificial Sequence: Synthetic oligonucleotide
uauuggagaggaucuuggc

SEQ ID NO: 924015 - RNA, 19 nt, Artificial Sequence
  Description of Artificial Sequence: Synthetic oligonucleotide
uccccacacuccaagaucu

SEQ ID NO: 924016 - RNA, 19 nt, Artificial Sequence
  Description of Artificial Sequence: Synthetic oligonucleotide
acagggguagcccucagga

SEQ ID NO: 924017 - RNA, 19 nt, Artificial Sequence
  Description of Artificial Sequence: Synthetic oligonucleotide
aguagcaccacagcauuag

SEQ ID NO: 924018 - RNA, 19 nt, Artificial Sequence
  Description of Artificial Sequence: Synthetic oligonucleotide
auagaggccagcaaaggug

SEQ ID NO: 924019 - RNA, 19 nt, Artificial Sequence
  Description of Artificial Sequence: Synthetic oligonucleotide
gauaucaaagagacgggca

SEQ ID NO: 924020 - RNA, 19 nt, Artificial Sequence
  Description of Artificial Sequence: Synthetic oligonucleotide
cacuggaacauguaaucug

SEQ ID NO: 924021 - RNA, 19 nt, Artificial Sequence
  Description of Artificial Sequence: Synthetic oligonucleotide
ggacguugagaacaugucg

SEQ ID NO: 924022 - RNA, 19 nt, Artificial Sequence
  Description of Artificial Sequence: Synthetic oligonucleotide
aauaagaucugcagggcuu

SEQ ID NO: 924023 - RNA, 19 nt, Artificial Sequence
  Description of Artificial Sequence: Synthetic oligonucleotide
uagcccucaggaauuagga

SEQ ID NO: 924024 - RNA, 19 nt, Artificial Sequence
  Description of Artificial Sequence: Synthetic oligonucleotide
cagagcuugcaccauuucc

SEQ ID NO: 924025 - RNA, 19 nt, Artificial Sequence
  Description of Artificial Sequence: Synthetic oligonucleotide
aagugcaggaugugcccuc

SEQ ID NO: 924026 - RNA, 19 nt, Artificial Sequence
  Description of Artificial Sequence: Synthetic oligonucleotide
acccauguccaaugaauag

SEQ ID NO: 924027 - RNA, 19 nt, Artificial Sequence
  Description of Artificial Sequence: Synthetic oligonucleotide
cuggaaaggcucacaagag

SEQ ID NO: 924028 - RNA, 19 nt, Artificial Sequence
  Description of Artificial Sequence: Synthetic oligonucleotide
ugcuagacagaguuuguuc

SEQ ID NO: 924029 - RNA, 19 nt, Artificial Sequence
  Description of Artificial Sequence: Synthetic oligonucleotide
ucucuagcagcagacgugc

SEQ ID NO: 924030 - RNA, 19 nt, Artificial Sequence
  Description of Artificial Sequence: Synthetic oligonucleotide
ucaggaauuaggagaggaa

SEQ ID NO: 924031 - RNA, 19 nt, Artificial Sequence
  Description of Artificial Sequence: Synthetic oligonucleotide
uguugaaauccaucugcac

SEQ ID NO: 924032 - RNA, 19 nt, Artificial Sequence
  Description of Artificial Sequence: Synthetic oligonucleotide
gugaacggggcauagguca

SEQ ID NO: 924033 - RNA, 19 nt, Artificial Sequence
  Description of Artificial Sequence: Synthetic oligonucleotide
ucuucaaauuuucgccgga

SEQ ID NO: 924034 - RNA, 19 nt, Artificial Sequence
  Description of Artificial Sequence: Synthetic oligonucleotide
ucucuugagcgaucaguag

SEQ ID NO: 924035 - RNA, 19 nt, Artificial Sequence
  Description of Artificial Sequence: Synthetic oligonucleotide
uugagcgaucaguagcacc

SEQ ID NO: 924036 - RNA, 19 nt, Artificial Sequence
  Description of Artificial Sequence: Synthetic oligonucleotide
aaagugguuaggagcagca

SEQ ID NO: 924037 - RNA, 19 nt, Artificial Sequence
  Description of Artificial Sequence: Synthetic oligonucleotide
caucucggaaguaaaccac

SEQ ID NO: 924038 - RNA, 19 nt, Artificial Sequence
  Description of Artificial Sequence: Synthetic oligonucleotide
caaauuuucgccggauuac

SEQ ID NO: 924039 - RNA, 19 nt, Artificial Sequence
  Description of Artificial Sequence: Synthetic oligonucleotide
gcacaaagugguuaggagc

SEQ ID NO: 924040 - RNA, 19 nt, Artificial Sequence
  Description of Artificial Sequence: Synthetic oligonucleotide
ucacaaguguuguucccug

SEQ ID NO: 924041 - RNA, 19 nt, Artificial Sequence
  Description of Artificial Sequence: Synthetic oligonucleotide
guaauaagaucugcagggc

SEQ ID NO: 924042 - RNA, 19 nt, Artificial Sequence
  Description of Artificial Sequence: Synthetic oligonucleotide
agaacaugucggugcacag

SEQ ID NO: 924043 - RNA, 19 nt, Artificial Sequence
  Description of Artificial Sequence: Synthetic oligonucleotide
aaugucaaguacaggggau

SEQ ID NO: 924044 - RNA, 19 nt, Artificial Sequence
  Description of Artificial Sequence: Synthetic oligonucleotide
uucaaauuuucgccggauu

SEQ ID NO: 924045 - RNA, 19 nt, Artificial Sequence
  Description of Artificial Sequence: Synthetic oligonucleotide
auguccggacacuuggcag

SEQ ID NO: 924046 - RNA, 19 nt, Artificial Sequence
  Description of Artificial Sequence: Synthetic oligonucleotide
cuagagaaccccuuucaga

SEQ ID NO: 924047 - RNA, 19 nt, Artificial Sequence
  Description of Artificial Sequence: Synthetic oligonucleotide
gcuuuggcgauucccaggg

SEQ ID NO: 924048 - RNA, 19 nt, Artificial Sequence
  Description of Artificial Sequence: Synthetic oligonucleotide
acuggaacauguaaucuga

SEQ ID NO: 924049 - RNA, 19 nt, Artificial Sequence
  Description of Artificial Sequence: Synthetic oligonucleotide
ucuaugcccuccuacccac

SEQ ID NO: 924050 - RNA, 19 nt, Artificial Sequence
  Description of Artificial Sequence: Synthetic oligonucleotide
aucacucaguccuacccca

SEQ ID NO: 924051 - RNA, 19 nt, Artificial Sequence
  Description of Artificial Sequence: Synthetic oligonucleotide
cucuauggcacgcugguca

SEQ ID NO: 924052 - RNA, 19 nt, Artificial Sequence
  Description of Artificial Sequence: Synthetic oligonucleotide
acgcccucagccaaggccc

SEQ ID NO: 924053 - RNA, 19 nt, Artificial Sequence
  Description of Artificial Sequence: Synthetic oligonucleotide
aguguuguucccugucuga

SEQ ID NO: 924054 - RNA, 19 nt, Artificial Sequence
  Description of Artificial Sequence: Synthetic oligonucleotide
caucacaaguguuguuccc

SEQ ID NO: 924055 - RNA, 19 nt, Artificial Sequence
  Description of Artificial Sequence: Synthetic oligonucleotide
cacuggaccacucgggcag

SEQ ID NO: 924056 - RNA, 19 nt, Artificial Sequence
  Description of Artificial Sequence: Synthetic oligonucleotide
gguuuuggucuagagaacc

SEQ ID NO: 924057 - RNA, 19 nt, Artificial Sequence
  Description of Artificial Sequence: Synthetic oligonucleotide
caaggcccggucuauggcc

SEQ ID NO: 924058 - RNA, 19 nt, Artificial Sequence
  Description of Artificial Sequence: Synthetic oligonucleotide
aguguugauuucaaucugu

SEQ ID NO: 924059 - RNA, 19 nt, Artificial Sequence
  Description of Artificial Sequence: Synthetic oligonucleotide
cauccaugaacagccuucg

SEQ ID NO: 924060 - RNA, 19 nt, Artificial Sequence
  Description of Artificial Sequence: Synthetic oligonucleotide
gaggguaauaagaucugca

SEQ ID NO: 924061 - RNA, 19 nt, Artificial Sequence
  Description of Artificial Sequence: Synthetic oligonucleotide
agacaucuucaaauuuucg

SEQ ID NO: 924062 - RNA, 19 nt, Artificial Sequence
  Description of Artificial Sequence: Synthetic oligonucleotide
caaguacaggggauagaag

SEQ ID NO: 924063 - RNA, 19 nt, Artificial Sequence
  Description of Artificial Sequence: Synthetic oligonucleotide
aaauccaucugcacagcau

SEQ ID NO: 924064 - RNA, 19 nt, Artificial Sequence
  Description of Artificial Sequence: Synthetic oligonucleotide
gaaggccgaguucuggcug

SEQ ID NO: 924065 - RNA, 19 nt, Artificial Sequence
  Description of Artificial Sequence: Synthetic oligonucleotide
uacagguuauuaccuccac

SEQ ID NO: 924066 - RNA, 19 nt, Artificial Sequence
  Description of Artificial Sequence: Synthetic oligonucleotide
auuaggagaggaaugucaa

SEQ ID NO: 924067 - RNA, 19 nt, Artificial Sequence
  Description of Artificial Sequence: Synthetic oligonucleotide
ccauguccaaugaauagag

SEQ ID NO: 924068 - RNA, 19 nt, Artificial Sequence
  Description of Artificial Sequence: Synthetic oligonucleotide
gaagcauaacucuucuggu

SEQ ID NO: 924069 - RNA, 19 nt, Artificial Sequence
  Description of Artificial Sequence: Synthetic oligonucleotide
auucucuauggcacgcugg

SEQ ID NO: 924070 - RNA, 19 nt, Artificial Sequence
  Description of Artificial Sequence: Synthetic oligonucleotide
ucuauggccugcugugcca

SEQ ID NO: 924071 - RNA, 19 nt, Artificial Sequence
  Description of Artificial Sequence: Synthetic oligonucleotide
agagacgggcaguguaguc

SEQ ID NO: 924072 - RNA, 19 nt, Artificial Sequence
  Description of Artificial Sequence: Synthetic oligonucleotide
auacacuggaccacucggg

SEQ ID NO: 924073 - RNA, 19 nt, Artificial Sequence
  Description of Artificial Sequence: Synthetic oligonucleotide
aaggccgaguucuggcuga

SEQ ID NO: 924074 - RNA, 19 nt, Artificial Sequence
  Description of Artificial Sequence: Synthetic oligonucleotide
cucggaaguaaaccacagc

SEQ ID NO: 924075 - RNA, 19 nt, Artificial Sequence
  Description of Artificial Sequence: Synthetic oligonucleotide
cacgcccucagccaaggcc

SEQ ID NO: 924076 - RNA, 19 nt, Artificial Sequence
  Description of Artificial Sequence: Synthetic oligonucleotide
ugcccuccuacccacuucu

SEQ ID NO: 924077 - RNA, 19 nt, Artificial Sequence
  Description of Artificial Sequence: Synthetic oligonucleotide
cuucgguuuuggucuagag

SEQ ID NO: 924078 - RNA, 19 nt, Artificial Sequence
  Description of Artificial Sequence: Synthetic oligonucleotide
gaacaugucggugcacagc

SEQ ID NO: 924079 - RNA, 19 nt, Artificial Sequence
  Description of Artificial Sequence: Synthetic oligonucleotide
gacagggguagcccucagg

SEQ ID NO: 924080 - RNA, 19 nt, Artificial Sequence
  Description of Artificial Sequence: Synthetic oligonucleotide
aguacaggggauagaaggu

SEQ ID NO: 924081 - RNA, 19 nt, Artificial Sequence
  Description of Artificial Sequence: Synthetic oligonucleotide
uggaagcauaacucuucug

SEQ ID NO: 924082 - RNA, 19 nt, Artificial Sequence
  Description of Artificial Sequence: Synthetic oligonucleotide
cuucuaauggaagcauaac

SEQ ID NO: 924083 - RNA, 19 nt, Artificial Sequence
  Description of Artificial Sequence: Synthetic oligonucleotide
aucacaaguguuguucccu

SEQ ID NO: 924084 - RNA, 19 nt, Artificial Sequence
  Description of Artificial Sequence: Synthetic oligonucleotide
uucaggacguugagaacau

SEQ ID NO: 924085 - RNA, 19 nt, Artificial Sequence
  Description of Artificial Sequence: Synthetic oligonucleotide
ugauagugcuagacagagu

SEQ ID NO: 924086 - RNA, 19 nt, Artificial Sequence
  Description of Artificial Sequence: Synthetic oligonucleotide
ugaacggggcauaggucac

SEQ ID NO: 924087 - RNA, 19 nt, Artificial Sequence
  Description of Artificial Sequence: Synthetic oligonucleotide
agguuauuaccuccacccu

SEQ ID NO: 924088 - RNA, 19 nt, Artificial Sequence
  Description of Artificial Sequence: Synthetic oligonucleotide
gggauuauuggagaggauc

SEQ ID NO: 924089 - RNA, 19 nt, Artificial Sequence
  Description of Artificial Sequence: Synthetic oligonucleotide
aagagcgugaacggggcau

SEQ ID NO: 924090 - RNA, 19 nt, Artificial Sequence
  Description of Artificial Sequence: Synthetic oligonucleotide
acucaguccuaccccaagu

SEQ ID NO: 924091 - RNA, 19 nt, Artificial Sequence
  Description of Artificial Sequence: Synthetic oligonucleotide
acguugagaacaugucggu

SEQ ID NO: 924092 - RNA, 19 nt, Artificial Sequence
  Description of Artificial Sequence: Synthetic oligonucleotide
ucgccggauuacauggaug

SEQ ID NO: 924093 - RNA, 19 nt, Artificial Sequence
  Description of Artificial Sequence: Synthetic oligonucleotide
ggagaggaaugucaaguac

SEQ ID NO: 924094 - RNA, 19 nt, Artificial Sequence
  Description of Artificial Sequence: Synthetic oligonucleotide
aauacccaguucugagaua

SEQ ID NO: 924095 - RNA, 19 nt, Artificial Sequence
  Description of Artificial Sequence: Synthetic oligonucleotide
gaauuaggagaggaauguc

SEQ ID NO: 924096 - RNA, 19 nt, Artificial Sequence
  Description of Artificial Sequence: Synthetic oligonucleotide
guuccccuaagguggagac

SEQ ID NO: 924097 - RNA, 19 nt, Artificial Sequence
  Description of Artificial Sequence: Synthetic oligonucleotide
aauuuucgccggauuacau

SEQ ID NO: 924098 - RNA, 19 nt, Artificial Sequence
  Description of Artificial Sequence: Synthetic oligonucleotide
caugaggauauaggaggcc

SEQ ID NO: 924099 - RNA, 19 nt, Artificial Sequence
  Description of Artificial Sequence: Synthetic oligonucleotide
aucucucuagcagcagacg

SEQ ID NO: 924100 - RNA, 19 nt, Artificial Sequence
  Description of Artificial Sequence: Synthetic oligonucleotide
agacgggcaguguagucgu

SEQ ID NO: 924101 - RNA, 19 nt, Artificial Sequence
  Description of Artificial Sequence: Synthetic oligonucleotide
aucccaacucguucguugu

SEQ ID NO: 924102 - RNA, 19 nt, Artificial Sequence
  Description of Artificial Sequence: Synthetic oligonucleotide
gaggucuauggaaaagaca

SEQ ID NO: 924103 - RNA, 19 nt, Artificial Sequence
  Description of Artificial Sequence: Synthetic oligonucleotide
cucaguccuaccccaaguc

SEQ ID NO: 924104 - RNA, 19 nt, Artificial Sequence
  Description of Artificial Sequence: Synthetic oligonucleotide
agauaguguugauuucaau

SEQ ID NO: 924105 - RNA, 19 nt, Artificial Sequence
  Description of Artificial Sequence: Synthetic oligonucleotide
caauguccggacacuuggc

SEQ ID NO: 924106 - RNA, 19 nt, Artificial Sequence
  Description of Artificial Sequence: Synthetic oligonucleotide
ggccaucccaacucguucg

SEQ ID NO: 924107 - RNA, 19 nt, Artificial Sequence
  Description of Artificial Sequence: Synthetic oligonucleotide
auguugaaauccaucugca

SEQ ID NO: 924108 - RNA, 19 nt, Artificial Sequence
  Description of Artificial Sequence: Synthetic oligonucleotide
ggauguuccuguccaguag

SEQ ID NO: 924109 - RNA, 19 nt, Artificial Sequence
  Description of Artificial Sequence: Synthetic oligonucleotide
cucauucucuauggcacgc

SEQ ID NO: 924110 - RNA, 19 nt, Artificial Sequence
  Description of Artificial Sequence: Synthetic oligonucleotide
uucgccggauuacauggau

SEQ ID NO: 924111 - RNA, 19 nt, Artificial Sequence
  Description of Artificial Sequence: Synthetic oligonucleotide
cauaggucaccacuugaga

SEQ ID NO: 924112 - RNA, 19 nt, Artificial Sequence
  Description of Artificial Sequence: Synthetic oligonucleotide
caaugaauagaggccagca

SEQ ID NO: 924113 - RNA, 19 nt, Artificial Sequence
  Description of Artificial Sequence: Synthetic oligonucleotide
gccuuuaccucaaagcagc

SEQ ID NO: 924114 - RNA, 19 nt, Artificial Sequence
  Description of Artificial Sequence: Synthetic oligonucleotide
aguccuaccccaagucagg

SEQ ID NO: 924115 - RNA, 19 nt, Artificial Sequence
  Description of Artificial Sequence: Synthetic oligonucleotide
gcuuauggccuuuaccuca

SEQ ID NO: 924116 - RNA, 19 nt, Artificial Sequence
  Description of Artificial Sequence: Synthetic oligonucleotide
aggcuuuggcgauucccag

SEQ ID NO: 924117 - RNA, 19 nt, Artificial Sequence
  Description of Artificial Sequence: Synthetic oligonucleotide
auguaaucugagcgauuca

SEQ ID NO: 924118 - RNA, 19 nt, Artificial Sequence
  Description of Artificial Sequence: Synthetic oligonucleotide
uuauacugacugggcaugu

SEQ ID NO: 924119 - RNA, 19 nt, Artificial Sequence
  Description of Artificial Sequence: Synthetic oligonucleotide
uggccaucccaacucguuc

SEQ ID NO: 924120 - RNA, 19 nt, Artificial Sequence
  Description of Artificial Sequence: Synthetic oligonucleotide
uuucgccggauuacaugga

SEQ ID NO: 924121 - RNA, 19 nt, Artificial Sequence
  Description of Artificial Sequence: Synthetic oligonucleotide
agagaaccccuuucagaga

SEQ ID NO: 924122 - RNA, 19 nt, Artificial Sequence
  Description of Artificial Sequence: Synthetic oligonucleotide
guagggguuguccaggacu

SEQ ID NO: 924123 - RNA, 19 nt, Artificial Sequence
  Description of Artificial Sequence: Synthetic oligonucleotide
ugagcgauucaggcccagg

SEQ ID NO: 924124 - RNA, 19 nt, Artificial Sequence
  Description of Artificial Sequence: Synthetic oligonucleotide
gccgaguucuggcugacag

SEQ ID NO: 924125 - RNA, 19 nt, Artificial Sequence
  Description of Artificial Sequence: Synthetic oligonucleotide
ucuuggucccagccagcug

SEQ ID NO: 924126 - RNA, 19 nt, Artificial Sequence
  Description of Artificial Sequence: Synthetic oligonucleotide
cgcuggucaaauauguucc

SEQ ID NO: 924127 - RNA, 19 nt, Artificial Sequence
  Description of Artificial Sequence: Synthetic oligonucleotide
ggccguagcaggcaauucc

SEQ ID NO: 924128 - RNA, 19 nt, Artificial Sequence
  Description of Artificial Sequence: Synthetic oligonucleotide
augaacagccuucgguuuu

SEQ ID NO: 924129 - RNA, 19 nt, Artificial Sequence
  Description of Artificial Sequence: Synthetic oligonucleotide
agaaggucucuugagugaa

SEQ ID NO: 924130 - RNA, 19 nt, Artificial Sequence
  Description of Artificial Sequence: Synthetic oligonucleotide
auacagguuauuaccucca

SEQ ID NO: 924131 - RNA, 19 nt, Artificial Sequence
  Description of Artificial Sequence: Synthetic oligonucleotide
gggcuuauggccuuuaccu

SEQ ID NO: 924132 - RNA, 19 nt, Artificial Sequence
  Description of Artificial Sequence: Synthetic oligonucleotide
uuggucuagagaaccccuu

SEQ ID NO: 924133 - RNA, 19 nt, Artificial Sequence
  Description of Artificial Sequence: Synthetic oligonucleotide
agcgauucaggcccaggaa

SEQ ID NO: 924134 - RNA, 19 nt, Artificial Sequence
  Description of Artificial Sequence: Synthetic oligonucleotide
cuagggacuggugagggga

SEQ ID NO: 924135 - RNA, 19 nt, Artificial Sequence
  Description of Artificial Sequence: Synthetic oligonucleotide
cggauuacauggauguucc

SEQ ID NO: 924136 - RNA, 19 nt, Artificial Sequence
  Description of Artificial Sequence: Synthetic oligonucleotide
acacuggaccacucgggca

SEQ ID NO: 924137 - RNA, 19 nt, Artificial Sequence
  Description of Artificial Sequence: Synthetic oligonucleotide
aacggggcauaggucacca

SEQ ID NO: 924138 - RNA, 19 nt, Artificial Sequence
  Description of Artificial Sequence: Synthetic oligonucleotide
ggaugugcccucauacagg

SEQ ID NO: 924139 - RNA, 19 nt, Artificial Sequence
  Description of Artificial Sequence: Synthetic oligonucleotide
agcagcagacgugcuuccc

SEQ ID NO: 924140 - RNA, 19 nt, Artificial Sequence
  Description of Artificial Sequence: Synthetic oligonucleotide
auuuagggcagagcuggga

SEQ ID NO: 924141 - RNA, 19 nt, Artificial Sequence
  Description of Artificial Sequence: Synthetic oligonucleotide
guagccaucucggaaguaa

SEQ ID NO: 924142 - RNA, 19 nt, Artificial Sequence
  Description of Artificial Sequence: Synthetic oligonucleotide
cuggaggucuauggaaaag

SEQ ID NO: 924143 - RNA, 19 nt, Artificial Sequence
  Description of Artificial Sequence: Synthetic oligonucleotide
ccaugaggauauaggaggc

SEQ ID NO: 924144 - RNA, 19 nt, Artificial Sequence
  Description of Artificial Sequence: Synthetic oligonucleotide
agaaccugcuggaaaggcu

SEQ ID NO: 924145 - RNA, 19 nt, Artificial Sequence
  Description of Artificial Sequence: Synthetic oligonucleotide
ggcuuuggcgauucccagg

SEQ ID NO: 924146 - RNA, 19 nt, Artificial Sequence
  Description of Artificial Sequence: Synthetic oligonucleotide
gcauaggucaccacuugag

SEQ ID NO: 924147 - RNA, 19 nt, Artificial Sequence
  Description of Artificial Sequence: Synthetic oligonucleotide
uguccaggacugccacucc

SEQ ID NO: 924148 - RNA, 19 nt, Artificial Sequence
  Description of Artificial Sequence: Synthetic oligonucleotide
ccuaccccaagucaggcac

SEQ ID NO: 924149 - RNA, 19 nt, Artificial Sequence
  Description of Artificial Sequence: Synthetic oligonucleotide
gucuaugcccuccuaccca

SEQ ID NO: 924150 - RNA, 19 nt, Artificial Sequence
  Description of Artificial Sequence: Synthetic oligonucleotide
acucuucuaauggaagcau

SEQ ID NO: 924151 - RNA, 19 nt, Artificial Sequence
  Description of Artificial Sequence: Synthetic oligonucleotide
ucugagcgauucaggccca

SEQ ID NO: 924152 - RNA, 19 nt, Artificial Sequence
  Description of Artificial Sequence: Synthetic oligonucleotide
uaugcccuccuacccacuu

SEQ ID NO: 924153 - RNA, 19 nt, Artificial Sequence
  Description of Artificial Sequence: Synthetic oligonucleotide
guacaggggauagaagguc

SEQ ID NO: 924154 - RNA, 19 nt, Artificial Sequence
  Description of Artificial Sequence: Synthetic oligonucleotide
gacccuggaggucuaugga

SEQ ID NO: 924155 - RNA, 19 nt, Artificial Sequence
  Description of Artificial Sequence: Synthetic oligonucleotide
gagauaguguugauuucaa

SEQ ID NO: 924156 - RNA, 19 nt, Artificial Sequence
  Description of Artificial Sequence: Synthetic oligonucleotide
augcccuccuacccacuuc

SEQ ID NO: 924157 - RNA, 19 nt, Artificial Sequence
  Description of Artificial Sequence: Synthetic oligonucleotide
ucauucucuauggcacgcu

SEQ ID NO: 924158 - RNA, 19 nt, Artificial Sequence
  Description of Artificial Sequence: Synthetic oligonucleotide
guuguucccugucugacau

SEQ ID NO: 924159 - RNA, 19 nt, Artificial Sequence
  Description of Artificial Sequence: Synthetic oligonucleotide
gacuggugaggggaagagc

SEQ ID NO: 924160 - RNA, 19 nt, Artificial Sequence
  Description of Artificial Sequence: Synthetic oligonucleotide
cagccuucgguuuuggucu

SEQ ID NO: 924161 - RNA, 19 nt, Artificial Sequence
  Description of Artificial Sequence: Synthetic oligonucleotide
ugcccucauacaggguagg

SEQ ID NO: 924162 - RNA, 19 nt, Artificial Sequence
  Description of Artificial Sequence: Synthetic oligonucleotide
uccuaucacucaguccuac

SEQ ID NO: 924163 - RNA, 19 nt, Artificial Sequence
  Description of Artificial Sequence: Synthetic oligonucleotide
cacucaguccuaccccaag

SEQ ID NO: 924164 - RNA, 19 nt, Artificial Sequence
  Description of Artificial Sequence: Synthetic oligonucleotide
aagugguuaggagcagcaa

SEQ ID NO: 924165 - RNA, 19 nt, Artificial Sequence
  Description of Artificial Sequence: Synthetic oligonucleotide
caagggcuucagcaauggc

SEQ ID NO: 924166 - RNA, 19 nt, Artificial Sequence
  Description of Artificial Sequence: Synthetic oligonucleotide
ugcgcugcacuggaacaug

SEQ ID NO: 924167 - RNA, 19 nt, Artificial Sequence
  Description of Artificial Sequence: Synthetic oligonucleotide
ucacucaguccuaccccaa

SEQ ID NO: 924168 - RNA, 19 nt, Artificial Sequence
  Description of Artificial Sequence: Synthetic oligonucleotide
gcgaucaguagcaccacag

SEQ ID NO: 924169 - RNA, 19 nt, Artificial Sequence
  Description of Artificial Sequence: Synthetic oligonucleotide
agucaggcacuagaaccug

SEQ ID NO: 924170 - RNA, 19 nt, Artificial Sequence
  Description of Artificial Sequence: Synthetic oligonucleotide
ugggauuauuggagaggau

SEQ ID NO: 924171 - RNA, 19 nt, Artificial Sequence
  Description of Artificial Sequence: Synthetic oligonucleotide
aguuccccuaagguggaga

SEQ ID NO: 924172 - RNA, 19 nt, Artificial Sequence
  Description of Artificial Sequence: Synthetic oligonucleotide
ggucuauggaaaagacaag

SEQ ID NO: 924173 - RNA, 19 nt, Artificial Sequence
  Description of Artificial Sequence: Synthetic oligonucleotide
caucauuguugcuuuauuu

SEQ ID NO: 924174 - RNA, 19 nt, Artificial Sequence
  Description of Artificial Sequence: Synthetic oligonucleotide
ggauuauuggagaggaucu

SEQ ID NO: 924175 - RNA, 19 nt, Artificial Sequence
  Description of Artificial Sequence: Synthetic oligonucleotide
augucaaguacaggggaua

SEQ ID NO: 924176 - RNA, 19 nt, Artificial Sequence
  Description of Artificial Sequence: Synthetic oligonucleotide
uugcuuuauuuagggcaga

SEQ ID NO: 924177 - RNA, 19 nt, Artificial Sequence
  Description of Artificial Sequence: Synthetic oligonucleotide
uauacugacugggcaugua

SEQ ID NO: 924178 - RNA, 19 nt, Artificial Sequence
  Description of Artificial Sequence: Synthetic oligonucleotide
ugggaaagucuaugcccuc

SEQ ID NO: 924179 - RNA, 19 nt, Artificial Sequence
  Description of Artificial Sequence: Synthetic oligonucleotide
gaagagcgugaacggggca

SEQ ID NO: 924180 - RNA, 19 nt, Artificial Sequence
  Description of Artificial Sequence: Synthetic oligonucleotide
uagcugagccauagagcuc

SEQ ID NO: 924181 - RNA, 19 nt, Artificial Sequence
  Description of Artificial Sequence: Synthetic oligonucleotide
agugcuagacagaguuugu

SEQ ID NO: 924182 - RNA, 19 nt, Artificial Sequence
  Description of Artificial Sequence: Synthetic oligonucleotide
agcgugaacggggcauagg

SEQ ID NO: 924183 - RNA, 19 nt, Artificial Sequence
  Description of Artificial Sequence: Synthetic oligonucleotide
uggcagcacaugaucucuc

SEQ ID NO: 924184 - RNA, 19 nt, Artificial Sequence
  Description of Artificial Sequence: Synthetic oligonucleotide
gguggagacagggguagcc

SEQ ID NO: 924185 - RNA, 19 nt, Artificial Sequence
  Description of Artificial Sequence: Synthetic oligonucleotide
cacccauguccaaugaaua

SEQ ID NO: 924186 - RNA, 19 nt, Artificial Sequence
  Description of Artificial Sequence: Synthetic oligonucleotide
ggaagagcgugaacggggc

SEQ ID NO: 924187 - RNA, 19 nt, Artificial Sequence
  Description of Artificial Sequence: Synthetic oligonucleotide
ucccaacucguucguuguc

SEQ ID NO: 924188 - RNA, 19 nt, Artificial Sequence
  Description of Artificial Sequence: Synthetic oligonucleotide
ccaagucaggcacuagaac

SEQ ID NO: 924189 - RNA, 19 nt, Artificial Sequence
  Description of Artificial Sequence: Synthetic oligonucleotide
gggaaagucuaugcccucc

SEQ ID NO: 924190 - RNA, 19 nt, Artificial Sequence
  Description of Artificial Sequence: Synthetic oligonucleotide
gggcaaugcccucuuucag

SEQ ID NO: 924191 - RNA, 19 nt, Artificial Sequence
  Description of Artificial Sequence: Synthetic oligonucleotide
uuggagccaucugcgcugc

SEQ ID NO: 924192 - RNA, 19 nt, Artificial Sequence
  Description of Artificial Sequence: Synthetic oligonucleotide
cagauggaaggcugagaga

SEQ ID NO: 924193 - RNA, 19 nt, Artificial Sequence
  Description of Artificial Sequence: Synthetic oligonucleotide
cagacgugcuucccaguuc

SEQ ID NO: 924194 - RNA, 19 nt, Artificial Sequence
  Description of Artificial Sequence: Synthetic oligonucleotide
cuuuggcgauucccagggc

SEQ ID NO: 924195 - RNA, 19 nt, Artificial Sequence
  Description of Artificial Sequence: Synthetic oligonucleotide
gaacggggcauaggucacc

SEQ ID NO: 924196 - RNA, 19 nt, Artificial Sequence
  Description of Artificial Sequence: Synthetic oligonucleotide
cuugagcgaucaguagcac

SEQ ID NO: 924197 - RNA, 19 nt, Artificial Sequence
  Description of Artificial Sequence: Synthetic oligonucleotide
ucaggacguugagaacaug

SEQ ID NO: 924198 - RNA, 19 nt, Artificial Sequence
  Description of Artificial Sequence: Synthetic oligonucleotide
cccuaagguggagacaggg

SEQ ID NO: 924199 - RNA, 19 nt, Artificial Sequence
  Description of Artificial Sequence: Synthetic oligonucleotide
ggcuuauggccuuuaccuc

SEQ ID NO: 924200 - RNA, 19 nt, Artificial Sequence
  Description of Artificial Sequence: Synthetic oligonucleotide
gcucacaagaggguaauaa

SEQ ID NO: 924201 - RNA, 19 nt, Artificial Sequence
  Description of Artificial Sequence: Synthetic oligonucleotide
guacccaggauuuucccuu

SEQ ID NO: 924202 - RNA, 19 nt, Artificial Sequence
  Description of Artificial Sequence: Synthetic oligonucleotide
ccggauuacauggauguuc

SEQ ID NO: 924203 - RNA, 19 nt, Artificial Sequence
  Description of Artificial Sequence: Synthetic oligonucleotide
uuccccuaagguggagaca

SEQ ID NO: 924204 - RNA, 19 nt, Artificial Sequence
  Description of Artificial Sequence: Synthetic oligonucleotide
accacgcccucagccaagg

SEQ ID NO: 924205 - RNA, 19 nt, Artificial Sequence
  Description of Artificial Sequence: Synthetic oligonucleotide
gcuuuggagccaucugcgc

SEQ ID NO: 924206 - RNA, 19 nt, Artificial Sequence
  Description of Artificial Sequence: Synthetic oligonucleotide
gcaauucccaaaaggcuca

SEQ ID NO: 924207 - RNA, 19 nt, Artificial Sequence
  Description of Artificial Sequence: Synthetic oligonucleotide
ggcauaggucaccacuuga

SEQ ID NO: 924208 - RNA, 19 nt, Artificial Sequence
  Description of Artificial Sequence: Synthetic oligonucleotide
cugcuggaaaggcucacaa

SEQ ID NO: 924209 - RNA, 19 nt, Artificial Sequence
  Description of Artificial Sequence: Synthetic oligonucleotide
gagauacacuggaccacuc

SEQ ID NO: 924210 - RNA, 19 nt, Artificial Sequence
  Description of Artificial Sequence: Synthetic oligonucleotide
gguccgaagcagaugcccc

SEQ ID NO: 924211 - RNA, 19 nt, Artificial Sequence
  Description of Artificial Sequence: Synthetic oligonucleotide
acggggcauaggucaccac

SEQ ID NO: 924212 - RNA, 19 nt, Artificial Sequence
  Description of Artificial Sequence: Synthetic oligonucleotide
ggcuucagcacaaaguggu

SEQ ID NO: 924213 - RNA, 19 nt, Artificial Sequence
  Description of Artificial Sequence: Synthetic oligonucleotide
caggaauuaggagaggaau

SEQ ID NO: 924214 - RNA, 19 nt, Artificial Sequence
  Description of Artificial Sequence: Synthetic oligonucleotide
agagcacuagggacuggug

SEQ ID NO: 924215 - RNA, 19 nt, Artificial Sequence
  Description of Artificial Sequence: Synthetic oligonucleotide
ggcacgcuggucaaauaug

SEQ ID NO: 924216 - RNA, 19 nt, Artificial Sequence
  Description of Artificial Sequence: Synthetic oligonucleotide
gccguagcaggcaauuccc

SEQ ID NO: 924217 - RNA, 19 nt, Artificial Sequence
  Description of Artificial Sequence: Synthetic oligonucleotide
aggcccacccugcucaguu

SEQ ID NO: 924218 - RNA, 19 nt, Artificial Sequence
  Description of Artificial Sequence: Synthetic oligonucleotide
guccuaccccaagucaggc

SEQ ID NO: 924219 - RNA, 19 nt, Artificial Sequence
  Description of Artificial Sequence: Synthetic oligonucleotide
acuggaccacucgggcagg

SEQ ID NO: 924220 - RNA, 19 nt, Artificial Sequence
  Description of Artificial Sequence: Synthetic oligonucleotide
ucucuauggcacgcugguc

SEQ ID NO: 924221 - RNA, 19 nt, Artificial Sequence
  Description of Artificial Sequence: Synthetic oligonucleotide
agacagggguagcccucag

SEQ ID NO: 924222 - RNA, 19 nt, Artificial Sequence
  Description of Artificial Sequence: Synthetic oligonucleotide
cugacugggcauguagcca

SEQ ID NO: 924223 - RNA, 19 nt, Artificial Sequence
  Description of Artificial Sequence: Synthetic oligonucleotide
aggccguagcaggcaauuc

SEQ ID NO: 924224 - RNA, 19 nt, Artificial Sequence
  Description of Artificial Sequence: Synthetic oligonucleotide
cagggcuuauggccuuuac

SEQ ID NO: 924225 - RNA, 19 nt, Artificial Sequence
  Description of Artificial Sequence: Synthetic oligonucleotide
gauuauuggagaggaucuu

SEQ ID NO: 924226 - RNA, 19 nt, Artificial Sequence
  Description of Artificial Sequence: Synthetic oligonucleotide
cucagauggaaggcugaga

SEQ ID NO: 924227 - RNA, 19 nt, Artificial Sequence
  Description of Artificial Sequence: Synthetic oligonucleotide
aggcccucuccucgcuguc

SEQ ID NO: 924228 - RNA, 19 nt, Artificial Sequence
  Description of Artificial Sequence: Synthetic oligonucleotide
caguucugugaauuauacu

SEQ ID NO: 924229 - RNA, 19 nt, Artificial Sequence
  Description of Artificial Sequence: Synthetic oligonucleotide
ggucuauggccugcugugc

SEQ ID NO: 924230 - RNA, 19 nt, Artificial Sequence
  Description of Artificial Sequence: Synthetic oligonucleotide
cagcugguggccaucccaa

SEQ ID NO: 924231 - RNA, 19 nt, Artificial Sequence
  Description of Artificial Sequence: Synthetic oligonucleotide
ccgaguucuggcugacagc

SEQ ID NO: 924232 - RNA, 19 nt, Artificial Sequence
  Description of Artificial Sequence: Synthetic oligonucleotide
caugaacagccuucgguuu

SEQ ID NO: 924233 - RNA, 19 nt, Artificial Sequence
  Description of Artificial Sequence: Synthetic oligonucleotide
aggaguccgggaggccagg

SEQ ID NO: 924234 - RNA, 19 nt, Artificial Sequence
  Description of Artificial Sequence: Synthetic oligonucleotide
gcgugaacggggcauaggu

SEQ ID NO: 924235 - RNA, 19 nt, Artificial Sequence
  Description of Artificial Sequence: Synthetic oligonucleotide
agagcgugaacggggcaua

SEQ ID NO: 924236 - RNA, 19 nt, Artificial Sequence
  Description of Artificial Sequence: Synthetic oligonucleotide
acauguaaucugagcgauu

SEQ ID NO: 924237 - RNA, 19 nt, Artificial Sequence
  Description of Artificial Sequence: Synthetic oligonucleotide
gguagcccucaggaauuag

SEQ ID NO: 924238 - RNA, 19 nt, Artificial Sequence
  Description of Artificial Sequence: Synthetic oligonucleotide
gcccucauacaggguaggg

SEQ ID NO: 924239 - RNA, 19 nt, Artificial Sequence
  Description of Artificial Sequence: Synthetic oligonucleotide
ccucagauggaaggcugag

SEQ ID NO: 924240 - RNA, 19 nt, Artificial Sequence
  Description of Artificial Sequence: Synthetic oligonucleotide
cugagcgauucaggcccag

SEQ ID NO: 924241 - RNA, 19 nt, Artificial Sequence
  Description of Artificial Sequence: Synthetic oligonucleotide
cagggguagcccucaggaa

SEQ ID NO: 924242 - RNA, 19 nt, Artificial Sequence
  Description of Artificial Sequence: Synthetic oligonucleotide
ggaaggccgaguucuggcu

SEQ ID NO: 924243 - RNA, 19 nt, Artificial Sequence
  Description of Artificial Sequence: Synthetic oligonucleotide
gcauuagcugagccauaga

SEQ ID NO: 924244 - RNA, 19 nt, Artificial Sequence
  Description of Artificial Sequence: Synthetic oligonucleotide
cagagcacuagggacuggu

SEQ ID NO: 924245 - RNA, 19 nt, Artificial Sequence
  Description of Artificial Sequence: Synthetic oligonucleotide
cguugagaacaugucggug

SEQ ID NO: 924246 - RNA, 19 nt, Artificial Sequence
  Description of Artificial Sequence: Synthetic oligonucleotide
cgugaacggggcauagguc

SEQ ID NO: 924247 - RNA, 19 nt, Artificial Sequence
  Description of Artificial Sequence: Synthetic oligonucleotide
gcacgcuggucaaauaugu

SEQ ID NO: 924248 - RNA, 19 nt, Artificial Sequence
  Description of Artificial Sequence: Synthetic oligonucleotide
ccaucugcgcugcacugga

SEQ ID NO: 924249 - RNA, 19 nt, Artificial Sequence
  Description of Artificial Sequence: Synthetic oligonucleotide
ccagagcuugcaccauuuc

SEQ ID NO: 924250 - RNA, 19 nt, Artificial Sequence
  Description of Artificial Sequence: Synthetic oligonucleotide
cagucccuugcugggauua

SEQ ID NO: 924251 - RNA, 19 nt, Artificial Sequence
  Description of Artificial Sequence: Synthetic oligonucleotide
ccacagcaacuuccugacc

SEQ ID NO: 924252 - RNA, 19 nt, Artificial Sequence
  Description of Artificial Sequence: Synthetic oligonucleotide
uccuguccaguagcucauu

SEQ ID NO: 924253 - RNA, 19 nt, Artificial Sequence
  Description of Artificial Sequence: Synthetic oligonucleotide
ccccuaagguggagacagg

SEQ ID NO: 924254 - RNA, 19 nt, Artificial Sequence
  Description of Artificial Sequence: Synthetic oligonucleotide
gugcuagacagaguuuguu

SEQ ID NO: 924255 - RNA, 19 nt, Artificial Sequence
  Description of Artificial Sequence: Synthetic oligonucleotide
gcgauucccagggccaguc

SEQ ID NO: 924256 - RNA, 19 nt, Artificial Sequence
  Description of Artificial Sequence: Synthetic oligonucleotide
cgccggauuacauggaugu

SEQ ID NO: 924257 - RNA, 19 nt, Artificial Sequence
  Description of Artificial Sequence: Synthetic oligonucleotide
cuggucaaauauguuccuu

SEQ ID NO: 924258 - RNA, 19 nt, Artificial Sequence
  Description of Artificial Sequence: Synthetic oligonucleotide
augugcccucauacagggu

SEQ ID NO: 924259 - RNA, 19 nt, Artificial Sequence
  Description of Artificial Sequence: Synthetic oligonucleotide
ggaguccgggaggccaggc

SEQ ID NO: 924260 - RNA, 19 nt, Artificial Sequence
  Description of Artificial Sequence: Synthetic oligonucleotide
gaccauccaugaacagccu

SEQ ID NO: 924261 - RNA, 19 nt, Artificial Sequence
  Description of Artificial Sequence: Synthetic oligonucleotide
caucugcgcugcacuggaa

SEQ ID NO: 924262 - RNA, 19 nt, Artificial Sequence
  Description of Artificial Sequence: Synthetic oligonucleotide
ggacucuccgcaggccuca

SEQ ID NO: 924263 - RNA, 19 nt, Artificial Sequence
  Description of Artificial Sequence: Synthetic oligonucleotide
gcagagcacuagggacugg

SEQ ID NO: 924264 - RNA, 19 nt, Artificial Sequence
  Description of Artificial Sequence: Synthetic oligonucleotide
ccccacacuccaagaucug

SEQ ID NO: 924265 - RNA, 19 nt, Artificial Sequence
  Description of Artificial Sequence: Synthetic oligonucleotide
cuaugcccuccuacccacu

SEQ ID NO: 924266 - RNA, 19 nt, Artificial Sequence
  Description of Artificial Sequence: Synthetic oligonucleotide
gccacuccugcggccacac

SEQ ID NO: 924267 - RNA, 19 nt, Artificial Sequence
  Description of Artificial Sequence: Synthetic oligonucleotide
gaagacccuggaggucuau

SEQ ID NO: 924268 - RNA, 19 nt, Artificial Sequence
  Description of Artificial Sequence: Synthetic oligonucleotide
cugcgcugcacuggaacau

SEQ ID NO: 924269 - RNA, 19 nt, Artificial Sequence
  Description of Artificial Sequence: Synthetic oligonucleotide
gccaucccaacucguucgu

SEQ ID NO: 924270 - RNA, 19 nt, Artificial Sequence
  Description of Artificial Sequence: Synthetic oligonucleotide
ccuuuaccucaaagcagcu

SEQ ID NO: 924271 - RNA, 19 nt, Artificial Sequence
  Description of Artificial Sequence: Synthetic oligonucleotide
ccuucgguuuuggucuaga

SEQ ID NO: 924272 - RNA, 19 nt, Artificial Sequence
  Description of Artificial Sequence: Synthetic oligonucleotide
caggccguagcaggcaauu

SEQ ID NO: 924273 - RNA, 19 nt, Artificial Sequence
  Description of Artificial Sequence: Synthetic oligonucleotide
cggggcauaggucaccacu

SEQ ID NO: 924274 - RNA, 19 nt, Artificial Sequence
  Description of Artificial Sequence: Synthetic oligonucleotide
gggguagcccucaggaauu

SEQ ID NO: 924275 - RNA, 19 nt, Artificial Sequence
  Description of Artificial Sequence: Synthetic oligonucleotide
gguggccaucccaacucgu

SEQ ID NO: 924276 - RNA, 19 nt, Artificial Sequence
  Description of Artificial Sequence: Synthetic oligonucleotide
cccggucuauggccugcug

SEQ ID NO: 924277 - RNA, 19 nt, Artificial Sequence
  Description of Artificial Sequence: Synthetic oligonucleotide
ccacgcccucagccaaggc

SEQ ID NO: 924278 - RNA, 19 nt, Artificial Sequence
  Description of Artificial Sequence: Synthetic oligonucleotide
gucccuugcugggauuauu

SEQ ID NO: 924279 - RNA, 19 nt, Artificial Sequence
  Description of Artificial Sequence: Synthetic oligonucleotide
gugcaggaugugcccucau

SEQ ID NO: 924280 - RNA, 19 nt, Artificial Sequence
  Description of Artificial Sequence: Synthetic oligonucleotide
ggguagcccucaggaauua

SEQ ID NO: 924281 - RNA, 19 nt, Artificial Sequence
  Description of Artificial Sequence: Synthetic oligonucleotide
ccacucgggcagggcugcc

SEQ ID NO: 924282 - RNA, 19 nt, Artificial Sequence
  Description of Artificial Sequence: Synthetic oligonucleotide
ccgcaggccucagcaccac

SEQ ID NO: 924283 - RNA, 19 nt, Artificial Sequence
  Description of Artificial Sequence: Synthetic oligonucleotide
gccggauuacauggauguu

SEQ ID NO: 924284 - RNA, 19 nt, Artificial Sequence
  Description of Artificial Sequence: Synthetic oligonucleotide
gccccacaugcuuguucau

SEQ ID NO: 924285 - RNA, 19 nt, Artificial Sequence
  Description of Artificial Sequence: Synthetic oligonucleotide
caggcccacccugcucagu

SEQ ID NO: 924286 - RNA, 19 nt, Artificial Sequence
  Description of Artificial Sequence: Synthetic oligonucleotide
ccaggccguagcaggcaau

SEQ ID NO: 924287 - RNA, 19 nt, Artificial Sequence
  Description of Artificial Sequence: Synthetic oligonucleotide
uuuaguacaacaaagguca

SEQ ID NO: 924288 - RNA, 19 nt, Artificial Sequence
  Description of Artificial Sequence: Synthetic oligonucleotide
aauaccacccuuugaaagc

SEQ ID NO: 924289 - RNA, 19 nt, Artificial Sequence
  Description of Artificial Sequence: Synthetic oligonucleotide
auguuuaccgauuaaaguc

SEQ ID NO: 924290 - RNA, 19 nt, Artificial Sequence
  Description of Artificial Sequence: Synthetic oligonucleotide
aaagguugaaaaccuacgg

SEQ ID NO: 924291 - RNA, 19 nt, Artificial Sequence
  Description of Artificial Sequence: Synthetic oligonucleotide
aaugguuuacauuugacaa

SEQ ID NO: 924292 - RNA, 19 nt, Artificial Sequence
  Description of Artificial Sequence: Synthetic oligonucleotide
aauugcaugaaggcuaacc

SEQ ID NO: 924293 - RNA, 19 nt, Artificial Sequence
  Description of Artificial Sequence: Synthetic oligonucleotide
uacgguaaaucuauaauag

SEQ ID NO: 924294 - RNA, 19 nt, Artificial Sequence
  Description of Artificial Sequence: Synthetic oligonucleotide
uuauguagaagucauagau

SEQ ID NO: 924295 - RNA, 19 nt, Artificial Sequence
  Description of Artificial Sequence: Synthetic oligonucleotide
aaaucuauaauagaauggu

SEQ ID NO: 924296 - RNA, 19 nt, Artificial Sequence
  Description of Artificial Sequence: Synthetic oligonucleotide
ucaugcagauaauugaggg

SEQ ID NO: 924297 - RNA, 19 nt, Artificial Sequence
  Description of Artificial Sequence: Synthetic oligonucleotide
uacaacaaaggucaagagc

SEQ ID NO: 924298 - RNA, 19 nt, Artificial Sequence
  Description of Artificial Sequence: Synthetic oligonucleotide
ugugaccaaacuuucagag

SEQ ID NO: 924299 - RNA, 19 nt, Artificial Sequence
  Description of Artificial Sequence: Synthetic oligonucleotide
uauuuuauguuaagaguug

SEQ ID NO: 924300 - RNA, 19 nt, Artificial Sequence
  Description of Artificial Sequence: Synthetic oligonucleotide
uguuuaccgauuaaaguca

SEQ ID NO: 924301 - RNA, 19 nt, Artificial Sequence
  Description of Artificial Sequence: Synthetic oligonucleotide
acaacaaaggucaagagca

SEQ ID NO: 924302 - RNA, 19 nt, Artificial Sequence
  Description of Artificial Sequence: Synthetic oligonucleotide
aaaagguugaaaaccuacg

SEQ ID NO: 924303 - RNA, 19 nt, Artificial Sequence
  Description of Artificial Sequence: Synthetic oligonucleotide
ucuuacuucaguuuauuaa

SEQ ID NO: 924304 - RNA, 19 nt, Artificial Sequence
  Description of Artificial Sequence: Synthetic oligonucleotide
aaagcuaacuuugugguga

SEQ ID NO: 924305 - RNA, 19 nt, Artificial Sequence
  Description of Artificial Sequence: Synthetic oligonucleotide
ucauagauuugguaaagca

SEQ ID NO: 924306 - RNA, 19 nt, Artificial Sequence
  Description of Artificial Sequence: Synthetic oligonucleotide
ugggacuaaacauuuuagg

SEQ ID NO: 924307 - RNA, 19 nt, Artificial Sequence
  Description of Artificial Sequence: Synthetic oligonucleotide
uauguuaagaguuguuugu

SEQ ID NO: 924308 - RNA, 19 nt, Artificial Sequence
  Description of Artificial Sequence: Synthetic oligonucleotide
gacuuacugccauucaucg

SEQ ID NO: 924309 - RNA, 19 nt, Artificial Sequence
  Description of Artificial Sequence: Synthetic oligonucleotide
agaugugugauucauggga

SEQ ID NO: 924310 - RNA, 19 nt, Artificial Sequence
  Description of Artificial Sequence: Synthetic oligonucleotide
uuaagaguuguuuguuagg

SEQ ID NO: 924311 - RNA, 19 nt, Artificial Sequence
  Description of Artificial Sequence: Synthetic oligonucleotide
uauaauagaaugguuuaca

SEQ ID NO: 924312 - RNA, 19 nt, Artificial Sequence
  Description of Artificial Sequence: Synthetic oligonucleotide
uugacgaggccuuagaagu

SEQ ID NO: 924313 - RNA, 19 nt, Artificial Sequence
  Description of Artificial Sequence: Synthetic oligonucleotide
uuaaauuccggacggauuu

SEQ ID NO: 924314 - RNA, 19 nt, Artificial Sequence
  Description of Artificial Sequence: Synthetic oligonucleotide
aaugggacuaaacauuuua

SEQ ID NO: 924315 - RNA, 19 nt, Artificial Sequence
  Description of Artificial Sequence: Synthetic oligonucleotide
aagguugaaaaccuacggu

SEQ ID NO: 924316 - RNA, 19 nt, Artificial Sequence
  Description of Artificial Sequence: Synthetic oligonucleotide
acggauuuuguuuuaaacu

SEQ ID NO: 924317 - RNA, 19 nt, Artificial Sequence
  Description of Artificial Sequence: Synthetic oligonucleotide
acccuuugaaagcacaaac

SEQ ID NO: 924318 - RNA, 19 nt, Artificial Sequence
  Description of Artificial Sequence: Synthetic oligonucleotide
aauuuaggaaggcaucuaa

SEQ ID NO: 924319 - RNA, 19 nt, Artificial Sequence
  Description of Artificial Sequence: Synthetic oligonucleotide
uuucucguauuuuaguaca

SEQ ID NO: 924320 - RNA, 19 nt, Artificial Sequence
  Description of Artificial Sequence: Synthetic oligonucleotide
aaguuacaggcucugcauc

SEQ ID NO: 924321 - RNA, 19 nt, Artificial Sequence
  Description of Artificial Sequence: Synthetic oligonucleotide
uugcaugaaggcuaacccg

SEQ ID NO: 924322 - RNA, 19 nt, Artificial Sequence
  Description of Artificial Sequence: Synthetic oligonucleotide
aauguccgcaugcauaagu

SEQ ID NO: 924323 - RNA, 19 nt, Artificial Sequence
  Description of Artificial Sequence: Synthetic oligonucleotide
aaggccacuacacauuagu

SEQ ID NO: 924324 - RNA, 19 nt, Artificial Sequence
  Description of Artificial Sequence: Synthetic oligonucleotide
uuaggaaggcaucuaaauc

SEQ ID NO: 924325 - RNA, 19 nt, Artificial Sequence
  Description of Artificial Sequence: Synthetic oligonucleotide
uuuaggaaggcaucuaaau

SEQ ID NO: 924326 - RNA, 19 nt, Artificial Sequence
  Description of Artificial Sequence: Synthetic oligonucleotide
uucgacgaggccaaguuca

SEQ ID NO: 924327 - RNA, 19 nt, Artificial Sequence
  Description of Artificial Sequence: Synthetic oligonucleotide
uuaucuggcgauuucugug

SEQ ID NO: 924328 - RNA, 19 nt, Artificial Sequence
  Description of Artificial Sequence: Synthetic oligonucleotide
gaugacaggugacuuacug

SEQ ID NO: 924329 - RNA, 19 nt, Artificial Sequence
  Description of Artificial Sequence: Synthetic oligonucleotide
ugcaugaaggcuaacccga

SEQ ID NO: 924330 - RNA, 19 nt, Artificial Sequence
  Description of Artificial Sequence: Synthetic oligonucleotide
ugggaaagagccauccucc

SEQ ID NO: 924331 - RNA, 19 nt, Artificial Sequence
  Description of Artificial Sequence: Synthetic oligonucleotide
agugauaguaacaacaaaa

SEQ ID NO: 924332 - RNA, 19 nt, Artificial Sequence
  Description of Artificial Sequence: Synthetic oligonucleotide
ugugacaugcauuacuguc

SEQ ID NO: 924333 - RNA, 19 nt, Artificial Sequence
  Description of Artificial Sequence: Synthetic oligonucleotide
agaggaagggguccauucc

SEQ ID NO: 924334 - RNA, 19 nt, Artificial Sequence
  Description of Artificial Sequence: Synthetic oligonucleotide
agucguucucucuccaacc

SEQ ID NO: 924335 - RNA, 19 nt, Artificial Sequence
  Description of Artificial Sequence: Synthetic oligonucleotide
ucuaacaguaucagacucu

SEQ ID NO: 924336 - RNA, 19 nt, Artificial Sequence
  Description of Artificial Sequence: Synthetic oligonucleotide
cuugagaaggccacuacac

SEQ ID NO: 924337 - RNA, 19 nt, Artificial Sequence
  Description of Artificial Sequence: Synthetic oligonucleotide
caugcuucagaccauugag

SEQ ID NO: 924338 - RNA, 19 nt, Artificial Sequence
  Description of Artificial Sequence: Synthetic oligonucleotide
auuggugucccuuuaucug

SEQ ID NO: 924339 - RNA, 19 nt, Artificial Sequence
  Description of Artificial Sequence: Synthetic oligonucleotide
caugcagauaauugagggg

SEQ ID NO: 924340 - RNA, 19 nt, Artificial Sequence
  Description of Artificial Sequence: Synthetic oligonucleotide
ucuacaaaaugguuucccu

SEQ ID NO: 924341 - RNA, 19 nt, Artificial Sequence
  Description of Artificial Sequence: Synthetic oligonucleotide
ugauaguaacaacaaaauu

SEQ ID NO: 924342 - RNA, 19 nt, Artificial Sequence
  Description of Artificial Sequence: Synthetic oligonucleotide
uugguaaagcauuguaaca

SEQ ID NO: 924343 - RNA, 19 nt, Artificial Sequence
  Description of Artificial Sequence: Synthetic oligonucleotide
guugacgaggccuuagaag

SEQ ID NO: 924344 - RNA, 19 nt, Artificial Sequence
  Description of Artificial Sequence: Synthetic oligonucleotide
agaaguuacaggcucugca

SEQ ID NO: 924345 - RNA, 19 nt, Artificial Sequence
  Description of Artificial Sequence: Synthetic oligonucleotide
gauuguaauuacauuauaa

SEQ ID NO: 924346 - RNA, 19 nt, Artificial Sequence
  Description of Artificial Sequence: Synthetic oligonucleotide
ugguaaagcauuguaacaa

SEQ ID NO: 924347 - RNA, 19 nt, Artificial Sequence
  Description of Artificial Sequence: Synthetic oligonucleotide
ggaccuuucuuauaaauac

SEQ ID NO: 924348 - RNA, 19 nt, Artificial Sequence
  Description of Artificial Sequence: Synthetic oligonucleotide
acaaaauugcaugaaggcu

SEQ ID NO: 924349 - RNA, 19 nt, Artificial Sequence
  Description of Artificial Sequence: Synthetic oligonucleotide
uccuaucauucuaaaauuc

SEQ ID NO: 924350 - RNA, 19 nt, Artificial Sequence
  Description of Artificial Sequence: Synthetic oligonucleotide
uuaccgauuaaagucacaa

SEQ ID NO: 924351 - RNA, 19 nt, Artificial Sequence
  Description of Artificial Sequence: Synthetic oligonucleotide
uguuuguuauguagaaguc

SEQ ID NO: 924352 - RNA, 19 nt, Artificial Sequence
  Description of Artificial Sequence: Synthetic oligonucleotide
cuuugcuccgcaauugcag

SEQ ID NO: 924353 - RNA, 19 nt, Artificial Sequence
  Description of Artificial Sequence: Synthetic oligonucleotide
ggacuaaacauuuuaggac

SEQ ID NO: 924354 - RNA, 19 nt, Artificial Sequence
  Description of Artificial Sequence: Synthetic oligonucleotide
caaaauugcaugaaggcua

SEQ ID NO: 924355 - RNA, 19 nt, Artificial Sequence
  Description of Artificial Sequence: Synthetic oligonucleotide
aggccuuagaaguuacagg

SEQ ID NO: 924356 - RNA, 19 nt, Artificial Sequence
  Description of Artificial Sequence: Synthetic oligonucleotide
ucaugcuucagaccauuga

SEQ ID NO: 924357 - RNA, 19 nt, Artificial Sequence
  Description of Artificial Sequence: Synthetic oligonucleotide
aaaccuacgguaaaucuau

SEQ ID NO: 924358 - RNA, 19 nt, Artificial Sequence
  Description of Artificial Sequence: Synthetic oligonucleotide
gguguaagagguuaaguac

SEQ ID NO: 924359 - RNA, 19 nt, Artificial Sequence
  Description of Artificial Sequence: Synthetic oligonucleotide
uuuaaauuccggacggauu

SEQ ID NO: 924360 - RNA, 19 nt, Artificial Sequence
  Description of Artificial Sequence: Synthetic oligonucleotide
aagggguccauucccacga

SEQ ID NO: 924361 - RNA, 19 nt, Artificial Sequence
  Description of Artificial Sequence: Synthetic oligonucleotide
augcagauaauugagggga

SEQ ID NO: 924362 - RNA, 19 nt, Artificial Sequence
  Description of Artificial Sequence: Synthetic oligonucleotide
uucucuaugcaguguucgg

SEQ ID NO: 924363 - RNA, 19 nt, Artificial Sequence
  Description of Artificial Sequence: Synthetic oligonucleotide
gagauugcugguuaaaaua

SEQ ID NO: 924364 - RNA, 19 nt, Artificial Sequence
  Description of Artificial Sequence: Synthetic oligonucleotide
agcauguacccacacaccu

SEQ ID NO: 924365 - RNA, 19 nt, Artificial Sequence
  Description of Artificial Sequence: Synthetic oligonucleotide
uguaacaauuuaggaaggc

SEQ ID NO: 924366 - RNA, 19 nt, Artificial Sequence
  Description of Artificial Sequence: Synthetic oligonucleotide
ugacuuacugccauucauc

SEQ ID NO: 924367 - RNA, 19 nt, Artificial Sequence
  Description of Artificial Sequence: Synthetic oligonucleotide
agguugaaaaccuacggua

SEQ ID NO: 924368 - RNA, 19 nt, Artificial Sequence
  Description of Artificial Sequence: Synthetic oligonucleotide
ugagauugcugguuaaaau

SEQ ID NO: 924369 - RNA, 19 nt, Artificial Sequence
  Description of Artificial Sequence: Synthetic oligonucleotide
aacccgaaagacuuccuau

SEQ ID NO: 924370 - RNA, 19 nt, Artificial Sequence
  Description of Artificial Sequence: Synthetic oligonucleotide
gagaugugugauucauggg

SEQ ID NO: 924371 - RNA, 19 nt, Artificial Sequence
  Description of Artificial Sequence: Synthetic oligonucleotide
accuaaaucuuacuucagu

SEQ ID NO: 924372 - RNA, 19 nt, Artificial Sequence
  Description of Artificial Sequence: Synthetic oligonucleotide
uuuucgacgaggccaaguu

SEQ ID NO: 924373 - RNA, 19 nt, Artificial Sequence
  Description of Artificial Sequence: Synthetic oligonucleotide
ccaccauugauauuucucg

SEQ ID NO: 924374 - RNA, 19 nt, Artificial Sequence
  Description of Artificial Sequence: Synthetic oligonucleotide
uuuuauguuaagaguuguu

SEQ ID NO: 924375 - RNA, 19 nt, Artificial Sequence
  Description of Artificial Sequence: Synthetic oligonucleotide
aaaaccuacgguaaaucua

SEQ ID NO: 924376 - RNA, 19 nt, Artificial Sequence
  Description of Artificial Sequence: Synthetic oligonucleotide
cuggcgauuucugugaccc

SEQ ID NO: 924377 - RNA, 19 nt, Artificial Sequence
  Description of Artificial Sequence: Synthetic oligonucleotide
acccgaaagacuuccuauc

SEQ ID NO: 924378 - RNA, 19 nt, Artificial Sequence
  Description of Artificial Sequence: Synthetic oligonucleotide
ucguguuuguucuuuccca

SEQ ID NO: 924379 - RNA, 19 nt, Artificial Sequence
  Description of Artificial Sequence: Synthetic oligonucleotide
uacacauuagugugacaug

SEQ ID NO: 924380 - RNA, 19 nt, Artificial Sequence
  Description of Artificial Sequence: Synthetic oligonucleotide
cuuuaucuggcgauuucug

SEQ ID NO: 924381 - RNA, 19 nt, Artificial Sequence
  Description of Artificial Sequence: Synthetic oligonucleotide
gauuugguaaagcauugua

SEQ ID NO: 924382 - RNA, 19 nt, Artificial Sequence
  Description of Artificial Sequence: Synthetic oligonucleotide
cuucucuaugcaguguucg

SEQ ID NO: 924383 - RNA, 19 nt, Artificial Sequence
  Description of Artificial Sequence: Synthetic oligonucleotide
aaugguuucccugggacua

SEQ ID NO: 924384 - RNA, 19 nt, Artificial Sequence
  Description of Artificial Sequence: Synthetic oligonucleotide
cuguuuguuauguagaagu

SEQ ID NO: 924385 - RNA, 19 nt, Artificial Sequence
  Description of Artificial Sequence: Synthetic oligonucleotide
gggacuaaacauuuuagga

SEQ ID NO: 924386 - RNA, 19 nt, Artificial Sequence
  Description of Artificial Sequence: Synthetic oligonucleotide
ugauuguaauuacauuaua

SEQ ID NO: 924387 - RNA, 19 nt, Artificial Sequence
  Description of Artificial Sequence: Synthetic oligonucleotide
cuauaauagaaugguuuac

SEQ ID NO: 924388 - RNA, 19 nt, Artificial Sequence
  Description of Artificial Sequence: Synthetic oligonucleotide
ugcauuacugucuguaauu

SEQ ID NO: 924389 - RNA, 19 nt, Artificial Sequence
  Description of Artificial Sequence: Synthetic oligonucleotide
uguaagagguuaaguacuu

SEQ ID NO: 924390 - RNA, 19 nt, Artificial Sequence
  Description of Artificial Sequence: Synthetic oligonucleotide
cucguauuuuaguacaaca

SEQ ID NO: 924391 - RNA, 19 nt, Artificial Sequence
  Description of Artificial Sequence: Synthetic oligonucleotide
agcauuggacagucugcgc

SEQ ID NO: 924392 - RNA, 19 nt, Artificial Sequence
  Description of Artificial Sequence: Synthetic oligonucleotide
aagucuugucucuccucag

SEQ ID NO: 924393 - RNA, 19 nt, Artificial Sequence
  Description of Artificial Sequence: Synthetic oligonucleotide
gccacuacacauuagugug

SEQ ID NO: 924394 - RNA, 19 nt, Artificial Sequence
  Description of Artificial Sequence: Synthetic oligonucleotide
gaaaaccuacgguaaaucu

SEQ ID NO: 924395 - RNA, 19 nt, Artificial Sequence
  Description of Artificial Sequence: Synthetic oligonucleotide
ucucuaugcaguguucggc

SEQ ID NO: 924396 - RNA, 19 nt, Artificial Sequence
  Description of Artificial Sequence: Synthetic oligonucleotide
ucagaguuccacagugaga

SEQ ID NO: 924397 - RNA, 19 nt, Artificial Sequence
  Description of Artificial Sequence: Synthetic oligonucleotide
uagucguucucucuccaac

SEQ ID NO: 924398 - RNA, 19 nt, Artificial Sequence
  Description of Artificial Sequence: Synthetic oligonucleotide
accgagugauaguaacaac

SEQ ID NO: 924399 - RNA, 19 nt, Artificial Sequence
  Description of Artificial Sequence: Synthetic oligonucleotide
acgguaaaucuauaauaga

SEQ ID NO: 924400 - RNA, 19 nt, Artificial Sequence
  Description of Artificial Sequence: Synthetic oligonucleotide
ugaaaaccuacgguaaauc

SEQ ID NO: 924401 - RNA, 19 nt, Artificial Sequence
  Description of Artificial Sequence: Synthetic oligonucleotide
gggucuaacaguaucagac

SEQ ID NO: 924402 - RNA, 19 nt, Artificial Sequence
  Description of Artificial Sequence: Synthetic oligonucleotide
uucggcuugcucaacuccu

SEQ ID NO: 924403 - RNA, 19 nt, Artificial Sequence
  Description of Artificial Sequence: Synthetic oligonucleotide
ugccugauugcaucaauaa

SEQ ID NO: 924404 - RNA, 19 nt, Artificial Sequence
  Description of Artificial Sequence: Synthetic oligonucleotide
aaauuccggacggauuuug

SEQ ID NO: 924405 - RNA, 19 nt, Artificial Sequence
  Description of Artificial Sequence: Synthetic oligonucleotide
uuuaccgauuaaagucaca

SEQ ID NO: 924406 - RNA, 19 nt, Artificial Sequence
  Description of Artificial Sequence: Synthetic oligonucleotide
auuugguaaagcauuguaa

SEQ ID NO: 924407 - RNA, 19 nt, Artificial Sequence
  Description of Artificial Sequence: Synthetic oligonucleotide
agagguuaaguacuugguu

SEQ ID NO: 924408 - RNA, 19 nt, Artificial Sequence
  Description of Artificial Sequence: Synthetic oligonucleotide
guuauguagaagucauaga

SEQ ID NO: 924409 - RNA, 19 nt, Artificial Sequence
  Description of Artificial Sequence: Synthetic oligonucleotide
uguugacgaggccuuagaa

SEQ ID NO: 924410 - RNA, 19 nt, Artificial Sequence
  Description of Artificial Sequence: Synthetic oligonucleotide
guucagguguacuuguuga

SEQ ID NO: 924411 - RNA, 19 nt, Artificial Sequence
  Description of Artificial Sequence: Synthetic oligonucleotide
gaccuuucuuauaaauacc

SEQ ID NO: 924412 - RNA, 19 nt, Artificial Sequence
  Description of Artificial Sequence: Synthetic oligonucleotide
aaaauugcaugaaggcuaa

SEQ ID NO: 924413 - RNA, 19 nt, Artificial Sequence
  Description of Artificial Sequence: Synthetic oligonucleotide
guaacaauuuaggaaggca

SEQ ID NO: 924414 - RNA, 19 nt, Artificial Sequence
  Description of Artificial Sequence: Synthetic oligonucleotide
agucaauucuucuccuccu

SEQ ID NO: 924415 - RNA, 19 nt, Artificial Sequence
  Description of Artificial Sequence: Synthetic oligonucleotide
uauaacucaugcagauaau

SEQ ID NO: 924416 - RNA, 19 nt, Artificial Sequence
  Description of Artificial Sequence: Synthetic oligonucleotide
ugacaacuguuuguuaugu

SEQ ID NO: 924417 - RNA, 19 nt, Artificial Sequence
  Description of Artificial Sequence: Synthetic oligonucleotide
gcuaacuuuguggugauug

SEQ ID NO: 924418 - RNA, 19 nt, Artificial Sequence
  Description of Artificial Sequence: Synthetic oligonucleotide
uugagauugcugguuaaaa

SEQ ID NO: 924419 - RNA, 19 nt, Artificial Sequence
  Description of Artificial Sequence: Synthetic oligonucleotide
agguuaaguacuugguuuu

SEQ ID NO: 924420 - RNA, 19 nt, Artificial Sequence
  Description of Artificial Sequence: Synthetic oligonucleotide
uuguugacgaggccuuaga

SEQ ID NO: 924421 - RNA, 19 nt, Artificial Sequence
  Description of Artificial Sequence: Synthetic oligonucleotide
uugaaaaccuacgguaaau

SEQ ID NO: 924422 - RNA, 19 nt, Artificial Sequence
  Description of Artificial Sequence: Synthetic oligonucleotide
uguccgcaugcauaagucu

SEQ ID NO: 924423 - RNA, 19 nt, Artificial Sequence
  Description of Artificial Sequence: Synthetic oligonucleotide
augcauuacugucuguaau

SEQ ID NO: 924424 - RNA, 19 nt, Artificial Sequence
  Description of Artificial Sequence: Synthetic oligonucleotide
uucucguauuuuaguacaa

SEQ ID NO: 924425 - RNA, 19 nt, Artificial Sequence
  Description of Artificial Sequence: Synthetic oligonucleotide
ucucguauuuuaguacaac

SEQ ID NO: 924426 - RNA, 19 nt, Artificial Sequence
  Description of Artificial Sequence: Synthetic oligonucleotide
uaacccgaaagacuuccua

SEQ ID NO: 924427 - RNA, 19 nt, Artificial Sequence
  Description of Artificial Sequence: Synthetic oligonucleotide
cagcauuggacagucugcg

SEQ ID NO: 924428 - RNA, 19 nt, Artificial Sequence
  Description of Artificial Sequence: Synthetic oligonucleotide
uuguggugauuguaauuac

SEQ ID NO: 924429 - RNA, 19 nt, Artificial Sequence
  Description of Artificial Sequence: Synthetic oligonucleotide
uuucgacgaggccaaguuc

SEQ ID NO: 924430 - RNA, 19 nt, Artificial Sequence
  Description of Artificial Sequence: Synthetic oligonucleotide
accuacgguaaaucuauaa

SEQ ID NO: 924431 - RNA, 19 nt, Artificial Sequence
  Description of Artificial Sequence: Synthetic oligonucleotide
ggacuaggccuugagaagg

SEQ ID NO: 924432 - RNA, 19 nt, Artificial Sequence
  Description of Artificial Sequence: Synthetic oligonucleotide
uccgcaauugcagcugcag

SEQ ID NO: 924433 - RNA, 19 nt, Artificial Sequence
  Description of Artificial Sequence: Synthetic oligonucleotide
aucuggcgauuucugugac

SEQ ID NO: 924434 - RNA, 19 nt, Artificial Sequence
  Description of Artificial Sequence: Synthetic oligonucleotide
ucagucaauucuucuccuc

SEQ ID NO: 924435 - RNA, 19 nt, Artificial Sequence
  Description of Artificial Sequence: Synthetic oligonucleotide
ugacccuaauugcugccac

SEQ ID NO: 924436 - RNA, 19 nt, Artificial Sequence
  Description of Artificial Sequence: Synthetic oligonucleotide
gauuugggucuggagauga

SEQ ID NO: 924437 - RNA, 19 nt, Artificial Sequence
  Description of Artificial Sequence: Synthetic oligonucleotide
agugagaugugugauucau

SEQ ID NO: 924438 - RNA, 19 nt, Artificial Sequence
  Description of Artificial Sequence: Synthetic oligonucleotide
caagucuugucucuccuca

SEQ ID NO: 924439 - RNA, 19 nt, Artificial Sequence
  Description of Artificial Sequence: Synthetic oligonucleotide
caugguguaagagguuaag

SEQ ID NO: 924440 - RNA, 19 nt, Artificial Sequence
  Description of Artificial Sequence: Synthetic oligonucleotide
auguccgcaugcauaaguc

SEQ ID NO: 924441 - RNA, 19 nt, Artificial Sequence
  Description of Artificial Sequence: Synthetic oligonucleotide
uuccggacggauuuuguuu

SEQ ID NO: 924442 - RNA, 19 nt, Artificial Sequence
  Description of Artificial Sequence: Synthetic oligonucleotide
ugcagauaauugaggggaa

SEQ ID NO: 924443 - RNA, 19 nt, Artificial Sequence
  Description of Artificial Sequence: Synthetic oligonucleotide
agucuugucucuccucagu

SEQ ID NO: 924444 - RNA, 19 nt, Artificial Sequence
  Description of Artificial Sequence: Synthetic oligonucleotide
aaauugcaugaaggcuaac

SEQ ID NO: 924445 - RNA, 19 nt, Artificial Sequence
  Description of Artificial Sequence: Synthetic oligonucleotide
guucggcuugcucaacucc

SEQ ID NO: 924446 - RNA, 19 nt, Artificial Sequence
  Description of Artificial Sequence: Synthetic oligonucleotide
cauucaucguguuuguucu

SEQ ID NO: 924447 - RNA, 19 nt, Artificial Sequence
  Description of Artificial Sequence: Synthetic oligonucleotide
acccgagacacuuuccuaa

SEQ ID NO: 924448 - RNA, 19 nt, Artificial Sequence
  Description of Artificial Sequence: Synthetic oligonucleotide
uaccgauuaaagucacaaa

SEQ ID NO: 924449 - RNA, 19 nt, Artificial Sequence
  Description of Artificial Sequence: Synthetic oligonucleotide
aguacucccuccacuuugg

SEQ ID NO: 924450 - RNA, 19 nt, Artificial Sequence
  Description of Artificial Sequence: Synthetic oligonucleotide
uuaguacaacaaaggucaa

SEQ ID NO: 924451 - RNA, 19 nt, Artificial Sequence
  Description of Artificial Sequence: Synthetic oligonucleotide
cuagccucucucucucuag

SEQ ID NO: 924452 - RNA, 19 nt, Artificial Sequence
  Description of Artificial Sequence: Synthetic oligonucleotide
uacucccuccacuuuggga

SEQ ID NO: 924453 - RNA, 19 nt, Artificial Sequence
  Description of Artificial Sequence: Synthetic oligonucleotide
gaaguuacaggcucugcau

SEQ ID NO: 924454 - RNA, 19 nt, Artificial Sequence
  Description of Artificial Sequence: Synthetic oligonucleotide
caguacucccuccacuuug

SEQ ID NO: 924455 - RNA, 19 nt, Artificial Sequence
  Description of Artificial Sequence: Synthetic oligonucleotide
agccucucucucucuaguc

SEQ ID NO: 924456 - RNA, 19 nt, Artificial Sequence
  Description of Artificial Sequence: Synthetic oligonucleotide
cauuggacagucugcgcuc

SEQ ID NO: 924457 - RNA, 19 nt, Artificial Sequence
  Description of Artificial Sequence: Synthetic oligonucleotide
gagugauaguaacaacaaa

SEQ ID NO: 924458 - RNA, 19 nt, Artificial Sequence
  Description of Artificial Sequence: Synthetic oligonucleotide
cauuauaacucaugcagau

SEQ ID NO: 924459 - RNA, 19 nt, Artificial Sequence
  Description of Artificial Sequence: Synthetic oligonucleotide
ucuggcgauuucugugacc

SEQ ID NO: 924460 - RNA, 19 nt, Artificial Sequence
  Description of Artificial Sequence: Synthetic oligonucleotide
acuuacugccauucaucgu

SEQ ID NO: 924461 - RNA, 19 nt, Artificial Sequence
  Description of Artificial Sequence: Synthetic oligonucleotide
cagguguacuuguugacga

SEQ ID NO: 924462 - RNA, 19 nt, Artificial Sequence
  Description of Artificial Sequence: Synthetic oligonucleotide
ucuagccucucucucucua

SEQ ID NO: 924463 - RNA, 19 nt, Artificial Sequence
  Description of Artificial Sequence: Synthetic oligonucleotide
aucuuacuucaguuuauua

SEQ ID NO: 924464 - RNA, 19 nt, Artificial Sequence
  Description of Artificial Sequence: Synthetic oligonucleotide
gguucagguguacuuguug

SEQ ID NO: 924465 - RNA, 19 nt, Artificial Sequence
  Description of Artificial Sequence: Synthetic oligonucleotide
uggacagucugcgcucgcg

SEQ ID NO: 924466 - RNA, 19 nt, Artificial Sequence
  Description of Artificial Sequence: Synthetic oligonucleotide
gacccuaauugcugccacc

SEQ ID NO: 924467 - RNA, 19 nt, Artificial Sequence
  Description of Artificial Sequence: Synthetic oligonucleotide
ccuaccaccuaaaucuuac

SEQ ID NO: 924468 - RNA, 19 nt, Artificial Sequence
  Description of Artificial Sequence: Synthetic oligonucleotide
uccuaagcuuugcuccgca

SEQ ID NO: 924469 - RNA, 19 nt, Artificial Sequence
  Description of Artificial Sequence: Synthetic oligonucleotide
aaauguccgcaugcauaag

SEQ ID NO: 924470 - RNA, 19 nt, Artificial Sequence
  Description of Artificial Sequence: Synthetic oligonucleotide
uguucggcuugcucaacuc

SEQ ID NO: 924471 - RNA, 19 nt, Artificial Sequence
  Description of Artificial Sequence: Synthetic oligonucleotide
uuguuauguagaagucaua

SEQ ID NO: 924472 - RNA, 19 nt, Artificial Sequence
  Description of Artificial Sequence: Synthetic oligonucleotide
auaccacccuuugaaagca

SEQ ID NO: 924473 - RNA, 19 nt, Artificial Sequence
  Description of Artificial Sequence: Synthetic oligonucleotide
uccggacggauuuuguuuu

SEQ ID NO: 924474 - RNA, 19 nt, Artificial Sequence
  Description of Artificial Sequence: Synthetic oligonucleotide
gccugauugcaucaauaag

SEQ ID NO: 924475 - RNA, 19 nt, Artificial Sequence
  Description of Artificial Sequence: Synthetic oligonucleotide
uagccucucucucucuagu

SEQ ID NO: 924476 - RNA, 19 nt, Artificial Sequence
  Description of Artificial Sequence: Synthetic oligonucleotide
aauuccggacggauuuugu

SEQ ID NO: 924477 - RNA, 19 nt, Artificial Sequence
  Description of Artificial Sequence: Synthetic oligonucleotide
ccgagugauaguaacaaca

SEQ ID NO: 924478 - RNA, 19 nt, Artificial Sequence
  Description of Artificial Sequence: Synthetic oligonucleotide
gccucucucucucuagucg

SEQ ID NO: 924479 - RNA, 19 nt, Artificial Sequence
  Description of Artificial Sequence: Synthetic oligonucleotide
auuuaggaaggcaucuaaa

SEQ ID NO: 924480 - RNA, 19 nt, Artificial Sequence
  Description of Artificial Sequence: Synthetic oligonucleotide
cuacacauuagugugacau

SEQ ID NO: 924481 - RNA, 19 nt, Artificial Sequence
  Description of Artificial Sequence: Synthetic oligonucleotide
aguuguuuguuaggaauuu

SEQ ID NO: 924482 - RNA, 19 nt, Artificial Sequence
  Description of Artificial Sequence: Synthetic oligonucleotide
guaagagguuaaguacuug

SEQ ID NO: 924483 - RNA, 19 nt, Artificial Sequence
  Description of Artificial Sequence: Synthetic oligonucleotide
uccacccgagacacuuucc

SEQ ID NO: 924484 - RNA, 19 nt, Artificial Sequence
  Description of Artificial Sequence: Synthetic oligonucleotide
auugagauugcugguuaaa

SEQ ID NO: 924485 - RNA, 19 nt, Artificial Sequence
  Description of Artificial Sequence: Synthetic oligonucleotide
acccuaauugcugccacca

SEQ ID NO: 924486 - RNA, 19 nt, Artificial Sequence
  Description of Artificial Sequence: Synthetic oligonucleotide
guuuaccgauuaaagucac

SEQ ID NO: 924487 - RNA, 19 nt, Artificial Sequence
  Description of Artificial Sequence: Synthetic oligonucleotide
gagcauguacccacacacc

SEQ ID NO: 924488 - RNA, 19 nt, Artificial Sequence
  Description of Artificial Sequence: Synthetic oligonucleotide
uugcuccgcaauugcagcu

SEQ ID NO: 924489 - RNA, 19 nt, Artificial Sequence
  Description of Artificial Sequence: Synthetic oligonucleotide
gggacuaggccuugagaag

SEQ ID NO: 924490 - RNA, 19 nt, Artificial Sequence
  Description of Artificial Sequence: Synthetic oligonucleotide
auuccggacggauuuuguu

SEQ ID NO: 924491 - RNA, 19 nt, Artificial Sequence
  Description of Artificial Sequence: Synthetic oligonucleotide
gaagcucagagucaugcuu

SEQ ID NO: 924492 - RNA, 19 nt, Artificial Sequence
  Description of Artificial Sequence: Synthetic oligonucleotide
gugauaguaacaacaaaau

SEQ ID NO: 924493 - RNA, 19 nt, Artificial Sequence
  Description of Artificial Sequence: Synthetic oligonucleotide
caugcauuacugucuguaa

SEQ ID NO: 924494 - RNA, 19 nt, Artificial Sequence
  Description of Artificial Sequence: Synthetic oligonucleotide
guguaagagguuaaguacu

SEQ ID NO: 924495 - RNA, 19 nt, Artificial Sequence
  Description of Artificial Sequence: Synthetic oligonucleotide
aggaccuuucuuauaaaua

SEQ ID NO: 924496 - RNA, 19 nt, Artificial Sequence
  Description of Artificial Sequence: Synthetic oligonucleotide
gcuaacccgaaagacuucc

SEQ ID NO: 924497 - RNA, 19 nt, Artificial Sequence
  Description of Artificial Sequence: Synthetic oligonucleotide
uccuaccaccuaaaucuua

SEQ ID NO: 924498 - RNA, 19 nt, Artificial Sequence
  Description of Artificial Sequence: Synthetic oligonucleotide
ucuaugcaguguucggcuu

SEQ ID NO: 924499 - RNA, 19 nt, Artificial Sequence
  Description of Artificial Sequence: Synthetic oligonucleotide
cagaguuccacagugagau

SEQ ID NO: 924500 - RNA, 19 nt, Artificial Sequence
  Description of Artificial Sequence: Synthetic oligonucleotide
aggcuaacccgaaagacuu

SEQ ID NO: 924501 - RNA, 19 nt, Artificial Sequence
  Description of Artificial Sequence: Synthetic oligonucleotide
ugcuccgcaauugcagcug

SEQ ID NO: 924502 - RNA, 19 nt, Artificial Sequence
  Description of Artificial Sequence: Synthetic oligonucleotide
ucgcuaguucuuuucucau

SEQ ID NO: 924503 - RNA, 19 nt, Artificial Sequence
  Description of Artificial Sequence: Synthetic oligonucleotide
ucgacgaggccaaguucac

SEQ ID NO: 924504 - RNA, 19 nt, Artificial Sequence
  Description of Artificial Sequence: Synthetic oligonucleotide
gacuaggccuugagaaggc

SEQ ID NO: 924505 - RNA, 19 nt, Artificial Sequence
  Description of Artificial Sequence: Synthetic oligonucleotide
gggaccgagugauaguaac

SEQ ID NO: 924506 - RNA, 19 nt, Artificial Sequence
  Description of Artificial Sequence: Synthetic oligonucleotide
acuacacauuagugugaca

SEQ ID NO: 924507 - RNA, 19 nt, Artificial Sequence
  Description of Artificial Sequence: Synthetic oligonucleotide
uggagaugacaggugacuu

SEQ ID NO: 924508 - RNA, 19 nt, Artificial Sequence
  Description of Artificial Sequence: Synthetic oligonucleotide
guccauucccacgaccagc

SEQ ID NO: 924509 - RNA, 19 nt, Artificial Sequence
  Description of Artificial Sequence: Synthetic oligonucleotide
acaaacagcugaagacaug

SEQ ID NO: 924510 - RNA, 19 nt, Artificial Sequence
  Description of Artificial Sequence: Synthetic oligonucleotide
guacucccuccacuuuggg

SEQ ID NO: 924511 - RNA, 19 nt, Artificial Sequence
  Description of Artificial Sequence: Synthetic oligonucleotide
uuccuaagcuuugcuccgc

SEQ ID NO: 924512 - RNA, 19 nt, Artificial Sequence
  Description of Artificial Sequence: Synthetic oligonucleotide
gaaggccacuacacauuag

SEQ ID NO: 924513 - RNA, 19 nt, Artificial Sequence
  Description of Artificial Sequence: Synthetic oligonucleotide
uuccuaccaccuaaaucuu

SEQ ID NO: 924514 - RNA, 19 nt, Artificial Sequence
  Description of Artificial Sequence: Synthetic oligonucleotide
gugagaugugugauucaug

SEQ ID NO: 924515 - RNA, 19 nt, Artificial Sequence
  Description of Artificial Sequence: Synthetic oligonucleotide
ugacgaggccuuagaaguu

SEQ ID NO: 924516 - RNA, 19 nt, Artificial Sequence
  Description of Artificial Sequence: Synthetic oligonucleotide
aaaugggacuaaacauuuu

SEQ ID NO: 924517 - RNA, 19 nt, Artificial Sequence
  Description of Artificial Sequence: Synthetic oligonucleotide
gacaacuguuuguuaugua

SEQ ID NO: 924518 - RNA, 19 nt, Artificial Sequence
  Description of Artificial Sequence: Synthetic oligonucleotide
cuguuuucgacgaggccaa

SEQ ID NO: 924519 - RNA, 19 nt, Artificial Sequence
  Description of Artificial Sequence: Synthetic oligonucleotide
gugacaugcauuacugucu

SEQ ID NO: 924520 - RNA, 19 nt, Artificial Sequence
  Description of Artificial Sequence: Synthetic oligonucleotide
gguugaaaaccuacgguaa

SEQ ID NO: 924521 - RNA, 19 nt, Artificial Sequence
  Description of Artificial Sequence: Synthetic oligonucleotide
acgaggccuuagaaguuac

SEQ ID NO: 924522 - RNA, 19 nt, Artificial Sequence
  Description of Artificial Sequence: Synthetic oligonucleotide
aggccacuacacauuagug

SEQ ID NO: 924523 - RNA, 19 nt, Artificial Sequence
  Description of Artificial Sequence: Synthetic oligonucleotide
gguuaaguacuugguuuug

SEQ ID NO: 924524 - RNA, 19 nt, Artificial Sequence
  Description of Artificial Sequence: Synthetic oligonucleotide
cucuaugcaguguucggcu

SEQ ID NO: 924525 - RNA, 19 nt, Artificial Sequence
  Description of Artificial Sequence: Synthetic oligonucleotide
cauugagauugcugguuaa

SEQ ID NO: 924526 - RNA, 19 nt, Artificial Sequence
  Description of Artificial Sequence: Synthetic oligonucleotide
uaaauuccggacggauuuu

SEQ ID NO: 924527 - RNA, 19 nt, Artificial Sequence
  Description of Artificial Sequence: Synthetic oligonucleotide
uaccacccuuugaaagcac

SEQ ID NO: 924528 - RNA, 19 nt, Artificial Sequence
  Description of Artificial Sequence: Synthetic oligonucleotide
ugcuucagucugucauagu

SEQ ID NO: 924529 - RNA, 19 nt, Artificial Sequence
  Description of Artificial Sequence: Synthetic oligonucleotide
guuaacauguuuaccgauu

SEQ ID NO: 924530 - RNA, 19 nt, Artificial Sequence
  Description of Artificial Sequence: Synthetic oligonucleotide
ggccacuacacauuagugu

SEQ ID NO: 924531 - RNA, 19 nt, Artificial Sequence
  Description of Artificial Sequence: Synthetic oligonucleotide
cuuuaaauuccggacggau

SEQ ID NO: 924532 - RNA, 19 nt, Artificial Sequence
  Description of Artificial Sequence: Synthetic oligonucleotide
cauuugacaacuguuuguu

SEQ ID NO: 924533 - RNA, 19 nt, Artificial Sequence
  Description of Artificial Sequence: Synthetic oligonucleotide
accacccuuugaaagcaca

SEQ ID NO: 924534 - RNA, 19 nt, Artificial Sequence
  Description of Artificial Sequence: Synthetic oligonucleotide
gugcagaauuaacuuuaaa

SEQ ID NO: 924535 - RNA, 19 nt, Artificial Sequence
  Description of Artificial Sequence: Synthetic oligonucleotide
ggucuaacaguaucagacu

SEQ ID NO: 924536 - RNA, 19 nt, Artificial Sequence
  Description of Artificial Sequence: Synthetic oligonucleotide
augguuucccugggacuag

SEQ ID NO: 924537 - RNA, 19 nt, Artificial Sequence
  Description of Artificial Sequence: Synthetic oligonucleotide
gcauuggacagucugcgcu

SEQ ID NO: 924538 - RNA, 19 nt, Artificial Sequence
  Description of Artificial Sequence: Synthetic oligonucleotide
gacgaggccuuagaaguua

SEQ ID NO: 924539 - RNA, 19 nt, Artificial Sequence
  Description of Artificial Sequence: Synthetic oligonucleotide
agucaugcuucagaccauu

SEQ ID NO: 924540 - RNA, 19 nt, Artificial Sequence
  Description of Artificial Sequence: Synthetic oligonucleotide
uguuuucgacgaggccaag

SEQ ID NO: 924541 - RNA, 19 nt, Artificial Sequence
  Description of Artificial Sequence: Synthetic oligonucleotide
gucguucucucuccaaccu

SEQ ID NO: 924542 - RNA, 19 nt, Artificial Sequence
  Description of Artificial Sequence: Synthetic oligonucleotide
agacucuuccuaccaccua

SEQ ID NO: 924543 - RNA, 19 nt, Artificial Sequence
  Description of Artificial Sequence: Synthetic oligonucleotide
ggagaugacaggugacuua

SEQ ID NO: 924544 - RNA, 19 nt, Artificial Sequence
  Description of Artificial Sequence: Synthetic oligonucleotide
gugacccuaauugcugcca

SEQ ID NO: 924545 - RNA, 19 nt, Artificial Sequence
  Description of Artificial Sequence: Synthetic oligonucleotide
cagcggcucgcucuccagc

SEQ ID NO: 924546 - RNA, 19 nt, Artificial Sequence
  Description of Artificial Sequence: Synthetic oligonucleotide
acaugguguaagagguuaa

SEQ ID NO: 924547 - RNA, 19 nt, Artificial Sequence
  Description of Artificial Sequence: Synthetic oligonucleotide
caccauugauauuucucgu

SEQ ID NO: 924548 - RNA, 19 nt, Artificial Sequence
  Description of Artificial Sequence: Synthetic oligonucleotide
caauuuaggaaggcaucua

SEQ ID NO: 924549 - RNA, 19 nt, Artificial Sequence
  Description of Artificial Sequence: Synthetic oligonucleotide
cuaacaguaucagacucuu

SEQ ID NO: 924550 - RNA, 19 nt, Artificial Sequence
  Description of Artificial Sequence: Synthetic oligonucleotide
uggcgauuucugugacccu

SEQ ID NO: 924551 - RNA, 19 nt, Artificial Sequence
  Description of Artificial Sequence: Synthetic oligonucleotide
gcauguacccacacaccug

SEQ ID NO: 924552 - RNA, 19 nt, Artificial Sequence
  Description of Artificial Sequence: Synthetic oligonucleotide
cccgagacacuuuccuaag

SEQ ID NO: 924553 - RNA, 19 nt, Artificial Sequence
  Description of Artificial Sequence: Synthetic oligonucleotide
cgagugauaguaacaacaa

SEQ ID NO: 924554 - RNA, 19 nt, Artificial Sequence
  Description of Artificial Sequence: Synthetic oligonucleotide
ccgcaauugcagcugcagc

SEQ ID NO: 924555 - RNA, 19 nt, Artificial Sequence
  Description of Artificial Sequence: Synthetic oligonucleotide
cccgaaagacuuccuauca

SEQ ID NO: 924556 - RNA, 19 nt, Artificial Sequence
  Description of Artificial Sequence: Synthetic oligonucleotide
cucucuagucguucucucu

SEQ ID NO: 924557 - RNA, 19 nt, Artificial Sequence
  Description of Artificial Sequence: Synthetic oligonucleotide
ggacggauuuuguuuuaaa

SEQ ID NO: 924558 - RNA, 19 nt, Artificial Sequence
  Description of Artificial Sequence: Synthetic oligonucleotide
cagggaccgagugauagua

SEQ ID NO: 924559 - RNA, 19 nt, Artificial Sequence
  Description of Artificial Sequence: Synthetic oligonucleotide
gcuccgcaauugcagcugc

SEQ ID NO: 924560 - RNA, 19 nt, Artificial Sequence
  Description of Artificial Sequence: Synthetic oligonucleotide
ccgauuaaagucacaaaau

SEQ ID NO: 924561 - RNA, 19 nt, Artificial Sequence
  Description of Artificial Sequence: Synthetic oligonucleotide
ggaccgagugauaguaaca

SEQ ID NO: 924562 - RNA, 19 nt, Artificial Sequence
  Description of Artificial Sequence: Synthetic oligonucleotide
ggacuccauuggcacuggg

SEQ ID NO: 924563 - RNA, 19 nt, Artificial Sequence
  Description of Artificial Sequence: Synthetic oligonucleotide
guguucggcuugcucaacu

SEQ ID NO: 924564 - RNA, 19 nt, Artificial Sequence
  Description of Artificial Sequence: Synthetic oligonucleotide
cacccuuugaaagcacaaa

SEQ ID NO: 924565 - RNA, 19 nt, Artificial Sequence
  Description of Artificial Sequence: Synthetic oligonucleotide
ccuacgguaaaucuauaau

SEQ ID NO: 924566 - RNA, 19 nt, Artificial Sequence
  Description of Artificial Sequence: Synthetic oligonucleotide
guuuucgacgaggccaagu

SEQ ID NO: 924567 - RNA, 19 nt, Artificial Sequence
  Description of Artificial Sequence: Synthetic oligonucleotide
aaccuacgguaaaucuaua

SEQ ID NO: 924568 - RNA, 19 nt, Artificial Sequence
  Description of Artificial Sequence: Synthetic oligonucleotide
gcuucgcuaguucuuuucu

SEQ ID NO: 924569 - RNA, 19 nt, Artificial Sequence
  Description of Artificial Sequence: Synthetic oligonucleotide
cuaacccgaaagacuuccu

SEQ ID NO: 924570 - RNA, 19 nt, Artificial Sequence
  Description of Artificial Sequence: Synthetic oligonucleotide
ccauugauauuucucguau

SEQ ID NO: 924571 - RNA, 19 nt, Artificial Sequence
  Description of Artificial Sequence: Synthetic oligonucleotide
ggcgauuucugugacccua

SEQ ID NO: 924572 - RNA, 19 nt, Artificial Sequence
  Description of Artificial Sequence: Synthetic oligonucleotide
agacaugguguaagagguu

SEQ ID NO: 924573 - RNA, 19 nt, Artificial Sequence
  Description of Artificial Sequence: Synthetic oligonucleotide
ccacuacacauuaguguga

SEQ ID NO: 924574 - RNA, 19 nt, Artificial Sequence
  Description of Artificial Sequence: Synthetic oligonucleotide
cccuuuaucuggcgauuuc

SEQ ID NO: 924575 - RNA, 19 nt, Artificial Sequence
  Description of Artificial Sequence: Synthetic oligonucleotide
cacccgagacacuuuccua

SEQ ID NO: 924576 - RNA, 19 nt, Artificial Sequence
  Description of Artificial Sequence: Synthetic oligonucleotide
cccacaguacucccuccac

SEQ ID NO: 924577 - RNA, 19 nt, Artificial Sequence
  Description of Artificial Sequence: Synthetic oligonucleotide
cuccgcaauugcagcugca

SEQ ID NO: 924578 - RNA, 19 nt, Artificial Sequence
  Description of Artificial Sequence: Synthetic oligonucleotide
agggaccgagugauaguaa

SEQ ID NO: 924579 - RNA, 19 nt, Artificial Sequence
  Description of Artificial Sequence: Synthetic oligonucleotide
gcggcucgcucuccagccg

SEQ ID NO: 924580 - RNA, 19 nt, Artificial Sequence
  Description of Artificial Sequence: Synthetic oligonucleotide
auguacccacacaccugca

SEQ ID NO: 924581 - RNA, 19 nt, Artificial Sequence
  Description of Artificial Sequence: Synthetic oligonucleotide
ggcgcucucucucuagccu

SEQ ID NO: 924582 - RNA, 19 nt, Artificial Sequence
  Description of Artificial Sequence: Synthetic oligonucleotide
uucccacgaccagcaucug

SEQ ID NO: 924583 - RNA, 19 nt, Artificial Sequence
  Description of Artificial Sequence: Synthetic oligonucleotide
agcuaacuuuguggugauu

SEQ ID NO: 924584 - RNA, 19 nt, Artificial Sequence
  Description of Artificial Sequence: Synthetic oligonucleotide
ggcuaacccgaaagacuuc

SEQ ID NO: 924585 - RNA, 19 nt, Artificial Sequence
  Description of Artificial Sequence: Synthetic oligonucleotide
ccucucucucucuagucgu

SEQ ID NO: 924586 - RNA, 19 nt, Artificial Sequence
  Description of Artificial Sequence: Synthetic oligonucleotide
cccacgaccagcaucuguu

SEQ ID NO: 924587 - RNA, 19 nt, Artificial Sequence
  Description of Artificial Sequence: Synthetic oligonucleotide
cucucucucucuagucguu

SEQ ID NO: 924588 - RNA, 19 nt, Artificial Sequence
  Description of Artificial Sequence: Synthetic oligonucleotide
ccuaagcuuugcuccgcaa

SEQ ID NO: 924589 - RNA, 19 nt, Artificial Sequence
  Description of Artificial Sequence: Synthetic oligonucleotide
cucuagccucucucucucu

SEQ ID NO: 924590 - RNA, 19 nt, Artificial Sequence
  Description of Artificial Sequence: Synthetic oligonucleotide
ccacccgagacacuuuccu

SEQ ID NO: 924591 - RNA, 19 nt, Artificial Sequence
  Description of Artificial Sequence: Synthetic oligonucleotide
caggugacuuacugccauu

SEQ ID NO: 924592 - RNA, 19 nt, Artificial Sequence
  Description of Artificial Sequence: Synthetic oligonucleotide
cccuagaggaaggggucca

SEQ ID NO: 924593 - RNA, 19 nt, Artificial Sequence
  Description of Artificial Sequence: Synthetic oligonucleotide
cgaggccuuagaaguuaca

SEQ ID NO: 924594 - RNA, 19 nt, Artificial Sequence
  Description of Artificial Sequence: Synthetic oligonucleotide
ccggacggauuuuguuuua

SEQ ID NO: 924595 - RNA, 19 nt, Artificial Sequence
  Description of Artificial Sequence: Synthetic oligonucleotide
ccgcaugcauaagucuaaa

SEQ ID NO: 924596 - RNA, 19 nt, Artificial Sequence
  Description of Artificial Sequence: Synthetic oligonucleotide
cggacggauuuuguuuuaa

SEQ ID NO: 924597 - RNA, 19 nt, Artificial Sequence
  Description of Artificial Sequence: Synthetic oligonucleotide
cccuaauugcugccaccau

SEQ ID NO: 924598 - RNA, 19 nt, Artificial Sequence
  Description of Artificial Sequence: Synthetic oligonucleotide
ccacgaccagcaucuguuu

SEQ ID NO: 924599 - RNA, 19 nt, Artificial Sequence
  Description of Artificial Sequence: Synthetic oligonucleotide
ucagugucguaccagaugg

SEQ ID NO: 924600 - RNA, 19 nt, Artificial Sequence
  Description of Artificial Sequence: Synthetic oligonucleotide
agauucauccgucaggccc

SEQ ID NO: 924601 - RNA, 19 nt, Artificial Sequence
  Description of Artificial Sequence: Synthetic oligonucleotide
gaagacuccacguuuacgg

SEQ ID NO: 924602 - RNA, 19 nt, Artificial Sequence
  Description of Artificial Sequence: Synthetic oligonucleotide
auugcacugacacaggugg

SEQ ID NO: 924603 - RNA, 19 nt, Artificial Sequence
  Description of Artificial Sequence: Synthetic oligonucleotide
uuaaagcucagaacaaagg

SEQ ID NO: 924604 - RNA, 19 nt, Artificial Sequence
  Description of Artificial Sequence: Synthetic oligonucleotide
aauggugguucugagacgc

SEQ ID NO: 924605 - RNA, 19 nt, Artificial Sequence
  Description of Artificial Sequence: Synthetic oligonucleotide
ugauauugguccuuuaaag

SEQ ID NO: 924606 - RNA, 19 nt, Artificial Sequence
  Description of Artificial Sequence: Synthetic oligonucleotide
ucguugagaaaauagagga

SEQ ID NO: 924607 - RNA, 19 nt, Artificial Sequence
  Description of Artificial Sequence: Synthetic oligonucleotide
gauauugguccuuuaaagc

SEQ ID NO: 924608 - RNA, 19 nt, Artificial Sequence
  Description of Artificial Sequence: Synthetic oligonucleotide
aagacaguaacaggggacc

SEQ ID NO: 924609 - RNA, 19 nt, Artificial Sequence
  Description of Artificial Sequence: Synthetic oligonucleotide
aucacugcucuucaggacc

SEQ ID NO: 924610 - RNA, 19 nt, Artificial Sequence
  Description of Artificial Sequence: Synthetic oligonucleotide
aaauagaugacaccccaca

SEQ ID NO: 924611 - RNA, 19 nt, Artificial Sequence
  Description of Artificial Sequence: Synthetic oligonucleotide
gauaauguuguugaagacc

SEQ ID NO: 924612 - RNA, 19 nt, Artificial Sequence
  Description of Artificial Sequence: Synthetic oligonucleotide
uuuauaagcugccccagcc

SEQ ID NO: 924613 - RNA, 19 nt, Artificial Sequence
  Description of Artificial Sequence: Synthetic oligonucleotide
acuggugacgauuuugugg

SEQ ID NO: 924614 - RNA, 19 nt, Artificial Sequence
  Description of Artificial Sequence: Synthetic oligonucleotide
ucuaggagcagacagcaca

SEQ ID NO: 924615 - RNA, 19 nt, Artificial Sequence
  Description of Artificial Sequence: Synthetic oligonucleotide
uagguucgaaaccacacgg

SEQ ID NO: 924616 - RNA, 19 nt, Artificial Sequence
  Description of Artificial Sequence: Synthetic oligonucleotide
aagaccggaauguccaugg

SEQ ID NO: 924617 - RNA, 19 nt, Artificial Sequence
  Description of Artificial Sequence: Synthetic oligonucleotide
ugucguaccagaugggugg

SEQ ID NO: 924618 - RNA, 19 nt, Artificial Sequence
  Description of Artificial Sequence: Synthetic oligonucleotide
acuugacugggauucaggc

SEQ ID NO: 924619 - RNA, 19 nt, Artificial Sequence
  Description of Artificial Sequence: Synthetic oligonucleotide
uugagaaaauagaggauag

SEQ ID NO: 924620 - RNA, 19 nt, Artificial Sequence
  Description of Artificial Sequence: Synthetic oligonucleotide
ucguugaccacaaugguga

SEQ ID NO: 924621 - RNA, 19 nt, Artificial Sequence
  Description of Artificial Sequence: Synthetic oligonucleotide
uuguggaauaccacgauga

SEQ ID NO: 924622 - RNA, 19 nt, Artificial Sequence
  Description of Artificial Sequence: Synthetic oligonucleotide
uacuuucggauaaggaugg

SEQ ID NO: 924623 - RNA, 19 nt, Artificial Sequence
  Description of Artificial Sequence: Synthetic oligonucleotide
guagucucaggcuagguag

SEQ ID NO: 924624 - RNA, 19 nt, Artificial Sequence
  Description of Artificial Sequence: Synthetic oligonucleotide
agcucaacugcucuuuccc

SEQ ID NO: 924625 - RNA, 19 nt, Artificial Sequence
  Description of Artificial Sequence: Synthetic oligonucleotide
agcaaaucugcaugugugc

SEQ ID NO: 924626 - RNA, 19 nt, Artificial Sequence
  Description of Artificial Sequence: Synthetic oligonucleotide
aacaggggacccucgacac

SEQ ID NO: 924627 - RNA, 19 nt, Artificial Sequence
  Description of Artificial Sequence: Synthetic oligonucleotide
agucguaccccaaaguucc

SEQ ID NO: 924628 - RNA, 19 nt, Artificial Sequence
  Description of Artificial Sequence: Synthetic oligonucleotide
ugugugccugugaagaccg

SEQ ID NO: 924629 - RNA, 19 nt, Artificial Sequence
  Description of Artificial Sequence: Synthetic oligonucleotide
caugcccugauauuggucc

SEQ ID NO: 924630 - RNA, 19 nt, Artificial Sequence
  Description of Artificial Sequence: Synthetic oligonucleotide
uauaagcugccccagcccc

SEQ ID NO: 924631 - RNA, 19 nt, Artificial Sequence
  Description of Artificial Sequence: Synthetic oligonucleotide
agaucuugaaggaggagcc

SEQ ID NO: 924632 - RNA, 19 nt, Artificial Sequence
  Description of Artificial Sequence: Synthetic oligonucleotide
ucuagggaccucaagguac

SEQ ID NO: 924633 - RNA, 19 nt, Artificial Sequence
  Description of Artificial Sequence: Synthetic oligonucleotide
aggcaauauccacuggucc

SEQ ID NO: 924634 - RNA, 19 nt, Artificial Sequence
  Description of Artificial Sequence: Synthetic oligonucleotide
agauugaucugcccgggcg

SEQ ID NO: 924635 - RNA, 19 nt, Artificial Sequence
  Description of Artificial Sequence: Synthetic oligonucleotide
cuugucaaugccuggagug

SEQ ID NO: 924636 - RNA, 19 nt, Artificial Sequence
  Description of Artificial Sequence: Synthetic oligonucleotide
ucagauucauccgucaggc

SEQ ID NO: 924637 - RNA, 19 nt, Artificial Sequence
  Description of Artificial Sequence: Synthetic oligonucleotide
uugcuuuauaagcugcccc

SEQ ID NO: 924638 - RNA, 19 nt, Artificial Sequence
  Description of Artificial Sequence: Synthetic oligonucleotide
ucaaacugauacuggauaa

SEQ ID NO: 924639 - RNA, 19 nt, Artificial Sequence
  Description of Artificial Sequence: Synthetic oligonucleotide
cuuccgcugaacuugacug

SEQ ID NO: 924640 - RNA, 19 nt, Artificial Sequence
  Description of Artificial Sequence: Synthetic oligonucleotide
uuggaauugccaucaaacu

SEQ ID NO: 924641 - RNA, 19 nt, Artificial Sequence
  Description of Artificial Sequence: Synthetic oligonucleotide
uuccucaaauagaugacac

SEQ ID NO: 924642 - RNA, 19 nt, Artificial Sequence
  Description of Artificial Sequence: Synthetic oligonucleotide
guagguucgaaaccacacg

SEQ ID NO: 924643 - RNA, 19 nt, Artificial Sequence
  Description of Artificial Sequence: Synthetic oligonucleotide
gacaagauccaaucugaug

SEQ ID NO: 924644 - RNA, 19 nt, Artificial Sequence
  Description of Artificial Sequence: Synthetic oligonucleotide
cuuaagggugccugguucg

SEQ ID NO: 924645 - RNA, 19 nt, Artificial Sequence
  Description of Artificial Sequence: Synthetic oligonucleotide
gucguugagaaaauagagg

SEQ ID NO: 924646 - RNA, 19 nt, Artificial Sequence
  Description of Artificial Sequence: Synthetic oligonucleotide
uucuaggacaacagcuuag

SEQ ID NO: 924647 - RNA, 19 nt, Artificial Sequence
  Description of Artificial Sequence: Synthetic oligonucleotide
uuauaagcugccccagccc

SEQ ID NO: 924648 - RNA, 19 nt, Artificial Sequence
  Description of Artificial Sequence: Synthetic oligonucleotide
uucgaaaccacacggccgu

SEQ ID NO: 924649 - RNA, 19 nt, Artificial Sequence
  Description of Artificial Sequence: Synthetic oligonucleotide
aguagagucgugguacccc

SEQ ID NO: 924650 - RNA, 19 nt, Artificial Sequence
  Description of Artificial Sequence: Synthetic oligonucleotide
ugugcaucaggcccacccg

SEQ ID NO: 924651 - RNA, 19 nt, Artificial Sequence
  Description of Artificial Sequence: Synthetic oligonucleotide
guacuuucggauaaggaug

SEQ ID NO: 924652 - RNA, 19 nt, Artificial Sequence
  Description of Artificial Sequence: Synthetic oligonucleotide
gaucuucucuaccuggggc

SEQ ID NO: 924653 - RNA, 19 nt, Artificial Sequence
  Description of Artificial Sequence: Synthetic oligonucleotide
cuucacaucagugucguac

SEQ ID NO: 924654 - RNA, 19 nt, Artificial Sequence
  Description of Artificial Sequence: Synthetic oligonucleotide
uuuacggaugauggcauag

SEQ ID NO: 924655 - RNA, 19 nt, Artificial Sequence
  Description of Artificial Sequence: Synthetic oligonucleotide
gauagggaccaggauaucc

SEQ ID NO: 924656 - RNA, 19 nt, Artificial Sequence
  Description of Artificial Sequence: Synthetic oligonucleotide
aauaccacgaugagcaaau

SEQ ID NO: 924657 - RNA, 19 nt, Artificial Sequence
  Description of Artificial Sequence: Synthetic oligonucleotide
ucgaagagggguugcagcc

SEQ ID NO: 924658 - RNA, 19 nt, Artificial Sequence
  Description of Artificial Sequence: Synthetic oligonucleotide
ugguccaaagacaguaaca

SEQ ID NO: 924659 - RNA, 19 nt, Artificial Sequence
  Description of Artificial Sequence: Synthetic oligonucleotide
ucagucguaccccaaaguu

SEQ ID NO: 924660 - RNA, 19 nt, Artificial Sequence
  Description of Artificial Sequence: Synthetic oligonucleotide
agaaaauagaggauaggga

SEQ ID NO: 924661 - RNA, 19 nt, Artificial Sequence
  Description of Artificial Sequence: Synthetic oligonucleotide
uggacaggcucguugacca

SEQ ID NO: 924662 - RNA, 19 nt, Artificial Sequence
  Description of Artificial Sequence: Synthetic oligonucleotide
agaguuuccagaagagaac

SEQ ID NO: 924663 - RNA, 19 nt, Artificial Sequence
  Description of Artificial Sequence: Synthetic oligonucleotide
auaaggaugggguggggca

SEQ ID NO: 924664 - RNA, 19 nt, Artificial Sequence
  Description of Artificial Sequence: Synthetic oligonucleotide
uccucaaauagaugacacc

SEQ ID NO: 924665 - RNA, 19 nt, Artificial Sequence
  Description of Artificial Sequence: Synthetic oligonucleotide
uguuggguuccacuggcca

SEQ ID NO: 924666 - RNA, 19 nt, Artificial Sequence
  Description of Artificial Sequence: Synthetic oligonucleotide
ugcucuucaggaccaaaga

SEQ ID NO: 924667 - RNA, 19 nt, Artificial Sequence
  Description of Artificial Sequence: Synthetic oligonucleotide
auauccacugguccaaaga

SEQ ID NO: 924668 - RNA, 19 nt, Artificial Sequence
  Description of Artificial Sequence: Synthetic oligonucleotide
ggcucuagggaccucaagg

SEQ ID NO: 924669 - RNA, 19 nt, Artificial Sequence
  Description of Artificial Sequence: Synthetic oligonucleotide
guucgugccuuguggaugg

SEQ ID NO: 924670 - RNA, 19 nt, Artificial Sequence
  Description of Artificial Sequence: Synthetic oligonucleotide
cugacauccaucagacccc

SEQ ID NO: 924671 - RNA, 19 nt, Artificial Sequence
  Description of Artificial Sequence: Synthetic oligonucleotide
gagcaaaucugcaugugug

SEQ ID NO: 924672 - RNA, 19 nt, Artificial Sequence
  Description of Artificial Sequence: Synthetic oligonucleotide
gacgauuuuguggaauacc

SEQ ID NO: 924673 - RNA, 19 nt, Artificial Sequence
  Description of Artificial Sequence: Synthetic oligonucleotide
cuauuagggcacagcaacc

SEQ ID NO: 924674 - RNA, 19 nt, Artificial Sequence
  Description of Artificial Sequence: Synthetic oligonucleotide
cauuccucaaauagaugac

SEQ ID NO: 924675 - RNA, 19 nt, Artificial Sequence
  Description of Artificial Sequence: Synthetic oligonucleotide
cuggugacgauuuugugga

SEQ ID NO: 924676 - RNA, 19 nt, Artificial Sequence
  Description of Artificial Sequence: Synthetic oligonucleotide
cuuucggauaaggaugggg

SEQ ID NO: 924677 - RNA, 19 nt, Artificial Sequence
  Description of Artificial Sequence: Synthetic oligonucleotide
uccacguuuacggaugaug

SEQ ID NO: 924678 - RNA, 19 nt, Artificial Sequence
  Description of Artificial Sequence: Synthetic oligonucleotide
uacggaugauggcauagac

SEQ ID NO: 924679 - RNA, 19 nt, Artificial Sequence
  Description of Artificial Sequence: Synthetic oligonucleotide
aucagugucguaccagaug

SEQ ID NO: 924680 - RNA, 19 nt, Artificial Sequence
  Description of Artificial Sequence: Synthetic oligonucleotide
aacagcuuagagggcagag

SEQ ID NO: 924681 - RNA, 19 nt, Artificial Sequence
  Description of Artificial Sequence: Synthetic oligonucleotide
gaggauagggaccaggaua

SEQ ID NO: 924682 - RNA, 19 nt, Artificial Sequence
  Description of Artificial Sequence: Synthetic oligonucleotide
cucguugaccacaauggug

SEQ ID NO: 924683 - RNA, 19 nt, Artificial Sequence
  Description of Artificial Sequence: Synthetic oligonucleotide
aagacuccacguuuacgga

SEQ ID NO: 924684 - RNA, 19 nt, Artificial Sequence
  Description of Artificial Sequence: Synthetic oligonucleotide
acccucgacacccuggcuc

SEQ ID NO: 924685 - RNA, 19 nt, Artificial Sequence
  Description of Artificial Sequence: Synthetic oligonucleotide
uuuuguggaauaccacgau

SEQ ID NO: 924686 - RNA, 19 nt, Artificial Sequence
  Description of Artificial Sequence: Synthetic oligonucleotide
aaaaccuauuagggcacag

SEQ ID NO: 924687 - RNA, 19 nt, Artificial Sequence
  Description of Artificial Sequence: Synthetic oligonucleotide
uauuagggcacagcaaccu

SEQ ID NO: 924688 - RNA, 19 nt, Artificial Sequence
  Description of Artificial Sequence: Synthetic oligonucleotide
ggaccaaccacucuacuug

SEQ ID NO: 924689 - RNA, 19 nt, Artificial Sequence
  Description of Artificial Sequence: Synthetic oligonucleotide
agauccaaucugauguugg

SEQ ID NO: 924690 - RNA, 19 nt, Artificial Sequence
  Description of Artificial Sequence: Synthetic oligonucleotide
aagauccaaucugauguug

SEQ ID NO: 924691 - RNA, 19 nt, Artificial Sequence
  Description of Artificial Sequence: Synthetic oligonucleotide
ucuaggacaacagcuuaga

SEQ ID NO: 924692 - RNA, 19 nt, Artificial Sequence
  Description of Artificial Sequence: Synthetic oligonucleotide
uucagucguaccccaaagu

SEQ ID NO: 924693 - RNA, 19 nt, Artificial Sequence
  Description of Artificial Sequence: Synthetic oligonucleotide
cuuuauaagcugccccagc

SEQ ID NO: 924694 - RNA, 19 nt, Artificial Sequence
  Description of Artificial Sequence: Synthetic oligonucleotide
aagcucagaacaaaggguu

SEQ ID NO: 924695 - RNA, 19 nt, Artificial Sequence
  Description of Artificial Sequence: Synthetic oligonucleotide
auaccugggauuucucugu

SEQ ID NO: 924696 - RNA, 19 nt, Artificial Sequence
  Description of Artificial Sequence: Synthetic oligonucleotide
agacccggaggccagagcu

SEQ ID NO: 924697 - RNA, 19 nt, Artificial Sequence
  Description of Artificial Sequence: Synthetic oligonucleotide
acgauuuuguggaauacca

SEQ ID NO: 924698 - RNA, 19 nt, Artificial Sequence
  Description of Artificial Sequence: Synthetic oligonucleotide
acucgcacugaguagggcu

SEQ ID NO: 924699 - RNA, 19 nt, Artificial Sequence
  Description of Artificial Sequence: Synthetic oligonucleotide
ccuauuagggcacagcaac

SEQ ID NO: 924700 - RNA, 19 nt, Artificial Sequence
  Description of Artificial Sequence: Synthetic oligonucleotide
uggucuuaagggugccugg

SEQ ID NO: 924701 - RNA, 19 nt, Artificial Sequence
  Description of Artificial Sequence: Synthetic oligonucleotide
uguccaugggcacucgcac

SEQ ID NO: 924702 - RNA, 19 nt, Artificial Sequence
  Description of Artificial Sequence: Synthetic oligonucleotide
acucuacuugccccaugcc

SEQ ID NO: 924703 - RNA, 19 nt, Artificial Sequence
  Description of Artificial Sequence: Synthetic oligonucleotide
gaccggaauguccaugggc

SEQ ID NO: 924704 - RNA, 19 nt, Artificial Sequence
  Description of Artificial Sequence: Synthetic oligonucleotide
aggcucguugaccacaaug

SEQ ID NO: 924705 - RNA, 19 nt, Artificial Sequence
  Description of Artificial Sequence: Synthetic oligonucleotide
cacucuacuugccccaugc

SEQ ID NO: 924706 - RNA, 19 nt, Artificial Sequence
  Description of Artificial Sequence: Synthetic oligonucleotide
caaccacucuacuugcccc

SEQ ID NO: 924707 - RNA, 19 nt, Artificial Sequence
  Description of Artificial Sequence: Synthetic oligonucleotide
agacgcugagaagaggaac

SEQ ID NO: 924708 - RNA, 19 nt, Artificial Sequence
  Description of Artificial Sequence: Synthetic oligonucleotide
uccgcugaacuugacuggg

SEQ ID NO: 924709 - RNA, 19 nt, Artificial Sequence
  Description of Artificial Sequence: Synthetic oligonucleotide
aaccacucuacuugcccca

SEQ ID NO: 924710 - RNA, 19 nt, Artificial Sequence
  Description of Artificial Sequence: Synthetic oligonucleotide
guucgaaaccacacggccg

SEQ ID NO: 924711 - RNA, 19 nt, Artificial Sequence
  Description of Artificial Sequence: Synthetic oligonucleotide
ugggcacucgcacugagua

SEQ ID NO: 924712 - RNA, 19 nt, Artificial Sequence
  Description of Artificial Sequence: Synthetic oligonucleotide
caaauagaugacaccccac

SEQ ID NO: 924713 - RNA, 19 nt, Artificial Sequence
  Description of Artificial Sequence: Synthetic oligonucleotide
accaaauggugguucugag

SEQ ID NO: 924714 - RNA, 19 nt, Artificial Sequence
  Description of Artificial Sequence: Synthetic oligonucleotide
ugggaccugacauccagga

SEQ ID NO: 924715 - RNA, 19 nt, Artificial Sequence
  Description of Artificial Sequence: Synthetic oligonucleotide
ccacguuuacggaugaugg

SEQ ID NO: 924716 - RNA, 19 nt, Artificial Sequence
  Description of Artificial Sequence: Synthetic oligonucleotide
ggcucguugaccacaaugg

SEQ ID NO: 924717 - RNA, 19 nt, Artificial Sequence
  Description of Artificial Sequence: Synthetic oligonucleotide
gacucaugucucuggagac

SEQ ID NO: 924718 - RNA, 19 nt, Artificial Sequence
  Description of Artificial Sequence: Synthetic oligonucleotide
acguuuacggaugauggca

SEQ ID NO: 924719 - RNA, 19 nt, Artificial Sequence
  Description of Artificial Sequence: Synthetic oligonucleotide
auuagggcacagcaaccug

SEQ ID NO: 924720 - RNA, 19 nt, Artificial Sequence
  Description of Artificial Sequence: Synthetic oligonucleotide
gucgaagagggguugcagc

SEQ ID NO: 924721 - RNA, 19 nt, Artificial Sequence
  Description of Artificial Sequence: Synthetic oligonucleotide
ugacauccaggaccaacca

SEQ ID NO: 924722 - RNA, 19 nt, Artificial Sequence
  Description of Artificial Sequence: Synthetic oligonucleotide
auuccucaaauagaugaca

SEQ ID NO: 924723 - RNA, 19 nt, Artificial Sequence
  Description of Artificial Sequence: Synthetic oligonucleotide
guccuuuaaagcucagaac

SEQ ID NO: 924724 - RNA, 19 nt, Artificial Sequence
  Description of Artificial Sequence: Synthetic oligonucleotide
uagggaccaggauauccag

SEQ ID NO: 924725 - RNA, 19 nt, Artificial Sequence
  Description of Artificial Sequence: Synthetic oligonucleotide
uugcacugacacagguggg

SEQ ID NO: 924726 - RNA, 19 nt, Artificial Sequence
  Description of Artificial Sequence: Synthetic oligonucleotide
gaccaaccacucuacuugc

SEQ ID NO: 924727 - RNA, 19 nt, Artificial Sequence
  Description of Artificial Sequence: Synthetic oligonucleotide
cacguuuacggaugauggc

SEQ ID NO: 924728 - RNA, 19 nt, Artificial Sequence
  Description of Artificial Sequence: Synthetic oligonucleotide
ucgugguaccccaccaccc

SEQ ID NO: 924729 - RNA, 19 nt, Artificial Sequence
  Description of Artificial Sequence: Synthetic oligonucleotide
agguucgaaaccacacggc

SEQ ID NO: 924730 - RNA, 19 nt, Artificial Sequence
  Description of Artificial Sequence: Synthetic oligonucleotide
gaugagcaaaucugcaugu

SEQ ID NO: 924731 - RNA, 19 nt, Artificial Sequence
  Description of Artificial Sequence: Synthetic oligonucleotide
ggaagaagaccaaauggug

SEQ ID NO: 924732 - RNA, 19 nt, Artificial Sequence
  Description of Artificial Sequence: Synthetic oligonucleotide
ugauagucugcaggggcag

SEQ ID NO: 924733 - RNA, 19 nt, Artificial Sequence
  Description of Artificial Sequence: Synthetic oligonucleotide
cagucguaccccaaaguuc

SEQ ID NO: 924734 - RNA, 19 nt, Artificial Sequence
  Description of Artificial Sequence: Synthetic oligonucleotide
ggcuuguucagucguaccc

SEQ ID NO: 924735 - RNA, 19 nt, Artificial Sequence
  Description of Artificial Sequence: Synthetic oligonucleotide
ucccaagccccuaccagca

SEQ ID NO: 924736 - RNA, 19 nt, Artificial Sequence
  Description of Artificial Sequence: Synthetic oligonucleotide
cuugaaggaggagccagag

SEQ ID NO: 924737 - RNA, 19 nt, Artificial Sequence
  Description of Artificial Sequence: Synthetic oligonucleotide
acggccgugccugaguucg

SEQ ID NO: 924738 - RNA, 19 nt, Artificial Sequence
  Description of Artificial Sequence: Synthetic oligonucleotide
uggacaaccgccguugcuc

SEQ ID NO: 924739 - RNA, 19 nt, Artificial Sequence
  Description of Artificial Sequence: Synthetic oligonucleotide
ccacauguagguucgaaac

SEQ ID NO: 924740 - RNA, 19 nt, Artificial Sequence
  Description of Artificial Sequence: Synthetic oligonucleotide
accggaauguccaugggca

SEQ ID NO: 924741 - RNA, 19 nt, Artificial Sequence
  Description of Artificial Sequence: Synthetic oligonucleotide
acaggggacccucgacacc

SEQ ID NO: 924742 - RNA, 19 nt, Artificial Sequence
  Description of Artificial Sequence: Synthetic oligonucleotide
ucacaucagugucguacca

SEQ ID NO: 924743 - RNA, 19 nt, Artificial Sequence
  Description of Artificial Sequence: Synthetic oligonucleotide
guggaauaccacgaugagc

SEQ ID NO: 924744 - RNA, 19 nt, Artificial Sequence
  Description of Artificial Sequence: Synthetic oligonucleotide
cugauauugguccuuuaaa

SEQ ID NO: 924745 - RNA, 19 nt, Artificial Sequence
  Description of Artificial Sequence: Synthetic oligonucleotide
uucgccugguacuuucgga

SEQ ID NO: 924746 - RNA, 19 nt, Artificial Sequence
  Description of Artificial Sequence: Synthetic oligonucleotide
cucaagguaccaucuucug

SEQ ID NO: 924747 - RNA, 19 nt, Artificial Sequence
  Description of Artificial Sequence: Synthetic oligonucleotide
gaacuugacugggauucag

SEQ ID NO: 924748 - RNA, 19 nt, Artificial Sequence
  Description of Artificial Sequence: Synthetic oligonucleotide
gucgugguaccccaccacc

SEQ ID NO: 924749 - RNA, 19 nt, Artificial Sequence
  Description of Artificial Sequence: Synthetic oligonucleotide
gacuccacguuuacggaug

SEQ ID NO: 924750 - RNA, 19 nt, Artificial Sequence
  Description of Artificial Sequence: Synthetic oligonucleotide
aggauagggaccaggauau

SEQ ID NO: 924751 - RNA, 19 nt, Artificial Sequence
  Description of Artificial Sequence: Synthetic oligonucleotide
gguacuuucggauaaggau

SEQ ID NO: 924752 - RNA, 19 nt, Artificial Sequence
  Description of Artificial Sequence: Synthetic oligonucleotide
caccccacauguagguucg

SEQ ID NO: 924753 - RNA, 19 nt, Artificial Sequence
  Description of Artificial Sequence: Synthetic oligonucleotide
uccgucaggcccuugucaa

SEQ ID NO: 924754 - RNA, 19 nt, Artificial Sequence
  Description of Artificial Sequence: Synthetic oligonucleotide
auagggaccaggauaucca

SEQ ID NO: 924755 - RNA, 19 nt, Artificial Sequence
  Description of Artificial Sequence: Synthetic oligonucleotide
agggcuuguucagucguac

SEQ ID NO: 924756 - RNA, 19 nt, Artificial Sequence
  Description of Artificial Sequence: Synthetic oligonucleotide
agugucguaccagaugggu

SEQ ID NO: 924757 - RNA, 19 nt, Artificial Sequence
  Description of Artificial Sequence: Synthetic oligonucleotide
gaccccgaugugcaucagg

SEQ ID NO: 924758 - RNA, 19 nt, Artificial Sequence
  Description of Artificial Sequence: Synthetic oligonucleotide
guucgccugguacuuucgg

SEQ ID NO: 924759 - RNA, 19 nt, Artificial Sequence
  Description of Artificial Sequence: Synthetic oligonucleotide
uugccccaugcccugauau

SEQ ID NO: 924760 - RNA, 19 nt, Artificial Sequence
  Description of Artificial Sequence: Synthetic oligonucleotide
ucgccugguacuuucggau

SEQ ID NO: 924761 - RNA, 19 nt, Artificial Sequence
  Description of Artificial Sequence: Synthetic oligonucleotide
agcuuagagggcagagggc

SEQ ID NO: 924762 - RNA, 19 nt, Artificial Sequence
  Description of Artificial Sequence: Synthetic oligonucleotide
cccgagauugaucugcccg

SEQ ID NO: 924763 - RNA, 19 nt, Artificial Sequence
  Description of Artificial Sequence: Synthetic oligonucleotide
uuacggaugauggcauaga

SEQ ID NO: 924764 - RNA, 19 nt, Artificial Sequence
  Description of Artificial Sequence: Synthetic oligonucleotide
gaagaccggaauguccaug

SEQ ID NO: 924765 - RNA, 19 nt, Artificial Sequence
  Description of Artificial Sequence: Synthetic oligonucleotide
ugacgauuuuguggaauac

SEQ ID NO: 924766 - RNA, 19 nt, Artificial Sequence
  Description of Artificial Sequence: Synthetic oligonucleotide
gagauugaucugcccgggc

SEQ ID NO: 924767 - RNA, 19 nt, Artificial Sequence
  Description of Artificial Sequence: Synthetic oligonucleotide
cgucguugagaaaauagag

SEQ ID NO: 924768 - RNA, 19 nt, Artificial Sequence
  Description of Artificial Sequence: Synthetic oligonucleotide
ggacucaugucucuggaga

SEQ ID NO: 924769 - RNA, 19 nt, Artificial Sequence
  Description of Artificial Sequence: Synthetic oligonucleotide
ggauaauguuguugaagac

SEQ ID NO: 924770 - RNA, 19 nt, Artificial Sequence
  Description of Artificial Sequence: Synthetic oligonucleotide
auugaucugcccgggcguc

SEQ ID NO: 924771 - RNA, 19 nt, Artificial Sequence
  Description of Artificial Sequence: Synthetic oligonucleotide
guaacaggggacccucgac

SEQ ID NO: 924772 - RNA, 19 nt, Artificial Sequence
  Description of Artificial Sequence: Synthetic oligonucleotide
aaaccacacggccgugccu

SEQ ID NO: 924773 - RNA, 19 nt, Artificial Sequence
  Description of Artificial Sequence: Synthetic oligonucleotide
agaccggaauguccauggg

SEQ ID NO: 924774 - RNA, 19 nt, Artificial Sequence
  Description of Artificial Sequence: Synthetic oligonucleotide
agacuccacguuuacggau

SEQ ID NO: 924775 - RNA, 19 nt, Artificial Sequence
  Description of Artificial Sequence: Synthetic oligonucleotide
cagcucaacugcucuuucc

SEQ ID NO: 924776 - RNA, 19 nt, Artificial Sequence
  Description of Artificial Sequence: Synthetic oligonucleotide
cuggucuuaagggugccug

SEQ ID NO: 924777 - RNA, 19 nt, Artificial Sequence
  Description of Artificial Sequence: Synthetic oligonucleotide
cuuagagggcagagggcac

SEQ ID NO: 924778 - RNA, 19 nt, Artificial Sequence
  Description of Artificial Sequence: Synthetic oligonucleotide
gaauaccacgaugagcaaa

SEQ ID NO: 924779 - RNA, 19 nt, Artificial Sequence
  Description of Artificial Sequence: Synthetic oligonucleotide
agaggauagggaccaggau

SEQ ID NO: 924780 - RNA, 19 nt, Artificial Sequence
  Description of Artificial Sequence: Synthetic oligonucleotide
cugccuuccgcugaacuug

SEQ ID NO: 924781 - RNA, 19 nt, Artificial Sequence
  Description of Artificial Sequence: Synthetic oligonucleotide
uggugguucugagacgcug

SEQ ID NO: 924782 - RNA, 19 nt, Artificial Sequence
  Description of Artificial Sequence: Synthetic oligonucleotide
gaguucgccugguacuuuc

SEQ ID NO: 924783 - RNA, 19 nt, Artificial Sequence
  Description of Artificial Sequence: Synthetic oligonucleotide
aggcuggucuuaagggugc

SEQ ID NO: 924784 - RNA, 19 nt, Artificial Sequence
  Description of Artificial Sequence: Synthetic oligonucleotide
agucgaagagggguugcag

SEQ ID NO: 924785 - RNA, 19 nt, Artificial Sequence
  Description of Artificial Sequence: Synthetic oligonucleotide
agccccuaccagcacacca

SEQ ID NO: 924786 - RNA, 19 nt, Artificial Sequence
  Description of Artificial Sequence: Synthetic oligonucleotide
cagucuugcuuuauaagcu

SEQ ID NO: 924787 - RNA, 19 nt, Artificial Sequence
  Description of Artificial Sequence: Synthetic oligonucleotide
ccgagauugaucugcccgg

SEQ ID NO: 924788 - RNA, 19 nt, Artificial Sequence
  Description of Artificial Sequence: Synthetic oligonucleotide
accgccguugcucucucca

SEQ ID NO: 924789 - RNA, 19 nt, Artificial Sequence
  Description of Artificial Sequence: Synthetic oligonucleotide
cucaggcuagguagccagg

SEQ ID NO: 924790 - RNA, 19 nt, Artificial Sequence
  Description of Artificial Sequence: Synthetic oligonucleotide
ugccugugaagaccggaau

SEQ ID NO: 924791 - RNA, 19 nt, Artificial Sequence
  Description of Artificial Sequence: Synthetic oligonucleotide
aggaaccucaggaucucag

SEQ ID NO: 924792 - RNA, 19 nt, Artificial Sequence
  Description of Artificial Sequence: Synthetic oligonucleotide
gugacgauuuuguggaaua

SEQ ID NO: 924793 - RNA, 19 nt, Artificial Sequence
  Description of Artificial Sequence: Synthetic oligonucleotide
gaagaccccgaugugcauc

SEQ ID NO: 924794 - RNA, 19 nt, Artificial Sequence
  Description of Artificial Sequence: Synthetic oligonucleotide
guugcagccgcuggugacc

SEQ ID NO: 924795 - RNA, 19 nt, Artificial Sequence
  Description of Artificial Sequence: Synthetic oligonucleotide
augagcaaaucugcaugug

SEQ ID NO: 924796 - RNA, 19 nt, Artificial Sequence
  Description of Artificial Sequence: Synthetic oligonucleotide
gauugaucugcccgggcgu

SEQ ID NO: 924797 - RNA, 19 nt, Artificial Sequence
  Description of Artificial Sequence: Synthetic oligonucleotide
uugaucugcccgggcgucg

SEQ ID NO: 924798 - RNA, 19 nt, Artificial Sequence
  Description of Artificial Sequence: Synthetic oligonucleotide
gaaccucaggaucucagau

SEQ ID NO: 924799 - RNA, 19 nt, Artificial Sequence
  Description of Artificial Sequence: Synthetic oligonucleotide
cagugucguaccagauggg

SEQ ID NO: 924800 - RNA, 19 nt, Artificial Sequence
  Description of Artificial Sequence: Synthetic oligonucleotide
ggaagacuccacguuuacg

SEQ ID NO: 924801 - RNA, 19 nt, Artificial Sequence
  Description of Artificial Sequence: Synthetic oligonucleotide
cacccgcuggaucucaaac

SEQ ID NO: 924802 - RNA, 19 nt, Artificial Sequence
  Description of Artificial Sequence: Synthetic oligonucleotide
aggcgcaugauagucugca

SEQ ID NO: 924803 - RNA, 19 nt, Artificial Sequence
  Description of Artificial Sequence: Synthetic oligonucleotide
cacccgagauugaucugcc

SEQ ID NO: 924804 - RNA, 19 nt, Artificial Sequence
  Description of Artificial Sequence: Synthetic oligonucleotide
cacuggacaaccgccguug

SEQ ID NO: 924805 - RNA, 19 nt, Artificial Sequence
  Description of Artificial Sequence: Synthetic oligonucleotide
uugguccuuuaaagcucag

SEQ ID NO: 924806 - RNA, 19 nt, Artificial Sequence
  Description of Artificial Sequence: Synthetic oligonucleotide
cagauucauccgucaggcc

SEQ ID NO: 924807 - RNA, 19 nt, Artificial Sequence
  Description of Artificial Sequence: Synthetic oligonucleotide
uggguggguccacauuccu

SEQ ID NO: 924808 - RNA, 19 nt, Artificial Sequence
  Description of Artificial Sequence: Synthetic oligonucleotide
agucccacgagggugccgu

SEQ ID NO: 924809 - RNA, 19 nt, Artificial Sequence
  Description of Artificial Sequence: Synthetic oligonucleotide
uuaagggugccugguucgu

SEQ ID NO: 924810 - RNA, 19 nt, Artificial Sequence
  Description of Artificial Sequence: Synthetic oligonucleotide
cacuggugacgauuuugug

SEQ ID NO: 924811 - RNA, 19 nt, Artificial Sequence
  Description of Artificial Sequence: Synthetic oligonucleotide
ugccuuccgcugaacuuga

SEQ ID NO: 924812 - RNA, 19 nt, Artificial Sequence
  Description of Artificial Sequence: Synthetic oligonucleotide
ggugccgugcugcaggaac

SEQ ID NO: 924813 - RNA, 19 nt, Artificial Sequence
  Description of Artificial Sequence: Synthetic oligonucleotide
gugucguaccagaugggug

SEQ ID NO: 924814 - RNA, 19 nt, Artificial Sequence
  Description of Artificial Sequence: Synthetic oligonucleotide
uccucacacccgcuggauc

SEQ ID NO: 924815 - RNA, 19 nt, Artificial Sequence
  Description of Artificial Sequence: Synthetic oligonucleotide
cgccagucaggcaauaucc

SEQ ID NO: 924816 - RNA, 19 nt, Artificial Sequence
  Description of Artificial Sequence: Synthetic oligonucleotide
gucaggcccuugucaaugc

SEQ ID NO: 924817 - RNA, 19 nt, Artificial Sequence
  Description of Artificial Sequence: Synthetic oligonucleotide
agcucagaacaaaggguug

SEQ ID NO: 924818 - RNA, 19 nt, Artificial Sequence
  Description of Artificial Sequence: Synthetic oligonucleotide
caggcuagguagccagggc

SEQ ID NO: 924819 - RNA, 19 nt, Artificial Sequence
  Description of Artificial Sequence: Synthetic oligonucleotide
cuucuaggacaacagcuua

SEQ ID NO: 924820 - RNA, 19 nt, Artificial Sequence
  Description of Artificial Sequence: Synthetic oligonucleotide
gacagcacaagggcagauc

SEQ ID NO: 924821 - RNA, 19 nt, Artificial Sequence
  Description of Artificial Sequence: Synthetic oligonucleotide
gcuuguucagucguacccc

SEQ ID NO: 924822 - RNA, 19 nt, Artificial Sequence
  Description of Artificial Sequence: Synthetic oligonucleotide
acuccacguuuacggauga

SEQ ID NO: 924823 - RNA, 19 nt, Artificial Sequence
  Description of Artificial Sequence: Synthetic oligonucleotide
ggaacaguagucucaggcu

SEQ ID NO: 924824 - RNA, 19 nt, Artificial Sequence
  Description of Artificial Sequence: Synthetic oligonucleotide
aguucgccugguacuuucg

SEQ ID NO: 924825 - RNA, 19 nt, Artificial Sequence
  Description of Artificial Sequence: Synthetic oligonucleotide
cacgagggugccgugcugc

SEQ ID NO: 924826 - RNA, 19 nt, Artificial Sequence
  Description of Artificial Sequence: Synthetic oligonucleotide
uucagacgggcugccuucc

SEQ ID NO: 924827 - RNA, 19 nt, Artificial Sequence
  Description of Artificial Sequence: Synthetic oligonucleotide
acuuucggauaaggauggg

SEQ ID NO: 924828 - RNA, 19 nt, Artificial Sequence
  Description of Artificial Sequence: Synthetic oligonucleotide
acaaccgccguugcucucu

SEQ ID NO: 924829 - RNA, 19 nt, Artificial Sequence
  Description of Artificial Sequence: Synthetic oligonucleotide
ucugcccgggcgucguuga

SEQ ID NO: 924830 - RNA, 19 nt, Artificial Sequence
  Description of Artificial Sequence: Synthetic oligonucleotide
gaucuugaaggaggagcca

SEQ ID NO: 924831 - RNA, 19 nt, Artificial Sequence
  Description of Artificial Sequence: Synthetic oligonucleotide
cuagguagccagggcuucc

SEQ ID NO: 924832 - RNA, 19 nt, Artificial Sequence
  Description of Artificial Sequence: Synthetic oligonucleotide
aggcucuagggaccucaag

SEQ ID NO: 924833 - RNA, 19 nt, Artificial Sequence
  Description of Artificial Sequence: Synthetic oligonucleotide
cacugacauccaucagacc

SEQ ID NO: 924834 - RNA, 19 nt, Artificial Sequence
  Description of Artificial Sequence: Synthetic oligonucleotide
ccagucaggcaauauccac

SEQ ID NO: 924835 - RNA, 19 nt, Artificial Sequence
  Description of Artificial Sequence: Synthetic oligonucleotide
cugauaccugggauuucuc

SEQ ID NO: 924836 - RNA, 19 nt, Artificial Sequence
  Description of Artificial Sequence: Synthetic oligonucleotide
gcuuuauaagcugccccag

SEQ ID NO: 924837 - RNA, 19 nt, Artificial Sequence
  Description of Artificial Sequence: Synthetic oligonucleotide
caguagagucgugguaccc

SEQ ID NO: 924838 - RNA, 19 nt, Artificial Sequence
  Description of Artificial Sequence: Synthetic oligonucleotide
gguucgugccuuguggaug

SEQ ID NO: 924839 - RNA, 19 nt, Artificial Sequence
  Description of Artificial Sequence: Synthetic oligonucleotide
gucguaccagauggguggg

SEQ ID NO: 924840 - RNA, 19 nt, Artificial Sequence
  Description of Artificial Sequence: Synthetic oligonucleotide
cagucaggcaauauccacu

SEQ ID NO: 924841 - RNA, 19 nt, Artificial Sequence
  Description of Artificial Sequence: Synthetic oligonucleotide
gggauucaggcucuaggga

SEQ ID NO: 924842 - RNA, 19 nt, Artificial Sequence
  Description of Artificial Sequence: Synthetic oligonucleotide
caaugccuggaguggccac

SEQ ID NO: 924843 - RNA, 19 nt, Artificial Sequence
  Description of Artificial Sequence: Synthetic oligonucleotide
ggaaccucaggaucucaga

SEQ ID NO: 924844 - RNA, 19 nt, Artificial Sequence
  Description of Artificial Sequence: Synthetic oligonucleotide
agauggguggguccacauu

SEQ ID NO: 924845 - RNA, 19 nt, Artificial Sequence
  Description of Artificial Sequence: Synthetic oligonucleotide
cccacgggacagcacaugg

SEQ ID NO: 924846 - RNA, 19 nt, Artificial Sequence
  Description of Artificial Sequence: Synthetic oligonucleotide
cucuggugggacucauguc

SEQ ID NO: 924847 - RNA, 19 nt, Artificial Sequence
  Description of Artificial Sequence: Synthetic oligonucleotide
gagacccggaggccagagc

SEQ ID NO: 924848 - RNA, 19 nt, Artificial Sequence
  Description of Artificial Sequence: Synthetic oligonucleotide
guagggcuuguucagucgu

SEQ ID NO: 924849 - RNA, 19 nt, Artificial Sequence
  Description of Artificial Sequence: Synthetic oligonucleotide
gguaccccaccacccaggc

SEQ ID NO: 924850 - RNA, 19 nt, Artificial Sequence
  Description of Artificial Sequence: Synthetic oligonucleotide
accuauuagggcacagcaa

SEQ ID NO: 924851 - RNA, 19 nt, Artificial Sequence
  Description of Artificial Sequence: Synthetic oligonucleotide
aggcccuugucaaugcaga

SEQ ID NO: 924852 - RNA, 19 nt, Artificial Sequence
  Description of Artificial Sequence: Synthetic oligonucleotide
cagcaggcgcaugauaguc

SEQ ID NO: 924853 - RNA, 19 nt, Artificial Sequence
  Description of Artificial Sequence: Synthetic oligonucleotide
ggacccucgacacccuggc

SEQ ID NO: 924854 - RNA, 19 nt, Artificial Sequence
  Description of Artificial Sequence: Synthetic oligonucleotide
gaccaaagaacaggaauuu

SEQ ID NO: 924855 - RNA, 19 nt, Artificial Sequence
  Description of Artificial Sequence: Synthetic oligonucleotide
guaccccaaaguuccucuc

SEQ ID NO: 924856 - RNA, 19 nt, Artificial Sequence
  Description of Artificial Sequence: Synthetic oligonucleotide
ucguaccccaaaguuccuc

SEQ ID NO: 924857 - RNA, 19 nt, Artificial Sequence
  Description of Artificial Sequence: Synthetic oligonucleotide
ccacccgagauugaucugc

SEQ ID NO: 924858 - RNA, 19 nt, Artificial Sequence
  Description of Artificial Sequence: Synthetic oligonucleotide
gccugaguucgccugguac

SEQ ID NO: 924859 - RNA, 19 nt, Artificial Sequence
  Description of Artificial Sequence: Synthetic oligonucleotide
caggcgcaugauagucugc

SEQ ID NO: 924860 - RNA, 19 nt, Artificial Sequence
  Description of Artificial Sequence: Synthetic oligonucleotide
agagggguugcagccgcug

SEQ ID NO: 924861 - RNA, 19 nt, Artificial Sequence
  Description of Artificial Sequence: Synthetic oligonucleotide
agcaggcgcaugauagucu

SEQ ID NO: 924862 - RNA, 19 nt, Artificial Sequence
  Description of Artificial Sequence: Synthetic oligonucleotide
cacgggacagcacauggcu

SEQ ID NO: 924863 - RNA, 19 nt, Artificial Sequence
  Description of Artificial Sequence: Synthetic oligonucleotide
gcgucguugagaaaauaga

SEQ ID NO: 924864 - RNA, 19 nt, Artificial Sequence
  Description of Artificial Sequence: Synthetic oligonucleotide
ccaugucugacugggcucc

SEQ ID NO: 924865 - RNA, 19 nt, Artificial Sequence
  Description of Artificial Sequence: Synthetic oligonucleotide
ugaucugcccgggcgucgu

SEQ ID NO: 924866 - RNA, 19 nt, Artificial Sequence
  Description of Artificial Sequence: Synthetic oligonucleotide
ggcuucuaggacaacagcu

SEQ ID NO: 924867 - RNA, 19 nt, Artificial Sequence
  Description of Artificial Sequence: Synthetic oligonucleotide
guuuacggaugauggcaua

SEQ ID NO: 924868 - RNA, 19 nt, Artificial Sequence
  Description of Artificial Sequence: Synthetic oligonucleotide
acagcacauggcuccuuuu

SEQ ID NO: 924869 - RNA, 19 nt, Artificial Sequence
  Description of Artificial Sequence: Synthetic oligonucleotide
ucgacacccuggcucccaa

SEQ ID NO: 924870 - RNA, 19 nt, Artificial Sequence
  Description of Artificial Sequence: Synthetic oligonucleotide
cagcuuggacuuccaggac

SEQ ID NO: 924871 - RNA, 19 nt, Artificial Sequence
  Description of Artificial Sequence: Synthetic oligonucleotide
ggcgcaugauagucugcag

SEQ ID NO: 924872 - RNA, 19 nt, Artificial Sequence
  Description of Artificial Sequence: Synthetic oligonucleotide
gccccaugcccugauauug

SEQ ID NO: 924873 - RNA, 19 nt, Artificial Sequence
  Description of Artificial Sequence: Synthetic oligonucleotide
cucuagggaccucaaggua

SEQ ID NO: 924874 - RNA, 19 nt, Artificial Sequence
  Description of Artificial Sequence: Synthetic oligonucleotide
aucaggcccacccgagauu

SEQ ID NO: 924875 - RNA, 19 nt, Artificial Sequence
  Description of Artificial Sequence: Synthetic oligonucleotide
ugccccaugcccugauauu

SEQ ID NO: 924876 - RNA, 19 nt, Artificial Sequence
  Description of Artificial Sequence: Synthetic oligonucleotide
ugccgugcugcaggaaccu

SEQ ID NO: 924877 - RNA, 19 nt, Artificial Sequence
  Description of Artificial Sequence: Synthetic oligonucleotide
gagacgcugagaagaggaa

SEQ ID NO: 924878 - RNA, 19 nt, Artificial Sequence
  Description of Artificial Sequence: Synthetic oligonucleotide
ucacacccgcuggaucuca

SEQ ID NO: 924879 - RNA, 19 nt, Artificial Sequence
  Description of Artificial Sequence: Synthetic oligonucleotide
uggugacgauuuuguggaa

SEQ ID NO: 924880 - RNA, 19 nt, Artificial Sequence
  Description of Artificial Sequence: Synthetic oligonucleotide
gcucuagggaccucaaggu

SEQ ID NO: 924881 - RNA, 19 nt, Artificial Sequence
  Description of Artificial Sequence: Synthetic oligonucleotide
ggaccaaagaacaggaauu

SEQ ID NO: 924882 - RNA, 19 nt, Artificial Sequence
  Description of Artificial Sequence: Synthetic oligonucleotide
gccucuaggagcagacagc

SEQ ID NO: 924883 - RNA, 19 nt, Artificial Sequence
  Description of Artificial Sequence: Synthetic oligonucleotide
agagugggcaagggcucug

SEQ ID NO: 924884 - RNA, 19 nt, Artificial Sequence
  Description of Artificial Sequence: Synthetic oligonucleotide
cacgggcaggagucccacg

SEQ ID NO: 924885 - RNA, 19 nt, Artificial Sequence
  Description of Artificial Sequence: Synthetic oligonucleotide
aauugccaucaaacugaua

SEQ ID NO: 924886 - RNA, 19 nt, Artificial Sequence
  Description of Artificial Sequence: Synthetic oligonucleotide
gacccggaggccagagcug

SEQ ID NO: 924887 - RNA, 19 nt, Artificial Sequence
  Description of Artificial Sequence: Synthetic oligonucleotide
gggcacucgcacugaguag

SEQ ID NO: 924888 - RNA, 19 nt, Artificial Sequence
  Description of Artificial Sequence: Synthetic oligonucleotide
agggugccgugcugcagga

SEQ ID NO: 924889 - RNA, 19 nt, Artificial Sequence
  Description of Artificial Sequence: Synthetic oligonucleotide
aucugcccgggcgucguug

SEQ ID NO: 924890 - RNA, 19 nt, Artificial Sequence
  Description of Artificial Sequence: Synthetic oligonucleotide
gcaauauccacugguccaa

SEQ ID NO: 924891 - RNA, 19 nt, Artificial Sequence
  Description of Artificial Sequence: Synthetic oligonucleotide
ucgaaaccacacggccgug

SEQ ID NO: 924892 - RNA, 19 nt, Artificial Sequence
  Description of Artificial Sequence: Synthetic oligonucleotide
cacucgcacugaguagggc

SEQ ID NO: 924893 - RNA, 19 nt, Artificial Sequence
  Description of Artificial Sequence: Synthetic oligonucleotide
ggugguucugagacgcuga

SEQ ID NO: 924894 - RNA, 19 nt, Artificial Sequence
  Description of Artificial Sequence: Synthetic oligonucleotide
gcaaccuggcagccucuag

SEQ ID NO: 924895 - RNA, 19 nt, Artificial Sequence
  Description of Artificial Sequence: Synthetic oligonucleotide
acacccgcuggaucucaaa

SEQ ID NO: 924896 - RNA, 19 nt, Artificial Sequence
  Description of Artificial Sequence: Synthetic oligonucleotide
gacaaccgccguugcucuc

SEQ ID NO: 924897 - RNA, 19 nt, Artificial Sequence
  Description of Artificial Sequence: Synthetic oligonucleotide
caugucugacugggcuccc

SEQ ID NO: 924898 - RNA, 19 nt, Artificial Sequence
  Description of Artificial Sequence: Synthetic oligonucleotide
ccacgggacagcacauggc

SEQ ID NO: 924899 - RNA, 19 nt, Artificial Sequence
  Description of Artificial Sequence: Synthetic oligonucleotide
gggucuaggaccagccauc

SEQ ID NO: 924900 - RNA, 19 nt, Artificial Sequence
  Description of Artificial Sequence: Synthetic oligonucleotide
gggaccugacauccaggac

SEQ ID NO: 924901 - RNA, 19 nt, Artificial Sequence
  Description of Artificial Sequence: Synthetic oligonucleotide
gccugguacuuucggauaa

SEQ ID NO: 924902 - RNA, 19 nt, Artificial Sequence
  Description of Artificial Sequence: Synthetic oligonucleotide
ggccuggaacaguagucuc

SEQ ID NO: 924903 - RNA, 19 nt, Artificial Sequence
  Description of Artificial Sequence: Synthetic oligonucleotide
ggcagucgaagagggguug

SEQ ID NO: 924904 - RNA, 19 nt, Artificial Sequence
  Description of Artificial Sequence: Synthetic oligonucleotide
ugaguucgccugguacuuu

SEQ ID NO: 924905 - RNA, 19 nt, Artificial Sequence
  Description of Artificial Sequence: Synthetic oligonucleotide
cgugcugcaggaaccucag

SEQ ID NO: 924906 - RNA, 19 nt, Artificial Sequence
  Description of Artificial Sequence: Synthetic oligonucleotide
gaugugcaucaggcccacc

SEQ ID NO: 924907 - RNA, 19 nt, Artificial Sequence
  Description of Artificial Sequence: Synthetic oligonucleotide
ucguaccagaugggugggu

SEQ ID NO: 924908 - RNA, 19 nt, Artificial Sequence
  Description of Artificial Sequence: Synthetic oligonucleotide
ugccugaguucgccuggua

SEQ ID NO: 924909 - RNA, 19 nt, Artificial Sequence
  Description of Artificial Sequence: Synthetic oligonucleotide
cucuccccgcucagaagca

SEQ ID NO: 924910 - RNA, 19 nt, Artificial Sequence
  Description of Artificial Sequence: Synthetic oligonucleotide
ccgcuggugaccacuggug

SEQ ID NO: 924911 - RNA, 19 nt, Artificial Sequence
  Description of Artificial Sequence: Synthetic oligonucleotide
ccgccagucaggcaauauc

SEQ ID NO: 924912 - RNA, 19 nt, Artificial Sequence
  Description of Artificial Sequence: Synthetic oligonucleotide
caggugccccacgggacag

SEQ ID NO: 924913 - RNA, 19 nt, Artificial Sequence
  Description of Artificial Sequence: Synthetic oligonucleotide
gcacucgcacugaguaggg

SEQ ID NO: 924914 - RNA, 19 nt, Artificial Sequence
  Description of Artificial Sequence: Synthetic oligonucleotide
aggcccacccgagauugau

SEQ ID NO: 924915 - RNA, 19 nt, Artificial Sequence
  Description of Artificial Sequence: Synthetic oligonucleotide
ccaugcccugauauugguc

SEQ ID NO: 924916 - RNA, 19 nt, Artificial Sequence
  Description of Artificial Sequence: Synthetic oligonucleotide
gugugccugugaagaccgg

SEQ ID NO: 924917 - RNA, 19 nt, Artificial Sequence
  Description of Artificial Sequence: Synthetic oligonucleotide
caucaggcccacccgagau

SEQ ID NO: 924918 - RNA, 19 nt, Artificial Sequence
  Description of Artificial Sequence: Synthetic oligonucleotide
gcagucgaagagggguugc

SEQ ID NO: 924919 - RNA, 19 nt, Artificial Sequence
  Description of Artificial Sequence: Synthetic oligonucleotide
ggaauaccacgaugagcaa

SEQ ID NO: 924920 - RNA, 19 nt, Artificial Sequence
  Description of Artificial Sequence: Synthetic oligonucleotide
ccggaauguccaugggcac

SEQ ID NO: 924921 - RNA, 19 nt, Artificial Sequence
  Description of Artificial Sequence: Synthetic oligonucleotide
ccugaguucgccugguacu

SEQ ID NO: 924922 - RNA, 19 nt, Artificial Sequence
  Description of Artificial Sequence: Synthetic oligonucleotide
cgagauugaucugcccggg

SEQ ID NO: 924923 - RNA, 19 nt, Artificial Sequence
  Description of Artificial Sequence: Synthetic oligonucleotide
ggcucccaagccccuacca

SEQ ID NO: 924924 - RNA, 19 nt, Artificial Sequence
  Description of Artificial Sequence: Synthetic oligonucleotide
gccccuaccagcacaccac

SEQ ID NO: 924925 - RNA, 19 nt, Artificial Sequence
  Description of Artificial Sequence: Synthetic oligonucleotide
caucagugucguaccagau

SEQ ID NO: 924926 - RNA, 19 nt, Artificial Sequence
  Description of Artificial Sequence: Synthetic oligonucleotide
gaccucaagguaccaucuu

SEQ ID NO: 924927 - RNA, 19 nt, Artificial Sequence
  Description of Artificial Sequence: Synthetic oligonucleotide
aggcagucgaagagggguu

SEQ ID NO: 924928 - RNA, 19 nt, Artificial Sequence
  Description of Artificial Sequence: Synthetic oligonucleotide
ccugugaagaccggaaugu

SEQ ID NO: 924929 - RNA, 19 nt, Artificial Sequence
  Description of Artificial Sequence: Synthetic oligonucleotide
uucauccgucaggcccuug

SEQ ID NO: 924930 - RNA, 19 nt, Artificial Sequence
  Description of Artificial Sequence: Synthetic oligonucleotide
gcucguugaccacaauggu

SEQ ID NO: 924931 - RNA, 19 nt, Artificial Sequence
  Description of Artificial Sequence: Synthetic oligonucleotide
ccgugccugaguucgccug

SEQ ID NO: 924932 - RNA, 19 nt, Artificial Sequence
  Description of Artificial Sequence: Synthetic oligonucleotide
cacggccgugccugaguuc

SEQ ID NO: 924933 - RNA, 19 nt, Artificial Sequence
  Description of Artificial Sequence: Synthetic oligonucleotide
ccucacacccgcuggaucu

SEQ ID NO: 924934 - RNA, 19 nt, Artificial Sequence
  Description of Artificial Sequence: Synthetic oligonucleotide
ccaagccccuaccagcaca

SEQ ID NO: 924935 - RNA, 19 nt, Artificial Sequence
  Description of Artificial Sequence: Synthetic oligonucleotide
gcuucuaggacaacagcuu

SEQ ID NO: 924936 - RNA, 19 nt, Artificial Sequence
  Description of Artificial Sequence: Synthetic oligonucleotide
ccgggcgucguugagaaaa

SEQ ID NO: 924937 - RNA, 19 nt, Artificial Sequence
  Description of Artificial Sequence: Synthetic oligonucleotide
caaccgccguugcucucuc

SEQ ID NO: 924938 - RNA, 19 nt, Artificial Sequence
  Description of Artificial Sequence: Synthetic oligonucleotide
agaugacaccccacaugua

SEQ ID NO: 924939 - RNA, 19 nt, Artificial Sequence
  Description of Artificial Sequence: Synthetic oligonucleotide
ggugacgauuuuguggaau

SEQ ID NO: 924940 - RNA, 19 nt, Artificial Sequence
  Description of Artificial Sequence: Synthetic oligonucleotide
ggacaaccgccguugcucu

SEQ ID NO: 924941 - RNA, 19 nt, Artificial Sequence
  Description of Artificial Sequence: Synthetic oligonucleotide
uucgugccuuguggaugga

SEQ ID NO: 924942 - RNA, 19 nt, Artificial Sequence
  Description of Artificial Sequence: Synthetic oligonucleotide
ggacaggcucguugaccac

SEQ ID NO: 924943 - RNA, 19 nt, Artificial Sequence
  Description of Artificial Sequence: Synthetic oligonucleotide
caggcucuagggaccucaa

SEQ ID NO: 924944 - RNA, 19 nt, Artificial Sequence
  Description of Artificial Sequence: Synthetic oligonucleotide
cguaccagauggguggguc

SEQ ID NO: 924945 - RNA, 19 nt, Artificial Sequence
  Description of Artificial Sequence: Synthetic oligonucleotide
cugcccgggcgucguugag

SEQ ID NO: 924946 - RNA, 19 nt, Artificial Sequence
  Description of Artificial Sequence: Synthetic oligonucleotide
cgaaaccacacggccgugc

SEQ ID NO: 924947 - RNA, 19 nt, Artificial Sequence
  Description of Artificial Sequence: Synthetic oligonucleotide
guggggcaagggagacccg

SEQ ID NO: 924948 - RNA, 19 nt, Artificial Sequence
  Description of Artificial Sequence: Synthetic oligonucleotide
cuggacaaccgccguugcu

SEQ ID NO: 924949 - RNA, 19 nt, Artificial Sequence
  Description of Artificial Sequence: Synthetic oligonucleotide
uucaggcucuagggaccuc

SEQ ID NO: 924950 - RNA, 19 nt, Artificial Sequence
  Description of Artificial Sequence: Synthetic oligonucleotide
gcccgggcgucguugagaa

SEQ ID NO: 924951 - RNA, 19 nt, Artificial Sequence
  Description of Artificial Sequence: Synthetic oligonucleotide
gcacaagggcagaucuuga

SEQ ID NO: 924952 - RNA, 19 nt, Artificial Sequence
  Description of Artificial Sequence: Synthetic oligonucleotide
cucgacacccuggcuccca

SEQ ID NO: 924953 - RNA, 19 nt, Artificial Sequence
  Description of Artificial Sequence: Synthetic oligonucleotide
auucauccgucaggcccuu

SEQ ID NO: 924954 - RNA, 19 nt, Artificial Sequence
  Description of Artificial Sequence: Synthetic oligonucleotide
gucuaggaccagccauccu

SEQ ID NO: 924955 - RNA, 19 nt, Artificial Sequence
  Description of Artificial Sequence: Synthetic oligonucleotide
cuugccccaugcccugaua

SEQ ID NO: 924956 - RNA, 19 nt, Artificial Sequence
  Description of Artificial Sequence: Synthetic oligonucleotide
ccaggacaagauccaaucu

SEQ ID NO: 924957 - RNA, 19 nt, Artificial Sequence
  Description of Artificial Sequence: Synthetic oligonucleotide
cagauggguggguccacau

SEQ ID NO: 924958 - RNA, 19 nt, Artificial Sequence
  Description of Artificial Sequence: Synthetic oligonucleotide
gggccaguagagucguggu

SEQ ID NO: 924959 - RNA, 19 nt, Artificial Sequence
  Description of Artificial Sequence: Synthetic oligonucleotide
ccaggugccccacgggaca

SEQ ID NO: 924960 - RNA, 19 nt, Artificial Sequence
  Description of Artificial Sequence: Synthetic oligonucleotide
caagggcucuggugggacu

SEQ ID NO: 924961 - RNA, 19 nt, Artificial Sequence
  Description of Artificial Sequence: Synthetic oligonucleotide
cugaguucgccugguacuu

SEQ ID NO: 924962 - RNA, 19 nt, Artificial Sequence
  Description of Artificial Sequence: Synthetic oligonucleotide
cacacccgcuggaucucaa

SEQ ID NO: 924963 - RNA, 19 nt, Artificial Sequence
  Description of Artificial Sequence: Synthetic oligonucleotide
gacccucgacacccuggcu

SEQ ID NO: 924964 - RNA, 19 nt, Artificial Sequence
  Description of Artificial Sequence: Synthetic oligonucleotide
gccgcuggugaccacuggu

SEQ ID NO: 924965 - RNA, 19 nt, Artificial Sequence
  Description of Artificial Sequence: Synthetic oligonucleotide
ggcucuggugggacucaug

SEQ ID NO: 924966 - RNA, 19 nt, Artificial Sequence
  Description of Artificial Sequence: Synthetic oligonucleotide
cccacccgagauugaucug

SEQ ID NO: 924967 - RNA, 19 nt, Artificial Sequence
  Description of Artificial Sequence: Synthetic oligonucleotide
ggauagggaccaggauauc

SEQ ID NO: 924968 - RNA, 19 nt, Artificial Sequence
  Description of Artificial Sequence: Synthetic oligonucleotide
ccuuccgcugaacuugacu

SEQ ID NO: 924969 - RNA, 19 nt, Artificial Sequence
  Description of Artificial Sequence: Synthetic oligonucleotide
cguugagaaaauagaggau

SEQ ID NO: 924970 - RNA, 19 nt, Artificial Sequence
  Description of Artificial Sequence: Synthetic oligonucleotide
ggacaagauccaaucugau

SEQ ID NO: 924971 - RNA, 19 nt, Artificial Sequence
  Description of Artificial Sequence: Synthetic oligonucleotide
cgugguaccccaccaccca

SEQ ID NO: 924972 - RNA, 19 nt, Artificial Sequence
  Description of Artificial Sequence: Synthetic oligonucleotide
caggcccacccgagauuga

SEQ ID NO: 924973 - RNA, 19 nt, Artificial Sequence
  Description of Artificial Sequence: Synthetic oligonucleotide
cccuaccagcacaccacca

SEQ ID NO: 924974 - RNA, 19 nt, Artificial Sequence
  Description of Artificial Sequence: Synthetic oligonucleotide
cagagugggcaagggcucu

SEQ ID NO: 924975 - RNA, 19 nt, Artificial Sequence
  Description of Artificial Sequence: Synthetic oligonucleotide
caguagucucaggcuaggu

SEQ ID NO: 924976 - RNA, 19 nt, Artificial Sequence
  Description of Artificial Sequence: Synthetic oligonucleotide
gacugggauucaggcucua

SEQ ID NO: 924977 - RNA, 19 nt, Artificial Sequence
  Description of Artificial Sequence: Synthetic oligonucleotide
ggcccacccgagauugauc

SEQ ID NO: 924978 - RNA, 19 nt, Artificial Sequence
  Description of Artificial Sequence: Synthetic oligonucleotide
gcacgggcaggagucccac

SEQ ID NO: 924979 - RNA, 19 nt, Artificial Sequence
  Description of Artificial Sequence: Synthetic oligonucleotide
cccaagccccuaccagcac

SEQ ID NO: 924980 - RNA, 19 nt, Artificial Sequence
  Description of Artificial Sequence: Synthetic oligonucleotide
ggcccuugucaaugcagau

SEQ ID NO: 924981 - RNA, 19 nt, Artificial Sequence
  Description of Artificial Sequence: Synthetic oligonucleotide
ggcuagguagccagggcuu

SEQ ID NO: 924982 - RNA, 19 nt, Artificial Sequence
  Description of Artificial Sequence: Synthetic oligonucleotide
gggcuccccuucagacggg

SEQ ID NO: 924983 - RNA, 19 nt, Artificial Sequence
  Description of Artificial Sequence: Synthetic oligonucleotide
gucguaccccaaaguuccu

SEQ ID NO: 924984 - RNA, 19 nt, Artificial Sequence
  Description of Artificial Sequence: Synthetic oligonucleotide
guccucacacccgcuggau

SEQ ID NO: 924985 - RNA, 19 nt, Artificial Sequence
  Description of Artificial Sequence: Synthetic oligonucleotide
accccgccagucaggcaau

SEQ ID NO: 924986 - RNA, 19 nt, Artificial Sequence
  Description of Artificial Sequence: Synthetic oligonucleotide
gugccugaguucgccuggu

SEQ ID NO: 924987 - RNA, 19 nt, Artificial Sequence
  Description of Artificial Sequence: Synthetic oligonucleotide
cccaugcccugauauuggu

SEQ ID NO: 924988 - RNA, 19 nt, Artificial Sequence
  Description of Artificial Sequence: Synthetic oligonucleotide
ccccuucagacgggcugcc

SEQ ID NO: 924989 - RNA, 19 nt, Artificial Sequence
  Description of Artificial Sequence: Synthetic oligonucleotide
gcacuggacaaccgccguu

SEQ ID NO: 924990 - RNA, 19 nt, Artificial Sequence
  Description of Artificial Sequence: Synthetic oligonucleotide
ccucgacacccuggcuccc

SEQ ID NO: 924991 - RNA, 19 nt, Artificial Sequence
  Description of Artificial Sequence: Synthetic oligonucleotide
cccugauauugguccuuua

SEQ ID NO: 924992 - RNA, 19 nt, Artificial Sequence
  Description of Artificial Sequence: Synthetic oligonucleotide
gccgugccugaguucgccu

SEQ ID NO: 924993 - RNA, 19 nt, Artificial Sequence
  Description of Artificial Sequence: Synthetic oligonucleotide
ccccacauguagguucgaa

SEQ ID NO: 924994 - RNA, 19 nt, Artificial Sequence
  Description of Artificial Sequence: Synthetic oligonucleotide
caggcucguugaccacaau

SEQ ID NO: 924995 - RNA, 19 nt, Artificial Sequence
  Description of Artificial Sequence: Synthetic oligonucleotide
ccgucaggcccuugucaau

SEQ ID NO: 924996 - RNA, 19 nt, Artificial Sequence
  Description of Artificial Sequence: Synthetic oligonucleotide
gggcucuggugggacucau

SEQ ID NO: 924997 - RNA, 19 nt, Artificial Sequence
  Description of Artificial Sequence: Synthetic oligonucleotide
cccgggcgucguugagaaa

SEQ ID NO: 924998 - RNA, 19 nt, Artificial Sequence
  Description of Artificial Sequence: Synthetic oligonucleotide
ccccgccagucaggcaaua

SEQ ID NO: 924999 - RNA, 19 nt, Artificial Sequence
  Description of Artificial Sequence: Synthetic oligonucleotide
uaaguuucuaacuauaugg

SEQ ID NO: 925000 - RNA, 19 nt, Artificial Sequence
  Description of Artificial Sequence: Synthetic oligonucleotide
aaguauauguguuuguuac

SEQ ID NO: 925001 - RNA, 19 nt, Artificial Sequence
  Description of Artificial Sequence: Synthetic oligonucleotide
uguuuuaguauuauaaacc

SEQ ID NO: 925002 - RNA, 19 nt, Artificial Sequence
  Description of Artificial Sequence: Synthetic oligonucleotide
uauuugauaguuauuauca

SEQ ID NO: 925003 - RNA, 19 nt, Artificial Sequence
  Description of Artificial Sequence: Synthetic oligonucleotide
aauaauauuuuaucgguca

SEQ ID NO: 925004 - RNA, 19 nt, Artificial Sequence
  Description of Artificial Sequence: Synthetic oligonucleotide
cuaauaauaacucagagga

SEQ ID NO: 925005 - RNA, 19 nt, Artificial Sequence
  Description of Artificial Sequence: Synthetic oligonucleotide
aacuuuaugaacauggguc

SEQ ID NO: 925006 - RNA, 19 nt, Artificial Sequence
  Description of Artificial Sequence: Synthetic oligonucleotide
auauauuaccucucuagcc

SEQ ID NO: 925007 - RNA, 19 nt, Artificial Sequence
  Description of Artificial Sequence: Synthetic oligonucleotide
uguaauuauacauaauugu

SEQ ID NO: 925008 - RNA, 19 nt, Artificial Sequence
  Description of Artificial Sequence: Synthetic oligonucleotide
aauauauccaaguauuuaa

SEQ ID NO: 925009 - RNA, 19 nt, Artificial Sequence
  Description of Artificial Sequence: Synthetic oligonucleotide
uuuaguauuauaaacccuc

SEQ ID NO: 925010 - RNA, 19 nt, Artificial Sequence
  Description of Artificial Sequence: Synthetic oligonucleotide
gauucuaacaauugggcag

SEQ ID NO: 925011 - RNA, 19 nt, Artificial Sequence
  Description of Artificial Sequence: Synthetic oligonucleotide
acuuuaugaacaugggucc

SEQ ID NO: 925012 - RNA, 19 nt, Artificial Sequence
  Description of Artificial Sequence: Synthetic oligonucleotide
cuagauaugaaauccuugg

SEQ ID NO: 925013 - RNA, 19 nt, Artificial Sequence
  Description of Artificial Sequence: Synthetic oligonucleotide
uuguuauagaacuagauau

SEQ ID NO: 925014 - RNA, 19 nt, Artificial Sequence
  Description of Artificial Sequence: Synthetic oligonucleotide
cuugauucuaacaauuggg

SEQ ID NO: 925015 - RNA, 19 nt, Artificial Sequence
  Description of Artificial Sequence: Synthetic oligonucleotide
aauaagaaaucccauacuu

SEQ ID NO: 925016 - RNA, 19 nt, Artificial Sequence
  Description of Artificial Sequence: Synthetic oligonucleotide
auauuugauaguuauuauc

SEQ ID NO: 925017 - RNA, 19 nt, Artificial Sequence
  Description of Artificial Sequence: Synthetic oligonucleotide
uaugauuacaggcuaauaa

SEQ ID NO: 925018 - RNA, 19 nt, Artificial Sequence
  Description of Artificial Sequence: Synthetic oligonucleotide
aagaaaguuacacuguggu

SEQ ID NO: 925019 - RNA, 19 nt, Artificial Sequence
  Description of Artificial Sequence: Synthetic oligonucleotide
uuagcuauuaauuuguaua

SEQ ID NO: 925020 - RNA, 19 nt, Artificial Sequence
  Description of Artificial Sequence: Synthetic oligonucleotide
uuaucggucaacaaauuca

SEQ ID NO: 925021 - RNA, 19 nt, Artificial Sequence
  Description of Artificial Sequence: Synthetic oligonucleotide
uacacuuguacacaacggg

SEQ ID NO: 925022 - RNA, 19 nt, Artificial Sequence
  Description of Artificial Sequence: Synthetic oligonucleotide
aaauaccugucuuaagguc

SEQ ID NO: 925023 - RNA, 19 nt, Artificial Sequence
  Description of Artificial Sequence: Synthetic oligonucleotide
gucauaaaacauuugcugg

SEQ ID NO: 925024 - RNA, 19 nt, Artificial Sequence
  Description of Artificial Sequence: Synthetic oligonucleotide
uauauuaccucucuagccu

SEQ ID NO: 925025 - RNA, 19 nt, Artificial Sequence
  Description of Artificial Sequence: Synthetic oligonucleotide
uucuacuaaagcaaaaccu

SEQ ID NO: 925026 - RNA, 19 nt, Artificial Sequence
  Description of Artificial Sequence: Synthetic oligonucleotide
uguaacgaaggccaagggg

SEQ ID NO: 925027 - RNA, 19 nt, Artificial Sequence
  Description of Artificial Sequence: Synthetic oligonucleotide
agucauaaaacauuugcug

SEQ ID NO: 925028 - RNA, 19 nt, Artificial Sequence
  Description of Artificial Sequence: Synthetic oligonucleotide
aaucaauauauccaaguau

SEQ ID NO: 925029 - RNA, 19 nt, Artificial Sequence
  Description of Artificial Sequence: Synthetic oligonucleotide
guauauauuaccucucuag

SEQ ID NO: 925030 - RNA, 19 nt, Artificial Sequence
  Description of Artificial Sequence: Synthetic oligonucleotide
uuauaaacccucacaauug

SEQ ID NO: 925031 - RNA, 19 nt, Artificial Sequence
  Description of Artificial Sequence: Synthetic oligonucleotide
aagaaaauaagaaauccca

SEQ ID NO: 925032 - RNA, 19 nt, Artificial Sequence
  Description of Artificial Sequence: Synthetic oligonucleotide
uuuguggcuauuaccaggg

SEQ ID NO: 925033 - RNA, 19 nt, Artificial Sequence
  Description of Artificial Sequence: Synthetic oligonucleotide
uguagaauacagauuaagu

SEQ ID NO: 925034 - RNA, 19 nt, Artificial Sequence
  Description of Artificial Sequence: Synthetic oligonucleotide
augagaacaauuaagauga

SEQ ID NO: 925035 - RNA, 19 nt, Artificial Sequence
  Description of Artificial Sequence: Synthetic oligonucleotide
aauauuuuaucggucaaca

SEQ ID NO: 925036 - RNA, 19 nt, Artificial Sequence
  Description of Artificial Sequence: Synthetic oligonucleotide
aaacagaaucccuguaacg

SEQ ID NO: 925037 - RNA, 19 nt, Artificial Sequence
  Description of Artificial Sequence: Synthetic oligonucleotide
uuugauuagaggaacacuu

SEQ ID NO: 925038 - RNA, 19 nt, Artificial Sequence
  Description of Artificial Sequence: Synthetic oligonucleotide
auuacaggcuaauaauaac

SEQ ID NO: 925039 - RNA, 19 nt, Artificial Sequence
  Description of Artificial Sequence: Synthetic oligonucleotide
uaguauuugagaaaauuuc

SEQ ID NO: 925040 - RNA, 19 nt, Artificial Sequence
  Description of Artificial Sequence: Synthetic oligonucleotide
agugcuacagcauccaauc

SEQ ID NO: 925041 - RNA, 19 nt, Artificial Sequence
  Description of Artificial Sequence: Synthetic oligonucleotide
aauauaaagccaugagacu

SEQ ID NO: 925042 - RNA, 19 nt, Artificial Sequence
  Description of Artificial Sequence: Synthetic oligonucleotide
ucucauaugugacaggcca

SEQ ID NO: 925043 - RNA, 19 nt, Artificial Sequence
  Description of Artificial Sequence: Synthetic oligonucleotide
uuacaggcuaauaauaacu

SEQ ID NO: 925044 - RNA, 19 nt, Artificial Sequence
  Description of Artificial Sequence: Synthetic oligonucleotide
auuacuguaguauuugaga

SEQ ID NO: 925045 - RNA, 19 nt, Artificial Sequence
  Description of Artificial Sequence: Synthetic oligonucleotide
aaucauuauuuauuaagau

SEQ ID NO: 925046 - RNA, 19 nt, Artificial Sequence
  Description of Artificial Sequence: Synthetic oligonucleotide
uguuauagaacuagauaug

SEQ ID NO: 925047 - RNA, 19 nt, Artificial Sequence
  Description of Artificial Sequence: Synthetic oligonucleotide
aaauugauauuuuauuauu

SEQ ID NO: 925048 - RNA, 19 nt, Artificial Sequence
  Description of Artificial Sequence: Synthetic oligonucleotide
cauuuaugcacaaaauuac

SEQ ID NO: 925049 - RNA, 19 nt, Artificial Sequence
  Description of Artificial Sequence: Synthetic oligonucleotide
ucaguugucagucuugacu

SEQ ID NO: 925050 - RNA, 19 nt, Artificial Sequence
  Description of Artificial Sequence: Synthetic oligonucleotide
aagaugauauaaauguauc

SEQ ID NO: 925051 - RNA, 19 nt, Artificial Sequence
  Description of Artificial Sequence: Synthetic oligonucleotide
aaauaagaaaucccauacu

SEQ ID NO: 925052 - RNA, 19 nt, Artificial Sequence
  Description of Artificial Sequence: Synthetic oligonucleotide
ucuacuaaagcaaaaccua

SEQ ID NO: 925053 - RNA, 19 nt, Artificial Sequence
  Description of Artificial Sequence: Synthetic oligonucleotide
uucagaugcgaguugagcc

SEQ ID NO: 925054 - RNA, 19 nt, Artificial Sequence
  Description of Artificial Sequence: Synthetic oligonucleotide
uuaauuuauauaugagaac

SEQ ID NO: 925055 - RNA, 19 nt, Artificial Sequence
  Description of Artificial Sequence: Synthetic oligonucleotide
ugcauuagguacaaaauau

SEQ ID NO: 925056 - RNA, 19 nt, Artificial Sequence
  Description of Artificial Sequence: Synthetic oligonucleotide
aaagcauuacuccuagagu

SEQ ID NO: 925057 - RNA, 19 nt, Artificial Sequence
  Description of Artificial Sequence: Synthetic oligonucleotide
uuccauauugucugcacgg

SEQ ID NO: 925058 - RNA, 19 nt, Artificial Sequence
  Description of Artificial Sequence: Synthetic oligonucleotide
aucccauacuuuuaugagc

SEQ ID NO: 925059 - RNA, 19 nt, Artificial Sequence
  Description of Artificial Sequence: Synthetic oligonucleotide
aacaauugggcagugaaga

SEQ ID NO: 925060 - RNA, 19 nt, Artificial Sequence
  Description of Artificial Sequence: Synthetic oligonucleotide
ugauuagaggaacacuugc

SEQ ID NO: 925061 - RNA, 19 nt, Artificial Sequence
  Description of Artificial Sequence: Synthetic oligonucleotide
aaaccuaucugcucauaag

SEQ ID NO: 925062 - RNA, 19 nt, Artificial Sequence
  Description of Artificial Sequence: Synthetic oligonucleotide
aacaucuuguuaaauauga

SEQ ID NO: 925063 - RNA, 19 nt, Artificial Sequence
  Description of Artificial Sequence: Synthetic oligonucleotide
aaccuaucugcucauaagu

SEQ ID NO: 925064 - RNA, 19 nt, Artificial Sequence
  Description of Artificial Sequence: Synthetic oligonucleotide
augacucgaguccacauac

SEQ ID NO: 925065 - RNA, 19 nt, Artificial Sequence
  Description of Artificial Sequence: Synthetic oligonucleotide
guuucuaacuauaugggag

SEQ ID NO: 925066 - RNA, 19 nt, Artificial Sequence
  Description of Artificial Sequence: Synthetic oligonucleotide
cucucuagccuuaugacgc

SEQ ID NO: 925067 - RNA, 19 nt, Artificial Sequence
  Description of Artificial Sequence: Synthetic oligonucleotide
uaugacgcuaucuguaaag

SEQ ID NO: 925068 - RNA, 19 nt, Artificial Sequence
  Description of Artificial Sequence: Synthetic oligonucleotide
gcaaauaccugucuuaagg

SEQ ID NO: 925069 - RNA, 19 nt, Artificial Sequence
  Description of Artificial Sequence: Synthetic oligonucleotide
uacauguaauuauacauaa

SEQ ID NO: 925070 - RNA, 19 nt, Artificial Sequence
  Description of Artificial Sequence: Synthetic oligonucleotide
gcuaauaauaacucagagg

SEQ ID NO: 925071 - RNA, 19 nt, Artificial Sequence
  Description of Artificial Sequence: Synthetic oligonucleotide
uaauucuccuauaaguuuc

SEQ ID NO: 925072 - RNA, 19 nt, Artificial Sequence
  Description of Artificial Sequence: Synthetic oligonucleotide
auuuguaauuguuagcuau

SEQ ID NO: 925073 - RNA, 19 nt, Artificial Sequence
  Description of Artificial Sequence: Synthetic oligonucleotide
ugucuuauuauauuugaua

SEQ ID NO: 925074 - RNA, 19 nt, Artificial Sequence
  Description of Artificial Sequence: Synthetic oligonucleotide
uagaucacauauuugcuga

SEQ ID NO: 925075 - RNA, 19 nt, Artificial Sequence
  Description of Artificial Sequence: Synthetic oligonucleotide
uuguuagcuauuaauuugu

SEQ ID NO: 925076 - RNA, 19 nt, Artificial Sequence
  Description of Artificial Sequence: Synthetic oligonucleotide
caggcuaauaauaacucag

SEQ ID NO: 925077 - RNA, 19 nt, Artificial Sequence
  Description of Artificial Sequence: Synthetic oligonucleotide
auauugucugcacggaagg

SEQ ID NO: 925078 - RNA, 19 nt, Artificial Sequence
  Description of Artificial Sequence: Synthetic oligonucleotide
aguuagagaggaaacauag

SEQ ID NO: 925079 - RNA, 19 nt, Artificial Sequence
  Description of Artificial Sequence: Synthetic oligonucleotide
uuucuaacuauaugggaga

SEQ ID NO: 925080 - RNA, 19 nt, Artificial Sequence
  Description of Artificial Sequence: Synthetic oligonucleotide
ucggucaacaaauucauau

SEQ ID NO: 925081 - RNA, 19 nt, Artificial Sequence
  Description of Artificial Sequence: Synthetic oligonucleotide
uuuaucggucaacaaauuc

SEQ ID NO: 925082 - RNA, 19 nt, Artificial Sequence
  Description of Artificial Sequence: Synthetic oligonucleotide
aaguucucauaugugacag

SEQ ID NO: 925083 - RNA, 19 nt, Artificial Sequence
  Description of Artificial Sequence: Synthetic oligonucleotide
uuaguauuauaaacccuca

SEQ ID NO: 925084 - RNA, 19 nt, Artificial Sequence
  Description of Artificial Sequence: Synthetic oligonucleotide
ugauucuaacaauugggca

SEQ ID NO: 925085 - RNA, 19 nt, Artificial Sequence
  Description of Artificial Sequence: Synthetic oligonucleotide
ucuugacucaguugcaugc

SEQ ID NO: 925086 - RNA, 19 nt, Artificial Sequence
  Description of Artificial Sequence: Synthetic oligonucleotide
auauguuuuaguauuauaa

SEQ ID NO: 925087 - RNA, 19 nt, Artificial Sequence
  Description of Artificial Sequence: Synthetic oligonucleotide
aauaccugucuuaagguca

SEQ ID NO: 925088 - RNA, 19 nt, Artificial Sequence
  Description of Artificial Sequence: Synthetic oligonucleotide
ucuccuauaaguuucucua

SEQ ID NO: 925089 - RNA, 19 nt, Artificial Sequence
  Description of Artificial Sequence: Synthetic oligonucleotide
aaaaccuaucugcucauaa

SEQ ID NO: 925090 - RNA, 19 nt, Artificial Sequence
  Description of Artificial Sequence: Synthetic oligonucleotide
ucuugaagauuuguaauug

SEQ ID NO: 925091 - RNA, 19 nt, Artificial Sequence
  Description of Artificial Sequence: Synthetic oligonucleotide
cauauugucugcacggaag

SEQ ID NO: 925092 - RNA, 19 nt, Artificial Sequence
  Description of Artificial Sequence: Synthetic oligonucleotide
ugcacaaaauuacuguagu

SEQ ID NO: 925093 - RNA, 19 nt, Artificial Sequence
  Description of Artificial Sequence: Synthetic oligonucleotide
ucuuauuauauuugauagu

SEQ ID NO: 925094 - RNA, 19 nt, Artificial Sequence
  Description of Artificial Sequence: Synthetic oligonucleotide
ucuuguuaaauaugauuac

SEQ ID NO: 925095 - RNA, 19 nt, Artificial Sequence
  Description of Artificial Sequence: Synthetic oligonucleotide
uauaaacccucacaauugu

SEQ ID NO: 925096 - RNA, 19 nt, Artificial Sequence
  Description of Artificial Sequence: Synthetic oligonucleotide
uugccaauacuuguuauag

SEQ ID NO: 925097 - RNA, 19 nt, Artificial Sequence
  Description of Artificial Sequence: Synthetic oligonucleotide
uccuauaaguuucucuaca

SEQ ID NO: 925098 - RNA, 19 nt, Artificial Sequence
  Description of Artificial Sequence: Synthetic oligonucleotide
uaacaauugggcagugaag

SEQ ID NO: 925099 - RNA, 19 nt, Artificial Sequence
  Description of Artificial Sequence: Synthetic oligonucleotide
uaaacccucacaauuguua

SEQ ID NO: 925100 - RNA, 19 nt, Artificial Sequence
  Description of Artificial Sequence: Synthetic oligonucleotide
uugauuagaggaacacuug

SEQ ID NO: 925101 - RNA, 19 nt, Artificial Sequence
  Description of Artificial Sequence: Synthetic oligonucleotide
ugcguauucgacaccacug

SEQ ID NO: 925102 - RNA, 19 nt, Artificial Sequence
  Description of Artificial Sequence: Synthetic oligonucleotide
uuuguauauauuaccucuc

SEQ ID NO: 925103 - RNA, 19 nt, Artificial Sequence
  Description of Artificial Sequence: Synthetic oligonucleotide
ugauuacaggcuaauaaua

SEQ ID NO: 925104 - RNA, 19 nt, Artificial Sequence
  Description of Artificial Sequence: Synthetic oligonucleotide
uuguauauauuaccucucu

SEQ ID NO: 925105 - RNA, 19 nt, Artificial Sequence
  Description of Artificial Sequence: Synthetic oligonucleotide
guagaucacauauuugcug

SEQ ID NO: 925106 - RNA, 19 nt, Artificial Sequence
  Description of Artificial Sequence: Synthetic oligonucleotide
acaucuugaagauuuguaa

SEQ ID NO: 925107 - RNA, 19 nt, Artificial Sequence
  Description of Artificial Sequence: Synthetic oligonucleotide
ugacaggccaaucuuacaa

SEQ ID NO: 925108 - RNA, 19 nt, Artificial Sequence
  Description of Artificial Sequence: Synthetic oligonucleotide
acuuguagaucacauauuu

SEQ ID NO: 925109 - RNA, 19 nt, Artificial Sequence
  Description of Artificial Sequence: Synthetic oligonucleotide
uuaauucuccuauaaguuu

SEQ ID NO: 925110 - RNA, 19 nt, Artificial Sequence
  Description of Artificial Sequence: Synthetic oligonucleotide
uagcuauuaauuuguauau

SEQ ID NO: 925111 - RNA, 19 nt, Artificial Sequence
  Description of Artificial Sequence: Synthetic oligonucleotide
uacaggcuaauaauaacuc

SEQ ID NO: 925112 - RNA, 19 nt, Artificial Sequence
  Description of Artificial Sequence: Synthetic oligonucleotide
uagaggaacacuugcauua

SEQ ID NO: 925113 - RNA, 19 nt, Artificial Sequence
  Description of Artificial Sequence: Synthetic oligonucleotide
uguagucucagguucugca

SEQ ID NO: 925114 - RNA, 19 nt, Artificial Sequence
  Description of Artificial Sequence: Synthetic oligonucleotide
uaccucucuagccuuauga

SEQ ID NO: 925115 - RNA, 19 nt, Artificial Sequence
  Description of Artificial Sequence: Synthetic oligonucleotide
auaugugacaggccaaucu

SEQ ID NO: 925116 - RNA, 19 nt, Artificial Sequence
  Description of Artificial Sequence: Synthetic oligonucleotide
ugucuuaaggucacagcca

SEQ ID NO: 925117 - RNA, 19 nt, Artificial Sequence
  Description of Artificial Sequence: Synthetic oligonucleotide
aguuucuaacuauauggga

SEQ ID NO: 925118 - RNA, 19 nt, Artificial Sequence
  Description of Artificial Sequence: Synthetic oligonucleotide
auuagaggaacacuugcau

SEQ ID NO: 925119 - RNA, 19 nt, Artificial Sequence
  Description of Artificial Sequence: Synthetic oligonucleotide
uuggaauguagaauacaga

SEQ ID NO: 925120 - RNA, 19 nt, Artificial Sequence
  Description of Artificial Sequence: Synthetic oligonucleotide
uuauagaacuagauaugaa

SEQ ID NO: 925121 - RNA, 19 nt, Artificial Sequence
  Description of Artificial Sequence: Synthetic oligonucleotide
agaaacagcgaccuacacu

SEQ ID NO: 925122 - RNA, 19 nt, Artificial Sequence
  Description of Artificial Sequence: Synthetic oligonucleotide
uacaucaucaagugcuaca

SEQ ID NO: 925123 - RNA, 19 nt, Artificial Sequence
  Description of Artificial Sequence: Synthetic oligonucleotide
agaguguguagucucaggu

SEQ ID NO: 925124 - RNA, 19 nt, Artificial Sequence
  Description of Artificial Sequence: Synthetic oligonucleotide
gaaacagcgaccuacacuu

SEQ ID NO: 925125 - RNA, 19 nt, Artificial Sequence
  Description of Artificial Sequence: Synthetic oligonucleotide
guuuguauauauuaccucu

SEQ ID NO: 925126 - RNA, 19 nt, Artificial Sequence
  Description of Artificial Sequence: Synthetic oligonucleotide
aaacccucacaauuguuaa

SEQ ID NO: 925127 - RNA, 19 nt, Artificial Sequence
  Description of Artificial Sequence: Synthetic oligonucleotide
uacacaacggggcaaugac

SEQ ID NO: 925128 - RNA, 19 nt, Artificial Sequence
  Description of Artificial Sequence: Synthetic oligonucleotide
caaaagaguguguagucuc

SEQ ID NO: 925129 - RNA, 19 nt, Artificial Sequence
  Description of Artificial Sequence: Synthetic oligonucleotide
uguguuuguuacugcauga

SEQ ID NO: 925130 - RNA, 19 nt, Artificial Sequence
  Description of Artificial Sequence: Synthetic oligonucleotide
auguagaauacagauuaag

SEQ ID NO: 925131 - RNA, 19 nt, Artificial Sequence
  Description of Artificial Sequence: Synthetic oligonucleotide
uguaauuguuagcuauuaa

SEQ ID NO: 925132 - RNA, 19 nt, Artificial Sequence
  Description of Artificial Sequence: Synthetic oligonucleotide
auguguuuguuacugcaug

SEQ ID NO: 925133 - RNA, 19 nt, Artificial Sequence
  Description of Artificial Sequence: Synthetic oligonucleotide
aauaugauuacaggcuaau

SEQ ID NO: 925134 - RNA, 19 nt, Artificial Sequence
  Description of Artificial Sequence: Synthetic oligonucleotide
uaucggucaacaaauucau

SEQ ID NO: 925135 - RNA, 19 nt, Artificial Sequence
  Description of Artificial Sequence: Synthetic oligonucleotide
ugagaaacagcgaccuaca

SEQ ID NO: 925136 - RNA, 19 nt, Artificial Sequence
  Description of Artificial Sequence: Synthetic oligonucleotide
cacuuuguggcuauuacca

SEQ ID NO: 925137 - RNA, 19 nt, Artificial Sequence
  Description of Artificial Sequence: Synthetic oligonucleotide
guuauagaacuagauauga

SEQ ID NO: 925138 - RNA, 19 nt, Artificial Sequence
  Description of Artificial Sequence: Synthetic oligonucleotide
gucuuaaggucacagccag

SEQ ID NO: 925139 - RNA, 19 nt, Artificial Sequence
  Description of Artificial Sequence: Synthetic oligonucleotide
ugcgaguugagccggugag

SEQ ID NO: 925140 - RNA, 19 nt, Artificial Sequence
  Description of Artificial Sequence: Synthetic oligonucleotide
agauuaaguuucuaacuau

SEQ ID NO: 925141 - RNA, 19 nt, Artificial Sequence
  Description of Artificial Sequence: Synthetic oligonucleotide
uaguauuauaaacccucac

SEQ ID NO: 925142 - RNA, 19 nt, Artificial Sequence
  Description of Artificial Sequence: Synthetic oligonucleotide
acauagacagcucauuuua

SEQ ID NO: 925143 - RNA, 19 nt, Artificial Sequence
  Description of Artificial Sequence: Synthetic oligonucleotide
guauucgacaccacugugg

SEQ ID NO: 925144 - RNA, 19 nt, Artificial Sequence
  Description of Artificial Sequence: Synthetic oligonucleotide
agccuuaugacgcuaucug

SEQ ID NO: 925145 - RNA, 19 nt, Artificial Sequence
  Description of Artificial Sequence: Synthetic oligonucleotide
gccaaucuuacaaagaaag

SEQ ID NO: 925146 - RNA, 19 nt, Artificial Sequence
  Description of Artificial Sequence: Synthetic oligonucleotide
auagaacuagauaugaaau

SEQ ID NO: 925147 - RNA, 19 nt, Artificial Sequence
  Description of Artificial Sequence: Synthetic oligonucleotide
aacagcgaccuacacuugu

SEQ ID NO: 925148 - RNA, 19 nt, Artificial Sequence
  Description of Artificial Sequence: Synthetic oligonucleotide
uguauauauuaccucucua

SEQ ID NO: 925149 - RNA, 19 nt, Artificial Sequence
  Description of Artificial Sequence: Synthetic oligonucleotide
aguugagccggugaggauc

SEQ ID NO: 925150 - RNA, 19 nt, Artificial Sequence
  Description of Artificial Sequence: Synthetic oligonucleotide
cuaacuauaugggagaaaa

SEQ ID NO: 925151 - RNA, 19 nt, Artificial Sequence
  Description of Artificial Sequence: Synthetic oligonucleotide
aacaccgucaggaacuugu

SEQ ID NO: 925152 - RNA, 19 nt, Artificial Sequence
  Description of Artificial Sequence: Synthetic oligonucleotide
uuuaugaacaugggucccc

SEQ ID NO: 925153 - RNA, 19 nt, Artificial Sequence
  Description of Artificial Sequence: Synthetic oligonucleotide
ucaagucaucacuacaaau

SEQ ID NO: 925154 - RNA, 19 nt, Artificial Sequence
  Description of Artificial Sequence: Synthetic oligonucleotide
ucauaaguggaguguugcc

SEQ ID NO: 925155 - RNA, 19 nt, Artificial Sequence
  Description of Artificial Sequence: Synthetic oligonucleotide
acaggcuaauaauaacuca

SEQ ID NO: 925156 - RNA, 19 nt, Artificial Sequence
  Description of Artificial Sequence: Synthetic oligonucleotide
gaauaauauuuuaucgguc

SEQ ID NO: 925157 - RNA, 19 nt, Artificial Sequence
  Description of Artificial Sequence: Synthetic oligonucleotide
acaauuguuaauucuccua

SEQ ID NO: 925158 - RNA, 19 nt, Artificial Sequence
  Description of Artificial Sequence: Synthetic oligonucleotide
auguuuguauauauuaccu

SEQ ID NO: 925159 - RNA, 19 nt, Artificial Sequence
  Description of Artificial Sequence: Synthetic oligonucleotide
agccaugagacugacuuuc

SEQ ID NO: 925160 - RNA, 19 nt, Artificial Sequence
  Description of Artificial Sequence: Synthetic oligonucleotide
acaauuaagaugauauaaa

SEQ ID NO: 925161 - RNA, 19 nt, Artificial Sequence
  Description of Artificial Sequence: Synthetic oligonucleotide
gauggcgagaaacaccguc

SEQ ID NO: 925162 - RNA, 19 nt, Artificial Sequence
  Description of Artificial Sequence: Synthetic oligonucleotide
acaauugggcagugaagag

SEQ ID NO: 925163 - RNA, 19 nt, Artificial Sequence
  Description of Artificial Sequence: Synthetic oligonucleotide
agauaaaccccagucauaa

SEQ ID NO: 925164 - RNA, 19 nt, Artificial Sequence
  Description of Artificial Sequence: Synthetic oligonucleotide
guaauuguuagcuauuaau

SEQ ID NO: 925165 - RNA, 19 nt, Artificial Sequence
  Description of Artificial Sequence: Synthetic oligonucleotide
ggcuaauaauaacucagag

SEQ ID NO: 925166 - RNA, 19 nt, Artificial Sequence
  Description of Artificial Sequence: Synthetic oligonucleotide
uauguguuuguuacugcau

SEQ ID NO: 925167 - RNA, 19 nt, Artificial Sequence
  Description of Artificial Sequence: Synthetic oligonucleotide
auaaguggaguguugccaa

SEQ ID NO: 925168 - RNA, 19 nt, Artificial Sequence
  Description of Artificial Sequence: Synthetic oligonucleotide
gagacugacuuucaaaagu

SEQ ID NO: 925169 - RNA, 19 nt, Artificial Sequence
  Description of Artificial Sequence: Synthetic oligonucleotide
aggaucccgaucaugacuc

SEQ ID NO: 925170 - RNA, 19 nt, Artificial Sequence
  Description of Artificial Sequence: Synthetic oligonucleotide
ucuagaauguuuguauaua

SEQ ID NO: 925171 - RNA, 19 nt, Artificial Sequence
  Description of Artificial Sequence: Synthetic oligonucleotide
uucucauaugugacaggcc

SEQ ID NO: 925172 - RNA, 19 nt, Artificial Sequence
  Description of Artificial Sequence: Synthetic oligonucleotide
agauccucgaagccuagcu

SEQ ID NO: 925173 - RNA, 19 nt, Artificial Sequence
  Description of Artificial Sequence: Synthetic oligonucleotide
agacagcucauuuuacacu

SEQ ID NO: 925174 - RNA, 19 nt, Artificial Sequence
  Description of Artificial Sequence: Synthetic oligonucleotide
uaaauugguuuuguacaug

SEQ ID NO: 925175 - RNA, 19 nt, Artificial Sequence
  Description of Artificial Sequence: Synthetic oligonucleotide
acuagauaugaaauccuug

SEQ ID NO: 925176 - RNA, 19 nt, Artificial Sequence
  Description of Artificial Sequence: Synthetic oligonucleotide
acuuuguggcuauuaccag

SEQ ID NO: 925177 - RNA, 19 nt, Artificial Sequence
  Description of Artificial Sequence: Synthetic oligonucleotide
ccuaucugcucauaagugg

SEQ ID NO: 925178 - RNA, 19 nt, Artificial Sequence
  Description of Artificial Sequence: Synthetic oligonucleotide
cagaaucccuguaacgaag

SEQ ID NO: 925179 - RNA, 19 nt, Artificial Sequence
  Description of Artificial Sequence: Synthetic oligonucleotide
acuuguacacaacggggca

SEQ ID NO: 925180 - RNA, 19 nt, Artificial Sequence
  Description of Artificial Sequence: Synthetic oligonucleotide
aggcaggaccauuaggcag

SEQ ID NO: 925181 - RNA, 19 nt, Artificial Sequence
  Description of Artificial Sequence: Synthetic oligonucleotide
uuagaggaacacuugcauu

SEQ ID NO: 925182 - RNA, 19 nt, Artificial Sequence
  Description of Artificial Sequence: Synthetic oligonucleotide
gauuagaggaacacuugca

SEQ ID NO: 925183 - RNA, 19 nt, Artificial Sequence
  Description of Artificial Sequence: Synthetic oligonucleotide
uaguggcaacacuuugugg

SEQ ID NO: 925184 - RNA, 19 nt, Artificial Sequence
  Description of Artificial Sequence: Synthetic oligonucleotide
ucaucaagugcuacagcau

SEQ ID NO: 925185 - RNA, 19 nt, Artificial Sequence
  Description of Artificial Sequence: Synthetic oligonucleotide
uugacucaguugcaugcug

SEQ ID NO: 925186 - RNA, 19 nt, Artificial Sequence
  Description of Artificial Sequence: Synthetic oligonucleotide
uauuaagaucugucauuga

SEQ ID NO: 925187 - RNA, 19 nt, Artificial Sequence
  Description of Artificial Sequence: Synthetic oligonucleotide
cauucauuggaauguagaa

SEQ ID NO: 925188 - RNA, 19 nt, Artificial Sequence
  Description of Artificial Sequence: Synthetic oligonucleotide
aguaauugaagcauucauu

SEQ ID NO: 925189 - RNA, 19 nt, Artificial Sequence
  Description of Artificial Sequence: Synthetic oligonucleotide
agcaaauaccugucuuaag

SEQ ID NO: 925190 - RNA, 19 nt, Artificial Sequence
  Description of Artificial Sequence: Synthetic oligonucleotide
aacauggguccccucuuga

SEQ ID NO: 925191 - RNA, 19 nt, Artificial Sequence
  Description of Artificial Sequence: Synthetic oligonucleotide
cauagacagcucauuuuac

SEQ ID NO: 925192 - RNA, 19 nt, Artificial Sequence
  Description of Artificial Sequence: Synthetic oligonucleotide
auucuaacaauugggcagu

SEQ ID NO: 925193 - RNA, 19 nt, Artificial Sequence
  Description of Artificial Sequence: Synthetic oligonucleotide
agaaucccuguaacgaagg

SEQ ID NO: 925194 - RNA, 19 nt, Artificial Sequence
  Description of Artificial Sequence: Synthetic oligonucleotide
uaucuaugcuuaauuuaua

SEQ ID NO: 925195 - RNA, 19 nt, Artificial Sequence
  Description of Artificial Sequence: Synthetic oligonucleotide
aaauaugauuacaggcuaa

SEQ ID NO: 925196 - RNA, 19 nt, Artificial Sequence
  Description of Artificial Sequence: Synthetic oligonucleotide
gacugacuuucaaaaguag

SEQ ID NO: 925197 - RNA, 19 nt, Artificial Sequence
  Description of Artificial Sequence: Synthetic oligonucleotide
cuuuaugaacauggguccc

SEQ ID NO: 925198 - RNA, 19 nt, Artificial Sequence
  Description of Artificial Sequence: Synthetic oligonucleotide
gaaucccuguaacgaaggc

SEQ ID NO: 925199 - RNA, 19 nt, Artificial Sequence
  Description of Artificial Sequence: Synthetic oligonucleotide
acagaaucccuguaacgaa

SEQ ID NO: 925200 - RNA, 19 nt, Artificial Sequence
  Description of Artificial Sequence: Synthetic oligonucleotide
ugcugauuucaaagagggc

SEQ ID NO: 925201 - RNA, 19 nt, Artificial Sequence
  Description of Artificial Sequence: Synthetic oligonucleotide
uccaaguauuuaaauucuu

SEQ ID NO: 925202 - RNA, 19 nt, Artificial Sequence
  Description of Artificial Sequence: Synthetic oligonucleotide
cuucagaugcgaguugagc

SEQ ID NO: 925203 - RNA, 19 nt, Artificial Sequence
  Description of Artificial Sequence: Synthetic oligonucleotide
auaccugucuuaaggucac

SEQ ID NO: 925204 - RNA, 19 nt, Artificial Sequence
  Description of Artificial Sequence: Synthetic oligonucleotide
cuccuauaaguuucucuac

SEQ ID NO: 925205 - RNA, 19 nt, Artificial Sequence
  Description of Artificial Sequence: Synthetic oligonucleotide
uguuagcuauuaauuugua

SEQ ID NO: 925206 - RNA, 19 nt, Artificial Sequence
  Description of Artificial Sequence: Synthetic oligonucleotide
uuguaauuguuagcuauua

SEQ ID NO: 925207 - RNA, 19 nt, Artificial Sequence
  Description of Artificial Sequence: Synthetic oligonucleotide
ggaucugcguauucgacac

SEQ ID NO: 925208 - RNA, 19 nt, Artificial Sequence
  Description of Artificial Sequence: Synthetic oligonucleotide
uacaugagccacuguagua

SEQ ID NO: 925209 - RNA, 19 nt, Artificial Sequence
  Description of Artificial Sequence: Synthetic oligonucleotide
ccauaguccuguuaguggc

SEQ ID NO: 925210 - RNA, 19 nt, Artificial Sequence
  Description of Artificial Sequence: Synthetic oligonucleotide
ucuagccuuaugacgcuau

SEQ ID NO: 925211 - RNA, 19 nt, Artificial Sequence
  Description of Artificial Sequence: Synthetic oligonucleotide
cugcacggaaggcaggacc

SEQ ID NO: 925212 - RNA, 19 nt, Artificial Sequence
  Description of Artificial Sequence: Synthetic oligonucleotide
ugucagucuugacucaguu

SEQ ID NO: 925213 - RNA, 19 nt, Artificial Sequence
  Description of Artificial Sequence: Synthetic oligonucleotide
acaacggggcaaugacaac

SEQ ID NO: 925214 - RNA, 19 nt, Artificial Sequence
  Description of Artificial Sequence: Synthetic oligonucleotide
cuguaacgaaggccaaggg

SEQ ID NO: 925215 - RNA, 19 nt, Artificial Sequence
  Description of Artificial Sequence: Synthetic oligonucleotide
cacaacggggcaaugacaa

SEQ ID NO: 925216 - RNA, 19 nt, Artificial Sequence
  Description of Artificial Sequence: Synthetic oligonucleotide
ucauaugugacaggccaau

SEQ ID NO: 925217 - RNA, 19 nt, Artificial Sequence
  Description of Artificial Sequence: Synthetic oligonucleotide
ucaguugcaugcugacaga

SEQ ID NO: 925218 - RNA, 19 nt, Artificial Sequence
  Description of Artificial Sequence: Synthetic oligonucleotide
cucuacaugagccacugua

SEQ ID NO: 925219 - RNA, 19 nt, Artificial Sequence
  Description of Artificial Sequence: Synthetic oligonucleotide
acucgaguccacauacuuc

SEQ ID NO: 925220 - RNA, 19 nt, Artificial Sequence
  Description of Artificial Sequence: Synthetic oligonucleotide
aacccucacaauuguuaau

SEQ ID NO: 925221 - RNA, 19 nt, Artificial Sequence
  Description of Artificial Sequence: Synthetic oligonucleotide
gggaaaucauuauuuauua

SEQ ID NO: 925222 - RNA, 19 nt, Artificial Sequence
  Description of Artificial Sequence: Synthetic oligonucleotide
aucugcguauucgacacca

SEQ ID NO: 925223 - RNA, 19 nt, Artificial Sequence
  Description of Artificial Sequence: Synthetic oligonucleotide
uuaugaacauggguccccu

SEQ ID NO: 925224 - RNA, 19 nt, Artificial Sequence
  Description of Artificial Sequence: Synthetic oligonucleotide
ucuaacaauugggcaguga

SEQ ID NO: 925225 - RNA, 19 nt, Artificial Sequence
  Description of Artificial Sequence: Synthetic oligonucleotide
gcuauuaauuuguauauau

SEQ ID NO: 925226 - RNA, 19 nt, Artificial Sequence
  Description of Artificial Sequence: Synthetic oligonucleotide
ccucucuagccuuaugacg

SEQ ID NO: 925227 - RNA, 19 nt, Artificial Sequence
  Description of Artificial Sequence: Synthetic oligonucleotide
ugacgcuaucuguaaagua

SEQ ID NO: 925228 - RNA, 19 nt, Artificial Sequence
  Description of Artificial Sequence: Synthetic oligonucleotide
caucaucaagugcuacagc

SEQ ID NO: 925229 - RNA, 19 nt, Artificial Sequence
  Description of Artificial Sequence: Synthetic oligonucleotide
auacuucucgggaucugcg

SEQ ID NO: 925230 - RNA, 19 nt, Artificial Sequence
  Description of Artificial Sequence: Synthetic oligonucleotide
agcgaccuacacuuguaca

SEQ ID NO: 925231 - RNA, 19 nt, Artificial Sequence
  Description of Artificial Sequence: Synthetic oligonucleotide
aucacuacaaaugcauguu

SEQ ID NO: 925232 - RNA, 19 nt, Artificial Sequence
  Description of Artificial Sequence: Synthetic oligonucleotide
cucgaguccacauacuucu

SEQ ID NO: 925233 - RNA, 19 nt, Artificial Sequence
  Description of Artificial Sequence: Synthetic oligonucleotide
uucuaacuauaugggagaa

SEQ ID NO: 925234 - RNA, 19 nt, Artificial Sequence
  Description of Artificial Sequence: Synthetic oligonucleotide
ucuuaaggucacagccaga

SEQ ID NO: 925235 - RNA, 19 nt, Artificial Sequence
  Description of Artificial Sequence: Synthetic oligonucleotide
uagccuuaugacgcuaucu

SEQ ID NO: 925236 - RNA, 19 nt, Artificial Sequence
  Description of Artificial Sequence: Synthetic oligonucleotide
ucuaacuauaugggagaaa

SEQ ID NO: 925237 - RNA, 19 nt, Artificial Sequence
  Description of Artificial Sequence: Synthetic oligonucleotide
gagaaacagcgaccuacac

SEQ ID NO: 925238 - RNA, 19 nt, Artificial Sequence
  Description of Artificial Sequence: Synthetic oligonucleotide
caucacuacaaaugcaugu

SEQ ID NO: 925239 - RNA, 19 nt, Artificial Sequence
  Description of Artificial Sequence: Synthetic oligonucleotide
caaauaccugucuuaaggu

SEQ ID NO: 925240 - RNA, 19 nt, Artificial Sequence
  Description of Artificial Sequence: Synthetic oligonucleotide
uaugagcauuuaugcacaa

SEQ ID NO: 925241 - RNA, 19 nt, Artificial Sequence
  Description of Artificial Sequence: Synthetic oligonucleotide
cauuaggcaggucuucaca

SEQ ID NO: 925242 - RNA, 19 nt, Artificial Sequence
  Description of Artificial Sequence: Synthetic oligonucleotide
gcgaccuacacuuguacac

SEQ ID NO: 925243 - RNA, 19 nt, Artificial Sequence
  Description of Artificial Sequence: Synthetic oligonucleotide
augacgcuaucuguaaagu

SEQ ID NO: 925244 - RNA, 19 nt, Artificial Sequence
  Description of Artificial Sequence: Synthetic oligonucleotide
aggcuaauaauaacucaga

SEQ ID NO: 925245 - RNA, 19 nt, Artificial Sequence
  Description of Artificial Sequence: Synthetic oligonucleotide
ccuguaacgaaggccaagg

SEQ ID NO: 925246 - RNA, 19 nt, Artificial Sequence
  Description of Artificial Sequence: Synthetic oligonucleotide
ucccgaucaugacucgagu

SEQ ID NO: 925247 - RNA, 19 nt, Artificial Sequence
  Description of Artificial Sequence: Synthetic oligonucleotide
gagaacaauuaagaugaua

SEQ ID NO: 925248 - RNA, 19 nt, Artificial Sequence
  Description of Artificial Sequence: Synthetic oligonucleotide
ucucuagccuuaugacgcu

SEQ ID NO: 925249 - RNA, 19 nt, Artificial Sequence
  Description of Artificial Sequence: Synthetic oligonucleotide
guuagcuauuaauuuguau

SEQ ID NO: 925250 - RNA, 19 nt, Artificial Sequence
  Description of Artificial Sequence: Synthetic oligonucleotide
aagccaugagacugacuuu

SEQ ID NO: 925251 - RNA, 19 nt, Artificial Sequence
  Description of Artificial Sequence: Synthetic oligonucleotide
agacugacuuucaaaagua

SEQ ID NO: 925252 - RNA, 19 nt, Artificial Sequence
  Description of Artificial Sequence: Synthetic oligonucleotide
cauuggaauguagaauaca

SEQ ID NO: 925253 - RNA, 19 nt, Artificial Sequence
  Description of Artificial Sequence: Synthetic oligonucleotide
guugagccggugaggaucc

SEQ ID NO: 925254 - RNA, 19 nt, Artificial Sequence
  Description of Artificial Sequence: Synthetic oligonucleotide
caauugggcagugaagaga

SEQ ID NO: 925255 - RNA, 19 nt, Artificial Sequence
  Description of Artificial Sequence: Synthetic oligonucleotide
ucugcguauucgacaccac

SEQ ID NO: 925256 - RNA, 19 nt, Artificial Sequence
  Description of Artificial Sequence: Synthetic oligonucleotide
cacuuugauuagaggaaca

SEQ ID NO: 925257 - RNA, 19 nt, Artificial Sequence
  Description of Artificial Sequence: Synthetic oligonucleotide
gucaucggccaugaagagc

SEQ ID NO: 925258 - RNA, 19 nt, Artificial Sequence
  Description of Artificial Sequence: Synthetic oligonucleotide
aucccgaucaugacucgag

SEQ ID NO: 925259 - RNA, 19 nt, Artificial Sequence
  Description of Artificial Sequence: Synthetic oligonucleotide
gaucugcguauucgacacc

SEQ ID NO: 925260 - RNA, 19 nt, Artificial Sequence
  Description of Artificial Sequence: Synthetic oligonucleotide
caccgucaggaacuuguag

SEQ ID NO: 925261 - RNA, 19 nt, Artificial Sequence
  Description of Artificial Sequence: Synthetic oligonucleotide
uuaccaggguaugaauaau

SEQ ID NO: 925262 - RNA, 19 nt, Artificial Sequence
  Description of Artificial Sequence: Synthetic oligonucleotide
cauggguccccucuugaca

SEQ ID NO: 925263 - RNA, 19 nt, Artificial Sequence
  Description of Artificial Sequence: Synthetic oligonucleotide
cuacuaaagcaaaaccuau

SEQ ID NO: 925264 - RNA, 19 nt, Artificial Sequence
  Description of Artificial Sequence: Synthetic oligonucleotide
gguaugaauaauauuuuau

SEQ ID NO: 925265 - RNA, 19 nt, Artificial Sequence
  Description of Artificial Sequence: Synthetic oligonucleotide
aacuagcaccagaauuacu

SEQ ID NO: 925266 - RNA, 19 nt, Artificial Sequence
  Description of Artificial Sequence: Synthetic oligonucleotide
auaugauuacaggcuaaua

SEQ ID NO: 925267 - RNA, 19 nt, Artificial Sequence
  Description of Artificial Sequence: Synthetic oligonucleotide
cauuacuccuagaguaaaa

SEQ ID NO: 925268 - RNA, 19 nt, Artificial Sequence
  Description of Artificial Sequence: Synthetic oligonucleotide
agcuauuaauuuguauaua

SEQ ID NO: 925269 - RNA, 19 nt, Artificial Sequence
  Description of Artificial Sequence: Synthetic oligonucleotide
agcaccagaauuacuugaa

SEQ ID NO: 925270 - RNA, 19 nt, Artificial Sequence
  Description of Artificial Sequence: Synthetic oligonucleotide
gguuaaaagcuuauaauuu

SEQ ID NO: 925271 - RNA, 19 nt, Artificial Sequence
  Description of Artificial Sequence: Synthetic oligonucleotide
cuuaaggucacagccagau

SEQ ID NO: 925272 - RNA, 19 nt, Artificial Sequence
  Description of Artificial Sequence: Synthetic oligonucleotide
guuaguggcaacacuuugu

SEQ ID NO: 925273 - RNA, 19 nt, Artificial Sequence
  Description of Artificial Sequence: Synthetic oligonucleotide
augcgaguugagccgguga

SEQ ID NO: 925274 - RNA, 19 nt, Artificial Sequence
  Description of Artificial Sequence: Synthetic oligonucleotide
agcauuacuccuagaguaa

SEQ ID NO: 925275 - RNA, 19 nt, Artificial Sequence
  Description of Artificial Sequence: Synthetic oligonucleotide
aggcaggucuucacaaaag

SEQ ID NO: 925276 - RNA, 19 nt, Artificial Sequence
  Description of Artificial Sequence: Synthetic oligonucleotide
uggcuauuaccaggguaug

SEQ ID NO: 925277 - RNA, 19 nt, Artificial Sequence
  Description of Artificial Sequence: Synthetic oligonucleotide
cuagccuuaugacgcuauc

SEQ ID NO: 925278 - RNA, 19 nt, Artificial Sequence
  Description of Artificial Sequence: Synthetic oligonucleotide
aucaugacucgaguccaca

SEQ ID NO: 925279 - RNA, 19 nt, Artificial Sequence
  Description of Artificial Sequence: Synthetic oligonucleotide
uucuaacaauugggcagug

SEQ ID NO: 925280 - RNA, 19 nt, Artificial Sequence
  Description of Artificial Sequence: Synthetic oligonucleotide
acggggcaaugacaacauc

SEQ ID NO: 925281 - RNA, 19 nt, Artificial Sequence
  Description of Artificial Sequence: Synthetic oligonucleotide
cacaauuguuaauucuccu

SEQ ID NO: 925282 - RNA, 19 nt, Artificial Sequence
  Description of Artificial Sequence: Synthetic oligonucleotide
cauaugugacaggccaauc

SEQ ID NO: 925283 - RNA, 19 nt, Artificial Sequence
  Description of Artificial Sequence: Synthetic oligonucleotide
gaucaugacucgaguccac

SEQ ID NO: 925284 - RNA, 19 nt, Artificial Sequence
  Description of Artificial Sequence: Synthetic oligonucleotide
gcuauuaccaggguaugaa

SEQ ID NO: 925285 - RNA, 19 nt, Artificial Sequence
  Description of Artificial Sequence: Synthetic oligonucleotide
gaugcgaguugagccggug

SEQ ID NO: 925286 - RNA, 19 nt, Artificial Sequence
  Description of Artificial Sequence: Synthetic oligonucleotide
gcgucaucggccaugaaga

SEQ ID NO: 925287 - RNA, 19 nt, Artificial Sequence
  Description of Artificial Sequence: Synthetic oligonucleotide
uaggcgucaucggccauga

SEQ ID NO: 925288 - RNA, 19 nt, Artificial Sequence
  Description of Artificial Sequence: Synthetic oligonucleotide
guaggcgucaucggccaug

SEQ ID NO: 925289 - RNA, 19 nt, Artificial Sequence
  Description of Artificial Sequence: Synthetic oligonucleotide
gaauacagauuaaguuucu

SEQ ID NO: 925290 - RNA, 19 nt, Artificial Sequence
  Description of Artificial Sequence: Synthetic oligonucleotide
cucauaugugacaggccaa

SEQ ID NO: 925291 - RNA, 19 nt, Artificial Sequence
  Description of Artificial Sequence: Synthetic oligonucleotide
aaacaccgucaggaacuug

SEQ ID NO: 925292 - RNA, 19 nt, Artificial Sequence
  Description of Artificial Sequence: Synthetic oligonucleotide
aaacagcgaccuacacuug

SEQ ID NO: 925293 - RNA, 19 nt, Artificial Sequence
  Description of Artificial Sequence: Synthetic oligonucleotide
gcuacagcauccaaucauc

SEQ ID NO: 925294 - RNA, 19 nt, Artificial Sequence
  Description of Artificial Sequence: Synthetic oligonucleotide
acgcuaucuguaaaguaau

SEQ ID NO: 925295 - RNA, 19 nt, Artificial Sequence
  Description of Artificial Sequence: Synthetic oligonucleotide
gacucgaguccacauacuu

SEQ ID NO: 925296 - RNA, 19 nt, Artificial Sequence
  Description of Artificial Sequence: Synthetic oligonucleotide
aguuacacugugguaucua

SEQ ID NO: 925297 - RNA, 19 nt, Artificial Sequence
  Description of Artificial Sequence: Synthetic oligonucleotide
cagguucugcaaucagauc

SEQ ID NO: 925298 - RNA, 19 nt, Artificial Sequence
  Description of Artificial Sequence: Synthetic oligonucleotide
cuacaugagccacuguagu

SEQ ID NO: 925299 - RNA, 19 nt, Artificial Sequence
  Description of Artificial Sequence: Synthetic oligonucleotide
gugacaggccaaucuuaca

SEQ ID NO: 925300 - RNA, 19 nt, Artificial Sequence
  Description of Artificial Sequence: Synthetic oligonucleotide
caugacucgaguccacaua

SEQ ID NO: 925301 - RNA, 19 nt, Artificial Sequence
  Description of Artificial Sequence: Synthetic oligonucleotide
acacaacggggcaaugaca

SEQ ID NO: 925302 - RNA, 19 nt, Artificial Sequence
  Description of Artificial Sequence: Synthetic oligonucleotide
gaucccgaucaugacucga

SEQ ID NO: 925303 - RNA, 19 nt, Artificial Sequence
  Description of Artificial Sequence: Synthetic oligonucleotide
auaaacccucacaauuguu

SEQ ID NO: 925304 - RNA, 19 nt, Artificial Sequence
  Description of Artificial Sequence: Synthetic oligonucleotide
cccuugaccauuaucaagu

SEQ ID NO: 925305 - RNA, 19 nt, Artificial Sequence
  Description of Artificial Sequence: Synthetic oligonucleotide
ucugcacggaaggcaggac

SEQ ID NO: 925306 - RNA, 19 nt, Artificial Sequence
  Description of Artificial Sequence: Synthetic oligonucleotide
guguagucucagguucugc

SEQ ID NO: 925307 - RNA, 19 nt, Artificial Sequence
  Description of Artificial Sequence: Synthetic oligonucleotide
cuagcuucagaugcgaguu

SEQ ID NO: 925308 - RNA, 19 nt, Artificial Sequence
  Description of Artificial Sequence: Synthetic oligonucleotide
cuuguacacaacggggcaa

SEQ ID NO: 925309 - RNA, 19 nt, Artificial Sequence
  Description of Artificial Sequence: Synthetic oligonucleotide
cuauuaccaggguaugaau

SEQ ID NO: 925310 - RNA, 19 nt, Artificial Sequence
  Description of Artificial Sequence: Synthetic oligonucleotide
cagucuugacucaguugca

SEQ ID NO: 925311 - RNA, 19 nt, Artificial Sequence
  Description of Artificial Sequence: Synthetic oligonucleotide
ccggugaggaucccgauca

SEQ ID NO: 925312 - RNA, 19 nt, Artificial Sequence
  Description of Artificial Sequence: Synthetic oligonucleotide
gauccucgaagccuagcuu

SEQ ID NO: 925313 - RNA, 19 nt, Artificial Sequence
  Description of Artificial Sequence: Synthetic oligonucleotide
uggcaacacuuuguggcua

SEQ ID NO: 925314 - RNA, 19 nt, Artificial Sequence
  Description of Artificial Sequence: Synthetic oligonucleotide
gaucacauauuugcugauu

SEQ ID NO: 925315 - RNA, 19 nt, Artificial Sequence
  Description of Artificial Sequence: Synthetic oligonucleotide
ccagauaaaccccagucau

SEQ ID NO: 925316 - RNA, 19 nt, Artificial Sequence
  Description of Artificial Sequence: Synthetic oligonucleotide
cugcguauucgacaccacu

SEQ ID NO: 925317 - RNA, 19 nt, Artificial Sequence
  Description of Artificial Sequence: Synthetic oligonucleotide
cguauucgacaccacugug

SEQ ID NO: 925318 - RNA, 19 nt, Artificial Sequence
  Description of Artificial Sequence: Synthetic oligonucleotide
cuugacucaguugcaugcu

SEQ ID NO: 925319 - RNA, 19 nt, Artificial Sequence
  Description of Artificial Sequence: Synthetic oligonucleotide
uucucgggaucugcguauu

SEQ ID NO: 925320 - RNA, 19 nt, Artificial Sequence
  Description of Artificial Sequence: Synthetic oligonucleotide
ggaaacauagacagcucau

SEQ ID NO: 925321 - RNA, 19 nt, Artificial Sequence
  Description of Artificial Sequence: Synthetic oligonucleotide
gcguauucgacaccacugu

SEQ ID NO: 925322 - RNA, 19 nt, Artificial Sequence
  Description of Artificial Sequence: Synthetic oligonucleotide
uaccugucuuaaggucaca

SEQ ID NO: 925323 - RNA, 19 nt, Artificial Sequence
  Description of Artificial Sequence: Synthetic oligonucleotide
cuucucgggaucugcguau

SEQ ID NO: 925324 - RNA, 19 nt, Artificial Sequence
  Description of Artificial Sequence: Synthetic oligonucleotide
ggccaaucuuacaaagaaa

SEQ ID NO: 925325 - RNA, 19 nt, Artificial Sequence
  Description of Artificial Sequence: Synthetic oligonucleotide
cugugguaucuaugcuuaa

SEQ ID NO: 925326 - RNA, 19 nt, Artificial Sequence
  Description of Artificial Sequence: Synthetic oligonucleotide
agccggugaggaucccgau

SEQ ID NO: 925327 - RNA, 19 nt, Artificial Sequence
  Description of Artificial Sequence: Synthetic oligonucleotide
caaaaccuaucugcucaua

SEQ ID NO: 925328 - RNA, 19 nt, Artificial Sequence
  Description of Artificial Sequence: Synthetic oligonucleotide
gccggugaggaucccgauc

SEQ ID NO: 925329 - RNA, 19 nt, Artificial Sequence
  Description of Artificial Sequence: Synthetic oligonucleotide
cgucaucggccaugaagag

SEQ ID NO: 925330 - RNA, 19 nt, Artificial Sequence
  Description of Artificial Sequence: Synthetic oligonucleotide
agaugcgaguugagccggu

SEQ ID NO: 925331 - RNA, 19 nt, Artificial Sequence
  Description of Artificial Sequence: Synthetic oligonucleotide
gccuagcuucagaugcgag

SEQ ID NO: 925332 - RNA, 19 nt, Artificial Sequence
  Description of Artificial Sequence: Synthetic oligonucleotide
cggggcaaugacaacaucu

SEQ ID NO: 925333 - RNA, 19 nt, Artificial Sequence
  Description of Artificial Sequence: Synthetic oligonucleotide
cgggaucugcguauucgac

SEQ ID NO: 925334 - RNA, 19 nt, Artificial Sequence
  Description of Artificial Sequence: Synthetic oligonucleotide
cgaguugagccggugagga

SEQ ID NO: 925335 - RNA, 19 nt, Artificial Sequence
  Description of Artificial Sequence: Synthetic oligonucleotide
caguugcaugcugacagau

SEQ ID NO: 925336 - RNA, 19 nt, Artificial Sequence
  Description of Artificial Sequence: Synthetic oligonucleotide
gccaugagacugacuuuca

SEQ ID NO: 925337 - RNA, 19 nt, Artificial Sequence
  Description of Artificial Sequence: Synthetic oligonucleotide
cucuagccuuaugacgcua

SEQ ID NO: 925338 - RNA, 19 nt, Artificial Sequence
  Description of Artificial Sequence: Synthetic oligonucleotide
ccgucaggaacuuguagau

SEQ ID NO: 925339 - RNA, 19 nt, Artificial Sequence
  Description of Artificial Sequence: Synthetic oligonucleotide
cgaccuacacuuguacaca

SEQ ID NO: 925340 - RNA, 19 nt, Artificial Sequence
  Description of Artificial Sequence: Synthetic oligonucleotide
ccauacuuuuaugagcauu

SEQ ID NO: 925341 - RNA, 19 nt, Artificial Sequence
  Description of Artificial Sequence: Synthetic oligonucleotide
ggaccauuaggcaggucuu

SEQ ID NO: 925342 - RNA, 19 nt, Artificial Sequence
  Description of Artificial Sequence: Synthetic oligonucleotide
aggcgucaucggccaugaa

SEQ ID NO: 925343 - RNA, 19 nt, Artificial Sequence
  Description of Artificial Sequence: Synthetic oligonucleotide
cccauacuuuuaugagcau

SEQ ID NO: 925344 - RNA, 19 nt, Artificial Sequence
  Description of Artificial Sequence: Synthetic oligonucleotide
uuuaccaaaacccuuaagg

SEQ ID NO: 925345 - RNA, 19 nt, Artificial Sequence
  Description of Artificial Sequence: Synthetic oligonucleotide
uauugauuuaccaaaaccc

SEQ ID NO: 925346 - RNA, 19 nt, Artificial Sequence
  Description of Artificial Sequence: Synthetic oligonucleotide
uuacuuuccgguaagaccg

SEQ ID NO: 925347 - RNA, 19 nt, Artificial Sequence
  Description of Artificial Sequence: Synthetic oligonucleotide
uacaacugaacaauaaucg

SEQ ID NO: 925348 - RNA, 19 nt, Artificial Sequence
  Description of Artificial Sequence: Synthetic oligonucleotide
acagguaucauuugaaggc

SEQ ID NO: 925349 - RNA, 19 nt, Artificial Sequence
  Description of Artificial Sequence: Synthetic oligonucleotide
aaaucuacagacucuaaag

SEQ ID NO: 925350 - RNA, 19 nt, Artificial Sequence
  Description of Artificial Sequence: Synthetic oligonucleotide
uuauugauuuaccaaaacc

SEQ ID NO: 925351 - RNA, 19 nt, Artificial Sequence
  Description of Artificial Sequence: Synthetic oligonucleotide
aagacauuguuucuguggg

SEQ ID NO: 925352 - RNA, 19 nt, Artificial Sequence
  Description of Artificial Sequence: Synthetic oligonucleotide
uuuauaaaugacuggaaga

SEQ ID NO: 925353 - RNA, 19 nt, Artificial Sequence
  Description of Artificial Sequence: Synthetic oligonucleotide
ugaauuaaugggcugaagu

SEQ ID NO: 925354 - RNA, 19 nt, Artificial Sequence
  Description of Artificial Sequence: Synthetic oligonucleotide
uucuugaguagauucaggg

SEQ ID NO: 925355 - RNA, 19 nt, Artificial Sequence
  Description of Artificial Sequence: Synthetic oligonucleotide
ucugguaacauauucgcug

SEQ ID NO: 925356 - RNA, 19 nt, Artificial Sequence
  Description of Artificial Sequence: Synthetic oligonucleotide
cauacaaugauguauccug

SEQ ID NO: 925357 - RNA, 19 nt, Artificial Sequence
  Description of Artificial Sequence: Synthetic oligonucleotide
aaugauguauccugcagcu

SEQ ID NO: 925358 - RNA, 19 nt, Artificial Sequence
  Description of Artificial Sequence: Synthetic oligonucleotide
aaacccuuaaggucuaauc

SEQ ID NO: 925359 - RNA, 19 nt, Artificial Sequence
  Description of Artificial Sequence: Synthetic oligonucleotide
gacagguaucauuugaagg

SEQ ID NO: 925360 - RNA, 19 nt, Artificial Sequence
  Description of Artificial Sequence: Synthetic oligonucleotide
aagcuuccgaucuucaggg

SEQ ID NO: 925361 - RNA, 19 nt, Artificial Sequence
  Description of Artificial Sequence: Synthetic oligonucleotide
acaucuuucuaccucguac

SEQ ID NO: 925362 - RNA, 19 nt, Artificial Sequence
  Description of Artificial Sequence: Synthetic oligonucleotide
uuugcuuagguacggaggc

SEQ ID NO: 925363 - RNA, 19 nt, Artificial Sequence
  Description of Artificial Sequence: Synthetic oligonucleotide
uugaagguguuaaacagug

SEQ ID NO: 925364 - RNA, 19 nt, Artificial Sequence
  Description of Artificial Sequence: Synthetic oligonucleotide
uuacaacugaacaauaauc

SEQ ID NO: 925365 - RNA, 19 nt, Artificial Sequence
  Description of Artificial Sequence: Synthetic oligonucleotide
uaguuccuacuaaagagcg

SEQ ID NO: 925366 - RNA, 19 nt, Artificial Sequence
  Description of Artificial Sequence: Synthetic oligonucleotide
uccgguaagaccgugaucc

SEQ ID NO: 925367 - RNA, 19 nt, Artificial Sequence
  Description of Artificial Sequence: Synthetic oligonucleotide
ugauguauccugcagcuug

SEQ ID NO: 925368 - RNA, 19 nt, Artificial Sequence
  Description of Artificial Sequence: Synthetic oligonucleotide
ucuaaagcccuuuucagcu

SEQ ID NO: 925369 - RNA, 19 nt, Artificial Sequence
  Description of Artificial Sequence: Synthetic oligonucleotide
acaacugaacaauaaucgg

SEQ ID NO: 925370 - RNA, 19 nt, Artificial Sequence
  Description of Artificial Sequence: Synthetic oligonucleotide
aacccuuaaggucuaaucu

SEQ ID NO: 925371 - RNA, 19 nt, Artificial Sequence
  Description of Artificial Sequence: Synthetic oligonucleotide
agguguuaaacaguggucc

SEQ ID NO: 925372 - RNA, 19 nt, Artificial Sequence
  Description of Artificial Sequence: Synthetic oligonucleotide
gaagcuuccgaucuucagg

SEQ ID NO: 925373 - RNA, 19 nt, Artificial Sequence
  Description of Artificial Sequence: Synthetic oligonucleotide
gaggcuguagauucuaagg

SEQ ID NO: 925374 - RNA, 19 nt, Artificial Sequence
  Description of Artificial Sequence: Synthetic oligonucleotide
cuuucuaccucguacagug

SEQ ID NO: 925375 - RNA, 19 nt, Artificial Sequence
  Description of Artificial Sequence: Synthetic oligonucleotide
aaaucccuuauugauuuac

SEQ ID NO: 925376 - RNA, 19 nt, Artificial Sequence
  Description of Artificial Sequence: Synthetic oligonucleotide
uuaccaaaacccuuaaggu

SEQ ID NO: 925377 - RNA, 19 nt, Artificial Sequence
  Description of Artificial Sequence: Synthetic oligonucleotide
auucuguaggcguagaaug

SEQ ID NO: 925378 - RNA, 19 nt, Artificial Sequence
  Description of Artificial Sequence: Synthetic oligonucleotide
ucuugaguagauucagggg

SEQ ID NO: 925379 - RNA, 19 nt, Artificial Sequence
  Description of Artificial Sequence: Synthetic oligonucleotide
gaaacucuagccuuaccag

SEQ ID NO: 925380 - RNA, 19 nt, Artificial Sequence
  Description of Artificial Sequence: Synthetic oligonucleotide
auaaacuacaaugucuauc

SEQ ID NO: 925381 - RNA, 19 nt, Artificial Sequence
  Description of Artificial Sequence: Synthetic oligonucleotide
uuauaaaugacuggaagau

SEQ ID NO: 925382 - RNA, 19 nt, Artificial Sequence
  Description of Artificial Sequence: Synthetic oligonucleotide
aacugugccauucuugagu

SEQ ID NO: 925383 - RNA, 19 nt, Artificial Sequence
  Description of Artificial Sequence: Synthetic oligonucleotide
uugucaaaucuacagacuc

SEQ ID NO: 925384 - RNA, 19 nt, Artificial Sequence
  Description of Artificial Sequence: Synthetic oligonucleotide
ugcgguuuggacaugauua

SEQ ID NO: 925385 - RNA, 19 nt, Artificial Sequence
  Description of Artificial Sequence: Synthetic oligonucleotide
auauucgcugcuccguucc

SEQ ID NO: 925386 - RNA, 19 nt, Artificial Sequence
  Description of Artificial Sequence: Synthetic oligonucleotide
acacugugaaacuuacucg

SEQ ID NO: 925387 - RNA, 19 nt, Artificial Sequence
  Description of Artificial Sequence: Synthetic oligonucleotide
cagacauugacaacugugc

SEQ ID NO: 925388 - RNA, 19 nt, Artificial Sequence
  Description of Artificial Sequence: Synthetic oligonucleotide
uacccuuuagaagaaaugc

SEQ ID NO: 925389 - RNA, 19 nt, Artificial Sequence
  Description of Artificial Sequence: Synthetic oligonucleotide
ugauugacagguaucauuu

SEQ ID NO: 925390 - RNA, 19 nt, Artificial Sequence
  Description of Artificial Sequence: Synthetic oligonucleotide
aucuucagggauuuugcgg

SEQ ID NO: 925391 - RNA, 19 nt, Artificial Sequence
  Description of Artificial Sequence: Synthetic oligonucleotide
agugagaccaaauacugau

SEQ ID NO: 925392 - RNA, 19 nt, Artificial Sequence
  Description of Artificial Sequence: Synthetic oligonucleotide
uuuugcuaggauucgauau

SEQ ID NO: 925393 - RNA, 19 nt, Artificial Sequence
  Description of Artificial Sequence: Synthetic oligonucleotide
ucuucagggauuuugcggu

SEQ ID NO: 925394 - RNA, 19 nt, Artificial Sequence
  Description of Artificial Sequence: Synthetic oligonucleotide
acauucacuugaaagaggg

SEQ ID NO: 925395 - RNA, 19 nt, Artificial Sequence
  Description of Artificial Sequence: Synthetic oligonucleotide
ucaaauaucugguaacaua

SEQ ID NO: 925396 - RNA, 19 nt, Artificial Sequence
  Description of Artificial Sequence: Synthetic oligonucleotide
aauacugauuuggagcuug

SEQ ID NO: 925397 - RNA, 19 nt, Artificial Sequence
  Description of Artificial Sequence: Synthetic oligonucleotide
cuuaccagugaagucaugg

SEQ ID NO: 925398 - RNA, 19 nt, Artificial Sequence
  Description of Artificial Sequence: Synthetic oligonucleotide
agaucuucguaguuccuac

SEQ ID NO: 925399 - RNA, 19 nt, Artificial Sequence
  Description of Artificial Sequence: Synthetic oligonucleotide
uagauucuaaggaagcuuc

SEQ ID NO: 925400 - RNA, 19 nt, Artificial Sequence
  Description of Artificial Sequence: Synthetic oligonucleotide
aaucccuuauugauuuacc

SEQ ID NO: 925401 - RNA, 19 nt, Artificial Sequence
  Description of Artificial Sequence: Synthetic oligonucleotide
uuuccuucaaaauggcaca

SEQ ID NO: 925402 - RNA, 19 nt, Artificial Sequence
  Description of Artificial Sequence: Synthetic oligonucleotide
auaucugguaacauauucg

SEQ ID NO: 925403 - RNA, 19 nt, Artificial Sequence
  Description of Artificial Sequence: Synthetic oligonucleotide
uuaaggucuaaucuucaaa

SEQ ID NO: 925404 - RNA, 19 nt, Artificial Sequence
  Description of Artificial Sequence: Synthetic oligonucleotide
acguauaaggugcuacugg

SEQ ID NO: 925405 - RNA, 19 nt, Artificial Sequence
  Description of Artificial Sequence: Synthetic oligonucleotide
acucauacaaugauguauc

SEQ ID NO: 925406 - RNA, 19 nt, Artificial Sequence
  Description of Artificial Sequence: Synthetic oligonucleotide
ugauuuaccaaaacccuua

SEQ ID NO: 925407 - RNA, 19 nt, Artificial Sequence
  Description of Artificial Sequence: Synthetic oligonucleotide
ugagaccaaauacugauuu

SEQ ID NO: 925408 - RNA, 19 nt, Artificial Sequence
  Description of Artificial Sequence: Synthetic oligonucleotide
aaacucuagccuuaccagu

SEQ ID NO: 925409 - RNA, 19 nt, Artificial Sequence
  Description of Artificial Sequence: Synthetic oligonucleotide
uaacauauucgcugcuccg

SEQ ID NO: 925410 - RNA, 19 nt, Artificial Sequence
  Description of Artificial Sequence: Synthetic oligonucleotide
auugacagguaucauuuga

SEQ ID NO: 925411 - RNA, 19 nt, Artificial Sequence
  Description of Artificial Sequence: Synthetic oligonucleotide
uacggaggcuuaaagaacu

SEQ ID NO: 925412 - RNA, 19 nt, Artificial Sequence
  Description of Artificial Sequence: Synthetic oligonucleotide
gauucuaaggaagcuuccg

SEQ ID NO: 925413 - RNA, 19 nt, Artificial Sequence
  Description of Artificial Sequence: Synthetic oligonucleotide
uccgugaagaugaaacucu

SEQ ID NO: 925414 - RNA, 19 nt, Artificial Sequence
  Description of Artificial Sequence: Synthetic oligonucleotide
ugaucuacgucagaguuac

SEQ ID NO: 925415 - RNA, 19 nt, Artificial Sequence
  Description of Artificial Sequence: Synthetic oligonucleotide
cuaucuggggcuuuaguug

SEQ ID NO: 925416 - RNA, 19 nt, Artificial Sequence
  Description of Artificial Sequence: Synthetic oligonucleotide
gaucuucagggauuuugcg

SEQ ID NO: 925417 - RNA, 19 nt, Artificial Sequence
  Description of Artificial Sequence: Synthetic oligonucleotide
ugacagguaucauuugaag

SEQ ID NO: 925418 - RNA, 19 nt, Artificial Sequence
  Description of Artificial Sequence: Synthetic oligonucleotide
gacucuaaagcccuuuuca

SEQ ID NO: 925419 - RNA, 19 nt, Artificial Sequence
  Description of Artificial Sequence: Synthetic oligonucleotide
gacuggaaaagucguuugg

SEQ ID NO: 925420 - RNA, 19 nt, Artificial Sequence
  Description of Artificial Sequence: Synthetic oligonucleotide
ucguaguuccuacuaaaga

SEQ ID NO: 925421 - RNA, 19 nt, Artificial Sequence
  Description of Artificial Sequence: Synthetic oligonucleotide
guaacauauucgcugcucc

SEQ ID NO: 925422 - RNA, 19 nt, Artificial Sequence
  Description of Artificial Sequence: Synthetic oligonucleotide
aacuucacaacaccacaga

SEQ ID NO: 925423 - RNA, 19 nt, Artificial Sequence
  Description of Artificial Sequence: Synthetic oligonucleotide
uggaaaagucguuugggcu

SEQ ID NO: 925424 - RNA, 19 nt, Artificial Sequence
  Description of Artificial Sequence: Synthetic oligonucleotide
ugggaaaucccuuauugau

SEQ ID NO: 925425 - RNA, 19 nt, Artificial Sequence
  Description of Artificial Sequence: Synthetic oligonucleotide
ugauuaucauaaacuacaa

SEQ ID NO: 925426 - RNA, 19 nt, Artificial Sequence
  Description of Artificial Sequence: Synthetic oligonucleotide
ugaagguguuaaacagugg

SEQ ID NO: 925427 - RNA, 19 nt, Artificial Sequence
  Description of Artificial Sequence: Synthetic oligonucleotide
cuguagauucuaaggaagc

SEQ ID NO: 925428 - RNA, 19 nt, Artificial Sequence
  Description of Artificial Sequence: Synthetic oligonucleotide
aagguguuaaacagugguc

SEQ ID NO: 925429 - RNA, 19 nt, Artificial Sequence
  Description of Artificial Sequence: Synthetic oligonucleotide
cucuaaagcccuuuucagc

SEQ ID NO: 925430 - RNA, 19 nt, Artificial Sequence
  Description of Artificial Sequence: Synthetic oligonucleotide
auugacaacugugccauuc

SEQ ID NO: 925431 - RNA, 19 nt, Artificial Sequence
  Description of Artificial Sequence: Synthetic oligonucleotide
aacaauaaucgguuccuuu

SEQ ID NO: 925432 - RNA, 19 nt, Artificial Sequence
  Description of Artificial Sequence: Synthetic oligonucleotide
uaccaaaacccuuaagguc

SEQ ID NO: 925433 - RNA, 19 nt, Artificial Sequence
  Description of Artificial Sequence: Synthetic oligonucleotide
uuaaugggcugaaguuugg

SEQ ID NO: 925434 - RNA, 19 nt, Artificial Sequence
  Description of Artificial Sequence: Synthetic oligonucleotide
agugguccagacuucugac

SEQ ID NO: 925435 - RNA, 19 nt, Artificial Sequence
  Description of Artificial Sequence: Synthetic oligonucleotide
ugucaaaucuacagacucu

SEQ ID NO: 925436 - RNA, 19 nt, Artificial Sequence
  Description of Artificial Sequence: Synthetic oligonucleotide
ugguugucaaaucuacaga

SEQ ID NO: 925437 - RNA, 19 nt, Artificial Sequence
  Description of Artificial Sequence: Synthetic oligonucleotide
auugauuuaccaaaacccu

SEQ ID NO: 925438 - RNA, 19 nt, Artificial Sequence
  Description of Artificial Sequence: Synthetic oligonucleotide
accaaaacccuuaaggucu

SEQ ID NO: 925439 - RNA, 19 nt, Artificial Sequence
  Description of Artificial Sequence: Synthetic oligonucleotide
guguguacguauaaggugc

SEQ ID NO: 925440 - RNA, 19 nt, Artificial Sequence
  Description of Artificial Sequence: Synthetic oligonucleotide
cugguaacauauucgcugc

SEQ ID NO: 925441 - RNA, 19 nt, Artificial Sequence
  Description of Artificial Sequence: Synthetic oligonucleotide
auacaaugauguauccugc

SEQ ID NO: 925442 - RNA, 19 nt, Artificial Sequence
  Description of Artificial Sequence: Synthetic oligonucleotide
ugaaugguugucaaaucua

SEQ ID NO: 925443 - RNA, 19 nt, Artificial Sequence
  Description of Artificial Sequence: Synthetic oligonucleotide
gaagguguuaaacaguggu

SEQ ID NO: 925444 - RNA, 19 nt, Artificial Sequence
  Description of Artificial Sequence: Synthetic oligonucleotide
gguugucaaaucuacagac

SEQ ID NO: 925445 - RNA, 19 nt, Artificial Sequence
  Description of Artificial Sequence: Synthetic oligonucleotide
ggaaacuuuguccuugugc

SEQ ID NO: 925446 - RNA, 19 nt, Artificial Sequence
  Description of Artificial Sequence: Synthetic oligonucleotide
uaccagugaagucauggac

SEQ ID NO: 925447 - RNA, 19 nt, Artificial Sequence
  Description of Artificial Sequence: Synthetic oligonucleotide
uguuaaacagugguccuca

SEQ ID NO: 925448 - RNA, 19 nt, Artificial Sequence
  Description of Artificial Sequence: Synthetic oligonucleotide
agauucagggguguguacg

SEQ ID NO: 925449 - RNA, 19 nt, Artificial Sequence
  Description of Artificial Sequence: Synthetic oligonucleotide
uacgucagaguuacuuucc

SEQ ID NO: 925450 - RNA, 19 nt, Artificial Sequence
  Description of Artificial Sequence: Synthetic oligonucleotide
ucuagccuuaccagugaag

SEQ ID NO: 925451 - RNA, 19 nt, Artificial Sequence
  Description of Artificial Sequence: Synthetic oligonucleotide
guauggaggcuguagauuc

SEQ ID NO: 925452 - RNA, 19 nt, Artificial Sequence
  Description of Artificial Sequence: Synthetic oligonucleotide
uugacagguaucauuugaa

SEQ ID NO: 925453 - RNA, 19 nt, Artificial Sequence
  Description of Artificial Sequence: Synthetic oligonucleotide
ucauaugaccucaguuuug

SEQ ID NO: 925454 - RNA, 19 nt, Artificial Sequence
  Description of Artificial Sequence: Synthetic oligonucleotide
uaugaccucaguuuugcua

SEQ ID NO: 925455 - RNA, 19 nt, Artificial Sequence
  Description of Artificial Sequence: Synthetic oligonucleotide
auuaaugggcugaaguuug

SEQ ID NO: 925456 - RNA, 19 nt, Artificial Sequence
  Description of Artificial Sequence: Synthetic oligonucleotide
uguuucugugggaaauccc

SEQ ID NO: 925457 - RNA, 19 nt, Artificial Sequence
  Description of Artificial Sequence: Synthetic oligonucleotide
ugugccauucuugaguaga

SEQ ID NO: 925458 - RNA, 19 nt, Artificial Sequence
  Description of Artificial Sequence: Synthetic oligonucleotide
agacucuaaagcccuuuuc

SEQ ID NO: 925459 - RNA, 19 nt, Artificial Sequence
  Description of Artificial Sequence: Synthetic oligonucleotide
uugauuuaccaaaacccuu

SEQ ID NO: 925460 - RNA, 19 nt, Artificial Sequence
  Description of Artificial Sequence: Synthetic oligonucleotide
aucaggacuagaugauguc

SEQ ID NO: 925461 - RNA, 19 nt, Artificial Sequence
  Description of Artificial Sequence: Synthetic oligonucleotide
auuuaccaaaacccuuaag

SEQ ID NO: 925462 - RNA, 19 nt, Artificial Sequence
  Description of Artificial Sequence: Synthetic oligonucleotide
aacucuagccuuaccagug

SEQ ID NO: 925463 - RNA, 19 nt, Artificial Sequence
  Description of Artificial Sequence: Synthetic oligonucleotide
agugaagucauggacucug

SEQ ID NO: 925464 - RNA, 19 nt, Artificial Sequence
  Description of Artificial Sequence: Synthetic oligonucleotide
uucagcugaucuacgucag

SEQ ID NO: 925465 - RNA, 19 nt, Artificial Sequence
  Description of Artificial Sequence: Synthetic oligonucleotide
ucuaccaucuucagcccac

SEQ ID NO: 925466 - RNA, 19 nt, Artificial Sequence
  Description of Artificial Sequence: Synthetic oligonucleotide
ggaagaucuucguaguucc

SEQ ID NO: 925467 - RNA, 19 nt, Artificial Sequence
  Description of Artificial Sequence: Synthetic oligonucleotide
aacugugacauuguaggau

SEQ ID NO: 925468 - RNA, 19 nt, Artificial Sequence
  Description of Artificial Sequence: Synthetic oligonucleotide
uaaucgguuccuuugcuua

SEQ ID NO: 925469 - RNA, 19 nt, Artificial Sequence
  Description of Artificial Sequence: Synthetic oligonucleotide
ucccuuauugauuuaccaa

SEQ ID NO: 925470 - RNA, 19 nt, Artificial Sequence
  Description of Artificial Sequence: Synthetic oligonucleotide
uucugacucauacaaugau

SEQ ID NO: 925471 - RNA, 19 nt, Artificial Sequence
  Description of Artificial Sequence: Synthetic oligonucleotide
aaugggcugaaguuuggua

SEQ ID NO: 925472 - RNA, 19 nt, Artificial Sequence
  Description of Artificial Sequence: Synthetic oligonucleotide
aacauauucgcugcuccgu

SEQ ID NO: 925473 - RNA, 19 nt, Artificial Sequence
  Description of Artificial Sequence: Synthetic oligonucleotide
ucugcaaccauggugucaa

SEQ ID NO: 925474 - RNA, 19 nt, Artificial Sequence
  Description of Artificial Sequence: Synthetic oligonucleotide
aaacuuuguccuugugcca

SEQ ID NO: 925475 - RNA, 19 nt, Artificial Sequence
  Description of Artificial Sequence: Synthetic oligonucleotide
aucccuuauugauuuacca

SEQ ID NO: 925476 - RNA, 19 nt, Artificial Sequence
  Description of Artificial Sequence: Synthetic oligonucleotide
aguggugucuucucuaaau

SEQ ID NO: 925477 - RNA, 19 nt, Artificial Sequence
  Description of Artificial Sequence: Synthetic oligonucleotide
ucauacaaugauguauccu

SEQ ID NO: 925478 - RNA, 19 nt, Artificial Sequence
  Description of Artificial Sequence: Synthetic oligonucleotide
uggggcuuuaguugcagca

SEQ ID NO: 925479 - RNA, 19 nt, Artificial Sequence
  Description of Artificial Sequence: Synthetic oligonucleotide
acagugagaccaaauacug

SEQ ID NO: 925480 - RNA, 19 nt, Artificial Sequence
  Description of Artificial Sequence: Synthetic oligonucleotide
cuugaguagauucaggggu

SEQ ID NO: 925481 - RNA, 19 nt, Artificial Sequence
  Description of Artificial Sequence: Synthetic oligonucleotide
agaguugcugacaucuuuc

SEQ ID NO: 925482 - RNA, 19 nt, Artificial Sequence
  Description of Artificial Sequence: Synthetic oligonucleotide
agccuuaccagugaaguca

SEQ ID NO: 925483 - RNA, 19 nt, Artificial Sequence
  Description of Artificial Sequence: Synthetic oligonucleotide
cguaguuccuacuaaagag

SEQ ID NO: 925484 - RNA, 19 nt, Artificial Sequence
  Description of Artificial Sequence: Synthetic oligonucleotide
aucuuucuaccucguacag

SEQ ID NO: 925485 - RNA, 19 nt, Artificial Sequence
  Description of Artificial Sequence: Synthetic oligonucleotide
acugugacauuguaggauu

SEQ ID NO: 925486 - RNA, 19 nt, Artificial Sequence
  Description of Artificial Sequence: Synthetic oligonucleotide
cuacgucagaguuacuuuc

SEQ ID NO: 925487 - RNA, 19 nt, Artificial Sequence
  Description of Artificial Sequence: Synthetic oligonucleotide
caaauacugauuuggagcu

SEQ ID NO: 925488 - RNA, 19 nt, Artificial Sequence
  Description of Artificial Sequence: Synthetic oligonucleotide
ucuaccucguacagugaga

SEQ ID NO: 925489 - RNA, 19 nt, Artificial Sequence
  Description of Artificial Sequence: Synthetic oligonucleotide
gauuuggagcuugaaggug

SEQ ID NO: 925490 - RNA, 19 nt, Artificial Sequence
  Description of Artificial Sequence: Synthetic oligonucleotide
uacguauaaggugcuacug

SEQ ID NO: 925491 - RNA, 19 nt, Artificial Sequence
  Description of Artificial Sequence: Synthetic oligonucleotide
acgucagaguuacuuuccg

SEQ ID NO: 925492 - RNA, 19 nt, Artificial Sequence
  Description of Artificial Sequence: Synthetic oligonucleotide
aucacacugugaaacuuac

SEQ ID NO: 925493 - RNA, 19 nt, Artificial Sequence
  Description of Artificial Sequence: Synthetic oligonucleotide
uuuccgguaagaccgugau

SEQ ID NO: 925494 - RNA, 19 nt, Artificial Sequence
  Description of Artificial Sequence: Synthetic oligonucleotide
uggaagaucuucguaguuc

SEQ ID NO: 925495 - RNA, 19 nt, Artificial Sequence
  Description of Artificial Sequence: Synthetic oligonucleotide
ucuacgucagaguuacuuu

SEQ ID NO: 925496 - RNA, 19 nt, Artificial Sequence
  Description of Artificial Sequence: Synthetic oligonucleotide
uugcuaggauucgauauug

SEQ ID NO: 925497 - RNA, 19 nt, Artificial Sequence
  Description of Artificial Sequence: Synthetic oligonucleotide
gaauuaaugggcugaaguu

SEQ ID NO: 925498 - RNA, 19 nt, Artificial Sequence
  Description of Artificial Sequence: Synthetic oligonucleotide
uuuggacaugauuaucaua

SEQ ID NO: 925499 - RNA, 19 nt, Artificial Sequence
  Description of Artificial Sequence: Synthetic oligonucleotide
uggaugcccaaaccgcaag

SEQ ID NO: 925500 - RNA, 19 nt, Artificial Sequence
  Description of Artificial Sequence: Synthetic oligonucleotide
uccguuccaacugugacau

SEQ ID NO: 925501 - RNA, 19 nt, Artificial Sequence
  Description of Artificial Sequence: Synthetic oligonucleotide
ggaaaagucguuugggcuc

SEQ ID NO: 925502 - RNA, 19 nt, Artificial Sequence
  Description of Artificial Sequence: Synthetic oligonucleotide
uguguacguauaaggugcu

SEQ ID NO: 925503 - RNA, 19 nt, Artificial Sequence
  Description of Artificial Sequence: Synthetic oligonucleotide
auuuggagcuugaaggugu

SEQ ID NO: 925504 - RNA, 19 nt, Artificial Sequence
  Description of Artificial Sequence: Synthetic oligonucleotide
acugugaaacuuacucgac

SEQ ID NO: 925505 - RNA, 19 nt, Artificial Sequence
  Description of Artificial Sequence: Synthetic oligonucleotide
ucugugggaaaucccuuau

SEQ ID NO: 925506 - RNA, 19 nt, Artificial Sequence
  Description of Artificial Sequence: Synthetic oligonucleotide
uggagcuugaagguguuaa

SEQ ID NO: 925507 - RNA, 19 nt, Artificial Sequence
  Description of Artificial Sequence: Synthetic oligonucleotide
gaugcccaaaccgcaaggc

SEQ ID NO: 925508 - RNA, 19 nt, Artificial Sequence
  Description of Artificial Sequence: Synthetic oligonucleotide
ucaaaucuacagacucuaa

SEQ ID NO: 925509 - RNA, 19 nt, Artificial Sequence
  Description of Artificial Sequence: Synthetic oligonucleotide
uaucauuugaaggcugaau

SEQ ID NO: 925510 - RNA, 19 nt, Artificial Sequence
  Description of Artificial Sequence: Synthetic oligonucleotide
ucagaguuacuuuccggua

SEQ ID NO: 925511 - RNA, 19 nt, Artificial Sequence
  Description of Artificial Sequence: Synthetic oligonucleotide
gauguauccugcagcuugc

SEQ ID NO: 925512 - RNA, 19 nt, Artificial Sequence
  Description of Artificial Sequence: Synthetic oligonucleotide
auacccuuuagaagaaaug

SEQ ID NO: 925513 - RNA, 19 nt, Artificial Sequence
  Description of Artificial Sequence: Synthetic oligonucleotide
acccuuaaggucuaaucuu

SEQ ID NO: 925514 - RNA, 19 nt, Artificial Sequence
  Description of Artificial Sequence: Synthetic oligonucleotide
aguagauucaggggugugu

SEQ ID NO: 925515 - RNA, 19 nt, Artificial Sequence
  Description of Artificial Sequence: Synthetic oligonucleotide
aaucacacugugaaacuua

SEQ ID NO: 925516 - RNA, 19 nt, Artificial Sequence
  Description of Artificial Sequence: Synthetic oligonucleotide
uuuugcgguuuggacauga

SEQ ID NO: 925517 - RNA, 19 nt, Artificial Sequence
  Description of Artificial Sequence: Synthetic oligonucleotide
uaccaucuucagcccacgg

SEQ ID NO: 925518 - RNA, 19 nt, Artificial Sequence
  Description of Artificial Sequence: Synthetic oligonucleotide
cguauaaggugcuacuggg

SEQ ID NO: 925519 - RNA, 19 nt, Artificial Sequence
  Description of Artificial Sequence: Synthetic oligonucleotide
ucugaauuaaugggcugaa

SEQ ID NO: 925520 - RNA, 19 nt, Artificial Sequence
  Description of Artificial Sequence: Synthetic oligonucleotide
ucguuugggcucauaugac

SEQ ID NO: 925521 - RNA, 19 nt, Artificial Sequence
  Description of Artificial Sequence: Synthetic oligonucleotide
ucauggacucugaauuaau

SEQ ID NO: 925522 - RNA, 19 nt, Artificial Sequence
  Description of Artificial Sequence: Synthetic oligonucleotide
uccuacuaaagagcgugca

SEQ ID NO: 925523 - RNA, 19 nt, Artificial Sequence
  Description of Artificial Sequence: Synthetic oligonucleotide
acugugccauucuugagua

SEQ ID NO: 925524 - RNA, 19 nt, Artificial Sequence
  Description of Artificial Sequence: Synthetic oligonucleotide
gauuuaccaaaacccuuaa

SEQ ID NO: 925525 - RNA, 19 nt, Artificial Sequence
  Description of Artificial Sequence: Synthetic oligonucleotide
aaaacccuuaaggucuaau

SEQ ID NO: 925526 - RNA, 19 nt, Artificial Sequence
  Description of Artificial Sequence: Synthetic oligonucleotide
cuucugacucauacaauga

SEQ ID NO: 925527 - RNA, 19 nt, Artificial Sequence
  Description of Artificial Sequence: Synthetic oligonucleotide
gguuuggacaugauuauca

SEQ ID NO: 925528 - RNA, 19 nt, Artificial Sequence
  Description of Artificial Sequence: Synthetic oligonucleotide
aucuacgucagaguuacuu

SEQ ID NO: 925529 - RNA, 19 nt, Artificial Sequence
  Description of Artificial Sequence: Synthetic oligonucleotide
uauccugcagcuugcuauc

SEQ ID NO: 925530 - RNA, 19 nt, Artificial Sequence
  Description of Artificial Sequence: Synthetic oligonucleotide
aaacagugguccucauuuu

SEQ ID NO: 925531 - RNA, 19 nt, Artificial Sequence
  Description of Artificial Sequence: Synthetic oligonucleotide
gucagaguuacuuuccggu

SEQ ID NO: 925532 - RNA, 19 nt, Artificial Sequence
  Description of Artificial Sequence: Synthetic oligonucleotide
ggacucugaauuaaugggc

SEQ ID NO: 925533 - RNA, 19 nt, Artificial Sequence
  Description of Artificial Sequence: Synthetic oligonucleotide
ugaccucaguuuugcuagg

SEQ ID NO: 925534 - RNA, 19 nt, Artificial Sequence
  Description of Artificial Sequence: Synthetic oligonucleotide
ugguauggaggcuguagau

SEQ ID NO: 925535 - RNA, 19 nt, Artificial Sequence
  Description of Artificial Sequence: Synthetic oligonucleotide
ugacuggaagaucuucgua

SEQ ID NO: 925536 - RNA, 19 nt, Artificial Sequence
  Description of Artificial Sequence: Synthetic oligonucleotide
gaaggcugaaugguuguca

SEQ ID NO: 925537 - RNA, 19 nt, Artificial Sequence
  Description of Artificial Sequence: Synthetic oligonucleotide
gaaaagucguuugggcuca

SEQ ID NO: 925538 - RNA, 19 nt, Artificial Sequence
  Description of Artificial Sequence: Synthetic oligonucleotide
ugcuaucuggggcuuuagu

SEQ ID NO: 925539 - RNA, 19 nt, Artificial Sequence
  Description of Artificial Sequence: Synthetic oligonucleotide
ugcuaggauucgauauugu

SEQ ID NO: 925540 - RNA, 19 nt, Artificial Sequence
  Description of Artificial Sequence: Synthetic oligonucleotide
uuugggcucauaugaccuc

SEQ ID NO: 925541 - RNA, 19 nt, Artificial Sequence
  Description of Artificial Sequence: Synthetic oligonucleotide
uugggcucauaugaccuca

SEQ ID NO: 925542 - RNA, 19 nt, Artificial Sequence
  Description of Artificial Sequence: Synthetic oligonucleotide
ccagacuucugacucauac

SEQ ID NO: 925543 - RNA, 19 nt, Artificial Sequence
  Description of Artificial Sequence: Synthetic oligonucleotide
ggcccgaagacauuguuuc

SEQ ID NO: 925544 - RNA, 19 nt, Artificial Sequence
  Description of Artificial Sequence: Synthetic oligonucleotide
guauccugcagcuugcuau

SEQ ID NO: 925545 - RNA, 19 nt, Artificial Sequence
  Description of Artificial Sequence: Synthetic oligonucleotide
ugguaacauauucgcugcu

SEQ ID NO: 925546 - RNA, 19 nt, Artificial Sequence
  Description of Artificial Sequence: Synthetic oligonucleotide
acaucaggacuagaugaug

SEQ ID NO: 925547 - RNA, 19 nt, Artificial Sequence
  Description of Artificial Sequence: Synthetic oligonucleotide
cugugaaacuuacucgaca

SEQ ID NO: 925548 - RNA, 19 nt, Artificial Sequence
  Description of Artificial Sequence: Synthetic oligonucleotide
ugcuccguuccaacuguga

SEQ ID NO: 925549 - RNA, 19 nt, Artificial Sequence
  Description of Artificial Sequence: Synthetic oligonucleotide
ucagcugaucuacgucaga

SEQ ID NO: 925550 - RNA, 19 nt, Artificial Sequence
  Description of Artificial Sequence: Synthetic oligonucleotide
agauucuguaggcguagaa

SEQ ID NO: 925551 - RNA, 19 nt, Artificial Sequence
  Description of Artificial Sequence: Synthetic oligonucleotide
gaccaaauacugauuugga

SEQ ID NO: 925552 - RNA, 19 nt, Artificial Sequence
  Description of Artificial Sequence: Synthetic oligonucleotide
uggacaugauuaucauaaa

SEQ ID NO: 925553 - RNA, 19 nt, Artificial Sequence
  Description of Artificial Sequence: Synthetic oligonucleotide
cugaaugguugucaaaucu

SEQ ID NO: 925554 - RNA, 19 nt, Artificial Sequence
  Description of Artificial Sequence: Synthetic oligonucleotide
cuuaaggucuaaucuucaa

SEQ ID NO: 925555 - RNA, 19 nt, Artificial Sequence
  Description of Artificial Sequence: Synthetic oligonucleotide
augcccaaaccgcaaggcu

SEQ ID NO: 925556 - RNA, 19 nt, Artificial Sequence
  Description of Artificial Sequence: Synthetic oligonucleotide
uagauucagggguguguac

SEQ ID NO: 925557 - RNA, 19 nt, Artificial Sequence
  Description of Artificial Sequence: Synthetic oligonucleotide
cauauucgcugcuccguuc

SEQ ID NO: 925558 - RNA, 19 nt, Artificial Sequence
  Description of Artificial Sequence: Synthetic oligonucleotide
guagcacagaguugcugac

SEQ ID NO: 925559 - RNA, 19 nt, Artificial Sequence
  Description of Artificial Sequence: Synthetic oligonucleotide
agcccacggaaacaaacaa

SEQ ID NO: 925560 - RNA, 19 nt, Artificial Sequence
  Description of Artificial Sequence: Synthetic oligonucleotide
ugggcucauaugaccucag

SEQ ID NO: 925561 - RNA, 19 nt, Artificial Sequence
  Description of Artificial Sequence: Synthetic oligonucleotide
ccugcagcuugcuaucugg

SEQ ID NO: 925562 - RNA, 19 nt, Artificial Sequence
  Description of Artificial Sequence: Synthetic oligonucleotide
uccuucaaaauggcacaca

SEQ ID NO: 925563 - RNA, 19 nt, Artificial Sequence
  Description of Artificial Sequence: Synthetic oligonucleotide
cucugaauuaaugggcuga

SEQ ID NO: 925564 - RNA, 19 nt, Artificial Sequence
  Description of Artificial Sequence: Synthetic oligonucleotide
aagcccuuuucagcugauc

SEQ ID NO: 925565 - RNA, 19 nt, Artificial Sequence
  Description of Artificial Sequence: Synthetic oligonucleotide
uucgcugcuccguuccaac

SEQ ID NO: 925566 - RNA, 19 nt, Artificial Sequence
  Description of Artificial Sequence: Synthetic oligonucleotide
uugcgguuuggacaugauu

SEQ ID NO: 925567 - RNA, 19 nt, Artificial Sequence
  Description of Artificial Sequence: Synthetic oligonucleotide
ucuggggcuuuaguugcag

SEQ ID NO: 925568 - RNA, 19 nt, Artificial Sequence
  Description of Artificial Sequence: Synthetic oligonucleotide
ggaugcccaaaccgcaagg

SEQ ID NO: 925569 - RNA, 19 nt, Artificial Sequence
  Description of Artificial Sequence: Synthetic oligonucleotide
acucuagccuuaccaguga

SEQ ID NO: 925570 - RNA, 19 nt, Artificial Sequence
  Description of Artificial Sequence: Synthetic oligonucleotide
ugacaacugugccauucuu

SEQ ID NO: 925571 - RNA, 19 nt, Artificial Sequence
  Description of Artificial Sequence: Synthetic oligonucleotide
acauauucgcugcuccguu

SEQ ID NO: 925572 - RNA, 19 nt, Artificial Sequence
  Description of Artificial Sequence: Synthetic oligonucleotide
aguuuugcuaggauucgau

SEQ ID NO: 925573 - RNA, 19 nt, Artificial Sequence
  Description of Artificial Sequence: Synthetic oligonucleotide
gacucugaauuaaugggcu

SEQ ID NO: 925574 - RNA, 19 nt, Artificial Sequence
  Description of Artificial Sequence: Synthetic oligonucleotide
uuagguacggaggcuuaaa

SEQ ID NO: 925575 - RNA, 19 nt, Artificial Sequence
  Description of Artificial Sequence: Synthetic oligonucleotide
uaaugggcugaaguuuggu

SEQ ID NO: 925576 - RNA, 19 nt, Artificial Sequence
  Description of Artificial Sequence: Synthetic oligonucleotide
uagccuuaccagugaaguc

SEQ ID NO: 925577 - RNA, 19 nt, Artificial Sequence
  Description of Artificial Sequence: Synthetic oligonucleotide
cugaauuaaugggcugaag

SEQ ID NO: 925578 - RNA, 19 nt, Artificial Sequence
  Description of Artificial Sequence: Synthetic oligonucleotide
uuccaacugugacauugua

SEQ ID NO: 925579 - RNA, 19 nt, Artificial Sequence
  Description of Artificial Sequence: Synthetic oligonucleotide
uauucgcugcuccguucca

SEQ ID NO: 925580 - RNA, 19 nt, Artificial Sequence
  Description of Artificial Sequence: Synthetic oligonucleotide
agggauuuugcgguuugga

SEQ ID NO: 925581 - RNA, 19 nt, Artificial Sequence
  Description of Artificial Sequence: Synthetic oligonucleotide
guuuugcuaggauucgaua

SEQ ID NO: 925582 - RNA, 19 nt, Artificial Sequence
  Description of Artificial Sequence: Synthetic oligonucleotide
cacagaguugcugacaucu

SEQ ID NO: 925583 - RNA, 19 nt, Artificial Sequence
  Description of Artificial Sequence: Synthetic oligonucleotide
cagaguuacuuuccgguaa

SEQ ID NO: 925584 - RNA, 19 nt, Artificial Sequence
  Description of Artificial Sequence: Synthetic oligonucleotide
cuccguuccaacugugaca

SEQ ID NO: 925585 - RNA, 19 nt, Artificial Sequence
  Description of Artificial Sequence: Synthetic oligonucleotide
ugcuuagguacggaggcuu

SEQ ID NO: 925586 - RNA, 19 nt, Artificial Sequence
  Description of Artificial Sequence: Synthetic oligonucleotide
aaauacugauuuggagcuu

SEQ ID NO: 925587 - RNA, 19 nt, Artificial Sequence
  Description of Artificial Sequence: Synthetic oligonucleotide
uaccucguacagugagacc

SEQ ID NO: 925588 - RNA, 19 nt, Artificial Sequence
  Description of Artificial Sequence: Synthetic oligonucleotide
guacguauaaggugcuacu

SEQ ID NO: 925589 - RNA, 19 nt, Artificial Sequence
  Description of Artificial Sequence: Synthetic oligonucleotide
uuugcgguuuggacaugau

SEQ ID NO: 925590 - RNA, 19 nt, Artificial Sequence
  Description of Artificial Sequence: Synthetic oligonucleotide
cuagccuuaccagugaagu

SEQ ID NO: 925591 - RNA, 19 nt, Artificial Sequence
  Description of Artificial Sequence: Synthetic oligonucleotide
aucugguaacauauucgcu

SEQ ID NO: 925592 - RNA, 19 nt, Artificial Sequence
  Description of Artificial Sequence: Synthetic oligonucleotide
cccuuaaggucuaaucuuc

SEQ ID NO: 925593 - RNA, 19 nt, Artificial Sequence
  Description of Artificial Sequence: Synthetic oligonucleotide
cauacccuuuagaagaaau

SEQ ID NO: 925594 - RNA, 19 nt, Artificial Sequence
  Description of Artificial Sequence: Synthetic oligonucleotide
uggaggcuguagauucuaa

SEQ ID NO: 925595 - RNA, 19 nt, Artificial Sequence
  Description of Artificial Sequence: Synthetic oligonucleotide
cuuuccgguaagaccguga

SEQ ID NO: 925596 - RNA, 19 nt, Artificial Sequence
  Description of Artificial Sequence: Synthetic oligonucleotide
cagugagaccaaauacuga

SEQ ID NO: 925597 - RNA, 19 nt, Artificial Sequence
  Description of Artificial Sequence: Synthetic oligonucleotide
cagugguccagacuucuga

SEQ ID NO: 925598 - RNA, 19 nt, Artificial Sequence
  Description of Artificial Sequence: Synthetic oligonucleotide
caacugugacauuguagga

SEQ ID NO: 925599 - RNA, 19 nt, Artificial Sequence
  Description of Artificial Sequence: Synthetic oligonucleotide
guguuaaacagugguccuc

SEQ ID NO: 925600 - RNA, 19 nt, Artificial Sequence
  Description of Artificial Sequence: Synthetic oligonucleotide
gaguagauucaggggugug

SEQ ID NO: 925601 - RNA, 19 nt, Artificial Sequence
  Description of Artificial Sequence: Synthetic oligonucleotide
uuccgguaagaccgugauc

SEQ ID NO: 925602 - RNA, 19 nt, Artificial Sequence
  Description of Artificial Sequence: Synthetic oligonucleotide
cauucacuugaaagaggga

SEQ ID NO: 925603 - RNA, 19 nt, Artificial Sequence
  Description of Artificial Sequence: Synthetic oligonucleotide
gguaacauauucgcugcuc

SEQ ID NO: 925604 - RNA, 19 nt, Artificial Sequence
  Description of Artificial Sequence: Synthetic oligonucleotide
gcaaccauggugucaaaua

SEQ ID NO: 925605 - RNA, 19 nt, Artificial Sequence
  Description of Artificial Sequence: Synthetic oligonucleotide
guuugggcucauaugaccu

SEQ ID NO: 925606 - RNA, 19 nt, Artificial Sequence
  Description of Artificial Sequence: Synthetic oligonucleotide
gguaucauuugaaggcuga

SEQ ID NO: 925607 - RNA, 19 nt, Artificial Sequence
  Description of Artificial Sequence: Synthetic oligonucleotide
cugauugacagguaucauu

SEQ ID NO: 925608 - RNA, 19 nt, Artificial Sequence
  Description of Artificial Sequence: Synthetic oligonucleotide
uacugauuuggagcuugaa

SEQ ID NO: 925609 - RNA, 19 nt, Artificial Sequence
  Description of Artificial Sequence: Synthetic oligonucleotide
cucauaugaccucaguuuu

SEQ ID NO: 925610 - RNA, 19 nt, Artificial Sequence
  Description of Artificial Sequence: Synthetic oligonucleotide
cguuugggcucauaugacc

SEQ ID NO: 925611 - RNA, 19 nt, Artificial Sequence
  Description of Artificial Sequence: Synthetic oligonucleotide
accugucgcccuccuugac

SEQ ID NO: 925612 - RNA, 19 nt, Artificial Sequence
  Description of Artificial Sequence: Synthetic oligonucleotide
guuuggacaugauuaucau

SEQ ID NO: 925613 - RNA, 19 nt, Artificial Sequence
  Description of Artificial Sequence: Synthetic oligonucleotide
guugucaaaucuacagacu

SEQ ID NO: 925614 - RNA, 19 nt, Artificial Sequence
  Description of Artificial Sequence: Synthetic oligonucleotide
gcucauaugaccucaguuu

SEQ ID NO: 925615 - RNA, 19 nt, Artificial Sequence
  Description of Artificial Sequence: Synthetic oligonucleotide
gcugaaugguugucaaauc

SEQ ID NO: 925616 - RNA, 19 nt, Artificial Sequence
  Description of Artificial Sequence: Synthetic oligonucleotide
cugaucuacgucagaguua

SEQ ID NO: 925617 - RNA, 19 nt, Artificial Sequence
  Description of Artificial Sequence: Synthetic oligonucleotide
aguuccuacuaaagagcgu

SEQ ID NO: 925618 - RNA, 19 nt, Artificial Sequence
  Description of Artificial Sequence: Synthetic oligonucleotide
auauuguugaggggucuuu

SEQ ID NO: 925619 - RNA, 19 nt, Artificial Sequence
  Description of Artificial Sequence: Synthetic oligonucleotide
caaccauggugucaaauau

SEQ ID NO: 925620 - RNA, 19 nt, Artificial Sequence
  Description of Artificial Sequence: Synthetic oligonucleotide
gcuccguuccaacugugac

SEQ ID NO: 925621 - RNA, 19 nt, Artificial Sequence
  Description of Artificial Sequence: Synthetic oligonucleotide
ccauucuugaguagauuca

SEQ ID NO: 925622 - RNA, 19 nt, Artificial Sequence
  Description of Artificial Sequence: Synthetic oligonucleotide
guagauucuaaggaagcuu

SEQ ID NO: 925623 - RNA, 19 nt, Artificial Sequence
  Description of Artificial Sequence: Synthetic oligonucleotide
guguuguagcacagaguug

SEQ ID NO: 925624 - RNA, 19 nt, Artificial Sequence
  Description of Artificial Sequence: Synthetic oligonucleotide
ucgcugcuccguuccaacu

SEQ ID NO: 925625 - RNA, 19 nt, Artificial Sequence
  Description of Artificial Sequence: Synthetic oligonucleotide
gaucuucguaguuccuacu

SEQ ID NO: 925626 - RNA, 19 nt, Artificial Sequence
  Description of Artificial Sequence: Synthetic oligonucleotide
guaucauuugaaggcugaa

SEQ ID NO: 925627 - RNA, 19 nt, Artificial Sequence
  Description of Artificial Sequence: Synthetic oligonucleotide
gaguuacuuuccgguaaga

SEQ ID NO: 925628 - RNA, 19 nt, Artificial Sequence
  Description of Artificial Sequence: Synthetic oligonucleotide
cgucagaguuacuuuccgg

SEQ ID NO: 925629 - RNA, 19 nt, Artificial Sequence
  Description of Artificial Sequence: Synthetic oligonucleotide
gaccucaguuuugcuagga

SEQ ID NO: 925630 - RNA, 19 nt, Artificial Sequence
  Description of Artificial Sequence: Synthetic oligonucleotide
cauuguuucugugggaaau

SEQ ID NO: 925631 - RNA, 19 nt, Artificial Sequence
  Description of Artificial Sequence: Synthetic oligonucleotide
gggcuuuaguugcagcauc

SEQ ID NO: 925632 - RNA, 19 nt, Artificial Sequence
  Description of Artificial Sequence: Synthetic oligonucleotide
agcuuccgaucuucaggga

SEQ ID NO: 925633 - RNA, 19 nt, Artificial Sequence
  Description of Artificial Sequence: Synthetic oligonucleotide
cccgaagacauuguuucug

SEQ ID NO: 925634 - RNA, 19 nt, Artificial Sequence
  Description of Artificial Sequence: Synthetic oligonucleotide
gcuaucuggggcuuuaguu

SEQ ID NO: 925635 - RNA, 19 nt, Artificial Sequence
  Description of Artificial Sequence: Synthetic oligonucleotide
cauaaacuacaaugucuau

SEQ ID NO: 925636 - RNA, 19 nt, Artificial Sequence
  Description of Artificial Sequence: Synthetic oligonucleotide
caucuucagcccacggaaa

SEQ ID NO: 925637 - RNA, 19 nt, Artificial Sequence
  Description of Artificial Sequence: Synthetic oligonucleotide
gcuacugggcccgaagaca

SEQ ID NO: 925638 - RNA, 19 nt, Artificial Sequence
  Description of Artificial Sequence: Synthetic oligonucleotide
gauauuguugaggggucuu

SEQ ID NO: 925639 - RNA, 19 nt, Artificial Sequence
  Description of Artificial Sequence: Synthetic oligonucleotide
aaagcccuuuucagcugau

SEQ ID NO: 925640 - RNA, 19 nt, Artificial Sequence
  Description of Artificial Sequence: Synthetic oligonucleotide
cugucgcccuccuugaccu

SEQ ID NO: 925641 - RNA, 19 nt, Artificial Sequence
  Description of Artificial Sequence: Synthetic oligonucleotide
aaagucguuugggcucaua

SEQ ID NO: 925642 - RNA, 19 nt, Artificial Sequence
  Description of Artificial Sequence: Synthetic oligonucleotide
ccuuaaggucuaaucuuca

SEQ ID NO: 925643 - RNA, 19 nt, Artificial Sequence
  Description of Artificial Sequence: Synthetic oligonucleotide
aggaagcuuccgaucuuca

SEQ ID NO: 925644 - RNA, 19 nt, Artificial Sequence
  Description of Artificial Sequence: Synthetic oligonucleotide
ggugucuucucuaaauaau

SEQ ID NO: 925645 - RNA, 19 nt, Artificial Sequence
  Description of Artificial Sequence: Synthetic oligonucleotide
ccagauucuguaggcguag

SEQ ID NO: 925646 - RNA, 19 nt, Artificial Sequence
  Description of Artificial Sequence: Synthetic oligonucleotide
cagguaucauuugaaggcu

SEQ ID NO: 925647 - RNA, 19 nt, Artificial Sequence
  Description of Artificial Sequence: Synthetic oligonucleotide
gugguccagacuucugacu

SEQ ID NO: 925648 - RNA, 19 nt, Artificial Sequence
  Description of Artificial Sequence: Synthetic oligonucleotide
cuuagguacggaggcuuaa

SEQ ID NO: 925649 - RNA, 19 nt, Artificial Sequence
  Description of Artificial Sequence: Synthetic oligonucleotide
auucgcugcuccguuccaa

SEQ ID NO: 925650 - RNA, 19 nt, Artificial Sequence
  Description of Artificial Sequence: Synthetic oligonucleotide
cuuccgaucuucagggauu

SEQ ID NO: 925651 - RNA, 19 nt, Artificial Sequence
  Description of Artificial Sequence: Synthetic oligonucleotide
gcuaggauucgauauuguu

SEQ ID NO: 925652 - RNA, 19 nt, Artificial Sequence
  Description of Artificial Sequence: Synthetic oligonucleotide
ggcucauaugaccucaguu

SEQ ID NO: 925653 - RNA, 19 nt, Artificial Sequence
  Description of Artificial Sequence: Synthetic oligonucleotide
auuuugcgguuuggacaug

SEQ ID NO: 925654 - RNA, 19 nt, Artificial Sequence
  Description of Artificial Sequence: Synthetic oligonucleotide
aaaagucguuugggcucau

SEQ ID NO: 925655 - RNA, 19 nt, Artificial Sequence
  Description of Artificial Sequence: Synthetic oligonucleotide
guuccaacugugacauugu

SEQ ID NO: 925656 - RNA, 19 nt, Artificial Sequence
  Description of Artificial Sequence: Synthetic oligonucleotide
uacugggcccgaagacauu

SEQ ID NO: 925657 - RNA, 19 nt, Artificial Sequence
  Description of Artificial Sequence: Synthetic oligonucleotide
cagaguugcugacaucuuu

SEQ ID NO: 925658 - RNA, 19 nt, Artificial Sequence
  Description of Artificial Sequence: Synthetic oligonucleotide
caccugucgcccuccuuga

SEQ ID NO: 925659 - RNA, 19 nt, Artificial Sequence
  Description of Artificial Sequence: Synthetic oligonucleotide
gccaucccauacccuuuag

SEQ ID NO: 925660 - RNA, 19 nt, Artificial Sequence
  Description of Artificial Sequence: Synthetic oligonucleotide
guggaugcccaaaccgcaa

SEQ ID NO: 925661 - RNA, 19 nt, Artificial Sequence
  Description of Artificial Sequence: Synthetic oligonucleotide
guuaaacagugguccucau

SEQ ID NO: 925662 - RNA, 19 nt, Artificial Sequence
  Description of Artificial Sequence: Synthetic oligonucleotide
gcuuccgaucuucagggau

SEQ ID NO: 925663 - RNA, 19 nt, Artificial Sequence
  Description of Artificial Sequence: Synthetic oligonucleotide
ccgguaagaccgugauccc

SEQ ID NO: 925664 - RNA, 19 nt, Artificial Sequence
  Description of Artificial Sequence: Synthetic oligonucleotide
gcccaaaccgcaaggcuuc

SEQ ID NO: 925665 - RNA, 19 nt, Artificial Sequence
  Description of Artificial Sequence: Synthetic oligonucleotide
cagauucuguaggcguaga

SEQ ID NO: 925666 - RNA, 19 nt, Artificial Sequence
  Description of Artificial Sequence: Synthetic oligonucleotide
ccaucccauacccuuuaga

SEQ ID NO: 925667 - RNA, 19 nt, Artificial Sequence
  Description of Artificial Sequence: Synthetic oligonucleotide
gguauggaggcuguagauu

SEQ ID NO: 925668 - RNA, 19 nt, Artificial Sequence
  Description of Artificial Sequence: Synthetic oligonucleotide
gcugcuccguuccaacugu

SEQ ID NO: 925669 - RNA, 19 nt, Artificial Sequence
  Description of Artificial Sequence: Synthetic oligonucleotide
cgguaagaccgugaucccc

SEQ ID NO: 925670 - RNA, 19 nt, Artificial Sequence
  Description of Artificial Sequence: Synthetic oligonucleotide
cagacucuaaagcccuuuu

SEQ ID NO: 925671 - RNA, 19 nt, Artificial Sequence
  Description of Artificial Sequence: Synthetic oligonucleotide
gcgguuuggacaugauuau

SEQ ID NO: 925672 - RNA, 19 nt, Artificial Sequence
  Description of Artificial Sequence: Synthetic oligonucleotide
cuggaagaucuucguaguu

SEQ ID NO: 925673 - RNA, 19 nt, Artificial Sequence
  Description of Artificial Sequence: Synthetic oligonucleotide
agcuugcuaucuggggcuu

SEQ ID NO: 925674 - RNA, 19 nt, Artificial Sequence
  Description of Artificial Sequence: Synthetic oligonucleotide
ccgaagacauuguuucugu

SEQ ID NO: 925675 - RNA, 19 nt, Artificial Sequence
  Description of Artificial Sequence: Synthetic oligonucleotide
guguacguauaaggugcua

SEQ ID NO: 925676 - RNA, 19 nt, Artificial Sequence
  Description of Artificial Sequence: Synthetic oligonucleotide
ccuccgugaagaugaaacu

SEQ ID NO: 925677 - RNA, 19 nt, Artificial Sequence
  Description of Artificial Sequence: Synthetic oligonucleotide
uccgaucuucagggauuuu

SEQ ID NO: 925678 - RNA, 19 nt, Artificial Sequence
  Description of Artificial Sequence: Synthetic oligonucleotide
ccgugaagaugaaacucua

SEQ ID NO: 925679 - RNA, 19 nt, Artificial Sequence
  Description of Artificial Sequence: Synthetic oligonucleotide
ugucgcccuccuugaccuu

SEQ ID NO: 925680 - RNA, 19 nt, Artificial Sequence
  Description of Artificial Sequence: Synthetic oligonucleotide
ccuacuaaagagcgugcau

SEQ ID NO: 925681 - RNA, 19 nt, Artificial Sequence
  Description of Artificial Sequence: Synthetic oligonucleotide
ccaaaacccuuaaggucua

SEQ ID NO: 925682 - RNA, 19 nt, Artificial Sequence
  Description of Artificial Sequence: Synthetic oligonucleotide
gcuuagguacggaggcuua

SEQ ID NO: 925683 - RNA, 19 nt, Artificial Sequence
  Description of Artificial Sequence: Synthetic oligonucleotide
gggcucauaugaccucagu

SEQ ID NO: 925684 - RNA, 19 nt, Artificial Sequence
  Description of Artificial Sequence: Synthetic oligonucleotide
cugcaaccauggugucaaa

SEQ ID NO: 925685 - RNA, 19 nt, Artificial Sequence
  Description of Artificial Sequence: Synthetic oligonucleotide
gaucuacgucagaguuacu

SEQ ID NO: 925686 - RNA, 19 nt, Artificial Sequence
  Description of Artificial Sequence: Synthetic oligonucleotide
gcccacggaaacaaacaau

SEQ ID NO: 925687 - RNA, 19 nt, Artificial Sequence
  Description of Artificial Sequence: Synthetic oligonucleotide
cauugacaacugugccauu

SEQ ID NO: 925688 - RNA, 19 nt, Artificial Sequence
  Description of Artificial Sequence: Synthetic oligonucleotide
ccauacccuuuagaagaaa

SEQ ID NO: 925689 - RNA, 19 nt, Artificial Sequence
  Description of Artificial Sequence: Synthetic oligonucleotide
gggcccgaagacauuguuu

SEQ ID NO: 925690 - RNA, 19 nt, Artificial Sequence
  Description of Artificial Sequence: Synthetic oligonucleotide
cgauauuguugaggggucu

SEQ ID NO: 925691 - RNA, 19 nt, Artificial Sequence
  Description of Artificial Sequence: Synthetic oligonucleotide
ccaaaccgcaaggcuucua

SEQ ID NO: 925692 - RNA, 19 nt, Artificial Sequence
  Description of Artificial Sequence: Synthetic oligonucleotide
gcuugcuaucuggggcuuu

SEQ ID NO: 925693 - RNA, 19 nt, Artificial Sequence
  Description of Artificial Sequence: Synthetic oligonucleotide
cccaaaccgcaaggcuucu

SEQ ID NO: 925694 - RNA, 19 nt, Artificial Sequence
  Description of Artificial Sequence: Synthetic oligonucleotide
ccguuccaacugugacauu

SEQ ID NO: 925695 - RNA, 19 nt, Artificial Sequence
  Description of Artificial Sequence: Synthetic oligonucleotide
uaaaacaugauaaacccag

SEQ ID NO: 925696 - RNA, 19 nt, Artificial Sequence
  Description of Artificial Sequence: Synthetic oligonucleotide
uggaauacgacaaugacac

SEQ ID NO: 925697 - RNA, 19 nt, Artificial Sequence
  Description of Artificial Sequence: Synthetic oligonucleotide
uaaaacucuaccuaggaug

SEQ ID NO: 925698 - RNA, 19 nt, Artificial Sequence
  Description of Artificial Sequence: Synthetic oligonucleotide
auaacaaacucuuuaauga

SEQ ID NO: 925699 - RNA, 19 nt, Artificial Sequence
  Description of Artificial Sequence: Synthetic oligonucleotide
aauaaggcccaggagagcc

SEQ ID NO: 925700 - RNA, 19 nt, Artificial Sequence
  Description of Artificial Sequence: Synthetic oligonucleotide
aaugauaaaacucuaccua

SEQ ID NO: 925701 - RNA, 19 nt, Artificial Sequence
  Description of Artificial Sequence: Synthetic oligonucleotide
aaauuuaccacuuccuccu

SEQ ID NO: 925702 - RNA, 19 nt, Artificial Sequence
  Description of Artificial Sequence: Synthetic oligonucleotide
acacaacuaaagcacagcc

SEQ ID NO: 925703 - RNA, 19 nt, Artificial Sequence
  Description of Artificial Sequence: Synthetic oligonucleotide
aaauuaaaguuauggguca

SEQ ID NO: 925704 - RNA, 19 nt, Artificial Sequence
  Description of Artificial Sequence: Synthetic oligonucleotide
uuuauagccaaauguaacu

SEQ ID NO: 925705 - RNA, 19 nt, Artificial Sequence
  Description of Artificial Sequence: Synthetic oligonucleotide
cagaagaaaacucacagug

SEQ ID NO: 925706 - RNA, 19 nt, Artificial Sequence
  Description of Artificial Sequence: Synthetic oligonucleotide
uuuaaugagguuagcaaac

SEQ ID NO: 925707 - RNA, 19 nt, Artificial Sequence
  Description of Artificial Sequence: Synthetic oligonucleotide
aagaugaccgaccaggaga

SEQ ID NO: 925708 - RNA, 19 nt, Artificial Sequence
  Description of Artificial Sequence: Synthetic oligonucleotide
aaaacucuaccuaggaugg

SEQ ID NO: 925709 - RNA, 19 nt, Artificial Sequence
  Description of Artificial Sequence: Synthetic oligonucleotide
aggauuaaggcacggaagg

SEQ ID NO: 925710 - RNA, 19 nt, Artificial Sequence
  Description of Artificial Sequence: Synthetic oligonucleotide
aaauaaucgaugaagcuga

SEQ ID NO: 925711 - RNA, 19 nt, Artificial Sequence
  Description of Artificial Sequence: Synthetic oligonucleotide
aagcugaauaaauuaaagu

SEQ ID NO: 925712 - RNA, 19 nt, Artificial Sequence
  Description of Artificial Sequence: Synthetic oligonucleotide
augauaaaacucuaccuag

SEQ ID NO: 925713 - RNA, 19 nt, Artificial Sequence
  Description of Artificial Sequence: Synthetic oligonucleotide
ucaaugauaacaaacucuu

SEQ ID NO: 925714 - RNA, 19 nt, Artificial Sequence
  Description of Artificial Sequence: Synthetic oligonucleotide
agcugaauaaauuaaaguu

SEQ ID NO: 925715 - RNA, 19 nt, Artificial Sequence
  Description of Artificial Sequence: Synthetic oligonucleotide
auucucuccaucgagaagg

SEQ ID NO: 925716 - RNA, 19 nt, Artificial Sequence
  Description of Artificial Sequence: Synthetic oligonucleotide
ccaaauguaacucaaaccc

SEQ ID NO: 925717 - RNA, 19 nt, Artificial Sequence
  Description of Artificial Sequence: Synthetic oligonucleotide
acgacaaugacacgcuugc

SEQ ID NO: 925718 - RNA, 19 nt, Artificial Sequence
  Description of Artificial Sequence: Synthetic oligonucleotide
gaauacgacaaugacacgc

SEQ ID NO: 925719 - RNA, 19 nt, Artificial Sequence
  Description of Artificial Sequence: Synthetic oligonucleotide
ucacauaucggcacaugcg

SEQ ID NO: 925720 - RNA, 19 nt, Artificial Sequence
  Description of Artificial Sequence: Synthetic oligonucleotide
acccauaacaaacaacuag

SEQ ID NO: 925721 - RNA, 19 nt, Artificial Sequence
  Description of Artificial Sequence: Synthetic oligonucleotide
caaaguggcuuucacaggg

SEQ ID NO: 925722 - RNA, 19 nt, Artificial Sequence
  Description of Artificial Sequence: Synthetic oligonucleotide
gaagaaaacucacagugga

SEQ ID NO: 925723 - RNA, 19 nt, Artificial Sequence
  Description of Artificial Sequence: Synthetic oligonucleotide
uguccuguagccaagccug

SEQ ID NO: 925724 - RNA, 19 nt, Artificial Sequence
  Description of Artificial Sequence: Synthetic oligonucleotide
uuugaguaagaacuccuca

SEQ ID NO: 925725 - RNA, 19 nt, Artificial Sequence
  Description of Artificial Sequence: Synthetic oligonucleotide
cauauucauauggauaucg

SEQ ID NO: 925726 - RNA, 19 nt, Artificial Sequence
  Description of Artificial Sequence: Synthetic oligonucleotide
uuaaaacaugauaaaccca

SEQ ID NO: 925727 - RNA, 19 nt, Artificial Sequence
  Description of Artificial Sequence: Synthetic oligonucleotide
uuaaaguuaugggucaucc

SEQ ID NO: 925728 - RNA, 19 nt, Artificial Sequence
  Description of Artificial Sequence: Synthetic oligonucleotide
acuggugugauuuaccacu

SEQ ID NO: 925729 - RNA, 19 nt, Artificial Sequence
  Description of Artificial Sequence: Synthetic oligonucleotide
uuaaugaagcaguaaagua

SEQ ID NO: 925730 - RNA, 19 nt, Artificial Sequence
  Description of Artificial Sequence: Synthetic oligonucleotide
acucaaacccauaacaaac

SEQ ID NO: 925731 - RNA, 19 nt, Artificial Sequence
  Description of Artificial Sequence: Synthetic oligonucleotide
gaagcugaauaaauuaaag

SEQ ID NO: 925732 - RNA, 19 nt, Artificial Sequence
  Description of Artificial Sequence: Synthetic oligonucleotide
aguaagaacuccucaaccu

SEQ ID NO: 925733 - RNA, 19 nt, Artificial Sequence
  Description of Artificial Sequence: Synthetic oligonucleotide
ugauaaacccagaacauuu

SEQ ID NO: 925734 - RNA, 19 nt, Artificial Sequence
  Description of Artificial Sequence: Synthetic oligonucleotide
aaacaugauaaacccagaa

SEQ ID NO: 925735 - RNA, 19 nt, Artificial Sequence
  Description of Artificial Sequence: Synthetic oligonucleotide
agucaagcagccugcaucg

SEQ ID NO: 925736 - RNA, 19 nt, Artificial Sequence
  Description of Artificial Sequence: Synthetic oligonucleotide
accagagacuaauugggac

SEQ ID NO: 925737 - RNA, 19 nt, Artificial Sequence
  Description of Artificial Sequence: Synthetic oligonucleotide
aacuggugugauuuaccac

SEQ ID NO: 925738 - RNA, 19 nt, Artificial Sequence
  Description of Artificial Sequence: Synthetic oligonucleotide
ggaagguuagcuuaugucc

SEQ ID NO: 925739 - RNA, 19 nt, Artificial Sequence
  Description of Artificial Sequence: Synthetic oligonucleotide
uuuaggacauacagcucgg

SEQ ID NO: 925740 - RNA, 19 nt, Artificial Sequence
  Description of Artificial Sequence: Synthetic oligonucleotide
ugaagcugaauaaauuaaa

SEQ ID NO: 925741 - RNA, 19 nt, Artificial Sequence
  Description of Artificial Sequence: Synthetic oligonucleotide
uuuccaacaagauuuguuu

SEQ ID NO: 925742 - RNA, 19 nt, Artificial Sequence
  Description of Artificial Sequence: Synthetic oligonucleotide
aacucuuuaaugagguuag

SEQ ID NO: 925743 - RNA, 19 nt, Artificial Sequence
  Description of Artificial Sequence: Synthetic oligonucleotide
uguaacucaaacccauaac

SEQ ID NO: 925744 - RNA, 19 nt, Artificial Sequence
  Description of Artificial Sequence: Synthetic oligonucleotide
ugauuuaccacucccuguc

SEQ ID NO: 925745 - RNA, 19 nt, Artificial Sequence
  Description of Artificial Sequence: Synthetic oligonucleotide
uucacggcacccuugaugu

SEQ ID NO: 925746 - RNA, 19 nt, Artificial Sequence
  Description of Artificial Sequence: Synthetic oligonucleotide
gauaaaacucuaccuagga

SEQ ID NO: 925747 - RNA, 19 nt, Artificial Sequence
  Description of Artificial Sequence: Synthetic oligonucleotide
ugaguaagaacuccucaac

SEQ ID NO: 925748 - RNA, 19 nt, Artificial Sequence
  Description of Artificial Sequence: Synthetic oligonucleotide
aaucucuacaaaccagaga

SEQ ID NO: 925749 - RNA, 19 nt, Artificial Sequence
  Description of Artificial Sequence: Synthetic oligonucleotide
uagcuuauguccuguagcc

SEQ ID NO: 925750 - RNA, 19 nt, Artificial Sequence
  Description of Artificial Sequence: Synthetic oligonucleotide
gucuaugaagccaucaucc

SEQ ID NO: 925751 - RNA, 19 nt, Artificial Sequence
  Description of Artificial Sequence: Synthetic oligonucleotide
auugccaagguuuguaggu

SEQ ID NO: 925752 - RNA, 19 nt, Artificial Sequence
  Description of Artificial Sequence: Synthetic oligonucleotide
uccuggaaugauaaaacuc

SEQ ID NO: 925753 - RNA, 19 nt, Artificial Sequence
  Description of Artificial Sequence: Synthetic oligonucleotide
uuuaccacuuccuccugag

SEQ ID NO: 925754 - RNA, 19 nt, Artificial Sequence
  Description of Artificial Sequence: Synthetic oligonucleotide
gauuaaggcacggaaggcc

SEQ ID NO: 925755 - RNA, 19 nt, Artificial Sequence
  Description of Artificial Sequence: Synthetic oligonucleotide
uuacuucaaaauuuaccac

SEQ ID NO: 925756 - RNA, 19 nt, Artificial Sequence
  Description of Artificial Sequence: Synthetic oligonucleotide
aggauggcaguauuuugac

SEQ ID NO: 925757 - RNA, 19 nt, Artificial Sequence
  Description of Artificial Sequence: Synthetic oligonucleotide
uuugccuauucuuaucccu

SEQ ID NO: 925758 - RNA, 19 nt, Artificial Sequence
  Description of Artificial Sequence: Synthetic oligonucleotide
gagacugucccuaagaaaa

SEQ ID NO: 925759 - RNA, 19 nt, Artificial Sequence
  Description of Artificial Sequence: Synthetic oligonucleotide
aaugacacgcuugccauca

SEQ ID NO: 925760 - RNA, 19 nt, Artificial Sequence
  Description of Artificial Sequence: Synthetic oligonucleotide
agagguaguuccuggaaug

SEQ ID NO: 925761 - RNA, 19 nt, Artificial Sequence
  Description of Artificial Sequence: Synthetic oligonucleotide
cauaucggcacaugcgagg

SEQ ID NO: 925762 - RNA, 19 nt, Artificial Sequence
  Description of Artificial Sequence: Synthetic oligonucleotide
uacgacaaugacacgcuug

SEQ ID NO: 925763 - RNA, 19 nt, Artificial Sequence
  Description of Artificial Sequence: Synthetic oligonucleotide
caucaguagguacaauagg

SEQ ID NO: 925764 - RNA, 19 nt, Artificial Sequence
  Description of Artificial Sequence: Synthetic oligonucleotide
cacaacuaaagcacagccc

SEQ ID NO: 925765 - RNA, 19 nt, Artificial Sequence
  Description of Artificial Sequence: Synthetic oligonucleotide
auuuugacuuaaugaagca

SEQ ID NO: 925766 - RNA, 19 nt, Artificial Sequence
  Description of Artificial Sequence: Synthetic oligonucleotide
ugagaaagucuacagucau

SEQ ID NO: 925767 - RNA, 19 nt, Artificial Sequence
  Description of Artificial Sequence: Synthetic oligonucleotide
cuuugaguagcagcaaucc

SEQ ID NO: 925768 - RNA, 19 nt, Artificial Sequence
  Description of Artificial Sequence: Synthetic oligonucleotide
cucacauaucggcacaugc

SEQ ID NO: 925769 - RNA, 19 nt, Artificial Sequence
  Description of Artificial Sequence: Synthetic oligonucleotide
aauacgacaaugacacgcu

SEQ ID NO: 925770 - RNA, 19 nt, Artificial Sequence
  Description of Artificial Sequence: Synthetic oligonucleotide
aaagucuugaggaauuaaa

SEQ ID NO: 925771 - RNA, 19 nt, Artificial Sequence
  Description of Artificial Sequence: Synthetic oligonucleotide
agcggagcaaagaugaccg

SEQ ID NO: 925772 - RNA, 19 nt, Artificial Sequence
  Description of Artificial Sequence: Synthetic oligonucleotide
ucuuucuccguguaccgca

SEQ ID NO: 925773 - RNA, 19 nt, Artificial Sequence
  Description of Artificial Sequence: Synthetic oligonucleotide
uugccuauucuuaucccug

SEQ ID NO: 925774 - RNA, 19 nt, Artificial Sequence
  Description of Artificial Sequence: Synthetic oligonucleotide
agacuggcauuucaggaag

SEQ ID NO: 925775 - RNA, 19 nt, Artificial Sequence
  Description of Artificial Sequence: Synthetic oligonucleotide
gguacgaaacuucuucagg

SEQ ID NO: 925776 - RNA, 19 nt, Artificial Sequence
  Description of Artificial Sequence: Synthetic oligonucleotide
aucaguagguacaauaggu

SEQ ID NO: 925777 - RNA, 19 nt, Artificial Sequence
  Description of Artificial Sequence: Synthetic oligonucleotide
guuugggguauucauugcc

SEQ ID NO: 925778 - RNA, 19 nt, Artificial Sequence
  Description of Artificial Sequence: Synthetic oligonucleotide
acaggauuaaggcacggaa

SEQ ID NO: 925779 - RNA, 19 nt, Artificial Sequence
  Description of Artificial Sequence: Synthetic oligonucleotide
ugacugagcuccuagcgcu

SEQ ID NO: 925780 - RNA, 19 nt, Artificial Sequence
  Description of Artificial Sequence: Synthetic oligonucleotide
aucggcacaugcgagggcc

SEQ ID NO: 925781 - RNA, 19 nt, Artificial Sequence
  Description of Artificial Sequence: Synthetic oligonucleotide
uucagauucucuccaucga

SEQ ID NO: 925782 - RNA, 19 nt, Artificial Sequence
  Description of Artificial Sequence: Synthetic oligonucleotide
cacgcuugccaucaguagg

SEQ ID NO: 925783 - RNA, 19 nt, Artificial Sequence
  Description of Artificial Sequence: Synthetic oligonucleotide
ugagguuagcaaacuugcc

SEQ ID NO: 925784 - RNA, 19 nt, Artificial Sequence
  Description of Artificial Sequence: Synthetic oligonucleotide
caggauuaaggcacggaag

SEQ ID NO: 925785 - RNA, 19 nt, Artificial Sequence
  Description of Artificial Sequence: Synthetic oligonucleotide
cuugccaucaguagguaca

SEQ ID NO: 925786 - RNA, 19 nt, Artificial Sequence
  Description of Artificial Sequence: Synthetic oligonucleotide
auaggcugcacacaacuaa

SEQ ID NO: 925787 - RNA, 19 nt, Artificial Sequence
  Description of Artificial Sequence: Synthetic oligonucleotide
uugguacgaaacuucuuca

SEQ ID NO: 925788 - RNA, 19 nt, Artificial Sequence
  Description of Artificial Sequence: Synthetic oligonucleotide
ugcacacaacuaaagcaca

SEQ ID NO: 925789 - RNA, 19 nt, Artificial Sequence
  Description of Artificial Sequence: Synthetic oligonucleotide
auuaaaguuaugggucauc

SEQ ID NO: 925790 - RNA, 19 nt, Artificial Sequence
  Description of Artificial Sequence: Synthetic oligonucleotide
augacaaggggagcugucc

SEQ ID NO: 925791 - RNA, 19 nt, Artificial Sequence
  Description of Artificial Sequence: Synthetic oligonucleotide
aguaaaagucuugaggaau

SEQ ID NO: 925792 - RNA, 19 nt, Artificial Sequence
  Description of Artificial Sequence: Synthetic oligonucleotide
aacucuaccuaggauggca

SEQ ID NO: 925793 - RNA, 19 nt, Artificial Sequence
  Description of Artificial Sequence: Synthetic oligonucleotide
ugccgaauaaggcccagga

SEQ ID NO: 925794 - RNA, 19 nt, Artificial Sequence
  Description of Artificial Sequence: Synthetic oligonucleotide
ucaguagguacaauagguu

SEQ ID NO: 925795 - RNA, 19 nt, Artificial Sequence
  Description of Artificial Sequence: Synthetic oligonucleotide
ugugcaaguucacggcacc

SEQ ID NO: 925796 - RNA, 19 nt, Artificial Sequence
  Description of Artificial Sequence: Synthetic oligonucleotide
uacagcucgggguagugga

SEQ ID NO: 925797 - RNA, 19 nt, Artificial Sequence
  Description of Artificial Sequence: Synthetic oligonucleotide
acaacuagccaucuucaau

SEQ ID NO: 925798 - RNA, 19 nt, Artificial Sequence
  Description of Artificial Sequence: Synthetic oligonucleotide
aaggggagcuguccagagg

SEQ ID NO: 925799 - RNA, 19 nt, Artificial Sequence
  Description of Artificial Sequence: Synthetic oligonucleotide
uaucggcagucaaugauaa

SEQ ID NO: 925800 - RNA, 19 nt, Artificial Sequence
  Description of Artificial Sequence: Synthetic oligonucleotide
cuucaauaucacugauucc

SEQ ID NO: 925801 - RNA, 19 nt, Artificial Sequence
  Description of Artificial Sequence: Synthetic oligonucleotide
cuucaggcgacuauacauc

SEQ ID NO: 925802 - RNA, 19 nt, Artificial Sequence
  Description of Artificial Sequence: Synthetic oligonucleotide
cauuggucgguaacugggg

SEQ ID NO: 925803 - RNA, 19 nt, Artificial Sequence
  Description of Artificial Sequence: Synthetic oligonucleotide
acuuugaguagcagcaauc

SEQ ID NO: 925804 - RNA, 19 nt, Artificial Sequence
  Description of Artificial Sequence: Synthetic oligonucleotide
ugucacuucucuccccuca

SEQ ID NO: 925805 - RNA, 19 nt, Artificial Sequence
  Description of Artificial Sequence: Synthetic oligonucleotide
auaucggcacaugcgaggg

SEQ ID NO: 925806 - RNA, 19 nt, Artificial Sequence
  Description of Artificial Sequence: Synthetic oligonucleotide
ucuggugcaggcucuuacc

SEQ ID NO: 925807 - RNA, 19 nt, Artificial Sequence
  Description of Artificial Sequence: Synthetic oligonucleotide
acaugcgagggccucuuuc

SEQ ID NO: 925808 - RNA, 19 nt, Artificial Sequence
  Description of Artificial Sequence: Synthetic oligonucleotide
gacuaauugggacacauuu

SEQ ID NO: 925809 - RNA, 19 nt, Artificial Sequence
  Description of Artificial Sequence: Synthetic oligonucleotide
caaauguaacucaaaccca

SEQ ID NO: 925810 - RNA, 19 nt, Artificial Sequence
  Description of Artificial Sequence: Synthetic oligonucleotide
aaacucuaccuaggauggc

SEQ ID NO: 925811 - RNA, 19 nt, Artificial Sequence
  Description of Artificial Sequence: Synthetic oligonucleotide
aacaacuagccaucuucaa

SEQ ID NO: 925812 - RNA, 19 nt, Artificial Sequence
  Description of Artificial Sequence: Synthetic oligonucleotide
aaguggcuuucacagggga

SEQ ID NO: 925813 - RNA, 19 nt, Artificial Sequence
  Description of Artificial Sequence: Synthetic oligonucleotide
aaaagucuugaggaauuaa

SEQ ID NO: 925814 - RNA, 19 nt, Artificial Sequence
  Description of Artificial Sequence: Synthetic oligonucleotide
ucccucgagagccucaccu

SEQ ID NO: 925815 - RNA, 19 nt, Artificial Sequence
  Description of Artificial Sequence: Synthetic oligonucleotide
gagauguucccucgagagc

SEQ ID NO: 925816 - RNA, 19 nt, Artificial Sequence
  Description of Artificial Sequence: Synthetic oligonucleotide
aguuaugggucauccacaa

SEQ ID NO: 925817 - RNA, 19 nt, Artificial Sequence
  Description of Artificial Sequence: Synthetic oligonucleotide
aaaaccuggcuagacccca

SEQ ID NO: 925818 - RNA, 19 nt, Artificial Sequence
  Description of Artificial Sequence: Synthetic oligonucleotide
ucucucacauaucggcaca

SEQ ID NO: 925819 - RNA, 19 nt, Artificial Sequence
  Description of Artificial Sequence: Synthetic oligonucleotide
acuagccaucuucaauauc

SEQ ID NO: 925820 - RNA, 19 nt, Artificial Sequence
  Description of Artificial Sequence: Synthetic oligonucleotide
gauuuaccacucccugucc

SEQ ID NO: 925821 - RNA, 19 nt, Artificial Sequence
  Description of Artificial Sequence: Synthetic oligonucleotide
ggugugauuuaccacuccc

SEQ ID NO: 925822 - RNA, 19 nt, Artificial Sequence
  Description of Artificial Sequence: Synthetic oligonucleotide
aaaguggcuuucacagggg

SEQ ID NO: 925823 - RNA, 19 nt, Artificial Sequence
  Description of Artificial Sequence: Synthetic oligonucleotide
uacgaaacuucuucagguc

SEQ ID NO: 925824 - RNA, 19 nt, Artificial Sequence
  Description of Artificial Sequence: Synthetic oligonucleotide
ugggguauucauugccaag

SEQ ID NO: 925825 - RNA, 19 nt, Artificial Sequence
  Description of Artificial Sequence: Synthetic oligonucleotide
aaaacaugauaaacccaga

SEQ ID NO: 925826 - RNA, 19 nt, Artificial Sequence
  Description of Artificial Sequence: Synthetic oligonucleotide
cuuauguccuguagccaag

SEQ ID NO: 925827 - RNA, 19 nt, Artificial Sequence
  Description of Artificial Sequence: Synthetic oligonucleotide
uggcuucaaagcuucuuca

SEQ ID NO: 925828 - RNA, 19 nt, Artificial Sequence
  Description of Artificial Sequence: Synthetic oligonucleotide
gaagaggagucaagcagcc

SEQ ID NO: 925829 - RNA, 19 nt, Artificial Sequence
  Description of Artificial Sequence: Synthetic oligonucleotide
aauuaaaguuaugggucau

SEQ ID NO: 925830 - RNA, 19 nt, Artificial Sequence
  Description of Artificial Sequence: Synthetic oligonucleotide
aaguuaugggucauccaca

SEQ ID NO: 925831 - RNA, 19 nt, Artificial Sequence
  Description of Artificial Sequence: Synthetic oligonucleotide
auaaacccagaacauuuua

SEQ ID NO: 925832 - RNA, 19 nt, Artificial Sequence
  Description of Artificial Sequence: Synthetic oligonucleotide
agugagacuggcauuucag

SEQ ID NO: 925833 - RNA, 19 nt, Artificial Sequence
  Description of Artificial Sequence: Synthetic oligonucleotide
uaggcugcacacaacuaaa

SEQ ID NO: 925834 - RNA, 19 nt, Artificial Sequence
  Description of Artificial Sequence: Synthetic oligonucleotide
cuccguguaccgcagcugg

SEQ ID NO: 925835 - RNA, 19 nt, Artificial Sequence
  Description of Artificial Sequence: Synthetic oligonucleotide
uggagauguucccucgaga

SEQ ID NO: 925836 - RNA, 19 nt, Artificial Sequence
  Description of Artificial Sequence: Synthetic oligonucleotide
uaaugagguuagcaaacuu

SEQ ID NO: 925837 - RNA, 19 nt, Artificial Sequence
  Description of Artificial Sequence: Synthetic oligonucleotide
caacuagccaucuucaaua

SEQ ID NO: 925838 - RNA, 19 nt, Artificial Sequence
  Description of Artificial Sequence: Synthetic oligonucleotide
cagcaaucccaguucacag

SEQ ID NO: 925839 - RNA, 19 nt, Artificial Sequence
  Description of Artificial Sequence: Synthetic oligonucleotide
ccuaucuuugguauuuggc

SEQ ID NO: 925840 - RNA, 19 nt, Artificial Sequence
  Description of Artificial Sequence: Synthetic oligonucleotide
ccaucaguagguacaauag

SEQ ID NO: 925841 - RNA, 19 nt, Artificial Sequence
  Description of Artificial Sequence: Synthetic oligonucleotide
guuugccuauucuuauccc

SEQ ID NO: 925842 - RNA, 19 nt, Artificial Sequence
  Description of Artificial Sequence: Synthetic oligonucleotide
ugccuauucuuaucccugc

SEQ ID NO: 925843 - RNA, 19 nt, Artificial Sequence
  Description of Artificial Sequence: Synthetic oligonucleotide
agggucugccgaauaaggc

SEQ ID NO: 925844 - RNA, 19 nt, Artificial Sequence
  Description of Artificial Sequence: Synthetic oligonucleotide
cucgccaugcacgaagggg

SEQ ID NO: 925845 - RNA, 19 nt, Artificial Sequence
  Description of Artificial Sequence: Synthetic oligonucleotide
uccagccuaucuuugguau

SEQ ID NO: 925846 - RNA, 19 nt, Artificial Sequence
  Description of Artificial Sequence: Synthetic oligonucleotide
cuuaaugaagcaguaaagu

SEQ ID NO: 925847 - RNA, 19 nt, Artificial Sequence
  Description of Artificial Sequence: Synthetic oligonucleotide
caucgauugccaagguuug

SEQ ID NO: 925848 - RNA, 19 nt, Artificial Sequence
  Description of Artificial Sequence: Synthetic oligonucleotide
cacauaucggcacaugcga

SEQ ID NO: 925849 - RNA, 19 nt, Artificial Sequence
  Description of Artificial Sequence: Synthetic oligonucleotide
auuaaggcacggaaggccu

SEQ ID NO: 925850 - RNA, 19 nt, Artificial Sequence
  Description of Artificial Sequence: Synthetic oligonucleotide
uuaggacauacagcucggg

SEQ ID NO: 925851 - RNA, 19 nt, Artificial Sequence
  Description of Artificial Sequence: Synthetic oligonucleotide
uucuccguguaccgcagcu

SEQ ID NO: 925852 - RNA, 19 nt, Artificial Sequence
  Description of Artificial Sequence: Synthetic oligonucleotide
guaacuggugugauuuacc

SEQ ID NO: 925853 - RNA, 19 nt, Artificial Sequence
  Description of Artificial Sequence: Synthetic oligonucleotide
auuuaccacuuccuccuga

SEQ ID NO: 925854 - RNA, 19 nt, Artificial Sequence
  Description of Artificial Sequence: Synthetic oligonucleotide
gagcaaagaugaccgacca

SEQ ID NO: 925855 - RNA, 19 nt, Artificial Sequence
  Description of Artificial Sequence: Synthetic oligonucleotide
guauucauugccaagccua

SEQ ID NO: 925856 - RNA, 19 nt, Artificial Sequence
  Description of Artificial Sequence: Synthetic oligonucleotide
acacgcuugccaucaguag

SEQ ID NO: 925857 - RNA, 19 nt, Artificial Sequence
  Description of Artificial Sequence: Synthetic oligonucleotide
ucauugccaagccuaucuc

SEQ ID NO: 925858 - RNA, 19 nt, Artificial Sequence
  Description of Artificial Sequence: Synthetic oligonucleotide
agcaaucccaguucacagu

SEQ ID NO: 925859 - RNA, 19 nt, Artificial Sequence
  Description of Artificial Sequence: Synthetic oligonucleotide
ucaagcagccugcaucgau

SEQ ID NO: 925860 - RNA, 19 nt, Artificial Sequence
  Description of Artificial Sequence: Synthetic oligonucleotide
cuagcgcuguccacaacag

SEQ ID NO: 925861 - RNA, 19 nt, Artificial Sequence
  Description of Artificial Sequence: Synthetic oligonucleotide
agcgcuguccacaacaggu

SEQ ID NO: 925862 - RNA, 19 nt, Artificial Sequence
  Description of Artificial Sequence: Synthetic oligonucleotide
gggucugccgaauaaggcc

SEQ ID NO: 925863 - RNA, 19 nt, Artificial Sequence
  Description of Artificial Sequence: Synthetic oligonucleotide
guuagcaaacuugccauuc

SEQ ID NO: 925864 - RNA, 19 nt, Artificial Sequence
  Description of Artificial Sequence: Synthetic oligonucleotide
ucuccaucgagaaggucua

SEQ ID NO: 925865 - RNA, 19 nt, Artificial Sequence
  Description of Artificial Sequence: Synthetic oligonucleotide
agucuacagucaucuguag

SEQ ID NO: 925866 - RNA, 19 nt, Artificial Sequence
  Description of Artificial Sequence: Synthetic oligonucleotide
aagaggacugaaaugucuu

SEQ ID NO: 925867 - RNA, 19 nt, Artificial Sequence
  Description of Artificial Sequence: Synthetic oligonucleotide
augaccgaccaggagacug

SEQ ID NO: 925868 - RNA, 19 nt, Artificial Sequence
  Description of Artificial Sequence: Synthetic oligonucleotide
cagagacuaauugggacac

SEQ ID NO: 925869 - RNA, 19 nt, Artificial Sequence
  Description of Artificial Sequence: Synthetic oligonucleotide
aggcucgccaugcacgaag

SEQ ID NO: 925870 - RNA, 19 nt, Artificial Sequence
  Description of Artificial Sequence: Synthetic oligonucleotide
aucgaugaagcugaauaaa

SEQ ID NO: 925871 - RNA, 19 nt, Artificial Sequence
  Description of Artificial Sequence: Synthetic oligonucleotide
uuauguccuguagccaagc

SEQ ID NO: 925872 - RNA, 19 nt, Artificial Sequence
  Description of Artificial Sequence: Synthetic oligonucleotide
uugggguauucauugccaa

SEQ ID NO: 925873 - RNA, 19 nt, Artificial Sequence
  Description of Artificial Sequence: Synthetic oligonucleotide
uggugugauuuaccacucc

SEQ ID NO: 925874 - RNA, 19 nt, Artificial Sequence
  Description of Artificial Sequence: Synthetic oligonucleotide
ucuuaucccugccccauuu

SEQ ID NO: 925875 - RNA, 19 nt, Artificial Sequence
  Description of Artificial Sequence: Synthetic oligonucleotide
uccaucgagaaggucuaug

SEQ ID NO: 925876 - RNA, 19 nt, Artificial Sequence
  Description of Artificial Sequence: Synthetic oligonucleotide
aacucacaguggaauacga

SEQ ID NO: 925877 - RNA, 19 nt, Artificial Sequence
  Description of Artificial Sequence: Synthetic oligonucleotide
ugcugcccggaaauguuga

SEQ ID NO: 925878 - RNA, 19 nt, Artificial Sequence
  Description of Artificial Sequence: Synthetic oligonucleotide
aguagguacaauagguuuu

SEQ ID NO: 925879 - RNA, 19 nt, Artificial Sequence
  Description of Artificial Sequence: Synthetic oligonucleotide
gggguauucauugccaagc

SEQ ID NO: 925880 - RNA, 19 nt, Artificial Sequence
  Description of Artificial Sequence: Synthetic oligonucleotide
gaagguuagcuuauguccu

SEQ ID NO: 925881 - RNA, 19 nt, Artificial Sequence
  Description of Artificial Sequence: Synthetic oligonucleotide
ucccugucccucaaauuaa

SEQ ID NO: 925882 - RNA, 19 nt, Artificial Sequence
  Description of Artificial Sequence: Synthetic oligonucleotide
aucggcagucaaugauaac

SEQ ID NO: 925883 - RNA, 19 nt, Artificial Sequence
  Description of Artificial Sequence: Synthetic oligonucleotide
gacuauacaucucucuuuu

SEQ ID NO: 925884 - RNA, 19 nt, Artificial Sequence
  Description of Artificial Sequence: Synthetic oligonucleotide
ucaugacaggcggccaggg

SEQ ID NO: 925885 - RNA, 19 nt, Artificial Sequence
  Description of Artificial Sequence: Synthetic oligonucleotide
cuuucuccguguaccgcag

SEQ ID NO: 925886 - RNA, 19 nt, Artificial Sequence
  Description of Artificial Sequence: Synthetic oligonucleotide
cagcggagcaaagaugacc

SEQ ID NO: 925887 - RNA, 19 nt, Artificial Sequence
  Description of Artificial Sequence: Synthetic oligonucleotide
cacugauucccuccccacc

SEQ ID NO: 925888 - RNA, 19 nt, Artificial Sequence
  Description of Artificial Sequence: Synthetic oligonucleotide
ugcaucgauugccaagguu

SEQ ID NO: 925889 - RNA, 19 nt, Artificial Sequence
  Description of Artificial Sequence: Synthetic oligonucleotide
ucuugguacgaaacuucuu

SEQ ID NO: 925890 - RNA, 19 nt, Artificial Sequence
  Description of Artificial Sequence: Synthetic oligonucleotide
auaaggcccaggagagccc

SEQ ID NO: 925891 - RNA, 19 nt, Artificial Sequence
  Description of Artificial Sequence: Synthetic oligonucleotide
cuguagccaagccuggauc

SEQ ID NO: 925892 - RNA, 19 nt, Artificial Sequence
  Description of Artificial Sequence: Synthetic oligonucleotide
ucauauucauauggauauc

SEQ ID NO: 925893 - RNA, 19 nt, Artificial Sequence
  Description of Artificial Sequence: Synthetic oligonucleotide
aguggaguuugggguauuc

SEQ ID NO: 925894 - RNA, 19 nt, Artificial Sequence
  Description of Artificial Sequence: Synthetic oligonucleotide
aauguaacucaaacccaua

SEQ ID NO: 925895 - RNA, 19 nt, Artificial Sequence
  Description of Artificial Sequence: Synthetic oligonucleotide
gggaagguuagcuuauguc

SEQ ID NO: 925896 - RNA, 19 nt, Artificial Sequence
  Description of Artificial Sequence: Synthetic oligonucleotide
aaaacaugcuggagcugca

SEQ ID NO: 925897 - RNA, 19 nt, Artificial Sequence
  Description of Artificial Sequence: Synthetic oligonucleotide
caaagaugaccgaccagga

SEQ ID NO: 925898 - RNA, 19 nt, Artificial Sequence
  Description of Artificial Sequence: Synthetic oligonucleotide
cuggcuagaccccagcgga

SEQ ID NO: 925899 - RNA, 19 nt, Artificial Sequence
  Description of Artificial Sequence: Synthetic oligonucleotide
caugcuggagcugcacggg

SEQ ID NO: 925900 - RNA, 19 nt, Artificial Sequence
  Description of Artificial Sequence: Synthetic oligonucleotide
caugauaaacccagaacau

SEQ ID NO: 925901 - RNA, 19 nt, Artificial Sequence
  Description of Artificial Sequence: Synthetic oligonucleotide
ccuauucuuaucccugccc

SEQ ID NO: 925902 - RNA, 19 nt, Artificial Sequence
  Description of Artificial Sequence: Synthetic oligonucleotide
ucgauugccaagguuugua

SEQ ID NO: 925903 - RNA, 19 nt, Artificial Sequence
  Description of Artificial Sequence: Synthetic oligonucleotide
caugcgagggccucuuuca

SEQ ID NO: 925904 - RNA, 19 nt, Artificial Sequence
  Description of Artificial Sequence: Synthetic oligonucleotide
ucaugacaaggggagcugu

SEQ ID NO: 925905 - RNA, 19 nt, Artificial Sequence
  Description of Artificial Sequence: Synthetic oligonucleotide
cucccugucccucaaauua

SEQ ID NO: 925906 - RNA, 19 nt, Artificial Sequence
  Description of Artificial Sequence: Synthetic oligonucleotide
cuggugugauuuaccacuc

SEQ ID NO: 925907 - RNA, 19 nt, Artificial Sequence
  Description of Artificial Sequence: Synthetic oligonucleotide
gaauaaggcccaggagagc

SEQ ID NO: 925908 - RNA, 19 nt, Artificial Sequence
  Description of Artificial Sequence: Synthetic oligonucleotide
agcuccuagcgcuguccac

SEQ ID NO: 925909 - RNA, 19 nt, Artificial Sequence
  Description of Artificial Sequence: Synthetic oligonucleotide
ggguauucauugccaagcc

SEQ ID NO: 925910 - RNA, 19 nt, Artificial Sequence
  Description of Artificial Sequence: Synthetic oligonucleotide
aauaggcugcacacaacua

SEQ ID NO: 925911 - RNA, 19 nt, Artificial Sequence
  Description of Artificial Sequence: Synthetic oligonucleotide
ugcgagggccucuuucaga

SEQ ID NO: 925912 - RNA, 19 nt, Artificial Sequence
  Description of Artificial Sequence: Synthetic oligonucleotide
acagguuugccuauucuua

SEQ ID NO: 925913 - RNA, 19 nt, Artificial Sequence
  Description of Artificial Sequence: Synthetic oligonucleotide
acgaaggggucuccucauc

SEQ ID NO: 925914 - RNA, 19 nt, Artificial Sequence
  Description of Artificial Sequence: Synthetic oligonucleotide
gucugggaagguuagcuua

SEQ ID NO: 925915 - RNA, 19 nt, Artificial Sequence
  Description of Artificial Sequence: Synthetic oligonucleotide
uggcuagaccccagcggag

SEQ ID NO: 925916 - RNA, 19 nt, Artificial Sequence
  Description of Artificial Sequence: Synthetic oligonucleotide
auaucggcagucaaugaua

SEQ ID NO: 925917 - RNA, 19 nt, Artificial Sequence
  Description of Artificial Sequence: Synthetic oligonucleotide
ucucacauaucggcacaug

SEQ ID NO: 925918 - RNA, 19 nt, Artificial Sequence
  Description of Artificial Sequence: Synthetic oligonucleotide
ggucugccgaauaaggccc

SEQ ID NO: 925919 - RNA, 19 nt, Artificial Sequence
  Description of Artificial Sequence: Synthetic oligonucleotide
uaucucuuucucucacaua

SEQ ID NO: 925920 - RNA, 19 nt, Artificial Sequence
  Description of Artificial Sequence: Synthetic oligonucleotide
acucuaccuaggauggcag

SEQ ID NO: 925921 - RNA, 19 nt, Artificial Sequence
  Description of Artificial Sequence: Synthetic oligonucleotide
ggacacauuucaacacugg

SEQ ID NO: 925922 - RNA, 19 nt, Artificial Sequence
  Description of Artificial Sequence: Synthetic oligonucleotide
uaucggcacaugcgagggc

SEQ ID NO: 925923 - RNA, 19 nt, Artificial Sequence
  Description of Artificial Sequence: Synthetic oligonucleotide
gcuuauguccuguagccaa

SEQ ID NO: 925924 - RNA, 19 nt, Artificial Sequence
  Description of Artificial Sequence: Synthetic oligonucleotide
cucgggguaguggaguuug

SEQ ID NO: 925925 - RNA, 19 nt, Artificial Sequence
  Description of Artificial Sequence: Synthetic oligonucleotide
cucaugacaggcggccagg

SEQ ID NO: 925926 - RNA, 19 nt, Artificial Sequence
  Description of Artificial Sequence: Synthetic oligonucleotide
guguaccgcagcuggcucc

SEQ ID NO: 925927 - RNA, 19 nt, Artificial Sequence
  Description of Artificial Sequence: Synthetic oligonucleotide
augcgagggccucuuucag

SEQ ID NO: 925928 - RNA, 19 nt, Artificial Sequence
  Description of Artificial Sequence: Synthetic oligonucleotide
cacccuugaugugaccucc

SEQ ID NO: 925929 - RNA, 19 nt, Artificial Sequence
  Description of Artificial Sequence: Synthetic oligonucleotide
aauaaucgaugaagcugaa

SEQ ID NO: 925930 - RNA, 19 nt, Artificial Sequence
  Description of Artificial Sequence: Synthetic oligonucleotide
ggaauacgacaaugacacg

SEQ ID NO: 925931 - RNA, 19 nt, Artificial Sequence
  Description of Artificial Sequence: Synthetic oligonucleotide
uccguguaccgcagcuggc

SEQ ID NO: 925932 - RNA, 19 nt, Artificial Sequence
  Description of Artificial Sequence: Synthetic oligonucleotide
cugcacgggaagaggaguc

SEQ ID NO: 925933 - RNA, 19 nt, Artificial Sequence
  Description of Artificial Sequence: Synthetic oligonucleotide
ugcacgaaggggucuccuc

SEQ ID NO: 925934 - RNA, 19 nt, Artificial Sequence
  Description of Artificial Sequence: Synthetic oligonucleotide
gacaggauuaaggcacgga

SEQ ID NO: 925935 - RNA, 19 nt, Artificial Sequence
  Description of Artificial Sequence: Synthetic oligonucleotide
agcagcaaucccaguucac

SEQ ID NO: 925936 - RNA, 19 nt, Artificial Sequence
  Description of Artificial Sequence: Synthetic oligonucleotide
uguaccgcagcuggcuccu

SEQ ID NO: 925937 - RNA, 19 nt, Artificial Sequence
  Description of Artificial Sequence: Synthetic oligonucleotide
ggagcuguccagaggcucg

SEQ ID NO: 925938 - RNA, 19 nt, Artificial Sequence
  Description of Artificial Sequence: Synthetic oligonucleotide
ugcacgggaagaggaguca

SEQ ID NO: 925939 - RNA, 19 nt, Artificial Sequence
  Description of Artificial Sequence: Synthetic oligonucleotide
gacuuugaguagcagcaau

SEQ ID NO: 925940 - RNA, 19 nt, Artificial Sequence
  Description of Artificial Sequence: Synthetic oligonucleotide
cucaugacaaggggagcug

SEQ ID NO: 925941 - RNA, 19 nt, Artificial Sequence
  Description of Artificial Sequence: Synthetic oligonucleotide
gagacuaauugggacacau

SEQ ID NO: 925942 - RNA, 19 nt, Artificial Sequence
  Description of Artificial Sequence: Synthetic oligonucleotide
auaaucgaugaagcugaau

SEQ ID NO: 925943 - RNA, 19 nt, Artificial Sequence
  Description of Artificial Sequence: Synthetic oligonucleotide
gacacgcuugccaucagua

SEQ ID NO: 925944 - RNA, 19 nt, Artificial Sequence
  Description of Artificial Sequence: Synthetic oligonucleotide
uaccuaggauggcaguauu

SEQ ID NO: 925945 - RNA, 19 nt, Artificial Sequence
  Description of Artificial Sequence: Synthetic oligonucleotide
caaugacacgcuugccauc

SEQ ID NO: 925946 - RNA, 19 nt, Artificial Sequence
  Description of Artificial Sequence: Synthetic oligonucleotide
gugcauuggucgguaacug

SEQ ID NO: 925947 - RNA, 19 nt, Artificial Sequence
  Description of Artificial Sequence: Synthetic oligonucleotide
gccaucaguagguacaaua

SEQ ID NO: 925948 - RNA, 19 nt, Artificial Sequence
  Description of Artificial Sequence: Synthetic oligonucleotide
cuggugcaggcucuuacca

SEQ ID NO: 925949 - RNA, 19 nt, Artificial Sequence
  Description of Artificial Sequence: Synthetic oligonucleotide
gugauuuaccacucccugu

SEQ ID NO: 925950 - RNA, 19 nt, Artificial Sequence
  Description of Artificial Sequence: Synthetic oligonucleotide
cccagcggagcaaagauga

SEQ ID NO: 925951 - RNA, 19 nt, Artificial Sequence
  Description of Artificial Sequence: Synthetic oligonucleotide
uggcaguauuuugacuuaa

SEQ ID NO: 925952 - RNA, 19 nt, Artificial Sequence
  Description of Artificial Sequence: Synthetic oligonucleotide
ggagcugcacgggaagagg

SEQ ID NO: 925953 - RNA, 19 nt, Artificial Sequence
  Description of Artificial Sequence: Synthetic oligonucleotide
aggcugcacacaacuaaag

SEQ ID NO: 925954 - RNA, 19 nt, Artificial Sequence
  Description of Artificial Sequence: Synthetic oligonucleotide
gccgaauaaggcccaggag

SEQ ID NO: 925955 - RNA, 19 nt, Artificial Sequence
  Description of Artificial Sequence: Synthetic oligonucleotide
ggggugacugagcuccuag

SEQ ID NO: 925956 - RNA, 19 nt, Artificial Sequence
  Description of Artificial Sequence: Synthetic oligonucleotide
auacgacaaugacacgcuu

SEQ ID NO: 925957 - RNA, 19 nt, Artificial Sequence
  Description of Artificial Sequence: Synthetic oligonucleotide
ucgagagccucaccuccau

SEQ ID NO: 925958 - RNA, 19 nt, Artificial Sequence
  Description of Artificial Sequence: Synthetic oligonucleotide
ggcucuuaccagcaucuca

SEQ ID NO: 925959 - RNA, 19 nt, Artificial Sequence
  Description of Artificial Sequence: Synthetic oligonucleotide
caguagguacaauagguuu

SEQ ID NO: 925960 - RNA, 19 nt, Artificial Sequence
  Description of Artificial Sequence: Synthetic oligonucleotide
cuacaaaccagagacuaau

SEQ ID NO: 925961 - RNA, 19 nt, Artificial Sequence
  Description of Artificial Sequence: Synthetic oligonucleotide
ccggaaauguugauggaca

SEQ ID NO: 925962 - RNA, 19 nt, Artificial Sequence
  Description of Artificial Sequence: Synthetic oligonucleotide
uuaccacucccugucccuc

SEQ ID NO: 925963 - RNA, 19 nt, Artificial Sequence
  Description of Artificial Sequence: Synthetic oligonucleotide
gagcuccuagcgcugucca

SEQ ID NO: 925964 - RNA, 19 nt, Artificial Sequence
  Description of Artificial Sequence: Synthetic oligonucleotide
acuugccauucaaaacaug

SEQ ID NO: 925965 - RNA, 19 nt, Artificial Sequence
  Description of Artificial Sequence: Synthetic oligonucleotide
aggggcagagggaaauaug

SEQ ID NO: 925966 - RNA, 19 nt, Artificial Sequence
  Description of Artificial Sequence: Synthetic oligonucleotide
ccuagcgcuguccacaaca

SEQ ID NO: 925967 - RNA, 19 nt, Artificial Sequence
  Description of Artificial Sequence: Synthetic oligonucleotide
cagugagacuggcauuuca

SEQ ID NO: 925968 - RNA, 19 nt, Artificial Sequence
  Description of Artificial Sequence: Synthetic oligonucleotide
agcugcacgggaagaggag

SEQ ID NO: 925969 - RNA, 19 nt, Artificial Sequence
  Description of Artificial Sequence: Synthetic oligonucleotide
uucccucgagagccucacc

SEQ ID NO: 925970 - RNA, 19 nt, Artificial Sequence
  Description of Artificial Sequence: Synthetic oligonucleotide
aucgauugccaagguuugu

SEQ ID NO: 925971 - RNA, 19 nt, Artificial Sequence
  Description of Artificial Sequence: Synthetic oligonucleotide
gccuauucuuaucccugcc

SEQ ID NO: 925972 - RNA, 19 nt, Artificial Sequence
  Description of Artificial Sequence: Synthetic oligonucleotide
ggggagacugucccuaaga

SEQ ID NO: 925973 - RNA, 19 nt, Artificial Sequence
  Description of Artificial Sequence: Synthetic oligonucleotide
gggagacugucccuaagaa

SEQ ID NO: 925974 - RNA, 19 nt, Artificial Sequence
  Description of Artificial Sequence: Synthetic oligonucleotide
agccuaucuuugguauuug

SEQ ID NO: 925975 - RNA, 19 nt, Artificial Sequence
  Description of Artificial Sequence: Synthetic oligonucleotide
aggcgacuauacaucucuc

SEQ ID NO: 925976 - RNA, 19 nt, Artificial Sequence
  Description of Artificial Sequence: Synthetic oligonucleotide
guuaugggucauccacaaa

SEQ ID NO: 925977 - RNA, 19 nt, Artificial Sequence
  Description of Artificial Sequence: Synthetic oligonucleotide
caugcacgaaggggucucc

SEQ ID NO: 925978 - RNA, 19 nt, Artificial Sequence
  Description of Artificial Sequence: Synthetic oligonucleotide
ucacggcacccuugaugug

SEQ ID NO: 925979 - RNA, 19 nt, Artificial Sequence
  Description of Artificial Sequence: Synthetic oligonucleotide
gccuaucucuuucucucac

SEQ ID NO: 925980 - RNA, 19 nt, Artificial Sequence
  Description of Artificial Sequence: Synthetic oligonucleotide
cgauugccaagguuuguag

SEQ ID NO: 925981 - RNA, 19 nt, Artificial Sequence
  Description of Artificial Sequence: Synthetic oligonucleotide
gguauucauugccaagccu

SEQ ID NO: 925982 - RNA, 19 nt, Artificial Sequence
  Description of Artificial Sequence: Synthetic oligonucleotide
cucgagagccucaccucca

SEQ ID NO: 925983 - RNA, 19 nt, Artificial Sequence
  Description of Artificial Sequence: Synthetic oligonucleotide
gcacgaaggggucuccuca

SEQ ID NO: 925984 - RNA, 19 nt, Artificial Sequence
  Description of Artificial Sequence: Synthetic oligonucleotide
ccggcucuugguacgaaac

SEQ ID NO: 925985 - RNA, 19 nt, Artificial Sequence
  Description of Artificial Sequence: Synthetic oligonucleotide
cccggaaauguugauggac

SEQ ID NO: 925986 - RNA, 19 nt, Artificial Sequence
  Description of Artificial Sequence: Synthetic oligonucleotide
agagacuaauugggacaca

SEQ ID NO: 925987 - RNA, 19 nt, Artificial Sequence
  Description of Artificial Sequence: Synthetic oligonucleotide
ggcgucacagugagacugg

SEQ ID NO: 925988 - RNA, 19 nt, Artificial Sequence
  Description of Artificial Sequence: Synthetic oligonucleotide
ccucaugacaggcggccag

SEQ ID NO: 925989 - RNA, 19 nt, Artificial Sequence
  Description of Artificial Sequence: Synthetic oligonucleotide
aguucacggcacccuugau

SEQ ID NO: 925990 - RNA, 19 nt, Artificial Sequence
  Description of Artificial Sequence: Synthetic oligonucleotide
uccuagcgcuguccacaac

SEQ ID NO: 925991 - RNA, 19 nt, Artificial Sequence
  Description of Artificial Sequence: Synthetic oligonucleotide
ggcuagaccccagcggagc

SEQ ID NO: 925992 - RNA, 19 nt, Artificial Sequence
  Description of Artificial Sequence: Synthetic oligonucleotide
ggcgacuauacaucucucu

SEQ ID NO: 925993 - RNA, 19 nt, Artificial Sequence
  Description of Artificial Sequence: Synthetic oligonucleotide
ggugcauuggucgguaacu

SEQ ID NO: 925994 - RNA, 19 nt, Artificial Sequence
  Description of Artificial Sequence: Synthetic oligonucleotide
cagguuugccuauucuuau

SEQ ID NO: 925995 - RNA, 19 nt, Artificial Sequence
  Description of Artificial Sequence: Synthetic oligonucleotide
aggagucaagcagccugca

SEQ ID NO: 925996 - RNA, 19 nt, Artificial Sequence
  Description of Artificial Sequence: Synthetic oligonucleotide
ggcucgccaugcacgaagg

SEQ ID NO: 925997 - RNA, 19 nt, Artificial Sequence
  Description of Artificial Sequence: Synthetic oligonucleotide
gaggggagacugucccuaa

SEQ ID NO: 925998 - RNA, 19 nt, Artificial Sequence
  Description of Artificial Sequence: Synthetic oligonucleotide
gcuccuagcgcuguccaca

SEQ ID NO: 925999 - RNA, 19 nt, Artificial Sequence
  Description of Artificial Sequence: Synthetic oligonucleotide
auggugcauuggucgguaa

SEQ ID NO: 926000 - RNA, 19 nt, Artificial Sequence
  Description of Artificial Sequence: Synthetic oligonucleotide
gcucgccaugcacgaaggg

SEQ ID NO: 926001 - RNA, 19 nt, Artificial Sequence
  Description of Artificial Sequence: Synthetic oligonucleotide
gcccagguccggcucuugg

SEQ ID NO: 926002 - RNA, 19 nt, Artificial Sequence
  Description of Artificial Sequence: Synthetic oligonucleotide
ccaagccuaucucuuucuc

SEQ ID NO: 926003 - RNA, 19 nt, Artificial Sequence
  Description of Artificial Sequence: Synthetic oligonucleotide
ccaaaauaggcugcacaca

SEQ ID NO: 926004 - RNA, 19 nt, Artificial Sequence
  Description of Artificial Sequence: Synthetic oligonucleotide
augcacgaaggggucuccu

SEQ ID NO: 926005 - RNA, 19 nt, Artificial Sequence
  Description of Artificial Sequence: Synthetic oligonucleotide
cugagcuccuagcgcuguc

SEQ ID NO: 926006 - RNA, 19 nt, Artificial Sequence
  Description of Artificial Sequence: Synthetic oligonucleotide
cuccuagcgcuguccacaa

SEQ ID NO: 926007 - RNA, 19 nt, Artificial Sequence
  Description of Artificial Sequence: Synthetic oligonucleotide
caaacucuuuaaugagguu

SEQ ID NO: 926008 - RNA, 19 nt, Artificial Sequence
  Description of Artificial Sequence: Synthetic oligonucleotide
ccuccugagaaagucuaca

SEQ ID NO: 926009 - RNA, 19 nt, Artificial Sequence
  Description of Artificial Sequence: Synthetic oligonucleotide
cauggugcauuggucggua

SEQ ID NO: 926010 - RNA, 19 nt, Artificial Sequence
  Description of Artificial Sequence: Synthetic oligonucleotide
ggcacccuugaugugaccu

SEQ ID NO: 926011 - RNA, 19 nt, Artificial Sequence
  Description of Artificial Sequence: Synthetic oligonucleotide
cucuaccuaggauggcagu

SEQ ID NO: 926012 - RNA, 19 nt, Artificial Sequence
  Description of Artificial Sequence: Synthetic oligonucleotide
gauguucccucgagagccu

SEQ ID NO: 926013 - RNA, 19 nt, Artificial Sequence
  Description of Artificial Sequence: Synthetic oligonucleotide
ccuaggggugacugagcuc

SEQ ID NO: 926014 - RNA, 19 nt, Artificial Sequence
  Description of Artificial Sequence: Synthetic oligonucleotide
guaguggaguuugggguau

SEQ ID NO: 926015 - RNA, 19 nt, Artificial Sequence
  Description of Artificial Sequence: Synthetic oligonucleotide
caaagaccucucucucccu

SEQ ID NO: 926016 - RNA, 19 nt, Artificial Sequence
  Description of Artificial Sequence: Synthetic oligonucleotide
gaucuggugcaggcucuua

SEQ ID NO: 926017 - RNA, 19 nt, Artificial Sequence
  Description of Artificial Sequence: Synthetic oligonucleotide
ccaagguuuguaggucuuc

SEQ ID NO: 926018 - RNA, 19 nt, Artificial Sequence
  Description of Artificial Sequence: Synthetic oligonucleotide
ccagcggagcaaagaugac

SEQ ID NO: 926019 - RNA, 19 nt, Artificial Sequence
  Description of Artificial Sequence: Synthetic oligonucleotide
ggaguuugggguauucauu

SEQ ID NO: 926020 - RNA, 19 nt, Artificial Sequence
  Description of Artificial Sequence: Synthetic oligonucleotide
cgaaggggucuccucauca

SEQ ID NO: 926021 - RNA, 19 nt, Artificial Sequence
  Description of Artificial Sequence: Synthetic oligonucleotide
cuagaccccagcggagcaa

SEQ ID NO: 926022 - RNA, 19 nt, Artificial Sequence
  Description of Artificial Sequence: Synthetic oligonucleotide
cgggguaguggaguuuggg

SEQ ID NO: 926023 - RNA, 19 nt, Artificial Sequence
  Description of Artificial Sequence: Synthetic oligonucleotide
uaguggaguuugggguauu

SEQ ID NO: 926024 - RNA, 19 nt, Artificial Sequence
  Description of Artificial Sequence: Synthetic oligonucleotide
gucaagcagccugcaucga

SEQ ID NO: 926025 - RNA, 19 nt, Artificial Sequence
  Description of Artificial Sequence: Synthetic oligonucleotide
ccaugcacgaaggggucuc

SEQ ID NO: 926026 - RNA, 19 nt, Artificial Sequence
  Description of Artificial Sequence: Synthetic oligonucleotide
ugcccagguccggcucuug

SEQ ID NO: 926027 - RNA, 19 nt, Artificial Sequence
  Description of Artificial Sequence: Synthetic oligonucleotide
cacgaaggggucuccucau

SEQ ID NO: 926028 - RNA, 19 nt, Artificial Sequence
  Description of Artificial Sequence: Synthetic oligonucleotide
gcgucacagugagacuggc

SEQ ID NO: 926029 - RNA, 19 nt, Artificial Sequence
  Description of Artificial Sequence: Synthetic oligonucleotide
ggucugggaagguuagcuu

SEQ ID NO: 926030 - RNA, 19 nt, Artificial Sequence
  Description of Artificial Sequence: Synthetic oligonucleotide
ggguaacuggugugauuua

SEQ ID NO: 926031 - RNA, 19 nt, Artificial Sequence
  Description of Artificial Sequence: Synthetic oligonucleotide
gcggagcaaagaugaccga

SEQ ID NO: 926032 - RNA, 19 nt, Artificial Sequence
  Description of Artificial Sequence: Synthetic oligonucleotide
gcugcacgggaagaggagu

SEQ ID NO: 926033 - RNA, 19 nt, Artificial Sequence
  Description of Artificial Sequence: Synthetic oligonucleotide
aggggugacugagcuccua

SEQ ID NO: 926034 - RNA, 19 nt, Artificial Sequence
  Description of Artificial Sequence: Synthetic oligonucleotide
cguguaccgcagcuggcuc

SEQ ID NO: 926035 - RNA, 19 nt, Artificial Sequence
  Description of Artificial Sequence: Synthetic oligonucleotide
gaggcucgccaugcacgaa

SEQ ID NO: 926036 - RNA, 19 nt, Artificial Sequence
  Description of Artificial Sequence: Synthetic oligonucleotide
gggccucuuucagaagaaa

SEQ ID NO: 926037 - RNA, 19 nt, Artificial Sequence
  Description of Artificial Sequence: Synthetic oligonucleotide
cugcaucgauugccaaggu

SEQ ID NO: 926038 - RNA, 19 nt, Artificial Sequence
  Description of Artificial Sequence: Synthetic oligonucleotide
cgacuauacaucucucuuu

SEQ ID NO: 926039 - RNA, 19 nt, Artificial Sequence
  Description of Artificial Sequence: Synthetic oligonucleotide
cgagagccucaccuccaug

SEQ ID NO: 926040 - RNA, 19 nt, Artificial Sequence
  Description of Artificial Sequence: Synthetic oligonucleotide
ggggcgucacagugagacu

SEQ ID NO: 926041 - RNA, 19 nt, Artificial Sequence
  Description of Artificial Sequence: Synthetic oligonucleotide
gcugcccggaaauguugau

SEQ ID NO: 926042 - RNA, 19 nt, Artificial Sequence
  Description of Artificial Sequence: Synthetic oligonucleotide
cuccucagauggagauguu

SEQ ID NO: 926043 - RNA, 19 nt, Artificial Sequence
  Description of Artificial Sequence: Synthetic oligonucleotide
ccagccuaucuuugguauu

SEQ ID NO: 926044 - RNA, 19 nt, Artificial Sequence
  Description of Artificial Sequence: Synthetic oligonucleotide
ccguguaccgcagcuggcu

SEQ ID NO: 926045 - RNA, 19 nt, Artificial Sequence
  Description of Artificial Sequence: Synthetic oligonucleotide
cggcucuugguacgaaacu

SEQ ID NO: 926046 - RNA, 19 nt, Artificial Sequence
  Description of Artificial Sequence: Synthetic oligonucleotide
cuccaucgagaaggucuau

SEQ ID NO: 926047 - RNA, 19 nt, Artificial Sequence
  Description of Artificial Sequence: Synthetic oligonucleotide
cacaugcgagggccucuuu

SEQ ID NO: 926048 - RNA, 19 nt, Artificial Sequence
  Description of Artificial Sequence: Synthetic oligonucleotide
gcacaugcgagggccucuu

SEQ ID NO: 926049 - RNA, 19 nt, Artificial Sequence
  Description of Artificial Sequence: Synthetic oligonucleotide
gcucgggguaguggaguuu

SEQ ID NO: 926050 - RNA, 19 nt, Artificial Sequence
  Description of Artificial Sequence: Synthetic oligonucleotide
guaccgcagcuggcuccuu

SEQ ID NO: 926051 - RNA, 19 nt, Artificial Sequence
  Description of Artificial Sequence: Synthetic oligonucleotide
aguaaauucauuuaauucc

SEQ ID NO: 926052 - RNA, 19 nt, Artificial Sequence
  Description of Artificial Sequence: Synthetic oligonucleotide
uuaauaaccacauaaaacu

SEQ ID NO: 926053 - RNA, 19 nt, Artificial Sequence
  Description of Artificial Sequence: Synthetic oligonucleotide
aauaaguacagucuacuac

SEQ ID NO: 926054 - RNA, 19 nt, Artificial Sequence
  Description of Artificial Sequence: Synthetic oligonucleotide
aaaaucuagauugauagac

SEQ ID NO: 926055 - RNA, 19 nt, Artificial Sequence
  Description of Artificial Sequence: Synthetic oligonucleotide
gaaaacgucauucugaggc

SEQ ID NO: 926056 - RNA, 19 nt, Artificial Sequence
  Description of Artificial Sequence: Synthetic oligonucleotide
auuuugaucaaucacaacu

SEQ ID NO: 926057 - RNA, 19 nt, Artificial Sequence
  Description of Artificial Sequence: Synthetic oligonucleotide
aucuauaguaaacugaggg

SEQ ID NO: 926058 - RNA, 19 nt, Artificial Sequence
  Description of Artificial Sequence: Synthetic oligonucleotide
ugaauaaucuggaaaauug

SEQ ID NO: 926059 - RNA, 19 nt, Artificial Sequence
  Description of Artificial Sequence: Synthetic oligonucleotide
aaccauaacucacucagac

SEQ ID NO: 926060 - RNA, 19 nt, Artificial Sequence
  Description of Artificial Sequence: Synthetic oligonucleotide
aagagaguaauaaauugcc

SEQ ID NO: 926061 - RNA, 19 nt, Artificial Sequence
  Description of Artificial Sequence: Synthetic oligonucleotide
uuauaggauaguuacauga

SEQ ID NO: 926062 - RNA, 19 nt, Artificial Sequence
  Description of Artificial Sequence: Synthetic oligonucleotide
aguaacuaagacuugcuuc

SEQ ID NO: 926063 - RNA, 19 nt, Artificial Sequence
  Description of Artificial Sequence: Synthetic oligonucleotide
ucuacuuauauuaugcccu

SEQ ID NO: 926064 - RNA, 19 nt, Artificial Sequence
  Description of Artificial Sequence: Synthetic oligonucleotide
agauugauagaccuaguac

SEQ ID NO: 926065 - RNA, 19 nt, Artificial Sequence
  Description of Artificial Sequence: Synthetic oligonucleotide
uaauaaauugccuagcuau

SEQ ID NO: 926066 - RNA, 19 nt, Artificial Sequence
  Description of Artificial Sequence: Synthetic oligonucleotide
uaagauaucuuauggcacg

SEQ ID NO: 926067 - RNA, 19 nt, Artificial Sequence
  Description of Artificial Sequence: Synthetic oligonucleotide
uuacuaacaaaagacauca

SEQ ID NO: 926068 - RNA, 19 nt, Artificial Sequence
  Description of Artificial Sequence: Synthetic oligonucleotide
auaggauaguuacaugacc

SEQ ID NO: 926069 - RNA, 19 nt, Artificial Sequence
  Description of Artificial Sequence: Synthetic oligonucleotide
aaaucuagauugauagacc

SEQ ID NO: 926070 - RNA, 19 nt, Artificial Sequence
  Description of Artificial Sequence: Synthetic oligonucleotide
aagccaauuaucuauagua

SEQ ID NO: 926071 - RNA, 19 nt, Artificial Sequence
  Description of Artificial Sequence: Synthetic oligonucleotide
auuguuauagcaauuuaac

SEQ ID NO: 926072 - RNA, 19 nt, Artificial Sequence
  Description of Artificial Sequence: Synthetic oligonucleotide
acagcuuaaggucagucac

SEQ ID NO: 926073 - RNA, 19 nt, Artificial Sequence
  Description of Artificial Sequence: Synthetic oligonucleotide
auaaguacagucuacuacu

SEQ ID NO: 926074 - RNA, 19 nt, Artificial Sequence
  Description of Artificial Sequence: Synthetic oligonucleotide
aaaugauuguuauagcaau

SEQ ID NO: 926075 - RNA, 19 nt, Artificial Sequence
  Description of Artificial Sequence: Synthetic oligonucleotide
ucaugcaaaauucaaggcu

SEQ ID NO: 926076 - RNA, 19 nt, Artificial Sequence
  Description of Artificial Sequence: Synthetic oligonucleotide
aauaaccaggguccuaccg

SEQ ID NO: 926077 - RNA, 19 nt, Artificial Sequence
  Description of Artificial Sequence: Synthetic oligonucleotide
gacuagaaaaccuggaaug

SEQ ID NO: 926078 - RNA, 19 nt, Artificial Sequence
  Description of Artificial Sequence: Synthetic oligonucleotide
uauggacuagaaaaccugg

SEQ ID NO: 926079 - RNA, 19 nt, Artificial Sequence
  Description of Artificial Sequence: Synthetic oligonucleotide
caagagaguaauaaauugc

SEQ ID NO: 926080 - RNA, 19 nt, Artificial Sequence
  Description of Artificial Sequence: Synthetic oligonucleotide
uuuuaaaccauaacucacu

SEQ ID NO: 926081 - RNA, 19 nt, Artificial Sequence
  Description of Artificial Sequence: Synthetic oligonucleotide
auucauguggugcuuuugc

SEQ ID NO: 926082 - RNA, 19 nt, Artificial Sequence
  Description of Artificial Sequence: Synthetic oligonucleotide
uuuagugaaacugcaauca

SEQ ID NO: 926083 - RNA, 19 nt, Artificial Sequence
  Description of Artificial Sequence: Synthetic oligonucleotide
aaugugaaaugauuguuau

SEQ ID NO: 926084 - RNA, 19 nt, Artificial Sequence
  Description of Artificial Sequence: Synthetic oligonucleotide
uuaaccagggcaucgaaca

SEQ ID NO: 926085 - RNA, 19 nt, Artificial Sequence
  Description of Artificial Sequence: Synthetic oligonucleotide
uuuacuaacaaaagacauc

SEQ ID NO: 926086 - RNA, 19 nt, Artificial Sequence
  Description of Artificial Sequence: Synthetic oligonucleotide
uuaugagugaagaggcagg

SEQ ID NO: 926087 - RNA, 19 nt, Artificial Sequence
  Description of Artificial Sequence: Synthetic oligonucleotide
aaauugccuagcuauauaa

SEQ ID NO: 926088 - RNA, 19 nt, Artificial Sequence
  Description of Artificial Sequence: Synthetic oligonucleotide
ucuauaguaaacugaggga

SEQ ID NO: 926089 - RNA, 19 nt, Artificial Sequence
  Description of Artificial Sequence: Synthetic oligonucleotide
aaaugcacucaauagguaa

SEQ ID NO: 926090 - RNA, 19 nt, Artificial Sequence
  Description of Artificial Sequence: Synthetic oligonucleotide
uaugauguaagcaaaccuu

SEQ ID NO: 926091 - RNA, 19 nt, Artificial Sequence
  Description of Artificial Sequence: Synthetic oligonucleotide
aaaauagguagacaaugau

SEQ ID NO: 926092 - RNA, 19 nt, Artificial Sequence
  Description of Artificial Sequence: Synthetic oligonucleotide
acccaaaccaugcauaauc

SEQ ID NO: 926093 - RNA, 19 nt, Artificial Sequence
  Description of Artificial Sequence: Synthetic oligonucleotide
caugcaaaauucaaggcug

SEQ ID NO: 926094 - RNA, 19 nt, Artificial Sequence
  Description of Artificial Sequence: Synthetic oligonucleotide
uuggcgaccaucuucgcgg

SEQ ID NO: 926095 - RNA, 19 nt, Artificial Sequence
  Description of Artificial Sequence: Synthetic oligonucleotide
cugauuaaguuacaaaaug

SEQ ID NO: 926096 - RNA, 19 nt, Artificial Sequence
  Description of Artificial Sequence: Synthetic oligonucleotide
aauuaacaugcuaagauau

SEQ ID NO: 926097 - RNA, 19 nt, Artificial Sequence
  Description of Artificial Sequence: Synthetic oligonucleotide
caagcuaaaagucacagga

SEQ ID NO: 926098 - RNA, 19 nt, Artificial Sequence
  Description of Artificial Sequence: Synthetic oligonucleotide
agaaaauuuugaucaauca

SEQ ID NO: 926099 - RNA, 19 nt, Artificial Sequence
  Description of Artificial Sequence: Synthetic oligonucleotide
uguacaucccuaacuaccc

SEQ ID NO: 926100 - RNA, 19 nt, Artificial Sequence
  Description of Artificial Sequence: Synthetic oligonucleotide
aaaccuuaagauuccaaau

SEQ ID NO: 926101 - RNA, 19 nt, Artificial Sequence
  Description of Artificial Sequence: Synthetic oligonucleotide
ucuuauggcacgcuggacu

SEQ ID NO: 926102 - RNA, 19 nt, Artificial Sequence
  Description of Artificial Sequence: Synthetic oligonucleotide
ucuaauuagccauaaguuu

SEQ ID NO: 926103 - RNA, 19 nt, Artificial Sequence
  Description of Artificial Sequence: Synthetic oligonucleotide
uuaacaugcuaagauaucu

SEQ ID NO: 926104 - RNA, 19 nt, Artificial Sequence
  Description of Artificial Sequence: Synthetic oligonucleotide
augaaaacgucauucugag

SEQ ID NO: 926105 - RNA, 19 nt, Artificial Sequence
  Description of Artificial Sequence: Synthetic oligonucleotide
ugccuagcuauauaaaacc

SEQ ID NO: 926106 - RNA, 19 nt, Artificial Sequence
  Description of Artificial Sequence: Synthetic oligonucleotide
uauaggauaguuacaugac

SEQ ID NO: 926107 - RNA, 19 nt, Artificial Sequence
  Description of Artificial Sequence: Synthetic oligonucleotide
uuuacggaugggaucuugg

SEQ ID NO: 926108 - RNA, 19 nt, Artificial Sequence
  Description of Artificial Sequence: Synthetic oligonucleotide
agggccaauaaccaggguc

SEQ ID NO: 926109 - RNA, 19 nt, Artificial Sequence
  Description of Artificial Sequence: Synthetic oligonucleotide
uuguuauagcaauuuaaca

SEQ ID NO: 926110 - RNA, 19 nt, Artificial Sequence
  Description of Artificial Sequence: Synthetic oligonucleotide
auaugauguaagcaaaccu

SEQ ID NO: 926111 - RNA, 19 nt, Artificial Sequence
  Description of Artificial Sequence: Synthetic oligonucleotide
cacucaauagguaaauuac

SEQ ID NO: 926112 - RNA, 19 nt, Artificial Sequence
  Description of Artificial Sequence: Synthetic oligonucleotide
cuuugaauaaucuggaaaa

SEQ ID NO: 926113 - RNA, 19 nt, Artificial Sequence
  Description of Artificial Sequence: Synthetic oligonucleotide
uuaagauuccaaauuuaaa

SEQ ID NO: 926114 - RNA, 19 nt, Artificial Sequence
  Description of Artificial Sequence: Synthetic oligonucleotide
aaguacagucuacuacugg

SEQ ID NO: 926115 - RNA, 19 nt, Artificial Sequence
  Description of Artificial Sequence: Synthetic oligonucleotide
uacaaaaugcucaaccgau

SEQ ID NO: 926116 - RNA, 19 nt, Artificial Sequence
  Description of Artificial Sequence: Synthetic oligonucleotide
aguuacaugacccuauaau

SEQ ID NO: 926117 - RNA, 19 nt, Artificial Sequence
  Description of Artificial Sequence: Synthetic oligonucleotide
agcaucucuacuuauauua

SEQ ID NO: 926118 - RNA, 19 nt, Artificial Sequence
  Description of Artificial Sequence: Synthetic oligonucleotide
guaacuaagacuugcuuca

SEQ ID NO: 926119 - RNA, 19 nt, Artificial Sequence
  Description of Artificial Sequence: Synthetic oligonucleotide
agugauguucuugcuaugc

SEQ ID NO: 926120 - RNA, 19 nt, Artificial Sequence
  Description of Artificial Sequence: Synthetic oligonucleotide
gauaugauguaagcaaacc

SEQ ID NO: 926121 - RNA, 19 nt, Artificial Sequence
  Description of Artificial Sequence: Synthetic oligonucleotide
acuuauaagcaccuuauua

SEQ ID NO: 926122 - RNA, 19 nt, Artificial Sequence
  Description of Artificial Sequence: Synthetic oligonucleotide
cuugcuaugcuucucguug

SEQ ID NO: 926123 - RNA, 19 nt, Artificial Sequence
  Description of Artificial Sequence: Synthetic oligonucleotide
gaauaaucuggaaaauugc

SEQ ID NO: 926124 - RNA, 19 nt, Artificial Sequence
  Description of Artificial Sequence: Synthetic oligonucleotide
ucaagcuaaaagucacagg

SEQ ID NO: 926125 - RNA, 19 nt, Artificial Sequence
  Description of Artificial Sequence: Synthetic oligonucleotide
cuaacuaccccuuuccuuc

SEQ ID NO: 926126 - RNA, 19 nt, Artificial Sequence
  Description of Artificial Sequence: Synthetic oligonucleotide
aguacagucuacuacugga

SEQ ID NO: 926127 - RNA, 19 nt, Artificial Sequence
  Description of Artificial Sequence: Synthetic oligonucleotide
cuaagauaucuuauggcac

SEQ ID NO: 926128 - RNA, 19 nt, Artificial Sequence
  Description of Artificial Sequence: Synthetic oligonucleotide
uccuguuuaauacacugaa

SEQ ID NO: 926129 - RNA, 19 nt, Artificial Sequence
  Description of Artificial Sequence: Synthetic oligonucleotide
uuuuagugaaacugcaauc

SEQ ID NO: 926130 - RNA, 19 nt, Artificial Sequence
  Description of Artificial Sequence: Synthetic oligonucleotide
guuuaauacacugaaguuc

SEQ ID NO: 926131 - RNA, 19 nt, Artificial Sequence
  Description of Artificial Sequence: Synthetic oligonucleotide
auaugaaaacgucauucug

SEQ ID NO: 926132 - RNA, 19 nt, Artificial Sequence
  Description of Artificial Sequence: Synthetic oligonucleotide
gauaucuuauggcacgcug

SEQ ID NO: 926133 - RNA, 19 nt, Artificial Sequence
  Description of Artificial Sequence: Synthetic oligonucleotide
uucaagcuaaaagucacag

SEQ ID NO: 926134 - RNA, 19 nt, Artificial Sequence
  Description of Artificial Sequence: Synthetic oligonucleotide
caugcuaagauaucuuaug

SEQ ID NO: 926135 - RNA, 19 nt, Artificial Sequence
  Description of Artificial Sequence: Synthetic oligonucleotide
ggaaugauuugauucaaag

SEQ ID NO: 926136 - RNA, 19 nt, Artificial Sequence
  Description of Artificial Sequence: Synthetic oligonucleotide
caacauguuccgaugaggc

SEQ ID NO: 926137 - RNA, 19 nt, Artificial Sequence
  Description of Artificial Sequence: Synthetic oligonucleotide
acuagaaaaccuggaaugg

SEQ ID NO: 926138 - RNA, 19 nt, Artificial Sequence
  Description of Artificial Sequence: Synthetic oligonucleotide
guaguuguccacuuauaag

SEQ ID NO: 926139 - RNA, 19 nt, Artificial Sequence
  Description of Artificial Sequence: Synthetic oligonucleotide
ucaccuuacuauuuaagaa

SEQ ID NO: 926140 - RNA, 19 nt, Artificial Sequence
  Description of Artificial Sequence: Synthetic oligonucleotide
uuaguaacuaagacuugcu

SEQ ID NO: 926141 - RNA, 19 nt, Artificial Sequence
  Description of Artificial Sequence: Synthetic oligonucleotide
uuagcaucucuacuuauau

SEQ ID NO: 926142 - RNA, 19 nt, Artificial Sequence
  Description of Artificial Sequence: Synthetic oligonucleotide
ucaguaaauucauuuaauu

SEQ ID NO: 926143 - RNA, 19 nt, Artificial Sequence
  Description of Artificial Sequence: Synthetic oligonucleotide
uugccuagcuauauaaaac

SEQ ID NO: 926144 - RNA, 19 nt, Artificial Sequence
  Description of Artificial Sequence: Synthetic oligonucleotide
auuaucuauaguaaacuga

SEQ ID NO: 926145 - RNA, 19 nt, Artificial Sequence
  Description of Artificial Sequence: Synthetic oligonucleotide
aacaugcuaagauaucuua

SEQ ID NO: 926146 - RNA, 19 nt, Artificial Sequence
  Description of Artificial Sequence: Synthetic oligonucleotide
cuucucguuggccauacgg

SEQ ID NO: 926147 - RNA, 19 nt, Artificial Sequence
  Description of Artificial Sequence: Synthetic oligonucleotide
agugaaacugcaaucacug

SEQ ID NO: 926148 - RNA, 19 nt, Artificial Sequence
  Description of Artificial Sequence: Synthetic oligonucleotide
aacuaggcuguguaguugu

SEQ ID NO: 926149 - RNA, 19 nt, Artificial Sequence
  Description of Artificial Sequence: Synthetic oligonucleotide
ugauugugguagaacuagg

SEQ ID NO: 926150 - RNA, 19 nt, Artificial Sequence
  Description of Artificial Sequence: Synthetic oligonucleotide
aaaacgucauucugaggca

SEQ ID NO: 926151 - RNA, 19 nt, Artificial Sequence
  Description of Artificial Sequence: Synthetic oligonucleotide
uacaugacccuauaaugga

SEQ ID NO: 926152 - RNA, 19 nt, Artificial Sequence
  Description of Artificial Sequence: Synthetic oligonucleotide
ucucuacuuauauuaugcc

SEQ ID NO: 926153 - RNA, 19 nt, Artificial Sequence
  Description of Artificial Sequence: Synthetic oligonucleotide
acuauacuuauucaugcaa

SEQ ID NO: 926154 - RNA, 19 nt, Artificial Sequence
  Description of Artificial Sequence: Synthetic oligonucleotide
auugccuagcuauauaaaa

SEQ ID NO: 926155 - RNA, 19 nt, Artificial Sequence
  Description of Artificial Sequence: Synthetic oligonucleotide
uuuaaucuaauuagccaua

SEQ ID NO: 926156 - RNA, 19 nt, Artificial Sequence
  Description of Artificial Sequence: Synthetic oligonucleotide
gagaguaauaaauugccua

SEQ ID NO: 926157 - RNA, 19 nt, Artificial Sequence
  Description of Artificial Sequence: Synthetic oligonucleotide
agugcaauuaacaugcuaa

SEQ ID NO: 926158 - RNA, 19 nt, Artificial Sequence
  Description of Artificial Sequence: Synthetic oligonucleotide
uggugagauaugauguaag

SEQ ID NO: 926159 - RNA, 19 nt, Artificial Sequence
  Description of Artificial Sequence: Synthetic oligonucleotide
cacugauuaaguuacaaaa

SEQ ID NO: 926160 - RNA, 19 nt, Artificial Sequence
  Description of Artificial Sequence: Synthetic oligonucleotide
ucuugggugacuauacuua

SEQ ID NO: 926161 - RNA, 19 nt, Artificial Sequence
  Description of Artificial Sequence: Synthetic oligonucleotide
uaaagccaauuaucuauag

SEQ ID NO: 926162 - RNA, 19 nt, Artificial Sequence
  Description of Artificial Sequence: Synthetic oligonucleotide
uauaguaaacugagggaaa

SEQ ID NO: 926163 - RNA, 19 nt, Artificial Sequence
  Description of Artificial Sequence: Synthetic oligonucleotide
ucuacacagauuuaaucua

SEQ ID NO: 926164 - RNA, 19 nt, Artificial Sequence
  Description of Artificial Sequence: Synthetic oligonucleotide
acggaugggaucuugggug

SEQ ID NO: 926165 - RNA, 19 nt, Artificial Sequence
  Description of Artificial Sequence: Synthetic oligonucleotide
gacguugccgcgcugagug

SEQ ID NO: 926166 - RNA, 19 nt, Artificial Sequence
  Description of Artificial Sequence: Synthetic oligonucleotide
uuacggaugggaucuuggg

SEQ ID NO: 926167 - RNA, 19 nt, Artificial Sequence
  Description of Artificial Sequence: Synthetic oligonucleotide
uaucuuauggcacgcugga

SEQ ID NO: 926168 - RNA, 19 nt, Artificial Sequence
  Description of Artificial Sequence: Synthetic oligonucleotide
uaaucuaauuagccauaag

SEQ ID NO: 926169 - RNA, 19 nt, Artificial Sequence
  Description of Artificial Sequence: Synthetic oligonucleotide
gacccuauaauggagugug

SEQ ID NO: 926170 - RNA, 19 nt, Artificial Sequence
  Description of Artificial Sequence: Synthetic oligonucleotide
augauugugguagaacuag

SEQ ID NO: 926171 - RNA, 19 nt, Artificial Sequence
  Description of Artificial Sequence: Synthetic oligonucleotide
cauguggugcuuuugcaag

SEQ ID NO: 926172 - RNA, 19 nt, Artificial Sequence
  Description of Artificial Sequence: Synthetic oligonucleotide
uuucucgaggucuuggcga

SEQ ID NO: 926173 - RNA, 19 nt, Artificial Sequence
  Description of Artificial Sequence: Synthetic oligonucleotide
cuguguaacagaaacauua

SEQ ID NO: 926174 - RNA, 19 nt, Artificial Sequence
  Description of Artificial Sequence: Synthetic oligonucleotide
aauugcauuuacacauuag

SEQ ID NO: 926175 - RNA, 19 nt, Artificial Sequence
  Description of Artificial Sequence: Synthetic oligonucleotide
uuaaaccauaacucacuca

SEQ ID NO: 926176 - RNA, 19 nt, Artificial Sequence
  Description of Artificial Sequence: Synthetic oligonucleotide
auucaagagaguaauaaau

SEQ ID NO: 926177 - RNA, 19 nt, Artificial Sequence
  Description of Artificial Sequence: Synthetic oligonucleotide
uuuaaccagggcaucgaac

SEQ ID NO: 926178 - RNA, 19 nt, Artificial Sequence
  Description of Artificial Sequence: Synthetic oligonucleotide
auaacucacucagacacag

SEQ ID NO: 926179 - RNA, 19 nt, Artificial Sequence
  Description of Artificial Sequence: Synthetic oligonucleotide
cuuaagauuccaaauuuaa

SEQ ID NO: 926180 - RNA, 19 nt, Artificial Sequence
  Description of Artificial Sequence: Synthetic oligonucleotide
auuauaggauaguuacaug

SEQ ID NO: 926181 - RNA, 19 nt, Artificial Sequence
  Description of Artificial Sequence: Synthetic oligonucleotide
uguguaacagaaacauuau

SEQ ID NO: 926182 - RNA, 19 nt, Artificial Sequence
  Description of Artificial Sequence: Synthetic oligonucleotide
gaccuaguacccuaagggc

SEQ ID NO: 926183 - RNA, 19 nt, Artificial Sequence
  Description of Artificial Sequence: Synthetic oligonucleotide
agguaaauuacaugauaca

SEQ ID NO: 926184 - RNA, 19 nt, Artificial Sequence
  Description of Artificial Sequence: Synthetic oligonucleotide
uaaguacagucuacuacug

SEQ ID NO: 926185 - RNA, 19 nt, Artificial Sequence
  Description of Artificial Sequence: Synthetic oligonucleotide
uucucguuggccauacgga

SEQ ID NO: 926186 - RNA, 19 nt, Artificial Sequence
  Description of Artificial Sequence: Synthetic oligonucleotide
aaauagguagacaaugauu

SEQ ID NO: 926187 - RNA, 19 nt, Artificial Sequence
  Description of Artificial Sequence: Synthetic oligonucleotide
agguagacaaugauugugg

SEQ ID NO: 926188 - RNA, 19 nt, Artificial Sequence
  Description of Artificial Sequence: Synthetic oligonucleotide
uagauugauagaccuagua

SEQ ID NO: 926189 - RNA, 19 nt, Artificial Sequence
  Description of Artificial Sequence: Synthetic oligonucleotide
uccacuuauaagcaccuua

SEQ ID NO: 926190 - RNA, 19 nt, Artificial Sequence
  Description of Artificial Sequence: Synthetic oligonucleotide
cacaugcccauccugauac

SEQ ID NO: 926191 - RNA, 19 nt, Artificial Sequence
  Description of Artificial Sequence: Synthetic oligonucleotide
gauuaaguuacaaaaugcu

SEQ ID NO: 926192 - RNA, 19 nt, Artificial Sequence
  Description of Artificial Sequence: Synthetic oligonucleotide
auaucuuauggcacgcugg

SEQ ID NO: 926193 - RNA, 19 nt, Artificial Sequence
  Description of Artificial Sequence: Synthetic oligonucleotide
aacauguuccgaugaggca

SEQ ID NO: 926194 - RNA, 19 nt, Artificial Sequence
  Description of Artificial Sequence: Synthetic oligonucleotide
ugcagggauucacuuauga

SEQ ID NO: 926195 - RNA, 19 nt, Artificial Sequence
  Description of Artificial Sequence: Synthetic oligonucleotide
guuucucgaggucuuggcg

SEQ ID NO: 926196 - RNA, 19 nt, Artificial Sequence
  Description of Artificial Sequence: Synthetic oligonucleotide
ucccuaacuaccccuuucc

SEQ ID NO: 926197 - RNA, 19 nt, Artificial Sequence
  Description of Artificial Sequence: Synthetic oligonucleotide
uugcuaugcuucucguugg

SEQ ID NO: 926198 - RNA, 19 nt, Artificial Sequence
  Description of Artificial Sequence: Synthetic oligonucleotide
ucacugauuaaguuacaaa

SEQ ID NO: 926199 - RNA, 19 nt, Artificial Sequence
  Description of Artificial Sequence: Synthetic oligonucleotide
ucuacuacuggaacuuaau

SEQ ID NO: 926200 - RNA, 19 nt, Artificial Sequence
  Description of Artificial Sequence: Synthetic oligonucleotide
ugaaaacgucauucugagg

SEQ ID NO: 926201 - RNA, 19 nt, Artificial Sequence
  Description of Artificial Sequence: Synthetic oligonucleotide
gugacuauacuuauucaug

SEQ ID NO: 926202 - RNA, 19 nt, Artificial Sequence
  Description of Artificial Sequence: Synthetic oligonucleotide
cugaauaaguacagucuac

SEQ ID NO: 926203 - RNA, 19 nt, Artificial Sequence
  Description of Artificial Sequence: Synthetic oligonucleotide
cuuauaagcaccuuauuau

SEQ ID NO: 926204 - RNA, 19 nt, Artificial Sequence
  Description of Artificial Sequence: Synthetic oligonucleotide
cucauuucauuccaccaug

SEQ ID NO: 926205 - RNA, 19 nt, Artificial Sequence
  Description of Artificial Sequence: Synthetic oligonucleotide
auuaacaugcuaagauauc

SEQ ID NO: 926206 - RNA, 19 nt, Artificial Sequence
  Description of Artificial Sequence: Synthetic oligonucleotide
ugauuguuauagcaauuua

SEQ ID NO: 926207 - RNA, 19 nt, Artificial Sequence
  Description of Artificial Sequence: Synthetic oligonucleotide
agcaccuuauuauaggaua

SEQ ID NO: 926208 - RNA, 19 nt, Artificial Sequence
  Description of Artificial Sequence: Synthetic oligonucleotide
aacuaagacuugcuucaga

SEQ ID NO: 926209 - RNA, 19 nt, Artificial Sequence
  Description of Artificial Sequence: Synthetic oligonucleotide
ugguauggacuagaaaacc

SEQ ID NO: 926210 - RNA, 19 nt, Artificial Sequence
  Description of Artificial Sequence: Synthetic oligonucleotide
aggaugauaugaaaacguc

SEQ ID NO: 926211 - RNA, 19 nt, Artificial Sequence
  Description of Artificial Sequence: Synthetic oligonucleotide
auacggauccucugcuugg

SEQ ID NO: 926212 - RNA, 19 nt, Artificial Sequence
  Description of Artificial Sequence: Synthetic oligonucleotide
ugcaauuaacaugcuaaga

SEQ ID NO: 926213 - RNA, 19 nt, Artificial Sequence
  Description of Artificial Sequence: Synthetic oligonucleotide
ucuauacccugucuacaca

SEQ ID NO: 926214 - RNA, 19 nt, Artificial Sequence
  Description of Artificial Sequence: Synthetic oligonucleotide
gugcaauuaacaugcuaag

SEQ ID NO: 926215 - RNA, 19 nt, Artificial Sequence
  Description of Artificial Sequence: Synthetic oligonucleotide
gaggcaggaugauuuacug

SEQ ID NO: 926216 - RNA, 19 nt, Artificial Sequence
  Description of Artificial Sequence: Synthetic oligonucleotide
uaggguuaacaaaaucuau

SEQ ID NO: 926217 - RNA, 19 nt, Artificial Sequence
  Description of Artificial Sequence: Synthetic oligonucleotide
gguuaacaaaaucuauacc

SEQ ID NO: 926218 - RNA, 19 nt, Artificial Sequence
  Description of Artificial Sequence: Synthetic oligonucleotide
uuaaucuaauuagccauaa

SEQ ID NO: 926219 - RNA, 19 nt, Artificial Sequence
  Description of Artificial Sequence: Synthetic oligonucleotide
cuauaguaaacugagggaa

SEQ ID NO: 926220 - RNA, 19 nt, Artificial Sequence
  Description of Artificial Sequence: Synthetic oligonucleotide
caaaccuucccucauuuca

SEQ ID NO: 926221 - RNA, 19 nt, Artificial Sequence
  Description of Artificial Sequence: Synthetic oligonucleotide
uagaacuaggcuguguagu

SEQ ID NO: 926222 - RNA, 19 nt, Artificial Sequence
  Description of Artificial Sequence: Synthetic oligonucleotide
accuuaaagccaauuaucu

SEQ ID NO: 926223 - RNA, 19 nt, Artificial Sequence
  Description of Artificial Sequence: Synthetic oligonucleotide
aauucugguauggaaugau

SEQ ID NO: 926224 - RNA, 19 nt, Artificial Sequence
  Description of Artificial Sequence: Synthetic oligonucleotide
guagaacuaggcuguguag

SEQ ID NO: 926225 - RNA, 19 nt, Artificial Sequence
  Description of Artificial Sequence: Synthetic oligonucleotide
ucauguggugcuuuugcaa

SEQ ID NO: 926226 - RNA, 19 nt, Artificial Sequence
  Description of Artificial Sequence: Synthetic oligonucleotide
cauacggauccucugcuug

SEQ ID NO: 926227 - RNA, 19 nt, Artificial Sequence
  Description of Artificial Sequence: Synthetic oligonucleotide
uacggaugggaucuugggu

SEQ ID NO: 926228 - RNA, 19 nt, Artificial Sequence
  Description of Artificial Sequence: Synthetic oligonucleotide
uguacugaauaaguacagu

SEQ ID NO: 926229 - RNA, 19 nt, Artificial Sequence
  Description of Artificial Sequence: Synthetic oligonucleotide
gcuaauugcauuuacacau

SEQ ID NO: 926230 - RNA, 19 nt, Artificial Sequence
  Description of Artificial Sequence: Synthetic oligonucleotide
auguggugcuuuugcaagg

SEQ ID NO: 926231 - RNA, 19 nt, Artificial Sequence
  Description of Artificial Sequence: Synthetic oligonucleotide
aaugcacucaauagguaaa

SEQ ID NO: 926232 - RNA, 19 nt, Artificial Sequence
  Description of Artificial Sequence: Synthetic oligonucleotide
aucccuaacuaccccuuuc

SEQ ID NO: 926233 - RNA, 19 nt, Artificial Sequence
  Description of Artificial Sequence: Synthetic oligonucleotide
ugguauggaaugauuugau

SEQ ID NO: 926234 - RNA, 19 nt, Artificial Sequence
  Description of Artificial Sequence: Synthetic oligonucleotide
augacccuauaauggagug

SEQ ID NO: 926235 - RNA, 19 nt, Artificial Sequence
  Description of Artificial Sequence: Synthetic oligonucleotide
uaguaacuaagacuugcuu

SEQ ID NO: 926236 - RNA, 19 nt, Artificial Sequence
  Description of Artificial Sequence: Synthetic oligonucleotide
cuuggcgaccaucuucgcg

SEQ ID NO: 926237 - RNA, 19 nt, Artificial Sequence
  Description of Artificial Sequence: Synthetic oligonucleotide
uaacaugcuaagauaucuu

SEQ ID NO: 926238 - RNA, 19 nt, Artificial Sequence
  Description of Artificial Sequence: Synthetic oligonucleotide
caaugauugugguagaacu

SEQ ID NO: 926239 - RNA, 19 nt, Artificial Sequence
  Description of Artificial Sequence: Synthetic oligonucleotide
ugauagcuuuuagugaaac

SEQ ID NO: 926240 - RNA, 19 nt, Artificial Sequence
  Description of Artificial Sequence: Synthetic oligonucleotide
ugauagaccuaguacccua

SEQ ID NO: 926241 - RNA, 19 nt, Artificial Sequence
  Description of Artificial Sequence: Synthetic oligonucleotide
accuucccucauuucauuc

SEQ ID NO: 926242 - RNA, 19 nt, Artificial Sequence
  Description of Artificial Sequence: Synthetic oligonucleotide
agggcaucgaacaucagga

SEQ ID NO: 926243 - RNA, 19 nt, Artificial Sequence
  Description of Artificial Sequence: Synthetic oligonucleotide
acucaacauguuccgauga

SEQ ID NO: 926244 - RNA, 19 nt, Artificial Sequence
  Description of Artificial Sequence: Synthetic oligonucleotide
aaugauugugguagaacua

SEQ ID NO: 926245 - RNA, 19 nt, Artificial Sequence
  Description of Artificial Sequence: Synthetic oligonucleotide
caauuaacaugcuaagaua

SEQ ID NO: 926246 - RNA, 19 nt, Artificial Sequence
  Description of Artificial Sequence: Synthetic oligonucleotide
gaauaaguacagucuacua

SEQ ID NO: 926247 - RNA, 19 nt, Artificial Sequence
  Description of Artificial Sequence: Synthetic oligonucleotide
agagggaaucaagugcagg

SEQ ID NO: 926248 - RNA, 19 nt, Artificial Sequence
  Description of Artificial Sequence: Synthetic oligonucleotide
acauguuccgaugaggcau

SEQ ID NO: 926249 - RNA, 19 nt, Artificial Sequence
  Description of Artificial Sequence: Synthetic oligonucleotide
acucaauagguaaauuaca

SEQ ID NO: 926250 - RNA, 19 nt, Artificial Sequence
  Description of Artificial Sequence: Synthetic oligonucleotide
guaagcaaaccuucccuca

SEQ ID NO: 926251 - RNA, 19 nt, Artificial Sequence
  Description of Artificial Sequence: Synthetic oligonucleotide
auccugauacuuugaauaa

SEQ ID NO: 926252 - RNA, 19 nt, Artificial Sequence
  Description of Artificial Sequence: Synthetic oligonucleotide
ugauccuuaucaguaaauu

SEQ ID NO: 926253 - RNA, 19 nt, Artificial Sequence
  Description of Artificial Sequence: Synthetic oligonucleotide
gccauaaguuuuaauaacc

SEQ ID NO: 926254 - RNA, 19 nt, Artificial Sequence
  Description of Artificial Sequence: Synthetic oligonucleotide
auagaccuaguacccuaag

SEQ ID NO: 926255 - RNA, 19 nt, Artificial Sequence
  Description of Artificial Sequence: Synthetic oligonucleotide
gauucacuuaugagugaag

SEQ ID NO: 926256 - RNA, 19 nt, Artificial Sequence
  Description of Artificial Sequence: Synthetic oligonucleotide
uacuuugaauaaucuggaa

SEQ ID NO: 926257 - RNA, 19 nt, Artificial Sequence
  Description of Artificial Sequence: Synthetic oligonucleotide
uggaaugauuugauucaaa

SEQ ID NO: 926258 - RNA, 19 nt, Artificial Sequence
  Description of Artificial Sequence: Synthetic oligonucleotide
ucuggugagauaugaugua

SEQ ID NO: 926259 - RNA, 19 nt, Artificial Sequence
  Description of Artificial Sequence: Synthetic oligonucleotide
auaguaaacugagggaaau

SEQ ID NO: 926260 - RNA, 19 nt, Artificial Sequence
  Description of Artificial Sequence: Synthetic oligonucleotide
acuuaauaaucaaauuuua

SEQ ID NO: 926261 - RNA, 19 nt, Artificial Sequence
  Description of Artificial Sequence: Synthetic oligonucleotide
ccugauacuuugaauaauc

SEQ ID NO: 926262 - RNA, 19 nt, Artificial Sequence
  Description of Artificial Sequence: Synthetic oligonucleotide
aauugccuagcuauauaaa

SEQ ID NO: 926263 - RNA, 19 nt, Artificial Sequence
  Description of Artificial Sequence: Synthetic oligonucleotide
uaguuacaugacccuauaa

SEQ ID NO: 926264 - RNA, 19 nt, Artificial Sequence
  Description of Artificial Sequence: Synthetic oligonucleotide
caaaaucuagauugauaga

SEQ ID NO: 926265 - RNA, 19 nt, Artificial Sequence
  Description of Artificial Sequence: Synthetic oligonucleotide
ggagaauggaaacagcuua

SEQ ID NO: 926266 - RNA, 19 nt, Artificial Sequence
  Description of Artificial Sequence: Synthetic oligonucleotide
uuuuacggaugggaucuug

SEQ ID NO: 926267 - RNA, 19 nt, Artificial Sequence
  Description of Artificial Sequence: Synthetic oligonucleotide
uaccgacgcuuucucuucg

SEQ ID NO: 926268 - RNA, 19 nt, Artificial Sequence
  Description of Artificial Sequence: Synthetic oligonucleotide
accaugcauaauccaaccu

SEQ ID NO: 926269 - RNA, 19 nt, Artificial Sequence
  Description of Artificial Sequence: Synthetic oligonucleotide
gcaauuaacaugcuaagau

SEQ ID NO: 926270 - RNA, 19 nt, Artificial Sequence
  Description of Artificial Sequence: Synthetic oligonucleotide
uggcacgcuggacucaaca

SEQ ID NO: 926271 - RNA, 19 nt, Artificial Sequence
  Description of Artificial Sequence: Synthetic oligonucleotide
ugcuaugcuucucguuggc

SEQ ID NO: 926272 - RNA, 19 nt, Artificial Sequence
  Description of Artificial Sequence: Synthetic oligonucleotide
uaacuaagacuugcuucag

SEQ ID NO: 926273 - RNA, 19 nt, Artificial Sequence
  Description of Artificial Sequence: Synthetic oligonucleotide
accuaguacccuaagggca

SEQ ID NO: 926274 - RNA, 19 nt, Artificial Sequence
  Description of Artificial Sequence: Synthetic oligonucleotide
accuuacuauuuaagaaaa

SEQ ID NO: 926275 - RNA, 19 nt, Artificial Sequence
  Description of Artificial Sequence: Synthetic oligonucleotide
cucaauagguaaauuacau

SEQ ID NO: 926276 - RNA, 19 nt, Artificial Sequence
  Description of Artificial Sequence: Synthetic oligonucleotide
ugcaaaauucaaggcugug

SEQ ID NO: 926277 - RNA, 19 nt, Artificial Sequence
  Description of Artificial Sequence: Synthetic oligonucleotide
uaacuaccccuuuccuucc

SEQ ID NO: 926278 - RNA, 19 nt, Artificial Sequence
  Description of Artificial Sequence: Synthetic oligonucleotide
auaguuacaugacccuaua

SEQ ID NO: 926279 - RNA, 19 nt, Artificial Sequence
  Description of Artificial Sequence: Synthetic oligonucleotide
aacucauucuguacugaau

SEQ ID NO: 926280 - RNA, 19 nt, Artificial Sequence
  Description of Artificial Sequence: Synthetic oligonucleotide
uugauagaccuaguacccu

SEQ ID NO: 926281 - RNA, 19 nt, Artificial Sequence
  Description of Artificial Sequence: Synthetic oligonucleotide
gacuagacugauccuuauc

SEQ ID NO: 926282 - RNA, 19 nt, Artificial Sequence
  Description of Artificial Sequence: Synthetic oligonucleotide
uuauucauguggugcuuuu

SEQ ID NO: 926283 - RNA, 19 nt, Artificial Sequence
  Description of Artificial Sequence: Synthetic oligonucleotide
acaugacccuauaauggag

SEQ ID NO: 926284 - RNA, 19 nt, Artificial Sequence
  Description of Artificial Sequence: Synthetic oligonucleotide
aaaaugcacucaauaggua

SEQ ID NO: 926285 - RNA, 19 nt, Artificial Sequence
  Description of Artificial Sequence: Synthetic oligonucleotide
gggccaauaaccagggucc

SEQ ID NO: 926286 - RNA, 19 nt, Artificial Sequence
  Description of Artificial Sequence: Synthetic oligonucleotide
ugcucguucgccgcucccg

SEQ ID NO: 926287 - RNA, 19 nt, Artificial Sequence
  Description of Artificial Sequence: Synthetic oligonucleotide
caauaaccaggguccuacc

SEQ ID NO: 926288 - RNA, 19 nt, Artificial Sequence
  Description of Artificial Sequence: Synthetic oligonucleotide
ccuaagggcauuucaauca

SEQ ID NO: 926289 - RNA, 19 nt, Artificial Sequence
  Description of Artificial Sequence: Synthetic oligonucleotide
auuuacacauuaggguuaa

SEQ ID NO: 926290 - RNA, 19 nt, Artificial Sequence
  Description of Artificial Sequence: Synthetic oligonucleotide
acccuaagggcauuucaau

SEQ ID NO: 926291 - RNA, 19 nt, Artificial Sequence
  Description of Artificial Sequence: Synthetic oligonucleotide
auuaagcuaauugcauuua

SEQ ID NO: 926292 - RNA, 19 nt, Artificial Sequence
  Description of Artificial Sequence: Synthetic oligonucleotide
acucucaccuuacuauuua

SEQ ID NO: 926293 - RNA, 19 nt, Artificial Sequence
  Description of Artificial Sequence: Synthetic oligonucleotide
aagaaaccuuggaaugcca

SEQ ID NO: 926294 - RNA, 19 nt, Artificial Sequence
  Description of Artificial Sequence: Synthetic oligonucleotide
ucguucgccgcucccgggc

SEQ ID NO: 926295 - RNA, 19 nt, Artificial Sequence
  Description of Artificial Sequence: Synthetic oligonucleotide
auaaucuccgggaacuuua

SEQ ID NO: 926296 - RNA, 19 nt, Artificial Sequence
  Description of Artificial Sequence: Synthetic oligonucleotide
aucuuauggcacgcuggac

SEQ ID NO: 926297 - RNA, 19 nt, Artificial Sequence
  Description of Artificial Sequence: Synthetic oligonucleotide
acaugcuaagauaucuuau

SEQ ID NO: 926298 - RNA, 19 nt, Artificial Sequence
  Description of Artificial Sequence: Synthetic oligonucleotide
guagacaaugauuguggua

SEQ ID NO: 926299 - RNA, 19 nt, Artificial Sequence
  Description of Artificial Sequence: Synthetic oligonucleotide
agacaaugauugugguaga

SEQ ID NO: 926300 - RNA, 19 nt, Artificial Sequence
  Description of Artificial Sequence: Synthetic oligonucleotide
ccauaaguuuuaauaacca

SEQ ID NO: 926301 - RNA, 19 nt, Artificial Sequence
  Description of Artificial Sequence: Synthetic oligonucleotide
gagugauguucuugcuaug

SEQ ID NO: 926302 - RNA, 19 nt, Artificial Sequence
  Description of Artificial Sequence: Synthetic oligonucleotide
ucuugcuaugcuucucguu

SEQ ID NO: 926303 - RNA, 19 nt, Artificial Sequence
  Description of Artificial Sequence: Synthetic oligonucleotide
ugacccuauaauggagugu

SEQ ID NO: 926304 - RNA, 19 nt, Artificial Sequence
  Description of Artificial Sequence: Synthetic oligonucleotide
uccugauacuuugaauaau

SEQ ID NO: 926305 - RNA, 19 nt, Artificial Sequence
  Description of Artificial Sequence: Synthetic oligonucleotide
gauaguuacaugacccuau

SEQ ID NO: 926306 - RNA, 19 nt, Artificial Sequence
  Description of Artificial Sequence: Synthetic oligonucleotide
ggaaauaaggcaccugcua

SEQ ID NO: 926307 - RNA, 19 nt, Artificial Sequence
  Description of Artificial Sequence: Synthetic oligonucleotide
gcaccuuauuauaggauag

SEQ ID NO: 926308 - RNA, 19 nt, Artificial Sequence
  Description of Artificial Sequence: Synthetic oligonucleotide
gaugauuuacugaauuguu

SEQ ID NO: 926309 - RNA, 19 nt, Artificial Sequence
  Description of Artificial Sequence: Synthetic oligonucleotide
cuaccgacgcuuucucuuc

SEQ ID NO: 926310 - RNA, 19 nt, Artificial Sequence
  Description of Artificial Sequence: Synthetic oligonucleotide
uuuaguugaugugccuuuu

SEQ ID NO: 926311 - RNA, 19 nt, Artificial Sequence
  Description of Artificial Sequence: Synthetic oligonucleotide
guuccgaugaggcauuuau

SEQ ID NO: 926312 - RNA, 19 nt, Artificial Sequence
  Description of Artificial Sequence: Synthetic oligonucleotide
uggccauacggauccucug

SEQ ID NO: 926313 - RNA, 19 nt, Artificial Sequence
  Description of Artificial Sequence: Synthetic oligonucleotide
ggugacuauacuuauucau

SEQ ID NO: 926314 - RNA, 19 nt, Artificial Sequence
  Description of Artificial Sequence: Synthetic oligonucleotide
ucuucgcggcgccaccuga

SEQ ID NO: 926315 - RNA, 19 nt, Artificial Sequence
  Description of Artificial Sequence: Synthetic oligonucleotide
uucgcggcgccaccugacc

SEQ ID NO: 926316 - RNA, 19 nt, Artificial Sequence
  Description of Artificial Sequence: Synthetic oligonucleotide
uuggcgacguugccgcgcu

SEQ ID NO: 926317 - RNA, 19 nt, Artificial Sequence
  Description of Artificial Sequence: Synthetic oligonucleotide
agacuugcuucagagggaa

SEQ ID NO: 926318 - RNA, 19 nt, Artificial Sequence
  Description of Artificial Sequence: Synthetic oligonucleotide
uagcaucucuacuuauauu

SEQ ID NO: 926319 - RNA, 19 nt, Artificial Sequence
  Description of Artificial Sequence: Synthetic oligonucleotide
ccaauaaccaggguccuac

SEQ ID NO: 926320 - RNA, 19 nt, Artificial Sequence
  Description of Artificial Sequence: Synthetic oligonucleotide
agcuuaaggucagucacuu

SEQ ID NO: 926321 - RNA, 19 nt, Artificial Sequence
  Description of Artificial Sequence: Synthetic oligonucleotide
uauggcacgcuggacucaa

SEQ ID NO: 926322 - RNA, 19 nt, Artificial Sequence
  Description of Artificial Sequence: Synthetic oligonucleotide
acuuaugagugaagaggca

SEQ ID NO: 926323 - RNA, 19 nt, Artificial Sequence
  Description of Artificial Sequence: Synthetic oligonucleotide
gacaaugauugugguagaa

SEQ ID NO: 926324 - RNA, 19 nt, Artificial Sequence
  Description of Artificial Sequence: Synthetic oligonucleotide
ggccauacggauccucugc

SEQ ID NO: 926325 - RNA, 19 nt, Artificial Sequence
  Description of Artificial Sequence: Synthetic oligonucleotide
caugacccuauaauggagu

SEQ ID NO: 926326 - RNA, 19 nt, Artificial Sequence
  Description of Artificial Sequence: Synthetic oligonucleotide
ucuuggcgacguugccgcg

SEQ ID NO: 926327 - RNA, 19 nt, Artificial Sequence
  Description of Artificial Sequence: Synthetic oligonucleotide
gcacgcuggacucaacaug

SEQ ID NO: 926328 - RNA, 19 nt, Artificial Sequence
  Description of Artificial Sequence: Synthetic oligonucleotide
uccuaccgacgcuuucucu

SEQ ID NO: 926329 - RNA, 19 nt, Artificial Sequence
  Description of Artificial Sequence: Synthetic oligonucleotide
cuuggcgacguugccgcgc

SEQ ID NO: 926330 - RNA, 19 nt, Artificial Sequence
  Description of Artificial Sequence: Synthetic oligonucleotide
gaucuugggugacuauacu

SEQ ID NO: 926331 - RNA, 19 nt, Artificial Sequence
  Description of Artificial Sequence: Synthetic oligonucleotide
ugguagaacuaggcugugu

SEQ ID NO: 926332 - RNA, 19 nt, Artificial Sequence
  Description of Artificial Sequence: Synthetic oligonucleotide
caucgaacaucaggaauga

SEQ ID NO: 926333 - RNA, 19 nt, Artificial Sequence
  Description of Artificial Sequence: Synthetic oligonucleotide
cuauaauggagugugcuuu

SEQ ID NO: 926334 - RNA, 19 nt, Artificial Sequence
  Description of Artificial Sequence: Synthetic oligonucleotide
acuugcucguucgccgcuc

SEQ ID NO: 926335 - RNA, 19 nt, Artificial Sequence
  Description of Artificial Sequence: Synthetic oligonucleotide
ugcuucucguuggccauac

SEQ ID NO: 926336 - RNA, 19 nt, Artificial Sequence
  Description of Artificial Sequence: Synthetic oligonucleotide
ggacuagaaaaccuggaau

SEQ ID NO: 926337 - RNA, 19 nt, Artificial Sequence
  Description of Artificial Sequence: Synthetic oligonucleotide
guacagucuacuacuggaa

SEQ ID NO: 926338 - RNA, 19 nt, Artificial Sequence
  Description of Artificial Sequence: Synthetic oligonucleotide
uuauggcacgcuggacuca

SEQ ID NO: 926339 - RNA, 19 nt, Artificial Sequence
  Description of Artificial Sequence: Synthetic oligonucleotide
gcuaaaagucacaggagaa

SEQ ID NO: 926340 - RNA, 19 nt, Artificial Sequence
  Description of Artificial Sequence: Synthetic oligonucleotide
acgucauucugaggcagga

SEQ ID NO: 926341 - RNA, 19 nt, Artificial Sequence
  Description of Artificial Sequence: Synthetic oligonucleotide
caucacucucaccuuacua

SEQ ID NO: 926342 - RNA, 19 nt, Artificial Sequence
  Description of Artificial Sequence: Synthetic oligonucleotide
cccuaagggcauuucaauc

SEQ ID NO: 926343 - RNA, 19 nt, Artificial Sequence
  Description of Artificial Sequence: Synthetic oligonucleotide
acuaggcuguguaguuguc

SEQ ID NO: 926344 - RNA, 19 nt, Artificial Sequence
  Description of Artificial Sequence: Synthetic oligonucleotide
uggcgaccaucuucgcggc

SEQ ID NO: 926345 - RNA, 19 nt, Artificial Sequence
  Description of Artificial Sequence: Synthetic oligonucleotide
cugacccgggaaccccucg

SEQ ID NO: 926346 - RNA, 19 nt, Artificial Sequence
  Description of Artificial Sequence: Synthetic oligonucleotide
aggcacugugguauggacu

SEQ ID NO: 926347 - RNA, 19 nt, Artificial Sequence
  Description of Artificial Sequence: Synthetic oligonucleotide
ggauucacuuaugagugaa

SEQ ID NO: 926348 - RNA, 19 nt, Artificial Sequence
  Description of Artificial Sequence: Synthetic oligonucleotide
cucggacuugcucguucgc

SEQ ID NO: 926349 - RNA, 19 nt, Artificial Sequence
  Description of Artificial Sequence: Synthetic oligonucleotide
auucugguauggaaugauu

SEQ ID NO: 926350 - RNA, 19 nt, Artificial Sequence
  Description of Artificial Sequence: Synthetic oligonucleotide
cucucaccuuacuauuuaa

SEQ ID NO: 926351 - RNA, 19 nt, Artificial Sequence
  Description of Artificial Sequence: Synthetic oligonucleotide
cuucgcggcgccaccugac

SEQ ID NO: 926352 - RNA, 19 nt, Artificial Sequence
  Description of Artificial Sequence: Synthetic oligonucleotide
ccgaugaggcauuuauuuc

SEQ ID NO: 926353 - RNA, 19 nt, Artificial Sequence
  Description of Artificial Sequence: Synthetic oligonucleotide
ccucggacuugcucguucg

SEQ ID NO: 926354 - RNA, 19 nt, Artificial Sequence
  Description of Artificial Sequence: Synthetic oligonucleotide
ggacuugcucguucgccgc

SEQ ID NO: 926355 - RNA, 19 nt, Artificial Sequence
  Description of Artificial Sequence: Synthetic oligonucleotide
gucuacuacuggaacuuaa

SEQ ID NO: 926356 - RNA, 19 nt, Artificial Sequence
  Description of Artificial Sequence: Synthetic oligonucleotide
cuugggugacuauacuuau

SEQ ID NO: 926357 - RNA, 19 nt, Artificial Sequence
  Description of Artificial Sequence: Synthetic oligonucleotide
uugccgcgcugagugaugu

SEQ ID NO: 926358 - RNA, 19 nt, Artificial Sequence
  Description of Artificial Sequence: Synthetic oligonucleotide
cuaauugcauuuacacauu

SEQ ID NO: 926359 - RNA, 19 nt, Artificial Sequence
  Description of Artificial Sequence: Synthetic oligonucleotide
gguagacaaugauuguggu

SEQ ID NO: 926360 - RNA, 19 nt, Artificial Sequence
  Description of Artificial Sequence: Synthetic oligonucleotide
ugggaucuugggugacuau

SEQ ID NO: 926361 - RNA, 19 nt, Artificial Sequence
  Description of Artificial Sequence: Synthetic oligonucleotide
augauagcuuuuagugaaa

SEQ ID NO: 926362 - RNA, 19 nt, Artificial Sequence
  Description of Artificial Sequence: Synthetic oligonucleotide
gacccgggaaccccucgga

SEQ ID NO: 926363 - RNA, 19 nt, Artificial Sequence
  Description of Artificial Sequence: Synthetic oligonucleotide
ggaaaauugcagagccaca

SEQ ID NO: 926364 - RNA, 19 nt, Artificial Sequence
  Description of Artificial Sequence: Synthetic oligonucleotide
guccuaccgacgcuuucuc

SEQ ID NO: 926365 - RNA, 19 nt, Artificial Sequence
  Description of Artificial Sequence: Synthetic oligonucleotide
cugauccuuaucaguaaau

SEQ ID NO: 926366 - RNA, 19 nt, Artificial Sequence
  Description of Artificial Sequence: Synthetic oligonucleotide
cguuucucgaggucuuggc

SEQ ID NO: 926367 - RNA, 19 nt, Artificial Sequence
  Description of Artificial Sequence: Synthetic oligonucleotide
uuaugcccuugaagacuua

SEQ ID NO: 926368 - RNA, 19 nt, Artificial Sequence
  Description of Artificial Sequence: Synthetic oligonucleotide
cgacgcuuucucuucgggg

SEQ ID NO: 926369 - RNA, 19 nt, Artificial Sequence
  Description of Artificial Sequence: Synthetic oligonucleotide
gcguuucucgaggucuugg

SEQ ID NO: 926370 - RNA, 19 nt, Artificial Sequence
  Description of Artificial Sequence: Synthetic oligonucleotide
gcuaugcuucucguuggcc

SEQ ID NO: 926371 - RNA, 19 nt, Artificial Sequence
  Description of Artificial Sequence: Synthetic oligonucleotide
ccuuaaagccaauuaucua

SEQ ID NO: 926372 - RNA, 19 nt, Artificial Sequence
  Description of Artificial Sequence: Synthetic oligonucleotide
uguuccgaugaggcauuua

SEQ ID NO: 926373 - RNA, 19 nt, Artificial Sequence
  Description of Artificial Sequence: Synthetic oligonucleotide
ggacucaacauguuccgau

SEQ ID NO: 926374 - RNA, 19 nt, Artificial Sequence
  Description of Artificial Sequence: Synthetic oligonucleotide
gcgaccaucuucgcggcgc

SEQ ID NO: 926375 - RNA, 19 nt, Artificial Sequence
  Description of Artificial Sequence: Synthetic oligonucleotide
ggcaucgaacaucaggaau

SEQ ID NO: 926376 - RNA, 19 nt, Artificial Sequence
  Description of Artificial Sequence: Synthetic oligonucleotide
gggauucacuuaugaguga

SEQ ID NO: 926377 - RNA, 19 nt, Artificial Sequence
  Description of Artificial Sequence: Synthetic oligonucleotide
agucuacuacuggaacuua

SEQ ID NO: 926378 - RNA, 19 nt, Artificial Sequence
  Description of Artificial Sequence: Synthetic oligonucleotide
gaugggaucuugggugacu

SEQ ID NO: 926379 - RNA, 19 nt, Artificial Sequence
  Description of Artificial Sequence: Synthetic oligonucleotide
gcauuucaaucauagcuuu

SEQ ID NO: 926380 - RNA, 19 nt, Artificial Sequence
  Description of Artificial Sequence: Synthetic oligonucleotide
caccugcuacaaauuuaga

SEQ ID NO: 926381 - RNA, 19 nt, Artificial Sequence
  Description of Artificial Sequence: Synthetic oligonucleotide
cagcuuaaggucagucacu

SEQ ID NO: 926382 - RNA, 19 nt, Artificial Sequence
  Description of Artificial Sequence: Synthetic oligonucleotide
gugguagaacuaggcugug

SEQ ID NO: 926383 - RNA, 19 nt, Artificial Sequence
  Description of Artificial Sequence: Synthetic oligonucleotide
guugccgcgcugagugaug

SEQ ID NO: 926384 - RNA, 19 nt, Artificial Sequence
  Description of Artificial Sequence: Synthetic oligonucleotide
cgaacaucaggaaugaguu

SEQ ID NO: 926385 - RNA, 19 nt, Artificial Sequence
  Description of Artificial Sequence: Synthetic oligonucleotide
gggaaucaagugcagggau

SEQ ID NO: 926386 - RNA, 19 nt, Artificial Sequence
  Description of Artificial Sequence: Synthetic oligonucleotide
gggaucuugggugacuaua

SEQ ID NO: 926387 - RNA, 19 nt, Artificial Sequence
  Description of Artificial Sequence: Synthetic oligonucleotide
ccacuuauaagcaccuuau

SEQ ID NO: 926388 - RNA, 19 nt, Artificial Sequence
  Description of Artificial Sequence: Synthetic oligonucleotide
cagucuacuacuggaacuu

SEQ ID NO: 926389 - RNA, 19 nt, Artificial Sequence
  Description of Artificial Sequence: Synthetic oligonucleotide
acguugccgcgcugaguga

SEQ ID NO: 926390 - RNA, 19 nt, Artificial Sequence
  Description of Artificial Sequence: Synthetic oligonucleotide
gacuugcucguucgccgcu

SEQ ID NO: 926391 - RNA, 19 nt, Artificial Sequence
  Description of Artificial Sequence: Synthetic oligonucleotide
caccuuauuauaggauagu

SEQ ID NO: 926392 - RNA, 19 nt, Artificial Sequence
  Description of Artificial Sequence: Synthetic oligonucleotide
ccuagcuauauaaaaccuu

SEQ ID NO: 926393 - RNA, 19 nt, Artificial Sequence
  Description of Artificial Sequence: Synthetic oligonucleotide
gugcagggauucacuuaug

SEQ ID NO: 926394 - RNA, 19 nt, Artificial Sequence
  Description of Artificial Sequence: Synthetic oligonucleotide
gcuucucguuggccauacg

SEQ ID NO: 926395 - RNA, 19 nt, Artificial Sequence
  Description of Artificial Sequence: Synthetic oligonucleotide
gccuagcuauauaaaaccu

SEQ ID NO: 926396 - RNA, 19 nt, Artificial Sequence
  Description of Artificial Sequence: Synthetic oligonucleotide
auggcacgcuggacucaac

SEQ ID NO: 926397 - RNA, 19 nt, Artificial Sequence
  Description of Artificial Sequence: Synthetic oligonucleotide
ggcgaccaucuucgcggcg

SEQ ID NO: 926398 - RNA, 19 nt, Artificial Sequence
  Description of Artificial Sequence: Synthetic oligonucleotide
gccgcgcugagugauguuc

SEQ ID NO: 926399 - RNA, 19 nt, Artificial Sequence
  Description of Artificial Sequence: Synthetic oligonucleotide
cauguuccgaugaggcauu

SEQ ID NO: 926400 - RNA, 19 nt, Artificial Sequence
  Description of Artificial Sequence: Synthetic oligonucleotide
gcgacguugccgcgcugag

SEQ ID NO: 926401 - RNA, 19 nt, Artificial Sequence
  Description of Artificial Sequence: Synthetic oligonucleotide
gggcaucgaacaucaggaa

SEQ ID NO: 926402 - RNA, 19 nt, Artificial Sequence
  Description of Artificial Sequence: Synthetic oligonucleotide
ucgaggucuuggcgacguu

SEQ ID NO: 926403 - RNA, 19 nt, Artificial Sequence
  Description of Artificial Sequence: Synthetic oligonucleotide
gcgcugagugauguucuug

SEQ ID NO: 926404 - RNA, 19 nt, Artificial Sequence
  Description of Artificial Sequence: Synthetic oligonucleotide
gguccuaccgacgcuuucu

SEQ ID NO: 926405 - RNA, 19 nt, Artificial Sequence
  Description of Artificial Sequence: Synthetic oligonucleotide
ccaucuucgcggcgccacc

SEQ ID NO: 926406 - RNA, 19 nt, Artificial Sequence
  Description of Artificial Sequence: Synthetic oligonucleotide
gccauacggauccucugcu

SEQ ID NO: 926407 - RNA, 19 nt, Artificial Sequence
  Description of Artificial Sequence: Synthetic oligonucleotide
ccuauaauggagugugcuu

SEQ ID NO: 926408 - RNA, 19 nt, Artificial Sequence
  Description of Artificial Sequence: Synthetic oligonucleotide
ggcgacguugccgcgcuga

SEQ ID NO: 926409 - RNA, 19 nt, Artificial Sequence
  Description of Artificial Sequence: Synthetic oligonucleotide
cgaggucuuggcgacguug

SEQ ID NO: 926410 - RNA, 19 nt, Artificial Sequence
  Description of Artificial Sequence: Synthetic oligonucleotide
cucgaggucuuggcgacgu

SEQ ID NO: 926411 - RNA, 19 nt, Artificial Sequence
  Description of Artificial Sequence: Synthetic oligonucleotide
ggaaucaagugcagggauu

SEQ ID NO: 926412 - RNA, 19 nt, Artificial Sequence
  Description of Artificial Sequence: Synthetic oligonucleotide
ggcgccaccugacccggga

SEQ ID NO: 926413 - RNA, 19 nt, Artificial Sequence
  Description of Artificial Sequence: Synthetic oligonucleotide
ccuaacuaccccuuuccuu

SEQ ID NO: 926414 - RNA, 19 nt, Artificial Sequence
  Description of Artificial Sequence: Synthetic oligonucleotide
uggcgacguugccgcgcug

SEQ ID NO: 926415 - RNA, 19 nt, Artificial Sequence
  Description of Artificial Sequence: Synthetic oligonucleotide
gcacugugguauggacuag

SEQ ID NO: 926416 - RNA, 19 nt, Artificial Sequence
  Description of Artificial Sequence: Synthetic oligonucleotide
gagggccaauaaccagggu

SEQ ID NO: 926417 - RNA, 19 nt, Artificial Sequence
  Description of Artificial Sequence: Synthetic oligonucleotide
ggguccuaccgacgcuuuc

SEQ ID NO: 926418 - RNA, 19 nt, Artificial Sequence
  Description of Artificial Sequence: Synthetic oligonucleotide
ccuaccgacgcuuucucuu

SEQ ID NO: 926419 - RNA, 19 nt, Artificial Sequence
  Description of Artificial Sequence: Synthetic oligonucleotide
aggguccuaccgacgcuuu

SEQ ID NO: 926420 - RNA, 19 nt, Artificial Sequence
  Description of Artificial Sequence: Synthetic oligonucleotide
caucuucgcggcgccaccu

SEQ ID NO: 926421 - RNA, 19 nt, Artificial Sequence
  Description of Artificial Sequence: Synthetic oligonucleotide
ccugacccgggaaccccuc

SEQ ID NO: 926422 - RNA, 19 nt, Artificial Sequence
  Description of Artificial Sequence: Synthetic oligonucleotide
cguucgccgcucccgggcc

SEQ ID NO: 926423 - RNA, 19 nt, Artificial Sequence
  Description of Artificial Sequence: Synthetic oligonucleotide
acgcuggacucaacauguu

SEQ ID NO: 926424 - RNA, 19 nt, Artificial Sequence
  Description of Artificial Sequence: Synthetic oligonucleotide
gccaauaaccaggguccua

SEQ ID NO: 926425 - RNA, 19 nt, Artificial Sequence
  Description of Artificial Sequence: Synthetic oligonucleotide
cccgggaaccccucggacu

SEQ ID NO: 926426 - RNA, 19 nt, Artificial Sequence
  Description of Artificial Sequence: Synthetic oligonucleotide
cccuaacuaccccuuuccu

SEQ ID NO: 926427 - RNA, 19 nt, Artificial Sequence
  Description of Artificial Sequence: Synthetic oligonucleotide
ggccaauaaccaggguccu

SEQ ID NO: 926428 - RNA, 19 nt, Artificial Sequence
  Description of Artificial Sequence: Synthetic oligonucleotide
cuaguacccuaagggcauu

SEQ ID NO: 926429 - RNA, 19 nt, Artificial Sequence
  Description of Artificial Sequence: Synthetic oligonucleotide
ccgcgcugagugauguucu

SEQ ID NO: 926430 - RNA, 19 nt, Artificial Sequence
  Description of Artificial Sequence: Synthetic oligonucleotide
ccauacggauccucugcuu

SEQ ID NO: 926431 - RNA, 19 nt, Artificial Sequence
  Description of Artificial Sequence: Synthetic oligonucleotide
cgggaaccccucggacuug

SEQ ID NO: 926432 - RNA, 19 nt, Artificial Sequence
  Description of Artificial Sequence: Synthetic oligonucleotide
cggcgccaccugacccggg

SEQ ID NO: 926433 - RNA, 19 nt, Artificial Sequence
  Description of Artificial Sequence: Synthetic oligonucleotide
cguugccgcgcugagugau

SEQ ID NO: 926434 - RNA, 19 nt, Artificial Sequence
  Description of Artificial Sequence: Synthetic oligonucleotide
cgcgcugagugauguucuu

SEQ ID NO: 926435 - RNA, 19 nt, Artificial Sequence
  Description of Artificial Sequence: Synthetic oligonucleotide
cgacguugccgcgcugagu

SEQ ID NO: 926436 - RNA, 19 nt, Artificial Sequence
  Description of Artificial Sequence: Synthetic oligonucleotide
ccccucggacuugcucguu

SEQ ID NO: 926437 - RNA, 19 nt, Artificial Sequence
  Description of Artificial Sequence: Synthetic oligonucleotide
aaagcuaauaaauaaauag

SEQ ID NO: 926438 - RNA, 19 nt, Artificial Sequence
  Description of Artificial Sequence: Synthetic oligonucleotide
aaauagaaaacucagcaau

SEQ ID NO: 926439 - RNA, 19 nt, Artificial Sequence
  Description of Artificial Sequence: Synthetic oligonucleotide
uugauaaugcauuuagugg

SEQ ID NO: 926440 - RNA, 19 nt, Artificial Sequence
  Description of Artificial Sequence: Synthetic oligonucleotide
agaaaacucagcaauaugc

SEQ ID NO: 926441 - RNA, 19 nt, Artificial Sequence
  Description of Artificial Sequence: Synthetic oligonucleotide
ugauaaugcauuuaguggc

SEQ ID NO: 926442 - RNA, 19 nt, Artificial Sequence
  Description of Artificial Sequence: Synthetic oligonucleotide
cuugauaaugcauuuagug

SEQ ID NO: 926443 - RNA, 19 nt, Artificial Sequence
  Description of Artificial Sequence: Synthetic oligonucleotide
agauuuuagaguccagacc

SEQ ID NO: 926444 - RNA, 19 nt, Artificial Sequence
  Description of Artificial Sequence: Synthetic oligonucleotide
uuagcaaacuccacgaucu

SEQ ID NO: 926445 - RNA, 19 nt, Artificial Sequence
  Description of Artificial Sequence: Synthetic oligonucleotide
uguaaaaccaggcaaccgu

SEQ ID NO: 926446 - RNA, 19 nt, Artificial Sequence
  Description of Artificial Sequence: Synthetic oligonucleotide
aaggguagaaggcacuagg

SEQ ID NO: 926447 - RNA, 19 nt, Artificial Sequence
  Description of Artificial Sequence: Synthetic oligonucleotide
aaaauagaaaacucagcaa

SEQ ID NO: 926448 - RNA, 19 nt, Artificial Sequence
  Description of Artificial Sequence: Synthetic oligonucleotide
agcuaauaaauaaauagag

SEQ ID NO: 926449 - RNA, 19 nt, Artificial Sequence
  Description of Artificial Sequence: Synthetic oligonucleotide
aaugcauuuaguggccagc

SEQ ID NO: 926450 - RNA, 19 nt, Artificial Sequence
  Description of Artificial Sequence: Synthetic oligonucleotide
ucagcaauaugcgauacag

SEQ ID NO: 926451 - RNA, 19 nt, Artificial Sequence
  Description of Artificial Sequence: Synthetic oligonucleotide
aggaaucuuauuuggcagc

SEQ ID NO: 926452 - RNA, 19 nt, Artificial Sequence
  Description of Artificial Sequence: Synthetic oligonucleotide
guuuguaaaauggagggcc

SEQ ID NO: 926453 - RNA, 19 nt, Artificial Sequence
  Description of Artificial Sequence: Synthetic oligonucleotide
uuggcagcuaaauacaaac

SEQ ID NO: 926454 - RNA, 19 nt, Artificial Sequence
  Description of Artificial Sequence: Synthetic oligonucleotide
ucuauaccuggcaggaagg

SEQ ID NO: 926455 - RNA, 19 nt, Artificial Sequence
  Description of Artificial Sequence: Synthetic oligonucleotide
uacacggugauucugcacu

SEQ ID NO: 926456 - RNA, 19 nt, Artificial Sequence
  Description of Artificial Sequence: Synthetic oligonucleotide
uguacuugcccuagucugg

SEQ ID NO: 926457 - RNA, 19 nt, Artificial Sequence
  Description of Artificial Sequence: Synthetic oligonucleotide
cuucauaccucacuggaag

SEQ ID NO: 926458 - RNA, 19 nt, Artificial Sequence
  Description of Artificial Sequence: Synthetic oligonucleotide
aaugucauggugucuugcu

SEQ ID NO: 926459 - RNA, 19 nt, Artificial Sequence
  Description of Artificial Sequence: Synthetic oligonucleotide
uuuguaaaauggagggccc

SEQ ID NO: 926460 - RNA, 19 nt, Artificial Sequence
  Description of Artificial Sequence: Synthetic oligonucleotide
ggguuuguaaaauggaggg

SEQ ID NO: 926461 - RNA, 19 nt, Artificial Sequence
  Description of Artificial Sequence: Synthetic oligonucleotide
uuuaguggccagcucacug

SEQ ID NO: 926462 - RNA, 19 nt, Artificial Sequence
  Description of Artificial Sequence: Synthetic oligonucleotide
caaccguuuagcaaacucc

SEQ ID NO: 926463 - RNA, 19 nt, Artificial Sequence
  Description of Artificial Sequence: Synthetic oligonucleotide
ucucuaguguuccuguuug

SEQ ID NO: 926464 - RNA, 19 nt, Artificial Sequence
  Description of Artificial Sequence: Synthetic oligonucleotide
uaugcgauacagcggagug

SEQ ID NO: 926465 - RNA, 19 nt, Artificial Sequence
  Description of Artificial Sequence: Synthetic oligonucleotide
ugggguauaccuuguacag

SEQ ID NO: 926466 - RNA, 19 nt, Artificial Sequence
  Description of Artificial Sequence: Synthetic oligonucleotide
gagccuguggccugaaucg

SEQ ID NO: 926467 - RNA, 19 nt, Artificial Sequence
  Description of Artificial Sequence: Synthetic oligonucleotide
ugcgauacagcggaguggg

SEQ ID NO: 926468 - RNA, 19 nt, Artificial Sequence
  Description of Artificial Sequence: Synthetic oligonucleotide
aaccaggcaaccguuuagc

SEQ ID NO: 926469 - RNA, 19 nt, Artificial Sequence
  Description of Artificial Sequence: Synthetic oligonucleotide
aaaccaggcaaccguuuag

SEQ ID NO: 926470 - RNA, 19 nt, Artificial Sequence
  Description of Artificial Sequence: Synthetic oligonucleotide
uccuguaaaaccaggcaac

SEQ ID NO: 926471 - RNA, 19 nt, Artificial Sequence
  Description of Artificial Sequence: Synthetic oligonucleotide
gcuaauaaauaaauagagg

SEQ ID NO: 926472 - RNA, 19 nt, Artificial Sequence
  Description of Artificial Sequence: Synthetic oligonucleotide
cucacuggaagccuugggg

SEQ ID NO: 926473 - RNA, 19 nt, Artificial Sequence
  Description of Artificial Sequence: Synthetic oligonucleotide
ggcagcuaaauacaaacag

SEQ ID NO: 926474 - RNA, 19 nt, Artificial Sequence
  Description of Artificial Sequence: Synthetic oligonucleotide
agcuaagcagcaucucccc

SEQ ID NO: 926475 - RNA, 19 nt, Artificial Sequence
  Description of Artificial Sequence: Synthetic oligonucleotide
cucuauaccuggcaggaag

SEQ ID NO: 926476 - RNA, 19 nt, Artificial Sequence
  Description of Artificial Sequence: Synthetic oligonucleotide
gauaaugcauuuaguggcc

SEQ ID NO: 926477 - RNA, 19 nt, Artificial Sequence
  Description of Artificial Sequence: Synthetic oligonucleotide
ucuugauaaugcauuuagu

SEQ ID NO: 926478 - RNA, 19 nt, Artificial Sequence
  Description of Artificial Sequence: Synthetic oligonucleotide
caauaugcgauacagcgga

SEQ ID NO: 926479 - RNA, 19 nt, Artificial Sequence
  Description of Artificial Sequence: Synthetic oligonucleotide
agguucaucacacagcguu

SEQ ID NO: 926480 - RNA, 19 nt, Artificial Sequence
  Description of Artificial Sequence: Synthetic oligonucleotide
uuagaacaggacagggaug

SEQ ID NO: 926481 - RNA, 19 nt, Artificial Sequence
  Description of Artificial Sequence: Synthetic oligonucleotide
gaguucgugguguacuugc

SEQ ID NO: 926482 - RNA, 19 nt, Artificial Sequence
  Description of Artificial Sequence: Synthetic oligonucleotide
agaaacuuuggcaaaacaa

SEQ ID NO: 926483 - RNA, 19 nt, Artificial Sequence
  Description of Artificial Sequence: Synthetic oligonucleotide
aggucggugauuuucauua

SEQ ID NO: 926484 - RNA, 19 nt, Artificial Sequence
  Description of Artificial Sequence: Synthetic oligonucleotide
accccuagaaacuuuggca

SEQ ID NO: 926485 - RNA, 19 nt, Artificial Sequence
  Description of Artificial Sequence: Synthetic oligonucleotide
guguacuugcccuagucug

SEQ ID NO: 926486 - RNA, 19 nt, Artificial Sequence
  Description of Artificial Sequence: Synthetic oligonucleotide
aacaaugagcucaugggaa

SEQ ID NO: 926487 - RNA, 19 nt, Artificial Sequence
  Description of Artificial Sequence: Synthetic oligonucleotide
cauggcagguucaucacac

SEQ ID NO: 926488 - RNA, 19 nt, Artificial Sequence
  Description of Artificial Sequence: Synthetic oligonucleotide
uccaucacuuuauuuugca

SEQ ID NO: 926489 - RNA, 19 nt, Artificial Sequence
  Description of Artificial Sequence: Synthetic oligonucleotide
ugcucugggguauaccuug

SEQ ID NO: 926490 - RNA, 19 nt, Artificial Sequence
  Description of Artificial Sequence: Synthetic oligonucleotide
aaaaccaggcaaccguuua

SEQ ID NO: 926491 - RNA, 19 nt, Artificial Sequence
  Description of Artificial Sequence: Synthetic oligonucleotide
aaccguuuagcaaacucca

SEQ ID NO: 926492 - RNA, 19 nt, Artificial Sequence
  Description of Artificial Sequence: Synthetic oligonucleotide
ucauaccucacuggaagcc

SEQ ID NO: 926493 - RNA, 19 nt, Artificial Sequence
  Description of Artificial Sequence: Synthetic oligonucleotide
cuguacacggugauucugc

SEQ ID NO: 926494 - RNA, 19 nt, Artificial Sequence
  Description of Artificial Sequence: Synthetic oligonucleotide
gaggagauguaaacagagg

SEQ ID NO: 926495 - RNA, 19 nt, Artificial Sequence
  Description of Artificial Sequence: Synthetic oligonucleotide
ugccucuauaccuggcagg

SEQ ID NO: 926496 - RNA, 19 nt, Artificial Sequence
  Description of Artificial Sequence: Synthetic oligonucleotide
uucauaccucacuggaagc

SEQ ID NO: 926497 - RNA, 19 nt, Artificial Sequence
  Description of Artificial Sequence: Synthetic oligonucleotide
gugcugagauuuuagaguc

SEQ ID NO: 926498 - RNA, 19 nt, Artificial Sequence
  Description of Artificial Sequence: Synthetic oligonucleotide
augucauggugucuugcuc

SEQ ID NO: 926499 - RNA, 19 nt, Artificial Sequence
  Description of Artificial Sequence: Synthetic oligonucleotide
ggagauguaaacagagggg

SEQ ID NO: 926500 - RNA, 19 nt, Artificial Sequence
  Description of Artificial Sequence: Synthetic oligonucleotide
uggcagcuaaauacaaaca

SEQ ID NO: 926501 - RNA, 19 nt, Artificial Sequence
  Description of Artificial Sequence: Synthetic oligonucleotide
uguacagauucgcagcauu

SEQ ID NO: 926502 - RNA, 19 nt, Artificial Sequence
  Description of Artificial Sequence: Synthetic oligonucleotide
auucgcagcauuaggaugu

SEQ ID NO: 926503 - RNA, 19 nt, Artificial Sequence
  Description of Artificial Sequence: Synthetic oligonucleotide
ucuaguguuccuguuugcu

SEQ ID NO: 926504 - RNA, 19 nt, Artificial Sequence
  Description of Artificial Sequence: Synthetic oligonucleotide
guuagaacaggacagggau

SEQ ID NO: 926505 - RNA, 19 nt, Artificial Sequence
  Description of Artificial Sequence: Synthetic oligonucleotide
cauuuaguggccagcucac

SEQ ID NO: 926506 - RNA, 19 nt, Artificial Sequence
  Description of Artificial Sequence: Synthetic oligonucleotide
uguaaacagaggggagggg

SEQ ID NO: 926507 - RNA, 19 nt, Artificial Sequence
  Description of Artificial Sequence: Synthetic oligonucleotide
cugcaguuuauccacuuuc

SEQ ID NO: 926508 - RNA, 19 nt, Artificial Sequence
  Description of Artificial Sequence: Synthetic oligonucleotide
gauacagcggagugggcga

SEQ ID NO: 926509 - RNA, 19 nt, Artificial Sequence
  Description of Artificial Sequence: Synthetic oligonucleotide
gccugaaucggacaggcag

SEQ ID NO: 926510 - RNA, 19 nt, Artificial Sequence
  Description of Artificial Sequence: Synthetic oligonucleotide
cuaguguuccuguuugcuc

SEQ ID NO: 926511 - RNA, 19 nt, Artificial Sequence
  Description of Artificial Sequence: Synthetic oligonucleotide
cuguaaaaccaggcaaccg

SEQ ID NO: 926512 - RNA, 19 nt, Artificial Sequence
  Description of Artificial Sequence: Synthetic oligonucleotide
gucacgguggaucagcuaa

SEQ ID NO: 926513 - RNA, 19 nt, Artificial Sequence
  Description of Artificial Sequence: Synthetic oligonucleotide
caggcaaccguuuagcaaa

SEQ ID NO: 926514 - RNA, 19 nt, Artificial Sequence
  Description of Artificial Sequence: Synthetic oligonucleotide
guacgguucagggucagcc

SEQ ID NO: 926515 - RNA, 19 nt, Artificial Sequence
  Description of Artificial Sequence: Synthetic oligonucleotide
uggaggaaggggucauucc

SEQ ID NO: 926516 - RNA, 19 nt, Artificial Sequence
  Description of Artificial Sequence: Synthetic oligonucleotide
gucggugauuuucauuagc

SEQ ID NO: 926517 - RNA, 19 nt, Artificial Sequence
  Description of Artificial Sequence: Synthetic oligonucleotide
ucauuccaggguguaaaca

SEQ ID NO: 926518 - RNA, 19 nt, Artificial Sequence
  Description of Artificial Sequence: Synthetic oligonucleotide
cuguaccucagcagagagg

SEQ ID NO: 926519 - RNA, 19 nt, Artificial Sequence
  Description of Artificial Sequence: Synthetic oligonucleotide
auccgagaaugucauggug

SEQ ID NO: 926520 - RNA, 19 nt, Artificial Sequence
  Description of Artificial Sequence: Synthetic oligonucleotide
gaggagucguccucaaaca

SEQ ID NO: 926521 - RNA, 19 nt, Artificial Sequence
  Description of Artificial Sequence: Synthetic oligonucleotide
gaaucggacaggcagugcu

SEQ ID NO: 926522 - RNA, 19 nt, Artificial Sequence
  Description of Artificial Sequence: Synthetic oligonucleotide
cugggguauaccuuguaca

SEQ ID NO: 926523 - RNA, 19 nt, Artificial Sequence
  Description of Artificial Sequence: Synthetic oligonucleotide
cagcguuaggcacccaggg

SEQ ID NO: 926524 - RNA, 19 nt, Artificial Sequence
  Description of Artificial Sequence: Synthetic oligonucleotide
aaacuccacgaucuugaua

SEQ ID NO: 926525 - RNA, 19 nt, Artificial Sequence
  Description of Artificial Sequence: Synthetic oligonucleotide
uacgguucagggucagccc

SEQ ID NO: 926526 - RNA, 19 nt, Artificial Sequence
  Description of Artificial Sequence: Synthetic oligonucleotide
guccuguaaaaccaggcaa

SEQ ID NO: 926527 - RNA, 19 nt, Artificial Sequence
  Description of Artificial Sequence: Synthetic oligonucleotide
ccauccgagaaugucaugg

SEQ ID NO: 926528 - RNA, 19 nt, Artificial Sequence
  Description of Artificial Sequence: Synthetic oligonucleotide
cagcaauaugcgauacagc

SEQ ID NO: 926529 - RNA, 19 nt, Artificial Sequence
  Description of Artificial Sequence: Synthetic oligonucleotide
ccaggguguaaacaaaagc

SEQ ID NO: 926530 - RNA, 19 nt, Artificial Sequence
  Description of Artificial Sequence: Synthetic oligonucleotide
cauugugcaucuggguacg

SEQ ID NO: 926531 - RNA, 19 nt, Artificial Sequence
  Description of Artificial Sequence: Synthetic oligonucleotide
ccguuuagcaaacuccacg

SEQ ID NO: 926532 - RNA, 19 nt, Artificial Sequence
  Description of Artificial Sequence: Synthetic oligonucleotide
gaaugucauggugucuugc

SEQ ID NO: 926533 - RNA, 19 nt, Artificial Sequence
  Description of Artificial Sequence: Synthetic oligonucleotide
gcauuuaguggccagcuca

SEQ ID NO: 926534 - RNA, 19 nt, Artificial Sequence
  Description of Artificial Sequence: Synthetic oligonucleotide
gaacaggacagggauggac

SEQ ID NO: 926535 - RNA, 19 nt, Artificial Sequence
  Description of Artificial Sequence: Synthetic oligonucleotide
cacagcguuaggcacccag

SEQ ID NO: 926536 - RNA, 19 nt, Artificial Sequence
  Description of Artificial Sequence: Synthetic oligonucleotide
uuguaaaauggagggccca

SEQ ID NO: 926537 - RNA, 19 nt, Artificial Sequence
  Description of Artificial Sequence: Synthetic oligonucleotide
caugcggucuccacagaug

SEQ ID NO: 926538 - RNA, 19 nt, Artificial Sequence
  Description of Artificial Sequence: Synthetic oligonucleotide
aggaggccaaggcacaaga

SEQ ID NO: 926539 - RNA, 19 nt, Artificial Sequence
  Description of Artificial Sequence: Synthetic oligonucleotide
uaguguaggagggucccug

SEQ ID NO: 926540 - RNA, 19 nt, Artificial Sequence
  Description of Artificial Sequence: Synthetic oligonucleotide
aauaugcgauacagcggag

SEQ ID NO: 926541 - RNA, 19 nt, Artificial Sequence
  Description of Artificial Sequence: Synthetic oligonucleotide
uuaggauguccaggcaggc

SEQ ID NO: 926542 - RNA, 19 nt, Artificial Sequence
  Description of Artificial Sequence: Synthetic oligonucleotide
agguccaugcggucuccac

SEQ ID NO: 926543 - RNA, 19 nt, Artificial Sequence
  Description of Artificial Sequence: Synthetic oligonucleotide
gcaauaugcgauacagcgg

SEQ ID NO: 926544 - RNA, 19 nt, Artificial Sequence
  Description of Artificial Sequence: Synthetic oligonucleotide
ugcauggcagguucaucac

SEQ ID NO: 926545 - RNA, 19 nt, Artificial Sequence
  Description of Artificial Sequence: Synthetic oligonucleotide
agguacagaaagggcuuac

SEQ ID NO: 926546 - RNA, 19 nt, Artificial Sequence
  Description of Artificial Sequence: Synthetic oligonucleotide
gguuggggacuuuuggccc

SEQ ID NO: 926547 - RNA, 19 nt, Artificial Sequence
  Description of Artificial Sequence: Synthetic oligonucleotide
cugccucuauaccuggcag

SEQ ID NO: 926548 - RNA, 19 nt, Artificial Sequence
  Description of Artificial Sequence: Synthetic oligonucleotide
augcgauacagcggagugg

SEQ ID NO: 926549 - RNA, 19 nt, Artificial Sequence
  Description of Artificial Sequence: Synthetic oligonucleotide
auaugcgauacagcggagu

SEQ ID NO: 926550 - RNA, 19 nt, Artificial Sequence
  Description of Artificial Sequence: Synthetic oligonucleotide
gcauugugcaucuggguac

SEQ ID NO: 926551 - RNA, 19 nt, Artificial Sequence
  Description of Artificial Sequence: Synthetic oligonucleotide
cuugcucugggguauaccu

SEQ ID NO: 926552 - RNA, 19 nt, Artificial Sequence
  Description of Artificial Sequence: Synthetic oligonucleotide
cucuaguguuccuguuugc

SEQ ID NO: 926553 - RNA, 19 nt, Artificial Sequence
  Description of Artificial Sequence: Synthetic oligonucleotide
caggacuguagagggagcc

SEQ ID NO: 926554 - RNA, 19 nt, Artificial Sequence
  Description of Artificial Sequence: Synthetic oligonucleotide
gagggguuuguaaaaugga

SEQ ID NO: 926555 - RNA, 19 nt, Artificial Sequence
  Description of Artificial Sequence: Synthetic oligonucleotide
uccgucgccgggcguaaag

SEQ ID NO: 926556 - RNA, 19 nt, Artificial Sequence
  Description of Artificial Sequence: Synthetic oligonucleotide
cgaggagauguaaacagag

SEQ ID NO: 926557 - RNA, 19 nt, Artificial Sequence
  Description of Artificial Sequence: Synthetic oligonucleotide
ugggucacgguggaucagc

SEQ ID NO: 926558 - RNA, 19 nt, Artificial Sequence
  Description of Artificial Sequence: Synthetic oligonucleotide
ggguaauggcccuuucugc

SEQ ID NO: 926559 - RNA, 19 nt, Artificial Sequence
  Description of Artificial Sequence: Synthetic oligonucleotide
caaaggcaaagccaggucu

SEQ ID NO: 926560 - RNA, 19 nt, Artificial Sequence
  Description of Artificial Sequence: Synthetic oligonucleotide
gucagcccauccgagaaug

SEQ ID NO: 926561 - RNA, 19 nt, Artificial Sequence
  Description of Artificial Sequence: Synthetic oligonucleotide
ggacuuuuggcccguuuug

SEQ ID NO: 926562 - RNA, 19 nt, Artificial Sequence
  Description of Artificial Sequence: Synthetic oligonucleotide
gcaucucucggaucagagg

SEQ ID NO: 926563 - RNA, 19 nt, Artificial Sequence
  Description of Artificial Sequence: Synthetic oligonucleotide
gguuuguaaaauggagggc

SEQ ID NO: 926564 - RNA, 19 nt, Artificial Sequence
  Description of Artificial Sequence: Synthetic oligonucleotide
aggguguaaacaaaagcua

SEQ ID NO: 926565 - RNA, 19 nt, Artificial Sequence
  Description of Artificial Sequence: Synthetic oligonucleotide
gaaacauguaggguuggcu

SEQ ID NO: 926566 - RNA, 19 nt, Artificial Sequence
  Description of Artificial Sequence: Synthetic oligonucleotide
ucaaggguagaaggcacua

SEQ ID NO: 926567 - RNA, 19 nt, Artificial Sequence
  Description of Artificial Sequence: Synthetic oligonucleotide
acacggugauucugcacug

SEQ ID NO: 926568 - RNA, 19 nt, Artificial Sequence
  Description of Artificial Sequence: Synthetic oligonucleotide
agcguuaggcacccagggu

SEQ ID NO: 926569 - RNA, 19 nt, Artificial Sequence
  Description of Artificial Sequence: Synthetic oligonucleotide
accguuuagcaaacuccac

SEQ ID NO: 926570 - RNA, 19 nt, Artificial Sequence
  Description of Artificial Sequence: Synthetic oligonucleotide
cgguggaucagcuaagcag

SEQ ID NO: 926571 - RNA, 19 nt, Artificial Sequence
  Description of Artificial Sequence: Synthetic oligonucleotide
cagaaagggcuuacacuuc

SEQ ID NO: 926572 - RNA, 19 nt, Artificial Sequence
  Description of Artificial Sequence: Synthetic oligonucleotide
ggugauucugcacuggagu

SEQ ID NO: 926573 - RNA, 19 nt, Artificial Sequence
  Description of Artificial Sequence: Synthetic oligonucleotide
cugaaucggacaggcagug

SEQ ID NO: 926574 - RNA, 19 nt, Artificial Sequence
  Description of Artificial Sequence: Synthetic oligonucleotide
ugguaggugcagagcaguc

SEQ ID NO: 926575 - RNA, 19 nt, Artificial Sequence
  Description of Artificial Sequence: Synthetic oligonucleotide
acgguggaucagcuaagca

SEQ ID NO: 926576 - RNA, 19 nt, Artificial Sequence
  Description of Artificial Sequence: Synthetic oligonucleotide
uugcccuagucuggcagag

SEQ ID NO: 926577 - RNA, 19 nt, Artificial Sequence
  Description of Artificial Sequence: Synthetic oligonucleotide
gcaaccguuuagcaaacuc

SEQ ID NO: 926578 - RNA, 19 nt, Artificial Sequence
  Description of Artificial Sequence: Synthetic oligonucleotide
caaggguagaaggcacuag

SEQ ID NO: 926579 - RNA, 19 nt, Artificial Sequence
  Description of Artificial Sequence: Synthetic oligonucleotide
gcugaguccuguaaaacca

SEQ ID NO: 926580 - RNA, 19 nt, Artificial Sequence
  Description of Artificial Sequence: Synthetic oligonucleotide
gacagggcuaagggagggg

SEQ ID NO: 926581 - RNA, 19 nt, Artificial Sequence
  Description of Artificial Sequence: Synthetic oligonucleotide
auuuuagaguccagaccca

SEQ ID NO: 926582 - RNA, 19 nt, Artificial Sequence
  Description of Artificial Sequence: Synthetic oligonucleotide
uggguacgguucaggguca

SEQ ID NO: 926583 - RNA, 19 nt, Artificial Sequence
  Description of Artificial Sequence: Synthetic oligonucleotide
acagggcuaagggaggggu

SEQ ID NO: 926584 - RNA, 19 nt, Artificial Sequence
  Description of Artificial Sequence: Synthetic oligonucleotide
aggguagaaggcacuagga

SEQ ID NO: 926585 - RNA, 19 nt, Artificial Sequence
  Description of Artificial Sequence: Synthetic oligonucleotide
agcccauccgagaauguca

SEQ ID NO: 926586 - RNA, 19 nt, Artificial Sequence
  Description of Artificial Sequence: Synthetic oligonucleotide
uggaguucgugguguacuu

SEQ ID NO: 926587 - RNA, 19 nt, Artificial Sequence
  Description of Artificial Sequence: Synthetic oligonucleotide
gcccguuuugcccuggccc

SEQ ID NO: 926588 - RNA, 19 nt, Artificial Sequence
  Description of Artificial Sequence: Synthetic oligonucleotide
gcccuagucuggcagagug

SEQ ID NO: 926589 - RNA, 19 nt, Artificial Sequence
  Description of Artificial Sequence: Synthetic oligonucleotide
uucaccccuccuccgguuc

SEQ ID NO: 926590 - RNA, 19 nt, Artificial Sequence
  Description of Artificial Sequence: Synthetic oligonucleotide
gggcguaaagccucagggc

SEQ ID NO: 926591 - RNA, 19 nt, Artificial Sequence
  Description of Artificial Sequence: Synthetic oligonucleotide
ggacuguagagggagccag

SEQ ID NO: 926592 - RNA, 19 nt, Artificial Sequence
  Description of Artificial Sequence: Synthetic oligonucleotide
ugggguaggucaggggccc

SEQ ID NO: 926593 - RNA, 19 nt, Artificial Sequence
  Description of Artificial Sequence: Synthetic oligonucleotide
ucggacaggcagugcugag

SEQ ID NO: 926594 - RNA, 19 nt, Artificial Sequence
  Description of Artificial Sequence: Synthetic oligonucleotide
ucagcccauccgagaaugu

SEQ ID NO: 926595 - RNA, 19 nt, Artificial Sequence
  Description of Artificial Sequence: Synthetic oligonucleotide
cgggcguaaagccucaggg

SEQ ID NO: 926596 - RNA, 19 nt, Artificial Sequence
  Description of Artificial Sequence: Synthetic oligonucleotide
ucaggguaauggcccuuuc

SEQ ID NO: 926597 - RNA, 19 nt, Artificial Sequence
  Description of Artificial Sequence: Synthetic oligonucleotide
cagugggguaggucagggg

SEQ ID NO: 926598 - RNA, 19 nt, Artificial Sequence
  Description of Artificial Sequence: Synthetic oligonucleotide
ggcguaaagccucagggcu

SEQ ID NO: 926599 - RNA, 19 nt, Artificial Sequence
  Description of Artificial Sequence: Synthetic oligonucleotide
uagaguccagacccagguu

SEQ ID NO: 926600 - RNA, 19 nt, Artificial Sequence
  Description of Artificial Sequence: Synthetic oligonucleotide
uugcucugggguauaccuu

SEQ ID NO: 926601 - RNA, 19 nt, Artificial Sequence
  Description of Artificial Sequence: Synthetic oligonucleotide
cacgguggaucagcuaagc

SEQ ID NO: 926602 - RNA, 19 nt, Artificial Sequence
  Description of Artificial Sequence: Synthetic oligonucleotide
gucagucugcugccuggag

SEQ ID NO: 926603 - RNA, 19 nt, Artificial Sequence
  Description of Artificial Sequence: Synthetic oligonucleotide
uggccccucuguaguguag

SEQ ID NO: 926604 - RNA, 19 nt, Artificial Sequence
  Description of Artificial Sequence: Synthetic oligonucleotide
cucagcaauaugcgauaca

SEQ ID NO: 926605 - RNA, 19 nt, Artificial Sequence
  Description of Artificial Sequence: Synthetic oligonucleotide
guuaggcacccaggguagg

SEQ ID NO: 926606 - RNA, 19 nt, Artificial Sequence
  Description of Artificial Sequence: Synthetic oligonucleotide
ggucggugauuuucauuag

SEQ ID NO: 926607 - RNA, 19 nt, Artificial Sequence
  Description of Artificial Sequence: Synthetic oligonucleotide
ugugcauggcagguucauc

SEQ ID NO: 926608 - RNA, 19 nt, Artificial Sequence
  Description of Artificial Sequence: Synthetic oligonucleotide
ugucuccgugucauccauc

SEQ ID NO: 926609 - RNA, 19 nt, Artificial Sequence
  Description of Artificial Sequence: Synthetic oligonucleotide
ccaagcaccuggcagagga

SEQ ID NO: 926610 - RNA, 19 nt, Artificial Sequence
  Description of Artificial Sequence: Synthetic oligonucleotide
gggauggacacaggcaccc

SEQ ID NO: 926611 - RNA, 19 nt, Artificial Sequence
  Description of Artificial Sequence: Synthetic oligonucleotide
acuguagagggagccaguu

SEQ ID NO: 926612 - RNA, 19 nt, Artificial Sequence
  Description of Artificial Sequence: Synthetic oligonucleotide
gagucguccucaaacauuu

SEQ ID NO: 926613 - RNA, 19 nt, Artificial Sequence
  Description of Artificial Sequence: Synthetic oligonucleotide
uacagcggagugggcgagg

SEQ ID NO: 926614 - RNA, 19 nt, Artificial Sequence
  Description of Artificial Sequence: Synthetic oligonucleotide
guccagccugccucuauac

SEQ ID NO: 926615 - RNA, 19 nt, Artificial Sequence
  Description of Artificial Sequence: Synthetic oligonucleotide
aggcaaccguuuagcaaac

SEQ ID NO: 926616 - RNA, 19 nt, Artificial Sequence
  Description of Artificial Sequence: Synthetic oligonucleotide
cguuuagcaaacuccacga

SEQ ID NO: 926617 - RNA, 19 nt, Artificial Sequence
  Description of Artificial Sequence: Synthetic oligonucleotide
cgauacagcggagugggcg

SEQ ID NO: 926618 - RNA, 19 nt, Artificial Sequence
  Description of Artificial Sequence: Synthetic oligonucleotide
uuguacagauucgcagcau

SEQ ID NO: 926619 - RNA, 19 nt, Artificial Sequence
  Description of Artificial Sequence: Synthetic oligonucleotide
ccaggaugugugcuguacc

SEQ ID NO: 926620 - RNA, 19 nt, Artificial Sequence
  Description of Artificial Sequence: Synthetic oligonucleotide
gaaaugcaggguccagccu

SEQ ID NO: 926621 - RNA, 19 nt, Artificial Sequence
  Description of Artificial Sequence: Synthetic oligonucleotide
gaugccccggaggucggug

SEQ ID NO: 926622 - RNA, 19 nt, Artificial Sequence
  Description of Artificial Sequence: Synthetic oligonucleotide
uccaugcggucuccacaga

SEQ ID NO: 926623 - RNA, 19 nt, Artificial Sequence
  Description of Artificial Sequence: Synthetic oligonucleotide
ccaccccagaaaugcaggg

SEQ ID NO: 926624 - RNA, 19 nt, Artificial Sequence
  Description of Artificial Sequence: Synthetic oligonucleotide
ggucaaggguagaaggcac

SEQ ID NO: 926625 - RNA, 19 nt, Artificial Sequence
  Description of Artificial Sequence: Synthetic oligonucleotide
guacagauucgcagcauua

SEQ ID NO: 926626 - RNA, 19 nt, Artificial Sequence
  Description of Artificial Sequence: Synthetic oligonucleotide
ucgugguguacuugcccua

SEQ ID NO: 926627 - RNA, 19 nt, Artificial Sequence
  Description of Artificial Sequence: Synthetic oligonucleotide
auacagcggagugggcgag

SEQ ID NO: 926628 - RNA, 19 nt, Artificial Sequence
  Description of Artificial Sequence: Synthetic oligonucleotide
cuauaccuggcaggaagga

SEQ ID NO: 926629 - RNA, 19 nt, Artificial Sequence
  Description of Artificial Sequence: Synthetic oligonucleotide
gcguuaggcacccagggua

SEQ ID NO: 926630 - RNA, 19 nt, Artificial Sequence
  Description of Artificial Sequence: Synthetic oligonucleotide
gguccaugcggucuccaca

SEQ ID NO: 926631 - RNA, 19 nt, Artificial Sequence
  Description of Artificial Sequence: Synthetic oligonucleotide
agggcuaagggagggguuu

SEQ ID NO: 926632 - RNA, 19 nt, Artificial Sequence
  Description of Artificial Sequence: Synthetic oligonucleotide
ggcaccccuagaaacuuug

SEQ ID NO: 926633 - RNA, 19 nt, Artificial Sequence
  Description of Artificial Sequence: Synthetic oligonucleotide
cugaugccccggaggucgg

SEQ ID NO: 926634 - RNA, 19 nt, Artificial Sequence
  Description of Artificial Sequence: Synthetic oligonucleotide
gguacagaaagggcuuaca

SEQ ID NO: 926635 - RNA, 19 nt, Artificial Sequence
  Description of Artificial Sequence: Synthetic oligonucleotide
cugggucuccgucgccggg

SEQ ID NO: 926636 - RNA, 19 nt, Artificial Sequence
  Description of Artificial Sequence: Synthetic oligonucleotide
ucgcagcauuaggaugucc

SEQ ID NO: 926637 - RNA, 19 nt, Artificial Sequence
  Description of Artificial Sequence: Synthetic oligonucleotide
gcuguacacggugauucug

SEQ ID NO: 926638 - RNA, 19 nt, Artificial Sequence
  Description of Artificial Sequence: Synthetic oligonucleotide
gaaucuuauuuggcagcua

SEQ ID NO: 926639 - RNA, 19 nt, Artificial Sequence
  Description of Artificial Sequence: Synthetic oligonucleotide
agucguccucaaacauuuc

SEQ ID NO: 926640 - RNA, 19 nt, Artificial Sequence
  Description of Artificial Sequence: Synthetic oligonucleotide
cguuaggcacccaggguag

SEQ ID NO: 926641 - RNA, 19 nt, Artificial Sequence
  Description of Artificial Sequence: Synthetic oligonucleotide
aagggcuccugcaguuuau

SEQ ID NO: 926642 - RNA, 19 nt, Artificial Sequence
  Description of Artificial Sequence: Synthetic oligonucleotide
agugggcgaggagauguaa

SEQ ID NO: 926643 - RNA, 19 nt, Artificial Sequence
  Description of Artificial Sequence: Synthetic oligonucleotide
ugguggugucuggggaaug

SEQ ID NO: 926644 - RNA, 19 nt, Artificial Sequence
  Description of Artificial Sequence: Synthetic oligonucleotide
ccucacuggaagccuuggg

SEQ ID NO: 926645 - RNA, 19 nt, Artificial Sequence
  Description of Artificial Sequence: Synthetic oligonucleotide
uucgcagcauuaggauguc

SEQ ID NO: 926646 - RNA, 19 nt, Artificial Sequence
  Description of Artificial Sequence: Synthetic oligonucleotide
augccccggaggucgguga

SEQ ID NO: 926647 - RNA, 19 nt, Artificial Sequence
  Description of Artificial Sequence: Synthetic oligonucleotide
augcaggguccagccugcc

SEQ ID NO: 926648 - RNA, 19 nt, Artificial Sequence
  Description of Artificial Sequence: Synthetic oligonucleotide
cauccgagaaugucauggu

SEQ ID NO: 926649 - RNA, 19 nt, Artificial Sequence
  Description of Artificial Sequence: Synthetic oligonucleotide
guaaaaccaggcaaccguu

SEQ ID NO: 926650 - RNA, 19 nt, Artificial Sequence
  Description of Artificial Sequence: Synthetic oligonucleotide
gccuggaaucuccaucuuc

SEQ ID NO: 926651 - RNA, 19 nt, Artificial Sequence
  Description of Artificial Sequence: Synthetic oligonucleotide
gccucuauaccuggcagga

SEQ ID NO: 926652 - RNA, 19 nt, Artificial Sequence
  Description of Artificial Sequence: Synthetic oligonucleotide
gucucuaguguuccuguuu

SEQ ID NO: 926653 - RNA, 19 nt, Artificial Sequence
  Description of Artificial Sequence: Synthetic oligonucleotide
ggaguucgugguguacuug

SEQ ID NO: 926654 - RNA, 19 nt, Artificial Sequence
  Description of Artificial Sequence: Synthetic oligonucleotide
gagguacagaaagggcuua

SEQ ID NO: 926655 - RNA, 19 nt, Artificial Sequence
  Description of Artificial Sequence: Synthetic oligonucleotide
uuggcccguuuugcccugg

SEQ ID NO: 926656 - RNA, 19 nt, Artificial Sequence
  Description of Artificial Sequence: Synthetic oligonucleotide
cauaccucacuggaagccu

SEQ ID NO: 926657 - RNA, 19 nt, Artificial Sequence
  Description of Artificial Sequence: Synthetic oligonucleotide
guagggcacaagggugggc

SEQ ID NO: 926658 - RNA, 19 nt, Artificial Sequence
  Description of Artificial Sequence: Synthetic oligonucleotide
acccagguucaccccuccu

SEQ ID NO: 926659 - RNA, 19 nt, Artificial Sequence
  Description of Artificial Sequence: Synthetic oligonucleotide
auaccucacuggaagccuu

SEQ ID NO: 926660 - RNA, 19 nt, Artificial Sequence
  Description of Artificial Sequence: Synthetic oligonucleotide
caagggcuccugcaguuua

SEQ ID NO: 926661 - RNA, 19 nt, Artificial Sequence
  Description of Artificial Sequence: Synthetic oligonucleotide
gaggucggugauuuucauu

SEQ ID NO: 926662 - RNA, 19 nt, Artificial Sequence
  Description of Artificial Sequence: Synthetic oligonucleotide
ugccccggaggucggugau

SEQ ID NO: 926663 - RNA, 19 nt, Artificial Sequence
  Description of Artificial Sequence: Synthetic oligonucleotide
ucgggccuggaaucuccau

SEQ ID NO: 926664 - RNA, 19 nt, Artificial Sequence
  Description of Artificial Sequence: Synthetic oligonucleotide
gcaccccuagaaacuuugg

SEQ ID NO: 926665 - RNA, 19 nt, Artificial Sequence
  Description of Artificial Sequence: Synthetic oligonucleotide
cuguggccugaaucggaca

SEQ ID NO: 926666 - RNA, 19 nt, Artificial Sequence
  Description of Artificial Sequence: Synthetic oligonucleotide
cuggaguucgugguguacu

SEQ ID NO: 926667 - RNA, 19 nt, Artificial Sequence
  Description of Artificial Sequence: Synthetic oligonucleotide
aggucuguaaggggcccaa

SEQ ID NO: 926668 - RNA, 19 nt, Artificial Sequence
  Description of Artificial Sequence: Synthetic oligonucleotide
cuguagagggagccaguua

SEQ ID NO: 926669 - RNA, 19 nt, Artificial Sequence
  Description of Artificial Sequence: Synthetic oligonucleotide
gggguauaccuuguacaga

SEQ ID NO: 926670 - RNA, 19 nt, Artificial Sequence
  Description of Artificial Sequence: Synthetic oligonucleotide
gugggcgaggagauguaaa

SEQ ID NO: 926671 - RNA, 19 nt, Artificial Sequence
  Description of Artificial Sequence: Synthetic oligonucleotide
ccaggcaaccguuuagcaa

SEQ ID NO: 926672 - RNA, 19 nt, Artificial Sequence
  Description of Artificial Sequence: Synthetic oligonucleotide
gucaaggguagaaggcacu

SEQ ID NO: 926673 - RNA, 19 nt, Artificial Sequence
  Description of Artificial Sequence: Synthetic oligonucleotide
gggcgaggagauguaaaca

SEQ ID NO: 926674 - RNA, 19 nt, Artificial Sequence
  Description of Artificial Sequence: Synthetic oligonucleotide
cugccucguggcugagaug

SEQ ID NO: 926675 - RNA, 19 nt, Artificial Sequence
  Description of Artificial Sequence: Synthetic oligonucleotide
ccgggcguaaagccucagg

SEQ ID NO: 926676 - RNA, 19 nt, Artificial Sequence
  Description of Artificial Sequence: Synthetic oligonucleotide
aggggucauuccagggugu

SEQ ID NO: 926677 - RNA, 19 nt, Artificial Sequence
  Description of Artificial Sequence: Synthetic oligonucleotide
ugucuugcucugggguaua

SEQ ID NO: 926678 - RNA, 19 nt, Artificial Sequence
  Description of Artificial Sequence: Synthetic oligonucleotide
ugcccuagucuggcagagu

SEQ ID NO: 926679 - RNA, 19 nt, Artificial Sequence
  Description of Artificial Sequence: Synthetic oligonucleotide
ccucaaacauuucaggguu

SEQ ID NO: 926680 - RNA, 19 nt, Artificial Sequence
  Description of Artificial Sequence: Synthetic oligonucleotide
ggguuucuuccugccuggg

SEQ ID NO: 926681 - RNA, 19 nt, Artificial Sequence
  Description of Artificial Sequence: Synthetic oligonucleotide
ggcuuacacuucucccuuc

SEQ ID NO: 926682 - RNA, 19 nt, Artificial Sequence
  Description of Artificial Sequence: Synthetic oligonucleotide
ggcccguuuugcccuggcc

SEQ ID NO: 926683 - RNA, 19 nt, Artificial Sequence
  Description of Artificial Sequence: Synthetic oligonucleotide
gggacuuuuggcccguuuu

SEQ ID NO: 926684 - RNA, 19 nt, Artificial Sequence
  Description of Artificial Sequence: Synthetic oligonucleotide
gguucaucacacagcguua

SEQ ID NO: 926685 - RNA, 19 nt, Artificial Sequence
  Description of Artificial Sequence: Synthetic oligonucleotide
cgucgccgggcguaaagcc

SEQ ID NO: 926686 - RNA, 19 nt, Artificial Sequence
  Description of Artificial Sequence: Synthetic oligonucleotide
ggacacaggcaccccuaga

SEQ ID NO: 926687 - RNA, 19 nt, Artificial Sequence
  Description of Artificial Sequence: Synthetic oligonucleotide
gacuguagagggagccagu

SEQ ID NO: 926688 - RNA, 19 nt, Artificial Sequence
  Description of Artificial Sequence: Synthetic oligonucleotide
ggggcaucgggccuggaau

SEQ ID NO: 926689 - RNA, 19 nt, Artificial Sequence
  Description of Artificial Sequence: Synthetic oligonucleotide
cccuccgcgggccaagcug

SEQ ID NO: 926690 - RNA, 19 nt, Artificial Sequence
  Description of Artificial Sequence: Synthetic oligonucleotide
gcagagugaucuggucagc

SEQ ID NO: 926691 - RNA, 19 nt, Artificial Sequence
  Description of Artificial Sequence: Synthetic oligonucleotide
ggagggucccugccucgug

SEQ ID NO: 926692 - RNA, 19 nt, Artificial Sequence
  Description of Artificial Sequence: Synthetic oligonucleotide
cacuaggagagggaucccu

SEQ ID NO: 926693 - RNA, 19 nt, Artificial Sequence
  Description of Artificial Sequence: Synthetic oligonucleotide
ccugaaucggacaggcagu

SEQ ID NO: 926694 - RNA, 19 nt, Artificial Sequence
  Description of Artificial Sequence: Synthetic oligonucleotide
cgugguguacuugcccuag

SEQ ID NO: 926695 - RNA, 19 nt, Artificial Sequence
  Description of Artificial Sequence: Synthetic oligonucleotide
gcuaagcagcaucuccccu

SEQ ID NO: 926696 - RNA, 19 nt, Artificial Sequence
  Description of Artificial Sequence: Synthetic oligonucleotide
gucgccgggcguaaagccu

SEQ ID NO: 926697 - RNA, 19 nt, Artificial Sequence
  Description of Artificial Sequence: Synthetic oligonucleotide
cuggccccucuguagugua

SEQ ID NO: 926698 - RNA, 19 nt, Artificial Sequence
  Description of Artificial Sequence: Synthetic oligonucleotide
gucuccgucgccgggcgua

SEQ ID NO: 926699 - RNA, 19 nt, Artificial Sequence
  Description of Artificial Sequence: Synthetic oligonucleotide
gugguguacuugcccuagu

SEQ ID NO: 926700 - RNA, 19 nt, Artificial Sequence
  Description of Artificial Sequence: Synthetic oligonucleotide
ggagucguccucaaacauu

SEQ ID NO: 926701 - RNA, 19 nt, Artificial Sequence
  Description of Artificial Sequence: Synthetic oligonucleotide
gguucaccccuccuccggu

SEQ ID NO: 926702 - RNA, 19 nt, Artificial Sequence
  Description of Artificial Sequence: Synthetic oligonucleotide
guggugucuggggaauggu

SEQ ID NO: 926703 - RNA, 19 nt, Artificial Sequence
  Description of Artificial Sequence: Synthetic oligonucleotide
guaggucaggggcccuggu

SEQ ID NO: 926704 - RNA, 19 nt, Artificial Sequence
  Description of Artificial Sequence: Synthetic oligonucleotide
ggguacgguucagggucag

SEQ ID NO: 926705 - RNA, 19 nt, Artificial Sequence
  Description of Artificial Sequence: Synthetic oligonucleotide
cccuagucuggcagaguga

SEQ ID NO: 926706 - RNA, 19 nt, Artificial Sequence
  Description of Artificial Sequence: Synthetic oligonucleotide
ccgucgccgggcguaaagc

SEQ ID NO: 926707 - RNA, 19 nt, Artificial Sequence
  Description of Artificial Sequence: Synthetic oligonucleotide
ggaucccuggccccucugu

SEQ ID NO: 926708 - RNA, 19 nt, Artificial Sequence
  Description of Artificial Sequence: Synthetic oligonucleotide
ccccucccaagaccccugg

SEQ ID NO: 926709 - RNA, 19 nt, Artificial Sequence
  Description of Artificial Sequence: Synthetic oligonucleotide
gcuaagggagggguuugua

SEQ ID NO: 926710 - RNA, 19 nt, Artificial Sequence
  Description of Artificial Sequence: Synthetic oligonucleotide
gcacuaggagagggauccc

SEQ ID NO: 926711 - RNA, 19 nt, Artificial Sequence
  Description of Artificial Sequence: Synthetic oligonucleotide
gggucauuccaggguguaa

SEQ ID NO: 926712 - RNA, 19 nt, Artificial Sequence
  Description of Artificial Sequence: Synthetic oligonucleotide
ccugccucguggcugagau

SEQ ID NO: 926713 - RNA, 19 nt, Artificial Sequence
  Description of Artificial Sequence: Synthetic oligonucleotide
gccugccucuauaccuggc

SEQ ID NO: 926714 - RNA, 19 nt, Artificial Sequence
  Description of Artificial Sequence: Synthetic oligonucleotide
cauguaggguuggcugggu

SEQ ID NO: 926715 - RNA, 19 nt, Artificial Sequence
  Description of Artificial Sequence: Synthetic oligonucleotide
ggucucuaguguuccuguu

SEQ ID NO: 926716 - RNA, 19 nt, Artificial Sequence
  Description of Artificial Sequence: Synthetic oligonucleotide
gauggggcacagggacagu

SEQ ID NO: 926717 - RNA, 19 nt, Artificial Sequence
  Description of Artificial Sequence: Synthetic oligonucleotide
cagggcuaagggagggguu

SEQ ID NO: 926718 - RNA, 19 nt, Artificial Sequence
  Description of Artificial Sequence: Synthetic oligonucleotide
ggggucauuccagggugua

SEQ ID NO: 926719 - RNA, 19 nt, Artificial Sequence
  Description of Artificial Sequence: Synthetic oligonucleotide
gcgauacagcggagugggc

SEQ ID NO: 926720 - RNA, 19 nt, Artificial Sequence
  Description of Artificial Sequence: Synthetic oligonucleotide
caggcaccccuagaaacuu

SEQ ID NO: 926721 - RNA, 19 nt, Artificial Sequence
  Description of Artificial Sequence: Synthetic oligonucleotide
uggggacuuuuggcccguu

SEQ ID NO: 926722 - RNA, 19 nt, Artificial Sequence
  Description of Artificial Sequence: Synthetic oligonucleotide
ggucuguaaggggcccaaa

SEQ ID NO: 926723 - RNA, 19 nt, Artificial Sequence
  Description of Artificial Sequence: Synthetic oligonucleotide
acacagcguuaggcaccca

SEQ ID NO: 926724 - RNA, 19 nt, Artificial Sequence
  Description of Artificial Sequence: Synthetic oligonucleotide
cggugauuuucauuagcau

SEQ ID NO: 926725 - RNA, 19 nt, Artificial Sequence
  Description of Artificial Sequence: Synthetic oligonucleotide
ggcuaagggagggguuugu

SEQ ID NO: 926726 - RNA, 19 nt, Artificial Sequence
  Description of Artificial Sequence: Synthetic oligonucleotide
aggguccagccugccucua

SEQ ID NO: 926727 - RNA, 19 nt, Artificial Sequence
  Description of Artificial Sequence: Synthetic oligonucleotide
cggacaggcagugcugaga

SEQ ID NO: 926728 - RNA, 19 nt, Artificial Sequence
  Description of Artificial Sequence: Synthetic oligonucleotide
cacccaggguagggcacaa

SEQ ID NO: 926729 - RNA, 19 nt, Artificial Sequence
  Description of Artificial Sequence: Synthetic oligonucleotide
ggcaaccguuuagcaaacu

SEQ ID NO: 926730 - RNA, 19 nt, Artificial Sequence
  Description of Artificial Sequence: Synthetic oligonucleotide
gccgggcguaaagccucag

SEQ ID NO: 926731 - RNA, 19 nt, Artificial Sequence
  Description of Artificial Sequence: Synthetic oligonucleotide
gcguaaagccucagggcuu

SEQ ID NO: 926732 - RNA, 19 nt, Artificial Sequence
  Description of Artificial Sequence: Synthetic oligonucleotide
ggggacuuuuggcccguuu

SEQ ID NO: 926733 - RNA, 19 nt, Artificial Sequence
  Description of Artificial Sequence: Synthetic oligonucleotide
ggguccagccugccucuau

SEQ ID NO: 926734 - RNA, 19 nt, Artificial Sequence
  Description of Artificial Sequence: Synthetic oligonucleotide
cuccgcgggccaagcugcu

SEQ ID NO: 926735 - RNA, 19 nt, Artificial Sequence
  Description of Artificial Sequence: Synthetic oligonucleotide
gcccaggaugugugcugua

SEQ ID NO: 926736 - RNA, 19 nt, Artificial Sequence
  Description of Artificial Sequence: Synthetic oligonucleotide
gcaagggcuccugcaguuu

SEQ ID NO: 926737 - RNA, 19 nt, Artificial Sequence
  Description of Artificial Sequence: Synthetic oligonucleotide
ccccagucacugguggugu

SEQ ID NO: 926738 - RNA, 19 nt, Artificial Sequence
  Description of Artificial Sequence: Synthetic oligonucleotide
ggucuccgucgccgggcgu

SEQ ID NO: 926739 - RNA, 19 nt, Artificial Sequence
  Description of Artificial Sequence: Synthetic oligonucleotide
cuccgucgccgggcguaaa

SEQ ID NO: 926740 - RNA, 19 nt, Artificial Sequence
  Description of Artificial Sequence: Synthetic oligonucleotide
cgccgggcguaaagccuca

SEQ ID NO: 926741 - RNA, 19 nt, Artificial Sequence
  Description of Artificial Sequence: Synthetic oligonucleotide
ccccuccgcgggccaagcu

SEQ ID NO: 926742 - RNA, 19 nt, Artificial Sequence
  Description of Artificial Sequence: Synthetic oligonucleotide
gccccggaggucggugauu

SEQ ID NO: 926743 - RNA, 19 nt, Artificial Sequence
  Description of Artificial Sequence: Synthetic oligonucleotide
uauauauauauauaaaucc

SEQ ID NO: 926744 - RNA, 19 nt, Artificial Sequence
  Description of Artificial Sequence: Synthetic oligonucleotide
aacuauagggcuuagcccc

SEQ ID NO: 926745 - RNA, 19 nt, Artificial Sequence
  Description of Artificial Sequence: Synthetic oligonucleotide
acaacuauagggcuuagcc

SEQ ID NO: 926746 - RNA, 19 nt, Artificial Sequence
  Description of Artificial Sequence: Synthetic oligonucleotide
uauauauauacuuauauau

SEQ ID NO: 926747 - RNA, 19 nt, Artificial Sequence
  Description of Artificial Sequence: Synthetic oligonucleotide
uauauauauauauauauaa

SEQ ID NO: 926748 - RNA, 19 nt, Artificial Sequence
  Description of Artificial Sequence: Synthetic oligonucleotide
uauacuuauauauauauau

SEQ ID NO: 926749 - RNA, 19 nt, Artificial Sequence
  Description of Artificial Sequence: Synthetic oligonucleotide
uauauauauauauauauau

SEQ ID NO: 926750 - RNA, 19 nt, Artificial Sequence
  Description of Artificial Sequence: Synthetic oligonucleotide
ugaagugagaccaugacca

SEQ ID NO: 926751 - RNA, 19 nt, Artificial Sequence
  Description of Artificial Sequence: Synthetic oligonucleotide
uauauauauauauauaaau

SEQ ID NO: 926752 - RNA, 19 nt, Artificial Sequence
  Description of Artificial Sequence: Synthetic oligonucleotide
uauauauauauacuuauau

SEQ ID NO: 926753 - RNA, 19 nt, Artificial Sequence
  Description of Artificial Sequence: Synthetic oligonucleotide
uuuaggaggagccacacug

SEQ ID NO: 926754 - RNA, 19 nt, Artificial Sequence
  Description of Artificial Sequence: Synthetic oligonucleotide
auauauauauauauaaauc

SEQ ID NO: 926755 - RNA, 19 nt, Artificial Sequence
  Description of Artificial Sequence: Synthetic oligonucleotide
uauauauacuuauauauau

SEQ ID NO: 926756 - RNA, 19 nt, Artificial Sequence
  Description of Artificial Sequence: Synthetic oligonucleotide
uuggguaacacuaucagcu

SEQ ID NO: 926757 - RNA, 19 nt, Artificial Sequence
  Description of Artificial Sequence: Synthetic oligonucleotide
aaagguacagucaccaccc

SEQ ID NO: 926758 - RNA, 19 nt, Artificial Sequence
  Description of Artificial Sequence: Synthetic oligonucleotide
uauauacuuauauauauau

SEQ ID NO: 926759 - RNA, 19 nt, Artificial Sequence
  Description of Artificial Sequence: Synthetic oligonucleotide
auguuuccgauguauaugc

SEQ ID NO: 926760 - RNA, 19 nt, Artificial Sequence
  Description of Artificial Sequence: Synthetic oligonucleotide
guuacaacaaagauggccg

SEQ ID NO: 926761 - RNA, 19 nt, Artificial Sequence
  Description of Artificial Sequence: Synthetic oligonucleotide
uauauauauauauacuuau

SEQ ID NO: 926762 - RNA, 19 nt, Artificial Sequence
  Description of Artificial Sequence: Synthetic oligonucleotide
uccgacuuugaguagaagg

SEQ ID NO: 926763 - RNA, 19 nt, Artificial Sequence
  Description of Artificial Sequence: Synthetic oligonucleotide
uaagguauguuuccgaugu

SEQ ID NO: 926764 - RNA, 19 nt, Artificial Sequence
  Description of Artificial Sequence: Synthetic oligonucleotide
uauauauauauaaauccau

SEQ ID NO: 926765 - RNA, 19 nt, Artificial Sequence
  Description of Artificial Sequence: Synthetic oligonucleotide
uacuuauauauauauauau

SEQ ID NO: 926766 - RNA, 19 nt, Artificial Sequence
  Description of Artificial Sequence: Synthetic oligonucleotide
aaggguuuaucuuuguugu

SEQ ID NO: 926767 - RNA, 19 nt, Artificial Sequence
  Description of Artificial Sequence: Synthetic oligonucleotide
auaacccacacuuguauac

SEQ ID NO: 926768 - RNA, 19 nt, Artificial Sequence
  Description of Artificial Sequence: Synthetic oligonucleotide
aacacuaucagcucaggau

SEQ ID NO: 926769 - RNA, 19 nt, Artificial Sequence
  Description of Artificial Sequence: Synthetic oligonucleotide
ugaaaauucugagauaaug

SEQ ID NO: 926770 - RNA, 19 nt, Artificial Sequence
  Description of Artificial Sequence: Synthetic oligonucleotide
ucugagauaaugcaguuua

SEQ ID NO: 926771 - RNA, 19 nt, Artificial Sequence
  Description of Artificial Sequence: Synthetic oligonucleotide
uuauauauauauauauaua

SEQ ID NO: 926772 - RNA, 19 nt, Artificial Sequence
  Description of Artificial Sequence: Synthetic oligonucleotide
cagguauauauauauauac

SEQ ID NO: 926773 - RNA, 19 nt, Artificial Sequence
  Description of Artificial Sequence: Synthetic oligonucleotide
uucuuuuacagguaagcgc

SEQ ID NO: 926774 - RNA, 19 nt, Artificial Sequence
  Description of Artificial Sequence: Synthetic oligonucleotide
aaggaaaagucauaaccca

SEQ ID NO: 926775 - RNA, 19 nt, Artificial Sequence
  Description of Artificial Sequence: Synthetic oligonucleotide
gagaccaugaccauguaag

SEQ ID NO: 926776 - RNA, 19 nt, Artificial Sequence
  Description of Artificial Sequence: Synthetic oligonucleotide
cuuuugaugaucaucguca

SEQ ID NO: 926777 - RNA, 19 nt, Artificial Sequence
  Description of Artificial Sequence: Synthetic oligonucleotide
ugagcagguauauauauau

SEQ ID NO: 926778 - RNA, 19 nt, Artificial Sequence
  Description of Artificial Sequence: Synthetic oligonucleotide
uggucuaucgcccgugugg

SEQ ID NO: 926779 - RNA, 19 nt, Artificial Sequence
  Description of Artificial Sequence: Synthetic oligonucleotide
auaugggagggccagccgc

SEQ ID NO: 926780 - RNA, 19 nt, Artificial Sequence
  Description of Artificial Sequence: Synthetic oligonucleotide
auauauauauauaaaucca

SEQ ID NO: 926781 - RNA, 19 nt, Artificial Sequence
  Description of Artificial Sequence: Synthetic oligonucleotide
ucuguuauaugggagggcc

SEQ ID NO: 926782 - RNA, 19 nt, Artificial Sequence
  Description of Artificial Sequence: Synthetic oligonucleotide
acagucaccacccaauaug

SEQ ID NO: 926783 - RNA, 19 nt, Artificial Sequence
  Description of Artificial Sequence: Synthetic oligonucleotide
auauauauauacuuauaua

SEQ ID NO: 926784 - RNA, 19 nt, Artificial Sequence
  Description of Artificial Sequence: Synthetic oligonucleotide
agcagauccucucucgagc

SEQ ID NO: 926785 - RNA, 19 nt, Artificial Sequence
  Description of Artificial Sequence: Synthetic oligonucleotide
uuugaguagaaggucagug

SEQ ID NO: 926786 - RNA, 19 nt, Artificial Sequence
  Description of Artificial Sequence: Synthetic oligonucleotide
agcagguauauauauauau

SEQ ID NO: 926787 - RNA, 19 nt, Artificial Sequence
  Description of Artificial Sequence: Synthetic oligonucleotide
uauacuaccccuuggucac

SEQ ID NO: 926788 - RNA, 19 nt, Artificial Sequence
  Description of Artificial Sequence: Synthetic oligonucleotide
aauaugaagugagaccaug

SEQ ID NO: 926789 - RNA, 19 nt, Artificial Sequence
  Description of Artificial Sequence: Synthetic oligonucleotide
cuuauauauauauauauau

SEQ ID NO: 926790 - RNA, 19 nt, Artificial Sequence
  Description of Artificial Sequence: Synthetic oligonucleotide
uguauaugcccgacuacag

SEQ ID NO: 926791 - RNA, 19 nt, Artificial Sequence
  Description of Artificial Sequence: Synthetic oligonucleotide
uguguaugcucgaugacaa

SEQ ID NO: 926792 - RNA, 19 nt, Artificial Sequence
  Description of Artificial Sequence: Synthetic oligonucleotide
cauguaucggcuacugucc

SEQ ID NO: 926793 - RNA, 19 nt, Artificial Sequence
  Description of Artificial Sequence: Synthetic oligonucleotide
uguguguagauaagugagc

SEQ ID NO: 926794 - RNA, 19 nt, Artificial Sequence
  Description of Artificial Sequence: Synthetic oligonucleotide
uaugcccgacuacagauug

SEQ ID NO: 926795 - RNA, 19 nt, Artificial Sequence
  Description of Artificial Sequence: Synthetic oligonucleotide
auaagugagccucuaguga

SEQ ID NO: 926796 - RNA, 19 nt, Artificial Sequence
  Description of Artificial Sequence: Synthetic oligonucleotide
agucauaacccacacuugu

SEQ ID NO: 926797 - RNA, 19 nt, Artificial Sequence
  Description of Artificial Sequence: Synthetic oligonucleotide
gauacggaugugcugggcc

SEQ ID NO: 926798 - RNA, 19 nt, Artificial Sequence
  Description of Artificial Sequence: Synthetic oligonucleotide
gaugaucaucgucaucggg

SEQ ID NO: 926799 - RNA, 19 nt, Artificial Sequence
  Description of Artificial Sequence: Synthetic oligonucleotide
accaugaccauguaaggga

SEQ ID NO: 926800 - RNA, 19 nt, Artificial Sequence
  Description of Artificial Sequence: Synthetic oligonucleotide
uuguauacuaccccuuggu

SEQ ID NO: 926801 - RNA, 19 nt, Artificial Sequence
  Description of Artificial Sequence: Synthetic oligonucleotide
gaacucucccaccaagagg

SEQ ID NO: 926802 - RNA, 19 nt, Artificial Sequence
  Description of Artificial Sequence: Synthetic oligonucleotide
uguuauaugggagggccag

SEQ ID NO: 926803 - RNA, 19 nt, Artificial Sequence
  Description of Artificial Sequence: Synthetic oligonucleotide
guaagcgcagcacggaagg

SEQ ID NO: 926804 - RNA, 19 nt, Artificial Sequence
  Description of Artificial Sequence: Synthetic oligonucleotide
guucuuuuacagguaagcg

SEQ ID NO: 926805 - RNA, 19 nt, Artificial Sequence
  Description of Artificial Sequence: Synthetic oligonucleotide
cagauuagagaguugugug

SEQ ID NO: 926806 - RNA, 19 nt, Artificial Sequence
  Description of Artificial Sequence: Synthetic oligonucleotide
auugugcagguauacaccu

SEQ ID NO: 926807 - RNA, 19 nt, Artificial Sequence
  Description of Artificial Sequence: Synthetic oligonucleotide
accgggaaaucucuggcac

SEQ ID NO: 926808 - RNA, 19 nt, Artificial Sequence
  Description of Artificial Sequence: Synthetic oligonucleotide
caacuauagggcuuagccc

SEQ ID NO: 926809 - RNA, 19 nt, Artificial Sequence
  Description of Artificial Sequence: Synthetic oligonucleotide
guuuccgauguauaugccc

SEQ ID NO: 926810 - RNA, 19 nt, Artificial Sequence
  Description of Artificial Sequence: Synthetic oligonucleotide
guauacuaccccuugguca

SEQ ID NO: 926811 - RNA, 19 nt, Artificial Sequence
  Description of Artificial Sequence: Synthetic oligonucleotide
agauuagagaguuguguga

SEQ ID NO: 926812 - RNA, 19 nt, Artificial Sequence
  Description of Artificial Sequence: Synthetic oligonucleotide
auguaagggaaagaaaaug

SEQ ID NO: 926813 - RNA, 19 nt, Artificial Sequence
  Description of Artificial Sequence: Synthetic oligonucleotide
auauauauauauauauaaa

SEQ ID NO: 926814 - RNA, 19 nt, Artificial Sequence
  Description of Artificial Sequence: Synthetic oligonucleotide
gauugugcagguauacacc

SEQ ID NO: 926815 - RNA, 19 nt, Artificial Sequence
  Description of Artificial Sequence: Synthetic oligonucleotide
cuuguauacuaccccuugg

SEQ ID NO: 926816 - RNA, 19 nt, Artificial Sequence
  Description of Artificial Sequence: Synthetic oligonucleotide
agggagcuaaguccagucc

SEQ ID NO: 926817 - RNA, 19 nt, Artificial Sequence
  Description of Artificial Sequence: Synthetic oligonucleotide
gacuugucaaggaagaaga

SEQ ID NO: 926818 - RNA, 19 nt, Artificial Sequence
  Description of Artificial Sequence: Synthetic oligonucleotide
gaccaugaccauguaaggg

SEQ ID NO: 926819 - RNA, 19 nt, Artificial Sequence
  Description of Artificial Sequence: Synthetic oligonucleotide
uguauacuaccccuugguc

SEQ ID NO: 926820 - RNA, 19 nt, Artificial Sequence
  Description of Artificial Sequence: Synthetic oligonucleotide
auaagguauguuuccgaug

SEQ ID NO: 926821 - RNA, 19 nt, Artificial Sequence
  Description of Artificial Sequence: Synthetic oligonucleotide
caccuagggagcuaagucc

SEQ ID NO: 926822 - RNA, 19 nt, Artificial Sequence
  Description of Artificial Sequence: Synthetic oligonucleotide
uauaugggagggccagccg

SEQ ID NO: 926823 - RNA, 19 nt, Artificial Sequence
  Description of Artificial Sequence: Synthetic oligonucleotide
auguaucggcuacuguccc

SEQ ID NO: 926824 - RNA, 19 nt, Artificial Sequence
  Description of Artificial Sequence: Synthetic oligonucleotide
acuuguauacuaccccuug

SEQ ID NO: 926825 - RNA, 19 nt, Artificial Sequence
  Description of Artificial Sequence: Synthetic oligonucleotide
auuaaggaugguugucuug

SEQ ID NO: 926826 - RNA, 19 nt, Artificial Sequence
  Description of Artificial Sequence: Synthetic oligonucleotide
uugcgcauguguuucauaa

SEQ ID NO: 926827 - RNA, 19 nt, Artificial Sequence
  Description of Artificial Sequence: Synthetic oligonucleotide
uuuaugaugcucugccguc

SEQ ID NO: 926828 - RNA, 19 nt, Artificial Sequence
  Description of Artificial Sequence: Synthetic oligonucleotide
uguagauaagugagccucu

SEQ ID NO: 926829 - RNA, 19 nt, Artificial Sequence
  Description of Artificial Sequence: Synthetic oligonucleotide
ucaccguguguguagauaa

SEQ ID NO: 926830 - RNA, 19 nt, Artificial Sequence
  Description of Artificial Sequence: Synthetic oligonucleotide
aggaaaagucauaacccac

SEQ ID NO: 926831 - RNA, 19 nt, Artificial Sequence
  Description of Artificial Sequence: Synthetic oligonucleotide
acguaagggucauucaucu

SEQ ID NO: 926832 - RNA, 19 nt, Artificial Sequence
  Description of Artificial Sequence: Synthetic oligonucleotide
aagaucaggaggguugugu

SEQ ID NO: 926833 - RNA, 19 nt, Artificial Sequence
  Description of Artificial Sequence: Synthetic oligonucleotide
uuguauggucuaucgcccg

SEQ ID NO: 926834 - RNA, 19 nt, Artificial Sequence
  Description of Artificial Sequence: Synthetic oligonucleotide
auauauauauauauauaua

SEQ ID NO: 926835 - RNA, 19 nt, Artificial Sequence
  Description of Artificial Sequence: Synthetic oligonucleotide
ucgggugugcugcugaaga

SEQ ID NO: 926836 - RNA, 19 nt, Artificial Sequence
  Description of Artificial Sequence: Synthetic oligonucleotide
agauuaaggaugguugucu

SEQ ID NO: 926837 - RNA, 19 nt, Artificial Sequence
  Description of Artificial Sequence: Synthetic oligonucleotide
guguguagauaagugagcc

SEQ ID NO: 926838 - RNA, 19 nt, Artificial Sequence
  Description of Artificial Sequence: Synthetic oligonucleotide
ucaccgggaaaucucuggc

SEQ ID NO: 926839 - RNA, 19 nt, Artificial Sequence
  Description of Artificial Sequence: Synthetic oligonucleotide
cugaccguggcaccuaggg

SEQ ID NO: 926840 - RNA, 19 nt, Artificial Sequence
  Description of Artificial Sequence: Synthetic oligonucleotide
acacuaucagcucaggauu

SEQ ID NO: 926841 - RNA, 19 nt, Artificial Sequence
  Description of Artificial Sequence: Synthetic oligonucleotide
agguauacaccuuggcgug

SEQ ID NO: 926842 - RNA, 19 nt, Artificial Sequence
  Description of Artificial Sequence: Synthetic oligonucleotide
caagaugugaggccauagc

SEQ ID NO: 926843 - RNA, 19 nt, Artificial Sequence
  Description of Artificial Sequence: Synthetic oligonucleotide
augaccauguaagggaaag

SEQ ID NO: 926844 - RNA, 19 nt, Artificial Sequence
  Description of Artificial Sequence: Synthetic oligonucleotide
gauguauaugcccgacuac

SEQ ID NO: 926845 - RNA, 19 nt, Artificial Sequence
  Description of Artificial Sequence: Synthetic oligonucleotide
auauauauacuuauauaua

SEQ ID NO: 926846 - RNA, 19 nt, Artificial Sequence
  Description of Artificial Sequence: Synthetic oligonucleotide
agguauauauauauauacu

SEQ ID NO: 926847 - RNA, 19 nt, Artificial Sequence
  Description of Artificial Sequence: Synthetic oligonucleotide
agugagccucuagugaggc

SEQ ID NO: 926848 - RNA, 19 nt, Artificial Sequence
  Description of Artificial Sequence: Synthetic oligonucleotide
guauauauauauauacuua

SEQ ID NO: 926849 - RNA, 19 nt, Artificial Sequence
  Description of Artificial Sequence: Synthetic oligonucleotide
auguauaugcccgacuaca

SEQ ID NO: 926850 - RNA, 19 nt, Artificial Sequence
  Description of Artificial Sequence: Synthetic oligonucleotide
gucaccgggaaaucucugg

SEQ ID NO: 926851 - RNA, 19 nt, Artificial Sequence
  Description of Artificial Sequence: Synthetic oligonucleotide
uaugcucgaugacaauugu

SEQ ID NO: 926852 - RNA, 19 nt, Artificial Sequence
  Description of Artificial Sequence: Synthetic oligonucleotide
acuuauauauauauauaua

SEQ ID NO: 926853 - RNA, 19 nt, Artificial Sequence
  Description of Artificial Sequence: Synthetic oligonucleotide
gaucucuaagagcuggcca

SEQ ID NO: 926854 - RNA, 19 nt, Artificial Sequence
  Description of Artificial Sequence: Synthetic oligonucleotide
ucuagugaggcugcgucug

SEQ ID NO: 926855 - RNA, 19 nt, Artificial Sequence
  Description of Artificial Sequence: Synthetic oligonucleotide
uucuauuggcuccaacuuu

SEQ ID NO: 926856 - RNA, 19 nt, Artificial Sequence
  Description of Artificial Sequence: Synthetic oligonucleotide
gcaguuuauaaacacagaa

SEQ ID NO: 926857 - RNA, 19 nt, Artificial Sequence
  Description of Artificial Sequence: Synthetic oligonucleotide
uguaugcucgaugacaauu

SEQ ID NO: 926858 - RNA, 19 nt, Artificial Sequence
  Description of Artificial Sequence: Synthetic oligonucleotide
gguauauauauauauacuu

SEQ ID NO: 926859 - RNA, 19 nt, Artificial Sequence
  Description of Artificial Sequence: Synthetic oligonucleotide
agcaucugaccguggcacc

SEQ ID NO: 926860 - RNA, 19 nt, Artificial Sequence
  Description of Artificial Sequence: Synthetic oligonucleotide
gauuagagaguugugugaa

SEQ ID NO: 926861 - RNA, 19 nt, Artificial Sequence
  Description of Artificial Sequence: Synthetic oligonucleotide
ugcuucaccguguguguag

SEQ ID NO: 926862 - RNA, 19 nt, Artificial Sequence
  Description of Artificial Sequence: Synthetic oligonucleotide
ggagaauacaggcccuugg

SEQ ID NO: 926863 - RNA, 19 nt, Artificial Sequence
  Description of Artificial Sequence: Synthetic oligonucleotide
uuacaacaaagauggccgu

SEQ ID NO: 926864 - RNA, 19 nt, Artificial Sequence
  Description of Artificial Sequence: Synthetic oligonucleotide
aggaguugacaaaggaggg

SEQ ID NO: 926865 - RNA, 19 nt, Artificial Sequence
  Description of Artificial Sequence: Synthetic oligonucleotide
gaugagcagguauauauau

SEQ ID NO: 926866 - RNA, 19 nt, Artificial Sequence
  Description of Artificial Sequence: Synthetic oligonucleotide
acaacaaagauggccguga

SEQ ID NO: 926867 - RNA, 19 nt, Artificial Sequence
  Description of Artificial Sequence: Synthetic oligonucleotide
uagcagauccucucucgag

SEQ ID NO: 926868 - RNA, 19 nt, Artificial Sequence
  Description of Artificial Sequence: Synthetic oligonucleotide
uguauggucuaucgcccgu

SEQ ID NO: 926869 - RNA, 19 nt, Artificial Sequence
  Description of Artificial Sequence: Synthetic oligonucleotide
ucuguguaugcucgaugac

SEQ ID NO: 926870 - RNA, 19 nt, Artificial Sequence
  Description of Artificial Sequence: Synthetic oligonucleotide
ucggugugugacuuggagu

SEQ ID NO: 926871 - RNA, 19 nt, Artificial Sequence
  Description of Artificial Sequence: Synthetic oligonucleotide
cucgaugacaauuguggca

SEQ ID NO: 926872 - RNA, 19 nt, Artificial Sequence
  Description of Artificial Sequence: Synthetic oligonucleotide
aagugagccucuagugagg

SEQ ID NO: 926873 - RNA, 19 nt, Artificial Sequence
  Description of Artificial Sequence: Synthetic oligonucleotide
auauauauauauacuuaua

SEQ ID NO: 926874 - RNA, 19 nt, Artificial Sequence
  Description of Artificial Sequence: Synthetic oligonucleotide
aagucauaacccacacuug

SEQ ID NO: 926875 - RNA, 19 nt, Artificial Sequence
  Description of Artificial Sequence: Synthetic oligonucleotide
ugugugcccugacuucucc

SEQ ID NO: 926876 - RNA, 19 nt, Artificial Sequence
  Description of Artificial Sequence: Synthetic oligonucleotide
gugaccauguaucggcuac

SEQ ID NO: 926877 - RNA, 19 nt, Artificial Sequence
  Description of Artificial Sequence: Synthetic oligonucleotide
auauauacuuauauauaua

SEQ ID NO: 926878 - RNA, 19 nt, Artificial Sequence
  Description of Artificial Sequence: Synthetic oligonucleotide
auacuuauauauauauaua

SEQ ID NO: 926879 - RNA, 19 nt, Artificial Sequence
  Description of Artificial Sequence: Synthetic oligonucleotide
cuuuuacagguaagcgcag

SEQ ID NO: 926880 - RNA, 19 nt, Artificial Sequence
  Description of Artificial Sequence: Synthetic oligonucleotide
auacggaugugcugggcca

SEQ ID NO: 926881 - RNA, 19 nt, Artificial Sequence
  Description of Artificial Sequence: Synthetic oligonucleotide
ccauguaucggcuacuguc

SEQ ID NO: 926882 - RNA, 19 nt, Artificial Sequence
  Description of Artificial Sequence: Synthetic oligonucleotide
acaagaugugaggccauag

SEQ ID NO: 926883 - RNA, 19 nt, Artificial Sequence
  Description of Artificial Sequence: Synthetic oligonucleotide
gauggccgugaugagcagg

SEQ ID NO: 926884 - RNA, 19 nt, Artificial Sequence
  Description of Artificial Sequence: Synthetic oligonucleotide
uagggcuuagccccugagu

SEQ ID NO: 926885 - RNA, 19 nt, Artificial Sequence
  Description of Artificial Sequence: Synthetic oligonucleotide
aggucagugagcacauccg

SEQ ID NO: 926886 - RNA, 19 nt, Artificial Sequence
  Description of Artificial Sequence: Synthetic oligonucleotide
uggucaccgggaaaucucu

SEQ ID NO: 926887 - RNA, 19 nt, Artificial Sequence
  Description of Artificial Sequence: Synthetic oligonucleotide
auaugaagugagaccauga

SEQ ID NO: 926888 - RNA, 19 nt, Artificial Sequence
  Description of Artificial Sequence: Synthetic oligonucleotide
aacccacacuuguauacua

SEQ ID NO: 926889 - RNA, 19 nt, Artificial Sequence
  Description of Artificial Sequence: Synthetic oligonucleotide
gacguaagggucauucauc

SEQ ID NO: 926890 - RNA, 19 nt, Artificial Sequence
  Description of Artificial Sequence: Synthetic oligonucleotide
ugcccgacuacagauugug

SEQ ID NO: 926891 - RNA, 19 nt, Artificial Sequence
  Description of Artificial Sequence: Synthetic oligonucleotide
uauggucuaucgcccgugu

SEQ ID NO: 926892 - RNA, 19 nt, Artificial Sequence
  Description of Artificial Sequence: Synthetic oligonucleotide
uuacagguaagcgcagcac

SEQ ID NO: 926893 - RNA, 19 nt, Artificial Sequence
  Description of Artificial Sequence: Synthetic oligonucleotide
auauacuuauauauauaua

SEQ ID NO: 926894 - RNA, 19 nt, Artificial Sequence
  Description of Artificial Sequence: Synthetic oligonucleotide
gguaacacuaucagcucag

SEQ ID NO: 926895 - RNA, 19 nt, Artificial Sequence
  Description of Artificial Sequence: Synthetic oligonucleotide
uguccagcaucugaccgug

SEQ ID NO: 926896 - RNA, 19 nt, Artificial Sequence
  Description of Artificial Sequence: Synthetic oligonucleotide
uuaugaugcucugccgucu

SEQ ID NO: 926897 - RNA, 19 nt, Artificial Sequence
  Description of Artificial Sequence: Synthetic oligonucleotide
cuaaguccaguccacaugu

SEQ ID NO: 926898 - RNA, 19 nt, Artificial Sequence
  Description of Artificial Sequence: Synthetic oligonucleotide
aguugugugaaggcuuucu

SEQ ID NO: 926899 - RNA, 19 nt, Artificial Sequence
  Description of Artificial Sequence: Synthetic oligonucleotide
gucucggugugugacuugg

SEQ ID NO: 926900 - RNA, 19 nt, Artificial Sequence
  Description of Artificial Sequence: Synthetic oligonucleotide
guugugugaaggcuuucuc

SEQ ID NO: 926901 - RNA, 19 nt, Artificial Sequence
  Description of Artificial Sequence: Synthetic oligonucleotide
uacaacuauagggcuuagc

SEQ ID NO: 926902 - RNA, 19 nt, Artificial Sequence
  Description of Artificial Sequence: Synthetic oligonucleotide
uucuguuauaugggagggc

SEQ ID NO: 926903 - RNA, 19 nt, Artificial Sequence
  Description of Artificial Sequence: Synthetic oligonucleotide
ccacccaauaugaagugag

SEQ ID NO: 926904 - RNA, 19 nt, Artificial Sequence
  Description of Artificial Sequence: Synthetic oligonucleotide
cucucucgagcacaacccc

SEQ ID NO: 926905 - RNA, 19 nt, Artificial Sequence
  Description of Artificial Sequence: Synthetic oligonucleotide
uggguaacacuaucagcuc

SEQ ID NO: 926906 - RNA, 19 nt, Artificial Sequence
  Description of Artificial Sequence: Synthetic oligonucleotide
uaccccuuggucaccggga

SEQ ID NO: 926907 - RNA, 19 nt, Artificial Sequence
  Description of Artificial Sequence: Synthetic oligonucleotide
uuggguugcuguccccacc

SEQ ID NO: 926908 - RNA, 19 nt, Artificial Sequence
  Description of Artificial Sequence: Synthetic oligonucleotide
auagggcuuagccccugag

SEQ ID NO: 926909 - RNA, 19 nt, Artificial Sequence
  Description of Artificial Sequence: Synthetic oligonucleotide
cuuuaugaugcucugccgu

SEQ ID NO: 926910 - RNA, 19 nt, Artificial Sequence
  Description of Artificial Sequence: Synthetic oligonucleotide
agccgcuagccuucuauug

SEQ ID NO: 926911 - RNA, 19 nt, Artificial Sequence
  Description of Artificial Sequence: Synthetic oligonucleotide
ugaccguggcaccuaggga

SEQ ID NO: 926912 - RNA, 19 nt, Artificial Sequence
  Description of Artificial Sequence: Synthetic oligonucleotide
gcucugccgucuuauaggg

SEQ ID NO: 926913 - RNA, 19 nt, Artificial Sequence
  Description of Artificial Sequence: Synthetic oligonucleotide
uacuaccccuuggucaccg

SEQ ID NO: 926914 - RNA, 19 nt, Artificial Sequence
  Description of Artificial Sequence: Synthetic oligonucleotide
ucugaccguggcaccuagg

SEQ ID NO: 926915 - RNA, 19 nt, Artificial Sequence
  Description of Artificial Sequence: Synthetic oligonucleotide
gauuccagcacccgcuucu

SEQ ID NO: 926916 - RNA, 19 nt, Artificial Sequence
  Description of Artificial Sequence: Synthetic oligonucleotide
agaucaggaggguuguguu

SEQ ID NO: 926917 - RNA, 19 nt, Artificial Sequence
  Description of Artificial Sequence: Synthetic oligonucleotide
ugucccucuuagaaauaaa

SEQ ID NO: 926918 - RNA, 19 nt, Artificial Sequence
  Description of Artificial Sequence: Synthetic oligonucleotide
cuaccccuuggucaccggg

SEQ ID NO: 926919 - RNA, 19 nt, Artificial Sequence
  Description of Artificial Sequence: Synthetic oligonucleotide
gagaauacaggcccuuggu

SEQ ID NO: 926920 - RNA, 19 nt, Artificial Sequence
  Description of Artificial Sequence: Synthetic oligonucleotide
agcuaaguccaguccacau

SEQ ID NO: 926921 - RNA, 19 nt, Artificial Sequence
  Description of Artificial Sequence: Synthetic oligonucleotide
gcaucuccgacuuugagua

SEQ ID NO: 926922 - RNA, 19 nt, Artificial Sequence
  Description of Artificial Sequence: Synthetic oligonucleotide
gccgcuagccuucuauugg

SEQ ID NO: 926923 - RNA, 19 nt, Artificial Sequence
  Description of Artificial Sequence: Synthetic oligonucleotide
ggcagugcggaucucuaag

SEQ ID NO: 926924 - RNA, 19 nt, Artificial Sequence
  Description of Artificial Sequence: Synthetic oligonucleotide
gcuaaguccaguccacaug

SEQ ID NO: 926925 - RNA, 19 nt, Artificial Sequence
  Description of Artificial Sequence: Synthetic oligonucleotide
uguuugcgcauguguuuca

SEQ ID NO: 926926 - RNA, 19 nt, Artificial Sequence
  Description of Artificial Sequence: Synthetic oligonucleotide
agguauguuuccgauguau

SEQ ID NO: 926927 - RNA, 19 nt, Artificial Sequence
  Description of Artificial Sequence: Synthetic oligonucleotide
uuuggguugcuguccccac

SEQ ID NO: 926928 - RNA, 19 nt, Artificial Sequence
  Description of Artificial Sequence: Synthetic oligonucleotide
cagggcaugugcaagaccu

SEQ ID NO: 926929 - RNA, 19 nt, Artificial Sequence
  Description of Artificial Sequence: Synthetic oligonucleotide
cuaucgcccguguggauuc

SEQ ID NO: 926930 - RNA, 19 nt, Artificial Sequence
  Description of Artificial Sequence: Synthetic oligonucleotide
ugaccauguaagggaaaga

SEQ ID NO: 926931 - RNA, 19 nt, Artificial Sequence
  Description of Artificial Sequence: Synthetic oligonucleotide
agcccugauuccagcaccc

SEQ ID NO: 926932 - RNA, 19 nt, Artificial Sequence
  Description of Artificial Sequence: Synthetic oligonucleotide
ucggcuacugucccucuua

SEQ ID NO: 926933 - RNA, 19 nt, Artificial Sequence
  Description of Artificial Sequence: Synthetic oligonucleotide
gggugugcacauuuguaug

SEQ ID NO: 926934 - RNA, 19 nt, Artificial Sequence
  Description of Artificial Sequence: Synthetic oligonucleotide
uggugaccauguaucggcu

SEQ ID NO: 926935 - RNA, 19 nt, Artificial Sequence
  Description of Artificial Sequence: Synthetic oligonucleotide
accuagggagcuaagucca

SEQ ID NO: 926936 - RNA, 19 nt, Artificial Sequence
  Description of Artificial Sequence: Synthetic oligonucleotide
gaccauguaucggcuacug

SEQ ID NO: 926937 - RNA, 19 nt, Artificial Sequence
  Description of Artificial Sequence: Synthetic oligonucleotide
uuccgauguauaugcccga

SEQ ID NO: 926938 - RNA, 19 nt, Artificial Sequence
  Description of Artificial Sequence: Synthetic oligonucleotide
gagaacucucccaccaaga

SEQ ID NO: 926939 - RNA, 19 nt, Artificial Sequence
  Description of Artificial Sequence: Synthetic oligonucleotide
caagaccuguucuuuuaca

SEQ ID NO: 926940 - RNA, 19 nt, Artificial Sequence
  Description of Artificial Sequence: Synthetic oligonucleotide
ccgacuacagauugugcag

SEQ ID NO: 926941 - RNA, 19 nt, Artificial Sequence
  Description of Artificial Sequence: Synthetic oligonucleotide
gggagcuaaguccagucca

SEQ ID NO: 926942 - RNA, 19 nt, Artificial Sequence
  Description of Artificial Sequence: Synthetic oligonucleotide
gcucgaugacaauuguggc

SEQ ID NO: 926943 - RNA, 19 nt, Artificial Sequence
  Description of Artificial Sequence: Synthetic oligonucleotide
aucugaccguggcaccuag

SEQ ID NO: 926944 - RNA, 19 nt, Artificial Sequence
  Description of Artificial Sequence: Synthetic oligonucleotide
accauguaucggcuacugu

SEQ ID NO: 926945 - RNA, 19 nt, Artificial Sequence
  Description of Artificial Sequence: Synthetic oligonucleotide
uccgauguauaugcccgac

SEQ ID NO: 926946 - RNA, 19 nt, Artificial Sequence
  Description of Artificial Sequence: Synthetic oligonucleotide
auggucuaucgcccgugug

SEQ ID NO: 926947 - RNA, 19 nt, Artificial Sequence
  Description of Artificial Sequence: Synthetic oligonucleotide
cccacacuuguauacuacc

SEQ ID NO: 926948 - RNA, 19 nt, Artificial Sequence
  Description of Artificial Sequence: Synthetic oligonucleotide
cauaagguauguuuccgau

SEQ ID NO: 926949 - RNA, 19 nt, Artificial Sequence
  Description of Artificial Sequence: Synthetic oligonucleotide
cggugugugacuuggagug

SEQ ID NO: 926950 - RNA, 19 nt, Artificial Sequence
  Description of Artificial Sequence: Synthetic oligonucleotide
agguaagcgcagcacggaa

SEQ ID NO: 926951 - RNA, 19 nt, Artificial Sequence
  Description of Artificial Sequence: Synthetic oligonucleotide
uuacaacuauagggcuuag

SEQ ID NO: 926952 - RNA, 19 nt, Artificial Sequence
  Description of Artificial Sequence: Synthetic oligonucleotide
guguuugcgcauguguuuc

SEQ ID NO: 926953 - RNA, 19 nt, Artificial Sequence
  Description of Artificial Sequence: Synthetic oligonucleotide
guuauaugggagggccagc

SEQ ID NO: 926954 - RNA, 19 nt, Artificial Sequence
  Description of Artificial Sequence: Synthetic oligonucleotide
gggucauucaucucaggaa

SEQ ID NO: 926955 - RNA, 19 nt, Artificial Sequence
  Description of Artificial Sequence: Synthetic oligonucleotide
uuugcgcauguguuucaua

SEQ ID NO: 926956 - RNA, 19 nt, Artificial Sequence
  Description of Artificial Sequence: Synthetic oligonucleotide
cucugccgucuuauagggg

SEQ ID NO: 926957 - RNA, 19 nt, Artificial Sequence
  Description of Artificial Sequence: Synthetic oligonucleotide
agugaggcagaugucuuua

SEQ ID NO: 926958 - RNA, 19 nt, Artificial Sequence
  Description of Artificial Sequence: Synthetic oligonucleotide
gauuaaggaugguugucuu

SEQ ID NO: 926959 - RNA, 19 nt, Artificial Sequence
  Description of Artificial Sequence: Synthetic oligonucleotide
gugcagguauacaccuugg

SEQ ID NO: 926960 - RNA, 19 nt, Artificial Sequence
  Description of Artificial Sequence: Synthetic oligonucleotide
aagguauguuuccgaugua

SEQ ID NO: 926961 - RNA, 19 nt, Artificial Sequence
  Description of Artificial Sequence: Synthetic oligonucleotide
gguaagcgcagcacggaag

SEQ ID NO: 926962 - RNA, 19 nt, Artificial Sequence
  Description of Artificial Sequence: Synthetic oligonucleotide
ugggagggccagccgcuag

SEQ ID NO: 926963 - RNA, 19 nt, Artificial Sequence
  Description of Artificial Sequence: Synthetic oligonucleotide
guaucggcuacugucccuc

SEQ ID NO: 926964 - RNA, 19 nt, Artificial Sequence
  Description of Artificial Sequence: Synthetic oligonucleotide
ucaucucaggaagcccuga

SEQ ID NO: 926965 - RNA, 19 nt, Artificial Sequence
  Description of Artificial Sequence: Synthetic oligonucleotide
aagccaugccugaggacca

SEQ ID NO: 926966 - RNA, 19 nt, Artificial Sequence
  Description of Artificial Sequence: Synthetic oligonucleotide
gcaccuagggagcuaaguc

SEQ ID NO: 926967 - RNA, 19 nt, Artificial Sequence
  Description of Artificial Sequence: Synthetic oligonucleotide
caccguguguguagauaag

SEQ ID NO: 926968 - RNA, 19 nt, Artificial Sequence
  Description of Artificial Sequence: Synthetic oligonucleotide
ggguaacacuaucagcuca

SEQ ID NO: 926969 - RNA, 19 nt, Artificial Sequence
  Description of Artificial Sequence: Synthetic oligonucleotide
guauggucuaucgcccgug

SEQ ID NO: 926970 - RNA, 19 nt, Artificial Sequence
  Description of Artificial Sequence: Synthetic oligonucleotide
ugaccauguaucggcuacu

SEQ ID NO: 926971 - RNA, 19 nt, Artificial Sequence
  Description of Artificial Sequence: Synthetic oligonucleotide
uaagcgcagcacggaaggc

SEQ ID NO: 926972 - RNA, 19 nt, Artificial Sequence
  Description of Artificial Sequence: Synthetic oligonucleotide
ccguguguguagauaagug

SEQ ID NO: 926973 - RNA, 19 nt, Artificial Sequence
  Description of Artificial Sequence: Synthetic oligonucleotide
cuguuauaugggagggcca

SEQ ID NO: 926974 - RNA, 19 nt, Artificial Sequence
  Description of Artificial Sequence: Synthetic oligonucleotide
ugcgucuguguaugcucga

SEQ ID NO: 926975 - RNA, 19 nt, Artificial Sequence
  Description of Artificial Sequence: Synthetic oligonucleotide
agccacacugccaccuccg

SEQ ID NO: 926976 - RNA, 19 nt, Artificial Sequence
  Description of Artificial Sequence: Synthetic oligonucleotide
guagaaggucagugagcac

SEQ ID NO: 926977 - RNA, 19 nt, Artificial Sequence
  Description of Artificial Sequence: Synthetic oligonucleotide
cuauuggcuccaacuuuga

SEQ ID NO: 926978 - RNA, 19 nt, Artificial Sequence
  Description of Artificial Sequence: Synthetic oligonucleotide
caucuccgacuuugaguag

SEQ ID NO: 926979 - RNA, 19 nt, Artificial Sequence
  Description of Artificial Sequence: Synthetic oligonucleotide
cccgacuacagauugugca

SEQ ID NO: 926980 - RNA, 19 nt, Artificial Sequence
  Description of Artificial Sequence: Synthetic oligonucleotide
augagcagguauauauaua

SEQ ID NO: 926981 - RNA, 19 nt, Artificial Sequence
  Description of Artificial Sequence: Synthetic oligonucleotide
gcagauuagagaguugugu

SEQ ID NO: 926982 - RNA, 19 nt, Artificial Sequence
  Description of Artificial Sequence: Synthetic oligonucleotide
acuauagggcuuagccccu

SEQ ID NO: 926983 - RNA, 19 nt, Artificial Sequence
  Description of Artificial Sequence: Synthetic oligonucleotide
uaucggcuacugucccucu

SEQ ID NO: 926984 - RNA, 19 nt, Artificial Sequence
  Description of Artificial Sequence: Synthetic oligonucleotide
gcagguauauauauauaua

SEQ ID NO: 926985 - RNA, 19 nt, Artificial Sequence
  Description of Artificial Sequence: Synthetic oligonucleotide
gaugcucugccgucuuaua

SEQ ID NO: 926986 - RNA, 19 nt, Artificial Sequence
  Description of Artificial Sequence: Synthetic oligonucleotide
auucgggugugcugcugaa

SEQ ID NO: 926987 - RNA, 19 nt, Artificial Sequence
  Description of Artificial Sequence: Synthetic oligonucleotide
caccgggaaaucucuggca

SEQ ID NO: 926988 - RNA, 19 nt, Artificial Sequence
  Description of Artificial Sequence: Synthetic oligonucleotide
gagcagguauauauauaua

SEQ ID NO: 926989 - RNA, 19 nt, Artificial Sequence
  Description of Artificial Sequence: Synthetic oligonucleotide
ggagcuaaguccaguccac

SEQ ID NO: 926990 - RNA, 19 nt, Artificial Sequence
  Description of Artificial Sequence: Synthetic oligonucleotide
gggaagugcccacacugga

SEQ ID NO: 926991 - RNA, 19 nt, Artificial Sequence
  Description of Artificial Sequence: Synthetic oligonucleotide
agcccgggugugcacauuu

SEQ ID NO: 926992 - RNA, 19 nt, Artificial Sequence
  Description of Artificial Sequence: Synthetic oligonucleotide
cacaugugugcccugacuu

SEQ ID NO: 926993 - RNA, 19 nt, Artificial Sequence
  Description of Artificial Sequence: Synthetic oligonucleotide
ccgcuagccuucuauuggc

SEQ ID NO: 926994 - RNA, 19 nt, Artificial Sequence
  Description of Artificial Sequence: Synthetic oligonucleotide
uauacaccuuggcgugcuu

SEQ ID NO: 926995 - RNA, 19 nt, Artificial Sequence
  Description of Artificial Sequence: Synthetic oligonucleotide
gcacauccggcaccuguag

SEQ ID NO: 926996 - RNA, 19 nt, Artificial Sequence
  Description of Artificial Sequence: Synthetic oligonucleotide
cugucccucuuagaaauaa

SEQ ID NO: 926997 - RNA, 19 nt, Artificial Sequence
  Description of Artificial Sequence: Synthetic oligonucleotide
ggcguuggguaacacuauc

SEQ ID NO: 926998 - RNA, 19 nt, Artificial Sequence
  Description of Artificial Sequence: Synthetic oligonucleotide
augugugcccugacuucuc

SEQ ID NO: 926999 - RNA, 19 nt, Artificial Sequence
  Description of Artificial Sequence: Synthetic oligonucleotide
gguauguuuccgauguaua

SEQ ID NO: 927000 - RNA, 19 nt, Artificial Sequence
  Description of Artificial Sequence: Synthetic oligonucleotide
gcagugcggaucucuaaga

SEQ ID NO: 927001 - RNA, 19 nt, Artificial Sequence
  Description of Artificial Sequence: Synthetic oligonucleotide
gguauacaccuuggcgugc

SEQ ID NO: 927002 - RNA, 19 nt, Artificial Sequence
  Description of Artificial Sequence: Synthetic oligonucleotide
ggacguaagggucauucau

SEQ ID NO: 927003 - RNA, 19 nt, Artificial Sequence
  Description of Artificial Sequence: Synthetic oligonucleotide
gacaagaugugaggccaua

SEQ ID NO: 927004 - RNA, 19 nt, Artificial Sequence
  Description of Artificial Sequence: Synthetic oligonucleotide
auaugcccgacuacagauu

SEQ ID NO: 927005 - RNA, 19 nt, Artificial Sequence
  Description of Artificial Sequence: Synthetic oligonucleotide
ggggcguuggguaacacua

SEQ ID NO: 927006 - RNA, 19 nt, Artificial Sequence
  Description of Artificial Sequence: Synthetic oligonucleotide
ccgggaaaucucuggcacc

SEQ ID NO: 927007 - RNA, 19 nt, Artificial Sequence
  Description of Artificial Sequence: Synthetic oligonucleotide
ggcuuagccccugagugga

SEQ ID NO: 927008 - RNA, 19 nt, Artificial Sequence
  Description of Artificial Sequence: Synthetic oligonucleotide
agcuggcggaaggauuucu

SEQ ID NO: 927009 - RNA, 19 nt, Artificial Sequence
  Description of Artificial Sequence: Synthetic oligonucleotide
agccucuagugaggcugcg

SEQ ID NO: 927010 - RNA, 19 nt, Artificial Sequence
  Description of Artificial Sequence: Synthetic oligonucleotide
aucggcuacugucccucuu

SEQ ID NO: 927011 - RNA, 19 nt, Artificial Sequence
  Description of Artificial Sequence: Synthetic oligonucleotide
cuuuguugugcugccgucu

SEQ ID NO: 927012 - RNA, 19 nt, Artificial Sequence
  Description of Artificial Sequence: Synthetic oligonucleotide
acagcccgggugugcacau

SEQ ID NO: 927013 - RNA, 19 nt, Artificial Sequence
  Description of Artificial Sequence: Synthetic oligonucleotide
cgccgcuugcacuuguugc

SEQ ID NO: 927014 - RNA, 19 nt, Artificial Sequence
  Description of Artificial Sequence: Synthetic oligonucleotide
agggcaugugcaagaccug

SEQ ID NO: 927015 - RNA, 19 nt, Artificial Sequence
  Description of Artificial Sequence: Synthetic oligonucleotide
guauacaccuuggcgugcu

SEQ ID NO: 927016 - RNA, 19 nt, Artificial Sequence
  Description of Artificial Sequence: Synthetic oligonucleotide
gcguuggguaacacuauca

SEQ ID NO: 927017 - RNA, 19 nt, Artificial Sequence
  Description of Artificial Sequence: Synthetic oligonucleotide
cugagauaaugcaguuuau

SEQ ID NO: 927018 - RNA, 19 nt, Artificial Sequence
  Description of Artificial Sequence: Synthetic oligonucleotide
ggauacggaugugcugggc

SEQ ID NO: 927019 - RNA, 19 nt, Artificial Sequence
  Description of Artificial Sequence: Synthetic oligonucleotide
cgauguauaugcccgacua

SEQ ID NO: 927020 - RNA, 19 nt, Artificial Sequence
  Description of Artificial Sequence: Synthetic oligonucleotide
cagguaagcgcagcacgga

SEQ ID NO: 927021 - RNA, 19 nt, Artificial Sequence
  Description of Artificial Sequence: Synthetic oligonucleotide
ccagggcaugugcaagacc

SEQ ID NO: 927022 - RNA, 19 nt, Artificial Sequence
  Description of Artificial Sequence: Synthetic oligonucleotide
ugcggccccgaggagguuu

SEQ ID NO: 927023 - RNA, 19 nt, Artificial Sequence
  Description of Artificial Sequence: Synthetic oligonucleotide
ggagggccagccgcuagcc

SEQ ID NO: 927024 - RNA, 19 nt, Artificial Sequence
  Description of Artificial Sequence: Synthetic oligonucleotide
ggugaccauguaucggcua

SEQ ID NO: 927025 - RNA, 19 nt, Artificial Sequence
  Description of Artificial Sequence: Synthetic oligonucleotide
cacuuguauacuaccccuu

SEQ ID NO: 927026 - RNA, 19 nt, Artificial Sequence
  Description of Artificial Sequence: Synthetic oligonucleotide
gccgcuugcacuuguugcu

SEQ ID NO: 927027 - RNA, 19 nt, Artificial Sequence
  Description of Artificial Sequence: Synthetic oligonucleotide
ggucaccgggaaaucucug

SEQ ID NO: 927028 - RNA, 19 nt, Artificial Sequence
  Description of Artificial Sequence: Synthetic oligonucleotide
gggucaggucaaaggaaca

SEQ ID NO: 927029 - RNA, 19 nt, Artificial Sequence
  Description of Artificial Sequence: Synthetic oligonucleotide
cugggccauggagcagugc

SEQ ID NO: 927030 - RNA, 19 nt, Artificial Sequence
  Description of Artificial Sequence: Synthetic oligonucleotide
gccuucuauuggcuccaac

SEQ ID NO: 927031 - RNA, 19 nt, Artificial Sequence
  Description of Artificial Sequence: Synthetic oligonucleotide
gccgugaugagcagguaua

SEQ ID NO: 927032 - RNA, 19 nt, Artificial Sequence
  Description of Artificial Sequence: Synthetic oligonucleotide
gcuucaccguguguguaga

SEQ ID NO: 927033 - RNA, 19 nt, Artificial Sequence
  Description of Artificial Sequence: Synthetic oligonucleotide
guuugcgcauguguuucau

SEQ ID NO: 927034 - RNA, 19 nt, Artificial Sequence
  Description of Artificial Sequence: Synthetic oligonucleotide
cguaagggucauucaucuc

SEQ ID NO: 927035 - RNA, 19 nt, Artificial Sequence
  Description of Artificial Sequence: Synthetic oligonucleotide
cuagugaggcugcgucugu

SEQ ID NO: 927036 - RNA, 19 nt, Artificial Sequence
  Description of Artificial Sequence: Synthetic oligonucleotide
guguaugcucgaugacaau

SEQ ID NO: 927037 - RNA, 19 nt, Artificial Sequence
  Description of Artificial Sequence: Synthetic oligonucleotide
ugcugccgucugugagacu

SEQ ID NO: 927038 - RNA, 19 nt, Artificial Sequence
  Description of Artificial Sequence: Synthetic oligonucleotide
gcccgacuacagauugugc

SEQ ID NO: 927039 - RNA, 19 nt, Artificial Sequence
  Description of Artificial Sequence: Synthetic oligonucleotide
ccgccgcuugcacuuguug

SEQ ID NO: 927040 - RNA, 19 nt, Artificial Sequence
  Description of Artificial Sequence: Synthetic oligonucleotide
caucugaccguggcaccua

SEQ ID NO: 927041 - RNA, 19 nt, Artificial Sequence
  Description of Artificial Sequence: Synthetic oligonucleotide
cgcauguguuucauaaggu

SEQ ID NO: 927042 - RNA, 19 nt, Artificial Sequence
  Description of Artificial Sequence: Synthetic oligonucleotide
cucccucuuuccagugggu

SEQ ID NO: 927043 - RNA, 19 nt, Artificial Sequence
  Description of Artificial Sequence: Synthetic oligonucleotide
gcaucugaccguggcaccu

SEQ ID NO: 927044 - RNA, 19 nt, Artificial Sequence
  Description of Artificial Sequence: Synthetic oligonucleotide
agccuucuauuggcuccaa

SEQ ID NO: 927045 - RNA, 19 nt, Artificial Sequence
  Description of Artificial Sequence: Synthetic oligonucleotide
cagccgcuagccuucuauu

SEQ ID NO: 927046 - RNA, 19 nt, Artificial Sequence
  Description of Artificial Sequence: Synthetic oligonucleotide
gcccgggugugcacauuug

SEQ ID NO: 927047 - RNA, 19 nt, Artificial Sequence
  Description of Artificial Sequence: Synthetic oligonucleotide
ccagccgcuagccuucuau

SEQ ID NO: 927048 - RNA, 19 nt, Artificial Sequence
  Description of Artificial Sequence: Synthetic oligonucleotide
ccgauguauaugcccgacu

SEQ ID NO: 927049 - RNA, 19 nt, Artificial Sequence
  Description of Artificial Sequence: Synthetic oligonucleotide
gccccugaguggauacgga

SEQ ID NO: 927050 - RNA, 19 nt, Artificial Sequence
  Description of Artificial Sequence: Synthetic oligonucleotide
cgugcuucaccgugugugu

SEQ ID NO: 927051 - RNA, 19 nt, Artificial Sequence
  Description of Artificial Sequence: Synthetic oligonucleotide
cccgggugugcacauuugu

SEQ ID NO: 927052 - RNA, 19 nt, Artificial Sequence
  Description of Artificial Sequence: Synthetic oligonucleotide
ggacaagaugugaggccau

SEQ ID NO: 927053 - RNA, 19 nt, Artificial Sequence
  Description of Artificial Sequence: Synthetic oligonucleotide
ccccugaguggauacggau

SEQ ID NO: 927054 - RNA, 19 nt, Artificial Sequence
  Description of Artificial Sequence: Synthetic oligonucleotide
cggaaggauuucucacaaa

SEQ ID NO: 927055 - RNA, 19 nt, Artificial Sequence
  Description of Artificial Sequence: Synthetic oligonucleotide
ggcgugcuucaccgugugu

SEQ ID NO: 927056 - RNA, 19 nt, Artificial Sequence
  Description of Artificial Sequence: Synthetic oligonucleotide
gccucuagugaggcugcgu

SEQ ID NO: 927057 - RNA, 19 nt, Artificial Sequence
  Description of Artificial Sequence: Synthetic oligonucleotide
gcgucuguguaugcucgau

SEQ ID NO: 927058 - RNA, 19 nt, Artificial Sequence
  Description of Artificial Sequence: Synthetic oligonucleotide
ccgugaugagcagguauau

SEQ ID NO: 927059 - RNA, 19 nt, Artificial Sequence
  Description of Artificial Sequence: Synthetic oligonucleotide
caaggacguaagggucauu

SEQ ID NO: 927060 - RNA, 19 nt, Artificial Sequence
  Description of Artificial Sequence: Synthetic oligonucleotide
gcggccccgaggagguuua

SEQ ID NO: 927061 - RNA, 19 nt, Artificial Sequence
  Description of Artificial Sequence: Synthetic oligonucleotide
cgcagcacggaaggcuggu

SEQ ID NO: 927062 - RNA, 19 nt, Artificial Sequence
  Description of Artificial Sequence: Synthetic oligonucleotide
cagcccgggugugcacauu

SEQ ID NO: 927063 - RNA, 19 nt, Artificial Sequence
  Description of Artificial Sequence: Synthetic oligonucleotide
aauuauugcaguuacauca

SEQ ID NO: 927064 - RNA, 19 nt, Artificial Sequence
  Description of Artificial Sequence: Synthetic oligonucleotide
aaauauagaaucuagacau

SEQ ID NO: 927065 - RNA, 19 nt, Artificial Sequence
  Description of Artificial Sequence: Synthetic oligonucleotide
aaauuaugcugcuaaagac

SEQ ID NO: 927066 - RNA, 19 nt, Artificial Sequence
  Description of Artificial Sequence: Synthetic oligonucleotide
uuuacuauagcaaaacacu

SEQ ID NO: 927067 - RNA, 19 nt, Artificial Sequence
  Description of Artificial Sequence: Synthetic oligonucleotide
auagagguaaaccaguuac

SEQ ID NO: 927068 - RNA, 19 nt, Artificial Sequence
  Description of Artificial Sequence: Synthetic oligonucleotide
aaauaucacaaugugauag

SEQ ID NO: 927069 - RNA, 19 nt, Artificial Sequence
  Description of Artificial Sequence: Synthetic oligonucleotide
ugguguuacaaacuaaucg

SEQ ID NO: 927070 - RNA, 19 nt, Artificial Sequence
  Description of Artificial Sequence: Synthetic oligonucleotide
aaugcuaauaaagugagcu

SEQ ID NO: 927071 - RNA, 19 nt, Artificial Sequence
  Description of Artificial Sequence: Synthetic oligonucleotide
uuaaccuaaacauugauua

SEQ ID NO: 927072 - RNA, 19 nt, Artificial Sequence
  Description of Artificial Sequence: Synthetic oligonucleotide
gauuacgaaagacaacugg

SEQ ID NO: 927073 - RNA, 19 nt, Artificial Sequence
  Description of Artificial Sequence: Synthetic oligonucleotide
augauauguauuucuauac

SEQ ID NO: 927074 - RNA, 19 nt, Artificial Sequence
  Description of Artificial Sequence: Synthetic oligonucleotide
uauaaguggaggcagaggu

SEQ ID NO: 927075 - RNA, 19 nt, Artificial Sequence
  Description of Artificial Sequence: Synthetic oligonucleotide
aaaagauacaacauucaag

SEQ ID NO: 927076 - RNA, 19 nt, Artificial Sequence
  Description of Artificial Sequence: Synthetic oligonucleotide
aagccuaggaucaaaauuc

SEQ ID NO: 927077 - RNA, 19 nt, Artificial Sequence
  Description of Artificial Sequence: Synthetic oligonucleotide
aucauaacuauuuaauaug

SEQ ID NO: 927078 - RNA, 19 nt, Artificial Sequence
  Description of Artificial Sequence: Synthetic oligonucleotide
aaauugauugaagauacug

SEQ ID NO: 927079 - RNA, 19 nt, Artificial Sequence
  Description of Artificial Sequence: Synthetic oligonucleotide
aacauugauuacgaaagac

SEQ ID NO: 927080 - RNA, 19 nt, Artificial Sequence
  Description of Artificial Sequence: Synthetic oligonucleotide
aauaggaagacuaugcaca

SEQ ID NO: 927081 - RNA, 19 nt, Artificial Sequence
  Description of Artificial Sequence: Synthetic oligonucleotide
aacuaaugcuaguaagaac

SEQ ID NO: 927082 - RNA, 19 nt, Artificial Sequence
  Description of Artificial Sequence: Synthetic oligonucleotide
agaaaugguaguuagcucu

SEQ ID NO: 927083 - RNA, 19 nt, Artificial Sequence
  Description of Artificial Sequence: Synthetic oligonucleotide
ugguaguuagcucugauga

SEQ ID NO: 927084 - RNA, 19 nt, Artificial Sequence
  Description of Artificial Sequence: Synthetic oligonucleotide
auuacgaaagacaacuggc

SEQ ID NO: 927085 - RNA, 19 nt, Artificial Sequence
  Description of Artificial Sequence: Synthetic oligonucleotide
uugauuacgaaagacaacu

SEQ ID NO: 927086 - RNA, 19 nt, Artificial Sequence
  Description of Artificial Sequence: Synthetic oligonucleotide
aacuaaucgguuuugugcu

SEQ ID NO: 927087 - RNA, 19 nt, Artificial Sequence
  Description of Artificial Sequence: Synthetic oligonucleotide
uguuauauucauuuuggcu

SEQ ID NO: 927088 - RNA, 19 nt, Artificial Sequence
  Description of Artificial Sequence: Synthetic oligonucleotide
auaauuacuacagucucac

SEQ ID NO: 927089 - RNA, 19 nt, Artificial Sequence
  Description of Artificial Sequence: Synthetic oligonucleotide
ugugauagagcaauaaaau

SEQ ID NO: 927090 - RNA, 19 nt, Artificial Sequence
  Description of Artificial Sequence: Synthetic oligonucleotide
uguaggaucacuucuccag

SEQ ID NO: 927091 - RNA, 19 nt, Artificial Sequence
  Description of Artificial Sequence: Synthetic oligonucleotide
acuauguaagucuccacac

SEQ ID NO: 927092 - RNA, 19 nt, Artificial Sequence
  Description of Artificial Sequence: Synthetic oligonucleotide
uuuggaucaagggacaggg

SEQ ID NO: 927093 - RNA, 19 nt, Artificial Sequence
  Description of Artificial Sequence: Synthetic oligonucleotide
gaagacuaugcacagcggg

SEQ ID NO: 927094 - RNA, 19 nt, Artificial Sequence
  Description of Artificial Sequence: Synthetic oligonucleotide
uugguuaggauaaugucca

SEQ ID NO: 927095 - RNA, 19 nt, Artificial Sequence
  Description of Artificial Sequence: Synthetic oligonucleotide
uguauuucuauacuacagu

SEQ ID NO: 927096 - RNA, 19 nt, Artificial Sequence
  Description of Artificial Sequence: Synthetic oligonucleotide
agcaguugguguuacaaac

SEQ ID NO: 927097 - RNA, 19 nt, Artificial Sequence
  Description of Artificial Sequence: Synthetic oligonucleotide
auugauugaagauacugga

SEQ ID NO: 927098 - RNA, 19 nt, Artificial Sequence
  Description of Artificial Sequence: Synthetic oligonucleotide
acaaacuaaugcuaguaag

SEQ ID NO: 927099 - RNA, 19 nt, Artificial Sequence
  Description of Artificial Sequence: Synthetic oligonucleotide
uaauuaagccuguuaaggc

SEQ ID NO: 927100 - RNA, 19 nt, Artificial Sequence
  Description of Artificial Sequence: Synthetic oligonucleotide
ugauugaagauacuggauc

SEQ ID NO: 927101 - RNA, 19 nt, Artificial Sequence
  Description of Artificial Sequence: Synthetic oligonucleotide
aggauguaaguucaugugg

SEQ ID NO: 927102 - RNA, 19 nt, Artificial Sequence
  Description of Artificial Sequence: Synthetic oligonucleotide
ugcuugaaacuaaacaacc

SEQ ID NO: 927103 - RNA, 19 nt, Artificial Sequence
  Description of Artificial Sequence: Synthetic oligonucleotide
uaaaggaaccggaaguaag

SEQ ID NO: 927104 - RNA, 19 nt, Artificial Sequence
  Description of Artificial Sequence: Synthetic oligonucleotide
ugcuaaagacaaaacacug

SEQ ID NO: 927105 - RNA, 19 nt, Artificial Sequence
  Description of Artificial Sequence: Synthetic oligonucleotide
uuauauucauuuuggcugc

SEQ ID NO: 927106 - RNA, 19 nt, Artificial Sequence
  Description of Artificial Sequence: Synthetic oligonucleotide
aaugugauagagcaauaaa

SEQ ID NO: 927107 - RNA, 19 nt, Artificial Sequence
  Description of Artificial Sequence: Synthetic oligonucleotide
uuguauuccauaaucuacu

SEQ ID NO: 927108 - RNA, 19 nt, Artificial Sequence
  Description of Artificial Sequence: Synthetic oligonucleotide
cauauacucaagcugacug

SEQ ID NO: 927109 - RNA, 19 nt, Artificial Sequence
  Description of Artificial Sequence: Synthetic oligonucleotide
uauuucuauacuacagucu

SEQ ID NO: 927110 - RNA, 19 nt, Artificial Sequence
  Description of Artificial Sequence: Synthetic oligonucleotide
ugcuaguaagaacugaacu

SEQ ID NO: 927111 - RNA, 19 nt, Artificial Sequence
  Description of Artificial Sequence: Synthetic oligonucleotide
uguaaguucaugugguucu

SEQ ID NO: 927112 - RNA, 19 nt, Artificial Sequence
  Description of Artificial Sequence: Synthetic oligonucleotide
ugaauaggaagacuaugca

SEQ ID NO: 927113 - RNA, 19 nt, Artificial Sequence
  Description of Artificial Sequence: Synthetic oligonucleotide
uggcauauacucaagcuga

SEQ ID NO: 927114 - RNA, 19 nt, Artificial Sequence
  Description of Artificial Sequence: Synthetic oligonucleotide
uaguuagcucugaugaagg

SEQ ID NO: 927115 - RNA, 19 nt, Artificial Sequence
  Description of Artificial Sequence: Synthetic oligonucleotide
ucguacaaacuaaugcuag

SEQ ID NO: 927116 - RNA, 19 nt, Artificial Sequence
  Description of Artificial Sequence: Synthetic oligonucleotide
uaacaaaauggugacgcgg

SEQ ID NO: 927117 - RNA, 19 nt, Artificial Sequence
  Description of Artificial Sequence: Synthetic oligonucleotide
uggaucaagggacagggca

SEQ ID NO: 927118 - RNA, 19 nt, Artificial Sequence
  Description of Artificial Sequence: Synthetic oligonucleotide
acuguuaaccuaaacauug

SEQ ID NO: 927119 - RNA, 19 nt, Artificial Sequence
  Description of Artificial Sequence: Synthetic oligonucleotide
uuagcucugaugaaggcaa

SEQ ID NO: 927120 - RNA, 19 nt, Artificial Sequence
  Description of Artificial Sequence: Synthetic oligonucleotide
aauucuuuugcagccuagg

SEQ ID NO: 927121 - RNA, 19 nt, Artificial Sequence
  Description of Artificial Sequence: Synthetic oligonucleotide
uuacgaaagacaacuggca

SEQ ID NO: 927122 - RNA, 19 nt, Artificial Sequence
  Description of Artificial Sequence: Synthetic oligonucleotide
uuauccgcacuccucagag

SEQ ID NO: 927123 - RNA, 19 nt, Artificial Sequence
  Description of Artificial Sequence: Synthetic oligonucleotide
gaugugacucuguauuggg

SEQ ID NO: 927124 - RNA, 19 nt, Artificial Sequence
  Description of Artificial Sequence: Synthetic oligonucleotide
agcuuaauaauuacuacag

SEQ ID NO: 927125 - RNA, 19 nt, Artificial Sequence
  Description of Artificial Sequence: Synthetic oligonucleotide
aggaaccggaaguaagucc

SEQ ID NO: 927126 - RNA, 19 nt, Artificial Sequence
  Description of Artificial Sequence: Synthetic oligonucleotide
uuaaggccugaauaggaag

SEQ ID NO: 927127 - RNA, 19 nt, Artificial Sequence
  Description of Artificial Sequence: Synthetic oligonucleotide
uauacuacagucucuugaa

SEQ ID NO: 927128 - RNA, 19 nt, Artificial Sequence
  Description of Artificial Sequence: Synthetic oligonucleotide
uuggguuugguuaggauaa

SEQ ID NO: 927129 - RNA, 19 nt, Artificial Sequence
  Description of Artificial Sequence: Synthetic oligonucleotide
uguacacaaacaguguugc

SEQ ID NO: 927130 - RNA, 19 nt, Artificial Sequence
  Description of Artificial Sequence: Synthetic oligonucleotide
ucuggucagcuauaagugg

SEQ ID NO: 927131 - RNA, 19 nt, Artificial Sequence
  Description of Artificial Sequence: Synthetic oligonucleotide
cucuacuuggaucaccugg

SEQ ID NO: 927132 - RNA, 19 nt, Artificial Sequence
  Description of Artificial Sequence: Synthetic oligonucleotide
ucuuugauacaugugaguc

SEQ ID NO: 927133 - RNA, 19 nt, Artificial Sequence
  Description of Artificial Sequence: Synthetic oligonucleotide
gagguaaauugauugaaga

SEQ ID NO: 927134 - RNA, 19 nt, Artificial Sequence
  Description of Artificial Sequence: Synthetic oligonucleotide
uauggaggucuaauuaagc

SEQ ID NO: 927135 - RNA, 19 nt, Artificial Sequence
  Description of Artificial Sequence: Synthetic oligonucleotide
cuuugauacaugugagucc

SEQ ID NO: 927136 - RNA, 19 nt, Artificial Sequence
  Description of Artificial Sequence: Synthetic oligonucleotide
cuaaacauugauuacgaaa

SEQ ID NO: 927137 - RNA, 19 nt, Artificial Sequence
  Description of Artificial Sequence: Synthetic oligonucleotide
ucagcuuaauaauuacuac

SEQ ID NO: 927138 - RNA, 19 nt, Artificial Sequence
  Description of Artificial Sequence: Synthetic oligonucleotide
uucuaugauacaguguuca

SEQ ID NO: 927139 - RNA, 19 nt, Artificial Sequence
  Description of Artificial Sequence: Synthetic oligonucleotide
ggaucguacaaacuaaugc

SEQ ID NO: 927140 - RNA, 19 nt, Artificial Sequence
  Description of Artificial Sequence: Synthetic oligonucleotide
ugcaggaguuuucuguagg

SEQ ID NO: 927141 - RNA, 19 nt, Artificial Sequence
  Description of Artificial Sequence: Synthetic oligonucleotide
uugaaacuaaacaaccaua

SEQ ID NO: 927142 - RNA, 19 nt, Artificial Sequence
  Description of Artificial Sequence: Synthetic oligonucleotide
aggauccuaguuaaaauac

SEQ ID NO: 927143 - RNA, 19 nt, Artificial Sequence
  Description of Artificial Sequence: Synthetic oligonucleotide
aauaauuacuacagucuca

SEQ ID NO: 927144 - RNA, 19 nt, Artificial Sequence
  Description of Artificial Sequence: Synthetic oligonucleotide
gauccuaguuaaaauacug

SEQ ID NO: 927145 - RNA, 19 nt, Artificial Sequence
  Description of Artificial Sequence: Synthetic oligonucleotide
aagugagcuaauuaugguu

SEQ ID NO: 927146 - RNA, 19 nt, Artificial Sequence
  Description of Artificial Sequence: Synthetic oligonucleotide
aguuagcucugaugaaggc

SEQ ID NO: 927147 - RNA, 19 nt, Artificial Sequence
  Description of Artificial Sequence: Synthetic oligonucleotide
uacuacagucucuugaagu

SEQ ID NO: 927148 - RNA, 19 nt, Artificial Sequence
  Description of Artificial Sequence: Synthetic oligonucleotide
aaacuaaugcuaguaagaa

SEQ ID NO: 927149 - RNA, 19 nt, Artificial Sequence
  Description of Artificial Sequence: Synthetic oligonucleotide
aaucuacugagccucuggu

SEQ ID NO: 927150 - RNA, 19 nt, Artificial Sequence
  Description of Artificial Sequence: Synthetic oligonucleotide
ugaacuauguaagucucca

SEQ ID NO: 927151 - RNA, 19 nt, Artificial Sequence
  Description of Artificial Sequence: Synthetic oligonucleotide
uuuauagcugcuugaugug

SEQ ID NO: 927152 - RNA, 19 nt, Artificial Sequence
  Description of Artificial Sequence: Synthetic oligonucleotide
ugauacuagcagcugaaaa

SEQ ID NO: 927153 - RNA, 19 nt, Artificial Sequence
  Description of Artificial Sequence: Synthetic oligonucleotide
gaucguacaaacuaaugcu

SEQ ID NO: 927154 - RNA, 19 nt, Artificial Sequence
  Description of Artificial Sequence: Synthetic oligonucleotide
uggaggucuaauuaagccu

SEQ ID NO: 927155 - RNA, 19 nt, Artificial Sequence
  Description of Artificial Sequence: Synthetic oligonucleotide
cuguguuauauucauuuug

SEQ ID NO: 927156 - RNA, 19 nt, Artificial Sequence
  Description of Artificial Sequence: Synthetic oligonucleotide
acaacuggcauauacucaa

SEQ ID NO: 927157 - RNA, 19 nt, Artificial Sequence
  Description of Artificial Sequence: Synthetic oligonucleotide
aucggguuuagguaaagga

SEQ ID NO: 927158 - RNA, 19 nt, Artificial Sequence
  Description of Artificial Sequence: Synthetic oligonucleotide
auaggaagacuaugcacag

SEQ ID NO: 927159 - RNA, 19 nt, Artificial Sequence
  Description of Artificial Sequence: Synthetic oligonucleotide
caaacuaaugcuaguaaga

SEQ ID NO: 927160 - RNA, 19 nt, Artificial Sequence
  Description of Artificial Sequence: Synthetic oligonucleotide
aaugcuaguaagaacugaa

SEQ ID NO: 927161 - RNA, 19 nt, Artificial Sequence
  Description of Artificial Sequence: Synthetic oligonucleotide
cuuuauagcugcuugaugu

SEQ ID NO: 927162 - RNA, 19 nt, Artificial Sequence
  Description of Artificial Sequence: Synthetic oligonucleotide
ucggguuuagguaaaggaa

SEQ ID NO: 927163 - RNA, 19 nt, Artificial Sequence
  Description of Artificial Sequence: Synthetic oligonucleotide
uacuggaucggguuuaggu

SEQ ID NO: 927164 - RNA, 19 nt, Artificial Sequence
  Description of Artificial Sequence: Synthetic oligonucleotide
cauugauuacgaaagacaa

SEQ ID NO: 927165 - RNA, 19 nt, Artificial Sequence
  Description of Artificial Sequence: Synthetic oligonucleotide
cuaacaaaauggugacgcg

SEQ ID NO: 927166 - RNA, 19 nt, Artificial Sequence
  Description of Artificial Sequence: Synthetic oligonucleotide
uuacaaacuaaucgguuuu

SEQ ID NO: 927167 - RNA, 19 nt, Artificial Sequence
  Description of Artificial Sequence: Synthetic oligonucleotide
ucagcuauaaguggaggca

SEQ ID NO: 927168 - RNA, 19 nt, Artificial Sequence
  Description of Artificial Sequence: Synthetic oligonucleotide
gucuaauuaagccuguuaa

SEQ ID NO: 927169 - RNA, 19 nt, Artificial Sequence
  Description of Artificial Sequence: Synthetic oligonucleotide
guaguuagcucugaugaag

SEQ ID NO: 927170 - RNA, 19 nt, Artificial Sequence
  Description of Artificial Sequence: Synthetic oligonucleotide
caaacaguguugccaaugc

SEQ ID NO: 927171 - RNA, 19 nt, Artificial Sequence
  Description of Artificial Sequence: Synthetic oligonucleotide
uuuuggaucaagggacagg

SEQ ID NO: 927172 - RNA, 19 nt, Artificial Sequence
  Description of Artificial Sequence: Synthetic oligonucleotide
aacaaaauggugacgcggu

SEQ ID NO: 927173 - RNA, 19 nt, Artificial Sequence
  Description of Artificial Sequence: Synthetic oligonucleotide
gugauagagcaauaaaauc

SEQ ID NO: 927174 - RNA, 19 nt, Artificial Sequence
  Description of Artificial Sequence: Synthetic oligonucleotide
gcuaacaaaauggugacgc

SEQ ID NO: 927175 - RNA, 19 nt, Artificial Sequence
  Description of Artificial Sequence: Synthetic oligonucleotide
gauacuagcagcugaaaau

SEQ ID NO: 927176 - RNA, 19 nt, Artificial Sequence
  Description of Artificial Sequence: Synthetic oligonucleotide
auugauuacgaaagacaac

SEQ ID NO: 927177 - RNA, 19 nt, Artificial Sequence
  Description of Artificial Sequence: Synthetic oligonucleotide
uuaucacuacucuuugaac

SEQ ID NO: 927178 - RNA, 19 nt, Artificial Sequence
  Description of Artificial Sequence: Synthetic oligonucleotide
ucuggagcccacacgaugu

SEQ ID NO: 927179 - RNA, 19 nt, Artificial Sequence
  Description of Artificial Sequence: Synthetic oligonucleotide
uguuaaccuaaacauugau

SEQ ID NO: 927180 - RNA, 19 nt, Artificial Sequence
  Description of Artificial Sequence: Synthetic oligonucleotide
uccauaaucuacugagccu

SEQ ID NO: 927181 - RNA, 19 nt, Artificial Sequence
  Description of Artificial Sequence: Synthetic oligonucleotide
uuuuacuaaugcucacaug

SEQ ID NO: 927182 - RNA, 19 nt, Artificial Sequence
  Description of Artificial Sequence: Synthetic oligonucleotide
ugauuacgaaagacaacug

SEQ ID NO: 927183 - RNA, 19 nt, Artificial Sequence
  Description of Artificial Sequence: Synthetic oligonucleotide
ugaagauacuggaucgggu

SEQ ID NO: 927184 - RNA, 19 nt, Artificial Sequence
  Description of Artificial Sequence: Synthetic oligonucleotide
aaaggaaccggaaguaagu

SEQ ID NO: 927185 - RNA, 19 nt, Artificial Sequence
  Description of Artificial Sequence: Synthetic oligonucleotide
auguaaguucaugugguuc

SEQ ID NO: 927186 - RNA, 19 nt, Artificial Sequence
  Description of Artificial Sequence: Synthetic oligonucleotide
acauugauuacgaaagaca

SEQ ID NO: 927187 - RNA, 19 nt, Artificial Sequence
  Description of Artificial Sequence: Synthetic oligonucleotide
uacgaaagacaacuggcau

SEQ ID NO: 927188 - RNA, 19 nt, Artificial Sequence
  Description of Artificial Sequence: Synthetic oligonucleotide
cacgauguguuuugcaaag

SEQ ID NO: 927189 - RNA, 19 nt, Artificial Sequence
  Description of Artificial Sequence: Synthetic oligonucleotide
uagagguaaaccaguuaca

SEQ ID NO: 927190 - RNA, 19 nt, Artificial Sequence
  Description of Artificial Sequence: Synthetic oligonucleotide
uugauugaagauacuggau

SEQ ID NO: 927191 - RNA, 19 nt, Artificial Sequence
  Description of Artificial Sequence: Synthetic oligonucleotide
guuugguuaggauaauguc

SEQ ID NO: 927192 - RNA, 19 nt, Artificial Sequence
  Description of Artificial Sequence: Synthetic oligonucleotide
gucagcuauaaguggaggc

SEQ ID NO: 927193 - RNA, 19 nt, Artificial Sequence
  Description of Artificial Sequence: Synthetic oligonucleotide
uuuuaucacuacucuuuga

SEQ ID NO: 927194 - RNA, 19 nt, Artificial Sequence
  Description of Artificial Sequence: Synthetic oligonucleotide
caguuacaucauuugaaag

SEQ ID NO: 927195 - RNA, 19 nt, Artificial Sequence
  Description of Artificial Sequence: Synthetic oligonucleotide
uugaguucaugaugguuca

SEQ ID NO: 927196 - RNA, 19 nt, Artificial Sequence
  Description of Artificial Sequence: Synthetic oligonucleotide
uauagagguaaaccaguua

SEQ ID NO: 927197 - RNA, 19 nt, Artificial Sequence
  Description of Artificial Sequence: Synthetic oligonucleotide
cuauacuacagucucuuga

SEQ ID NO: 927198 - RNA, 19 nt, Artificial Sequence
  Description of Artificial Sequence: Synthetic oligonucleotide
uuacuuagcaguugguguu

SEQ ID NO: 927199 - RNA, 19 nt, Artificial Sequence
  Description of Artificial Sequence: Synthetic oligonucleotide
aaugguaguuagcucugau

SEQ ID NO: 927200 - RNA, 19 nt, Artificial Sequence
  Description of Artificial Sequence: Synthetic oligonucleotide
agugguaacuguuaaccua

SEQ ID NO: 927201 - RNA, 19 nt, Artificial Sequence
  Description of Artificial Sequence: Synthetic oligonucleotide
gaucuggcuagguuugggc

SEQ ID NO: 927202 - RNA, 19 nt, Artificial Sequence
  Description of Artificial Sequence: Synthetic oligonucleotide
uugaaacauuaucagcuua

SEQ ID NO: 927203 - RNA, 19 nt, Artificial Sequence
  Description of Artificial Sequence: Synthetic oligonucleotide
cuaaugcuaguaagaacug

SEQ ID NO: 927204 - RNA, 19 nt, Artificial Sequence
  Description of Artificial Sequence: Synthetic oligonucleotide
caugauauguauuucuaua

SEQ ID NO: 927205 - RNA, 19 nt, Artificial Sequence
  Description of Artificial Sequence: Synthetic oligonucleotide
uauugggcagucugugaag

SEQ ID NO: 927206 - RNA, 19 nt, Artificial Sequence
  Description of Artificial Sequence: Synthetic oligonucleotide
cacagcggggaccugaacc

SEQ ID NO: 927207 - RNA, 19 nt, Artificial Sequence
  Description of Artificial Sequence: Synthetic oligonucleotide
uacuaaugcucacaugaua

SEQ ID NO: 927208 - RNA, 19 nt, Artificial Sequence
  Description of Artificial Sequence: Synthetic oligonucleotide
augugauagagcaauaaaa

SEQ ID NO: 927209 - RNA, 19 nt, Artificial Sequence
  Description of Artificial Sequence: Synthetic oligonucleotide
uuagagaaccuggaaauuu

SEQ ID NO: 927210 - RNA, 19 nt, Artificial Sequence
  Description of Artificial Sequence: Synthetic oligonucleotide
acgcgguuggaucaaaugu

SEQ ID NO: 927211 - RNA, 19 nt, Artificial Sequence
  Description of Artificial Sequence: Synthetic oligonucleotide
ucgguuuugugcuggcaag

SEQ ID NO: 927212 - RNA, 19 nt, Artificial Sequence
  Description of Artificial Sequence: Synthetic oligonucleotide
agaggauccuaguuaaaau

SEQ ID NO: 927213 - RNA, 19 nt, Artificial Sequence
  Description of Artificial Sequence: Synthetic oligonucleotide
uugguguuacaaacuaauc

SEQ ID NO: 927214 - RNA, 19 nt, Artificial Sequence
  Description of Artificial Sequence: Synthetic oligonucleotide
cuagggucuccuaauuuac

SEQ ID NO: 927215 - RNA, 19 nt, Artificial Sequence
  Description of Artificial Sequence: Synthetic oligonucleotide
gaggauccuaguuaaaaua

SEQ ID NO: 927216 - RNA, 19 nt, Artificial Sequence
  Description of Artificial Sequence: Synthetic oligonucleotide
uggucagcuauaaguggag

SEQ ID NO: 927217 - RNA, 19 nt, Artificial Sequence
  Description of Artificial Sequence: Synthetic oligonucleotide
aaaguuggguuugguuagg

SEQ ID NO: 927218 - RNA, 19 nt, Artificial Sequence
  Description of Artificial Sequence: Synthetic oligonucleotide
gggaccugaaccuuauccg

SEQ ID NO: 927219 - RNA, 19 nt, Artificial Sequence
  Description of Artificial Sequence: Synthetic oligonucleotide
cuaaugcucacaugauaug

SEQ ID NO: 927220 - RNA, 19 nt, Artificial Sequence
  Description of Artificial Sequence: Synthetic oligonucleotide
agagguaaauugauugaag

SEQ ID NO: 927221 - RNA, 19 nt, Artificial Sequence
  Description of Artificial Sequence: Synthetic oligonucleotide
aaauucuuuugcagccuag

SEQ ID NO: 927222 - RNA, 19 nt, Artificial Sequence
  Description of Artificial Sequence: Synthetic oligonucleotide
uugauaggugaugcuauug

SEQ ID NO: 927223 - RNA, 19 nt, Artificial Sequence
  Description of Artificial Sequence: Synthetic oligonucleotide
uguauugggcagucuguga

SEQ ID NO: 927224 - RNA, 19 nt, Artificial Sequence
  Description of Artificial Sequence: Synthetic oligonucleotide
guauggaggucuaauuaag

SEQ ID NO: 927225 - RNA, 19 nt, Artificial Sequence
  Description of Artificial Sequence: Synthetic oligonucleotide
auuaugcugcuaaagacaa

SEQ ID NO: 927226 - RNA, 19 nt, Artificial Sequence
  Description of Artificial Sequence: Synthetic oligonucleotide
uacuagcagcugaaaaugu

SEQ ID NO: 927227 - RNA, 19 nt, Artificial Sequence
  Description of Artificial Sequence: Synthetic oligonucleotide
cauauggaggaagagccac

SEQ ID NO: 927228 - RNA, 19 nt, Artificial Sequence
  Description of Artificial Sequence: Synthetic oligonucleotide
ucuauacuacagucucuug

SEQ ID NO: 927229 - RNA, 19 nt, Artificial Sequence
  Description of Artificial Sequence: Synthetic oligonucleotide
gaaaugguaguuagcucug

SEQ ID NO: 927230 - RNA, 19 nt, Artificial Sequence
  Description of Artificial Sequence: Synthetic oligonucleotide
uaaugcuaguaagaacuga

SEQ ID NO: 927231 - RNA, 19 nt, Artificial Sequence
  Description of Artificial Sequence: Synthetic oligonucleotide
acuuuuacuaaugcucaca

SEQ ID NO: 927232 - RNA, 19 nt, Artificial Sequence
  Description of Artificial Sequence: Synthetic oligonucleotide
cuguuaaggccugaauagg

SEQ ID NO: 927233 - RNA, 19 nt, Artificial Sequence
  Description of Artificial Sequence: Synthetic oligonucleotide
acaaacaguguugccaaug

SEQ ID NO: 927234 - RNA, 19 nt, Artificial Sequence
  Description of Artificial Sequence: Synthetic oligonucleotide
gacgcgguuggaucaaaug

SEQ ID NO: 927235 - RNA, 19 nt, Artificial Sequence
  Description of Artificial Sequence: Synthetic oligonucleotide
ugacagcgugagaagagcu

SEQ ID NO: 927236 - RNA, 19 nt, Artificial Sequence
  Description of Artificial Sequence: Synthetic oligonucleotide
uacaaacuaaucgguuuug

SEQ ID NO: 927237 - RNA, 19 nt, Artificial Sequence
  Description of Artificial Sequence: Synthetic oligonucleotide
ucuaugauacaguguucaa

SEQ ID NO: 927238 - RNA, 19 nt, Artificial Sequence
  Description of Artificial Sequence: Synthetic oligonucleotide
agagguaaaccaguuacaa

SEQ ID NO: 927239 - RNA, 19 nt, Artificial Sequence
  Description of Artificial Sequence: Synthetic oligonucleotide
gaucggguuuagguaaagg

SEQ ID NO: 927240 - RNA, 19 nt, Artificial Sequence
  Description of Artificial Sequence: Synthetic oligonucleotide
uagaggauguaaguucaug

SEQ ID NO: 927241 - RNA, 19 nt, Artificial Sequence
  Description of Artificial Sequence: Synthetic oligonucleotide
aucuagacauuugaaacau

SEQ ID NO: 927242 - RNA, 19 nt, Artificial Sequence
  Description of Artificial Sequence: Synthetic oligonucleotide
uaggaucguacaaacuaau

SEQ ID NO: 927243 - RNA, 19 nt, Artificial Sequence
  Description of Artificial Sequence: Synthetic oligonucleotide
augcuaguaagaacugaac

SEQ ID NO: 927244 - RNA, 19 nt, Artificial Sequence
  Description of Artificial Sequence: Synthetic oligonucleotide
cagcuucuaugauacagug

SEQ ID NO: 927245 - RNA, 19 nt, Artificial Sequence
  Description of Artificial Sequence: Synthetic oligonucleotide
uuaagccuguuaaggccug

SEQ ID NO: 927246 - RNA, 19 nt, Artificial Sequence
  Description of Artificial Sequence: Synthetic oligonucleotide
ucaugaugguucacuuaca

SEQ ID NO: 927247 - RNA, 19 nt, Artificial Sequence
  Description of Artificial Sequence: Synthetic oligonucleotide
gaugguucacuuacaauaa

SEQ ID NO: 927248 - RNA, 19 nt, Artificial Sequence
  Description of Artificial Sequence: Synthetic oligonucleotide
cuauaaguggaggcagagg

SEQ ID NO: 927249 - RNA, 19 nt, Artificial Sequence
  Description of Artificial Sequence: Synthetic oligonucleotide
ugaacccuucucccuagga

SEQ ID NO: 927250 - RNA, 19 nt, Artificial Sequence
  Description of Artificial Sequence: Synthetic oligonucleotide
ggggaccugaaccuuaucc

SEQ ID NO: 927251 - RNA, 19 nt, Artificial Sequence
  Description of Artificial Sequence: Synthetic oligonucleotide
aguucaugaugguucacuu

SEQ ID NO: 927252 - RNA, 19 nt, Artificial Sequence
  Description of Artificial Sequence: Synthetic oligonucleotide
ggaggucuaauuaagccug

SEQ ID NO: 927253 - RNA, 19 nt, Artificial Sequence
  Description of Artificial Sequence: Synthetic oligonucleotide
aaaauaccacagacuuuag

SEQ ID NO: 927254 - RNA, 19 nt, Artificial Sequence
  Description of Artificial Sequence: Synthetic oligonucleotide
agugagcuaauuaugguuu

SEQ ID NO: 927255 - RNA, 19 nt, Artificial Sequence
  Description of Artificial Sequence: Synthetic oligonucleotide
ucucccuaggaucguacaa

SEQ ID NO: 927256 - RNA, 19 nt, Artificial Sequence
  Description of Artificial Sequence: Synthetic oligonucleotide
aacuguuaaccuaaacauu

SEQ ID NO: 927257 - RNA, 19 nt, Artificial Sequence
  Description of Artificial Sequence: Synthetic oligonucleotide
ucccuaggaucguacaaac

SEQ ID NO: 927258 - RNA, 19 nt, Artificial Sequence
  Description of Artificial Sequence: Synthetic oligonucleotide
uauacucaagcugacuguu

SEQ ID NO: 927259 - RNA, 19 nt, Artificial Sequence
  Description of Artificial Sequence: Synthetic oligonucleotide
acgaaagacaacuggcaua

SEQ ID NO: 927260 - RNA, 19 nt, Artificial Sequence
  Description of Artificial Sequence: Synthetic oligonucleotide
ggcaaugaacccuucuccc

SEQ ID NO: 927261 - RNA, 19 nt, Artificial Sequence
  Description of Artificial Sequence: Synthetic oligonucleotide
cagcauugauaggugaugc

SEQ ID NO: 927262 - RNA, 19 nt, Artificial Sequence
  Description of Artificial Sequence: Synthetic oligonucleotide
cuugaugugacucuguauu

SEQ ID NO: 927263 - RNA, 19 nt, Artificial Sequence
  Description of Artificial Sequence: Synthetic oligonucleotide
acuaaucgguuuugugcug

SEQ ID NO: 927264 - RNA, 19 nt, Artificial Sequence
  Description of Artificial Sequence: Synthetic oligonucleotide
aauauagaaucuagacauu

SEQ ID NO: 927265 - RNA, 19 nt, Artificial Sequence
  Description of Artificial Sequence: Synthetic oligonucleotide
acucaagcugacuguugag

SEQ ID NO: 927266 - RNA, 19 nt, Artificial Sequence
  Description of Artificial Sequence: Synthetic oligonucleotide
guauugggcagucugugaa

SEQ ID NO: 927267 - RNA, 19 nt, Artificial Sequence
  Description of Artificial Sequence: Synthetic oligonucleotide
guuggaucaaaugucuuaa

SEQ ID NO: 927268 - RNA, 19 nt, Artificial Sequence
  Description of Artificial Sequence: Synthetic oligonucleotide
cuaggaucguacaaacuaa

SEQ ID NO: 927269 - RNA, 19 nt, Artificial Sequence
  Description of Artificial Sequence: Synthetic oligonucleotide
cuugaaacuaaacaaccau

SEQ ID NO: 927270 - RNA, 19 nt, Artificial Sequence
  Description of Artificial Sequence: Synthetic oligonucleotide
agcauugauaggugaugcu

SEQ ID NO: 927271 - RNA, 19 nt, Artificial Sequence
  Description of Artificial Sequence: Synthetic oligonucleotide
guuacaaacuaaucgguuu

SEQ ID NO: 927272 - RNA, 19 nt, Artificial Sequence
  Description of Artificial Sequence: Synthetic oligonucleotide
cuacuuggaucaccugggg

SEQ ID NO: 927273 - RNA, 19 nt, Artificial Sequence
  Description of Artificial Sequence: Synthetic oligonucleotide
guuagcucugaugaaggca

SEQ ID NO: 927274 - RNA, 19 nt, Artificial Sequence
  Description of Artificial Sequence: Synthetic oligonucleotide
acacgauguguuuugcaaa

SEQ ID NO: 927275 - RNA, 19 nt, Artificial Sequence
  Description of Artificial Sequence: Synthetic oligonucleotide
gguuuagguaaaggaaccg

SEQ ID NO: 927276 - RNA, 19 nt, Artificial Sequence
  Description of Artificial Sequence: Synthetic oligonucleotide
ggaguuuucuguaggauca

SEQ ID NO: 927277 - RNA, 19 nt, Artificial Sequence
  Description of Artificial Sequence: Synthetic oligonucleotide
auccgcacuccucagagua

SEQ ID NO: 927278 - RNA, 19 nt, Artificial Sequence
  Description of Artificial Sequence: Synthetic oligonucleotide
agguuugggccacucuuug

SEQ ID NO: 927279 - RNA, 19 nt, Artificial Sequence
  Description of Artificial Sequence: Synthetic oligonucleotide
augcuaauaaagugagcua

SEQ ID NO: 927280 - RNA, 19 nt, Artificial Sequence
  Description of Artificial Sequence: Synthetic oligonucleotide
uggugacgcgguuggauca

SEQ ID NO: 927281 - RNA, 19 nt, Artificial Sequence
  Description of Artificial Sequence: Synthetic oligonucleotide
acaaacuaaucgguuuugu

SEQ ID NO: 927282 - RNA, 19 nt, Artificial Sequence
  Description of Artificial Sequence: Synthetic oligonucleotide
ggaccugaaccuuauccgc

SEQ ID NO: 927283 - RNA, 19 nt, Artificial Sequence
  Description of Artificial Sequence: Synthetic oligonucleotide
cuucuaugauacaguguuc

SEQ ID NO: 927284 - RNA, 19 nt, Artificial Sequence
  Description of Artificial Sequence: Synthetic oligonucleotide
gauacuggaucggguuuag

SEQ ID NO: 927285 - RNA, 19 nt, Artificial Sequence
  Description of Artificial Sequence: Synthetic oligonucleotide
uucucccuaggaucguaca

SEQ ID NO: 927286 - RNA, 19 nt, Artificial Sequence
  Description of Artificial Sequence: Synthetic oligonucleotide
uaaucgguuuugugcuggc

SEQ ID NO: 927287 - RNA, 19 nt, Artificial Sequence
  Description of Artificial Sequence: Synthetic oligonucleotide
gugaugcuauugaugacug

SEQ ID NO: 927288 - RNA, 19 nt, Artificial Sequence
  Description of Artificial Sequence: Synthetic oligonucleotide
uuagaggauguaaguucau

SEQ ID NO: 927289 - RNA, 19 nt, Artificial Sequence
  Description of Artificial Sequence: Synthetic oligonucleotide
cucagaguaucugccugcg

SEQ ID NO: 927290 - RNA, 19 nt, Artificial Sequence
  Description of Artificial Sequence: Synthetic oligonucleotide
cugcgugucgacuggcccc

SEQ ID NO: 927291 - RNA, 19 nt, Artificial Sequence
  Description of Artificial Sequence: Synthetic oligonucleotide
ggacguccgagucugcagg

SEQ ID NO: 927292 - RNA, 19 nt, Artificial Sequence
  Description of Artificial Sequence: Synthetic oligonucleotide
cagcuauaaguggaggcag

SEQ ID NO: 927293 - RNA, 19 nt, Artificial Sequence
  Description of Artificial Sequence: Synthetic oligonucleotide
cuggaucggguuuagguaa

SEQ ID NO: 927294 - RNA, 19 nt, Artificial Sequence
  Description of Artificial Sequence: Synthetic oligonucleotide
ucaccugggacguccgagu

SEQ ID NO: 927295 - RNA, 19 nt, Artificial Sequence
  Description of Artificial Sequence: Synthetic oligonucleotide
agacuaugcacagcgggga

SEQ ID NO: 927296 - RNA, 19 nt, Artificial Sequence
  Description of Artificial Sequence: Synthetic oligonucleotide
cucacaugauauguauuuc

SEQ ID NO: 927297 - RNA, 19 nt, Artificial Sequence
  Description of Artificial Sequence: Synthetic oligonucleotide
cugaaccuuauccgcacuc

SEQ ID NO: 927298 - RNA, 19 nt, Artificial Sequence
  Description of Artificial Sequence: Synthetic oligonucleotide
cucuggagcccacacgaug

SEQ ID NO: 927299 - RNA, 19 nt, Artificial Sequence
  Description of Artificial Sequence: Synthetic oligonucleotide
aaccggaaguaaguccucu

SEQ ID NO: 927300 - RNA, 19 nt, Artificial Sequence
  Description of Artificial Sequence: Synthetic oligonucleotide
ugugaagccuaggaucaaa

SEQ ID NO: 927301 - RNA, 19 nt, Artificial Sequence
  Description of Artificial Sequence: Synthetic oligonucleotide
cuguuaaccuaaacauuga

SEQ ID NO: 927302 - RNA, 19 nt, Artificial Sequence
  Description of Artificial Sequence: Synthetic oligonucleotide
gacuaugcacagcggggac

SEQ ID NO: 927303 - RNA, 19 nt, Artificial Sequence
  Description of Artificial Sequence: Synthetic oligonucleotide
cuucucccuaggaucguac

SEQ ID NO: 927304 - RNA, 19 nt, Artificial Sequence
  Description of Artificial Sequence: Synthetic oligonucleotide
ucucuacuuggaucaccug

SEQ ID NO: 927305 - RNA, 19 nt, Artificial Sequence
  Description of Artificial Sequence: Synthetic oligonucleotide
ugaugcuauugaugacugu

SEQ ID NO: 927306 - RNA, 19 nt, Artificial Sequence
  Description of Artificial Sequence: Synthetic oligonucleotide
augaacccuucucccuagg

SEQ ID NO: 927307 - RNA, 19 nt, Artificial Sequence
  Description of Artificial Sequence: Synthetic oligonucleotide
ggguuuagguaaaggaacc

SEQ ID NO: 927308 - RNA, 19 nt, Artificial Sequence
  Description of Artificial Sequence: Synthetic oligonucleotide
gcuuaauuacacaacagcu

SEQ ID NO: 927309 - RNA, 19 nt, Artificial Sequence
  Description of Artificial Sequence: Synthetic oligonucleotide
gugacagcgugagaagagc

SEQ ID NO: 927310 - RNA, 19 nt, Artificial Sequence
  Description of Artificial Sequence: Synthetic oligonucleotide
cagacuuuagaggauguaa

SEQ ID NO: 927311 - RNA, 19 nt, Artificial Sequence
  Description of Artificial Sequence: Synthetic oligonucleotide
aucguacaaacuaaugcua

SEQ ID NO: 927312 - RNA, 19 nt, Artificial Sequence
  Description of Artificial Sequence: Synthetic oligonucleotide
guugguguuacaaacuaau

SEQ ID NO: 927313 - RNA, 19 nt, Artificial Sequence
  Description of Artificial Sequence: Synthetic oligonucleotide
ucgacuggccccucaccug

SEQ ID NO: 927314 - RNA, 19 nt, Artificial Sequence
  Description of Artificial Sequence: Synthetic oligonucleotide
ucacuacucuuugaaccac

SEQ ID NO: 927315 - RNA, 19 nt, Artificial Sequence
  Description of Artificial Sequence: Synthetic oligonucleotide
cuuuuacuaaugcucacau

SEQ ID NO: 927316 - RNA, 19 nt, Artificial Sequence
  Description of Artificial Sequence: Synthetic oligonucleotide
aaguuggguuugguuagga

SEQ ID NO: 927317 - RNA, 19 nt, Artificial Sequence
  Description of Artificial Sequence: Synthetic oligonucleotide
gggucuccuaauuuacccc

SEQ ID NO: 927318 - RNA, 19 nt, Artificial Sequence
  Description of Artificial Sequence: Synthetic oligonucleotide
cuguucuggcucucuugcc

SEQ ID NO: 927319 - RNA, 19 nt, Artificial Sequence
  Description of Artificial Sequence: Synthetic oligonucleotide
uuugggccacucuuugaua

SEQ ID NO: 927320 - RNA, 19 nt, Artificial Sequence
  Description of Artificial Sequence: Synthetic oligonucleotide
guuaaggccugaauaggaa

SEQ ID NO: 927321 - RNA, 19 nt, Artificial Sequence
  Description of Artificial Sequence: Synthetic oligonucleotide
uggaucggguuuagguaaa

SEQ ID NO: 927322 - RNA, 19 nt, Artificial Sequence
  Description of Artificial Sequence: Synthetic oligonucleotide
gguuggaucaaaugucuua

SEQ ID NO: 927323 - RNA, 19 nt, Artificial Sequence
  Description of Artificial Sequence: Synthetic oligonucleotide
guguugccaaugcuaauaa

SEQ ID NO: 927324 - RNA, 19 nt, Artificial Sequence
  Description of Artificial Sequence: Synthetic oligonucleotide
gcuauugaugacugugaca

SEQ ID NO: 927325 - RNA, 19 nt, Artificial Sequence
  Description of Artificial Sequence: Synthetic oligonucleotide
cauugauaggugaugcuau

SEQ ID NO: 927326 - RNA, 19 nt, Artificial Sequence
  Description of Artificial Sequence: Synthetic oligonucleotide
acagcgugagaagagcuua

SEQ ID NO: 927327 - RNA, 19 nt, Artificial Sequence
  Description of Artificial Sequence: Synthetic oligonucleotide
guaagucuccacacuguuc

SEQ ID NO: 927328 - RNA, 19 nt, Artificial Sequence
  Description of Artificial Sequence: Synthetic oligonucleotide
guuaaccuaaacauugauu

SEQ ID NO: 927329 - RNA, 19 nt, Artificial Sequence
  Description of Artificial Sequence: Synthetic oligonucleotide
acuagcagcugaaaauguu

SEQ ID NO: 927330 - RNA, 19 nt, Artificial Sequence
  Description of Artificial Sequence: Synthetic oligonucleotide
ggucagcuauaaguggagg

SEQ ID NO: 927331 - RNA, 19 nt, Artificial Sequence
  Description of Artificial Sequence: Synthetic oligonucleotide
agauacuggaucggguuua

SEQ ID NO: 927332 - RNA, 19 nt, Artificial Sequence
  Description of Artificial Sequence: Synthetic oligonucleotide
auacucaagcugacuguug

SEQ ID NO: 927333 - RNA, 19 nt, Artificial Sequence
  Description of Artificial Sequence: Synthetic oligonucleotide
cuuauccgcacuccucaga

SEQ ID NO: 927334 - RNA, 19 nt, Artificial Sequence
  Description of Artificial Sequence: Synthetic oligonucleotide
uauccgcacuccucagagu

SEQ ID NO: 927335 - RNA, 19 nt, Artificial Sequence
  Description of Artificial Sequence: Synthetic oligonucleotide
agcuucuaugauacagugu

SEQ ID NO: 927336 - RNA, 19 nt, Artificial Sequence
  Description of Artificial Sequence: Synthetic oligonucleotide
aguugguguuacaaacuaa

SEQ ID NO: 927337 - RNA, 19 nt, Artificial Sequence
  Description of Artificial Sequence: Synthetic oligonucleotide
cuagcagcugaaaauguuu

SEQ ID NO: 927338 - RNA, 19 nt, Artificial Sequence
  Description of Artificial Sequence: Synthetic oligonucleotide
ugacgcgguuggaucaaau

SEQ ID NO: 927339 - RNA, 19 nt, Artificial Sequence
  Description of Artificial Sequence: Synthetic oligonucleotide
ggaagacuaugcacagcgg

SEQ ID NO: 927340 - RNA, 19 nt, Artificial Sequence
  Description of Artificial Sequence: Synthetic oligonucleotide
ggucuaauuaagccuguua

SEQ ID NO: 927341 - RNA, 19 nt, Artificial Sequence
  Description of Artificial Sequence: Synthetic oligonucleotide
gguuugguuaggauaaugu

SEQ ID NO: 927342 - RNA, 19 nt, Artificial Sequence
  Description of Artificial Sequence: Synthetic oligonucleotide
auacuggaucggguuuagg

SEQ ID NO: 927343 - RNA, 19 nt, Artificial Sequence
  Description of Artificial Sequence: Synthetic oligonucleotide
cuauguaagucuccacacu

SEQ ID NO: 927344 - RNA, 19 nt, Artificial Sequence
  Description of Artificial Sequence: Synthetic oligonucleotide
ugggacguccgagucugca

SEQ ID NO: 927345 - RNA, 19 nt, Artificial Sequence
  Description of Artificial Sequence: Synthetic oligonucleotide
cucuuugauacaugugagu

SEQ ID NO: 927346 - RNA, 19 nt, Artificial Sequence
  Description of Artificial Sequence: Synthetic oligonucleotide
aagccuguuaaggccugaa

SEQ ID NO: 927347 - RNA, 19 nt, Artificial Sequence
  Description of Artificial Sequence: Synthetic oligonucleotide
agcuauaaguggaggcaga

SEQ ID NO: 927348 - RNA, 19 nt, Artificial Sequence
  Description of Artificial Sequence: Synthetic oligonucleotide
gacguccgagucugcagga

SEQ ID NO: 927349 - RNA, 19 nt, Artificial Sequence
  Description of Artificial Sequence: Synthetic oligonucleotide
ugaguucaugaugguucac

SEQ ID NO: 927350 - RNA, 19 nt, Artificial Sequence
  Description of Artificial Sequence: Synthetic oligonucleotide
uccgcacuccucagaguau

SEQ ID NO: 927351 - RNA, 19 nt, Artificial Sequence
  Description of Artificial Sequence: Synthetic oligonucleotide
ggauguaaguucauguggu

SEQ ID NO: 927352 - RNA, 19 nt, Artificial Sequence
  Description of Artificial Sequence: Synthetic oligonucleotide
acgauguguuuugcaaagu

SEQ ID NO: 927353 - RNA, 19 nt, Artificial Sequence
  Description of Artificial Sequence: Synthetic oligonucleotide
gguaguuagcucugaugaa

SEQ ID NO: 927354 - RNA, 19 nt, Artificial Sequence
  Description of Artificial Sequence: Synthetic oligonucleotide
ugcgugucgacuggccccu

SEQ ID NO: 927355 - RNA, 19 nt, Artificial Sequence
  Description of Artificial Sequence: Synthetic oligonucleotide
gaguaucugccugcguguc

SEQ ID NO: 927356 - RNA, 19 nt, Artificial Sequence
  Description of Artificial Sequence: Synthetic oligonucleotide
uugcaaaguuggguuuggu

SEQ ID NO: 927357 - RNA, 19 nt, Artificial Sequence
  Description of Artificial Sequence: Synthetic oligonucleotide
ugguuaggauaauguccau

SEQ ID NO: 927358 - RNA, 19 nt, Artificial Sequence
  Description of Artificial Sequence: Synthetic oligonucleotide
gggacguccgagucugcag

SEQ ID NO: 927359 - RNA, 19 nt, Artificial Sequence
  Description of Artificial Sequence: Synthetic oligonucleotide
acuacucuuugaaccacuu

SEQ ID NO: 927360 - RNA, 19 nt, Artificial Sequence
  Description of Artificial Sequence: Synthetic oligonucleotide
cuauagagguaaaccaguu

SEQ ID NO: 927361 - RNA, 19 nt, Artificial Sequence
  Description of Artificial Sequence: Synthetic oligonucleotide
gucgacuggccccucaccu

SEQ ID NO: 927362 - RNA, 19 nt, Artificial Sequence
  Description of Artificial Sequence: Synthetic oligonucleotide
gcauugauaggugaugcua

SEQ ID NO: 927363 - RNA, 19 nt, Artificial Sequence
  Description of Artificial Sequence: Synthetic oligonucleotide
ggguuugguuaggauaaug

SEQ ID NO: 927364 - RNA, 19 nt, Artificial Sequence
  Description of Artificial Sequence: Synthetic oligonucleotide
guguucaauaaaauacuuu

SEQ ID NO: 927365 - RNA, 19 nt, Artificial Sequence
  Description of Artificial Sequence: Synthetic oligonucleotide
cucccuaggaucguacaaa

SEQ ID NO: 927366 - RNA, 19 nt, Artificial Sequence
  Description of Artificial Sequence: Synthetic oligonucleotide
gugucgacuggccccucac

SEQ ID NO: 927367 - RNA, 19 nt, Artificial Sequence
  Description of Artificial Sequence: Synthetic oligonucleotide
gccacucuuugauacaugu

SEQ ID NO: 927368 - RNA, 19 nt, Artificial Sequence
  Description of Artificial Sequence: Synthetic oligonucleotide
ggccugaauaggaagacua

SEQ ID NO: 927369 - RNA, 19 nt, Artificial Sequence
  Description of Artificial Sequence: Synthetic oligonucleotide
cgcgguuggaucaaauguc

SEQ ID NO: 927370 - RNA, 19 nt, Artificial Sequence
  Description of Artificial Sequence: Synthetic oligonucleotide
ccuagggucuccuaauuua

SEQ ID NO: 927371 - RNA, 19 nt, Artificial Sequence
  Description of Artificial Sequence: Synthetic oligonucleotide
agcgugagaagagcuuaau

SEQ ID NO: 927372 - RNA, 19 nt, Artificial Sequence
  Description of Artificial Sequence: Synthetic oligonucleotide
accacagacuuuagaggau

SEQ ID NO: 927373 - RNA, 19 nt, Artificial Sequence
  Description of Artificial Sequence: Synthetic oligonucleotide
caccugggacguccgaguc

SEQ ID NO: 927374 - RNA, 19 nt, Artificial Sequence
  Description of Artificial Sequence: Synthetic oligonucleotide
ccugcgugucgacuggccc

SEQ ID NO: 927375 - RNA, 19 nt, Artificial Sequence
  Description of Artificial Sequence: Synthetic oligonucleotide
ggcauauacucaagcugac

SEQ ID NO: 927376 - RNA, 19 nt, Artificial Sequence
  Description of Artificial Sequence: Synthetic oligonucleotide
acguccgagucugcaggag

SEQ ID NO: 927377 - RNA, 19 nt, Artificial Sequence
  Description of Artificial Sequence: Synthetic oligonucleotide
gugacaaaccaggguuuga

SEQ ID NO: 927378 - RNA, 19 nt, Artificial Sequence
  Description of Artificial Sequence: Synthetic oligonucleotide
ccugggacguccgagucug

SEQ ID NO: 927379 - RNA, 19 nt, Artificial Sequence
  Description of Artificial Sequence: Synthetic oligonucleotide
ccuuauccgcacuccucag

SEQ ID NO: 927380 - RNA, 19 nt, Artificial Sequence
  Description of Artificial Sequence: Synthetic oligonucleotide
ccuaguuaaaauacugauu

SEQ ID NO: 927381 - RNA, 19 nt, Artificial Sequence
  Description of Artificial Sequence: Synthetic oligonucleotide
ggauccuaguuaaaauacu

SEQ ID NO: 927382 - RNA, 19 nt, Artificial Sequence
  Description of Artificial Sequence: Synthetic oligonucleotide
cagagaacugugacagcgu

SEQ ID NO: 927383 - RNA, 19 nt, Artificial Sequence
  Description of Artificial Sequence: Synthetic oligonucleotide
aggucuaauuaagccuguu

SEQ ID NO: 927384 - RNA, 19 nt, Artificial Sequence
  Description of Artificial Sequence: Synthetic oligonucleotide
ggaucggguuuagguaaag

SEQ ID NO: 927385 - RNA, 19 nt, Artificial Sequence
  Description of Artificial Sequence: Synthetic oligonucleotide
uccgagucugcaggaguuu

SEQ ID NO: 927386 - RNA, 19 nt, Artificial Sequence
  Description of Artificial Sequence: Synthetic oligonucleotide
gugagcuaauuaugguuuu

SEQ ID NO: 927387 - RNA, 19 nt, Artificial Sequence
  Description of Artificial Sequence: Synthetic oligonucleotide
ugccugcgugucgacuggc

SEQ ID NO: 927388 - RNA, 19 nt, Artificial Sequence
  Description of Artificial Sequence: Synthetic oligonucleotide
ggcuugccuguucuggcuc

SEQ ID NO: 927389 - RNA, 19 nt, Artificial Sequence
  Description of Artificial Sequence: Synthetic oligonucleotide
cagcgugagaagagcuuaa

SEQ ID NO: 927390 - RNA, 19 nt, Artificial Sequence
  Description of Artificial Sequence: Synthetic oligonucleotide
gguuugaucuggcuagguu

SEQ ID NO: 927391 - RNA, 19 nt, Artificial Sequence
  Description of Artificial Sequence: Synthetic oligonucleotide
gaggucuaauuaagccugu

SEQ ID NO: 927392 - RNA, 19 nt, Artificial Sequence
  Description of Artificial Sequence: Synthetic oligonucleotide
gacagcgugagaagagcuu

SEQ ID NO: 927393 - RNA, 19 nt, Artificial Sequence
  Description of Artificial Sequence: Synthetic oligonucleotide
ccuaaacauugauuacgaa

SEQ ID NO: 927394 - RNA, 19 nt, Artificial Sequence
  Description of Artificial Sequence: Synthetic oligonucleotide
cacuguauggaggucuaau

SEQ ID NO: 927395 - RNA, 19 nt, Artificial Sequence
  Description of Artificial Sequence: Synthetic oligonucleotide
cugggacguccgagucugc

SEQ ID NO: 927396 - RNA, 19 nt, Artificial Sequence
  Description of Artificial Sequence: Synthetic oligonucleotide
gguggggcuugccuguucu

SEQ ID NO: 927397 - RNA, 19 nt, Artificial Sequence
  Description of Artificial Sequence: Synthetic oligonucleotide
gcuugaugugacucuguau

SEQ ID NO: 927398 - RNA, 19 nt, Artificial Sequence
  Description of Artificial Sequence: Synthetic oligonucleotide
ccacacgauguguuuugca

SEQ ID NO: 927399 - RNA, 19 nt, Artificial Sequence
  Description of Artificial Sequence: Synthetic oligonucleotide
gguuaggauaauguccauu

SEQ ID NO: 927400 - RNA, 19 nt, Artificial Sequence
  Description of Artificial Sequence: Synthetic oligonucleotide
gcgguuggaucaaaugucu

SEQ ID NO: 927401 - RNA, 19 nt, Artificial Sequence
  Description of Artificial Sequence: Synthetic oligonucleotide
caggaguuuucuguaggau

SEQ ID NO: 927402 - RNA, 19 nt, Artificial Sequence
  Description of Artificial Sequence: Synthetic oligonucleotide
agcggggaccugaaccuua

SEQ ID NO: 927403 - RNA, 19 nt, Artificial Sequence
  Description of Artificial Sequence: Synthetic oligonucleotide
gcauauacucaagcugacu

SEQ ID NO: 927404 - RNA, 19 nt, Artificial Sequence
  Description of Artificial Sequence: Synthetic oligonucleotide
gcuagguuugggccacucu

SEQ ID NO: 927405 - RNA, 19 nt, Artificial Sequence
  Description of Artificial Sequence: Synthetic oligonucleotide
cguacaaacuaaugcuagu

SEQ ID NO: 927406 - RNA, 19 nt, Artificial Sequence
  Description of Artificial Sequence: Synthetic oligonucleotide
ccgcacuccucagaguauc

SEQ ID NO: 927407 - RNA, 19 nt, Artificial Sequence
  Description of Artificial Sequence: Synthetic oligonucleotide
cacaaacaguguugccaau

SEQ ID NO: 927408 - RNA, 19 nt, Artificial Sequence
  Description of Artificial Sequence: Synthetic oligonucleotide
cugugaagccuaggaucaa

SEQ ID NO: 927409 - RNA, 19 nt, Artificial Sequence
  Description of Artificial Sequence: Synthetic oligonucleotide
gccugcgugucgacuggcc

SEQ ID NO: 927410 - RNA, 19 nt, Artificial Sequence
  Description of Artificial Sequence: Synthetic oligonucleotide
ggugacgcgguuggaucaa

SEQ ID NO: 927411 - RNA, 19 nt, Artificial Sequence
  Description of Artificial Sequence: Synthetic oligonucleotide
ggcuagguuugggccacuc

SEQ ID NO: 927412 - RNA, 19 nt, Artificial Sequence
  Description of Artificial Sequence: Synthetic oligonucleotide
uggcuagguuugggccacu

SEQ ID NO: 927413 - RNA, 19 nt, Artificial Sequence
  Description of Artificial Sequence: Synthetic oligonucleotide
gccuagggucuccuaauuu

SEQ ID NO: 927414 - RNA, 19 nt, Artificial Sequence
  Description of Artificial Sequence: Synthetic oligonucleotide
gugacgcgguuggaucaaa

SEQ ID NO: 927415 - RNA, 19 nt, Artificial Sequence
  Description of Artificial Sequence: Synthetic oligonucleotide
gccugaauaggaagacuau

SEQ ID NO: 927416 - RNA, 19 nt, Artificial Sequence
  Description of Artificial Sequence: Synthetic oligonucleotide
gcacagcggggaccugaac

SEQ ID NO: 927417 - RNA, 19 nt, Artificial Sequence
  Description of Artificial Sequence: Synthetic oligonucleotide
cccuaggaucguacaaacu

SEQ ID NO: 927418 - RNA, 19 nt, Artificial Sequence
  Description of Artificial Sequence: Synthetic oligonucleotide
ccugaaccuuauccgcacu

SEQ ID NO: 927419 - RNA, 19 nt, Artificial Sequence
  Description of Artificial Sequence: Synthetic oligonucleotide
ccucucucuguguuauauu

SEQ ID NO: 927420 - RNA, 19 nt, Artificial Sequence
  Description of Artificial Sequence: Synthetic oligonucleotide
ccacaggaccagcauugau

SEQ ID NO: 927421 - RNA, 19 nt, Artificial Sequence
  Description of Artificial Sequence: Synthetic oligonucleotide
cggggaccugaaccuuauc

SEQ ID NO: 927422 - RNA, 19 nt, Artificial Sequence
  Description of Artificial Sequence: Synthetic oligonucleotide
cgcacuccucagaguaucu

SEQ ID NO: 927423 - RNA, 19 nt, Artificial Sequence
  Description of Artificial Sequence: Synthetic oligonucleotide
gcggggaccugaaccuuau

SEQ ID NO: 927424 - RNA, 19 nt, Artificial Sequence
  Description of Artificial Sequence: Synthetic oligonucleotide
gcgugucgacuggccccuc

SEQ ID NO: 927425 - RNA, 19 nt, Artificial Sequence
  Description of Artificial Sequence: Synthetic oligonucleotide
uuaauuguaagaaucaagc

SEQ ID NO: 927426 - RNA, 19 nt, Artificial Sequence
  Description of Artificial Sequence: Synthetic oligonucleotide
uaugauaugacucauaaua

SEQ ID NO: 927427 - RNA, 19 nt, Artificial Sequence
  Description of Artificial Sequence: Synthetic oligonucleotide
aauucuuaguauuugaggu

SEQ ID NO: 927428 - RNA, 19 nt, Artificial Sequence
  Description of Artificial Sequence: Synthetic oligonucleotide
aaagaaguacagcaguggc

SEQ ID NO: 927429 - RNA, 19 nt, Artificial Sequence
  Description of Artificial Sequence: Synthetic oligonucleotide
ucuaaaacuacaaaacuca

SEQ ID NO: 927430 - RNA, 19 nt, Artificial Sequence
  Description of Artificial Sequence: Synthetic oligonucleotide
aaaagcucccaccucaggc

SEQ ID NO: 927431 - RNA, 19 nt, Artificial Sequence
  Description of Artificial Sequence: Synthetic oligonucleotide
acagaugcuaauuuuaaac

SEQ ID NO: 927432 - RNA, 19 nt, Artificial Sequence
  Description of Artificial Sequence: Synthetic oligonucleotide
cauaauacgaggauaaaag

SEQ ID NO: 927433 - RNA, 19 nt, Artificial Sequence
  Description of Artificial Sequence: Synthetic oligonucleotide
uaaugagucuucuucaugg

SEQ ID NO: 927434 - RNA, 19 nt, Artificial Sequence
  Description of Artificial Sequence: Synthetic oligonucleotide
augacaaaucaccagaaac

SEQ ID NO: 927435 - RNA, 19 nt, Artificial Sequence
  Description of Artificial Sequence: Synthetic oligonucleotide
ugauguaaaacaaaaugca

SEQ ID NO: 927436 - RNA, 19 nt, Artificial Sequence
  Description of Artificial Sequence: Synthetic oligonucleotide
cagguaaugacuuaggagc

SEQ ID NO: 927437 - RNA, 19 nt, Artificial Sequence
  Description of Artificial Sequence: Synthetic oligonucleotide
uaauacgaggauaaaaggc

SEQ ID NO: 927438 - RNA, 19 nt, Artificial Sequence
  Description of Artificial Sequence: Synthetic oligonucleotide
aaauaagucagaaacacgu

SEQ ID NO: 927439 - RNA, 19 nt, Artificial Sequence
  Description of Artificial Sequence: Synthetic oligonucleotide
agacucaauggcuaaaccc

SEQ ID NO: 927440 - RNA, 19 nt, Artificial Sequence
  Description of Artificial Sequence: Synthetic oligonucleotide
acaaguaaugacuaaaaca

SEQ ID NO: 927441 - RNA, 19 nt, Artificial Sequence
  Description of Artificial Sequence: Synthetic oligonucleotide
uugguuauacguuugaugu

SEQ ID NO: 927442 - RNA, 19 nt, Artificial Sequence
  Description of Artificial Sequence: Synthetic oligonucleotide
ucuuguauuggcaauguca

SEQ ID NO: 927443 - RNA, 19 nt, Artificial Sequence
  Description of Artificial Sequence: Synthetic oligonucleotide
ugauaugacucauaauacg

SEQ ID NO: 927444 - RNA, 19 nt, Artificial Sequence
  Description of Artificial Sequence: Synthetic oligonucleotide
aucacuaugaauucagaag

SEQ ID NO: 927445 - RNA, 19 nt, Artificial Sequence
  Description of Artificial Sequence: Synthetic oligonucleotide
uauuugaaagaacaauacc

SEQ ID NO: 927446 - RNA, 19 nt, Artificial Sequence
  Description of Artificial Sequence: Synthetic oligonucleotide
uuuagauugccuaggauac

SEQ ID NO: 927447 - RNA, 19 nt, Artificial Sequence
  Description of Artificial Sequence: Synthetic oligonucleotide
auaauacgaggauaaaagg

SEQ ID NO: 927448 - RNA, 19 nt, Artificial Sequence
  Description of Artificial Sequence: Synthetic oligonucleotide
aauaauuaauucaaaggca

SEQ ID NO: 927449 - RNA, 19 nt, Artificial Sequence
  Description of Artificial Sequence: Synthetic oligonucleotide
gaaacgagaucccaaaacc

SEQ ID NO: 927450 - RNA, 19 nt, Artificial Sequence
  Description of Artificial Sequence: Synthetic oligonucleotide
aauaggccuacaaugagac

SEQ ID NO: 927451 - RNA, 19 nt, Artificial Sequence
  Description of Artificial Sequence: Synthetic oligonucleotide
uucuaugcgauuuaguugu

SEQ ID NO: 927452 - RNA, 19 nt, Artificial Sequence
  Description of Artificial Sequence: Synthetic oligonucleotide
aaacacguuaccuauuuga

SEQ ID NO: 927453 - RNA, 19 nt, Artificial Sequence
  Description of Artificial Sequence: Synthetic oligonucleotide
uaugacucauaauacgagg

SEQ ID NO: 927454 - RNA, 19 nt, Artificial Sequence
  Description of Artificial Sequence: Synthetic oligonucleotide
ugcaugugcaauaugaaac

SEQ ID NO: 927455 - RNA, 19 nt, Artificial Sequence
  Description of Artificial Sequence: Synthetic oligonucleotide
auacguuugauguauccac

SEQ ID NO: 927456 - RNA, 19 nt, Artificial Sequence
  Description of Artificial Sequence: Synthetic oligonucleotide
ugacaaaucaccagaaacu

SEQ ID NO: 927457 - RNA, 19 nt, Artificial Sequence
  Description of Artificial Sequence: Synthetic oligonucleotide
aagucagaaacacguuacc

SEQ ID NO: 927458 - RNA, 19 nt, Artificial Sequence
  Description of Artificial Sequence: Synthetic oligonucleotide
cacguuaccuauuugaaag

SEQ ID NO: 927459 - RNA, 19 nt, Artificial Sequence
  Description of Artificial Sequence: Synthetic oligonucleotide
aauacgaggauaaaaggca

SEQ ID NO: 927460 - RNA, 19 nt, Artificial Sequence
  Description of Artificial Sequence: Synthetic oligonucleotide
uugacuauggacauuugcu

SEQ ID NO: 927461 - RNA, 19 nt, Artificial Sequence
  Description of Artificial Sequence: Synthetic oligonucleotide
uuaacgaaaacccacugua

SEQ ID NO: 927462 - RNA, 19 nt, Artificial Sequence
  Description of Artificial Sequence: Synthetic oligonucleotide
aacaaaggugacaaauacc

SEQ ID NO: 927463 - RNA, 19 nt, Artificial Sequence
  Description of Artificial Sequence: Synthetic oligonucleotide
ugugcaauaugaaacgaga

SEQ ID NO: 927464 - RNA, 19 nt, Artificial Sequence
  Description of Artificial Sequence: Synthetic oligonucleotide
aaaagaagcuaagugaaga

SEQ ID NO: 927465 - RNA, 19 nt, Artificial Sequence
  Description of Artificial Sequence: Synthetic oligonucleotide
agacucaugacaaaucacc

SEQ ID NO: 927466 - RNA, 19 nt, Artificial Sequence
  Description of Artificial Sequence: Synthetic oligonucleotide
gugauguaaaacaaaaugc

SEQ ID NO: 927467 - RNA, 19 nt, Artificial Sequence
  Description of Artificial Sequence: Synthetic oligonucleotide
aucugaauucacaugauac

SEQ ID NO: 927468 - RNA, 19 nt, Artificial Sequence
  Description of Artificial Sequence: Synthetic oligonucleotide
ucaucaguaaccuggugag

SEQ ID NO: 927469 - RNA, 19 nt, Artificial Sequence
  Description of Artificial Sequence: Synthetic oligonucleotide
ucugaugacagauuaucca

SEQ ID NO: 927470 - RNA, 19 nt, Artificial Sequence
  Description of Artificial Sequence: Synthetic oligonucleotide
uaugcgauuuaguuguucc

SEQ ID NO: 927471 - RNA, 19 nt, Artificial Sequence
  Description of Artificial Sequence: Synthetic oligonucleotide
ugaguaaaagcucccaccu

SEQ ID NO: 927472 - RNA, 19 nt, Artificial Sequence
  Description of Artificial Sequence: Synthetic oligonucleotide
aaucacuaugaauucagaa

SEQ ID NO: 927473 - RNA, 19 nt, Artificial Sequence
  Description of Artificial Sequence: Synthetic oligonucleotide
acuacauaaacuugacuug

SEQ ID NO: 927474 - RNA, 19 nt, Artificial Sequence
  Description of Artificial Sequence: Synthetic oligonucleotide
ucuuugcccuauuacaagg

SEQ ID NO: 927475 - RNA, 19 nt, Artificial Sequence
  Description of Artificial Sequence: Synthetic oligonucleotide
uuaaacaaaggugacaaau

SEQ ID NO: 927476 - RNA, 19 nt, Artificial Sequence
  Description of Artificial Sequence: Synthetic oligonucleotide
ugauguacggaaagcagcc

SEQ ID NO: 927477 - RNA, 19 nt, Artificial Sequence
  Description of Artificial Sequence: Synthetic oligonucleotide
ugcaaaauagugauguaaa

SEQ ID NO: 927478 - RNA, 19 nt, Artificial Sequence
  Description of Artificial Sequence: Synthetic oligonucleotide
aauggucauuggucaaacc

SEQ ID NO: 927479 - RNA, 19 nt, Artificial Sequence
  Description of Artificial Sequence: Synthetic oligonucleotide
ugaaacgagaucccaaaac

SEQ ID NO: 927480 - RNA, 19 nt, Artificial Sequence
  Description of Artificial Sequence: Synthetic oligonucleotide
cugucaaugaguuucuuug

SEQ ID NO: 927481 - RNA, 19 nt, Artificial Sequence
  Description of Artificial Sequence: Synthetic oligonucleotide
acagguaaugacuuaggag

SEQ ID NO: 927482 - RNA, 19 nt, Artificial Sequence
  Description of Artificial Sequence: Synthetic oligonucleotide
ucugaauucacaugauaca

SEQ ID NO: 927483 - RNA, 19 nt, Artificial Sequence
  Description of Artificial Sequence: Synthetic oligonucleotide
uugacuugcaugcauggca

SEQ ID NO: 927484 - RNA, 19 nt, Artificial Sequence
  Description of Artificial Sequence: Synthetic oligonucleotide
guaaagaagucugagcagg

SEQ ID NO: 927485 - RNA, 19 nt, Artificial Sequence
  Description of Artificial Sequence: Synthetic oligonucleotide
ucuauuggaguucuugacu

SEQ ID NO: 927486 - RNA, 19 nt, Artificial Sequence
  Description of Artificial Sequence: Synthetic oligonucleotide
ugccuuauaauucuuuccu

SEQ ID NO: 927487 - RNA, 19 nt, Artificial Sequence
  Description of Artificial Sequence: Synthetic oligonucleotide
aacuccuguaaacauuuug

SEQ ID NO: 927488 - RNA, 19 nt, Artificial Sequence
  Description of Artificial Sequence: Synthetic oligonucleotide
aacaaaaugcaugaguaaa

SEQ ID NO: 927489 - RNA, 19 nt, Artificial Sequence
  Description of Artificial Sequence: Synthetic oligonucleotide
aagacuaaugacaacuuca

SEQ ID NO: 927490 - RNA, 19 nt, Artificial Sequence
  Description of Artificial Sequence: Synthetic oligonucleotide
guucacuuaacgaaaaccc

SEQ ID NO: 927491 - RNA, 19 nt, Artificial Sequence
  Description of Artificial Sequence: Synthetic oligonucleotide
cuaugaauucagaagugag

SEQ ID NO: 927492 - RNA, 19 nt, Artificial Sequence
  Description of Artificial Sequence: Synthetic oligonucleotide
uuauaauucuuuccugacu

SEQ ID NO: 927493 - RNA, 19 nt, Artificial Sequence
  Description of Artificial Sequence: Synthetic oligonucleotide
acaacuuuaguaacaaauc

SEQ ID NO: 927494 - RNA, 19 nt, Artificial Sequence
  Description of Artificial Sequence: Synthetic oligonucleotide
ucacuuaacgaaaacccac

SEQ ID NO: 927495 - RNA, 19 nt, Artificial Sequence
  Description of Artificial Sequence: Synthetic oligonucleotide
agacucaucaguaaccugg

SEQ ID NO: 927496 - RNA, 19 nt, Artificial Sequence
  Description of Artificial Sequence: Synthetic oligonucleotide
aaagcagccuaaguaagag

SEQ ID NO: 927497 - RNA, 19 nt, Artificial Sequence
  Description of Artificial Sequence: Synthetic oligonucleotide
aaaugucuaaaacuacaaa

SEQ ID NO: 927498 - RNA, 19 nt, Artificial Sequence
  Description of Artificial Sequence: Synthetic oligonucleotide
gcaauaugaaacgagaucc

SEQ ID NO: 927499 - RNA, 19 nt, Artificial Sequence
  Description of Artificial Sequence: Synthetic oligonucleotide
uccagcauagugauggucu

SEQ ID NO: 927500 - RNA, 19 nt, Artificial Sequence
  Description of Artificial Sequence: Synthetic oligonucleotide
uaggccuacaaugagacca

SEQ ID NO: 927501 - RNA, 19 nt, Artificial Sequence
  Description of Artificial Sequence: Synthetic oligonucleotide
ucacaagguaaauaggccu

SEQ ID NO: 927502 - RNA, 19 nt, Artificial Sequence
  Description of Artificial Sequence: Synthetic oligonucleotide
uuauacguuugauguaucc

SEQ ID NO: 927503 - RNA, 19 nt, Artificial Sequence
  Description of Artificial Sequence: Synthetic oligonucleotide
agugugaacugagagagag

SEQ ID NO: 927504 - RNA, 19 nt, Artificial Sequence
  Description of Artificial Sequence: Synthetic oligonucleotide
auggucauuggucaaacca

SEQ ID NO: 927505 - RNA, 19 nt, Artificial Sequence
  Description of Artificial Sequence: Synthetic oligonucleotide
gauaugacucauaauacga

SEQ ID NO: 927506 - RNA, 19 nt, Artificial Sequence
  Description of Artificial Sequence: Synthetic oligonucleotide
uuaaugagucuucuucaug

SEQ ID NO: 927507 - RNA, 19 nt, Artificial Sequence
  Description of Artificial Sequence: Synthetic oligonucleotide
gacucaaauuucuuugccc

SEQ ID NO: 927508 - RNA, 19 nt, Artificial Sequence
  Description of Artificial Sequence: Synthetic oligonucleotide
guugguuauacguuugaug

SEQ ID NO: 927509 - RNA, 19 nt, Artificial Sequence
  Description of Artificial Sequence: Synthetic oligonucleotide
caagcaauggucauugguc

SEQ ID NO: 927510 - RNA, 19 nt, Artificial Sequence
  Description of Artificial Sequence: Synthetic oligonucleotide
aauaugaaacgagauccca

SEQ ID NO: 927511 - RNA, 19 nt, Artificial Sequence
  Description of Artificial Sequence: Synthetic oligonucleotide
ucaauggcuaaacccagga

SEQ ID NO: 927512 - RNA, 19 nt, Artificial Sequence
  Description of Artificial Sequence: Synthetic oligonucleotide
uacauugcuaggugaauug

SEQ ID NO: 927513 - RNA, 19 nt, Artificial Sequence
  Description of Artificial Sequence: Synthetic oligonucleotide
ugagguaaaucugaauuca

SEQ ID NO: 927514 - RNA, 19 nt, Artificial Sequence
  Description of Artificial Sequence: Synthetic oligonucleotide
ugacucaaauuucuuugcc

SEQ ID NO: 927515 - RNA, 19 nt, Artificial Sequence
  Description of Artificial Sequence: Synthetic oligonucleotide
uugccuaggauacugccca

SEQ ID NO: 927516 - RNA, 19 nt, Artificial Sequence
  Description of Artificial Sequence: Synthetic oligonucleotide
cuugacuauggacauuugc

SEQ ID NO: 927517 - RNA, 19 nt, Artificial Sequence
  Description of Artificial Sequence: Synthetic oligonucleotide
accaaucuacuuugguagc

SEQ ID NO: 927518 - RNA, 19 nt, Artificial Sequence
  Description of Artificial Sequence: Synthetic oligonucleotide
aacgaaaacccacuguauu

SEQ ID NO: 927519 - RNA, 19 nt, Artificial Sequence
  Description of Artificial Sequence: Synthetic oligonucleotide
ugacaaguaaugacuaaaa

SEQ ID NO: 927520 - RNA, 19 nt, Artificial Sequence
  Description of Artificial Sequence: Synthetic oligonucleotide
ugagaccaugauaugauau

SEQ ID NO: 927521 - RNA, 19 nt, Artificial Sequence
  Description of Artificial Sequence: Synthetic oligonucleotide
uugauguauccaccgcugg

SEQ ID NO: 927522 - RNA, 19 nt, Artificial Sequence
  Description of Artificial Sequence: Synthetic oligonucleotide
aaucuacuuugguagcucu

SEQ ID NO: 927523 - RNA, 19 nt, Artificial Sequence
  Description of Artificial Sequence: Synthetic oligonucleotide
acuugacuugcaugcaugg

SEQ ID NO: 927524 - RNA, 19 nt, Artificial Sequence
  Description of Artificial Sequence: Synthetic oligonucleotide
cuuuagauugccuaggaua

SEQ ID NO: 927525 - RNA, 19 nt, Artificial Sequence
  Description of Artificial Sequence: Synthetic oligonucleotide
uuugcccuauuacaagggc

SEQ ID NO: 927526 - RNA, 19 nt, Artificial Sequence
  Description of Artificial Sequence: Synthetic oligonucleotide
agacuaaugacaacuucac

SEQ ID NO: 927527 - RNA, 19 nt, Artificial Sequence
  Description of Artificial Sequence: Synthetic oligonucleotide
agugagguucacuuaacga

SEQ ID NO: 927528 - RNA, 19 nt, Artificial Sequence
  Description of Artificial Sequence: Synthetic oligonucleotide
gauuuaguuguuccccuug

SEQ ID NO: 927529 - RNA, 19 nt, Artificial Sequence
  Description of Artificial Sequence: Synthetic oligonucleotide
gaggaugagugauguacgg

SEQ ID NO: 927530 - RNA, 19 nt, Artificial Sequence
  Description of Artificial Sequence: Synthetic oligonucleotide
agaagugagguucacuuaa

SEQ ID NO: 927531 - RNA, 19 nt, Artificial Sequence
  Description of Artificial Sequence: Synthetic oligonucleotide
agugauggucuuaauuccc

SEQ ID NO: 927532 - RNA, 19 nt, Artificial Sequence
  Description of Artificial Sequence: Synthetic oligonucleotide
cauacuacauugcuaggug

SEQ ID NO: 927533 - RNA, 19 nt, Artificial Sequence
  Description of Artificial Sequence: Synthetic oligonucleotide
caauaugaaacgagauccc

SEQ ID NO: 927534 - RNA, 19 nt, Artificial Sequence
  Description of Artificial Sequence: Synthetic oligonucleotide
uauuacaagggcagacaca

SEQ ID NO: 927535 - RNA, 19 nt, Artificial Sequence
  Description of Artificial Sequence: Synthetic oligonucleotide
aauagugauguaaaacaaa

SEQ ID NO: 927536 - RNA, 19 nt, Artificial Sequence
  Description of Artificial Sequence: Synthetic oligonucleotide
uauacguuugauguaucca

SEQ ID NO: 927537 - RNA, 19 nt, Artificial Sequence
  Description of Artificial Sequence: Synthetic oligonucleotide
aaugagaccaugauaugau

SEQ ID NO: 927538 - RNA, 19 nt, Artificial Sequence
  Description of Artificial Sequence: Synthetic oligonucleotide
agaacuacauaaacuugac

SEQ ID NO: 927539 - RNA, 19 nt, Artificial Sequence
  Description of Artificial Sequence: Synthetic oligonucleotide
uucuauuggaguucuugac

SEQ ID NO: 927540 - RNA, 19 nt, Artificial Sequence
  Description of Artificial Sequence: Synthetic oligonucleotide
agagcuaauugcaacuuuc

SEQ ID NO: 927541 - RNA, 19 nt, Artificial Sequence
  Description of Artificial Sequence: Synthetic oligonucleotide
uuccaaaucuugaaugcaa

SEQ ID NO: 927542 - RNA, 19 nt, Artificial Sequence
  Description of Artificial Sequence: Synthetic oligonucleotide
guuuuguugaccuauaguu

SEQ ID NO: 927543 - RNA, 19 nt, Artificial Sequence
  Description of Artificial Sequence: Synthetic oligonucleotide
acuuguugagcucuguuaa

SEQ ID NO: 927544 - RNA, 19 nt, Artificial Sequence
  Description of Artificial Sequence: Synthetic oligonucleotide
agaagcuaagugaagagga

SEQ ID NO: 927545 - RNA, 19 nt, Artificial Sequence
  Description of Artificial Sequence: Synthetic oligonucleotide
uucuuaguauuugagguaa

SEQ ID NO: 927546 - RNA, 19 nt, Artificial Sequence
  Description of Artificial Sequence: Synthetic oligonucleotide
uguccauucguuacccggc

SEQ ID NO: 927547 - RNA, 19 nt, Artificial Sequence
  Description of Artificial Sequence: Synthetic oligonucleotide
cuuugcccuauuacaaggg

SEQ ID NO: 927548 - RNA, 19 nt, Artificial Sequence
  Description of Artificial Sequence: Synthetic oligonucleotide
cuaccugagaucaaaacaa

SEQ ID NO: 927549 - RNA, 19 nt, Artificial Sequence
  Description of Artificial Sequence: Synthetic oligonucleotide
cagaacuacauaaacuuga

SEQ ID NO: 927550 - RNA, 19 nt, Artificial Sequence
  Description of Artificial Sequence: Synthetic oligonucleotide
uucuuuagauugccuagga

SEQ ID NO: 927551 - RNA, 19 nt, Artificial Sequence
  Description of Artificial Sequence: Synthetic oligonucleotide
auggcuaaacccaggauuc

SEQ ID NO: 927552 - RNA, 19 nt, Artificial Sequence
  Description of Artificial Sequence: Synthetic oligonucleotide
auugccuaggauacugccc

SEQ ID NO: 927553 - RNA, 19 nt, Artificial Sequence
  Description of Artificial Sequence: Synthetic oligonucleotide
aaauaggccuacaaugaga

SEQ ID NO: 927554 - RNA, 19 nt, Artificial Sequence
  Description of Artificial Sequence: Synthetic oligonucleotide
gacucaauggcuaaaccca

SEQ ID NO: 927555 - RNA, 19 nt, Artificial Sequence
  Description of Artificial Sequence: Synthetic oligonucleotide
uugaccuauaguuucuuua

SEQ ID NO: 927556 - RNA, 19 nt, Artificial Sequence
  Description of Artificial Sequence: Synthetic oligonucleotide
gcaugugcaauaugaaacg

SEQ ID NO: 927557 - RNA, 19 nt, Artificial Sequence
  Description of Artificial Sequence: Synthetic oligonucleotide
uaaagaagucugagcagga

SEQ ID NO: 927558 - RNA, 19 nt, Artificial Sequence
  Description of Artificial Sequence: Synthetic oligonucleotide
cagaugcuaauuuuaaaca

SEQ ID NO: 927559 - RNA, 19 nt, Artificial Sequence
  Description of Artificial Sequence: Synthetic oligonucleotide
uacuacauugcuaggugaa

SEQ ID NO: 927560 - RNA, 19 nt, Artificial Sequence
  Description of Artificial Sequence: Synthetic oligonucleotide
ggagcuagagaacugagca

SEQ ID NO: 927561 - RNA, 19 nt, Artificial Sequence
  Description of Artificial Sequence: Synthetic oligonucleotide
aaacgagaucccaaaaccu

SEQ ID NO: 927562 - RNA, 19 nt, Artificial Sequence
  Description of Artificial Sequence: Synthetic oligonucleotide
uagauugccuaggauacug

SEQ ID NO: 927563 - RNA, 19 nt, Artificial Sequence
  Description of Artificial Sequence: Synthetic oligonucleotide
augacuuaggagcuagaga

SEQ ID NO: 927564 - RNA, 19 nt, Artificial Sequence
  Description of Artificial Sequence: Synthetic oligonucleotide
ucgauuucauugcccaugu

SEQ ID NO: 927565 - RNA, 19 nt, Artificial Sequence
  Description of Artificial Sequence: Synthetic oligonucleotide
acggaaagcagccuaagua

SEQ ID NO: 927566 - RNA, 19 nt, Artificial Sequence
  Description of Artificial Sequence: Synthetic oligonucleotide
gugagguucacuuaacgaa

SEQ ID NO: 927567 - RNA, 19 nt, Artificial Sequence
  Description of Artificial Sequence: Synthetic oligonucleotide
agaaacacguuaccuauuu

SEQ ID NO: 927568 - RNA, 19 nt, Artificial Sequence
  Description of Artificial Sequence: Synthetic oligonucleotide
caugaguaaaagcucccac

SEQ ID NO: 927569 - RNA, 19 nt, Artificial Sequence
  Description of Artificial Sequence: Synthetic oligonucleotide
acuaugaauucagaaguga

SEQ ID NO: 927570 - RNA, 19 nt, Artificial Sequence
  Description of Artificial Sequence: Synthetic oligonucleotide
ugacucauaauacgaggau

SEQ ID NO: 927571 - RNA, 19 nt, Artificial Sequence
  Description of Artificial Sequence: Synthetic oligonucleotide
guugccuuauaauucuuuc

SEQ ID NO: 927572 - RNA, 19 nt, Artificial Sequence
  Description of Artificial Sequence: Synthetic oligonucleotide
guucuuuagauugccuagg

SEQ ID NO: 927573 - RNA, 19 nt, Artificial Sequence
  Description of Artificial Sequence: Synthetic oligonucleotide
agucugagcaggaaccuac

SEQ ID NO: 927574 - RNA, 19 nt, Artificial Sequence
  Description of Artificial Sequence: Synthetic oligonucleotide
gcugauaaaaugauugccc

SEQ ID NO: 927575 - RNA, 19 nt, Artificial Sequence
  Description of Artificial Sequence: Synthetic oligonucleotide
auacgaggauaaaaggcac

SEQ ID NO: 927576 - RNA, 19 nt, Artificial Sequence
  Description of Artificial Sequence: Synthetic oligonucleotide
ugcuuacauacuacauugc

SEQ ID NO: 927577 - RNA, 19 nt, Artificial Sequence
  Description of Artificial Sequence: Synthetic oligonucleotide
acuuaggagcuagagaacu

SEQ ID NO: 927578 - RNA, 19 nt, Artificial Sequence
  Description of Artificial Sequence: Synthetic oligonucleotide
acauacuacauugcuaggu

SEQ ID NO: 927579 - RNA, 19 nt, Artificial Sequence
  Description of Artificial Sequence: Synthetic oligonucleotide
ugguugcuuacauacuaca

SEQ ID NO: 927580 - RNA, 19 nt, Artificial Sequence
  Description of Artificial Sequence: Synthetic oligonucleotide
ucugaacauaauucuuagu

SEQ ID NO: 927581 - RNA, 19 nt, Artificial Sequence
  Description of Artificial Sequence: Synthetic oligonucleotide
uuuauacaguguuccugca

SEQ ID NO: 927582 - RNA, 19 nt, Artificial Sequence
  Description of Artificial Sequence: Synthetic oligonucleotide
auacuacauugcuagguga

SEQ ID NO: 927583 - RNA, 19 nt, Artificial Sequence
  Description of Artificial Sequence: Synthetic oligonucleotide
cauuaguuacaaaauuuaa

SEQ ID NO: 927584 - RNA, 19 nt, Artificial Sequence
  Description of Artificial Sequence: Synthetic oligonucleotide
aggaaccuaccccaaagga

SEQ ID NO: 927585 - RNA, 19 nt, Artificial Sequence
  Description of Artificial Sequence: Synthetic oligonucleotide
aacuuucuauuggaguucu

SEQ ID NO: 927586 - RNA, 19 nt, Artificial Sequence
  Description of Artificial Sequence: Synthetic oligonucleotide
acuuuaguaacaaaucaua

SEQ ID NO: 927587 - RNA, 19 nt, Artificial Sequence
  Description of Artificial Sequence: Synthetic oligonucleotide
guauuugagguaaaucuga

SEQ ID NO: 927588 - RNA, 19 nt, Artificial Sequence
  Description of Artificial Sequence: Synthetic oligonucleotide
auaauucuuuccugacuca

SEQ ID NO: 927589 - RNA, 19 nt, Artificial Sequence
  Description of Artificial Sequence: Synthetic oligonucleotide
ucuuuagauugccuaggau

SEQ ID NO: 927590 - RNA, 19 nt, Artificial Sequence
  Description of Artificial Sequence: Synthetic oligonucleotide
cacuaugaauucagaagug

SEQ ID NO: 927591 - RNA, 19 nt, Artificial Sequence
  Description of Artificial Sequence: Synthetic oligonucleotide
gaacauaauucuuaguauu

SEQ ID NO: 927592 - RNA, 19 nt, Artificial Sequence
  Description of Artificial Sequence: Synthetic oligonucleotide
acucauaauacgaggauaa

SEQ ID NO: 927593 - RNA, 19 nt, Artificial Sequence
  Description of Artificial Sequence: Synthetic oligonucleotide
gaaacacguuaccuauuug

SEQ ID NO: 927594 - RNA, 19 nt, Artificial Sequence
  Description of Artificial Sequence: Synthetic oligonucleotide
ugugguuugcugaggcugu

SEQ ID NO: 927595 - RNA, 19 nt, Artificial Sequence
  Description of Artificial Sequence: Synthetic oligonucleotide
acauaaacuugacuugcau

SEQ ID NO: 927596 - RNA, 19 nt, Artificial Sequence
  Description of Artificial Sequence: Synthetic oligonucleotide
agcaucgauuucauugccc

SEQ ID NO: 927597 - RNA, 19 nt, Artificial Sequence
  Description of Artificial Sequence: Synthetic oligonucleotide
uacgaggauaaaaggcacu

SEQ ID NO: 927598 - RNA, 19 nt, Artificial Sequence
  Description of Artificial Sequence: Synthetic oligonucleotide
ucguuacccggccugguug

SEQ ID NO: 927599 - RNA, 19 nt, Artificial Sequence
  Description of Artificial Sequence: Synthetic oligonucleotide
ucaguaaccuggugagccc

SEQ ID NO: 927600 - RNA, 19 nt, Artificial Sequence
  Description of Artificial Sequence: Synthetic oligonucleotide
ccaaaaccuauguacauac

SEQ ID NO: 927601 - RNA, 19 nt, Artificial Sequence
  Description of Artificial Sequence: Synthetic oligonucleotide
aggagcuagagaacugagc

SEQ ID NO: 927602 - RNA, 19 nt, Artificial Sequence
  Description of Artificial Sequence: Synthetic oligonucleotide
aacacguuaccuauuugaa

SEQ ID NO: 927603 - RNA, 19 nt, Artificial Sequence
  Description of Artificial Sequence: Synthetic oligonucleotide
uuguugaccuauaguuucu

SEQ ID NO: 927604 - RNA, 19 nt, Artificial Sequence
  Description of Artificial Sequence: Synthetic oligonucleotide
aagagcuaauugcaacuuu

SEQ ID NO: 927605 - RNA, 19 nt, Artificial Sequence
  Description of Artificial Sequence: Synthetic oligonucleotide
acgaaaacccacuguauuu

SEQ ID NO: 927606 - RNA, 19 nt, Artificial Sequence
  Description of Artificial Sequence: Synthetic oligonucleotide
ugauaugauaugacucaua

SEQ ID NO: 927607 - RNA, 19 nt, Artificial Sequence
  Description of Artificial Sequence: Synthetic oligonucleotide
augacaaguaaugacuaaa

SEQ ID NO: 927608 - RNA, 19 nt, Artificial Sequence
  Description of Artificial Sequence: Synthetic oligonucleotide
cauugcuaggugaauuguc

SEQ ID NO: 927609 - RNA, 19 nt, Artificial Sequence
  Description of Artificial Sequence: Synthetic oligonucleotide
augacucauaauacgagga

SEQ ID NO: 927610 - RNA, 19 nt, Artificial Sequence
  Description of Artificial Sequence: Synthetic oligonucleotide
ccaugauaugauaugacuc

SEQ ID NO: 927611 - RNA, 19 nt, Artificial Sequence
  Description of Artificial Sequence: Synthetic oligonucleotide
caggaaccuaccccaaagg

SEQ ID NO: 927612 - RNA, 19 nt, Artificial Sequence
  Description of Artificial Sequence: Synthetic oligonucleotide
accauuaguuacaaaauuu

SEQ ID NO: 927613 - RNA, 19 nt, Artificial Sequence
  Description of Artificial Sequence: Synthetic oligonucleotide
uguugccuuauaauucuuu

SEQ ID NO: 927614 - RNA, 19 nt, Artificial Sequence
  Description of Artificial Sequence: Synthetic oligonucleotide
uaaacuugacuugcaugca

SEQ ID NO: 927615 - RNA, 19 nt, Artificial Sequence
  Description of Artificial Sequence: Synthetic oligonucleotide
auaugauaugacucauaau

SEQ ID NO: 927616 - RNA, 19 nt, Artificial Sequence
  Description of Artificial Sequence: Synthetic oligonucleotide
auaccuacccagcuuuccu

SEQ ID NO: 927617 - RNA, 19 nt, Artificial Sequence
  Description of Artificial Sequence: Synthetic oligonucleotide
aauaagucagaaacacguu

SEQ ID NO: 927618 - RNA, 19 nt, Artificial Sequence
  Description of Artificial Sequence: Synthetic oligonucleotide
auuagccuguuuuguuuug

SEQ ID NO: 927619 - RNA, 19 nt, Artificial Sequence
  Description of Artificial Sequence: Synthetic oligonucleotide
aguggcagugcagucauca

SEQ ID NO: 927620 - RNA, 19 nt, Artificial Sequence
  Description of Artificial Sequence: Synthetic oligonucleotide
cuauuggaguucuugacua

SEQ ID NO: 927621 - RNA, 19 nt, Artificial Sequence
  Description of Artificial Sequence: Synthetic oligonucleotide
ucguugguuauacguuuga

SEQ ID NO: 927622 - RNA, 19 nt, Artificial Sequence
  Description of Artificial Sequence: Synthetic oligonucleotide
aacgagaucccaaaaccua

SEQ ID NO: 927623 - RNA, 19 nt, Artificial Sequence
  Description of Artificial Sequence: Synthetic oligonucleotide
cagacucaugacaaaucac

SEQ ID NO: 927624 - RNA, 19 nt, Artificial Sequence
  Description of Artificial Sequence: Synthetic oligonucleotide
ggcuuuagcugucaaugag

SEQ ID NO: 927625 - RNA, 19 nt, Artificial Sequence
  Description of Artificial Sequence: Synthetic oligonucleotide
cuaauugcaacuuucuauu

SEQ ID NO: 927626 - RNA, 19 nt, Artificial Sequence
  Description of Artificial Sequence: Synthetic oligonucleotide
uggcuuuagcugucaauga

SEQ ID NO: 927627 - RNA, 19 nt, Artificial Sequence
  Description of Artificial Sequence: Synthetic oligonucleotide
auccgauccuuguuggugu

SEQ ID NO: 927628 - RNA, 19 nt, Artificial Sequence
  Description of Artificial Sequence: Synthetic oligonucleotide
uaccuacccagcuuuccug

SEQ ID NO: 927629 - RNA, 19 nt, Artificial Sequence
  Description of Artificial Sequence: Synthetic oligonucleotide
acacguuaccuauuugaaa

SEQ ID NO: 927630 - RNA, 19 nt, Artificial Sequence
  Description of Artificial Sequence: Synthetic oligonucleotide
cugagcaaaugguaaagaa

SEQ ID NO: 927631 - RNA, 19 nt, Artificial Sequence
  Description of Artificial Sequence: Synthetic oligonucleotide
uggucuuaauucccgcauc

SEQ ID NO: 927632 - RNA, 19 nt, Artificial Sequence
  Description of Artificial Sequence: Synthetic oligonucleotide
ggcacucauuuauacagug

SEQ ID NO: 927633 - RNA, 19 nt, Artificial Sequence
  Description of Artificial Sequence: Synthetic oligonucleotide
acguuaccuauuugaaaga

SEQ ID NO: 927634 - RNA, 19 nt, Artificial Sequence
  Description of Artificial Sequence: Synthetic oligonucleotide
caccucaggcauuagccug

SEQ ID NO: 927635 - RNA, 19 nt, Artificial Sequence
  Description of Artificial Sequence: Synthetic oligonucleotide
gguaaagaaguacagcagu

SEQ ID NO: 927636 - RNA, 19 nt, Artificial Sequence
  Description of Artificial Sequence: Synthetic oligonucleotide
ugucaauccgauccuuguu

SEQ ID NO: 927637 - RNA, 19 nt, Artificial Sequence
  Description of Artificial Sequence: Synthetic oligonucleotide
ucuugacuauggacauuug

SEQ ID NO: 927638 - RNA, 19 nt, Artificial Sequence
  Description of Artificial Sequence: Synthetic oligonucleotide
ggcgcuguaaagaagucug

SEQ ID NO: 927639 - RNA, 19 nt, Artificial Sequence
  Description of Artificial Sequence: Synthetic oligonucleotide
uuucugugauccucuguau

SEQ ID NO: 927640 - RNA, 19 nt, Artificial Sequence
  Description of Artificial Sequence: Synthetic oligonucleotide
ggaugagugauguacggaa

SEQ ID NO: 927641 - RNA, 19 nt, Artificial Sequence
  Description of Artificial Sequence: Synthetic oligonucleotide
cauguugccuuauaauucu

SEQ ID NO: 927642 - RNA, 19 nt, Artificial Sequence
  Description of Artificial Sequence: Synthetic oligonucleotide
ccauguugccuuauaauuc

SEQ ID NO: 927643 - RNA, 19 nt, Artificial Sequence
  Description of Artificial Sequence: Synthetic oligonucleotide
auaugaaacgagaucccaa

SEQ ID NO: 927644 - RNA, 19 nt, Artificial Sequence
  Description of Artificial Sequence: Synthetic oligonucleotide
ugguuauacguuugaugua

SEQ ID NO: 927645 - RNA, 19 nt, Artificial Sequence
  Description of Artificial Sequence: Synthetic oligonucleotide
cagccuaaguaagagugug

SEQ ID NO: 927646 - RNA, 19 nt, Artificial Sequence
  Description of Artificial Sequence: Synthetic oligonucleotide
gacucauaauacgaggaua

SEQ ID NO: 927647 - RNA, 19 nt, Artificial Sequence
  Description of Artificial Sequence: Synthetic oligonucleotide
ccuuauaauucuuuccuga

SEQ ID NO: 927648 - RNA, 19 nt, Artificial Sequence
  Description of Artificial Sequence: Synthetic oligonucleotide
gcuaauugcaacuuucuau

SEQ ID NO: 927649 - RNA, 19 nt, Artificial Sequence
  Description of Artificial Sequence: Synthetic oligonucleotide
gagcccuuagcugaauuuc

SEQ ID NO: 927650 - RNA, 19 nt, Artificial Sequence
  Description of Artificial Sequence: Synthetic oligonucleotide
gaacuacauaaacuugacu

SEQ ID NO: 927651 - RNA, 19 nt, Artificial Sequence
  Description of Artificial Sequence: Synthetic oligonucleotide
uaauucccgcauccugaga

SEQ ID NO: 927652 - RNA, 19 nt, Artificial Sequence
  Description of Artificial Sequence: Synthetic oligonucleotide
cuggcaucguugguuauac

SEQ ID NO: 927653 - RNA, 19 nt, Artificial Sequence
  Description of Artificial Sequence: Synthetic oligonucleotide
uuagauugccuaggauacu

SEQ ID NO: 927654 - RNA, 19 nt, Artificial Sequence
  Description of Artificial Sequence: Synthetic oligonucleotide
gaagugagguucacuuaac

SEQ ID NO: 927655 - RNA, 19 nt, Artificial Sequence
  Description of Artificial Sequence: Synthetic oligonucleotide
cauucguuacccggccugg

SEQ ID NO: 927656 - RNA, 19 nt, Artificial Sequence
  Description of Artificial Sequence: Synthetic oligonucleotide
acauugcuaggugaauugu

SEQ ID NO: 927657 - RNA, 19 nt, Artificial Sequence
  Description of Artificial Sequence: Synthetic oligonucleotide
acaauaccauuaguuacaa

SEQ ID NO: 927658 - RNA, 19 nt, Artificial Sequence
  Description of Artificial Sequence: Synthetic oligonucleotide
cuuaacgaaaacccacugu

SEQ ID NO: 927659 - RNA, 19 nt, Artificial Sequence
  Description of Artificial Sequence: Synthetic oligonucleotide
cacaagguaaauaggccua

SEQ ID NO: 927660 - RNA, 19 nt, Artificial Sequence
  Description of Artificial Sequence: Synthetic oligonucleotide
gugaagaggaugagugaug

SEQ ID NO: 927661 - RNA, 19 nt, Artificial Sequence
  Description of Artificial Sequence: Synthetic oligonucleotide
accugagaucaaaacaagu

SEQ ID NO: 927662 - RNA, 19 nt, Artificial Sequence
  Description of Artificial Sequence: Synthetic oligonucleotide
caaucuacuuugguagcuc

SEQ ID NO: 927663 - RNA, 19 nt, Artificial Sequence
  Description of Artificial Sequence: Synthetic oligonucleotide
guccauucguuacccggcc

SEQ ID NO: 927664 - RNA, 19 nt, Artificial Sequence
  Description of Artificial Sequence: Synthetic oligonucleotide
augagaccaugauaugaua

SEQ ID NO: 927665 - RNA, 19 nt, Artificial Sequence
  Description of Artificial Sequence: Synthetic oligonucleotide
uccauucguuacccggccu

SEQ ID NO: 927666 - RNA, 19 nt, Artificial Sequence
  Description of Artificial Sequence: Synthetic oligonucleotide
agcaauggucauuggucaa

SEQ ID NO: 927667 - RNA, 19 nt, Artificial Sequence
  Description of Artificial Sequence: Synthetic oligonucleotide
gccuuauaauucuuuccug

SEQ ID NO: 927668 - RNA, 19 nt, Artificial Sequence
  Description of Artificial Sequence: Synthetic oligonucleotide
gaugagugauguacggaaa

SEQ ID NO: 927669 - RNA, 19 nt, Artificial Sequence
  Description of Artificial Sequence: Synthetic oligonucleotide
gcuaaacccaggauucucc

SEQ ID NO: 927670 - RNA, 19 nt, Artificial Sequence
  Description of Artificial Sequence: Synthetic oligonucleotide
gagcuagagaacugagcaa

SEQ ID NO: 927671 - RNA, 19 nt, Artificial Sequence
  Description of Artificial Sequence: Synthetic oligonucleotide
gcaaaauagugauguaaaa

SEQ ID NO: 927672 - RNA, 19 nt, Artificial Sequence
  Description of Artificial Sequence: Synthetic oligonucleotide
cacuuguugagcucuguua

SEQ ID NO: 927673 - RNA, 19 nt, Artificial Sequence
  Description of Artificial Sequence: Synthetic oligonucleotide
ggcaucguugguuauacgu

SEQ ID NO: 927674 - RNA, 19 nt, Artificial Sequence
  Description of Artificial Sequence: Synthetic oligonucleotide
guaagagugugaacugaga

SEQ ID NO: 927675 - RNA, 19 nt, Artificial Sequence
  Description of Artificial Sequence: Synthetic oligonucleotide
aucguugguuauacguuug

SEQ ID NO: 927676 - RNA, 19 nt, Artificial Sequence
  Description of Artificial Sequence: Synthetic oligonucleotide
acuacauugcuaggugaau

SEQ ID NO: 927677 - RNA, 19 nt, Artificial Sequence
  Description of Artificial Sequence: Synthetic oligonucleotide
ucuggcaucguugguuaua

SEQ ID NO: 927678 - RNA, 19 nt, Artificial Sequence
  Description of Artificial Sequence: Synthetic oligonucleotide
uucguuacccggccugguu

SEQ ID NO: 927679 - RNA, 19 nt, Artificial Sequence
  Description of Artificial Sequence: Synthetic oligonucleotide
caaauaccuacccagcuuu

SEQ ID NO: 927680 - RNA, 19 nt, Artificial Sequence
  Description of Artificial Sequence: Synthetic oligonucleotide
cacuuaacgaaaacccacu

SEQ ID NO: 927681 - RNA, 19 nt, Artificial Sequence
  Description of Artificial Sequence: Synthetic oligonucleotide
cuaugcgauuuaguuguuc

SEQ ID NO: 927682 - RNA, 19 nt, Artificial Sequence
  Description of Artificial Sequence: Synthetic oligonucleotide
caucaguaaccuggugagc

SEQ ID NO: 927683 - RNA, 19 nt, Artificial Sequence
  Description of Artificial Sequence: Synthetic oligonucleotide
acgagaucccaaaaccuau

SEQ ID NO: 927684 - RNA, 19 nt, Artificial Sequence
  Description of Artificial Sequence: Synthetic oligonucleotide
ccuaaguaagagugugaac

SEQ ID NO: 927685 - RNA, 19 nt, Artificial Sequence
  Description of Artificial Sequence: Synthetic oligonucleotide
cucaugucuuuauuuauuu

SEQ ID NO: 927686 - RNA, 19 nt, Artificial Sequence
  Description of Artificial Sequence: Synthetic oligonucleotide
aggcgcuguaaagaagucu

SEQ ID NO: 927687 - RNA, 19 nt, Artificial Sequence
  Description of Artificial Sequence: Synthetic oligonucleotide
guuauacguuugauguauc

SEQ ID NO: 927688 - RNA, 19 nt, Artificial Sequence
  Description of Artificial Sequence: Synthetic oligonucleotide
gguuauacguuugauguau

SEQ ID NO: 927689 - RNA, 19 nt, Artificial Sequence
  Description of Artificial Sequence: Synthetic oligonucleotide
cuaagugaagaggaugagu

SEQ ID NO: 927690 - RNA, 19 nt, Artificial Sequence
  Description of Artificial Sequence: Synthetic oligonucleotide
auacacucuuaaacuuucu

SEQ ID NO: 927691 - RNA, 19 nt, Artificial Sequence
  Description of Artificial Sequence: Synthetic oligonucleotide
gagcuaauugcaacuuucu

SEQ ID NO: 927692 - RNA, 19 nt, Artificial Sequence
  Description of Artificial Sequence: Synthetic oligonucleotide
ucuaugcgauuuaguuguu

SEQ ID NO: 927693 - RNA, 19 nt, Artificial Sequence
  Description of Artificial Sequence: Synthetic oligonucleotide
uucccgcauccugagacuc

SEQ ID NO: 927694 - RNA, 19 nt, Artificial Sequence
  Description of Artificial Sequence: Synthetic oligonucleotide
uggcuaaacccaggauucu

SEQ ID NO: 927695 - RNA, 19 nt, Artificial Sequence
  Description of Artificial Sequence: Synthetic oligonucleotide
cuugcaugcauggcagaga

SEQ ID NO: 927696 - RNA, 19 nt, Artificial Sequence
  Description of Artificial Sequence: Synthetic oligonucleotide
uccgauccuuguugguguc

SEQ ID NO: 927697 - RNA, 19 nt, Artificial Sequence
  Description of Artificial Sequence: Synthetic oligonucleotide
guacagcaguggcuuuagc

SEQ ID NO: 927698 - RNA, 19 nt, Artificial Sequence
  Description of Artificial Sequence: Synthetic oligonucleotide
aggauucuccuuguacuuu

SEQ ID NO: 927699 - RNA, 19 nt, Artificial Sequence
  Description of Artificial Sequence: Synthetic oligonucleotide
uacccggccugguugcuua

SEQ ID NO: 927700 - RNA, 19 nt, Artificial Sequence
  Description of Artificial Sequence: Synthetic oligonucleotide
gcuguccauucguuacccg

SEQ ID NO: 927701 - RNA, 19 nt, Artificial Sequence
  Description of Artificial Sequence: Synthetic oligonucleotide
ccauucguuacccggccug

SEQ ID NO: 927702 - RNA, 19 nt, Artificial Sequence
  Description of Artificial Sequence: Synthetic oligonucleotide
cguuugauguauccaccgc

SEQ ID NO: 927703 - RNA, 19 nt, Artificial Sequence
  Description of Artificial Sequence: Synthetic oligonucleotide
ugccuaggauacugcccac

SEQ ID NO: 927704 - RNA, 19 nt, Artificial Sequence
  Description of Artificial Sequence: Synthetic oligonucleotide
ccugagaucaaaacaaguu

SEQ ID NO: 927705 - RNA, 19 nt, Artificial Sequence
  Description of Artificial Sequence: Synthetic oligonucleotide
caucguugguuauacguuu

SEQ ID NO: 927706 - RNA, 19 nt, Artificial Sequence
  Description of Artificial Sequence: Synthetic oligonucleotide
aaacuccuguaaacauuuu

SEQ ID NO: 927707 - RNA, 19 nt, Artificial Sequence
  Description of Artificial Sequence: Synthetic oligonucleotide
gaggcgcuguaaagaaguc

SEQ ID NO: 927708 - RNA, 19 nt, Artificial Sequence
  Description of Artificial Sequence: Synthetic oligonucleotide
gauguacggaaagcagccu

SEQ ID NO: 927709 - RNA, 19 nt, Artificial Sequence
  Description of Artificial Sequence: Synthetic oligonucleotide
auucguuacccggccuggu

SEQ ID NO: 927710 - RNA, 19 nt, Artificial Sequence
  Description of Artificial Sequence: Synthetic oligonucleotide
gagugugaacugagagaga

SEQ ID NO: 927711 - RNA, 19 nt, Artificial Sequence
  Description of Artificial Sequence: Synthetic oligonucleotide
ggcuaaacccaggauucuc

SEQ ID NO: 927712 - RNA, 19 nt, Artificial Sequence
  Description of Artificial Sequence: Synthetic oligonucleotide
cgagaucccaaaaccuaug

SEQ ID NO: 927713 - RNA, 19 nt, Artificial Sequence
  Description of Artificial Sequence: Synthetic oligonucleotide
gcuuuagcugucaaugagu

SEQ ID NO: 927714 - RNA, 19 nt, Artificial Sequence
  Description of Artificial Sequence: Synthetic oligonucleotide
aggccuacaaugagaccau

SEQ ID NO: 927715 - RNA, 19 nt, Artificial Sequence
  Description of Artificial Sequence: Synthetic oligonucleotide
gccuacaaugagaccauga

SEQ ID NO: 927716 - RNA, 19 nt, Artificial Sequence
  Description of Artificial Sequence: Synthetic oligonucleotide
ggugaauugucuccuccau

SEQ ID NO: 927717 - RNA, 19 nt, Artificial Sequence
  Description of Artificial Sequence: Synthetic oligonucleotide
ccuacaaugagaccaugau

SEQ ID NO: 927718 - RNA, 19 nt, Artificial Sequence
  Description of Artificial Sequence: Synthetic oligonucleotide
cccauguugccuuauaauu

SEQ ID NO: 927719 - RNA, 19 nt, Artificial Sequence
  Description of Artificial Sequence: Synthetic oligonucleotide
gcaauggucauuggucaaa

SEQ ID NO: 927720 - RNA, 19 nt, Artificial Sequence
  Description of Artificial Sequence: Synthetic oligonucleotide
gcauuagccuguuuuguuu

SEQ ID NO: 927721 - RNA, 19 nt, Artificial Sequence
  Description of Artificial Sequence: Synthetic oligonucleotide
cguuacccggccugguugc

SEQ ID NO: 927722 - RNA, 19 nt, Artificial Sequence
  Description of Artificial Sequence: Synthetic oligonucleotide
gcgauuuaguuguuccccu

SEQ ID NO: 927723 - RNA, 19 nt, Artificial Sequence
  Description of Artificial Sequence: Synthetic oligonucleotide
gcuaggugaauugucuccu

SEQ ID NO: 927724 - RNA, 19 nt, Artificial Sequence
  Description of Artificial Sequence: Synthetic oligonucleotide
gguaaugacuuaggagcua

SEQ ID NO: 927725 - RNA, 19 nt, Artificial Sequence
  Description of Artificial Sequence: Synthetic oligonucleotide
gguugcuuacauacuacau

SEQ ID NO: 927726 - RNA, 19 nt, Artificial Sequence
  Description of Artificial Sequence: Synthetic oligonucleotide
ggcauuagccuguuuuguu

SEQ ID NO: 927727 - RNA, 19 nt, Artificial Sequence
  Description of Artificial Sequence: Synthetic oligonucleotide
auguugccuuauaauucuu

SEQ ID NO: 927728 - RNA, 19 nt, Artificial Sequence
  Description of Artificial Sequence: Synthetic oligonucleotide
uuacccggccugguugcuu

SEQ ID NO: 927729 - RNA, 19 nt, Artificial Sequence
  Description of Artificial Sequence: Synthetic oligonucleotide
guaaccuggugagcccuua

SEQ ID NO: 927730 - RNA, 19 nt, Artificial Sequence
  Description of Artificial Sequence: Synthetic oligonucleotide
cagugcagucaucaauaau

SEQ ID NO: 927731 - RNA, 19 nt, Artificial Sequence
  Description of Artificial Sequence: Synthetic oligonucleotide
cccacuugagucagguucu

SEQ ID NO: 927732 - RNA, 19 nt, Artificial Sequence
  Description of Artificial Sequence: Synthetic oligonucleotide
uauccaccgcuggcugcuc

SEQ ID NO: 927733 - RNA, 19 nt, Artificial Sequence
  Description of Artificial Sequence: Synthetic oligonucleotide
acuuucuauuggaguucuu

SEQ ID NO: 927734 - RNA, 19 nt, Artificial Sequence
  Description of Artificial Sequence: Synthetic oligonucleotide
gcaucguugguuauacguu

SEQ ID NO: 927735 - RNA, 19 nt, Artificial Sequence
  Description of Artificial Sequence: Synthetic oligonucleotide
ggccuacaaugagaccaug

SEQ ID NO: 927736 - RNA, 19 nt, Artificial Sequence
  Description of Artificial Sequence: Synthetic oligonucleotide
gcagccuaaguaagagugu

SEQ ID NO: 927737 - RNA, 19 nt, Artificial Sequence
  Description of Artificial Sequence: Synthetic oligonucleotide
gcgcuguaaagaagucuga

SEQ ID NO: 927738 - RNA, 19 nt, Artificial Sequence
  Description of Artificial Sequence: Synthetic oligonucleotide
ccaaucuacuuugguagcu

SEQ ID NO: 927739 - RNA, 19 nt, Artificial Sequence
  Description of Artificial Sequence: Synthetic oligonucleotide
gcacuuguugagcucuguu

SEQ ID NO: 927740 - RNA, 19 nt, Artificial Sequence
  Description of Artificial Sequence: Synthetic oligonucleotide
ccccauguugccuuauaau

SEQ ID NO: 927741 - RNA, 19 nt, Artificial Sequence
  Description of Artificial Sequence: Synthetic oligonucleotide
guuacccggccugguugcu

SEQ ID NO: 927742 - RNA, 19 nt, Artificial Sequence
  Description of Artificial Sequence: Synthetic oligonucleotide
gccuaggauacugcccacu

SEQ ID NO: 927743 - RNA, 19 nt, Artificial Sequence
  Description of Artificial Sequence: Synthetic oligonucleotide
cgaaaacccacuguauuuu

SEQ ID NO: 927744 - RNA, 19 nt, Artificial Sequence
  Description of Artificial Sequence: Synthetic oligonucleotide
gcccuuagcugaauuucuu

SEQ ID NO: 927745 - RNA, 19 nt, Artificial Sequence
  Description of Artificial Sequence: Synthetic oligonucleotide
cgauuuaguuguuccccuu

SEQ ID NO: 927746 - RNA, 19 nt, Artificial Sequence
  Description of Artificial Sequence: Synthetic oligonucleotide
cguugguuauacguuugau

SEQ ID NO: 927747 - RNA, 19 nt, Artificial Sequence
  Description of Artificial Sequence: Synthetic oligonucleotide
ggugagcccuuagcugaau

SEQ ID NO: 927748 - RNA, 19 nt, Artificial Sequence
  Description of Artificial Sequence: Synthetic oligonucleotide
ccgcauccugagacucaau

SEQ ID NO: 927749 - RNA, 19 nt, Artificial Sequence
  Description of Artificial Sequence: Synthetic oligonucleotide
agagcuuuaauuuagauug

SEQ ID NO: 927750 - RNA, 19 nt, Artificial Sequence
  Description of Artificial Sequence: Synthetic oligonucleotide
gauagugugacauaaagcc

SEQ ID NO: 927751 - RNA, 19 nt, Artificial Sequence
  Description of Artificial Sequence: Synthetic oligonucleotide
aaucgcaacaacuugacca

SEQ ID NO: 927752 - RNA, 19 nt, Artificial Sequence
  Description of Artificial Sequence: Synthetic oligonucleotide
uuuagcuuacucuugggcg

SEQ ID NO: 927753 - RNA, 19 nt, Artificial Sequence
  Description of Artificial Sequence: Synthetic oligonucleotide
aguacuucaccacauaggg

SEQ ID NO: 927754 - RNA, 19 nt, Artificial Sequence
  Description of Artificial Sequence: Synthetic oligonucleotide
aacaaaauccgugaagucg

SEQ ID NO: 927755 - RNA, 19 nt, Artificial Sequence
  Description of Artificial Sequence: Synthetic oligonucleotide
uguagaacguacauuuugg

SEQ ID NO: 927756 - RNA, 19 nt, Artificial Sequence
  Description of Artificial Sequence: Synthetic oligonucleotide
cugauuacaguuuucgugg

SEQ ID NO: 927757 - RNA, 19 nt, Artificial Sequence
  Description of Artificial Sequence: Synthetic oligonucleotide
uuucguaaccuaaugaugu

SEQ ID NO: 927758 - RNA, 19 nt, Artificial Sequence
  Description of Artificial Sequence: Synthetic oligonucleotide
ucugauuacaguuuucgug

SEQ ID NO: 927759 - RNA, 19 nt, Artificial Sequence
  Description of Artificial Sequence: Synthetic oligonucleotide
uuuagauugguuugguugc

SEQ ID NO: 927760 - RNA, 19 nt, Artificial Sequence
  Description of Artificial Sequence: Synthetic oligonucleotide
ucuaauccuuucaaugugg

SEQ ID NO: 927761 - RNA, 19 nt, Artificial Sequence
  Description of Artificial Sequence: Synthetic oligonucleotide
ucuaaccgaagccagagug

SEQ ID NO: 927762 - RNA, 19 nt, Artificial Sequence
  Description of Artificial Sequence: Synthetic oligonucleotide
ugaagaucugacucgacag

SEQ ID NO: 927763 - RNA, 19 nt, Artificial Sequence
  Description of Artificial Sequence: Synthetic oligonucleotide
gacuuuugcaaacuuguag

SEQ ID NO: 927764 - RNA, 19 nt, Artificial Sequence
  Description of Artificial Sequence: Synthetic oligonucleotide
uauccuuucuaaccgaagc

SEQ ID NO: 927765 - RNA, 19 nt, Artificial Sequence
  Description of Artificial Sequence: Synthetic oligonucleotide
ugaaguaacugccauagua

SEQ ID NO: 927766 - RNA, 19 nt, Artificial Sequence
  Description of Artificial Sequence: Synthetic oligonucleotide
aaauccgugaagucgucag

SEQ ID NO: 927767 - RNA, 19 nt, Artificial Sequence
  Description of Artificial Sequence: Synthetic oligonucleotide
uucgcauucuugauaaaag

SEQ ID NO: 927768 - RNA, 19 nt, Artificial Sequence
  Description of Artificial Sequence: Synthetic oligonucleotide
uaguacuucaccacauagg

SEQ ID NO: 927769 - RNA, 19 nt, Artificial Sequence
  Description of Artificial Sequence: Synthetic oligonucleotide
auuguaucuguuaacuggc

SEQ ID NO: 927770 - RNA, 19 nt, Artificial Sequence
  Description of Artificial Sequence: Synthetic oligonucleotide
uuaugcucgaucaucgucu

SEQ ID NO: 927771 - RNA, 19 nt, Artificial Sequence
  Description of Artificial Sequence: Synthetic oligonucleotide
auaaauaggcuuuuccaca

SEQ ID NO: 927772 - RNA, 19 nt, Artificial Sequence
  Description of Artificial Sequence: Synthetic oligonucleotide
aaguaguccaugaaagacg

SEQ ID NO: 927773 - RNA, 19 nt, Artificial Sequence
  Description of Artificial Sequence: Synthetic oligonucleotide
uccuauuacaguauugcgu

SEQ ID NO: 927774 - RNA, 19 nt, Artificial Sequence
  Description of Artificial Sequence: Synthetic oligonucleotide
aggauagugugacauaaag

SEQ ID NO: 927775 - RNA, 19 nt, Artificial Sequence
  Description of Artificial Sequence: Synthetic oligonucleotide
ucuguaguucuucuaaacu

SEQ ID NO: 927776 - RNA, 19 nt, Artificial Sequence
  Description of Artificial Sequence: Synthetic oligonucleotide
uuucaauguggauuuuagg

SEQ ID NO: 927777 - RNA, 19 nt, Artificial Sequence
  Description of Artificial Sequence: Synthetic oligonucleotide
uagugugacauaaagcccu

SEQ ID NO: 927778 - RNA, 19 nt, Artificial Sequence
  Description of Artificial Sequence: Synthetic oligonucleotide
ucgcauucuugauaaaagg

SEQ ID NO: 927779 - RNA, 19 nt, Artificial Sequence
  Description of Artificial Sequence: Synthetic oligonucleotide
uguuucguaaccuaaugau

SEQ ID NO: 927780 - RNA, 19 nt, Artificial Sequence
  Description of Artificial Sequence: Synthetic oligonucleotide
aauuuaccuggcuguguac

SEQ ID NO: 927781 - RNA, 19 nt, Artificial Sequence
  Description of Artificial Sequence: Synthetic oligonucleotide
uucuaauccuuucaaugug

SEQ ID NO: 927782 - RNA, 19 nt, Artificial Sequence
  Description of Artificial Sequence: Synthetic oligonucleotide
aguguugaggagaauauuc

SEQ ID NO: 927783 - RNA, 19 nt, Artificial Sequence
  Description of Artificial Sequence: Synthetic oligonucleotide
aauggcccgcauuggaugg

SEQ ID NO: 927784 - RNA, 19 nt, Artificial Sequence
  Description of Artificial Sequence: Synthetic oligonucleotide
uuccuauuacaguauugcg

SEQ ID NO: 927785 - RNA, 19 nt, Artificial Sequence
  Description of Artificial Sequence: Synthetic oligonucleotide
uggauuuuaggaugguugc

SEQ ID NO: 927786 - RNA, 19 nt, Artificial Sequence
  Description of Artificial Sequence: Synthetic oligonucleotide
ucugacucuaacacagugc

SEQ ID NO: 927787 - RNA, 19 nt, Artificial Sequence
  Description of Artificial Sequence: Synthetic oligonucleotide
aaguaacugccauaguacu

SEQ ID NO: 927788 - RNA, 19 nt, Artificial Sequence
  Description of Artificial Sequence: Synthetic oligonucleotide
aaccuaaugaugucugaca

SEQ ID NO: 927789 - RNA, 19 nt, Artificial Sequence
  Description of Artificial Sequence: Synthetic oligonucleotide
ggaaucaugaaaauggccc

SEQ ID NO: 927790 - RNA, 19 nt, Artificial Sequence
  Description of Artificial Sequence: Synthetic oligonucleotide
aagucgucagaccagaguu

SEQ ID NO: 927791 - RNA, 19 nt, Artificial Sequence
  Description of Artificial Sequence: Synthetic oligonucleotide
cacagugcuguuaugcucg

SEQ ID NO: 927792 - RNA, 19 nt, Artificial Sequence
  Description of Artificial Sequence: Synthetic oligonucleotide
uuaagcgacaacuuuggau

SEQ ID NO: 927793 - RNA, 19 nt, Artificial Sequence
  Description of Artificial Sequence: Synthetic oligonucleotide
ucucuuaguggcuuggucu

SEQ ID NO: 927794 - RNA, 19 nt, Artificial Sequence
  Description of Artificial Sequence: Synthetic oligonucleotide
auuuaccuggcuguguacc

SEQ ID NO: 927795 - RNA, 19 nt, Artificial Sequence
  Description of Artificial Sequence: Synthetic oligonucleotide
uugcuuaaucgcaacaacu

SEQ ID NO: 927796 - RNA, 19 nt, Artificial Sequence
  Description of Artificial Sequence: Synthetic oligonucleotide
aaugggguuccuauuacag

SEQ ID NO: 927797 - RNA, 19 nt, Artificial Sequence
  Description of Artificial Sequence: Synthetic oligonucleotide
uuaaucgcaacaacuugac

SEQ ID NO: 927798 - RNA, 19 nt, Artificial Sequence
  Description of Artificial Sequence: Synthetic oligonucleotide
ucuuaauauugacacgggu

SEQ ID NO: 927799 - RNA, 19 nt, Artificial Sequence
  Description of Artificial Sequence: Synthetic oligonucleotide
ggucucuuaauauugacac

SEQ ID NO: 927800 - RNA, 19 nt, Artificial Sequence
  Description of Artificial Sequence: Synthetic oligonucleotide
aaauggcccgcauuggaug

SEQ ID NO: 927801 - RNA, 19 nt, Artificial Sequence
  Description of Artificial Sequence: Synthetic oligonucleotide
uguaguucuucuaaacuua

SEQ ID NO: 927802 - RNA, 19 nt, Artificial Sequence
  Description of Artificial Sequence: Synthetic oligonucleotide
cuguuaugcucgaucaucg

SEQ ID NO: 927803 - RNA, 19 nt, Artificial Sequence
  Description of Artificial Sequence: Synthetic oligonucleotide
guuguaaccgauuucuuga

SEQ ID NO: 927804 - RNA, 19 nt, Artificial Sequence
  Description of Artificial Sequence: Synthetic oligonucleotide
ucuagcuuugggaauuuac

SEQ ID NO: 927805 - RNA, 19 nt, Artificial Sequence
  Description of Artificial Sequence: Synthetic oligonucleotide
uguaucuguuaacuggcca

SEQ ID NO: 927806 - RNA, 19 nt, Artificial Sequence
  Description of Artificial Sequence: Synthetic oligonucleotide
uuuuaacaaaauccgugaa

SEQ ID NO: 927807 - RNA, 19 nt, Artificial Sequence
  Description of Artificial Sequence: Synthetic oligonucleotide
gaaguaacugccauaguac

SEQ ID NO: 927808 - RNA, 19 nt, Artificial Sequence
  Description of Artificial Sequence: Synthetic oligonucleotide
aguaguccaugaaagacgg

SEQ ID NO: 927809 - RNA, 19 nt, Artificial Sequence
  Description of Artificial Sequence: Synthetic oligonucleotide
uaacacagugcuguuaugc

SEQ ID NO: 927810 - RNA, 19 nt, Artificial Sequence
  Description of Artificial Sequence: Synthetic oligonucleotide
guuccuauuacaguauugc

SEQ ID NO: 927811 - RNA, 19 nt, Artificial Sequence
  Description of Artificial Sequence: Synthetic oligonucleotide
ucgucuucaccauagugug

SEQ ID NO: 927812 - RNA, 19 nt, Artificial Sequence
  Description of Artificial Sequence: Synthetic oligonucleotide
guagaacguacauuuuggg

SEQ ID NO: 927813 - RNA, 19 nt, Artificial Sequence
  Description of Artificial Sequence: Synthetic oligonucleotide
ugaccagacuccuuaaugu

SEQ ID NO: 927814 - RNA, 19 nt, Artificial Sequence
  Description of Artificial Sequence: Synthetic oligonucleotide
agaaugggguuccuauuac

SEQ ID NO: 927815 - RNA, 19 nt, Artificial Sequence
  Description of Artificial Sequence: Synthetic oligonucleotide
aucgcaacaacuugaccag

SEQ ID NO: 927816 - RNA, 19 nt, Artificial Sequence
  Description of Artificial Sequence: Synthetic oligonucleotide
uuucuaaccgaagccagag

SEQ ID NO: 927817 - RNA, 19 nt, Artificial Sequence
  Description of Artificial Sequence: Synthetic oligonucleotide
aaccgauuucuugaauuac

SEQ ID NO: 927818 - RNA, 19 nt, Artificial Sequence
  Description of Artificial Sequence: Synthetic oligonucleotide
uuagcuuacucuugggcgu

SEQ ID NO: 927819 - RNA, 19 nt, Artificial Sequence
  Description of Artificial Sequence: Synthetic oligonucleotide
uuuucguggcucuuguucu

SEQ ID NO: 927820 - RNA, 19 nt, Artificial Sequence
  Description of Artificial Sequence: Synthetic oligonucleotide
cauaagacccuucuccaag

SEQ ID NO: 927821 - RNA, 19 nt, Artificial Sequence
  Description of Artificial Sequence: Synthetic oligonucleotide
cuuaaucgcaacaacuuga

SEQ ID NO: 927822 - RNA, 19 nt, Artificial Sequence
  Description of Artificial Sequence: Synthetic oligonucleotide
cuaaccgaagccagagugg

SEQ ID NO: 927823 - RNA, 19 nt, Artificial Sequence
  Description of Artificial Sequence: Synthetic oligonucleotide
ucagaaauucugcugucuc

SEQ ID NO: 927824 - RNA, 19 nt, Artificial Sequence
  Description of Artificial Sequence: Synthetic oligonucleotide
uuauccuuucuaaccgaag

SEQ ID NO: 927825 - RNA, 19 nt, Artificial Sequence
  Description of Artificial Sequence: Synthetic oligonucleotide
accgauuucuugaauuacc

SEQ ID NO: 927826 - RNA, 19 nt, Artificial Sequence
  Description of Artificial Sequence: Synthetic oligonucleotide
agugugcgaguccagcucg

SEQ ID NO: 927827 - RNA, 19 nt, Artificial Sequence
  Description of Artificial Sequence: Synthetic oligonucleotide
ugcuuaaucgcaacaacuu

SEQ ID NO: 927828 - RNA, 19 nt, Artificial Sequence
  Description of Artificial Sequence: Synthetic oligonucleotide
auugacacggguuucgcau

SEQ ID NO: 927829 - RNA, 19 nt, Artificial Sequence
  Description of Artificial Sequence: Synthetic oligonucleotide
uagagcuuuaauuuagauu

SEQ ID NO: 927830 - RNA, 19 nt, Artificial Sequence
  Description of Artificial Sequence: Synthetic oligonucleotide
uuuauccuuucuaaccgaa

SEQ ID NO: 927831 - RNA, 19 nt, Artificial Sequence
  Description of Artificial Sequence: Synthetic oligonucleotide
guggauuuuaggaugguug

SEQ ID NO: 927832 - RNA, 19 nt, Artificial Sequence
  Description of Artificial Sequence: Synthetic oligonucleotide
ucaguguugaggagaauau

SEQ ID NO: 927833 - RNA, 19 nt, Artificial Sequence
  Description of Artificial Sequence: Synthetic oligonucleotide
aaagucuagcuuugggaau

SEQ ID NO: 927834 - RNA, 19 nt, Artificial Sequence
  Description of Artificial Sequence: Synthetic oligonucleotide
aacgcaucuguaguucuuc

SEQ ID NO: 927835 - RNA, 19 nt, Artificial Sequence
  Description of Artificial Sequence: Synthetic oligonucleotide
ugacucgacaggcacuugc

SEQ ID NO: 927836 - RNA, 19 nt, Artificial Sequence
  Description of Artificial Sequence: Synthetic oligonucleotide
aucguacccacacucuccg

SEQ ID NO: 927837 - RNA, 19 nt, Artificial Sequence
  Description of Artificial Sequence: Synthetic oligonucleotide
acacagugcuguuaugcuc

SEQ ID NO: 927838 - RNA, 19 nt, Artificial Sequence
  Description of Artificial Sequence: Synthetic oligonucleotide
aauuuagauugguuugguu

SEQ ID NO: 927839 - RNA, 19 nt, Artificial Sequence
  Description of Artificial Sequence: Synthetic oligonucleotide
guuuucguggcucuuguuc

SEQ ID NO: 927840 - RNA, 19 nt, Artificial Sequence
  Description of Artificial Sequence: Synthetic oligonucleotide
uucuuugcguccauggcau

SEQ ID NO: 927841 - RNA, 19 nt, Artificial Sequence
  Description of Artificial Sequence: Synthetic oligonucleotide
ugaucaggucucuuaauau

SEQ ID NO: 927842 - RNA, 19 nt, Artificial Sequence
  Description of Artificial Sequence: Synthetic oligonucleotide
cuugcuuaaucgcaacaac

SEQ ID NO: 927843 - RNA, 19 nt, Artificial Sequence
  Description of Artificial Sequence: Synthetic oligonucleotide
cuuaucaaaguaguccaug

SEQ ID NO: 927844 - RNA, 19 nt, Artificial Sequence
  Description of Artificial Sequence: Synthetic oligonucleotide
ucuuguuucguaaccuaau

SEQ ID NO: 927845 - RNA, 19 nt, Artificial Sequence
  Description of Artificial Sequence: Synthetic oligonucleotide
acggguuucgcauucuuga

SEQ ID NO: 927846 - RNA, 19 nt, Artificial Sequence
  Description of Artificial Sequence: Synthetic oligonucleotide
ugauaaaaggaugcuguaa

SEQ ID NO: 927847 - RNA, 19 nt, Artificial Sequence
  Description of Artificial Sequence: Synthetic oligonucleotide
uugcguuuugccauuguau

SEQ ID NO: 927848 - RNA, 19 nt, Artificial Sequence
  Description of Artificial Sequence: Synthetic oligonucleotide
gaacagaggauagugugac

SEQ ID NO: 927849 - RNA, 19 nt, Artificial Sequence
  Description of Artificial Sequence: Synthetic oligonucleotide
guuucguaaccuaaugaug

SEQ ID NO: 927850 - RNA, 19 nt, Artificial Sequence
  Description of Artificial Sequence: Synthetic oligonucleotide
uaaucgcaacaacuugacc

SEQ ID NO: 927851 - RNA, 19 nt, Artificial Sequence
  Description of Artificial Sequence: Synthetic oligonucleotide
gaaaauggcccgcauugga

SEQ ID NO: 927852 - RNA, 19 nt, Artificial Sequence
  Description of Artificial Sequence: Synthetic oligonucleotide
auauugacacggguuucgc

SEQ ID NO: 927853 - RNA, 19 nt, Artificial Sequence
  Description of Artificial Sequence: Synthetic oligonucleotide
uaaccgauuucuugaauua

SEQ ID NO: 927854 - RNA, 19 nt, Artificial Sequence
  Description of Artificial Sequence: Synthetic oligonucleotide
uaaccuaaugaugucugac

SEQ ID NO: 927855 - RNA, 19 nt, Artificial Sequence
  Description of Artificial Sequence: Synthetic oligonucleotide
uuuaccuggcuguguacca

SEQ ID NO: 927856 - RNA, 19 nt, Artificial Sequence
  Description of Artificial Sequence: Synthetic oligonucleotide
uaaacgcaucuguaguucu

SEQ ID NO: 927857 - RNA, 19 nt, Artificial Sequence
  Description of Artificial Sequence: Synthetic oligonucleotide
gacauaaagcccuccagua

SEQ ID NO: 927858 - RNA, 19 nt, Artificial Sequence
  Description of Artificial Sequence: Synthetic oligonucleotide
uuugggaauuuaccuggcu

SEQ ID NO: 927859 - RNA, 19 nt, Artificial Sequence
  Description of Artificial Sequence: Synthetic oligonucleotide
guaacugccauaguacuuc

SEQ ID NO: 927860 - RNA, 19 nt, Artificial Sequence
  Description of Artificial Sequence: Synthetic oligonucleotide
uaacaaaauccgugaaguc

SEQ ID NO: 927861 - RNA, 19 nt, Artificial Sequence
  Description of Artificial Sequence: Synthetic oligonucleotide
aauccgugaagucgucaga

SEQ ID NO: 927862 - RNA, 19 nt, Artificial Sequence
  Description of Artificial Sequence: Synthetic oligonucleotide
guuaugcucgaucaucguc

SEQ ID NO: 927863 - RNA, 19 nt, Artificial Sequence
  Description of Artificial Sequence: Synthetic oligonucleotide
aucuguuaacuggccagcc

SEQ ID NO: 927864 - RNA, 19 nt, Artificial Sequence
  Description of Artificial Sequence: Synthetic oligonucleotide
caucguacccacacucucc

SEQ ID NO: 927865 - RNA, 19 nt, Artificial Sequence
  Description of Artificial Sequence: Synthetic oligonucleotide
auagugugcgaguccagcu

SEQ ID NO: 927866 - RNA, 19 nt, Artificial Sequence
  Description of Artificial Sequence: Synthetic oligonucleotide
uaucuguuaacuggccagc

SEQ ID NO: 927867 - RNA, 19 nt, Artificial Sequence
  Description of Artificial Sequence: Synthetic oligonucleotide
gguuaagcgacaacuuugg

SEQ ID NO: 927868 - RNA, 19 nt, Artificial Sequence
  Description of Artificial Sequence: Synthetic oligonucleotide
gaauuuaccuggcugugua

SEQ ID NO: 927869 - RNA, 19 nt, Artificial Sequence
  Description of Artificial Sequence: Synthetic oligonucleotide
gucugacucuaacacagug

SEQ ID NO: 927870 - RNA, 19 nt, Artificial Sequence
  Description of Artificial Sequence: Synthetic oligonucleotide
uaauuuagauugguuuggu

SEQ ID NO: 927871 - RNA, 19 nt, Artificial Sequence
  Description of Artificial Sequence: Synthetic oligonucleotide
gacucuaacacagugcugu

SEQ ID NO: 927872 - RNA, 19 nt, Artificial Sequence
  Description of Artificial Sequence: Synthetic oligonucleotide
aggcugcuuagucaaacug

SEQ ID NO: 927873 - RNA, 19 nt, Artificial Sequence
  Description of Artificial Sequence: Synthetic oligonucleotide
uuagucaaacugucuucac

SEQ ID NO: 927874 - RNA, 19 nt, Artificial Sequence
  Description of Artificial Sequence: Synthetic oligonucleotide
agaggauagugugacauaa

SEQ ID NO: 927875 - RNA, 19 nt, Artificial Sequence
  Description of Artificial Sequence: Synthetic oligonucleotide
uguuaacuggccagccacu

SEQ ID NO: 927876 - RNA, 19 nt, Artificial Sequence
  Description of Artificial Sequence: Synthetic oligonucleotide
uauugacacggguuucgca

SEQ ID NO: 927877 - RNA, 19 nt, Artificial Sequence
  Description of Artificial Sequence: Synthetic oligonucleotide
cauggggcgggacucacgc

SEQ ID NO: 927878 - RNA, 19 nt, Artificial Sequence
  Description of Artificial Sequence: Synthetic oligonucleotide
auuuuaggaugguugcaau

SEQ ID NO: 927879 - RNA, 19 nt, Artificial Sequence
  Description of Artificial Sequence: Synthetic oligonucleotide
gagcuuuaauuuagauugg

SEQ ID NO: 927880 - RNA, 19 nt, Artificial Sequence
  Description of Artificial Sequence: Synthetic oligonucleotide
cuguguauuuuccucauaa

SEQ ID NO: 927881 - RNA, 19 nt, Artificial Sequence
  Description of Artificial Sequence: Synthetic oligonucleotide
guugaggagaauauuccca

SEQ ID NO: 927882 - RNA, 19 nt, Artificial Sequence
  Description of Artificial Sequence: Synthetic oligonucleotide
uuaguggcuuggucucugg

SEQ ID NO: 927883 - RNA, 19 nt, Artificial Sequence
  Description of Artificial Sequence: Synthetic oligonucleotide
ucucuguucaggacucuuc

SEQ ID NO: 927884 - RNA, 19 nt, Artificial Sequence
  Description of Artificial Sequence: Synthetic oligonucleotide
aaaauccgugaagucguca

SEQ ID NO: 927885 - RNA, 19 nt, Artificial Sequence
  Description of Artificial Sequence: Synthetic oligonucleotide
ucguaaccuaaugaugucu

SEQ ID NO: 927886 - RNA, 19 nt, Artificial Sequence
  Description of Artificial Sequence: Synthetic oligonucleotide
uaugcucgaucaucgucug

SEQ ID NO: 927887 - RNA, 19 nt, Artificial Sequence
  Description of Artificial Sequence: Synthetic oligonucleotide
ugaagucgucagaccagag

SEQ ID NO: 927888 - RNA, 19 nt, Artificial Sequence
  Description of Artificial Sequence: Synthetic oligonucleotide
ugacguggcauuucuuuuc

SEQ ID NO: 927889 - RNA, 19 nt, Artificial Sequence
  Description of Artificial Sequence: Synthetic oligonucleotide
aagcccugcuuaucaaagu

SEQ ID NO: 927890 - RNA, 19 nt, Artificial Sequence
  Description of Artificial Sequence: Synthetic oligonucleotide
aucgucugggcuccuucac

SEQ ID NO: 927891 - RNA, 19 nt, Artificial Sequence
  Description of Artificial Sequence: Synthetic oligonucleotide
uguaaccgauuucuugaau

SEQ ID NO: 927892 - RNA, 19 nt, Artificial Sequence
  Description of Artificial Sequence: Synthetic oligonucleotide
aaaauggcccgcauuggau

SEQ ID NO: 927893 - RNA, 19 nt, Artificial Sequence
  Description of Artificial Sequence: Synthetic oligonucleotide
acacaguuguaaccgauuu

SEQ ID NO: 927894 - RNA, 19 nt, Artificial Sequence
  Description of Artificial Sequence: Synthetic oligonucleotide
uuacucuugggcguccggc

SEQ ID NO: 927895 - RNA, 19 nt, Artificial Sequence
  Description of Artificial Sequence: Synthetic oligonucleotide
cucuuaguggcuuggucuc

SEQ ID NO: 927896 - RNA, 19 nt, Artificial Sequence
  Description of Artificial Sequence: Synthetic oligonucleotide
cuuagucaaacugucuuca

SEQ ID NO: 927897 - RNA, 19 nt, Artificial Sequence
  Description of Artificial Sequence: Synthetic oligonucleotide
ucgacaggcacuugcuuaa

SEQ ID NO: 927898 - RNA, 19 nt, Artificial Sequence
  Description of Artificial Sequence: Synthetic oligonucleotide
cauagugugcgaguccagc

SEQ ID NO: 927899 - RNA, 19 nt, Artificial Sequence
  Description of Artificial Sequence: Synthetic oligonucleotide
cugaagaucugacucgaca

SEQ ID NO: 927900 - RNA, 19 nt, Artificial Sequence
  Description of Artificial Sequence: Synthetic oligonucleotide
gguuucgcauucuugauaa

SEQ ID NO: 927901 - RNA, 19 nt, Artificial Sequence
  Description of Artificial Sequence: Synthetic oligonucleotide
gaaugggguuccuauuaca

SEQ ID NO: 927902 - RNA, 19 nt, Artificial Sequence
  Description of Artificial Sequence: Synthetic oligonucleotide
gcuuaaucgcaacaacuug

SEQ ID NO: 927903 - RNA, 19 nt, Artificial Sequence
  Description of Artificial Sequence: Synthetic oligonucleotide
aagucuagcuuugggaauu

SEQ ID NO: 927904 - RNA, 19 nt, Artificial Sequence
  Description of Artificial Sequence: Synthetic oligonucleotide
auugcguuuugccauugua

SEQ ID NO: 927905 - RNA, 19 nt, Artificial Sequence
  Description of Artificial Sequence: Synthetic oligonucleotide
cacauaggggcugucacac

SEQ ID NO: 927906 - RNA, 19 nt, Artificial Sequence
  Description of Artificial Sequence: Synthetic oligonucleotide
uucguaaccuaaugauguc

SEQ ID NO: 927907 - RNA, 19 nt, Artificial Sequence
  Description of Artificial Sequence: Synthetic oligonucleotide
acuugcuuaaucgcaacaa

SEQ ID NO: 927908 - RNA, 19 nt, Artificial Sequence
  Description of Artificial Sequence: Synthetic oligonucleotide
cuuugcguccauggcaucc

SEQ ID NO: 927909 - RNA, 19 nt, Artificial Sequence
  Description of Artificial Sequence: Synthetic oligonucleotide
uuguaaccgauuucuugaa

SEQ ID NO: 927910 - RNA, 19 nt, Artificial Sequence
  Description of Artificial Sequence: Synthetic oligonucleotide
uguuaugcucgaucaucgu

SEQ ID NO: 927911 - RNA, 19 nt, Artificial Sequence
  Description of Artificial Sequence: Synthetic oligonucleotide
uagugugcgaguccagcuc

SEQ ID NO: 927912 - RNA, 19 nt, Artificial Sequence
  Description of Artificial Sequence: Synthetic oligonucleotide
ucaucgugcugguggcccg

SEQ ID NO: 927913 - RNA, 19 nt, Artificial Sequence
  Description of Artificial Sequence: Synthetic oligonucleotide
ugacucuaacacagugcug

SEQ ID NO: 927914 - RNA, 19 nt, Artificial Sequence
  Description of Artificial Sequence: Synthetic oligonucleotide
gcagccggcagaaagagcc

SEQ ID NO: 927915 - RNA, 19 nt, Artificial Sequence
  Description of Artificial Sequence: Synthetic oligonucleotide
agcuuuaauuuagauuggu

SEQ ID NO: 927916 - RNA, 19 nt, Artificial Sequence
  Description of Artificial Sequence: Synthetic oligonucleotide
gugcuguuaugcucgauca

SEQ ID NO: 927917 - RNA, 19 nt, Artificial Sequence
  Description of Artificial Sequence: Synthetic oligonucleotide
ugugcgguuaagcgacaac

SEQ ID NO: 927918 - RNA, 19 nt, Artificial Sequence
  Description of Artificial Sequence: Synthetic oligonucleotide
ucauccgaauuuuccuccu

SEQ ID NO: 927919 - RNA, 19 nt, Artificial Sequence
  Description of Artificial Sequence: Synthetic oligonucleotide
uucuaaccgaagccagagu

SEQ ID NO: 927920 - RNA, 19 nt, Artificial Sequence
  Description of Artificial Sequence: Synthetic oligonucleotide
cugacucuaacacagugcu

SEQ ID NO: 927921 - RNA, 19 nt, Artificial Sequence
  Description of Artificial Sequence: Synthetic oligonucleotide
ugcgguuaagcgacaacuu

SEQ ID NO: 927922 - RNA, 19 nt, Artificial Sequence
  Description of Artificial Sequence: Synthetic oligonucleotide
aacugccauaguacuucac

SEQ ID NO: 927923 - RNA, 19 nt, Artificial Sequence
  Description of Artificial Sequence: Synthetic oligonucleotide
uagcagccggcagaaagag

SEQ ID NO: 927924 - RNA, 19 nt, Artificial Sequence
  Description of Artificial Sequence: Synthetic oligonucleotide
aguauugcguuuugccauu

SEQ ID NO: 927925 - RNA, 19 nt, Artificial Sequence
  Description of Artificial Sequence: Synthetic oligonucleotide
acaguuuucguggcucuug

SEQ ID NO: 927926 - RNA, 19 nt, Artificial Sequence
  Description of Artificial Sequence: Synthetic oligonucleotide
aguccaugaaagacggucu

SEQ ID NO: 927927 - RNA, 19 nt, Artificial Sequence
  Description of Artificial Sequence: Synthetic oligonucleotide
uccuucacucaucgugcug

SEQ ID NO: 927928 - RNA, 19 nt, Artificial Sequence
  Description of Artificial Sequence: Synthetic oligonucleotide
guugcuggcguagcagccg

SEQ ID NO: 927929 - RNA, 19 nt, Artificial Sequence
  Description of Artificial Sequence: Synthetic oligonucleotide
uuugcguccauggcaucca

SEQ ID NO: 927930 - RNA, 19 nt, Artificial Sequence
  Description of Artificial Sequence: Synthetic oligonucleotide
aagcgacaacuuuggauuu

SEQ ID NO: 927931 - RNA, 19 nt, Artificial Sequence
  Description of Artificial Sequence: Synthetic oligonucleotide
cagacuccuuaauguauug

SEQ ID NO: 927932 - RNA, 19 nt, Artificial Sequence
  Description of Artificial Sequence: Synthetic oligonucleotide
guaaccgauuucuugaauu

SEQ ID NO: 927933 - RNA, 19 nt, Artificial Sequence
  Description of Artificial Sequence: Synthetic oligonucleotide
ucugacucgacaggcacuu

SEQ ID NO: 927934 - RNA, 19 nt, Artificial Sequence
  Description of Artificial Sequence: Synthetic oligonucleotide
cuuucuaaccgaagccaga

SEQ ID NO: 927935 - RNA, 19 nt, Artificial Sequence
  Description of Artificial Sequence: Synthetic oligonucleotide
ugacacggguuucgcauuc

SEQ ID NO: 927936 - RNA, 19 nt, Artificial Sequence
  Description of Artificial Sequence: Synthetic oligonucleotide
ucgucugggcuccuucacu

SEQ ID NO: 927937 - RNA, 19 nt, Artificial Sequence
  Description of Artificial Sequence: Synthetic oligonucleotide
ccuuucuaaccgaagccag

SEQ ID NO: 927938 - RNA, 19 nt, Artificial Sequence
  Description of Artificial Sequence: Synthetic oligonucleotide
caguacugugcgguuaagc

SEQ ID NO: 927939 - RNA, 19 nt, Artificial Sequence
  Description of Artificial Sequence: Synthetic oligonucleotide
agucgucagaccagaguuc

SEQ ID NO: 927940 - RNA, 19 nt, Artificial Sequence
  Description of Artificial Sequence: Synthetic oligonucleotide
cacggguuucgcauucuug

SEQ ID NO: 927941 - RNA, 19 nt, Artificial Sequence
  Description of Artificial Sequence: Synthetic oligonucleotide
gaucaggucucuuaauauu

SEQ ID NO: 927942 - RNA, 19 nt, Artificial Sequence
  Description of Artificial Sequence: Synthetic oligonucleotide
agcgacaacuuuggauuuc

SEQ ID NO: 927943 - RNA, 19 nt, Artificial Sequence
  Description of Artificial Sequence: Synthetic oligonucleotide
cuggaagcccugcuuauca

SEQ ID NO: 927944 - RNA, 19 nt, Artificial Sequence
  Description of Artificial Sequence: Synthetic oligonucleotide
gggaaucaugaaaauggcc

SEQ ID NO: 927945 - RNA, 19 nt, Artificial Sequence
  Description of Artificial Sequence: Synthetic oligonucleotide
gaccagacuccuuaaugua

SEQ ID NO: 927946 - RNA, 19 nt, Artificial Sequence
  Description of Artificial Sequence: Synthetic oligonucleotide
ugcuguuaugcucgaucau

SEQ ID NO: 927947 - RNA, 19 nt, Artificial Sequence
  Description of Artificial Sequence: Synthetic oligonucleotide
aaccgaagccagaguggac

SEQ ID NO: 927948 - RNA, 19 nt, Artificial Sequence
  Description of Artificial Sequence: Synthetic oligonucleotide
gaacguacauuuuggggau

SEQ ID NO: 927949 - RNA, 19 nt, Artificial Sequence
  Description of Artificial Sequence: Synthetic oligonucleotide
agcgccgcaguacuccaug

SEQ ID NO: 927950 - RNA, 19 nt, Artificial Sequence
  Description of Artificial Sequence: Synthetic oligonucleotide
cucacgcacgcucugauua

SEQ ID NO: 927951 - RNA, 19 nt, Artificial Sequence
  Description of Artificial Sequence: Synthetic oligonucleotide
ucgucagaccagaguucag

SEQ ID NO: 927952 - RNA, 19 nt, Artificial Sequence
  Description of Artificial Sequence: Synthetic oligonucleotide
cugguggcccgcaucguac

SEQ ID NO: 927953 - RNA, 19 nt, Artificial Sequence
  Description of Artificial Sequence: Synthetic oligonucleotide
ucacgcacgcucugauuac

SEQ ID NO: 927954 - RNA, 19 nt, Artificial Sequence
  Description of Artificial Sequence: Synthetic oligonucleotide
ugcaaacuuguagaacgua

SEQ ID NO: 927955 - RNA, 19 nt, Artificial Sequence
  Description of Artificial Sequence: Synthetic oligonucleotide
aggacauuggucagaaauu

SEQ ID NO: 927956 - RNA, 19 nt, Artificial Sequence
  Description of Artificial Sequence: Synthetic oligonucleotide
gucgucagaccagaguuca

SEQ ID NO: 927957 - RNA, 19 nt, Artificial Sequence
  Description of Artificial Sequence: Synthetic oligonucleotide
gcagaaagagcccauuucu

SEQ ID NO: 927958 - RNA, 19 nt, Artificial Sequence
  Description of Artificial Sequence: Synthetic oligonucleotide
guuaagcgacaacuuugga

SEQ ID NO: 927959 - RNA, 19 nt, Artificial Sequence
  Description of Artificial Sequence: Synthetic oligonucleotide
uugcguccauggcauccag

SEQ ID NO: 927960 - RNA, 19 nt, Artificial Sequence
  Description of Artificial Sequence: Synthetic oligonucleotide
cguaaccuaaugaugucug

SEQ ID NO: 927961 - RNA, 19 nt, Artificial Sequence
  Description of Artificial Sequence: Synthetic oligonucleotide
acuguaucucuggugcagu

SEQ ID NO: 927962 - RNA, 19 nt, Artificial Sequence
  Description of Artificial Sequence: Synthetic oligonucleotide
augcucgaucaucgucugg

SEQ ID NO: 927963 - RNA, 19 nt, Artificial Sequence
  Description of Artificial Sequence: Synthetic oligonucleotide
gguuccuauuacaguauug

SEQ ID NO: 927964 - RNA, 19 nt, Artificial Sequence
  Description of Artificial Sequence: Synthetic oligonucleotide
gcuguuaugcucgaucauc

SEQ ID NO: 927965 - RNA, 19 nt, Artificial Sequence
  Description of Artificial Sequence: Synthetic oligonucleotide
gccauaguacuucaccaca

SEQ ID NO: 927966 - RNA, 19 nt, Artificial Sequence
  Description of Artificial Sequence: Synthetic oligonucleotide
aguaacugccauaguacuu

SEQ ID NO: 927967 - RNA, 19 nt, Artificial Sequence
  Description of Artificial Sequence: Synthetic oligonucleotide
agcuuacucuugggcgucc

SEQ ID NO: 927968 - RNA, 19 nt, Artificial Sequence
  Description of Artificial Sequence: Synthetic oligonucleotide
aggcacuugcuuaaucgca

SEQ ID NO: 927969 - RNA, 19 nt, Artificial Sequence
  Description of Artificial Sequence: Synthetic oligonucleotide
caguauugcguuuugccau

SEQ ID NO: 927970 - RNA, 19 nt, Artificial Sequence
  Description of Artificial Sequence: Synthetic oligonucleotide
gucugacacggagccagcg

SEQ ID NO: 927971 - RNA, 19 nt, Artificial Sequence
  Description of Artificial Sequence: Synthetic oligonucleotide
uugggcguccggcggcugc

SEQ ID NO: 927972 - RNA, 19 nt, Artificial Sequence
  Description of Artificial Sequence: Synthetic oligonucleotide
acgcucugauuacaguuuu

SEQ ID NO: 927973 - RNA, 19 nt, Artificial Sequence
  Description of Artificial Sequence: Synthetic oligonucleotide
agagcccauuucuauuguu

SEQ ID NO: 927974 - RNA, 19 nt, Artificial Sequence
  Description of Artificial Sequence: Synthetic oligonucleotide
cgguuaagcgacaacuuug

SEQ ID NO: 927975 - RNA, 19 nt, Artificial Sequence
  Description of Artificial Sequence: Synthetic oligonucleotide
uaaagcccuccaguacugu

SEQ ID NO: 927976 - RNA, 19 nt, Artificial Sequence
  Description of Artificial Sequence: Synthetic oligonucleotide
auaguuccguccucuucuu

SEQ ID NO: 927977 - RNA, 19 nt, Artificial Sequence
  Description of Artificial Sequence: Synthetic oligonucleotide
cucuugggcguccggcggc

SEQ ID NO: 927978 - RNA, 19 nt, Artificial Sequence
  Description of Artificial Sequence: Synthetic oligonucleotide
ggaacagaggauaguguga

SEQ ID NO: 927979 - RNA, 19 nt, Artificial Sequence
  Description of Artificial Sequence: Synthetic oligonucleotide
cauccgaauuuuccuccuc

SEQ ID NO: 927980 - RNA, 19 nt, Artificial Sequence
  Description of Artificial Sequence: Synthetic oligonucleotide
ggaugggcugccucuuugc

SEQ ID NO: 927981 - RNA, 19 nt, Artificial Sequence
  Description of Artificial Sequence: Synthetic oligonucleotide
uuaccuggcuguguaccau

SEQ ID NO: 927982 - RNA, 19 nt, Artificial Sequence
  Description of Artificial Sequence: Synthetic oligonucleotide
gguuugguugcuggcguag

SEQ ID NO: 927983 - RNA, 19 nt, Artificial Sequence
  Description of Artificial Sequence: Synthetic oligonucleotide
gugcgguuaagcgacaacu

SEQ ID NO: 927984 - RNA, 19 nt, Artificial Sequence
  Description of Artificial Sequence: Synthetic oligonucleotide
gcgacaacuuuggauuucc

SEQ ID NO: 927985 - RNA, 19 nt, Artificial Sequence
  Description of Artificial Sequence: Synthetic oligonucleotide
gggaauuuaccuggcugug

SEQ ID NO: 927986 - RNA, 19 nt, Artificial Sequence
  Description of Artificial Sequence: Synthetic oligonucleotide
aguuuucguggcucuuguu

SEQ ID NO: 927987 - RNA, 19 nt, Artificial Sequence
  Description of Artificial Sequence: Synthetic oligonucleotide
acguacauuuuggggauua

SEQ ID NO: 927988 - RNA, 19 nt, Artificial Sequence
  Description of Artificial Sequence: Synthetic oligonucleotide
caucgucugggcuccuuca

SEQ ID NO: 927989 - RNA, 19 nt, Artificial Sequence
  Description of Artificial Sequence: Synthetic oligonucleotide
ucgcaacaacuugaccaga

SEQ ID NO: 927990 - RNA, 19 nt, Artificial Sequence
  Description of Artificial Sequence: Synthetic oligonucleotide
uagcuuacucuugggcguc

SEQ ID NO: 927991 - RNA, 19 nt, Artificial Sequence
  Description of Artificial Sequence: Synthetic oligonucleotide
gccgcaguacuccaugaca

SEQ ID NO: 927992 - RNA, 19 nt, Artificial Sequence
  Description of Artificial Sequence: Synthetic oligonucleotide
gaggauagugugacauaaa

SEQ ID NO: 927993 - RNA, 19 nt, Artificial Sequence
  Description of Artificial Sequence: Synthetic oligonucleotide
gcaucguacccacacucuc

SEQ ID NO: 927994 - RNA, 19 nt, Artificial Sequence
  Description of Artificial Sequence: Synthetic oligonucleotide
ucuuugcguccauggcauc

SEQ ID NO: 927995 - RNA, 19 nt, Artificial Sequence
  Description of Artificial Sequence: Synthetic oligonucleotide
ucguacccacacucuccga

SEQ ID NO: 927996 - RNA, 19 nt, Artificial Sequence
  Description of Artificial Sequence: Synthetic oligonucleotide
acgcacgcucugauuacag

SEQ ID NO: 927997 - RNA, 19 nt, Artificial Sequence
  Description of Artificial Sequence: Synthetic oligonucleotide
gcuuggucucuggucaugc

SEQ ID NO: 927998 - RNA, 19 nt, Artificial Sequence
  Description of Artificial Sequence: Synthetic oligonucleotide
aacguacauuuuggggauu

SEQ ID NO: 927999 - RNA, 19 nt, Artificial Sequence
  Description of Artificial Sequence: Synthetic oligonucleotide
ccgugaagucgucagacca

SEQ ID NO: 928000 - RNA, 19 nt, Artificial Sequence
  Description of Artificial Sequence: Synthetic oligonucleotide
cgcaacaacuugaccagac

SEQ ID NO: 928001 - RNA, 19 nt, Artificial Sequence
  Description of Artificial Sequence: Synthetic oligonucleotide
acauggggcgggacucacg

SEQ ID NO: 928002 - RNA, 19 nt, Artificial Sequence
  Description of Artificial Sequence: Synthetic oligonucleotide
ugugcgaguccagcucguc

SEQ ID NO: 928003 - RNA, 19 nt, Artificial Sequence
  Description of Artificial Sequence: Synthetic oligonucleotide
cgauuucuugaauuaccuc

SEQ ID NO: 928004 - RNA, 19 nt, Artificial Sequence
  Description of Artificial Sequence: Synthetic oligonucleotide
ucuugggcguccggcggcu

SEQ ID NO: 928005 - RNA, 19 nt, Artificial Sequence
  Description of Artificial Sequence: Synthetic oligonucleotide
gcccgcaucguacccacac

SEQ ID NO: 928006 - RNA, 19 nt, Artificial Sequence
  Description of Artificial Sequence: Synthetic oligonucleotide
gacucgacaggcacuugcu

SEQ ID NO: 928007 - RNA, 19 nt, Artificial Sequence
  Description of Artificial Sequence: Synthetic oligonucleotide
ggguuucgcauucuugaua

SEQ ID NO: 928008 - RNA, 19 nt, Artificial Sequence
  Description of Artificial Sequence: Synthetic oligonucleotide
ggcacuugcuuaaucgcaa

SEQ ID NO: 928009 - RNA, 19 nt, Artificial Sequence
  Description of Artificial Sequence: Synthetic oligonucleotide
ucgggugacguggcauuuc

SEQ ID NO: 928010 - RNA, 19 nt, Artificial Sequence
  Description of Artificial Sequence: Synthetic oligonucleotide
gugacguggcauuucuuuu

SEQ ID NO: 928011 - RNA, 19 nt, Artificial Sequence
  Description of Artificial Sequence: Synthetic oligonucleotide
caucgugcugguggcccgc

SEQ ID NO: 928012 - RNA, 19 nt, Artificial Sequence
  Description of Artificial Sequence: Synthetic oligonucleotide
uucgggugacguggcauuu

SEQ ID NO: 928013 - RNA, 19 nt, Artificial Sequence
  Description of Artificial Sequence: Synthetic oligonucleotide
ccgcaucguacccacacuc

SEQ ID NO: 928014 - RNA, 19 nt, Artificial Sequence
  Description of Artificial Sequence: Synthetic oligonucleotide
uggcggguuugugggaauc

SEQ ID NO: 928015 - RNA, 19 nt, Artificial Sequence
  Description of Artificial Sequence: Synthetic oligonucleotide
cugcuuagucaaacugucu

SEQ ID NO: 928016 - RNA, 19 nt, Artificial Sequence
  Description of Artificial Sequence: Synthetic oligonucleotide
ccgauuucuugaauuaccu

SEQ ID NO: 928017 - RNA, 19 nt, Artificial Sequence
  Description of Artificial Sequence: Synthetic oligonucleotide
cacgcucugauuacaguuu

SEQ ID NO: 928018 - RNA, 19 nt, Artificial Sequence
  Description of Artificial Sequence: Synthetic oligonucleotide
uugugacauggggcgggac

SEQ ID NO: 928019 - RNA, 19 nt, Artificial Sequence
  Description of Artificial Sequence: Synthetic oligonucleotide
ggcugcuuagucaaacugu

SEQ ID NO: 928020 - RNA, 19 nt, Artificial Sequence
  Description of Artificial Sequence: Synthetic oligonucleotide
auggggcgggacucacgca

SEQ ID NO: 928021 - RNA, 19 nt, Artificial Sequence
  Description of Artificial Sequence: Synthetic oligonucleotide
cuugaccagacuccuuaau

SEQ ID NO: 928022 - RNA, 19 nt, Artificial Sequence
  Description of Artificial Sequence: Synthetic oligonucleotide
ccgcaguacuccaugacaa

SEQ ID NO: 928023 - RNA, 19 nt, Artificial Sequence
  Description of Artificial Sequence: Synthetic oligonucleotide
gcgggacucacgcacgcuc

SEQ ID NO: 928024 - RNA, 19 nt, Artificial Sequence
  Description of Artificial Sequence: Synthetic oligonucleotide
ccauagugugcgaguccag

SEQ ID NO: 928025 - RNA, 19 nt, Artificial Sequence
  Description of Artificial Sequence: Synthetic oligonucleotide
gcugcauuauggagauuuc

SEQ ID NO: 928026 - RNA, 19 nt, Artificial Sequence
  Description of Artificial Sequence: Synthetic oligonucleotide
cgaucaucgucugggcucc

SEQ ID NO: 928027 - RNA, 19 nt, Artificial Sequence
  Description of Artificial Sequence: Synthetic oligonucleotide
cugaauguugguggcgggu

SEQ ID NO: 928028 - RNA, 19 nt, Artificial Sequence
  Description of Artificial Sequence: Synthetic oligonucleotide
uggcccgcauuggauggau

SEQ ID NO: 928029 - RNA, 19 nt, Artificial Sequence
  Description of Artificial Sequence: Synthetic oligonucleotide
cgucuucaccauagugugc

SEQ ID NO: 928030 - RNA, 19 nt, Artificial Sequence
  Description of Artificial Sequence: Synthetic oligonucleotide
cacgcacgcucugauuaca

SEQ ID NO: 928031 - RNA, 19 nt, Artificial Sequence
  Description of Artificial Sequence: Synthetic oligonucleotide
ggaauuuaccuggcugugu

SEQ ID NO: 928032 - RNA, 19 nt, Artificial Sequence
  Description of Artificial Sequence: Synthetic oligonucleotide
gcccgcauuggauggaugu

SEQ ID NO: 928033 - RNA, 19 nt, Artificial Sequence
  Description of Artificial Sequence: Synthetic oligonucleotide
ccuuaauguauugcuuuaa

SEQ ID NO: 928034 - RNA, 19 nt, Artificial Sequence
  Description of Artificial Sequence: Synthetic oligonucleotide
ccauaagacccuucuccaa

SEQ ID NO: 928035 - RNA, 19 nt, Artificial Sequence
  Description of Artificial Sequence: Synthetic oligonucleotide
auggcccgcauuggaugga

SEQ ID NO: 928036 - RNA, 19 nt, Artificial Sequence
  Description of Artificial Sequence: Synthetic oligonucleotide
cuucgggugacguggcauu

SEQ ID NO: 928037 - RNA, 19 nt, Artificial Sequence
  Description of Artificial Sequence: Synthetic oligonucleotide
cugacucgacaggcacuug

SEQ ID NO: 928038 - RNA, 19 nt, Artificial Sequence
  Description of Artificial Sequence: Synthetic oligonucleotide
ccgcauuggauggauguca

SEQ ID NO: 928039 - RNA, 19 nt, Artificial Sequence
  Description of Artificial Sequence: Synthetic oligonucleotide
acugugcgguuaagcgaca

SEQ ID NO: 928040 - RNA, 19 nt, Artificial Sequence
  Description of Artificial Sequence: Synthetic oligonucleotide
gcgguuaagcgacaacuuu

SEQ ID NO: 928041 - RNA, 19 nt, Artificial Sequence
  Description of Artificial Sequence: Synthetic oligonucleotide
ccccaggucugacucuaac

SEQ ID NO: 928042 - RNA, 19 nt, Artificial Sequence
  Description of Artificial Sequence: Synthetic oligonucleotide
ggcggguuugugggaauca

SEQ ID NO: 928043 - RNA, 19 nt, Artificial Sequence
  Description of Artificial Sequence: Synthetic oligonucleotide
gacacggguuucgcauucu

SEQ ID NO: 928044 - RNA, 19 nt, Artificial Sequence
  Description of Artificial Sequence: Synthetic oligonucleotide
cuguaucucuggugcaguu

SEQ ID NO: 928045 - RNA, 19 nt, Artificial Sequence
  Description of Artificial Sequence: Synthetic oligonucleotide
gcuggcguagcagccggca

SEQ ID NO: 928046 - RNA, 19 nt, Artificial Sequence
  Description of Artificial Sequence: Synthetic oligonucleotide
cugugcgguuaagcgacaa

SEQ ID NO: 928047 - RNA, 19 nt, Artificial Sequence
  Description of Artificial Sequence: Synthetic oligonucleotide
gucuagcuuugggaauuua

SEQ ID NO: 928048 - RNA, 19 nt, Artificial Sequence
  Description of Artificial Sequence: Synthetic oligonucleotide
ggacucacgcacgcucuga

SEQ ID NO: 928049 - RNA, 19 nt, Artificial Sequence
  Description of Artificial Sequence: Synthetic oligonucleotide
ccagacuccuuaauguauu

SEQ ID NO: 928050 - RNA, 19 nt, Artificial Sequence
  Description of Artificial Sequence: Synthetic oligonucleotide
cccgcauuggauggauguc

SEQ ID NO: 928051 - RNA, 19 nt, Artificial Sequence
  Description of Artificial Sequence: Synthetic oligonucleotide
ggguuccuauuacaguauu

SEQ ID NO: 928052 - RNA, 19 nt, Artificial Sequence
  Description of Artificial Sequence: Synthetic oligonucleotide
guaguccaugaaagacggu

SEQ ID NO: 928053 - RNA, 19 nt, Artificial Sequence
  Description of Artificial Sequence: Synthetic oligonucleotide
ccaguacugugcgguuaag

SEQ ID NO: 928054 - RNA, 19 nt, Artificial Sequence
  Description of Artificial Sequence: Synthetic oligonucleotide
cuugggcguccggcggcug

SEQ ID NO: 928055 - RNA, 19 nt, Artificial Sequence
  Description of Artificial Sequence: Synthetic oligonucleotide
caugggguccagugcuuuu

SEQ ID NO: 928056 - RNA, 19 nt, Artificial Sequence
  Description of Artificial Sequence: Synthetic oligonucleotide
gcgccgcaguacuccauga

SEQ ID NO: 928057 - RNA, 19 nt, Artificial Sequence
  Description of Artificial Sequence: Synthetic oligonucleotide
cucucuguucaggacucuu

SEQ ID NO: 928058 - RNA, 19 nt, Artificial Sequence
  Description of Artificial Sequence: Synthetic oligonucleotide
gcucgucuucauccgaauu

SEQ ID NO: 928059 - RNA, 19 nt, Artificial Sequence
  Description of Artificial Sequence: Synthetic oligonucleotide
gggguuccuauuacaguau

SEQ ID NO: 928060 - RNA, 19 nt, Artificial Sequence
  Description of Artificial Sequence: Synthetic oligonucleotide
ccaucucuauggcagugau

SEQ ID NO: 928061 - RNA, 19 nt, Artificial Sequence
  Description of Artificial Sequence: Synthetic oligonucleotide
ggcccgcauuggauggaug

SEQ ID NO: 928062 - RNA, 19 nt, Artificial Sequence
  Description of Artificial Sequence: Synthetic oligonucleotide
guggcggguuugugggaau

SEQ ID NO: 928063 - RNA, 19 nt, Artificial Sequence
  Description of Artificial Sequence: Synthetic oligonucleotide
cgaacucgucuucaccaua

SEQ ID NO: 928064 - RNA, 19 nt, Artificial Sequence
  Description of Artificial Sequence: Synthetic oligonucleotide
gaucaucgucugggcuccu

SEQ ID NO: 928065 - RNA, 19 nt, Artificial Sequence
  Description of Artificial Sequence: Synthetic oligonucleotide
cgcaucguacccacacucu

SEQ ID NO: 928066 - RNA, 19 nt, Artificial Sequence
  Description of Artificial Sequence: Synthetic oligonucleotide
ccgaacucgucuucaccau

SEQ ID NO: 928067 - RNA, 19 nt, Artificial Sequence
  Description of Artificial Sequence: Synthetic oligonucleotide
cgggugacguggcauuucu

SEQ ID NO: 928068 - RNA, 19 nt, Artificial Sequence
  Description of Artificial Sequence: Synthetic oligonucleotide
cccgcaucguacccacacu

SEQ ID NO: 928069 - RNA, 19 nt, Artificial Sequence
  Description of Artificial Sequence: Synthetic oligonucleotide
cggguuucgcauucuugau

SEQ ID NO: 928070 - RNA, 19 nt, Artificial Sequence
  Description of Artificial Sequence: Synthetic oligonucleotide
ggcgggacucacgcacgcu

SEQ ID NO: 928071 - RNA, 19 nt, Artificial Sequence
  Description of Artificial Sequence: Synthetic oligonucleotide
gccggcagaaagagcccau

SEQ ID NO: 928072 - RNA, 19 nt, Artificial Sequence
  Description of Artificial Sequence: Synthetic oligonucleotide
gcguagcagccggcagaaa

SEQ ID NO: 928073 - RNA, 19 nt, Artificial Sequence
  Description of Artificial Sequence: Synthetic oligonucleotide
auaagcaccacauugucac

SEQ ID NO: 928074 - RNA, 19 nt, Artificial Sequence
  Description of Artificial Sequence: Synthetic oligonucleotide
uugucguucacucaugcgg

SEQ ID NO: 928075 - RNA, 19 nt, Artificial Sequence
  Description of Artificial Sequence: Synthetic oligonucleotide
uguccgauagcacauuucg

SEQ ID NO: 928076 - RNA, 19 nt, Artificial Sequence
  Description of Artificial Sequence: Synthetic oligonucleotide
uuuagaaagagcauuuuau

SEQ ID NO: 928077 - RNA, 19 nt, Artificial Sequence
  Description of Artificial Sequence: Synthetic oligonucleotide
aaggacaugucgcucaccg

SEQ ID NO: 928078 - RNA, 19 nt, Artificial Sequence
  Description of Artificial Sequence: Synthetic oligonucleotide
cuaugaaucgccauucucc

SEQ ID NO: 928079 - RNA, 19 nt, Artificial Sequence
  Description of Artificial Sequence: Synthetic oligonucleotide
guuuacugggcauauaugc

SEQ ID NO: 928080 - RNA, 19 nt, Artificial Sequence
  Description of Artificial Sequence: Synthetic oligonucleotide
cuuucgaaaggacaugucg

SEQ ID NO: 928081 - RNA, 19 nt, Artificial Sequence
  Description of Artificial Sequence: Synthetic oligonucleotide
uuuucugggucccacaaug

SEQ ID NO: 928082 - RNA, 19 nt, Artificial Sequence
  Description of Artificial Sequence: Synthetic oligonucleotide
uuucgaaaggacaugucgc

SEQ ID NO: 928083 - RNA, 19 nt, Artificial Sequence
  Description of Artificial Sequence: Synthetic oligonucleotide
aagaacuugggaguuugcc

SEQ ID NO: 928084 - RNA, 19 nt, Artificial Sequence
  Description of Artificial Sequence: Synthetic oligonucleotide
ucaaaguaccggaugcugg

SEQ ID NO: 928085 - RNA, 19 nt, Artificial Sequence
  Description of Artificial Sequence: Synthetic oligonucleotide
uccgauagcacauuucgcc

SEQ ID NO: 928086 - RNA, 19 nt, Artificial Sequence
  Description of Artificial Sequence: Synthetic oligonucleotide
uaaagaucauccuggaaga

SEQ ID NO: 928087 - RNA, 19 nt, Artificial Sequence
  Description of Artificial Sequence: Synthetic oligonucleotide
gaauccaauuccuguaggg

SEQ ID NO: 928088 - RNA, 19 nt, Artificial Sequence
  Description of Artificial Sequence: Synthetic oligonucleotide
cacugaucauucuugaccg

SEQ ID NO: 928089 - RNA, 19 nt, Artificial Sequence
  Description of Artificial Sequence: Synthetic oligonucleotide
agaagauggucccuuaaag

SEQ ID NO: 928090 - RNA, 19 nt, Artificial Sequence
  Description of Artificial Sequence: Synthetic oligonucleotide
acagacauagaccacgcug

SEQ ID NO: 928091 - RNA, 19 nt, Artificial Sequence
  Description of Artificial Sequence: Synthetic oligonucleotide
ugaaucgccauucuccaug

SEQ ID NO: 928092 - RNA, 19 nt, Artificial Sequence
  Description of Artificial Sequence: Synthetic oligonucleotide
cucuaggcggcuaauacgg

SEQ ID NO: 928093 - RNA, 19 nt, Artificial Sequence
  Description of Artificial Sequence: Synthetic oligonucleotide
gaucccguuguuuacuggg

SEQ ID NO: 928094 - RNA, 19 nt, Artificial Sequence
  Description of Artificial Sequence: Synthetic oligonucleotide
acuauggguucacacuugc

SEQ ID NO: 928095 - RNA, 19 nt, Artificial Sequence
  Description of Artificial Sequence: Synthetic oligonucleotide
uauagaacugucucugcug

SEQ ID NO: 928096 - RNA, 19 nt, Artificial Sequence
  Description of Artificial Sequence: Synthetic oligonucleotide
aagaggucggacuuucuug

SEQ ID NO: 928097 - RNA, 19 nt, Artificial Sequence
  Description of Artificial Sequence: Synthetic oligonucleotide
ggugaauguauucaggaag

SEQ ID NO: 928098 - RNA, 19 nt, Artificial Sequence
  Description of Artificial Sequence: Synthetic oligonucleotide
auaugcuucccguagugag

SEQ ID NO: 928099 - RNA, 19 nt, Artificial Sequence
  Description of Artificial Sequence: Synthetic oligonucleotide
aguugucguucacucaugc

SEQ ID NO: 928100 - RNA, 19 nt, Artificial Sequence
  Description of Artificial Sequence: Synthetic oligonucleotide
uuguuuacugggcauauau

SEQ ID NO: 928101 - RNA, 19 nt, Artificial Sequence
  Description of Artificial Sequence: Synthetic oligonucleotide
uuuacugggcauauaugcu

SEQ ID NO: 928102 - RNA, 19 nt, Artificial Sequence
  Description of Artificial Sequence: Synthetic oligonucleotide
aacacaugccggaauuugc

SEQ ID NO: 928103 - RNA, 19 nt, Artificial Sequence
  Description of Artificial Sequence: Synthetic oligonucleotide
agauaagcaccacauuguc

SEQ ID NO: 928104 - RNA, 19 nt, Artificial Sequence
  Description of Artificial Sequence: Synthetic oligonucleotide
uguagaaccgggcaauuuc

SEQ ID NO: 928105 - RNA, 19 nt, Artificial Sequence
  Description of Artificial Sequence: Synthetic oligonucleotide
ugagaagcacauuucgggc

SEQ ID NO: 928106 - RNA, 19 nt, Artificial Sequence
  Description of Artificial Sequence: Synthetic oligonucleotide
uaugaaucgccauucucca

SEQ ID NO: 928107 - RNA, 19 nt, Artificial Sequence
  Description of Artificial Sequence: Synthetic oligonucleotide
cuugcuuaaagggagcacc

SEQ ID NO: 928108 - RNA, 19 nt, Artificial Sequence
  Description of Artificial Sequence: Synthetic oligonucleotide
uuaggcaugcuacccauac

SEQ ID NO: 928109 - RNA, 19 nt, Artificial Sequence
  Description of Artificial Sequence: Synthetic oligonucleotide
acuugcugaccuccaagcc

SEQ ID NO: 928110 - RNA, 19 nt, Artificial Sequence
  Description of Artificial Sequence: Synthetic oligonucleotide
ugggcauauaugcuucccg

SEQ ID NO: 928111 - RNA, 19 nt, Artificial Sequence
  Description of Artificial Sequence: Synthetic oligonucleotide
uugacugcgcagaagguac

SEQ ID NO: 928112 - RNA, 19 nt, Artificial Sequence
  Description of Artificial Sequence: Synthetic oligonucleotide
aggucgagaagaugguccc

SEQ ID NO: 928113 - RNA, 19 nt, Artificial Sequence
  Description of Artificial Sequence: Synthetic oligonucleotide
ugggaguuugccuugguac

SEQ ID NO: 928114 - RNA, 19 nt, Artificial Sequence
  Description of Artificial Sequence: Synthetic oligonucleotide
ggcaauuucacacuugcug

SEQ ID NO: 928115 - RNA, 19 nt, Artificial Sequence
  Description of Artificial Sequence: Synthetic oligonucleotide
ugucgaaccaccuuucgaa

SEQ ID NO: 928116 - RNA, 19 nt, Artificial Sequence
  Description of Artificial Sequence: Synthetic oligonucleotide
cugucuugcuuaaagggag

SEQ ID NO: 928117 - RNA, 19 nt, Artificial Sequence
  Description of Artificial Sequence: Synthetic oligonucleotide
uguuuacugggcauauaug

SEQ ID NO: 928118 - RNA, 19 nt, Artificial Sequence
  Description of Artificial Sequence: Synthetic oligonucleotide
ugucguucacucaugcggc

SEQ ID NO: 928119 - RNA, 19 nt, Artificial Sequence
  Description of Artificial Sequence: Synthetic oligonucleotide
uacccauaccccuuugggg

SEQ ID NO: 928120 - RNA, 19 nt, Artificial Sequence
  Description of Artificial Sequence: Synthetic oligonucleotide
uuugcucugucgaaccacc

SEQ ID NO: 928121 - RNA, 19 nt, Artificial Sequence
  Description of Artificial Sequence: Synthetic oligonucleotide
auauagaacugucucugcu

SEQ ID NO: 928122 - RNA, 19 nt, Artificial Sequence
  Description of Artificial Sequence: Synthetic oligonucleotide
cacuaagcagcaaacugcc

SEQ ID NO: 928123 - RNA, 19 nt, Artificial Sequence
  Description of Artificial Sequence: Synthetic oligonucleotide
aaugccaguugucguucac

SEQ ID NO: 928124 - RNA, 19 nt, Artificial Sequence
  Description of Artificial Sequence: Synthetic oligonucleotide
augacuauggguucacacu

SEQ ID NO: 928125 - RNA, 19 nt, Artificial Sequence
  Description of Artificial Sequence: Synthetic oligonucleotide
ugccauaccaugacugugc

SEQ ID NO: 928126 - RNA, 19 nt, Artificial Sequence
  Description of Artificial Sequence: Synthetic oligonucleotide
cuugcugaccuccaagccc

SEQ ID NO: 928127 - RNA, 19 nt, Artificial Sequence
  Description of Artificial Sequence: Synthetic oligonucleotide
cacugagaagcacauuucg

SEQ ID NO: 928128 - RNA, 19 nt, Artificial Sequence
  Description of Artificial Sequence: Synthetic oligonucleotide
uuucuuggcacggucauga

SEQ ID NO: 928129 - RNA, 19 nt, Artificial Sequence
  Description of Artificial Sequence: Synthetic oligonucleotide
uaggccuugucaaugcggc

SEQ ID NO: 928130 - RNA, 19 nt, Artificial Sequence
  Description of Artificial Sequence: Synthetic oligonucleotide
cauggaguuuguagaaccg

SEQ ID NO: 928131 - RNA, 19 nt, Artificial Sequence
  Description of Artificial Sequence: Synthetic oligonucleotide
caggucgagaagauggucc

SEQ ID NO: 928132 - RNA, 19 nt, Artificial Sequence
  Description of Artificial Sequence: Synthetic oligonucleotide
ucugucgaaccaccuuucg

SEQ ID NO: 928133 - RNA, 19 nt, Artificial Sequence
  Description of Artificial Sequence: Synthetic oligonucleotide
ugucgcucaccgcucaccg

SEQ ID NO: 928134 - RNA, 19 nt, Artificial Sequence
  Description of Artificial Sequence: Synthetic oligonucleotide
caugacuauggguucacac

SEQ ID NO: 928135 - RNA, 19 nt, Artificial Sequence
  Description of Artificial Sequence: Synthetic oligonucleotide
gauguagggagccucaucu

SEQ ID NO: 928136 - RNA, 19 nt, Artificial Sequence
  Description of Artificial Sequence: Synthetic oligonucleotide
gaaucugccauaccaugac

SEQ ID NO: 928137 - RNA, 19 nt, Artificial Sequence
  Description of Artificial Sequence: Synthetic oligonucleotide
ugacuauggguucacacuu

SEQ ID NO: 928138 - RNA, 19 nt, Artificial Sequence
  Description of Artificial Sequence: Synthetic oligonucleotide
uucgaaaggacaugucgcu

SEQ ID NO: 928139 - RNA, 19 nt, Artificial Sequence
  Description of Artificial Sequence: Synthetic oligonucleotide
uuugcuggugaauguauuc

SEQ ID NO: 928140 - RNA, 19 nt, Artificial Sequence
  Description of Artificial Sequence: Synthetic oligonucleotide
aauuugcucugucgaacca

SEQ ID NO: 928141 - RNA, 19 nt, Artificial Sequence
  Description of Artificial Sequence: Synthetic oligonucleotide
cuacccauaccccuuuggg

SEQ ID NO: 928142 - RNA, 19 nt, Artificial Sequence
  Description of Artificial Sequence: Synthetic oligonucleotide
gaugauucggacacucuug

SEQ ID NO: 928143 - RNA, 19 nt, Artificial Sequence
  Description of Artificial Sequence: Synthetic oligonucleotide
ggaucgaugauucggacac

SEQ ID NO: 928144 - RNA, 19 nt, Artificial Sequence
  Description of Artificial Sequence: Synthetic oligonucleotide
ugaaaccagugguaaacac

SEQ ID NO: 928145 - RNA, 19 nt, Artificial Sequence
  Description of Artificial Sequence: Synthetic oligonucleotide
ugcggcugaaaccaguggu

SEQ ID NO: 928146 - RNA, 19 nt, Artificial Sequence
  Description of Artificial Sequence: Synthetic oligonucleotide
uaaacaccuugccaucggc

SEQ ID NO: 928147 - RNA, 19 nt, Artificial Sequence
  Description of Artificial Sequence: Synthetic oligonucleotide
ugguaugccccucaagcac

SEQ ID NO: 928148 - RNA, 19 nt, Artificial Sequence
  Description of Artificial Sequence: Synthetic oligonucleotide
acccauaccccuuuggggu

SEQ ID NO: 928149 - RNA, 19 nt, Artificial Sequence
  Description of Artificial Sequence: Synthetic oligonucleotide
agcacugaucauucuugac

SEQ ID NO: 928150 - RNA, 19 nt, Artificial Sequence
  Description of Artificial Sequence: Synthetic oligonucleotide
ucgaaccaccuuucgaaag

SEQ ID NO: 928151 - RNA, 19 nt, Artificial Sequence
  Description of Artificial Sequence: Synthetic oligonucleotide
uaugcuucccguagugaga

SEQ ID NO: 928152 - RNA, 19 nt, Artificial Sequence
  Description of Artificial Sequence: Synthetic oligonucleotide
ggguugacugcgcagaagg

SEQ ID NO: 928153 - RNA, 19 nt, Artificial Sequence
  Description of Artificial Sequence: Synthetic oligonucleotide
uugguaugccccucaagca

SEQ ID NO: 928154 - RNA, 19 nt, Artificial Sequence
  Description of Artificial Sequence: Synthetic oligonucleotide
ugcgcagaagguacugucc

SEQ ID NO: 928155 - RNA, 19 nt, Artificial Sequence
  Description of Artificial Sequence: Synthetic oligonucleotide
auuugcucugucgaaccac

SEQ ID NO: 928156 - RNA, 19 nt, Artificial Sequence
  Description of Artificial Sequence: Synthetic oligonucleotide
ugaucauucuugaccggcu

SEQ ID NO: 928157 - RNA, 19 nt, Artificial Sequence
  Description of Artificial Sequence: Synthetic oligonucleotide
auagcacugaucauucuug

SEQ ID NO: 928158 - RNA, 19 nt, Artificial Sequence
  Description of Artificial Sequence: Synthetic oligonucleotide
ucauuguggggacaccagu

SEQ ID NO: 928159 - RNA, 19 nt, Artificial Sequence
  Description of Artificial Sequence: Synthetic oligonucleotide
gaaucgccauucuccaugc

SEQ ID NO: 928160 - RNA, 19 nt, Artificial Sequence
  Description of Artificial Sequence: Synthetic oligonucleotide
guugucguucacucaugcg

SEQ ID NO: 928161 - RNA, 19 nt, Artificial Sequence
  Description of Artificial Sequence: Synthetic oligonucleotide
auuguggggacaccaguca

SEQ ID NO: 928162 - RNA, 19 nt, Artificial Sequence
  Description of Artificial Sequence: Synthetic oligonucleotide
aaaggacaugucgcucacc

SEQ ID NO: 928163 - RNA, 19 nt, Artificial Sequence
  Description of Artificial Sequence: Synthetic oligonucleotide
cuguaucaggauaaagauc

SEQ ID NO: 928164 - RNA, 19 nt, Artificial Sequence
  Description of Artificial Sequence: Synthetic oligonucleotide
aucgaugauucggacacuc

SEQ ID NO: 928165 - RNA, 19 nt, Artificial Sequence
  Description of Artificial Sequence: Synthetic oligonucleotide
ggcacuaagcagcaaacug

SEQ ID NO: 928166 - RNA, 19 nt, Artificial Sequence
  Description of Artificial Sequence: Synthetic oligonucleotide
ucccguagugagaucagga

SEQ ID NO: 928167 - RNA, 19 nt, Artificial Sequence
  Description of Artificial Sequence: Synthetic oligonucleotide
acaugccggaauuugcucu

SEQ ID NO: 928168 - RNA, 19 nt, Artificial Sequence
  Description of Artificial Sequence: Synthetic oligonucleotide
cuccaagccccucuuaggc

SEQ ID NO: 928169 - RNA, 19 nt, Artificial Sequence
  Description of Artificial Sequence: Synthetic oligonucleotide
gcauauaugcuucccguag

SEQ ID NO: 928170 - RNA, 19 nt, Artificial Sequence
  Description of Artificial Sequence: Synthetic oligonucleotide
cuuggcacggucaugacua

SEQ ID NO: 928171 - RNA, 19 nt, Artificial Sequence
  Description of Artificial Sequence: Synthetic oligonucleotide
caggaucggaucagcaucc

SEQ ID NO: 928172 - RNA, 19 nt, Artificial Sequence
  Description of Artificial Sequence: Synthetic oligonucleotide
ggucccuuaaagaacuugg

SEQ ID NO: 928173 - RNA, 19 nt, Artificial Sequence
  Description of Artificial Sequence: Synthetic oligonucleotide
cacucaugcggcugaaacc

SEQ ID NO: 928174 - RNA, 19 nt, Artificial Sequence
  Description of Artificial Sequence: Synthetic oligonucleotide
cuggugaauguauucagga

SEQ ID NO: 928175 - RNA, 19 nt, Artificial Sequence
  Description of Artificial Sequence: Synthetic oligonucleotide
auaccaugacugugcaguc

SEQ ID NO: 928176 - RNA, 19 nt, Artificial Sequence
  Description of Artificial Sequence: Synthetic oligonucleotide
aacccgggacacucgaaug

SEQ ID NO: 928177 - RNA, 19 nt, Artificial Sequence
  Description of Artificial Sequence: Synthetic oligonucleotide
gaacacaugccggaauuug

SEQ ID NO: 928178 - RNA, 19 nt, Artificial Sequence
  Description of Artificial Sequence: Synthetic oligonucleotide
ucuuggcacggucaugacu

SEQ ID NO: 928179 - RNA, 19 nt, Artificial Sequence
  Description of Artificial Sequence: Synthetic oligonucleotide
cuguccgaacacaugccgg

SEQ ID NO: 928180 - RNA, 19 nt, Artificial Sequence
  Description of Artificial Sequence: Synthetic oligonucleotide
gaaguggauguagggagcc

SEQ ID NO: 928181 - RNA, 19 nt, Artificial Sequence
  Description of Artificial Sequence: Synthetic oligonucleotide
uggugaauguauucaggaa

SEQ ID NO: 928182 - RNA, 19 nt, Artificial Sequence
  Description of Artificial Sequence: Synthetic oligonucleotide
aaaguguccaggcgguaua

SEQ ID NO: 928183 - RNA, 19 nt, Artificial Sequence
  Description of Artificial Sequence: Synthetic oligonucleotide
caucagaaauugugguagc

SEQ ID NO: 928184 - RNA, 19 nt, Artificial Sequence
  Description of Artificial Sequence: Synthetic oligonucleotide
aaaguaccggaugcuggag

SEQ ID NO: 928185 - RNA, 19 nt, Artificial Sequence
  Description of Artificial Sequence: Synthetic oligonucleotide
acugaucauucuugaccgg

SEQ ID NO: 928186 - RNA, 19 nt, Artificial Sequence
  Description of Artificial Sequence: Synthetic oligonucleotide
gucaaugcggccugucuug

SEQ ID NO: 928187 - RNA, 19 nt, Artificial Sequence
  Description of Artificial Sequence: Synthetic oligonucleotide
aaugcggccugucuugcuu

SEQ ID NO: 928188 - RNA, 19 nt, Artificial Sequence
  Description of Artificial Sequence: Synthetic oligonucleotide
ucaccgcucgccaggggcg

SEQ ID NO: 928189 - RNA, 19 nt, Artificial Sequence
  Description of Artificial Sequence: Synthetic oligonucleotide
cuauggguucacacuugcg

SEQ ID NO: 928190 - RNA, 19 nt, Artificial Sequence
  Description of Artificial Sequence: Synthetic oligonucleotide
aggacaugucgcucaccgc

SEQ ID NO: 928191 - RNA, 19 nt, Artificial Sequence
  Description of Artificial Sequence: Synthetic oligonucleotide
agcagggccccauugcuug

SEQ ID NO: 928192 - RNA, 19 nt, Artificial Sequence
  Description of Artificial Sequence: Synthetic oligonucleotide
cucaugagccuucucccgc

SEQ ID NO: 928193 - RNA, 19 nt, Artificial Sequence
  Description of Artificial Sequence: Synthetic oligonucleotide
ucgcucaccgcucaccgcu

SEQ ID NO: 928194 - RNA, 19 nt, Artificial Sequence
  Description of Artificial Sequence: Synthetic oligonucleotide
aaucgccauucuccaugcg

SEQ ID NO: 928195 - RNA, 19 nt, Artificial Sequence
  Description of Artificial Sequence: Synthetic oligonucleotide
caaacugccuggugugacc

SEQ ID NO: 928196 - RNA, 19 nt, Artificial Sequence
  Description of Artificial Sequence: Synthetic oligonucleotide
uauaugcuucccguaguga

SEQ ID NO: 928197 - RNA, 19 nt, Artificial Sequence
  Description of Artificial Sequence: Synthetic oligonucleotide
uugugguuccagcucacau

SEQ ID NO: 928198 - RNA, 19 nt, Artificial Sequence
  Description of Artificial Sequence: Synthetic oligonucleotide
uaacccgggacacucgaau

SEQ ID NO: 928199 - RNA, 19 nt, Artificial Sequence
  Description of Artificial Sequence: Synthetic oligonucleotide
agaucccguuguuuacugg

SEQ ID NO: 928200 - RNA, 19 nt, Artificial Sequence
  Description of Artificial Sequence: Synthetic oligonucleotide
aaacugccuggugugaccu

SEQ ID NO: 928201 - RNA, 19 nt, Artificial Sequence
  Description of Artificial Sequence: Synthetic oligonucleotide
gaaaggacaugucgcucac

SEQ ID NO: 928202 - RNA, 19 nt, Artificial Sequence
  Description of Artificial Sequence: Synthetic oligonucleotide
uagcacugaucauucuuga

SEQ ID NO: 928203 - RNA, 19 nt, Artificial Sequence
  Description of Artificial Sequence: Synthetic oligonucleotide
acggucaugacuauggguu

SEQ ID NO: 928204 - RNA, 19 nt, Artificial Sequence
  Description of Artificial Sequence: Synthetic oligonucleotide
guuggguaggccuugucaa

SEQ ID NO: 928205 - RNA, 19 nt, Artificial Sequence
  Description of Artificial Sequence: Synthetic oligonucleotide
caugcggcugaaaccagug

SEQ ID NO: 928206 - RNA, 19 nt, Artificial Sequence
  Description of Artificial Sequence: Synthetic oligonucleotide
guauagcuccucugcagug

SEQ ID NO: 928207 - RNA, 19 nt, Artificial Sequence
  Description of Artificial Sequence: Synthetic oligonucleotide
ucacacuugcguucaugga

SEQ ID NO: 928208 - RNA, 19 nt, Artificial Sequence
  Description of Artificial Sequence: Synthetic oligonucleotide
uuccuugaccagcacucga

SEQ ID NO: 928209 - RNA, 19 nt, Artificial Sequence
  Description of Artificial Sequence: Synthetic oligonucleotide
gcguucauggaguuuguag

SEQ ID NO: 928210 - RNA, 19 nt, Artificial Sequence
  Description of Artificial Sequence: Synthetic oligonucleotide
aucaccucuuguaguuucc

SEQ ID NO: 928211 - RNA, 19 nt, Artificial Sequence
  Description of Artificial Sequence: Synthetic oligonucleotide
uugcaucaccucuuguagu

SEQ ID NO: 928212 - RNA, 19 nt, Artificial Sequence
  Description of Artificial Sequence: Synthetic oligonucleotide
acauuucgccggcugaccu

SEQ ID NO: 928213 - RNA, 19 nt, Artificial Sequence
  Description of Artificial Sequence: Synthetic oligonucleotide
uccuaugaaucgccauucu

SEQ ID NO: 928214 - RNA, 19 nt, Artificial Sequence
  Description of Artificial Sequence: Synthetic oligonucleotide
caaaguaccggaugcugga

SEQ ID NO: 928215 - RNA, 19 nt, Artificial Sequence
  Description of Artificial Sequence: Synthetic oligonucleotide
uucuugaccggcuguccga

SEQ ID NO: 928216 - RNA, 19 nt, Artificial Sequence
  Description of Artificial Sequence: Synthetic oligonucleotide
cucaccgcucgccaggggc

SEQ ID NO: 928217 - RNA, 19 nt, Artificial Sequence
  Description of Artificial Sequence: Synthetic oligonucleotide
ucaugcggcugaaaccagu

SEQ ID NO: 928218 - RNA, 19 nt, Artificial Sequence
  Description of Artificial Sequence: Synthetic oligonucleotide
auggguucacacuugcguu

SEQ ID NO: 928219 - RNA, 19 nt, Artificial Sequence
  Description of Artificial Sequence: Synthetic oligonucleotide
caugccggaauuugcucug

SEQ ID NO: 928220 - RNA, 19 nt, Artificial Sequence
  Description of Artificial Sequence: Synthetic oligonucleotide
gcuguccgaacacaugccg

SEQ ID NO: 928221 - RNA, 19 nt, Artificial Sequence
  Description of Artificial Sequence: Synthetic oligonucleotide
ucgaugauucggacacucu

SEQ ID NO: 928222 - RNA, 19 nt, Artificial Sequence
  Description of Artificial Sequence: Synthetic oligonucleotide
uccaagccccucuuaggca

SEQ ID NO: 928223 - RNA, 19 nt, Artificial Sequence
  Description of Artificial Sequence: Synthetic oligonucleotide
uggguaggccuugucaaug

SEQ ID NO: 928224 - RNA, 19 nt, Artificial Sequence
  Description of Artificial Sequence: Synthetic oligonucleotide
aggccuugucaaugcggcc

SEQ ID NO: 928225 - RNA, 19 nt, Artificial Sequence
  Description of Artificial Sequence: Synthetic oligonucleotide
augcccacacgcuugguau

SEQ ID NO: 928226 - RNA, 19 nt, Artificial Sequence
  Description of Artificial Sequence: Synthetic oligonucleotide
augcggcugaaaccagugg

SEQ ID NO: 928227 - RNA, 19 nt, Artificial Sequence
  Description of Artificial Sequence: Synthetic oligonucleotide
caggccgacuguccgauag

SEQ ID NO: 928228 - RNA, 19 nt, Artificial Sequence
  Description of Artificial Sequence: Synthetic oligonucleotide
agucaguggagaggucagc

SEQ ID NO: 928229 - RNA, 19 nt, Artificial Sequence
  Description of Artificial Sequence: Synthetic oligonucleotide
ggcgguauagcuccucugc

SEQ ID NO: 928230 - RNA, 19 nt, Artificial Sequence
  Description of Artificial Sequence: Synthetic oligonucleotide
agcacauuucgccggcuga

SEQ ID NO: 928231 - RNA, 19 nt, Artificial Sequence
  Description of Artificial Sequence: Synthetic oligonucleotide
ucauucuugaccggcuguc

SEQ ID NO: 928232 - RNA, 19 nt, Artificial Sequence
  Description of Artificial Sequence: Synthetic oligonucleotide
gaggcacuaagcagcaaac

SEQ ID NO: 928233 - RNA, 19 nt, Artificial Sequence
  Description of Artificial Sequence: Synthetic oligonucleotide
gguggugcuuccaaccugg

SEQ ID NO: 928234 - RNA, 19 nt, Artificial Sequence
  Description of Artificial Sequence: Synthetic oligonucleotide
gaacaggucccgugugccc

SEQ ID NO: 928235 - RNA, 19 nt, Artificial Sequence
  Description of Artificial Sequence: Synthetic oligonucleotide
augucgcucaccgcucacc

SEQ ID NO: 928236 - RNA, 19 nt, Artificial Sequence
  Description of Artificial Sequence: Synthetic oligonucleotide
aguguccaggcgguauagc

SEQ ID NO: 928237 - RNA, 19 nt, Artificial Sequence
  Description of Artificial Sequence: Synthetic oligonucleotide
uagaccacgcuggugucug

SEQ ID NO: 928238 - RNA, 19 nt, Artificial Sequence
  Description of Artificial Sequence: Synthetic oligonucleotide
gguacugucccagguaacc

SEQ ID NO: 928239 - RNA, 19 nt, Artificial Sequence
  Description of Artificial Sequence: Synthetic oligonucleotide
acucuuguccuugcaagcu

SEQ ID NO: 928240 - RNA, 19 nt, Artificial Sequence
  Description of Artificial Sequence: Synthetic oligonucleotide
aggccgacuguccgauagc

SEQ ID NO: 928241 - RNA, 19 nt, Artificial Sequence
  Description of Artificial Sequence: Synthetic oligonucleotide
aggucggacuuucuuggca

SEQ ID NO: 928242 - RNA, 19 nt, Artificial Sequence
  Description of Artificial Sequence: Synthetic oligonucleotide
ccgauagcacauuucgccg

SEQ ID NO: 928243 - RNA, 19 nt, Artificial Sequence
  Description of Artificial Sequence: Synthetic oligonucleotide
aguuugccuugguacaaaa

SEQ ID NO: 928244 - RNA, 19 nt, Artificial Sequence
  Description of Artificial Sequence: Synthetic oligonucleotide
gccggaauuugcucugucg

SEQ ID NO: 928245 - RNA, 19 nt, Artificial Sequence
  Description of Artificial Sequence: Synthetic oligonucleotide
ccugggaucgaugauucgg

SEQ ID NO: 928246 - RNA, 19 nt, Artificial Sequence
  Description of Artificial Sequence: Synthetic oligonucleotide
guagaaccgggcaauuuca

SEQ ID NO: 928247 - RNA, 19 nt, Artificial Sequence
  Description of Artificial Sequence: Synthetic oligonucleotide
ucggacacucuuguccuug

SEQ ID NO: 928248 - RNA, 19 nt, Artificial Sequence
  Description of Artificial Sequence: Synthetic oligonucleotide
acacuugcguucauggagu

SEQ ID NO: 928249 - RNA, 19 nt, Artificial Sequence
  Description of Artificial Sequence: Synthetic oligonucleotide
uggugguccuaugaaucgc

SEQ ID NO: 928250 - RNA, 19 nt, Artificial Sequence
  Description of Artificial Sequence: Synthetic oligonucleotide
ccucuaggcggcuaauacg

SEQ ID NO: 928251 - RNA, 19 nt, Artificial Sequence
  Description of Artificial Sequence: Synthetic oligonucleotide
uccgaacacaugccggaau

SEQ ID NO: 928252 - RNA, 19 nt, Artificial Sequence
  Description of Artificial Sequence: Synthetic oligonucleotide
ugggaucgaugauucggac

SEQ ID NO: 928253 - RNA, 19 nt, Artificial Sequence
  Description of Artificial Sequence: Synthetic oligonucleotide
uccuugcaagcugagcaga

SEQ ID NO: 928254 - RNA, 19 nt, Artificial Sequence
  Description of Artificial Sequence: Synthetic oligonucleotide
gacuauggguucacacuug

SEQ ID NO: 928255 - RNA, 19 nt, Artificial Sequence
  Description of Artificial Sequence: Synthetic oligonucleotide
cugggaucgaugauucgga

SEQ ID NO: 928256 - RNA, 19 nt, Artificial Sequence
  Description of Artificial Sequence: Synthetic oligonucleotide
uuucacacuugcugaccuc

SEQ ID NO: 928257 - RNA, 19 nt, Artificial Sequence
  Description of Artificial Sequence: Synthetic oligonucleotide
cugcgcagaagguacuguc

SEQ ID NO: 928258 - RNA, 19 nt, Artificial Sequence
  Description of Artificial Sequence: Synthetic oligonucleotide
cuucccguagugagaucag

SEQ ID NO: 928259 - RNA, 19 nt, Artificial Sequence
  Description of Artificial Sequence: Synthetic oligonucleotide
acacaugccggaauuugcu

SEQ ID NO: 928260 - RNA, 19 nt, Artificial Sequence
  Description of Artificial Sequence: Synthetic oligonucleotide
uuccaaaagccagguggug

SEQ ID NO: 928261 - RNA, 19 nt, Artificial Sequence
  Description of Artificial Sequence: Synthetic oligonucleotide
guagugagaucaggaucgg

SEQ ID NO: 928262 - RNA, 19 nt, Artificial Sequence
  Description of Artificial Sequence: Synthetic oligonucleotide
gaggucggacuuucuuggc

SEQ ID NO: 928263 - RNA, 19 nt, Artificial Sequence
  Description of Artificial Sequence: Synthetic oligonucleotide
cacaugccggaauuugcuc

SEQ ID NO: 928264 - RNA, 19 nt, Artificial Sequence
  Description of Artificial Sequence: Synthetic oligonucleotide
gcuacccauaccccuuugg

SEQ ID NO: 928265 - RNA, 19 nt, Artificial Sequence
  Description of Artificial Sequence: Synthetic oligonucleotide
gaagcuaggugagaagggu

SEQ ID NO: 928266 - RNA, 19 nt, Artificial Sequence
  Description of Artificial Sequence: Synthetic oligonucleotide
acuugggaguuugccuugg

SEQ ID NO: 928267 - RNA, 19 nt, Artificial Sequence
  Description of Artificial Sequence: Synthetic oligonucleotide
cauugucacaaccugcacu

SEQ ID NO: 928268 - RNA, 19 nt, Artificial Sequence
  Description of Artificial Sequence: Synthetic oligonucleotide
ggucggacuuucuuggcac

SEQ ID NO: 928269 - RNA, 19 nt, Artificial Sequence
  Description of Artificial Sequence: Synthetic oligonucleotide
ccuggugguccuaugaauc

SEQ ID NO: 928270 - RNA, 19 nt, Artificial Sequence
  Description of Artificial Sequence: Synthetic oligonucleotide
ucgaaaggacaugucgcuc

SEQ ID NO: 928271 - RNA, 19 nt, Artificial Sequence
  Description of Artificial Sequence: Synthetic oligonucleotide
ugguccuaugaaucgccau

SEQ ID NO: 928272 - RNA, 19 nt, Artificial Sequence
  Description of Artificial Sequence: Synthetic oligonucleotide
ugacugcgcagaagguacu

SEQ ID NO: 928273 - RNA, 19 nt, Artificial Sequence
  Description of Artificial Sequence: Synthetic oligonucleotide
cagcacucgaagugcccgg

SEQ ID NO: 928274 - RNA, 19 nt, Artificial Sequence
  Description of Artificial Sequence: Synthetic oligonucleotide
accagcacucgaagugccc

SEQ ID NO: 928275 - RNA, 19 nt, Artificial Sequence
  Description of Artificial Sequence: Synthetic oligonucleotide
ugcccacacgcuugguaug

SEQ ID NO: 928276 - RNA, 19 nt, Artificial Sequence
  Description of Artificial Sequence: Synthetic oligonucleotide
ucguucacucaugcggcug

SEQ ID NO: 928277 - RNA, 19 nt, Artificial Sequence
  Description of Artificial Sequence: Synthetic oligonucleotide
cugggcauauaugcuuccc

SEQ ID NO: 928278 - RNA, 19 nt, Artificial Sequence
  Description of Artificial Sequence: Synthetic oligonucleotide
uaccggaugcuggagucac

SEQ ID NO: 928279 - RNA, 19 nt, Artificial Sequence
  Description of Artificial Sequence: Synthetic oligonucleotide
agguuuucugggucccaca

SEQ ID NO: 928280 - RNA, 19 nt, Artificial Sequence
  Description of Artificial Sequence: Synthetic oligonucleotide
acaugucgcucaccgcuca

SEQ ID NO: 928281 - RNA, 19 nt, Artificial Sequence
  Description of Artificial Sequence: Synthetic oligonucleotide
cuuccaaccugggucccag

SEQ ID NO: 928282 - RNA, 19 nt, Artificial Sequence
  Description of Artificial Sequence: Synthetic oligonucleotide
uucgccggcugaccuucag

SEQ ID NO: 928283 - RNA, 19 nt, Artificial Sequence
  Description of Artificial Sequence: Synthetic oligonucleotide
gggaguuugccuugguaca

SEQ ID NO: 928284 - RNA, 19 nt, Artificial Sequence
  Description of Artificial Sequence: Synthetic oligonucleotide
ugcuacccauaccccuuug

SEQ ID NO: 928285 - RNA, 19 nt, Artificial Sequence
  Description of Artificial Sequence: Synthetic oligonucleotide
ccacuacuggcucagucag

SEQ ID NO: 928286 - RNA, 19 nt, Artificial Sequence
  Description of Artificial Sequence: Synthetic oligonucleotide
uuuguagaaccgggcaauu

SEQ ID NO: 928287 - RNA, 19 nt, Artificial Sequence
  Description of Artificial Sequence: Synthetic oligonucleotide
uggugugaccuggccacag

SEQ ID NO: 928288 - RNA, 19 nt, Artificial Sequence
  Description of Artificial Sequence: Synthetic oligonucleotide
gcgcagaagguacuguccc

SEQ ID NO: 928289 - RNA, 19 nt, Artificial Sequence
  Description of Artificial Sequence: Synthetic oligonucleotide
ucaugacuauggguucaca

SEQ ID NO: 928290 - RNA, 19 nt, Artificial Sequence
  Description of Artificial Sequence: Synthetic oligonucleotide
caguugucguucacucaug

SEQ ID NO: 928291 - RNA, 19 nt, Artificial Sequence
  Description of Artificial Sequence: Synthetic oligonucleotide
uuccaaccugggucccagg

SEQ ID NO: 928292 - RNA, 19 nt, Artificial Sequence
  Description of Artificial Sequence: Synthetic oligonucleotide
gucccagguaacccgggac

SEQ ID NO: 928293 - RNA, 19 nt, Artificial Sequence
  Description of Artificial Sequence: Synthetic oligonucleotide
uugcguucauggaguuugu

SEQ ID NO: 928294 - RNA, 19 nt, Artificial Sequence
  Description of Artificial Sequence: Synthetic oligonucleotide
guugacugcgcagaaggua

SEQ ID NO: 928295 - RNA, 19 nt, Artificial Sequence
  Description of Artificial Sequence: Synthetic oligonucleotide
guccgauagcacauuucgc

SEQ ID NO: 928296 - RNA, 19 nt, Artificial Sequence
  Description of Artificial Sequence: Synthetic oligonucleotide
cugucgaaccaccuuucga

SEQ ID NO: 928297 - RNA, 19 nt, Artificial Sequence
  Description of Artificial Sequence: Synthetic oligonucleotide
aggcgguauagcuccucug

SEQ ID NO: 928298 - RNA, 19 nt, Artificial Sequence
  Description of Artificial Sequence: Synthetic oligonucleotide
aggcacuaagcagcaaacu

SEQ ID NO: 928299 - RNA, 19 nt, Artificial Sequence
  Description of Artificial Sequence: Synthetic oligonucleotide
ggugguccuaugaaucgcc

SEQ ID NO: 928300 - RNA, 19 nt, Artificial Sequence
  Description of Artificial Sequence: Synthetic oligonucleotide
ucgagaagauggucccuua

SEQ ID NO: 928301 - RNA, 19 nt, Artificial Sequence
  Description of Artificial Sequence: Synthetic oligonucleotide
ucuugaccggcuguccgaa

SEQ ID NO: 928302 - RNA, 19 nt, Artificial Sequence
  Description of Artificial Sequence: Synthetic oligonucleotide
uggcuuccacaaucacugc

SEQ ID NO: 928303 - RNA, 19 nt, Artificial Sequence
  Description of Artificial Sequence: Synthetic oligonucleotide
ggacaugucgcucaccgcu

SEQ ID NO: 928304 - RNA, 19 nt, Artificial Sequence
  Description of Artificial Sequence: Synthetic oligonucleotide
ucgccggcugaccuucaga

SEQ ID NO: 928305 - RNA, 19 nt, Artificial Sequence
  Description of Artificial Sequence: Synthetic oligonucleotide
ccuaugaaucgccauucuc

SEQ ID NO: 928306 - RNA, 19 nt, Artificial Sequence
  Description of Artificial Sequence: Synthetic oligonucleotide
uuguagaaccgggcaauuu

SEQ ID NO: 928307 - RNA, 19 nt, Artificial Sequence
  Description of Artificial Sequence: Synthetic oligonucleotide
augaaucgccauucuccau

SEQ ID NO: 928308 - RNA, 19 nt, Artificial Sequence
  Description of Artificial Sequence: Synthetic oligonucleotide
gcuaggugagaaggguugg

SEQ ID NO: 928309 - RNA, 19 nt, Artificial Sequence
  Description of Artificial Sequence: Synthetic oligonucleotide
cauauaugcuucccguagu

SEQ ID NO: 928310 - RNA, 19 nt, Artificial Sequence
  Description of Artificial Sequence: Synthetic oligonucleotide
ggguaggccuugucaaugc

SEQ ID NO: 928311 - RNA, 19 nt, Artificial Sequence
  Description of Artificial Sequence: Synthetic oligonucleotide
auagaccacgcuggugucu

SEQ ID NO: 928312 - RNA, 19 nt, Artificial Sequence
  Description of Artificial Sequence: Synthetic oligonucleotide
gggaucgaugauucggaca

SEQ ID NO: 928313 - RNA, 19 nt, Artificial Sequence
  Description of Artificial Sequence: Synthetic oligonucleotide
cugcccgcucacccaaucc

SEQ ID NO: 928314 - RNA, 19 nt, Artificial Sequence
  Description of Artificial Sequence: Synthetic oligonucleotide
gucgaaccaccuuucgaaa

SEQ ID NO: 928315 - RNA, 19 nt, Artificial Sequence
  Description of Artificial Sequence: Synthetic oligonucleotide
gcagcaaacugccuggugu

SEQ ID NO: 928316 - RNA, 19 nt, Artificial Sequence
  Description of Artificial Sequence: Synthetic oligonucleotide
uucuuggcacggucaugac

SEQ ID NO: 928317 - RNA, 19 nt, Artificial Sequence
  Description of Artificial Sequence: Synthetic oligonucleotide
cauagcacugaucauucuu

SEQ ID NO: 928318 - RNA, 19 nt, Artificial Sequence
  Description of Artificial Sequence: Synthetic oligonucleotide
gguuuucugggucccacaa

SEQ ID NO: 928319 - RNA, 19 nt, Artificial Sequence
  Description of Artificial Sequence: Synthetic oligonucleotide
cacccaauccucugccuca

SEQ ID NO: 928320 - RNA, 19 nt, Artificial Sequence
  Description of Artificial Sequence: Synthetic oligonucleotide
ccccucuuaggcaugcuac

SEQ ID NO: 928321 - RNA, 19 nt, Artificial Sequence
  Description of Artificial Sequence: Synthetic oligonucleotide
ggaucagcauccugcccgc

SEQ ID NO: 928322 - RNA, 19 nt, Artificial Sequence
  Description of Artificial Sequence: Synthetic oligonucleotide
ggacacucgaauguccuca

SEQ ID NO: 928323 - RNA, 19 nt, Artificial Sequence
  Description of Artificial Sequence: Synthetic oligonucleotide
ccguagugagaucaggauc

SEQ ID NO: 928324 - RNA, 19 nt, Artificial Sequence
  Description of Artificial Sequence: Synthetic oligonucleotide
gugugaccuggccacagaa

SEQ ID NO: 928325 - RNA, 19 nt, Artificial Sequence
  Description of Artificial Sequence: Synthetic oligonucleotide
acugcgcagaagguacugu

SEQ ID NO: 928326 - RNA, 19 nt, Artificial Sequence
  Description of Artificial Sequence: Synthetic oligonucleotide
ccgacuguccgauagcaca

SEQ ID NO: 928327 - RNA, 19 nt, Artificial Sequence
  Description of Artificial Sequence: Synthetic oligonucleotide
gucaugacuauggguucac

SEQ ID NO: 928328 - RNA, 19 nt, Artificial Sequence
  Description of Artificial Sequence: Synthetic oligonucleotide
agaccacgcuggugucugg

SEQ ID NO: 928329 - RNA, 19 nt, Artificial Sequence
  Description of Artificial Sequence: Synthetic oligonucleotide
gcuuaaagggagcaccaua

SEQ ID NO: 928330 - RNA, 19 nt, Artificial Sequence
  Description of Artificial Sequence: Synthetic oligonucleotide
gguaacccgggacacucga

SEQ ID NO: 928331 - RNA, 19 nt, Artificial Sequence
  Description of Artificial Sequence: Synthetic oligonucleotide
ggaucggaucagcauccug

SEQ ID NO: 928332 - RNA, 19 nt, Artificial Sequence
  Description of Artificial Sequence: Synthetic oligonucleotide
acuaagcagcaaacugccu

SEQ ID NO: 928333 - RNA, 19 nt, Artificial Sequence
  Description of Artificial Sequence: Synthetic oligonucleotide
gaagugcccggagcucuug

SEQ ID NO: 928334 - RNA, 19 nt, Artificial Sequence
  Description of Artificial Sequence: Synthetic oligonucleotide
agcaaaggugccacugaaa

SEQ ID NO: 928335 - RNA, 19 nt, Artificial Sequence
  Description of Artificial Sequence: Synthetic oligonucleotide
agguaacccgggacacucg

SEQ ID NO: 928336 - RNA, 19 nt, Artificial Sequence
  Description of Artificial Sequence: Synthetic oligonucleotide
uguagggccaugggcucau

SEQ ID NO: 928337 - RNA, 19 nt, Artificial Sequence
  Description of Artificial Sequence: Synthetic oligonucleotide
uuccucuaggcggcuaaua

SEQ ID NO: 928338 - RNA, 19 nt, Artificial Sequence
  Description of Artificial Sequence: Synthetic oligonucleotide
auccugcccgcucacccaa

SEQ ID NO: 928339 - RNA, 19 nt, Artificial Sequence
  Description of Artificial Sequence: Synthetic oligonucleotide
cucgccaggggcgccgggg

SEQ ID NO: 928340 - RNA, 19 nt, Artificial Sequence
  Description of Artificial Sequence: Synthetic oligonucleotide
cuugaccggcuguccgaac

SEQ ID NO: 928341 - RNA, 19 nt, Artificial Sequence
  Description of Artificial Sequence: Synthetic oligonucleotide
caugucgcucaccgcucac

SEQ ID NO: 928342 - RNA, 19 nt, Artificial Sequence
  Description of Artificial Sequence: Synthetic oligonucleotide
cugccuggugugaccuggc

SEQ ID NO: 928343 - RNA, 19 nt, Artificial Sequence
  Description of Artificial Sequence: Synthetic oligonucleotide
cucaccgcucaccgcucgc

SEQ ID NO: 928344 - RNA, 19 nt, Artificial Sequence
  Description of Artificial Sequence: Synthetic oligonucleotide
gucgcucaccgcucaccgc

SEQ ID NO: 928345 - RNA, 19 nt, Artificial Sequence
  Description of Artificial Sequence: Synthetic oligonucleotide
ggcauauaugcuucccgua

SEQ ID NO: 928346 - RNA, 19 nt, Artificial Sequence
  Description of Artificial Sequence: Synthetic oligonucleotide
aggcaguguugggugcagg

SEQ ID NO: 928347 - RNA, 19 nt, Artificial Sequence
  Description of Artificial Sequence: Synthetic oligonucleotide
augcuacccauaccccuuu

SEQ ID NO: 928348 - RNA, 19 nt, Artificial Sequence
  Description of Artificial Sequence: Synthetic oligonucleotide
ugcggccugucuugcuuaa

SEQ ID NO: 928349 - RNA, 19 nt, Artificial Sequence
  Description of Artificial Sequence: Synthetic oligonucleotide
gggcauauaugcuucccgu

SEQ ID NO: 928350 - RNA, 19 nt, Artificial Sequence
  Description of Artificial Sequence: Synthetic oligonucleotide
auagcacauuucgccggcu

SEQ ID NO: 928351 - RNA, 19 nt, Artificial Sequence
  Description of Artificial Sequence: Synthetic oligonucleotide
cacaaugccaguugucguu

SEQ ID NO: 928352 - RNA, 19 nt, Artificial Sequence
  Description of Artificial Sequence: Synthetic oligonucleotide
caaugccaguugucguuca

SEQ ID NO: 928353 - RNA, 19 nt, Artificial Sequence
  Description of Artificial Sequence: Synthetic oligonucleotide
ggcaugcuacccauacccc

SEQ ID NO: 928354 - RNA, 19 nt, Artificial Sequence
  Description of Artificial Sequence: Synthetic oligonucleotide
cacuguuggguaggccuug

SEQ ID NO: 928355 - RNA, 19 nt, Artificial Sequence
  Description of Artificial Sequence: Synthetic oligonucleotide
uuucgccggcugaccuuca

SEQ ID NO: 928356 - RNA, 19 nt, Artificial Sequence
  Description of Artificial Sequence: Synthetic oligonucleotide
cagguuguggagaggugua

SEQ ID NO: 928357 - RNA, 19 nt, Artificial Sequence
  Description of Artificial Sequence: Synthetic oligonucleotide
acuguuggguaggccuugu

SEQ ID NO: 928358 - RNA, 19 nt, Artificial Sequence
  Description of Artificial Sequence: Synthetic oligonucleotide
ccuuucgaaaggacauguc

SEQ ID NO: 928359 - RNA, 19 nt, Artificial Sequence
  Description of Artificial Sequence: Synthetic oligonucleotide
caugagccuucucccgcuc

SEQ ID NO: 928360 - RNA, 19 nt, Artificial Sequence
  Description of Artificial Sequence: Synthetic oligonucleotide
cacggucaugacuaugggu

SEQ ID NO: 928361 - RNA, 19 nt, Artificial Sequence
  Description of Artificial Sequence: Synthetic oligonucleotide
uuggcacggucaugacuau

SEQ ID NO: 928362 - RNA, 19 nt, Artificial Sequence
  Description of Artificial Sequence: Synthetic oligonucleotide
ugcguucauggaguuugua

SEQ ID NO: 928363 - RNA, 19 nt, Artificial Sequence
  Description of Artificial Sequence: Synthetic oligonucleotide
augcggccugucuugcuua

SEQ ID NO: 928364 - RNA, 19 nt, Artificial Sequence
  Description of Artificial Sequence: Synthetic oligonucleotide
uucggacacucuuguccuu

SEQ ID NO: 928365 - RNA, 19 nt, Artificial Sequence
  Description of Artificial Sequence: Synthetic oligonucleotide
acacucgaauguccucaua

SEQ ID NO: 928366 - RNA, 19 nt, Artificial Sequence
  Description of Artificial Sequence: Synthetic oligonucleotide
gacacucgaauguccucau

SEQ ID NO: 928367 - RNA, 19 nt, Artificial Sequence
  Description of Artificial Sequence: Synthetic oligonucleotide
ccgggacacucgaaugucc

SEQ ID NO: 928368 - RNA, 19 nt, Artificial Sequence
  Description of Artificial Sequence: Synthetic oligonucleotide
gguccuaugaaucgccauu

SEQ ID NO: 928369 - RNA, 19 nt, Artificial Sequence
  Description of Artificial Sequence: Synthetic oligonucleotide
cuguuggguaggccuuguc

SEQ ID NO: 928370 - RNA, 19 nt, Artificial Sequence
  Description of Artificial Sequence: Synthetic oligonucleotide
gugguccuaugaaucgcca

SEQ ID NO: 928371 - RNA, 19 nt, Artificial Sequence
  Description of Artificial Sequence: Synthetic oligonucleotide
accucgggcggcuccggau

SEQ ID NO: 928372 - RNA, 19 nt, Artificial Sequence
  Description of Artificial Sequence: Synthetic oligonucleotide
gaacuggcaggccgacugu

SEQ ID NO: 928373 - RNA, 19 nt, Artificial Sequence
  Description of Artificial Sequence: Synthetic oligonucleotide
gcucaccgcucaccgcucg

SEQ ID NO: 928374 - RNA, 19 nt, Artificial Sequence
  Description of Artificial Sequence: Synthetic oligonucleotide
ggagccucaucugugauuu

SEQ ID NO: 928375 - RNA, 19 nt, Artificial Sequence
  Description of Artificial Sequence: Synthetic oligonucleotide
cacacuugcugaccuccaa

SEQ ID NO: 928376 - RNA, 19 nt, Artificial Sequence
  Description of Artificial Sequence: Synthetic oligonucleotide
gggacacucgaauguccuc

SEQ ID NO: 928377 - RNA, 19 nt, Artificial Sequence
  Description of Artificial Sequence: Synthetic oligonucleotide
gcaugcuacccauaccccu

SEQ ID NO: 928378 - RNA, 19 nt, Artificial Sequence
  Description of Artificial Sequence: Synthetic oligonucleotide
aggaucggaucagcauccu

SEQ ID NO: 928379 - RNA, 19 nt, Artificial Sequence
  Description of Artificial Sequence: Synthetic oligonucleotide
cggccugucuugcuuaaag

SEQ ID NO: 928380 - RNA, 19 nt, Artificial Sequence
  Description of Artificial Sequence: Synthetic oligonucleotide
guuguuuacugggcauaua

SEQ ID NO: 928381 - RNA, 19 nt, Artificial Sequence
  Description of Artificial Sequence: Synthetic oligonucleotide
accggcuguccgaacacau

SEQ ID NO: 928382 - RNA, 19 nt, Artificial Sequence
  Description of Artificial Sequence: Synthetic oligonucleotide
ugggucccacaaugccagu

SEQ ID NO: 928383 - RNA, 19 nt, Artificial Sequence
  Description of Artificial Sequence: Synthetic oligonucleotide
ggcugaaaccagugguaaa

SEQ ID NO: 928384 - RNA, 19 nt, Artificial Sequence
  Description of Artificial Sequence: Synthetic oligonucleotide
gccaguugucguucacuca

SEQ ID NO: 928385 - RNA, 19 nt, Artificial Sequence
  Description of Artificial Sequence: Synthetic oligonucleotide
ugcuucccguagugagauc

SEQ ID NO: 928386 - RNA, 19 nt, Artificial Sequence
  Description of Artificial Sequence: Synthetic oligonucleotide
agggccccauugcuugaau

SEQ ID NO: 928387 - RNA, 19 nt, Artificial Sequence
  Description of Artificial Sequence: Synthetic oligonucleotide
ggugugaccuggccacaga

SEQ ID NO: 928388 - RNA, 19 nt, Artificial Sequence
  Description of Artificial Sequence: Synthetic oligonucleotide
gggccccauugcuugaauc

SEQ ID NO: 928389 - RNA, 19 nt, Artificial Sequence
  Description of Artificial Sequence: Synthetic oligonucleotide
gaccggcuguccgaacaca

SEQ ID NO: 928390 - RNA, 19 nt, Artificial Sequence
  Description of Artificial Sequence: Synthetic oligonucleotide
accgcucgccaggggcgcc

SEQ ID NO: 928391 - RNA, 19 nt, Artificial Sequence
  Description of Artificial Sequence: Synthetic oligonucleotide
gcccacacgcuugguaugc

SEQ ID NO: 928392 - RNA, 19 nt, Artificial Sequence
  Description of Artificial Sequence: Synthetic oligonucleotide
caaaguguccaggcgguau

SEQ ID NO: 928393 - RNA, 19 nt, Artificial Sequence
  Description of Artificial Sequence: Synthetic oligonucleotide
gcccgcaugggccgggccc

SEQ ID NO: 928394 - RNA, 19 nt, Artificial Sequence
  Description of Artificial Sequence: Synthetic oligonucleotide
ccaguugucguucacucau

SEQ ID NO: 928395 - RNA, 19 nt, Artificial Sequence
  Description of Artificial Sequence: Synthetic oligonucleotide
gucguucacucaugcggcu

SEQ ID NO: 928396 - RNA, 19 nt, Artificial Sequence
  Description of Artificial Sequence: Synthetic oligonucleotide
ggccgacuguccgauagca

SEQ ID NO: 928397 - RNA, 19 nt, Artificial Sequence
  Description of Artificial Sequence: Synthetic oligonucleotide
gcaggucgagaagaugguc

SEQ ID NO: 928398 - RNA, 19 nt, Artificial Sequence
  Description of Artificial Sequence: Synthetic oligonucleotide
ccgggcaauuucacacuug

SEQ ID NO: 928399 - RNA, 19 nt, Artificial Sequence
  Description of Artificial Sequence: Synthetic oligonucleotide
gucgagaagauggucccuu

SEQ ID NO: 928400 - RNA, 19 nt, Artificial Sequence
  Description of Artificial Sequence: Synthetic oligonucleotide
gaccuccaagccccucuua

SEQ ID NO: 928401 - RNA, 19 nt, Artificial Sequence
  Description of Artificial Sequence: Synthetic oligonucleotide
guaacccgggacacucgaa

SEQ ID NO: 928402 - RNA, 19 nt, Artificial Sequence
  Description of Artificial Sequence: Synthetic oligonucleotide
gaucgaugauucggacacu

SEQ ID NO: 928403 - RNA, 19 nt, Artificial Sequence
  Description of Artificial Sequence: Synthetic oligonucleotide
gaccucgggcggcuccgga

SEQ ID NO: 928404 - RNA, 19 nt, Artificial Sequence
  Description of Artificial Sequence: Synthetic oligonucleotide
guccgaacacaugccggaa

SEQ ID NO: 928405 - RNA, 19 nt, Artificial Sequence
  Description of Artificial Sequence: Synthetic oligonucleotide
ccgcucaccgcucgccagg

SEQ ID NO: 928406 - RNA, 19 nt, Artificial Sequence
  Description of Artificial Sequence: Synthetic oligonucleotide
caccgcucgccaggggcgc

SEQ ID NO: 928407 - RNA, 19 nt, Artificial Sequence
  Description of Artificial Sequence: Synthetic oligonucleotide
caccgcucaccgcucgcca

SEQ ID NO: 928408 - RNA, 19 nt, Artificial Sequence
  Description of Artificial Sequence: Synthetic oligonucleotide
gagagugggcugggcaggu

SEQ ID NO: 928409 - RNA, 19 nt, Artificial Sequence
  Description of Artificial Sequence: Synthetic oligonucleotide
cggacacucuuguccuugc

SEQ ID NO: 928410 - RNA, 19 nt, Artificial Sequence
  Description of Artificial Sequence: Synthetic oligonucleotide
gccggcugaccuucagauc

SEQ ID NO: 928411 - RNA, 19 nt, Artificial Sequence
  Description of Artificial Sequence: Synthetic oligonucleotide
cauuucgccggcugaccuu

SEQ ID NO: 928412 - RNA, 19 nt, Artificial Sequence
  Description of Artificial Sequence: Synthetic oligonucleotide
ccccuccugggaucgauga

SEQ ID NO: 928413 - RNA, 19 nt, Artificial Sequence
  Description of Artificial Sequence: Synthetic oligonucleotide
cacuacuggcucagucagu

SEQ ID NO: 928414 - RNA, 19 nt, Artificial Sequence
  Description of Artificial Sequence: Synthetic oligonucleotide
gccccucaagcaccacuac

SEQ ID NO: 928415 - RNA, 19 nt, Artificial Sequence
  Description of Artificial Sequence: Synthetic oligonucleotide
gcggcugaaaccaguggua

SEQ ID NO: 928416 - RNA, 19 nt, Artificial Sequence
  Description of Artificial Sequence: Synthetic oligonucleotide
gggacugcggcggcgaccu

SEQ ID NO: 928417 - RNA, 19 nt, Artificial Sequence
  Description of Artificial Sequence: Synthetic oligonucleotide
ccgcucacccaauccucug

SEQ ID NO: 928418 - RNA, 19 nt, Artificial Sequence
  Description of Artificial Sequence: Synthetic oligonucleotide
auggucccuuaaagaacuu

SEQ ID NO: 928419 - RNA, 19 nt, Artificial Sequence
  Description of Artificial Sequence: Synthetic oligonucleotide
ggggacugcggcggcgacc

SEQ ID NO: 928420 - RNA, 19 nt, Artificial Sequence
  Description of Artificial Sequence: Synthetic oligonucleotide
caaugcggccugucuugcu

SEQ ID NO: 928421 - RNA, 19 nt, Artificial Sequence
  Description of Artificial Sequence: Synthetic oligonucleotide
gccgacuguccgauagcac

SEQ ID NO: 928422 - RNA, 19 nt, Artificial Sequence
  Description of Artificial Sequence: Synthetic oligonucleotide
cuggugugaccuggccaca

SEQ ID NO: 928423 - RNA, 19 nt, Artificial Sequence
  Description of Artificial Sequence: Synthetic oligonucleotide
gguugacugcgcagaaggu

SEQ ID NO: 928424 - RNA, 19 nt, Artificial Sequence
  Description of Artificial Sequence: Synthetic oligonucleotide
cccguagugagaucaggau

SEQ ID NO: 928425 - RNA, 19 nt, Artificial Sequence
  Description of Artificial Sequence: Synthetic oligonucleotide
gacuguccgauagcacauu

SEQ ID NO: 928426 - RNA, 19 nt, Artificial Sequence
  Description of Artificial Sequence: Synthetic oligonucleotide
ccugcccgcucacccaauc

SEQ ID NO: 928427 - RNA, 19 nt, Artificial Sequence
  Description of Artificial Sequence: Synthetic oligonucleotide
cccgcaugggccgggcccc

SEQ ID NO: 928428 - RNA, 19 nt, Artificial Sequence
  Description of Artificial Sequence: Synthetic oligonucleotide
cgagaagauggucccuuaa

SEQ ID NO: 928429 - RNA, 19 nt, Artificial Sequence
  Description of Artificial Sequence: Synthetic oligonucleotide
gcccgcucacccaauccuc

SEQ ID NO: 928430 - RNA, 19 nt, Artificial Sequence
  Description of Artificial Sequence: Synthetic oligonucleotide
cacuugcguucauggaguu

SEQ ID NO: 928431 - RNA, 19 nt, Artificial Sequence
  Description of Artificial Sequence: Synthetic oligonucleotide
gggcaauuucacacuugcu

SEQ ID NO: 928432 - RNA, 19 nt, Artificial Sequence
  Description of Artificial Sequence: Synthetic oligonucleotide
ccgaacacaugccggaauu

SEQ ID NO: 928433 - RNA, 19 nt, Artificial Sequence
  Description of Artificial Sequence: Synthetic oligonucleotide
cagggccccauugcuugaa

SEQ ID NO: 928434 - RNA, 19 nt, Artificial Sequence
  Description of Artificial Sequence: Synthetic oligonucleotide
ggcggcgaccucgggcggc

SEQ ID NO: 928435 - RNA, 19 nt, Artificial Sequence
  Description of Artificial Sequence: Synthetic oligonucleotide
ggucgagaagauggucccu

SEQ ID NO: 928436 - RNA, 19 nt, Artificial Sequence
  Description of Artificial Sequence: Synthetic oligonucleotide
gcucgccaggggcgccggg

SEQ ID NO: 928437 - RNA, 19 nt, Artificial Sequence
  Description of Artificial Sequence: Synthetic oligonucleotide
cccguuguuuacugggcau

SEQ ID NO: 928438 - RNA, 19 nt, Artificial Sequence
  Description of Artificial Sequence: Synthetic oligonucleotide
ccccucaagcaccacuacu

SEQ ID NO: 928439 - RNA, 19 nt, Artificial Sequence
  Description of Artificial Sequence: Synthetic oligonucleotide
gcaaaguguccaggcggua

SEQ ID NO: 928440 - RNA, 19 nt, Artificial Sequence
  Description of Artificial Sequence: Synthetic oligonucleotide
cgcucaccgcucgccaggg

SEQ ID NO: 928441 - RNA, 19 nt, Artificial Sequence
  Description of Artificial Sequence: Synthetic oligonucleotide
cgggacacucgaauguccu

SEQ ID NO: 928442 - RNA, 19 nt, Artificial Sequence
  Description of Artificial Sequence: Synthetic oligonucleotide
cccgcucacccaauccucu

SEQ ID NO: 928443 - RNA, 19 nt, Artificial Sequence
  Description of Artificial Sequence: Synthetic oligonucleotide
cggcugaaaccagugguaa

SEQ ID NO: 928444 - RNA, 19 nt, Artificial Sequence
  Description of Artificial Sequence: Synthetic oligonucleotide
guguugggugcaggucccu

SEQ ID NO: 928445 - RNA, 19 nt, Artificial Sequence
  Description of Artificial Sequence: Synthetic oligonucleotide
cgacuguccgauagcacau

SEQ ID NO: 928446 - RNA, 19 nt, Artificial Sequence
  Description of Artificial Sequence: Synthetic oligonucleotide
gggucccacaaugccaguu

SEQ ID NO: 928447 - RNA, 19 nt, Artificial Sequence
  Description of Artificial Sequence: Synthetic oligonucleotide
cgccggcugaccuucagau

SEQ ID NO: 928448 - RNA, 19 nt, Artificial Sequence
  Description of Artificial Sequence: Synthetic oligonucleotide
cguuguuuacugggcauau

SEQ ID NO: 928449 - RNA, 19 nt, Artificial Sequence
  Description of Artificial Sequence: Synthetic oligonucleotide
cgcucaccgcucaccgcuc

SEQ ID NO: 928450 - RNA, 19 nt, Artificial Sequence
  Description of Artificial Sequence: Synthetic oligonucleotide
cccauaccccuuugggguu

SEQ ID NO: 928451 - RNA, 19 nt, Artificial Sequence
  Description of Artificial Sequence: Synthetic oligonucleotide
cccuugccacagacauaga

SEQ ID NO: 928452 - RNA, 19 nt, Artificial Sequence
  Description of Artificial Sequence: Synthetic oligonucleotide
gcaggccgacuguccgaua

SEQ ID NO: 928453 - RNA, 19 nt, Artificial Sequence
  Description of Artificial Sequence: Synthetic oligonucleotide
ccggggacugcggcggcga

SEQ ID NO: 928454 - RNA, 19 nt, Artificial Sequence
  Description of Artificial Sequence: Synthetic oligonucleotide
gcggccugucuugcuuaaa

SEQ ID NO: 928455 - RNA, 19 nt, Artificial Sequence
  Description of Artificial Sequence: Synthetic oligonucleotide
caggucccuggugguccua

SEQ ID NO: 928456 - RNA, 19 nt, Artificial Sequence
  Description of Artificial Sequence: Synthetic oligonucleotide
cgcucgccaggggcgccgg

SEQ ID NO: 928457 - RNA, 19 nt, Artificial Sequence
  Description of Artificial Sequence: Synthetic oligonucleotide
gcaccacuacuggcucagu

SEQ ID NO: 928458 - RNA, 19 nt, Artificial Sequence
  Description of Artificial Sequence: Synthetic oligonucleotide
cgaagugcccggagcucuu

SEQ ID NO: 928459 - RNA, 19 nt, Artificial Sequence
  Description of Artificial Sequence: Synthetic oligonucleotide
aaugauaagagccuuuacc

SEQ ID NO: 928460 - RNA, 19 nt, Artificial Sequence
  Description of Artificial Sequence: Synthetic oligonucleotide
agcaacuaaacuuucaucc

SEQ ID NO: 928461 - RNA, 19 nt, Artificial Sequence
  Description of Artificial Sequence: Synthetic oligonucleotide
aauucgaaaccucagauca

SEQ ID NO: 928462 - RNA, 19 nt, Artificial Sequence
  Description of Artificial Sequence: Synthetic oligonucleotide
uauauuucccaucaauucg

SEQ ID NO: 928463 - RNA, 19 nt, Artificial Sequence
  Description of Artificial Sequence: Synthetic oligonucleotide
uucacuaacacacacacac

SEQ ID NO: 928464 - RNA, 19 nt, Artificial Sequence
  Description of Artificial Sequence: Synthetic oligonucleotide
aacacacacacacacacac

SEQ ID NO: 928465 - RNA, 19 nt, Artificial Sequence
  Description of Artificial Sequence: Synthetic oligonucleotide
agucuuaaugauaagagcc

SEQ ID NO: 928466 - RNA, 19 nt, Artificial Sequence
  Description of Artificial Sequence: Synthetic oligonucleotide
guuaaaguggguuuaaugc

SEQ ID NO: 928467 - RNA, 19 nt, Artificial Sequence
  Description of Artificial Sequence: Synthetic oligonucleotide
uguaaaacaacuuguaacu

SEQ ID NO: 928468 - RNA, 19 nt, Artificial Sequence
  Description of Artificial Sequence: Synthetic oligonucleotide
agaaaugugacuucucugg

SEQ ID NO: 928469 - RNA, 19 nt, Artificial Sequence
  Description of Artificial Sequence: Synthetic oligonucleotide
aaaggcuccacauuuacug

SEQ ID NO: 928470 - RNA, 19 nt, Artificial Sequence
  Description of Artificial Sequence: Synthetic oligonucleotide
uuuauggacaugaauauau

SEQ ID NO: 928471 - RNA, 19 nt, Artificial Sequence
  Description of Artificial Sequence: Synthetic oligonucleotide
uaguauguaaaacaacuug

SEQ ID NO: 928472 - RNA, 19 nt, Artificial Sequence
  Description of Artificial Sequence: Synthetic oligonucleotide
ucaauaguauuucuuaaga

SEQ ID NO: 928473 - RNA, 19 nt, Artificial Sequence
  Description of Artificial Sequence: Synthetic oligonucleotide
aaaggcacgguacacgggg

SEQ ID NO: 928474 - RNA, 19 nt, Artificial Sequence
  Description of Artificial Sequence: Synthetic oligonucleotide
ugaacuuaagccaucaguc

SEQ ID NO: 928475 - RNA, 19 nt, Artificial Sequence
  Description of Artificial Sequence: Synthetic oligonucleotide
acagagaucagccaaauau

SEQ ID NO: 928476 - RNA, 19 nt, Artificial Sequence
  Description of Artificial Sequence: Synthetic oligonucleotide
aggacuggaacauggaucg

SEQ ID NO: 928477 - RNA, 19 nt, Artificial Sequence
  Description of Artificial Sequence: Synthetic oligonucleotide
ucucuuaguauguaaaaca

SEQ ID NO: 928478 - RNA, 19 nt, Artificial Sequence
  Description of Artificial Sequence: Synthetic oligonucleotide
uucaaaacagcuuuaugga

SEQ ID NO: 928479 - RNA, 19 nt, Artificial Sequence
  Description of Artificial Sequence: Synthetic oligonucleotide
uggacaugaauauauuucc

SEQ ID NO: 928480 - RNA, 19 nt, Artificial Sequence
  Description of Artificial Sequence: Synthetic oligonucleotide
augaugugcugacaaagcc

SEQ ID NO: 928481 - RNA, 19 nt, Artificial Sequence
  Description of Artificial Sequence: Synthetic oligonucleotide
uucauucaguucuuaaagg

SEQ ID NO: 928482 - RNA, 19 nt, Artificial Sequence
  Description of Artificial Sequence: Synthetic oligonucleotide
uuaauccaaguucaaaaga

SEQ ID NO: 928483 - RNA, 19 nt, Artificial Sequence
  Description of Artificial Sequence: Synthetic oligonucleotide
ucaaggauacaguuuaggc

SEQ ID NO: 928484 - RNA, 19 nt, Artificial Sequence
  Description of Artificial Sequence: Synthetic oligonucleotide
auacaugugggguuuuacc

SEQ ID NO: 928485 - RNA, 19 nt, Artificial Sequence
  Description of Artificial Sequence: Synthetic oligonucleotide
uaaugcauauucaauagua

SEQ ID NO: 928486 - RNA, 19 nt, Artificial Sequence
  Description of Artificial Sequence: Synthetic oligonucleotide
gaugcccacaucuuaagag

SEQ ID NO: 928487 - RNA, 19 nt, Artificial Sequence
  Description of Artificial Sequence: Synthetic oligonucleotide
aaagcaacuaaacuuucau

SEQ ID NO: 928488 - RNA, 19 nt, Artificial Sequence
  Description of Artificial Sequence: Synthetic oligonucleotide
uguauagcggucaaaggac

SEQ ID NO: 928489 - RNA, 19 nt, Artificial Sequence
  Description of Artificial Sequence: Synthetic oligonucleotide
aagcaacuaaacuuucauc

SEQ ID NO: 928490 - RNA, 19 nt, Artificial Sequence
  Description of Artificial Sequence: Synthetic oligonucleotide
uauucaauaguauuucuua

SEQ ID NO: 928491 - RNA, 19 nt, Artificial Sequence
  Description of Artificial Sequence: Synthetic oligonucleotide
agaaucacaucacccaccg

SEQ ID NO: 928492 - RNA, 19 nt, Artificial Sequence
  Description of Artificial Sequence: Synthetic oligonucleotide
agagaauaaugagaaagcg

SEQ ID NO: 928493 - RNA, 19 nt, Artificial Sequence
  Description of Artificial Sequence: Synthetic oligonucleotide
aguccaagagaccuauggc

SEQ ID NO: 928494 - RNA, 19 nt, Artificial Sequence
  Description of Artificial Sequence: Synthetic oligonucleotide
cuaacacacacacacacac

SEQ ID NO: 928495 - RNA, 19 nt, Artificial Sequence
  Description of Artificial Sequence: Synthetic oligonucleotide
uuucacaguacgaugucgc

SEQ ID NO: 928496 - RNA, 19 nt, Artificial Sequence
  Description of Artificial Sequence: Synthetic oligonucleotide
aacacuaauuucaagaaua

SEQ ID NO: 928497 - RNA, 19 nt, Artificial Sequence
  Description of Artificial Sequence: Synthetic oligonucleotide
ugagaaagcguuuuccaca

SEQ ID NO: 928498 - RNA, 19 nt, Artificial Sequence
  Description of Artificial Sequence: Synthetic oligonucleotide
aacuggucuaucucuauca

SEQ ID NO: 928499 - RNA, 19 nt, Artificial Sequence
  Description of Artificial Sequence: Synthetic oligonucleotide
augagaaagcguuuuccac

SEQ ID NO: 928500 - RNA, 19 nt, Artificial Sequence
  Description of Artificial Sequence: Synthetic oligonucleotide
agucuguuuucacaguacg

SEQ ID NO: 928501 - RNA, 19 nt, Artificial Sequence
  Description of Artificial Sequence: Synthetic oligonucleotide
uucuggacuaucaaauucu

SEQ ID NO: 928502 - RNA, 19 nt, Artificial Sequence
  Description of Artificial Sequence: Synthetic oligonucleotide
uuguccuucaccgacagug

SEQ ID NO: 928503 - RNA, 19 nt, Artificial Sequence
  Description of Artificial Sequence: Synthetic oligonucleotide
ugucaaaugauugaugcaa

SEQ ID NO: 928504 - RNA, 19 nt, Artificial Sequence
  Description of Artificial Sequence: Synthetic oligonucleotide
aaaacauguauagcgguca

SEQ ID NO: 928505 - RNA, 19 nt, Artificial Sequence
  Description of Artificial Sequence: Synthetic oligonucleotide
ucaauucgaaaccucagau

SEQ ID NO: 928506 - RNA, 19 nt, Artificial Sequence
  Description of Artificial Sequence: Synthetic oligonucleotide
aaggacaauuuguaagucu

SEQ ID NO: 928507 - RNA, 19 nt, Artificial Sequence
  Description of Artificial Sequence: Synthetic oligonucleotide
ugauugaugcaaaacuuaa

SEQ ID NO: 928508 - RNA, 19 nt, Artificial Sequence
  Description of Artificial Sequence: Synthetic oligonucleotide
aguacgaugucgccaaguc

SEQ ID NO: 928509 - RNA, 19 nt, Artificial Sequence
  Description of Artificial Sequence: Synthetic oligonucleotide
uuaaugcauauucaauagu

SEQ ID NO: 928510 - RNA, 19 nt, Artificial Sequence
  Description of Artificial Sequence: Synthetic oligonucleotide
agugugaacaggcuuguug

SEQ ID NO: 928511 - RNA, 19 nt, Artificial Sequence
  Description of Artificial Sequence: Synthetic oligonucleotide
cuuaguauguaaaacaacu

SEQ ID NO: 928512 - RNA, 19 nt, Artificial Sequence
  Description of Artificial Sequence: Synthetic oligonucleotide
uuucuuaagagccucccau

SEQ ID NO: 928513 - RNA, 19 nt, Artificial Sequence
  Description of Artificial Sequence: Synthetic oligonucleotide
ucuuaguauguaaaacaac

SEQ ID NO: 928514 - RNA, 19 nt, Artificial Sequence
  Description of Artificial Sequence: Synthetic oligonucleotide
uucaccgacagugugaaca

SEQ ID NO: 928515 - RNA, 19 nt, Artificial Sequence
  Description of Artificial Sequence: Synthetic oligonucleotide
uacaguuuaggcuauuuua

SEQ ID NO: 928516 - RNA, 19 nt, Artificial Sequence
  Description of Artificial Sequence: Synthetic oligonucleotide
aguuuaggcuauuuuaaga

SEQ ID NO: 928517 - RNA, 19 nt, Artificial Sequence
  Description of Artificial Sequence: Synthetic oligonucleotide
aauaaugagaaagcguuuu

SEQ ID NO: 928518 - RNA, 19 nt, Artificial Sequence
  Description of Artificial Sequence: Synthetic oligonucleotide
acauguauagcggucaaag

SEQ ID NO: 928519 - RNA, 19 nt, Artificial Sequence
  Description of Artificial Sequence: Synthetic oligonucleotide
aaaggacaauuuguaaguc

SEQ ID NO: 928520 - RNA, 19 nt, Artificial Sequence
  Description of Artificial Sequence: Synthetic oligonucleotide
aguauguaaaacaacuugu

SEQ ID NO: 928521 - RNA, 19 nt, Artificial Sequence
  Description of Artificial Sequence: Synthetic oligonucleotide
uacaugugggguuuuaccu

SEQ ID NO: 928522 - RNA, 19 nt, Artificial Sequence
  Description of Artificial Sequence: Synthetic oligonucleotide
cacgggguaagaaaacugg

SEQ ID NO: 928523 - RNA, 19 nt, Artificial Sequence
  Description of Artificial Sequence: Synthetic oligonucleotide
uggguguugggcuuaguag

SEQ ID NO: 928524 - RNA, 19 nt, Artificial Sequence
  Description of Artificial Sequence: Synthetic oligonucleotide
uaaaguggguuuaaugcau

SEQ ID NO: 928525 - RNA, 19 nt, Artificial Sequence
  Description of Artificial Sequence: Synthetic oligonucleotide
uuaguauguaaaacaacuu

SEQ ID NO: 928526 - RNA, 19 nt, Artificial Sequence
  Description of Artificial Sequence: Synthetic oligonucleotide
aucggaagugcucacaccu

SEQ ID NO: 928527 - RNA, 19 nt, Artificial Sequence
  Description of Artificial Sequence: Synthetic oligonucleotide
cauuggaugaggucugacc

SEQ ID NO: 928528 - RNA, 19 nt, Artificial Sequence
  Description of Artificial Sequence: Synthetic oligonucleotide
uuagcggcagauguguggg

SEQ ID NO: 928529 - RNA, 19 nt, Artificial Sequence
  Description of Artificial Sequence: Synthetic oligonucleotide
agucuguguaacuucuguc

SEQ ID NO: 928530 - RNA, 19 nt, Artificial Sequence
  Description of Artificial Sequence: Synthetic oligonucleotide
aaacacuuuugaaagggcu

SEQ ID NO: 928531 - RNA, 19 nt, Artificial Sequence
  Description of Artificial Sequence: Synthetic oligonucleotide
aacuucugucaaaugauug

SEQ ID NO: 928532 - RNA, 19 nt, Artificial Sequence
  Description of Artificial Sequence: Synthetic oligonucleotide
auccucggguggcagaucc

SEQ ID NO: 928533 - RNA, 19 nt, Artificial Sequence
  Description of Artificial Sequence: Synthetic oligonucleotide
uggguuuaaugcauauuca

SEQ ID NO: 928534 - RNA, 19 nt, Artificial Sequence
  Description of Artificial Sequence: Synthetic oligonucleotide
aauuccucgcuugaugaug

SEQ ID NO: 928535 - RNA, 19 nt, Artificial Sequence
  Description of Artificial Sequence: Synthetic oligonucleotide
aagggcuuauucuuucacu

SEQ ID NO: 928536 - RNA, 19 nt, Artificial Sequence
  Description of Artificial Sequence: Synthetic oligonucleotide
acucucggcaaaccuaaac

SEQ ID NO: 928537 - RNA, 19 nt, Artificial Sequence
  Description of Artificial Sequence: Synthetic oligonucleotide
acuggucuaucucuaucac

SEQ ID NO: 928538 - RNA, 19 nt, Artificial Sequence
  Description of Artificial Sequence: Synthetic oligonucleotide
cacacacacacacacacac

SEQ ID NO: 928539 - RNA, 19 nt, Artificial Sequence
  Description of Artificial Sequence: Synthetic oligonucleotide
cacuaacacacacacacac

SEQ ID NO: 928540 - RNA, 19 nt, Artificial Sequence
  Description of Artificial Sequence: Synthetic oligonucleotide
cuuagcggcagaugugugg

SEQ ID NO: 928541 - RNA, 19 nt, Artificial Sequence
  Description of Artificial Sequence: Synthetic oligonucleotide
gaaccagagacaucucacc

SEQ ID NO: 928542 - RNA, 19 nt, Artificial Sequence
  Description of Artificial Sequence: Synthetic oligonucleotide
agaaccagagacaucucac

SEQ ID NO: 928543 - RNA, 19 nt, Artificial Sequence
  Description of Artificial Sequence: Synthetic oligonucleotide
acuaaacuuucauccuuuc

SEQ ID NO: 928544 - RNA, 19 nt, Artificial Sequence
  Description of Artificial Sequence: Synthetic oligonucleotide
uauggacaugaauauauuu

SEQ ID NO: 928545 - RNA, 19 nt, Artificial Sequence
  Description of Artificial Sequence: Synthetic oligonucleotide
aucagucuuaaugauaaga

SEQ ID NO: 928546 - RNA, 19 nt, Artificial Sequence
  Description of Artificial Sequence: Synthetic oligonucleotide
gaugaugugcugacaaagc

SEQ ID NO: 928547 - RNA, 19 nt, Artificial Sequence
  Description of Artificial Sequence: Synthetic oligonucleotide
agcacucacacccagccca

SEQ ID NO: 928548 - RNA, 19 nt, Artificial Sequence
  Description of Artificial Sequence: Synthetic oligonucleotide
guagagguacuggagaaag

SEQ ID NO: 928549 - RNA, 19 nt, Artificial Sequence
  Description of Artificial Sequence: Synthetic oligonucleotide
agcuuuauggacaugaaua

SEQ ID NO: 928550 - RNA, 19 nt, Artificial Sequence
  Description of Artificial Sequence: Synthetic oligonucleotide
acaucacccaccgugcccc

SEQ ID NO: 928551 - RNA, 19 nt, Artificial Sequence
  Description of Artificial Sequence: Synthetic oligonucleotide
aaugcauauucaauaguau

SEQ ID NO: 928552 - RNA, 19 nt, Artificial Sequence
  Description of Artificial Sequence: Synthetic oligonucleotide
gagaaaggcacgguacacg

SEQ ID NO: 928553 - RNA, 19 nt, Artificial Sequence
  Description of Artificial Sequence: Synthetic oligonucleotide
caucaauucgaaaccucag

SEQ ID NO: 928554 - RNA, 19 nt, Artificial Sequence
  Description of Artificial Sequence: Synthetic oligonucleotide
ugggguuuuaccugcagaa

SEQ ID NO: 928555 - RNA, 19 nt, Artificial Sequence
  Description of Artificial Sequence: Synthetic oligonucleotide
uuaaugauaagagccuuua

SEQ ID NO: 928556 - RNA, 19 nt, Artificial Sequence
  Description of Artificial Sequence: Synthetic oligonucleotide
uucuuaagagccucccaug

SEQ ID NO: 928557 - RNA, 19 nt, Artificial Sequence
  Description of Artificial Sequence: Synthetic oligonucleotide
aagcguuuuccacaguaau

SEQ ID NO: 928558 - RNA, 19 nt, Artificial Sequence
  Description of Artificial Sequence: Synthetic oligonucleotide
uuaagaaaugugacuucuc

SEQ ID NO: 928559 - RNA, 19 nt, Artificial Sequence
  Description of Artificial Sequence: Synthetic oligonucleotide
accgacagugugaacaggc

SEQ ID NO: 928560 - RNA, 19 nt, Artificial Sequence
  Description of Artificial Sequence: Synthetic oligonucleotide
uaaugauaagagccuuuac

SEQ ID NO: 928561 - RNA, 19 nt, Artificial Sequence
  Description of Artificial Sequence: Synthetic oligonucleotide
aggacaauuuguaagucug

SEQ ID NO: 928562 - RNA, 19 nt, Artificial Sequence
  Description of Artificial Sequence: Synthetic oligonucleotide
uuuuaccugcagaaucaca

SEQ ID NO: 928563 - RNA, 19 nt, Artificial Sequence
  Description of Artificial Sequence: Synthetic oligonucleotide
caguuuaggcuauuuuaag

SEQ ID NO: 928564 - RNA, 19 nt, Artificial Sequence
  Description of Artificial Sequence: Synthetic oligonucleotide
caauuuguaagucugcucu

SEQ ID NO: 928565 - RNA, 19 nt, Artificial Sequence
  Description of Artificial Sequence: Synthetic oligonucleotide
acaugugggguuuuaccug

SEQ ID NO: 928566 - RNA, 19 nt, Artificial Sequence
  Description of Artificial Sequence: Synthetic oligonucleotide
ucucggcaaaccuaaacau

SEQ ID NO: 928567 - RNA, 19 nt, Artificial Sequence
  Description of Artificial Sequence: Synthetic oligonucleotide
cauugccaauuauagcccc

SEQ ID NO: 928568 - RNA, 19 nt, Artificial Sequence
  Description of Artificial Sequence: Synthetic oligonucleotide
ucaccgacagugugaacag

SEQ ID NO: 928569 - RNA, 19 nt, Artificial Sequence
  Description of Artificial Sequence: Synthetic oligonucleotide
caauucgaaaccucagauc

SEQ ID NO: 928570 - RNA, 19 nt, Artificial Sequence
  Description of Artificial Sequence: Synthetic oligonucleotide
uaaacgugcccgccuuggg

SEQ ID NO: 928571 - RNA, 19 nt, Artificial Sequence
  Description of Artificial Sequence: Synthetic oligonucleotide
cucuuaguauguaaaacaa

SEQ ID NO: 928572 - RNA, 19 nt, Artificial Sequence
  Description of Artificial Sequence: Synthetic oligonucleotide
accuauggcauccucgggu

SEQ ID NO: 928573 - RNA, 19 nt, Artificial Sequence
  Description of Artificial Sequence: Synthetic oligonucleotide
ucacuaacacacacacaca

SEQ ID NO: 928574 - RNA, 19 nt, Artificial Sequence
  Description of Artificial Sequence: Synthetic oligonucleotide
uaacacacacacacacaca

SEQ ID NO: 928575 - RNA, 19 nt, Artificial Sequence
  Description of Artificial Sequence: Synthetic oligonucleotide
agagacaucucaccaacuu

SEQ ID NO: 928576 - RNA, 19 nt, Artificial Sequence
  Description of Artificial Sequence: Synthetic oligonucleotide
auauuucccaucaauucga

SEQ ID NO: 928577 - RNA, 19 nt, Artificial Sequence
  Description of Artificial Sequence: Synthetic oligonucleotide
aaacauguauagcggucaa

SEQ ID NO: 928578 - RNA, 19 nt, Artificial Sequence
  Description of Artificial Sequence: Synthetic oligonucleotide
uuauggacaugaauauauu

SEQ ID NO: 928579 - RNA, 19 nt, Artificial Sequence
  Description of Artificial Sequence: Synthetic oligonucleotide
uccuucaccgacaguguga

SEQ ID NO: 928580 - RNA, 19 nt, Artificial Sequence
  Description of Artificial Sequence: Synthetic oligonucleotide
ugccccagagcacucacac

SEQ ID NO: 928581 - RNA, 19 nt, Artificial Sequence
  Description of Artificial Sequence: Synthetic oligonucleotide
aaaaugccguagucugugu

SEQ ID NO: 928582 - RNA, 19 nt, Artificial Sequence
  Description of Artificial Sequence: Synthetic oligonucleotide
uauagcggucaaaggacaa

SEQ ID NO: 928583 - RNA, 19 nt, Artificial Sequence
  Description of Artificial Sequence: Synthetic oligonucleotide
aaguggguuuaaugcauau

SEQ ID NO: 928584 - RNA, 19 nt, Artificial Sequence
  Description of Artificial Sequence: Synthetic oligonucleotide
aaagauccucucaucaaaa

SEQ ID NO: 928585 - RNA, 19 nt, Artificial Sequence
  Description of Artificial Sequence: Synthetic oligonucleotide
ucgagggguuguuuguucc

SEQ ID NO: 928586 - RNA, 19 nt, Artificial Sequence
  Description of Artificial Sequence: Synthetic oligonucleotide
uacccauuguuuccccaag

SEQ ID NO: 928587 - RNA, 19 nt, Artificial Sequence
  Description of Artificial Sequence: Synthetic oligonucleotide
auaucugacugcagcagag

SEQ ID NO: 928588 - RNA, 19 nt, Artificial Sequence
  Description of Artificial Sequence: Synthetic oligonucleotide
gaacauggaucggaagugc

SEQ ID NO: 928589 - RNA, 19 nt, Artificial Sequence
  Description of Artificial Sequence: Synthetic oligonucleotide
ugugggguuuuaccugcag

SEQ ID NO: 928590 - RNA, 19 nt, Artificial Sequence
  Description of Artificial Sequence: Synthetic oligonucleotide
aaaugccguagucugugua

SEQ ID NO: 928591 - RNA, 19 nt, Artificial Sequence
  Description of Artificial Sequence: Synthetic oligonucleotide
aacacuuuugaaagggcuu

SEQ ID NO: 928592 - RNA, 19 nt, Artificial Sequence
  Description of Artificial Sequence: Synthetic oligonucleotide
augucgccaaguccaagag

SEQ ID NO: 928593 - RNA, 19 nt, Artificial Sequence
  Description of Artificial Sequence: Synthetic oligonucleotide
cucucggcaaaccuaaaca

SEQ ID NO: 928594 - RNA, 19 nt, Artificial Sequence
  Description of Artificial Sequence: Synthetic oligonucleotide
uuacccauuguuuccccaa

SEQ ID NO: 928595 - RNA, 19 nt, Artificial Sequence
  Description of Artificial Sequence: Synthetic oligonucleotide
gaucggaagugcucacacc

SEQ ID NO: 928596 - RNA, 19 nt, Artificial Sequence
  Description of Artificial Sequence: Synthetic oligonucleotide
uacacgggguaagaaaacu

SEQ ID NO: 928597 - RNA, 19 nt, Artificial Sequence
  Description of Artificial Sequence: Synthetic oligonucleotide
ucacaguacgaugucgcca

SEQ ID NO: 928598 - RNA, 19 nt, Artificial Sequence
  Description of Artificial Sequence: Synthetic oligonucleotide
aggcuauuuuaagaaaugu

SEQ ID NO: 928599 - RNA, 19 nt, Artificial Sequence
  Description of Artificial Sequence: Synthetic oligonucleotide
uguaaacgugcccgccuug

SEQ ID NO: 928600 - RNA, 19 nt, Artificial Sequence
  Description of Artificial Sequence: Synthetic oligonucleotide
uauuucccaucaauucgaa

SEQ ID NO: 928601 - RNA, 19 nt, Artificial Sequence
  Description of Artificial Sequence: Synthetic oligonucleotide
ccucauuccaguaggacug

SEQ ID NO: 928602 - RNA, 19 nt, Artificial Sequence
  Description of Artificial Sequence: Synthetic oligonucleotide
cacacacacacacacaaaa

SEQ ID NO: 928603 - RNA, 19 nt, Artificial Sequence
  Description of Artificial Sequence: Synthetic oligonucleotide
uugccaaaaugccguaguc

SEQ ID NO: 928604 - RNA, 19 nt, Artificial Sequence
  Description of Artificial Sequence: Synthetic oligonucleotide
agauccacugugucugugu

SEQ ID NO: 928605 - RNA, 19 nt, Artificial Sequence
  Description of Artificial Sequence: Synthetic oligonucleotide
ucuggacuaucaaauucuu

SEQ ID NO: 928606 - RNA, 19 nt, Artificial Sequence
  Description of Artificial Sequence: Synthetic oligonucleotide
guaaacgugcccgccuugg

SEQ ID NO: 928607 - RNA, 19 nt, Artificial Sequence
  Description of Artificial Sequence: Synthetic oligonucleotide
uuacugccaguucccagcu

SEQ ID NO: 928608 - RNA, 19 nt, Artificial Sequence
  Description of Artificial Sequence: Synthetic oligonucleotide
ugucgccaaguccaagaga

SEQ ID NO: 928609 - RNA, 19 nt, Artificial Sequence
  Description of Artificial Sequence: Synthetic oligonucleotide
cuaaacuuucauccuuuca

SEQ ID NO: 928610 - RNA, 19 nt, Artificial Sequence
  Description of Artificial Sequence: Synthetic oligonucleotide
cacacacacacacacacaa

SEQ ID NO: 928611 - RNA, 19 nt, Artificial Sequence
  Description of Artificial Sequence: Synthetic oligonucleotide
ugguuacccauuguuuccc

SEQ ID NO: 928612 - RNA, 19 nt, Artificial Sequence
  Description of Artificial Sequence: Synthetic oligonucleotide
agccucaggcuucauucag

SEQ ID NO: 928613 - RNA, 19 nt, Artificial Sequence
  Description of Artificial Sequence: Synthetic oligonucleotide
cagucuguuuucacaguac

SEQ ID NO: 928614 - RNA, 19 nt, Artificial Sequence
  Description of Artificial Sequence: Synthetic oligonucleotide
auggaucggaagugcucac

SEQ ID NO: 928615 - RNA, 19 nt, Artificial Sequence
  Description of Artificial Sequence: Synthetic oligonucleotide
ugggcuuaguagauuguuu

SEQ ID NO: 928616 - RNA, 19 nt, Artificial Sequence
  Description of Artificial Sequence: Synthetic oligonucleotide
cugaacuuaagccaucagu

SEQ ID NO: 928617 - RNA, 19 nt, Artificial Sequence
  Description of Artificial Sequence: Synthetic oligonucleotide
gauugaugcaaaacuuaaa

SEQ ID NO: 928618 - RNA, 19 nt, Artificial Sequence
  Description of Artificial Sequence: Synthetic oligonucleotide
ugugaacaggcuuguuguc

SEQ ID NO: 928619 - RNA, 19 nt, Artificial Sequence
  Description of Artificial Sequence: Synthetic oligonucleotide
gugugaacaggcuuguugu

SEQ ID NO: 928620 - RNA, 19 nt, Artificial Sequence
  Description of Artificial Sequence: Synthetic oligonucleotide
gaccuauggcauccucggg

SEQ ID NO: 928621 - RNA, 19 nt, Artificial Sequence
  Description of Artificial Sequence: Synthetic oligonucleotide
cacuggacugggcuugucc

SEQ ID NO: 928622 - RNA, 19 nt, Artificial Sequence
  Description of Artificial Sequence: Synthetic oligonucleotide
ucgcuugaugaugugcuga

SEQ ID NO: 928623 - RNA, 19 nt, Artificial Sequence
  Description of Artificial Sequence: Synthetic oligonucleotide
cauaucugacugcagcaga

SEQ ID NO: 928624 - RNA, 19 nt, Artificial Sequence
  Description of Artificial Sequence: Synthetic oligonucleotide
agugagcagcacucaggag

SEQ ID NO: 928625 - RNA, 19 nt, Artificial Sequence
  Description of Artificial Sequence: Synthetic oligonucleotide
auccacugugucuguguag

SEQ ID NO: 928626 - RNA, 19 nt, Artificial Sequence
  Description of Artificial Sequence: Synthetic oligonucleotide
gacuggaacauggaucgga

SEQ ID NO: 928627 - RNA, 19 nt, Artificial Sequence
  Description of Artificial Sequence: Synthetic oligonucleotide
cugacugcagcagagaaua

SEQ ID NO: 928628 - RNA, 19 nt, Artificial Sequence
  Description of Artificial Sequence: Synthetic oligonucleotide
uccucgcuugaugaugugc

SEQ ID NO: 928629 - RNA, 19 nt, Artificial Sequence
  Description of Artificial Sequence: Synthetic oligonucleotide
gacaauuuguaagucugcu

SEQ ID NO: 928630 - RNA, 19 nt, Artificial Sequence
  Description of Artificial Sequence: Synthetic oligonucleotide
uggcuuuagcaaugaacuc

SEQ ID NO: 928631 - RNA, 19 nt, Artificial Sequence
  Description of Artificial Sequence: Synthetic oligonucleotide
acuaacacacacacacaca

SEQ ID NO: 928632 - RNA, 19 nt, Artificial Sequence
  Description of Artificial Sequence: Synthetic oligonucleotide
agugacggggcugcaaucu

SEQ ID NO: 928633 - RNA, 19 nt, Artificial Sequence
  Description of Artificial Sequence: Synthetic oligonucleotide
acacuaauuucaagaauaa

SEQ ID NO: 928634 - RNA, 19 nt, Artificial Sequence
  Description of Artificial Sequence: Synthetic oligonucleotide
gagggguuguuuguuccag

SEQ ID NO: 928635 - RNA, 19 nt, Artificial Sequence
  Description of Artificial Sequence: Synthetic oligonucleotide
ucccaucaauucgaaaccu

SEQ ID NO: 928636 - RNA, 19 nt, Artificial Sequence
  Description of Artificial Sequence: Synthetic oligonucleotide
cacaguacgaugucgccaa

SEQ ID NO: 928637 - RNA, 19 nt, Artificial Sequence
  Description of Artificial Sequence: Synthetic oligonucleotide
cacgagacugcaggggugg

SEQ ID NO: 928638 - RNA, 19 nt, Artificial Sequence
  Description of Artificial Sequence: Synthetic oligonucleotide
cauggaucggaagugcuca

SEQ ID NO: 928639 - RNA, 19 nt, Artificial Sequence
  Description of Artificial Sequence: Synthetic oligonucleotide
acaaggcaaugcugaccac

SEQ ID NO: 928640 - RNA, 19 nt, Artificial Sequence
  Description of Artificial Sequence: Synthetic oligonucleotide
gacugaacuuaagccauca

SEQ ID NO: 928641 - RNA, 19 nt, Artificial Sequence
  Description of Artificial Sequence: Synthetic oligonucleotide
cccgccuugggucuuagcg

SEQ ID NO: 928642 - RNA, 19 nt, Artificial Sequence
  Description of Artificial Sequence: Synthetic oligonucleotide
cagagaucagccaaauaua

SEQ ID NO: 928643 - RNA, 19 nt, Artificial Sequence
  Description of Artificial Sequence: Synthetic oligonucleotide
uggcuguuaaaguggguuu

SEQ ID NO: 928644 - RNA, 19 nt, Artificial Sequence
  Description of Artificial Sequence: Synthetic oligonucleotide
cugucaaaugauugaugca

SEQ ID NO: 928645 - RNA, 19 nt, Artificial Sequence
  Description of Artificial Sequence: Synthetic oligonucleotide
uucgagggguuguuuguuc

SEQ ID NO: 928646 - RNA, 19 nt, Artificial Sequence
  Description of Artificial Sequence: Synthetic oligonucleotide
uaucugacugcagcagaga

SEQ ID NO: 928647 - RNA, 19 nt, Artificial Sequence
  Description of Artificial Sequence: Synthetic oligonucleotide
aacauguauagcggucaaa

SEQ ID NO: 928648 - RNA, 19 nt, Artificial Sequence
  Description of Artificial Sequence: Synthetic oligonucleotide
gggguaagaaaacuggucu

SEQ ID NO: 928649 - RNA, 19 nt, Artificial Sequence
  Description of Artificial Sequence: Synthetic oligonucleotide
gcguuuuccacaguaauuc

SEQ ID NO: 928650 - RNA, 19 nt, Artificial Sequence
  Description of Artificial Sequence: Synthetic oligonucleotide
cauauucaauaguauuucu

SEQ ID NO: 928651 - RNA, 19 nt, Artificial Sequence
  Description of Artificial Sequence: Synthetic oligonucleotide
cagugagcagcacucagga

SEQ ID NO: 928652 - RNA, 19 nt, Artificial Sequence
  Description of Artificial Sequence: Synthetic oligonucleotide
gcagaaucacaucacccac

SEQ ID NO: 928653 - RNA, 19 nt, Artificial Sequence
  Description of Artificial Sequence: Synthetic oligonucleotide
ccauuguuuccccaagccc

SEQ ID NO: 928654 - RNA, 19 nt, Artificial Sequence
  Description of Artificial Sequence: Synthetic oligonucleotide
auuccucgcuugaugaugu

SEQ ID NO: 928655 - RNA, 19 nt, Artificial Sequence
  Description of Artificial Sequence: Synthetic oligonucleotide
acacuuuugaaagggcuua

SEQ ID NO: 928656 - RNA, 19 nt, Artificial Sequence
  Description of Artificial Sequence: Synthetic oligonucleotide
cuauggcauccucgggugg

SEQ ID NO: 928657 - RNA, 19 nt, Artificial Sequence
  Description of Artificial Sequence: Synthetic oligonucleotide
auucgaaaccucagaucag

SEQ ID NO: 928658 - RNA, 19 nt, Artificial Sequence
  Description of Artificial Sequence: Synthetic oligonucleotide
acacgggguaagaaaacug

SEQ ID NO: 928659 - RNA, 19 nt, Artificial Sequence
  Description of Artificial Sequence: Synthetic oligonucleotide
ggaucggaagugcucacac

SEQ ID NO: 928660 - RNA, 19 nt, Artificial Sequence
  Description of Artificial Sequence: Synthetic oligonucleotide
ucgccaaguccaagagacc

SEQ ID NO: 928661 - RNA, 19 nt, Artificial Sequence
  Description of Artificial Sequence: Synthetic oligonucleotide
cuuaaaggcuccacauuua

SEQ ID NO: 928662 - RNA, 19 nt, Artificial Sequence
  Description of Artificial Sequence: Synthetic oligonucleotide
gugaacaggcuuguuguca

SEQ ID NO: 928663 - RNA, 19 nt, Artificial Sequence
  Description of Artificial Sequence: Synthetic oligonucleotide
auguaaacgugcccgccuu

SEQ ID NO: 928664 - RNA, 19 nt, Artificial Sequence
  Description of Artificial Sequence: Synthetic oligonucleotide
uugggcuuaguagauuguu

SEQ ID NO: 928665 - RNA, 19 nt, Artificial Sequence
  Description of Artificial Sequence: Synthetic oligonucleotide
cccauuguuuccccaagcc

SEQ ID NO: 928666 - RNA, 19 nt, Artificial Sequence
  Description of Artificial Sequence: Synthetic oligonucleotide
guuuuaccugcagaaucac

SEQ ID NO: 928667 - RNA, 19 nt, Artificial Sequence
  Description of Artificial Sequence: Synthetic oligonucleotide
ugugcugacaaagccucuu

SEQ ID NO: 928668 - RNA, 19 nt, Artificial Sequence
  Description of Artificial Sequence: Synthetic oligonucleotide
guuacccauuguuucccca

SEQ ID NO: 928669 - RNA, 19 nt, Artificial Sequence
  Description of Artificial Sequence: Synthetic oligonucleotide
cucgcuugaugaugugcug

SEQ ID NO: 928670 - RNA, 19 nt, Artificial Sequence
  Description of Artificial Sequence: Synthetic oligonucleotide
gucuuaaugauaagagccu

SEQ ID NO: 928671 - RNA, 19 nt, Artificial Sequence
  Description of Artificial Sequence: Synthetic oligonucleotide
gagcacucacacccagccc

SEQ ID NO: 928672 - RNA, 19 nt, Artificial Sequence
  Description of Artificial Sequence: Synthetic oligonucleotide
gguacacgggguaagaaaa

SEQ ID NO: 928673 - RNA, 19 nt, Artificial Sequence
  Description of Artificial Sequence: Synthetic oligonucleotide
gauccacugugucugugua

SEQ ID NO: 928674 - RNA, 19 nt, Artificial Sequence
  Description of Artificial Sequence: Synthetic oligonucleotide
ucacccaccgugccccaga

SEQ ID NO: 928675 - RNA, 19 nt, Artificial Sequence
  Description of Artificial Sequence: Synthetic oligonucleotide
guauagcggucaaaggaca

SEQ ID NO: 928676 - RNA, 19 nt, Artificial Sequence
  Description of Artificial Sequence: Synthetic oligonucleotide
uagcggucaaaggacaauu

SEQ ID NO: 928677 - RNA, 19 nt, Artificial Sequence
  Description of Artificial Sequence: Synthetic oligonucleotide
acuuaagccaucagucuua

SEQ ID NO: 928678 - RNA, 19 nt, Artificial Sequence
  Description of Artificial Sequence: Synthetic oligonucleotide
agaccuguccauugccaau

SEQ ID NO: 928679 - RNA, 19 nt, Artificial Sequence
  Description of Artificial Sequence: Synthetic oligonucleotide
ccaucaauucgaaaccuca

SEQ ID NO: 928680 - RNA, 19 nt, Artificial Sequence
  Description of Artificial Sequence: Synthetic oligonucleotide
gacuaucaaauucuuucuu

SEQ ID NO: 928681 - RNA, 19 nt, Artificial Sequence
  Description of Artificial Sequence: Synthetic oligonucleotide
uggaucggaagugcucaca

SEQ ID NO: 928682 - RNA, 19 nt, Artificial Sequence
  Description of Artificial Sequence: Synthetic oligonucleotide
ugccguagucuguguaacu

SEQ ID NO: 928683 - RNA, 19 nt, Artificial Sequence
  Description of Artificial Sequence: Synthetic oligonucleotide
gugggguuuuaccugcaga

SEQ ID NO: 928684 - RNA, 19 nt, Artificial Sequence
  Description of Artificial Sequence: Synthetic oligonucleotide
aguaggacuggaacaugga

SEQ ID NO: 928685 - RNA, 19 nt, Artificial Sequence
  Description of Artificial Sequence: Synthetic oligonucleotide
agacucucggcaaaccuaa

SEQ ID NO: 928686 - RNA, 19 nt, Artificial Sequence
  Description of Artificial Sequence: Synthetic oligonucleotide
agcggcagaugugugggug

SEQ ID NO: 928687 - RNA, 19 nt, Artificial Sequence
  Description of Artificial Sequence: Synthetic oligonucleotide
gucaaaugauugaugcaaa

SEQ ID NO: 928688 - RNA, 19 nt, Artificial Sequence
  Description of Artificial Sequence: Synthetic oligonucleotide
ggacaauuuguaagucugc

SEQ ID NO: 928689 - RNA, 19 nt, Artificial Sequence
  Description of Artificial Sequence: Synthetic oligonucleotide
acggggcugcaaucucuac

SEQ ID NO: 928690 - RNA, 19 nt, Artificial Sequence
  Description of Artificial Sequence: Synthetic oligonucleotide
agggguuguuuguuccagu

SEQ ID NO: 928691 - RNA, 19 nt, Artificial Sequence
  Description of Artificial Sequence: Synthetic oligonucleotide
auagcggucaaaggacaau

SEQ ID NO: 928692 - RNA, 19 nt, Artificial Sequence
  Description of Artificial Sequence: Synthetic oligonucleotide
caccuagaugcccacaucu

SEQ ID NO: 928693 - RNA, 19 nt, Artificial Sequence
  Description of Artificial Sequence: Synthetic oligonucleotide
acgggguaagaaaacuggu

SEQ ID NO: 928694 - RNA, 19 nt, Artificial Sequence
  Description of Artificial Sequence: Synthetic oligonucleotide
guagucuguguaacuucug

SEQ ID NO: 928695 - RNA, 19 nt, Artificial Sequence
  Description of Artificial Sequence: Synthetic oligonucleotide
gcuuuauggacaugaauau

SEQ ID NO: 928696 - RNA, 19 nt, Artificial Sequence
  Description of Artificial Sequence: Synthetic oligonucleotide
ccuauggcauccucgggug

SEQ ID NO: 928697 - RNA, 19 nt, Artificial Sequence
  Description of Artificial Sequence: Synthetic oligonucleotide
cuuuauggacaugaauaua

SEQ ID NO: 928698 - RNA, 19 nt, Artificial Sequence
  Description of Artificial Sequence: Synthetic oligonucleotide
agcguuuuccacaguaauu

SEQ ID NO: 928699 - RNA, 19 nt, Artificial Sequence
  Description of Artificial Sequence: Synthetic oligonucleotide
guacacgggguaagaaaac

SEQ ID NO: 928700 - RNA, 19 nt, Artificial Sequence
  Description of Artificial Sequence: Synthetic oligonucleotide
acaguacgaugucgccaag

SEQ ID NO: 928701 - RNA, 19 nt, Artificial Sequence
  Description of Artificial Sequence: Synthetic oligonucleotide
gguuacccauuguuucccc

SEQ ID NO: 928702 - RNA, 19 nt, Artificial Sequence
  Description of Artificial Sequence: Synthetic oligonucleotide
agaaagcguuuuccacagu

SEQ ID NO: 928703 - RNA, 19 nt, Artificial Sequence
  Description of Artificial Sequence: Synthetic oligonucleotide
ugacugcagcagagaauaa

SEQ ID NO: 928704 - RNA, 19 nt, Artificial Sequence
  Description of Artificial Sequence: Synthetic oligonucleotide
cuguguaacuucugucaaa

SEQ ID NO: 928705 - RNA, 19 nt, Artificial Sequence
  Description of Artificial Sequence: Synthetic oligonucleotide
gagugacggggcugcaauc

SEQ ID NO: 928706 - RNA, 19 nt, Artificial Sequence
  Description of Artificial Sequence: Synthetic oligonucleotide
ccgccuugggucuuagcgg

SEQ ID NO: 928707 - RNA, 19 nt, Artificial Sequence
  Description of Artificial Sequence: Synthetic oligonucleotide
gaauaaugagaaagcguuu

SEQ ID NO: 928708 - RNA, 19 nt, Artificial Sequence
  Description of Artificial Sequence: Synthetic oligonucleotide
ggagaaaggcacgguacac

SEQ ID NO: 928709 - RNA, 19 nt, Artificial Sequence
  Description of Artificial Sequence: Synthetic oligonucleotide
caccucaccacuguccaga

SEQ ID NO: 928710 - RNA, 19 nt, Artificial Sequence
  Description of Artificial Sequence: Synthetic oligonucleotide
acgagacugcagggguggc

SEQ ID NO: 928711 - RNA, 19 nt, Artificial Sequence
  Description of Artificial Sequence: Synthetic oligonucleotide
uuuccuucgagggguuguu

SEQ ID NO: 928712 - RNA, 19 nt, Artificial Sequence
  Description of Artificial Sequence: Synthetic oligonucleotide
acacacacacacacacaca

SEQ ID NO: 928713 - RNA, 19 nt, Artificial Sequence
  Description of Artificial Sequence: Synthetic oligonucleotide
auauacaugugggguuuua

SEQ ID NO: 928714 - RNA, 19 nt, Artificial Sequence
  Description of Artificial Sequence: Synthetic oligonucleotide
gucuuagcggcagaugugu

SEQ ID NO: 928715 - RNA, 19 nt, Artificial Sequence
  Description of Artificial Sequence: Synthetic oligonucleotide
cuuaagagccucccauggu

SEQ ID NO: 928716 - RNA, 19 nt, Artificial Sequence
  Description of Artificial Sequence: Synthetic oligonucleotide
gacugcagcagagaauaau

SEQ ID NO: 928717 - RNA, 19 nt, Artificial Sequence
  Description of Artificial Sequence: Synthetic oligonucleotide
ccaagagaccuauggcauc

SEQ ID NO: 928718 - RNA, 19 nt, Artificial Sequence
  Description of Artificial Sequence: Synthetic oligonucleotide
gugacggggcugcaaucuc

SEQ ID NO: 928719 - RNA, 19 nt, Artificial Sequence
  Description of Artificial Sequence: Synthetic oligonucleotide
gcuuuagcaaugaacuccu

SEQ ID NO: 928720 - RNA, 19 nt, Artificial Sequence
  Description of Artificial Sequence: Synthetic oligonucleotide
ccguagucuguguaacuuc

SEQ ID NO: 928721 - RNA, 19 nt, Artificial Sequence
  Description of Artificial Sequence: Synthetic oligonucleotide
gggguuguuuguuccagua

SEQ ID NO: 928722 - RNA, 19 nt, Artificial Sequence
  Description of Artificial Sequence: Synthetic oligonucleotide
ggguuguuuguuccaguaa

SEQ ID NO: 928723 - RNA, 19 nt, Artificial Sequence
  Description of Artificial Sequence: Synthetic oligonucleotide
gggcuuaguagauuguuuu

SEQ ID NO: 928724 - RNA, 19 nt, Artificial Sequence
  Description of Artificial Sequence: Synthetic oligonucleotide
cgccuugggucuuagcggc

SEQ ID NO: 928725 - RNA, 19 nt, Artificial Sequence
  Description of Artificial Sequence: Synthetic oligonucleotide
acacacacacacacacaaa

SEQ ID NO: 928726 - RNA, 19 nt, Artificial Sequence
  Description of Artificial Sequence: Synthetic oligonucleotide
agcggucaaaggacaauuu

SEQ ID NO: 928727 - RNA, 19 nt, Artificial Sequence
  Description of Artificial Sequence: Synthetic oligonucleotide
cucggcaaaccuaaacauu

SEQ ID NO: 928728 - RNA, 19 nt, Artificial Sequence
  Description of Artificial Sequence: Synthetic oligonucleotide
gcugaccacucucuuagua

SEQ ID NO: 928729 - RNA, 19 nt, Artificial Sequence
  Description of Artificial Sequence: Synthetic oligonucleotide
uagcggcagaugugugggu

SEQ ID NO: 928730 - RNA, 19 nt, Artificial Sequence
  Description of Artificial Sequence: Synthetic oligonucleotide
acgguacacgggguaagaa

SEQ ID NO: 928731 - RNA, 19 nt, Artificial Sequence
  Description of Artificial Sequence: Synthetic oligonucleotide
gcaucauaucugacugcag

SEQ ID NO: 928732 - RNA, 19 nt, Artificial Sequence
  Description of Artificial Sequence: Synthetic oligonucleotide
accuagaugcccacaucuu

SEQ ID NO: 928733 - RNA, 19 nt, Artificial Sequence
  Description of Artificial Sequence: Synthetic oligonucleotide
cagacaggaggcgccacga

SEQ ID NO: 928734 - RNA, 19 nt, Artificial Sequence
  Description of Artificial Sequence: Synthetic oligonucleotide
gggucaacugguuacccau

SEQ ID NO: 928735 - RNA, 19 nt, Artificial Sequence
  Description of Artificial Sequence: Synthetic oligonucleotide
cuugggucuuagcggcaga

SEQ ID NO: 928736 - RNA, 19 nt, Artificial Sequence
  Description of Artificial Sequence: Synthetic oligonucleotide
caugauggguguugggcuu

SEQ ID NO: 928737 - RNA, 19 nt, Artificial Sequence
  Description of Artificial Sequence: Synthetic oligonucleotide
gcgccacgagacugcaggg

SEQ ID NO: 928738 - RNA, 19 nt, Artificial Sequence
  Description of Artificial Sequence: Synthetic oligonucleotide
ccuagaugcccacaucuua

SEQ ID NO: 928739 - RNA, 19 nt, Artificial Sequence
  Description of Artificial Sequence: Synthetic oligonucleotide
cacagagaucagccaaaua

SEQ ID NO: 928740 - RNA, 19 nt, Artificial Sequence
  Description of Artificial Sequence: Synthetic oligonucleotide
ggcuguuaaaguggguuua

SEQ ID NO: 928741 - RNA, 19 nt, Artificial Sequence
  Description of Artificial Sequence: Synthetic oligonucleotide
augugcugacaaagccucu

SEQ ID NO: 928742 - RNA, 19 nt, Artificial Sequence
  Description of Artificial Sequence: Synthetic oligonucleotide
gggacugaacuuaagccau

SEQ ID NO: 928743 - RNA, 19 nt, Artificial Sequence
  Description of Artificial Sequence: Synthetic oligonucleotide
gacggggcugcaaucucua

SEQ ID NO: 928744 - RNA, 19 nt, Artificial Sequence
  Description of Artificial Sequence: Synthetic oligonucleotide
ggacuggaacauggaucgg

SEQ ID NO: 928745 - RNA, 19 nt, Artificial Sequence
  Description of Artificial Sequence: Synthetic oligonucleotide
cuggacuaucaaauucuuu

SEQ ID NO: 928746 - RNA, 19 nt, Artificial Sequence
  Description of Artificial Sequence: Synthetic oligonucleotide
cacgguacacgggguaaga

SEQ ID NO: 928747 - RNA, 19 nt, Artificial Sequence
  Description of Artificial Sequence: Synthetic oligonucleotide
gcuguuaaaguggguuuaa

SEQ ID NO: 928748 - RNA, 19 nt, Artificial Sequence
  Description of Artificial Sequence: Synthetic oligonucleotide
gcacgguacacgggguaag

SEQ ID NO: 928749 - RNA, 19 nt, Artificial Sequence
  Description of Artificial Sequence: Synthetic oligonucleotide
guugggcuuaguagauugu

SEQ ID NO: 928750 - RNA, 19 nt, Artificial Sequence
  Description of Artificial Sequence: Synthetic oligonucleotide
gcaccuagaugcccacauc

SEQ ID NO: 928751 - RNA, 19 nt, Artificial Sequence
  Description of Artificial Sequence: Synthetic oligonucleotide
ggacugaacuuaagccauc

SEQ ID NO: 928752 - RNA, 19 nt, Artificial Sequence
  Description of Artificial Sequence: Synthetic oligonucleotide
acgaugucgccaaguccaa

SEQ ID NO: 928753 - RNA, 19 nt, Artificial Sequence
  Description of Artificial Sequence: Synthetic oligonucleotide
cccagccauacaccucacc

SEQ ID NO: 928754 - RNA, 19 nt, Artificial Sequence
  Description of Artificial Sequence: Synthetic oligonucleotide
accgugccccagagcacuc

SEQ ID NO: 928755 - RNA, 19 nt, Artificial Sequence
  Description of Artificial Sequence: Synthetic oligonucleotide
ccucggguggcagauccac

SEQ ID NO: 928756 - RNA, 19 nt, Artificial Sequence
  Description of Artificial Sequence: Synthetic oligonucleotide
gcuugaugaugugcugaca

SEQ ID NO: 928757 - RNA, 19 nt, Artificial Sequence
  Description of Artificial Sequence: Synthetic oligonucleotide
gggcugcaaucucuacaac

SEQ ID NO: 928758 - RNA, 19 nt, Artificial Sequence
  Description of Artificial Sequence: Synthetic oligonucleotide
ccauuggaugaggucugac

SEQ ID NO: 928759 - RNA, 19 nt, Artificial Sequence
  Description of Artificial Sequence: Synthetic oligonucleotide
gacucucggcaaaccuaaa

SEQ ID NO: 928760 - RNA, 19 nt, Artificial Sequence
  Description of Artificial Sequence: Synthetic oligonucleotide
ugcccgccuugggucuuag

SEQ ID NO: 928761 - RNA, 19 nt, Artificial Sequence
  Description of Artificial Sequence: Synthetic oligonucleotide
cuguuaaaguggguuuaau

SEQ ID NO: 928762 - RNA, 19 nt, Artificial Sequence
  Description of Artificial Sequence: Synthetic oligonucleotide
caagcccagaccuguccau

SEQ ID NO: 928763 - RNA, 19 nt, Artificial Sequence
  Description of Artificial Sequence: Synthetic oligonucleotide
caguacgaugucgccaagu

SEQ ID NO: 928764 - RNA, 19 nt, Artificial Sequence
  Description of Artificial Sequence: Synthetic oligonucleotide
ccaaaaugccguagucugu

SEQ ID NO: 928765 - RNA, 19 nt, Artificial Sequence
  Description of Artificial Sequence: Synthetic oligonucleotide
ggcacgguacacgggguaa

SEQ ID NO: 928766 - RNA, 19 nt, Artificial Sequence
  Description of Artificial Sequence: Synthetic oligonucleotide
cggaagugcucacaccuga

SEQ ID NO: 928767 - RNA, 19 nt, Artificial Sequence
  Description of Artificial Sequence: Synthetic oligonucleotide
cgguacacgggguaagaaa

SEQ ID NO: 928768 - RNA, 19 nt, Artificial Sequence
  Description of Artificial Sequence: Synthetic oligonucleotide
caccgugccccagagcacu

SEQ ID NO: 928769 - RNA, 19 nt, Artificial Sequence
  Description of Artificial Sequence: Synthetic oligonucleotide
ggaugaggucugaccacaa

SEQ ID NO: 928770 - RNA, 19 nt, Artificial Sequence
  Description of Artificial Sequence: Synthetic oligonucleotide
cuucgagggguuguuuguu

SEQ ID NO: 928771 - RNA, 19 nt, Artificial Sequence
  Description of Artificial Sequence: Synthetic oligonucleotide
gggguuuuaccugcagaau

SEQ ID NO: 928772 - RNA, 19 nt, Artificial Sequence
  Description of Artificial Sequence: Synthetic oligonucleotide
gccguagucuguguaacuu

SEQ ID NO: 928773 - RNA, 19 nt, Artificial Sequence
  Description of Artificial Sequence: Synthetic oligonucleotide
gccaaguccaagagaccua

SEQ ID NO: 928774 - RNA, 19 nt, Artificial Sequence
  Description of Artificial Sequence: Synthetic oligonucleotide
ccgacagugugaacaggcu

SEQ ID NO: 928775 - RNA, 19 nt, Artificial Sequence
  Description of Artificial Sequence: Synthetic oligonucleotide
ggccauccauuugccaaaa

SEQ ID NO: 928776 - RNA, 19 nt, Artificial Sequence
  Description of Artificial Sequence: Synthetic oligonucleotide
gcucccacgggaagguggu

SEQ ID NO: 928777 - RNA, 19 nt, Artificial Sequence
  Description of Artificial Sequence: Synthetic oligonucleotide
ccacaguaauuccucgcuu

SEQ ID NO: 928778 - RNA, 19 nt, Artificial Sequence
  Description of Artificial Sequence: Synthetic oligonucleotide
aauuuuauaacucugucag

SEQ ID NO: 928779 - RNA, 19 nt, Artificial Sequence
  Description of Artificial Sequence: Synthetic oligonucleotide
aaugccaacagucuuaggc

SEQ ID NO: 928780 - RNA, 19 nt, Artificial Sequence
  Description of Artificial Sequence: Synthetic oligonucleotide
aguauaagggaacagaucc

SEQ ID NO: 928781 - RNA, 19 nt, Artificial Sequence
  Description of Artificial Sequence: Synthetic oligonucleotide
uucacuaaauucaagauga

SEQ ID NO: 928782 - RNA, 19 nt, Artificial Sequence
  Description of Artificial Sequence: Synthetic oligonucleotide
uugucaaucaguccuaagg

SEQ ID NO: 928783 - RNA, 19 nt, Artificial Sequence
  Description of Artificial Sequence: Synthetic oligonucleotide
uauagcuccuccuaguugg

SEQ ID NO: 928784 - RNA, 19 nt, Artificial Sequence
  Description of Artificial Sequence: Synthetic oligonucleotide
uuuuauaacucugucagag

SEQ ID NO: 928785 - RNA, 19 nt, Artificial Sequence
  Description of Artificial Sequence: Synthetic oligonucleotide
aauggacuuggaucaaugc

SEQ ID NO: 928786 - RNA, 19 nt, Artificial Sequence
  Description of Artificial Sequence: Synthetic oligonucleotide
aacugcucaauucaugcgg

SEQ ID NO: 928787 - RNA, 19 nt, Artificial Sequence
  Description of Artificial Sequence: Synthetic oligonucleotide
ugcaugauaccucugcugg

SEQ ID NO: 928788 - RNA, 19 nt, Artificial Sequence
  Description of Artificial Sequence: Synthetic oligonucleotide
aagaagaguagcugccugc

SEQ ID NO: 928789 - RNA, 19 nt, Artificial Sequence
  Description of Artificial Sequence: Synthetic oligonucleotide
aaguuugcggcacagauaa

SEQ ID NO: 928790 - RNA, 19 nt, Artificial Sequence
  Description of Artificial Sequence: Synthetic oligonucleotide
aacauugcacagcuuacuc

SEQ ID NO: 928791 - RNA, 19 nt, Artificial Sequence
  Description of Artificial Sequence: Synthetic oligonucleotide
ucuaacuuguacauaagaa

SEQ ID NO: 928792 - RNA, 19 nt, Artificial Sequence
  Description of Artificial Sequence: Synthetic oligonucleotide
aguccuaaggaauacagcu

SEQ ID NO: 928793 - RNA, 19 nt, Artificial Sequence
  Description of Artificial Sequence: Synthetic oligonucleotide
ucugcagccgaccaguggg

SEQ ID NO: 928794 - RNA, 19 nt, Artificial Sequence
  Description of Artificial Sequence: Synthetic oligonucleotide
guuggugcgauccaaacag

SEQ ID NO: 928795 - RNA, 19 nt, Artificial Sequence
  Description of Artificial Sequence: Synthetic oligonucleotide
gauguaaacgauugugugc

SEQ ID NO: 928796 - RNA, 19 nt, Artificial Sequence
  Description of Artificial Sequence: Synthetic oligonucleotide
ucugauauacucucgguac

SEQ ID NO: 928797 - RNA, 19 nt, Artificial Sequence
  Description of Artificial Sequence: Synthetic oligonucleotide
ugaucggugagccaaaccu

SEQ ID NO: 928798 - RNA, 19 nt, Artificial Sequence
  Description of Artificial Sequence: Synthetic oligonucleotide
auauacucucgguacaugg

SEQ ID NO: 928799 - RNA, 19 nt, Artificial Sequence
  Description of Artificial Sequence: Synthetic oligonucleotide
uaggcaugaaaucacgugc

SEQ ID NO: 928800 - RNA, 19 nt, Artificial Sequence
  Description of Artificial Sequence: Synthetic oligonucleotide
aauucaagaugaugaucgg

SEQ ID NO: 928801 - RNA, 19 nt, Artificial Sequence
  Description of Artificial Sequence: Synthetic oligonucleotide
uguacauaagaagaguagc

SEQ ID NO: 928802 - RNA, 19 nt, Artificial Sequence
  Description of Artificial Sequence: Synthetic oligonucleotide
agcgguuucugauauacuc

SEQ ID NO: 928803 - RNA, 19 nt, Artificial Sequence
  Description of Artificial Sequence: Synthetic oligonucleotide
uaucagagagguuaacucc

SEQ ID NO: 928804 - RNA, 19 nt, Artificial Sequence
  Description of Artificial Sequence: Synthetic oligonucleotide
ugaaaucacgugcugaacu

SEQ ID NO: 928805 - RNA, 19 nt, Artificial Sequence
  Description of Artificial Sequence: Synthetic oligonucleotide
aaacaaccucacugcaucc

SEQ ID NO: 928806 - RNA, 19 nt, Artificial Sequence
  Description of Artificial Sequence: Synthetic oligonucleotide
guuuucgcacaguaaaugg

SEQ ID NO: 928807 - RNA, 19 nt, Artificial Sequence
  Description of Artificial Sequence: Synthetic oligonucleotide
ucuaucggcaucugaaaag

SEQ ID NO: 928808 - RNA, 19 nt, Artificial Sequence
  Description of Artificial Sequence: Synthetic oligonucleotide
uaauaggugguuuaggcau

SEQ ID NO: 928809 - RNA, 19 nt, Artificial Sequence
  Description of Artificial Sequence: Synthetic oligonucleotide
ucuuaggcaugaaaucacg

SEQ ID NO: 928810 - RNA, 19 nt, Artificial Sequence
  Description of Artificial Sequence: Synthetic oligonucleotide
ugcaaucacauucagccga

SEQ ID NO: 928811 - RNA, 19 nt, Artificial Sequence
  Description of Artificial Sequence: Synthetic oligonucleotide
aaggguaucagagagguua

SEQ ID NO: 928812 - RNA, 19 nt, Artificial Sequence
  Description of Artificial Sequence: Synthetic oligonucleotide
ugaguauagcuccuccuag

SEQ ID NO: 928813 - RNA, 19 nt, Artificial Sequence
  Description of Artificial Sequence: Synthetic oligonucleotide
agauugauggaaucuuguc

SEQ ID NO: 928814 - RNA, 19 nt, Artificial Sequence
  Description of Artificial Sequence: Synthetic oligonucleotide
aguugguucgaagaaugcc

SEQ ID NO: 928815 - RNA, 19 nt, Artificial Sequence
  Description of Artificial Sequence: Synthetic oligonucleotide
ugcuguaucaccuccggug

SEQ ID NO: 928816 - RNA, 19 nt, Artificial Sequence
  Description of Artificial Sequence: Synthetic oligonucleotide
uagacuuucugucuacucu

SEQ ID NO: 928817 - RNA, 19 nt, Artificial Sequence
  Description of Artificial Sequence: Synthetic oligonucleotide
ugggaguuaauuuuauaac

SEQ ID NO: 928818 - RNA, 19 nt, Artificial Sequence
  Description of Artificial Sequence: Synthetic oligonucleotide
ucaucuggccguaaagugc

SEQ ID NO: 928819 - RNA, 19 nt, Artificial Sequence
  Description of Artificial Sequence: Synthetic oligonucleotide
uuucgcacaguaaauggac

SEQ ID NO: 928820 - RNA, 19 nt, Artificial Sequence
  Description of Artificial Sequence: Synthetic oligonucleotide
gcagguaaaagucuguggg

SEQ ID NO: 928821 - RNA, 19 nt, Artificial Sequence
  Description of Artificial Sequence: Synthetic oligonucleotide
aacgauugugugcuccggg

SEQ ID NO: 928822 - RNA, 19 nt, Artificial Sequence
  Description of Artificial Sequence: Synthetic oligonucleotide
uuuucgcacaguaaaugga

SEQ ID NO: 928823 - RNA, 19 nt, Artificial Sequence
  Description of Artificial Sequence: Synthetic oligonucleotide
agacuuucugucuacucuc

SEQ ID NO: 928824 - RNA, 19 nt, Artificial Sequence
  Description of Artificial Sequence: Synthetic oligonucleotide
guugagaugucuugggacc

SEQ ID NO: 928825 - RNA, 19 nt, Artificial Sequence
  Description of Artificial Sequence: Synthetic oligonucleotide
auugauggaaucuugucua

SEQ ID NO: 928826 - RNA, 19 nt, Artificial Sequence
  Description of Artificial Sequence: Synthetic oligonucleotide
cuugacccgaugaacaagc

SEQ ID NO: 928827 - RNA, 19 nt, Artificial Sequence
  Description of Artificial Sequence: Synthetic oligonucleotide
uucagugggguggaaaacg

SEQ ID NO: 928828 - RNA, 19 nt, Artificial Sequence
  Description of Artificial Sequence: Synthetic oligonucleotide
cuccuaguugguaacaggc

SEQ ID NO: 928829 - RNA, 19 nt, Artificial Sequence
  Description of Artificial Sequence: Synthetic oligonucleotide
uauacucucgguacauggc

SEQ ID NO: 928830 - RNA, 19 nt, Artificial Sequence
  Description of Artificial Sequence: Synthetic oligonucleotide
ugaggcuucccuucagugg

SEQ ID NO: 928831 - RNA, 19 nt, Artificial Sequence
  Description of Artificial Sequence: Synthetic oligonucleotide
auaaguagcgguuucugau

SEQ ID NO: 928832 - RNA, 19 nt, Artificial Sequence
  Description of Artificial Sequence: Synthetic oligonucleotide
aaaacgcccaagaagagau

SEQ ID NO: 928833 - RNA, 19 nt, Artificial Sequence
  Description of Artificial Sequence: Synthetic oligonucleotide
gaugcuguaucaccuccgg

SEQ ID NO: 928834 - RNA, 19 nt, Artificial Sequence
  Description of Artificial Sequence: Synthetic oligonucleotide
uguuuuccgcugcaagacg

SEQ ID NO: 928835 - RNA, 19 nt, Artificial Sequence
  Description of Artificial Sequence: Synthetic oligonucleotide
uaagaagaguagcugccug

SEQ ID NO: 928836 - RNA, 19 nt, Artificial Sequence
  Description of Artificial Sequence: Synthetic oligonucleotide
ucaaacuguagguuuggcu

SEQ ID NO: 928837 - RNA, 19 nt, Artificial Sequence
  Description of Artificial Sequence: Synthetic oligonucleotide
guaucagagagguuaacuc

SEQ ID NO: 928838 - RNA, 19 nt, Artificial Sequence
  Description of Artificial Sequence: Synthetic oligonucleotide
guaucgucaaaacugcuca

SEQ ID NO: 928839 - RNA, 19 nt, Artificial Sequence
  Description of Artificial Sequence: Synthetic oligonucleotide
agugggguggaaaacgccc

SEQ ID NO: 928840 - RNA, 19 nt, Artificial Sequence
  Description of Artificial Sequence: Synthetic oligonucleotide
ugucuugggaccaguauaa

SEQ ID NO: 928841 - RNA, 19 nt, Artificial Sequence
  Description of Artificial Sequence: Synthetic oligonucleotide
ggugguuuaggcaucauag

SEQ ID NO: 928842 - RNA, 19 nt, Artificial Sequence
  Description of Artificial Sequence: Synthetic oligonucleotide
cuaucggcaucugaaaagg

SEQ ID NO: 928843 - RNA, 19 nt, Artificial Sequence
  Description of Artificial Sequence: Synthetic oligonucleotide
aucgagaacauugcacagc

SEQ ID NO: 928844 - RNA, 19 nt, Artificial Sequence
  Description of Artificial Sequence: Synthetic oligonucleotide
ucaagaugaugaucgguga

SEQ ID NO: 928845 - RNA, 19 nt, Artificial Sequence
  Description of Artificial Sequence: Synthetic oligonucleotide
ugguuuaggcaucauaguu

SEQ ID NO: 928846 - RNA, 19 nt, Artificial Sequence
  Description of Artificial Sequence: Synthetic oligonucleotide
uuaccaaggggcugcauga

SEQ ID NO: 928847 - RNA, 19 nt, Artificial Sequence
  Description of Artificial Sequence: Synthetic oligonucleotide
guuuaggcaucauaguuga

SEQ ID NO: 928848 - RNA, 19 nt, Artificial Sequence
  Description of Artificial Sequence: Synthetic oligonucleotide
uguuggugcgauccaaaca

SEQ ID NO: 928849 - RNA, 19 nt, Artificial Sequence
  Description of Artificial Sequence: Synthetic oligonucleotide
agacgcaucgcagaggauc

SEQ ID NO: 928850 - RNA, 19 nt, Artificial Sequence
  Description of Artificial Sequence: Synthetic oligonucleotide
cagguaaaagucugugggg

SEQ ID NO: 928851 - RNA, 19 nt, Artificial Sequence
  Description of Artificial Sequence: Synthetic oligonucleotide
agucuuaggcaugaaauca

SEQ ID NO: 928852 - RNA, 19 nt, Artificial Sequence
  Description of Artificial Sequence: Synthetic oligonucleotide
aacaaaccuggcauaaaug

SEQ ID NO: 928853 - RNA, 19 nt, Artificial Sequence
  Description of Artificial Sequence: Synthetic oligonucleotide
gaucgagaacauugcacag

SEQ ID NO: 928854 - RNA, 19 nt, Artificial Sequence
  Description of Artificial Sequence: Synthetic oligonucleotide
agcuacaugugcaaagggg

SEQ ID NO: 928855 - RNA, 19 nt, Artificial Sequence
  Description of Artificial Sequence: Synthetic oligonucleotide
ugguaacaggcucauggug

SEQ ID NO: 928856 - RNA, 19 nt, Artificial Sequence
  Description of Artificial Sequence: Synthetic oligonucleotide
augaucggugagccaaacc

SEQ ID NO: 928857 - RNA, 19 nt, Artificial Sequence
  Description of Artificial Sequence: Synthetic oligonucleotide
aguaucgggacagagucug

SEQ ID NO: 928858 - RNA, 19 nt, Artificial Sequence
  Description of Artificial Sequence: Synthetic oligonucleotide
gacccgaugaacaagcuga

SEQ ID NO: 928859 - RNA, 19 nt, Artificial Sequence
  Description of Artificial Sequence: Synthetic oligonucleotide
ucuguagacuuucugucua

SEQ ID NO: 928860 - RNA, 19 nt, Artificial Sequence
  Description of Artificial Sequence: Synthetic oligonucleotide
aguguaauaggugguuuag

SEQ ID NO: 928861 - RNA, 19 nt, Artificial Sequence
  Description of Artificial Sequence: Synthetic oligonucleotide
acgauugugugcuccgggg

SEQ ID NO: 928862 - RNA, 19 nt, Artificial Sequence
  Description of Artificial Sequence: Synthetic oligonucleotide
aaguagcgguuucugauau

SEQ ID NO: 928863 - RNA, 19 nt, Artificial Sequence
  Description of Artificial Sequence: Synthetic oligonucleotide
uccgugucaaacuguaggu

SEQ ID NO: 928864 - RNA, 19 nt, Artificial Sequence
  Description of Artificial Sequence: Synthetic oligonucleotide
uuucugauauacucucggu

SEQ ID NO: 928865 - RNA, 19 nt, Artificial Sequence
  Description of Artificial Sequence: Synthetic oligonucleotide
gaguuaauuuuauaacucu

SEQ ID NO: 928866 - RNA, 19 nt, Artificial Sequence
  Description of Artificial Sequence: Synthetic oligonucleotide
agaacauugcacagcuuac

SEQ ID NO: 928867 - RNA, 19 nt, Artificial Sequence
  Description of Artificial Sequence: Synthetic oligonucleotide
guaauaggugguuuaggca

SEQ ID NO: 928868 - RNA, 19 nt, Artificial Sequence
  Description of Artificial Sequence: Synthetic oligonucleotide
uccucuuuaccaaggggcu

SEQ ID NO: 928869 - RNA, 19 nt, Artificial Sequence
  Description of Artificial Sequence: Synthetic oligonucleotide
ugggcuuggaagaucucug

SEQ ID NO: 928870 - RNA, 19 nt, Artificial Sequence
  Description of Artificial Sequence: Synthetic oligonucleotide
uacucucgguacauggcag

SEQ ID NO: 928871 - RNA, 19 nt, Artificial Sequence
  Description of Artificial Sequence: Synthetic oligonucleotide
uugugaaugucuaucucuu

SEQ ID NO: 928872 - RNA, 19 nt, Artificial Sequence
  Description of Artificial Sequence: Synthetic oligonucleotide
aaugggaguuaauuuuaua

SEQ ID NO: 928873 - RNA, 19 nt, Artificial Sequence
  Description of Artificial Sequence: Synthetic oligonucleotide
gaguggagcgcugagacac

SEQ ID NO: 928874 - RNA, 19 nt, Artificial Sequence
  Description of Artificial Sequence: Synthetic oligonucleotide
guuuuccgcugcaagacgg

SEQ ID NO: 928875 - RNA, 19 nt, Artificial Sequence
  Description of Artificial Sequence: Synthetic oligonucleotide
aaaucacgugcugaacuug

SEQ ID NO: 928876 - RNA, 19 nt, Artificial Sequence
  Description of Artificial Sequence: Synthetic oligonucleotide
uaagagucagggcgguuca

SEQ ID NO: 928877 - RNA, 19 nt, Artificial Sequence
  Description of Artificial Sequence: Synthetic oligonucleotide
ugacccgaugaacaagcug

SEQ ID NO: 928878 - RNA, 19 nt, Artificial Sequence
  Description of Artificial Sequence: Synthetic oligonucleotide
agugaguauagcuccuccu

SEQ ID NO: 928879 - RNA, 19 nt, Artificial Sequence
  Description of Artificial Sequence: Synthetic oligonucleotide
agaauccgcucaugcuucc

SEQ ID NO: 928880 - RNA, 19 nt, Artificial Sequence
  Description of Artificial Sequence: Synthetic oligonucleotide
aaccucacugcauccgugu

SEQ ID NO: 928881 - RNA, 19 nt, Artificial Sequence
  Description of Artificial Sequence: Synthetic oligonucleotide
accaguauaagggaacaga

SEQ ID NO: 928882 - RNA, 19 nt, Artificial Sequence
  Description of Artificial Sequence: Synthetic oligonucleotide
aaacgauugugugcuccgg

SEQ ID NO: 928883 - RNA, 19 nt, Artificial Sequence
  Description of Artificial Sequence: Synthetic oligonucleotide
ucaugcggucggaagaacu

SEQ ID NO: 928884 - RNA, 19 nt, Artificial Sequence
  Description of Artificial Sequence: Synthetic oligonucleotide
guagcgguuucugauauac

SEQ ID NO: 928885 - RNA, 19 nt, Artificial Sequence
  Description of Artificial Sequence: Synthetic oligonucleotide
uucgcacaguaaauggacu

SEQ ID NO: 928886 - RNA, 19 nt, Artificial Sequence
  Description of Artificial Sequence: Synthetic oligonucleotide
cacacagccuccuaguuca

SEQ ID NO: 928887 - RNA, 19 nt, Artificial Sequence
  Description of Artificial Sequence: Synthetic oligonucleotide
acagauaacuucaucguaa

SEQ ID NO: 928888 - RNA, 19 nt, Artificial Sequence
  Description of Artificial Sequence: Synthetic oligonucleotide
gauaccucugcuggccugg

SEQ ID NO: 928889 - RNA, 19 nt, Artificial Sequence
  Description of Artificial Sequence: Synthetic oligonucleotide
acaguugguucgaagaaug

SEQ ID NO: 928890 - RNA, 19 nt, Artificial Sequence
  Description of Artificial Sequence: Synthetic oligonucleotide
gacggcuuccucucgguug

SEQ ID NO: 928891 - RNA, 19 nt, Artificial Sequence
  Description of Artificial Sequence: Synthetic oligonucleotide
uccuaguucauuccacuuu

SEQ ID NO: 928892 - RNA, 19 nt, Artificial Sequence
  Description of Artificial Sequence: Synthetic oligonucleotide
ugggauucacacagccucc

SEQ ID NO: 928893 - RNA, 19 nt, Artificial Sequence
  Description of Artificial Sequence: Synthetic oligonucleotide
acauucagccgaucgagaa

SEQ ID NO: 928894 - RNA, 19 nt, Artificial Sequence
  Description of Artificial Sequence: Synthetic oligonucleotide
uugggaccaguauaaggga

SEQ ID NO: 928895 - RNA, 19 nt, Artificial Sequence
  Description of Artificial Sequence: Synthetic oligonucleotide
uaagggaacagauccucua

SEQ ID NO: 928896 - RNA, 19 nt, Artificial Sequence
  Description of Artificial Sequence: Synthetic oligonucleotide
caguccuaaggaauacagc

SEQ ID NO: 928897 - RNA, 19 nt, Artificial Sequence
  Description of Artificial Sequence: Synthetic oligonucleotide
uuuuccgcugcaagacggc

SEQ ID NO: 928898 - RNA, 19 nt, Artificial Sequence
  Description of Artificial Sequence: Synthetic oligonucleotide
guuaauuuuauaacucugu

SEQ ID NO: 928899 - RNA, 19 nt, Artificial Sequence
  Description of Artificial Sequence: Synthetic oligonucleotide
caguauaagggaacagauc

SEQ ID NO: 928900 - RNA, 19 nt, Artificial Sequence
  Description of Artificial Sequence: Synthetic oligonucleotide
ucgucaaaacugcucaauu

SEQ ID NO: 928901 - RNA, 19 nt, Artificial Sequence
  Description of Artificial Sequence: Synthetic oligonucleotide
ucaugguguuuuguggugc

SEQ ID NO: 928902 - RNA, 19 nt, Artificial Sequence
  Description of Artificial Sequence: Synthetic oligonucleotide
ucuugacccgaugaacaag

SEQ ID NO: 928903 - RNA, 19 nt, Artificial Sequence
  Description of Artificial Sequence: Synthetic oligonucleotide
guauagcuccuccuaguug

SEQ ID NO: 928904 - RNA, 19 nt, Artificial Sequence
  Description of Artificial Sequence: Synthetic oligonucleotide
aaucacgugcugaacuugu

SEQ ID NO: 928905 - RNA, 19 nt, Artificial Sequence
  Description of Artificial Sequence: Synthetic oligonucleotide
ugucuaucggcaucugaaa

SEQ ID NO: 928906 - RNA, 19 nt, Artificial Sequence
  Description of Artificial Sequence: Synthetic oligonucleotide
uuugcggcacagauaacuu

SEQ ID NO: 928907 - RNA, 19 nt, Artificial Sequence
  Description of Artificial Sequence: Synthetic oligonucleotide
uccuguuuauguugacucu

SEQ ID NO: 928908 - RNA, 19 nt, Artificial Sequence
  Description of Artificial Sequence: Synthetic oligonucleotide
uaggucuugacccgaugaa

SEQ ID NO: 928909 - RNA, 19 nt, Artificial Sequence
  Description of Artificial Sequence: Synthetic oligonucleotide
cuaguugguaacaggcuca

SEQ ID NO: 928910 - RNA, 19 nt, Artificial Sequence
  Description of Artificial Sequence: Synthetic oligonucleotide
ggaguuaauuuuauaacuc

SEQ ID NO: 928911 - RNA, 19 nt, Artificial Sequence
  Description of Artificial Sequence: Synthetic oligonucleotide
agaacucauugugaauguc

SEQ ID NO: 928912 - RNA, 19 nt, Artificial Sequence
  Description of Artificial Sequence: Synthetic oligonucleotide
ugcaagacggcuuccucuc

SEQ ID NO: 928913 - RNA, 19 nt, Artificial Sequence
  Description of Artificial Sequence: Synthetic oligonucleotide
aguauagcuccuccuaguu

SEQ ID NO: 928914 - RNA, 19 nt, Artificial Sequence
  Description of Artificial Sequence: Synthetic oligonucleotide
uuuaggcaucauaguugag

SEQ ID NO: 928915 - RNA, 19 nt, Artificial Sequence
  Description of Artificial Sequence: Synthetic oligonucleotide
uggugcgauccaaacaguc

SEQ ID NO: 928916 - RNA, 19 nt, Artificial Sequence
  Description of Artificial Sequence: Synthetic oligonucleotide
auaagaagaguagcugccu

SEQ ID NO: 928917 - RNA, 19 nt, Artificial Sequence
  Description of Artificial Sequence: Synthetic oligonucleotide
aagugaagagcagcuacau

SEQ ID NO: 928918 - RNA, 19 nt, Artificial Sequence
  Description of Artificial Sequence: Synthetic oligonucleotide
aucagagagguuaacucca

SEQ ID NO: 928919 - RNA, 19 nt, Artificial Sequence
  Description of Artificial Sequence: Synthetic oligonucleotide
cuugucaaucaguccuaag

SEQ ID NO: 928920 - RNA, 19 nt, Artificial Sequence
  Description of Artificial Sequence: Synthetic oligonucleotide
ucucagucacuuugguacu

SEQ ID NO: 928921 - RNA, 19 nt, Artificial Sequence
  Description of Artificial Sequence: Synthetic oligonucleotide
gaacaaaccuggcauaaau

SEQ ID NO: 928922 - RNA, 19 nt, Artificial Sequence
  Description of Artificial Sequence: Synthetic oligonucleotide
uucacaggaguggagcgcu

SEQ ID NO: 928923 - RNA, 19 nt, Artificial Sequence
  Description of Artificial Sequence: Synthetic oligonucleotide
cuguuuuccgcugcaagac

SEQ ID NO: 928924 - RNA, 19 nt, Artificial Sequence
  Description of Artificial Sequence: Synthetic oligonucleotide
cucgguugcuuuuguuucc

SEQ ID NO: 928925 - RNA, 19 nt, Artificial Sequence
  Description of Artificial Sequence: Synthetic oligonucleotide
caugcggucggaagaacuc

SEQ ID NO: 928926 - RNA, 19 nt, Artificial Sequence
  Description of Artificial Sequence: Synthetic oligonucleotide
aaaugggaguuaauuuuau

SEQ ID NO: 928927 - RNA, 19 nt, Artificial Sequence
  Description of Artificial Sequence: Synthetic oligonucleotide
uggugcuaucuuccuguag

SEQ ID NO: 928928 - RNA, 19 nt, Artificial Sequence
  Description of Artificial Sequence: Synthetic oligonucleotide
uccgcugcaagacggcuuc

SEQ ID NO: 928929 - RNA, 19 nt, Artificial Sequence
  Description of Artificial Sequence: Synthetic oligonucleotide
caaacuguagguuuggcuu

SEQ ID NO: 928930 - RNA, 19 nt, Artificial Sequence
  Description of Artificial Sequence: Synthetic oligonucleotide
gugagccaaaccucugaag

SEQ ID NO: 928931 - RNA, 19 nt, Artificial Sequence
  Description of Artificial Sequence: Synthetic oligonucleotide
gggaguuaauuuuauaacu

SEQ ID NO: 928932 - RNA, 19 nt, Artificial Sequence
  Description of Artificial Sequence: Synthetic oligonucleotide
agguuuggcuugucaauca

SEQ ID NO: 928933 - RNA, 19 nt, Artificial Sequence
  Description of Artificial Sequence: Synthetic oligonucleotide
ggcaucauaguugagaugu

SEQ ID NO: 928934 - RNA, 19 nt, Artificial Sequence
  Description of Artificial Sequence: Synthetic oligonucleotide
acagcuuacucuuggugua

SEQ ID NO: 928935 - RNA, 19 nt, Artificial Sequence
  Description of Artificial Sequence: Synthetic oligonucleotide
gcuuuuguuucccaguaca

SEQ ID NO: 928936 - RNA, 19 nt, Artificial Sequence
  Description of Artificial Sequence: Synthetic oligonucleotide
ggggauguaaacgauugug

SEQ ID NO: 928937 - RNA, 19 nt, Artificial Sequence
  Description of Artificial Sequence: Synthetic oligonucleotide
aagacggcuuccucucggu

SEQ ID NO: 928938 - RNA, 19 nt, Artificial Sequence
  Description of Artificial Sequence: Synthetic oligonucleotide
cagcuacaugugcaaaggg

SEQ ID NO: 928939 - RNA, 19 nt, Artificial Sequence
  Description of Artificial Sequence: Synthetic oligonucleotide
guaagagucagggcgguuc

SEQ ID NO: 928940 - RNA, 19 nt, Artificial Sequence
  Description of Artificial Sequence: Synthetic oligonucleotide
gguuuucgcacaguaaaug

SEQ ID NO: 928941 - RNA, 19 nt, Artificial Sequence
  Description of Artificial Sequence: Synthetic oligonucleotide
aggcauugcuguaguaucg

SEQ ID NO: 928942 - RNA, 19 nt, Artificial Sequence
  Description of Artificial Sequence: Synthetic oligonucleotide
ucgcacaguaaauggacuu

SEQ ID NO: 928943 - RNA, 19 nt, Artificial Sequence
  Description of Artificial Sequence: Synthetic oligonucleotide
aucggcaucugaaaaggca

SEQ ID NO: 928944 - RNA, 19 nt, Artificial Sequence
  Description of Artificial Sequence: Synthetic oligonucleotide
uaucgggacagagucugca

SEQ ID NO: 928945 - RNA, 19 nt, Artificial Sequence
  Description of Artificial Sequence: Synthetic oligonucleotide
cuucacucagaauccgcuc

SEQ ID NO: 928946 - RNA, 19 nt, Artificial Sequence
  Description of Artificial Sequence: Synthetic oligonucleotide
ugauaccucugcuggccug

SEQ ID NO: 928947 - RNA, 19 nt, Artificial Sequence
  Description of Artificial Sequence: Synthetic oligonucleotide
uuuuguggugcagguaaaa

SEQ ID NO: 928948 - RNA, 19 nt, Artificial Sequence
  Description of Artificial Sequence: Synthetic oligonucleotide
uaucgucaaaacugcucaa

SEQ ID NO: 928949 - RNA, 19 nt, Artificial Sequence
  Description of Artificial Sequence: Synthetic oligonucleotide
ucacucagaauccgcucau

SEQ ID NO: 928950 - RNA, 19 nt, Artificial Sequence
  Description of Artificial Sequence: Synthetic oligonucleotide
gucuuaggcaugaaaucac

SEQ ID NO: 928951 - RNA, 19 nt, Artificial Sequence
  Description of Artificial Sequence: Synthetic oligonucleotide
guccuaaggaauacagcug

SEQ ID NO: 928952 - RNA, 19 nt, Artificial Sequence
  Description of Artificial Sequence: Synthetic oligonucleotide
acuugucauggccaagcaa

SEQ ID NO: 928953 - RNA, 19 nt, Artificial Sequence
  Description of Artificial Sequence: Synthetic oligonucleotide
gaccaguauaagggaacag

SEQ ID NO: 928954 - RNA, 19 nt, Artificial Sequence
  Description of Artificial Sequence: Synthetic oligonucleotide
ggaaucuugucuaucggca

SEQ ID NO: 928955 - RNA, 19 nt, Artificial Sequence
  Description of Artificial Sequence: Synthetic oligonucleotide
cugauauacucucgguaca

SEQ ID NO: 928956 - RNA, 19 nt, Artificial Sequence
  Description of Artificial Sequence: Synthetic oligonucleotide
gcaguaagagucagggcgg

SEQ ID NO: 928957 - RNA, 19 nt, Artificial Sequence
  Description of Artificial Sequence: Synthetic oligonucleotide
ucgguugcuuuuguuuccc

SEQ ID NO: 928958 - RNA, 19 nt, Artificial Sequence
  Description of Artificial Sequence: Synthetic oligonucleotide
cugcaguaagagucagggc

SEQ ID NO: 928959 - RNA, 19 nt, Artificial Sequence
  Description of Artificial Sequence: Synthetic oligonucleotide
ugaugaucggugagccaaa

SEQ ID NO: 928960 - RNA, 19 nt, Artificial Sequence
  Description of Artificial Sequence: Synthetic oligonucleotide
gugaguauagcuccuccua

SEQ ID NO: 928961 - RNA, 19 nt, Artificial Sequence
  Description of Artificial Sequence: Synthetic oligonucleotide
guguuggugcgauccaaac

SEQ ID NO: 928962 - RNA, 19 nt, Artificial Sequence
  Description of Artificial Sequence: Synthetic oligonucleotide
gaaaucacgugcugaacuu

SEQ ID NO: 928963 - RNA, 19 nt, Artificial Sequence
  Description of Artificial Sequence: Synthetic oligonucleotide
uggggaguucccagagaug

SEQ ID NO: 928964 - RNA, 19 nt, Artificial Sequence
  Description of Artificial Sequence: Synthetic oligonucleotide
ucgguacauggcagugucc

SEQ ID NO: 928965 - RNA, 19 nt, Artificial Sequence
  Description of Artificial Sequence: Synthetic oligonucleotide
uuggugcgauccaaacagu

SEQ ID NO: 928966 - RNA, 19 nt, Artificial Sequence
  Description of Artificial Sequence: Synthetic oligonucleotide
cguaaagugcugcaguaag

SEQ ID NO: 928967 - RNA, 19 nt, Artificial Sequence
  Description of Artificial Sequence: Synthetic oligonucleotide
gaucggugagccaaaccuc

SEQ ID NO: 928968 - RNA, 19 nt, Artificial Sequence
  Description of Artificial Sequence: Synthetic oligonucleotide
augauaccucugcuggccu

SEQ ID NO: 928969 - RNA, 19 nt, Artificial Sequence
  Description of Artificial Sequence: Synthetic oligonucleotide
ucaauucaugcggucggaa

SEQ ID NO: 928970 - RNA, 19 nt, Artificial Sequence
  Description of Artificial Sequence: Synthetic oligonucleotide
ggugcgauccaaacagucc

SEQ ID NO: 928971 - RNA, 19 nt, Artificial Sequence
  Description of Artificial Sequence: Synthetic oligonucleotide
cauccgugucaaacuguag

SEQ ID NO: 928972 - RNA, 19 nt, Artificial Sequence
  Description of Artificial Sequence: Synthetic oligonucleotide
gguaucgucaaaacugcuc

SEQ ID NO: 928973 - RNA, 19 nt, Artificial Sequence
  Description of Artificial Sequence: Synthetic oligonucleotide
aucggugagccaaaccucu

SEQ ID NO: 928974 - RNA, 19 nt, Artificial Sequence
  Description of Artificial Sequence: Synthetic oligonucleotide
aucgucaaaacugcucaau

SEQ ID NO: 928975 - RNA, 19 nt, Artificial Sequence
  Description of Artificial Sequence: Synthetic oligonucleotide
gcuguuuuccgcugcaaga

SEQ ID NO: 928976 - RNA, 19 nt, Artificial Sequence
  Description of Artificial Sequence: Synthetic oligonucleotide
uagcgguuucugauauacu

SEQ ID NO: 928977 - RNA, 19 nt, Artificial Sequence
  Description of Artificial Sequence: Synthetic oligonucleotide
aggugguuuaggcaucaua

SEQ ID NO: 928978 - RNA, 19 nt, Artificial Sequence
  Description of Artificial Sequence: Synthetic oligonucleotide
uguaaacgauugugugcuc

SEQ ID NO: 928979 - RNA, 19 nt, Artificial Sequence
  Description of Artificial Sequence: Synthetic oligonucleotide
gaguauagcuccuccuagu

SEQ ID NO: 928980 - RNA, 19 nt, Artificial Sequence
  Description of Artificial Sequence: Synthetic oligonucleotide
ugcggucggaagaacucau

SEQ ID NO: 928981 - RNA, 19 nt, Artificial Sequence
  Description of Artificial Sequence: Synthetic oligonucleotide
ucguaaggcaguggcagau

SEQ ID NO: 928982 - RNA, 19 nt, Artificial Sequence
  Description of Artificial Sequence: Synthetic oligonucleotide
uccucauaaguagcgguuu

SEQ ID NO: 928983 - RNA, 19 nt, Artificial Sequence
  Description of Artificial Sequence: Synthetic oligonucleotide
gaugaucggugagccaaac

SEQ ID NO: 928984 - RNA, 19 nt, Artificial Sequence
  Description of Artificial Sequence: Synthetic oligonucleotide
uugguguacuuggccaugu

SEQ ID NO: 928985 - RNA, 19 nt, Artificial Sequence
  Description of Artificial Sequence: Synthetic oligonucleotide
cagccgaccagugggauuc

SEQ ID NO: 928986 - RNA, 19 nt, Artificial Sequence
  Description of Artificial Sequence: Synthetic oligonucleotide
caucgcagaggaucugcuc

SEQ ID NO: 928987 - RNA, 19 nt, Artificial Sequence
  Description of Artificial Sequence: Synthetic oligonucleotide
ucuucccggucagugccag

SEQ ID NO: 928988 - RNA, 19 nt, Artificial Sequence
  Description of Artificial Sequence: Synthetic oligonucleotide
uuuccgcugcaagacggcu

SEQ ID NO: 928989 - RNA, 19 nt, Artificial Sequence
  Description of Artificial Sequence: Synthetic oligonucleotide
cuuaggcaugaaaucacgu

SEQ ID NO: 928990 - RNA, 19 nt, Artificial Sequence
  Description of Artificial Sequence: Synthetic oligonucleotide
caucuggccguaaagugcu

SEQ ID NO: 928991 - RNA, 19 nt, Artificial Sequence
  Description of Artificial Sequence: Synthetic oligonucleotide
cacagacgcaucgcagagg

SEQ ID NO: 928992 - RNA, 19 nt, Artificial Sequence
  Description of Artificial Sequence: Synthetic oligonucleotide
uccucucgguugcuuuugu

SEQ ID NO: 928993 - RNA, 19 nt, Artificial Sequence
  Description of Artificial Sequence: Synthetic oligonucleotide
gccuuccucauaaguagcg

SEQ ID NO: 928994 - RNA, 19 nt, Artificial Sequence
  Description of Artificial Sequence: Synthetic oligonucleotide
aucacgugcugaacuuguc

SEQ ID NO: 928995 - RNA, 19 nt, Artificial Sequence
  Description of Artificial Sequence: Synthetic oligonucleotide
augcuguaucaccuccggu

SEQ ID NO: 928996 - RNA, 19 nt, Artificial Sequence
  Description of Artificial Sequence: Synthetic oligonucleotide
ccuggcauaaauggagaag

SEQ ID NO: 928997 - RNA, 19 nt, Artificial Sequence
  Description of Artificial Sequence: Synthetic oligonucleotide
caaguuugcggcacagaua

SEQ ID NO: 928998 - RNA, 19 nt, Artificial Sequence
  Description of Artificial Sequence: Synthetic oligonucleotide
uaguugguaacaggcucau

SEQ ID NO: 928999 - RNA, 19 nt, Artificial Sequence
  Description of Artificial Sequence: Synthetic oligonucleotide
cgaucgagaacauugcaca

SEQ ID NO: 929000 - RNA, 19 nt, Artificial Sequence
  Description of Artificial Sequence: Synthetic oligonucleotide
cgaccagugggauucacac

SEQ ID NO: 929001 - RNA, 19 nt, Artificial Sequence
  Description of Artificial Sequence: Synthetic oligonucleotide
uuccgcugcaagacggcuu

SEQ ID NO: 929002 - RNA, 19 nt, Artificial Sequence
  Description of Artificial Sequence: Synthetic oligonucleotide
gugguuuaggcaucauagu

SEQ ID NO: 929003 - RNA, 19 nt, Artificial Sequence
  Description of Artificial Sequence: Synthetic oligonucleotide
agucagggcgguucacaaa

SEQ ID NO: 929004 - RNA, 19 nt, Artificial Sequence
  Description of Artificial Sequence: Synthetic oligonucleotide
guggggaguucccagagau

SEQ ID NO: 929005 - RNA, 19 nt, Artificial Sequence
  Description of Artificial Sequence: Synthetic oligonucleotide
gcacauuugcccaccauga

SEQ ID NO: 929006 - RNA, 19 nt, Artificial Sequence
  Description of Artificial Sequence: Synthetic oligonucleotide
gcaugauaccucugcuggc

SEQ ID NO: 929007 - RNA, 19 nt, Artificial Sequence
  Description of Artificial Sequence: Synthetic oligonucleotide
gguaucagagagguuaacu

SEQ ID NO: 929008 - RNA, 19 nt, Artificial Sequence
  Description of Artificial Sequence: Synthetic oligonucleotide
gucuugggaccaguauaag

SEQ ID NO: 929009 - RNA, 19 nt, Artificial Sequence
  Description of Artificial Sequence: Synthetic oligonucleotide
agcuuacucuugguguacu

SEQ ID NO: 929010 - RNA, 19 nt, Artificial Sequence
  Description of Artificial Sequence: Synthetic oligonucleotide
cuggccguaaagugcugca

SEQ ID NO: 929011 - RNA, 19 nt, Artificial Sequence
  Description of Artificial Sequence: Synthetic oligonucleotide
gcuacaugugcaaaggggu

SEQ ID NO: 929012 - RNA, 19 nt, Artificial Sequence
  Description of Artificial Sequence: Synthetic oligonucleotide
gggaccaguauaagggaac

SEQ ID NO: 929013 - RNA, 19 nt, Artificial Sequence
  Description of Artificial Sequence: Synthetic oligonucleotide
uucaugcggucggaagaac

SEQ ID NO: 929014 - RNA, 19 nt, Artificial Sequence
  Description of Artificial Sequence: Synthetic oligonucleotide
guggagcgcugagacacag

SEQ ID NO: 929015 - RNA, 19 nt, Artificial Sequence
  Description of Artificial Sequence: Synthetic oligonucleotide
acccgaugaacaagcugag

SEQ ID NO: 929016 - RNA, 19 nt, Artificial Sequence
  Description of Artificial Sequence: Synthetic oligonucleotide
uccucgcugggagguggcg

SEQ ID NO: 929017 - RNA, 19 nt, Artificial Sequence
  Description of Artificial Sequence: Synthetic oligonucleotide
gacgcaucgcagaggaucu

SEQ ID NO: 929018 - RNA, 19 nt, Artificial Sequence
  Description of Artificial Sequence: Synthetic oligonucleotide
cuguaucaccuccgguguc

SEQ ID NO: 929019 - RNA, 19 nt, Artificial Sequence
  Description of Artificial Sequence: Synthetic oligonucleotide
ggugagccaaaccucugaa

SEQ ID NO: 929020 - RNA, 19 nt, Artificial Sequence
  Description of Artificial Sequence: Synthetic oligonucleotide
aguagcgguuucugauaua

SEQ ID NO: 929021 - RNA, 19 nt, Artificial Sequence
  Description of Artificial Sequence: Synthetic oligonucleotide
gcaagacggcuuccucucg

SEQ ID NO: 929022 - RNA, 19 nt, Artificial Sequence
  Description of Artificial Sequence: Synthetic oligonucleotide
cagcuuacucuugguguac

SEQ ID NO: 929023 - RNA, 19 nt, Artificial Sequence
  Description of Artificial Sequence: Synthetic oligonucleotide
gggcugaacuucauagaug

SEQ ID NO: 929024 - RNA, 19 nt, Artificial Sequence
  Description of Artificial Sequence: Synthetic oligonucleotide
ggucggaagaacucauugu

SEQ ID NO: 929025 - RNA, 19 nt, Artificial Sequence
  Description of Artificial Sequence: Synthetic oligonucleotide
aguugguaacaggcucaug

SEQ ID NO: 929026 - RNA, 19 nt, Artificial Sequence
  Description of Artificial Sequence: Synthetic oligonucleotide
ggaccaguauaagggaaca

SEQ ID NO: 929027 - RNA, 19 nt, Artificial Sequence
  Description of Artificial Sequence: Synthetic oligonucleotide
ucccggucagugccagagu

SEQ ID NO: 929028 - RNA, 19 nt, Artificial Sequence
  Description of Artificial Sequence: Synthetic oligonucleotide
uaucaccuccgguguccac

SEQ ID NO: 929029 - RNA, 19 nt, Artificial Sequence
  Description of Artificial Sequence: Synthetic oligonucleotide
gggauguaaacgauugugu

SEQ ID NO: 929030 - RNA, 19 nt, Artificial Sequence
  Description of Artificial Sequence: Synthetic oligonucleotide
aggguaucagagagguuaa

SEQ ID NO: 929031 - RNA, 19 nt, Artificial Sequence
  Description of Artificial Sequence: Synthetic oligonucleotide
agguaucgucaaaacugcu

SEQ ID NO: 929032 - RNA, 19 nt, Artificial Sequence
  Description of Artificial Sequence: Synthetic oligonucleotide
cacgugcugaacuugucau

SEQ ID NO: 929033 - RNA, 19 nt, Artificial Sequence
  Description of Artificial Sequence: Synthetic oligonucleotide
ggggcugaacuucauagau

SEQ ID NO: 929034 - RNA, 19 nt, Artificial Sequence
  Description of Artificial Sequence: Synthetic oligonucleotide
aaaggguaucagagagguu

SEQ ID NO: 929035 - RNA, 19 nt, Artificial Sequence
  Description of Artificial Sequence: Synthetic oligonucleotide
gguuaacuccauacacuuc

SEQ ID NO: 929036 - RNA, 19 nt, Artificial Sequence
  Description of Artificial Sequence: Synthetic oligonucleotide
cuccucgcugggagguggc

SEQ ID NO: 929037 - RNA, 19 nt, Artificial Sequence
  Description of Artificial Sequence: Synthetic oligonucleotide
cucaauucaugcggucgga

SEQ ID NO: 929038 - RNA, 19 nt, Artificial Sequence
  Description of Artificial Sequence: Synthetic oligonucleotide
gaacacggcugcuggcugu

SEQ ID NO: 929039 - RNA, 19 nt, Artificial Sequence
  Description of Artificial Sequence: Synthetic oligonucleotide
gcuccuccuaguugguaac

SEQ ID NO: 929040 - RNA, 19 nt, Artificial Sequence
  Description of Artificial Sequence: Synthetic oligonucleotide
guaucgggacagagucugc

SEQ ID NO: 929041 - RNA, 19 nt, Artificial Sequence
  Description of Artificial Sequence: Synthetic oligonucleotide
ggacacggccuccucgcug

SEQ ID NO: 929042 - RNA, 19 nt, Artificial Sequence
  Description of Artificial Sequence: Synthetic oligonucleotide
aaacgcccaagaagagauu

SEQ ID NO: 929043 - RNA, 19 nt, Artificial Sequence
  Description of Artificial Sequence: Synthetic oligonucleotide
ccaguauaagggaacagau

SEQ ID NO: 929044 - RNA, 19 nt, Artificial Sequence
  Description of Artificial Sequence: Synthetic oligonucleotide
ugacugcggccaccaguuc

SEQ ID NO: 929045 - RNA, 19 nt, Artificial Sequence
  Description of Artificial Sequence: Synthetic oligonucleotide
ggccuuccucauaaguagc

SEQ ID NO: 929046 - RNA, 19 nt, Artificial Sequence
  Description of Artificial Sequence: Synthetic oligonucleotide
gagcagcuacaugugcaaa

SEQ ID NO: 929047 - RNA, 19 nt, Artificial Sequence
  Description of Artificial Sequence: Synthetic oligonucleotide
aguaagagucagggcgguu

SEQ ID NO: 929048 - RNA, 19 nt, Artificial Sequence
  Description of Artificial Sequence: Synthetic oligonucleotide
gcugcaugauaccucugcu

SEQ ID NO: 929049 - RNA, 19 nt, Artificial Sequence
  Description of Artificial Sequence: Synthetic oligonucleotide
gggaguucccagagaugag

SEQ ID NO: 929050 - RNA, 19 nt, Artificial Sequence
  Description of Artificial Sequence: Synthetic oligonucleotide
gugacugcggccaccaguu

SEQ ID NO: 929051 - RNA, 19 nt, Artificial Sequence
  Description of Artificial Sequence: Synthetic oligonucleotide
gaguagcugccugcaguaa

SEQ ID NO: 929052 - RNA, 19 nt, Artificial Sequence
  Description of Artificial Sequence: Synthetic oligonucleotide
cugcagccgaccaguggga

SEQ ID NO: 929053 - RNA, 19 nt, Artificial Sequence
  Description of Artificial Sequence: Synthetic oligonucleotide
gagaugucuugggaccagu

SEQ ID NO: 929054 - RNA, 19 nt, Artificial Sequence
  Description of Artificial Sequence: Synthetic oligonucleotide
cgaagaaugccagucugca

SEQ ID NO: 929055 - RNA, 19 nt, Artificial Sequence
  Description of Artificial Sequence: Synthetic oligonucleotide
gccuccuaguucauuccac

SEQ ID NO: 929056 - RNA, 19 nt, Artificial Sequence
  Description of Artificial Sequence: Synthetic oligonucleotide
ccucacugcauccguguca

SEQ ID NO: 929057 - RNA, 19 nt, Artificial Sequence
  Description of Artificial Sequence: Synthetic oligonucleotide
cuccuaguucauuccacuu

SEQ ID NO: 929058 - RNA, 19 nt, Artificial Sequence
  Description of Artificial Sequence: Synthetic oligonucleotide
gcgguuucugauauacucu

SEQ ID NO: 929059 - RNA, 19 nt, Artificial Sequence
  Description of Artificial Sequence: Synthetic oligonucleotide
ucacugcauccgugucaaa

SEQ ID NO: 929060 - RNA, 19 nt, Artificial Sequence
  Description of Artificial Sequence: Synthetic oligonucleotide
ggguaucagagagguuaac

SEQ ID NO: 929061 - RNA, 19 nt, Artificial Sequence
  Description of Artificial Sequence: Synthetic oligonucleotide
acgcaucgcagaggaucug

SEQ ID NO: 929062 - RNA, 19 nt, Artificial Sequence
  Description of Artificial Sequence: Synthetic oligonucleotide
ccaugguccucauacaguu

SEQ ID NO: 929063 - RNA, 19 nt, Artificial Sequence
  Description of Artificial Sequence: Synthetic oligonucleotide
caguacagauuuucccguu

SEQ ID NO: 929064 - RNA, 19 nt, Artificial Sequence
  Description of Artificial Sequence: Synthetic oligonucleotide
ccgaccagugggauucaca

SEQ ID NO: 929065 - RNA, 19 nt, Artificial Sequence
  Description of Artificial Sequence: Synthetic oligonucleotide
agggguccgccugguccag

SEQ ID NO: 929066 - RNA, 19 nt, Artificial Sequence
  Description of Artificial Sequence: Synthetic oligonucleotide
cgugucaaacuguagguuu

SEQ ID NO: 929067 - RNA, 19 nt, Artificial Sequence
  Description of Artificial Sequence: Synthetic oligonucleotide
ccgcucaugcuuccucuuc

SEQ ID NO: 929068 - RNA, 19 nt, Artificial Sequence
  Description of Artificial Sequence: Synthetic oligonucleotide
cuucacaccuguggaacuu

SEQ ID NO: 929069 - RNA, 19 nt, Artificial Sequence
  Description of Artificial Sequence: Synthetic oligonucleotide
ccggucagugccagaguca

SEQ ID NO: 929070 - RNA, 19 nt, Artificial Sequence
  Description of Artificial Sequence: Synthetic oligonucleotide
cccguuucaucugguuuuc

SEQ ID NO: 929071 - RNA, 19 nt, Artificial Sequence
  Description of Artificial Sequence: Synthetic oligonucleotide
gcuguaguaucgggacaga

SEQ ID NO: 929072 - RNA, 19 nt, Artificial Sequence
  Description of Artificial Sequence: Synthetic oligonucleotide
caccuccgguguccaccag

SEQ ID NO: 929073 - RNA, 19 nt, Artificial Sequence
  Description of Artificial Sequence: Synthetic oligonucleotide
cuucccggucagugccaga

SEQ ID NO: 929074 - RNA, 19 nt, Artificial Sequence
  Description of Artificial Sequence: Synthetic oligonucleotide
caguaagagucagggcggu

SEQ ID NO: 929075 - RNA, 19 nt, Artificial Sequence
  Description of Artificial Sequence: Synthetic oligonucleotide
ccguaaagugcugcaguaa

SEQ ID NO: 929076 - RNA, 19 nt, Artificial Sequence
  Description of Artificial Sequence: Synthetic oligonucleotide
agccgaccagugggauuca

SEQ ID NO: 929077 - RNA, 19 nt, Artificial Sequence
  Description of Artificial Sequence: Synthetic oligonucleotide
ccgguguccaccagugagu

SEQ ID NO: 929078 - RNA, 19 nt, Artificial Sequence
  Description of Artificial Sequence: Synthetic oligonucleotide
cacggccuccucgcuggga

SEQ ID NO: 929079 - RNA, 19 nt, Artificial Sequence
  Description of Artificial Sequence: Synthetic oligonucleotide
cagacgcaucgcagaggau

SEQ ID NO: 929080 - RNA, 19 nt, Artificial Sequence
  Description of Artificial Sequence: Synthetic oligonucleotide
gcagccgaccagugggauu

SEQ ID NO: 929081 - RNA, 19 nt, Artificial Sequence
  Description of Artificial Sequence: Synthetic oligonucleotide
ccgugucaaacuguagguu

SEQ ID NO: 929082 - RNA, 19 nt, Artificial Sequence
  Description of Artificial Sequence: Synthetic oligonucleotide
gcggucggaagaacucauu

SEQ ID NO: 929083 - RNA, 19 nt, Artificial Sequence
  Description of Artificial Sequence: Synthetic oligonucleotide
gggguccgccugguccagu

SEQ ID NO: 929084 - RNA, 19 nt, Artificial Sequence
  Description of Artificial Sequence: Synthetic oligonucleotide
aaaagugugaucuucaccg

SEQ ID NO: 929085 - RNA, 19 nt, Artificial Sequence
  Description of Artificial Sequence: Synthetic oligonucleotide
ugaaccuucauccaggucu

SEQ ID NO: 929086 - RNA, 19 nt, Artificial Sequence
  Description of Artificial Sequence: Synthetic oligonucleotide
aaucucacuggucuggccc

SEQ ID NO: 929087 - RNA, 19 nt, Artificial Sequence
  Description of Artificial Sequence: Synthetic oligonucleotide
uuuacuuccacacccuggc

SEQ ID NO: 929088 - RNA, 19 nt, Artificial Sequence
  Description of Artificial Sequence: Synthetic oligonucleotide
uauaaguggauccacuuau

SEQ ID NO: 929089 - RNA, 19 nt, Artificial Sequence
  Description of Artificial Sequence: Synthetic oligonucleotide
agcguaggcucauagaagg

SEQ ID NO: 929090 - RNA, 19 nt, Artificial Sequence
  Description of Artificial Sequence: Synthetic oligonucleotide
acgcauugaaugcaggagc

SEQ ID NO: 929091 - RNA, 19 nt, Artificial Sequence
  Description of Artificial Sequence: Synthetic oligonucleotide
gaagcaaccauauccucag

SEQ ID NO: 929092 - RNA, 19 nt, Artificial Sequence
  Description of Artificial Sequence: Synthetic oligonucleotide
ugugguaacaucuguguga

SEQ ID NO: 929093 - RNA, 19 nt, Artificial Sequence
  Description of Artificial Sequence: Synthetic oligonucleotide
agucuuauggcuuccucgg

SEQ ID NO: 929094 - RNA, 19 nt, Artificial Sequence
  Description of Artificial Sequence: Synthetic oligonucleotide
auaucuauggcugaugcug

SEQ ID NO: 929095 - RNA, 19 nt, Artificial Sequence
  Description of Artificial Sequence: Synthetic oligonucleotide
gagucuuauggcuuccucg

SEQ ID NO: 929096 - RNA, 19 nt, Artificial Sequence
  Description of Artificial Sequence: Synthetic oligonucleotide
gugaucuucaccgauagcc

SEQ ID NO: 929097 - RNA, 19 nt, Artificial Sequence
  Description of Artificial Sequence: Synthetic oligonucleotide
accaacacucucuugguuc

SEQ ID NO: 929098 - RNA, 19 nt, Artificial Sequence
  Description of Artificial Sequence: Synthetic oligonucleotide
uuugcacacaggcauauuc

SEQ ID NO: 929099 - RNA, 19 nt, Artificial Sequence
  Description of Artificial Sequence: Synthetic oligonucleotide
uguguuaccgagcuguggu

SEQ ID NO: 929100 - RNA, 19 nt, Artificial Sequence
  Description of Artificial Sequence: Synthetic oligonucleotide
uucuggauacagccgaggg

SEQ ID NO: 929101 - RNA, 19 nt, Artificial Sequence
  Description of Artificial Sequence: Synthetic oligonucleotide
ugucuguaaguccucgggg

SEQ ID NO: 929102 - RNA, 19 nt, Artificial Sequence
  Description of Artificial Sequence: Synthetic oligonucleotide
ugcagaaucuccagggaag

SEQ ID NO: 929103 - RNA, 19 nt, Artificial Sequence
  Description of Artificial Sequence: Synthetic oligonucleotide
uguaguaaccucucaucag

SEQ ID NO: 929104 - RNA, 19 nt, Artificial Sequence
  Description of Artificial Sequence: Synthetic oligonucleotide
auagugagacgacugcugg

SEQ ID NO: 929105 - RNA, 19 nt, Artificial Sequence
  Description of Artificial Sequence: Synthetic oligonucleotide
uggacauagucugagaaug

SEQ ID NO: 929106 - RNA, 19 nt, Artificial Sequence
  Description of Artificial Sequence: Synthetic oligonucleotide
agcaaccauauccucaggg

SEQ ID NO: 929107 - RNA, 19 nt, Artificial Sequence
  Description of Artificial Sequence: Synthetic oligonucleotide
guaguauugcagcaggcag

SEQ ID NO: 929108 - RNA, 19 nt, Artificial Sequence
  Description of Artificial Sequence: Synthetic oligonucleotide
ugcuguugccucaaaagug

SEQ ID NO: 929109 - RNA, 19 nt, Artificial Sequence
  Description of Artificial Sequence: Synthetic oligonucleotide
guggucagauaacugaggg

SEQ ID NO: 929110 - RNA, 19 nt, Artificial Sequence
  Description of Artificial Sequence: Synthetic oligonucleotide
gguaacaucuguguuaccg

SEQ ID NO: 929111 - RNA, 19 nt, Artificial Sequence
  Description of Artificial Sequence: Synthetic oligonucleotide
acaggguucauggaugagc

SEQ ID NO: 929112 - RNA, 19 nt, Artificial Sequence
  Description of Artificial Sequence: Synthetic oligonucleotide
ugaucuucaccgauagccc

SEQ ID NO: 929113 - RNA, 19 nt, Artificial Sequence
  Description of Artificial Sequence: Synthetic oligonucleotide
uggcagaugcuacaccugg

SEQ ID NO: 929114 - RNA, 19 nt, Artificial Sequence
  Description of Artificial Sequence: Synthetic oligonucleotide
uaguauugcagcaggcagc

SEQ ID NO: 929115 - RNA, 19 nt, Artificial Sequence
  Description of Artificial Sequence: Synthetic oligonucleotide
aagccuaggguuggcaagc

SEQ ID NO: 929116 - RNA, 19 nt, Artificial Sequence
  Description of Artificial Sequence: Synthetic oligonucleotide
cuucagacgcauugaaugc

SEQ ID NO: 929117 - RNA, 19 nt, Artificial Sequence
  Description of Artificial Sequence: Synthetic oligonucleotide
uggguggucagauaacuga

SEQ ID NO: 929118 - RNA, 19 nt, Artificial Sequence
  Description of Artificial Sequence: Synthetic oligonucleotide
uauuccaguugacaucgug

SEQ ID NO: 929119 - RNA, 19 nt, Artificial Sequence
  Description of Artificial Sequence: Synthetic oligonucleotide
ugcuaugggagcugucugg

SEQ ID NO: 929120 - RNA, 19 nt, Artificial Sequence
  Description of Artificial Sequence: Synthetic oligonucleotide
gagaauagugagacgacug

SEQ ID NO: 929121 - RNA, 19 nt, Artificial Sequence
  Description of Artificial Sequence: Synthetic oligonucleotide
gguacuugguaugugaugc

SEQ ID NO: 929122 - RNA, 19 nt, Artificial Sequence
  Description of Artificial Sequence: Synthetic oligonucleotide
accacgaugcugucguugg

SEQ ID NO: 929123 - RNA, 19 nt, Artificial Sequence
  Description of Artificial Sequence: Synthetic oligonucleotide
auccacuuauuccaguuga

SEQ ID NO: 929124 - RNA, 19 nt, Artificial Sequence
  Description of Artificial Sequence: Synthetic oligonucleotide
cauauucaggcgcccaucc

SEQ ID NO: 929125 - RNA, 19 nt, Artificial Sequence
  Description of Artificial Sequence: Synthetic oligonucleotide
uuguguaguaaccucucau

SEQ ID NO: 929126 - RNA, 19 nt, Artificial Sequence
  Description of Artificial Sequence: Synthetic oligonucleotide
cugucuguaaguccucggg

SEQ ID NO: 929127 - RNA, 19 nt, Artificial Sequence
  Description of Artificial Sequence: Synthetic oligonucleotide
ucccugucaaccccaaagc

SEQ ID NO: 929128 - RNA, 19 nt, Artificial Sequence
  Description of Artificial Sequence: Synthetic oligonucleotide
gacgcauugaaugcaggag

SEQ ID NO: 929129 - RNA, 19 nt, Artificial Sequence
  Description of Artificial Sequence: Synthetic oligonucleotide
agugugggccucuuggcag

SEQ ID NO: 929130 - RNA, 19 nt, Artificial Sequence
  Description of Artificial Sequence: Synthetic oligonucleotide
cugaugggccuuuacuucc

SEQ ID NO: 929131 - RNA, 19 nt, Artificial Sequence
  Description of Artificial Sequence: Synthetic oligonucleotide
cucccugucaaccccaaag

SEQ ID NO: 929132 - RNA, 19 nt, Artificial Sequence
  Description of Artificial Sequence: Synthetic oligonucleotide
caggcauuguguaguaacc

SEQ ID NO: 929133 - RNA, 19 nt, Artificial Sequence
  Description of Artificial Sequence: Synthetic oligonucleotide
aggaacgccaggucuggac

SEQ ID NO: 929134 - RNA, 19 nt, Artificial Sequence
  Description of Artificial Sequence: Synthetic oligonucleotide
uaguaaccucucaucagca

SEQ ID NO: 929135 - RNA, 19 nt, Artificial Sequence
  Description of Artificial Sequence: Synthetic oligonucleotide
ccuucagacgcauugaaug

SEQ ID NO: 929136 - RNA, 19 nt, Artificial Sequence
  Description of Artificial Sequence: Synthetic oligonucleotide
uguugccucaaaaguguga

SEQ ID NO: 929137 - RNA, 19 nt, Artificial Sequence
  Description of Artificial Sequence: Synthetic oligonucleotide
uggguaacaucuguguuac

SEQ ID NO: 929138 - RNA, 19 nt, Artificial Sequence
  Description of Artificial Sequence: Synthetic oligonucleotide
guguaguaaccucucauca

SEQ ID NO: 929139 - RNA, 19 nt, Artificial Sequence
  Description of Artificial Sequence: Synthetic oligonucleotide
acaggcuuggagaauagug

SEQ ID NO: 929140 - RNA, 19 nt, Artificial Sequence
  Description of Artificial Sequence: Synthetic oligonucleotide
gugggcaaacucuucuggg

SEQ ID NO: 929141 - RNA, 19 nt, Artificial Sequence
  Description of Artificial Sequence: Synthetic oligonucleotide
ugggcgaccgaugaaacac

SEQ ID NO: 929142 - RNA, 19 nt, Artificial Sequence
  Description of Artificial Sequence: Synthetic oligonucleotide
ggcgcuucuggauacagcc

SEQ ID NO: 929143 - RNA, 19 nt, Artificial Sequence
  Description of Artificial Sequence: Synthetic oligonucleotide
uggagaauagugagacgac

SEQ ID NO: 929144 - RNA, 19 nt, Artificial Sequence
  Description of Artificial Sequence: Synthetic oligonucleotide
agacgcauugaaugcagga

SEQ ID NO: 929145 - RNA, 19 nt, Artificial Sequence
  Description of Artificial Sequence: Synthetic oligonucleotide
uacaguccagcguaggcuc

SEQ ID NO: 929146 - RNA, 19 nt, Artificial Sequence
  Description of Artificial Sequence: Synthetic oligonucleotide
ucgcguacugaccacucca

SEQ ID NO: 929147 - RNA, 19 nt, Artificial Sequence
  Description of Artificial Sequence: Synthetic oligonucleotide
agguuucgcguacugacca

SEQ ID NO: 929148 - RNA, 19 nt, Artificial Sequence
  Description of Artificial Sequence: Synthetic oligonucleotide
ucuuccagcgguguagcug

SEQ ID NO: 929149 - RNA, 19 nt, Artificial Sequence
  Description of Artificial Sequence: Synthetic oligonucleotide
uccaccuuugccauaucua

SEQ ID NO: 929150 - RNA, 19 nt, Artificial Sequence
  Description of Artificial Sequence: Synthetic oligonucleotide
guaacaucuguguuaccga

SEQ ID NO: 929151 - RNA, 19 nt, Artificial Sequence
  Description of Artificial Sequence: Synthetic oligonucleotide
caagccuaggguuggcaag

SEQ ID NO: 929152 - RNA, 19 nt, Artificial Sequence
  Description of Artificial Sequence: Synthetic oligonucleotide
uggacaugaugugguauag

SEQ ID NO: 929153 - RNA, 19 nt, Artificial Sequence
  Description of Artificial Sequence: Synthetic oligonucleotide
agguacuugguaugugaug

SEQ ID NO: 929154 - RNA, 19 nt, Artificial Sequence
  Description of Artificial Sequence: Synthetic oligonucleotide
ucgaccucacucuccacca

SEQ ID NO: 929155 - RNA, 19 nt, Artificial Sequence
  Description of Artificial Sequence: Synthetic oligonucleotide
accuggguaacaucugugu

SEQ ID NO: 929156 - RNA, 19 nt, Artificial Sequence
  Description of Artificial Sequence: Synthetic oligonucleotide
aggcggaugguacagucca

SEQ ID NO: 929157 - RNA, 19 nt, Artificial Sequence
  Description of Artificial Sequence: Synthetic oligonucleotide
agugagacgacugcuggcu

SEQ ID NO: 929158 - RNA, 19 nt, Artificial Sequence
  Description of Artificial Sequence: Synthetic oligonucleotide
uccacaccacgccaugggc

SEQ ID NO: 929159 - RNA, 19 nt, Artificial Sequence
  Description of Artificial Sequence: Synthetic oligonucleotide
uccacuuauuccaguugac

SEQ ID NO: 929160 - RNA, 19 nt, Artificial Sequence
  Description of Artificial Sequence: Synthetic oligonucleotide
agcacggcuuccaucauuc

SEQ ID NO: 929161 - RNA, 19 nt, Artificial Sequence
  Description of Artificial Sequence: Synthetic oligonucleotide
cucaggaacgccaggucug

SEQ ID NO: 929162 - RNA, 19 nt, Artificial Sequence
  Description of Artificial Sequence: Synthetic oligonucleotide
ugggcacgcuuucuggugc

SEQ ID NO: 929163 - RNA, 19 nt, Artificial Sequence
  Description of Artificial Sequence: Synthetic oligonucleotide
ggccuuuacuuccacaccc

SEQ ID NO: 929164 - RNA, 19 nt, Artificial Sequence
  Description of Artificial Sequence: Synthetic oligonucleotide
gacagugcucucguggcag

SEQ ID NO: 929165 - RNA, 19 nt, Artificial Sequence
  Description of Artificial Sequence: Synthetic oligonucleotide
uggaugagcuauagagcac

SEQ ID NO: 929166 - RNA, 19 nt, Artificial Sequence
  Description of Artificial Sequence: Synthetic oligonucleotide
gacauagucugagaauguc

SEQ ID NO: 929167 - RNA, 19 nt, Artificial Sequence
  Description of Artificial Sequence: Synthetic oligonucleotide
uugccuccaacuuccauua

SEQ ID NO: 929168 - RNA, 19 nt, Artificial Sequence
  Description of Artificial Sequence: Synthetic oligonucleotide
cuaggccugagacaccaac

SEQ ID NO: 929169 - RNA, 19 nt, Artificial Sequence
  Description of Artificial Sequence: Synthetic oligonucleotide
augaugugguauagcacgg

SEQ ID NO: 929170 - RNA, 19 nt, Artificial Sequence
  Description of Artificial Sequence: Synthetic oligonucleotide
uacuugguaugugaugccu

SEQ ID NO: 929171 - RNA, 19 nt, Artificial Sequence
  Description of Artificial Sequence: Synthetic oligonucleotide
uucgcguacugaccacucc

SEQ ID NO: 929172 - RNA, 19 nt, Artificial Sequence
  Description of Artificial Sequence: Synthetic oligonucleotide
uagugagacgacugcuggc

SEQ ID NO: 929173 - RNA, 19 nt, Artificial Sequence
  Description of Artificial Sequence: Synthetic oligonucleotide
cagguuucgcguacugacc

SEQ ID NO: 929174 - RNA, 19 nt, Artificial Sequence
  Description of Artificial Sequence: Synthetic oligonucleotide
agaaucuccagggaagcaa

SEQ ID NO: 929175 - RNA, 19 nt, Artificial Sequence
  Description of Artificial Sequence: Synthetic oligonucleotide
ccugucaaccccaaagcag

SEQ ID NO: 929176 - RNA, 19 nt, Artificial Sequence
  Description of Artificial Sequence: Synthetic oligonucleotide
uacugcuguugccucaaaa

SEQ ID NO: 929177 - RNA, 19 nt, Artificial Sequence
  Description of Artificial Sequence: Synthetic oligonucleotide
cacgaugcugucguugggg

SEQ ID NO: 929178 - RNA, 19 nt, Artificial Sequence
  Description of Artificial Sequence: Synthetic oligonucleotide
cagcguaggcucauagaag

SEQ ID NO: 929179 - RNA, 19 nt, Artificial Sequence
  Description of Artificial Sequence: Synthetic oligonucleotide
uaggcucauagaaggugac

SEQ ID NO: 929180 - RNA, 19 nt, Artificial Sequence
  Description of Artificial Sequence: Synthetic oligonucleotide
gaugagcuauagagcacag

SEQ ID NO: 929181 - RNA, 19 nt, Artificial Sequence
  Description of Artificial Sequence: Synthetic oligonucleotide
uguuaccgagcugugguaa

SEQ ID NO: 929182 - RNA, 19 nt, Artificial Sequence
  Description of Artificial Sequence: Synthetic oligonucleotide
uccagcguaggcucauaga

SEQ ID NO: 929183 - RNA, 19 nt, Artificial Sequence
  Description of Artificial Sequence: Synthetic oligonucleotide
gcagguacgcagcuguggg

SEQ ID NO: 929184 - RNA, 19 nt, Artificial Sequence
  Description of Artificial Sequence: Synthetic oligonucleotide
acgcuuucuggugcuaugg

SEQ ID NO: 929185 - RNA, 19 nt, Artificial Sequence
  Description of Artificial Sequence: Synthetic oligonucleotide
ucagcaggcgcuucuggau

SEQ ID NO: 929186 - RNA, 19 nt, Artificial Sequence
  Description of Artificial Sequence: Synthetic oligonucleotide
uggggacagcaucuauaag

SEQ ID NO: 929187 - RNA, 19 nt, Artificial Sequence
  Description of Artificial Sequence: Synthetic oligonucleotide
gaacccagugggcccaagc

SEQ ID NO: 929188 - RNA, 19 nt, Artificial Sequence
  Description of Artificial Sequence: Synthetic oligonucleotide
augagcuauagagcacagg

SEQ ID NO: 929189 - RNA, 19 nt, Artificial Sequence
  Description of Artificial Sequence: Synthetic oligonucleotide
ugaugugguauagcacggc

SEQ ID NO: 929190 - RNA, 19 nt, Artificial Sequence
  Description of Artificial Sequence: Synthetic oligonucleotide
guacuugguaugugaugcc

SEQ ID NO: 929191 - RNA, 19 nt, Artificial Sequence
  Description of Artificial Sequence: Synthetic oligonucleotide
agcagguacgcagcugugg

SEQ ID NO: 929192 - RNA, 19 nt, Artificial Sequence
  Description of Artificial Sequence: Synthetic oligonucleotide
gguacaguccagcguaggc

SEQ ID NO: 929193 - RNA, 19 nt, Artificial Sequence
  Description of Artificial Sequence: Synthetic oligonucleotide
ugguauagcacggcuucca

SEQ ID NO: 929194 - RNA, 19 nt, Artificial Sequence
  Description of Artificial Sequence: Synthetic oligonucleotide
cagacgcauugaaugcagg

SEQ ID NO: 929195 - RNA, 19 nt, Artificial Sequence
  Description of Artificial Sequence: Synthetic oligonucleotide
gaugugguauagcacggcu

SEQ ID NO: 929196 - RNA, 19 nt, Artificial Sequence
  Description of Artificial Sequence: Synthetic oligonucleotide
uacugaccacuccaggcau

SEQ ID NO: 929197 - RNA, 19 nt, Artificial Sequence
  Description of Artificial Sequence: Synthetic oligonucleotide
guaacaucugugugaggga

SEQ ID NO: 929198 - RNA, 19 nt, Artificial Sequence
  Description of Artificial Sequence: Synthetic oligonucleotide
uuucgcguacugaccacuc

SEQ ID NO: 929199 - RNA, 19 nt, Artificial Sequence
  Description of Artificial Sequence: Synthetic oligonucleotide
ggggacagcaucuauaagu

SEQ ID NO: 929200 - RNA, 19 nt, Artificial Sequence
  Description of Artificial Sequence: Synthetic oligonucleotide
ugacagugcucucguggca

SEQ ID NO: 929201 - RNA, 19 nt, Artificial Sequence
  Description of Artificial Sequence: Synthetic oligonucleotide
aucuauaaguggauccacu

SEQ ID NO: 929202 - RNA, 19 nt, Artificial Sequence
  Description of Artificial Sequence: Synthetic oligonucleotide
agcacucgaacauccugga

SEQ ID NO: 929203 - RNA, 19 nt, Artificial Sequence
  Description of Artificial Sequence: Synthetic oligonucleotide
gugguggguggucagauaa

SEQ ID NO: 929204 - RNA, 19 nt, Artificial Sequence
  Description of Artificial Sequence: Synthetic oligonucleotide
ucggcgucugucucagcag

SEQ ID NO: 929205 - RNA, 19 nt, Artificial Sequence
  Description of Artificial Sequence: Synthetic oligonucleotide
guaggcucauagaagguga

SEQ ID NO: 929206 - RNA, 19 nt, Artificial Sequence
  Description of Artificial Sequence: Synthetic oligonucleotide
caugggcgaccgaugaaac

SEQ ID NO: 929207 - RNA, 19 nt, Artificial Sequence
  Description of Artificial Sequence: Synthetic oligonucleotide
cuucuggauacagccgagg

SEQ ID NO: 929208 - RNA, 19 nt, Artificial Sequence
  Description of Artificial Sequence: Synthetic oligonucleotide
ucuggacaugaugugguau

SEQ ID NO: 929209 - RNA, 19 nt, Artificial Sequence
  Description of Artificial Sequence: Synthetic oligonucleotide
ugguacaguccagcguagg

SEQ ID NO: 929210 - RNA, 19 nt, Artificial Sequence
  Description of Artificial Sequence: Synthetic oligonucleotide
ugcgcagccgaaacuucac

SEQ ID NO: 929211 - RNA, 19 nt, Artificial Sequence
  Description of Artificial Sequence: Synthetic oligonucleotide
accgagcugugguaacauc

SEQ ID NO: 929212 - RNA, 19 nt, Artificial Sequence
  Description of Artificial Sequence: Synthetic oligonucleotide
acgaugcugucguuggggu

SEQ ID NO: 929213 - RNA, 19 nt, Artificial Sequence
  Description of Artificial Sequence: Synthetic oligonucleotide
uuaccgagcugugguaaca

SEQ ID NO: 929214 - RNA, 19 nt, Artificial Sequence
  Description of Artificial Sequence: Synthetic oligonucleotide
ucuggugggcaaacucuuc

SEQ ID NO: 929215 - RNA, 19 nt, Artificial Sequence
  Description of Artificial Sequence: Synthetic oligonucleotide
cuacaccuggguaacaucu

SEQ ID NO: 929216 - RNA, 19 nt, Artificial Sequence
  Description of Artificial Sequence: Synthetic oligonucleotide
ugcucucguggcaggagac

SEQ ID NO: 929217 - RNA, 19 nt, Artificial Sequence
  Description of Artificial Sequence: Synthetic oligonucleotide
caaucucacuggucuggcc

SEQ ID NO: 929218 - RNA, 19 nt, Artificial Sequence
  Description of Artificial Sequence: Synthetic oligonucleotide
ucaggcgcccauccacacc

SEQ ID NO: 929219 - RNA, 19 nt, Artificial Sequence
  Description of Artificial Sequence: Synthetic oligonucleotide
aggcauuguguaguaaccu

SEQ ID NO: 929220 - RNA, 19 nt, Artificial Sequence
  Description of Artificial Sequence: Synthetic oligonucleotide
guauagcacggcuuccauc

SEQ ID NO: 929221 - RNA, 19 nt, Artificial Sequence
  Description of Artificial Sequence: Synthetic oligonucleotide
guuaccgagcugugguaac

SEQ ID NO: 929222 - RNA, 19 nt, Artificial Sequence
  Description of Artificial Sequence: Synthetic oligonucleotide
gaccacgaugcugucguug

SEQ ID NO: 929223 - RNA, 19 nt, Artificial Sequence
  Description of Artificial Sequence: Synthetic oligonucleotide
uccuggacauagucugaga

SEQ ID NO: 929224 - RNA, 19 nt, Artificial Sequence
  Description of Artificial Sequence: Synthetic oligonucleotide
ggcauuguguaguaaccuc

SEQ ID NO: 929225 - RNA, 19 nt, Artificial Sequence
  Description of Artificial Sequence: Synthetic oligonucleotide
cacuuauuccaguugacau

SEQ ID NO: 929226 - RNA, 19 nt, Artificial Sequence
  Description of Artificial Sequence: Synthetic oligonucleotide
uguagccggacugugccau

SEQ ID NO: 929227 - RNA, 19 nt, Artificial Sequence
  Description of Artificial Sequence: Synthetic oligonucleotide
cgaccgaugaaacacacuc

SEQ ID NO: 929228 - RNA, 19 nt, Artificial Sequence
  Description of Artificial Sequence: Synthetic oligonucleotide
ggcaaacucuucugggcag

SEQ ID NO: 929229 - RNA, 19 nt, Artificial Sequence
  Description of Artificial Sequence: Synthetic oligonucleotide
agggagucuuauggcuucc

SEQ ID NO: 929230 - RNA, 19 nt, Artificial Sequence
  Description of Artificial Sequence: Synthetic oligonucleotide
cgaugaaacacacucuuuc

SEQ ID NO: 929231 - RNA, 19 nt, Artificial Sequence
  Description of Artificial Sequence: Synthetic oligonucleotide
cuugcagaaucuccaggga

SEQ ID NO: 929232 - RNA, 19 nt, Artificial Sequence
  Description of Artificial Sequence: Synthetic oligonucleotide
cuguguuaccgagcugugg

SEQ ID NO: 929233 - RNA, 19 nt, Artificial Sequence
  Description of Artificial Sequence: Synthetic oligonucleotide
ugcuacaccuggguaacau

SEQ ID NO: 929234 - RNA, 19 nt, Artificial Sequence
  Description of Artificial Sequence: Synthetic oligonucleotide
cuggcagaugcuacaccug

SEQ ID NO: 929235 - RNA, 19 nt, Artificial Sequence
  Description of Artificial Sequence: Synthetic oligonucleotide
guccagcguaggcucauag

SEQ ID NO: 929236 - RNA, 19 nt, Artificial Sequence
  Description of Artificial Sequence: Synthetic oligonucleotide
ggaagacacggcccaggcg

SEQ ID NO: 929237 - RNA, 19 nt, Artificial Sequence
  Description of Artificial Sequence: Synthetic oligonucleotide
gucuuauggcuuccucggc

SEQ ID NO: 929238 - RNA, 19 nt, Artificial Sequence
  Description of Artificial Sequence: Synthetic oligonucleotide
aucuauggcugaugcugga

SEQ ID NO: 929239 - RNA, 19 nt, Artificial Sequence
  Description of Artificial Sequence: Synthetic oligonucleotide
cacaguguugccuccaacu

SEQ ID NO: 929240 - RNA, 19 nt, Artificial Sequence
  Description of Artificial Sequence: Synthetic oligonucleotide
ccauguugcugucuguaag

SEQ ID NO: 929241 - RNA, 19 nt, Artificial Sequence
  Description of Artificial Sequence: Synthetic oligonucleotide
cacccuggcgcuuggcccc

SEQ ID NO: 929242 - RNA, 19 nt, Artificial Sequence
  Description of Artificial Sequence: Synthetic oligonucleotide
cuggacaugaugugguaua

SEQ ID NO: 929243 - RNA, 19 nt, Artificial Sequence
  Description of Artificial Sequence: Synthetic oligonucleotide
augggcgaccgaugaaaca

SEQ ID NO: 929244 - RNA, 19 nt, Artificial Sequence
  Description of Artificial Sequence: Synthetic oligonucleotide
cauguugcugucuguaagu

SEQ ID NO: 929245 - RNA, 19 nt, Artificial Sequence
  Description of Artificial Sequence: Synthetic oligonucleotide
uuauuccaguugacaucgu

SEQ ID NO: 929246 - RNA, 19 nt, Artificial Sequence
  Description of Artificial Sequence: Synthetic oligonucleotide
cauccacaccacgccaugg

SEQ ID NO: 929247 - RNA, 19 nt, Artificial Sequence
  Description of Artificial Sequence: Synthetic oligonucleotide
uggcgcuuggccccugaac

SEQ ID NO: 929248 - RNA, 19 nt, Artificial Sequence
  Description of Artificial Sequence: Synthetic oligonucleotide
uuauggcuuccucggcguc

SEQ ID NO: 929249 - RNA, 19 nt, Artificial Sequence
  Description of Artificial Sequence: Synthetic oligonucleotide
cuggaacucacagcccagc

SEQ ID NO: 929250 - RNA, 19 nt, Artificial Sequence
  Description of Artificial Sequence: Synthetic oligonucleotide
uccugguacgcucgcccac

SEQ ID NO: 929251 - RNA, 19 nt, Artificial Sequence
  Description of Artificial Sequence: Synthetic oligonucleotide
cacgcuuucuggugcuaug

SEQ ID NO: 929252 - RNA, 19 nt, Artificial Sequence
  Description of Artificial Sequence: Synthetic oligonucleotide
acagcaucuauaaguggau

SEQ ID NO: 929253 - RNA, 19 nt, Artificial Sequence
  Description of Artificial Sequence: Synthetic oligonucleotide
gguguagcugugaacccag

SEQ ID NO: 929254 - RNA, 19 nt, Artificial Sequence
  Description of Artificial Sequence: Synthetic oligonucleotide
ugcugcgcagccgaaacuu

SEQ ID NO: 929255 - RNA, 19 nt, Artificial Sequence
  Description of Artificial Sequence: Synthetic oligonucleotide
cgcauugaaugcaggagcc

SEQ ID NO: 929256 - RNA, 19 nt, Artificial Sequence
  Description of Artificial Sequence: Synthetic oligonucleotide
uggcaggaguugaccacga

SEQ ID NO: 929257 - RNA, 19 nt, Artificial Sequence
  Description of Artificial Sequence: Synthetic oligonucleotide
aacgccaggucuggacaug

SEQ ID NO: 929258 - RNA, 19 nt, Artificial Sequence
  Description of Artificial Sequence: Synthetic oligonucleotide
gacgacugcuggcuucuuc

SEQ ID NO: 929259 - RNA, 19 nt, Artificial Sequence
  Description of Artificial Sequence: Synthetic oligonucleotide
cuuccagcgguguagcugu

SEQ ID NO: 929260 - RNA, 19 nt, Artificial Sequence
  Description of Artificial Sequence: Synthetic oligonucleotide
ggacucuaggccccggagc

SEQ ID NO: 929261 - RNA, 19 nt, Artificial Sequence
  Description of Artificial Sequence: Synthetic oligonucleotide
caggcgcccauccacacca

SEQ ID NO: 929262 - RNA, 19 nt, Artificial Sequence
  Description of Artificial Sequence: Synthetic oligonucleotide
gguacgcucgcccacuguc

SEQ ID NO: 929263 - RNA, 19 nt, Artificial Sequence
  Description of Artificial Sequence: Synthetic oligonucleotide
gcaacaggcuguaggaccc

SEQ ID NO: 929264 - RNA, 19 nt, Artificial Sequence
  Description of Artificial Sequence: Synthetic oligonucleotide
uuccucggcgucugucuca

SEQ ID NO: 929265 - RNA, 19 nt, Artificial Sequence
  Description of Artificial Sequence: Synthetic oligonucleotide
ggguggucagauaacugag

SEQ ID NO: 929266 - RNA, 19 nt, Artificial Sequence
  Description of Artificial Sequence: Synthetic oligonucleotide
aggcgcuucuggauacagc

SEQ ID NO: 929267 - RNA, 19 nt, Artificial Sequence
  Description of Artificial Sequence: Synthetic oligonucleotide
ggugcugcgcagccgaaac

SEQ ID NO: 929268 - RNA, 19 nt, Artificial Sequence
  Description of Artificial Sequence: Synthetic oligonucleotide
caggguucauggaugagcu

SEQ ID NO: 929269 - RNA, 19 nt, Artificial Sequence
  Description of Artificial Sequence: Synthetic oligonucleotide
agugugaucuucaccgaua

SEQ ID NO: 929270 - RNA, 19 nt, Artificial Sequence
  Description of Artificial Sequence: Synthetic oligonucleotide
ggaacgccaggucuggaca

SEQ ID NO: 929271 - RNA, 19 nt, Artificial Sequence
  Description of Artificial Sequence: Synthetic oligonucleotide
guugccucaaaagugugau

SEQ ID NO: 929272 - RNA, 19 nt, Artificial Sequence
  Description of Artificial Sequence: Synthetic oligonucleotide
gacaggguucauggaugag

SEQ ID NO: 929273 - RNA, 19 nt, Artificial Sequence
  Description of Artificial Sequence: Synthetic oligonucleotide
ugccauaucuauggcugau

SEQ ID NO: 929274 - RNA, 19 nt, Artificial Sequence
  Description of Artificial Sequence: Synthetic oligonucleotide
uacgcucgcccacugucuu

SEQ ID NO: 929275 - RNA, 19 nt, Artificial Sequence
  Description of Artificial Sequence: Synthetic oligonucleotide
cagcaucuauaaguggauc

SEQ ID NO: 929276 - RNA, 19 nt, Artificial Sequence
  Description of Artificial Sequence: Synthetic oligonucleotide
cauaucuauggcugaugcu

SEQ ID NO: 929277 - RNA, 19 nt, Artificial Sequence
  Description of Artificial Sequence: Synthetic oligonucleotide
ccagcguaggcucauagaa

SEQ ID NO: 929278 - RNA, 19 nt, Artificial Sequence
  Description of Artificial Sequence: Synthetic oligonucleotide
gagaauguccugguacgcu

SEQ ID NO: 929279 - RNA, 19 nt, Artificial Sequence
  Description of Artificial Sequence: Synthetic oligonucleotide
caacuuccauuaccugcug

SEQ ID NO: 929280 - RNA, 19 nt, Artificial Sequence
  Description of Artificial Sequence: Synthetic oligonucleotide
gugguauagcacggcuucc

SEQ ID NO: 929281 - RNA, 19 nt, Artificial Sequence
  Description of Artificial Sequence: Synthetic oligonucleotide
gguuggcaagcacucgaac

SEQ ID NO: 929282 - RNA, 19 nt, Artificial Sequence
  Description of Artificial Sequence: Synthetic oligonucleotide
acgcucgcccacugucuuc

SEQ ID NO: 929283 - RNA, 19 nt, Artificial Sequence
  Description of Artificial Sequence: Synthetic oligonucleotide
ugguacgcucgcccacugu

SEQ ID NO: 929284 - RNA, 19 nt, Artificial Sequence
  Description of Artificial Sequence: Synthetic oligonucleotide
aggcucauagaaggugaca

SEQ ID NO: 929285 - RNA, 19 nt, Artificial Sequence
  Description of Artificial Sequence: Synthetic oligonucleotide
cugcgcagccgaaacuuca

SEQ ID NO: 929286 - RNA, 19 nt, Artificial Sequence
  Description of Artificial Sequence: Synthetic oligonucleotide
ucuaggccugagacaccaa

SEQ ID NO: 929287 - RNA, 19 nt, Artificial Sequence
  Description of Artificial Sequence: Synthetic oligonucleotide
gucucagcagugggcacgc

SEQ ID NO: 929288 - RNA, 19 nt, Artificial Sequence
  Description of Artificial Sequence: Synthetic oligonucleotide
gggccuuuacuuccacacc

SEQ ID NO: 929289 - RNA, 19 nt, Artificial Sequence
  Description of Artificial Sequence: Synthetic oligonucleotide
uaccgagcugugguaacau

SEQ ID NO: 929290 - RNA, 19 nt, Artificial Sequence
  Description of Artificial Sequence: Synthetic oligonucleotide
ggacaggguucauggauga

SEQ ID NO: 929291 - RNA, 19 nt, Artificial Sequence
  Description of Artificial Sequence: Synthetic oligonucleotide
ccugaguucagagcagaac

SEQ ID NO: 929292 - RNA, 19 nt, Artificial Sequence
  Description of Artificial Sequence: Synthetic oligonucleotide
cagcgguguagcugugaac

SEQ ID NO: 929293 - RNA, 19 nt, Artificial Sequence
  Description of Artificial Sequence: Synthetic oligonucleotide
accacgccaugggcgaccg

SEQ ID NO: 929294 - RNA, 19 nt, Artificial Sequence
  Description of Artificial Sequence: Synthetic oligonucleotide
uccagcgguguagcuguga

SEQ ID NO: 929295 - RNA, 19 nt, Artificial Sequence
  Description of Artificial Sequence: Synthetic oligonucleotide
ugccaucuggugggcaaac

SEQ ID NO: 929296 - RNA, 19 nt, Artificial Sequence
  Description of Artificial Sequence: Synthetic oligonucleotide
ccaacuuccauuaccugcu

SEQ ID NO: 929297 - RNA, 19 nt, Artificial Sequence
  Description of Artificial Sequence: Synthetic oligonucleotide
gcugucguugggguucagg

SEQ ID NO: 929298 - RNA, 19 nt, Artificial Sequence
  Description of Artificial Sequence: Synthetic oligonucleotide
ccuuugccauaucuauggc

SEQ ID NO: 929299 - RNA, 19 nt, Artificial Sequence
  Description of Artificial Sequence: Synthetic oligonucleotide
gcuacaccuggguaacauc

SEQ ID NO: 929300 - RNA, 19 nt, Artificial Sequence
  Description of Artificial Sequence: Synthetic oligonucleotide
gaccgaugaaacacacucu

SEQ ID NO: 929301 - RNA, 19 nt, Artificial Sequence
  Description of Artificial Sequence: Synthetic oligonucleotide
caggagccagggaugggca

SEQ ID NO: 929302 - RNA, 19 nt, Artificial Sequence
  Description of Artificial Sequence: Synthetic oligonucleotide
uccaggcauuguguaguaa

SEQ ID NO: 929303 - RNA, 19 nt, Artificial Sequence
  Description of Artificial Sequence: Synthetic oligonucleotide
gguuucgcguacugaccac

SEQ ID NO: 929304 - RNA, 19 nt, Artificial Sequence
  Description of Artificial Sequence: Synthetic oligonucleotide
aaggccccgccuggagcuc

SEQ ID NO: 929305 - RNA, 19 nt, Artificial Sequence
  Description of Artificial Sequence: Synthetic oligonucleotide
ccccugaaccuucauccag

SEQ ID NO: 929306 - RNA, 19 nt, Artificial Sequence
  Description of Artificial Sequence: Synthetic oligonucleotide
gcacucgaacauccuggag

SEQ ID NO: 929307 - RNA, 19 nt, Artificial Sequence
  Description of Artificial Sequence: Synthetic oligonucleotide
uggugcuaugggagcuguc

SEQ ID NO: 929308 - RNA, 19 nt, Artificial Sequence
  Description of Artificial Sequence: Synthetic oligonucleotide
acucuaggccccggagcag

SEQ ID NO: 929309 - RNA, 19 nt, Artificial Sequence
  Description of Artificial Sequence: Synthetic oligonucleotide
ggauacagccgagggacuc

SEQ ID NO: 929310 - RNA, 19 nt, Artificial Sequence
  Description of Artificial Sequence: Synthetic oligonucleotide
cacggcuuccaucauuccu

SEQ ID NO: 929311 - RNA, 19 nt, Artificial Sequence
  Description of Artificial Sequence: Synthetic oligonucleotide
ggagaauagugagacgacu

SEQ ID NO: 929312 - RNA, 19 nt, Artificial Sequence
  Description of Artificial Sequence: Synthetic oligonucleotide
gccauaucuauggcugaug

SEQ ID NO: 929313 - RNA, 19 nt, Artificial Sequence
  Description of Artificial Sequence: Synthetic oligonucleotide
cugugugagggacaggguu

SEQ ID NO: 929314 - RNA, 19 nt, Artificial Sequence
  Description of Artificial Sequence: Synthetic oligonucleotide
cguaggcucauagaaggug

SEQ ID NO: 929315 - RNA, 19 nt, Artificial Sequence
  Description of Artificial Sequence: Synthetic oligonucleotide
agccggacugugccaucug

SEQ ID NO: 929316 - RNA, 19 nt, Artificial Sequence
  Description of Artificial Sequence: Synthetic oligonucleotide
caucgaccucacucuccac

SEQ ID NO: 929317 - RNA, 19 nt, Artificial Sequence
  Description of Artificial Sequence: Synthetic oligonucleotide
gaacgccaggucuggacau

SEQ ID NO: 929318 - RNA, 19 nt, Artificial Sequence
  Description of Artificial Sequence: Synthetic oligonucleotide
caacaggcuguaggacccc

SEQ ID NO: 929319 - RNA, 19 nt, Artificial Sequence
  Description of Artificial Sequence: Synthetic oligonucleotide
gcauuguguaguaaccucu

SEQ ID NO: 929320 - RNA, 19 nt, Artificial Sequence
  Description of Artificial Sequence: Synthetic oligonucleotide
ggguucagguuucgcguac

SEQ ID NO: 929321 - RNA, 19 nt, Artificial Sequence
  Description of Artificial Sequence: Synthetic oligonucleotide
cugguacgcucgcccacug

SEQ ID NO: 929322 - RNA, 19 nt, Artificial Sequence
  Description of Artificial Sequence: Synthetic oligonucleotide
caacauccaccuuugccau

SEQ ID NO: 929323 - RNA, 19 nt, Artificial Sequence
  Description of Artificial Sequence: Synthetic oligonucleotide
acaccacgccaugggcgac

SEQ ID NO: 929324 - RNA, 19 nt, Artificial Sequence
  Description of Artificial Sequence: Synthetic oligonucleotide
guguuaccgagcuguggua

SEQ ID NO: 929325 - RNA, 19 nt, Artificial Sequence
  Description of Artificial Sequence: Synthetic oligonucleotide
ccaggcggaugguacaguc

SEQ ID NO: 929326 - RNA, 19 nt, Artificial Sequence
  Description of Artificial Sequence: Synthetic oligonucleotide
agacugccucaaucucacu

SEQ ID NO: 929327 - RNA, 19 nt, Artificial Sequence
  Description of Artificial Sequence: Synthetic oligonucleotide
ggaugguacaguccagcgu

SEQ ID NO: 929328 - RNA, 19 nt, Artificial Sequence
  Description of Artificial Sequence: Synthetic oligonucleotide
ccuccaacuuccauuaccu

SEQ ID NO: 929329 - RNA, 19 nt, Artificial Sequence
  Description of Artificial Sequence: Synthetic oligonucleotide
gucuggacaugauguggua

SEQ ID NO: 929330 - RNA, 19 nt, Artificial Sequence
  Description of Artificial Sequence: Synthetic oligonucleotide
gccgaaacuucaccuggca

SEQ ID NO: 929331 - RNA, 19 nt, Artificial Sequence
  Description of Artificial Sequence: Synthetic oligonucleotide
cagguacuugguaugugau

SEQ ID NO: 929332 - RNA, 19 nt, Artificial Sequence
  Description of Artificial Sequence: Synthetic oligonucleotide
aggguucauggaugagcua

SEQ ID NO: 929333 - RNA, 19 nt, Artificial Sequence
  Description of Artificial Sequence: Synthetic oligonucleotide
guuucgcguacugaccacu

SEQ ID NO: 929334 - RNA, 19 nt, Artificial Sequence
  Description of Artificial Sequence: Synthetic oligonucleotide
caccacgccaugggcgacc

SEQ ID NO: 929335 - RNA, 19 nt, Artificial Sequence
  Description of Artificial Sequence: Synthetic oligonucleotide
agucauccccuguggccuu

SEQ ID NO: 929336 - RNA, 19 nt, Artificial Sequence
  Description of Artificial Sequence: Synthetic oligonucleotide
ccacuuauuccaguugaca

SEQ ID NO: 929337 - RNA, 19 nt, Artificial Sequence
  Description of Artificial Sequence: Synthetic oligonucleotide
gguggguggucagauaacu

SEQ ID NO: 929338 - RNA, 19 nt, Artificial Sequence
  Description of Artificial Sequence: Synthetic oligonucleotide
gcgcagccgaaacuucacc

SEQ ID NO: 929339 - RNA, 19 nt, Artificial Sequence
  Description of Artificial Sequence: Synthetic oligonucleotide
auacagccgagggacucua

SEQ ID NO: 929340 - RNA, 19 nt, Artificial Sequence
  Description of Artificial Sequence: Synthetic oligonucleotide
guagccggacugugccauc

SEQ ID NO: 929341 - RNA, 19 nt, Artificial Sequence
  Description of Artificial Sequence: Synthetic oligonucleotide
gggagcugucuggagguac

SEQ ID NO: 929342 - RNA, 19 nt, Artificial Sequence
  Description of Artificial Sequence: Synthetic oligonucleotide
gguccacuaggcuggugaa

SEQ ID NO: 929343 - RNA, 19 nt, Artificial Sequence
  Description of Artificial Sequence: Synthetic oligonucleotide
gccauguugcugucuguaa

SEQ ID NO: 929344 - RNA, 19 nt, Artificial Sequence
  Description of Artificial Sequence: Synthetic oligonucleotide
cagcaggcgcuucuggaua

SEQ ID NO: 929345 - RNA, 19 nt, Artificial Sequence
  Description of Artificial Sequence: Synthetic oligonucleotide
ccgccuggagcucuuccag

SEQ ID NO: 929346 - RNA, 19 nt, Artificial Sequence
  Description of Artificial Sequence: Synthetic oligonucleotide
caagaaggccccgccugga

SEQ ID NO: 929347 - RNA, 19 nt, Artificial Sequence
  Description of Artificial Sequence: Synthetic oligonucleotide
guacgcagcugugggucca

SEQ ID NO: 929348 - RNA, 19 nt, Artificial Sequence
  Description of Artificial Sequence: Synthetic oligonucleotide
agucaaggccugggccucu

SEQ ID NO: 929349 - RNA, 19 nt, Artificial Sequence
  Description of Artificial Sequence: Synthetic oligonucleotide
ugaccacgaugcugucguu

SEQ ID NO: 929350 - RNA, 19 nt, Artificial Sequence
  Description of Artificial Sequence: Synthetic oligonucleotide
ccaagccuaggguuggcaa

SEQ ID NO: 929351 - RNA, 19 nt, Artificial Sequence
  Description of Artificial Sequence: Synthetic oligonucleotide
acgccaugggcgaccgaug

SEQ ID NO: 929352 - RNA, 19 nt, Artificial Sequence
  Description of Artificial Sequence: Synthetic oligonucleotide
augcuacaccuggguaaca

SEQ ID NO: 929353 - RNA, 19 nt, Artificial Sequence
  Description of Artificial Sequence: Synthetic oligonucleotide
ggggauuccugcaccugca

SEQ ID NO: 929354 - RNA, 19 nt, Artificial Sequence
  Description of Artificial Sequence: Synthetic oligonucleotide
ccaacacucucuugguucu

SEQ ID NO: 929355 - RNA, 19 nt, Artificial Sequence
  Description of Artificial Sequence: Synthetic oligonucleotide
uggguccacuaggcuggug

SEQ ID NO: 929356 - RNA, 19 nt, Artificial Sequence
  Description of Artificial Sequence: Synthetic oligonucleotide
cgcccauccacaccacgcc

SEQ ID NO: 929357 - RNA, 19 nt, Artificial Sequence
  Description of Artificial Sequence: Synthetic oligonucleotide
ggcauauucaggcgcccau

SEQ ID NO: 929358 - RNA, 19 nt, Artificial Sequence
  Description of Artificial Sequence: Synthetic oligonucleotide
gccccugaaccuucaucca

SEQ ID NO: 929359 - RNA, 19 nt, Artificial Sequence
  Description of Artificial Sequence: Synthetic oligonucleotide
cacgccaugggcgaccgau

SEQ ID NO: 929360 - RNA, 19 nt, Artificial Sequence
  Description of Artificial Sequence: Synthetic oligonucleotide
ccaugggcgaccgaugaaa

SEQ ID NO: 929361 - RNA, 19 nt, Artificial Sequence
  Description of Artificial Sequence: Synthetic oligonucleotide
guacgcucgcccacugucu

SEQ ID NO: 929362 - RNA, 19 nt, Artificial Sequence
  Description of Artificial Sequence: Synthetic oligonucleotide
guacugcuguugccucaaa

SEQ ID NO: 929363 - RNA, 19 nt, Artificial Sequence
  Description of Artificial Sequence: Synthetic oligonucleotide
ccagcgguguagcugugaa

SEQ ID NO: 929364 - RNA, 19 nt, Artificial Sequence
  Description of Artificial Sequence: Synthetic oligonucleotide
guauugcagcaggcagcuc

SEQ ID NO: 929365 - RNA, 19 nt, Artificial Sequence
  Description of Artificial Sequence: Synthetic oligonucleotide
gugcugcgcagccgaaacu

SEQ ID NO: 929366 - RNA, 19 nt, Artificial Sequence
  Description of Artificial Sequence: Synthetic oligonucleotide
ugcugucguugggguucag

SEQ ID NO: 929367 - RNA, 19 nt, Artificial Sequence
  Description of Artificial Sequence: Synthetic oligonucleotide
ggguuggcaagcacucgaa

SEQ ID NO: 929368 - RNA, 19 nt, Artificial Sequence
  Description of Artificial Sequence: Synthetic oligonucleotide
aguccagcguaggcucaua

SEQ ID NO: 929369 - RNA, 19 nt, Artificial Sequence
  Description of Artificial Sequence: Synthetic oligonucleotide
gcugcgcagccgaaacuuc

SEQ ID NO: 929370 - RNA, 19 nt, Artificial Sequence
  Description of Artificial Sequence: Synthetic oligonucleotide
caggcgcacaguguugccu

SEQ ID NO: 929371 - RNA, 19 nt, Artificial Sequence
  Description of Artificial Sequence: Synthetic oligonucleotide
cuggugcuaugggagcugu

SEQ ID NO: 929372 - RNA, 19 nt, Artificial Sequence
  Description of Artificial Sequence: Synthetic oligonucleotide
gccuuuacuuccacacccu

SEQ ID NO: 929373 - RNA, 19 nt, Artificial Sequence
  Description of Artificial Sequence: Synthetic oligonucleotide
gccaugggcgaccgaugaa

SEQ ID NO: 929374 - RNA, 19 nt, Artificial Sequence
  Description of Artificial Sequence: Synthetic oligonucleotide
ggcuugggagucauccccu

SEQ ID NO: 929375 - RNA, 19 nt, Artificial Sequence
  Description of Artificial Sequence: Synthetic oligonucleotide
caggaacgccaggucugga

SEQ ID NO: 929376 - RNA, 19 nt, Artificial Sequence
  Description of Artificial Sequence: Synthetic oligonucleotide
gcgcuuggccccugaaccu

SEQ ID NO: 929377 - RNA, 19 nt, Artificial Sequence
  Description of Artificial Sequence: Synthetic oligonucleotide
acccuggcgcuuggccccu

SEQ ID NO: 929378 - RNA, 19 nt, Artificial Sequence
  Description of Artificial Sequence: Synthetic oligonucleotide
ccuggggauuccugcaccu

SEQ ID NO: 929379 - RNA, 19 nt, Artificial Sequence
  Description of Artificial Sequence: Synthetic oligonucleotide
cgguguagcugugaaccca

SEQ ID NO: 929380 - RNA, 19 nt, Artificial Sequence
  Description of Artificial Sequence: Synthetic oligonucleotide
cucgaacauccuggagugu

SEQ ID NO: 929381 - RNA, 19 nt, Artificial Sequence
  Description of Artificial Sequence: Synthetic oligonucleotide
cgccaugggcgaccgauga

SEQ ID NO: 929382 - RNA, 19 nt, Artificial Sequence
  Description of Artificial Sequence: Synthetic oligonucleotide
cgagggacucuaggccccg

SEQ ID NO: 929383 - RNA, 19 nt, Artificial Sequence
  Description of Artificial Sequence: Synthetic oligonucleotide
ccgaugaaacacacucuuu

SEQ ID NO: 929384 - RNA, 19 nt, Artificial Sequence
  Description of Artificial Sequence: Synthetic oligonucleotide
gcguaggcucauagaaggu

SEQ ID NO: 929385 - RNA, 19 nt, Artificial Sequence
  Description of Artificial Sequence: Synthetic oligonucleotide
gggugcugcgcagccgaaa

SEQ ID NO: 929386 - RNA, 19 nt, Artificial Sequence
  Description of Artificial Sequence: Synthetic oligonucleotide
ggcagagaacugccugcuu

SEQ ID NO: 929387 - RNA, 19 nt, Artificial Sequence
  Description of Artificial Sequence: Synthetic oligonucleotide
ggcaggagacugccucaau

SEQ ID NO: 929388 - RNA, 19 nt, Artificial Sequence
  Description of Artificial Sequence: Synthetic oligonucleotide
gccaucuggugggcaaacu

SEQ ID NO: 929389 - RNA, 19 nt, Artificial Sequence
  Description of Artificial Sequence: Synthetic oligonucleotide
caguccagcguaggcucau

SEQ ID NO: 929390 - RNA, 19 nt, Artificial Sequence
  Description of Artificial Sequence: Synthetic oligonucleotide
ccugguacgcucgcccacu

SEQ ID NO: 929391 - RNA, 19 nt, Artificial Sequence
  Description of Artificial Sequence: Synthetic oligonucleotide
cccaaacaacauccaccuu

SEQ ID NO: 929392 - RNA, 19 nt, Artificial Sequence
  Description of Artificial Sequence: Synthetic oligonucleotide
cgcucgcccacugucuucu

SEQ ID NO: 929393 - RNA, 19 nt, Artificial Sequence
  Description of Artificial Sequence: Synthetic oligonucleotide
cacggcccaggcggauggu

SEQ ID NO: 929394 - RNA, 19 nt, Artificial Sequence
  Description of Artificial Sequence: Synthetic oligonucleotide
gggcccaagcugggugggu

SEQ ID NO: 929395 - RNA, 19 nt, Artificial Sequence
  Description of Artificial Sequence: Synthetic oligonucleotide
ccacgccaugggcgaccga

SEQ ID NO: 929396 - RNA, 19 nt, Artificial Sequence
  Description of Artificial Sequence: Synthetic oligonucleotide
ggccccgccuggagcucuu

SEQ ID NO: 929397 - RNA, 19 nt, Artificial Sequence
  Description of Artificial Sequence: Synthetic oligonucleotide
aacacuauaaucuguacac

SEQ ID NO: 929398 - RNA, 19 nt, Artificial Sequence
  Description of Artificial Sequence: Synthetic oligonucleotide
aaucauuauguaaagaagg

SEQ ID NO: 929399 - RNA, 19 nt, Artificial Sequence
  Description of Artificial Sequence: Synthetic oligonucleotide
aaaccaauuguguaguggg

SEQ ID NO: 929400 - RNA, 19 nt, Artificial Sequence
  Description of Artificial Sequence: Synthetic oligonucleotide
aaauaguggucauucuccc

SEQ ID NO: 929401 - RNA, 19 nt, Artificial Sequence
  Description of Artificial Sequence: Synthetic oligonucleotide
uaccugagcaauuauaagg

SEQ ID NO: 929402 - RNA, 19 nt, Artificial Sequence
  Description of Artificial Sequence: Synthetic oligonucleotide
aaaugucucaaucauuaug

SEQ ID NO: 929403 - RNA, 19 nt, Artificial Sequence
  Description of Artificial Sequence: Synthetic oligonucleotide
cuuacuaugggaugggucc

SEQ ID NO: 929404 - RNA, 19 nt, Artificial Sequence
  Description of Artificial Sequence: Synthetic oligonucleotide
cuuucauagaguaagugac

SEQ ID NO: 929405 - RNA, 19 nt, Artificial Sequence
  Description of Artificial Sequence: Synthetic oligonucleotide
gaaauugucauacaucauc

SEQ ID NO: 929406 - RNA, 19 nt, Artificial Sequence
  Description of Artificial Sequence: Synthetic oligonucleotide
aaugucucaaucauuaugu

SEQ ID NO: 929407 - RNA, 19 nt, Artificial Sequence
  Description of Artificial Sequence: Synthetic oligonucleotide
agcacuuaguaucuguggc

SEQ ID NO: 929408 - RNA, 19 nt, Artificial Sequence
  Description of Artificial Sequence: Synthetic oligonucleotide
cuugaauguaguaugugcc

SEQ ID NO: 929409 - RNA, 19 nt, Artificial Sequence
  Description of Artificial Sequence: Synthetic oligonucleotide
ucucugagaagacggaugg

SEQ ID NO: 929410 - RNA, 19 nt, Artificial Sequence
  Description of Artificial Sequence: Synthetic oligonucleotide
uguaguaugugccaugcac

SEQ ID NO: 929411 - RNA, 19 nt, Artificial Sequence
  Description of Artificial Sequence: Synthetic oligonucleotide
ugagcaauuauaagguggc

SEQ ID NO: 929412 - RNA, 19 nt, Artificial Sequence
  Description of Artificial Sequence: Synthetic oligonucleotide
aaagcaagugaacaugcca

SEQ ID NO: 929413 - RNA, 19 nt, Artificial Sequence
  Description of Artificial Sequence: Synthetic oligonucleotide
ugucguugaaccgaaaggg

SEQ ID NO: 929414 - RNA, 19 nt, Artificial Sequence
  Description of Artificial Sequence: Synthetic oligonucleotide
cugagcaauuauaaggugg

SEQ ID NO: 929415 - RNA, 19 nt, Artificial Sequence
  Description of Artificial Sequence: Synthetic oligonucleotide
uaaugcagaccauaaaucu

SEQ ID NO: 929416 - RNA, 19 nt, Artificial Sequence
  Description of Artificial Sequence: Synthetic oligonucleotide
gugaaauugucauacauca

SEQ ID NO: 929417 - RNA, 19 nt, Artificial Sequence
  Description of Artificial Sequence: Synthetic oligonucleotide
accagaaaaugucucaauc

SEQ ID NO: 929418 - RNA, 19 nt, Artificial Sequence
  Description of Artificial Sequence: Synthetic oligonucleotide
gaaguuaaacccauggaug

SEQ ID NO: 929419 - RNA, 19 nt, Artificial Sequence
  Description of Artificial Sequence: Synthetic oligonucleotide
aauugucauacaucaucuc

SEQ ID NO: 929420 - RNA, 19 nt, Artificial Sequence
  Description of Artificial Sequence: Synthetic oligonucleotide
ugugucguugaaccgaaag

SEQ ID NO: 929421 - RNA, 19 nt, Artificial Sequence
  Description of Artificial Sequence: Synthetic oligonucleotide
cacuauaaucuguacaccc

SEQ ID NO: 929422 - RNA, 19 nt, Artificial Sequence
  Description of Artificial Sequence: Synthetic oligonucleotide
uguaaagaaggaagguccc

SEQ ID NO: 929423 - RNA, 19 nt, Artificial Sequence
  Description of Artificial Sequence: Synthetic oligonucleotide
uauaagguggccgucagga

SEQ ID NO: 929424 - RNA, 19 nt, Artificial Sequence
  Description of Artificial Sequence: Synthetic oligonucleotide
acugguaucucccaucaug

SEQ ID NO: 929425 - RNA, 19 nt, Artificial Sequence
  Description of Artificial Sequence: Synthetic oligonucleotide
uacaaccgcccauagagag

SEQ ID NO: 929426 - RNA, 19 nt, Artificial Sequence
  Description of Artificial Sequence: Synthetic oligonucleotide
ugugugaaguccgucaaag

SEQ ID NO: 929427 - RNA, 19 nt, Artificial Sequence
  Description of Artificial Sequence: Synthetic oligonucleotide
ucucaaucauuauguaaag

SEQ ID NO: 929428 - RNA, 19 nt, Artificial Sequence
  Description of Artificial Sequence: Synthetic oligonucleotide
gucaacaaggguuccauug

SEQ ID NO: 929429 - RNA, 19 nt, Artificial Sequence
  Description of Artificial Sequence: Synthetic oligonucleotide
uucaucucgccucagcaga

SEQ ID NO: 929430 - RNA, 19 nt, Artificial Sequence
  Description of Artificial Sequence: Synthetic oligonucleotide
aaaauaguaacugguguuu

SEQ ID NO: 929431 - RNA, 19 nt, Artificial Sequence
  Description of Artificial Sequence: Synthetic oligonucleotide
aauaguaacugguguuuau

SEQ ID NO: 929432 - RNA, 19 nt, Artificial Sequence
  Description of Artificial Sequence: Synthetic oligonucleotide
aauuauaagguggccguca

SEQ ID NO: 929433 - RNA, 19 nt, Artificial Sequence
  Description of Artificial Sequence: Synthetic oligonucleotide
ugcaucacggugcucuggg

SEQ ID NO: 929434 - RNA, 19 nt, Artificial Sequence
  Description of Artificial Sequence: Synthetic oligonucleotide
aaugcagaccauaaaucug

SEQ ID NO: 929435 - RNA, 19 nt, Artificial Sequence
  Description of Artificial Sequence: Synthetic oligonucleotide
agagucucugagaagacgg

SEQ ID NO: 929436 - RNA, 19 nt, Artificial Sequence
  Description of Artificial Sequence: Synthetic oligonucleotide
agggcauacagcucuuugg

SEQ ID NO: 929437 - RNA, 19 nt, Artificial Sequence
  Description of Artificial Sequence: Synthetic oligonucleotide
gugucguugaaccgaaagg

SEQ ID NO: 929438 - RNA, 19 nt, Artificial Sequence
  Description of Artificial Sequence: Synthetic oligonucleotide
aucgcagugcacuuccugg

SEQ ID NO: 929439 - RNA, 19 nt, Artificial Sequence
  Description of Artificial Sequence: Synthetic oligonucleotide
uggccauacaacucaggcg

SEQ ID NO: 929440 - RNA, 19 nt, Artificial Sequence
  Description of Artificial Sequence: Synthetic oligonucleotide
guaucucccaucauguggg

SEQ ID NO: 929441 - RNA, 19 nt, Artificial Sequence
  Description of Artificial Sequence: Synthetic oligonucleotide
uguggaaaagcaugcuagc

SEQ ID NO: 929442 - RNA, 19 nt, Artificial Sequence
  Description of Artificial Sequence: Synthetic oligonucleotide
uuauguaaagaaggaaggu

SEQ ID NO: 929443 - RNA, 19 nt, Artificial Sequence
  Description of Artificial Sequence: Synthetic oligonucleotide
ggccauacaacucaggcgc

SEQ ID NO: 929444 - RNA, 19 nt, Artificial Sequence
  Description of Artificial Sequence: Synthetic oligonucleotide
auagacgucgagguucugc

SEQ ID NO: 929445 - RNA, 19 nt, Artificial Sequence
  Description of Artificial Sequence: Synthetic oligonucleotide
ucguugaaccgaaagggcu

SEQ ID NO: 929446 - RNA, 19 nt, Artificial Sequence
  Description of Artificial Sequence: Synthetic oligonucleotide
auuauaagguggccgucag

SEQ ID NO: 929447 - RNA, 19 nt, Artificial Sequence
  Description of Artificial Sequence: Synthetic oligonucleotide
aguaugggucaccggacac

SEQ ID NO: 929448 - RNA, 19 nt, Artificial Sequence
  Description of Artificial Sequence: Synthetic oligonucleotide
uaguaugugccaugcacug

SEQ ID NO: 929449 - RNA, 19 nt, Artificial Sequence
  Description of Artificial Sequence: Synthetic oligonucleotide
uuagccggggugucaaagg

SEQ ID NO: 929450 - RNA, 19 nt, Artificial Sequence
  Description of Artificial Sequence: Synthetic oligonucleotide
ucaaauaggcccugugccu

SEQ ID NO: 929451 - RNA, 19 nt, Artificial Sequence
  Description of Artificial Sequence: Synthetic oligonucleotide
uuauaagguggccgucagg

SEQ ID NO: 929452 - RNA, 19 nt, Artificial Sequence
  Description of Artificial Sequence: Synthetic oligonucleotide
guaugugccaugcacugug

SEQ ID NO: 929453 - RNA, 19 nt, Artificial Sequence
  Description of Artificial Sequence: Synthetic oligonucleotide
ugaaguugccccacaggug

SEQ ID NO: 929454 - RNA, 19 nt, Artificial Sequence
  Description of Artificial Sequence: Synthetic oligonucleotide
gaaaguagguggugcauuc

SEQ ID NO: 929455 - RNA, 19 nt, Artificial Sequence
  Description of Artificial Sequence: Synthetic oligonucleotide
guacacggcagccacguag

SEQ ID NO: 929456 - RNA, 19 nt, Artificial Sequence
  Description of Artificial Sequence: Synthetic oligonucleotide
uaugggauggguccauuuc

SEQ ID NO: 929457 - RNA, 19 nt, Artificial Sequence
  Description of Artificial Sequence: Synthetic oligonucleotide
auggguuccacuugaccag

SEQ ID NO: 929458 - RNA, 19 nt, Artificial Sequence
  Description of Artificial Sequence: Synthetic oligonucleotide
gucucaaucauuauguaaa

SEQ ID NO: 929459 - RNA, 19 nt, Artificial Sequence
  Description of Artificial Sequence: Synthetic oligonucleotide
cacuugaccaggcugggag

SEQ ID NO: 929460 - RNA, 19 nt, Artificial Sequence
  Description of Artificial Sequence: Synthetic oligonucleotide
cuggccacaagugucaaag

SEQ ID NO: 929461 - RNA, 19 nt, Artificial Sequence
  Description of Artificial Sequence: Synthetic oligonucleotide
aguaucuguggccugugga

SEQ ID NO: 929462 - RNA, 19 nt, Artificial Sequence
  Description of Artificial Sequence: Synthetic oligonucleotide
acagacuugaauguaguau

SEQ ID NO: 929463 - RNA, 19 nt, Artificial Sequence
  Description of Artificial Sequence: Synthetic oligonucleotide
acggcagccacguaguacu

SEQ ID NO: 929464 - RNA, 19 nt, Artificial Sequence
  Description of Artificial Sequence: Synthetic oligonucleotide
cuuccuuuccccagacagg

SEQ ID NO: 929465 - RNA, 19 nt, Artificial Sequence
  Description of Artificial Sequence: Synthetic oligonucleotide
cucgccucagcagacagcg

SEQ ID NO: 929466 - RNA, 19 nt, Artificial Sequence
  Description of Artificial Sequence: Synthetic oligonucleotide
cuaccugagcaauuauaag

SEQ ID NO: 929467 - RNA, 19 nt, Artificial Sequence
  Description of Artificial Sequence: Synthetic oligonucleotide
cagcacuuaguaucugugg

SEQ ID NO: 929468 - RNA, 19 nt, Artificial Sequence
  Description of Artificial Sequence: Synthetic oligonucleotide
cauucucccacccuagcug

SEQ ID NO: 929469 - RNA, 19 nt, Artificial Sequence
  Description of Artificial Sequence: Synthetic oligonucleotide
uagacgucgagguucugcu

SEQ ID NO: 929470 - RNA, 19 nt, Artificial Sequence
  Description of Artificial Sequence: Synthetic oligonucleotide
agguaagaaauaaaggaaa

SEQ ID NO: 929471 - RNA, 19 nt, Artificial Sequence
  Description of Artificial Sequence: Synthetic oligonucleotide
ugugcuuacgguagcgguc

SEQ ID NO: 929472 - RNA, 19 nt, Artificial Sequence
  Description of Artificial Sequence: Synthetic oligonucleotide
acuuacuaugggauggguc

SEQ ID NO: 929473 - RNA, 19 nt, Artificial Sequence
  Description of Artificial Sequence: Synthetic oligonucleotide
aagaagguguggcuugaaa

SEQ ID NO: 929474 - RNA, 19 nt, Artificial Sequence
  Description of Artificial Sequence: Synthetic oligonucleotide
ugaaauugucauacaucau

SEQ ID NO: 929475 - RNA, 19 nt, Artificial Sequence
  Description of Artificial Sequence: Synthetic oligonucleotide
ucauacaaccgcccauaga

SEQ ID NO: 929476 - RNA, 19 nt, Artificial Sequence
  Description of Artificial Sequence: Synthetic oligonucleotide
ucgcagugcacuuccuggg

SEQ ID NO: 929477 - RNA, 19 nt, Artificial Sequence
  Description of Artificial Sequence: Synthetic oligonucleotide
ugggaacacuauaaucugu

SEQ ID NO: 929478 - RNA, 19 nt, Artificial Sequence
  Description of Artificial Sequence: Synthetic oligonucleotide
uggcaugaaguccaagaau

SEQ ID NO: 929479 - RNA, 19 nt, Artificial Sequence
  Description of Artificial Sequence: Synthetic oligonucleotide
ucauagaguaagugacaac

SEQ ID NO: 929480 - RNA, 19 nt, Artificial Sequence
  Description of Artificial Sequence: Synthetic oligonucleotide
uugugcuuacgguagcggu

SEQ ID NO: 929481 - RNA, 19 nt, Artificial Sequence
  Description of Artificial Sequence: Synthetic oligonucleotide
uguacacccuucugggcug

SEQ ID NO: 929482 - RNA, 19 nt, Artificial Sequence
  Description of Artificial Sequence: Synthetic oligonucleotide
uuugggcucaggaccgacc

SEQ ID NO: 929483 - RNA, 19 nt, Artificial Sequence
  Description of Artificial Sequence: Synthetic oligonucleotide
gcuguuagagcagaccugg

SEQ ID NO: 929484 - RNA, 19 nt, Artificial Sequence
  Description of Artificial Sequence: Synthetic oligonucleotide
aaauaguaacugguguuua

SEQ ID NO: 929485 - RNA, 19 nt, Artificial Sequence
  Description of Artificial Sequence: Synthetic oligonucleotide
gacgucgagguucugcuuc

SEQ ID NO: 929486 - RNA, 19 nt, Artificial Sequence
  Description of Artificial Sequence: Synthetic oligonucleotide
guuagcugccagaacacug

SEQ ID NO: 929487 - RNA, 19 nt, Artificial Sequence
  Description of Artificial Sequence: Synthetic oligonucleotide
aaauaggcccugugccucu

SEQ ID NO: 929488 - RNA, 19 nt, Artificial Sequence
  Description of Artificial Sequence: Synthetic oligonucleotide
ucuguacacccuucugggc

SEQ ID NO: 929489 - RNA, 19 nt, Artificial Sequence
  Description of Artificial Sequence: Synthetic oligonucleotide
uggucauucucccacccua

SEQ ID NO: 929490 - RNA, 19 nt, Artificial Sequence
  Description of Artificial Sequence: Synthetic oligonucleotide
aaaguacagguugugcuua

SEQ ID NO: 929491 - RNA, 19 nt, Artificial Sequence
  Description of Artificial Sequence: Synthetic oligonucleotide
caugcacugugugaagucc

SEQ ID NO: 929492 - RNA, 19 nt, Artificial Sequence
  Description of Artificial Sequence: Synthetic oligonucleotide
uucaccucagagucucuga

SEQ ID NO: 929493 - RNA, 19 nt, Artificial Sequence
  Description of Artificial Sequence: Synthetic oligonucleotide
auaaaucugcuuggcguag

SEQ ID NO: 929494 - RNA, 19 nt, Artificial Sequence
  Description of Artificial Sequence: Synthetic oligonucleotide
uggauguuagcugccagaa

SEQ ID NO: 929495 - RNA, 19 nt, Artificial Sequence
  Description of Artificial Sequence: Synthetic oligonucleotide
acccuagcugguuaggggu

SEQ ID NO: 929496 - RNA, 19 nt, Artificial Sequence
  Description of Artificial Sequence: Synthetic oligonucleotide
gucccucucauacaaccgc

SEQ ID NO: 929497 - RNA, 19 nt, Artificial Sequence
  Description of Artificial Sequence: Synthetic oligonucleotide
uuggcguaggccgcgaucu

SEQ ID NO: 929498 - RNA, 19 nt, Artificial Sequence
  Description of Artificial Sequence: Synthetic oligonucleotide
cacccuagcugguuagggg

SEQ ID NO: 929499 - RNA, 19 nt, Artificial Sequence
  Description of Artificial Sequence: Synthetic oligonucleotide
accgcccauagagagcugc

SEQ ID NO: 929500 - RNA, 19 nt, Artificial Sequence
  Description of Artificial Sequence: Synthetic oligonucleotide
ucuccgguucaucucgccu

SEQ ID NO: 929501 - RNA, 19 nt, Artificial Sequence
  Description of Artificial Sequence: Synthetic oligonucleotide
uagcggucaacaaggguuc

SEQ ID NO: 929502 - RNA, 19 nt, Artificial Sequence
  Description of Artificial Sequence: Synthetic oligonucleotide
cuuacgguagcggucaaca

SEQ ID NO: 929503 - RNA, 19 nt, Artificial Sequence
  Description of Artificial Sequence: Synthetic oligonucleotide
ccgucaaagacacccaggg

SEQ ID NO: 929504 - RNA, 19 nt, Artificial Sequence
  Description of Artificial Sequence: Synthetic oligonucleotide
gaggcuguuagagcagacc

SEQ ID NO: 929505 - RNA, 19 nt, Artificial Sequence
  Description of Artificial Sequence: Synthetic oligonucleotide
guagguggugcauucaugu

SEQ ID NO: 929506 - RNA, 19 nt, Artificial Sequence
  Description of Artificial Sequence: Synthetic oligonucleotide
gguaccaaaaggacugaag

SEQ ID NO: 929507 - RNA, 19 nt, Artificial Sequence
  Description of Artificial Sequence: Synthetic oligonucleotide
acaaccgcccauagagagc

SEQ ID NO: 929508 - RNA, 19 nt, Artificial Sequence
  Description of Artificial Sequence: Synthetic oligonucleotide
aucucgccucagcagacag

SEQ ID NO: 929509 - RNA, 19 nt, Artificial Sequence
  Description of Artificial Sequence: Synthetic oligonucleotide
uggagauagccuuccuuuc

SEQ ID NO: 929510 - RNA, 19 nt, Artificial Sequence
  Description of Artificial Sequence: Synthetic oligonucleotide
uaugggucaccggacacaa

SEQ ID NO: 929511 - RNA, 19 nt, Artificial Sequence
  Description of Artificial Sequence: Synthetic oligonucleotide
guaucuguggccuguggaa

SEQ ID NO: 929512 - RNA, 19 nt, Artificial Sequence
  Description of Artificial Sequence: Synthetic oligonucleotide
gacaguccacucuuccuca

SEQ ID NO: 929513 - RNA, 19 nt, Artificial Sequence
  Description of Artificial Sequence: Synthetic oligonucleotide
aaggacugaagaggagugu

SEQ ID NO: 929514 - RNA, 19 nt, Artificial Sequence
  Description of Artificial Sequence: Synthetic oligonucleotide
ugcacugugugaaguccgu

SEQ ID NO: 929515 - RNA, 19 nt, Artificial Sequence
  Description of Artificial Sequence: Synthetic oligonucleotide
uccacguuagccggggugu

SEQ ID NO: 929516 - RNA, 19 nt, Artificial Sequence
  Description of Artificial Sequence: Synthetic oligonucleotide
cugguuagggguauccaga

SEQ ID NO: 929517 - RNA, 19 nt, Artificial Sequence
  Description of Artificial Sequence: Synthetic oligonucleotide
guugaaccgaaagggcucc

SEQ ID NO: 929518 - RNA, 19 nt, Artificial Sequence
  Description of Artificial Sequence: Synthetic oligonucleotide
ugccccacaggugaaaguc

SEQ ID NO: 929519 - RNA, 19 nt, Artificial Sequence
  Description of Artificial Sequence: Synthetic oligonucleotide
ucaucucgccucagcagac

SEQ ID NO: 929520 - RNA, 19 nt, Artificial Sequence
  Description of Artificial Sequence: Synthetic oligonucleotide
agucccucucauacaaccg

SEQ ID NO: 929521 - RNA, 19 nt, Artificial Sequence
  Description of Artificial Sequence: Synthetic oligonucleotide
cacguaguacucugcauca

SEQ ID NO: 929522 - RNA, 19 nt, Artificial Sequence
  Description of Artificial Sequence: Synthetic oligonucleotide
aagacggauggugggguca

SEQ ID NO: 929523 - RNA, 19 nt, Artificial Sequence
  Description of Artificial Sequence: Synthetic oligonucleotide
acuuaguaucuguggccug

SEQ ID NO: 929524 - RNA, 19 nt, Artificial Sequence
  Description of Artificial Sequence: Synthetic oligonucleotide
uccauuucacuaguugcau

SEQ ID NO: 929525 - RNA, 19 nt, Artificial Sequence
  Description of Artificial Sequence: Synthetic oligonucleotide
agccacguaguacucugca

SEQ ID NO: 929526 - RNA, 19 nt, Artificial Sequence
  Description of Artificial Sequence: Synthetic oligonucleotide
guccgucaaagacacccag

SEQ ID NO: 929527 - RNA, 19 nt, Artificial Sequence
  Description of Artificial Sequence: Synthetic oligonucleotide
guuagccggggugucaaag

SEQ ID NO: 929528 - RNA, 19 nt, Artificial Sequence
  Description of Artificial Sequence: Synthetic oligonucleotide
caaauaggcccugugccuc

SEQ ID NO: 929529 - RNA, 19 nt, Artificial Sequence
  Description of Artificial Sequence: Synthetic oligonucleotide
agagucgggugguggaugu

SEQ ID NO: 929530 - RNA, 19 nt, Artificial Sequence
  Description of Artificial Sequence: Synthetic oligonucleotide
uguaugccacugccaguca

SEQ ID NO: 929531 - RNA, 19 nt, Artificial Sequence
  Description of Artificial Sequence: Synthetic oligonucleotide
uuaguaucuguggccugug

SEQ ID NO: 929532 - RNA, 19 nt, Artificial Sequence
  Description of Artificial Sequence: Synthetic oligonucleotide
agacuugaauguaguaugu

SEQ ID NO: 929533 - RNA, 19 nt, Artificial Sequence
  Description of Artificial Sequence: Synthetic oligonucleotide
gagcaauuauaagguggcc

SEQ ID NO: 929534 - RNA, 19 nt, Artificial Sequence
  Description of Artificial Sequence: Synthetic oligonucleotide
cacuuggcagccucaucgc

SEQ ID NO: 929535 - RNA, 19 nt, Artificial Sequence
  Description of Artificial Sequence: Synthetic oligonucleotide
agcgcagaacagccgagga

SEQ ID NO: 929536 - RNA, 19 nt, Artificial Sequence
  Description of Artificial Sequence: Synthetic oligonucleotide
guggauguuagcugccaga

SEQ ID NO: 929537 - RNA, 19 nt, Artificial Sequence
  Description of Artificial Sequence: Synthetic oligonucleotide
ucguacacggcagccacgu

SEQ ID NO: 929538 - RNA, 19 nt, Artificial Sequence
  Description of Artificial Sequence: Synthetic oligonucleotide
aggguuccauuguugcuga

SEQ ID NO: 929539 - RNA, 19 nt, Artificial Sequence
  Description of Artificial Sequence: Synthetic oligonucleotide
agaagacggaugguggggu

SEQ ID NO: 929540 - RNA, 19 nt, Artificial Sequence
  Description of Artificial Sequence: Synthetic oligonucleotide
caugcuagcagagcccauc

SEQ ID NO: 929541 - RNA, 19 nt, Artificial Sequence
  Description of Artificial Sequence: Synthetic oligonucleotide
cauguuccacuuggcagcc

SEQ ID NO: 929542 - RNA, 19 nt, Artificial Sequence
  Description of Artificial Sequence: Synthetic oligonucleotide
aguagguggugcauucaug

SEQ ID NO: 929543 - RNA, 19 nt, Artificial Sequence
  Description of Artificial Sequence: Synthetic oligonucleotide
caagcgcagaacagccgag

SEQ ID NO: 929544 - RNA, 19 nt, Artificial Sequence
  Description of Artificial Sequence: Synthetic oligonucleotide
caucgcagugcacuuccug

SEQ ID NO: 929545 - RNA, 19 nt, Artificial Sequence
  Description of Artificial Sequence: Synthetic oligonucleotide
gcaauuauaagguggccgu

SEQ ID NO: 929546 - RNA, 19 nt, Artificial Sequence
  Description of Artificial Sequence: Synthetic oligonucleotide
caauuguguagugggaaga

SEQ ID NO: 929547 - RNA, 19 nt, Artificial Sequence
  Description of Artificial Sequence: Synthetic oligonucleotide
guccacguuagccggggug

SEQ ID NO: 929548 - RNA, 19 nt, Artificial Sequence
  Description of Artificial Sequence: Synthetic oligonucleotide
guaaagaaggaagguccca

SEQ ID NO: 929549 - RNA, 19 nt, Artificial Sequence
  Description of Artificial Sequence: Synthetic oligonucleotide
acguaguacucugcaucac

SEQ ID NO: 929550 - RNA, 19 nt, Artificial Sequence
  Description of Artificial Sequence: Synthetic oligonucleotide
uggugcauucauguuccac

SEQ ID NO: 929551 - RNA, 19 nt, Artificial Sequence
  Description of Artificial Sequence: Synthetic oligonucleotide
uguggcuaccugagcaauu

SEQ ID NO: 929552 - RNA, 19 nt, Artificial Sequence
  Description of Artificial Sequence: Synthetic oligonucleotide
acggaugguggggucaaag

SEQ ID NO: 929553 - RNA, 19 nt, Artificial Sequence
  Description of Artificial Sequence: Synthetic oligonucleotide
agccaucacuugcuguuca

SEQ ID NO: 929554 - RNA, 19 nt, Artificial Sequence
  Description of Artificial Sequence: Synthetic oligonucleotide
auguaguaugugccaugca

SEQ ID NO: 929555 - RNA, 19 nt, Artificial Sequence
  Description of Artificial Sequence: Synthetic oligonucleotide
uggaaaguagguggugcau

SEQ ID NO: 929556 - RNA, 19 nt, Artificial Sequence
  Description of Artificial Sequence: Synthetic oligonucleotide
agagugggccuuucauaga

SEQ ID NO: 929557 - RNA, 19 nt, Artificial Sequence
  Description of Artificial Sequence: Synthetic oligonucleotide
gaagacggauggugggguc

SEQ ID NO: 929558 - RNA, 19 nt, Artificial Sequence
  Description of Artificial Sequence: Synthetic oligonucleotide
gcuaccugagcaauuauaa

SEQ ID NO: 929559 - RNA, 19 nt, Artificial Sequence
  Description of Artificial Sequence: Synthetic oligonucleotide
aguguguaugccacugcca

SEQ ID NO: 929560 - RNA, 19 nt, Artificial Sequence
  Description of Artificial Sequence: Synthetic oligonucleotide
gguugugcuuacgguagcg

SEQ ID NO: 929561 - RNA, 19 nt, Artificial Sequence
  Description of Artificial Sequence: Synthetic oligonucleotide
gaccagggcacagacuuga

SEQ ID NO: 929562 - RNA, 19 nt, Artificial Sequence
  Description of Artificial Sequence: Synthetic oligonucleotide
gaccuggagauagccuucc

SEQ ID NO: 929563 - RNA, 19 nt, Artificial Sequence
  Description of Artificial Sequence: Synthetic oligonucleotide
agcggucaacaaggguucc

SEQ ID NO: 929564 - RNA, 19 nt, Artificial Sequence
  Description of Artificial Sequence: Synthetic oligonucleotide
guaguaugugccaugcacu

SEQ ID NO: 929565 - RNA, 19 nt, Artificial Sequence
  Description of Artificial Sequence: Synthetic oligonucleotide
gaggaccucugugucguug

SEQ ID NO: 929566 - RNA, 19 nt, Artificial Sequence
  Description of Artificial Sequence: Synthetic oligonucleotide
caauuauaagguggccguc

SEQ ID NO: 929567 - RNA, 19 nt, Artificial Sequence
  Description of Artificial Sequence: Synthetic oligonucleotide
aguaugugccaugcacugu

SEQ ID NO: 929568 - RNA, 19 nt, Artificial Sequence
  Description of Artificial Sequence: Synthetic oligonucleotide
cgugggguacacaaugugc

SEQ ID NO: 929569 - RNA, 19 nt, Artificial Sequence
  Description of Artificial Sequence: Synthetic oligonucleotide
gggagauggcaugaagucc

SEQ ID NO: 929570 - RNA, 19 nt, Artificial Sequence
  Description of Artificial Sequence: Synthetic oligonucleotide
uuguuccgagauuggccac

SEQ ID NO: 929571 - RNA, 19 nt, Artificial Sequence
  Description of Artificial Sequence: Synthetic oligonucleotide
guucuggcggcuacugagc

SEQ ID NO: 929572 - RNA, 19 nt, Artificial Sequence
  Description of Artificial Sequence: Synthetic oligonucleotide
cagacagcggaaucgggaa

SEQ ID NO: 929573 - RNA, 19 nt, Artificial Sequence
  Description of Artificial Sequence: Synthetic oligonucleotide
ggggucaaagaacaggaua

SEQ ID NO: 929574 - RNA, 19 nt, Artificial Sequence
  Description of Artificial Sequence: Synthetic oligonucleotide
cugccagaacacugacacc

SEQ ID NO: 929575 - RNA, 19 nt, Artificial Sequence
  Description of Artificial Sequence: Synthetic oligonucleotide
aacgcccagcgcaagcgca

SEQ ID NO: 929576 - RNA, 19 nt, Artificial Sequence
  Description of Artificial Sequence: Synthetic oligonucleotide
uaggccgcgaucuccgguu

SEQ ID NO: 929577 - RNA, 19 nt, Artificial Sequence
  Description of Artificial Sequence: Synthetic oligonucleotide
cuuggcguaggccgcgauc

SEQ ID NO: 929578 - RNA, 19 nt, Artificial Sequence
  Description of Artificial Sequence: Synthetic oligonucleotide
gcaagcgcagaacagccga

SEQ ID NO: 929579 - RNA, 19 nt, Artificial Sequence
  Description of Artificial Sequence: Synthetic oligonucleotide
agagcccaucccacugacc

SEQ ID NO: 929580 - RNA, 19 nt, Artificial Sequence
  Description of Artificial Sequence: Synthetic oligonucleotide
cuguacacccuucugggcu

SEQ ID NO: 929581 - RNA, 19 nt, Artificial Sequence
  Description of Artificial Sequence: Synthetic oligonucleotide
acgucgagguucugcuuca

SEQ ID NO: 929582 - RNA, 19 nt, Artificial Sequence
  Description of Artificial Sequence: Synthetic oligonucleotide
cgaucuccgguucaucucg

SEQ ID NO: 929583 - RNA, 19 nt, Artificial Sequence
  Description of Artificial Sequence: Synthetic oligonucleotide
gugcuuacgguagcgguca

SEQ ID NO: 929584 - RNA, 19 nt, Artificial Sequence
  Description of Artificial Sequence: Synthetic oligonucleotide
uagguggugcauucauguu

SEQ ID NO: 929585 - RNA, 19 nt, Artificial Sequence
  Description of Artificial Sequence: Synthetic oligonucleotide
uccuuuccccagacaggga

SEQ ID NO: 929586 - RNA, 19 nt, Artificial Sequence
  Description of Artificial Sequence: Synthetic oligonucleotide
agacagcggaaucgggaaa

SEQ ID NO: 929587 - RNA, 19 nt, Artificial Sequence
  Description of Artificial Sequence: Synthetic oligonucleotide
auacaaccgcccauagaga

SEQ ID NO: 929588 - RNA, 19 nt, Artificial Sequence
  Description of Artificial Sequence: Synthetic oligonucleotide
caacgcccagcgcaagcgc

SEQ ID NO: 929589 - RNA, 19 nt, Artificial Sequence
  Description of Artificial Sequence: Synthetic oligonucleotide
gucgggugguggauguuag

SEQ ID NO: 929590 - RNA, 19 nt, Artificial Sequence
  Description of Artificial Sequence: Synthetic oligonucleotide
ggguaucaaaggugaugag

SEQ ID NO: 929591 - RNA, 19 nt, Artificial Sequence
  Description of Artificial Sequence: Synthetic oligonucleotide
cuauaaucuguacacccuu

SEQ ID NO: 929592 - RNA, 19 nt, Artificial Sequence
  Description of Artificial Sequence: Synthetic oligonucleotide
gagucucugagaagacgga

SEQ ID NO: 929593 - RNA, 19 nt, Artificial Sequence
  Description of Artificial Sequence: Synthetic oligonucleotide
gccacaagugucaaagcca

SEQ ID NO: 929594 - RNA, 19 nt, Artificial Sequence
  Description of Artificial Sequence: Synthetic oligonucleotide
ggugcucguacacggcagc

SEQ ID NO: 929595 - RNA, 19 nt, Artificial Sequence
  Description of Artificial Sequence: Synthetic oligonucleotide
cagccacguaguacucugc

SEQ ID NO: 929596 - RNA, 19 nt, Artificial Sequence
  Description of Artificial Sequence: Synthetic oligonucleotide
caguaugggucaccggaca

SEQ ID NO: 929597 - RNA, 19 nt, Artificial Sequence
  Description of Artificial Sequence: Synthetic oligonucleotide
cacggcagccacguaguac

SEQ ID NO: 929598 - RNA, 19 nt, Artificial Sequence
  Description of Artificial Sequence: Synthetic oligonucleotide
ggucauucucccacccuag

SEQ ID NO: 929599 - RNA, 19 nt, Artificial Sequence
  Description of Artificial Sequence: Synthetic oligonucleotide
cuuaguaucuguggccugu

SEQ ID NO: 929600 - RNA, 19 nt, Artificial Sequence
  Description of Artificial Sequence: Synthetic oligonucleotide
gaccgaccggugcucguac

SEQ ID NO: 929601 - RNA, 19 nt, Artificial Sequence
  Description of Artificial Sequence: Synthetic oligonucleotide
aaggaaggucccagcacuu

SEQ ID NO: 929602 - RNA, 19 nt, Artificial Sequence
  Description of Artificial Sequence: Synthetic oligonucleotide
gggagcccgagccaacgcc

SEQ ID NO: 929603 - RNA, 19 nt, Artificial Sequence
  Description of Artificial Sequence: Synthetic oligonucleotide
ggauguuagcugccagaac

SEQ ID NO: 929604 - RNA, 19 nt, Artificial Sequence
  Description of Artificial Sequence: Synthetic oligonucleotide
cagaacagccgaggaggag

SEQ ID NO: 929605 - RNA, 19 nt, Artificial Sequence
  Description of Artificial Sequence: Synthetic oligonucleotide
aggccgcgaucuccgguuc

SEQ ID NO: 929606 - RNA, 19 nt, Artificial Sequence
  Description of Artificial Sequence: Synthetic oligonucleotide
gcgcagaacagccgaggag

SEQ ID NO: 929607 - RNA, 19 nt, Artificial Sequence
  Description of Artificial Sequence: Synthetic oligonucleotide
uacuaugggauggguccau

SEQ ID NO: 929608 - RNA, 19 nt, Artificial Sequence
  Description of Artificial Sequence: Synthetic oligonucleotide
uggguccauuucacuaguu

SEQ ID NO: 929609 - RNA, 19 nt, Artificial Sequence
  Description of Artificial Sequence: Synthetic oligonucleotide
aagugacaacagaggcugu

SEQ ID NO: 929610 - RNA, 19 nt, Artificial Sequence
  Description of Artificial Sequence: Synthetic oligonucleotide
agucgggugguggauguua

SEQ ID NO: 929611 - RNA, 19 nt, Artificial Sequence
  Description of Artificial Sequence: Synthetic oligonucleotide
cagagucgggugguggaug

SEQ ID NO: 929612 - RNA, 19 nt, Artificial Sequence
  Description of Artificial Sequence: Synthetic oligonucleotide
uugaaccgaaagggcucca

SEQ ID NO: 929613 - RNA, 19 nt, Artificial Sequence
  Description of Artificial Sequence: Synthetic oligonucleotide
caaccgcccauagagagcu

SEQ ID NO: 929614 - RNA, 19 nt, Artificial Sequence
  Description of Artificial Sequence: Synthetic oligonucleotide
ccuagucccucucauacaa

SEQ ID NO: 929615 - RNA, 19 nt, Artificial Sequence
  Description of Artificial Sequence: Synthetic oligonucleotide
ucaggaccgaccggugcuc

SEQ ID NO: 929616 - RNA, 19 nt, Artificial Sequence
  Description of Artificial Sequence: Synthetic oligonucleotide
ccaacgcccagcgcaagcg

SEQ ID NO: 929617 - RNA, 19 nt, Artificial Sequence
  Description of Artificial Sequence: Synthetic oligonucleotide
gcagacagcggaaucggga

SEQ ID NO: 929618 - RNA, 19 nt, Artificial Sequence
  Description of Artificial Sequence: Synthetic oligonucleotide
gugacaacagaggcuguua

SEQ ID NO: 929619 - RNA, 19 nt, Artificial Sequence
  Description of Artificial Sequence: Synthetic oligonucleotide
gccggggugucaaaggcug

SEQ ID NO: 929620 - RNA, 19 nt, Artificial Sequence
  Description of Artificial Sequence: Synthetic oligonucleotide
ggagcccgagccaacgccc

SEQ ID NO: 929621 - RNA, 19 nt, Artificial Sequence
  Description of Artificial Sequence: Synthetic oligonucleotide
agucauccccagagucggg

SEQ ID NO: 929622 - RNA, 19 nt, Artificial Sequence
  Description of Artificial Sequence: Synthetic oligonucleotide
caggaccgaccggugcucg

SEQ ID NO: 929623 - RNA, 19 nt, Artificial Sequence
  Description of Artificial Sequence: Synthetic oligonucleotide
cuguuagagcagaccugga

SEQ ID NO: 929624 - RNA, 19 nt, Artificial Sequence
  Description of Artificial Sequence: Synthetic oligonucleotide
acguuagccggggugucaa

SEQ ID NO: 929625 - RNA, 19 nt, Artificial Sequence
  Description of Artificial Sequence: Synthetic oligonucleotide
ucccagcacuuaguaucug

SEQ ID NO: 929626 - RNA, 19 nt, Artificial Sequence
  Description of Artificial Sequence: Synthetic oligonucleotide
gaagaagguguggcuugaa

SEQ ID NO: 929627 - RNA, 19 nt, Artificial Sequence
  Description of Artificial Sequence: Synthetic oligonucleotide
cucaggaccgaccggugcu

SEQ ID NO: 929628 - RNA, 19 nt, Artificial Sequence
  Description of Artificial Sequence: Synthetic oligonucleotide
accgaccggugcucguaca

SEQ ID NO: 929629 - RNA, 19 nt, Artificial Sequence
  Description of Artificial Sequence: Synthetic oligonucleotide
ugcuuacgguagcggucaa

SEQ ID NO: 929630 - RNA, 19 nt, Artificial Sequence
  Description of Artificial Sequence: Synthetic oligonucleotide
ccacccuagcugguuaggg

SEQ ID NO: 929631 - RNA, 19 nt, Artificial Sequence
  Description of Artificial Sequence: Synthetic oligonucleotide
ggcguaggccgcgaucucc

SEQ ID NO: 929632 - RNA, 19 nt, Artificial Sequence
  Description of Artificial Sequence: Synthetic oligonucleotide
agacggaugguggggucaa

SEQ ID NO: 929633 - RNA, 19 nt, Artificial Sequence
  Description of Artificial Sequence: Synthetic oligonucleotide
aggaccgaccggugcucgu

SEQ ID NO: 929634 - RNA, 19 nt, Artificial Sequence
  Description of Artificial Sequence: Synthetic oligonucleotide
gcgaucuccgguucaucuc

SEQ ID NO: 929635 - RNA, 19 nt, Artificial Sequence
  Description of Artificial Sequence: Synthetic oligonucleotide
agccggggugucaaaggcu

SEQ ID NO: 929636 - RNA, 19 nt, Artificial Sequence
  Description of Artificial Sequence: Synthetic oligonucleotide
cccgagccaacgcccagcg

SEQ ID NO: 929637 - RNA, 19 nt, Artificial Sequence
  Description of Artificial Sequence: Synthetic oligonucleotide
uggcguaggccgcgaucuc

SEQ ID NO: 929638 - RNA, 19 nt, Artificial Sequence
  Description of Artificial Sequence: Synthetic oligonucleotide
ccgugggguacacaaugug

SEQ ID NO: 929639 - RNA, 19 nt, Artificial Sequence
  Description of Artificial Sequence: Synthetic oligonucleotide
gcggcuacugagcuccaga

SEQ ID NO: 929640 - RNA, 19 nt, Artificial Sequence
  Description of Artificial Sequence: Synthetic oligonucleotide
guggucauucucccacccu

SEQ ID NO: 929641 - RNA, 19 nt, Artificial Sequence
  Description of Artificial Sequence: Synthetic oligonucleotide
gcccauagagagcugcugu

SEQ ID NO: 929642 - RNA, 19 nt, Artificial Sequence
  Description of Artificial Sequence: Synthetic oligonucleotide
ggcuaccugagcaauuaua

SEQ ID NO: 929643 - RNA, 19 nt, Artificial Sequence
  Description of Artificial Sequence: Synthetic oligonucleotide
cuaugggauggguccauuu

SEQ ID NO: 929644 - RNA, 19 nt, Artificial Sequence
  Description of Artificial Sequence: Synthetic oligonucleotide
ccucucauacaaccgccca

SEQ ID NO: 929645 - RNA, 19 nt, Artificial Sequence
  Description of Artificial Sequence: Synthetic oligonucleotide
gucauccccagagucgggu

SEQ ID NO: 929646 - RNA, 19 nt, Artificial Sequence
  Description of Artificial Sequence: Synthetic oligonucleotide
ggggagcccgagccaacgc

SEQ ID NO: 929647 - RNA, 19 nt, Artificial Sequence
  Description of Artificial Sequence: Synthetic oligonucleotide
auccaggccgugggguaca

SEQ ID NO: 929648 - RNA, 19 nt, Artificial Sequence
  Description of Artificial Sequence: Synthetic oligonucleotide
acacggcagccacguagua

SEQ ID NO: 929649 - RNA, 19 nt, Artificial Sequence
  Description of Artificial Sequence: Synthetic oligonucleotide
caucucgccucagcagaca

SEQ ID NO: 929650 - RNA, 19 nt, Artificial Sequence
  Description of Artificial Sequence: Synthetic oligonucleotide
ccgaccggugcucguacac

SEQ ID NO: 929651 - RNA, 19 nt, Artificial Sequence
  Description of Artificial Sequence: Synthetic oligonucleotide
cacguuagccgggguguca

SEQ ID NO: 929652 - RNA, 19 nt, Artificial Sequence
  Description of Artificial Sequence: Synthetic oligonucleotide
cauagacgucgagguucug

SEQ ID NO: 929653 - RNA, 19 nt, Artificial Sequence
  Description of Artificial Sequence: Synthetic oligonucleotide
cgaaagggcuccagacaug

SEQ ID NO: 929654 - RNA, 19 nt, Artificial Sequence
  Description of Artificial Sequence: Synthetic oligonucleotide
uggcggcuacugagcucca

SEQ ID NO: 929655 - RNA, 19 nt, Artificial Sequence
  Description of Artificial Sequence: Synthetic oligonucleotide
gggucacugcgaaggcaag

SEQ ID NO: 929656 - RNA, 19 nt, Artificial Sequence
  Description of Artificial Sequence: Synthetic oligonucleotide
ccgaaagggcuccagacau

SEQ ID NO: 929657 - RNA, 19 nt, Artificial Sequence
  Description of Artificial Sequence: Synthetic oligonucleotide
aaccgcccauagagagcug

SEQ ID NO: 929658 - RNA, 19 nt, Artificial Sequence
  Description of Artificial Sequence: Synthetic oligonucleotide
gccguucuggcggcuacug

SEQ ID NO: 929659 - RNA, 19 nt, Artificial Sequence
  Description of Artificial Sequence: Synthetic oligonucleotide
cucccacccuagcugguua

SEQ ID NO: 929660 - RNA, 19 nt, Artificial Sequence
  Description of Artificial Sequence: Synthetic oligonucleotide
uccaggccgugggguacac

SEQ ID NO: 929661 - RNA, 19 nt, Artificial Sequence
  Description of Artificial Sequence: Synthetic oligonucleotide
ggucaccggacacaauuuu

SEQ ID NO: 929662 - RNA, 19 nt, Artificial Sequence
  Description of Artificial Sequence: Synthetic oligonucleotide
cggugcucguacacggcag

SEQ ID NO: 929663 - RNA, 19 nt, Artificial Sequence
  Description of Artificial Sequence: Synthetic oligonucleotide
cccacccuagcugguuagg

SEQ ID NO: 929664 - RNA, 19 nt, Artificial Sequence
  Description of Artificial Sequence: Synthetic oligonucleotide
ccacaggugaaagucaaau

SEQ ID NO: 929665 - RNA, 19 nt, Artificial Sequence
  Description of Artificial Sequence: Synthetic oligonucleotide
gggccguucuggcggcuac

SEQ ID NO: 929666 - RNA, 19 nt, Artificial Sequence
  Description of Artificial Sequence: Synthetic oligonucleotide
cgaccggugcucguacacg

SEQ ID NO: 929667 - RNA, 19 nt, Artificial Sequence
  Description of Artificial Sequence: Synthetic oligonucleotide
cccagcgcaagcgcagaac

SEQ ID NO: 929668 - RNA, 19 nt, Artificial Sequence
  Description of Artificial Sequence: Synthetic oligonucleotide
ggcggcuacugagcuccag

SEQ ID NO: 929669 - RNA, 19 nt, Artificial Sequence
  Description of Artificial Sequence: Synthetic oligonucleotide
ggcucaggaccgaccggug

SEQ ID NO: 929670 - RNA, 19 nt, Artificial Sequence
  Description of Artificial Sequence: Synthetic oligonucleotide
gcggucaacaaggguucca

SEQ ID NO: 929671 - RNA, 19 nt, Artificial Sequence
  Description of Artificial Sequence: Synthetic oligonucleotide
gggcucaggaccgaccggu

SEQ ID NO: 929672 - RNA, 19 nt, Artificial Sequence
  Description of Artificial Sequence: Synthetic oligonucleotide
cagggaccaaggugaaauu

SEQ ID NO: 929673 - RNA, 19 nt, Artificial Sequence
  Description of Artificial Sequence: Synthetic oligonucleotide
cucugagaagacggauggu

SEQ ID NO: 929674 - RNA, 19 nt, Artificial Sequence
  Description of Artificial Sequence: Synthetic oligonucleotide
gccacguaguacucugcau

SEQ ID NO: 929675 - RNA, 19 nt, Artificial Sequence
  Description of Artificial Sequence: Synthetic oligonucleotide
gacggaugguggggucaaa

SEQ ID NO: 929676 - RNA, 19 nt, Artificial Sequence
  Description of Artificial Sequence: Synthetic oligonucleotide
ggucaacaaggguuccauu

SEQ ID NO: 929677 - RNA, 19 nt, Artificial Sequence
  Description of Artificial Sequence: Synthetic oligonucleotide
ggccuuucauagaguaagu

SEQ ID NO: 929678 - RNA, 19 nt, Artificial Sequence
  Description of Artificial Sequence: Synthetic oligonucleotide
gcagaccauaaaucugcuu

SEQ ID NO: 929679 - RNA, 19 nt, Artificial Sequence
  Description of Artificial Sequence: Synthetic oligonucleotide
ggugcucuggggagcccga

SEQ ID NO: 929680 - RNA, 19 nt, Artificial Sequence
  Description of Artificial Sequence: Synthetic oligonucleotide
ggccgcgaucuccgguuca

SEQ ID NO: 929681 - RNA, 19 nt, Artificial Sequence
  Description of Artificial Sequence: Synthetic oligonucleotide
cgcgaucuccgguucaucu

SEQ ID NO: 929682 - RNA, 19 nt, Artificial Sequence
  Description of Artificial Sequence: Synthetic oligonucleotide
cccaucaugugggcacuca

SEQ ID NO: 929683 - RNA, 19 nt, Artificial Sequence
  Description of Artificial Sequence: Synthetic oligonucleotide
cgcccauagagagcugcug

SEQ ID NO: 929684 - RNA, 19 nt, Artificial Sequence
  Description of Artificial Sequence: Synthetic oligonucleotide
ggaccgaccggugcucgua

SEQ ID NO: 929685 - RNA, 19 nt, Artificial Sequence
  Description of Artificial Sequence: Synthetic oligonucleotide
ccgagccaacgcccagcgc

SEQ ID NO: 929686 - RNA, 19 nt, Artificial Sequence
  Description of Artificial Sequence: Synthetic oligonucleotide
ccgucaggauuguccaugu

SEQ ID NO: 929687 - RNA, 19 nt, Artificial Sequence
  Description of Artificial Sequence: Synthetic oligonucleotide
ggguuccauuguugcugaa

SEQ ID NO: 929688 - RNA, 19 nt, Artificial Sequence
  Description of Artificial Sequence: Synthetic oligonucleotide
ccacguuagccgggguguc

SEQ ID NO: 929689 - RNA, 19 nt, Artificial Sequence
  Description of Artificial Sequence: Synthetic oligonucleotide
gggucaccggacacaauuu

SEQ ID NO: 929690 - RNA, 19 nt, Artificial Sequence
  Description of Artificial Sequence: Synthetic oligonucleotide
gguggccgucaggauuguc

SEQ ID NO: 929691 - RNA, 19 nt, Artificial Sequence
  Description of Artificial Sequence: Synthetic oligonucleotide
ccguucuggcggcuacuga

SEQ ID NO: 929692 - RNA, 19 nt, Artificial Sequence
  Description of Artificial Sequence: Synthetic oligonucleotide
gccucaucgcagugcacuu

SEQ ID NO: 929693 - RNA, 19 nt, Artificial Sequence
  Description of Artificial Sequence: Synthetic oligonucleotide
ccgguucaucucgccucag

SEQ ID NO: 929694 - RNA, 19 nt, Artificial Sequence
  Description of Artificial Sequence: Synthetic oligonucleotide
gagucgggugguggauguu

SEQ ID NO: 929695 - RNA, 19 nt, Artificial Sequence
  Description of Artificial Sequence: Synthetic oligonucleotide
ccgcccauagagagcugcu

SEQ ID NO: 929696 - RNA, 19 nt, Artificial Sequence
  Description of Artificial Sequence: Synthetic oligonucleotide
ccgcgaucuccgguucauc

SEQ ID NO: 929697 - RNA, 19 nt, Artificial Sequence
  Description of Artificial Sequence: Synthetic oligonucleotide
gccgcgaucuccgguucau

SEQ ID NO: 929698 - RNA, 19 nt, Artificial Sequence
  Description of Artificial Sequence: Synthetic oligonucleotide
cggucaacaaggguuccau

SEQ ID NO: 929699 - RNA, 19 nt, Artificial Sequence
  Description of Artificial Sequence: Synthetic oligonucleotide
ggccguucuggcggcuacu

SEQ ID NO: 929700 - RNA, 19 nt, Artificial Sequence
  Description of Artificial Sequence: Synthetic oligonucleotide
cguuagccggggugucaaa

SEQ ID NO: 929701 - RNA, 19 nt, Artificial Sequence
  Description of Artificial Sequence: Synthetic oligonucleotide
gcaugcuagcagagcccau

SEQ ID NO: 929702 - RNA, 19 nt, Artificial Sequence
  Description of Artificial Sequence: Synthetic oligonucleotide
ccagggcauacagcucuuu

SEQ ID NO: 929703 - RNA, 19 nt, Artificial Sequence
  Description of Artificial Sequence: Synthetic oligonucleotide
uguaaaaccuccaagugcc

SEQ ID NO: 929704 - RNA, 19 nt, Artificial Sequence
  Description of Artificial Sequence: Synthetic oligonucleotide
aguucuaggguccaugugc

SEQ ID NO: 929705 - RNA, 19 nt, Artificial Sequence
  Description of Artificial Sequence: Synthetic oligonucleotide
aauggcgucggucuguggc

SEQ ID NO: 929706 - RNA, 19 nt, Artificial Sequence
  Description of Artificial Sequence: Synthetic oligonucleotide
aacucaguaacaaagcagg

SEQ ID NO: 929707 - RNA, 19 nt, Artificial Sequence
  Description of Artificial Sequence: Synthetic oligonucleotide
aacucgggcaugcagcucc

SEQ ID NO: 929708 - RNA, 19 nt, Artificial Sequence
  Description of Artificial Sequence: Synthetic oligonucleotide
ucaguaacaaagcaggcgu

SEQ ID NO: 929709 - RNA, 19 nt, Artificial Sequence
  Description of Artificial Sequence: Synthetic oligonucleotide
agugcgagcaagcaaggcc

SEQ ID NO: 929710 - RNA, 19 nt, Artificial Sequence
  Description of Artificial Sequence: Synthetic oligonucleotide
aauaauccucuucucaugu

SEQ ID NO: 929711 - RNA, 19 nt, Artificial Sequence
  Description of Artificial Sequence: Synthetic oligonucleotide
aggaaagacauccucgugg

SEQ ID NO: 929712 - RNA, 19 nt, Artificial Sequence
  Description of Artificial Sequence: Synthetic oligonucleotide
ugguucuuggggcagauag

SEQ ID NO: 929713 - RNA, 19 nt, Artificial Sequence
  Description of Artificial Sequence: Synthetic oligonucleotide
uguuccuuuguacuggacc

SEQ ID NO: 929714 - RNA, 19 nt, Artificial Sequence
  Description of Artificial Sequence: Synthetic oligonucleotide
gaaaauacgucucugccuc

SEQ ID NO: 929715 - RNA, 19 nt, Artificial Sequence
  Description of Artificial Sequence: Synthetic oligonucleotide
ucccacaugcuucaguugg

SEQ ID NO: 929716 - RNA, 19 nt, Artificial Sequence
  Description of Artificial Sequence: Synthetic oligonucleotide
ucggaagucuugaaguugg

SEQ ID NO: 929717 - RNA, 19 nt, Artificial Sequence
  Description of Artificial Sequence: Synthetic oligonucleotide
aaauaauccucuucucaug

SEQ ID NO: 929718 - RNA, 19 nt, Artificial Sequence
  Description of Artificial Sequence: Synthetic oligonucleotide
ugacuauccuucaacaucu

SEQ ID NO: 929719 - RNA, 19 nt, Artificial Sequence
  Description of Artificial Sequence: Synthetic oligonucleotide
gagaaaauacgucucugcc

SEQ ID NO: 929720 - RNA, 19 nt, Artificial Sequence
  Description of Artificial Sequence: Synthetic oligonucleotide
gaaucauguucucagcucc

SEQ ID NO: 929721 - RNA, 19 nt, Artificial Sequence
  Description of Artificial Sequence: Synthetic oligonucleotide
aaaaccuccaagugccgag

SEQ ID NO: 929722 - RNA, 19 nt, Artificial Sequence
  Description of Artificial Sequence: Synthetic oligonucleotide
uugacuauccuucaacauc

SEQ ID NO: 929723 - RNA, 19 nt, Artificial Sequence
  Description of Artificial Sequence: Synthetic oligonucleotide
cuuaucuucauucggagca

SEQ ID NO: 929724 - RNA, 19 nt, Artificial Sequence
  Description of Artificial Sequence: Synthetic oligonucleotide
aguagcgaaggucugcagg

SEQ ID NO: 929725 - RNA, 19 nt, Artificial Sequence
  Description of Artificial Sequence: Synthetic oligonucleotide
uccgcaaucuucaggaagc

SEQ ID NO: 929726 - RNA, 19 nt, Artificial Sequence
  Description of Artificial Sequence: Synthetic oligonucleotide
aaccacgcaggccagguag

SEQ ID NO: 929727 - RNA, 19 nt, Artificial Sequence
  Description of Artificial Sequence: Synthetic oligonucleotide
cugaaugagcucaagcccc

SEQ ID NO: 929728 - RNA, 19 nt, Artificial Sequence
  Description of Artificial Sequence: Synthetic oligonucleotide
gacagugcgagcaagcaag

SEQ ID NO: 929729 - RNA, 19 nt, Artificial Sequence
  Description of Artificial Sequence: Synthetic oligonucleotide
cuucaguugacuauccuuc

SEQ ID NO: 929730 - RNA, 19 nt, Artificial Sequence
  Description of Artificial Sequence: Synthetic oligonucleotide
aagguuaccuccuggcucu

SEQ ID NO: 929731 - RNA, 19 nt, Artificial Sequence
  Description of Artificial Sequence: Synthetic oligonucleotide
guagcgaaggucugcaggg

SEQ ID NO: 929732 - RNA, 19 nt, Artificial Sequence
  Description of Artificial Sequence: Synthetic oligonucleotide
gugugaaucauguucucag

SEQ ID NO: 929733 - RNA, 19 nt, Artificial Sequence
  Description of Artificial Sequence: Synthetic oligonucleotide
uuccucgugggugagaccg

SEQ ID NO: 929734 - RNA, 19 nt, Artificial Sequence
  Description of Artificial Sequence: Synthetic oligonucleotide
gucacagaagguuaccucc

SEQ ID NO: 929735 - RNA, 19 nt, Artificial Sequence
  Description of Artificial Sequence: Synthetic oligonucleotide
aguacaggcugucaaucuc

SEQ ID NO: 929736 - RNA, 19 nt, Artificial Sequence
  Description of Artificial Sequence: Synthetic oligonucleotide
cugagucagaacuucgggg

SEQ ID NO: 929737 - RNA, 19 nt, Artificial Sequence
  Description of Artificial Sequence: Synthetic oligonucleotide
cagagaguaggcacaaagg

SEQ ID NO: 929738 - RNA, 19 nt, Artificial Sequence
  Description of Artificial Sequence: Synthetic oligonucleotide
aguugacuauccuucaaca

SEQ ID NO: 929739 - RNA, 19 nt, Artificial Sequence
  Description of Artificial Sequence: Synthetic oligonucleotide
uuuggauacaaggaguguc

SEQ ID NO: 929740 - RNA, 19 nt, Artificial Sequence
  Description of Artificial Sequence: Synthetic oligonucleotide
guagaagcaggccuggggc

SEQ ID NO: 929741 - RNA, 19 nt, Artificial Sequence
  Description of Artificial Sequence: Synthetic oligonucleotide
ucuaggguccaugugcggg

SEQ ID NO: 929742 - RNA, 19 nt, Artificial Sequence
  Description of Artificial Sequence: Synthetic oligonucleotide
aaucauguucucagcuccc

SEQ ID NO: 929743 - RNA, 19 nt, Artificial Sequence
  Description of Artificial Sequence: Synthetic oligonucleotide
agcaucggaagucuugaag

SEQ ID NO: 929744 - RNA, 19 nt, Artificial Sequence
  Description of Artificial Sequence: Synthetic oligonucleotide
agcacuuccuauuuuccug

SEQ ID NO: 929745 - RNA, 19 nt, Artificial Sequence
  Description of Artificial Sequence: Synthetic oligonucleotide
gaagguuaccuccuggcuc

SEQ ID NO: 929746 - RNA, 19 nt, Artificial Sequence
  Description of Artificial Sequence: Synthetic oligonucleotide
acagaagguuaccuccugg

SEQ ID NO: 929747 - RNA, 19 nt, Artificial Sequence
  Description of Artificial Sequence: Synthetic oligonucleotide
ucccuguaaauaauccucu

SEQ ID NO: 929748 - RNA, 19 nt, Artificial Sequence
  Description of Artificial Sequence: Synthetic oligonucleotide
ggugagaccgccugggugg

SEQ ID NO: 929749 - RNA, 19 nt, Artificial Sequence
  Description of Artificial Sequence: Synthetic oligonucleotide
aaugagcucaagccccuga

SEQ ID NO: 929750 - RNA, 19 nt, Artificial Sequence
  Description of Artificial Sequence: Synthetic oligonucleotide
agcaggguuaccuucaguu

SEQ ID NO: 929751 - RNA, 19 nt, Artificial Sequence
  Description of Artificial Sequence: Synthetic oligonucleotide
caaggaguguccaggacug

SEQ ID NO: 929752 - RNA, 19 nt, Artificial Sequence
  Description of Artificial Sequence: Synthetic oligonucleotide
cagaagguuaccuccuggc

SEQ ID NO: 929753 - RNA, 19 nt, Artificial Sequence
  Description of Artificial Sequence: Synthetic oligonucleotide
ucggucuguggccacacgc

SEQ ID NO: 929754 - RNA, 19 nt, Artificial Sequence
  Description of Artificial Sequence: Synthetic oligonucleotide
aggaccuucccaaaguguc

SEQ ID NO: 929755 - RNA, 19 nt, Artificial Sequence
  Description of Artificial Sequence: Synthetic oligonucleotide
auggcgucggucuguggcc

SEQ ID NO: 929756 - RNA, 19 nt, Artificial Sequence
  Description of Artificial Sequence: Synthetic oligonucleotide
cuccuagucgcuucucugg

SEQ ID NO: 929757 - RNA, 19 nt, Artificial Sequence
  Description of Artificial Sequence: Synthetic oligonucleotide
ggagaaaauacgucucugc

SEQ ID NO: 929758 - RNA, 19 nt, Artificial Sequence
  Description of Artificial Sequence: Synthetic oligonucleotide
acaguacaggcugucaauc

SEQ ID NO: 929759 - RNA, 19 nt, Artificial Sequence
  Description of Artificial Sequence: Synthetic oligonucleotide
agaauuggaggucccacau

SEQ ID NO: 929760 - RNA, 19 nt, Artificial Sequence
  Description of Artificial Sequence: Synthetic oligonucleotide
uguuggcgggcagugaggg

SEQ ID NO: 929761 - RNA, 19 nt, Artificial Sequence
  Description of Artificial Sequence: Synthetic oligonucleotide
gaaggugcucguccggucc

SEQ ID NO: 929762 - RNA, 19 nt, Artificial Sequence
  Description of Artificial Sequence: Synthetic oligonucleotide
ugguugcuauuccaguucu

SEQ ID NO: 929763 - RNA, 19 nt, Artificial Sequence
  Description of Artificial Sequence: Synthetic oligonucleotide
cugagacacaaagucaaag

SEQ ID NO: 929764 - RNA, 19 nt, Artificial Sequence
  Description of Artificial Sequence: Synthetic oligonucleotide
uuaucuucauucggagcag

SEQ ID NO: 929765 - RNA, 19 nt, Artificial Sequence
  Description of Artificial Sequence: Synthetic oligonucleotide
guucuaggguccaugugcg

SEQ ID NO: 929766 - RNA, 19 nt, Artificial Sequence
  Description of Artificial Sequence: Synthetic oligonucleotide
cccugugugacccacagcc

SEQ ID NO: 929767 - RNA, 19 nt, Artificial Sequence
  Description of Artificial Sequence: Synthetic oligonucleotide
ucguccgguccccaaagcc

SEQ ID NO: 929768 - RNA, 19 nt, Artificial Sequence
  Description of Artificial Sequence: Synthetic oligonucleotide
caguugacuauccuucaac

SEQ ID NO: 929769 - RNA, 19 nt, Artificial Sequence
  Description of Artificial Sequence: Synthetic oligonucleotide
cucgccaugcagcugcucc

SEQ ID NO: 929770 - RNA, 19 nt, Artificial Sequence
  Description of Artificial Sequence: Synthetic oligonucleotide
ugcuuuaccuucagcucca

SEQ ID NO: 929771 - RNA, 19 nt, Artificial Sequence
  Description of Artificial Sequence: Synthetic oligonucleotide
ugaccaggcguccccaggc

SEQ ID NO: 929772 - RNA, 19 nt, Artificial Sequence
  Description of Artificial Sequence: Synthetic oligonucleotide
aaaauacgucucugccucu

SEQ ID NO: 929773 - RNA, 19 nt, Artificial Sequence
  Description of Artificial Sequence: Synthetic oligonucleotide
ugaaugagcucaagccccu

SEQ ID NO: 929774 - RNA, 19 nt, Artificial Sequence
  Description of Artificial Sequence: Synthetic oligonucleotide
uccaggcacaaacucagua

SEQ ID NO: 929775 - RNA, 19 nt, Artificial Sequence
  Description of Artificial Sequence: Synthetic oligonucleotide
aucaugaggucuccuccag

SEQ ID NO: 929776 - RNA, 19 nt, Artificial Sequence
  Description of Artificial Sequence: Synthetic oligonucleotide
gaauuggaggucccacaug

SEQ ID NO: 929777 - RNA, 19 nt, Artificial Sequence
  Description of Artificial Sequence: Synthetic oligonucleotide
uucauucggagcaggguua

SEQ ID NO: 929778 - RNA, 19 nt, Artificial Sequence
  Description of Artificial Sequence: Synthetic oligonucleotide
aagccccugaaccgacagg

SEQ ID NO: 929779 - RNA, 19 nt, Artificial Sequence
  Description of Artificial Sequence: Synthetic oligonucleotide
cuaggguccaugugcgggc

SEQ ID NO: 929780 - RNA, 19 nt, Artificial Sequence
  Description of Artificial Sequence: Synthetic oligonucleotide
gauagcaggaagggugccc

SEQ ID NO: 929781 - RNA, 19 nt, Artificial Sequence
  Description of Artificial Sequence: Synthetic oligonucleotide
acauggcccaaauggcguc

SEQ ID NO: 929782 - RNA, 19 nt, Artificial Sequence
  Description of Artificial Sequence: Synthetic oligonucleotide
ucucgucccggccagcacu

SEQ ID NO: 929783 - RNA, 19 nt, Artificial Sequence
  Description of Artificial Sequence: Synthetic oligonucleotide
ucuucuccggagagggucu

SEQ ID NO: 929784 - RNA, 19 nt, Artificial Sequence
  Description of Artificial Sequence: Synthetic oligonucleotide
gucccuguaaauaauccuc

SEQ ID NO: 929785 - RNA, 19 nt, Artificial Sequence
  Description of Artificial Sequence: Synthetic oligonucleotide
cucgaaguagcgaaggucu

SEQ ID NO: 929786 - RNA, 19 nt, Artificial Sequence
  Description of Artificial Sequence: Synthetic oligonucleotide
ucgugggugagaccgccug

SEQ ID NO: 929787 - RNA, 19 nt, Artificial Sequence
  Description of Artificial Sequence: Synthetic oligonucleotide
gaaguagcgaaggucugca

SEQ ID NO: 929788 - RNA, 19 nt, Artificial Sequence
  Description of Artificial Sequence: Synthetic oligonucleotide
auucggagcaggguuaccu

SEQ ID NO: 929789 - RNA, 19 nt, Artificial Sequence
  Description of Artificial Sequence: Synthetic oligonucleotide
aaauggcgucggucugugg

SEQ ID NO: 929790 - RNA, 19 nt, Artificial Sequence
  Description of Artificial Sequence: Synthetic oligonucleotide
uucuaggguccaugugcgg

SEQ ID NO: 929791 - RNA, 19 nt, Artificial Sequence
  Description of Artificial Sequence: Synthetic oligonucleotide
uggccucuaugcuuggaga

SEQ ID NO: 929792 - RNA, 19 nt, Artificial Sequence
  Description of Artificial Sequence: Synthetic oligonucleotide
augaccaggcguccccagg

SEQ ID NO: 929793 - RNA, 19 nt, Artificial Sequence
  Description of Artificial Sequence: Synthetic oligonucleotide
cucaugaccaggcgucccc

SEQ ID NO: 929794 - RNA, 19 nt, Artificial Sequence
  Description of Artificial Sequence: Synthetic oligonucleotide
caggguuaccuucaguuga

SEQ ID NO: 929795 - RNA, 19 nt, Artificial Sequence
  Description of Artificial Sequence: Synthetic oligonucleotide
gaguguccaggacugguuc

SEQ ID NO: 929796 - RNA, 19 nt, Artificial Sequence
  Description of Artificial Sequence: Synthetic oligonucleotide
agagggucuucauggacaa

SEQ ID NO: 929797 - RNA, 19 nt, Artificial Sequence
  Description of Artificial Sequence: Synthetic oligonucleotide
aggguuaccuucaguugac

SEQ ID NO: 929798 - RNA, 19 nt, Artificial Sequence
  Description of Artificial Sequence: Synthetic oligonucleotide
gcaucaugaggucuccucc

SEQ ID NO: 929799 - RNA, 19 nt, Artificial Sequence
  Description of Artificial Sequence: Synthetic oligonucleotide
uguggccacacgccgcaug

SEQ ID NO: 929800 - RNA, 19 nt, Artificial Sequence
  Description of Artificial Sequence: Synthetic oligonucleotide
aaugggcacucacccacua

SEQ ID NO: 929801 - RNA, 19 nt, Artificial Sequence
  Description of Artificial Sequence: Synthetic oligonucleotide
agccccugaaccgacagga

SEQ ID NO: 929802 - RNA, 19 nt, Artificial Sequence
  Description of Artificial Sequence: Synthetic oligonucleotide
aguggggacgcggugcauc

SEQ ID NO: 929803 - RNA, 19 nt, Artificial Sequence
  Description of Artificial Sequence: Synthetic oligonucleotide
auacgucucugccucugca

SEQ ID NO: 929804 - RNA, 19 nt, Artificial Sequence
  Description of Artificial Sequence: Synthetic oligonucleotide
gaacuuuggggugcuggug

SEQ ID NO: 929805 - RNA, 19 nt, Artificial Sequence
  Description of Artificial Sequence: Synthetic oligonucleotide
caagccccugaaccgacag

SEQ ID NO: 929806 - RNA, 19 nt, Artificial Sequence
  Description of Artificial Sequence: Synthetic oligonucleotide
ggauacaaggaguguccag

SEQ ID NO: 929807 - RNA, 19 nt, Artificial Sequence
  Description of Artificial Sequence: Synthetic oligonucleotide
cuggagauccgcuggucuc

SEQ ID NO: 929808 - RNA, 19 nt, Artificial Sequence
  Description of Artificial Sequence: Synthetic oligonucleotide
cuugacugcucugcccgcg

SEQ ID NO: 929809 - RNA, 19 nt, Artificial Sequence
  Description of Artificial Sequence: Synthetic oligonucleotide
ugacagggucacagaaggu

SEQ ID NO: 929810 - RNA, 19 nt, Artificial Sequence
  Description of Artificial Sequence: Synthetic oligonucleotide
ccggaaggcagccuguugg

SEQ ID NO: 929811 - RNA, 19 nt, Artificial Sequence
  Description of Artificial Sequence: Synthetic oligonucleotide
gggaacuuuggggugcugg

SEQ ID NO: 929812 - RNA, 19 nt, Artificial Sequence
  Description of Artificial Sequence: Synthetic oligonucleotide
agaauggcugaaccuugau

SEQ ID NO: 929813 - RNA, 19 nt, Artificial Sequence
  Description of Artificial Sequence: Synthetic oligonucleotide
caucaugaggucuccucca

SEQ ID NO: 929814 - RNA, 19 nt, Artificial Sequence
  Description of Artificial Sequence: Synthetic oligonucleotide
auaauccucuucucaugua

SEQ ID NO: 929815 - RNA, 19 nt, Artificial Sequence
  Description of Artificial Sequence: Synthetic oligonucleotide
guuaccuccuggcucugga

SEQ ID NO: 929816 - RNA, 19 nt, Artificial Sequence
  Description of Artificial Sequence: Synthetic oligonucleotide
caggaaagacauccucgug

SEQ ID NO: 929817 - RNA, 19 nt, Artificial Sequence
  Description of Artificial Sequence: Synthetic oligonucleotide
ggggcagauagagacgagg

SEQ ID NO: 929818 - RNA, 19 nt, Artificial Sequence
  Description of Artificial Sequence: Synthetic oligonucleotide
aagcaucggaagucuugaa

SEQ ID NO: 929819 - RNA, 19 nt, Artificial Sequence
  Description of Artificial Sequence: Synthetic oligonucleotide
aaccgacaggaagugggga

SEQ ID NO: 929820 - RNA, 19 nt, Artificial Sequence
  Description of Artificial Sequence: Synthetic oligonucleotide
cgggcguuuggauacaagg

SEQ ID NO: 929821 - RNA, 19 nt, Artificial Sequence
  Description of Artificial Sequence: Synthetic oligonucleotide
gcacauggcccaaauggcg

SEQ ID NO: 929822 - RNA, 19 nt, Artificial Sequence
  Description of Artificial Sequence: Synthetic oligonucleotide
cauggcccaaauggcgucg

SEQ ID NO: 929823 - RNA, 19 nt, Artificial Sequence
  Description of Artificial Sequence: Synthetic oligonucleotide
ucaagccccugaaccgaca

SEQ ID NO: 929824 - RNA, 19 nt, Artificial Sequence
  Description of Artificial Sequence: Synthetic oligonucleotide
ucauucggagcaggguuac

SEQ ID NO: 929825 - RNA, 19 nt, Artificial Sequence
  Description of Artificial Sequence: Synthetic oligonucleotide
cccuugacugcucugcccg

SEQ ID NO: 929826 - RNA, 19 nt, Artificial Sequence
  Description of Artificial Sequence: Synthetic oligonucleotide
gcagaacucgggcaugcag

SEQ ID NO: 929827 - RNA, 19 nt, Artificial Sequence
  Description of Artificial Sequence: Synthetic oligonucleotide
gagaccgccugggugguug

SEQ ID NO: 929828 - RNA, 19 nt, Artificial Sequence
  Description of Artificial Sequence: Synthetic oligonucleotide
agaccgccugggugguugc

SEQ ID NO: 929829 - RNA, 19 nt, Artificial Sequence
  Description of Artificial Sequence: Synthetic oligonucleotide
gacccucaggacuccagga

SEQ ID NO: 929830 - RNA, 19 nt, Artificial Sequence
  Description of Artificial Sequence: Synthetic oligonucleotide
cguuuggauacaaggagug

SEQ ID NO: 929831 - RNA, 19 nt, Artificial Sequence
  Description of Artificial Sequence: Synthetic oligonucleotide
agaaccacgcaggccaggu

SEQ ID NO: 929832 - RNA, 19 nt, Artificial Sequence
  Description of Artificial Sequence: Synthetic oligonucleotide
ggucacagaagguuaccuc

SEQ ID NO: 929833 - RNA, 19 nt, Artificial Sequence
  Description of Artificial Sequence: Synthetic oligonucleotide
gcaggguuaccuucaguug

SEQ ID NO: 929834 - RNA, 19 nt, Artificial Sequence
  Description of Artificial Sequence: Synthetic oligonucleotide
gcaucggaagucuugaagu

SEQ ID NO: 929835 - RNA, 19 nt, Artificial Sequence
  Description of Artificial Sequence: Synthetic oligonucleotide
acagugcgagcaagcaagg

SEQ ID NO: 929836 - RNA, 19 nt, Artificial Sequence
  Description of Artificial Sequence: Synthetic oligonucleotide
guugacuauccuucaacau

SEQ ID NO: 929837 - RNA, 19 nt, Artificial Sequence
  Description of Artificial Sequence: Synthetic oligonucleotide
uggggcagauagagacgag

SEQ ID NO: 929838 - RNA, 19 nt, Artificial Sequence
  Description of Artificial Sequence: Synthetic oligonucleotide
cucaagccccugaaccgac

SEQ ID NO: 929839 - RNA, 19 nt, Artificial Sequence
  Description of Artificial Sequence: Synthetic oligonucleotide
ccaagcaucggaagucuug

SEQ ID NO: 929840 - RNA, 19 nt, Artificial Sequence
  Description of Artificial Sequence: Synthetic oligonucleotide
acccucaggacuccaggaa

SEQ ID NO: 929841 - RNA, 19 nt, Artificial Sequence
  Description of Artificial Sequence: Synthetic oligonucleotide
gaguguaagccuccugagu

SEQ ID NO: 929842 - RNA, 19 nt, Artificial Sequence
  Description of Artificial Sequence: Synthetic oligonucleotide
aggaguguccaggacuggu

SEQ ID NO: 929843 - RNA, 19 nt, Artificial Sequence
  Description of Artificial Sequence: Synthetic oligonucleotide
uucggagcaggguuaccuu

SEQ ID NO: 929844 - RNA, 19 nt, Artificial Sequence
  Description of Artificial Sequence: Synthetic oligonucleotide
cagccaagcaucggaaguc

SEQ ID NO: 929845 - RNA, 19 nt, Artificial Sequence
  Description of Artificial Sequence: Synthetic oligonucleotide
ugcucguccgguccccaaa

SEQ ID NO: 929846 - RNA, 19 nt, Artificial Sequence
  Description of Artificial Sequence: Synthetic oligonucleotide
caaauggcgucggucugug

SEQ ID NO: 929847 - RNA, 19 nt, Artificial Sequence
  Description of Artificial Sequence: Synthetic oligonucleotide
augugcgggcguuuggaua

SEQ ID NO: 929848 - RNA, 19 nt, Artificial Sequence
  Description of Artificial Sequence: Synthetic oligonucleotide
accaggcguccccaggcug

SEQ ID NO: 929849 - RNA, 19 nt, Artificial Sequence
  Description of Artificial Sequence: Synthetic oligonucleotide
agccaagcaucggaagucu

SEQ ID NO: 929850 - RNA, 19 nt, Artificial Sequence
  Description of Artificial Sequence: Synthetic oligonucleotide
uccucgugggugagaccgc

SEQ ID NO: 929851 - RNA, 19 nt, Artificial Sequence
  Description of Artificial Sequence: Synthetic oligonucleotide
gugccgcagaaggugcucg

SEQ ID NO: 929852 - RNA, 19 nt, Artificial Sequence
  Description of Artificial Sequence: Synthetic oligonucleotide
ggaucugcaucaugagguc

SEQ ID NO: 929853 - RNA, 19 nt, Artificial Sequence
  Description of Artificial Sequence: Synthetic oligonucleotide
gacuauccuucaacaucug

SEQ ID NO: 929854 - RNA, 19 nt, Artificial Sequence
  Description of Artificial Sequence: Synthetic oligonucleotide
gggugagaccgccugggug

SEQ ID NO: 929855 - RNA, 19 nt, Artificial Sequence
  Description of Artificial Sequence: Synthetic oligonucleotide
gugccgagcccuugacugc

SEQ ID NO: 929856 - RNA, 19 nt, Artificial Sequence
  Description of Artificial Sequence: Synthetic oligonucleotide
gguuaccuucaguugacua

SEQ ID NO: 929857 - RNA, 19 nt, Artificial Sequence
  Description of Artificial Sequence: Synthetic oligonucleotide
agucgcuucucugggcacu

SEQ ID NO: 929858 - RNA, 19 nt, Artificial Sequence
  Description of Artificial Sequence: Synthetic oligonucleotide
ccgggaaugggcacucacc

SEQ ID NO: 929859 - RNA, 19 nt, Artificial Sequence
  Description of Artificial Sequence: Synthetic oligonucleotide
aggugcucguccggucccc

SEQ ID NO: 929860 - RNA, 19 nt, Artificial Sequence
  Description of Artificial Sequence: Synthetic oligonucleotide
cacacgccgcauguucucc

SEQ ID NO: 929861 - RNA, 19 nt, Artificial Sequence
  Description of Artificial Sequence: Synthetic oligonucleotide
gucggucuguggccacacg

SEQ ID NO: 929862 - RNA, 19 nt, Artificial Sequence
  Description of Artificial Sequence: Synthetic oligonucleotide
ccgaguguaagccuccuga

SEQ ID NO: 929863 - RNA, 19 nt, Artificial Sequence
  Description of Artificial Sequence: Synthetic oligonucleotide
ccuggcacacgugugaauc

SEQ ID NO: 929864 - RNA, 19 nt, Artificial Sequence
  Description of Artificial Sequence: Synthetic oligonucleotide
gugcgagcaagcaaggccu

SEQ ID NO: 929865 - RNA, 19 nt, Artificial Sequence
  Description of Artificial Sequence: Synthetic oligonucleotide
gagauccgcuggucuccag

SEQ ID NO: 929866 - RNA, 19 nt, Artificial Sequence
  Description of Artificial Sequence: Synthetic oligonucleotide
cccacaugcuucaguuggg

SEQ ID NO: 929867 - RNA, 19 nt, Artificial Sequence
  Description of Artificial Sequence: Synthetic oligonucleotide
ccaggcacaaacucaguaa

SEQ ID NO: 929868 - RNA, 19 nt, Artificial Sequence
  Description of Artificial Sequence: Synthetic oligonucleotide
cgaguguaagccuccugag

SEQ ID NO: 929869 - RNA, 19 nt, Artificial Sequence
  Description of Artificial Sequence: Synthetic oligonucleotide
caguacaggcugucaaucu

SEQ ID NO: 929870 - RNA, 19 nt, Artificial Sequence
  Description of Artificial Sequence: Synthetic oligonucleotide
gcucguccgguccccaaag

SEQ ID NO: 929871 - RNA, 19 nt, Artificial Sequence
  Description of Artificial Sequence: Synthetic oligonucleotide
cagaaccacgcaggccagg

SEQ ID NO: 929872 - RNA, 19 nt, Artificial Sequence
  Description of Artificial Sequence: Synthetic oligonucleotide
cauucggagcaggguuacc

SEQ ID NO: 929873 - RNA, 19 nt, Artificial Sequence
  Description of Artificial Sequence: Synthetic oligonucleotide
ccaggcguccccaggcugc

SEQ ID NO: 929874 - RNA, 19 nt, Artificial Sequence
  Description of Artificial Sequence: Synthetic oligonucleotide
ccucgaaguagcgaagguc

SEQ ID NO: 929875 - RNA, 19 nt, Artificial Sequence
  Description of Artificial Sequence: Synthetic oligonucleotide
uggcgucggucuguggcca

SEQ ID NO: 929876 - RNA, 19 nt, Artificial Sequence
  Description of Artificial Sequence: Synthetic oligonucleotide
guagccccagaaccacgca

SEQ ID NO: 929877 - RNA, 19 nt, Artificial Sequence
  Description of Artificial Sequence: Synthetic oligonucleotide
uggcccaaauggcgucggu

SEQ ID NO: 929878 - RNA, 19 nt, Artificial Sequence
  Description of Artificial Sequence: Synthetic oligonucleotide
cacaguacaggcugucaau

SEQ ID NO: 929879 - RNA, 19 nt, Artificial Sequence
  Description of Artificial Sequence: Synthetic oligonucleotide
ggacagugcgagcaagcaa

SEQ ID NO: 929880 - RNA, 19 nt, Artificial Sequence
  Description of Artificial Sequence: Synthetic oligonucleotide
ccggacagugcgagcaagc

SEQ ID NO: 929881 - RNA, 19 nt, Artificial Sequence
  Description of Artificial Sequence: Synthetic oligonucleotide
gggaaugggcacucaccca

SEQ ID NO: 929882 - RNA, 19 nt, Artificial Sequence
  Description of Artificial Sequence: Synthetic oligonucleotide
agccgaggccuccuuucaa

SEQ ID NO: 929883 - RNA, 19 nt, Artificial Sequence
  Description of Artificial Sequence: Synthetic oligonucleotide
aggccuccuuucaaugaca

SEQ ID NO: 929884 - RNA, 19 nt, Artificial Sequence
  Description of Artificial Sequence: Synthetic oligonucleotide
caaggagggauagcaggaa

SEQ ID NO: 929885 - RNA, 19 nt, Artificial Sequence
  Description of Artificial Sequence: Synthetic oligonucleotide
gcccaaauggcgucggucu

SEQ ID NO: 929886 - RNA, 19 nt, Artificial Sequence
  Description of Artificial Sequence: Synthetic oligonucleotide
aggcggcgguuggaggccc

SEQ ID NO: 929887 - RNA, 19 nt, Artificial Sequence
  Description of Artificial Sequence: Synthetic oligonucleotide
gacugguucuuggggcaga

SEQ ID NO: 929888 - RNA, 19 nt, Artificial Sequence
  Description of Artificial Sequence: Synthetic oligonucleotide
cucuggagauccgcugguc

SEQ ID NO: 929889 - RNA, 19 nt, Artificial Sequence
  Description of Artificial Sequence: Synthetic oligonucleotide
gcagccgaggccuccuuuc

SEQ ID NO: 929890 - RNA, 19 nt, Artificial Sequence
  Description of Artificial Sequence: Synthetic oligonucleotide
ggugguugcuauuccaguu

SEQ ID NO: 929891 - RNA, 19 nt, Artificial Sequence
  Description of Artificial Sequence: Synthetic oligonucleotide
agcagaacucgggcaugca

SEQ ID NO: 929892 - RNA, 19 nt, Artificial Sequence
  Description of Artificial Sequence: Synthetic oligonucleotide
caggcggcgguuggaggcc

SEQ ID NO: 929893 - RNA, 19 nt, Artificial Sequence
  Description of Artificial Sequence: Synthetic oligonucleotide
gguucuuggggcagauaga

SEQ ID NO: 929894 - RNA, 19 nt, Artificial Sequence
  Description of Artificial Sequence: Synthetic oligonucleotide
cuggaccaggaggaccuuc

SEQ ID NO: 929895 - RNA, 19 nt, Artificial Sequence
  Description of Artificial Sequence: Synthetic oligonucleotide
ggauagcaggaagggugcc

SEQ ID NO: 929896 - RNA, 19 nt, Artificial Sequence
  Description of Artificial Sequence: Synthetic oligonucleotide
ccgaggccuccuuucaaug

SEQ ID NO: 929897 - RNA, 19 nt, Artificial Sequence
  Description of Artificial Sequence: Synthetic oligonucleotide
gccgcauguucuccaugcc

SEQ ID NO: 929898 - RNA, 19 nt, Artificial Sequence
  Description of Artificial Sequence: Synthetic oligonucleotide
gaaccacgcaggccaggua

SEQ ID NO: 929899 - RNA, 19 nt, Artificial Sequence
  Description of Artificial Sequence: Synthetic oligonucleotide
gaacucgggcaugcagcuc

SEQ ID NO: 929900 - RNA, 19 nt, Artificial Sequence
  Description of Artificial Sequence: Synthetic oligonucleotide
guccgguccccaaagccaa

SEQ ID NO: 929901 - RNA, 19 nt, Artificial Sequence
  Description of Artificial Sequence: Synthetic oligonucleotide
cccaaauggcgucggucug

SEQ ID NO: 929902 - RNA, 19 nt, Artificial Sequence
  Description of Artificial Sequence: Synthetic oligonucleotide
uuccaguucuaggguccau

SEQ ID NO: 929903 - RNA, 19 nt, Artificial Sequence
  Description of Artificial Sequence: Synthetic oligonucleotide
gaaugggcacucacccacu

SEQ ID NO: 929904 - RNA, 19 nt, Artificial Sequence
  Description of Artificial Sequence: Synthetic oligonucleotide
gcgguuggaggcccucagc

SEQ ID NO: 929905 - RNA, 19 nt, Artificial Sequence
  Description of Artificial Sequence: Synthetic oligonucleotide
ggcucaugaccaggcgucc

SEQ ID NO: 929906 - RNA, 19 nt, Artificial Sequence
  Description of Artificial Sequence: Synthetic oligonucleotide
ugcgggcguuuggauacaa

SEQ ID NO: 929907 - RNA, 19 nt, Artificial Sequence
  Description of Artificial Sequence: Synthetic oligonucleotide
gcucaugaccaggcguccc

SEQ ID NO: 929908 - RNA, 19 nt, Artificial Sequence
  Description of Artificial Sequence: Synthetic oligonucleotide
cagccgaggccuccuuuca

SEQ ID NO: 929909 - RNA, 19 nt, Artificial Sequence
  Description of Artificial Sequence: Synthetic oligonucleotide
gcguuuggauacaaggagu

SEQ ID NO: 929910 - RNA, 19 nt, Artificial Sequence
  Description of Artificial Sequence: Synthetic oligonucleotide
ccucuaugcuuggagaaaa

SEQ ID NO: 929911 - RNA, 19 nt, Artificial Sequence
  Description of Artificial Sequence: Synthetic oligonucleotide
gugugacccacagccucca

SEQ ID NO: 929912 - RNA, 19 nt, Artificial Sequence
  Description of Artificial Sequence: Synthetic oligonucleotide
uggggacgcggugcaucug

SEQ ID NO: 929913 - RNA, 19 nt, Artificial Sequence
  Description of Artificial Sequence: Synthetic oligonucleotide
gggugguugcuauuccagu

SEQ ID NO: 929914 - RNA, 19 nt, Artificial Sequence
  Description of Artificial Sequence: Synthetic oligonucleotide
gggcacucacccacuagca

SEQ ID NO: 929915 - RNA, 19 nt, Artificial Sequence
  Description of Artificial Sequence: Synthetic oligonucleotide
guaagccuccugagucaga

SEQ ID NO: 929916 - RNA, 19 nt, Artificial Sequence
  Description of Artificial Sequence: Synthetic oligonucleotide
gccggacagugcgagcaag

SEQ ID NO: 929917 - RNA, 19 nt, Artificial Sequence
  Description of Artificial Sequence: Synthetic oligonucleotide
ccgcaaucuucaggaagcc

SEQ ID NO: 929918 - RNA, 19 nt, Artificial Sequence
  Description of Artificial Sequence: Synthetic oligonucleotide
caugugcgggcguuuggau

SEQ ID NO: 929919 - RNA, 19 nt, Artificial Sequence
  Description of Artificial Sequence: Synthetic oligonucleotide
ggcucagcugagguuggca

SEQ ID NO: 929920 - RNA, 19 nt, Artificial Sequence
  Description of Artificial Sequence: Synthetic oligonucleotide
gggucacagaagguuaccu

SEQ ID NO: 929921 - RNA, 19 nt, Artificial Sequence
  Description of Artificial Sequence: Synthetic oligonucleotide
agguuaccuccuggcucug

SEQ ID NO: 929922 - RNA, 19 nt, Artificial Sequence
  Description of Artificial Sequence: Synthetic oligonucleotide
gccucuaugcuuggagaaa

SEQ ID NO: 929923 - RNA, 19 nt, Artificial Sequence
  Description of Artificial Sequence: Synthetic oligonucleotide
gcgggcguuuggauacaag

SEQ ID NO: 929924 - RNA, 19 nt, Artificial Sequence
  Description of Artificial Sequence: Synthetic oligonucleotide
cccgaguguaagccuccug

SEQ ID NO: 929925 - RNA, 19 nt, Artificial Sequence
  Description of Artificial Sequence: Synthetic oligonucleotide
ggagauccgcuggucucca

SEQ ID NO: 929926 - RNA, 19 nt, Artificial Sequence
  Description of Artificial Sequence: Synthetic oligonucleotide
cgucccggccagcacuucc

SEQ ID NO: 929927 - RNA, 19 nt, Artificial Sequence
  Description of Artificial Sequence: Synthetic oligonucleotide
ggggccggacagugcgagc

SEQ ID NO: 929928 - RNA, 19 nt, Artificial Sequence
  Description of Artificial Sequence: Synthetic oligonucleotide
gcggugcaucugcauugac

SEQ ID NO: 929929 - RNA, 19 nt, Artificial Sequence
  Description of Artificial Sequence: Synthetic oligonucleotide
ggcgucggucuguggccac

SEQ ID NO: 929930 - RNA, 19 nt, Artificial Sequence
  Description of Artificial Sequence: Synthetic oligonucleotide
gccgaggccuccuuucaau

SEQ ID NO: 929931 - RNA, 19 nt, Artificial Sequence
  Description of Artificial Sequence: Synthetic oligonucleotide
ucgucccggccagcacuuc

SEQ ID NO: 929932 - RNA, 19 nt, Artificial Sequence
  Description of Artificial Sequence: Synthetic oligonucleotide
ugagaccgccugggugguu

SEQ ID NO: 929933 - RNA, 19 nt, Artificial Sequence
  Description of Artificial Sequence: Synthetic oligonucleotide
ggaguguccaggacugguu

SEQ ID NO: 929934 - RNA, 19 nt, Artificial Sequence
  Description of Artificial Sequence: Synthetic oligonucleotide
gcguccccaggcugccaug

SEQ ID NO: 929935 - RNA, 19 nt, Artificial Sequence
  Description of Artificial Sequence: Synthetic oligonucleotide
cucgucccggccagcacuu

SEQ ID NO: 929936 - RNA, 19 nt, Artificial Sequence
  Description of Artificial Sequence: Synthetic oligonucleotide
gggacgcggugcaucugca

SEQ ID NO: 929937 - RNA, 19 nt, Artificial Sequence
  Description of Artificial Sequence: Synthetic oligonucleotide
gugcgggcguuuggauaca

SEQ ID NO: 929938 - RNA, 19 nt, Artificial Sequence
  Description of Artificial Sequence: Synthetic oligonucleotide
ggccggacagugcgagcaa

SEQ ID NO: 929939 - RNA, 19 nt, Artificial Sequence
  Description of Artificial Sequence: Synthetic oligonucleotide
cggagagggucuucaugga

SEQ ID NO: 929940 - RNA, 19 nt, Artificial Sequence
  Description of Artificial Sequence: Synthetic oligonucleotide
ccaaauggcgucggucugu

SEQ ID NO: 929941 - RNA, 19 nt, Artificial Sequence
  Description of Artificial Sequence: Synthetic oligonucleotide
gaccgccugggugguugcu

SEQ ID NO: 929942 - RNA, 19 nt, Artificial Sequence
  Description of Artificial Sequence: Synthetic oligonucleotide
cgucggucuguggccacac

SEQ ID NO: 929943 - RNA, 19 nt, Artificial Sequence
  Description of Artificial Sequence: Synthetic oligonucleotide
gcgucggucuguggccaca

SEQ ID NO: 929944 - RNA, 19 nt, Artificial Sequence
  Description of Artificial Sequence: Synthetic oligonucleotide
cuucuccggagagggucuu

SEQ ID NO: 929945 - RNA, 19 nt, Artificial Sequence
  Description of Artificial Sequence: Synthetic oligonucleotide
ggguccaugugcgggcguu

SEQ ID NO: 929946 - RNA, 19 nt, Artificial Sequence
  Description of Artificial Sequence: Synthetic oligonucleotide
cgcggugcaucugcauuga

SEQ ID NO: 929947 - RNA, 19 nt, Artificial Sequence
  Description of Artificial Sequence: Synthetic oligonucleotide
gcggcgguuggaggcccuc

SEQ ID NO: 929948 - RNA, 19 nt, Artificial Sequence
  Description of Artificial Sequence: Synthetic oligonucleotide
ccgccugggugguugcuau

SEQ ID NO: 929949 - RNA, 19 nt, Artificial Sequence
  Description of Artificial Sequence: Synthetic oligonucleotide
gccaagcaucggaagucuu

SEQ ID NO: 929950 - RNA, 19 nt, Artificial Sequence
  Description of Artificial Sequence: Synthetic oligonucleotide
gguccaugugcgggcguuu

SEQ ID NO: 929951 - RNA, 19 nt, Artificial Sequence
  Description of Artificial Sequence: Synthetic oligonucleotide
cccggccagcacuuccuau

SEQ ID NO: 929952 - RNA, 19 nt, Artificial Sequence
  Description of Artificial Sequence: Synthetic oligonucleotide
cuguggccacacgccgcau

SEQ ID NO: 929953 - RNA, 19 nt, Artificial Sequence
  Description of Artificial Sequence: Synthetic oligonucleotide
ggcggcgguuggaggcccu

SEQ ID NO: 929954 - RNA, 19 nt, Artificial Sequence
  Description of Artificial Sequence: Synthetic oligonucleotide
aaugaagacauccuaucgg

SEQ ID NO: 929955 - RNA, 19 nt, Artificial Sequence
  Description of Artificial Sequence: Synthetic oligonucleotide
aauauuucgugccaagauc

SEQ ID NO: 929956 - RNA, 19 nt, Artificial Sequence
  Description of Artificial Sequence: Synthetic oligonucleotide
uaaacgaagaccaaagagu

SEQ ID NO: 929957 - RNA, 19 nt, Artificial Sequence
  Description of Artificial Sequence: Synthetic oligonucleotide
ucuuauaagguugaaauca

SEQ ID NO: 929958 - RNA, 19 nt, Artificial Sequence
  Description of Artificial Sequence: Synthetic oligonucleotide
uuuagaaaguaucuucaag

SEQ ID NO: 929959 - RNA, 19 nt, Artificial Sequence
  Description of Artificial Sequence: Synthetic oligonucleotide
aaugacaccauuauuucuc

SEQ ID NO: 929960 - RNA, 19 nt, Artificial Sequence
  Description of Artificial Sequence: Synthetic oligonucleotide
uaagguugaaaucaagucu

SEQ ID NO: 929961 - RNA, 19 nt, Artificial Sequence
  Description of Artificial Sequence: Synthetic oligonucleotide
aauuugucgacccauuccu

SEQ ID NO: 929962 - RNA, 19 nt, Artificial Sequence
  Description of Artificial Sequence: Synthetic oligonucleotide
aauaucaauuugcucaaca

SEQ ID NO: 929963 - RNA, 19 nt, Artificial Sequence
  Description of Artificial Sequence: Synthetic oligonucleotide
acaauauugcuaaauagcg

SEQ ID NO: 929964 - RNA, 19 nt, Artificial Sequence
  Description of Artificial Sequence: Synthetic oligonucleotide
acuaucagaguuuugcauc

SEQ ID NO: 929965 - RNA, 19 nt, Artificial Sequence
  Description of Artificial Sequence: Synthetic oligonucleotide
ugccuuaucaccugcaagg

SEQ ID NO: 929966 - RNA, 19 nt, Artificial Sequence
  Description of Artificial Sequence: Synthetic oligonucleotide
acgaguuugccuuaucacc

SEQ ID NO: 929967 - RNA, 19 nt, Artificial Sequence
  Description of Artificial Sequence: Synthetic oligonucleotide
ucucaauaaggucacuccg

SEQ ID NO: 929968 - RNA, 19 nt, Artificial Sequence
  Description of Artificial Sequence: Synthetic oligonucleotide
ugugauaggaagcuugggc

SEQ ID NO: 929969 - RNA, 19 nt, Artificial Sequence
  Description of Artificial Sequence: Synthetic oligonucleotide
auauuucgugccaagaucc

SEQ ID NO: 929970 - RNA, 19 nt, Artificial Sequence
  Description of Artificial Sequence: Synthetic oligonucleotide
acucuuauaagguugaaau

SEQ ID NO: 929971 - RNA, 19 nt, Artificial Sequence
  Description of Artificial Sequence: Synthetic oligonucleotide
uagacucaaaccaagagau

SEQ ID NO: 929972 - RNA, 19 nt, Artificial Sequence
  Description of Artificial Sequence: Synthetic oligonucleotide
agaucuuuauucuugguga

SEQ ID NO: 929973 - RNA, 19 nt, Artificial Sequence
  Description of Artificial Sequence: Synthetic oligonucleotide
auaucaauuugcucaacag

SEQ ID NO: 929974 - RNA, 19 nt, Artificial Sequence
  Description of Artificial Sequence: Synthetic oligonucleotide
uagaaaguaucuucaaggc

SEQ ID NO: 929975 - RNA, 19 nt, Artificial Sequence
  Description of Artificial Sequence: Synthetic oligonucleotide
gauggagcgacaauguagg

SEQ ID NO: 929976 - RNA, 19 nt, Artificial Sequence
  Description of Artificial Sequence: Synthetic oligonucleotide
agagguuacaggcaacgac

SEQ ID NO: 929977 - RNA, 19 nt, Artificial Sequence
  Description of Artificial Sequence: Synthetic oligonucleotide
aagcgacuagacucaaacc

SEQ ID NO: 929978 - RNA, 19 nt, Artificial Sequence
  Description of Artificial Sequence: Synthetic oligonucleotide
aggaaaaccuguuagcuca

SEQ ID NO: 929979 - RNA, 19 nt, Artificial Sequence
  Description of Artificial Sequence: Synthetic oligonucleotide
aagguugaaaucaagucug

SEQ ID NO: 929980 - RNA, 19 nt, Artificial Sequence
  Description of Artificial Sequence: Synthetic oligonucleotide
uccgccaauaucaauuugc

SEQ ID NO: 929981 - RNA, 19 nt, Artificial Sequence
  Description of Artificial Sequence: Synthetic oligonucleotide
agaaacgucucucaauuug

SEQ ID NO: 929982 - RNA, 19 nt, Artificial Sequence
  Description of Artificial Sequence: Synthetic oligonucleotide
gaagcgacuagacucaaac

SEQ ID NO: 929983 - RNA, 19 nt, Artificial Sequence
  Description of Artificial Sequence: Synthetic oligonucleotide
agcgacuagacucaaacca

SEQ ID NO: 929984 - RNA, 19 nt, Artificial Sequence
  Description of Artificial Sequence: Synthetic oligonucleotide
ucucuucuggcuuaaacga

SEQ ID NO: 929985 - RNA, 19 nt, Artificial Sequence
  Description of Artificial Sequence: Synthetic oligonucleotide
uccgaugccaauaaccugu

SEQ ID NO: 929986 - RNA, 19 nt, Artificial Sequence
  Description of Artificial Sequence: Synthetic oligonucleotide
agcggauccagauggagcg

SEQ ID NO: 929987 - RNA, 19 nt, Artificial Sequence
  Description of Artificial Sequence: Synthetic oligonucleotide
aucugaagaacacaguagu

SEQ ID NO: 929988 - RNA, 19 nt, Artificial Sequence
  Description of Artificial Sequence: Synthetic oligonucleotide
aguaugaguaaaugccuuc

SEQ ID NO: 929989 - RNA, 19 nt, Artificial Sequence
  Description of Artificial Sequence: Synthetic oligonucleotide
uaaugcaauaaagucacca

SEQ ID NO: 929990 - RNA, 19 nt, Artificial Sequence
  Description of Artificial Sequence: Synthetic oligonucleotide
aaaccuguuagcucagaca

SEQ ID NO: 929991 - RNA, 19 nt, Artificial Sequence
  Description of Artificial Sequence: Synthetic oligonucleotide
caaaccaagagaugcgagg

SEQ ID NO: 929992 - RNA, 19 nt, Artificial Sequence
  Description of Artificial Sequence: Synthetic oligonucleotide
ucuggcuuaaacgaagacc

SEQ ID NO: 929993 - RNA, 19 nt, Artificial Sequence
  Description of Artificial Sequence: Synthetic oligonucleotide
ccgguuuuaaacuucaugg

SEQ ID NO: 929994 - RNA, 19 nt, Artificial Sequence
  Description of Artificial Sequence: Synthetic oligonucleotide
auagcgacuugucaaugac

SEQ ID NO: 929995 - RNA, 19 nt, Artificial Sequence
  Description of Artificial Sequence: Synthetic oligonucleotide
aauccccuuacuguacugc

SEQ ID NO: 929996 - RNA, 19 nt, Artificial Sequence
  Description of Artificial Sequence: Synthetic oligonucleotide
agauaaugcaauaaaguca

SEQ ID NO: 929997 - RNA, 19 nt, Artificial Sequence
  Description of Artificial Sequence: Synthetic oligonucleotide
cuuggcguagcacacagag

SEQ ID NO: 929998 - RNA, 19 nt, Artificial Sequence
  Description of Artificial Sequence: Synthetic oligonucleotide
ucacacacgacugucaccc

SEQ ID NO: 929999 - RNA, 19 nt, Artificial Sequence
  Description of Artificial Sequence: Synthetic oligonucleotide
cuggcuuaaacgaagacca

SEQ ID NO: 930000 - RNA, 19 nt, Artificial Sequence
  Description of Artificial Sequence: Synthetic oligonucleotide
augcaagguuuucacacgc

SEQ ID NO: 930001 - RNA, 19 nt, Artificial Sequence
  Description of Artificial Sequence: Synthetic oligonucleotide
ugcaguguauccgagacug

SEQ ID NO: 930002 - RNA, 19 nt, Artificial Sequence
  Description of Artificial Sequence: Synthetic oligonucleotide
ugcuccgaugccaauaacc

SEQ ID NO: 930003 - RNA, 19 nt, Artificial Sequence
  Description of Artificial Sequence: Synthetic oligonucleotide
aacaaugccauccgacacu

SEQ ID NO: 930004 - RNA, 19 nt, Artificial Sequence
  Description of Artificial Sequence: Synthetic oligonucleotide
uccggaagcgacuagacuc

SEQ ID NO: 930005 - RNA, 19 nt, Artificial Sequence
  Description of Artificial Sequence: Synthetic oligonucleotide
cuugcucuggcauaugcag

SEQ ID NO: 930006 - RNA, 19 nt, Artificial Sequence
  Description of Artificial Sequence: Synthetic oligonucleotide
caucauauugugcaguaug

SEQ ID NO: 930007 - RNA, 19 nt, Artificial Sequence
  Description of Artificial Sequence: Synthetic oligonucleotide
cugccaggcauucaaagcg

SEQ ID NO: 930008 - RNA, 19 nt, Artificial Sequence
  Description of Artificial Sequence: Synthetic oligonucleotide
guacuugacagcaacagug

SEQ ID NO: 930009 - RNA, 19 nt, Artificial Sequence
  Description of Artificial Sequence: Synthetic oligonucleotide
aggugugagagucggauag

SEQ ID NO: 930010 - RNA, 19 nt, Artificial Sequence
  Description of Artificial Sequence: Synthetic oligonucleotide
ggcaacgacucuuauaagg

SEQ ID NO: 930011 - RNA, 19 nt, Artificial Sequence
  Description of Artificial Sequence: Synthetic oligonucleotide
cuaaauagcgacuugucaa

SEQ ID NO: 930012 - RNA, 19 nt, Artificial Sequence
  Description of Artificial Sequence: Synthetic oligonucleotide
cucucaauaaggucacucc

SEQ ID NO: 930013 - RNA, 19 nt, Artificial Sequence
  Description of Artificial Sequence: Synthetic oligonucleotide
uuauucuuggugacaauau

SEQ ID NO: 930014 - RNA, 19 nt, Artificial Sequence
  Description of Artificial Sequence: Synthetic oligonucleotide
aaucgcuucaucauauugu

SEQ ID NO: 930015 - RNA, 19 nt, Artificial Sequence
  Description of Artificial Sequence: Synthetic oligonucleotide
ugaaaucgcuucaucauau

SEQ ID NO: 930016 - RNA, 19 nt, Artificial Sequence
  Description of Artificial Sequence: Synthetic oligonucleotide
uggcguagcacacagaguu

SEQ ID NO: 930017 - RNA, 19 nt, Artificial Sequence
  Description of Artificial Sequence: Synthetic oligonucleotide
auccgugugagccaggaug

SEQ ID NO: 930018 - RNA, 19 nt, Artificial Sequence
  Description of Artificial Sequence: Synthetic oligonucleotide
aaaccaagagaugcgaggu

SEQ ID NO: 930019 - RNA, 19 nt, Artificial Sequence
  Description of Artificial Sequence: Synthetic oligonucleotide
aucgcuucaucauauugug

SEQ ID NO: 930020 - RNA, 19 nt, Artificial Sequence
  Description of Artificial Sequence: Synthetic oligonucleotide
uuacuaucagaguuuugca

SEQ ID NO: 930021 - RNA, 19 nt, Artificial Sequence
  Description of Artificial Sequence: Synthetic oligonucleotide
gaggucguagaccaugcag

SEQ ID NO: 930022 - RNA, 19 nt, Artificial Sequence
  Description of Artificial Sequence: Synthetic oligonucleotide
caauuugucgacccauucc

SEQ ID NO: 930023 - RNA, 19 nt, Artificial Sequence
  Description of Artificial Sequence: Synthetic oligonucleotide
aguuugccuuaucaccugc

SEQ ID NO: 930024 - RNA, 19 nt, Artificial Sequence
  Description of Artificial Sequence: Synthetic oligonucleotide
ucccugagcgcuuuugccg

SEQ ID NO: 930025 - RNA, 19 nt, Artificial Sequence
  Description of Artificial Sequence: Synthetic oligonucleotide
aggccagcaucccugagcg

SEQ ID NO: 930026 - RNA, 19 nt, Artificial Sequence
  Description of Artificial Sequence: Synthetic oligonucleotide
accaaagaguguucgaacu

SEQ ID NO: 930027 - RNA, 19 nt, Artificial Sequence
  Description of Artificial Sequence: Synthetic oligonucleotide
agaacugugauaggaagcu

SEQ ID NO: 930028 - RNA, 19 nt, Artificial Sequence
  Description of Artificial Sequence: Synthetic oligonucleotide
uucauggaaagcacucgug

SEQ ID NO: 930029 - RNA, 19 nt, Artificial Sequence
  Description of Artificial Sequence: Synthetic oligonucleotide
ucucucaauuugucgaccc

SEQ ID NO: 930030 - RNA, 19 nt, Artificial Sequence
  Description of Artificial Sequence: Synthetic oligonucleotide
uuaucaccugcaaggcgcg

SEQ ID NO: 930031 - RNA, 19 nt, Artificial Sequence
  Description of Artificial Sequence: Synthetic oligonucleotide
aaagccaaguggcgccugg

SEQ ID NO: 930032 - RNA, 19 nt, Artificial Sequence
  Description of Artificial Sequence: Synthetic oligonucleotide
guggccauaggugugagag

SEQ ID NO: 930033 - RNA, 19 nt, Artificial Sequence
  Description of Artificial Sequence: Synthetic oligonucleotide
cuagacucaaaccaagaga

SEQ ID NO: 930034 - RNA, 19 nt, Artificial Sequence
  Description of Artificial Sequence: Synthetic oligonucleotide
ugaucccuaguucaucgca

SEQ ID NO: 930035 - RNA, 19 nt, Artificial Sequence
  Description of Artificial Sequence: Synthetic oligonucleotide
uggaauauuucgugccaag

SEQ ID NO: 930036 - RNA, 19 nt, Artificial Sequence
  Description of Artificial Sequence: Synthetic oligonucleotide
ucggauagaggucguagac

SEQ ID NO: 930037 - RNA, 19 nt, Artificial Sequence
  Description of Artificial Sequence: Synthetic oligonucleotide
uuuggcucgguccacguua

SEQ ID NO: 930038 - RNA, 19 nt, Artificial Sequence
  Description of Artificial Sequence: Synthetic oligonucleotide
gacuuccucgaacagugcc

SEQ ID NO: 930039 - RNA, 19 nt, Artificial Sequence
  Description of Artificial Sequence: Synthetic oligonucleotide
uaccgcaagggcaucuggg

SEQ ID NO: 930040 - RNA, 19 nt, Artificial Sequence
  Description of Artificial Sequence: Synthetic oligonucleotide
auauugugcaguaugagua

SEQ ID NO: 930041 - RNA, 19 nt, Artificial Sequence
  Description of Artificial Sequence: Synthetic oligonucleotide
gaguguacuugacagcaac

SEQ ID NO: 930042 - RNA, 19 nt, Artificial Sequence
  Description of Artificial Sequence: Synthetic oligonucleotide
uacuaucagaguuuugcau

SEQ ID NO: 930043 - RNA, 19 nt, Artificial Sequence
  Description of Artificial Sequence: Synthetic oligonucleotide
uccucugguucacacacga

SEQ ID NO: 930044 - RNA, 19 nt, Artificial Sequence
  Description of Artificial Sequence: Synthetic oligonucleotide
cuuacuguacugcuuucug

SEQ ID NO: 930045 - RNA, 19 nt, Artificial Sequence
  Description of Artificial Sequence: Synthetic oligonucleotide
ggaugcaagguuuucacac

SEQ ID NO: 930046 - RNA, 19 nt, Artificial Sequence
  Description of Artificial Sequence: Synthetic oligonucleotide
augaucccuaguucaucgc

SEQ ID NO: 930047 - RNA, 19 nt, Artificial Sequence
  Description of Artificial Sequence: Synthetic oligonucleotide
uauuucgugccaagauccc

SEQ ID NO: 930048 - RNA, 19 nt, Artificial Sequence
  Description of Artificial Sequence: Synthetic oligonucleotide
cucuuauaagguugaaauc

SEQ ID NO: 930049 - RNA, 19 nt, Artificial Sequence
  Description of Artificial Sequence: Synthetic oligonucleotide
gaggccacggucuucacga

SEQ ID NO: 930050 - RNA, 19 nt, Artificial Sequence
  Description of Artificial Sequence: Synthetic oligonucleotide
uaguucaucgcacgccuca

SEQ ID NO: 930051 - RNA, 19 nt, Artificial Sequence
  Description of Artificial Sequence: Synthetic oligonucleotide
acagguuuaugaauccagg

SEQ ID NO: 930052 - RNA, 19 nt, Artificial Sequence
  Description of Artificial Sequence: Synthetic oligonucleotide
auauccuggggcaacaaug

SEQ ID NO: 930053 - RNA, 19 nt, Artificial Sequence
  Description of Artificial Sequence: Synthetic oligonucleotide
auguaggccacaccacuuc

SEQ ID NO: 930054 - RNA, 19 nt, Artificial Sequence
  Description of Artificial Sequence: Synthetic oligonucleotide
ugcuaaauagcgacuuguc

SEQ ID NO: 930055 - RNA, 19 nt, Artificial Sequence
  Description of Artificial Sequence: Synthetic oligonucleotide
caagaucccagcauggaca

SEQ ID NO: 930056 - RNA, 19 nt, Artificial Sequence
  Description of Artificial Sequence: Synthetic oligonucleotide
uuugucgacccauuccuuc

SEQ ID NO: 930057 - RNA, 19 nt, Artificial Sequence
  Description of Artificial Sequence: Synthetic oligonucleotide
aggggcuccauugagaacu

SEQ ID NO: 930058 - RNA, 19 nt, Artificial Sequence
  Description of Artificial Sequence: Synthetic oligonucleotide
uucaucgcacgccucaauc

SEQ ID NO: 930059 - RNA, 19 nt, Artificial Sequence
  Description of Artificial Sequence: Synthetic oligonucleotide
uugcuaaauagcgacuugu

SEQ ID NO: 930060 - RNA, 19 nt, Artificial Sequence
  Description of Artificial Sequence: Synthetic oligonucleotide
aauccaggggcuccauuga

SEQ ID NO: 930061 - RNA, 19 nt, Artificial Sequence
  Description of Artificial Sequence: Synthetic oligonucleotide
uuaugaauccaggggcucc

SEQ ID NO: 930062 - RNA, 19 nt, Artificial Sequence
  Description of Artificial Sequence: Synthetic oligonucleotide
aaauccccuuacuguacug

SEQ ID NO: 930063 - RNA, 19 nt, Artificial Sequence
  Description of Artificial Sequence: Synthetic oligonucleotide
cacguuaucucugaaagga

SEQ ID NO: 930064 - RNA, 19 nt, Artificial Sequence
  Description of Artificial Sequence: Synthetic oligonucleotide
gaccaaagaguguucgaac

SEQ ID NO: 930065 - RNA, 19 nt, Artificial Sequence
  Description of Artificial Sequence: Synthetic oligonucleotide
uggagcgacaauguaggcc

SEQ ID NO: 930066 - RNA, 19 nt, Artificial Sequence
  Description of Artificial Sequence: Synthetic oligonucleotide
ugguguccgucacauacug

SEQ ID NO: 930067 - RNA, 19 nt, Artificial Sequence
  Description of Artificial Sequence: Synthetic oligonucleotide
cuucaccccgguuuuaaac

SEQ ID NO: 930068 - RNA, 19 nt, Artificial Sequence
  Description of Artificial Sequence: Synthetic oligonucleotide
acugugauaggaagcuugg

SEQ ID NO: 930069 - RNA, 19 nt, Artificial Sequence
  Description of Artificial Sequence: Synthetic oligonucleotide
ggagcgacaauguaggcca

SEQ ID NO: 930070 - RNA, 19 nt, Artificial Sequence
  Description of Artificial Sequence: Synthetic oligonucleotide
cacgaguuugccuuaucac

SEQ ID NO: 930071 - RNA, 19 nt, Artificial Sequence
  Description of Artificial Sequence: Synthetic oligonucleotide
ucugaagaacacaguaguu

SEQ ID NO: 930072 - RNA, 19 nt, Artificial Sequence
  Description of Artificial Sequence: Synthetic oligonucleotide
ggauagaggucguagacca

SEQ ID NO: 930073 - RNA, 19 nt, Artificial Sequence
  Description of Artificial Sequence: Synthetic oligonucleotide
auagaggucguagaccaug

SEQ ID NO: 930074 - RNA, 19 nt, Artificial Sequence
  Description of Artificial Sequence: Synthetic oligonucleotide
uggauggugucgcagccac

SEQ ID NO: 930075 - RNA, 19 nt, Artificial Sequence
  Description of Artificial Sequence: Synthetic oligonucleotide
acucaaaccaagagaugcg

SEQ ID NO: 930076 - RNA, 19 nt, Artificial Sequence
  Description of Artificial Sequence: Synthetic oligonucleotide
gcuuaaacgaagaccaaag

SEQ ID NO: 930077 - RNA, 19 nt, Artificial Sequence
  Description of Artificial Sequence: Synthetic oligonucleotide
gaaguaaucugaaaucgcu

SEQ ID NO: 930078 - RNA, 19 nt, Artificial Sequence
  Description of Artificial Sequence: Synthetic oligonucleotide
gaugcgagguuucuggcaa

SEQ ID NO: 930079 - RNA, 19 nt, Artificial Sequence
  Description of Artificial Sequence: Synthetic oligonucleotide
ugcaagguuuucacacgcc

SEQ ID NO: 930080 - RNA, 19 nt, Artificial Sequence
  Description of Artificial Sequence: Synthetic oligonucleotide
agcgcuuuugccgugccuc

SEQ ID NO: 930081 - RNA, 19 nt, Artificial Sequence
  Description of Artificial Sequence: Synthetic oligonucleotide
caacaaugccauccgacac

SEQ ID NO: 930082 - RNA, 19 nt, Artificial Sequence
  Description of Artificial Sequence: Synthetic oligonucleotide
guucaucccauaccgcaag

SEQ ID NO: 930083 - RNA, 19 nt, Artificial Sequence
  Description of Artificial Sequence: Synthetic oligonucleotide
uuggccgcagcucucaaua

SEQ ID NO: 930084 - RNA, 19 nt, Artificial Sequence
  Description of Artificial Sequence: Synthetic oligonucleotide
guccgucacauacugauca

SEQ ID NO: 930085 - RNA, 19 nt, Artificial Sequence
  Description of Artificial Sequence: Synthetic oligonucleotide
gaauauuucgugccaagau

SEQ ID NO: 930086 - RNA, 19 nt, Artificial Sequence
  Description of Artificial Sequence: Synthetic oligonucleotide
uccggcagaucuuuauucu

SEQ ID NO: 930087 - RNA, 19 nt, Artificial Sequence
  Description of Artificial Sequence: Synthetic oligonucleotide
ugacagaaacgucucucaa

SEQ ID NO: 930088 - RNA, 19 nt, Artificial Sequence
  Description of Artificial Sequence: Synthetic oligonucleotide
augcaguggccauaggugu

SEQ ID NO: 930089 - RNA, 19 nt, Artificial Sequence
  Description of Artificial Sequence: Synthetic oligonucleotide
uuauuucucuucuggcuua

SEQ ID NO: 930090 - RNA, 19 nt, Artificial Sequence
  Description of Artificial Sequence: Synthetic oligonucleotide
ucauccgguuuguaggacu

SEQ ID NO: 930091 - RNA, 19 nt, Artificial Sequence
  Description of Artificial Sequence: Synthetic oligonucleotide
uauccgagacugcuguccu

SEQ ID NO: 930092 - RNA, 19 nt, Artificial Sequence
  Description of Artificial Sequence: Synthetic oligonucleotide
auggagcgacaauguaggc

SEQ ID NO: 930093 - RNA, 19 nt, Artificial Sequence
  Description of Artificial Sequence: Synthetic oligonucleotide
caaagaguguucgaacuuc

SEQ ID NO: 930094 - RNA, 19 nt, Artificial Sequence
  Description of Artificial Sequence: Synthetic oligonucleotide
agaguguucgaacuucauu

SEQ ID NO: 930095 - RNA, 19 nt, Artificial Sequence
  Description of Artificial Sequence: Synthetic oligonucleotide
uucuggcuuaaacgaagac

SEQ ID NO: 930096 - RNA, 19 nt, Artificial Sequence
  Description of Artificial Sequence: Synthetic oligonucleotide
auaggugugagagucggau

SEQ ID NO: 930097 - RNA, 19 nt, Artificial Sequence
  Description of Artificial Sequence: Synthetic oligonucleotide
acgaagaccaaagaguguu

SEQ ID NO: 930098 - RNA, 19 nt, Artificial Sequence
  Description of Artificial Sequence: Synthetic oligonucleotide
gugauaggaagcuugggcu

SEQ ID NO: 930099 - RNA, 19 nt, Artificial Sequence
  Description of Artificial Sequence: Synthetic oligonucleotide
aguugggacaucacaaaca

SEQ ID NO: 930100 - RNA, 19 nt, Artificial Sequence
  Description of Artificial Sequence: Synthetic oligonucleotide
ugucacccgagcaugguuu

SEQ ID NO: 930101 - RNA, 19 nt, Artificial Sequence
  Description of Artificial Sequence: Synthetic oligonucleotide
agucggauagaggucguag

SEQ ID NO: 930102 - RNA, 19 nt, Artificial Sequence
  Description of Artificial Sequence: Synthetic oligonucleotide
aaggucacuccgccaauau

SEQ ID NO: 930103 - RNA, 19 nt, Artificial Sequence
  Description of Artificial Sequence: Synthetic oligonucleotide
auaccgcaagggcaucugg

SEQ ID NO: 930104 - RNA, 19 nt, Artificial Sequence
  Description of Artificial Sequence: Synthetic oligonucleotide
gagaugcgagguuucuggc

SEQ ID NO: 930105 - RNA, 19 nt, Artificial Sequence
  Description of Artificial Sequence: Synthetic oligonucleotide
caguugggacaucacaaac

SEQ ID NO: 930106 - RNA, 19 nt, Artificial Sequence
  Description of Artificial Sequence: Synthetic oligonucleotide
aggucacuccgccaauauc

SEQ ID NO: 930107 - RNA, 19 nt, Artificial Sequence
  Description of Artificial Sequence: Synthetic oligonucleotide
cauauugugcaguaugagu

SEQ ID NO: 930108 - RNA, 19 nt, Artificial Sequence
  Description of Artificial Sequence: Synthetic oligonucleotide
aggcgcgugcaguguaucc

SEQ ID NO: 930109 - RNA, 19 nt, Artificial Sequence
  Description of Artificial Sequence: Synthetic oligonucleotide
ucgcuucaucauauugugc

SEQ ID NO: 930110 - RNA, 19 nt, Artificial Sequence
  Description of Artificial Sequence: Synthetic oligonucleotide
ugccucagugaguaacuca

SEQ ID NO: 930111 - RNA, 19 nt, Artificial Sequence
  Description of Artificial Sequence: Synthetic oligonucleotide
aaguaaucugaaaucgcuu

SEQ ID NO: 930112 - RNA, 19 nt, Artificial Sequence
  Description of Artificial Sequence: Synthetic oligonucleotide
aagagccggagauccgugu

SEQ ID NO: 930113 - RNA, 19 nt, Artificial Sequence
  Description of Artificial Sequence: Synthetic oligonucleotide
ucccuaguucaucgcacgc

SEQ ID NO: 930114 - RNA, 19 nt, Artificial Sequence
  Description of Artificial Sequence: Synthetic oligonucleotide
acgacugucacccgagcau

SEQ ID NO: 930115 - RNA, 19 nt, Artificial Sequence
  Description of Artificial Sequence: Synthetic oligonucleotide
ugcguacgcagggaguccg

SEQ ID NO: 930116 - RNA, 19 nt, Artificial Sequence
  Description of Artificial Sequence: Synthetic oligonucleotide
cuccggcagaucuuuauuc

SEQ ID NO: 930117 - RNA, 19 nt, Artificial Sequence
  Description of Artificial Sequence: Synthetic oligonucleotide
acacgacugucacccgagc

SEQ ID NO: 930118 - RNA, 19 nt, Artificial Sequence
  Description of Artificial Sequence: Synthetic oligonucleotide
uccuaucggccccucuugc

SEQ ID NO: 930119 - RNA, 19 nt, Artificial Sequence
  Description of Artificial Sequence: Synthetic oligonucleotide
agaccaaagaguguucgaa

SEQ ID NO: 930120 - RNA, 19 nt, Artificial Sequence
  Description of Artificial Sequence: Synthetic oligonucleotide
gcuaaauagcgacuuguca

SEQ ID NO: 930121 - RNA, 19 nt, Artificial Sequence
  Description of Artificial Sequence: Synthetic oligonucleotide
acugaucaauggcauugga

SEQ ID NO: 930122 - RNA, 19 nt, Artificial Sequence
  Description of Artificial Sequence: Synthetic oligonucleotide
gcacgccucaaucacaacc

SEQ ID NO: 930123 - RNA, 19 nt, Artificial Sequence
  Description of Artificial Sequence: Synthetic oligonucleotide
caucgcacgccucaaucac

SEQ ID NO: 930124 - RNA, 19 nt, Artificial Sequence
  Description of Artificial Sequence: Synthetic oligonucleotide
aggacugguccaucugaag

SEQ ID NO: 930125 - RNA, 19 nt, Artificial Sequence
  Description of Artificial Sequence: Synthetic oligonucleotide
cacacgacugucacccgag

SEQ ID NO: 930126 - RNA, 19 nt, Artificial Sequence
  Description of Artificial Sequence: Synthetic oligonucleotide
gcugacgugcuugaaagag

SEQ ID NO: 930127 - RNA, 19 nt, Artificial Sequence
  Description of Artificial Sequence: Synthetic oligonucleotide
aggucguagaccaugcaga

SEQ ID NO: 930128 - RNA, 19 nt, Artificial Sequence
  Description of Artificial Sequence: Synthetic oligonucleotide
gagguuacaggcaacgacu

SEQ ID NO: 930129 - RNA, 19 nt, Artificial Sequence
  Description of Artificial Sequence: Synthetic oligonucleotide
ucccucaccaauggugucc

SEQ ID NO: 930130 - RNA, 19 nt, Artificial Sequence
  Description of Artificial Sequence: Synthetic oligonucleotide
agagccggagauccgugug

SEQ ID NO: 930131 - RNA, 19 nt, Artificial Sequence
  Description of Artificial Sequence: Synthetic oligonucleotide
gugugagagucggauagag

SEQ ID NO: 930132 - RNA, 19 nt, Artificial Sequence
  Description of Artificial Sequence: Synthetic oligonucleotide
ucgcacgccucaaucacaa

SEQ ID NO: 930133 - RNA, 19 nt, Artificial Sequence
  Description of Artificial Sequence: Synthetic oligonucleotide
aacgaagaccaaagagugu

SEQ ID NO: 930134 - RNA, 19 nt, Artificial Sequence
  Description of Artificial Sequence: Synthetic oligonucleotide
auccccuuacuguacugcu

SEQ ID NO: 930135 - RNA, 19 nt, Artificial Sequence
  Description of Artificial Sequence: Synthetic oligonucleotide
agugggaucccaacagcag

SEQ ID NO: 930136 - RNA, 19 nt, Artificial Sequence
  Description of Artificial Sequence: Synthetic oligonucleotide
ucgguccacguuaucucug

SEQ ID NO: 930137 - RNA, 19 nt, Artificial Sequence
  Description of Artificial Sequence: Synthetic oligonucleotide
uugccgugccuccggaagc

SEQ ID NO: 930138 - RNA, 19 nt, Artificial Sequence
  Description of Artificial Sequence: Synthetic oligonucleotide
ucuucacgaagggguagag

SEQ ID NO: 930139 - RNA, 19 nt, Artificial Sequence
  Description of Artificial Sequence: Synthetic oligonucleotide
auccuaucggccccucuug

SEQ ID NO: 930140 - RNA, 19 nt, Artificial Sequence
  Description of Artificial Sequence: Synthetic oligonucleotide
accgcaagggcaucuggga

SEQ ID NO: 930141 - RNA, 19 nt, Artificial Sequence
  Description of Artificial Sequence: Synthetic oligonucleotide
ugaguguacuugacagcaa

SEQ ID NO: 930142 - RNA, 19 nt, Artificial Sequence
  Description of Artificial Sequence: Synthetic oligonucleotide
cuucacgaagggguagagg

SEQ ID NO: 930143 - RNA, 19 nt, Artificial Sequence
  Description of Artificial Sequence: Synthetic oligonucleotide
agguugaaaucaagucugg

SEQ ID NO: 930144 - RNA, 19 nt, Artificial Sequence
  Description of Artificial Sequence: Synthetic oligonucleotide
aaccaagagaugcgagguu

SEQ ID NO: 930145 - RNA, 19 nt, Artificial Sequence
  Description of Artificial Sequence: Synthetic oligonucleotide
gacucuuauaagguugaaa

SEQ ID NO: 930146 - RNA, 19 nt, Artificial Sequence
  Description of Artificial Sequence: Synthetic oligonucleotide
uaucggccccucuugcucu

SEQ ID NO: 930147 - RNA, 19 nt, Artificial Sequence
  Description of Artificial Sequence: Synthetic oligonucleotide
uggcgccuggucuccaggg

SEQ ID NO: 930148 - RNA, 19 nt, Artificial Sequence
  Description of Artificial Sequence: Synthetic oligonucleotide
ggacugguccaucugaaga

SEQ ID NO: 930149 - RNA, 19 nt, Artificial Sequence
  Description of Artificial Sequence: Synthetic oligonucleotide
uguccgucacauacugauc

SEQ ID NO: 930150 - RNA, 19 nt, Artificial Sequence
  Description of Artificial Sequence: Synthetic oligonucleotide
agcacucguggaugguguc

SEQ ID NO: 930151 - RNA, 19 nt, Artificial Sequence
  Description of Artificial Sequence: Synthetic oligonucleotide
cuaucggccccucuugcuc

SEQ ID NO: 930152 - RNA, 19 nt, Artificial Sequence
  Description of Artificial Sequence: Synthetic oligonucleotide
ucgugccaagaucccagca

SEQ ID NO: 930153 - RNA, 19 nt, Artificial Sequence
  Description of Artificial Sequence: Synthetic oligonucleotide
aguuggacugaguguacuu

SEQ ID NO: 930154 - RNA, 19 nt, Artificial Sequence
  Description of Artificial Sequence: Synthetic oligonucleotide
gagugggaucccaacagca

SEQ ID NO: 930155 - RNA, 19 nt, Artificial Sequence
  Description of Artificial Sequence: Synthetic oligonucleotide
agaguuggacugaguguac

SEQ ID NO: 930156 - RNA, 19 nt, Artificial Sequence
  Description of Artificial Sequence: Synthetic oligonucleotide
auuucgugccaagauccca

SEQ ID NO: 930157 - RNA, 19 nt, Artificial Sequence
  Description of Artificial Sequence: Synthetic oligonucleotide
cuccgaugccaauaaccug

SEQ ID NO: 930158 - RNA, 19 nt, Artificial Sequence
  Description of Artificial Sequence: Synthetic oligonucleotide
uagagguuacaggcaacga

SEQ ID NO: 930159 - RNA, 19 nt, Artificial Sequence
  Description of Artificial Sequence: Synthetic oligonucleotide
ucgacccauuccuucuucu

SEQ ID NO: 930160 - RNA, 19 nt, Artificial Sequence
  Description of Artificial Sequence: Synthetic oligonucleotide
gucggauagaggucguaga

SEQ ID NO: 930161 - RNA, 19 nt, Artificial Sequence
  Description of Artificial Sequence: Synthetic oligonucleotide
gacugucacccgagcaugg

SEQ ID NO: 930162 - RNA, 19 nt, Artificial Sequence
  Description of Artificial Sequence: Synthetic oligonucleotide
ggagauuuccgcucucuuc

SEQ ID NO: 930163 - RNA, 19 nt, Artificial Sequence
  Description of Artificial Sequence: Synthetic oligonucleotide
accaagagaugcgagguuu

SEQ ID NO: 930164 - RNA, 19 nt, Artificial Sequence
  Description of Artificial Sequence: Synthetic oligonucleotide
aguguacuugacagcaaca

SEQ ID NO: 930165 - RNA, 19 nt, Artificial Sequence
  Description of Artificial Sequence: Synthetic oligonucleotide
aaggcgcgugcaguguauc

SEQ ID NO: 930166 - RNA, 19 nt, Artificial Sequence
  Description of Artificial Sequence: Synthetic oligonucleotide
gaaauccccuuacuguacu

SEQ ID NO: 930167 - RNA, 19 nt, Artificial Sequence
  Description of Artificial Sequence: Synthetic oligonucleotide
cugugauaggaagcuuggg

SEQ ID NO: 930168 - RNA, 19 nt, Artificial Sequence
  Description of Artificial Sequence: Synthetic oligonucleotide
acuccgccaauaucaauuu

SEQ ID NO: 930169 - RNA, 19 nt, Artificial Sequence
  Description of Artificial Sequence: Synthetic oligonucleotide
uccgguuuguaggacuggu

SEQ ID NO: 930170 - RNA, 19 nt, Artificial Sequence
  Description of Artificial Sequence: Synthetic oligonucleotide
acuuccucgaacagugccu

SEQ ID NO: 930171 - RNA, 19 nt, Artificial Sequence
  Description of Artificial Sequence: Synthetic oligonucleotide
cacgugcguacgcagggag

SEQ ID NO: 930172 - RNA, 19 nt, Artificial Sequence
  Description of Artificial Sequence: Synthetic oligonucleotide
uggagauuuccgcucucuu

SEQ ID NO: 930173 - RNA, 19 nt, Artificial Sequence
  Description of Artificial Sequence: Synthetic oligonucleotide
cugaaaucgcuucaucaua

SEQ ID NO: 930174 - RNA, 19 nt, Artificial Sequence
  Description of Artificial Sequence: Synthetic oligonucleotide
cacucguggauggugucgc

SEQ ID NO: 930175 - RNA, 19 nt, Artificial Sequence
  Description of Artificial Sequence: Synthetic oligonucleotide
ugagcgcuuuugccgugcc

SEQ ID NO: 930176 - RNA, 19 nt, Artificial Sequence
  Description of Artificial Sequence: Synthetic oligonucleotide
cucaaaccaagagaugcga

SEQ ID NO: 930177 - RNA, 19 nt, Artificial Sequence
  Description of Artificial Sequence: Synthetic oligonucleotide
cgguuuguaggacuggucc

SEQ ID NO: 930178 - RNA, 19 nt, Artificial Sequence
  Description of Artificial Sequence: Synthetic oligonucleotide
aggcaacgacucuuauaag

SEQ ID NO: 930179 - RNA, 19 nt, Artificial Sequence
  Description of Artificial Sequence: Synthetic oligonucleotide
ggucguagaccaugcagac

SEQ ID NO: 930180 - RNA, 19 nt, Artificial Sequence
  Description of Artificial Sequence: Synthetic oligonucleotide
guguccgucacauacugau

SEQ ID NO: 930181 - RNA, 19 nt, Artificial Sequence
  Description of Artificial Sequence: Synthetic oligonucleotide
uccgucacauacugaucaa

SEQ ID NO: 930182 - RNA, 19 nt, Artificial Sequence
  Description of Artificial Sequence: Synthetic oligonucleotide
gcguagcacacagaguugg

SEQ ID NO: 930183 - RNA, 19 nt, Artificial Sequence
  Description of Artificial Sequence: Synthetic oligonucleotide
ucuucaccccgguuuuaaa

SEQ ID NO: 930184 - RNA, 19 nt, Artificial Sequence
  Description of Artificial Sequence: Synthetic oligonucleotide
uggcuuaaacgaagaccaa

SEQ ID NO: 930185 - RNA, 19 nt, Artificial Sequence
  Description of Artificial Sequence: Synthetic oligonucleotide
gguuuguaggacuggucca

SEQ ID NO: 930186 - RNA, 19 nt, Artificial Sequence
  Description of Artificial Sequence: Synthetic oligonucleotide
accuugucugcagcggauc

SEQ ID NO: 930187 - RNA, 19 nt, Artificial Sequence
  Description of Artificial Sequence: Synthetic oligonucleotide
ccuuaucaccugcaaggcg

SEQ ID NO: 930188 - RNA, 19 nt, Artificial Sequence
  Description of Artificial Sequence: Synthetic oligonucleotide
ccggagauccgugugagcc

SEQ ID NO: 930189 - RNA, 19 nt, Artificial Sequence
  Description of Artificial Sequence: Synthetic oligonucleotide
ggagguguccuuacuauca

SEQ ID NO: 930190 - RNA, 19 nt, Artificial Sequence
  Description of Artificial Sequence: Synthetic oligonucleotide
aguaacucagggacuuccu

SEQ ID NO: 930191 - RNA, 19 nt, Artificial Sequence
  Description of Artificial Sequence: Synthetic oligonucleotide
cacggucuucacgaagggg

SEQ ID NO: 930192 - RNA, 19 nt, Artificial Sequence
  Description of Artificial Sequence: Synthetic oligonucleotide
agggacuuccucgaacagu

SEQ ID NO: 930193 - RNA, 19 nt, Artificial Sequence
  Description of Artificial Sequence: Synthetic oligonucleotide
gaagagccggagauccgug

SEQ ID NO: 930194 - RNA, 19 nt, Artificial Sequence
  Description of Artificial Sequence: Synthetic oligonucleotide
ccacguuaucucugaaagg

SEQ ID NO: 930195 - RNA, 19 nt, Artificial Sequence
  Description of Artificial Sequence: Synthetic oligonucleotide
ggcaacaaugccauccgac

SEQ ID NO: 930196 - RNA, 19 nt, Artificial Sequence
  Description of Artificial Sequence: Synthetic oligonucleotide
cccgguuuuaaacuucaug

SEQ ID NO: 930197 - RNA, 19 nt, Artificial Sequence
  Description of Artificial Sequence: Synthetic oligonucleotide
aagaguguucgaacuucau

SEQ ID NO: 930198 - RNA, 19 nt, Artificial Sequence
  Description of Artificial Sequence: Synthetic oligonucleotide
ggccauaggugugagaguc

SEQ ID NO: 930199 - RNA, 19 nt, Artificial Sequence
  Description of Artificial Sequence: Synthetic oligonucleotide
ugcagcggauccagaugga

SEQ ID NO: 930200 - RNA, 19 nt, Artificial Sequence
  Description of Artificial Sequence: Synthetic oligonucleotide
auccgacacuucucuggag

SEQ ID NO: 930201 - RNA, 19 nt, Artificial Sequence
  Description of Artificial Sequence: Synthetic oligonucleotide
cuaguucaucgcacgccuc

SEQ ID NO: 930202 - RNA, 19 nt, Artificial Sequence
  Description of Artificial Sequence: Synthetic oligonucleotide
gcuuuugccgugccuccgg

SEQ ID NO: 930203 - RNA, 19 nt, Artificial Sequence
  Description of Artificial Sequence: Synthetic oligonucleotide
gccacgugcguacgcaggg

SEQ ID NO: 930204 - RNA, 19 nt, Artificial Sequence
  Description of Artificial Sequence: Synthetic oligonucleotide
uucauccgguuuguaggac

SEQ ID NO: 930205 - RNA, 19 nt, Artificial Sequence
  Description of Artificial Sequence: Synthetic oligonucleotide
uggccauaggugugagagu

SEQ ID NO: 930206 - RNA, 19 nt, Artificial Sequence
  Description of Artificial Sequence: Synthetic oligonucleotide
ccaagaucccagcauggac

SEQ ID NO: 930207 - RNA, 19 nt, Artificial Sequence
  Description of Artificial Sequence: Synthetic oligonucleotide
cacgccucaaucacaaccu

SEQ ID NO: 930208 - RNA, 19 nt, Artificial Sequence
  Description of Artificial Sequence: Synthetic oligonucleotide
cucgaacagugccuuccac

SEQ ID NO: 930209 - RNA, 19 nt, Artificial Sequence
  Description of Artificial Sequence: Synthetic oligonucleotide
ggagauccgugugagccag

SEQ ID NO: 930210 - RNA, 19 nt, Artificial Sequence
  Description of Artificial Sequence: Synthetic oligonucleotide
uuuugccgugccuccggaa

SEQ ID NO: 930211 - RNA, 19 nt, Artificial Sequence
  Description of Artificial Sequence: Synthetic oligonucleotide
ugucgacccauuccuucuu

SEQ ID NO: 930212 - RNA, 19 nt, Artificial Sequence
  Description of Artificial Sequence: Synthetic oligonucleotide
gagccggagauccguguga

SEQ ID NO: 930213 - RNA, 19 nt, Artificial Sequence
  Description of Artificial Sequence: Synthetic oligonucleotide
aguggcgccuggucuccag

SEQ ID NO: 930214 - RNA, 19 nt, Artificial Sequence
  Description of Artificial Sequence: Synthetic oligonucleotide
acacaguaguuuccauuuu

SEQ ID NO: 930215 - RNA, 19 nt, Artificial Sequence
  Description of Artificial Sequence: Synthetic oligonucleotide
cauaccgcaagggcaucug

SEQ ID NO: 930216 - RNA, 19 nt, Artificial Sequence
  Description of Artificial Sequence: Synthetic oligonucleotide
uccccuuacuguacugcuu

SEQ ID NO: 930217 - RNA, 19 nt, Artificial Sequence
  Description of Artificial Sequence: Synthetic oligonucleotide
agccggagauccgugugag

SEQ ID NO: 930218 - RNA, 19 nt, Artificial Sequence
  Description of Artificial Sequence: Synthetic oligonucleotide
ggcgcgugcaguguauccg

SEQ ID NO: 930219 - RNA, 19 nt, Artificial Sequence
  Description of Artificial Sequence: Synthetic oligonucleotide
gcgucacacagguuuauga

SEQ ID NO: 930220 - RNA, 19 nt, Artificial Sequence
  Description of Artificial Sequence: Synthetic oligonucleotide
cucucaauuugucgaccca

SEQ ID NO: 930221 - RNA, 19 nt, Artificial Sequence
  Description of Artificial Sequence: Synthetic oligonucleotide
uggccaugucagcauuauc

SEQ ID NO: 930222 - RNA, 19 nt, Artificial Sequence
  Description of Artificial Sequence: Synthetic oligonucleotide
ggacugaguguacuugaca

SEQ ID NO: 930223 - RNA, 19 nt, Artificial Sequence
  Description of Artificial Sequence: Synthetic oligonucleotide
aaccuugucugcagcggau

SEQ ID NO: 930224 - RNA, 19 nt, Artificial Sequence
  Description of Artificial Sequence: Synthetic oligonucleotide
guacgcagggaguccggac

SEQ ID NO: 930225 - RNA, 19 nt, Artificial Sequence
  Description of Artificial Sequence: Synthetic oligonucleotide
cuccgccaauaucaauuug

SEQ ID NO: 930226 - RNA, 19 nt, Artificial Sequence
  Description of Artificial Sequence: Synthetic oligonucleotide
agcgucacacagguuuaug

SEQ ID NO: 930227 - RNA, 19 nt, Artificial Sequence
  Description of Artificial Sequence: Synthetic oligonucleotide
uaucagaguuuugcaucuc

SEQ ID NO: 930228 - RNA, 19 nt, Artificial Sequence
  Description of Artificial Sequence: Synthetic oligonucleotide
guucgaacuucauuuucau

SEQ ID NO: 930229 - RNA, 19 nt, Artificial Sequence
  Description of Artificial Sequence: Synthetic oligonucleotide
ugacagcaacaguggcuac

SEQ ID NO: 930230 - RNA, 19 nt, Artificial Sequence
  Description of Artificial Sequence: Synthetic oligonucleotide
caccccgguuuuaaacuuc

SEQ ID NO: 930231 - RNA, 19 nt, Artificial Sequence
  Description of Artificial Sequence: Synthetic oligonucleotide
guggcgccuggucuccagg

SEQ ID NO: 930232 - RNA, 19 nt, Artificial Sequence
  Description of Artificial Sequence: Synthetic oligonucleotide
ugaguaacucagggacuuc

SEQ ID NO: 930233 - RNA, 19 nt, Artificial Sequence
  Description of Artificial Sequence: Synthetic oligonucleotide
guuacaggcaacgacucuu

SEQ ID NO: 930234 - RNA, 19 nt, Artificial Sequence
  Description of Artificial Sequence: Synthetic oligonucleotide
ggguagagguuacaggcaa

SEQ ID NO: 930235 - RNA, 19 nt, Artificial Sequence
  Description of Artificial Sequence: Synthetic oligonucleotide
cacgacugucacccgagca

SEQ ID NO: 930236 - RNA, 19 nt, Artificial Sequence
  Description of Artificial Sequence: Synthetic oligonucleotide
gcucucaauaaggucacuc

SEQ ID NO: 930237 - RNA, 19 nt, Artificial Sequence
  Description of Artificial Sequence: Synthetic oligonucleotide
acauccuaucggccccucu

SEQ ID NO: 930238 - RNA, 19 nt, Artificial Sequence
  Description of Artificial Sequence: Synthetic oligonucleotide
auccgagacugcuguccug

SEQ ID NO: 930239 - RNA, 19 nt, Artificial Sequence
  Description of Artificial Sequence: Synthetic oligonucleotide
ggcauuggagauuuccgcu

SEQ ID NO: 930240 - RNA, 19 nt, Artificial Sequence
  Description of Artificial Sequence: Synthetic oligonucleotide
aagccaaguggcgccuggu

SEQ ID NO: 930241 - RNA, 19 nt, Artificial Sequence
  Description of Artificial Sequence: Synthetic oligonucleotide
ugcaaggcgcgugcagugu

SEQ ID NO: 930242 - RNA, 19 nt, Artificial Sequence
  Description of Artificial Sequence: Synthetic oligonucleotide
cgacuagacucaaaccaag

SEQ ID NO: 930243 - RNA, 19 nt, Artificial Sequence
  Description of Artificial Sequence: Synthetic oligonucleotide
ggcuuaaacgaagaccaaa

SEQ ID NO: 930244 - RNA, 19 nt, Artificial Sequence
  Description of Artificial Sequence: Synthetic oligonucleotide
gucuucacgaagggguaga

SEQ ID NO: 930245 - RNA, 19 nt, Artificial Sequence
  Description of Artificial Sequence: Synthetic oligonucleotide
acguuaucucugaaaggaa

SEQ ID NO: 930246 - RNA, 19 nt, Artificial Sequence
  Description of Artificial Sequence: Synthetic oligonucleotide
gucgacccauuccuucuuc

SEQ ID NO: 930247 - RNA, 19 nt, Artificial Sequence
  Description of Artificial Sequence: Synthetic oligonucleotide
cugagcgcuuuugccgugc

SEQ ID NO: 930248 - RNA, 19 nt, Artificial Sequence
  Description of Artificial Sequence: Synthetic oligonucleotide
accccgguuuuaaacuuca

SEQ ID NO: 930249 - RNA, 19 nt, Artificial Sequence
  Description of Artificial Sequence: Synthetic oligonucleotide
gggagguguccuuacuauc

SEQ ID NO: 930250 - RNA, 19 nt, Artificial Sequence
  Description of Artificial Sequence: Synthetic oligonucleotide
cauaggugugagagucgga

SEQ ID NO: 930251 - RNA, 19 nt, Artificial Sequence
  Description of Artificial Sequence: Synthetic oligonucleotide
gcaacgacucuuauaaggu

SEQ ID NO: 930252 - RNA, 19 nt, Artificial Sequence
  Description of Artificial Sequence: Synthetic oligonucleotide
ggucuucacgaagggguag

SEQ ID NO: 930253 - RNA, 19 nt, Artificial Sequence
  Description of Artificial Sequence: Synthetic oligonucleotide
gcacucguggauggugucg

SEQ ID NO: 930254 - RNA, 19 nt, Artificial Sequence
  Description of Artificial Sequence: Synthetic oligonucleotide
ggcaucggagcugacagaa

SEQ ID NO: 930255 - RNA, 19 nt, Artificial Sequence
  Description of Artificial Sequence: Synthetic oligonucleotide
agcgacaauguaggccaca

SEQ ID NO: 930256 - RNA, 19 nt, Artificial Sequence
  Description of Artificial Sequence: Synthetic oligonucleotide
gacuccggcagaucuuuau

SEQ ID NO: 930257 - RNA, 19 nt, Artificial Sequence
  Description of Artificial Sequence: Synthetic oligonucleotide
ccaagagaugcgagguuuc

SEQ ID NO: 930258 - RNA, 19 nt, Artificial Sequence
  Description of Artificial Sequence: Synthetic oligonucleotide
ggcagacuccggcagaucu

SEQ ID NO: 930259 - RNA, 19 nt, Artificial Sequence
  Description of Artificial Sequence: Synthetic oligonucleotide
acucguggauggugucgca

SEQ ID NO: 930260 - RNA, 19 nt, Artificial Sequence
  Description of Artificial Sequence: Synthetic oligonucleotide
aucgcacgccucaaucaca

SEQ ID NO: 930261 - RNA, 19 nt, Artificial Sequence
  Description of Artificial Sequence: Synthetic oligonucleotide
gcgacuugucaaugacacc

SEQ ID NO: 930262 - RNA, 19 nt, Artificial Sequence
  Description of Artificial Sequence: Synthetic oligonucleotide
ggcuacaaugaggucucug

SEQ ID NO: 930263 - RNA, 19 nt, Artificial Sequence
  Description of Artificial Sequence: Synthetic oligonucleotide
cuuuugccgugccuccgga

SEQ ID NO: 930264 - RNA, 19 nt, Artificial Sequence
  Description of Artificial Sequence: Synthetic oligonucleotide
ccacgaguuugccuuauca

SEQ ID NO: 930265 - RNA, 19 nt, Artificial Sequence
  Description of Artificial Sequence: Synthetic oligonucleotide
gaguuggacugaguguacu

SEQ ID NO: 930266 - RNA, 19 nt, Artificial Sequence
  Description of Artificial Sequence: Synthetic oligonucleotide
auuugucgacccauuccuu

SEQ ID NO: 930267 - RNA, 19 nt, Artificial Sequence
  Description of Artificial Sequence: Synthetic oligonucleotide
cuugggcuucaggguauac

SEQ ID NO: 930268 - RNA, 19 nt, Artificial Sequence
  Description of Artificial Sequence: Synthetic oligonucleotide
aucggccccucuugcucug

SEQ ID NO: 930269 - RNA, 19 nt, Artificial Sequence
  Description of Artificial Sequence: Synthetic oligonucleotide
ggucucggagaaggaagcc

SEQ ID NO: 930270 - RNA, 19 nt, Artificial Sequence
  Description of Artificial Sequence: Synthetic oligonucleotide
ccuccggaagcgacuagac

SEQ ID NO: 930271 - RNA, 19 nt, Artificial Sequence
  Description of Artificial Sequence: Synthetic oligonucleotide
cggauagaggucguagacc

SEQ ID NO: 930272 - RNA, 19 nt, Artificial Sequence
  Description of Artificial Sequence: Synthetic oligonucleotide
gugcuugaaagaggcugca

SEQ ID NO: 930273 - RNA, 19 nt, Artificial Sequence
  Description of Artificial Sequence: Synthetic oligonucleotide
ccuuacuaucagaguuuug

SEQ ID NO: 930274 - RNA, 19 nt, Artificial Sequence
  Description of Artificial Sequence: Synthetic oligonucleotide
gcgacuagacucaaaccaa

SEQ ID NO: 930275 - RNA, 19 nt, Artificial Sequence
  Description of Artificial Sequence: Synthetic oligonucleotide
ccacggucuucacgaaggg

SEQ ID NO: 930276 - RNA, 19 nt, Artificial Sequence
  Description of Artificial Sequence: Synthetic oligonucleotide
gugcguacgcagggagucc

SEQ ID NO: 930277 - RNA, 19 nt, Artificial Sequence
  Description of Artificial Sequence: Synthetic oligonucleotide
cucuucaccccgguuuuaa

SEQ ID NO: 930278 - RNA, 19 nt, Artificial Sequence
  Description of Artificial Sequence: Synthetic oligonucleotide
agagucggauagaggucgu

SEQ ID NO: 930279 - RNA, 19 nt, Artificial Sequence
  Description of Artificial Sequence: Synthetic oligonucleotide
gcgcuuuugccgugccucc

SEQ ID NO: 930280 - RNA, 19 nt, Artificial Sequence
  Description of Artificial Sequence: Synthetic oligonucleotide
ggcguagcacacagaguug

SEQ ID NO: 930281 - RNA, 19 nt, Artificial Sequence
  Description of Artificial Sequence: Synthetic oligonucleotide
guggauggugucgcagcca

SEQ ID NO: 930282 - RNA, 19 nt, Artificial Sequence
  Description of Artificial Sequence: Synthetic oligonucleotide
ccggaagcgacuagacuca

SEQ ID NO: 930283 - RNA, 19 nt, Artificial Sequence
  Description of Artificial Sequence: Synthetic oligonucleotide
cuuuuggcucgguccacgu

SEQ ID NO: 930284 - RNA, 19 nt, Artificial Sequence
  Description of Artificial Sequence: Synthetic oligonucleotide
cagugguggaagagccgga

SEQ ID NO: 930285 - RNA, 19 nt, Artificial Sequence
  Description of Artificial Sequence: Synthetic oligonucleotide
acgugcguacgcagggagu

SEQ ID NO: 930286 - RNA, 19 nt, Artificial Sequence
  Description of Artificial Sequence: Synthetic oligonucleotide
cauccuaucggccccucuu

SEQ ID NO: 930287 - RNA, 19 nt, Artificial Sequence
  Description of Artificial Sequence: Synthetic oligonucleotide
gagcgacaauguaggccac

SEQ ID NO: 930288 - RNA, 19 nt, Artificial Sequence
  Description of Artificial Sequence: Synthetic oligonucleotide
gcaucccugagcgcuuuug

SEQ ID NO: 930289 - RNA, 19 nt, Artificial Sequence
  Description of Artificial Sequence: Synthetic oligonucleotide
caagagaugcgagguuucu

SEQ ID NO: 930290 - RNA, 19 nt, Artificial Sequence
  Description of Artificial Sequence: Synthetic oligonucleotide
ggugugagagucggauaga

SEQ ID NO: 930291 - RNA, 19 nt, Artificial Sequence
  Description of Artificial Sequence: Synthetic oligonucleotide
gguuacaggcaacgacucu

SEQ ID NO: 930292 - RNA, 19 nt, Artificial Sequence
  Description of Artificial Sequence: Synthetic oligonucleotide
ccgguuuguaggacugguc

SEQ ID NO: 930293 - RNA, 19 nt, Artificial Sequence
  Description of Artificial Sequence: Synthetic oligonucleotide
ccagauggagcgacaaugu

SEQ ID NO: 930294 - RNA, 19 nt, Artificial Sequence
  Description of Artificial Sequence: Synthetic oligonucleotide
ccacuaggccaguuuuguc

SEQ ID NO: 930295 - RNA, 19 nt, Artificial Sequence
  Description of Artificial Sequence: Synthetic oligonucleotide
gacauccuaucggccccuc

SEQ ID NO: 930296 - RNA, 19 nt, Artificial Sequence
  Description of Artificial Sequence: Synthetic oligonucleotide
gcgcgugcaguguauccga

SEQ ID NO: 930297 - RNA, 19 nt, Artificial Sequence
  Description of Artificial Sequence: Synthetic oligonucleotide
gauagaggucguagaccau

SEQ ID NO: 930298 - RNA, 19 nt, Artificial Sequence
  Description of Artificial Sequence: Synthetic oligonucleotide
ccgaugccaauaaccuguc

SEQ ID NO: 930299 - RNA, 19 nt, Artificial Sequence
  Description of Artificial Sequence: Synthetic oligonucleotide
gauccgugugagccaggau

SEQ ID NO: 930300 - RNA, 19 nt, Artificial Sequence
  Description of Artificial Sequence: Synthetic oligonucleotide
gaacugugauaggaagcuu

SEQ ID NO: 930301 - RNA, 19 nt, Artificial Sequence
  Description of Artificial Sequence: Synthetic oligonucleotide
cagaaacgucucucaauuu

SEQ ID NO: 930302 - RNA, 19 nt, Artificial Sequence
  Description of Artificial Sequence: Synthetic oligonucleotide
cgugcguacgcagggaguc

SEQ ID NO: 930303 - RNA, 19 nt, Artificial Sequence
  Description of Artificial Sequence: Synthetic oligonucleotide
gagucggauagaggucgua

SEQ ID NO: 930304 - RNA, 19 nt, Artificial Sequence
  Description of Artificial Sequence: Synthetic oligonucleotide
gcgugcaguguauccgaga

SEQ ID NO: 930305 - RNA, 19 nt, Artificial Sequence
  Description of Artificial Sequence: Synthetic oligonucleotide
aggccacggucuucacgaa

SEQ ID NO: 930306 - RNA, 19 nt, Artificial Sequence
  Description of Artificial Sequence: Synthetic oligonucleotide
gacgugcuugaaagaggcu

SEQ ID NO: 930307 - RNA, 19 nt, Artificial Sequence
  Description of Artificial Sequence: Synthetic oligonucleotide
agcaucccugagcgcuuuu

SEQ ID NO: 930308 - RNA, 19 nt, Artificial Sequence
  Description of Artificial Sequence: Synthetic oligonucleotide
ccgccaauaucaauuugcu

SEQ ID NO: 930309 - RNA, 19 nt, Artificial Sequence
  Description of Artificial Sequence: Synthetic oligonucleotide
gagcgcuuuugccgugccu

SEQ ID NO: 930310 - RNA, 19 nt, Artificial Sequence
  Description of Artificial Sequence: Synthetic oligonucleotide
caguuuugucagacacacu

SEQ ID NO: 930311 - RNA, 19 nt, Artificial Sequence
  Description of Artificial Sequence: Synthetic oligonucleotide
gccggagauccgugugagc

SEQ ID NO: 930312 - RNA, 19 nt, Artificial Sequence
  Description of Artificial Sequence: Synthetic oligonucleotide
cuuccucgaacagugccuu

SEQ ID NO: 930313 - RNA, 19 nt, Artificial Sequence
  Description of Artificial Sequence: Synthetic oligonucleotide
gguguccgucacauacuga

SEQ ID NO: 930314 - RNA, 19 nt, Artificial Sequence
  Description of Artificial Sequence: Synthetic oligonucleotide
cccuaacauuucaggaaaa

SEQ ID NO: 930315 - RNA, 19 nt, Artificial Sequence
  Description of Artificial Sequence: Synthetic oligonucleotide
ccgugccuccggaagcgac

SEQ ID NO: 930316 - RNA, 19 nt, Artificial Sequence
  Description of Artificial Sequence: Synthetic oligonucleotide
caaggcgcgugcaguguau

SEQ ID NO: 930317 - RNA, 19 nt, Artificial Sequence
  Description of Artificial Sequence: Synthetic oligonucleotide
cggauccagauggagcgac

SEQ ID NO: 930318 - RNA, 19 nt, Artificial Sequence
  Description of Artificial Sequence: Synthetic oligonucleotide
gcguacgcagggaguccgg

SEQ ID NO: 930319 - RNA, 19 nt, Artificial Sequence
  Description of Artificial Sequence: Synthetic oligonucleotide
ccugagcgcuuuugccgug

SEQ ID NO: 930320 - RNA, 19 nt, Artificial Sequence
  Description of Artificial Sequence: Synthetic oligonucleotide
cagacuccggcagaucuuu

SEQ ID NO: 930321 - RNA, 19 nt, Artificial Sequence
  Description of Artificial Sequence: Synthetic oligonucleotide
ggaagcgacuagacucaaa

SEQ ID NO: 930322 - RNA, 19 nt, Artificial Sequence
  Description of Artificial Sequence: Synthetic oligonucleotide
cgcgugcaguguauccgag

SEQ ID NO: 930323 - RNA, 19 nt, Artificial Sequence
  Description of Artificial Sequence: Synthetic oligonucleotide
ccgcaagggcaucugggaa

SEQ ID NO: 930324 - RNA, 19 nt, Artificial Sequence
  Description of Artificial Sequence: Synthetic oligonucleotide
cccugagcgcuuuugccgu

SEQ ID NO: 930325 - RNA, 19 nt, Artificial Sequence
  Description of Artificial Sequence: Synthetic oligonucleotide
cggagauccgugugagcca

SEQ ID NO: 930326 - RNA, 19 nt, Artificial Sequence
  Description of Artificial Sequence: Synthetic oligonucleotide
ccuaucggccccucuugcu

SEQ ID NO: 930327 - RNA, 19 nt, Artificial Sequence
  Description of Artificial Sequence: Synthetic oligonucleotide
caccugcaaggcgcgugca

SEQ ID NO: 930328 - RNA, 19 nt, Artificial Sequence
  Description of Artificial Sequence: Synthetic oligonucleotide
gcggauccagauggagcga

SEQ ID NO: 930329 - RNA, 19 nt, Artificial Sequence
  Description of Artificial Sequence: Synthetic oligonucleotide
ccgacacuucucuggagau

SEQ ID NO: 930330 - RNA, 19 nt, Artificial Sequence
  Description of Artificial Sequence: Synthetic oligonucleotide
ccggcagaucuuuauucuu

SEQ ID NO: 930331 - RNA, 19 nt, Artificial Sequence
  Description of Artificial Sequence: Synthetic oligonucleotide
cgcacgccucaaucacaac

SEQ ID NO: 930332 - RNA, 19 nt, Artificial Sequence
  Description of Artificial Sequence: Synthetic oligonucleotide
cccauaccgcaagggcauc

SEQ ID NO: 930333 - RNA, 19 nt, Artificial Sequence
  Description of Artificial Sequence: Synthetic oligonucleotide
cguacgcagggaguccgga

SEQ ID NO: 930334 - RNA, 19 nt, Artificial Sequence
  Description of Artificial Sequence: Synthetic oligonucleotide
ccauaccgcaagggcaucu

SEQ ID NO: 930335 - RNA, 19 nt, Artificial Sequence
  Description of Artificial Sequence: Synthetic oligonucleotide
ccgucacauacugaucaau

SEQ ID NO: 930336 - RNA, 19 nt, Artificial Sequence
  Description of Artificial Sequence: Synthetic oligonucleotide
cgacacuucucuggagaua

SEQ ID NO: 930337 - RNA, 19 nt, Artificial Sequence
  Description of Artificial Sequence: Synthetic oligonucleotide
gcgagguuucuggcaaauu

SEQ ID NO: 930338 - RNA, 19 nt, Artificial Sequence
  Description of Artificial Sequence: Synthetic oligonucleotide
cgacucuuauaagguugaa

SEQ ID NO: 930339 - RNA, 19 nt, Artificial Sequence
  Description of Artificial Sequence: Synthetic oligonucleotide
ccccgguuuuaaacuucau

SEQ ID NO: 930340 - RNA, 19 nt, Artificial Sequence
  Description of Artificial Sequence: Synthetic oligonucleotide
cggaagcgacuagacucaa

SEQ ID NO: 930341 - RNA, 19 nt, Artificial Sequence
  Description of Artificial Sequence: Synthetic oligonucleotide
ugagagaccaauuugaagg

SEQ ID NO: 930342 - RNA, 19 nt, Artificial Sequence
  Description of Artificial Sequence: Synthetic oligonucleotide
uucaucauagaagugaugg

SEQ ID NO: 930343 - RNA, 19 nt, Artificial Sequence
  Description of Artificial Sequence: Synthetic oligonucleotide
uuugaaggggcaaagucgg

SEQ ID NO: 930344 - RNA, 19 nt, Artificial Sequence
  Description of Artificial Sequence: Synthetic oligonucleotide
uuaacucccacccagaaau

SEQ ID NO: 930345 - RNA, 19 nt, Artificial Sequence
  Description of Artificial Sequence: Synthetic oligonucleotide
uugguuucaagccuugagg

SEQ ID NO: 930346 - RNA, 19 nt, Artificial Sequence
  Description of Artificial Sequence: Synthetic oligonucleotide
aguagcaucagucugugug

SEQ ID NO: 930347 - RNA, 19 nt, Artificial Sequence
  Description of Artificial Sequence: Synthetic oligonucleotide
uguuguacucaucuguucc

SEQ ID NO: 930348 - RNA, 19 nt, Artificial Sequence
  Description of Artificial Sequence: Synthetic oligonucleotide
agggugagcuccuuuaucc

SEQ ID NO: 930349 - RNA, 19 nt, Artificial Sequence
  Description of Artificial Sequence: Synthetic oligonucleotide
ugggcagcaccucagagcg

SEQ ID NO: 930350 - RNA, 19 nt, Artificial Sequence
  Description of Artificial Sequence: Synthetic oligonucleotide
ucaaacuuauuccuggccu

SEQ ID NO: 930351 - RNA, 19 nt, Artificial Sequence
  Description of Artificial Sequence: Synthetic oligonucleotide
cauccauuaacuuggcugg

SEQ ID NO: 930352 - RNA, 19 nt, Artificial Sequence
  Description of Artificial Sequence: Synthetic oligonucleotide
uaucaagucauccagucau

SEQ ID NO: 930353 - RNA, 19 nt, Artificial Sequence
  Description of Artificial Sequence: Synthetic oligonucleotide
acgugaaaggcuucgauuc

SEQ ID NO: 930354 - RNA, 19 nt, Artificial Sequence
  Description of Artificial Sequence: Synthetic oligonucleotide
cuucgauucaucauagaag

SEQ ID NO: 930355 - RNA, 19 nt, Artificial Sequence
  Description of Artificial Sequence: Synthetic oligonucleotide
aaagucgguagauguacuc

SEQ ID NO: 930356 - RNA, 19 nt, Artificial Sequence
  Description of Artificial Sequence: Synthetic oligonucleotide
aucgaugacagccuguguc

SEQ ID NO: 930357 - RNA, 19 nt, Artificial Sequence
  Description of Artificial Sequence: Synthetic oligonucleotide
uucugagagaccaauuuga

SEQ ID NO: 930358 - RNA, 19 nt, Artificial Sequence
  Description of Artificial Sequence: Synthetic oligonucleotide
ucagccaucgaaaccaccc

SEQ ID NO: 930359 - RNA, 19 nt, Artificial Sequence
  Description of Artificial Sequence: Synthetic oligonucleotide
ucucuuaaccucuacugcc

SEQ ID NO: 930360 - RNA, 19 nt, Artificial Sequence
  Description of Artificial Sequence: Synthetic oligonucleotide
auuugaaggggcaaagucg

SEQ ID NO: 930361 - RNA, 19 nt, Artificial Sequence
  Description of Artificial Sequence: Synthetic oligonucleotide
aaacuuauuccuggccucc

SEQ ID NO: 930362 - RNA, 19 nt, Artificial Sequence
  Description of Artificial Sequence: Synthetic oligonucleotide
uaugcgaacuccccguggg

SEQ ID NO: 930363 - RNA, 19 nt, Artificial Sequence
  Description of Artificial Sequence: Synthetic oligonucleotide
uuccuuacgacccuucucu

SEQ ID NO: 930364 - RNA, 19 nt, Artificial Sequence
  Description of Artificial Sequence: Synthetic oligonucleotide
guaaucaucguucaccuga

SEQ ID NO: 930365 - RNA, 19 nt, Artificial Sequence
  Description of Artificial Sequence: Synthetic oligonucleotide
cuuuauccaucucuggagg

SEQ ID NO: 930366 - RNA, 19 nt, Artificial Sequence
  Description of Artificial Sequence: Synthetic oligonucleotide
cauuaacuuggcuggaggg

SEQ ID NO: 930367 - RNA, 19 nt, Artificial Sequence
  Description of Artificial Sequence: Synthetic oligonucleotide
ugagacggaaccccucucg

SEQ ID NO: 930368 - RNA, 19 nt, Artificial Sequence
  Description of Artificial Sequence: Synthetic oligonucleotide
uuguggguaagucacauuu

SEQ ID NO: 930369 - RNA, 19 nt, Artificial Sequence
  Description of Artificial Sequence: Synthetic oligonucleotide
aaggcuucgauucaucaua

SEQ ID NO: 930370 - RNA, 19 nt, Artificial Sequence
  Description of Artificial Sequence: Synthetic oligonucleotide
aagucgguagauguacucg

SEQ ID NO: 930371 - RNA, 19 nt, Artificial Sequence
  Description of Artificial Sequence: Synthetic oligonucleotide
ugguuucaagccuugaggu

SEQ ID NO: 930372 - RNA, 19 nt, Artificial Sequence
  Description of Artificial Sequence: Synthetic oligonucleotide
ucaaaugggaugguggcug

SEQ ID NO: 930373 - RNA, 19 nt, Artificial Sequence
  Description of Artificial Sequence: Synthetic oligonucleotide
cagggauuaacucccaccc

SEQ ID NO: 930374 - RNA, 19 nt, Artificial Sequence
  Description of Artificial Sequence: Synthetic oligonucleotide
cauaucaagucauccaguc

SEQ ID NO: 930375 - RNA, 19 nt, Artificial Sequence
  Description of Artificial Sequence: Synthetic oligonucleotide
gaagaaguguguugugcag

SEQ ID NO: 930376 - RNA, 19 nt, Artificial Sequence
  Description of Artificial Sequence: Synthetic oligonucleotide
uuugccacacaagaggcgc

SEQ ID NO: 930377 - RNA, 19 nt, Artificial Sequence
  Description of Artificial Sequence: Synthetic oligonucleotide
caugugccaagguuggugg

SEQ ID NO: 930378 - RNA, 19 nt, Artificial Sequence
  Description of Artificial Sequence: Synthetic oligonucleotide
ugucuuccaguccucaaug

SEQ ID NO: 930379 - RNA, 19 nt, Artificial Sequence
  Description of Artificial Sequence: Synthetic oligonucleotide
gaacuugucgugaucgggg

SEQ ID NO: 930380 - RNA, 19 nt, Artificial Sequence
  Description of Artificial Sequence: Synthetic oligonucleotide
cauaucagugggcagcacc

SEQ ID NO: 930381 - RNA, 19 nt, Artificial Sequence
  Description of Artificial Sequence: Synthetic oligonucleotide
uuuauccaucucuggaggc

SEQ ID NO: 930382 - RNA, 19 nt, Artificial Sequence
  Description of Artificial Sequence: Synthetic oligonucleotide
uuuauuguucugaggucac

SEQ ID NO: 930383 - RNA, 19 nt, Artificial Sequence
  Description of Artificial Sequence: Synthetic oligonucleotide
uuuccggugcuuaucuuug

SEQ ID NO: 930384 - RNA, 19 nt, Artificial Sequence
  Description of Artificial Sequence: Synthetic oligonucleotide
gagguaugcgaacuccccg

SEQ ID NO: 930385 - RNA, 19 nt, Artificial Sequence
  Description of Artificial Sequence: Synthetic oligonucleotide
cucguuaguggugagcucg

SEQ ID NO: 930386 - RNA, 19 nt, Artificial Sequence
  Description of Artificial Sequence: Synthetic oligonucleotide
auuggcuguagagguaugc

SEQ ID NO: 930387 - RNA, 19 nt, Artificial Sequence
  Description of Artificial Sequence: Synthetic oligonucleotide
aagaggcgcaccguggugg

SEQ ID NO: 930388 - RNA, 19 nt, Artificial Sequence
  Description of Artificial Sequence: Synthetic oligonucleotide
aacauggauggcuuggcua

SEQ ID NO: 930389 - RNA, 19 nt, Artificial Sequence
  Description of Artificial Sequence: Synthetic oligonucleotide
auagaagugaugguugcug

SEQ ID NO: 930390 - RNA, 19 nt, Artificial Sequence
  Description of Artificial Sequence: Synthetic oligonucleotide
uagagguaugcgaacuccc

SEQ ID NO: 930391 - RNA, 19 nt, Artificial Sequence
  Description of Artificial Sequence: Synthetic oligonucleotide
cucuuaaccucuacugccc

SEQ ID NO: 930392 - RNA, 19 nt, Artificial Sequence
  Description of Artificial Sequence: Synthetic oligonucleotide
caucgaaaccaccccaucc

SEQ ID NO: 930393 - RNA, 19 nt, Artificial Sequence
  Description of Artificial Sequence: Synthetic oligonucleotide
aaccaccccauccuuguug

SEQ ID NO: 930394 - RNA, 19 nt, Artificial Sequence
  Description of Artificial Sequence: Synthetic oligonucleotide
aucgaaaccaccccauccu

SEQ ID NO: 930395 - RNA, 19 nt, Artificial Sequence
  Description of Artificial Sequence: Synthetic oligonucleotide
gagcucguagcauuggcug

SEQ ID NO: 930396 - RNA, 19 nt, Artificial Sequence
  Description of Artificial Sequence: Synthetic oligonucleotide
ucugagagaccaauuugaa

SEQ ID NO: 930397 - RNA, 19 nt, Artificial Sequence
  Description of Artificial Sequence: Synthetic oligonucleotide
gagaccaauuugaaggggc

SEQ ID NO: 930398 - RNA, 19 nt, Artificial Sequence
  Description of Artificial Sequence: Synthetic oligonucleotide
gucucuuaaccucuacugc

SEQ ID NO: 930399 - RNA, 19 nt, Artificial Sequence
  Description of Artificial Sequence: Synthetic oligonucleotide
uuggcuguagagguaugcg

SEQ ID NO: 930400 - RNA, 19 nt, Artificial Sequence
  Description of Artificial Sequence: Synthetic oligonucleotide
gggcuuagagcccacaggg

SEQ ID NO: 930401 - RNA, 19 nt, Artificial Sequence
  Description of Artificial Sequence: Synthetic oligonucleotide
caggcuacagcucaucaug

SEQ ID NO: 930402 - RNA, 19 nt, Artificial Sequence
  Description of Artificial Sequence: Synthetic oligonucleotide
gauggcuuggcuagccugg

SEQ ID NO: 930403 - RNA, 19 nt, Artificial Sequence
  Description of Artificial Sequence: Synthetic oligonucleotide
cuuacgacccuucucucug

SEQ ID NO: 930404 - RNA, 19 nt, Artificial Sequence
  Description of Artificial Sequence: Synthetic oligonucleotide
uccaaacacgugaaaggcu

SEQ ID NO: 930405 - RNA, 19 nt, Artificial Sequence
  Description of Artificial Sequence: Synthetic oligonucleotide
ugaguagauugguuucaag

SEQ ID NO: 930406 - RNA, 19 nt, Artificial Sequence
  Description of Artificial Sequence: Synthetic oligonucleotide
cacccagaaauccaaggag

SEQ ID NO: 930407 - RNA, 19 nt, Artificial Sequence
  Description of Artificial Sequence: Synthetic oligonucleotide
cugccauugggacaagcgg

SEQ ID NO: 930408 - RNA, 19 nt, Artificial Sequence
  Description of Artificial Sequence: Synthetic oligonucleotide
ugcucguacuucauggcac

SEQ ID NO: 930409 - RNA, 19 nt, Artificial Sequence
  Description of Artificial Sequence: Synthetic oligonucleotide
gucacauaucaagucaucc

SEQ ID NO: 930410 - RNA, 19 nt, Artificial Sequence
  Description of Artificial Sequence: Synthetic oligonucleotide
uuauccaucucuggaggcc

SEQ ID NO: 930411 - RNA, 19 nt, Artificial Sequence
  Description of Artificial Sequence: Synthetic oligonucleotide
agagguaugcgaacucccc

SEQ ID NO: 930412 - RNA, 19 nt, Artificial Sequence
  Description of Artificial Sequence: Synthetic oligonucleotide
acuugucgugaucggggcc

SEQ ID NO: 930413 - RNA, 19 nt, Artificial Sequence
  Description of Artificial Sequence: Synthetic oligonucleotide
acccagaaauccaaggagg

SEQ ID NO: 930414 - RNA, 19 nt, Artificial Sequence
  Description of Artificial Sequence: Synthetic oligonucleotide
agaucucuuguuccaaacu

SEQ ID NO: 930415 - RNA, 19 nt, Artificial Sequence
  Description of Artificial Sequence: Synthetic oligonucleotide
ugucccuuauggcagccca

SEQ ID NO: 930416 - RNA, 19 nt, Artificial Sequence
  Description of Artificial Sequence: Synthetic oligonucleotide
ugagcucguagcauuggcu

SEQ ID NO: 930417 - RNA, 19 nt, Artificial Sequence
  Description of Artificial Sequence: Synthetic oligonucleotide
cucgguaguacuagucacc

SEQ ID NO: 930418 - RNA, 19 nt, Artificial Sequence
  Description of Artificial Sequence: Synthetic oligonucleotide
ucgaugacagccugugucu

SEQ ID NO: 930419 - RNA, 19 nt, Artificial Sequence
  Description of Artificial Sequence: Synthetic oligonucleotide
cuugcagucgcaguaauca

SEQ ID NO: 930420 - RNA, 19 nt, Artificial Sequence
  Description of Artificial Sequence: Synthetic oligonucleotide
aaucaucguucaccugauc

SEQ ID NO: 930421 - RNA, 19 nt, Artificial Sequence
  Description of Artificial Sequence: Synthetic oligonucleotide
ucguucaccugaucaaaug

SEQ ID NO: 930422 - RNA, 19 nt, Artificial Sequence
  Description of Artificial Sequence: Synthetic oligonucleotide
gggauuaacucccacccag

SEQ ID NO: 930423 - RNA, 19 nt, Artificial Sequence
  Description of Artificial Sequence: Synthetic oligonucleotide
cuuugccacacaagaggcg

SEQ ID NO: 930424 - RNA, 19 nt, Artificial Sequence
  Description of Artificial Sequence: Synthetic oligonucleotide
ucuuaaccucuacugccca

SEQ ID NO: 930425 - RNA, 19 nt, Artificial Sequence
  Description of Artificial Sequence: Synthetic oligonucleotide
uuucaagccuugagguuca

SEQ ID NO: 930426 - RNA, 19 nt, Artificial Sequence
  Description of Artificial Sequence: Synthetic oligonucleotide
ucggcuuccucaaacuuau

SEQ ID NO: 930427 - RNA, 19 nt, Artificial Sequence
  Description of Artificial Sequence: Synthetic oligonucleotide
ugggacaagcggcuguacc

SEQ ID NO: 930428 - RNA, 19 nt, Artificial Sequence
  Description of Artificial Sequence: Synthetic oligonucleotide
caaacuuauuccuggccuc

SEQ ID NO: 930429 - RNA, 19 nt, Artificial Sequence
  Description of Artificial Sequence: Synthetic oligonucleotide
guccaaacacgugaaaggc

SEQ ID NO: 930430 - RNA, 19 nt, Artificial Sequence
  Description of Artificial Sequence: Synthetic oligonucleotide
agucgguagauguacucgu

SEQ ID NO: 930431 - RNA, 19 nt, Artificial Sequence
  Description of Artificial Sequence: Synthetic oligonucleotide
ucuugagauagcacugcau

SEQ ID NO: 930432 - RNA, 19 nt, Artificial Sequence
  Description of Artificial Sequence: Synthetic oligonucleotide
ucuccucaucguagggugg

SEQ ID NO: 930433 - RNA, 19 nt, Artificial Sequence
  Description of Artificial Sequence: Synthetic oligonucleotide
ucgauucaucauagaagug

SEQ ID NO: 930434 - RNA, 19 nt, Artificial Sequence
  Description of Artificial Sequence: Synthetic oligonucleotide
cuuagagcccacaggguuc

SEQ ID NO: 930435 - RNA, 19 nt, Artificial Sequence
  Description of Artificial Sequence: Synthetic oligonucleotide
guaguacuagucaccacag

SEQ ID NO: 930436 - RNA, 19 nt, Artificial Sequence
  Description of Artificial Sequence: Synthetic oligonucleotide
uuauuccuggccuccugug

SEQ ID NO: 930437 - RNA, 19 nt, Artificial Sequence
  Description of Artificial Sequence: Synthetic oligonucleotide
uauuguucugaggucacau

SEQ ID NO: 930438 - RNA, 19 nt, Artificial Sequence
  Description of Artificial Sequence: Synthetic oligonucleotide
uccucgacggggcuggcug

SEQ ID NO: 930439 - RNA, 19 nt, Artificial Sequence
  Description of Artificial Sequence: Synthetic oligonucleotide
uggcuguagagguaugcga

SEQ ID NO: 930440 - RNA, 19 nt, Artificial Sequence
  Description of Artificial Sequence: Synthetic oligonucleotide
gucgcaguaaucaucguuc

SEQ ID NO: 930441 - RNA, 19 nt, Artificial Sequence
  Description of Artificial Sequence: Synthetic oligonucleotide
cacaagaggcgcaccgugg

SEQ ID NO: 930442 - RNA, 19 nt, Artificial Sequence
  Description of Artificial Sequence: Synthetic oligonucleotide
ucagagcgguacuuguccc

SEQ ID NO: 930443 - RNA, 19 nt, Artificial Sequence
  Description of Artificial Sequence: Synthetic oligonucleotide
ucgguaguacuagucacca

SEQ ID NO: 930444 - RNA, 19 nt, Artificial Sequence
  Description of Artificial Sequence: Synthetic oligonucleotide
gguacucacagcgacuagg

SEQ ID NO: 930445 - RNA, 19 nt, Artificial Sequence
  Description of Artificial Sequence: Synthetic oligonucleotide
gcagucgcaguaaucaucg

SEQ ID NO: 930446 - RNA, 19 nt, Artificial Sequence
  Description of Artificial Sequence: Synthetic oligonucleotide
uagcucagccaucgaaacc

SEQ ID NO: 930447 - RNA, 19 nt, Artificial Sequence
  Description of Artificial Sequence: Synthetic oligonucleotide
uccauuaacuuggcuggag

SEQ ID NO: 930448 - RNA, 19 nt, Artificial Sequence
  Description of Artificial Sequence: Synthetic oligonucleotide
uaaucaucguucaccugau

SEQ ID NO: 930449 - RNA, 19 nt, Artificial Sequence
  Description of Artificial Sequence: Synthetic oligonucleotide
gguaggcaggccuuggucc

SEQ ID NO: 930450 - RNA, 19 nt, Artificial Sequence
  Description of Artificial Sequence: Synthetic oligonucleotide
acacaagaggcgcaccgug

SEQ ID NO: 930451 - RNA, 19 nt, Artificial Sequence
  Description of Artificial Sequence: Synthetic oligonucleotide
ugugccguccaaacacgug

SEQ ID NO: 930452 - RNA, 19 nt, Artificial Sequence
  Description of Artificial Sequence: Synthetic oligonucleotide
acaagcggcuguaccaggc

SEQ ID NO: 930453 - RNA, 19 nt, Artificial Sequence
  Description of Artificial Sequence: Synthetic oligonucleotide
aggucucuuaaccucuacu

SEQ ID NO: 930454 - RNA, 19 nt, Artificial Sequence
  Description of Artificial Sequence: Synthetic oligonucleotide
uugcugagggaaacgcccc

SEQ ID NO: 930455 - RNA, 19 nt, Artificial Sequence
  Description of Artificial Sequence: Synthetic oligonucleotide
agcccagacacggucauag

SEQ ID NO: 930456 - RNA, 19 nt, Artificial Sequence
  Description of Artificial Sequence: Synthetic oligonucleotide
uuagagcccacaggguucc

SEQ ID NO: 930457 - RNA, 19 nt, Artificial Sequence
  Description of Artificial Sequence: Synthetic oligonucleotide
ccauguuuggguuucugag

SEQ ID NO: 930458 - RNA, 19 nt, Artificial Sequence
  Description of Artificial Sequence: Synthetic oligonucleotide
gauuaacucccacccagaa

SEQ ID NO: 930459 - RNA, 19 nt, Artificial Sequence
  Description of Artificial Sequence: Synthetic oligonucleotide
ugcuaccuggaggauagcc

SEQ ID NO: 930460 - RNA, 19 nt, Artificial Sequence
  Description of Artificial Sequence: Synthetic oligonucleotide
agguaugcgaacuccccgu

SEQ ID NO: 930461 - RNA, 19 nt, Artificial Sequence
  Description of Artificial Sequence: Synthetic oligonucleotide
aucccguccgggccgagac

SEQ ID NO: 930462 - RNA, 19 nt, Artificial Sequence
  Description of Artificial Sequence: Synthetic oligonucleotide
gaccggaagaaguguguug

SEQ ID NO: 930463 - RNA, 19 nt, Artificial Sequence
  Description of Artificial Sequence: Synthetic oligonucleotide
accgaagucaaaggagauc

SEQ ID NO: 930464 - RNA, 19 nt, Artificial Sequence
  Description of Artificial Sequence: Synthetic oligonucleotide
guaugcgaacuccccgugg

SEQ ID NO: 930465 - RNA, 19 nt, Artificial Sequence
  Description of Artificial Sequence: Synthetic oligonucleotide
cuuaaccucuacugcccag

SEQ ID NO: 930466 - RNA, 19 nt, Artificial Sequence
  Description of Artificial Sequence: Synthetic oligonucleotide
ggcgucaucagcuccauga

SEQ ID NO: 930467 - RNA, 19 nt, Artificial Sequence
  Description of Artificial Sequence: Synthetic oligonucleotide
gacaagcggcuguaccagg

SEQ ID NO: 930468 - RNA, 19 nt, Artificial Sequence
  Description of Artificial Sequence: Synthetic oligonucleotide
guggggaccgaagucaaag

SEQ ID NO: 930469 - RNA, 19 nt, Artificial Sequence
  Description of Artificial Sequence: Synthetic oligonucleotide
ucgcaguaaucaucguuca

SEQ ID NO: 930470 - RNA, 19 nt, Artificial Sequence
  Description of Artificial Sequence: Synthetic oligonucleotide
ucaucguaggguggcaucu

SEQ ID NO: 930471 - RNA, 19 nt, Artificial Sequence
  Description of Artificial Sequence: Synthetic oligonucleotide
uguacucguuaguggugag

SEQ ID NO: 930472 - RNA, 19 nt, Artificial Sequence
  Description of Artificial Sequence: Synthetic oligonucleotide
guacucacagcgacuaggc

SEQ ID NO: 930473 - RNA, 19 nt, Artificial Sequence
  Description of Artificial Sequence: Synthetic oligonucleotide
uuccggugcuuaucuuugg

SEQ ID NO: 930474 - RNA, 19 nt, Artificial Sequence
  Description of Artificial Sequence: Synthetic oligonucleotide
ucaagccuugagguucagg

SEQ ID NO: 930475 - RNA, 19 nt, Artificial Sequence
  Description of Artificial Sequence: Synthetic oligonucleotide
accgugguggagcgguugg

SEQ ID NO: 930476 - RNA, 19 nt, Artificial Sequence
  Description of Artificial Sequence: Synthetic oligonucleotide
ucuugagacggaaccccuc

SEQ ID NO: 930477 - RNA, 19 nt, Artificial Sequence
  Description of Artificial Sequence: Synthetic oligonucleotide
ugaugguugcugagggaaa

SEQ ID NO: 930478 - RNA, 19 nt, Artificial Sequence
  Description of Artificial Sequence: Synthetic oligonucleotide
gcagggauuaacucccacc

SEQ ID NO: 930479 - RNA, 19 nt, Artificial Sequence
  Description of Artificial Sequence: Synthetic oligonucleotide
gugccguccaaacacguga

SEQ ID NO: 930480 - RNA, 19 nt, Artificial Sequence
  Description of Artificial Sequence: Synthetic oligonucleotide
acucguuaguggugagcuc

SEQ ID NO: 930481 - RNA, 19 nt, Artificial Sequence
  Description of Artificial Sequence: Synthetic oligonucleotide
guccacagacugcaggaug

SEQ ID NO: 930482 - RNA, 19 nt, Artificial Sequence
  Description of Artificial Sequence: Synthetic oligonucleotide
cuguuguacucaucuguuc

SEQ ID NO: 930483 - RNA, 19 nt, Artificial Sequence
  Description of Artificial Sequence: Synthetic oligonucleotide
ccauuaacuuggcuggagg

SEQ ID NO: 930484 - RNA, 19 nt, Artificial Sequence
  Description of Artificial Sequence: Synthetic oligonucleotide
uuauuguucugaggucaca

SEQ ID NO: 930485 - RNA, 19 nt, Artificial Sequence
  Description of Artificial Sequence: Synthetic oligonucleotide
uacagcucaucauggucuc

SEQ ID NO: 930486 - RNA, 19 nt, Artificial Sequence
  Description of Artificial Sequence: Synthetic oligonucleotide
agacacggucauagaaggc

SEQ ID NO: 930487 - RNA, 19 nt, Artificial Sequence
  Description of Artificial Sequence: Synthetic oligonucleotide
agccaucgaaaccacccca

SEQ ID NO: 930488 - RNA, 19 nt, Artificial Sequence
  Description of Artificial Sequence: Synthetic oligonucleotide
gugagcucguagcauuggc

SEQ ID NO: 930489 - RNA, 19 nt, Artificial Sequence
  Description of Artificial Sequence: Synthetic oligonucleotide
auuguucugaggucacaua

SEQ ID NO: 930490 - RNA, 19 nt, Artificial Sequence
  Description of Artificial Sequence: Synthetic oligonucleotide
uggguaagucacauuuauu

SEQ ID NO: 930491 - RNA, 19 nt, Artificial Sequence
  Description of Artificial Sequence: Synthetic oligonucleotide
ucccgccggaccuuggcag

SEQ ID NO: 930492 - RNA, 19 nt, Artificial Sequence
  Description of Artificial Sequence: Synthetic oligonucleotide
uguccgcagcaucucuacc

SEQ ID NO: 930493 - RNA, 19 nt, Artificial Sequence
  Description of Artificial Sequence: Synthetic oligonucleotide
agcgacuaggcucgguagu

SEQ ID NO: 930494 - RNA, 19 nt, Artificial Sequence
  Description of Artificial Sequence: Synthetic oligonucleotide
ugcuggcgucaucagcucc

SEQ ID NO: 930495 - RNA, 19 nt, Artificial Sequence
  Description of Artificial Sequence: Synthetic oligonucleotide
cguucaccugaucaaaugg

SEQ ID NO: 930496 - RNA, 19 nt, Artificial Sequence
  Description of Artificial Sequence: Synthetic oligonucleotide
ucguacuucauggcacuga

SEQ ID NO: 930497 - RNA, 19 nt, Artificial Sequence
  Description of Artificial Sequence: Synthetic oligonucleotide
uucugaggucacauaucaa

SEQ ID NO: 930498 - RNA, 19 nt, Artificial Sequence
  Description of Artificial Sequence: Synthetic oligonucleotide
cuguagggacucucuuucc

SEQ ID NO: 930499 - RNA, 19 nt, Artificial Sequence
  Description of Artificial Sequence: Synthetic oligonucleotide
acagcgacuaggcucggua

SEQ ID NO: 930500 - RNA, 19 nt, Artificial Sequence
  Description of Artificial Sequence: Synthetic oligonucleotide
acauaucaagucauccagu

SEQ ID NO: 930501 - RNA, 19 nt, Artificial Sequence
  Description of Artificial Sequence: Synthetic oligonucleotide
uuacgacccuucucucugc

SEQ ID NO: 930502 - RNA, 19 nt, Artificial Sequence
  Description of Artificial Sequence: Synthetic oligonucleotide
ggaggggauguacaaggcc

SEQ ID NO: 930503 - RNA, 19 nt, Artificial Sequence
  Description of Artificial Sequence: Synthetic oligonucleotide
agggauuaacucccaccca

SEQ ID NO: 930504 - RNA, 19 nt, Artificial Sequence
  Description of Artificial Sequence: Synthetic oligonucleotide
augcgaacuccccgugggg

SEQ ID NO: 930505 - RNA, 19 nt, Artificial Sequence
  Description of Artificial Sequence: Synthetic oligonucleotide
aggcuacagcucaucaugg

SEQ ID NO: 930506 - RNA, 19 nt, Artificial Sequence
  Description of Artificial Sequence: Synthetic oligonucleotide
ugcuguagggacucucuuu

SEQ ID NO: 930507 - RNA, 19 nt, Artificial Sequence
  Description of Artificial Sequence: Synthetic oligonucleotide
aggauagccagggaucccu

SEQ ID NO: 930508 - RNA, 19 nt, Artificial Sequence
  Description of Artificial Sequence: Synthetic oligonucleotide
agcucguagcauuggcugu

SEQ ID NO: 930509 - RNA, 19 nt, Artificial Sequence
  Description of Artificial Sequence: Synthetic oligonucleotide
uagggacucucuuuccuua

SEQ ID NO: 930510 - RNA, 19 nt, Artificial Sequence
  Description of Artificial Sequence: Synthetic oligonucleotide
gagggugagcuccuuuauc

SEQ ID NO: 930511 - RNA, 19 nt, Artificial Sequence
  Description of Artificial Sequence: Synthetic oligonucleotide
cagccaucgaaaccacccc

SEQ ID NO: 930512 - RNA, 19 nt, Artificial Sequence
  Description of Artificial Sequence: Synthetic oligonucleotide
uccuccuccuccuccuccc

SEQ ID NO: 930513 - RNA, 19 nt, Artificial Sequence
  Description of Artificial Sequence: Synthetic oligonucleotide
uacgacccuucucucugca

SEQ ID NO: 930514 - RNA, 19 nt, Artificial Sequence
  Description of Artificial Sequence: Synthetic oligonucleotide
uucaaggaccgcucggcuu

SEQ ID NO: 930515 - RNA, 19 nt, Artificial Sequence
  Description of Artificial Sequence: Synthetic oligonucleotide
acacggucauagaaggcag

SEQ ID NO: 930516 - RNA, 19 nt, Artificial Sequence
  Description of Artificial Sequence: Synthetic oligonucleotide
ugcgaacuccccgugggga

SEQ ID NO: 930517 - RNA, 19 nt, Artificial Sequence
  Description of Artificial Sequence: Synthetic oligonucleotide
gggaccgaagucaaaggag

SEQ ID NO: 930518 - RNA, 19 nt, Artificial Sequence
  Description of Artificial Sequence: Synthetic oligonucleotide
ucggggccagcccacgagc

SEQ ID NO: 930519 - RNA, 19 nt, Artificial Sequence
  Description of Artificial Sequence: Synthetic oligonucleotide
cucaucguaggguggcauc

SEQ ID NO: 930520 - RNA, 19 nt, Artificial Sequence
  Description of Artificial Sequence: Synthetic oligonucleotide
uccgggccgagaccggaag

SEQ ID NO: 930521 - RNA, 19 nt, Artificial Sequence
  Description of Artificial Sequence: Synthetic oligonucleotide
gguaagucacauuuauugu

SEQ ID NO: 930522 - RNA, 19 nt, Artificial Sequence
  Description of Artificial Sequence: Synthetic oligonucleotide
ucgugaucggggccagccc

SEQ ID NO: 930523 - RNA, 19 nt, Artificial Sequence
  Description of Artificial Sequence: Synthetic oligonucleotide
ucguuaguggugagcucgu

SEQ ID NO: 930524 - RNA, 19 nt, Artificial Sequence
  Description of Artificial Sequence: Synthetic oligonucleotide
ucccuuauggcagcccaga

SEQ ID NO: 930525 - RNA, 19 nt, Artificial Sequence
  Description of Artificial Sequence: Synthetic oligonucleotide
ucgaaaccaccccauccuu

SEQ ID NO: 930526 - RNA, 19 nt, Artificial Sequence
  Description of Artificial Sequence: Synthetic oligonucleotide
agaccaauuugaaggggca

SEQ ID NO: 930527 - RNA, 19 nt, Artificial Sequence
  Description of Artificial Sequence: Synthetic oligonucleotide
caugagguacucacagcga

SEQ ID NO: 930528 - RNA, 19 nt, Artificial Sequence
  Description of Artificial Sequence: Synthetic oligonucleotide
uuuguggguaagucacauu

SEQ ID NO: 930529 - RNA, 19 nt, Artificial Sequence
  Description of Artificial Sequence: Synthetic oligonucleotide
guagcaucagucugugugu

SEQ ID NO: 930530 - RNA, 19 nt, Artificial Sequence
  Description of Artificial Sequence: Synthetic oligonucleotide
cagcgacuaggcucgguag

SEQ ID NO: 930531 - RNA, 19 nt, Artificial Sequence
  Description of Artificial Sequence: Synthetic oligonucleotide
ggaggauagccagggaucc

SEQ ID NO: 930532 - RNA, 19 nt, Artificial Sequence
  Description of Artificial Sequence: Synthetic oligonucleotide
uugaaggggcaaagucggu

SEQ ID NO: 930533 - RNA, 19 nt, Artificial Sequence
  Description of Artificial Sequence: Synthetic oligonucleotide
uugagacggaaccccucuc

SEQ ID NO: 930534 - RNA, 19 nt, Artificial Sequence
  Description of Artificial Sequence: Synthetic oligonucleotide
gaaguguguugugcagcag

SEQ ID NO: 930535 - RNA, 19 nt, Artificial Sequence
  Description of Artificial Sequence: Synthetic oligonucleotide
cuugucgugaucggggcca

SEQ ID NO: 930536 - RNA, 19 nt, Artificial Sequence
  Description of Artificial Sequence: Synthetic oligonucleotide
gacggaaccccucucgggu

SEQ ID NO: 930537 - RNA, 19 nt, Artificial Sequence
  Description of Artificial Sequence: Synthetic oligonucleotide
uugcagucgcaguaaucau

SEQ ID NO: 930538 - RNA, 19 nt, Artificial Sequence
  Description of Artificial Sequence: Synthetic oligonucleotide
gaacuccccguggggaccg

SEQ ID NO: 930539 - RNA, 19 nt, Artificial Sequence
  Description of Artificial Sequence: Synthetic oligonucleotide
gggacaagcggcuguacca

SEQ ID NO: 930540 - RNA, 19 nt, Artificial Sequence
  Description of Artificial Sequence: Synthetic oligonucleotide
agccccaugugccaagguu

SEQ ID NO: 930541 - RNA, 19 nt, Artificial Sequence
  Description of Artificial Sequence: Synthetic oligonucleotide
guacucguuaguggugagc

SEQ ID NO: 930542 - RNA, 19 nt, Artificial Sequence
  Description of Artificial Sequence: Synthetic oligonucleotide
uguucccgccggaccuugg

SEQ ID NO: 930543 - RNA, 19 nt, Artificial Sequence
  Description of Artificial Sequence: Synthetic oligonucleotide
uucccgccggaccuuggca

SEQ ID NO: 930544 - RNA, 19 nt, Artificial Sequence
  Description of Artificial Sequence: Synthetic oligonucleotide
gcuguagcggggcuggggc

SEQ ID NO: 930545 - RNA, 19 nt, Artificial Sequence
  Description of Artificial Sequence: Synthetic oligonucleotide
uaggcucgguaguacuagu

SEQ ID NO: 930546 - RNA, 19 nt, Artificial Sequence
  Description of Artificial Sequence: Synthetic oligonucleotide
agguacucacagcgacuag

SEQ ID NO: 930547 - RNA, 19 nt, Artificial Sequence
  Description of Artificial Sequence: Synthetic oligonucleotide
uccuccuccuccuccuccu

SEQ ID NO: 930548 - RNA, 19 nt, Artificial Sequence
  Description of Artificial Sequence: Synthetic oligonucleotide
gcucgguaguacuagucac

SEQ ID NO: 930549 - RNA, 19 nt, Artificial Sequence
  Description of Artificial Sequence: Synthetic oligonucleotide
guggguaagucacauuuau

SEQ ID NO: 930550 - RNA, 19 nt, Artificial Sequence
  Description of Artificial Sequence: Synthetic oligonucleotide
aggcucgguaguacuaguc

SEQ ID NO: 930551 - RNA, 19 nt, Artificial Sequence
  Description of Artificial Sequence: Synthetic oligonucleotide
acggaaccccucucgggug

SEQ ID NO: 930552 - RNA, 19 nt, Artificial Sequence
  Description of Artificial Sequence: Synthetic oligonucleotide
cauccuugcagucgcagua

SEQ ID NO: 930553 - RNA, 19 nt, Artificial Sequence
  Description of Artificial Sequence: Synthetic oligonucleotide
ggcucgguaguacuaguca

SEQ ID NO: 930554 - RNA, 19 nt, Artificial Sequence
  Description of Artificial Sequence: Synthetic oligonucleotide
acgacccuucucucugcag

SEQ ID NO: 930555 - RNA, 19 nt, Artificial Sequence
  Description of Artificial Sequence: Synthetic oligonucleotide
ggaccgaagucaaaggaga

SEQ ID NO: 930556 - RNA, 19 nt, Artificial Sequence
  Description of Artificial Sequence: Synthetic oligonucleotide
gauugguuucaagccuuga

SEQ ID NO: 930557 - RNA, 19 nt, Artificial Sequence
  Description of Artificial Sequence: Synthetic oligonucleotide
uccuuacgacccuucucuc

SEQ ID NO: 930558 - RNA, 19 nt, Artificial Sequence
  Description of Artificial Sequence: Synthetic oligonucleotide
cagcaucccguccgggccg

SEQ ID NO: 930559 - RNA, 19 nt, Artificial Sequence
  Description of Artificial Sequence: Synthetic oligonucleotide
augaguagauugguuucaa

SEQ ID NO: 930560 - RNA, 19 nt, Artificial Sequence
  Description of Artificial Sequence: Synthetic oligonucleotide
gccuuguacccaguguugg

SEQ ID NO: 930561 - RNA, 19 nt, Artificial Sequence
  Description of Artificial Sequence: Synthetic oligonucleotide
agcuuacucugcuucucuu

SEQ ID NO: 930562 - RNA, 19 nt, Artificial Sequence
  Description of Artificial Sequence: Synthetic oligonucleotide
ggggaccgaagucaaagga

SEQ ID NO: 930563 - RNA, 19 nt, Artificial Sequence
  Description of Artificial Sequence: Synthetic oligonucleotide
gguaugcgaacuccccgug

SEQ ID NO: 930564 - RNA, 19 nt, Artificial Sequence
  Description of Artificial Sequence: Synthetic oligonucleotide
cuuggcuagccugggccag

SEQ ID NO: 930565 - RNA, 19 nt, Artificial Sequence
  Description of Artificial Sequence: Synthetic oligonucleotide
agcgguuggggcccugcca

SEQ ID NO: 930566 - RNA, 19 nt, Artificial Sequence
  Description of Artificial Sequence: Synthetic oligonucleotide
gcuuacucugcuucucuuc

SEQ ID NO: 930567 - RNA, 19 nt, Artificial Sequence
  Description of Artificial Sequence: Synthetic oligonucleotide
cucuacugcccagcagagg

SEQ ID NO: 930568 - RNA, 19 nt, Artificial Sequence
  Description of Artificial Sequence: Synthetic oligonucleotide
gcuguagagguaugcgaac

SEQ ID NO: 930569 - RNA, 19 nt, Artificial Sequence
  Description of Artificial Sequence: Synthetic oligonucleotide
ccguccaaacacgugaaag

SEQ ID NO: 930570 - RNA, 19 nt, Artificial Sequence
  Description of Artificial Sequence: Synthetic oligonucleotide
gcagcaucccguccgggcc

SEQ ID NO: 930571 - RNA, 19 nt, Artificial Sequence
  Description of Artificial Sequence: Synthetic oligonucleotide
cuccucccaggcauaucag

SEQ ID NO: 930572 - RNA, 19 nt, Artificial Sequence
  Description of Artificial Sequence: Synthetic oligonucleotide
cuccuccuccuccuccucc

SEQ ID NO: 930573 - RNA, 19 nt, Artificial Sequence
  Description of Artificial Sequence: Synthetic oligonucleotide
cugcauccccaucuguguc

SEQ ID NO: 930574 - RNA, 19 nt, Artificial Sequence
  Description of Artificial Sequence: Synthetic oligonucleotide
ggacaagcggcuguaccag

SEQ ID NO: 930575 - RNA, 19 nt, Artificial Sequence
  Description of Artificial Sequence: Synthetic oligonucleotide
gacuaggcucgguaguacu

SEQ ID NO: 930576 - RNA, 19 nt, Artificial Sequence
  Description of Artificial Sequence: Synthetic oligonucleotide
gaggauagccagggauccc

SEQ ID NO: 930577 - RNA, 19 nt, Artificial Sequence
  Description of Artificial Sequence: Synthetic oligonucleotide
cauuggcuguagagguaug

SEQ ID NO: 930578 - RNA, 19 nt, Artificial Sequence
  Description of Artificial Sequence: Synthetic oligonucleotide
cgguagauguacucguuag

SEQ ID NO: 930579 - RNA, 19 nt, Artificial Sequence
  Description of Artificial Sequence: Synthetic oligonucleotide
gguugcugagggaaacgcc

SEQ ID NO: 930580 - RNA, 19 nt, Artificial Sequence
  Description of Artificial Sequence: Synthetic oligonucleotide
gcgucaucagcuccaugag

SEQ ID NO: 930581 - RNA, 19 nt, Artificial Sequence
  Description of Artificial Sequence: Synthetic oligonucleotide
cuugagacggaaccccucu

SEQ ID NO: 930582 - RNA, 19 nt, Artificial Sequence
  Description of Artificial Sequence: Synthetic oligonucleotide
gcgguuggggcccugccag

SEQ ID NO: 930583 - RNA, 19 nt, Artificial Sequence
  Description of Artificial Sequence: Synthetic oligonucleotide
cgacccuucucucugcagg

SEQ ID NO: 930584 - RNA, 19 nt, Artificial Sequence
  Description of Artificial Sequence: Synthetic oligonucleotide
acaccccauccauuaacuu

SEQ ID NO: 930585 - RNA, 19 nt, Artificial Sequence
  Description of Artificial Sequence: Synthetic oligonucleotide
agaggcgcaccguggugga

SEQ ID NO: 930586 - RNA, 19 nt, Artificial Sequence
  Description of Artificial Sequence: Synthetic oligonucleotide
acgagccccaugugccaag

SEQ ID NO: 930587 - RNA, 19 nt, Artificial Sequence
  Description of Artificial Sequence: Synthetic oligonucleotide
auugggacaagcggcugua

SEQ ID NO: 930588 - RNA, 19 nt, Artificial Sequence
  Description of Artificial Sequence: Synthetic oligonucleotide
aucguucaccugaucaaau

SEQ ID NO: 930589 - RNA, 19 nt, Artificial Sequence
  Description of Artificial Sequence: Synthetic oligonucleotide
caccccauccuuguuguca

SEQ ID NO: 930590 - RNA, 19 nt, Artificial Sequence
  Description of Artificial Sequence: Synthetic oligonucleotide
gagcgguuggggcccugcc

SEQ ID NO: 930591 - RNA, 19 nt, Artificial Sequence
  Description of Artificial Sequence: Synthetic oligonucleotide
aggggcaaagucgguagau

SEQ ID NO: 930592 - RNA, 19 nt, Artificial Sequence
  Description of Artificial Sequence: Synthetic oligonucleotide
aguuuccggugcuuaucuu

SEQ ID NO: 930593 - RNA, 19 nt, Artificial Sequence
  Description of Artificial Sequence: Synthetic oligonucleotide
gccccaugugccaagguug

SEQ ID NO: 930594 - RNA, 19 nt, Artificial Sequence
  Description of Artificial Sequence: Synthetic oligonucleotide
gcugugccguccaaacacg

SEQ ID NO: 930595 - RNA, 19 nt, Artificial Sequence
  Description of Artificial Sequence: Synthetic oligonucleotide
agagcccacaggguuccug

SEQ ID NO: 930596 - RNA, 19 nt, Artificial Sequence
  Description of Artificial Sequence: Synthetic oligonucleotide
gccgcuguuguacucaucu

SEQ ID NO: 930597 - RNA, 19 nt, Artificial Sequence
  Description of Artificial Sequence: Synthetic oligonucleotide
cuuguuccaaacuccugau

SEQ ID NO: 930598 - RNA, 19 nt, Artificial Sequence
  Description of Artificial Sequence: Synthetic oligonucleotide
agaccggaagaaguguguu

SEQ ID NO: 930599 - RNA, 19 nt, Artificial Sequence
  Description of Artificial Sequence: Synthetic oligonucleotide
cuccccguggggaccgaag

SEQ ID NO: 930600 - RNA, 19 nt, Artificial Sequence
  Description of Artificial Sequence: Synthetic oligonucleotide
gggcaaagucgguagaugu

SEQ ID NO: 930601 - RNA, 19 nt, Artificial Sequence
  Description of Artificial Sequence: Synthetic oligonucleotide
uugucgugaucggggccag

SEQ ID NO: 930602 - RNA, 19 nt, Artificial Sequence
  Description of Artificial Sequence: Synthetic oligonucleotide
auccauuaacuuggcugga

SEQ ID NO: 930603 - RNA, 19 nt, Artificial Sequence
  Description of Artificial Sequence: Synthetic oligonucleotide
guacaaggccuuguaccca

SEQ ID NO: 930604 - RNA, 19 nt, Artificial Sequence
  Description of Artificial Sequence: Synthetic oligonucleotide
ggcuguagagguaugcgaa

SEQ ID NO: 930605 - RNA, 19 nt, Artificial Sequence
  Description of Artificial Sequence: Synthetic oligonucleotide
gguagauguacucguuagu

SEQ ID NO: 930606 - RNA, 19 nt, Artificial Sequence
  Description of Artificial Sequence: Synthetic oligonucleotide
ggcgcaccgugguggagcg

SEQ ID NO: 930607 - RNA, 19 nt, Artificial Sequence
  Description of Artificial Sequence: Synthetic oligonucleotide
uccucaucguaggguggca

SEQ ID NO: 930608 - RNA, 19 nt, Artificial Sequence
  Description of Artificial Sequence: Synthetic oligonucleotide
accccucucgggugaccuc

SEQ ID NO: 930609 - RNA, 19 nt, Artificial Sequence
  Description of Artificial Sequence: Synthetic oligonucleotide
caaagucgguagauguacu

SEQ ID NO: 930610 - RNA, 19 nt, Artificial Sequence
  Description of Artificial Sequence: Synthetic oligonucleotide
ccaugugccaagguuggug

SEQ ID NO: 930611 - RNA, 19 nt, Artificial Sequence
  Description of Artificial Sequence: Synthetic oligonucleotide
agagcgguacuugucccuu

SEQ ID NO: 930612 - RNA, 19 nt, Artificial Sequence
  Description of Artificial Sequence: Synthetic oligonucleotide
ucccguccgggccgagacc

SEQ ID NO: 930613 - RNA, 19 nt, Artificial Sequence
  Description of Artificial Sequence: Synthetic oligonucleotide
cagucacacaccccaucca

SEQ ID NO: 930614 - RNA, 19 nt, Artificial Sequence
  Description of Artificial Sequence: Synthetic oligonucleotide
caguuuccggugcuuaucu

SEQ ID NO: 930615 - RNA, 19 nt, Artificial Sequence
  Description of Artificial Sequence: Synthetic oligonucleotide
uucaagccuugagguucag

SEQ ID NO: 930616 - RNA, 19 nt, Artificial Sequence
  Description of Artificial Sequence: Synthetic oligonucleotide
cacgugaaaggcuucgauu

SEQ ID NO: 930617 - RNA, 19 nt, Artificial Sequence
  Description of Artificial Sequence: Synthetic oligonucleotide
gagaccggaagaagugugu

SEQ ID NO: 930618 - RNA, 19 nt, Artificial Sequence
  Description of Artificial Sequence: Synthetic oligonucleotide
gccgagaccggaagaagug

SEQ ID NO: 930619 - RNA, 19 nt, Artificial Sequence
  Description of Artificial Sequence: Synthetic oligonucleotide
ccuuauggcagcccagaca

SEQ ID NO: 930620 - RNA, 19 nt, Artificial Sequence
  Description of Artificial Sequence: Synthetic oligonucleotide
gaccgcucggcuuccucaa

SEQ ID NO: 930621 - RNA, 19 nt, Artificial Sequence
  Description of Artificial Sequence: Synthetic oligonucleotide
gaucggggccagcccacga

SEQ ID NO: 930622 - RNA, 19 nt, Artificial Sequence
  Description of Artificial Sequence: Synthetic oligonucleotide
uugggacaagcggcuguac

SEQ ID NO: 930623 - RNA, 19 nt, Artificial Sequence
  Description of Artificial Sequence: Synthetic oligonucleotide
ggugagucuguagcucagc

SEQ ID NO: 930624 - RNA, 19 nt, Artificial Sequence
  Description of Artificial Sequence: Synthetic oligonucleotide
ccgaagucaaaggagaucu

SEQ ID NO: 930625 - RNA, 19 nt, Artificial Sequence
  Description of Artificial Sequence: Synthetic oligonucleotide
agcagccggugcccugcuc

SEQ ID NO: 930626 - RNA, 19 nt, Artificial Sequence
  Description of Artificial Sequence: Synthetic oligonucleotide
gggugagcuccuuuaucca

SEQ ID NO: 930627 - RNA, 19 nt, Artificial Sequence
  Description of Artificial Sequence: Synthetic oligonucleotide
cacccaccagcuggggagg

SEQ ID NO: 930628 - RNA, 19 nt, Artificial Sequence
  Description of Artificial Sequence: Synthetic oligonucleotide
cgagaccggaagaagugug

SEQ ID NO: 930629 - RNA, 19 nt, Artificial Sequence
  Description of Artificial Sequence: Synthetic oligonucleotide
ggauuaacucccacccaga

SEQ ID NO: 930630 - RNA, 19 nt, Artificial Sequence
  Description of Artificial Sequence: Synthetic oligonucleotide
cauugggacaagcggcugu

SEQ ID NO: 930631 - RNA, 19 nt, Artificial Sequence
  Description of Artificial Sequence: Synthetic oligonucleotide
cauagaagugaugguugcu

SEQ ID NO: 930632 - RNA, 19 nt, Artificial Sequence
  Description of Artificial Sequence: Synthetic oligonucleotide
cgaaaccaccccauccuug

SEQ ID NO: 930633 - RNA, 19 nt, Artificial Sequence
  Description of Artificial Sequence: Synthetic oligonucleotide
cugggccuccucuugagau

SEQ ID NO: 930634 - RNA, 19 nt, Artificial Sequence
  Description of Artificial Sequence: Synthetic oligonucleotide
cucgacggggcuggcuggc

SEQ ID NO: 930635 - RNA, 19 nt, Artificial Sequence
  Description of Artificial Sequence: Synthetic oligonucleotide
gcuuggcuagccugggcca

SEQ ID NO: 930636 - RNA, 19 nt, Artificial Sequence
  Description of Artificial Sequence: Synthetic oligonucleotide
gaaccccucucgggugacc

SEQ ID NO: 930637 - RNA, 19 nt, Artificial Sequence
  Description of Artificial Sequence: Synthetic oligonucleotide
gcgaacuccccguggggac

SEQ ID NO: 930638 - RNA, 19 nt, Artificial Sequence
  Description of Artificial Sequence: Synthetic oligonucleotide
caaaugggaugguggcugu

SEQ ID NO: 930639 - RNA, 19 nt, Artificial Sequence
  Description of Artificial Sequence: Synthetic oligonucleotide
agcagggcuuagagcccac

SEQ ID NO: 930640 - RNA, 19 nt, Artificial Sequence
  Description of Artificial Sequence: Synthetic oligonucleotide
aggccgcuggggccucagg

SEQ ID NO: 930641 - RNA, 19 nt, Artificial Sequence
  Description of Artificial Sequence: Synthetic oligonucleotide
gggugagucuguagcucag

SEQ ID NO: 930642 - RNA, 19 nt, Artificial Sequence
  Description of Artificial Sequence: Synthetic oligonucleotide
gaccgaagucaaaggagau

SEQ ID NO: 930643 - RNA, 19 nt, Artificial Sequence
  Description of Artificial Sequence: Synthetic oligonucleotide
caccgugguggagcgguug

SEQ ID NO: 930644 - RNA, 19 nt, Artificial Sequence
  Description of Artificial Sequence: Synthetic oligonucleotide
ugucgugaucggggccagc

SEQ ID NO: 930645 - RNA, 19 nt, Artificial Sequence
  Description of Artificial Sequence: Synthetic oligonucleotide
ggccuccuccuccuccucc

SEQ ID NO: 930646 - RNA, 19 nt, Artificial Sequence
  Description of Artificial Sequence: Synthetic oligonucleotide
ccccucucgggugaccucg

SEQ ID NO: 930647 - RNA, 19 nt, Artificial Sequence
  Description of Artificial Sequence: Synthetic oligonucleotide
caggaugaguagauugguu

SEQ ID NO: 930648 - RNA, 19 nt, Artificial Sequence
  Description of Artificial Sequence: Synthetic oligonucleotide
ccaucgaaaccaccccauc

SEQ ID NO: 930649 - RNA, 19 nt, Artificial Sequence
  Description of Artificial Sequence: Synthetic oligonucleotide
ggauagccagggaucccug

SEQ ID NO: 930650 - RNA, 19 nt, Artificial Sequence
  Description of Artificial Sequence: Synthetic oligonucleotide
cacacaccccauccauuaa

SEQ ID NO: 930651 - RNA, 19 nt, Artificial Sequence
  Description of Artificial Sequence: Synthetic oligonucleotide
gguuucaagccuugagguu

SEQ ID NO: 930652 - RNA, 19 nt, Artificial Sequence
  Description of Artificial Sequence: Synthetic oligonucleotide
gguggcgguucugggcagg

SEQ ID NO: 930653 - RNA, 19 nt, Artificial Sequence
  Description of Artificial Sequence: Synthetic oligonucleotide
ggcaaagucgguagaugua

SEQ ID NO: 930654 - RNA, 19 nt, Artificial Sequence
  Description of Artificial Sequence: Synthetic oligonucleotide
gccggugcccugcucguac

SEQ ID NO: 930655 - RNA, 19 nt, Artificial Sequence
  Description of Artificial Sequence: Synthetic oligonucleotide
cagagcgguacuugucccu

SEQ ID NO: 930656 - RNA, 19 nt, Artificial Sequence
  Description of Artificial Sequence: Synthetic oligonucleotide
cacaguuuccggugcuuau

SEQ ID NO: 930657 - RNA, 19 nt, Artificial Sequence
  Description of Artificial Sequence: Synthetic oligonucleotide
cuguucccgccggaccuug

SEQ ID NO: 930658 - RNA, 19 nt, Artificial Sequence
  Description of Artificial Sequence: Synthetic oligonucleotide
gaggcgcaccgugguggag

SEQ ID NO: 930659 - RNA, 19 nt, Artificial Sequence
  Description of Artificial Sequence: Synthetic oligonucleotide
gcgguacuugucccuuaug

SEQ ID NO: 930660 - RNA, 19 nt, Artificial Sequence
  Description of Artificial Sequence: Synthetic oligonucleotide
gagcgguacuugucccuua

SEQ ID NO: 930661 - RNA, 19 nt, Artificial Sequence
  Description of Artificial Sequence: Synthetic oligonucleotide
cccuuauggcagcccagac

SEQ ID NO: 930662 - RNA, 19 nt, Artificial Sequence
  Description of Artificial Sequence: Synthetic oligonucleotide
gggccgagaccggaagaag

SEQ ID NO: 930663 - RNA, 19 nt, Artificial Sequence
  Description of Artificial Sequence: Synthetic oligonucleotide
ccucgacggggcuggcugg

SEQ ID NO: 930664 - RNA, 19 nt, Artificial Sequence
  Description of Artificial Sequence: Synthetic oligonucleotide
aaggaccgcucggcuuccu

SEQ ID NO: 930665 - RNA, 19 nt, Artificial Sequence
  Description of Artificial Sequence: Synthetic oligonucleotide
cacggucauagaaggcagu

SEQ ID NO: 930666 - RNA, 19 nt, Artificial Sequence
  Description of Artificial Sequence: Synthetic oligonucleotide
caagcggcuguaccaggcu

SEQ ID NO: 930667 - RNA, 19 nt, Artificial Sequence
  Description of Artificial Sequence: Synthetic oligonucleotide
cugugccguccaaacacgu

SEQ ID NO: 930668 - RNA, 19 nt, Artificial Sequence
  Description of Artificial Sequence: Synthetic oligonucleotide
uggcgguucugggcaggcu

SEQ ID NO: 930669 - RNA, 19 nt, Artificial Sequence
  Description of Artificial Sequence: Synthetic oligonucleotide
gguuggggcccugccagca

SEQ ID NO: 930670 - RNA, 19 nt, Artificial Sequence
  Description of Artificial Sequence: Synthetic oligonucleotide
gugaccucggccagcugcu

SEQ ID NO: 930671 - RNA, 19 nt, Artificial Sequence
  Description of Artificial Sequence: Synthetic oligonucleotide
cacaggguuccugcuaccu

SEQ ID NO: 930672 - RNA, 19 nt, Artificial Sequence
  Description of Artificial Sequence: Synthetic oligonucleotide
ggagcgguuggggcccugc

SEQ ID NO: 930673 - RNA, 19 nt, Artificial Sequence
  Description of Artificial Sequence: Synthetic oligonucleotide
agcaucccguccgggccga

SEQ ID NO: 930674 - RNA, 19 nt, Artificial Sequence
  Description of Artificial Sequence: Synthetic oligonucleotide
ggagggugagcuccuuuau

SEQ ID NO: 930675 - RNA, 19 nt, Artificial Sequence
  Description of Artificial Sequence: Synthetic oligonucleotide
ccuuacgacccuucucucu

SEQ ID NO: 930676 - RNA, 19 nt, Artificial Sequence
  Description of Artificial Sequence: Synthetic oligonucleotide
ggccgagaccggaagaagu

SEQ ID NO: 930677 - RNA, 19 nt, Artificial Sequence
  Description of Artificial Sequence: Synthetic oligonucleotide
gcucguagcauuggcugua

SEQ ID NO: 930678 - RNA, 19 nt, Artificial Sequence
  Description of Artificial Sequence: Synthetic oligonucleotide
ccgggugagucuguagcuc

SEQ ID NO: 930679 - RNA, 19 nt, Artificial Sequence
  Description of Artificial Sequence: Synthetic oligonucleotide
gcgacuaggcucgguagua

SEQ ID NO: 930680 - RNA, 19 nt, Artificial Sequence
  Description of Artificial Sequence: Synthetic oligonucleotide
gucacacaccccauccauu

SEQ ID NO: 930681 - RNA, 19 nt, Artificial Sequence
  Description of Artificial Sequence: Synthetic oligonucleotide
ccgaggucucuuaaccucu

SEQ ID NO: 930682 - RNA, 19 nt, Artificial Sequence
  Description of Artificial Sequence: Synthetic oligonucleotide
cgaacuccccguggggacc

SEQ ID NO: 930683 - RNA, 19 nt, Artificial Sequence
  Description of Artificial Sequence: Synthetic oligonucleotide
cgguaguacuagucaccac

SEQ ID NO: 930684 - RNA, 19 nt, Artificial Sequence
  Description of Artificial Sequence: Synthetic oligonucleotide
gccguccaaacacgugaaa

SEQ ID NO: 930685 - RNA, 19 nt, Artificial Sequence
  Description of Artificial Sequence: Synthetic oligonucleotide
ccgugguggagcgguuggg

SEQ ID NO: 930686 - RNA, 19 nt, Artificial Sequence
  Description of Artificial Sequence: Synthetic oligonucleotide
uggagcgguuggggcccug

SEQ ID NO: 930687 - RNA, 19 nt, Artificial Sequence
  Description of Artificial Sequence: Synthetic oligonucleotide
gcauaucagugggcagcac

SEQ ID NO: 930688 - RNA, 19 nt, Artificial Sequence
  Description of Artificial Sequence: Synthetic oligonucleotide
guagcggggcuggggccuc

SEQ ID NO: 930689 - RNA, 19 nt, Artificial Sequence
  Description of Artificial Sequence: Synthetic oligonucleotide
caucccguccgggccgaga

SEQ ID NO: 930690 - RNA, 19 nt, Artificial Sequence
  Description of Artificial Sequence: Synthetic oligonucleotide
cgacuaggcucgguaguac

SEQ ID NO: 930691 - RNA, 19 nt, Artificial Sequence
  Description of Artificial Sequence: Synthetic oligonucleotide
ccauccuugcagucgcagu

SEQ ID NO: 930692 - RNA, 19 nt, Artificial Sequence
  Description of Artificial Sequence: Synthetic oligonucleotide
acuccccguggggaccgaa

SEQ ID NO: 930693 - RNA, 19 nt, Artificial Sequence
  Description of Artificial Sequence: Synthetic oligonucleotide
cagucgcaguaaucaucgu

SEQ ID NO: 930694 - RNA, 19 nt, Artificial Sequence
  Description of Artificial Sequence: Synthetic oligonucleotide
ccaucacagcagucacaca

SEQ ID NO: 930695 - RNA, 19 nt, Artificial Sequence
  Description of Artificial Sequence: Synthetic oligonucleotide
gccaucgaaaccaccccau

SEQ ID NO: 930696 - RNA, 19 nt, Artificial Sequence
  Description of Artificial Sequence: Synthetic oligonucleotide
gccuccuccuccuccuccu

SEQ ID NO: 930697 - RNA, 19 nt, Artificial Sequence
  Description of Artificial Sequence: Synthetic oligonucleotide
guccgggccgagaccggaa

SEQ ID NO: 930698 - RNA, 19 nt, Artificial Sequence
  Description of Artificial Sequence: Synthetic oligonucleotide
gguucaggcuacagcucau

SEQ ID NO: 930699 - RNA, 19 nt, Artificial Sequence
  Description of Artificial Sequence: Synthetic oligonucleotide
ccuccuccuccuccuccuc

SEQ ID NO: 930700 - RNA, 19 nt, Artificial Sequence
  Description of Artificial Sequence: Synthetic oligonucleotide
caucguaggguggcaucuu

SEQ ID NO: 930701 - RNA, 19 nt, Artificial Sequence
  Description of Artificial Sequence: Synthetic oligonucleotide
cggaaccccucucggguga

SEQ ID NO: 930702 - RNA, 19 nt, Artificial Sequence
  Description of Artificial Sequence: Synthetic oligonucleotide
ccgagaccggaagaagugu

SEQ ID NO: 930703 - RNA, 19 nt, Artificial Sequence
  Description of Artificial Sequence: Synthetic oligonucleotide
ccgggccgagaccggaaga

SEQ ID NO: 930704 - RNA, 19 nt, Artificial Sequence
  Description of Artificial Sequence: Synthetic oligonucleotide
cacagcgacuaggcucggu

SEQ ID NO: 930705 - RNA, 19 nt, Artificial Sequence
  Description of Artificial Sequence: Synthetic oligonucleotide
cgaggucucuuaaccucua

SEQ ID NO: 930706 - RNA, 19 nt, Artificial Sequence
  Description of Artificial Sequence: Synthetic oligonucleotide
ccuccuccuccuccuccca

SEQ ID NO: 930707 - RNA, 19 nt, Artificial Sequence
  Description of Artificial Sequence: Synthetic oligonucleotide
cagcccagacacggucaua

SEQ ID NO: 930708 - RNA, 19 nt, Artificial Sequence
  Description of Artificial Sequence: Synthetic oligonucleotide
cuccucgacggggcuggcu

SEQ ID NO: 930709 - RNA, 19 nt, Artificial Sequence
  Description of Artificial Sequence: Synthetic oligonucleotide
gcgcaccgugguggagcgg

SEQ ID NO: 930710 - RNA, 19 nt, Artificial Sequence
  Description of Artificial Sequence: Synthetic oligonucleotide
cgggccgagaccggaagaa

SEQ ID NO: 930711 - RNA, 19 nt, Artificial Sequence
  Description of Artificial Sequence: Synthetic oligonucleotide
cgcaccgugguggagcggu

SEQ ID NO: 930712 - RNA, 19 nt, Artificial Sequence
  Description of Artificial Sequence: Synthetic oligonucleotide
ccucaucguaggguggcau

SEQ ID NO: 930713 - RNA, 19 nt, Artificial Sequence
  Description of Artificial Sequence: Synthetic oligonucleotide
gcaucccguccgggccgag

SEQ ID NO: 930714 - RNA, 19 nt, Artificial Sequence
  Description of Artificial Sequence: Synthetic oligonucleotide
ccgccggaccuuggcagca

SEQ ID NO: 930715 - RNA, 19 nt, Artificial Sequence
  Description of Artificial Sequence: Synthetic oligonucleotide
cgccggaccuuggcagcag

SEQ ID NO: 930716 - RNA, 19 nt, Artificial Sequence
  Description of Artificial Sequence: Synthetic oligonucleotide
ccuccucgacggggcuggc

SEQ ID NO: 930717 - RNA, 19 nt, Artificial Sequence
  Description of Artificial Sequence: Synthetic oligonucleotide
gcggcuguaccaggcucau

SEQ ID NO: 930718 - RNA, 19 nt, Artificial Sequence
  Description of Artificial Sequence: Synthetic oligonucleotide
guggagcgguuggggcccu

SEQ ID NO: 930719 - RNA, 19 nt, Artificial Sequence
  Description of Artificial Sequence: Synthetic oligonucleotide
ccggugcccugcucguacu

SEQ ID NO: 930720 - RNA, 19 nt, Artificial Sequence
  Description of Artificial Sequence: Synthetic oligonucleotide
cguuaguggugagcucgua

SEQ ID NO: 930721 - RNA, 19 nt, Artificial Sequence
  Description of Artificial Sequence: Synthetic oligonucleotide
cccaugugccaagguuggu

SEQ ID NO: 930722 - RNA, 19 nt, Artificial Sequence
  Description of Artificial Sequence: Synthetic oligonucleotide
gcaccgugguggagcgguu

SEQ ID NO: 930723 - RNA, 19 nt, Artificial Sequence
  Description of Artificial Sequence: Synthetic oligonucleotide
aaauauugcccacugaagc

SEQ ID NO: 930724 - RNA, 19 nt, Artificial Sequence
  Description of Artificial Sequence: Synthetic oligonucleotide
aauaauucggcccuucuuc

SEQ ID NO: 930725 - RNA, 19 nt, Artificial Sequence
  Description of Artificial Sequence: Synthetic oligonucleotide
aauaguuaggcucguauuc

SEQ ID NO: 930726 - RNA, 19 nt, Artificial Sequence
  Description of Artificial Sequence: Synthetic oligonucleotide
cuaucauucacucaguacg

SEQ ID NO: 930727 - RNA, 19 nt, Artificial Sequence
  Description of Artificial Sequence: Synthetic oligonucleotide
gagcuaaucauauuggacg

SEQ ID NO: 930728 - RNA, 19 nt, Artificial Sequence
  Description of Artificial Sequence: Synthetic oligonucleotide
guuuacguaauuuaaaaug

SEQ ID NO: 930729 - RNA, 19 nt, Artificial Sequence
  Description of Artificial Sequence: Synthetic oligonucleotide
agaaaacccacauccaucc

SEQ ID NO: 930730 - RNA, 19 nt, Artificial Sequence
  Description of Artificial Sequence: Synthetic oligonucleotide
uuuacguaauuuaaaaugu

SEQ ID NO: 930731 - RNA, 19 nt, Artificial Sequence
  Description of Artificial Sequence: Synthetic oligonucleotide
uguacguacagaaugaccu

SEQ ID NO: 930732 - RNA, 19 nt, Artificial Sequence
  Description of Artificial Sequence: Synthetic oligonucleotide
aaucauauuggacgguccg

SEQ ID NO: 930733 - RNA, 19 nt, Artificial Sequence
  Description of Artificial Sequence: Synthetic oligonucleotide
aucaauacaaaccugccug

SEQ ID NO: 930734 - RNA, 19 nt, Artificial Sequence
  Description of Artificial Sequence: Synthetic oligonucleotide
acugaagaccuacaggccc

SEQ ID NO: 930735 - RNA, 19 nt, Artificial Sequence
  Description of Artificial Sequence: Synthetic oligonucleotide
ugagguaacuccauggacc

SEQ ID NO: 930736 - RNA, 19 nt, Artificial Sequence
  Description of Artificial Sequence: Synthetic oligonucleotide
auacaaaccugccugacuc

SEQ ID NO: 930737 - RNA, 19 nt, Artificial Sequence
  Description of Artificial Sequence: Synthetic oligonucleotide
uuaauuaaggcugaaggac

SEQ ID NO: 930738 - RNA, 19 nt, Artificial Sequence
  Description of Artificial Sequence: Synthetic oligonucleotide
aagaauaugccuacacagc

SEQ ID NO: 930739 - RNA, 19 nt, Artificial Sequence
  Description of Artificial Sequence: Synthetic oligonucleotide
agacuuauuguuuggagag

SEQ ID NO: 930740 - RNA, 19 nt, Artificial Sequence
  Description of Artificial Sequence: Synthetic oligonucleotide
gauugaauaguuaggcucg

SEQ ID NO: 930741 - RNA, 19 nt, Artificial Sequence
  Description of Artificial Sequence: Synthetic oligonucleotide
gaaggaguaauucaccagc

SEQ ID NO: 930742 - RNA, 19 nt, Artificial Sequence
  Description of Artificial Sequence: Synthetic oligonucleotide
aauauugcccacugaagca

SEQ ID NO: 930743 - RNA, 19 nt, Artificial Sequence
  Description of Artificial Sequence: Synthetic oligonucleotide
uuggagagcgacuauaacc

SEQ ID NO: 930744 - RNA, 19 nt, Artificial Sequence
  Description of Artificial Sequence: Synthetic oligonucleotide
cucaucaauacaaaccugc

SEQ ID NO: 930745 - RNA, 19 nt, Artificial Sequence
  Description of Artificial Sequence: Synthetic oligonucleotide
caucccgcaacaaagagcc

SEQ ID NO: 930746 - RNA, 19 nt, Artificial Sequence
  Description of Artificial Sequence: Synthetic oligonucleotide
augccuauagaacucaguc

SEQ ID NO: 930747 - RNA, 19 nt, Artificial Sequence
  Description of Artificial Sequence: Synthetic oligonucleotide
cacauguccgguuaaaggg

SEQ ID NO: 930748 - RNA, 19 nt, Artificial Sequence
  Description of Artificial Sequence: Synthetic oligonucleotide
agcauugauagacuuauug

SEQ ID NO: 930749 - RNA, 19 nt, Artificial Sequence
  Description of Artificial Sequence: Synthetic oligonucleotide
ucaacgauuccugugacag

SEQ ID NO: 930750 - RNA, 19 nt, Artificial Sequence
  Description of Artificial Sequence: Synthetic oligonucleotide
uggagagcgacuauaacca

SEQ ID NO: 930751 - RNA, 19 nt, Artificial Sequence
  Description of Artificial Sequence: Synthetic oligonucleotide
uaaagggaugagcugacag

SEQ ID NO: 930752 - RNA, 19 nt, Artificial Sequence
  Description of Artificial Sequence: Synthetic oligonucleotide
uaugguaugacuccaggaa

SEQ ID NO: 930753 - RNA, 19 nt, Artificial Sequence
  Description of Artificial Sequence: Synthetic oligonucleotide
uaauuaaggcugaaggaca

SEQ ID NO: 930754 - RNA, 19 nt, Artificial Sequence
  Description of Artificial Sequence: Synthetic oligonucleotide
acuauuaauggugagauaa

SEQ ID NO: 930755 - RNA, 19 nt, Artificial Sequence
  Description of Artificial Sequence: Synthetic oligonucleotide
aauucggcccuucuucgac

SEQ ID NO: 930756 - RNA, 19 nt, Artificial Sequence
  Description of Artificial Sequence: Synthetic oligonucleotide
agcuaaucauauuggacgg

SEQ ID NO: 930757 - RNA, 19 nt, Artificial Sequence
  Description of Artificial Sequence: Synthetic oligonucleotide
gaaaggcguacucauaacc

SEQ ID NO: 930758 - RNA, 19 nt, Artificial Sequence
  Description of Artificial Sequence: Synthetic oligonucleotide
aagaugacgaucccaccag

SEQ ID NO: 930759 - RNA, 19 nt, Artificial Sequence
  Description of Artificial Sequence: Synthetic oligonucleotide
gguugaaagcuccacaugg

SEQ ID NO: 930760 - RNA, 19 nt, Artificial Sequence
  Description of Artificial Sequence: Synthetic oligonucleotide
cuaacaauccaccaacaug

SEQ ID NO: 930761 - RNA, 19 nt, Artificial Sequence
  Description of Artificial Sequence: Synthetic oligonucleotide
gucuugaagacauacacuc

SEQ ID NO: 930762 - RNA, 19 nt, Artificial Sequence
  Description of Artificial Sequence: Synthetic oligonucleotide
acguaauuuaaaauguacg

SEQ ID NO: 930763 - RNA, 19 nt, Artificial Sequence
  Description of Artificial Sequence: Synthetic oligonucleotide
auagacuuauuguuuggag

SEQ ID NO: 930764 - RNA, 19 nt, Artificial Sequence
  Description of Artificial Sequence: Synthetic oligonucleotide
uagacuuauuguuuggaga

SEQ ID NO: 930765 - RNA, 19 nt, Artificial Sequence
  Description of Artificial Sequence: Synthetic oligonucleotide
aaaauaauucggcccuucu

SEQ ID NO: 930766 - RNA, 19 nt, Artificial Sequence
  Description of Artificial Sequence: Synthetic oligonucleotide
gacgaggacuuccagaagc

SEQ ID NO: 930767 - RNA, 19 nt, Artificial Sequence
  Description of Artificial Sequence: Synthetic oligonucleotide
auaauucggcccuucuucg

SEQ ID NO: 930768 - RNA, 19 nt, Artificial Sequence
  Description of Artificial Sequence: Synthetic oligonucleotide
uuagcccuuaauuaaggcu

SEQ ID NO: 930769 - RNA, 19 nt, Artificial Sequence
  Description of Artificial Sequence: Synthetic oligonucleotide
agugaguaugguaugacuc

SEQ ID NO: 930770 - RNA, 19 nt, Artificial Sequence
  Description of Artificial Sequence: Synthetic oligonucleotide
uaucauucacucaguacgc

SEQ ID NO: 930771 - RNA, 19 nt, Artificial Sequence
  Description of Artificial Sequence: Synthetic oligonucleotide
aguaugguaugacuccagg

SEQ ID NO: 930772 - RNA, 19 nt, Artificial Sequence
  Description of Artificial Sequence: Synthetic oligonucleotide
ucugccucaauacucggga

SEQ ID NO: 930773 - RNA, 19 nt, Artificial Sequence
  Description of Artificial Sequence: Synthetic oligonucleotide
uaauggugagauaaacaga

SEQ ID NO: 930774 - RNA, 19 nt, Artificial Sequence
  Description of Artificial Sequence: Synthetic oligonucleotide
uccgacaucguaccaaaug

SEQ ID NO: 930775 - RNA, 19 nt, Artificial Sequence
  Description of Artificial Sequence: Synthetic oligonucleotide
ucaauacauacacuccaca

SEQ ID NO: 930776 - RNA, 19 nt, Artificial Sequence
  Description of Artificial Sequence: Synthetic oligonucleotide
uucuacaacgggcaggccu

SEQ ID NO: 930777 - RNA, 19 nt, Artificial Sequence
  Description of Artificial Sequence: Synthetic oligonucleotide
guacucauaaccauacugc

SEQ ID NO: 930778 - RNA, 19 nt, Artificial Sequence
  Description of Artificial Sequence: Synthetic oligonucleotide
uuaaaguucccagacagua

SEQ ID NO: 930779 - RNA, 19 nt, Artificial Sequence
  Description of Artificial Sequence: Synthetic oligonucleotide
uauuaauggugagauaaac

SEQ ID NO: 930780 - RNA, 19 nt, Artificial Sequence
  Description of Artificial Sequence: Synthetic oligonucleotide
agagcuaaucauauuggac

SEQ ID NO: 930781 - RNA, 19 nt, Artificial Sequence
  Description of Artificial Sequence: Synthetic oligonucleotide
uggugagauaaacagaauu

SEQ ID NO: 930782 - RNA, 19 nt, Artificial Sequence
  Description of Artificial Sequence: Synthetic oligonucleotide
aacugaagaccuacaggcc

SEQ ID NO: 930783 - RNA, 19 nt, Artificial Sequence
  Description of Artificial Sequence: Synthetic oligonucleotide
uucaauacauacacuccac

SEQ ID NO: 930784 - RNA, 19 nt, Artificial Sequence
  Description of Artificial Sequence: Synthetic oligonucleotide
uccaagaauaugccuacac

SEQ ID NO: 930785 - RNA, 19 nt, Artificial Sequence
  Description of Artificial Sequence: Synthetic oligonucleotide
agcgacuauaaccaacaag

SEQ ID NO: 930786 - RNA, 19 nt, Artificial Sequence
  Description of Artificial Sequence: Synthetic oligonucleotide
agaaggaguaauucaccag

SEQ ID NO: 930787 - RNA, 19 nt, Artificial Sequence
  Description of Artificial Sequence: Synthetic oligonucleotide
ucacuauuaauggugagau

SEQ ID NO: 930788 - RNA, 19 nt, Artificial Sequence
  Description of Artificial Sequence: Synthetic oligonucleotide
ucuucuacaacgggcaggc

SEQ ID NO: 930789 - RNA, 19 nt, Artificial Sequence
  Description of Artificial Sequence: Synthetic oligonucleotide
gaagaugacgaucccacca

SEQ ID NO: 930790 - RNA, 19 nt, Artificial Sequence
  Description of Artificial Sequence: Synthetic oligonucleotide
aagacaacuccccggccag

SEQ ID NO: 930791 - RNA, 19 nt, Artificial Sequence
  Description of Artificial Sequence: Synthetic oligonucleotide
aaauaauucggcccuucuu

SEQ ID NO: 930792 - RNA, 19 nt, Artificial Sequence
  Description of Artificial Sequence: Synthetic oligonucleotide
auucacucaguacgcgagc

SEQ ID NO: 930793 - RNA, 19 nt, Artificial Sequence
  Description of Artificial Sequence: Synthetic oligonucleotide
gugaguaugguaugacucc

SEQ ID NO: 930794 - RNA, 19 nt, Artificial Sequence
  Description of Artificial Sequence: Synthetic oligonucleotide
ggauugaauaguuaggcuc

SEQ ID NO: 930795 - RNA, 19 nt, Artificial Sequence
  Description of Artificial Sequence: Synthetic oligonucleotide
aaaggcguacucauaacca

SEQ ID NO: 930796 - RNA, 19 nt, Artificial Sequence
  Description of Artificial Sequence: Synthetic oligonucleotide
uuauuguuuggagagcgac

SEQ ID NO: 930797 - RNA, 19 nt, Artificial Sequence
  Description of Artificial Sequence: Synthetic oligonucleotide
cauucacucaguacgcgag

SEQ ID NO: 930798 - RNA, 19 nt, Artificial Sequence
  Description of Artificial Sequence: Synthetic oligonucleotide
ggugagauaaacagaauug

SEQ ID NO: 930799 - RNA, 19 nt, Artificial Sequence
  Description of Artificial Sequence: Synthetic oligonucleotide
gacgcggucaccagaaagg

SEQ ID NO: 930800 - RNA, 19 nt, Artificial Sequence
  Description of Artificial Sequence: Synthetic oligonucleotide
ugugugaaucuucuuccga

SEQ ID NO: 930801 - RNA, 19 nt, Artificial Sequence
  Description of Artificial Sequence: Synthetic oligonucleotide
uuacguaauuuaaaaugua

SEQ ID NO: 930802 - RNA, 19 nt, Artificial Sequence
  Description of Artificial Sequence: Synthetic oligonucleotide
accagcaaacugcacggac

SEQ ID NO: 930803 - RNA, 19 nt, Artificial Sequence
  Description of Artificial Sequence: Synthetic oligonucleotide
acgcucccaaaauauugcc

SEQ ID NO: 930804 - RNA, 19 nt, Artificial Sequence
  Description of Artificial Sequence: Synthetic oligonucleotide
gcaacaaagagccucugcc

SEQ ID NO: 930805 - RNA, 19 nt, Artificial Sequence
  Description of Artificial Sequence: Synthetic oligonucleotide
aguacgcgagcuugucucc

SEQ ID NO: 930806 - RNA, 19 nt, Artificial Sequence
  Description of Artificial Sequence: Synthetic oligonucleotide
uuggcaacuccacacgacu

SEQ ID NO: 930807 - RNA, 19 nt, Artificial Sequence
  Description of Artificial Sequence: Synthetic oligonucleotide
acuucccucacuauuaaug

SEQ ID NO: 930808 - RNA, 19 nt, Artificial Sequence
  Description of Artificial Sequence: Synthetic oligonucleotide
ucuacaacgggcaggccuc

SEQ ID NO: 930809 - RNA, 19 nt, Artificial Sequence
  Description of Artificial Sequence: Synthetic oligonucleotide
uaucacacggcaguguucu

SEQ ID NO: 930810 - RNA, 19 nt, Artificial Sequence
  Description of Artificial Sequence: Synthetic oligonucleotide
agaugacgaucccaccagc

SEQ ID NO: 930811 - RNA, 19 nt, Artificial Sequence
  Description of Artificial Sequence: Synthetic oligonucleotide
auguacguacagaaugacc

SEQ ID NO: 930812 - RNA, 19 nt, Artificial Sequence
  Description of Artificial Sequence: Synthetic oligonucleotide
aucauauuggacgguccgc

SEQ ID NO: 930813 - RNA, 19 nt, Artificial Sequence
  Description of Artificial Sequence: Synthetic oligonucleotide
cuucgcuugggugacagcc

SEQ ID NO: 930814 - RNA, 19 nt, Artificial Sequence
  Description of Artificial Sequence: Synthetic oligonucleotide
uggauugaauaguuaggcu

SEQ ID NO: 930815 - RNA, 19 nt, Artificial Sequence
  Description of Artificial Sequence: Synthetic oligonucleotide
agagcauugauagacuuau

SEQ ID NO: 930816 - RNA, 19 nt, Artificial Sequence
  Description of Artificial Sequence: Synthetic oligonucleotide
cauacacuccacaucccgc

SEQ ID NO: 930817 - RNA, 19 nt, Artificial Sequence
  Description of Artificial Sequence: Synthetic oligonucleotide
cagacaguaaaucugaggu

SEQ ID NO: 930818 - RNA, 19 nt, Artificial Sequence
  Description of Artificial Sequence: Synthetic oligonucleotide
ugccuauagaacucagucu

SEQ ID NO: 930819 - RNA, 19 nt, Artificial Sequence
  Description of Artificial Sequence: Synthetic oligonucleotide
aggacgaggacuuccagaa

SEQ ID NO: 930820 - RNA, 19 nt, Artificial Sequence
  Description of Artificial Sequence: Synthetic oligonucleotide
aaccauacugcagaacaga

SEQ ID NO: 930821 - RNA, 19 nt, Artificial Sequence
  Description of Artificial Sequence: Synthetic oligonucleotide
cacgcucccaaaauauugc

SEQ ID NO: 930822 - RNA, 19 nt, Artificial Sequence
  Description of Artificial Sequence: Synthetic oligonucleotide
agucugcagaaauagcaga

SEQ ID NO: 930823 - RNA, 19 nt, Artificial Sequence
  Description of Artificial Sequence: Synthetic oligonucleotide
uuuggcaacuccacacgac

SEQ ID NO: 930824 - RNA, 19 nt, Artificial Sequence
  Description of Artificial Sequence: Synthetic oligonucleotide
guaauucaccagcuucagg

SEQ ID NO: 930825 - RNA, 19 nt, Artificial Sequence
  Description of Artificial Sequence: Synthetic oligonucleotide
cacgacugaacugaagacc

SEQ ID NO: 930826 - RNA, 19 nt, Artificial Sequence
  Description of Artificial Sequence: Synthetic oligonucleotide
caccgauacucccaguucc

SEQ ID NO: 930827 - RNA, 19 nt, Artificial Sequence
  Description of Artificial Sequence: Synthetic oligonucleotide
uccgguuaaagggaugagc

SEQ ID NO: 930828 - RNA, 19 nt, Artificial Sequence
  Description of Artificial Sequence: Synthetic oligonucleotide
uaugccuacacagcauggc

SEQ ID NO: 930829 - RNA, 19 nt, Artificial Sequence
  Description of Artificial Sequence: Synthetic oligonucleotide
ggaguaauucaccagcuuc

SEQ ID NO: 930830 - RNA, 19 nt, Artificial Sequence
  Description of Artificial Sequence: Synthetic oligonucleotide
auacacuccacaucccgca

SEQ ID NO: 930831 - RNA, 19 nt, Artificial Sequence
  Description of Artificial Sequence: Synthetic oligonucleotide
ugaugccuauagaacucag

SEQ ID NO: 930832 - RNA, 19 nt, Artificial Sequence
  Description of Artificial Sequence: Synthetic oligonucleotide
uauaaccaacaagggaccc

SEQ ID NO: 930833 - RNA, 19 nt, Artificial Sequence
  Description of Artificial Sequence: Synthetic oligonucleotide
gauugccuucgcuugggug

SEQ ID NO: 930834 - RNA, 19 nt, Artificial Sequence
  Description of Artificial Sequence: Synthetic oligonucleotide
uguccgguuaaagggauga

SEQ ID NO: 930835 - RNA, 19 nt, Artificial Sequence
  Description of Artificial Sequence: Synthetic oligonucleotide
ugacgaucccaccagcaaa

SEQ ID NO: 930836 - RNA, 19 nt, Artificial Sequence
  Description of Artificial Sequence: Synthetic oligonucleotide
gauagacuuauuguuugga

SEQ ID NO: 930837 - RNA, 19 nt, Artificial Sequence
  Description of Artificial Sequence: Synthetic oligonucleotide
aggaccaaaaucacauguc

SEQ ID NO: 930838 - RNA, 19 nt, Artificial Sequence
  Description of Artificial Sequence: Synthetic oligonucleotide
gccccuaucauucacucag

SEQ ID NO: 930839 - RNA, 19 nt, Artificial Sequence
  Description of Artificial Sequence: Synthetic oligonucleotide
ucgugaguccauccguuug

SEQ ID NO: 930840 - RNA, 19 nt, Artificial Sequence
  Description of Artificial Sequence: Synthetic oligonucleotide
aagaccuacaggcccucgu

SEQ ID NO: 930841 - RNA, 19 nt, Artificial Sequence
  Description of Artificial Sequence: Synthetic oligonucleotide
ggucuuaaaguucccagac

SEQ ID NO: 930842 - RNA, 19 nt, Artificial Sequence
  Description of Artificial Sequence: Synthetic oligonucleotide
auaguuaggcucguauuca

SEQ ID NO: 930843 - RNA, 19 nt, Artificial Sequence
  Description of Artificial Sequence: Synthetic oligonucleotide
aaaucacauguccgguuaa

SEQ ID NO: 930844 - RNA, 19 nt, Artificial Sequence
  Description of Artificial Sequence: Synthetic oligonucleotide
ccgacaucguaccaaaugg

SEQ ID NO: 930845 - RNA, 19 nt, Artificial Sequence
  Description of Artificial Sequence: Synthetic oligonucleotide
uagaggacgaggacuucca

SEQ ID NO: 930846 - RNA, 19 nt, Artificial Sequence
  Description of Artificial Sequence: Synthetic oligonucleotide
uaggcucguauucaucuuc

SEQ ID NO: 930847 - RNA, 19 nt, Artificial Sequence
  Description of Artificial Sequence: Synthetic oligonucleotide
auuguacaacuugucauga

SEQ ID NO: 930848 - RNA, 19 nt, Artificial Sequence
  Description of Artificial Sequence: Synthetic oligonucleotide
gagaacacuucccucacua

SEQ ID NO: 930849 - RNA, 19 nt, Artificial Sequence
  Description of Artificial Sequence: Synthetic oligonucleotide
uuacucagaaggaguaauu

SEQ ID NO: 930850 - RNA, 19 nt, Artificial Sequence
  Description of Artificial Sequence: Synthetic oligonucleotide
agagcgacuauaaccaaca

SEQ ID NO: 930851 - RNA, 19 nt, Artificial Sequence
  Description of Artificial Sequence: Synthetic oligonucleotide
acgacugaacugaagaccu

SEQ ID NO: 930852 - RNA, 19 nt, Artificial Sequence
  Description of Artificial Sequence: Synthetic oligonucleotide
uucgcuugggugacagccc

SEQ ID NO: 930853 - RNA, 19 nt, Artificial Sequence
  Description of Artificial Sequence: Synthetic oligonucleotide
caguacgcgagcuugucuc

SEQ ID NO: 930854 - RNA, 19 nt, Artificial Sequence
  Description of Artificial Sequence: Synthetic oligonucleotide
caggcccuaacaauccacc

SEQ ID NO: 930855 - RNA, 19 nt, Artificial Sequence
  Description of Artificial Sequence: Synthetic oligonucleotide
cugagguaacuccauggac

SEQ ID NO: 930856 - RNA, 19 nt, Artificial Sequence
  Description of Artificial Sequence: Synthetic oligonucleotide
aucauucacucaguacgcg

SEQ ID NO: 930857 - RNA, 19 nt, Artificial Sequence
  Description of Artificial Sequence: Synthetic oligonucleotide
ggcccaacaaagauguugg

SEQ ID NO: 930858 - RNA, 19 nt, Artificial Sequence
  Description of Artificial Sequence: Synthetic oligonucleotide
guaugguaugacuccagga

SEQ ID NO: 930859 - RNA, 19 nt, Artificial Sequence
  Description of Artificial Sequence: Synthetic oligonucleotide
ucaguacgcgagcuugucu

SEQ ID NO: 930860 - RNA, 19 nt, Artificial Sequence
  Description of Artificial Sequence: Synthetic oligonucleotide
cucaauacucgggagacca

SEQ ID NO: 930861 - RNA, 19 nt, Artificial Sequence
  Description of Artificial Sequence: Synthetic oligonucleotide
guacguacagaaugaccug

SEQ ID NO: 930862 - RNA, 19 nt, Artificial Sequence
  Description of Artificial Sequence: Synthetic oligonucleotide
uggaucagcucuuggcgac

SEQ ID NO: 930863 - RNA, 19 nt, Artificial Sequence
  Description of Artificial Sequence: Synthetic oligonucleotide
gguuaaagggaugagcuga

SEQ ID NO: 930864 - RNA, 19 nt, Artificial Sequence
  Description of Artificial Sequence: Synthetic oligonucleotide
acaacgggcaggccucagg

SEQ ID NO: 930865 - RNA, 19 nt, Artificial Sequence
  Description of Artificial Sequence: Synthetic oligonucleotide
accagauacuggcccacag

SEQ ID NO: 930866 - RNA, 19 nt, Artificial Sequence
  Description of Artificial Sequence: Synthetic oligonucleotide
agaccuacaggcccucgug

SEQ ID NO: 930867 - RNA, 19 nt, Artificial Sequence
  Description of Artificial Sequence: Synthetic oligonucleotide
accuacaaugccuccgaca

SEQ ID NO: 930868 - RNA, 19 nt, Artificial Sequence
  Description of Artificial Sequence: Synthetic oligonucleotide
ucgcuugggugacagcccc

SEQ ID NO: 930869 - RNA, 19 nt, Artificial Sequence
  Description of Artificial Sequence: Synthetic oligonucleotide
uggacgguccgccaauaaa

SEQ ID NO: 930870 - RNA, 19 nt, Artificial Sequence
  Description of Artificial Sequence: Synthetic oligonucleotide
uucccucacuauuaauggu

SEQ ID NO: 930871 - RNA, 19 nt, Artificial Sequence
  Description of Artificial Sequence: Synthetic oligonucleotide
cagcaagccugauggaagc

SEQ ID NO: 930872 - RNA, 19 nt, Artificial Sequence
  Description of Artificial Sequence: Synthetic oligonucleotide
uguuuggagagcgacuaua

SEQ ID NO: 930873 - RNA, 19 nt, Artificial Sequence
  Description of Artificial Sequence: Synthetic oligonucleotide
acgcggucaccagaaaggc

SEQ ID NO: 930874 - RNA, 19 nt, Artificial Sequence
  Description of Artificial Sequence: Synthetic oligonucleotide
gacuuauuguuuggagagc

SEQ ID NO: 930875 - RNA, 19 nt, Artificial Sequence
  Description of Artificial Sequence: Synthetic oligonucleotide
guagaggacgaggacuucc

SEQ ID NO: 930876 - RNA, 19 nt, Artificial Sequence
  Description of Artificial Sequence: Synthetic oligonucleotide
cagaaaggcguacucauaa

SEQ ID NO: 930877 - RNA, 19 nt, Artificial Sequence
  Description of Artificial Sequence: Synthetic oligonucleotide
aguaaaucugagguugaaa

SEQ ID NO: 930878 - RNA, 19 nt, Artificial Sequence
  Description of Artificial Sequence: Synthetic oligonucleotide
ucccaguuccaucaacgau

SEQ ID NO: 930879 - RNA, 19 nt, Artificial Sequence
  Description of Artificial Sequence: Synthetic oligonucleotide
auaugccuacacagcaugg

SEQ ID NO: 930880 - RNA, 19 nt, Artificial Sequence
  Description of Artificial Sequence: Synthetic oligonucleotide
acaucguaccaaauggaca

SEQ ID NO: 930881 - RNA, 19 nt, Artificial Sequence
  Description of Artificial Sequence: Synthetic oligonucleotide
ucguaccaaauggacagcu

SEQ ID NO: 930882 - RNA, 19 nt, Artificial Sequence
  Description of Artificial Sequence: Synthetic oligonucleotide
agcaggggcaguguuguag

SEQ ID NO: 930883 - RNA, 19 nt, Artificial Sequence
  Description of Artificial Sequence: Synthetic oligonucleotide
uaauucggcccuucuucga

SEQ ID NO: 930884 - RNA, 19 nt, Artificial Sequence
  Description of Artificial Sequence: Synthetic oligonucleotide
cucacuauuaauggugaga

SEQ ID NO: 930885 - RNA, 19 nt, Artificial Sequence
  Description of Artificial Sequence: Synthetic oligonucleotide
uucacucaguacgcgagcu

SEQ ID NO: 930886 - RNA, 19 nt, Artificial Sequence
  Description of Artificial Sequence: Synthetic oligonucleotide
gaggacgaggacuuccaga

SEQ ID NO: 930887 - RNA, 19 nt, Artificial Sequence
  Description of Artificial Sequence: Synthetic oligonucleotide
uauuggacgguccgccaau

SEQ ID NO: 930888 - RNA, 19 nt, Artificial Sequence
  Description of Artificial Sequence: Synthetic oligonucleotide
aucaacgauuccugugaca

SEQ ID NO: 930889 - RNA, 19 nt, Artificial Sequence
  Description of Artificial Sequence: Synthetic oligonucleotide
acucgggagaccaauuucu

SEQ ID NO: 930890 - RNA, 19 nt, Artificial Sequence
  Description of Artificial Sequence: Synthetic oligonucleotide
gagagcgacuauaaccaac

SEQ ID NO: 930891 - RNA, 19 nt, Artificial Sequence
  Description of Artificial Sequence: Synthetic oligonucleotide
gcagaaauagcagagcuaa

SEQ ID NO: 930892 - RNA, 19 nt, Artificial Sequence
  Description of Artificial Sequence: Synthetic oligonucleotide
auauuggacgguccgccaa

SEQ ID NO: 930893 - RNA, 19 nt, Artificial Sequence
  Description of Artificial Sequence: Synthetic oligonucleotide
aacuugucaugagaaugaa

SEQ ID NO: 930894 - RNA, 19 nt, Artificial Sequence
  Description of Artificial Sequence: Synthetic oligonucleotide
gaugagaggccugugugaa

SEQ ID NO: 930895 - RNA, 19 nt, Artificial Sequence
  Description of Artificial Sequence: Synthetic oligonucleotide
ucccgcaacaaagagccuc

SEQ ID NO: 930896 - RNA, 19 nt, Artificial Sequence
  Description of Artificial Sequence: Synthetic oligonucleotide
aaucacauguccgguuaaa

SEQ ID NO: 930897 - RNA, 19 nt, Artificial Sequence
  Description of Artificial Sequence: Synthetic oligonucleotide
auacucgggagaccaauuu

SEQ ID NO: 930898 - RNA, 19 nt, Artificial Sequence
  Description of Artificial Sequence: Synthetic oligonucleotide
uuaaagggaugagcugaca

SEQ ID NO: 930899 - RNA, 19 nt, Artificial Sequence
  Description of Artificial Sequence: Synthetic oligonucleotide
gucuuaaaguucccagaca

SEQ ID NO: 930900 - RNA, 19 nt, Artificial Sequence
  Description of Artificial Sequence: Synthetic oligonucleotide
ucgggagaccaauuucuuc

SEQ ID NO: 930901 - RNA, 19 nt, Artificial Sequence
  Description of Artificial Sequence: Synthetic oligonucleotide
gaugacgaucccaccagca

SEQ ID NO: 930902 - RNA, 19 nt, Artificial Sequence
  Description of Artificial Sequence: Synthetic oligonucleotide
ccuaucauucacucaguac

SEQ ID NO: 930903 - RNA, 19 nt, Artificial Sequence
  Description of Artificial Sequence: Synthetic oligonucleotide
guuaaagggaugagcugac

SEQ ID NO: 930904 - RNA, 19 nt, Artificial Sequence
  Description of Artificial Sequence: Synthetic oligonucleotide
cuuggcgacccaagucugc

SEQ ID NO: 930905 - RNA, 19 nt, Artificial Sequence
  Description of Artificial Sequence: Synthetic oligonucleotide
aagagcauugauagacuua

SEQ ID NO: 930906 - RNA, 19 nt, Artificial Sequence
  Description of Artificial Sequence: Synthetic oligonucleotide
gugagauaaacagaauugu

SEQ ID NO: 930907 - RNA, 19 nt, Artificial Sequence
  Description of Artificial Sequence: Synthetic oligonucleotide
cauaaccauacugcagaac

SEQ ID NO: 930908 - RNA, 19 nt, Artificial Sequence
  Description of Artificial Sequence: Synthetic oligonucleotide
ugugaccgacaucaauuuu

SEQ ID NO: 930909 - RNA, 19 nt, Artificial Sequence
  Description of Artificial Sequence: Synthetic oligonucleotide
caucuucuacaacgggcag

SEQ ID NO: 930910 - RNA, 19 nt, Artificial Sequence
  Description of Artificial Sequence: Synthetic oligonucleotide
caucaacgauuccugugac

SEQ ID NO: 930911 - RNA, 19 nt, Artificial Sequence
  Description of Artificial Sequence: Synthetic oligonucleotide
aauacucgggagaccaauu

SEQ ID NO: 930912 - RNA, 19 nt, Artificial Sequence
  Description of Artificial Sequence: Synthetic oligonucleotide
agaacacuucccucacuau

SEQ ID NO: 930913 - RNA, 19 nt, Artificial Sequence
  Description of Artificial Sequence: Synthetic oligonucleotide
ugaaaguguugaugccuau

SEQ ID NO: 930914 - RNA, 19 nt, Artificial Sequence
  Description of Artificial Sequence: Synthetic oligonucleotide
acauguccgguuaaaggga

SEQ ID NO: 930915 - RNA, 19 nt, Artificial Sequence
  Description of Artificial Sequence: Synthetic oligonucleotide
cuacaggcccucgugaguc

SEQ ID NO: 930916 - RNA, 19 nt, Artificial Sequence
  Description of Artificial Sequence: Synthetic oligonucleotide
cauggacccggcugugacc

SEQ ID NO: 930917 - RNA, 19 nt, Artificial Sequence
  Description of Artificial Sequence: Synthetic oligonucleotide
ugcuuucaguacauucaua

SEQ ID NO: 930918 - RNA, 19 nt, Artificial Sequence
  Description of Artificial Sequence: Synthetic oligonucleotide
ugccucuugcucccuuagc

SEQ ID NO: 930919 - RNA, 19 nt, Artificial Sequence
  Description of Artificial Sequence: Synthetic oligonucleotide
gaagagcauugauagacuu

SEQ ID NO: 930920 - RNA, 19 nt, Artificial Sequence
  Description of Artificial Sequence: Synthetic oligonucleotide
caggccguagcuucuucug

SEQ ID NO: 930921 - RNA, 19 nt, Artificial Sequence
  Description of Artificial Sequence: Synthetic oligonucleotide
gaucagcucuuggcgaccc

SEQ ID NO: 930922 - RNA, 19 nt, Artificial Sequence
  Description of Artificial Sequence: Synthetic oligonucleotide
ggacgcggucaccagaaag

SEQ ID NO: 930923 - RNA, 19 nt, Artificial Sequence
  Description of Artificial Sequence: Synthetic oligonucleotide
uuaggcucguauucaucuu

SEQ ID NO: 930924 - RNA, 19 nt, Artificial Sequence
  Description of Artificial Sequence: Synthetic oligonucleotide
cugagguugaaagcuccac

SEQ ID NO: 930925 - RNA, 19 nt, Artificial Sequence
  Description of Artificial Sequence: Synthetic oligonucleotide
agcuugucggcuucggcuu

SEQ ID NO: 930926 - RNA, 19 nt, Artificial Sequence
  Description of Artificial Sequence: Synthetic oligonucleotide
caggaccaaaaucacaugu

SEQ ID NO: 930927 - RNA, 19 nt, Artificial Sequence
  Description of Artificial Sequence: Synthetic oligonucleotide
aggcccuaacaauccacca

SEQ ID NO: 930928 - RNA, 19 nt, Artificial Sequence
  Description of Artificial Sequence: Synthetic oligonucleotide
cugccucaauacucgggag

SEQ ID NO: 930929 - RNA, 19 nt, Artificial Sequence
  Description of Artificial Sequence: Synthetic oligonucleotide
auucggcccuucuucgaca

SEQ ID NO: 930930 - RNA, 19 nt, Artificial Sequence
  Description of Artificial Sequence: Synthetic oligonucleotide
gaccuacaggcccucguga

SEQ ID NO: 930931 - RNA, 19 nt, Artificial Sequence
  Description of Artificial Sequence: Synthetic oligonucleotide
gaagaccuacaggcccucg

SEQ ID NO: 930932 - RNA, 19 nt, Artificial Sequence
  Description of Artificial Sequence: Synthetic oligonucleotide
cguaauuuaaaauguacgu

SEQ ID NO: 930933 - RNA, 19 nt, Artificial Sequence
  Description of Artificial Sequence: Synthetic oligonucleotide
gaaaguguugaugccuaua

SEQ ID NO: 930934 - RNA, 19 nt, Artificial Sequence
  Description of Artificial Sequence: Synthetic oligonucleotide
cgacuauaaccaacaaggg

SEQ ID NO: 930935 - RNA, 19 nt, Artificial Sequence
  Description of Artificial Sequence: Synthetic oligonucleotide
acaguaaaucugagguuga

SEQ ID NO: 930936 - RNA, 19 nt, Artificial Sequence
  Description of Artificial Sequence: Synthetic oligonucleotide
uccacacgacugaacugaa

SEQ ID NO: 930937 - RNA, 19 nt, Artificial Sequence
  Description of Artificial Sequence: Synthetic oligonucleotide
gggucuuaaaguucccaga

SEQ ID NO: 930938 - RNA, 19 nt, Artificial Sequence
  Description of Artificial Sequence: Synthetic oligonucleotide
acugaacugaagaccuaca

SEQ ID NO: 930939 - RNA, 19 nt, Artificial Sequence
  Description of Artificial Sequence: Synthetic oligonucleotide
uuggacgguccgccaauaa

SEQ ID NO: 930940 - RNA, 19 nt, Artificial Sequence
  Description of Artificial Sequence: Synthetic oligonucleotide
cuggagacacuaggagucc

SEQ ID NO: 930941 - RNA, 19 nt, Artificial Sequence
  Description of Artificial Sequence: Synthetic oligonucleotide
cauauuggacgguccgcca

SEQ ID NO: 930942 - RNA, 19 nt, Artificial Sequence
  Description of Artificial Sequence: Synthetic oligonucleotide
cccuuagcccuuaauuaag

SEQ ID NO: 930943 - RNA, 19 nt, Artificial Sequence
  Description of Artificial Sequence: Synthetic oligonucleotide
caggggcaguguuguaggg

SEQ ID NO: 930944 - RNA, 19 nt, Artificial Sequence
  Description of Artificial Sequence: Synthetic oligonucleotide
ccaagaauaugccuacaca

SEQ ID NO: 930945 - RNA, 19 nt, Artificial Sequence
  Description of Artificial Sequence: Synthetic oligonucleotide
acgauuccugugacagucg

SEQ ID NO: 930946 - RNA, 19 nt, Artificial Sequence
  Description of Artificial Sequence: Synthetic oligonucleotide
gcacgcucccaaaauauug

SEQ ID NO: 930947 - RNA, 19 nt, Artificial Sequence
  Description of Artificial Sequence: Synthetic oligonucleotide
ucacucaguacgcgagcuu

SEQ ID NO: 930948 - RNA, 19 nt, Artificial Sequence
  Description of Artificial Sequence: Synthetic oligonucleotide
ggugacagccccguccucc

SEQ ID NO: 930949 - RNA, 19 nt, Artificial Sequence
  Description of Artificial Sequence: Synthetic oligonucleotide
uaacuccauggacccggcu

SEQ ID NO: 930950 - RNA, 19 nt, Artificial Sequence
  Description of Artificial Sequence: Synthetic oligonucleotide
aucacacggcaguguucuc

SEQ ID NO: 930951 - RNA, 19 nt, Artificial Sequence
  Description of Artificial Sequence: Synthetic oligonucleotide
gaugccuauagaacucagu

SEQ ID NO: 930952 - RNA, 19 nt, Artificial Sequence
  Description of Artificial Sequence: Synthetic oligonucleotide
acuugucaugagaaugaaa

SEQ ID NO: 930953 - RNA, 19 nt, Artificial Sequence
  Description of Artificial Sequence: Synthetic oligonucleotide
ugcucccuuagcccuuaau

SEQ ID NO: 930954 - RNA, 19 nt, Artificial Sequence
  Description of Artificial Sequence: Synthetic oligonucleotide
agguaacuccauggacccg

SEQ ID NO: 930955 - RNA, 19 nt, Artificial Sequence
  Description of Artificial Sequence: Synthetic oligonucleotide
acccuguaauggucaucag

SEQ ID NO: 930956 - RNA, 19 nt, Artificial Sequence
  Description of Artificial Sequence: Synthetic oligonucleotide
gcucccuuggaucagcucu

SEQ ID NO: 930957 - RNA, 19 nt, Artificial Sequence
  Description of Artificial Sequence: Synthetic oligonucleotide
aggcacgcucccaaaauau

SEQ ID NO: 930958 - RNA, 19 nt, Artificial Sequence
  Description of Artificial Sequence: Synthetic oligonucleotide
uugccuucgcuugggugac

SEQ ID NO: 930959 - RNA, 19 nt, Artificial Sequence
  Description of Artificial Sequence: Synthetic oligonucleotide
agcccuuaauuaaggcuga

SEQ ID NO: 930960 - RNA, 19 nt, Artificial Sequence
  Description of Artificial Sequence: Synthetic oligonucleotide
ggacgguccgccaauaaaa

SEQ ID NO: 930961 - RNA, 19 nt, Artificial Sequence
  Description of Artificial Sequence: Synthetic oligonucleotide
cgugaguccauccguuugc

SEQ ID NO: 930962 - RNA, 19 nt, Artificial Sequence
  Description of Artificial Sequence: Synthetic oligonucleotide
gcccucgugaguccauccg

SEQ ID NO: 930963 - RNA, 19 nt, Artificial Sequence
  Description of Artificial Sequence: Synthetic oligonucleotide
cucaguacgcgagcuuguc

SEQ ID NO: 930964 - RNA, 19 nt, Artificial Sequence
  Description of Artificial Sequence: Synthetic oligonucleotide
cagcuugucggcuucggcu

SEQ ID NO: 930965 - RNA, 19 nt, Artificial Sequence
  Description of Artificial Sequence: Synthetic oligonucleotide
guaucacacggcaguguuc

SEQ ID NO: 930966 - RNA, 19 nt, Artificial Sequence
  Description of Artificial Sequence: Synthetic oligonucleotide
accgauacucccaguucca

SEQ ID NO: 930967 - RNA, 19 nt, Artificial Sequence
  Description of Artificial Sequence: Synthetic oligonucleotide
gagcgacuauaaccaacaa

SEQ ID NO: 930968 - RNA, 19 nt, Artificial Sequence
  Description of Artificial Sequence: Synthetic oligonucleotide
ccucacuauuaauggugag

SEQ ID NO: 930969 - RNA, 19 nt, Artificial Sequence
  Description of Artificial Sequence: Synthetic oligonucleotide
cauccguuugcucucuccu

SEQ ID NO: 930970 - RNA, 19 nt, Artificial Sequence
  Description of Artificial Sequence: Synthetic oligonucleotide
ccgguuaaagggaugagcu

SEQ ID NO: 930971 - RNA, 19 nt, Artificial Sequence
  Description of Artificial Sequence: Synthetic oligonucleotide
ugccuccgacaucguacca

SEQ ID NO: 930972 - RNA, 19 nt, Artificial Sequence
  Description of Artificial Sequence: Synthetic oligonucleotide
caaaaucacauguccgguu

SEQ ID NO: 930973 - RNA, 19 nt, Artificial Sequence
  Description of Artificial Sequence: Synthetic oligonucleotide
uacaacgggcaggccucag

SEQ ID NO: 930974 - RNA, 19 nt, Artificial Sequence
  Description of Artificial Sequence: Synthetic oligonucleotide
ggcccuaacaauccaccaa

SEQ ID NO: 930975 - RNA, 19 nt, Artificial Sequence
  Description of Artificial Sequence: Synthetic oligonucleotide
gugggccccuaucauucac

SEQ ID NO: 930976 - RNA, 19 nt, Artificial Sequence
  Description of Artificial Sequence: Synthetic oligonucleotide
caccuacaaugccuccgac

SEQ ID NO: 930977 - RNA, 19 nt, Artificial Sequence
  Description of Artificial Sequence: Synthetic oligonucleotide
ggacgaggacuuccagaag

SEQ ID NO: 930978 - RNA, 19 nt, Artificial Sequence
  Description of Artificial Sequence: Synthetic oligonucleotide
acguacagaaugaccugaa

SEQ ID NO: 930979 - RNA, 19 nt, Artificial Sequence
  Description of Artificial Sequence: Synthetic oligonucleotide
cacuauuaauggugagaua

SEQ ID NO: 930980 - RNA, 19 nt, Artificial Sequence
  Description of Artificial Sequence: Synthetic oligonucleotide
caucaguaacugcuguagu

SEQ ID NO: 930981 - RNA, 19 nt, Artificial Sequence
  Description of Artificial Sequence: Synthetic oligonucleotide
uacgcgagcuugucuccuu

SEQ ID NO: 930982 - RNA, 19 nt, Artificial Sequence
  Description of Artificial Sequence: Synthetic oligonucleotide
aucagcucuuggcgaccca

SEQ ID NO: 930983 - RNA, 19 nt, Artificial Sequence
  Description of Artificial Sequence: Synthetic oligonucleotide
agugacccagccaggccgu

SEQ ID NO: 930984 - RNA, 19 nt, Artificial Sequence
  Description of Artificial Sequence: Synthetic oligonucleotide
aggcccucgugaguccauc

SEQ ID NO: 930985 - RNA, 19 nt, Artificial Sequence
  Description of Artificial Sequence: Synthetic oligonucleotide
auguccgguuaaagggaug

SEQ ID NO: 930986 - RNA, 19 nt, Artificial Sequence
  Description of Artificial Sequence: Synthetic oligonucleotide
acggacgcggucaccagaa

SEQ ID NO: 930987 - RNA, 19 nt, Artificial Sequence
  Description of Artificial Sequence: Synthetic oligonucleotide
caggcacgcucccaaaaua

SEQ ID NO: 930988 - RNA, 19 nt, Artificial Sequence
  Description of Artificial Sequence: Synthetic oligonucleotide
ccagugaguaugguaugac

SEQ ID NO: 930989 - RNA, 19 nt, Artificial Sequence
  Description of Artificial Sequence: Synthetic oligonucleotide
cugugaccgacaucaauuu

SEQ ID NO: 930990 - RNA, 19 nt, Artificial Sequence
  Description of Artificial Sequence: Synthetic oligonucleotide
cuucuacaacgggcaggcc

SEQ ID NO: 930991 - RNA, 19 nt, Artificial Sequence
  Description of Artificial Sequence: Synthetic oligonucleotide
caguaaaucugagguugaa

SEQ ID NO: 930992 - RNA, 19 nt, Artificial Sequence
  Description of Artificial Sequence: Synthetic oligonucleotide
ccuuugcacaagagagaac

SEQ ID NO: 930993 - RNA, 19 nt, Artificial Sequence
  Description of Artificial Sequence: Synthetic oligonucleotide
agacgccuccauggugauc

SEQ ID NO: 930994 - RNA, 19 nt, Artificial Sequence
  Description of Artificial Sequence: Synthetic oligonucleotide
caggcauaggccagugagu

SEQ ID NO: 930995 - RNA, 19 nt, Artificial Sequence
  Description of Artificial Sequence: Synthetic oligonucleotide
ccacacgacugaacugaag

SEQ ID NO: 930996 - RNA, 19 nt, Artificial Sequence
  Description of Artificial Sequence: Synthetic oligonucleotide
cgguuaaagggaugagcug

SEQ ID NO: 930997 - RNA, 19 nt, Artificial Sequence
  Description of Artificial Sequence: Synthetic oligonucleotide
gacaagaguccaggaccaa

SEQ ID NO: 930998 - RNA, 19 nt, Artificial Sequence
  Description of Artificial Sequence: Synthetic oligonucleotide
auuggacgguccgccaaua

SEQ ID NO: 930999 - RNA, 19 nt, Artificial Sequence
  Description of Artificial Sequence: Synthetic oligonucleotide
ggaucagcucuuggcgacc

SEQ ID NO: 931000 - RNA, 19 nt, Artificial Sequence
  Description of Artificial Sequence: Synthetic oligonucleotide
ggcccucgugaguccaucc

SEQ ID NO: 931001 - RNA, 19 nt, Artificial Sequence
  Description of Artificial Sequence: Synthetic oligonucleotide
cacggacgcggucaccaga

SEQ ID NO: 931002 - RNA, 19 nt, Artificial Sequence
  Description of Artificial Sequence: Synthetic oligonucleotide
caauacucgggagaccaau

SEQ ID NO: 931003 - RNA, 19 nt, Artificial Sequence
  Description of Artificial Sequence: Synthetic oligonucleotide
acccggcugugaccgacau

SEQ ID NO: 931004 - RNA, 19 nt, Artificial Sequence
  Description of Artificial Sequence: Synthetic oligonucleotide
cgauacucccaguuccauc

SEQ ID NO: 931005 - RNA, 19 nt, Artificial Sequence
  Description of Artificial Sequence: Synthetic oligonucleotide
cgcggucaccagaaaggcg

SEQ ID NO: 931006 - RNA, 19 nt, Artificial Sequence
  Description of Artificial Sequence: Synthetic oligonucleotide
cacacggcaguguucucau

SEQ ID NO: 931007 - RNA, 19 nt, Artificial Sequence
  Description of Artificial Sequence: Synthetic oligonucleotide
cccgcuggugcuuuggcaa

SEQ ID NO: 931008 - RNA, 19 nt, Artificial Sequence
  Description of Artificial Sequence: Synthetic oligonucleotide
ccaccuacaaugccuccga

SEQ ID NO: 931009 - RNA, 19 nt, Artificial Sequence
  Description of Artificial Sequence: Synthetic oligonucleotide
cgacaucguaccaaaugga

SEQ ID NO: 931010 - RNA, 19 nt, Artificial Sequence
  Description of Artificial Sequence: Synthetic oligonucleotide
caacgauuccugugacagu

SEQ ID NO: 931011 - RNA, 19 nt, Artificial Sequence
  Description of Artificial Sequence: Synthetic oligonucleotide
gacagucgccagagccuca

SEQ ID NO: 931012 - RNA, 19 nt, Artificial Sequence
  Description of Artificial Sequence: Synthetic oligonucleotide
ggccccuaucauucacuca

SEQ ID NO: 931013 - RNA, 19 nt, Artificial Sequence
  Description of Artificial Sequence: Synthetic oligonucleotide
gcacggacgcggucaccag

SEQ ID NO: 931014 - RNA, 19 nt, Artificial Sequence
  Description of Artificial Sequence: Synthetic oligonucleotide
cucgggagaccaauuucuu

SEQ ID NO: 931015 - RNA, 19 nt, Artificial Sequence
  Description of Artificial Sequence: Synthetic oligonucleotide
gcgacccaagucugcagaa

SEQ ID NO: 931016 - RNA, 19 nt, Artificial Sequence
  Description of Artificial Sequence: Synthetic oligonucleotide
gacccggcugugaccgaca

SEQ ID NO: 931017 - RNA, 19 nt, Artificial Sequence
  Description of Artificial Sequence: Synthetic oligonucleotide
ccuucgcuugggugacagc

SEQ ID NO: 931018 - RNA, 19 nt, Artificial Sequence
  Description of Artificial Sequence: Synthetic oligonucleotide
cacgcagggccagcccgug

SEQ ID NO: 931019 - RNA, 19 nt, Artificial Sequence
  Description of Artificial Sequence: Synthetic oligonucleotide
cuacaacgggcaggccuca

SEQ ID NO: 931020 - RNA, 19 nt, Artificial Sequence
  Description of Artificial Sequence: Synthetic oligonucleotide
ggacccggcugugaccgac

SEQ ID NO: 931021 - RNA, 19 nt, Artificial Sequence
  Description of Artificial Sequence: Synthetic oligonucleotide
cucgugaguccauccguuu

SEQ ID NO: 931022 - RNA, 19 nt, Artificial Sequence
  Description of Artificial Sequence: Synthetic oligonucleotide
caacuccccggccagcuuu

SEQ ID NO: 931023 - RNA, 19 nt, Artificial Sequence
  Description of Artificial Sequence: Synthetic oligonucleotide
cugcacggacgcggucacc

SEQ ID NO: 931024 - RNA, 19 nt, Artificial Sequence
  Description of Artificial Sequence: Synthetic oligonucleotide
guacgcgagcuugucuccu

SEQ ID NO: 931025 - RNA, 19 nt, Artificial Sequence
  Description of Artificial Sequence: Synthetic oligonucleotide
ugccuucgcuugggugaca

SEQ ID NO: 931026 - RNA, 19 nt, Artificial Sequence
  Description of Artificial Sequence: Synthetic oligonucleotide
cccuaucauucacucagua

SEQ ID NO: 931027 - RNA, 19 nt, Artificial Sequence
  Description of Artificial Sequence: Synthetic oligonucleotide
gccccgcuggugcuuuggc

SEQ ID NO: 931028 - RNA, 19 nt, Artificial Sequence
  Description of Artificial Sequence: Synthetic oligonucleotide
cguacagaaugaccugaaa

SEQ ID NO: 931029 - RNA, 19 nt, Artificial Sequence
  Description of Artificial Sequence: Synthetic oligonucleotide
cccgcaacaaagagccucu

SEQ ID NO: 931030 - RNA, 19 nt, Artificial Sequence
  Description of Artificial Sequence: Synthetic oligonucleotide
gagcauugauagacuuauu

SEQ ID NO: 931031 - RNA, 19 nt, Artificial Sequence
  Description of Artificial Sequence: Synthetic oligonucleotide
ggcucguauucaucuucau

SEQ ID NO: 931032 - RNA, 19 nt, Artificial Sequence
  Description of Artificial Sequence: Synthetic oligonucleotide
cuccgacaucguaccaaau

SEQ ID NO: 931033 - RNA, 19 nt, Artificial Sequence
  Description of Artificial Sequence: Synthetic oligonucleotide
ccaggcacgcucccaaaau

SEQ ID NO: 931034 - RNA, 19 nt, Artificial Sequence
  Description of Artificial Sequence: Synthetic oligonucleotide
ggcacgcucccaaaauauu

SEQ ID NO: 931035 - RNA, 19 nt, Artificial Sequence
  Description of Artificial Sequence: Synthetic oligonucleotide
cagacgccuccauggugau

SEQ ID NO: 931036 - RNA, 19 nt, Artificial Sequence
  Description of Artificial Sequence: Synthetic oligonucleotide
ccgcaacaaagagccucug

SEQ ID NO: 931037 - RNA, 19 nt, Artificial Sequence
  Description of Artificial Sequence: Synthetic oligonucleotide
gggacccaacugccaggaa

SEQ ID NO: 931038 - RNA, 19 nt, Artificial Sequence
  Description of Artificial Sequence: Synthetic oligonucleotide
ccucgugaguccauccguu

SEQ ID NO: 931039 - RNA, 19 nt, Artificial Sequence
  Description of Artificial Sequence: Synthetic oligonucleotide
cagucgccagagccucacu

SEQ ID NO: 931040 - RNA, 19 nt, Artificial Sequence
  Description of Artificial Sequence: Synthetic oligonucleotide
gaggccccgcuggugcuuu

SEQ ID NO: 931041 - RNA, 19 nt, Artificial Sequence
  Description of Artificial Sequence: Synthetic oligonucleotide
cguaccaaauggacagcuu

SEQ ID NO: 931042 - RNA, 19 nt, Artificial Sequence
  Description of Artificial Sequence: Synthetic oligonucleotide
ccacgcagggccagcccgu

SEQ ID NO: 931043 - RNA, 19 nt, Artificial Sequence
  Description of Artificial Sequence: Synthetic oligonucleotide
cggacgcggucaccagaaa

SEQ ID NO: 931044 - RNA, 19 nt, Artificial Sequence
  Description of Artificial Sequence: Synthetic oligonucleotide
cggcugugaccgacaucaa

SEQ ID NO: 931045 - RNA, 19 nt, Artificial Sequence
  Description of Artificial Sequence: Synthetic oligonucleotide
aguuaaauaaucuaccacg

SEQ ID NO: 931046 - RNA, 19 nt, Artificial Sequence
  Description of Artificial Sequence: Synthetic oligonucleotide
ugacauuuaguucagaagc

SEQ ID NO: 931047 - RNA, 19 nt, Artificial Sequence
  Description of Artificial Sequence: Synthetic oligonucleotide
aagucaagcaaauaaaaug

SEQ ID NO: 931048 - RNA, 19 nt, Artificial Sequence
  Description of Artificial Sequence: Synthetic oligonucleotide
uugaaaauauguuaucugg

SEQ ID NO: 931049 - RNA, 19 nt, Artificial Sequence
  Description of Artificial Sequence: Synthetic oligonucleotide
aaauauguuaucuggaagu

SEQ ID NO: 931050 - RNA, 19 nt, Artificial Sequence
  Description of Artificial Sequence: Synthetic oligonucleotide
aaagcauuauaucacaaca

SEQ ID NO: 931051 - RNA, 19 nt, Artificial Sequence
  Description of Artificial Sequence: Synthetic oligonucleotide
ugugcuaaaaucaagugcu

SEQ ID NO: 931052 - RNA, 19 nt, Artificial Sequence
  Description of Artificial Sequence: Synthetic oligonucleotide
agguuauuuagugagaucc

SEQ ID NO: 931053 - RNA, 19 nt, Artificial Sequence
  Description of Artificial Sequence: Synthetic oligonucleotide
aagaagaccaacuauuuga

SEQ ID NO: 931054 - RNA, 19 nt, Artificial Sequence
  Description of Artificial Sequence: Synthetic oligonucleotide
aauauaaucauuggugauc

SEQ ID NO: 931055 - RNA, 19 nt, Artificial Sequence
  Description of Artificial Sequence: Synthetic oligonucleotide
aauaaauggaaaauaauaa

SEQ ID NO: 931056 - RNA, 19 nt, Artificial Sequence
  Description of Artificial Sequence: Synthetic oligonucleotide
ugugauacgucacauaaac

SEQ ID NO: 931057 - RNA, 19 nt, Artificial Sequence
  Description of Artificial Sequence: Synthetic oligonucleotide
ugaucuaaguuuuaaacac

SEQ ID NO: 931058 - RNA, 19 nt, Artificial Sequence
  Description of Artificial Sequence: Synthetic oligonucleotide
aguacuacuugccuguggc

SEQ ID NO: 931059 - RNA, 19 nt, Artificial Sequence
  Description of Artificial Sequence: Synthetic oligonucleotide
uguggcagaauucugcacg

SEQ ID NO: 931060 - RNA, 19 nt, Artificial Sequence
  Description of Artificial Sequence: Synthetic oligonucleotide
caugcuaggaucuucauug

SEQ ID NO: 931061 - RNA, 19 nt, Artificial Sequence
  Description of Artificial Sequence: Synthetic oligonucleotide
uauacgguaacguuuaacu

SEQ ID NO: 931062 - RNA, 19 nt, Artificial Sequence
  Description of Artificial Sequence: Synthetic oligonucleotide
cuugauaaguacuacuugc

SEQ ID NO: 931063 - RNA, 19 nt, Artificial Sequence
  Description of Artificial Sequence: Synthetic oligonucleotide
auuauauaccccuuguuug

SEQ ID NO: 931064 - RNA, 19 nt, Artificial Sequence
  Description of Artificial Sequence: Synthetic oligonucleotide
uaacguuuaacucacauuu

SEQ ID NO: 931065 - RNA, 19 nt, Artificial Sequence
  Description of Artificial Sequence: Synthetic oligonucleotide
ugauacgucacauaaacaa

SEQ ID NO: 931066 - RNA, 19 nt, Artificial Sequence
  Description of Artificial Sequence: Synthetic oligonucleotide
uaacucacauuucagauac

SEQ ID NO: 931067 - RNA, 19 nt, Artificial Sequence
  Description of Artificial Sequence: Synthetic oligonucleotide
aaagauuauauaccccuug

SEQ ID NO: 931068 - RNA, 19 nt, Artificial Sequence
  Description of Artificial Sequence: Synthetic oligonucleotide
ucacauuucagauaccuga

SEQ ID NO: 931069 - RNA, 19 nt, Artificial Sequence
  Description of Artificial Sequence: Synthetic oligonucleotide
agcauuauaucacaacauc

SEQ ID NO: 931070 - RNA, 19 nt, Artificial Sequence
  Description of Artificial Sequence: Synthetic oligonucleotide
aauguguuugaaaauaugu

SEQ ID NO: 931071 - RNA, 19 nt, Artificial Sequence
  Description of Artificial Sequence: Synthetic oligonucleotide
aucaguuaaauaaucuacc

SEQ ID NO: 931072 - RNA, 19 nt, Artificial Sequence
  Description of Artificial Sequence: Synthetic oligonucleotide
caucaguuaaauaaucuac

SEQ ID NO: 931073 - RNA, 19 nt, Artificial Sequence
  Description of Artificial Sequence: Synthetic oligonucleotide
uguguuugaaaauauguua

SEQ ID NO: 931074 - RNA, 19 nt, Artificial Sequence
  Description of Artificial Sequence: Synthetic oligonucleotide
uuaaaguuugguaccacac

SEQ ID NO: 931075 - RNA, 19 nt, Artificial Sequence
  Description of Artificial Sequence: Synthetic oligonucleotide
uauaucacaacauccuugu

SEQ ID NO: 931076 - RNA, 19 nt, Artificial Sequence
  Description of Artificial Sequence: Synthetic oligonucleotide
uuuaacucacauuucagau

SEQ ID NO: 931077 - RNA, 19 nt, Artificial Sequence
  Description of Artificial Sequence: Synthetic oligonucleotide
aguaucagagcacaggaca

SEQ ID NO: 931078 - RNA, 19 nt, Artificial Sequence
  Description of Artificial Sequence: Synthetic oligonucleotide
uacgguaacguuuaacuca

SEQ ID NO: 931079 - RNA, 19 nt, Artificial Sequence
  Description of Artificial Sequence: Synthetic oligonucleotide
uuacuuuaaagcaaagcau

SEQ ID NO: 931080 - RNA, 19 nt, Artificial Sequence
  Description of Artificial Sequence: Synthetic oligonucleotide
aaucuaccacguuucuacc

SEQ ID NO: 931081 - RNA, 19 nt, Artificial Sequence
  Description of Artificial Sequence: Synthetic oligonucleotide
ucaguuaaauaaucuacca

SEQ ID NO: 931082 - RNA, 19 nt, Artificial Sequence
  Description of Artificial Sequence: Synthetic oligonucleotide
aaucaacuguccccaaagg

SEQ ID NO: 931083 - RNA, 19 nt, Artificial Sequence
  Description of Artificial Sequence: Synthetic oligonucleotide
agaagcaaacuccaaucac

SEQ ID NO: 931084 - RNA, 19 nt, Artificial Sequence
  Description of Artificial Sequence: Synthetic oligonucleotide
aagauuauauaccccuugu

SEQ ID NO: 931085 - RNA, 19 nt, Artificial Sequence
  Description of Artificial Sequence: Synthetic oligonucleotide
ggaaauagaagguucagug

SEQ ID NO: 931086 - RNA, 19 nt, Artificial Sequence
  Description of Artificial Sequence: Synthetic oligonucleotide
uauuucacuaugcugccca

SEQ ID NO: 931087 - RNA, 19 nt, Artificial Sequence
  Description of Artificial Sequence: Synthetic oligonucleotide
uaaaaguaacuguuguuca

SEQ ID NO: 931088 - RNA, 19 nt, Artificial Sequence
  Description of Artificial Sequence: Synthetic oligonucleotide
aacccuuggaacuugugcu

SEQ ID NO: 931089 - RNA, 19 nt, Artificial Sequence
  Description of Artificial Sequence: Synthetic oligonucleotide
aagaagcaaacuccaauca

SEQ ID NO: 931090 - RNA, 19 nt, Artificial Sequence
  Description of Artificial Sequence: Synthetic oligonucleotide
aucaacuguccccaaaggg

SEQ ID NO: 931091 - RNA, 19 nt, Artificial Sequence
  Description of Artificial Sequence: Synthetic oligonucleotide
ucuaccuaacucuucauuc

SEQ ID NO: 931092 - RNA, 19 nt, Artificial Sequence
  Description of Artificial Sequence: Synthetic oligonucleotide
uacuuuaaagcaaagcauu

SEQ ID NO: 931093 - RNA, 19 nt, Artificial Sequence
  Description of Artificial Sequence: Synthetic oligonucleotide
auaaguacuacuugccugu

SEQ ID NO: 931094 - RNA, 19 nt, Artificial Sequence
  Description of Artificial Sequence: Synthetic oligonucleotide
aaaauauacgguaacguuu

SEQ ID NO: 931095 - RNA, 19 nt, Artificial Sequence
  Description of Artificial Sequence: Synthetic oligonucleotide
gaaauggcuaucuucucug

SEQ ID NO: 931096 - RNA, 19 nt, Artificial Sequence
  Description of Artificial Sequence: Synthetic oligonucleotide
uuuguugugauacgucaca

SEQ ID NO: 931097 - RNA, 19 nt, Artificial Sequence
  Description of Artificial Sequence: Synthetic oligonucleotide
agaacacaagccaucacgc

SEQ ID NO: 931098 - RNA, 19 nt, Artificial Sequence
  Description of Artificial Sequence: Synthetic oligonucleotide
uaaaaucaagugcugacua

SEQ ID NO: 931099 - RNA, 19 nt, Artificial Sequence
  Description of Artificial Sequence: Synthetic oligonucleotide
agucaagcaaauaaaauga

SEQ ID NO: 931100 - RNA, 19 nt, Artificial Sequence
  Description of Artificial Sequence: Synthetic oligonucleotide
uuauuuagugagauccugu

SEQ ID NO: 931101 - RNA, 19 nt, Artificial Sequence
  Description of Artificial Sequence: Synthetic oligonucleotide
ugacuaaaaguaacuguug

SEQ ID NO: 931102 - RNA, 19 nt, Artificial Sequence
  Description of Artificial Sequence: Synthetic oligonucleotide
ucacguucuggucuagacg

SEQ ID NO: 931103 - RNA, 19 nt, Artificial Sequence
  Description of Artificial Sequence: Synthetic oligonucleotide
ugcacgacaucauauaaaa

SEQ ID NO: 931104 - RNA, 19 nt, Artificial Sequence
  Description of Artificial Sequence: Synthetic oligonucleotide
ucaccauuguccaaagugu

SEQ ID NO: 931105 - RNA, 19 nt, Artificial Sequence
  Description of Artificial Sequence: Synthetic oligonucleotide
uggaacuugugcuaaaauc

SEQ ID NO: 931106 - RNA, 19 nt, Artificial Sequence
  Description of Artificial Sequence: Synthetic oligonucleotide
aagcaguuuugaaagagag

SEQ ID NO: 931107 - RNA, 19 nt, Artificial Sequence
  Description of Artificial Sequence: Synthetic oligonucleotide
auacgguaacguuuaacuc

SEQ ID NO: 931108 - RNA, 19 nt, Artificial Sequence
  Description of Artificial Sequence: Synthetic oligonucleotide
gcuuagguuauuuagugag

SEQ ID NO: 931109 - RNA, 19 nt, Artificial Sequence
  Description of Artificial Sequence: Synthetic oligonucleotide
guaauccaaaccaaaacug

SEQ ID NO: 931110 - RNA, 19 nt, Artificial Sequence
  Description of Artificial Sequence: Synthetic oligonucleotide
uacgucacauaaacaacag

SEQ ID NO: 931111 - RNA, 19 nt, Artificial Sequence
  Description of Artificial Sequence: Synthetic oligonucleotide
uccuuguaaauuaaaguuu

SEQ ID NO: 931112 - RNA, 19 nt, Artificial Sequence
  Description of Artificial Sequence: Synthetic oligonucleotide
acgacaucauauaaaaguc

SEQ ID NO: 931113 - RNA, 19 nt, Artificial Sequence
  Description of Artificial Sequence: Synthetic oligonucleotide
gaacccuuggaacuugugc

SEQ ID NO: 931114 - RNA, 19 nt, Artificial Sequence
  Description of Artificial Sequence: Synthetic oligonucleotide
gaaacuuuagcucugguuu

SEQ ID NO: 931115 - RNA, 19 nt, Artificial Sequence
  Description of Artificial Sequence: Synthetic oligonucleotide
acuccacuguuuuagaaca

SEQ ID NO: 931116 - RNA, 19 nt, Artificial Sequence
  Description of Artificial Sequence: Synthetic oligonucleotide
auauaaucauuggugaucu

SEQ ID NO: 931117 - RNA, 19 nt, Artificial Sequence
  Description of Artificial Sequence: Synthetic oligonucleotide
acaacauccuuguaaauua

SEQ ID NO: 931118 - RNA, 19 nt, Artificial Sequence
  Description of Artificial Sequence: Synthetic oligonucleotide
guugugauacgucacauaa

SEQ ID NO: 931119 - RNA, 19 nt, Artificial Sequence
  Description of Artificial Sequence: Synthetic oligonucleotide
cacacacacacacaaaaug

SEQ ID NO: 931120 - RNA, 19 nt, Artificial Sequence
  Description of Artificial Sequence: Synthetic oligonucleotide
gaagaccaacuauuugagg

SEQ ID NO: 931121 - RNA, 19 nt, Artificial Sequence
  Description of Artificial Sequence: Synthetic oligonucleotide
uuuggaugguagcaaguga

SEQ ID NO: 931122 - RNA, 19 nt, Artificial Sequence
  Description of Artificial Sequence: Synthetic oligonucleotide
aaguacuacuugccugugg

SEQ ID NO: 931123 - RNA, 19 nt, Artificial Sequence
  Description of Artificial Sequence: Synthetic oligonucleotide
uuuuguugugauacgucac

SEQ ID NO: 931124 - RNA, 19 nt, Artificial Sequence
  Description of Artificial Sequence: Synthetic oligonucleotide
acgucacauaaacaacagc

SEQ ID NO: 931125 - RNA, 19 nt, Artificial Sequence
  Description of Artificial Sequence: Synthetic oligonucleotide
cuugugcuaaaaucaagug

SEQ ID NO: 931126 - RNA, 19 nt, Artificial Sequence
  Description of Artificial Sequence: Synthetic oligonucleotide
uuggaugguagcaagugau

SEQ ID NO: 931127 - RNA, 19 nt, Artificial Sequence
  Description of Artificial Sequence: Synthetic oligonucleotide
cugaucuaaguuuuaaaca

SEQ ID NO: 931128 - RNA, 19 nt, Artificial Sequence
  Description of Artificial Sequence: Synthetic oligonucleotide
aacgccagcaccagcgacc

SEQ ID NO: 931129 - RNA, 19 nt, Artificial Sequence
  Description of Artificial Sequence: Synthetic oligonucleotide
aaccgugguacugaucugg

SEQ ID NO: 931130 - RNA, 19 nt, Artificial Sequence
  Description of Artificial Sequence: Synthetic oligonucleotide
aaauauacgguaacguuua

SEQ ID NO: 931131 - RNA, 19 nt, Artificial Sequence
  Description of Artificial Sequence: Synthetic oligonucleotide
agcucuaaagaaaagauua

SEQ ID NO: 931132 - RNA, 19 nt, Artificial Sequence
  Description of Artificial Sequence: Synthetic oligonucleotide
ugguaccacacacacacac

SEQ ID NO: 931133 - RNA, 19 nt, Artificial Sequence
  Description of Artificial Sequence: Synthetic oligonucleotide
caguuaaauaaucuaccac

SEQ ID NO: 931134 - RNA, 19 nt, Artificial Sequence
  Description of Artificial Sequence: Synthetic oligonucleotide
aguuuugaaagagaggaaa

SEQ ID NO: 931135 - RNA, 19 nt, Artificial Sequence
  Description of Artificial Sequence: Synthetic oligonucleotide
aacuuuagcucugguuugg

SEQ ID NO: 931136 - RNA, 19 nt, Artificial Sequence
  Description of Artificial Sequence: Synthetic oligonucleotide
acuacugcaauaaaacagu

SEQ ID NO: 931137 - RNA, 19 nt, Artificial Sequence
  Description of Artificial Sequence: Synthetic oligonucleotide
agguauauuucacuaugcu

SEQ ID NO: 931138 - RNA, 19 nt, Artificial Sequence
  Description of Artificial Sequence: Synthetic oligonucleotide
aaaucaagugcugacuaaa

SEQ ID NO: 931139 - RNA, 19 nt, Artificial Sequence
  Description of Artificial Sequence: Synthetic oligonucleotide
uucacggaguccucaaacc

SEQ ID NO: 931140 - RNA, 19 nt, Artificial Sequence
  Description of Artificial Sequence: Synthetic oligonucleotide
uccuucaaucaacuguccc

SEQ ID NO: 931141 - RNA, 19 nt, Artificial Sequence
  Description of Artificial Sequence: Synthetic oligonucleotide
cacgacaucauauaaaagu

SEQ ID NO: 931142 - RNA, 19 nt, Artificial Sequence
  Description of Artificial Sequence: Synthetic oligonucleotide
uuaacucacauuucagaua

SEQ ID NO: 931143 - RNA, 19 nt, Artificial Sequence
  Description of Artificial Sequence: Synthetic oligonucleotide
cuuuuguugugauacguca

SEQ ID NO: 931144 - RNA, 19 nt, Artificial Sequence
  Description of Artificial Sequence: Synthetic oligonucleotide
auauguuaucuggaagugg

SEQ ID NO: 931145 - RNA, 19 nt, Artificial Sequence
  Description of Artificial Sequence: Synthetic oligonucleotide
uuagguuauuuagugagau

SEQ ID NO: 931146 - RNA, 19 nt, Artificial Sequence
  Description of Artificial Sequence: Synthetic oligonucleotide
gaagcaaacuccaaucaca

SEQ ID NO: 931147 - RNA, 19 nt, Artificial Sequence
  Description of Artificial Sequence: Synthetic oligonucleotide
auauacgguaacguuuaac

SEQ ID NO: 931148 - RNA, 19 nt, Artificial Sequence
  Description of Artificial Sequence: Synthetic oligonucleotide
gauacgucacauaaacaac

SEQ ID NO: 931149 - RNA, 19 nt, Artificial Sequence
  Description of Artificial Sequence: Synthetic oligonucleotide
uacuacuugccuguggcag

SEQ ID NO: 931150 - RNA, 19 nt, Artificial Sequence
  Description of Artificial Sequence: Synthetic oligonucleotide
agaauucugcacgacauca

SEQ ID NO: 931151 - RNA, 19 nt, Artificial Sequence
  Description of Artificial Sequence: Synthetic oligonucleotide
ucugcacgacaucauauaa

SEQ ID NO: 931152 - RNA, 19 nt, Artificial Sequence
  Description of Artificial Sequence: Synthetic oligonucleotide
ucaccugaacccuuggaac

SEQ ID NO: 931153 - RNA, 19 nt, Artificial Sequence
  Description of Artificial Sequence: Synthetic oligonucleotide
cuauuugaggccagcuuag

SEQ ID NO: 931154 - RNA, 19 nt, Artificial Sequence
  Description of Artificial Sequence: Synthetic oligonucleotide
ugggaucuuucaaaggaac

SEQ ID NO: 931155 - RNA, 19 nt, Artificial Sequence
  Description of Artificial Sequence: Synthetic oligonucleotide
auuuagugagauccugucu

SEQ ID NO: 931156 - RNA, 19 nt, Artificial Sequence
  Description of Artificial Sequence: Synthetic oligonucleotide
cacacacacacaaaaugug

SEQ ID NO: 931157 - RNA, 19 nt, Artificial Sequence
  Description of Artificial Sequence: Synthetic oligonucleotide
aacguuuaacucacauuuc

SEQ ID NO: 931158 - RNA, 19 nt, Artificial Sequence
  Description of Artificial Sequence: Synthetic oligonucleotide
accacacacacacacaaaa

SEQ ID NO: 931159 - RNA, 19 nt, Artificial Sequence
  Description of Artificial Sequence: Synthetic oligonucleotide
cagguauauuucacuaugc

SEQ ID NO: 931160 - RNA, 19 nt, Artificial Sequence
  Description of Artificial Sequence: Synthetic oligonucleotide
aaacgguggaguuguguga

SEQ ID NO: 931161 - RNA, 19 nt, Artificial Sequence
  Description of Artificial Sequence: Synthetic oligonucleotide
gcaguuuugaaagagagga

SEQ ID NO: 931162 - RNA, 19 nt, Artificial Sequence
  Description of Artificial Sequence: Synthetic oligonucleotide
gaugaaaaccagcagugcu

SEQ ID NO: 931163 - RNA, 19 nt, Artificial Sequence
  Description of Artificial Sequence: Synthetic oligonucleotide
gaaucuagcucuaaagaaa

SEQ ID NO: 931164 - RNA, 19 nt, Artificial Sequence
  Description of Artificial Sequence: Synthetic oligonucleotide
ugugcucuggaguaucaga

SEQ ID NO: 931165 - RNA, 19 nt, Artificial Sequence
  Description of Artificial Sequence: Synthetic oligonucleotide
cagcuuagguuauuuagug

SEQ ID NO: 931166 - RNA, 19 nt, Artificial Sequence
  Description of Artificial Sequence: Synthetic oligonucleotide
guuauuuagugagauccug

SEQ ID NO: 931167 - RNA, 19 nt, Artificial Sequence
  Description of Artificial Sequence: Synthetic oligonucleotide
uguggauggggaacuguug

SEQ ID NO: 931168 - RNA, 19 nt, Artificial Sequence
  Description of Artificial Sequence: Synthetic oligonucleotide
uuucagauaccugauugaa

SEQ ID NO: 931169 - RNA, 19 nt, Artificial Sequence
  Description of Artificial Sequence: Synthetic oligonucleotide
agaagaccaacuauuugag

SEQ ID NO: 931170 - RNA, 19 nt, Artificial Sequence
  Description of Artificial Sequence: Synthetic oligonucleotide
ucuaccacguuucuaccua

SEQ ID NO: 931171 - RNA, 19 nt, Artificial Sequence
  Description of Artificial Sequence: Synthetic oligonucleotide
ggaacuugugcuaaaauca

SEQ ID NO: 931172 - RNA, 19 nt, Artificial Sequence
  Description of Artificial Sequence: Synthetic oligonucleotide
uuccuuuuguugugauacg

SEQ ID NO: 931173 - RNA, 19 nt, Artificial Sequence
  Description of Artificial Sequence: Synthetic oligonucleotide
aucaccugaacccuuggaa

SEQ ID NO: 931174 - RNA, 19 nt, Artificial Sequence
  Description of Artificial Sequence: Synthetic oligonucleotide
auacgucacauaaacaaca

SEQ ID NO: 931175 - RNA, 19 nt, Artificial Sequence
  Description of Artificial Sequence: Synthetic oligonucleotide
ucaggcuuggcggcaaacg

SEQ ID NO: 931176 - RNA, 19 nt, Artificial Sequence
  Description of Artificial Sequence: Synthetic oligonucleotide
ugguuugggaucuuucaaa

SEQ ID NO: 931177 - RNA, 19 nt, Artificial Sequence
  Description of Artificial Sequence: Synthetic oligonucleotide
uggaugguagcaagugaug

SEQ ID NO: 931178 - RNA, 19 nt, Artificial Sequence
  Description of Artificial Sequence: Synthetic oligonucleotide
gauugaaucuagcucuaaa

SEQ ID NO: 931179 - RNA, 19 nt, Artificial Sequence
  Description of Artificial Sequence: Synthetic oligonucleotide
ugcuaaaaucaagugcuga

SEQ ID NO: 931180 - RNA, 19 nt, Artificial Sequence
  Description of Artificial Sequence: Synthetic oligonucleotide
ucucgugcagcuccgcuca

SEQ ID NO: 931181 - RNA, 19 nt, Artificial Sequence
  Description of Artificial Sequence: Synthetic oligonucleotide
acgguaacguuuaacucac

SEQ ID NO: 931182 - RNA, 19 nt, Artificial Sequence
  Description of Artificial Sequence: Synthetic oligonucleotide
acacacacacacaaaaugu

SEQ ID NO: 931183 - RNA, 19 nt, Artificial Sequence
  Description of Artificial Sequence: Synthetic oligonucleotide
aagcauuauaucacaacau

SEQ ID NO: 931184 - RNA, 19 nt, Artificial Sequence
  Description of Artificial Sequence: Synthetic oligonucleotide
auauuucacuaugcugccc

SEQ ID NO: 931185 - RNA, 19 nt, Artificial Sequence
  Description of Artificial Sequence: Synthetic oligonucleotide
uacugaucugggaaauaga

SEQ ID NO: 931186 - RNA, 19 nt, Artificial Sequence
  Description of Artificial Sequence: Synthetic oligonucleotide
aguccagguauauuucacu

SEQ ID NO: 931187 - RNA, 19 nt, Artificial Sequence
  Description of Artificial Sequence: Synthetic oligonucleotide
uauaccccuuguuugugac

SEQ ID NO: 931188 - RNA, 19 nt, Artificial Sequence
  Description of Artificial Sequence: Synthetic oligonucleotide
gcuaaaaucaagugcugac

SEQ ID NO: 931189 - RNA, 19 nt, Artificial Sequence
  Description of Artificial Sequence: Synthetic oligonucleotide
uagcucuaaagaaaagauu

SEQ ID NO: 931190 - RNA, 19 nt, Artificial Sequence
  Description of Artificial Sequence: Synthetic oligonucleotide
gucacauaaacaacagcug

SEQ ID NO: 931191 - RNA, 19 nt, Artificial Sequence
  Description of Artificial Sequence: Synthetic oligonucleotide
ucaucaccugaacccuugg

SEQ ID NO: 931192 - RNA, 19 nt, Artificial Sequence
  Description of Artificial Sequence: Synthetic oligonucleotide
uucagauaccugauugaau

SEQ ID NO: 931193 - RNA, 19 nt, Artificial Sequence
  Description of Artificial Sequence: Synthetic oligonucleotide
auaccugauugaaucuagc

SEQ ID NO: 931194 - RNA, 19 nt, Artificial Sequence
  Description of Artificial Sequence: Synthetic oligonucleotide
uuagaacacaagccaucac

SEQ ID NO: 931195 - RNA, 19 nt, Artificial Sequence
  Description of Artificial Sequence: Synthetic oligonucleotide
gugggugucgcagaggugc

SEQ ID NO: 931196 - RNA, 19 nt, Artificial Sequence
  Description of Artificial Sequence: Synthetic oligonucleotide
gucugcaccaggaucgugg

SEQ ID NO: 931197 - RNA, 19 nt, Artificial Sequence
  Description of Artificial Sequence: Synthetic oligonucleotide
cacggaguccucaaacccc

SEQ ID NO: 931198 - RNA, 19 nt, Artificial Sequence
  Description of Artificial Sequence: Synthetic oligonucleotide
cugcaauaaaacaguccag

SEQ ID NO: 931199 - RNA, 19 nt, Artificial Sequence
  Description of Artificial Sequence: Synthetic oligonucleotide
caaacgcccucacugacug

SEQ ID NO: 931200 - RNA, 19 nt, Artificial Sequence
  Description of Artificial Sequence: Synthetic oligonucleotide
uaaagcgccuguucucuca

SEQ ID NO: 931201 - RNA, 19 nt, Artificial Sequence
  Description of Artificial Sequence: Synthetic oligonucleotide
aauggcuaucuucucuguu

SEQ ID NO: 931202 - RNA, 19 nt, Artificial Sequence
  Description of Artificial Sequence: Synthetic oligonucleotide
uucuaccuaacucuucauu

SEQ ID NO: 931203 - RNA, 19 nt, Artificial Sequence
  Description of Artificial Sequence: Synthetic oligonucleotide
guaacuguuguucaucagu

SEQ ID NO: 931204 - RNA, 19 nt, Artificial Sequence
  Description of Artificial Sequence: Synthetic oligonucleotide
cugcuuugaacuaggagga

SEQ ID NO: 931205 - RNA, 19 nt, Artificial Sequence
  Description of Artificial Sequence: Synthetic oligonucleotide
ugguagcaagugaugaaaa

SEQ ID NO: 931206 - RNA, 19 nt, Artificial Sequence
  Description of Artificial Sequence: Synthetic oligonucleotide
ugugugacgugugcucugg

SEQ ID NO: 931207 - RNA, 19 nt, Artificial Sequence
  Description of Artificial Sequence: Synthetic oligonucleotide
agcuagaggagaaacggug

SEQ ID NO: 931208 - RNA, 19 nt, Artificial Sequence
  Description of Artificial Sequence: Synthetic oligonucleotide
uuggaacuugugcuaaaau

SEQ ID NO: 931209 - RNA, 19 nt, Artificial Sequence
  Description of Artificial Sequence: Synthetic oligonucleotide
ugcuggcucgccuaaacaa

SEQ ID NO: 931210 - RNA, 19 nt, Artificial Sequence
  Description of Artificial Sequence: Synthetic oligonucleotide
agcaguuuugaaagagagg

SEQ ID NO: 931211 - RNA, 19 nt, Artificial Sequence
  Description of Artificial Sequence: Synthetic oligonucleotide
aaaagauuauauaccccuu

SEQ ID NO: 931212 - RNA, 19 nt, Artificial Sequence
  Description of Artificial Sequence: Synthetic oligonucleotide
agcuuagguuauuuaguga

SEQ ID NO: 931213 - RNA, 19 nt, Artificial Sequence
  Description of Artificial Sequence: Synthetic oligonucleotide
gaugguagcaagugaugaa

SEQ ID NO: 931214 - RNA, 19 nt, Artificial Sequence
  Description of Artificial Sequence: Synthetic oligonucleotide
uccuuuuguugugauacgu

SEQ ID NO: 931215 - RNA, 19 nt, Artificial Sequence
  Description of Artificial Sequence: Synthetic oligonucleotide
auggcuaucuucucuguuu

SEQ ID NO: 931216 - RNA, 19 nt, Artificial Sequence
  Description of Artificial Sequence: Synthetic oligonucleotide
agcaagaagaccaacuauu

SEQ ID NO: 931217 - RNA, 19 nt, Artificial Sequence
  Description of Artificial Sequence: Synthetic oligonucleotide
agaggagaaacgguggagu

SEQ ID NO: 931218 - RNA, 19 nt, Artificial Sequence
  Description of Artificial Sequence: Synthetic oligonucleotide
cuaccuaacucuucauuca

SEQ ID NO: 931219 - RNA, 19 nt, Artificial Sequence
  Description of Artificial Sequence: Synthetic oligonucleotide
uccagguauauuucacuau

SEQ ID NO: 931220 - RNA, 19 nt, Artificial Sequence
  Description of Artificial Sequence: Synthetic oligonucleotide
aauauacgguaacguuuaa

SEQ ID NO: 931221 - RNA, 19 nt, Artificial Sequence
  Description of Artificial Sequence: Synthetic oligonucleotide
acuuccugcuuugaacuag

SEQ ID NO: 931222 - RNA, 19 nt, Artificial Sequence
  Description of Artificial Sequence: Synthetic oligonucleotide
uggaguugugugacgugug

SEQ ID NO: 931223 - RNA, 19 nt, Artificial Sequence
  Description of Artificial Sequence: Synthetic oligonucleotide
guaccacacacacacacaa

SEQ ID NO: 931224 - RNA, 19 nt, Artificial Sequence
  Description of Artificial Sequence: Synthetic oligonucleotide
cuaagcaagaagaccaacu

SEQ ID NO: 931225 - RNA, 19 nt, Artificial Sequence
  Description of Artificial Sequence: Synthetic oligonucleotide
ugacgugugcucuggagua

SEQ ID NO: 931226 - RNA, 19 nt, Artificial Sequence
  Description of Artificial Sequence: Synthetic oligonucleotide
cuuagguuauuuagugaga

SEQ ID NO: 931227 - RNA, 19 nt, Artificial Sequence
  Description of Artificial Sequence: Synthetic oligonucleotide
ugaacccuuggaacuugug

SEQ ID NO: 931228 - RNA, 19 nt, Artificial Sequence
  Description of Artificial Sequence: Synthetic oligonucleotide
auauaccccuuguuuguga

SEQ ID NO: 931229 - RNA, 19 nt, Artificial Sequence
  Description of Artificial Sequence: Synthetic oligonucleotide
cugacuaaaaguaacuguu

SEQ ID NO: 931230 - RNA, 19 nt, Artificial Sequence
  Description of Artificial Sequence: Synthetic oligonucleotide
accacguuucuaccuaacu

SEQ ID NO: 931231 - RNA, 19 nt, Artificial Sequence
  Description of Artificial Sequence: Synthetic oligonucleotide
aaucaagugcugacuaaaa

SEQ ID NO: 931232 - RNA, 19 nt, Artificial Sequence
  Description of Artificial Sequence: Synthetic oligonucleotide
acauguuacuuuaaagcaa

SEQ ID NO: 931233 - RNA, 19 nt, Artificial Sequence
  Description of Artificial Sequence: Synthetic oligonucleotide
uagguuauuuagugagauc

SEQ ID NO: 931234 - RNA, 19 nt, Artificial Sequence
  Description of Artificial Sequence: Synthetic oligonucleotide
aaguuugguaccacacaca

SEQ ID NO: 931235 - RNA, 19 nt, Artificial Sequence
  Description of Artificial Sequence: Synthetic oligonucleotide
ggaaccgugguacugaucu

SEQ ID NO: 931236 - RNA, 19 nt, Artificial Sequence
  Description of Artificial Sequence: Synthetic oligonucleotide
cuggucuagacggugguac

SEQ ID NO: 931237 - RNA, 19 nt, Artificial Sequence
  Description of Artificial Sequence: Synthetic oligonucleotide
cacguuucuaccuaacucu

SEQ ID NO: 931238 - RNA, 19 nt, Artificial Sequence
  Description of Artificial Sequence: Synthetic oligonucleotide
gccauaacggacucggccc

SEQ ID NO: 931239 - RNA, 19 nt, Artificial Sequence
  Description of Artificial Sequence: Synthetic oligonucleotide
uguugugauacgucacaua

SEQ ID NO: 931240 - RNA, 19 nt, Artificial Sequence
  Description of Artificial Sequence: Synthetic oligonucleotide
cucgccuaaacaaacugaa

SEQ ID NO: 931241 - RNA, 19 nt, Artificial Sequence
  Description of Artificial Sequence: Synthetic oligonucleotide
uccuaagcaagaagaccaa

SEQ ID NO: 931242 - RNA, 19 nt, Artificial Sequence
  Description of Artificial Sequence: Synthetic oligonucleotide
cuggcucgccuaaacaaac

SEQ ID NO: 931243 - RNA, 19 nt, Artificial Sequence
  Description of Artificial Sequence: Synthetic oligonucleotide
caggcuuggcggcaaacgc

SEQ ID NO: 931244 - RNA, 19 nt, Artificial Sequence
  Description of Artificial Sequence: Synthetic oligonucleotide
uucuggucuagacgguggu

SEQ ID NO: 931245 - RNA, 19 nt, Artificial Sequence
  Description of Artificial Sequence: Synthetic oligonucleotide
acuaugcugcccauccuuc

SEQ ID NO: 931246 - RNA, 19 nt, Artificial Sequence
  Description of Artificial Sequence: Synthetic oligonucleotide
ccagguauauuucacuaug

SEQ ID NO: 931247 - RNA, 19 nt, Artificial Sequence
  Description of Artificial Sequence: Synthetic oligonucleotide
auguguuugaaaauauguu

SEQ ID NO: 931248 - RNA, 19 nt, Artificial Sequence
  Description of Artificial Sequence: Synthetic oligonucleotide
caccauuguccaaaguguc

SEQ ID NO: 931249 - RNA, 19 nt, Artificial Sequence
  Description of Artificial Sequence: Synthetic oligonucleotide
ucauucacguucuggucua

SEQ ID NO: 931250 - RNA, 19 nt, Artificial Sequence
  Description of Artificial Sequence: Synthetic oligonucleotide
gaaggaaccgugguacuga

SEQ ID NO: 931251 - RNA, 19 nt, Artificial Sequence
  Description of Artificial Sequence: Synthetic oligonucleotide
uaccccuuguuugugacau

SEQ ID NO: 931252 - RNA, 19 nt, Artificial Sequence
  Description of Artificial Sequence: Synthetic oligonucleotide
ucuagacggugguacucca

SEQ ID NO: 931253 - RNA, 19 nt, Artificial Sequence
  Description of Artificial Sequence: Synthetic oligonucleotide
gaacuugugcuaaaaucaa

SEQ ID NO: 931254 - RNA, 19 nt, Artificial Sequence
  Description of Artificial Sequence: Synthetic oligonucleotide
gcggcaaacgcccucacug

SEQ ID NO: 931255 - RNA, 19 nt, Artificial Sequence
  Description of Artificial Sequence: Synthetic oligonucleotide
ggccauaacggacucggcc

SEQ ID NO: 931256 - RNA, 19 nt, Artificial Sequence
  Description of Artificial Sequence: Synthetic oligonucleotide
ucgccuaaacaaacugaaa

SEQ ID NO: 931257 - RNA, 19 nt, Artificial Sequence
  Description of Artificial Sequence: Synthetic oligonucleotide
cauaaacaacagcuguaca

SEQ ID NO: 931258 - RNA, 19 nt, Artificial Sequence
  Description of Artificial Sequence: Synthetic oligonucleotide
aaggaaccgugguacugau

SEQ ID NO: 931259 - RNA, 19 nt, Artificial Sequence
  Description of Artificial Sequence: Synthetic oligonucleotide
uuucuaccuaacucuucau

SEQ ID NO: 931260 - RNA, 19 nt, Artificial Sequence
  Description of Artificial Sequence: Synthetic oligonucleotide
aggagaaacgguggaguug

SEQ ID NO: 931261 - RNA, 19 nt, Artificial Sequence
  Description of Artificial Sequence: Synthetic oligonucleotide
ccugauugaaucuagcucu

SEQ ID NO: 931262 - RNA, 19 nt, Artificial Sequence
  Description of Artificial Sequence: Synthetic oligonucleotide
guguuugaaaauauguuau

SEQ ID NO: 931263 - RNA, 19 nt, Artificial Sequence
  Description of Artificial Sequence: Synthetic oligonucleotide
acauuucagauaccugauu

SEQ ID NO: 931264 - RNA, 19 nt, Artificial Sequence
  Description of Artificial Sequence: Synthetic oligonucleotide
gugguccagucauagucug

SEQ ID NO: 931265 - RNA, 19 nt, Artificial Sequence
  Description of Artificial Sequence: Synthetic oligonucleotide
gcaagugaugaaaaccagc

SEQ ID NO: 931266 - RNA, 19 nt, Artificial Sequence
  Description of Artificial Sequence: Synthetic oligonucleotide
ucucucgugcagcuccgcu

SEQ ID NO: 931267 - RNA, 19 nt, Artificial Sequence
  Description of Artificial Sequence: Synthetic oligonucleotide
ugcugccagaggcacaaua

SEQ ID NO: 931268 - RNA, 19 nt, Artificial Sequence
  Description of Artificial Sequence: Synthetic oligonucleotide
gucuagacggugguacucc

SEQ ID NO: 931269 - RNA, 19 nt, Artificial Sequence
  Description of Artificial Sequence: Synthetic oligonucleotide
uuguugugauacgucacau

SEQ ID NO: 931270 - RNA, 19 nt, Artificial Sequence
  Description of Artificial Sequence: Synthetic oligonucleotide
uguugagggccagaagauc

SEQ ID NO: 931271 - RNA, 19 nt, Artificial Sequence
  Description of Artificial Sequence: Synthetic oligonucleotide
uaaguacuacuugccugug

SEQ ID NO: 931272 - RNA, 19 nt, Artificial Sequence
  Description of Artificial Sequence: Synthetic oligonucleotide
uaccacguuucuaccuaac

SEQ ID NO: 931273 - RNA, 19 nt, Artificial Sequence
  Description of Artificial Sequence: Synthetic oligonucleotide
acucugaucuaaguuuuaa

SEQ ID NO: 931274 - RNA, 19 nt, Artificial Sequence
  Description of Artificial Sequence: Synthetic oligonucleotide
uggcucgccuaaacaaacu

SEQ ID NO: 931275 - RNA, 19 nt, Artificial Sequence
  Description of Artificial Sequence: Synthetic oligonucleotide
aggcgcgagcagcaacgcc

SEQ ID NO: 931276 - RNA, 19 nt, Artificial Sequence
  Description of Artificial Sequence: Synthetic oligonucleotide
ucacuaugcugcccauccu

SEQ ID NO: 931277 - RNA, 19 nt, Artificial Sequence
  Description of Artificial Sequence: Synthetic oligonucleotide
guccagguauauuucacua

SEQ ID NO: 931278 - RNA, 19 nt, Artificial Sequence
  Description of Artificial Sequence: Synthetic oligonucleotide
cucuugauaaguacuacuu

SEQ ID NO: 931279 - RNA, 19 nt, Artificial Sequence
  Description of Artificial Sequence: Synthetic oligonucleotide
ggaguugugugacgugugc

SEQ ID NO: 931280 - RNA, 19 nt, Artificial Sequence
  Description of Artificial Sequence: Synthetic oligonucleotide
cucugaucuaaguuuuaaa

SEQ ID NO: 931281 - RNA, 19 nt, Artificial Sequence
  Description of Artificial Sequence: Synthetic oligonucleotide
ugcugcccauccuucaauc

SEQ ID NO: 931282 - RNA, 19 nt, Artificial Sequence
  Description of Artificial Sequence: Synthetic oligonucleotide
cuaaaaucaagugcugacu

SEQ ID NO: 931283 - RNA, 19 nt, Artificial Sequence
  Description of Artificial Sequence: Synthetic oligonucleotide
cagcacuugagaauccuaa

SEQ ID NO: 931284 - RNA, 19 nt, Artificial Sequence
  Description of Artificial Sequence: Synthetic oligonucleotide
cuccaugcuaggaucuuca

SEQ ID NO: 931285 - RNA, 19 nt, Artificial Sequence
  Description of Artificial Sequence: Synthetic oligonucleotide
uaccacacacacacacaaa

SEQ ID NO: 931286 - RNA, 19 nt, Artificial Sequence
  Description of Artificial Sequence: Synthetic oligonucleotide
ucacaacauccuuguaaau

SEQ ID NO: 931287 - RNA, 19 nt, Artificial Sequence
  Description of Artificial Sequence: Synthetic oligonucleotide
accauuguccaaagugucu

SEQ ID NO: 931288 - RNA, 19 nt, Artificial Sequence
  Description of Artificial Sequence: Synthetic oligonucleotide
ggcucgccuaaacaaacug

SEQ ID NO: 931289 - RNA, 19 nt, Artificial Sequence
  Description of Artificial Sequence: Synthetic oligonucleotide
cuggcuggggaaggaaccg

SEQ ID NO: 931290 - RNA, 19 nt, Artificial Sequence
  Description of Artificial Sequence: Synthetic oligonucleotide
gaaccgugguacugaucug

SEQ ID NO: 931291 - RNA, 19 nt, Artificial Sequence
  Description of Artificial Sequence: Synthetic oligonucleotide
uugguaccacacacacaca

SEQ ID NO: 931292 - RNA, 19 nt, Artificial Sequence
  Description of Artificial Sequence: Synthetic oligonucleotide
caccuuaucauccaucuuu

SEQ ID NO: 931293 - RNA, 19 nt, Artificial Sequence
  Description of Artificial Sequence: Synthetic oligonucleotide
auguuacuuuaaagcaaag

SEQ ID NO: 931294 - RNA, 19 nt, Artificial Sequence
  Description of Artificial Sequence: Synthetic oligonucleotide
cucucgugcagcuccgcuc

SEQ ID NO: 931295 - RNA, 19 nt, Artificial Sequence
  Description of Artificial Sequence: Synthetic oligonucleotide
ugggugucgcagaggugcc

SEQ ID NO: 931296 - RNA, 19 nt, Artificial Sequence
  Description of Artificial Sequence: Synthetic oligonucleotide
guucaguguuguuuccaga

SEQ ID NO: 931297 - RNA, 19 nt, Artificial Sequence
  Description of Artificial Sequence: Synthetic oligonucleotide
ggcagaauucugcacgaca

SEQ ID NO: 931298 - RNA, 19 nt, Artificial Sequence
  Description of Artificial Sequence: Synthetic oligonucleotide
gacaggcgcgagcagcaac

SEQ ID NO: 931299 - RNA, 19 nt, Artificial Sequence
  Description of Artificial Sequence: Synthetic oligonucleotide
guacuccacuguuuuagaa

SEQ ID NO: 931300 - RNA, 19 nt, Artificial Sequence
  Description of Artificial Sequence: Synthetic oligonucleotide
ugauugaaucuagcucuaa

SEQ ID NO: 931301 - RNA, 19 nt, Artificial Sequence
  Description of Artificial Sequence: Synthetic oligonucleotide
gcuaggaucuucauugcca

SEQ ID NO: 931302 - RNA, 19 nt, Artificial Sequence
  Description of Artificial Sequence: Synthetic oligonucleotide
gcggccauaacggacucgg

SEQ ID NO: 931303 - RNA, 19 nt, Artificial Sequence
  Description of Artificial Sequence: Synthetic oligonucleotide
cgucacauaaacaacagcu

SEQ ID NO: 931304 - RNA, 19 nt, Artificial Sequence
  Description of Artificial Sequence: Synthetic oligonucleotide
auuucacuaugcugcccau

SEQ ID NO: 931305 - RNA, 19 nt, Artificial Sequence
  Description of Artificial Sequence: Synthetic oligonucleotide
uuggcggcaaacgcccuca

SEQ ID NO: 931306 - RNA, 19 nt, Artificial Sequence
  Description of Artificial Sequence: Synthetic oligonucleotide
cugcacgacaucauauaaa

SEQ ID NO: 931307 - RNA, 19 nt, Artificial Sequence
  Description of Artificial Sequence: Synthetic oligonucleotide
acagagggagugggugucg

SEQ ID NO: 931308 - RNA, 19 nt, Artificial Sequence
  Description of Artificial Sequence: Synthetic oligonucleotide
cuaaagcgccuguucucuc

SEQ ID NO: 931309 - RNA, 19 nt, Artificial Sequence
  Description of Artificial Sequence: Synthetic oligonucleotide
accgugguacugaucuggg

SEQ ID NO: 931310 - RNA, 19 nt, Artificial Sequence
  Description of Artificial Sequence: Synthetic oligonucleotide
cacgccacuuccugcuuug

SEQ ID NO: 931311 - RNA, 19 nt, Artificial Sequence
  Description of Artificial Sequence: Synthetic oligonucleotide
gugcuaaaaucaagugcug

SEQ ID NO: 931312 - RNA, 19 nt, Artificial Sequence
  Description of Artificial Sequence: Synthetic oligonucleotide
accagcgaccgcgccagcg

SEQ ID NO: 931313 - RNA, 19 nt, Artificial Sequence
  Description of Artificial Sequence: Synthetic oligonucleotide
gugacgugugcucuggagu

SEQ ID NO: 931314 - RNA, 19 nt, Artificial Sequence
  Description of Artificial Sequence: Synthetic oligonucleotide
gcaauaaaacaguccaggu

SEQ ID NO: 931315 - RNA, 19 nt, Artificial Sequence
  Description of Artificial Sequence: Synthetic oligonucleotide
gugauacgucacauaaaca

SEQ ID NO: 931316 - RNA, 19 nt, Artificial Sequence
  Description of Artificial Sequence: Synthetic oligonucleotide
cugaaaacacucugaucua

SEQ ID NO: 931317 - RNA, 19 nt, Artificial Sequence
  Description of Artificial Sequence: Synthetic oligonucleotide
cuaugcugcccauccuuca

SEQ ID NO: 931318 - RNA, 19 nt, Artificial Sequence
  Description of Artificial Sequence: Synthetic oligonucleotide
agcgcuccgaggccccggg

SEQ ID NO: 931319 - RNA, 19 nt, Artificial Sequence
  Description of Artificial Sequence: Synthetic oligonucleotide
gugcugggccccaugaaac

SEQ ID NO: 931320 - RNA, 19 nt, Artificial Sequence
  Description of Artificial Sequence: Synthetic oligonucleotide
aaacgcccucacugacuga

SEQ ID NO: 931321 - RNA, 19 nt, Artificial Sequence
  Description of Artificial Sequence: Synthetic oligonucleotide
cuuggaacuugugcuaaaa

SEQ ID NO: 931322 - RNA, 19 nt, Artificial Sequence
  Description of Artificial Sequence: Synthetic oligonucleotide
ucacgccacuuccugcuuu

SEQ ID NO: 931323 - RNA, 19 nt, Artificial Sequence
  Description of Artificial Sequence: Synthetic oligonucleotide
gguaccagcacuugagaau

SEQ ID NO: 931324 - RNA, 19 nt, Artificial Sequence
  Description of Artificial Sequence: Synthetic oligonucleotide
cuuggcggcaaacgcccuc

SEQ ID NO: 931325 - RNA, 19 nt, Artificial Sequence
  Description of Artificial Sequence: Synthetic oligonucleotide
ccaugaaacuuuagcucug

SEQ ID NO: 931326 - RNA, 19 nt, Artificial Sequence
  Description of Artificial Sequence: Synthetic oligonucleotide
auguuaucuggaagugggu

SEQ ID NO: 931327 - RNA, 19 nt, Artificial Sequence
  Description of Artificial Sequence: Synthetic oligonucleotide
gacggugguacuccacugu

SEQ ID NO: 931328 - RNA, 19 nt, Artificial Sequence
  Description of Artificial Sequence: Synthetic oligonucleotide
accaacuauuugaggccag

SEQ ID NO: 931329 - RNA, 19 nt, Artificial Sequence
  Description of Artificial Sequence: Synthetic oligonucleotide
gguacuccacuguuuuaga

SEQ ID NO: 931330 - RNA, 19 nt, Artificial Sequence
  Description of Artificial Sequence: Synthetic oligonucleotide
ugucgcagaggugccucca

SEQ ID NO: 931331 - RNA, 19 nt, Artificial Sequence
  Description of Artificial Sequence: Synthetic oligonucleotide
ugggccccaugaaacuuua

SEQ ID NO: 931332 - RNA, 19 nt, Artificial Sequence
  Description of Artificial Sequence: Synthetic oligonucleotide
gugugcucuggaguaucag

SEQ ID NO: 931333 - RNA, 19 nt, Artificial Sequence
  Description of Artificial Sequence: Synthetic oligonucleotide
ggcuuggcggcaaacgccc

SEQ ID NO: 931334 - RNA, 19 nt, Artificial Sequence
  Description of Artificial Sequence: Synthetic oligonucleotide
uagaagguucaguguuguu

SEQ ID NO: 931335 - RNA, 19 nt, Artificial Sequence
  Description of Artificial Sequence: Synthetic oligonucleotide
gggaucuuucaaaggaaca

SEQ ID NO: 931336 - RNA, 19 nt, Artificial Sequence
  Description of Artificial Sequence: Synthetic oligonucleotide
caucaccugaacccuugga

SEQ ID NO: 931337 - RNA, 19 nt, Artificial Sequence
  Description of Artificial Sequence: Synthetic oligonucleotide
cacaacauccuuguaaauu

SEQ ID NO: 931338 - RNA, 19 nt, Artificial Sequence
  Description of Artificial Sequence: Synthetic oligonucleotide
auucacguucuggucuaga

SEQ ID NO: 931339 - RNA, 19 nt, Artificial Sequence
  Description of Artificial Sequence: Synthetic oligonucleotide
cugauugaaucuagcucua

SEQ ID NO: 931340 - RNA, 19 nt, Artificial Sequence
  Description of Artificial Sequence: Synthetic oligonucleotide
caccugaacccuuggaacu

SEQ ID NO: 931341 - RNA, 19 nt, Artificial Sequence
  Description of Artificial Sequence: Synthetic oligonucleotide
caucacgccacuuccugcu

SEQ ID NO: 931342 - RNA, 19 nt, Artificial Sequence
  Description of Artificial Sequence: Synthetic oligonucleotide
ggugaucuucagagaaggc

SEQ ID NO: 931343 - RNA, 19 nt, Artificial Sequence
  Description of Artificial Sequence: Synthetic oligonucleotide
ggcaaacgcccucacugac

SEQ ID NO: 931344 - RNA, 19 nt, Artificial Sequence
  Description of Artificial Sequence: Synthetic oligonucleotide
gcuccgcucauucugccca

SEQ ID NO: 931345 - RNA, 19 nt, Artificial Sequence
  Description of Artificial Sequence: Synthetic oligonucleotide
ucgcagaggugccuccauu

SEQ ID NO: 931346 - RNA, 19 nt, Artificial Sequence
  Description of Artificial Sequence: Synthetic oligonucleotide
gugucgcagaggugccucc

SEQ ID NO: 931347 - RNA, 19 nt, Artificial Sequence
  Description of Artificial Sequence: Synthetic oligonucleotide
gcacgacaucauauaaaag

SEQ ID NO: 931348 - RNA, 19 nt, Artificial Sequence
  Description of Artificial Sequence: Synthetic oligonucleotide
cuccgcucauucugcccag

SEQ ID NO: 931349 - RNA, 19 nt, Artificial Sequence
  Description of Artificial Sequence: Synthetic oligonucleotide
gguaccacacacacacaca

SEQ ID NO: 931350 - RNA, 19 nt, Artificial Sequence
  Description of Artificial Sequence: Synthetic oligonucleotide
gcuuugaacuaggaggaaa

SEQ ID NO: 931351 - RNA, 19 nt, Artificial Sequence
  Description of Artificial Sequence: Synthetic oligonucleotide
agcacaggacaggcgcgag

SEQ ID NO: 931352 - RNA, 19 nt, Artificial Sequence
  Description of Artificial Sequence: Synthetic oligonucleotide
ccaacuauuugaggccagc

SEQ ID NO: 931353 - RNA, 19 nt, Artificial Sequence
  Description of Artificial Sequence: Synthetic oligonucleotide
uggcagaauucugcacgac

SEQ ID NO: 931354 - RNA, 19 nt, Artificial Sequence
  Description of Artificial Sequence: Synthetic oligonucleotide
ccaucacgccacuuccugc

SEQ ID NO: 931355 - RNA, 19 nt, Artificial Sequence
  Description of Artificial Sequence: Synthetic oligonucleotide
accgcgccagcgcuccgag

SEQ ID NO: 931356 - RNA, 19 nt, Artificial Sequence
  Description of Artificial Sequence: Synthetic oligonucleotide
cuaccacguuucuaccuaa

SEQ ID NO: 931357 - RNA, 19 nt, Artificial Sequence
  Description of Artificial Sequence: Synthetic oligonucleotide
aggaaccgugguacugauc

SEQ ID NO: 931358 - RNA, 19 nt, Artificial Sequence
  Description of Artificial Sequence: Synthetic oligonucleotide
gugcugacuaaaaguaacu

SEQ ID NO: 931359 - RNA, 19 nt, Artificial Sequence
  Description of Artificial Sequence: Synthetic oligonucleotide
uucucucgugcagcuccgc

SEQ ID NO: 931360 - RNA, 19 nt, Artificial Sequence
  Description of Artificial Sequence: Synthetic oligonucleotide
ggugguacuccacuguuuu

SEQ ID NO: 931361 - RNA, 19 nt, Artificial Sequence
  Description of Artificial Sequence: Synthetic oligonucleotide
accugaacccuuggaacuu

SEQ ID NO: 931362 - RNA, 19 nt, Artificial Sequence
  Description of Artificial Sequence: Synthetic oligonucleotide
cugcuggcucgccuaaaca

SEQ ID NO: 931363 - RNA, 19 nt, Artificial Sequence
  Description of Artificial Sequence: Synthetic oligonucleotide
cauucacguucuggucuag

SEQ ID NO: 931364 - RNA, 19 nt, Artificial Sequence
  Description of Artificial Sequence: Synthetic oligonucleotide
ccuaagcaagaagaccaac

SEQ ID NO: 931365 - RNA, 19 nt, Artificial Sequence
  Description of Artificial Sequence: Synthetic oligonucleotide
agcccaccuuaucauccau

SEQ ID NO: 931366 - RNA, 19 nt, Artificial Sequence
  Description of Artificial Sequence: Synthetic oligonucleotide
ccagcuuagguuauuuagu

SEQ ID NO: 931367 - RNA, 19 nt, Artificial Sequence
  Description of Artificial Sequence: Synthetic oligonucleotide
gcugcccauccuucaauca

SEQ ID NO: 931368 - RNA, 19 nt, Artificial Sequence
  Description of Artificial Sequence: Synthetic oligonucleotide
gguuauuuagugagauccu

SEQ ID NO: 931369 - RNA, 19 nt, Artificial Sequence
  Description of Artificial Sequence: Synthetic oligonucleotide
gggaaauagaagguucagu

SEQ ID NO: 931370 - RNA, 19 nt, Artificial Sequence
  Description of Artificial Sequence: Synthetic oligonucleotide
ccacuguuuuagaacacaa

SEQ ID NO: 931371 - RNA, 19 nt, Artificial Sequence
  Description of Artificial Sequence: Synthetic oligonucleotide
gagaaacgguggaguugug

SEQ ID NO: 931372 - RNA, 19 nt, Artificial Sequence
  Description of Artificial Sequence: Synthetic oligonucleotide
gcagcuccgcucauucugc

SEQ ID NO: 931373 - RNA, 19 nt, Artificial Sequence
  Description of Artificial Sequence: Synthetic oligonucleotide
ggucuagacggugguacuc

SEQ ID NO: 931374 - RNA, 19 nt, Artificial Sequence
  Description of Artificial Sequence: Synthetic oligonucleotide
gcagaauucugcacgacau

SEQ ID NO: 931375 - RNA, 19 nt, Artificial Sequence
  Description of Artificial Sequence: Synthetic oligonucleotide
ggugggguggccacaccug

SEQ ID NO: 931376 - RNA, 19 nt, Artificial Sequence
  Description of Artificial Sequence: Synthetic oligonucleotide
acacugcucaucaccugaa

SEQ ID NO: 931377 - RNA, 19 nt, Artificial Sequence
  Description of Artificial Sequence: Synthetic oligonucleotide
cuacuugccuguggcagaa

SEQ ID NO: 931378 - RNA, 19 nt, Artificial Sequence
  Description of Artificial Sequence: Synthetic oligonucleotide
aucacgccacuuccugcuu

SEQ ID NO: 931379 - RNA, 19 nt, Artificial Sequence
  Description of Artificial Sequence: Synthetic oligonucleotide
cagcuagaggagaaacggu

SEQ ID NO: 931380 - RNA, 19 nt, Artificial Sequence
  Description of Artificial Sequence: Synthetic oligonucleotide
cacuuccugcuuugaacua

SEQ ID NO: 931381 - RNA, 19 nt, Artificial Sequence
  Description of Artificial Sequence: Synthetic oligonucleotide
gggguuggugguccaguca

SEQ ID NO: 931382 - RNA, 19 nt, Artificial Sequence
  Description of Artificial Sequence: Synthetic oligonucleotide
caggcgcgagcagcaacgc

SEQ ID NO: 931383 - RNA, 19 nt, Artificial Sequence
  Description of Artificial Sequence: Synthetic oligonucleotide
gugguacuccacuguuuua

SEQ ID NO: 931384 - RNA, 19 nt, Artificial Sequence
  Description of Artificial Sequence: Synthetic oligonucleotide
ggguuggugguccagucau

SEQ ID NO: 931385 - RNA, 19 nt, Artificial Sequence
  Description of Artificial Sequence: Synthetic oligonucleotide
gccuguucucucaggcucc

SEQ ID NO: 931386 - RNA, 19 nt, Artificial Sequence
  Description of Artificial Sequence: Synthetic oligonucleotide
ggugguccagucauagucu

SEQ ID NO: 931387 - RNA, 19 nt, Artificial Sequence
  Description of Artificial Sequence: Synthetic oligonucleotide
cccucuugauaaguacuac

SEQ ID NO: 931388 - RNA, 19 nt, Artificial Sequence
  Description of Artificial Sequence: Synthetic oligonucleotide
cgccuguucucucaggcuc

SEQ ID NO: 931389 - RNA, 19 nt, Artificial Sequence
  Description of Artificial Sequence: Synthetic oligonucleotide
cccucacugacugagccca

SEQ ID NO: 931390 - RNA, 19 nt, Artificial Sequence
  Description of Artificial Sequence: Synthetic oligonucleotide
acguucuggucuagacggu

SEQ ID NO: 931391 - RNA, 19 nt, Artificial Sequence
  Description of Artificial Sequence: Synthetic oligonucleotide
agcgaccgcgccagcgcuc

SEQ ID NO: 931392 - RNA, 19 nt, Artificial Sequence
  Description of Artificial Sequence: Synthetic oligonucleotide
gcucuaaagaaaagauuau

SEQ ID NO: 931393 - RNA, 19 nt, Artificial Sequence
  Description of Artificial Sequence: Synthetic oligonucleotide
agcgcggcggcggccauaa

SEQ ID NO: 931394 - RNA, 19 nt, Artificial Sequence
  Description of Artificial Sequence: Synthetic oligonucleotide
cugaacccuuggaacuugu

SEQ ID NO: 931395 - RNA, 19 nt, Artificial Sequence
  Description of Artificial Sequence: Synthetic oligonucleotide
ccugaacccuuggaacuug

SEQ ID NO: 931396 - RNA, 19 nt, Artificial Sequence
  Description of Artificial Sequence: Synthetic oligonucleotide
cauugccaucagccucguc

SEQ ID NO: 931397 - RNA, 19 nt, Artificial Sequence
  Description of Artificial Sequence: Synthetic oligonucleotide
ccccucuugauaaguacua

SEQ ID NO: 931398 - RNA, 19 nt, Artificial Sequence
  Description of Artificial Sequence: Synthetic oligonucleotide
ucgugcagcuccgcucauu

SEQ ID NO: 931399 - RNA, 19 nt, Artificial Sequence
  Description of Artificial Sequence: Synthetic oligonucleotide
ccuccaugcuaggaucuuc

SEQ ID NO: 931400 - RNA, 19 nt, Artificial Sequence
  Description of Artificial Sequence: Synthetic oligonucleotide
uacuugccuguggcagaau

SEQ ID NO: 931401 - RNA, 19 nt, Artificial Sequence
  Description of Artificial Sequence: Synthetic oligonucleotide
ccuaaagcgccuguucucu

SEQ ID NO: 931402 - RNA, 19 nt, Artificial Sequence
  Description of Artificial Sequence: Synthetic oligonucleotide
gacgugugcucuggaguau

SEQ ID NO: 931403 - RNA, 19 nt, Artificial Sequence
  Description of Artificial Sequence: Synthetic oligonucleotide
acgccacuuccugcuuuga

SEQ ID NO: 931404 - RNA, 19 nt, Artificial Sequence
  Description of Artificial Sequence: Synthetic oligonucleotide
gcgaccgcgccagcgcucc

SEQ ID NO: 931405 - RNA, 19 nt, Artificial Sequence
  Description of Artificial Sequence: Synthetic oligonucleotide
ccacacacacacacaaaau

SEQ ID NO: 931406 - RNA, 19 nt, Artificial Sequence
  Description of Artificial Sequence: Synthetic oligonucleotide
ccccuaaagcgccuguucu

SEQ ID NO: 931407 - RNA, 19 nt, Artificial Sequence
  Description of Artificial Sequence: Synthetic oligonucleotide
gcaaacgcccucacugacu

SEQ ID NO: 931408 - RNA, 19 nt, Artificial Sequence
  Description of Artificial Sequence: Synthetic oligonucleotide
gucgcagaggugccuccau

SEQ ID NO: 931409 - RNA, 19 nt, Artificial Sequence
  Description of Artificial Sequence: Synthetic oligonucleotide
cgugugcucuggaguauca

SEQ ID NO: 931410 - RNA, 19 nt, Artificial Sequence
  Description of Artificial Sequence: Synthetic oligonucleotide
ccgugguacugaucuggga

SEQ ID NO: 931411 - RNA, 19 nt, Artificial Sequence
  Description of Artificial Sequence: Synthetic oligonucleotide
cacaagccaucacgccacu

SEQ ID NO: 931412 - RNA, 19 nt, Artificial Sequence
  Description of Artificial Sequence: Synthetic oligonucleotide
cccuuggaacuugugcuaa

SEQ ID NO: 931413 - RNA, 19 nt, Artificial Sequence
  Description of Artificial Sequence: Synthetic oligonucleotide
cggcaaacgcccucacuga

SEQ ID NO: 931414 - RNA, 19 nt, Artificial Sequence
  Description of Artificial Sequence: Synthetic oligonucleotide
ggcggcaaacgcccucacu

SEQ ID NO: 931415 - RNA, 19 nt, Artificial Sequence
  Description of Artificial Sequence: Synthetic oligonucleotide
ccaugcuaggaucuucauu

SEQ ID NO: 931416 - RNA, 19 nt, Artificial Sequence
  Description of Artificial Sequence: Synthetic oligonucleotide
gcgccuguucucucaggcu

SEQ ID NO: 931417 - RNA, 19 nt, Artificial Sequence
  Description of Artificial Sequence: Synthetic oligonucleotide
cagcgaccgcgccagcgcu

SEQ ID NO: 931418 - RNA, 19 nt, Artificial Sequence
  Description of Artificial Sequence: Synthetic oligonucleotide
cggccauaacggacucggc

SEQ ID NO: 931419 - RNA, 19 nt, Artificial Sequence
  Description of Artificial Sequence: Synthetic oligonucleotide
ccagcgcuccgaggccccg

SEQ ID NO: 931420 - RNA, 19 nt, Artificial Sequence
  Description of Artificial Sequence: Synthetic oligonucleotide
ggacaggcgcgagcagcaa

SEQ ID NO: 931421 - RNA, 19 nt, Artificial Sequence
  Description of Artificial Sequence: Synthetic oligonucleotide
cgguaacguuuaacucaca

SEQ ID NO: 931422 - RNA, 19 nt, Artificial Sequence
  Description of Artificial Sequence: Synthetic oligonucleotide
gggugucgcagaggugccu

SEQ ID NO: 931423 - RNA, 19 nt, Artificial Sequence
  Description of Artificial Sequence: Synthetic oligonucleotide
cucgugcagcuccgcucau

SEQ ID NO: 931424 - RNA, 19 nt, Artificial Sequence
  Description of Artificial Sequence: Synthetic oligonucleotide
cgaccgcgccagcgcuccg

SEQ ID NO: 931425 - RNA, 19 nt, Artificial Sequence
  Description of Artificial Sequence: Synthetic oligonucleotide
cagcgcggcggcggccaua

SEQ ID NO: 931426 - RNA, 19 nt, Artificial Sequence
  Description of Artificial Sequence: Synthetic oligonucleotide
ccgggcgccuggcccggga

SEQ ID NO: 931427 - RNA, 19 nt, Artificial Sequence
  Description of Artificial Sequence: Synthetic oligonucleotide
cugcugccagaggcacaau

SEQ ID NO: 931428 - RNA, 19 nt, Artificial Sequence
  Description of Artificial Sequence: Synthetic oligonucleotide
aagaauauuuaguaucucc

SEQ ID NO: 931429 - RNA, 19 nt, Artificial Sequence
  Description of Artificial Sequence: Synthetic oligonucleotide
uauaguuugguuuaaagcc

SEQ ID NO: 931430 - RNA, 19 nt, Artificial Sequence
  Description of Artificial Sequence: Synthetic oligonucleotide
aaaggcauaccauugaaag

SEQ ID NO: 931431 - RNA, 19 nt, Artificial Sequence
  Description of Artificial Sequence: Synthetic oligonucleotide
aauauuuaguaucuccgac

SEQ ID NO: 931432 - RNA, 19 nt, Artificial Sequence
  Description of Artificial Sequence: Synthetic oligonucleotide
uucuauuucccauagguga

SEQ ID NO: 931433 - RNA, 19 nt, Artificial Sequence
  Description of Artificial Sequence: Synthetic oligonucleotide
agauucuugaccgugaggg

SEQ ID NO: 931434 - RNA, 19 nt, Artificial Sequence
  Description of Artificial Sequence: Synthetic oligonucleotide
uuuucuaaguaucaggaau

SEQ ID NO: 931435 - RNA, 19 nt, Artificial Sequence
  Description of Artificial Sequence: Synthetic oligonucleotide
uucacgacgacgauguucc

SEQ ID NO: 931436 - RNA, 19 nt, Artificial Sequence
  Description of Artificial Sequence: Synthetic oligonucleotide
uguaucuauggaaacgaag

SEQ ID NO: 931437 - RNA, 19 nt, Artificial Sequence
  Description of Artificial Sequence: Synthetic oligonucleotide
ucuuaacaucaucuuagcg

SEQ ID NO: 931438 - RNA, 19 nt, Artificial Sequence
  Description of Artificial Sequence: Synthetic oligonucleotide
cuuaacaucaucuuagcga

SEQ ID NO: 931439 - RNA, 19 nt, Artificial Sequence
  Description of Artificial Sequence: Synthetic oligonucleotide
ggagaaagauucuugaccg

SEQ ID NO: 931440 - RNA, 19 nt, Artificial Sequence
  Description of Artificial Sequence: Synthetic oligonucleotide
agaauauuuaguaucuccg

SEQ ID NO: 931441 - RNA, 19 nt, Artificial Sequence
  Description of Artificial Sequence: Synthetic oligonucleotide
ucuccgacgcuuauuaggg

SEQ ID NO: 931442 - RNA, 19 nt, Artificial Sequence
  Description of Artificial Sequence: Synthetic oligonucleotide
uucuaaguucuuccaaacg

SEQ ID NO: 931443 - RNA, 19 nt, Artificial Sequence
  Description of Artificial Sequence: Synthetic oligonucleotide
cuuauuagggccgucaaag

SEQ ID NO: 931444 - RNA, 19 nt, Artificial Sequence
  Description of Artificial Sequence: Synthetic oligonucleotide
acucacaggaccuacacca

SEQ ID NO: 931445 - RNA, 19 nt, Artificial Sequence
  Description of Artificial Sequence: Synthetic oligonucleotide
guaucuauggaaacgaagc

SEQ ID NO: 931446 - RNA, 19 nt, Artificial Sequence
  Description of Artificial Sequence: Synthetic oligonucleotide
auaguuugguuuaaagccc

SEQ ID NO: 931447 - RNA, 19 nt, Artificial Sequence
  Description of Artificial Sequence: Synthetic oligonucleotide
cauauaguuugguuuaaag

SEQ ID NO: 931448 - RNA, 19 nt, Artificial Sequence
  Description of Artificial Sequence: Synthetic oligonucleotide
aaugcguacuugcuucagg

SEQ ID NO: 931449 - RNA, 19 nt, Artificial Sequence
  Description of Artificial Sequence: Synthetic oligonucleotide
cucuacuggaccaaacugg

SEQ ID NO: 931450 - RNA, 19 nt, Artificial Sequence
  Description of Artificial Sequence: Synthetic oligonucleotide
auuaauugguguucauguc

SEQ ID NO: 931451 - RNA, 19 nt, Artificial Sequence
  Description of Artificial Sequence: Synthetic oligonucleotide
aauucggagaggucugcuc

SEQ ID NO: 931452 - RNA, 19 nt, Artificial Sequence
  Description of Artificial Sequence: Synthetic oligonucleotide
aggcauaccauugaaagag

SEQ ID NO: 931453 - RNA, 19 nt, Artificial Sequence
  Description of Artificial Sequence: Synthetic oligonucleotide
ucauuggaaacaacuggag

SEQ ID NO: 931454 - RNA, 19 nt, Artificial Sequence
  Description of Artificial Sequence: Synthetic oligonucleotide
cuaaguaucaggaaugaaa

SEQ ID NO: 931455 - RNA, 19 nt, Artificial Sequence
  Description of Artificial Sequence: Synthetic oligonucleotide
uaucuauggaaacgaagca

SEQ ID NO: 931456 - RNA, 19 nt, Artificial Sequence
  Description of Artificial Sequence: Synthetic oligonucleotide
ucucuacuggaccaaacug

SEQ ID NO: 931457 - RNA, 19 nt, Artificial Sequence
  Description of Artificial Sequence: Synthetic oligonucleotide
auguuuauugcuccacggg

SEQ ID NO: 931458 - RNA, 19 nt, Artificial Sequence
  Description of Artificial Sequence: Synthetic oligonucleotide
ucugugucggaucauuucu

SEQ ID NO: 931459 - RNA, 19 nt, Artificial Sequence
  Description of Artificial Sequence: Synthetic oligonucleotide
aucuccgacgcuuauuagg

SEQ ID NO: 931460 - RNA, 19 nt, Artificial Sequence
  Description of Artificial Sequence: Synthetic oligonucleotide
aggugaacccaucugggac

SEQ ID NO: 931461 - RNA, 19 nt, Artificial Sequence
  Description of Artificial Sequence: Synthetic oligonucleotide
caucaagagccuuccaucg

SEQ ID NO: 931462 - RNA, 19 nt, Artificial Sequence
  Description of Artificial Sequence: Synthetic oligonucleotide
aaagcgaauucggagaggu

SEQ ID NO: 931463 - RNA, 19 nt, Artificial Sequence
  Description of Artificial Sequence: Synthetic oligonucleotide
acauguaucuauggaaacg

SEQ ID NO: 931464 - RNA, 19 nt, Artificial Sequence
  Description of Artificial Sequence: Synthetic oligonucleotide
uuagaucuugccucauuag

SEQ ID NO: 931465 - RNA, 19 nt, Artificial Sequence
  Description of Artificial Sequence: Synthetic oligonucleotide
auuagcauuaauugguguu

SEQ ID NO: 931466 - RNA, 19 nt, Artificial Sequence
  Description of Artificial Sequence: Synthetic oligonucleotide
ucccagguugagcaaaccg

SEQ ID NO: 931467 - RNA, 19 nt, Artificial Sequence
  Description of Artificial Sequence: Synthetic oligonucleotide
uguuguuguuagcaagaag

SEQ ID NO: 931468 - RNA, 19 nt, Artificial Sequence
  Description of Artificial Sequence: Synthetic oligonucleotide
ucgcgguugaugaagaccu

SEQ ID NO: 931469 - RNA, 19 nt, Artificial Sequence
  Description of Artificial Sequence: Synthetic oligonucleotide
aaggcauaccauugaaaga

SEQ ID NO: 931470 - RNA, 19 nt, Artificial Sequence
  Description of Artificial Sequence: Synthetic oligonucleotide
acuggagaaagauucuuga

SEQ ID NO: 931471 - RNA, 19 nt, Artificial Sequence
  Description of Artificial Sequence: Synthetic oligonucleotide
acaaaguguaaaggcauac

SEQ ID NO: 931472 - RNA, 19 nt, Artificial Sequence
  Description of Artificial Sequence: Synthetic oligonucleotide
uuucuaaguucuuccaaac

SEQ ID NO: 931473 - RNA, 19 nt, Artificial Sequence
  Description of Artificial Sequence: Synthetic oligonucleotide
uguuguucauauucauacc

SEQ ID NO: 931474 - RNA, 19 nt, Artificial Sequence
  Description of Artificial Sequence: Synthetic oligonucleotide
ucaguauggugccauccag

SEQ ID NO: 931475 - RNA, 19 nt, Artificial Sequence
  Description of Artificial Sequence: Synthetic oligonucleotide
uugguguucaugucuagcu

SEQ ID NO: 931476 - RNA, 19 nt, Artificial Sequence
  Description of Artificial Sequence: Synthetic oligonucleotide
ggaccuacaccacucaucg

SEQ ID NO: 931477 - RNA, 19 nt, Artificial Sequence
  Description of Artificial Sequence: Synthetic oligonucleotide
uggaaacgaagcaaggaaa

SEQ ID NO: 931478 - RNA, 19 nt, Artificial Sequence
  Description of Artificial Sequence: Synthetic oligonucleotide
aggaaaccuaucauugugc

SEQ ID NO: 931479 - RNA, 19 nt, Artificial Sequence
  Description of Artificial Sequence: Synthetic oligonucleotide
ucuauuucccauaggugaa

SEQ ID NO: 931480 - RNA, 19 nt, Artificial Sequence
  Description of Artificial Sequence: Synthetic oligonucleotide
uuuuccgguagcucuacca

SEQ ID NO: 931481 - RNA, 19 nt, Artificial Sequence
  Description of Artificial Sequence: Synthetic oligonucleotide
aaguaucaggaaugaaaga

SEQ ID NO: 931482 - RNA, 19 nt, Artificial Sequence
  Description of Artificial Sequence: Synthetic oligonucleotide
auaucacccauucucauuu

SEQ ID NO: 931483 - RNA, 19 nt, Artificial Sequence
  Description of Artificial Sequence: Synthetic oligonucleotide
uuucgcugcaaauucuaca

SEQ ID NO: 931484 - RNA, 19 nt, Artificial Sequence
  Description of Artificial Sequence: Synthetic oligonucleotide
cuaaguucuuccaaacguc

SEQ ID NO: 931485 - RNA, 19 nt, Artificial Sequence
  Description of Artificial Sequence: Synthetic oligonucleotide
gacgagguguuguuguuag

SEQ ID NO: 931486 - RNA, 19 nt, Artificial Sequence
  Description of Artificial Sequence: Synthetic oligonucleotide
ucucuauuuuccauauagu

SEQ ID NO: 931487 - RNA, 19 nt, Artificial Sequence
  Description of Artificial Sequence: Synthetic oligonucleotide
aucuuagcgagcucgccuc

SEQ ID NO: 931488 - RNA, 19 nt, Artificial Sequence
  Description of Artificial Sequence: Synthetic oligonucleotide
augucuagcugcuuccauc

SEQ ID NO: 931489 - RNA, 19 nt, Artificial Sequence
  Description of Artificial Sequence: Synthetic oligonucleotide
ucagguucccucuuaacau

SEQ ID NO: 931490 - RNA, 19 nt, Artificial Sequence
  Description of Artificial Sequence: Synthetic oligonucleotide
aguauggugccauccagcu

SEQ ID NO: 931491 - RNA, 19 nt, Artificial Sequence
  Description of Artificial Sequence: Synthetic oligonucleotide
uuccauauaguuugguuua

SEQ ID NO: 931492 - RNA, 19 nt, Artificial Sequence
  Description of Artificial Sequence: Synthetic oligonucleotide
cuagaagcucauuggaaac

SEQ ID NO: 931493 - RNA, 19 nt, Artificial Sequence
  Description of Artificial Sequence: Synthetic oligonucleotide
uuagcauuaauugguguuc

SEQ ID NO: 931494 - RNA, 19 nt, Artificial Sequence
  Description of Artificial Sequence: Synthetic oligonucleotide
uccgacgcuuauuagggcc

SEQ ID NO: 931495 - RNA, 19 nt, Artificial Sequence
  Description of Artificial Sequence: Synthetic oligonucleotide
ugccucauuagcauuaauu

SEQ ID NO: 931496 - RNA, 19 nt, Artificial Sequence
  Description of Artificial Sequence: Synthetic oligonucleotide
uuagggccgucaaaguugc

SEQ ID NO: 931497 - RNA, 19 nt, Artificial Sequence
  Description of Artificial Sequence: Synthetic oligonucleotide
uaaaggcauaccauugaaa

SEQ ID NO: 931498 - RNA, 19 nt, Artificial Sequence
  Description of Artificial Sequence: Synthetic oligonucleotide
ucugguaucauuggaguuc

SEQ ID NO: 931499 - RNA, 19 nt, Artificial Sequence
  Description of Artificial Sequence: Synthetic oligonucleotide
ugucuagcugcuuccaucu

SEQ ID NO: 931500 - RNA, 19 nt, Artificial Sequence
  Description of Artificial Sequence: Synthetic oligonucleotide
cuugacgucucauuagauc

SEQ ID NO: 931501 - RNA, 19 nt, Artificial Sequence
  Description of Artificial Sequence: Synthetic oligonucleotide
uuuccgguagcucuaccac

SEQ ID NO: 931502 - RNA, 19 nt, Artificial Sequence
  Description of Artificial Sequence: Synthetic oligonucleotide
cuucagucuacauacauua

SEQ ID NO: 931503 - RNA, 19 nt, Artificial Sequence
  Description of Artificial Sequence: Synthetic oligonucleotide
uauuagggccgucaaaguu

SEQ ID NO: 931504 - RNA, 19 nt, Artificial Sequence
  Description of Artificial Sequence: Synthetic oligonucleotide
uguucucuauuuuccauau

SEQ ID NO: 931505 - RNA, 19 nt, Artificial Sequence
  Description of Artificial Sequence: Synthetic oligonucleotide
uauugcuccacggggaccc

SEQ ID NO: 931506 - RNA, 19 nt, Artificial Sequence
  Description of Artificial Sequence: Synthetic oligonucleotide
agucuacauacauuaacaa

SEQ ID NO: 931507 - RNA, 19 nt, Artificial Sequence
  Description of Artificial Sequence: Synthetic oligonucleotide
agggccgucaaaguugccc

SEQ ID NO: 931508 - RNA, 19 nt, Artificial Sequence
  Description of Artificial Sequence: Synthetic oligonucleotide
agcgaauucggagaggucu

SEQ ID NO: 931509 - RNA, 19 nt, Artificial Sequence
  Description of Artificial Sequence: Synthetic oligonucleotide
auaccauugaaagaguuuu

SEQ ID NO: 931510 - RNA, 19 nt, Artificial Sequence
  Description of Artificial Sequence: Synthetic oligonucleotide
gaaacgaagcaaggaaagc

SEQ ID NO: 931511 - RNA, 19 nt, Artificial Sequence
  Description of Artificial Sequence: Synthetic oligonucleotide
uuccucuaccaaaaccacc

SEQ ID NO: 931512 - RNA, 19 nt, Artificial Sequence
  Description of Artificial Sequence: Synthetic oligonucleotide
uuccgguagcucuaccacg

SEQ ID NO: 931513 - RNA, 19 nt, Artificial Sequence
  Description of Artificial Sequence: Synthetic oligonucleotide
aaccuaucauugugcacug

SEQ ID NO: 931514 - RNA, 19 nt, Artificial Sequence
  Description of Artificial Sequence: Synthetic oligonucleotide
ugaggaaaccuaucauugu

SEQ ID NO: 931515 - RNA, 19 nt, Artificial Sequence
  Description of Artificial Sequence: Synthetic oligonucleotide
guuucuaaguucuuccaaa

SEQ ID NO: 931516 - RNA, 19 nt, Artificial Sequence
  Description of Artificial Sequence: Synthetic oligonucleotide
ugcguguacgucuucucgc

SEQ ID NO: 931517 - RNA, 19 nt, Artificial Sequence
  Description of Artificial Sequence: Synthetic oligonucleotide
ugcacugcgccauuaucug

SEQ ID NO: 931518 - RNA, 19 nt, Artificial Sequence
  Description of Artificial Sequence: Synthetic oligonucleotide
ucaguguaccacccguccc

SEQ ID NO: 931519 - RNA, 19 nt, Artificial Sequence
  Description of Artificial Sequence: Synthetic oligonucleotide
acgacgauguuccucuuca

SEQ ID NO: 931520 - RNA, 19 nt, Artificial Sequence
  Description of Artificial Sequence: Synthetic oligonucleotide
uucuaaguaucaggaauga

SEQ ID NO: 931521 - RNA, 19 nt, Artificial Sequence
  Description of Artificial Sequence: Synthetic oligonucleotide
agguauaguuccucuguug

SEQ ID NO: 931522 - RNA, 19 nt, Artificial Sequence
  Description of Artificial Sequence: Synthetic oligonucleotide
caaaguguaaaggcauacc

SEQ ID NO: 931523 - RNA, 19 nt, Artificial Sequence
  Description of Artificial Sequence: Synthetic oligonucleotide
uuauuagggccgucaaagu

SEQ ID NO: 931524 - RNA, 19 nt, Artificial Sequence
  Description of Artificial Sequence: Synthetic oligonucleotide
uauuucccauaggugaacc

SEQ ID NO: 931525 - RNA, 19 nt, Artificial Sequence
  Description of Artificial Sequence: Synthetic oligonucleotide
augcguacuugcuucaggu

SEQ ID NO: 931526 - RNA, 19 nt, Artificial Sequence
  Description of Artificial Sequence: Synthetic oligonucleotide
agaucuugccucauuagca

SEQ ID NO: 931527 - RNA, 19 nt, Artificial Sequence
  Description of Artificial Sequence: Synthetic oligonucleotide
ugcggccuagacuucagug

SEQ ID NO: 931528 - RNA, 19 nt, Artificial Sequence
  Description of Artificial Sequence: Synthetic oligonucleotide
aaaccgugguggcuguucu

SEQ ID NO: 931529 - RNA, 19 nt, Artificial Sequence
  Description of Artificial Sequence: Synthetic oligonucleotide
ugcgccauuaucugguauc

SEQ ID NO: 931530 - RNA, 19 nt, Artificial Sequence
  Description of Artificial Sequence: Synthetic oligonucleotide
ucuuagcgagcucgccucg

SEQ ID NO: 931531 - RNA, 19 nt, Artificial Sequence
  Description of Artificial Sequence: Synthetic oligonucleotide
aaguguaaaggcauaccau

SEQ ID NO: 931532 - RNA, 19 nt, Artificial Sequence
  Description of Artificial Sequence: Synthetic oligonucleotide
uuucucuacuggaccaaac

SEQ ID NO: 931533 - RNA, 19 nt, Artificial Sequence
  Description of Artificial Sequence: Synthetic oligonucleotide
uccccacauguaucuaugg

SEQ ID NO: 931534 - RNA, 19 nt, Artificial Sequence
  Description of Artificial Sequence: Synthetic oligonucleotide
gacuucaguguaccacccg

SEQ ID NO: 931535 - RNA, 19 nt, Artificial Sequence
  Description of Artificial Sequence: Synthetic oligonucleotide
cucgccguagcgcucaaag

SEQ ID NO: 931536 - RNA, 19 nt, Artificial Sequence
  Description of Artificial Sequence: Synthetic oligonucleotide
caucgaacugcuccauggg

SEQ ID NO: 931537 - RNA, 19 nt, Artificial Sequence
  Description of Artificial Sequence: Synthetic oligonucleotide
caguauggugccauccagc

SEQ ID NO: 931538 - RNA, 19 nt, Artificial Sequence
  Description of Artificial Sequence: Synthetic oligonucleotide
guucuauuucccauaggug

SEQ ID NO: 931539 - RNA, 19 nt, Artificial Sequence
  Description of Artificial Sequence: Synthetic oligonucleotide
aaacgucugaguucuucuu

SEQ ID NO: 931540 - RNA, 19 nt, Artificial Sequence
  Description of Artificial Sequence: Synthetic oligonucleotide
uccuuaugguauuguugag

SEQ ID NO: 931541 - RNA, 19 nt, Artificial Sequence
  Description of Artificial Sequence: Synthetic oligonucleotide
ucaaugcguacuugcuuca

SEQ ID NO: 931542 - RNA, 19 nt, Artificial Sequence
  Description of Artificial Sequence: Synthetic oligonucleotide
caguguaccacccgucccc

SEQ ID NO: 931543 - RNA, 19 nt, Artificial Sequence
  Description of Artificial Sequence: Synthetic oligonucleotide
cuucaguauggugccaucc

SEQ ID NO: 931544 - RNA, 19 nt, Artificial Sequence
  Description of Artificial Sequence: Synthetic oligonucleotide
agguugagcaaaccguggu

SEQ ID NO: 931545 - RNA, 19 nt, Artificial Sequence
  Description of Artificial Sequence: Synthetic oligonucleotide
aucuauggaaacgaagcaa

SEQ ID NO: 931546 - RNA, 19 nt, Artificial Sequence
  Description of Artificial Sequence: Synthetic oligonucleotide
uaggugaacccaucuggga

SEQ ID NO: 931547 - RNA, 19 nt, Artificial Sequence
  Description of Artificial Sequence: Synthetic oligonucleotide
cuugcgagcaggagguuuc

SEQ ID NO: 931548 - RNA, 19 nt, Artificial Sequence
  Description of Artificial Sequence: Synthetic oligonucleotide
agguaaaggaggggagccc

SEQ ID NO: 931549 - RNA, 19 nt, Artificial Sequence
  Description of Artificial Sequence: Synthetic oligonucleotide
uagcauuaauugguguuca

SEQ ID NO: 931550 - RNA, 19 nt, Artificial Sequence
  Description of Artificial Sequence: Synthetic oligonucleotide
uuaguaucuccgacgcuua

SEQ ID NO: 931551 - RNA, 19 nt, Artificial Sequence
  Description of Artificial Sequence: Synthetic oligonucleotide
ucggaucauuucuucuuca

SEQ ID NO: 931552 - RNA, 19 nt, Artificial Sequence
  Description of Artificial Sequence: Synthetic oligonucleotide
ucuugacgucucauuagau

SEQ ID NO: 931553 - RNA, 19 nt, Artificial Sequence
  Description of Artificial Sequence: Synthetic oligonucleotide
cucauuagaucuugccuca

SEQ ID NO: 931554 - RNA, 19 nt, Artificial Sequence
  Description of Artificial Sequence: Synthetic oligonucleotide
guaucuccgacgcuuauua

SEQ ID NO: 931555 - RNA, 19 nt, Artificial Sequence
  Description of Artificial Sequence: Synthetic oligonucleotide
uaucuccgacgcuuauuag

SEQ ID NO: 931556 - RNA, 19 nt, Artificial Sequence
  Description of Artificial Sequence: Synthetic oligonucleotide
aggaccuacaccacucauc

SEQ ID NO: 931557 - RNA, 19 nt, Artificial Sequence
  Description of Artificial Sequence: Synthetic oligonucleotide
auguguagcaaagcgaauu

SEQ ID NO: 931558 - RNA, 19 nt, Artificial Sequence
  Description of Artificial Sequence: Synthetic oligonucleotide
cuacaccacucaucggugc

SEQ ID NO: 931559 - RNA, 19 nt, Artificial Sequence
  Description of Artificial Sequence: Synthetic oligonucleotide
acgagguguuguuguuagc

SEQ ID NO: 931560 - RNA, 19 nt, Artificial Sequence
  Description of Artificial Sequence: Synthetic oligonucleotide
ucuaaguaucaggaaugaa

SEQ ID NO: 931561 - RNA, 19 nt, Artificial Sequence
  Description of Artificial Sequence: Synthetic oligonucleotide
cacggggacccauaucacc

SEQ ID NO: 931562 - RNA, 19 nt, Artificial Sequence
  Description of Artificial Sequence: Synthetic oligonucleotide
guuuauugcuccacgggga

SEQ ID NO: 931563 - RNA, 19 nt, Artificial Sequence
  Description of Artificial Sequence: Synthetic oligonucleotide
auuuaguaucuccgacgcu

SEQ ID NO: 931564 - RNA, 19 nt, Artificial Sequence
  Description of Artificial Sequence: Synthetic oligonucleotide
cuuaugguauuguugaguu

SEQ ID NO: 931565 - RNA, 19 nt, Artificial Sequence
  Description of Artificial Sequence: Synthetic oligonucleotide
ggaaaccuaucauugugca

SEQ ID NO: 931566 - RNA, 19 nt, Artificial Sequence
  Description of Artificial Sequence: Synthetic oligonucleotide
cuucacgacgacgauguuc

SEQ ID NO: 931567 - RNA, 19 nt, Artificial Sequence
  Description of Artificial Sequence: Synthetic oligonucleotide
ugugggguuucagaaccug

SEQ ID NO: 931568 - RNA, 19 nt, Artificial Sequence
  Description of Artificial Sequence: Synthetic oligonucleotide
ucggaugcuggaugcggcc

SEQ ID NO: 931569 - RNA, 19 nt, Artificial Sequence
  Description of Artificial Sequence: Synthetic oligonucleotide
cucggaugcuggaugcggc

SEQ ID NO: 931570 - RNA, 19 nt, Artificial Sequence
  Description of Artificial Sequence: Synthetic oligonucleotide
uuagcgagcucgccucgga

SEQ ID NO: 931571 - RNA, 19 nt, Artificial Sequence
  Description of Artificial Sequence: Synthetic oligonucleotide
ugucccagguugagcaaac

SEQ ID NO: 931572 - RNA, 19 nt, Artificial Sequence
  Description of Artificial Sequence: Synthetic oligonucleotide
augucggugggcagguuac

SEQ ID NO: 931573 - RNA, 19 nt, Artificial Sequence
  Description of Artificial Sequence: Synthetic oligonucleotide
guauuugcuuccguuucug

SEQ ID NO: 931574 - RNA, 19 nt, Artificial Sequence
  Description of Artificial Sequence: Synthetic oligonucleotide
ucgccucggaugcuggaug

SEQ ID NO: 931575 - RNA, 19 nt, Artificial Sequence
  Description of Artificial Sequence: Synthetic oligonucleotide
agcgagcucgccucggaug

SEQ ID NO: 931576 - RNA, 19 nt, Artificial Sequence
  Description of Artificial Sequence: Synthetic oligonucleotide
gucgcgguugaugaagacc

SEQ ID NO: 931577 - RNA, 19 nt, Artificial Sequence
  Description of Artificial Sequence: Synthetic oligonucleotide
cuucaguguaccacccguc

SEQ ID NO: 931578 - RNA, 19 nt, Artificial Sequence
  Description of Artificial Sequence: Synthetic oligonucleotide
gucuacauacauuaacaau

SEQ ID NO: 931579 - RNA, 19 nt, Artificial Sequence
  Description of Artificial Sequence: Synthetic oligonucleotide
ucauugugcacugcgccau

SEQ ID NO: 931580 - RNA, 19 nt, Artificial Sequence
  Description of Artificial Sequence: Synthetic oligonucleotide
aagaccucgcugggcucgc

SEQ ID NO: 931581 - RNA, 19 nt, Artificial Sequence
  Description of Artificial Sequence: Synthetic oligonucleotide
uuauugcuccacggggacc

SEQ ID NO: 931582 - RNA, 19 nt, Artificial Sequence
  Description of Artificial Sequence: Synthetic oligonucleotide
ccauguuuauugcuccacg

SEQ ID NO: 931583 - RNA, 19 nt, Artificial Sequence
  Description of Artificial Sequence: Synthetic oligonucleotide
gguauaguuccucuguugu

SEQ ID NO: 931584 - RNA, 19 nt, Artificial Sequence
  Description of Artificial Sequence: Synthetic oligonucleotide
cagagcgcgaaggcgagcc

SEQ ID NO: 931585 - RNA, 19 nt, Artificial Sequence
  Description of Artificial Sequence: Synthetic oligonucleotide
ucggugggcagguuaccca

SEQ ID NO: 931586 - RNA, 19 nt, Artificial Sequence
  Description of Artificial Sequence: Synthetic oligonucleotide
guagcgcucaaagagccuc

SEQ ID NO: 931587 - RNA, 19 nt, Artificial Sequence
  Description of Artificial Sequence: Synthetic oligonucleotide
aucgagaugcauauucaaa

SEQ ID NO: 931588 - RNA, 19 nt, Artificial Sequence
  Description of Artificial Sequence: Synthetic oligonucleotide
cuggaugcggccuagacuu

SEQ ID NO: 931589 - RNA, 19 nt, Artificial Sequence
  Description of Artificial Sequence: Synthetic oligonucleotide
uccgcgugcuccuccgaag

SEQ ID NO: 931590 - RNA, 19 nt, Artificial Sequence
  Description of Artificial Sequence: Synthetic oligonucleotide
augguauuguugaguuuuc

SEQ ID NO: 931591 - RNA, 19 nt, Artificial Sequence
  Description of Artificial Sequence: Synthetic oligonucleotide
gugaacccaucugggacgg

SEQ ID NO: 931592 - RNA, 19 nt, Artificial Sequence
  Description of Artificial Sequence: Synthetic oligonucleotide
cucacaggaccuacaccac

SEQ ID NO: 931593 - RNA, 19 nt, Artificial Sequence
  Description of Artificial Sequence: Synthetic oligonucleotide
gcguacuugcuucagguuc

SEQ ID NO: 931594 - RNA, 19 nt, Artificial Sequence
  Description of Artificial Sequence: Synthetic oligonucleotide
ggaccaaacugggaaaaug

SEQ ID NO: 931595 - RNA, 19 nt, Artificial Sequence
  Description of Artificial Sequence: Synthetic oligonucleotide
ucgcugcaaauucuacaaa

SEQ ID NO: 931596 - RNA, 19 nt, Artificial Sequence
  Description of Artificial Sequence: Synthetic oligonucleotide
caucgagaugcauauucaa

SEQ ID NO: 931597 - RNA, 19 nt, Artificial Sequence
  Description of Artificial Sequence: Synthetic oligonucleotide
aagcgaauucggagagguc

SEQ ID NO: 931598 - RNA, 19 nt, Artificial Sequence
  Description of Artificial Sequence: Synthetic oligonucleotide
agcauuaauugguguucau

SEQ ID NO: 931599 - RNA, 19 nt, Artificial Sequence
  Description of Artificial Sequence: Synthetic oligonucleotide
ggacccauaucacccauuc

SEQ ID NO: 931600 - RNA, 19 nt, Artificial Sequence
  Description of Artificial Sequence: Synthetic oligonucleotide
uccauauaguuugguuuaa

SEQ ID NO: 931601 - RNA, 19 nt, Artificial Sequence
  Description of Artificial Sequence: Synthetic oligonucleotide
gacgacgauguuccucuuc

SEQ ID NO: 931602 - RNA, 19 nt, Artificial Sequence
  Description of Artificial Sequence: Synthetic oligonucleotide
ucgccguagcgcucaaaga

SEQ ID NO: 931603 - RNA, 19 nt, Artificial Sequence
  Description of Artificial Sequence: Synthetic oligonucleotide
guuucgcugcaaauucuac

SEQ ID NO: 931604 - RNA, 19 nt, Artificial Sequence
  Description of Artificial Sequence: Synthetic oligonucleotide
uugcgagcaggagguuucg

SEQ ID NO: 931605 - RNA, 19 nt, Artificial Sequence
  Description of Artificial Sequence: Synthetic oligonucleotide
gacaaaguguaaaggcaua

SEQ ID NO: 931606 - RNA, 19 nt, Artificial Sequence
  Description of Artificial Sequence: Synthetic oligonucleotide
acuggacgagguguuguug

SEQ ID NO: 931607 - RNA, 19 nt, Artificial Sequence
  Description of Artificial Sequence: Synthetic oligonucleotide
cuuagcgagcucgccucgg

SEQ ID NO: 931608 - RNA, 19 nt, Artificial Sequence
  Description of Artificial Sequence: Synthetic oligonucleotide
caaacgucugaguucuucu

SEQ ID NO: 931609 - RNA, 19 nt, Artificial Sequence
  Description of Artificial Sequence: Synthetic oligonucleotide
uaguaucuccgacgcuuau

SEQ ID NO: 931610 - RNA, 19 nt, Artificial Sequence
  Description of Artificial Sequence: Synthetic oligonucleotide
acgcuuauuagggccguca

SEQ ID NO: 931611 - RNA, 19 nt, Artificial Sequence
  Description of Artificial Sequence: Synthetic oligonucleotide
cuccgacgcuuauuagggc

SEQ ID NO: 931612 - RNA, 19 nt, Artificial Sequence
  Description of Artificial Sequence: Synthetic oligonucleotide
cuguuccccggccaggguc

SEQ ID NO: 931613 - RNA, 19 nt, Artificial Sequence
  Description of Artificial Sequence: Synthetic oligonucleotide
ugcguacuugcuucagguu

SEQ ID NO: 931614 - RNA, 19 nt, Artificial Sequence
  Description of Artificial Sequence: Synthetic oligonucleotide
caaugcguacuugcuucag

SEQ ID NO: 931615 - RNA, 19 nt, Artificial Sequence
  Description of Artificial Sequence: Synthetic oligonucleotide
caaaccgugguggcuguuc

SEQ ID NO: 931616 - RNA, 19 nt, Artificial Sequence
  Description of Artificial Sequence: Synthetic oligonucleotide
guccccacauguaucuaug

SEQ ID NO: 931617 - RNA, 19 nt, Artificial Sequence
  Description of Artificial Sequence: Synthetic oligonucleotide
cauuggaguucccauauuu

SEQ ID NO: 931618 - RNA, 19 nt, Artificial Sequence
  Description of Artificial Sequence: Synthetic oligonucleotide
uugaccgugagggcugcuc

SEQ ID NO: 931619 - RNA, 19 nt, Artificial Sequence
  Description of Artificial Sequence: Synthetic oligonucleotide
cgccguagcgcucaaagag

SEQ ID NO: 931620 - RNA, 19 nt, Artificial Sequence
  Description of Artificial Sequence: Synthetic oligonucleotide
ccgacgcuuauuagggccg

SEQ ID NO: 931621 - RNA, 19 nt, Artificial Sequence
  Description of Artificial Sequence: Synthetic oligonucleotide
gcguguacgucuucucgcc

SEQ ID NO: 931622 - RNA, 19 nt, Artificial Sequence
  Description of Artificial Sequence: Synthetic oligonucleotide
agcaaaccgugguggcugu

SEQ ID NO: 931623 - RNA, 19 nt, Artificial Sequence
  Description of Artificial Sequence: Synthetic oligonucleotide
uggaccaaacugggaaaau

SEQ ID NO: 931624 - RNA, 19 nt, Artificial Sequence
  Description of Artificial Sequence: Synthetic oligonucleotide
gcgagcucgccucggaugc

SEQ ID NO: 931625 - RNA, 19 nt, Artificial Sequence
  Description of Artificial Sequence: Synthetic oligonucleotide
gucggugggcagguuaccc

SEQ ID NO: 931626 - RNA, 19 nt, Artificial Sequence
  Description of Artificial Sequence: Synthetic oligonucleotide
gcacugcgccauuaucugg

SEQ ID NO: 931627 - RNA, 19 nt, Artificial Sequence
  Description of Artificial Sequence: Synthetic oligonucleotide
gggguuucagaaccuguuc

SEQ ID NO: 931628 - RNA, 19 nt, Artificial Sequence
  Description of Artificial Sequence: Synthetic oligonucleotide
guaaaggaggggagcccug

SEQ ID NO: 931629 - RNA, 19 nt, Artificial Sequence
  Description of Artificial Sequence: Synthetic oligonucleotide
augcaucucccauguuuau

SEQ ID NO: 931630 - RNA, 19 nt, Artificial Sequence
  Description of Artificial Sequence: Synthetic oligonucleotide
ccuacaccacucaucggug

SEQ ID NO: 931631 - RNA, 19 nt, Artificial Sequence
  Description of Artificial Sequence: Synthetic oligonucleotide
ucauuagaucuugccucau

SEQ ID NO: 931632 - RNA, 19 nt, Artificial Sequence
  Description of Artificial Sequence: Synthetic oligonucleotide
caucuuagcgagcucgccu

SEQ ID NO: 931633 - RNA, 19 nt, Artificial Sequence
  Description of Artificial Sequence: Synthetic oligonucleotide
cacgacgacgauguuccuc

SEQ ID NO: 931634 - RNA, 19 nt, Artificial Sequence
  Description of Artificial Sequence: Synthetic oligonucleotide
auguaucuauggaaacgaa

SEQ ID NO: 931635 - RNA, 19 nt, Artificial Sequence
  Description of Artificial Sequence: Synthetic oligonucleotide
gguuuaaagcccuccugcu

SEQ ID NO: 931636 - RNA, 19 nt, Artificial Sequence
  Description of Artificial Sequence: Synthetic oligonucleotide
ucgcccggcuugaggaaac

SEQ ID NO: 931637 - RNA, 19 nt, Artificial Sequence
  Description of Artificial Sequence: Synthetic oligonucleotide
ggccgccgacuccagagcg

SEQ ID NO: 931638 - RNA, 19 nt, Artificial Sequence
  Description of Artificial Sequence: Synthetic oligonucleotide
gugcacugcgccauuaucu

SEQ ID NO: 931639 - RNA, 19 nt, Artificial Sequence
  Description of Artificial Sequence: Synthetic oligonucleotide
cuacuggaccaaacuggga

SEQ ID NO: 931640 - RNA, 19 nt, Artificial Sequence
  Description of Artificial Sequence: Synthetic oligonucleotide
cuggacgagguguuguugu

SEQ ID NO: 931641 - RNA, 19 nt, Artificial Sequence
  Description of Artificial Sequence: Synthetic oligonucleotide
uagcgagcucgccucggau

SEQ ID NO: 931642 - RNA, 19 nt, Artificial Sequence
  Description of Artificial Sequence: Synthetic oligonucleotide
gccuagacuucaguguacc

SEQ ID NO: 931643 - RNA, 19 nt, Artificial Sequence
  Description of Artificial Sequence: Synthetic oligonucleotide
gucccauggcaggaccagg

SEQ ID NO: 931644 - RNA, 19 nt, Artificial Sequence
  Description of Artificial Sequence: Synthetic oligonucleotide
agcgcgaaggcgagccggg

SEQ ID NO: 931645 - RNA, 19 nt, Artificial Sequence
  Description of Artificial Sequence: Synthetic oligonucleotide
caucauuggaggaggcccu

SEQ ID NO: 931646 - RNA, 19 nt, Artificial Sequence
  Description of Artificial Sequence: Synthetic oligonucleotide
cuccacucacaggaccuac

SEQ ID NO: 931647 - RNA, 19 nt, Artificial Sequence
  Description of Artificial Sequence: Synthetic oligonucleotide
cauaucacccauucucauu

SEQ ID NO: 931648 - RNA, 19 nt, Artificial Sequence
  Description of Artificial Sequence: Synthetic oligonucleotide
ucggagaggucugcucuuc

SEQ ID NO: 931649 - RNA, 19 nt, Artificial Sequence
  Description of Artificial Sequence: Synthetic oligonucleotide
cauuggugggccagguaua

SEQ ID NO: 931650 - RNA, 19 nt, Artificial Sequence
  Description of Artificial Sequence: Synthetic oligonucleotide
gccguagcgcucaaagagc

SEQ ID NO: 931651 - RNA, 19 nt, Artificial Sequence
  Description of Artificial Sequence: Synthetic oligonucleotide
augcggccuagacuucagu

SEQ ID NO: 931652 - RNA, 19 nt, Artificial Sequence
  Description of Artificial Sequence: Synthetic oligonucleotide
gcgugcuccuccgaaggcg

SEQ ID NO: 931653 - RNA, 19 nt, Artificial Sequence
  Description of Artificial Sequence: Synthetic oligonucleotide
cucuguuguucauauucau

SEQ ID NO: 931654 - RNA, 19 nt, Artificial Sequence
  Description of Artificial Sequence: Synthetic oligonucleotide
gcuuauuagggccgucaaa

SEQ ID NO: 931655 - RNA, 19 nt, Artificial Sequence
  Description of Artificial Sequence: Synthetic oligonucleotide
gacggagguccuugaggaa

SEQ ID NO: 931656 - RNA, 19 nt, Artificial Sequence
  Description of Artificial Sequence: Synthetic oligonucleotide
ccauucucauuuccuguuc

SEQ ID NO: 931657 - RNA, 19 nt, Artificial Sequence
  Description of Artificial Sequence: Synthetic oligonucleotide
ggcuaaaugcaucucccau

SEQ ID NO: 931658 - RNA, 19 nt, Artificial Sequence
  Description of Artificial Sequence: Synthetic oligonucleotide
gcgaauucggagaggucug

SEQ ID NO: 931659 - RNA, 19 nt, Artificial Sequence
  Description of Artificial Sequence: Synthetic oligonucleotide
caccacucaucggugccug

SEQ ID NO: 931660 - RNA, 19 nt, Artificial Sequence
  Description of Artificial Sequence: Synthetic oligonucleotide
ccaaacgucugaguucuuc

SEQ ID NO: 931661 - RNA, 19 nt, Artificial Sequence
  Description of Artificial Sequence: Synthetic oligonucleotide
gacccauaucacccauucu

SEQ ID NO: 931662 - RNA, 19 nt, Artificial Sequence
  Description of Artificial Sequence: Synthetic oligonucleotide
cggaucauuucuucuucac

SEQ ID NO: 931663 - RNA, 19 nt, Artificial Sequence
  Description of Artificial Sequence: Synthetic oligonucleotide
caggagguuucgcugcaaa

SEQ ID NO: 931664 - RNA, 19 nt, Artificial Sequence
  Description of Artificial Sequence: Synthetic oligonucleotide
ggaccagggcccauuggug

SEQ ID NO: 931665 - RNA, 19 nt, Artificial Sequence
  Description of Artificial Sequence: Synthetic oligonucleotide
gggucagcgccauggccgc

SEQ ID NO: 931666 - RNA, 19 nt, Artificial Sequence
  Description of Artificial Sequence: Synthetic oligonucleotide
uagggccgucaaaguugcc

SEQ ID NO: 931667 - RNA, 19 nt, Artificial Sequence
  Description of Artificial Sequence: Synthetic oligonucleotide
cagagccuugcgagcagga

SEQ ID NO: 931668 - RNA, 19 nt, Artificial Sequence
  Description of Artificial Sequence: Synthetic oligonucleotide
ucacgacgacgauguuccu

SEQ ID NO: 931669 - RNA, 19 nt, Artificial Sequence
  Description of Artificial Sequence: Synthetic oligonucleotide
agaccucgcugggcucgcc

SEQ ID NO: 931670 - RNA, 19 nt, Artificial Sequence
  Description of Artificial Sequence: Synthetic oligonucleotide
cuugccucauuagcauuaa

SEQ ID NO: 931671 - RNA, 19 nt, Artificial Sequence
  Description of Artificial Sequence: Synthetic oligonucleotide
ccgcgugcuccuccgaagg

SEQ ID NO: 931672 - RNA, 19 nt, Artificial Sequence
  Description of Artificial Sequence: Synthetic oligonucleotide
aucggugccugugggguuu

SEQ ID NO: 931673 - RNA, 19 nt, Artificial Sequence
  Description of Artificial Sequence: Synthetic oligonucleotide
ggugccugugggguuucag

SEQ ID NO: 931674 - RNA, 19 nt, Artificial Sequence
  Description of Artificial Sequence: Synthetic oligonucleotide
gacgcuuauuagggccguc

SEQ ID NO: 931675 - RNA, 19 nt, Artificial Sequence
  Description of Artificial Sequence: Synthetic oligonucleotide
ggagguuucgcugcaaauu

SEQ ID NO: 931676 - RNA, 19 nt, Artificial Sequence
  Description of Artificial Sequence: Synthetic oligonucleotide
gcggccuagacuucagugu

SEQ ID NO: 931677 - RNA, 19 nt, Artificial Sequence
  Description of Artificial Sequence: Synthetic oligonucleotide
ggucgcgguugaugaagac

SEQ ID NO: 931678 - RNA, 19 nt, Artificial Sequence
  Description of Artificial Sequence: Synthetic oligonucleotide
ccuccgugaugucgguggg

SEQ ID NO: 931679 - RNA, 19 nt, Artificial Sequence
  Description of Artificial Sequence: Synthetic oligonucleotide
ccggucgcgguugaugaag

SEQ ID NO: 931680 - RNA, 19 nt, Artificial Sequence
  Description of Artificial Sequence: Synthetic oligonucleotide
gcgcucaaagagccucuug

SEQ ID NO: 931681 - RNA, 19 nt, Artificial Sequence
  Description of Artificial Sequence: Synthetic oligonucleotide
accgugagggcugcuccau

SEQ ID NO: 931682 - RNA, 19 nt, Artificial Sequence
  Description of Artificial Sequence: Synthetic oligonucleotide
gcgccauuaucugguauca

SEQ ID NO: 931683 - RNA, 19 nt, Artificial Sequence
  Description of Artificial Sequence: Synthetic oligonucleotide
ccauuggugggccagguau

SEQ ID NO: 931684 - RNA, 19 nt, Artificial Sequence
  Description of Artificial Sequence: Synthetic oligonucleotide
cugggacggagguccuuga

SEQ ID NO: 931685 - RNA, 19 nt, Artificial Sequence
  Description of Artificial Sequence: Synthetic oligonucleotide
agcgcugcguguacgucuu

SEQ ID NO: 931686 - RNA, 19 nt, Artificial Sequence
  Description of Artificial Sequence: Synthetic oligonucleotide
cagguauaguuccucuguu

SEQ ID NO: 931687 - RNA, 19 nt, Artificial Sequence
  Description of Artificial Sequence: Synthetic oligonucleotide
ccuuaugguauuguugagu

SEQ ID NO: 931688 - RNA, 19 nt, Artificial Sequence
  Description of Artificial Sequence: Synthetic oligonucleotide
agggcccauuggugggcca

SEQ ID NO: 931689 - RNA, 19 nt, Artificial Sequence
  Description of Artificial Sequence: Synthetic oligonucleotide
cugugucggaucauuucuu

SEQ ID NO: 931690 - RNA, 19 nt, Artificial Sequence
  Description of Artificial Sequence: Synthetic oligonucleotide
cuccuccgugaugucggug

SEQ ID NO: 931691 - RNA, 19 nt, Artificial Sequence
  Description of Artificial Sequence: Synthetic oligonucleotide
caacuggagaaagauucuu

SEQ ID NO: 931692 - RNA, 19 nt, Artificial Sequence
  Description of Artificial Sequence: Synthetic oligonucleotide
gggcccauuggugggccag

SEQ ID NO: 931693 - RNA, 19 nt, Artificial Sequence
  Description of Artificial Sequence: Synthetic oligonucleotide
guagcucuaccacgaucau

SEQ ID NO: 931694 - RNA, 19 nt, Artificial Sequence
  Description of Artificial Sequence: Synthetic oligonucleotide
ggccuagacuucaguguac

SEQ ID NO: 931695 - RNA, 19 nt, Artificial Sequence
  Description of Artificial Sequence: Synthetic oligonucleotide
ccacggggacccauaucac

SEQ ID NO: 931696 - RNA, 19 nt, Artificial Sequence
  Description of Artificial Sequence: Synthetic oligonucleotide
ggaaacucuugaugucgau

SEQ ID NO: 931697 - RNA, 19 nt, Artificial Sequence
  Description of Artificial Sequence: Synthetic oligonucleotide
cacccguccccacauguau

SEQ ID NO: 931698 - RNA, 19 nt, Artificial Sequence
  Description of Artificial Sequence: Synthetic oligonucleotide
cccggcuugaggaaacucu

SEQ ID NO: 931699 - RNA, 19 nt, Artificial Sequence
  Description of Artificial Sequence: Synthetic oligonucleotide
cugugggguuucagaaccu

SEQ ID NO: 931700 - RNA, 19 nt, Artificial Sequence
  Description of Artificial Sequence: Synthetic oligonucleotide
gcauaccauugaaagaguu

SEQ ID NO: 931701 - RNA, 19 nt, Artificial Sequence
  Description of Artificial Sequence: Synthetic oligonucleotide
ggcauaccauugaaagagu

SEQ ID NO: 931702 - RNA, 19 nt, Artificial Sequence
  Description of Artificial Sequence: Synthetic oligonucleotide
cucgcccggcuugaggaaa

SEQ ID NO: 931703 - RNA, 19 nt, Artificial Sequence
  Description of Artificial Sequence: Synthetic oligonucleotide
ccauauaguuugguuuaaa

SEQ ID NO: 931704 - RNA, 19 nt, Artificial Sequence
  Description of Artificial Sequence: Synthetic oligonucleotide
ccgacuccagagcgcgaag

SEQ ID NO: 931705 - RNA, 19 nt, Artificial Sequence
  Description of Artificial Sequence: Synthetic oligonucleotide
ggcagcgcugcguguacgu

SEQ ID NO: 931706 - RNA, 19 nt, Artificial Sequence
  Description of Artificial Sequence: Synthetic oligonucleotide
cgagaugcauauucaaauu

SEQ ID NO: 931707 - RNA, 19 nt, Artificial Sequence
  Description of Artificial Sequence: Synthetic oligonucleotide
gcgaaggcgagccggguuu

SEQ ID NO: 931708 - RNA, 19 nt, Artificial Sequence
  Description of Artificial Sequence: Synthetic oligonucleotide
gccgccgacuccagagcgc

SEQ ID NO: 931709 - RNA, 19 nt, Artificial Sequence
  Description of Artificial Sequence: Synthetic oligonucleotide
gcggcagcgcugcguguac

SEQ ID NO: 931710 - RNA, 19 nt, Artificial Sequence
  Description of Artificial Sequence: Synthetic oligonucleotide
cgcgugcuccuccgaaggc

SEQ ID NO: 931711 - RNA, 19 nt, Artificial Sequence
  Description of Artificial Sequence: Synthetic oligonucleotide
cccguccccacauguaucu

SEQ ID NO: 931712 - RNA, 19 nt, Artificial Sequence
  Description of Artificial Sequence: Synthetic oligonucleotide
cugcgccauuaucugguau

SEQ ID NO: 931713 - RNA, 19 nt, Artificial Sequence
  Description of Artificial Sequence: Synthetic oligonucleotide
gcucgccucggaugcugga

SEQ ID NO: 931714 - RNA, 19 nt, Artificial Sequence
  Description of Artificial Sequence: Synthetic oligonucleotide
cggccuagacuucagugua

SEQ ID NO: 931715 - RNA, 19 nt, Artificial Sequence
  Description of Artificial Sequence: Synthetic oligonucleotide
gggcucgccguagcgcuca

SEQ ID NO: 931716 - RNA, 19 nt, Artificial Sequence
  Description of Artificial Sequence: Synthetic oligonucleotide
cgcuuauuagggccgucaa

SEQ ID NO: 931717 - RNA, 19 nt, Artificial Sequence
  Description of Artificial Sequence: Synthetic oligonucleotide
ggcggcagcgcugcgugua

SEQ ID NO: 931718 - RNA, 19 nt, Artificial Sequence
  Description of Artificial Sequence: Synthetic oligonucleotide
caucggugccugugggguu

SEQ ID NO: 931719 - RNA, 19 nt, Artificial Sequence
  Description of Artificial Sequence: Synthetic oligonucleotide
ccggcuugaggaaacucuu

SEQ ID NO: 931720 - RNA, 19 nt, Artificial Sequence
  Description of Artificial Sequence: Synthetic oligonucleotide
ccacccguccccacaugua

SEQ ID NO: 931721 - RNA, 19 nt, Artificial Sequence
  Description of Artificial Sequence: Synthetic oligonucleotide
cuugaccgugagggcugcu

SEQ ID NO: 931722 - RNA, 19 nt, Artificial Sequence
  Description of Artificial Sequence: Synthetic oligonucleotide
ccuugcgagcaggagguuu

SEQ ID NO: 931723 - RNA, 19 nt, Artificial Sequence
  Description of Artificial Sequence: Synthetic oligonucleotide
ccuccacucacaggaccua

SEQ ID NO: 931724 - RNA, 19 nt, Artificial Sequence
  Description of Artificial Sequence: Synthetic oligonucleotide
gggacccauaucacccauu

SEQ ID NO: 931725 - RNA, 19 nt, Artificial Sequence
  Description of Artificial Sequence: Synthetic oligonucleotide
cgcgggcaccggcucgccc

SEQ ID NO: 931726 - RNA, 19 nt, Artificial Sequence
  Description of Artificial Sequence: Synthetic oligonucleotide
ggcucgccguagcgcucaa

SEQ ID NO: 931727 - RNA, 19 nt, Artificial Sequence
  Description of Artificial Sequence: Synthetic oligonucleotide
gcucgccguagcgcucaaa

SEQ ID NO: 931728 - RNA, 19 nt, Artificial Sequence
  Description of Artificial Sequence: Synthetic oligonucleotide
gcaaaccgugguggcuguu

SEQ ID NO: 931729 - RNA, 19 nt, Artificial Sequence
  Description of Artificial Sequence: Synthetic oligonucleotide
cgacgcuuauuagggccgu

SEQ ID NO: 931730 - RNA, 19 nt, Artificial Sequence
  Description of Artificial Sequence: Synthetic oligonucleotide
cgcgaaggcgagccggguu

SEQ ID NO: 931731 - RNA, 19 nt, Artificial Sequence
  Description of Artificial Sequence: Synthetic oligonucleotide
cgccgacuccagagcgcga

SEQ ID NO: 931732 - RNA, 19 nt, Artificial Sequence
  Description of Artificial Sequence: Synthetic oligonucleotide
cgaaggcgagccggguuuu

SEQ ID NO: 931733 - RNA, 19 nt, Artificial Sequence
  Description of Artificial Sequence: Synthetic oligonucleotide
cgagcucgccucggaugcu

SEQ ID NO: 931734 - RNA, 19 nt, Artificial Sequence
  Description of Artificial Sequence: Synthetic oligonucleotide
cgacgacgauguuccucuu

SEQ ID NO: 931735 - RNA, 19 nt, Artificial Sequence
  Description of Artificial Sequence: Synthetic oligonucleotide
cggugccugugggguuuca

SEQ ID NO: 931736 - RNA, 19 nt, Artificial Sequence
  Description of Artificial Sequence: Synthetic oligonucleotide
aauauuaucucacuauggg

SEQ ID NO: 931737 - RNA, 19 nt, Artificial Sequence
  Description of Artificial Sequence: Synthetic oligonucleotide
guuacuaagauccugaucc

SEQ ID NO: 931738 - RNA, 19 nt, Artificial Sequence
  Description of Artificial Sequence: Synthetic oligonucleotide
agaauagcuaaauuuaucg

SEQ ID NO: 931739 - RNA, 19 nt, Artificial Sequence
  Description of Artificial Sequence: Synthetic oligonucleotide
uuaacaauguuauugggcc

SEQ ID NO: 931740 - RNA, 19 nt, Artificial Sequence
  Description of Artificial Sequence: Synthetic oligonucleotide
uguaucuucgggaagauug

SEQ ID NO: 931741 - RNA, 19 nt, Artificial Sequence
  Description of Artificial Sequence: Synthetic oligonucleotide
aaaaguguauugcagcauc

SEQ ID NO: 931742 - RNA, 19 nt, Artificial Sequence
  Description of Artificial Sequence: Synthetic oligonucleotide
auugauauaaaacccuagg

SEQ ID NO: 931743 - RNA, 19 nt, Artificial Sequence
  Description of Artificial Sequence: Synthetic oligonucleotide
uuuaacaauguuauugggc

SEQ ID NO: 931744 - RNA, 19 nt, Artificial Sequence
  Description of Artificial Sequence: Synthetic oligonucleotide
uauuaucucacuaugggga

SEQ ID NO: 931745 - RNA, 19 nt, Artificial Sequence
  Description of Artificial Sequence: Synthetic oligonucleotide
aauuuaucguaaccuaagg

SEQ ID NO: 931746 - RNA, 19 nt, Artificial Sequence
  Description of Artificial Sequence: Synthetic oligonucleotide
ugguauaauauccuuaucu

SEQ ID NO: 931747 - RNA, 19 nt, Artificial Sequence
  Description of Artificial Sequence: Synthetic oligonucleotide
uaacucuugaacuuuauca

SEQ ID NO: 931748 - RNA, 19 nt, Artificial Sequence
  Description of Artificial Sequence: Synthetic oligonucleotide
uuaucguaaccuaagggag

SEQ ID NO: 931749 - RNA, 19 nt, Artificial Sequence
  Description of Artificial Sequence: Synthetic oligonucleotide
gaugguccaaaguuaaugg

SEQ ID NO: 931750 - RNA, 19 nt, Artificial Sequence
  Description of Artificial Sequence: Synthetic oligonucleotide
aaaguaaacucccucaaaa

SEQ ID NO: 931751 - RNA, 19 nt, Artificial Sequence
  Description of Artificial Sequence: Synthetic oligonucleotide
aauagcuaaauuuaucgua

SEQ ID NO: 931752 - RNA, 19 nt, Artificial Sequence
  Description of Artificial Sequence: Synthetic oligonucleotide
auuuaucguaaccuaaggg

SEQ ID NO: 931753 - RNA, 19 nt, Artificial Sequence
  Description of Artificial Sequence: Synthetic oligonucleotide
ucauguagagcuaacaaaa

SEQ ID NO: 931754 - RNA, 19 nt, Artificial Sequence
  Description of Artificial Sequence: Synthetic oligonucleotide
uauuuaucaauaaauggua

SEQ ID NO: 931755 - RNA, 19 nt, Artificial Sequence
  Description of Artificial Sequence: Synthetic oligonucleotide
aguguuugccaauagacug

SEQ ID NO: 931756 - RNA, 19 nt, Artificial Sequence
  Description of Artificial Sequence: Synthetic oligonucleotide
agcuaaauuuaucguaacc

SEQ ID NO: 931757 - RNA, 19 nt, Artificial Sequence
  Description of Artificial Sequence: Synthetic oligonucleotide
gaagauugauauaaaaccc

SEQ ID NO: 931758 - RNA, 19 nt, Artificial Sequence
  Description of Artificial Sequence: Synthetic oligonucleotide
aaguuaauggaaaccgugc

SEQ ID NO: 931759 - RNA, 19 nt, Artificial Sequence
  Description of Artificial Sequence: Synthetic oligonucleotide
agaucuuuaacuggggagc

SEQ ID NO: 931760 - RNA, 19 nt, Artificial Sequence
  Description of Artificial Sequence: Synthetic oligonucleotide
uuuugguugucauaagcag

SEQ ID NO: 931761 - RNA, 19 nt, Artificial Sequence
  Description of Artificial Sequence: Synthetic oligonucleotide
agaaaguagguauucccac

SEQ ID NO: 931762 - RNA, 19 nt, Artificial Sequence
  Description of Artificial Sequence: Synthetic oligonucleotide
uuuagguucccacuagcag

SEQ ID NO: 931763 - RNA, 19 nt, Artificial Sequence
  Description of Artificial Sequence: Synthetic oligonucleotide
auaaaagguagacaugaug

SEQ ID NO: 931764 - RNA, 19 nt, Artificial Sequence
  Description of Artificial Sequence: Synthetic oligonucleotide
augaugacgugucuauucc

SEQ ID NO: 931765 - RNA, 19 nt, Artificial Sequence
  Description of Artificial Sequence: Synthetic oligonucleotide
ucagcuagaauauaccggu

SEQ ID NO: 931766 - RNA, 19 nt, Artificial Sequence
  Description of Artificial Sequence: Synthetic oligonucleotide
ugaagguuacccaagggcu

SEQ ID NO: 931767 - RNA, 19 nt, Artificial Sequence
  Description of Artificial Sequence: Synthetic oligonucleotide
uucgccaaagcacuaaggc

SEQ ID NO: 931768 - RNA, 19 nt, Artificial Sequence
  Description of Artificial Sequence: Synthetic oligonucleotide
aaauuuaucguaaccuaag

SEQ ID NO: 931769 - RNA, 19 nt, Artificial Sequence
  Description of Artificial Sequence: Synthetic oligonucleotide
uaaauuugcuugcuuccgg

SEQ ID NO: 931770 - RNA, 19 nt, Artificial Sequence
  Description of Artificial Sequence: Synthetic oligonucleotide
cucuuguacagagagaugg

SEQ ID NO: 931771 - RNA, 19 nt, Artificial Sequence
  Description of Artificial Sequence: Synthetic oligonucleotide
uaaauggguguuccaaagg

SEQ ID NO: 931772 - RNA, 19 nt, Artificial Sequence
  Description of Artificial Sequence: Synthetic oligonucleotide
aacaaagggucacuucggg

SEQ ID NO: 931773 - RNA, 19 nt, Artificial Sequence
  Description of Artificial Sequence: Synthetic oligonucleotide
gacgugucuauuccgaagg

SEQ ID NO: 931774 - RNA, 19 nt, Artificial Sequence
  Description of Artificial Sequence: Synthetic oligonucleotide
guucagcuagaauauaccg

SEQ ID NO: 931775 - RNA, 19 nt, Artificial Sequence
  Description of Artificial Sequence: Synthetic oligonucleotide
gggauaaucaucuuccggg

SEQ ID NO: 931776 - RNA, 19 nt, Artificial Sequence
  Description of Artificial Sequence: Synthetic oligonucleotide
aaaguuaauggaaaccgug

SEQ ID NO: 931777 - RNA, 19 nt, Artificial Sequence
  Description of Artificial Sequence: Synthetic oligonucleotide
uuaauggaaaccgugcagc

SEQ ID NO: 931778 - RNA, 19 nt, Artificial Sequence
  Description of Artificial Sequence: Synthetic oligonucleotide
uguuauugggccaagucau

SEQ ID NO: 931779 - RNA, 19 nt, Artificial Sequence
  Description of Artificial Sequence: Synthetic oligonucleotide
aauguuacuaagauccuga

SEQ ID NO: 931780 - RNA, 19 nt, Artificial Sequence
  Description of Artificial Sequence: Synthetic oligonucleotide
uguuagguucgccaaagca

SEQ ID NO: 931781 - RNA, 19 nt, Artificial Sequence
  Description of Artificial Sequence: Synthetic oligonucleotide
agucccacccaccagacuc

SEQ ID NO: 931782 - RNA, 19 nt, Artificial Sequence
  Description of Artificial Sequence: Synthetic oligonucleotide
uccgaauuugggauaauca

SEQ ID NO: 931783 - RNA, 19 nt, Artificial Sequence
  Description of Artificial Sequence: Synthetic oligonucleotide
ucuucgggaagauugauau

SEQ ID NO: 931784 - RNA, 19 nt, Artificial Sequence
  Description of Artificial Sequence: Synthetic oligonucleotide
uuagguucgccaaagcacu

SEQ ID NO: 931785 - RNA, 19 nt, Artificial Sequence
  Description of Artificial Sequence: Synthetic oligonucleotide
ucgucagagaucuuuaacu

SEQ ID NO: 931786 - RNA, 19 nt, Artificial Sequence
  Description of Artificial Sequence: Synthetic oligonucleotide
ugggauaaucaucuuccgg

SEQ ID NO: 931787 - RNA, 19 nt, Artificial Sequence
  Description of Artificial Sequence: Synthetic oligonucleotide
uuuuggauguucauccugu

SEQ ID NO: 931788 - RNA, 19 nt, Artificial Sequence
  Description of Artificial Sequence: Synthetic oligonucleotide
gguauucccacugugaugg

SEQ ID NO: 931789 - RNA, 19 nt, Artificial Sequence
  Description of Artificial Sequence: Synthetic oligonucleotide
uauugcagcaucuuuggaa

SEQ ID NO: 931790 - RNA, 19 nt, Artificial Sequence
  Description of Artificial Sequence: Synthetic oligonucleotide
uucugaaguauccccggcg

SEQ ID NO: 931791 - RNA, 19 nt, Artificial Sequence
  Description of Artificial Sequence: Synthetic oligonucleotide
uuucguaccccaugggagg

SEQ ID NO: 931792 - RNA, 19 nt, Artificial Sequence
  Description of Artificial Sequence: Synthetic oligonucleotide
aagauugauauaaaacccu

SEQ ID NO: 931793 - RNA, 19 nt, Artificial Sequence
  Description of Artificial Sequence: Synthetic oligonucleotide
cagaccacugacaucaacc

SEQ ID NO: 931794 - RNA, 19 nt, Artificial Sequence
  Description of Artificial Sequence: Synthetic oligonucleotide
guagagcuaacaaaacucg

SEQ ID NO: 931795 - RNA, 19 nt, Artificial Sequence
  Description of Artificial Sequence: Synthetic oligonucleotide
uccauuagaagauucuguc

SEQ ID NO: 931796 - RNA, 19 nt, Artificial Sequence
  Description of Artificial Sequence: Synthetic oligonucleotide
uuuguaaguauccggcagu

SEQ ID NO: 931797 - RNA, 19 nt, Artificial Sequence
  Description of Artificial Sequence: Synthetic oligonucleotide
agcuagaauauaccgguag

SEQ ID NO: 931798 - RNA, 19 nt, Artificial Sequence
  Description of Artificial Sequence: Synthetic oligonucleotide
acaaagggucacuucgggc

SEQ ID NO: 931799 - RNA, 19 nt, Artificial Sequence
  Description of Artificial Sequence: Synthetic oligonucleotide
auggccggaaaguaaacuc

SEQ ID NO: 931800 - RNA, 19 nt, Artificial Sequence
  Description of Artificial Sequence: Synthetic oligonucleotide
ucuauaguaucuuuuccau

SEQ ID NO: 931801 - RNA, 19 nt, Artificial Sequence
  Description of Artificial Sequence: Synthetic oligonucleotide
ucugaaguauccccggcgc

SEQ ID NO: 931802 - RNA, 19 nt, Artificial Sequence
  Description of Artificial Sequence: Synthetic oligonucleotide
auuaucucacuauggggag

SEQ ID NO: 931803 - RNA, 19 nt, Artificial Sequence
  Description of Artificial Sequence: Synthetic oligonucleotide
uucgggaagauugauauaa

SEQ ID NO: 931804 - RNA, 19 nt, Artificial Sequence
  Description of Artificial Sequence: Synthetic oligonucleotide
gucagagaucuuuaacugg

SEQ ID NO: 931805 - RNA, 19 nt, Artificial Sequence
  Description of Artificial Sequence: Synthetic oligonucleotide
agaaguccgaauuugggau

SEQ ID NO: 931806 - RNA, 19 nt, Artificial Sequence
  Description of Artificial Sequence: Synthetic oligonucleotide
uaucguaaccuaagggagc

SEQ ID NO: 931807 - RNA, 19 nt, Artificial Sequence
  Description of Artificial Sequence: Synthetic oligonucleotide
caaaacucguucauauaag

SEQ ID NO: 931808 - RNA, 19 nt, Artificial Sequence
  Description of Artificial Sequence: Synthetic oligonucleotide
uaacuggggagcucgauca

SEQ ID NO: 931809 - RNA, 19 nt, Artificial Sequence
  Description of Artificial Sequence: Synthetic oligonucleotide
gauugauauaaaacccuag

SEQ ID NO: 931810 - RNA, 19 nt, Artificial Sequence
  Description of Artificial Sequence: Synthetic oligonucleotide
uaguuggucauaaaaggua

SEQ ID NO: 931811 - RNA, 19 nt, Artificial Sequence
  Description of Artificial Sequence: Synthetic oligonucleotide
ccaacagucaaguucaagc

SEQ ID NO: 931812 - RNA, 19 nt, Artificial Sequence
  Description of Artificial Sequence: Synthetic oligonucleotide
uugucauacacucccagua

SEQ ID NO: 931813 - RNA, 19 nt, Artificial Sequence
  Description of Artificial Sequence: Synthetic oligonucleotide
uggauguucauccuguguu

SEQ ID NO: 931814 - RNA, 19 nt, Artificial Sequence
  Description of Artificial Sequence: Synthetic oligonucleotide
accuuuucguaccccaugg

SEQ ID NO: 931815 - RNA, 19 nt, Artificial Sequence
  Description of Artificial Sequence: Synthetic oligonucleotide
acaucaaccaaguuugcau

SEQ ID NO: 931816 - RNA, 19 nt, Artificial Sequence
  Description of Artificial Sequence: Synthetic oligonucleotide
uuacuccacagaaagcugu

SEQ ID NO: 931817 - RNA, 19 nt, Artificial Sequence
  Description of Artificial Sequence: Synthetic oligonucleotide
ugcuuccggagaaaguagg

SEQ ID NO: 931818 - RNA, 19 nt, Artificial Sequence
  Description of Artificial Sequence: Synthetic oligonucleotide
aacuuuaucaaagccuuau

SEQ ID NO: 931819 - RNA, 19 nt, Artificial Sequence
  Description of Artificial Sequence: Synthetic oligonucleotide
aaacaaagggucacuucgg

SEQ ID NO: 931820 - RNA, 19 nt, Artificial Sequence
  Description of Artificial Sequence: Synthetic oligonucleotide
gagcuaacaaaacucguuc

SEQ ID NO: 931821 - RNA, 19 nt, Artificial Sequence
  Description of Artificial Sequence: Synthetic oligonucleotide
uggggaguuuguuuuaggc

SEQ ID NO: 931822 - RNA, 19 nt, Artificial Sequence
  Description of Artificial Sequence: Synthetic oligonucleotide
gauguucauccuguguucg

SEQ ID NO: 931823 - RNA, 19 nt, Artificial Sequence
  Description of Artificial Sequence: Synthetic oligonucleotide
ugaugacgugucuauuccg

SEQ ID NO: 931824 - RNA, 19 nt, Artificial Sequence
  Description of Artificial Sequence: Synthetic oligonucleotide
uguucuaccacagcacccc

SEQ ID NO: 931825 - RNA, 19 nt, Artificial Sequence
  Description of Artificial Sequence: Synthetic oligonucleotide
cacuucugaaguauccccg

SEQ ID NO: 931826 - RNA, 19 nt, Artificial Sequence
  Description of Artificial Sequence: Synthetic oligonucleotide
gaucauguagagcuaacaa

SEQ ID NO: 931827 - RNA, 19 nt, Artificial Sequence
  Description of Artificial Sequence: Synthetic oligonucleotide
uuggaggauauuugaagga

SEQ ID NO: 931828 - RNA, 19 nt, Artificial Sequence
  Description of Artificial Sequence: Synthetic oligonucleotide
uguuaaauggguguuccaa

SEQ ID NO: 931829 - RNA, 19 nt, Artificial Sequence
  Description of Artificial Sequence: Synthetic oligonucleotide
caugaugacgugucuauuc

SEQ ID NO: 931830 - RNA, 19 nt, Artificial Sequence
  Description of Artificial Sequence: Synthetic oligonucleotide
ugugaagcgaggauggguu

SEQ ID NO: 931831 - RNA, 19 nt, Artificial Sequence
  Description of Artificial Sequence: Synthetic oligonucleotide
uacucauuguuuuaacaau

SEQ ID NO: 931832 - RNA, 19 nt, Artificial Sequence
  Description of Artificial Sequence: Synthetic oligonucleotide
uguuccaaaggguagccau

SEQ ID NO: 931833 - RNA, 19 nt, Artificial Sequence
  Description of Artificial Sequence: Synthetic oligonucleotide
aauauaccgguagccaucu

SEQ ID NO: 931834 - RNA, 19 nt, Artificial Sequence
  Description of Artificial Sequence: Synthetic oligonucleotide
uugggauaaucaucuuccg

SEQ ID NO: 931835 - RNA, 19 nt, Artificial Sequence
  Description of Artificial Sequence: Synthetic oligonucleotide
guuagguucgccaaagcac

SEQ ID NO: 931836 - RNA, 19 nt, Artificial Sequence
  Description of Artificial Sequence: Synthetic oligonucleotide
agaauauaccgguagccau

SEQ ID NO: 931837 - RNA, 19 nt, Artificial Sequence
  Description of Artificial Sequence: Synthetic oligonucleotide
ucaaccggucgucagagau

SEQ ID NO: 931838 - RNA, 19 nt, Artificial Sequence
  Description of Artificial Sequence: Synthetic oligonucleotide
aguagguauucccacugug

SEQ ID NO: 931839 - RNA, 19 nt, Artificial Sequence
  Description of Artificial Sequence: Synthetic oligonucleotide
uuggucauaaaagguagac

SEQ ID NO: 931840 - RNA, 19 nt, Artificial Sequence
  Description of Artificial Sequence: Synthetic oligonucleotide
uguuacuaagauccugauc

SEQ ID NO: 931841 - RNA, 19 nt, Artificial Sequence
  Description of Artificial Sequence: Synthetic oligonucleotide
cuugaagguuacccaaggg

SEQ ID NO: 931842 - RNA, 19 nt, Artificial Sequence
  Description of Artificial Sequence: Synthetic oligonucleotide
uuaacuggggagcucgauc

SEQ ID NO: 931843 - RNA, 19 nt, Artificial Sequence
  Description of Artificial Sequence: Synthetic oligonucleotide
uauaccgguagccaucuuu

SEQ ID NO: 931844 - RNA, 19 nt, Artificial Sequence
  Description of Artificial Sequence: Synthetic oligonucleotide
ugguacagaacaucugcca

SEQ ID NO: 931845 - RNA, 19 nt, Artificial Sequence
  Description of Artificial Sequence: Synthetic oligonucleotide
uauuccgaaggugucagcu

SEQ ID NO: 931846 - RNA, 19 nt, Artificial Sequence
  Description of Artificial Sequence: Synthetic oligonucleotide
uguagaggucuccaggaau

SEQ ID NO: 931847 - RNA, 19 nt, Artificial Sequence
  Description of Artificial Sequence: Synthetic oligonucleotide
uugccaauagacuggugga

SEQ ID NO: 931848 - RNA, 19 nt, Artificial Sequence
  Description of Artificial Sequence: Synthetic oligonucleotide
uuccggagaaaguagguau

SEQ ID NO: 931849 - RNA, 19 nt, Artificial Sequence
  Description of Artificial Sequence: Synthetic oligonucleotide
gcccaugucgcucauaggg

SEQ ID NO: 931850 - RNA, 19 nt, Artificial Sequence
  Description of Artificial Sequence: Synthetic oligonucleotide
augguacagaacaucugcc

SEQ ID NO: 931851 - RNA, 19 nt, Artificial Sequence
  Description of Artificial Sequence: Synthetic oligonucleotide
uggguguuccaaaggguag

SEQ ID NO: 931852 - RNA, 19 nt, Artificial Sequence
  Description of Artificial Sequence: Synthetic oligonucleotide
cauccuguguucgagacug

SEQ ID NO: 931853 - RNA, 19 nt, Artificial Sequence
  Description of Artificial Sequence: Synthetic oligonucleotide
uguugucccuccauccugc

SEQ ID NO: 931854 - RNA, 19 nt, Artificial Sequence
  Description of Artificial Sequence: Synthetic oligonucleotide
auagcuaaauuuaucguaa

SEQ ID NO: 931855 - RNA, 19 nt, Artificial Sequence
  Description of Artificial Sequence: Synthetic oligonucleotide
auugucgcccauucucuuc

SEQ ID NO: 931856 - RNA, 19 nt, Artificial Sequence
  Description of Artificial Sequence: Synthetic oligonucleotide
gauggguuagggcucccag

SEQ ID NO: 931857 - RNA, 19 nt, Artificial Sequence
  Description of Artificial Sequence: Synthetic oligonucleotide
aaaugguauaauauccuua

SEQ ID NO: 931858 - RNA, 19 nt, Artificial Sequence
  Description of Artificial Sequence: Synthetic oligonucleotide
uagagcuaacaaaacucgu

SEQ ID NO: 931859 - RNA, 19 nt, Artificial Sequence
  Description of Artificial Sequence: Synthetic oligonucleotide
gaugaguaguguuugccaa

SEQ ID NO: 931860 - RNA, 19 nt, Artificial Sequence
  Description of Artificial Sequence: Synthetic oligonucleotide
ucgccaaagcacuaaggca

SEQ ID NO: 931861 - RNA, 19 nt, Artificial Sequence
  Description of Artificial Sequence: Synthetic oligonucleotide
uaguaucuuuuccauuaga

SEQ ID NO: 931862 - RNA, 19 nt, Artificial Sequence
  Description of Artificial Sequence: Synthetic oligonucleotide
uuccgaaggugucagcugu

SEQ ID NO: 931863 - RNA, 19 nt, Artificial Sequence
  Description of Artificial Sequence: Synthetic oligonucleotide
augguauaauauccuuauc

SEQ ID NO: 931864 - RNA, 19 nt, Artificial Sequence
  Description of Artificial Sequence: Synthetic oligonucleotide
auguuagguucgccaaagc

SEQ ID NO: 931865 - RNA, 19 nt, Artificial Sequence
  Description of Artificial Sequence: Synthetic oligonucleotide
uguucauccuguguucgag

SEQ ID NO: 931866 - RNA, 19 nt, Artificial Sequence
  Description of Artificial Sequence: Synthetic oligonucleotide
gguacagaacaucugccag

SEQ ID NO: 931867 - RNA, 19 nt, Artificial Sequence
  Description of Artificial Sequence: Synthetic oligonucleotide
agcucuuguacagagagau

SEQ ID NO: 931868 - RNA, 19 nt, Artificial Sequence
  Description of Artificial Sequence: Synthetic oligonucleotide
aaccggucgucagagaucu

SEQ ID NO: 931869 - RNA, 19 nt, Artificial Sequence
  Description of Artificial Sequence: Synthetic oligonucleotide
cauuuagguucccacuagc

SEQ ID NO: 931870 - RNA, 19 nt, Artificial Sequence
  Description of Artificial Sequence: Synthetic oligonucleotide
auacauugcaauggaaacu

SEQ ID NO: 931871 - RNA, 19 nt, Artificial Sequence
  Description of Artificial Sequence: Synthetic oligonucleotide
aaguaccaggcaccuuuuc

SEQ ID NO: 931872 - RNA, 19 nt, Artificial Sequence
  Description of Artificial Sequence: Synthetic oligonucleotide
gagaaaguagguauuccca

SEQ ID NO: 931873 - RNA, 19 nt, Artificial Sequence
  Description of Artificial Sequence: Synthetic oligonucleotide
gcuguaaaccauuuuguac

SEQ ID NO: 931874 - RNA, 19 nt, Artificial Sequence
  Description of Artificial Sequence: Synthetic oligonucleotide
auuugcuugcuuccggaga

SEQ ID NO: 931875 - RNA, 19 nt, Artificial Sequence
  Description of Artificial Sequence: Synthetic oligonucleotide
uuggauguucauccugugu

SEQ ID NO: 931876 - RNA, 19 nt, Artificial Sequence
  Description of Artificial Sequence: Synthetic oligonucleotide
ugucauacacucccaguau

SEQ ID NO: 931877 - RNA, 19 nt, Artificial Sequence
  Description of Artificial Sequence: Synthetic oligonucleotide
aaguagguauucccacugu

SEQ ID NO: 931878 - RNA, 19 nt, Artificial Sequence
  Description of Artificial Sequence: Synthetic oligonucleotide
guuuuaggcucuucucugc

SEQ ID NO: 931879 - RNA, 19 nt, Artificial Sequence
  Description of Artificial Sequence: Synthetic oligonucleotide
uugucgcccauucucuuca

SEQ ID NO: 931880 - RNA, 19 nt, Artificial Sequence
  Description of Artificial Sequence: Synthetic oligonucleotide
caugucgcucauagggugg

SEQ ID NO: 931881 - RNA, 19 nt, Artificial Sequence
  Description of Artificial Sequence: Synthetic oligonucleotide
aaaguguauugcagcaucu

SEQ ID NO: 931882 - RNA, 19 nt, Artificial Sequence
  Description of Artificial Sequence: Synthetic oligonucleotide
gggaguuuguuuuaggcuc

SEQ ID NO: 931883 - RNA, 19 nt, Artificial Sequence
  Description of Artificial Sequence: Synthetic oligonucleotide
guaagucagauccuuugga

SEQ ID NO: 931884 - RNA, 19 nt, Artificial Sequence
  Description of Artificial Sequence: Synthetic oligonucleotide
uggucauaaaagguagaca

SEQ ID NO: 931885 - RNA, 19 nt, Artificial Sequence
  Description of Artificial Sequence: Synthetic oligonucleotide
aucaaagccuuaucuuugu

SEQ ID NO: 931886 - RNA, 19 nt, Artificial Sequence
  Description of Artificial Sequence: Synthetic oligonucleotide
acacucccaguauuuauca

SEQ ID NO: 931887 - RNA, 19 nt, Artificial Sequence
  Description of Artificial Sequence: Synthetic oligonucleotide
cauguuagguucgccaaag

SEQ ID NO: 931888 - RNA, 19 nt, Artificial Sequence
  Description of Artificial Sequence: Synthetic oligonucleotide
uuuggauguucauccugug

SEQ ID NO: 931889 - RNA, 19 nt, Artificial Sequence
  Description of Artificial Sequence: Synthetic oligonucleotide
auccugauccagaaguccg

SEQ ID NO: 931890 - RNA, 19 nt, Artificial Sequence
  Description of Artificial Sequence: Synthetic oligonucleotide
aguguauugcagcaucuuu

SEQ ID NO: 931891 - RNA, 19 nt, Artificial Sequence
  Description of Artificial Sequence: Synthetic oligonucleotide
cagcccaacagucaaguuc

SEQ ID NO: 931892 - RNA, 19 nt, Artificial Sequence
  Description of Artificial Sequence: Synthetic oligonucleotide
gggauguuccuuuaccaag

SEQ ID NO: 931893 - RNA, 19 nt, Artificial Sequence
  Description of Artificial Sequence: Synthetic oligonucleotide
ugaagcgaggauggguuag

SEQ ID NO: 931894 - RNA, 19 nt, Artificial Sequence
  Description of Artificial Sequence: Synthetic oligonucleotide
gaauauaccgguagccauc

SEQ ID NO: 931895 - RNA, 19 nt, Artificial Sequence
  Description of Artificial Sequence: Synthetic oligonucleotide
gaagguuacccaagggcug

SEQ ID NO: 931896 - RNA, 19 nt, Artificial Sequence
  Description of Artificial Sequence: Synthetic oligonucleotide
gucgggauguuccuuuacc

SEQ ID NO: 931897 - RNA, 19 nt, Artificial Sequence
  Description of Artificial Sequence: Synthetic oligonucleotide
uagcuaaauuuaucguaac

SEQ ID NO: 931898 - RNA, 19 nt, Artificial Sequence
  Description of Artificial Sequence: Synthetic oligonucleotide
acagucaaccggucgucag

SEQ ID NO: 931899 - RNA, 19 nt, Artificial Sequence
  Description of Artificial Sequence: Synthetic oligonucleotide
ucucacuauggggaguuug

SEQ ID NO: 931900 - RNA, 19 nt, Artificial Sequence
  Description of Artificial Sequence: Synthetic oligonucleotide
agcccaacagucaaguuca

SEQ ID NO: 931901 - RNA, 19 nt, Artificial Sequence
  Description of Artificial Sequence: Synthetic oligonucleotide
uggaggauauuugaaggau

SEQ ID NO: 931902 - RNA, 19 nt, Artificial Sequence
  Description of Artificial Sequence: Synthetic oligonucleotide
gaugacgugucuauuccga

SEQ ID NO: 931903 - RNA, 19 nt, Artificial Sequence
  Description of Artificial Sequence: Synthetic oligonucleotide
uuacgcuuggcuccucuuc

SEQ ID NO: 931904 - RNA, 19 nt, Artificial Sequence
  Description of Artificial Sequence: Synthetic oligonucleotide
uagacaugaugacgugucu

SEQ ID NO: 931905 - RNA, 19 nt, Artificial Sequence
  Description of Artificial Sequence: Synthetic oligonucleotide
auuccgaaggugucagcug

SEQ ID NO: 931906 - RNA, 19 nt, Artificial Sequence
  Description of Artificial Sequence: Synthetic oligonucleotide
auagguuuuccagcccaac

SEQ ID NO: 931907 - RNA, 19 nt, Artificial Sequence
  Description of Artificial Sequence: Synthetic oligonucleotide
uucauauaagcaggcucug

SEQ ID NO: 931908 - RNA, 19 nt, Artificial Sequence
  Description of Artificial Sequence: Synthetic oligonucleotide
cagaaguccgaauuuggga

SEQ ID NO: 931909 - RNA, 19 nt, Artificial Sequence
  Description of Artificial Sequence: Synthetic oligonucleotide
agguauucccacugugaug

SEQ ID NO: 931910 - RNA, 19 nt, Artificial Sequence
  Description of Artificial Sequence: Synthetic oligonucleotide
gucgucagagaucuuuaac

SEQ ID NO: 931911 - RNA, 19 nt, Artificial Sequence
  Description of Artificial Sequence: Synthetic oligonucleotide
aaaccgugcagcucuugua

SEQ ID NO: 931912 - RNA, 19 nt, Artificial Sequence
  Description of Artificial Sequence: Synthetic oligonucleotide
guucauauaagcaggcucu

SEQ ID NO: 931913 - RNA, 19 nt, Artificial Sequence
  Description of Artificial Sequence: Synthetic oligonucleotide
aauugucgcccauucucuu

SEQ ID NO: 931914 - RNA, 19 nt, Artificial Sequence
  Description of Artificial Sequence: Synthetic oligonucleotide
gaaaguagguauucccacu

SEQ ID NO: 931915 - RNA, 19 nt, Artificial Sequence
  Description of Artificial Sequence: Synthetic oligonucleotide
gaagcgaggauggguuagg

SEQ ID NO: 931916 - RNA, 19 nt, Artificial Sequence
  Description of Artificial Sequence: Synthetic oligonucleotide
ucccaauugucgcccauuc

SEQ ID NO: 931917 - RNA, 19 nt, Artificial Sequence
  Description of Artificial Sequence: Synthetic oligonucleotide
agucaaccggucgucagag

SEQ ID NO: 931918 - RNA, 19 nt, Artificial Sequence
  Description of Artificial Sequence: Synthetic oligonucleotide
cuucugaaguauccccggc

SEQ ID NO: 931919 - RNA, 19 nt, Artificial Sequence
  Description of Artificial Sequence: Synthetic oligonucleotide
auaccgguagccaucuuug

SEQ ID NO: 931920 - RNA, 19 nt, Artificial Sequence
  Description of Artificial Sequence: Synthetic oligonucleotide
acccaguauuacuccacag

SEQ ID NO: 931921 - RNA, 19 nt, Artificial Sequence
  Description of Artificial Sequence: Synthetic oligonucleotide
cauauaagcaggcucugua

SEQ ID NO: 931922 - RNA, 19 nt, Artificial Sequence
  Description of Artificial Sequence: Synthetic oligonucleotide
ccuucuauaguaucuuuuc

SEQ ID NO: 931923 - RNA, 19 nt, Artificial Sequence
  Description of Artificial Sequence: Synthetic oligonucleotide
auuacuccacagaaagcug

SEQ ID NO: 931924 - RNA, 19 nt, Artificial Sequence
  Description of Artificial Sequence: Synthetic oligonucleotide
caccucucccaauugucgc

SEQ ID NO: 931925 - RNA, 19 nt, Artificial Sequence
  Description of Artificial Sequence: Synthetic oligonucleotide
gcuaaauuuaucguaaccu

SEQ ID NO: 931926 - RNA, 19 nt, Artificial Sequence
  Description of Artificial Sequence: Synthetic oligonucleotide
guucgccaaagcacuaagg

SEQ ID NO: 931927 - RNA, 19 nt, Artificial Sequence
  Description of Artificial Sequence: Synthetic oligonucleotide
ucauauaagcaggcucugu

SEQ ID NO: 931928 - RNA, 19 nt, Artificial Sequence
  Description of Artificial Sequence: Synthetic oligonucleotide
gguucagcuagaauauacc

SEQ ID NO: 931929 - RNA, 19 nt, Artificial Sequence
  Description of Artificial Sequence: Synthetic oligonucleotide
gacaucaaccaaguuugca

SEQ ID NO: 931930 - RNA, 19 nt, Artificial Sequence
  Description of Artificial Sequence: Synthetic oligonucleotide
aaguccgaauuugggauaa

SEQ ID NO: 931931 - RNA, 19 nt, Artificial Sequence
  Description of Artificial Sequence: Synthetic oligonucleotide
ccaagaauagcuaaauuua

SEQ ID NO: 931932 - RNA, 19 nt, Artificial Sequence
  Description of Artificial Sequence: Synthetic oligonucleotide
agccuuaucuuuguaagua

SEQ ID NO: 931933 - RNA, 19 nt, Artificial Sequence
  Description of Artificial Sequence: Synthetic oligonucleotide
ccaauugucgcccauucuc

SEQ ID NO: 931934 - RNA, 19 nt, Artificial Sequence
  Description of Artificial Sequence: Synthetic oligonucleotide
agauugauauaaaacccua

SEQ ID NO: 931935 - RNA, 19 nt, Artificial Sequence
  Description of Artificial Sequence: Synthetic oligonucleotide
uccccggcgccuucuauag

SEQ ID NO: 931936 - RNA, 19 nt, Artificial Sequence
  Description of Artificial Sequence: Synthetic oligonucleotide
uguguucgagacugccaug

SEQ ID NO: 931937 - RNA, 19 nt, Artificial Sequence
  Description of Artificial Sequence: Synthetic oligonucleotide
uauugggccaagucauuuu

SEQ ID NO: 931938 - RNA, 19 nt, Artificial Sequence
  Description of Artificial Sequence: Synthetic oligonucleotide
aguguguguucuaccacag

SEQ ID NO: 931939 - RNA, 19 nt, Artificial Sequence
  Description of Artificial Sequence: Synthetic oligonucleotide
guagguauucccacuguga

SEQ ID NO: 931940 - RNA, 19 nt, Artificial Sequence
  Description of Artificial Sequence: Synthetic oligonucleotide
uuauugggccaagucauuu

SEQ ID NO: 931941 - RNA, 19 nt, Artificial Sequence
  Description of Artificial Sequence: Synthetic oligonucleotide
ucgggaagauugauauaaa

SEQ ID NO: 931942 - RNA, 19 nt, Artificial Sequence
  Description of Artificial Sequence: Synthetic oligonucleotide
uccggagaaaguagguauu

SEQ ID NO: 931943 - RNA, 19 nt, Artificial Sequence
  Description of Artificial Sequence: Synthetic oligonucleotide
auguuacuaagauccugau

SEQ ID NO: 931944 - RNA, 19 nt, Artificial Sequence
  Description of Artificial Sequence: Synthetic oligonucleotide
cugaaguauccccggcgcc

SEQ ID NO: 931945 - RNA, 19 nt, Artificial Sequence
  Description of Artificial Sequence: Synthetic oligonucleotide
uaaaacccuaggacaucuc

SEQ ID NO: 931946 - RNA, 19 nt, Artificial Sequence
  Description of Artificial Sequence: Synthetic oligonucleotide
uaucucacuauggggaguu

SEQ ID NO: 931947 - RNA, 19 nt, Artificial Sequence
  Description of Artificial Sequence: Synthetic oligonucleotide
aaguauccccggcgccuuc

SEQ ID NO: 931948 - RNA, 19 nt, Artificial Sequence
  Description of Artificial Sequence: Synthetic oligonucleotide
aaguguauugcagcaucuu

SEQ ID NO: 931949 - RNA, 19 nt, Artificial Sequence
  Description of Artificial Sequence: Synthetic oligonucleotide
cuguugucccuccauccug

SEQ ID NO: 931950 - RNA, 19 nt, Artificial Sequence
  Description of Artificial Sequence: Synthetic oligonucleotide
uccugcuguuuacgcuugg

SEQ ID NO: 931951 - RNA, 19 nt, Artificial Sequence
  Description of Artificial Sequence: Synthetic oligonucleotide
uuaucucacuauggggagu

SEQ ID NO: 931952 - RNA, 19 nt, Artificial Sequence
  Description of Artificial Sequence: Synthetic oligonucleotide
cucuguaucuucgggaaga

SEQ ID NO: 931953 - RNA, 19 nt, Artificial Sequence
  Description of Artificial Sequence: Synthetic oligonucleotide
gguauaauauccuuaucuu

SEQ ID NO: 931954 - RNA, 19 nt, Artificial Sequence
  Description of Artificial Sequence: Synthetic oligonucleotide
gacgcugagcagaaaacaa

SEQ ID NO: 931955 - RNA, 19 nt, Artificial Sequence
  Description of Artificial Sequence: Synthetic oligonucleotide
uaaccuaagggagcuugaa

SEQ ID NO: 931956 - RNA, 19 nt, Artificial Sequence
  Description of Artificial Sequence: Synthetic oligonucleotide
gguucgccaaagcacuaag

SEQ ID NO: 931957 - RNA, 19 nt, Artificial Sequence
  Description of Artificial Sequence: Synthetic oligonucleotide
cuggguauccaucacuucu

SEQ ID NO: 931958 - RNA, 19 nt, Artificial Sequence
  Description of Artificial Sequence: Synthetic oligonucleotide
agauggccggaaaguaaac

SEQ ID NO: 931959 - RNA, 19 nt, Artificial Sequence
  Description of Artificial Sequence: Synthetic oligonucleotide
gaaaccgugcagcucuugu

SEQ ID NO: 931960 - RNA, 19 nt, Artificial Sequence
  Description of Artificial Sequence: Synthetic oligonucleotide
aaguaacucuugaacuuua

SEQ ID NO: 931961 - RNA, 19 nt, Artificial Sequence
  Description of Artificial Sequence: Synthetic oligonucleotide
caaaguaccaggcaccuuu

SEQ ID NO: 931962 - RNA, 19 nt, Artificial Sequence
  Description of Artificial Sequence: Synthetic oligonucleotide
gugucuauuccgaaggugu

SEQ ID NO: 931963 - RNA, 19 nt, Artificial Sequence
  Description of Artificial Sequence: Synthetic oligonucleotide
ggaauagguuuuccagccc

SEQ ID NO: 931964 - RNA, 19 nt, Artificial Sequence
  Description of Artificial Sequence: Synthetic oligonucleotide
cuauuccgaaggugucagc

SEQ ID NO: 931965 - RNA, 19 nt, Artificial Sequence
  Description of Artificial Sequence: Synthetic oligonucleotide
guagccaucuuuguuaaau

SEQ ID NO: 931966 - RNA, 19 nt, Artificial Sequence
  Description of Artificial Sequence: Synthetic oligonucleotide
guguucuaccacagcaccc

SEQ ID NO: 931967 - RNA, 19 nt, Artificial Sequence
  Description of Artificial Sequence: Synthetic oligonucleotide
guggacugcgccuuccguc

SEQ ID NO: 931968 - RNA, 19 nt, Artificial Sequence
  Description of Artificial Sequence: Synthetic oligonucleotide
ccaccucucccaauugucg

SEQ ID NO: 931969 - RNA, 19 nt, Artificial Sequence
  Description of Artificial Sequence: Synthetic oligonucleotide
guaucuucgggaagauuga

SEQ ID NO: 931970 - RNA, 19 nt, Artificial Sequence
  Description of Artificial Sequence: Synthetic oligonucleotide
ggagcucgaucauguagag

SEQ ID NO: 931971 - RNA, 19 nt, Artificial Sequence
  Description of Artificial Sequence: Synthetic oligonucleotide
guugucauacacucccagu

SEQ ID NO: 931972 - RNA, 19 nt, Artificial Sequence
  Description of Artificial Sequence: Synthetic oligonucleotide
uuuacgcuuggcuccucuu

SEQ ID NO: 931973 - RNA, 19 nt, Artificial Sequence
  Description of Artificial Sequence: Synthetic oligonucleotide
acgugucuauuccgaaggu

SEQ ID NO: 931974 - RNA, 19 nt, Artificial Sequence
  Description of Artificial Sequence: Synthetic oligonucleotide
ggauguucauccuguguuc

SEQ ID NO: 931975 - RNA, 19 nt, Artificial Sequence
  Description of Artificial Sequence: Synthetic oligonucleotide
cgucagagaucuuuaacug

SEQ ID NO: 931976 - RNA, 19 nt, Artificial Sequence
  Description of Artificial Sequence: Synthetic oligonucleotide
ccaguauuacuccacagaa

SEQ ID NO: 931977 - RNA, 19 nt, Artificial Sequence
  Description of Artificial Sequence: Synthetic oligonucleotide
auggguguuccaaagggua

SEQ ID NO: 931978 - RNA, 19 nt, Artificial Sequence
  Description of Artificial Sequence: Synthetic oligonucleotide
guagaggucuccaggaaua

SEQ ID NO: 931979 - RNA, 19 nt, Artificial Sequence
  Description of Artificial Sequence: Synthetic oligonucleotide
aacuggggagcucgaucau

SEQ ID NO: 931980 - RNA, 19 nt, Artificial Sequence
  Description of Artificial Sequence: Synthetic oligonucleotide
guguguguucuaccacagc

SEQ ID NO: 931981 - RNA, 19 nt, Artificial Sequence
  Description of Artificial Sequence: Synthetic oligonucleotide
uaucuucgggaagauugau

SEQ ID NO: 931982 - RNA, 19 nt, Artificial Sequence
  Description of Artificial Sequence: Synthetic oligonucleotide
ccaggcaccuuuucguacc

SEQ ID NO: 931983 - RNA, 19 nt, Artificial Sequence
  Description of Artificial Sequence: Synthetic oligonucleotide
guccgaauuugggauaauc

SEQ ID NO: 931984 - RNA, 19 nt, Artificial Sequence
  Description of Artificial Sequence: Synthetic oligonucleotide
cuuccgggucuuugcuucc

SEQ ID NO: 931985 - RNA, 19 nt, Artificial Sequence
  Description of Artificial Sequence: Synthetic oligonucleotide
gauccagaaguccgaauuu

SEQ ID NO: 931986 - RNA, 19 nt, Artificial Sequence
  Description of Artificial Sequence: Synthetic oligonucleotide
uaccgguagccaucuuugu

SEQ ID NO: 931987 - RNA, 19 nt, Artificial Sequence
  Description of Artificial Sequence: Synthetic oligonucleotide
caauugucgcccauucucu

SEQ ID NO: 931988 - RNA, 19 nt, Artificial Sequence
  Description of Artificial Sequence: Synthetic oligonucleotide
aggguggacugcgccuucc

SEQ ID NO: 931989 - RNA, 19 nt, Artificial Sequence
  Description of Artificial Sequence: Synthetic oligonucleotide
ccauuuagguucccacuag

SEQ ID NO: 931990 - RNA, 19 nt, Artificial Sequence
  Description of Artificial Sequence: Synthetic oligonucleotide
aguaacucuugaacuuuau

SEQ ID NO: 931991 - RNA, 19 nt, Artificial Sequence
  Description of Artificial Sequence: Synthetic oligonucleotide
gauggccggaaaguaaacu

SEQ ID NO: 931992 - RNA, 19 nt, Artificial Sequence
  Description of Artificial Sequence: Synthetic oligonucleotide
ccaugucgcucauagggug

SEQ ID NO: 931993 - RNA, 19 nt, Artificial Sequence
  Description of Artificial Sequence: Synthetic oligonucleotide
gagcucgaucauguagagc

SEQ ID NO: 931994 - RNA, 19 nt, Artificial Sequence
  Description of Artificial Sequence: Synthetic oligonucleotide
aggcaccuuuucguacccc

SEQ ID NO: 931995 - RNA, 19 nt, Artificial Sequence
  Description of Artificial Sequence: Synthetic oligonucleotide
uagguucgccaaagcacua

SEQ ID NO: 931996 - RNA, 19 nt, Artificial Sequence
  Description of Artificial Sequence: Synthetic oligonucleotide
ucucccaauugucgcccau

SEQ ID NO: 931997 - RNA, 19 nt, Artificial Sequence
  Description of Artificial Sequence: Synthetic oligonucleotide
guaaccuaagggagcuuga

SEQ ID NO: 931998 - RNA, 19 nt, Artificial Sequence
  Description of Artificial Sequence: Synthetic oligonucleotide
gcccguaccauggaguagc

SEQ ID NO: 931999 - RNA, 19 nt, Artificial Sequence
  Description of Artificial Sequence: Synthetic oligonucleotide
ggcaccuuuucguacccca

SEQ ID NO: 932000 - RNA, 19 nt, Artificial Sequence
  Description of Artificial Sequence: Synthetic oligonucleotide
aggcccguaccauggagua

SEQ ID NO: 932001 - RNA, 19 nt, Artificial Sequence
  Description of Artificial Sequence: Synthetic oligonucleotide
cccuguugucccuccaucc

SEQ ID NO: 932002 - RNA, 19 nt, Artificial Sequence
  Description of Artificial Sequence: Synthetic oligonucleotide
acgcugagcagaaaacaaa

SEQ ID NO: 932003 - RNA, 19 nt, Artificial Sequence
  Description of Artificial Sequence: Synthetic oligonucleotide
ggccggaaaguaaacuccc

SEQ ID NO: 932004 - RNA, 19 nt, Artificial Sequence
  Description of Artificial Sequence: Synthetic oligonucleotide
uccgaaggugucagcugua

SEQ ID NO: 932005 - RNA, 19 nt, Artificial Sequence
  Description of Artificial Sequence: Synthetic oligonucleotide
ggguguuccaaaggguagc

SEQ ID NO: 932006 - RNA, 19 nt, Artificial Sequence
  Description of Artificial Sequence: Synthetic oligonucleotide
ggaggcccguaccauggag

SEQ ID NO: 932007 - RNA, 19 nt, Artificial Sequence
  Description of Artificial Sequence: Synthetic oligonucleotide
ccuuuucguaccccauggg

SEQ ID NO: 932008 - RNA, 19 nt, Artificial Sequence
  Description of Artificial Sequence: Synthetic oligonucleotide
acccugauugacaccauuu

SEQ ID NO: 932009 - RNA, 19 nt, Artificial Sequence
  Description of Artificial Sequence: Synthetic oligonucleotide
cuguguucgagacugccau

SEQ ID NO: 932010 - RNA, 19 nt, Artificial Sequence
  Description of Artificial Sequence: Synthetic oligonucleotide
ccggaaaguaaacucccuc

SEQ ID NO: 932011 - RNA, 19 nt, Artificial Sequence
  Description of Artificial Sequence: Synthetic oligonucleotide
caaccacagucaaccgguc

SEQ ID NO: 932012 - RNA, 19 nt, Artificial Sequence
  Description of Artificial Sequence: Synthetic oligonucleotide
guucuaccacagcacccca

SEQ ID NO: 932013 - RNA, 19 nt, Artificial Sequence
  Description of Artificial Sequence: Synthetic oligonucleotide
guguucgagacugccaugu

SEQ ID NO: 932014 - RNA, 19 nt, Artificial Sequence
  Description of Artificial Sequence: Synthetic oligonucleotide
augucgcucauaggguggu

SEQ ID NO: 932015 - RNA, 19 nt, Artificial Sequence
  Description of Artificial Sequence: Synthetic oligonucleotide
uauccccggcgccuucuau

SEQ ID NO: 932016 - RNA, 19 nt, Artificial Sequence
  Description of Artificial Sequence: Synthetic oligonucleotide
cggaaaguaaacucccuca

SEQ ID NO: 932017 - RNA, 19 nt, Artificial Sequence
  Description of Artificial Sequence: Synthetic oligonucleotide
auccccggcgccuucuaua

SEQ ID NO: 932018 - RNA, 19 nt, Artificial Sequence
  Description of Artificial Sequence: Synthetic oligonucleotide
cauacacucccaguauuua

SEQ ID NO: 932019 - RNA, 19 nt, Artificial Sequence
  Description of Artificial Sequence: Synthetic oligonucleotide
cguaaccuaagggagcuug

SEQ ID NO: 932020 - RNA, 19 nt, Artificial Sequence
  Description of Artificial Sequence: Synthetic oligonucleotide
uucgggccuucuugguggu

SEQ ID NO: 932021 - RNA, 19 nt, Artificial Sequence
  Description of Artificial Sequence: Synthetic oligonucleotide
aguauccccggcgccuucu

SEQ ID NO: 932022 - RNA, 19 nt, Artificial Sequence
  Description of Artificial Sequence: Synthetic oligonucleotide
acaugaugacgugucuauu

SEQ ID NO: 932023 - RNA, 19 nt, Artificial Sequence
  Description of Artificial Sequence: Synthetic oligonucleotide
cugcagucccacccaccag

SEQ ID NO: 932024 - RNA, 19 nt, Artificial Sequence
  Description of Artificial Sequence: Synthetic oligonucleotide
cuauggggaguuuguuuua

SEQ ID NO: 932025 - RNA, 19 nt, Artificial Sequence
  Description of Artificial Sequence: Synthetic oligonucleotide
ggaaacuguaguuggucau

SEQ ID NO: 932026 - RNA, 19 nt, Artificial Sequence
  Description of Artificial Sequence: Synthetic oligonucleotide
acucucugaccucgacaaa

SEQ ID NO: 932027 - RNA, 19 nt, Artificial Sequence
  Description of Artificial Sequence: Synthetic oligonucleotide
agguucgccaaagcacuaa

SEQ ID NO: 932028 - RNA, 19 nt, Artificial Sequence
  Description of Artificial Sequence: Synthetic oligonucleotide
guuuacgcuuggcuccucu

SEQ ID NO: 932029 - RNA, 19 nt, Artificial Sequence
  Description of Artificial Sequence: Synthetic oligonucleotide
ucguaccccaugggaggcc

SEQ ID NO: 932030 - RNA, 19 nt, Artificial Sequence
  Description of Artificial Sequence: Synthetic oligonucleotide
uaccccaugggaggcccgu

SEQ ID NO: 932031 - RNA, 19 nt, Artificial Sequence
  Description of Artificial Sequence: Synthetic oligonucleotide
cuucgggaagauugauaua

SEQ ID NO: 932032 - RNA, 19 nt, Artificial Sequence
  Description of Artificial Sequence: Synthetic oligonucleotide
ccgaauuugggauaaucau

SEQ ID NO: 932033 - RNA, 19 nt, Artificial Sequence
  Description of Artificial Sequence: Synthetic oligonucleotide
gugaagcgaggauggguua

SEQ ID NO: 932034 - RNA, 19 nt, Artificial Sequence
  Description of Artificial Sequence: Synthetic oligonucleotide
ggucgggauguuccuuuac

SEQ ID NO: 932035 - RNA, 19 nt, Artificial Sequence
  Description of Artificial Sequence: Synthetic oligonucleotide
agauccuuuggaggauauu

SEQ ID NO: 932036 - RNA, 19 nt, Artificial Sequence
  Description of Artificial Sequence: Synthetic oligonucleotide
ggucgucagagaucuuuaa

SEQ ID NO: 932037 - RNA, 19 nt, Artificial Sequence
  Description of Artificial Sequence: Synthetic oligonucleotide
guaaaccauuuuguacaua

SEQ ID NO: 932038 - RNA, 19 nt, Artificial Sequence
  Description of Artificial Sequence: Synthetic oligonucleotide
gaggcccguaccauggagu

SEQ ID NO: 932039 - RNA, 19 nt, Artificial Sequence
  Description of Artificial Sequence: Synthetic oligonucleotide
ugucgcccauucucuucau

SEQ ID NO: 932040 - RNA, 19 nt, Artificial Sequence
  Description of Artificial Sequence: Synthetic oligonucleotide
ccuguguucgagacugcca

SEQ ID NO: 932041 - RNA, 19 nt, Artificial Sequence
  Description of Artificial Sequence: Synthetic oligonucleotide
ccggagaaaguagguauuc

SEQ ID NO: 932042 - RNA, 19 nt, Artificial Sequence
  Description of Artificial Sequence: Synthetic oligonucleotide
cagcuagaauauaccggua

SEQ ID NO: 932043 - RNA, 19 nt, Artificial Sequence
  Description of Artificial Sequence: Synthetic oligonucleotide
ccuaagggagcuugaaggu

SEQ ID NO: 932044 - RNA, 19 nt, Artificial Sequence
  Description of Artificial Sequence: Synthetic oligonucleotide
gucaaccggucgucagaga

SEQ ID NO: 932045 - RNA, 19 nt, Artificial Sequence
  Description of Artificial Sequence: Synthetic oligonucleotide
ccaauagacugguggaacu

SEQ ID NO: 932046 - RNA, 19 nt, Artificial Sequence
  Description of Artificial Sequence: Synthetic oligonucleotide
acugcgccuuccguccacu

SEQ ID NO: 932047 - RNA, 19 nt, Artificial Sequence
  Description of Artificial Sequence: Synthetic oligonucleotide
cgugucuauuccgaaggug

SEQ ID NO: 932048 - RNA, 19 nt, Artificial Sequence
  Description of Artificial Sequence: Synthetic oligonucleotide
auauaccgguagccaucuu

SEQ ID NO: 932049 - RNA, 19 nt, Artificial Sequence
  Description of Artificial Sequence: Synthetic oligonucleotide
uguuuacgcuuggcuccuc

SEQ ID NO: 932050 - RNA, 19 nt, Artificial Sequence
  Description of Artificial Sequence: Synthetic oligonucleotide
cuaagggagcuugaagguu

SEQ ID NO: 932051 - RNA, 19 nt, Artificial Sequence
  Description of Artificial Sequence: Synthetic oligonucleotide
ggcgccuucuauaguaucu

SEQ ID NO: 932052 - RNA, 19 nt, Artificial Sequence
  Description of Artificial Sequence: Synthetic oligonucleotide
gccuuaucuuuguaaguau

SEQ ID NO: 932053 - RNA, 19 nt, Artificial Sequence
  Description of Artificial Sequence: Synthetic oligonucleotide
ggaaaccgugcagcucuug

SEQ ID NO: 932054 - RNA, 19 nt, Artificial Sequence
  Description of Artificial Sequence: Synthetic oligonucleotide
caauguuauugggccaagu

SEQ ID NO: 932055 - RNA, 19 nt, Artificial Sequence
  Description of Artificial Sequence: Synthetic oligonucleotide
caauagacugguggaacuu

SEQ ID NO: 932056 - RNA, 19 nt, Artificial Sequence
  Description of Artificial Sequence: Synthetic oligonucleotide
ggugucagcuguaaaccau

SEQ ID NO: 932057 - RNA, 19 nt, Artificial Sequence
  Description of Artificial Sequence: Synthetic oligonucleotide
cccguaccauggaguagcc

SEQ ID NO: 932058 - RNA, 19 nt, Artificial Sequence
  Description of Artificial Sequence: Synthetic oligonucleotide
ucguaaccuaagggagcuu

SEQ ID NO: 932059 - RNA, 19 nt, Artificial Sequence
  Description of Artificial Sequence: Synthetic oligonucleotide
aguccgaauuugggauaau

SEQ ID NO: 932060 - RNA, 19 nt, Artificial Sequence
  Description of Artificial Sequence: Synthetic oligonucleotide
guuauugggccaagucauu

SEQ ID NO: 932061 - RNA, 19 nt, Artificial Sequence
  Description of Artificial Sequence: Synthetic oligonucleotide
cagauccuuuggaggauau

SEQ ID NO: 932062 - RNA, 19 nt, Artificial Sequence
  Description of Artificial Sequence: Synthetic oligonucleotide
caggguggacugcgccuuc

SEQ ID NO: 932063 - RNA, 19 nt, Artificial Sequence
  Description of Artificial Sequence: Synthetic oligonucleotide
ggcccguaccauggaguag

SEQ ID NO: 932064 - RNA, 19 nt, Artificial Sequence
  Description of Artificial Sequence: Synthetic oligonucleotide
cccggcgccuucuauagua

SEQ ID NO: 932065 - RNA, 19 nt, Artificial Sequence
  Description of Artificial Sequence: Synthetic oligonucleotide
cuguuuacgcuuggcuccu

SEQ ID NO: 932066 - RNA, 19 nt, Artificial Sequence
  Description of Artificial Sequence: Synthetic oligonucleotide
ccccaugggaggcccguac

SEQ ID NO: 932067 - RNA, 19 nt, Artificial Sequence
  Description of Artificial Sequence: Synthetic oligonucleotide
aucucacuauggggaguuu

SEQ ID NO: 932068 - RNA, 19 nt, Artificial Sequence
  Description of Artificial Sequence: Synthetic oligonucleotide
cacuucgggccuucuuggu

SEQ ID NO: 932069 - RNA, 19 nt, Artificial Sequence
  Description of Artificial Sequence: Synthetic oligonucleotide
cgggauguuccuuuaccaa

SEQ ID NO: 932070 - RNA, 19 nt, Artificial Sequence
  Description of Artificial Sequence: Synthetic oligonucleotide
ggucccuguugucccucca

SEQ ID NO: 932071 - RNA, 19 nt, Artificial Sequence
  Description of Artificial Sequence: Synthetic oligonucleotide
guauccccggcgccuucua

SEQ ID NO: 932072 - RNA, 19 nt, Artificial Sequence
  Description of Artificial Sequence: Synthetic oligonucleotide
gcuuccggagaaaguaggu

SEQ ID NO: 932073 - RNA, 19 nt, Artificial Sequence
  Description of Artificial Sequence: Synthetic oligonucleotide
ccuguugucccuccauccu

SEQ ID NO: 932074 - RNA, 19 nt, Artificial Sequence
  Description of Artificial Sequence: Synthetic oligonucleotide
ccguaccauggaguagccc

SEQ ID NO: 932075 - RNA, 19 nt, Artificial Sequence
  Description of Artificial Sequence: Synthetic oligonucleotide
ccccauuuagguucccacu

SEQ ID NO: 932076 - RNA, 19 nt, Artificial Sequence
  Description of Artificial Sequence: Synthetic oligonucleotide
gggaggcccguaccaugga

SEQ ID NO: 932077 - RNA, 19 nt, Artificial Sequence
  Description of Artificial Sequence: Synthetic oligonucleotide
cacccugauugacaccauu

SEQ ID NO: 932078 - RNA, 19 nt, Artificial Sequence
  Description of Artificial Sequence: Synthetic oligonucleotide
cccugauugacaccauuuu

SEQ ID NO: 932079 - RNA, 19 nt, Artificial Sequence
  Description of Artificial Sequence: Synthetic oligonucleotide
gccuggguauccaucacuu

SEQ ID NO: 932080 - RNA, 19 nt, Artificial Sequence
  Description of Artificial Sequence: Synthetic oligonucleotide
ggucacuucgggccuucuu

SEQ ID NO: 932081 - RNA, 19 nt, Artificial Sequence
  Description of Artificial Sequence: Synthetic oligonucleotide
gccggaaaguaaacucccu

SEQ ID NO: 932082 - RNA, 19 nt, Artificial Sequence
  Description of Artificial Sequence: Synthetic oligonucleotide
cuguaucuucgggaagauu

SEQ ID NO: 932083 - RNA, 19 nt, Artificial Sequence
  Description of Artificial Sequence: Synthetic oligonucleotide
ccuuaucuuuggagaacau

SEQ ID NO: 932084 - RNA, 19 nt, Artificial Sequence
  Description of Artificial Sequence: Synthetic oligonucleotide
ccgaaggugucagcuguaa

SEQ ID NO: 932085 - RNA, 19 nt, Artificial Sequence
  Description of Artificial Sequence: Synthetic oligonucleotide
cccaauugucgcccauucu

SEQ ID NO: 932086 - RNA, 19 nt, Artificial Sequence
  Description of Artificial Sequence: Synthetic oligonucleotide
cggucgucagagaucuuua

SEQ ID NO: 932087 - RNA, 19 nt, Artificial Sequence
  Description of Artificial Sequence: Synthetic oligonucleotide
cagcaguaucugguggcau

SEQ ID NO: 932088 - RNA, 19 nt, Artificial Sequence
  Description of Artificial Sequence: Synthetic oligonucleotide
gcgccuucuauaguaucuu

SEQ ID NO: 932089 - RNA, 19 nt, Artificial Sequence
  Description of Artificial Sequence: Synthetic oligonucleotide
ccggucgucagagaucuuu

SEQ ID NO: 932090 - RNA, 19 nt, Artificial Sequence
  Description of Artificial Sequence: Synthetic oligonucleotide
cugggucgggauguuccuu

SEQ ID NO: 932091 - RNA, 19 nt, Artificial Sequence
  Description of Artificial Sequence: Synthetic oligonucleotide
cugcgccuuccguccacuu

SEQ ID NO: 932092 - RNA, 19 nt, Artificial Sequence
  Description of Artificial Sequence: Synthetic oligonucleotide
accggucgucagagaucuu

SEQ ID NO: 932093 - RNA, 19 nt, Artificial Sequence
  Description of Artificial Sequence: Synthetic oligonucleotide
ccggcgccuucuauaguau

SEQ ID NO: 932094 - RNA, 19 nt, Artificial Sequence
  Description of Artificial Sequence: Synthetic oligonucleotide
cgccuucuauaguaucuuu

SEQ ID NO: 932095 - RNA, 19 nt, Artificial Sequence
  Description of Artificial Sequence: Synthetic oligonucleotide
ccccggcgccuucuauagu

SEQ ID NO: 932096 - RNA, 19 nt, Artificial Sequence
  Description of Artificial Sequence: Synthetic oligonucleotide
aaguaaacauaucauagac

SEQ ID NO: 932097 - RNA, 19 nt, Artificial Sequence
  Description of Artificial Sequence: Synthetic oligonucleotide
aaauauaccuuauuuguuc

SEQ ID NO: 932098 - RNA, 19 nt, Artificial Sequence
  Description of Artificial Sequence: Synthetic oligonucleotide
aaacauaucuuucauguag

SEQ ID NO: 932099 - RNA, 19 nt, Artificial Sequence
  Description of Artificial Sequence: Synthetic oligonucleotide
auuagaaacaggaaaaggc

SEQ ID NO: 932100 - RNA, 19 nt, Artificial Sequence
  Description of Artificial Sequence: Synthetic oligonucleotide
gaugucauaaguucggugg

SEQ ID NO: 932101 - RNA, 19 nt, Artificial Sequence
  Description of Artificial Sequence: Synthetic oligonucleotide
uauuaaagauuuuauagug

SEQ ID NO: 932102 - RNA, 19 nt, Artificial Sequence
  Description of Artificial Sequence: Synthetic oligonucleotide
aucuauuugacacuguagg

SEQ ID NO: 932103 - RNA, 19 nt, Artificial Sequence
  Description of Artificial Sequence: Synthetic oligonucleotide
ugugauaguaauagcauag

SEQ ID NO: 932104 - RNA, 19 nt, Artificial Sequence
  Description of Artificial Sequence: Synthetic oligonucleotide
ugugagagaaaacuggaag

SEQ ID NO: 932105 - RNA, 19 nt, Artificial Sequence
  Description of Artificial Sequence: Synthetic oligonucleotide
aguaauagcauaguuuggc

SEQ ID NO: 932106 - RNA, 19 nt, Artificial Sequence
  Description of Artificial Sequence: Synthetic oligonucleotide
ucaacauugugauacaaug

SEQ ID NO: 932107 - RNA, 19 nt, Artificial Sequence
  Description of Artificial Sequence: Synthetic oligonucleotide
aaauguaugggccacgccu

SEQ ID NO: 932108 - RNA, 19 nt, Artificial Sequence
  Description of Artificial Sequence: Synthetic oligonucleotide
auaucuuucauguagugca

SEQ ID NO: 932109 - RNA, 19 nt, Artificial Sequence
  Description of Artificial Sequence: Synthetic oligonucleotide
auugaaaucaaauaccgaa

SEQ ID NO: 932110 - RNA, 19 nt, Artificial Sequence
  Description of Artificial Sequence: Synthetic oligonucleotide
uauguuuacaaaauuuaga

SEQ ID NO: 932111 - RNA, 19 nt, Artificial Sequence
  Description of Artificial Sequence: Synthetic oligonucleotide
ucuacuuuagcacuggcgu

SEQ ID NO: 932112 - RNA, 19 nt, Artificial Sequence
  Description of Artificial Sequence: Synthetic oligonucleotide
uauaagcacacacacacca

SEQ ID NO: 932113 - RNA, 19 nt, Artificial Sequence
  Description of Artificial Sequence: Synthetic oligonucleotide
aauaccgaaacguugguaa

SEQ ID NO: 932114 - RNA, 19 nt, Artificial Sequence
  Description of Artificial Sequence: Synthetic oligonucleotide
aaaugaauaacaucugaaa

SEQ ID NO: 932115 - RNA, 19 nt, Artificial Sequence
  Description of Artificial Sequence: Synthetic oligonucleotide
auaaaugauaguguucgcc

SEQ ID NO: 932116 - RNA, 19 nt, Artificial Sequence
  Description of Artificial Sequence: Synthetic oligonucleotide
auugugauacaaugcaugg

SEQ ID NO: 932117 - RNA, 19 nt, Artificial Sequence
  Description of Artificial Sequence: Synthetic oligonucleotide
uaagaaagcgauuccaacc

SEQ ID NO: 932118 - RNA, 19 nt, Artificial Sequence
  Description of Artificial Sequence: Synthetic oligonucleotide
aguucggugggccuaagcc

SEQ ID NO: 932119 - RNA, 19 nt, Artificial Sequence
  Description of Artificial Sequence: Synthetic oligonucleotide
uugauaccuacgaacaccg

SEQ ID NO: 932120 - RNA, 19 nt, Artificial Sequence
  Description of Artificial Sequence: Synthetic oligonucleotide
ugauugauaccuacgaaca

SEQ ID NO: 932121 - RNA, 19 nt, Artificial Sequence
  Description of Artificial Sequence: Synthetic oligonucleotide
acgacagucagugagaggg

SEQ ID NO: 932122 - RNA, 19 nt, Artificial Sequence
  Description of Artificial Sequence: Synthetic oligonucleotide
uucuagaucugucaaaagu

SEQ ID NO: 932123 - RNA, 19 nt, Artificial Sequence
  Description of Artificial Sequence: Synthetic oligonucleotide
ucuagaucugucaaaaguc

SEQ ID NO: 932124 - RNA, 19 nt, Artificial Sequence
  Description of Artificial Sequence: Synthetic oligonucleotide
uaaaauaaggcuucucagu

SEQ ID NO: 932125 - RNA, 19 nt, Artificial Sequence
  Description of Artificial Sequence: Synthetic oligonucleotide
aaauaucuauuugacacug

SEQ ID NO: 932126 - RNA, 19 nt, Artificial Sequence
  Description of Artificial Sequence: Synthetic oligonucleotide
uauuuuacccuuguguucc

SEQ ID NO: 932127 - RNA, 19 nt, Artificial Sequence
  Description of Artificial Sequence: Synthetic oligonucleotide
cacacauacacacacacac

SEQ ID NO: 932128 - RNA, 19 nt, Artificial Sequence
  Description of Artificial Sequence: Synthetic oligonucleotide
auguguauugauaaacacc

SEQ ID NO: 932129 - RNA, 19 nt, Artificial Sequence
  Description of Artificial Sequence: Synthetic oligonucleotide
cagcuuauauacuuaaacc

SEQ ID NO: 932130 - RNA, 19 nt, Artificial Sequence
  Description of Artificial Sequence: Synthetic oligonucleotide
ucauguagugcacauauau

SEQ ID NO: 932131 - RNA, 19 nt, Artificial Sequence
  Description of Artificial Sequence: Synthetic oligonucleotide
gauaccuacgaacaccgcc

SEQ ID NO: 932132 - RNA, 19 nt, Artificial Sequence
  Description of Artificial Sequence: Synthetic oligonucleotide
ugucaaaaguccaccacag

SEQ ID NO: 932133 - RNA, 19 nt, Artificial Sequence
  Description of Artificial Sequence: Synthetic oligonucleotide
aaucgaaguagaccaaugu

SEQ ID NO: 932134 - RNA, 19 nt, Artificial Sequence
  Description of Artificial Sequence: Synthetic oligonucleotide
uaucuauuugacacuguag

SEQ ID NO: 932135 - RNA, 19 nt, Artificial Sequence
  Description of Artificial Sequence: Synthetic oligonucleotide
uagacuagcaguuggguga

SEQ ID NO: 932136 - RNA, 19 nt, Artificial Sequence
  Description of Artificial Sequence: Synthetic oligonucleotide
cagauaauuaacaauuuca

SEQ ID NO: 932137 - RNA, 19 nt, Artificial Sequence
  Description of Artificial Sequence: Synthetic oligonucleotide
aacacuaaggcaaggaaca

SEQ ID NO: 932138 - RNA, 19 nt, Artificial Sequence
  Description of Artificial Sequence: Synthetic oligonucleotide
cauaguuuggcacaucaac

SEQ ID NO: 932139 - RNA, 19 nt, Artificial Sequence
  Description of Artificial Sequence: Synthetic oligonucleotide
uguggggugcucauaaugc

SEQ ID NO: 932140 - RNA, 19 nt, Artificial Sequence
  Description of Artificial Sequence: Synthetic oligonucleotide
aaguucaacacuaaggcaa

SEQ ID NO: 932141 - RNA, 19 nt, Artificial Sequence
  Description of Artificial Sequence: Synthetic oligonucleotide
uuguuaaugagaugugucu

SEQ ID NO: 932142 - RNA, 19 nt, Artificial Sequence
  Description of Artificial Sequence: Synthetic oligonucleotide
aauguuucccauuguuaug

SEQ ID NO: 932143 - RNA, 19 nt, Artificial Sequence
  Description of Artificial Sequence: Synthetic oligonucleotide
agucagauuauuuuacccu

SEQ ID NO: 932144 - RNA, 19 nt, Artificial Sequence
  Description of Artificial Sequence: Synthetic oligonucleotide
accuuauuuguucuaaaug

SEQ ID NO: 932145 - RNA, 19 nt, Artificial Sequence
  Description of Artificial Sequence: Synthetic oligonucleotide
ugaaaagaugcucguagac

SEQ ID NO: 932146 - RNA, 19 nt, Artificial Sequence
  Description of Artificial Sequence: Synthetic oligonucleotide
cauugugauacaaugcaug

SEQ ID NO: 932147 - RNA, 19 nt, Artificial Sequence
  Description of Artificial Sequence: Synthetic oligonucleotide
auaaacaccauuguagacu

SEQ ID NO: 932148 - RNA, 19 nt, Artificial Sequence
  Description of Artificial Sequence: Synthetic oligonucleotide
gaaaagaugcucguagacc

SEQ ID NO: 932149 - RNA, 19 nt, Artificial Sequence
  Description of Artificial Sequence: Synthetic oligonucleotide
ucugugauaguaauagcau

SEQ ID NO: 932150 - RNA, 19 nt, Artificial Sequence
  Description of Artificial Sequence: Synthetic oligonucleotide
cagugugagagaaaacugg

SEQ ID NO: 932151 - RNA, 19 nt, Artificial Sequence
  Description of Artificial Sequence: Synthetic oligonucleotide
gugauugauaccuacgaac

SEQ ID NO: 932152 - RNA, 19 nt, Artificial Sequence
  Description of Artificial Sequence: Synthetic oligonucleotide
cacacacacacauacacac

SEQ ID NO: 932153 - RNA, 19 nt, Artificial Sequence
  Description of Artificial Sequence: Synthetic oligonucleotide
cucacacacacacacauac

SEQ ID NO: 932154 - RNA, 19 nt, Artificial Sequence
  Description of Artificial Sequence: Synthetic oligonucleotide
uauugaaaucaaauaccga

SEQ ID NO: 932155 - RNA, 19 nt, Artificial Sequence
  Description of Artificial Sequence: Synthetic oligonucleotide
aaaacugcguugguguguc

SEQ ID NO: 932156 - RNA, 19 nt, Artificial Sequence
  Description of Artificial Sequence: Synthetic oligonucleotide
uacacacacacaccaauca

SEQ ID NO: 932157 - RNA, 19 nt, Artificial Sequence
  Description of Artificial Sequence: Synthetic oligonucleotide
aaugauaguguucgccacu

SEQ ID NO: 932158 - RNA, 19 nt, Artificial Sequence
  Description of Artificial Sequence: Synthetic oligonucleotide
uaagcacacacacaccaca

SEQ ID NO: 932159 - RNA, 19 nt, Artificial Sequence
  Description of Artificial Sequence: Synthetic oligonucleotide
uaguaauagcauaguuugg

SEQ ID NO: 932160 - RNA, 19 nt, Artificial Sequence
  Description of Artificial Sequence: Synthetic oligonucleotide
uuguagacuagcaguuggg

SEQ ID NO: 932161 - RNA, 19 nt, Artificial Sequence
  Description of Artificial Sequence: Synthetic oligonucleotide
ucgaagucuacuuuagcac

SEQ ID NO: 932162 - RNA, 19 nt, Artificial Sequence
  Description of Artificial Sequence: Synthetic oligonucleotide
uagaccuuauaacuuauua

SEQ ID NO: 932163 - RNA, 19 nt, Artificial Sequence
  Description of Artificial Sequence: Synthetic oligonucleotide
ugguauguuuacaaaauuu

SEQ ID NO: 932164 - RNA, 19 nt, Artificial Sequence
  Description of Artificial Sequence: Synthetic oligonucleotide
uguuccagauaauuaacaa

SEQ ID NO: 932165 - RNA, 19 nt, Artificial Sequence
  Description of Artificial Sequence: Synthetic oligonucleotide
guugcuaagaaagcgauuc

SEQ ID NO: 932166 - RNA, 19 nt, Artificial Sequence
  Description of Artificial Sequence: Synthetic oligonucleotide
ugagaugugucugaaacaa

SEQ ID NO: 932167 - RNA, 19 nt, Artificial Sequence
  Description of Artificial Sequence: Synthetic oligonucleotide
ugucacguuucucugaauc

SEQ ID NO: 932168 - RNA, 19 nt, Artificial Sequence
  Description of Artificial Sequence: Synthetic oligonucleotide
uguuaaugagaugugucug

SEQ ID NO: 932169 - RNA, 19 nt, Artificial Sequence
  Description of Artificial Sequence: Synthetic oligonucleotide
aacggacauagagaaaauc

SEQ ID NO: 932170 - RNA, 19 nt, Artificial Sequence
  Description of Artificial Sequence: Synthetic oligonucleotide
uguguuccagauaauuaac

SEQ ID NO: 932171 - RNA, 19 nt, Artificial Sequence
  Description of Artificial Sequence: Synthetic oligonucleotide
auacauugccaguugacga

SEQ ID NO: 932172 - RNA, 19 nt, Artificial Sequence
  Description of Artificial Sequence: Synthetic oligonucleotide
auggcaaccaagaacggac

SEQ ID NO: 932173 - RNA, 19 nt, Artificial Sequence
  Description of Artificial Sequence: Synthetic oligonucleotide
agccauaaaauaaaauaag

SEQ ID NO: 932174 - RNA, 19 nt, Artificial Sequence
  Description of Artificial Sequence: Synthetic oligonucleotide
agaaagcgauuccaacccc

SEQ ID NO: 932175 - RNA, 19 nt, Artificial Sequence
  Description of Artificial Sequence: Synthetic oligonucleotide
aaugcagggguacaauaau

SEQ ID NO: 932176 - RNA, 19 nt, Artificial Sequence
  Description of Artificial Sequence: Synthetic oligonucleotide
acguugguaacugauuuac

SEQ ID NO: 932177 - RNA, 19 nt, Artificial Sequence
  Description of Artificial Sequence: Synthetic oligonucleotide
agaacggacauagagaaaa

SEQ ID NO: 932178 - RNA, 19 nt, Artificial Sequence
  Description of Artificial Sequence: Synthetic oligonucleotide
cacacacacacacauacac

SEQ ID NO: 932179 - RNA, 19 nt, Artificial Sequence
  Description of Artificial Sequence: Synthetic oligonucleotide
cagucagauuauuuuaccc

SEQ ID NO: 932180 - RNA, 19 nt, Artificial Sequence
  Description of Artificial Sequence: Synthetic oligonucleotide
augucauaaguucgguggg

SEQ ID NO: 932181 - RNA, 19 nt, Artificial Sequence
  Description of Artificial Sequence: Synthetic oligonucleotide
uuauuuuacccuuguguuc

SEQ ID NO: 932182 - RNA, 19 nt, Artificial Sequence
  Description of Artificial Sequence: Synthetic oligonucleotide
cagcgcauaacacuggacc

SEQ ID NO: 932183 - RNA, 19 nt, Artificial Sequence
  Description of Artificial Sequence: Synthetic oligonucleotide
agaccuuauaacuuauuaa

SEQ ID NO: 932184 - RNA, 19 nt, Artificial Sequence
  Description of Artificial Sequence: Synthetic oligonucleotide
ugauaguaauagcauaguu

SEQ ID NO: 932185 - RNA, 19 nt, Artificial Sequence
  Description of Artificial Sequence: Synthetic oligonucleotide
cacacacacauacacacac

SEQ ID NO: 932186 - RNA, 19 nt, Artificial Sequence
  Description of Artificial Sequence: Synthetic oligonucleotide
aaguucggugggccuaagc

SEQ ID NO: 932187 - RNA, 19 nt, Artificial Sequence
  Description of Artificial Sequence: Synthetic oligonucleotide
ucguagaccacaucaggug

SEQ ID NO: 932188 - RNA, 19 nt, Artificial Sequence
  Description of Artificial Sequence: Synthetic oligonucleotide
uugucgaagucuacuuuag

SEQ ID NO: 932189 - RNA, 19 nt, Artificial Sequence
  Description of Artificial Sequence: Synthetic oligonucleotide
agcauucuuauucucugug

SEQ ID NO: 932190 - RNA, 19 nt, Artificial Sequence
  Description of Artificial Sequence: Synthetic oligonucleotide
auuuuauaguguuuacaaa

SEQ ID NO: 932191 - RNA, 19 nt, Artificial Sequence
  Description of Artificial Sequence: Synthetic oligonucleotide
augcucguagaccacauca

SEQ ID NO: 932192 - RNA, 19 nt, Artificial Sequence
  Description of Artificial Sequence: Synthetic oligonucleotide
ucauacauugccaguugac

SEQ ID NO: 932193 - RNA, 19 nt, Artificial Sequence
  Description of Artificial Sequence: Synthetic oligonucleotide
auaccgaaacguugguaac

SEQ ID NO: 932194 - RNA, 19 nt, Artificial Sequence
  Description of Artificial Sequence: Synthetic oligonucleotide
acacucuuagccugagaac

SEQ ID NO: 932195 - RNA, 19 nt, Artificial Sequence
  Description of Artificial Sequence: Synthetic oligonucleotide
gucgaagucuacuuuagca

SEQ ID NO: 932196 - RNA, 19 nt, Artificial Sequence
  Description of Artificial Sequence: Synthetic oligonucleotide
uaguguucgccacuccuag

SEQ ID NO: 932197 - RNA, 19 nt, Artificial Sequence
  Description of Artificial Sequence: Synthetic oligonucleotide
caagaacggacauagagaa

SEQ ID NO: 932198 - RNA, 19 nt, Artificial Sequence
  Description of Artificial Sequence: Synthetic oligonucleotide
auaucuauuugacacugua

SEQ ID NO: 932199 - RNA, 19 nt, Artificial Sequence
  Description of Artificial Sequence: Synthetic oligonucleotide
aaugcacacugcugauuag

SEQ ID NO: 932200 - RNA, 19 nt, Artificial Sequence
  Description of Artificial Sequence: Synthetic oligonucleotide
cacacacauacacacacac

SEQ ID NO: 932201 - RNA, 19 nt, Artificial Sequence
  Description of Artificial Sequence: Synthetic oligonucleotide
aggcacgacagucagugag

SEQ ID NO: 932202 - RNA, 19 nt, Artificial Sequence
  Description of Artificial Sequence: Synthetic oligonucleotide
uggaaguuguugucgaagu

SEQ ID NO: 932203 - RNA, 19 nt, Artificial Sequence
  Description of Artificial Sequence: Synthetic oligonucleotide
auuguuaugccuccagcaa

SEQ ID NO: 932204 - RNA, 19 nt, Artificial Sequence
  Description of Artificial Sequence: Synthetic oligonucleotide
uagcauuaggcuugcaaac

SEQ ID NO: 932205 - RNA, 19 nt, Artificial Sequence
  Description of Artificial Sequence: Synthetic oligonucleotide
ugaugucauaaguucggug

SEQ ID NO: 932206 - RNA, 19 nt, Artificial Sequence
  Description of Artificial Sequence: Synthetic oligonucleotide
uauaccuuauuuguucuaa

SEQ ID NO: 932207 - RNA, 19 nt, Artificial Sequence
  Description of Artificial Sequence: Synthetic oligonucleotide
uacauugccaguugacgac

SEQ ID NO: 932208 - RNA, 19 nt, Artificial Sequence
  Description of Artificial Sequence: Synthetic oligonucleotide
ugccaguugacgaccaaug

SEQ ID NO: 932209 - RNA, 19 nt, Artificial Sequence
  Description of Artificial Sequence: Synthetic oligonucleotide
gauugauaccuacgaacac

SEQ ID NO: 932210 - RNA, 19 nt, Artificial Sequence
  Description of Artificial Sequence: Synthetic oligonucleotide
aaguagaccaauguuucaa

SEQ ID NO: 932211 - RNA, 19 nt, Artificial Sequence
  Description of Artificial Sequence: Synthetic oligonucleotide
agauuuuauaguguuuaca

SEQ ID NO: 932212 - RNA, 19 nt, Artificial Sequence
  Description of Artificial Sequence: Synthetic oligonucleotide
ggacauagagaaaaucugg

SEQ ID NO: 932213 - RNA, 19 nt, Artificial Sequence
  Description of Artificial Sequence: Synthetic oligonucleotide
agaugugucugaaacaaca

SEQ ID NO: 932214 - RNA, 19 nt, Artificial Sequence
  Description of Artificial Sequence: Synthetic oligonucleotide
uaauccaaucacagcugag

SEQ ID NO: 932215 - RNA, 19 nt, Artificial Sequence
  Description of Artificial Sequence: Synthetic oligonucleotide
uagaugccugucaaugcag

SEQ ID NO: 932216 - RNA, 19 nt, Artificial Sequence
  Description of Artificial Sequence: Synthetic oligonucleotide
gugucucacacacacacac

SEQ ID NO: 932217 - RNA, 19 nt, Artificial Sequence
  Description of Artificial Sequence: Synthetic oligonucleotide
auucauacauugccaguug

SEQ ID NO: 932218 - RNA, 19 nt, Artificial Sequence
  Description of Artificial Sequence: Synthetic oligonucleotide
acggacauagagaaaaucu

SEQ ID NO: 932219 - RNA, 19 nt, Artificial Sequence
  Description of Artificial Sequence: Synthetic oligonucleotide
augaaaagaugcucguaga

SEQ ID NO: 932220 - RNA, 19 nt, Artificial Sequence
  Description of Artificial Sequence: Synthetic oligonucleotide
aagucuacuuuagcacugg

SEQ ID NO: 932221 - RNA, 19 nt, Artificial Sequence
  Description of Artificial Sequence: Synthetic oligonucleotide
agucuacuuuagcacuggc

SEQ ID NO: 932222 - RNA, 19 nt, Artificial Sequence
  Description of Artificial Sequence: Synthetic oligonucleotide
cucucacucagcauauaag

SEQ ID NO: 932223 - RNA, 19 nt, Artificial Sequence
  Description of Artificial Sequence: Synthetic oligonucleotide
uuguuaugccuccagcaaa

SEQ ID NO: 932224 - RNA, 19 nt, Artificial Sequence
  Description of Artificial Sequence: Synthetic oligonucleotide
guugggugacaacaguugc

SEQ ID NO: 932225 - RNA, 19 nt, Artificial Sequence
  Description of Artificial Sequence: Synthetic oligonucleotide
cugugaaucgaaguagacc

SEQ ID NO: 932226 - RNA, 19 nt, Artificial Sequence
  Description of Artificial Sequence: Synthetic oligonucleotide
uucaacacuaaggcaagga

SEQ ID NO: 932227 - RNA, 19 nt, Artificial Sequence
  Description of Artificial Sequence: Synthetic oligonucleotide
guagaccaauguuucaaug

SEQ ID NO: 932228 - RNA, 19 nt, Artificial Sequence
  Description of Artificial Sequence: Synthetic oligonucleotide
cacguuucucugaaucugg

SEQ ID NO: 932229 - RNA, 19 nt, Artificial Sequence
  Description of Artificial Sequence: Synthetic oligonucleotide
gaucugucaaaaguccacc

SEQ ID NO: 932230 - RNA, 19 nt, Artificial Sequence
  Description of Artificial Sequence: Synthetic oligonucleotide
cuacugacagugcagccag

SEQ ID NO: 932231 - RNA, 19 nt, Artificial Sequence
  Description of Artificial Sequence: Synthetic oligonucleotide
uugcuaagaaagcgauucc

SEQ ID NO: 932232 - RNA, 19 nt, Artificial Sequence
  Description of Artificial Sequence: Synthetic oligonucleotide
cuagcauuaggcuugcaaa

SEQ ID NO: 932233 - RNA, 19 nt, Artificial Sequence
  Description of Artificial Sequence: Synthetic oligonucleotide
uagcaguugggugacaaca

SEQ ID NO: 932234 - RNA, 19 nt, Artificial Sequence
  Description of Artificial Sequence: Synthetic oligonucleotide
uuuaugugguucuccuaga

SEQ ID NO: 932235 - RNA, 19 nt, Artificial Sequence
  Description of Artificial Sequence: Synthetic oligonucleotide
agauuauuuuacccuugug

SEQ ID NO: 932236 - RNA, 19 nt, Artificial Sequence
  Description of Artificial Sequence: Synthetic oligonucleotide
uacacgucgcuuuuccaug

SEQ ID NO: 932237 - RNA, 19 nt, Artificial Sequence
  Description of Artificial Sequence: Synthetic oligonucleotide
guuucacuaaauuucuaaa

SEQ ID NO: 932238 - RNA, 19 nt, Artificial Sequence
  Description of Artificial Sequence: Synthetic oligonucleotide
uaccuuauuuguucuaaau

SEQ ID NO: 932239 - RNA, 19 nt, Artificial Sequence
  Description of Artificial Sequence: Synthetic oligonucleotide
gagagaaaacuggaaguug

SEQ ID NO: 932240 - RNA, 19 nt, Artificial Sequence
  Description of Artificial Sequence: Synthetic oligonucleotide
cacauacacacacacacca

SEQ ID NO: 932241 - RNA, 19 nt, Artificial Sequence
  Description of Artificial Sequence: Synthetic oligonucleotide
uacaaugcaugguauguuu

SEQ ID NO: 932242 - RNA, 19 nt, Artificial Sequence
  Description of Artificial Sequence: Synthetic oligonucleotide
ugucgaagucuacuuuagc

SEQ ID NO: 932243 - RNA, 19 nt, Artificial Sequence
  Description of Artificial Sequence: Synthetic oligonucleotide
ucacguuucucugaaucug

SEQ ID NO: 932244 - RNA, 19 nt, Artificial Sequence
  Description of Artificial Sequence: Synthetic oligonucleotide
acacauacacacacacacc

SEQ ID NO: 932245 - RNA, 19 nt, Artificial Sequence
  Description of Artificial Sequence: Synthetic oligonucleotide
auguggggugcucauaaug

SEQ ID NO: 932246 - RNA, 19 nt, Artificial Sequence
  Description of Artificial Sequence: Synthetic oligonucleotide
uuaugugguucuccuagau

SEQ ID NO: 932247 - RNA, 19 nt, Artificial Sequence
  Description of Artificial Sequence: Synthetic oligonucleotide
gaagucuacuuuagcacug

SEQ ID NO: 932248 - RNA, 19 nt, Artificial Sequence
  Description of Artificial Sequence: Synthetic oligonucleotide
auacacgucgcuuuuccau

SEQ ID NO: 932249 - RNA, 19 nt, Artificial Sequence
  Description of Artificial Sequence: Synthetic oligonucleotide
agcgcauaacacuggacca

SEQ ID NO: 932250 - RNA, 19 nt, Artificial Sequence
  Description of Artificial Sequence: Synthetic oligonucleotide
ugcucauaaugcacacugc

SEQ ID NO: 932251 - RNA, 19 nt, Artificial Sequence
  Description of Artificial Sequence: Synthetic oligonucleotide
ugcugauuagaaacaggaa

SEQ ID NO: 932252 - RNA, 19 nt, Artificial Sequence
  Description of Artificial Sequence: Synthetic oligonucleotide
ugccaugaugucauaaguu

SEQ ID NO: 932253 - RNA, 19 nt, Artificial Sequence
  Description of Artificial Sequence: Synthetic oligonucleotide
auacacacacacaccaauc

SEQ ID NO: 932254 - RNA, 19 nt, Artificial Sequence
  Description of Artificial Sequence: Synthetic oligonucleotide
gaaauguaugggccacgcc

SEQ ID NO: 932255 - RNA, 19 nt, Artificial Sequence
  Description of Artificial Sequence: Synthetic oligonucleotide
uccaaucacagcugaggcu

SEQ ID NO: 932256 - RNA, 19 nt, Artificial Sequence
  Description of Artificial Sequence: Synthetic oligonucleotide
aagcgauuccaaccccaag

SEQ ID NO: 932257 - RNA, 19 nt, Artificial Sequence
  Description of Artificial Sequence: Synthetic oligonucleotide
uguagacuagcaguugggu

SEQ ID NO: 932258 - RNA, 19 nt, Artificial Sequence
  Description of Artificial Sequence: Synthetic oligonucleotide
uuaaugagaugugucugaa

SEQ ID NO: 932259 - RNA, 19 nt, Artificial Sequence
  Description of Artificial Sequence: Synthetic oligonucleotide
aagcacacacacaccacag

SEQ ID NO: 932260 - RNA, 19 nt, Artificial Sequence
  Description of Artificial Sequence: Synthetic oligonucleotide
uuccuagagaaaagacaga

SEQ ID NO: 932261 - RNA, 19 nt, Artificial Sequence
  Description of Artificial Sequence: Synthetic oligonucleotide
acacgucgcuuuuccaugg

SEQ ID NO: 932262 - RNA, 19 nt, Artificial Sequence
  Description of Artificial Sequence: Synthetic oligonucleotide
ugugucucacacacacaca

SEQ ID NO: 932263 - RNA, 19 nt, Artificial Sequence
  Description of Artificial Sequence: Synthetic oligonucleotide
aguagaccaauguuucaau

SEQ ID NO: 932264 - RNA, 19 nt, Artificial Sequence
  Description of Artificial Sequence: Synthetic oligonucleotide
ucggaguacucuugggaug

SEQ ID NO: 932265 - RNA, 19 nt, Artificial Sequence
  Description of Artificial Sequence: Synthetic oligonucleotide
ucacacacacacacauaca

SEQ ID NO: 932266 - RNA, 19 nt, Artificial Sequence
  Description of Artificial Sequence: Synthetic oligonucleotide
aucugucaaaaguccacca

SEQ ID NO: 932267 - RNA, 19 nt, Artificial Sequence
  Description of Artificial Sequence: Synthetic oligonucleotide
agugucacguuucucugaa

SEQ ID NO: 932268 - RNA, 19 nt, Artificial Sequence
  Description of Artificial Sequence: Synthetic oligonucleotide
accaauguuucccauuguu

SEQ ID NO: 932269 - RNA, 19 nt, Artificial Sequence
  Description of Artificial Sequence: Synthetic oligonucleotide
cacacucuuagccugagaa

SEQ ID NO: 932270 - RNA, 19 nt, Artificial Sequence
  Description of Artificial Sequence: Synthetic oligonucleotide
cuagaugccugucaaugca

SEQ ID NO: 932271 - RNA, 19 nt, Artificial Sequence
  Description of Artificial Sequence: Synthetic oligonucleotide
gaaagcaugggcacaugca

SEQ ID NO: 932272 - RNA, 19 nt, Artificial Sequence
  Description of Artificial Sequence: Synthetic oligonucleotide
ugucucacacacacacaca

SEQ ID NO: 932273 - RNA, 19 nt, Artificial Sequence
  Description of Artificial Sequence: Synthetic oligonucleotide
guugacgaccaauguuucc

SEQ ID NO: 932274 - RNA, 19 nt, Artificial Sequence
  Description of Artificial Sequence: Synthetic oligonucleotide
cuacuuuagcacuggcgug

SEQ ID NO: 932275 - RNA, 19 nt, Artificial Sequence
  Description of Artificial Sequence: Synthetic oligonucleotide
uucggugggccuaagccau

SEQ ID NO: 932276 - RNA, 19 nt, Artificial Sequence
  Description of Artificial Sequence: Synthetic oligonucleotide
aguugggugacaacaguug

SEQ ID NO: 932277 - RNA, 19 nt, Artificial Sequence
  Description of Artificial Sequence: Synthetic oligonucleotide
aauaucuauuugacacugu

SEQ ID NO: 932278 - RNA, 19 nt, Artificial Sequence
  Description of Artificial Sequence: Synthetic oligonucleotide
ugucauaaguucggugggc

SEQ ID NO: 932279 - RNA, 19 nt, Artificial Sequence
  Description of Artificial Sequence: Synthetic oligonucleotide
uuacacucuggaguacaag

SEQ ID NO: 932280 - RNA, 19 nt, Artificial Sequence
  Description of Artificial Sequence: Synthetic oligonucleotide
auaccuacgaacaccgcca

SEQ ID NO: 932281 - RNA, 19 nt, Artificial Sequence
  Description of Artificial Sequence: Synthetic oligonucleotide
aggugacucgggucuuucc

SEQ ID NO: 932282 - RNA, 19 nt, Artificial Sequence
  Description of Artificial Sequence: Synthetic oligonucleotide
ggaguacaagauuucagca

SEQ ID NO: 932283 - RNA, 19 nt, Artificial Sequence
  Description of Artificial Sequence: Synthetic oligonucleotide
uuguugucgaagucuacuu

SEQ ID NO: 932284 - RNA, 19 nt, Artificial Sequence
  Description of Artificial Sequence: Synthetic oligonucleotide
gauaguguucgccacuccu

SEQ ID NO: 932285 - RNA, 19 nt, Artificial Sequence
  Description of Artificial Sequence: Synthetic oligonucleotide
ggguacaauaauccaauca

SEQ ID NO: 932286 - RNA, 19 nt, Artificial Sequence
  Description of Artificial Sequence: Synthetic oligonucleotide
caaguucaacacuaaggca

SEQ ID NO: 932287 - RNA, 19 nt, Artificial Sequence
  Description of Artificial Sequence: Synthetic oligonucleotide
auuugacacuguaggaaag

SEQ ID NO: 932288 - RNA, 19 nt, Artificial Sequence
  Description of Artificial Sequence: Synthetic oligonucleotide
augggccacgccuuuuggg

SEQ ID NO: 932289 - RNA, 19 nt, Artificial Sequence
  Description of Artificial Sequence: Synthetic oligonucleotide
ugugccgcagcaagguggu

SEQ ID NO: 932290 - RNA, 19 nt, Artificial Sequence
  Description of Artificial Sequence: Synthetic oligonucleotide
gucauaaguucggugggcc

SEQ ID NO: 932291 - RNA, 19 nt, Artificial Sequence
  Description of Artificial Sequence: Synthetic oligonucleotide
agcauuaggcuugcaaaca

SEQ ID NO: 932292 - RNA, 19 nt, Artificial Sequence
  Description of Artificial Sequence: Synthetic oligonucleotide
uucgccacuccuagcauua

SEQ ID NO: 932293 - RNA, 19 nt, Artificial Sequence
  Description of Artificial Sequence: Synthetic oligonucleotide
uaaugagaugugucugaaa

SEQ ID NO: 932294 - RNA, 19 nt, Artificial Sequence
  Description of Artificial Sequence: Synthetic oligonucleotide
acucuuagccugagaacac

SEQ ID NO: 932295 - RNA, 19 nt, Artificial Sequence
  Description of Artificial Sequence: Synthetic oligonucleotide
acacacacacaccaaucaa

SEQ ID NO: 932296 - RNA, 19 nt, Artificial Sequence
  Description of Artificial Sequence: Synthetic oligonucleotide
aauguaugggccacgccuu

SEQ ID NO: 932297 - RNA, 19 nt, Artificial Sequence
  Description of Artificial Sequence: Synthetic oligonucleotide
agacuagcaguugggugac

SEQ ID NO: 932298 - RNA, 19 nt, Artificial Sequence
  Description of Artificial Sequence: Synthetic oligonucleotide
aucauagaccuuauaacuu

SEQ ID NO: 932299 - RNA, 19 nt, Artificial Sequence
  Description of Artificial Sequence: Synthetic oligonucleotide
ucgggucuuuccuucugcc

SEQ ID NO: 932300 - RNA, 19 nt, Artificial Sequence
  Description of Artificial Sequence: Synthetic oligonucleotide
auaccuuauuuguucuaaa

SEQ ID NO: 932301 - RNA, 19 nt, Artificial Sequence
  Description of Artificial Sequence: Synthetic oligonucleotide
uaccgaaacguugguaacu

SEQ ID NO: 932302 - RNA, 19 nt, Artificial Sequence
  Description of Artificial Sequence: Synthetic oligonucleotide
ugauaccuacgaacaccgc

SEQ ID NO: 932303 - RNA, 19 nt, Artificial Sequence
  Description of Artificial Sequence: Synthetic oligonucleotide
gaaagcgauuccaacccca

SEQ ID NO: 932304 - RNA, 19 nt, Artificial Sequence
  Description of Artificial Sequence: Synthetic oligonucleotide
caugguauguuuacaaaau

SEQ ID NO: 932305 - RNA, 19 nt, Artificial Sequence
  Description of Artificial Sequence: Synthetic oligonucleotide
guucggugggccuaagcca

SEQ ID NO: 932306 - RNA, 19 nt, Artificial Sequence
  Description of Artificial Sequence: Synthetic oligonucleotide
acucagcauauaagcacac

SEQ ID NO: 932307 - RNA, 19 nt, Artificial Sequence
  Description of Artificial Sequence: Synthetic oligonucleotide
uucauguagugcacauaua

SEQ ID NO: 932308 - RNA, 19 nt, Artificial Sequence
  Description of Artificial Sequence: Synthetic oligonucleotide
uggcgugauugauaccuac

SEQ ID NO: 932309 - RNA, 19 nt, Artificial Sequence
  Description of Artificial Sequence: Synthetic oligonucleotide
acguucacacucugggccu

SEQ ID NO: 932310 - RNA, 19 nt, Artificial Sequence
  Description of Artificial Sequence: Synthetic oligonucleotide
cacacacacaccacaguca

SEQ ID NO: 932311 - RNA, 19 nt, Artificial Sequence
  Description of Artificial Sequence: Synthetic oligonucleotide
ugguuuguuuguagccuuc

SEQ ID NO: 932312 - RNA, 19 nt, Artificial Sequence
  Description of Artificial Sequence: Synthetic oligonucleotide
guguuccagauaauuaaca

SEQ ID NO: 932313 - RNA, 19 nt, Artificial Sequence
  Description of Artificial Sequence: Synthetic oligonucleotide
gucgcuuuuccauggcuuc

SEQ ID NO: 932314 - RNA, 19 nt, Artificial Sequence
  Description of Artificial Sequence: Synthetic oligonucleotide
ugacucgggucuuuccuuc

SEQ ID NO: 932315 - RNA, 19 nt, Artificial Sequence
  Description of Artificial Sequence: Synthetic oligonucleotide
agcacacacacaccacagu

SEQ ID NO: 932316 - RNA, 19 nt, Artificial Sequence
  Description of Artificial Sequence: Synthetic oligonucleotide
gugggccuaagccauaaaa

SEQ ID NO: 932317 - RNA, 19 nt, Artificial Sequence
  Description of Artificial Sequence: Synthetic oligonucleotide
ucucacacacacacacaua

SEQ ID NO: 932318 - RNA, 19 nt, Artificial Sequence
  Description of Artificial Sequence: Synthetic oligonucleotide
aaagcgauuccaaccccaa

SEQ ID NO: 932319 - RNA, 19 nt, Artificial Sequence
  Description of Artificial Sequence: Synthetic oligonucleotide
cuagcaguugggugacaac

SEQ ID NO: 932320 - RNA, 19 nt, Artificial Sequence
  Description of Artificial Sequence: Synthetic oligonucleotide
accccaaggccaaaaccac

SEQ ID NO: 932321 - RNA, 19 nt, Artificial Sequence
  Description of Artificial Sequence: Synthetic oligonucleotide
ugggauguucacacucuua

SEQ ID NO: 932322 - RNA, 19 nt, Artificial Sequence
  Description of Artificial Sequence: Synthetic oligonucleotide
cucgggucuuuccuucugc

SEQ ID NO: 932323 - RNA, 19 nt, Artificial Sequence
  Description of Artificial Sequence: Synthetic oligonucleotide
ccuagaugccugucaaugc

SEQ ID NO: 932324 - RNA, 19 nt, Artificial Sequence
  Description of Artificial Sequence: Synthetic oligonucleotide
guucaacacuaaggcaagg

SEQ ID NO: 932325 - RNA, 19 nt, Artificial Sequence
  Description of Artificial Sequence: Synthetic oligonucleotide
auagcauaguuuggcacau

SEQ ID NO: 932326 - RNA, 19 nt, Artificial Sequence
  Description of Artificial Sequence: Synthetic oligonucleotide
ugccgcagcaaggugguac

SEQ ID NO: 932327 - RNA, 19 nt, Artificial Sequence
  Description of Artificial Sequence: Synthetic oligonucleotide
uaccuacgaacaccgccac

SEQ ID NO: 932328 - RNA, 19 nt, Artificial Sequence
  Description of Artificial Sequence: Synthetic oligonucleotide
cuggagauguguauugaua

SEQ ID NO: 932329 - RNA, 19 nt, Artificial Sequence
  Description of Artificial Sequence: Synthetic oligonucleotide
ggaaauguaugggccacgc

SEQ ID NO: 932330 - RNA, 19 nt, Artificial Sequence
  Description of Artificial Sequence: Synthetic oligonucleotide
cgaaguagaccaauguuuc

SEQ ID NO: 932331 - RNA, 19 nt, Artificial Sequence
  Description of Artificial Sequence: Synthetic oligonucleotide
aagucagcuuauauacuua

SEQ ID NO: 932332 - RNA, 19 nt, Artificial Sequence
  Description of Artificial Sequence: Synthetic oligonucleotide
gcacacacacaccacaguc

SEQ ID NO: 932333 - RNA, 19 nt, Artificial Sequence
  Description of Artificial Sequence: Synthetic oligonucleotide
acuagcaguugggugacaa

SEQ ID NO: 932334 - RNA, 19 nt, Artificial Sequence
  Description of Artificial Sequence: Synthetic oligonucleotide
cguagaccacaucaggugg

SEQ ID NO: 932335 - RNA, 19 nt, Artificial Sequence
  Description of Artificial Sequence: Synthetic oligonucleotide
ccuacgaacaccgccacac

SEQ ID NO: 932336 - RNA, 19 nt, Artificial Sequence
  Description of Artificial Sequence: Synthetic oligonucleotide
acauugugauacaaugcau

SEQ ID NO: 932337 - RNA, 19 nt, Artificial Sequence
  Description of Artificial Sequence: Synthetic oligonucleotide
acacacacacacauacaca

SEQ ID NO: 932338 - RNA, 19 nt, Artificial Sequence
  Description of Artificial Sequence: Synthetic oligonucleotide
aacugcguuggugugucuu

SEQ ID NO: 932339 - RNA, 19 nt, Artificial Sequence
  Description of Artificial Sequence: Synthetic oligonucleotide
caguugacgaccaauguuu

SEQ ID NO: 932340 - RNA, 19 nt, Artificial Sequence
  Description of Artificial Sequence: Synthetic oligonucleotide
gaugcucguagaccacauc

SEQ ID NO: 932341 - RNA, 19 nt, Artificial Sequence
  Description of Artificial Sequence: Synthetic oligonucleotide
cacauauuccacucggagu

SEQ ID NO: 932342 - RNA, 19 nt, Artificial Sequence
  Description of Artificial Sequence: Synthetic oligonucleotide
uguucgccacuccuagcau

SEQ ID NO: 932343 - RNA, 19 nt, Artificial Sequence
  Description of Artificial Sequence: Synthetic oligonucleotide
cacgacagucagugagagg

SEQ ID NO: 932344 - RNA, 19 nt, Artificial Sequence
  Description of Artificial Sequence: Synthetic oligonucleotide
ggcgugauugauaccuacg

SEQ ID NO: 932345 - RNA, 19 nt, Artificial Sequence
  Description of Artificial Sequence: Synthetic oligonucleotide
cggacauagagaaaaucug

SEQ ID NO: 932346 - RNA, 19 nt, Artificial Sequence
  Description of Artificial Sequence: Synthetic oligonucleotide
gucucacacacacacacau

SEQ ID NO: 932347 - RNA, 19 nt, Artificial Sequence
  Description of Artificial Sequence: Synthetic oligonucleotide
gagaugugucugaaacaac

SEQ ID NO: 932348 - RNA, 19 nt, Artificial Sequence
  Description of Artificial Sequence: Synthetic oligonucleotide
gcgugauugauaccuacga

SEQ ID NO: 932349 - RNA, 19 nt, Artificial Sequence
  Description of Artificial Sequence: Synthetic oligonucleotide
acgaccaauguuucccauu

SEQ ID NO: 932350 - RNA, 19 nt, Artificial Sequence
  Description of Artificial Sequence: Synthetic oligonucleotide
cucguagaccacaucaggu

SEQ ID NO: 932351 - RNA, 19 nt, Artificial Sequence
  Description of Artificial Sequence: Synthetic oligonucleotide
cuccaaugaagaagagcca

SEQ ID NO: 932352 - RNA, 19 nt, Artificial Sequence
  Description of Artificial Sequence: Synthetic oligonucleotide
acgccuuuugggcccaggu

SEQ ID NO: 932353 - RNA, 19 nt, Artificial Sequence
  Description of Artificial Sequence: Synthetic oligonucleotide
ccauuguuaugccuccagc

SEQ ID NO: 932354 - RNA, 19 nt, Artificial Sequence
  Description of Artificial Sequence: Synthetic oligonucleotide
ggugauaauuacauauuua

SEQ ID NO: 932355 - RNA, 19 nt, Artificial Sequence
  Description of Artificial Sequence: Synthetic oligonucleotide
cauacacacacacaccaau

SEQ ID NO: 932356 - RNA, 19 nt, Artificial Sequence
  Description of Artificial Sequence: Synthetic oligonucleotide
acgucgcuuuuccauggcu

SEQ ID NO: 932357 - RNA, 19 nt, Artificial Sequence
  Description of Artificial Sequence: Synthetic oligonucleotide
acacacauacacacacaca

SEQ ID NO: 932358 - RNA, 19 nt, Artificial Sequence
  Description of Artificial Sequence: Synthetic oligonucleotide
uugccaguugacgaccaau

SEQ ID NO: 932359 - RNA, 19 nt, Artificial Sequence
  Description of Artificial Sequence: Synthetic oligonucleotide
acagucagucagauuauuu

SEQ ID NO: 932360 - RNA, 19 nt, Artificial Sequence
  Description of Artificial Sequence: Synthetic oligonucleotide
acacagcgcauaacacugg

SEQ ID NO: 932361 - RNA, 19 nt, Artificial Sequence
  Description of Artificial Sequence: Synthetic oligonucleotide
cauggcaaccaagaacgga

SEQ ID NO: 932362 - RNA, 19 nt, Artificial Sequence
  Description of Artificial Sequence: Synthetic oligonucleotide
ccucggaucaccacguuca

SEQ ID NO: 932363 - RNA, 19 nt, Artificial Sequence
  Description of Artificial Sequence: Synthetic oligonucleotide
guagaccacaucaggugga

SEQ ID NO: 932364 - RNA, 19 nt, Artificial Sequence
  Description of Artificial Sequence: Synthetic oligonucleotide
ggucuuuccuucugccaug

SEQ ID NO: 932365 - RNA, 19 nt, Artificial Sequence
  Description of Artificial Sequence: Synthetic oligonucleotide
gcucauaaugcacacugcu

SEQ ID NO: 932366 - RNA, 19 nt, Artificial Sequence
  Description of Artificial Sequence: Synthetic oligonucleotide
auaaguucggugggccuaa

SEQ ID NO: 932367 - RNA, 19 nt, Artificial Sequence
  Description of Artificial Sequence: Synthetic oligonucleotide
auaguguucgccacuccua

SEQ ID NO: 932368 - RNA, 19 nt, Artificial Sequence
  Description of Artificial Sequence: Synthetic oligonucleotide
ggagauguguauugauaaa

SEQ ID NO: 932369 - RNA, 19 nt, Artificial Sequence
  Description of Artificial Sequence: Synthetic oligonucleotide
ggaacacuccaaugaagaa

SEQ ID NO: 932370 - RNA, 19 nt, Artificial Sequence
  Description of Artificial Sequence: Synthetic oligonucleotide
aggugguacccaccaggca

SEQ ID NO: 932371 - RNA, 19 nt, Artificial Sequence
  Description of Artificial Sequence: Synthetic oligonucleotide
gaaacguugguaacugauu

SEQ ID NO: 932372 - RNA, 19 nt, Artificial Sequence
  Description of Artificial Sequence: Synthetic oligonucleotide
aaacugcguuggugugucu

SEQ ID NO: 932373 - RNA, 19 nt, Artificial Sequence
  Description of Artificial Sequence: Synthetic oligonucleotide
acacacacacauacacaca

SEQ ID NO: 932374 - RNA, 19 nt, Artificial Sequence
  Description of Artificial Sequence: Synthetic oligonucleotide
acacacacauacacacaca

SEQ ID NO: 932375 - RNA, 19 nt, Artificial Sequence
  Description of Artificial Sequence: Synthetic oligonucleotide
ccauaaguaaauggcagga

SEQ ID NO: 932376 - RNA, 19 nt, Artificial Sequence
  Description of Artificial Sequence: Synthetic oligonucleotide
accgccacacagcgcauaa

SEQ ID NO: 932377 - RNA, 19 nt, Artificial Sequence
  Description of Artificial Sequence: Synthetic oligonucleotide
ggcuuccuagagaaaagac

SEQ ID NO: 932378 - RNA, 19 nt, Artificial Sequence
  Description of Artificial Sequence: Synthetic oligonucleotide
cauucauacauugccaguu

SEQ ID NO: 932379 - RNA, 19 nt, Artificial Sequence
  Description of Artificial Sequence: Synthetic oligonucleotide
auugccaguugacgaccaa

SEQ ID NO: 932380 - RNA, 19 nt, Artificial Sequence
  Description of Artificial Sequence: Synthetic oligonucleotide
gugauaguaauagcauagu

SEQ ID NO: 932381 - RNA, 19 nt, Artificial Sequence
  Description of Artificial Sequence: Synthetic oligonucleotide
acauacacacacacaccaa

SEQ ID NO: 932382 - RNA, 19 nt, Artificial Sequence
  Description of Artificial Sequence: Synthetic oligonucleotide
cacgucgcuuuuccauggc

SEQ ID NO: 932383 - RNA, 19 nt, Artificial Sequence
  Description of Artificial Sequence: Synthetic oligonucleotide
cucggaguacucuugggau

SEQ ID NO: 932384 - RNA, 19 nt, Artificial Sequence
  Description of Artificial Sequence: Synthetic oligonucleotide
cccauuguuaugccuccag

SEQ ID NO: 932385 - RNA, 19 nt, Artificial Sequence
  Description of Artificial Sequence: Synthetic oligonucleotide
acacuggaccauucucuuu

SEQ ID NO: 932386 - RNA, 19 nt, Artificial Sequence
  Description of Artificial Sequence: Synthetic oligonucleotide
aaccaagaacggacauaga

SEQ ID NO: 932387 - RNA, 19 nt, Artificial Sequence
  Description of Artificial Sequence: Synthetic oligonucleotide
auagaccuuauaacuuauu

SEQ ID NO: 932388 - RNA, 19 nt, Artificial Sequence
  Description of Artificial Sequence: Synthetic oligonucleotide
accuacgaacaccgccaca

SEQ ID NO: 932389 - RNA, 19 nt, Artificial Sequence
  Description of Artificial Sequence: Synthetic oligonucleotide
ccuagcauuaggcuugcaa

SEQ ID NO: 932390 - RNA, 19 nt, Artificial Sequence
  Description of Artificial Sequence: Synthetic oligonucleotide
uaaguucggugggccuaag

SEQ ID NO: 932391 - RNA, 19 nt, Artificial Sequence
  Description of Artificial Sequence: Synthetic oligonucleotide
gccgcagcaaggugguacc

SEQ ID NO: 932392 - RNA, 19 nt, Artificial Sequence
  Description of Artificial Sequence: Synthetic oligonucleotide
aguugcuaagaaagcgauu

SEQ ID NO: 932393 - RNA, 19 nt, Artificial Sequence
  Description of Artificial Sequence: Synthetic oligonucleotide
ucccauuguuaugccucca

SEQ ID NO: 932394 - RNA, 19 nt, Artificial Sequence
  Description of Artificial Sequence: Synthetic oligonucleotide
auguaugggccacgccuuu

SEQ ID NO: 932395 - RNA, 19 nt, Artificial Sequence
  Description of Artificial Sequence: Synthetic oligonucleotide
ggugacucgggucuuuccu

SEQ ID NO: 932396 - RNA, 19 nt, Artificial Sequence
  Description of Artificial Sequence: Synthetic oligonucleotide
agaugcucguagaccacau

SEQ ID NO: 932397 - RNA, 19 nt, Artificial Sequence
  Description of Artificial Sequence: Synthetic oligonucleotide
uguaugggccacgccuuuu

SEQ ID NO: 932398 - RNA, 19 nt, Artificial Sequence
  Description of Artificial Sequence: Synthetic oligonucleotide
caaauaccgaaacguuggu

SEQ ID NO: 932399 - RNA, 19 nt, Artificial Sequence
  Description of Artificial Sequence: Synthetic oligonucleotide
cuacgaacaccgccacaca

SEQ ID NO: 932400 - RNA, 19 nt, Artificial Sequence
  Description of Artificial Sequence: Synthetic oligonucleotide
ggggugcucauaaugcaca

SEQ ID NO: 932401 - RNA, 19 nt, Artificial Sequence
  Description of Artificial Sequence: Synthetic oligonucleotide
ucgccacuccuagcauuag

SEQ ID NO: 932402 - RNA, 19 nt, Artificial Sequence
  Description of Artificial Sequence: Synthetic oligonucleotide
gugauacaaugcaugguau

SEQ ID NO: 932403 - RNA, 19 nt, Artificial Sequence
  Description of Artificial Sequence: Synthetic oligonucleotide
gggccacgccuuuugggcc

SEQ ID NO: 932404 - RNA, 19 nt, Artificial Sequence
  Description of Artificial Sequence: Synthetic oligonucleotide
ggccacgccuuuugggccc

SEQ ID NO: 932405 - RNA, 19 nt, Artificial Sequence
  Description of Artificial Sequence: Synthetic oligonucleotide
gaccaauguuucccauugu

SEQ ID NO: 932406 - RNA, 19 nt, Artificial Sequence
  Description of Artificial Sequence: Synthetic oligonucleotide
ccuacugacagugcagcca

SEQ ID NO: 932407 - RNA, 19 nt, Artificial Sequence
  Description of Artificial Sequence: Synthetic oligonucleotide
ggcacgacagucagugaga

SEQ ID NO: 932408 - RNA, 19 nt, Artificial Sequence
  Description of Artificial Sequence: Synthetic oligonucleotide
uucucucacucagcauaua

SEQ ID NO: 932409 - RNA, 19 nt, Artificial Sequence
  Description of Artificial Sequence: Synthetic oligonucleotide
gacgaccaauguuucccau

SEQ ID NO: 932410 - RNA, 19 nt, Artificial Sequence
  Description of Artificial Sequence: Synthetic oligonucleotide
cacgccuuuugggcccagg

SEQ ID NO: 932411 - RNA, 19 nt, Artificial Sequence
  Description of Artificial Sequence: Synthetic oligonucleotide
guaaauggcaggaguuguu

SEQ ID NO: 932412 - RNA, 19 nt, Artificial Sequence
  Description of Artificial Sequence: Synthetic oligonucleotide
guucuccuagaugccuguc

SEQ ID NO: 932413 - RNA, 19 nt, Artificial Sequence
  Description of Artificial Sequence: Synthetic oligonucleotide
caggugacucgggucuuuc

SEQ ID NO: 932414 - RNA, 19 nt, Artificial Sequence
  Description of Artificial Sequence: Synthetic oligonucleotide
ccacuucuagaucugucaa

SEQ ID NO: 932415 - RNA, 19 nt, Artificial Sequence
  Description of Artificial Sequence: Synthetic oligonucleotide
ggagcaaguucaacacuaa

SEQ ID NO: 932416 - RNA, 19 nt, Artificial Sequence
  Description of Artificial Sequence: Synthetic oligonucleotide
cgacagucagugagagggg

SEQ ID NO: 932417 - RNA, 19 nt, Artificial Sequence
  Description of Artificial Sequence: Synthetic oligonucleotide
accaccccucggaucacca

SEQ ID NO: 932418 - RNA, 19 nt, Artificial Sequence
  Description of Artificial Sequence: Synthetic oligonucleotide
guucgccacuccuagcauu

SEQ ID NO: 932419 - RNA, 19 nt, Artificial Sequence
  Description of Artificial Sequence: Synthetic oligonucleotide
gucaaugcagggguacaau

SEQ ID NO: 932420 - RNA, 19 nt, Artificial Sequence
  Description of Artificial Sequence: Synthetic oligonucleotide
gguucuccuagaugccugu

SEQ ID NO: 932421 - RNA, 19 nt, Artificial Sequence
  Description of Artificial Sequence: Synthetic oligonucleotide
cuggcgugauugauaccua

SEQ ID NO: 932422 - RNA, 19 nt, Artificial Sequence
  Description of Artificial Sequence: Synthetic oligonucleotide
gccaguugacgaccaaugu

SEQ ID NO: 932423 - RNA, 19 nt, Artificial Sequence
  Description of Artificial Sequence: Synthetic oligonucleotide
gguuuguuuguagccuucu

SEQ ID NO: 932424 - RNA, 19 nt, Artificial Sequence
  Description of Artificial Sequence: Synthetic oligonucleotide
cgugauugauaccuacgaa

SEQ ID NO: 932425 - RNA, 19 nt, Artificial Sequence
  Description of Artificial Sequence: Synthetic oligonucleotide
uccuagcauuaggcuugca

SEQ ID NO: 932426 - RNA, 19 nt, Artificial Sequence
  Description of Artificial Sequence: Synthetic oligonucleotide
cgaaacguugguaacugau

SEQ ID NO: 932427 - RNA, 19 nt, Artificial Sequence
  Description of Artificial Sequence: Synthetic oligonucleotide
ccaguugacgaccaauguu

SEQ ID NO: 932428 - RNA, 19 nt, Artificial Sequence
  Description of Artificial Sequence: Synthetic oligonucleotide
cauguggggugcucauaau

SEQ ID NO: 932429 - RNA, 19 nt, Artificial Sequence
  Description of Artificial Sequence: Synthetic oligonucleotide
cuccuagaugccugucaau

SEQ ID NO: 932430 - RNA, 19 nt, Artificial Sequence
  Description of Artificial Sequence: Synthetic oligonucleotide
ccgaaacguugguaacuga

SEQ ID NO: 932431 - RNA, 19 nt, Artificial Sequence
  Description of Artificial Sequence: Synthetic oligonucleotide
cgggucuuuccuucugcca

SEQ ID NO: 932432 - RNA, 19 nt, Artificial Sequence
  Description of Artificial Sequence: Synthetic oligonucleotide
gcgcauaacacuggaccau

SEQ ID NO: 932433 - RNA, 19 nt, Artificial Sequence
  Description of Artificial Sequence: Synthetic oligonucleotide
ccgcagcaaggugguaccc

SEQ ID NO: 932434 - RNA, 19 nt, Artificial Sequence
  Description of Artificial Sequence: Synthetic oligonucleotide
cgucgcuuuuccauggcuu

SEQ ID NO: 932435 - RNA, 19 nt, Artificial Sequence
  Description of Artificial Sequence: Synthetic oligonucleotide
gccacgccuuuugggccca

SEQ ID NO: 932436 - RNA, 19 nt, Artificial Sequence
  Description of Artificial Sequence: Synthetic oligonucleotide
cgcauaacacuggaccauu

SEQ ID NO: 932437 - RNA, 19 nt, Artificial Sequence
  Description of Artificial Sequence: Synthetic oligonucleotide
gugccgcagcaagguggua

SEQ ID NO: 932438 - RNA, 19 nt, Artificial Sequence
  Description of Artificial Sequence: Synthetic oligonucleotide
ccacgccuuuugggcccag

SEQ ID NO: 932439 - RNA, 19 nt, Artificial Sequence
  Description of Artificial Sequence: Synthetic oligonucleotide
ccaggugacucgggucuuu

SEQ ID NO: 932440 - RNA, 19 nt, Artificial Sequence
  Description of Artificial Sequence: Synthetic oligonucleotide
ccccucggaucaccacguu

SEQ ID NO: 932441 - RNA, 19 nt, Artificial Sequence
  Description of Artificial Sequence: Synthetic oligonucleotide
aauauugcaaauuauuuuc

SEQ ID NO: 932442 - RNA, 19 nt, Artificial Sequence
  Description of Artificial Sequence: Synthetic oligonucleotide
aauaauaaucuuucgguag

SEQ ID NO: 932443 - RNA, 19 nt, Artificial Sequence
  Description of Artificial Sequence: Synthetic oligonucleotide
ugagcuauaauuaggaccc

SEQ ID NO: 932444 - RNA, 19 nt, Artificial Sequence
  Description of Artificial Sequence: Synthetic oligonucleotide
gauaacaucaaacccaggc

SEQ ID NO: 932445 - RNA, 19 nt, Artificial Sequence
  Description of Artificial Sequence: Synthetic oligonucleotide
uuuaggaucaucauaugca

SEQ ID NO: 932446 - RNA, 19 nt, Artificial Sequence
  Description of Artificial Sequence: Synthetic oligonucleotide
aaaguccaucuucagaggc

SEQ ID NO: 932447 - RNA, 19 nt, Artificial Sequence
  Description of Artificial Sequence: Synthetic oligonucleotide
aaguccucgaagcagcugc

SEQ ID NO: 932448 - RNA, 19 nt, Artificial Sequence
  Description of Artificial Sequence: Synthetic oligonucleotide
uaguaauuaaugaagccag

SEQ ID NO: 932449 - RNA, 19 nt, Artificial Sequence
  Description of Artificial Sequence: Synthetic oligonucleotide
uauaauuaggacccucagg

SEQ ID NO: 932450 - RNA, 19 nt, Artificial Sequence
  Description of Artificial Sequence: Synthetic oligonucleotide
guaauuauuaacaucuucc

SEQ ID NO: 932451 - RNA, 19 nt, Artificial Sequence
  Description of Artificial Sequence: Synthetic oligonucleotide
acauuaaucgauuauuucu

SEQ ID NO: 932452 - RNA, 19 nt, Artificial Sequence
  Description of Artificial Sequence: Synthetic oligonucleotide
auaauaaucuuucgguagg

SEQ ID NO: 932453 - RNA, 19 nt, Artificial Sequence
  Description of Artificial Sequence: Synthetic oligonucleotide
uaaucgauuauuucuuggg

SEQ ID NO: 932454 - RNA, 19 nt, Artificial Sequence
  Description of Artificial Sequence: Synthetic oligonucleotide
uguagaauagcucuuccca

SEQ ID NO: 932455 - RNA, 19 nt, Artificial Sequence
  Description of Artificial Sequence: Synthetic oligonucleotide
aaauauugcaaauuauuuu

SEQ ID NO: 932456 - RNA, 19 nt, Artificial Sequence
  Description of Artificial Sequence: Synthetic oligonucleotide
cauauuuugaaaguccucg

SEQ ID NO: 932457 - RNA, 19 nt, Artificial Sequence
  Description of Artificial Sequence: Synthetic oligonucleotide
uaacaucaaacccaggcag

SEQ ID NO: 932458 - RNA, 19 nt, Artificial Sequence
  Description of Artificial Sequence: Synthetic oligonucleotide
auagcuuugauaacuaugg

SEQ ID NO: 932459 - RNA, 19 nt, Artificial Sequence
  Description of Artificial Sequence: Synthetic oligonucleotide
aagcaccuaaaguacauuc

SEQ ID NO: 932460 - RNA, 19 nt, Artificial Sequence
  Description of Artificial Sequence: Synthetic oligonucleotide
auaaucuuucgguaggcac

SEQ ID NO: 932461 - RNA, 19 nt, Artificial Sequence
  Description of Artificial Sequence: Synthetic oligonucleotide
uuaaucgauuauuucuugg

SEQ ID NO: 932462 - RNA, 19 nt, Artificial Sequence
  Description of Artificial Sequence: Synthetic oligonucleotide
aauaucaagauugucugca

SEQ ID NO: 932463 - RNA, 19 nt, Artificial Sequence
  Description of Artificial Sequence: Synthetic oligonucleotide
uaagucauccaaauggcug

SEQ ID NO: 932464 - RNA, 19 nt, Artificial Sequence
  Description of Artificial Sequence: Synthetic oligonucleotide
aucauaugcaacgacuucc

SEQ ID NO: 932465 - RNA, 19 nt, Artificial Sequence
  Description of Artificial Sequence: Synthetic oligonucleotide
ugcacuaggacuuaagcac

SEQ ID NO: 932466 - RNA, 19 nt, Artificial Sequence
  Description of Artificial Sequence: Synthetic oligonucleotide
cugagcuauaauuaggacc

SEQ ID NO: 932467 - RNA, 19 nt, Artificial Sequence
  Description of Artificial Sequence: Synthetic oligonucleotide
uagauaacaucaaacccag

SEQ ID NO: 932468 - RNA, 19 nt, Artificial Sequence
  Description of Artificial Sequence: Synthetic oligonucleotide
auauguuuauggaugaugg

SEQ ID NO: 932469 - RNA, 19 nt, Artificial Sequence
  Description of Artificial Sequence: Synthetic oligonucleotide
uguauuugccuucggaagc

SEQ ID NO: 932470 - RNA, 19 nt, Artificial Sequence
  Description of Artificial Sequence: Synthetic oligonucleotide
aguaaucucgaauugugug

SEQ ID NO: 932471 - RNA, 19 nt, Artificial Sequence
  Description of Artificial Sequence: Synthetic oligonucleotide
cauguugucaauaucaaga

SEQ ID NO: 932472 - RNA, 19 nt, Artificial Sequence
  Description of Artificial Sequence: Synthetic oligonucleotide
accuaaaguacauucugac

SEQ ID NO: 932473 - RNA, 19 nt, Artificial Sequence
  Description of Artificial Sequence: Synthetic oligonucleotide
aaauucccuaguuuaaagu

SEQ ID NO: 932474 - RNA, 19 nt, Artificial Sequence
  Description of Artificial Sequence: Synthetic oligonucleotide
aaucaaauaugagucagca

SEQ ID NO: 932475 - RNA, 19 nt, Artificial Sequence
  Description of Artificial Sequence: Synthetic oligonucleotide
uaacuauggauauacauua

SEQ ID NO: 932476 - RNA, 19 nt, Artificial Sequence
  Description of Artificial Sequence: Synthetic oligonucleotide
uaaucuuucgguaggcacc

SEQ ID NO: 932477 - RNA, 19 nt, Artificial Sequence
  Description of Artificial Sequence: Synthetic oligonucleotide
uaugcaacgacuucccagc

SEQ ID NO: 932478 - RNA, 19 nt, Artificial Sequence
  Description of Artificial Sequence: Synthetic oligonucleotide
aaaaccuagaacugcuacu

SEQ ID NO: 932479 - RNA, 19 nt, Artificial Sequence
  Description of Artificial Sequence: Synthetic oligonucleotide
aaucuuucgguaggcaccc

SEQ ID NO: 932480 - RNA, 19 nt, Artificial Sequence
  Description of Artificial Sequence: Synthetic oligonucleotide
gacagguuaguuuucggag

SEQ ID NO: 932481 - RNA, 19 nt, Artificial Sequence
  Description of Artificial Sequence: Synthetic oligonucleotide
aaucgauuauuucuuggga

SEQ ID NO: 932482 - RNA, 19 nt, Artificial Sequence
  Description of Artificial Sequence: Synthetic oligonucleotide
ugguuuuccuucuagguug

SEQ ID NO: 932483 - RNA, 19 nt, Artificial Sequence
  Description of Artificial Sequence: Synthetic oligonucleotide
cucaugagggcuuacaaac

SEQ ID NO: 932484 - RNA, 19 nt, Artificial Sequence
  Description of Artificial Sequence: Synthetic oligonucleotide
uggauauacauuaaucgau

SEQ ID NO: 932485 - RNA, 19 nt, Artificial Sequence
  Description of Artificial Sequence: Synthetic oligonucleotide
aauauagguagcuguggcu

SEQ ID NO: 932486 - RNA, 19 nt, Artificial Sequence
  Description of Artificial Sequence: Synthetic oligonucleotide
guaaguagaaggaggaagg

SEQ ID NO: 932487 - RNA, 19 nt, Artificial Sequence
  Description of Artificial Sequence: Synthetic oligonucleotide
uccacauccguauugaaaa

SEQ ID NO: 932488 - RNA, 19 nt, Artificial Sequence
  Description of Artificial Sequence: Synthetic oligonucleotide
gacuuaagcaccuaaagua

SEQ ID NO: 932489 - RNA, 19 nt, Artificial Sequence
  Description of Artificial Sequence: Synthetic oligonucleotide
uuuuacuguuauaaagcca

SEQ ID NO: 932490 - RNA, 19 nt, Artificial Sequence
  Description of Artificial Sequence: Synthetic oligonucleotide
uucagcacuucucgaaugg

SEQ ID NO: 932491 - RNA, 19 nt, Artificial Sequence
  Description of Artificial Sequence: Synthetic oligonucleotide
aguaccccuuuucagcucc

SEQ ID NO: 932492 - RNA, 19 nt, Artificial Sequence
  Description of Artificial Sequence: Synthetic oligonucleotide
aggauuuguauauguguac

SEQ ID NO: 932493 - RNA, 19 nt, Artificial Sequence
  Description of Artificial Sequence: Synthetic oligonucleotide
cuauggauauacauuaauc

SEQ ID NO: 932494 - RNA, 19 nt, Artificial Sequence
  Description of Artificial Sequence: Synthetic oligonucleotide
uuaguuuucggagagcaga

SEQ ID NO: 932495 - RNA, 19 nt, Artificial Sequence
  Description of Artificial Sequence: Synthetic oligonucleotide
uuauuuugaggacagcaau

SEQ ID NO: 932496 - RNA, 19 nt, Artificial Sequence
  Description of Artificial Sequence: Synthetic oligonucleotide
aauuaggacccucaggauu

SEQ ID NO: 932497 - RNA, 19 nt, Artificial Sequence
  Description of Artificial Sequence: Synthetic oligonucleotide
acaaauaauccuuuacuau

SEQ ID NO: 932498 - RNA, 19 nt, Artificial Sequence
  Description of Artificial Sequence: Synthetic oligonucleotide
uauacauuaaucgauuauu

SEQ ID NO: 932499 - RNA, 19 nt, Artificial Sequence
  Description of Artificial Sequence: Synthetic oligonucleotide
ucuagguuguccacauccg

SEQ ID NO: 932500 - RNA, 19 nt, Artificial Sequence
  Description of Artificial Sequence: Synthetic oligonucleotide
uggcguaaguagaaggagg

SEQ ID NO: 932501 - RNA, 19 nt, Artificial Sequence
  Description of Artificial Sequence: Synthetic oligonucleotide
cauagcuuugauaacuaug

SEQ ID NO: 932502 - RNA, 19 nt, Artificial Sequence
  Description of Artificial Sequence: Synthetic oligonucleotide
acuuaagcaccuaaaguac

SEQ ID NO: 932503 - RNA, 19 nt, Artificial Sequence
  Description of Artificial Sequence: Synthetic oligonucleotide
ucaugaauggaguaauuau

SEQ ID NO: 932504 - RNA, 19 nt, Artificial Sequence
  Description of Artificial Sequence: Synthetic oligonucleotide
aaggaguaaucucgaauug

SEQ ID NO: 932505 - RNA, 19 nt, Artificial Sequence
  Description of Artificial Sequence: Synthetic oligonucleotide
auauagguagcuguggcuc

SEQ ID NO: 932506 - RNA, 19 nt, Artificial Sequence
  Description of Artificial Sequence: Synthetic oligonucleotide
ugucagaacagugagugca

SEQ ID NO: 932507 - RNA, 19 nt, Artificial Sequence
  Description of Artificial Sequence: Synthetic oligonucleotide
aggaauucuguagaauagc

SEQ ID NO: 932508 - RNA, 19 nt, Artificial Sequence
  Description of Artificial Sequence: Synthetic oligonucleotide
uauuuugaggacagcaauc

SEQ ID NO: 932509 - RNA, 19 nt, Artificial Sequence
  Description of Artificial Sequence: Synthetic oligonucleotide
acacacuacucaucggagc

SEQ ID NO: 932510 - RNA, 19 nt, Artificial Sequence
  Description of Artificial Sequence: Synthetic oligonucleotide
ugauccguccaucuuuucc

SEQ ID NO: 932511 - RNA, 19 nt, Artificial Sequence
  Description of Artificial Sequence: Synthetic oligonucleotide
guuuucggagagcagaggc

SEQ ID NO: 932512 - RNA, 19 nt, Artificial Sequence
  Description of Artificial Sequence: Synthetic oligonucleotide
auuaaucgauuauuucuug

SEQ ID NO: 932513 - RNA, 19 nt, Artificial Sequence
  Description of Artificial Sequence: Synthetic oligonucleotide
uauuuugaaaguccucgaa

SEQ ID NO: 932514 - RNA, 19 nt, Artificial Sequence
  Description of Artificial Sequence: Synthetic oligonucleotide
uuuauaucuucugagcuau

SEQ ID NO: 932515 - RNA, 19 nt, Artificial Sequence
  Description of Artificial Sequence: Synthetic oligonucleotide
uuaggaucaucauaugcaa

SEQ ID NO: 932516 - RNA, 19 nt, Artificial Sequence
  Description of Artificial Sequence: Synthetic oligonucleotide
ccuuuuacuguuauaaagc

SEQ ID NO: 932517 - RNA, 19 nt, Artificial Sequence
  Description of Artificial Sequence: Synthetic oligonucleotide
gggauuaugcccaaaaugc

SEQ ID NO: 932518 - RNA, 19 nt, Artificial Sequence
  Description of Artificial Sequence: Synthetic oligonucleotide
augucugcaaagcucuccg

SEQ ID NO: 932519 - RNA, 19 nt, Artificial Sequence
  Description of Artificial Sequence: Synthetic oligonucleotide
gaacacacuacucaucgga

SEQ ID NO: 932520 - RNA, 19 nt, Artificial Sequence
  Description of Artificial Sequence: Synthetic oligonucleotide
cucaauauagguagcugug

SEQ ID NO: 932521 - RNA, 19 nt, Artificial Sequence
  Description of Artificial Sequence: Synthetic oligonucleotide
ugaggccgaauaauaaucu

SEQ ID NO: 932522 - RNA, 19 nt, Artificial Sequence
  Description of Artificial Sequence: Synthetic oligonucleotide
uaguuuucggagagcagag

SEQ ID NO: 932523 - RNA, 19 nt, Artificial Sequence
  Description of Artificial Sequence: Synthetic oligonucleotide
gaauaauaaucuuucggua

SEQ ID NO: 932524 - RNA, 19 nt, Artificial Sequence
  Description of Artificial Sequence: Synthetic oligonucleotide
agaagaacacacuacucau

SEQ ID NO: 932525 - RNA, 19 nt, Artificial Sequence
  Description of Artificial Sequence: Synthetic oligonucleotide
ucggaagcaaauacuggug

SEQ ID NO: 932526 - RNA, 19 nt, Artificial Sequence
  Description of Artificial Sequence: Synthetic oligonucleotide
cuaccuuuugacagguuag

SEQ ID NO: 932527 - RNA, 19 nt, Artificial Sequence
  Description of Artificial Sequence: Synthetic oligonucleotide
cuucggaagcaaauacugg

SEQ ID NO: 932528 - RNA, 19 nt, Artificial Sequence
  Description of Artificial Sequence: Synthetic oligonucleotide
ccgauaaggaguaaucucg

SEQ ID NO: 932529 - RNA, 19 nt, Artificial Sequence
  Description of Artificial Sequence: Synthetic oligonucleotide
caaaaccuagaacugcuac

SEQ ID NO: 932530 - RNA, 19 nt, Artificial Sequence
  Description of Artificial Sequence: Synthetic oligonucleotide
cauccguauugaaaagugg

SEQ ID NO: 932531 - RNA, 19 nt, Artificial Sequence
  Description of Artificial Sequence: Synthetic oligonucleotide
auauaagagaauauguuua

SEQ ID NO: 932532 - RNA, 19 nt, Artificial Sequence
  Description of Artificial Sequence: Synthetic oligonucleotide
acuauggauauacauuaau

SEQ ID NO: 932533 - RNA, 19 nt, Artificial Sequence
  Description of Artificial Sequence: Synthetic oligonucleotide
cuauaauuaggacccucag

SEQ ID NO: 932534 - RNA, 19 nt, Artificial Sequence
  Description of Artificial Sequence: Synthetic oligonucleotide
cucucccaauuucagaggg

SEQ ID NO: 932535 - RNA, 19 nt, Artificial Sequence
  Description of Artificial Sequence: Synthetic oligonucleotide
uugucaauaucaagauugu

SEQ ID NO: 932536 - RNA, 19 nt, Artificial Sequence
  Description of Artificial Sequence: Synthetic oligonucleotide
guaggcacccgauaaggag

SEQ ID NO: 932537 - RNA, 19 nt, Artificial Sequence
  Description of Artificial Sequence: Synthetic oligonucleotide
aucgauuauuucuugggau

SEQ ID NO: 932538 - RNA, 19 nt, Artificial Sequence
  Description of Artificial Sequence: Synthetic oligonucleotide
auauuuugaaaguccucga

SEQ ID NO: 932539 - RNA, 19 nt, Artificial Sequence
  Description of Artificial Sequence: Synthetic oligonucleotide
auaucaagauugucugcag

SEQ ID NO: 932540 - RNA, 19 nt, Artificial Sequence
  Description of Artificial Sequence: Synthetic oligonucleotide
acucaucggagccaguuug

SEQ ID NO: 932541 - RNA, 19 nt, Artificial Sequence
  Description of Artificial Sequence: Synthetic oligonucleotide
aaaccuagaacugcuacuu

SEQ ID NO: 932542 - RNA, 19 nt, Artificial Sequence
  Description of Artificial Sequence: Synthetic oligonucleotide
uacaucaaguucugugagc

SEQ ID NO: 932543 - RNA, 19 nt, Artificial Sequence
  Description of Artificial Sequence: Synthetic oligonucleotide
ucaagcacuuauucaggug

SEQ ID NO: 932544 - RNA, 19 nt, Artificial Sequence
  Description of Artificial Sequence: Synthetic oligonucleotide
uccuguuauauuccugaga

SEQ ID NO: 932545 - RNA, 19 nt, Artificial Sequence
  Description of Artificial Sequence: Synthetic oligonucleotide
uuugugcacuuuauuuuga

SEQ ID NO: 932546 - RNA, 19 nt, Artificial Sequence
  Description of Artificial Sequence: Synthetic oligonucleotide
gauccguccaucuuuucca

SEQ ID NO: 932547 - RNA, 19 nt, Artificial Sequence
  Description of Artificial Sequence: Synthetic oligonucleotide
uuuucggagagcagaggcu

SEQ ID NO: 932548 - RNA, 19 nt, Artificial Sequence
  Description of Artificial Sequence: Synthetic oligonucleotide
uucgguaggcacccgauaa

SEQ ID NO: 932549 - RNA, 19 nt, Artificial Sequence
  Description of Artificial Sequence: Synthetic oligonucleotide
aagccauaaagcugaugcu

SEQ ID NO: 932550 - RNA, 19 nt, Artificial Sequence
  Description of Artificial Sequence: Synthetic oligonucleotide
ccgaauaauaaucuuucgg

SEQ ID NO: 932551 - RNA, 19 nt, Artificial Sequence
  Description of Artificial Sequence: Synthetic oligonucleotide
uauaucuucugagcuauaa

SEQ ID NO: 932552 - RNA, 19 nt, Artificial Sequence
  Description of Artificial Sequence: Synthetic oligonucleotide
cuacaucaaguucugugag

SEQ ID NO: 932553 - RNA, 19 nt, Artificial Sequence
  Description of Artificial Sequence: Synthetic oligonucleotide
uccguauugaaaaguggaa

SEQ ID NO: 932554 - RNA, 19 nt, Artificial Sequence
  Description of Artificial Sequence: Synthetic oligonucleotide
gccauaguaauuaaugaag

SEQ ID NO: 932555 - RNA, 19 nt, Artificial Sequence
  Description of Artificial Sequence: Synthetic oligonucleotide
cugaggccgaauaauaauc

SEQ ID NO: 932556 - RNA, 19 nt, Artificial Sequence
  Description of Artificial Sequence: Synthetic oligonucleotide
uaauaaucuuucgguaggc

SEQ ID NO: 932557 - RNA, 19 nt, Artificial Sequence
  Description of Artificial Sequence: Synthetic oligonucleotide
uccacacuaccuuuugaca

SEQ ID NO: 932558 - RNA, 19 nt, Artificial Sequence
  Description of Artificial Sequence: Synthetic oligonucleotide
ucagaguuauucuuucuuu

SEQ ID NO: 932559 - RNA, 19 nt, Artificial Sequence
  Description of Artificial Sequence: Synthetic oligonucleotide
cugaccaauuuauaucuuc

SEQ ID NO: 932560 - RNA, 19 nt, Artificial Sequence
  Description of Artificial Sequence: Synthetic oligonucleotide
uuucagcacuucucgaaug

SEQ ID NO: 932561 - RNA, 19 nt, Artificial Sequence
  Description of Artificial Sequence: Synthetic oligonucleotide
guagaauagcucuucccac

SEQ ID NO: 932562 - RNA, 19 nt, Artificial Sequence
  Description of Artificial Sequence: Synthetic oligonucleotide
ucgauuauuucuugggauu

SEQ ID NO: 932563 - RNA, 19 nt, Artificial Sequence
  Description of Artificial Sequence: Synthetic oligonucleotide
ucugagcuauaauuaggac

SEQ ID NO: 932564 - RNA, 19 nt, Artificial Sequence
  Description of Artificial Sequence: Synthetic oligonucleotide
aaguggaauuuuaggauca

SEQ ID NO: 932565 - RNA, 19 nt, Artificial Sequence
  Description of Artificial Sequence: Synthetic oligonucleotide
agaacacacuacucaucgg

SEQ ID NO: 932566 - RNA, 19 nt, Artificial Sequence
  Description of Artificial Sequence: Synthetic oligonucleotide
aucaagcacuuauucaggu

SEQ ID NO: 932567 - RNA, 19 nt, Artificial Sequence
  Description of Artificial Sequence: Synthetic oligonucleotide
caagauugucugcagcgag

SEQ ID NO: 932568 - RNA, 19 nt, Artificial Sequence
  Description of Artificial Sequence: Synthetic oligonucleotide
cuucccacuugguauguag

SEQ ID NO: 932569 - RNA, 19 nt, Artificial Sequence
  Description of Artificial Sequence: Synthetic oligonucleotide
cauccaaauggcugauccg

SEQ ID NO: 932570 - RNA, 19 nt, Artificial Sequence
  Description of Artificial Sequence: Synthetic oligonucleotide
ggguuucaguauuaaaucc

SEQ ID NO: 932571 - RNA, 19 nt, Artificial Sequence
  Description of Artificial Sequence: Synthetic oligonucleotide
ucaugagggcuuacaaacu

SEQ ID NO: 932572 - RNA, 19 nt, Artificial Sequence
  Description of Artificial Sequence: Synthetic oligonucleotide
cuacuuuaaacaaguccuc

SEQ ID NO: 932573 - RNA, 19 nt, Artificial Sequence
  Description of Artificial Sequence: Synthetic oligonucleotide
uuauggaugauggucguuu

SEQ ID NO: 932574 - RNA, 19 nt, Artificial Sequence
  Description of Artificial Sequence: Synthetic oligonucleotide
uacuguuauaaagccauaa

SEQ ID NO: 932575 - RNA, 19 nt, Artificial Sequence
  Description of Artificial Sequence: Synthetic oligonucleotide
aagcacuuauucagguggg

SEQ ID NO: 932576 - RNA, 19 nt, Artificial Sequence
  Description of Artificial Sequence: Synthetic oligonucleotide
uaaucucgaauuguguguc

SEQ ID NO: 932577 - RNA, 19 nt, Artificial Sequence
  Description of Artificial Sequence: Synthetic oligonucleotide
uccagaacgggguuucagu

SEQ ID NO: 932578 - RNA, 19 nt, Artificial Sequence
  Description of Artificial Sequence: Synthetic oligonucleotide
ucuuucgguaggcacccga

SEQ ID NO: 932579 - RNA, 19 nt, Artificial Sequence
  Description of Artificial Sequence: Synthetic oligonucleotide
gagauugcauggcuugcug

SEQ ID NO: 932580 - RNA, 19 nt, Artificial Sequence
  Description of Artificial Sequence: Synthetic oligonucleotide
acauccguauugaaaagug

SEQ ID NO: 932581 - RNA, 19 nt, Artificial Sequence
  Description of Artificial Sequence: Synthetic oligonucleotide
acuuuauuuugaggacagc

SEQ ID NO: 932582 - RNA, 19 nt, Artificial Sequence
  Description of Artificial Sequence: Synthetic oligonucleotide
auccguauugaaaagugga

SEQ ID NO: 932583 - RNA, 19 nt, Artificial Sequence
  Description of Artificial Sequence: Synthetic oligonucleotide
aucggagccaguuuguauu

SEQ ID NO: 932584 - RNA, 19 nt, Artificial Sequence
  Description of Artificial Sequence: Synthetic oligonucleotide
acgacuucccagcugacau

SEQ ID NO: 932585 - RNA, 19 nt, Artificial Sequence
  Description of Artificial Sequence: Synthetic oligonucleotide
cagauaagucauccaaaug

SEQ ID NO: 932586 - RNA, 19 nt, Artificial Sequence
  Description of Artificial Sequence: Synthetic oligonucleotide
uuuugaaaagcuggagcuc

SEQ ID NO: 932587 - RNA, 19 nt, Artificial Sequence
  Description of Artificial Sequence: Synthetic oligonucleotide
uagcuuugauaacuaugga

SEQ ID NO: 932588 - RNA, 19 nt, Artificial Sequence
  Description of Artificial Sequence: Synthetic oligonucleotide
uuacaaacuuggugaugcc

SEQ ID NO: 932589 - RNA, 19 nt, Artificial Sequence
  Description of Artificial Sequence: Synthetic oligonucleotide
auccaaauggcugauccgu

SEQ ID NO: 932590 - RNA, 19 nt, Artificial Sequence
  Description of Artificial Sequence: Synthetic oligonucleotide
augaauggaguaauuauua

SEQ ID NO: 932591 - RNA, 19 nt, Artificial Sequence
  Description of Artificial Sequence: Synthetic oligonucleotide
ucgguaggcacccgauaag

SEQ ID NO: 932592 - RNA, 19 nt, Artificial Sequence
  Description of Artificial Sequence: Synthetic oligonucleotide
uccucaauauagguagcug

SEQ ID NO: 932593 - RNA, 19 nt, Artificial Sequence
  Description of Artificial Sequence: Synthetic oligonucleotide
ugugugucucauguuguca

SEQ ID NO: 932594 - RNA, 19 nt, Artificial Sequence
  Description of Artificial Sequence: Synthetic oligonucleotide
agcuauaauuaggacccuc

SEQ ID NO: 932595 - RNA, 19 nt, Artificial Sequence
  Description of Artificial Sequence: Synthetic oligonucleotide
gggguuucaguauuaaauc

SEQ ID NO: 932596 - RNA, 19 nt, Artificial Sequence
  Description of Artificial Sequence: Synthetic oligonucleotide
agcacuuauucaggugggc

SEQ ID NO: 932597 - RNA, 19 nt, Artificial Sequence
  Description of Artificial Sequence: Synthetic oligonucleotide
agauugcauggcuugcugu

SEQ ID NO: 932598 - RNA, 19 nt, Artificial Sequence
  Description of Artificial Sequence: Synthetic oligonucleotide
guaaucucgaauugugugu

SEQ ID NO: 932599 - RNA, 19 nt, Artificial Sequence
  Description of Artificial Sequence: Synthetic oligonucleotide
cugcacuaggacuuaagca

SEQ ID NO: 932600 - RNA, 19 nt, Artificial Sequence
  Description of Artificial Sequence: Synthetic oligonucleotide
uuuauguuugggguagaua

SEQ ID NO: 932601 - RNA, 19 nt, Artificial Sequence
  Description of Artificial Sequence: Synthetic oligonucleotide
ucgaauugugugucucaug

SEQ ID NO: 932602 - RNA, 19 nt, Artificial Sequence
  Description of Artificial Sequence: Synthetic oligonucleotide
aucaugaauggaguaauua

SEQ ID NO: 932603 - RNA, 19 nt, Artificial Sequence
  Description of Artificial Sequence: Synthetic oligonucleotide
uuugauaacuauggauaua

SEQ ID NO: 932604 - RNA, 19 nt, Artificial Sequence
  Description of Artificial Sequence: Synthetic oligonucleotide
ggaguaaucucgaauugug

SEQ ID NO: 932605 - RNA, 19 nt, Artificial Sequence
  Description of Artificial Sequence: Synthetic oligonucleotide
ugcaacgacuucccagcug

SEQ ID NO: 932606 - RNA, 19 nt, Artificial Sequence
  Description of Artificial Sequence: Synthetic oligonucleotide
uccacacauagcuuugaua

SEQ ID NO: 932607 - RNA, 19 nt, Artificial Sequence
  Description of Artificial Sequence: Synthetic oligonucleotide
guucccauauaagagaaua

SEQ ID NO: 932608 - RNA, 19 nt, Artificial Sequence
  Description of Artificial Sequence: Synthetic oligonucleotide
gcaccuaaaguacauucug

SEQ ID NO: 932609 - RNA, 19 nt, Artificial Sequence
  Description of Artificial Sequence: Synthetic oligonucleotide
acuugguauguagggacag

SEQ ID NO: 932610 - RNA, 19 nt, Artificial Sequence
  Description of Artificial Sequence: Synthetic oligonucleotide
gaacaacgaagucagaguu

SEQ ID NO: 932611 - RNA, 19 nt, Artificial Sequence
  Description of Artificial Sequence: Synthetic oligonucleotide
agaacgggguuucaguauu

SEQ ID NO: 932612 - RNA, 19 nt, Artificial Sequence
  Description of Artificial Sequence: Synthetic oligonucleotide
uugggguagauaacaucaa

SEQ ID NO: 932613 - RNA, 19 nt, Artificial Sequence
  Description of Artificial Sequence: Synthetic oligonucleotide
gcgagcauuucccuguagg

SEQ ID NO: 932614 - RNA, 19 nt, Artificial Sequence
  Description of Artificial Sequence: Synthetic oligonucleotide
agguuguccacauccguau

SEQ ID NO: 932615 - RNA, 19 nt, Artificial Sequence
  Description of Artificial Sequence: Synthetic oligonucleotide
cucgaauggccaugguggc

SEQ ID NO: 932616 - RNA, 19 nt, Artificial Sequence
  Description of Artificial Sequence: Synthetic oligonucleotide
caggauuuguauaugugua

SEQ ID NO: 932617 - RNA, 19 nt, Artificial Sequence
  Description of Artificial Sequence: Synthetic oligonucleotide
gcuuugauaacuauggaua

SEQ ID NO: 932618 - RNA, 19 nt, Artificial Sequence
  Description of Artificial Sequence: Synthetic oligonucleotide
ccuuugagaacaagguccc

SEQ ID NO: 932619 - RNA, 19 nt, Artificial Sequence
  Description of Artificial Sequence: Synthetic oligonucleotide
auuaggacccucaggauuu

SEQ ID NO: 932620 - RNA, 19 nt, Artificial Sequence
  Description of Artificial Sequence: Synthetic oligonucleotide
cauucugaccaauuuauau

SEQ ID NO: 932621 - RNA, 19 nt, Artificial Sequence
  Description of Artificial Sequence: Synthetic oligonucleotide
agcugaaauucccuaguuu

SEQ ID NO: 932622 - RNA, 19 nt, Artificial Sequence
  Description of Artificial Sequence: Synthetic oligonucleotide
aguuuucggagagcagagg

SEQ ID NO: 932623 - RNA, 19 nt, Artificial Sequence
  Description of Artificial Sequence: Synthetic oligonucleotide
cacuuauucaggugggcga

SEQ ID NO: 932624 - RNA, 19 nt, Artificial Sequence
  Description of Artificial Sequence: Synthetic oligonucleotide
gccgaauaauaaucuuucg

SEQ ID NO: 932625 - RNA, 19 nt, Artificial Sequence
  Description of Artificial Sequence: Synthetic oligonucleotide
ugucaauaucaagauuguc

SEQ ID NO: 932626 - RNA, 19 nt, Artificial Sequence
  Description of Artificial Sequence: Synthetic oligonucleotide
cacccgauaaggaguaauc

SEQ ID NO: 932627 - RNA, 19 nt, Artificial Sequence
  Description of Artificial Sequence: Synthetic oligonucleotide
cuuuugcucaccaugguau

SEQ ID NO: 932628 - RNA, 19 nt, Artificial Sequence
  Description of Artificial Sequence: Synthetic oligonucleotide
uuucagcccauagucuucu

SEQ ID NO: 932629 - RNA, 19 nt, Artificial Sequence
  Description of Artificial Sequence: Synthetic oligonucleotide
guggcguaaguagaaggag

SEQ ID NO: 932630 - RNA, 19 nt, Artificial Sequence
  Description of Artificial Sequence: Synthetic oligonucleotide
aaaguccucgaagcagcug

SEQ ID NO: 932631 - RNA, 19 nt, Artificial Sequence
  Description of Artificial Sequence: Synthetic oligonucleotide
cuauauucuucauuccaua

SEQ ID NO: 932632 - RNA, 19 nt, Artificial Sequence
  Description of Artificial Sequence: Synthetic oligonucleotide
uauucaggugggcgagucu

SEQ ID NO: 932633 - RNA, 19 nt, Artificial Sequence
  Description of Artificial Sequence: Synthetic oligonucleotide
cuuugcaugccauaguaau

SEQ ID NO: 932634 - RNA, 19 nt, Artificial Sequence
  Description of Artificial Sequence: Synthetic oligonucleotide
aacgacuucccagcugaca

SEQ ID NO: 932635 - RNA, 19 nt, Artificial Sequence
  Description of Artificial Sequence: Synthetic oligonucleotide
cauuaaucgauuauuucuu

SEQ ID NO: 932636 - RNA, 19 nt, Artificial Sequence
  Description of Artificial Sequence: Synthetic oligonucleotide
uaccuuuugacagguuagu

SEQ ID NO: 932637 - RNA, 19 nt, Artificial Sequence
  Description of Artificial Sequence: Synthetic oligonucleotide
agcaccuaaaguacauucu

SEQ ID NO: 932638 - RNA, 19 nt, Artificial Sequence
  Description of Artificial Sequence: Synthetic oligonucleotide
uuuugcucaccaugguauu

SEQ ID NO: 932639 - RNA, 19 nt, Artificial Sequence
  Description of Artificial Sequence: Synthetic oligonucleotide
uuacuguuauaaagccaua

SEQ ID NO: 932640 - RNA, 19 nt, Artificial Sequence
  Description of Artificial Sequence: Synthetic oligonucleotide
agcacuucucgaauggcca

SEQ ID NO: 932641 - RNA, 19 nt, Artificial Sequence
  Description of Artificial Sequence: Synthetic oligonucleotide
ucggagagcagaggcuggg

SEQ ID NO: 932642 - RNA, 19 nt, Artificial Sequence
  Description of Artificial Sequence: Synthetic oligonucleotide
acccgauaaggaguaaucu

SEQ ID NO: 932643 - RNA, 19 nt, Artificial Sequence
  Description of Artificial Sequence: Synthetic oligonucleotide
cuuugauaacuauggauau

SEQ ID NO: 932644 - RNA, 19 nt, Artificial Sequence
  Description of Artificial Sequence: Synthetic oligonucleotide
cuugguauguagggacagc

SEQ ID NO: 932645 - RNA, 19 nt, Artificial Sequence
  Description of Artificial Sequence: Synthetic oligonucleotide
gcacuuauucaggugggcg

SEQ ID NO: 932646 - RNA, 19 nt, Artificial Sequence
  Description of Artificial Sequence: Synthetic oligonucleotide
gcaacgacuucccagcuga

SEQ ID NO: 932647 - RNA, 19 nt, Artificial Sequence
  Description of Artificial Sequence: Synthetic oligonucleotide
uauggaugauggucguuuu

SEQ ID NO: 932648 - RNA, 19 nt, Artificial Sequence
  Description of Artificial Sequence: Synthetic oligonucleotide
aacaacgaagucagaguua

SEQ ID NO: 932649 - RNA, 19 nt, Artificial Sequence
  Description of Artificial Sequence: Synthetic oligonucleotide
aagaucccugagaagcccu

SEQ ID NO: 932650 - RNA, 19 nt, Artificial Sequence
  Description of Artificial Sequence: Synthetic oligonucleotide
ugcaugccauaguaauuaa

SEQ ID NO: 932651 - RNA, 19 nt, Artificial Sequence
  Description of Artificial Sequence: Synthetic oligonucleotide
uuucgguaggcacccgaua

SEQ ID NO: 932652 - RNA, 19 nt, Artificial Sequence
  Description of Artificial Sequence: Synthetic oligonucleotide
cacuacucaucggagccag

SEQ ID NO: 932653 - RNA, 19 nt, Artificial Sequence
  Description of Artificial Sequence: Synthetic oligonucleotide
ugucuuugguucccauaua

SEQ ID NO: 932654 - RNA, 19 nt, Artificial Sequence
  Description of Artificial Sequence: Synthetic oligonucleotide
aggccuguauuugccuucg

SEQ ID NO: 932655 - RNA, 19 nt, Artificial Sequence
  Description of Artificial Sequence: Synthetic oligonucleotide
gcuauaauuaggacccuca

SEQ ID NO: 932656 - RNA, 19 nt, Artificial Sequence
  Description of Artificial Sequence: Synthetic oligonucleotide
caugguggcguaaguagaa

SEQ ID NO: 932657 - RNA, 19 nt, Artificial Sequence
  Description of Artificial Sequence: Synthetic oligonucleotide
aguucaucaagcacuuauu

SEQ ID NO: 932658 - RNA, 19 nt, Artificial Sequence
  Description of Artificial Sequence: Synthetic oligonucleotide
gguauguagggacagcagu

SEQ ID NO: 932659 - RNA, 19 nt, Artificial Sequence
  Description of Artificial Sequence: Synthetic oligonucleotide
aacgggguuucaguauuaa

SEQ ID NO: 932660 - RNA, 19 nt, Artificial Sequence
  Description of Artificial Sequence: Synthetic oligonucleotide
ggacuuaagcaccuaaagu

SEQ ID NO: 932661 - RNA, 19 nt, Artificial Sequence
  Description of Artificial Sequence: Synthetic oligonucleotide
cagggacagguuucagccc

SEQ ID NO: 932662 - RNA, 19 nt, Artificial Sequence
  Description of Artificial Sequence: Synthetic oligonucleotide
cggaagcaaauacuggugg

SEQ ID NO: 932663 - RNA, 19 nt, Artificial Sequence
  Description of Artificial Sequence: Synthetic oligonucleotide
cccgauaaggaguaaucuc

SEQ ID NO: 932664 - RNA, 19 nt, Artificial Sequence
  Description of Artificial Sequence: Synthetic oligonucleotide
augguggcguaaguagaag

SEQ ID NO: 932665 - RNA, 19 nt, Artificial Sequence
  Description of Artificial Sequence: Synthetic oligonucleotide
agauaacaucaaacccagg

SEQ ID NO: 932666 - RNA, 19 nt, Artificial Sequence
  Description of Artificial Sequence: Synthetic oligonucleotide
aggccgaauaauaaucuuu

SEQ ID NO: 932667 - RNA, 19 nt, Artificial Sequence
  Description of Artificial Sequence: Synthetic oligonucleotide
cuuugagaacaaggucccc

SEQ ID NO: 932668 - RNA, 19 nt, Artificial Sequence
  Description of Artificial Sequence: Synthetic oligonucleotide
ucguccacuggaacagaua

SEQ ID NO: 932669 - RNA, 19 nt, Artificial Sequence
  Description of Artificial Sequence: Synthetic oligonucleotide
cuccucguccacuggaaca

SEQ ID NO: 932670 - RNA, 19 nt, Artificial Sequence
  Description of Artificial Sequence: Synthetic oligonucleotide
ggauuaugcccaaaaugca

SEQ ID NO: 932671 - RNA, 19 nt, Artificial Sequence
  Description of Artificial Sequence: Synthetic oligonucleotide
cacuugguauguagggaca

SEQ ID NO: 932672 - RNA, 19 nt, Artificial Sequence
  Description of Artificial Sequence: Synthetic oligonucleotide
uuuauggaugauggucguu

SEQ ID NO: 932673 - RNA, 19 nt, Artificial Sequence
  Description of Artificial Sequence: Synthetic oligonucleotide
caaauaugagucagcaauu

SEQ ID NO: 932674 - RNA, 19 nt, Artificial Sequence
  Description of Artificial Sequence: Synthetic oligonucleotide
gcucuucccacuugguaug

SEQ ID NO: 932675 - RNA, 19 nt, Artificial Sequence
  Description of Artificial Sequence: Synthetic oligonucleotide
acgggguuucaguauuaaa

SEQ ID NO: 932676 - RNA, 19 nt, Artificial Sequence
  Description of Artificial Sequence: Synthetic oligonucleotide
cugaagguuccuccucguc

SEQ ID NO: 932677 - RNA, 19 nt, Artificial Sequence
  Description of Artificial Sequence: Synthetic oligonucleotide
ggcguaaguagaaggagga

SEQ ID NO: 932678 - RNA, 19 nt, Artificial Sequence
  Description of Artificial Sequence: Synthetic oligonucleotide
gaguaaucucgaauugugu

SEQ ID NO: 932679 - RNA, 19 nt, Artificial Sequence
  Description of Artificial Sequence: Synthetic oligonucleotide
agcgagcauuucccuguag

SEQ ID NO: 932680 - RNA, 19 nt, Artificial Sequence
  Description of Artificial Sequence: Synthetic oligonucleotide
agguuucagcccauagucu

SEQ ID NO: 932681 - RNA, 19 nt, Artificial Sequence
  Description of Artificial Sequence: Synthetic oligonucleotide
gcacuaggacuuaagcacc

SEQ ID NO: 932682 - RNA, 19 nt, Artificial Sequence
  Description of Artificial Sequence: Synthetic oligonucleotide
ugggcgagucuuugugcac

SEQ ID NO: 932683 - RNA, 19 nt, Artificial Sequence
  Description of Artificial Sequence: Synthetic oligonucleotide
cuuccacacuaccuuuuga

SEQ ID NO: 932684 - RNA, 19 nt, Artificial Sequence
  Description of Artificial Sequence: Synthetic oligonucleotide
guuucagcccauagucuuc

SEQ ID NO: 932685 - RNA, 19 nt, Artificial Sequence
  Description of Artificial Sequence: Synthetic oligonucleotide
uuaggacccucaggauuug

SEQ ID NO: 932686 - RNA, 19 nt, Artificial Sequence
  Description of Artificial Sequence: Synthetic oligonucleotide
auccguccaucuuuuccaa

SEQ ID NO: 932687 - RNA, 19 nt, Artificial Sequence
  Description of Artificial Sequence: Synthetic oligonucleotide
ggaucaucauaugcaacga

SEQ ID NO: 932688 - RNA, 19 nt, Artificial Sequence
  Description of Artificial Sequence: Synthetic oligonucleotide
uccgaaaggcugucuucuu

SEQ ID NO: 932689 - RNA, 19 nt, Artificial Sequence
  Description of Artificial Sequence: Synthetic oligonucleotide
ccacauccguauugaaaag

SEQ ID NO: 932690 - RNA, 19 nt, Artificial Sequence
  Description of Artificial Sequence: Synthetic oligonucleotide
ccuagaacugcuacuuuaa

SEQ ID NO: 932691 - RNA, 19 nt, Artificial Sequence
  Description of Artificial Sequence: Synthetic oligonucleotide
uggcugauccguccaucuu

SEQ ID NO: 932692 - RNA, 19 nt, Artificial Sequence
  Description of Artificial Sequence: Synthetic oligonucleotide
cuucuagguuguccacauc

SEQ ID NO: 932693 - RNA, 19 nt, Artificial Sequence
  Description of Artificial Sequence: Synthetic oligonucleotide
uccguccaucuuuuccaau

SEQ ID NO: 932694 - RNA, 19 nt, Artificial Sequence
  Description of Artificial Sequence: Synthetic oligonucleotide
ccucaauauagguagcugu

SEQ ID NO: 932695 - RNA, 19 nt, Artificial Sequence
  Description of Artificial Sequence: Synthetic oligonucleotide
gguuucagcccauagucuu

SEQ ID NO: 932696 - RNA, 19 nt, Artificial Sequence
  Description of Artificial Sequence: Synthetic oligonucleotide
gaauugugugucucauguu

SEQ ID NO: 932697 - RNA, 19 nt, Artificial Sequence
  Description of Artificial Sequence: Synthetic oligonucleotide
gaggccgaauaauaaucuu

SEQ ID NO: 932698 - RNA, 19 nt, Artificial Sequence
  Description of Artificial Sequence: Synthetic oligonucleotide
ugucuccgaaaggcugucu

SEQ ID NO: 932699 - RNA, 19 nt, Artificial Sequence
  Description of Artificial Sequence: Synthetic oligonucleotide
agcagugguuccaaaucuu

SEQ ID NO: 932700 - RNA, 19 nt, Artificial Sequence
  Description of Artificial Sequence: Synthetic oligonucleotide
caacgacuucccagcugac

SEQ ID NO: 932701 - RNA, 19 nt, Artificial Sequence
  Description of Artificial Sequence: Synthetic oligonucleotide
ucuugggauuaugcccaaa

SEQ ID NO: 932702 - RNA, 19 nt, Artificial Sequence
  Description of Artificial Sequence: Synthetic oligonucleotide
ccuuccacacuaccuuuug

SEQ ID NO: 932703 - RNA, 19 nt, Artificial Sequence
  Description of Artificial Sequence: Synthetic oligonucleotide
ggauauacauuaaucgauu

SEQ ID NO: 932704 - RNA, 19 nt, Artificial Sequence
  Description of Artificial Sequence: Synthetic oligonucleotide
cacauccguauugaaaagu

SEQ ID NO: 932705 - RNA, 19 nt, Artificial Sequence
  Description of Artificial Sequence: Synthetic oligonucleotide
cccuaguuuaaaguucauc

SEQ ID NO: 932706 - RNA, 19 nt, Artificial Sequence
  Description of Artificial Sequence: Synthetic oligonucleotide
aucuuucgguaggcacccg

SEQ ID NO: 932707 - RNA, 19 nt, Artificial Sequence
  Description of Artificial Sequence: Synthetic oligonucleotide
cucgauggcaacacugguu

SEQ ID NO: 932708 - RNA, 19 nt, Artificial Sequence
  Description of Artificial Sequence: Synthetic oligonucleotide
gguaggcacccgauaagga

SEQ ID NO: 932709 - RNA, 19 nt, Artificial Sequence
  Description of Artificial Sequence: Synthetic oligonucleotide
aggacccucaggauuugua

SEQ ID NO: 932710 - RNA, 19 nt, Artificial Sequence
  Description of Artificial Sequence: Synthetic oligonucleotide
cuuucgguaggcacccgau

SEQ ID NO: 932711 - RNA, 19 nt, Artificial Sequence
  Description of Artificial Sequence: Synthetic oligonucleotide
ucuucccacuugguaugua

SEQ ID NO: 932712 - RNA, 19 nt, Artificial Sequence
  Description of Artificial Sequence: Synthetic oligonucleotide
ccucaugagggcuuacaaa

SEQ ID NO: 932713 - RNA, 19 nt, Artificial Sequence
  Description of Artificial Sequence: Synthetic oligonucleotide
cucaucggagccaguuugu

SEQ ID NO: 932714 - RNA, 19 nt, Artificial Sequence
  Description of Artificial Sequence: Synthetic oligonucleotide
cgauaaggaguaaucucga

SEQ ID NO: 932715 - RNA, 19 nt, Artificial Sequence
  Description of Artificial Sequence: Synthetic oligonucleotide
cagaacgggguuucaguau

SEQ ID NO: 932716 - RNA, 19 nt, Artificial Sequence
  Description of Artificial Sequence: Synthetic oligonucleotide
aagcccucaugagggcuua

SEQ ID NO: 932717 - RNA, 19 nt, Artificial Sequence
  Description of Artificial Sequence: Synthetic oligonucleotide
cuauccuuuugcucaccau

SEQ ID NO: 932718 - RNA, 19 nt, Artificial Sequence
  Description of Artificial Sequence: Synthetic oligonucleotide
cgggguuucaguauuaaau

SEQ ID NO: 932719 - RNA, 19 nt, Artificial Sequence
  Description of Artificial Sequence: Synthetic oligonucleotide
gaacgggguuucaguauua

SEQ ID NO: 932720 - RNA, 19 nt, Artificial Sequence
  Description of Artificial Sequence: Synthetic oligonucleotide
cguauugaaaaguggaauu

SEQ ID NO: 932721 - RNA, 19 nt, Artificial Sequence
  Description of Artificial Sequence: Synthetic oligonucleotide
caucggagccaguuuguau

SEQ ID NO: 932722 - RNA, 19 nt, Artificial Sequence
  Description of Artificial Sequence: Synthetic oligonucleotide
caucaugaauggaguaauu

SEQ ID NO: 932723 - RNA, 19 nt, Artificial Sequence
  Description of Artificial Sequence: Synthetic oligonucleotide
ccagaacgggguuucagua

SEQ ID NO: 932724 - RNA, 19 nt, Artificial Sequence
  Description of Artificial Sequence: Synthetic oligonucleotide
agcccucaugagggcuuac

SEQ ID NO: 932725 - RNA, 19 nt, Artificial Sequence
  Description of Artificial Sequence: Synthetic oligonucleotide
cugacauucugaggccgaa

SEQ ID NO: 932726 - RNA, 19 nt, Artificial Sequence
  Description of Artificial Sequence: Synthetic oligonucleotide
ggcccuuuugucuuugguu

SEQ ID NO: 932727 - RNA, 19 nt, Artificial Sequence
  Description of Artificial Sequence: Synthetic oligonucleotide
ggcugauccguccaucuuu

SEQ ID NO: 932728 - RNA, 19 nt, Artificial Sequence
  Description of Artificial Sequence: Synthetic oligonucleotide
cuacucaucggagccaguu

SEQ ID NO: 932729 - RNA, 19 nt, Artificial Sequence
  Description of Artificial Sequence: Synthetic oligonucleotide
gucagaacagugagugcau

SEQ ID NO: 932730 - RNA, 19 nt, Artificial Sequence
  Description of Artificial Sequence: Synthetic oligonucleotide
gcugacauucugaggccga

SEQ ID NO: 932731 - RNA, 19 nt, Artificial Sequence
  Description of Artificial Sequence: Synthetic oligonucleotide
acuacucaucggagccagu

SEQ ID NO: 932732 - RNA, 19 nt, Artificial Sequence
  Description of Artificial Sequence: Synthetic oligonucleotide
gcaaaaccuagaacugcua

SEQ ID NO: 932733 - RNA, 19 nt, Artificial Sequence
  Description of Artificial Sequence: Synthetic oligonucleotide
cccacuugguauguaggga

SEQ ID NO: 932734 - RNA, 19 nt, Artificial Sequence
  Description of Artificial Sequence: Synthetic oligonucleotide
gagcuauaauuaggacccu

SEQ ID NO: 932735 - RNA, 19 nt, Artificial Sequence
  Description of Artificial Sequence: Synthetic oligonucleotide
cccucaugagggcuuacaa

SEQ ID NO: 932736 - RNA, 19 nt, Artificial Sequence
  Description of Artificial Sequence: Synthetic oligonucleotide
gcccaugcuucaucauguc

SEQ ID NO: 932737 - RNA, 19 nt, Artificial Sequence
  Description of Artificial Sequence: Synthetic oligonucleotide
gccuucggaagcaaauacu

SEQ ID NO: 932738 - RNA, 19 nt, Artificial Sequence
  Description of Artificial Sequence: Synthetic oligonucleotide
ccguauugaaaaguggaau

SEQ ID NO: 932739 - RNA, 19 nt, Artificial Sequence
  Description of Artificial Sequence: Synthetic oligonucleotide
cgauuauuucuugggauua

SEQ ID NO: 932740 - RNA, 19 nt, Artificial Sequence
  Description of Artificial Sequence: Synthetic oligonucleotide
gcguaaguagaaggaggaa

SEQ ID NO: 932741 - RNA, 19 nt, Artificial Sequence
  Description of Artificial Sequence: Synthetic oligonucleotide
guaccccuuuucagcucca

SEQ ID NO: 932742 - RNA, 19 nt, Artificial Sequence
  Description of Artificial Sequence: Synthetic oligonucleotide
caggugggcgagucuuugu

SEQ ID NO: 932743 - RNA, 19 nt, Artificial Sequence
  Description of Artificial Sequence: Synthetic oligonucleotide
gcaugccauaguaauuaau

SEQ ID NO: 932744 - RNA, 19 nt, Artificial Sequence
  Description of Artificial Sequence: Synthetic oligonucleotide
gggcgagucuuugugcacu

SEQ ID NO: 932745 - RNA, 19 nt, Artificial Sequence
  Description of Artificial Sequence: Synthetic oligonucleotide
gguuguccacauccguauu

SEQ ID NO: 932746 - RNA, 19 nt, Artificial Sequence
  Description of Artificial Sequence: Synthetic oligonucleotide
gcacccgauaaggaguaau

SEQ ID NO: 932747 - RNA, 19 nt, Artificial Sequence
  Description of Artificial Sequence: Synthetic oligonucleotide
gguucccauauaagagaau

SEQ ID NO: 932748 - RNA, 19 nt, Artificial Sequence
  Description of Artificial Sequence: Synthetic oligonucleotide
caacgaagucagaguuauu

SEQ ID NO: 932749 - RNA, 19 nt, Artificial Sequence
  Description of Artificial Sequence: Synthetic oligonucleotide
ccucgauggcaacacuggu

SEQ ID NO: 932750 - RNA, 19 nt, Artificial Sequence
  Description of Artificial Sequence: Synthetic oligonucleotide
ggcgagucuuugugcacuu

SEQ ID NO: 932751 - RNA, 19 nt, Artificial Sequence
  Description of Artificial Sequence: Synthetic oligonucleotide
ggacagguuucagcccaua

SEQ ID NO: 932752 - RNA, 19 nt, Artificial Sequence
  Description of Artificial Sequence: Synthetic oligonucleotide
cacuaccuuuugacagguu

SEQ ID NO: 932753 - RNA, 19 nt, Artificial Sequence
  Description of Artificial Sequence: Synthetic oligonucleotide
cccuuccacacuaccuuuu

SEQ ID NO: 932754 - RNA, 19 nt, Artificial Sequence
  Description of Artificial Sequence: Synthetic oligonucleotide
ccucguccacuggaacaga

SEQ ID NO: 932755 - RNA, 19 nt, Artificial Sequence
  Description of Artificial Sequence: Synthetic oligonucleotide
gcgagucuuugugcacuuu

SEQ ID NO: 932756 - RNA, 19 nt, Artificial Sequence
  Description of Artificial Sequence: Synthetic oligonucleotide
aaaugggacacauagaggg

SEQ ID NO: 932757 - RNA, 19 nt, Artificial Sequence
  Description of Artificial Sequence: Synthetic oligonucleotide
uuuauaguuauucaggaug

SEQ ID NO: 932758 - RNA, 19 nt, Artificial Sequence
  Description of Artificial Sequence: Synthetic oligonucleotide
agugaaagcacauaaacca

SEQ ID NO: 932759 - RNA, 19 nt, Artificial Sequence
  Description of Artificial Sequence: Synthetic oligonucleotide
aauaggaguccacagcaac

SEQ ID NO: 932760 - RNA, 19 nt, Artificial Sequence
  Description of Artificial Sequence: Synthetic oligonucleotide
agcacuaggagcaugaugg

SEQ ID NO: 932761 - RNA, 19 nt, Artificial Sequence
  Description of Artificial Sequence: Synthetic oligonucleotide
aaacucaugguggucauac

SEQ ID NO: 932762 - RNA, 19 nt, Artificial Sequence
  Description of Artificial Sequence: Synthetic oligonucleotide
aaagagggcccaccuaugc

SEQ ID NO: 932763 - RNA, 19 nt, Artificial Sequence
  Description of Artificial Sequence: Synthetic oligonucleotide
uguagugcccucaauacug

SEQ ID NO: 932764 - RNA, 19 nt, Artificial Sequence
  Description of Artificial Sequence: Synthetic oligonucleotide
agacaaucuucuuugguac

SEQ ID NO: 932765 - RNA, 19 nt, Artificial Sequence
  Description of Artificial Sequence: Synthetic oligonucleotide
cauugcaacaccaccaggg

SEQ ID NO: 932766 - RNA, 19 nt, Artificial Sequence
  Description of Artificial Sequence: Synthetic oligonucleotide
uuauaaauagcucccaguu

SEQ ID NO: 932767 - RNA, 19 nt, Artificial Sequence
  Description of Artificial Sequence: Synthetic oligonucleotide
aguguuguaccaaagcacc

SEQ ID NO: 932768 - RNA, 19 nt, Artificial Sequence
  Description of Artificial Sequence: Synthetic oligonucleotide
aaucuggcuacagacaauc

SEQ ID NO: 932769 - RNA, 19 nt, Artificial Sequence
  Description of Artificial Sequence: Synthetic oligonucleotide
acaggaaauacacacucag

SEQ ID NO: 932770 - RNA, 19 nt, Artificial Sequence
  Description of Artificial Sequence: Synthetic oligonucleotide
uauagggacaggcaauaag

SEQ ID NO: 932771 - RNA, 19 nt, Artificial Sequence
  Description of Artificial Sequence: Synthetic oligonucleotide
cugagaauaaaacuuggac

SEQ ID NO: 932772 - RNA, 19 nt, Artificial Sequence
  Description of Artificial Sequence: Synthetic oligonucleotide
cuaaguguggcuaucucag

SEQ ID NO: 932773 - RNA, 19 nt, Artificial Sequence
  Description of Artificial Sequence: Synthetic oligonucleotide
aguuuggucagagucagac

SEQ ID NO: 932774 - RNA, 19 nt, Artificial Sequence
  Description of Artificial Sequence: Synthetic oligonucleotide
uugacuuguagaaaccgug

SEQ ID NO: 932775 - RNA, 19 nt, Artificial Sequence
  Description of Artificial Sequence: Synthetic oligonucleotide
ugaguuagaagggugacca

SEQ ID NO: 932776 - RNA, 19 nt, Artificial Sequence
  Description of Artificial Sequence: Synthetic oligonucleotide
cagaguagaaauaccacag

SEQ ID NO: 932777 - RNA, 19 nt, Artificial Sequence
  Description of Artificial Sequence: Synthetic oligonucleotide
gaauauaaaucauccugug

SEQ ID NO: 932778 - RNA, 19 nt, Artificial Sequence
  Description of Artificial Sequence: Synthetic oligonucleotide
uacaaagccacgaauccca

SEQ ID NO: 932779 - RNA, 19 nt, Artificial Sequence
  Description of Artificial Sequence: Synthetic oligonucleotide
cuuguagaaaccgugacac

SEQ ID NO: 932780 - RNA, 19 nt, Artificial Sequence
  Description of Artificial Sequence: Synthetic oligonucleotide
auagggacaggcaauaagg

SEQ ID NO: 932781 - RNA, 19 nt, Artificial Sequence
  Description of Artificial Sequence: Synthetic oligonucleotide
acauuuaccaugauguguc

SEQ ID NO: 932782 - RNA, 19 nt, Artificial Sequence
  Description of Artificial Sequence: Synthetic oligonucleotide
aagccaauaauggcaaagg

SEQ ID NO: 932783 - RNA, 19 nt, Artificial Sequence
  Description of Artificial Sequence: Synthetic oligonucleotide
agccaauaauggcaaaggc

SEQ ID NO: 932784 - RNA, 19 nt, Artificial Sequence
  Description of Artificial Sequence: Synthetic oligonucleotide
cuaugggcaacaaguaugg

SEQ ID NO: 932785 - RNA, 19 nt, Artificial Sequence
  Description of Artificial Sequence: Synthetic oligonucleotide
cugagagccagacaaagag

SEQ ID NO: 932786 - RNA, 19 nt, Artificial Sequence
  Description of Artificial Sequence: Synthetic oligonucleotide
aagguaucuccagaaauag

SEQ ID NO: 932787 - RNA, 19 nt, Artificial Sequence
  Description of Artificial Sequence: Synthetic oligonucleotide
gagaauaaaacuuggacau

SEQ ID NO: 932788 - RNA, 19 nt, Artificial Sequence
  Description of Artificial Sequence: Synthetic oligonucleotide
aguagcauaaggcccagca

SEQ ID NO: 932789 - RNA, 19 nt, Artificial Sequence
  Description of Artificial Sequence: Synthetic oligonucleotide
agaguagaaauaccacagg

SEQ ID NO: 932790 - RNA, 19 nt, Artificial Sequence
  Description of Artificial Sequence: Synthetic oligonucleotide
uguagguugaagcucuccu

SEQ ID NO: 932791 - RNA, 19 nt, Artificial Sequence
  Description of Artificial Sequence: Synthetic oligonucleotide
gaauguucuagccuggcuc

SEQ ID NO: 932792 - RNA, 19 nt, Artificial Sequence
  Description of Artificial Sequence: Synthetic oligonucleotide
aauaaaacuuggacauuuc

SEQ ID NO: 932793 - RNA, 19 nt, Artificial Sequence
  Description of Artificial Sequence: Synthetic oligonucleotide
gacugguaggaccacagcc

SEQ ID NO: 932794 - RNA, 19 nt, Artificial Sequence
  Description of Artificial Sequence: Synthetic oligonucleotide
aguuauucaggauguaggu

SEQ ID NO: 932795 - RNA, 19 nt, Artificial Sequence
  Description of Artificial Sequence: Synthetic oligonucleotide
aauaagguggauggcagcu

SEQ ID NO: 932796 - RNA, 19 nt, Artificial Sequence
  Description of Artificial Sequence: Synthetic oligonucleotide
uguccugggaacaacgcca

SEQ ID NO: 932797 - RNA, 19 nt, Artificial Sequence
  Description of Artificial Sequence: Synthetic oligonucleotide
gaauacaaagccacgaauc

SEQ ID NO: 932798 - RNA, 19 nt, Artificial Sequence
  Description of Artificial Sequence: Synthetic oligonucleotide
gauauccagcagaacaugg

SEQ ID NO: 932799 - RNA, 19 nt, Artificial Sequence
  Description of Artificial Sequence: Synthetic oligonucleotide
ccaauaauggcaaaggcug

SEQ ID NO: 932800 - RNA, 19 nt, Artificial Sequence
  Description of Artificial Sequence: Synthetic oligonucleotide
ugaccauacuugauguucc

SEQ ID NO: 932801 - RNA, 19 nt, Artificial Sequence
  Description of Artificial Sequence: Synthetic oligonucleotide
gaguagaaauaccacagga

SEQ ID NO: 932802 - RNA, 19 nt, Artificial Sequence
  Description of Artificial Sequence: Synthetic oligonucleotide
auacaaagccacgaauccc

SEQ ID NO: 932803 - RNA, 19 nt, Artificial Sequence
  Description of Artificial Sequence: Synthetic oligonucleotide
aaacugucgccucacuucu

SEQ ID NO: 932804 - RNA, 19 nt, Artificial Sequence
  Description of Artificial Sequence: Synthetic oligonucleotide
auguccugggaacaacgcc

SEQ ID NO: 932805 - RNA, 19 nt, Artificial Sequence
  Description of Artificial Sequence: Synthetic oligonucleotide
agggguaugaagagaaggc

SEQ ID NO: 932806 - RNA, 19 nt, Artificial Sequence
  Description of Artificial Sequence: Synthetic oligonucleotide
uaucuccagaaauaggagu

SEQ ID NO: 932807 - RNA, 19 nt, Artificial Sequence
  Description of Artificial Sequence: Synthetic oligonucleotide
uccuuaugcgggaggagcg

SEQ ID NO: 932808 - RNA, 19 nt, Artificial Sequence
  Description of Artificial Sequence: Synthetic oligonucleotide
uaaaucauccugugggcga

SEQ ID NO: 932809 - RNA, 19 nt, Artificial Sequence
  Description of Artificial Sequence: Synthetic oligonucleotide
uguguccuaucacaagcag

SEQ ID NO: 932810 - RNA, 19 nt, Artificial Sequence
  Description of Artificial Sequence: Synthetic oligonucleotide
gaggagcgaauacaaagcc

SEQ ID NO: 932811 - RNA, 19 nt, Artificial Sequence
  Description of Artificial Sequence: Synthetic oligonucleotide
ugaacugucuucacugagu

SEQ ID NO: 932812 - RNA, 19 nt, Artificial Sequence
  Description of Artificial Sequence: Synthetic oligonucleotide
aaaucauccugugggcgac

SEQ ID NO: 932813 - RNA, 19 nt, Artificial Sequence
  Description of Artificial Sequence: Synthetic oligonucleotide
ugacuuguagaaaccguga

SEQ ID NO: 932814 - RNA, 19 nt, Artificial Sequence
  Description of Artificial Sequence: Synthetic oligonucleotide
uuuuauaguuauucaggau

SEQ ID NO: 932815 - RNA, 19 nt, Artificial Sequence
  Description of Artificial Sequence: Synthetic oligonucleotide
acaagguaucuccagaaau

SEQ ID NO: 932816 - RNA, 19 nt, Artificial Sequence
  Description of Artificial Sequence: Synthetic oligonucleotide
acuaggagcaugauggaag

SEQ ID NO: 932817 - RNA, 19 nt, Artificial Sequence
  Description of Artificial Sequence: Synthetic oligonucleotide
auauccagcagaacauggc

SEQ ID NO: 932818 - RNA, 19 nt, Artificial Sequence
  Description of Artificial Sequence: Synthetic oligonucleotide
acuuguagaaaccgugaca

SEQ ID NO: 932819 - RNA, 19 nt, Artificial Sequence
  Description of Artificial Sequence: Synthetic oligonucleotide
augaggugaaacuguguag

SEQ ID NO: 932820 - RNA, 19 nt, Artificial Sequence
  Description of Artificial Sequence: Synthetic oligonucleotide
cugcaaucaacagaggccc

SEQ ID NO: 932821 - RNA, 19 nt, Artificial Sequence
  Description of Artificial Sequence: Synthetic oligonucleotide
gaaaccgugacacaccugu

SEQ ID NO: 932822 - RNA, 19 nt, Artificial Sequence
  Description of Artificial Sequence: Synthetic oligonucleotide
aaccgugacacaccugucu

SEQ ID NO: 932823 - RNA, 19 nt, Artificial Sequence
  Description of Artificial Sequence: Synthetic oligonucleotide
uagaaaccgugacacaccu

SEQ ID NO: 932824 - RNA, 19 nt, Artificial Sequence
  Description of Artificial Sequence: Synthetic oligonucleotide
ucccaguuugaauauaaau

SEQ ID NO: 932825 - RNA, 19 nt, Artificial Sequence
  Description of Artificial Sequence: Synthetic oligonucleotide
guauagaugaugaaccgca

SEQ ID NO: 932826 - RNA, 19 nt, Artificial Sequence
  Description of Artificial Sequence: Synthetic oligonucleotide
aggguaguugaaaugggac

SEQ ID NO: 932827 - RNA, 19 nt, Artificial Sequence
  Description of Artificial Sequence: Synthetic oligonucleotide
gcagguugacaucaaaggg

SEQ ID NO: 932828 - RNA, 19 nt, Artificial Sequence
  Description of Artificial Sequence: Synthetic oligonucleotide
cccaguuugaauauaaauc

SEQ ID NO: 932829 - RNA, 19 nt, Artificial Sequence
  Description of Artificial Sequence: Synthetic oligonucleotide
uugucuauauccagcuggu

SEQ ID NO: 932830 - RNA, 19 nt, Artificial Sequence
  Description of Artificial Sequence: Synthetic oligonucleotide
cuaucacaagcagaguucc

SEQ ID NO: 932831 - RNA, 19 nt, Artificial Sequence
  Description of Artificial Sequence: Synthetic oligonucleotide
ccaguuugaauauaaauca

SEQ ID NO: 932832 - RNA, 19 nt, Artificial Sequence
  Description of Artificial Sequence: Synthetic oligonucleotide
uaucacaccuggugguggg

SEQ ID NO: 932833 - RNA, 19 nt, Artificial Sequence
  Description of Artificial Sequence: Synthetic oligonucleotide
aacaugaggugaaacugug

SEQ ID NO: 932834 - RNA, 19 nt, Artificial Sequence
  Description of Artificial Sequence: Synthetic oligonucleotide
aguccuagacagagaaucc

SEQ ID NO: 932835 - RNA, 19 nt, Artificial Sequence
  Description of Artificial Sequence: Synthetic oligonucleotide
gacuuguagaaaccgugac

SEQ ID NO: 932836 - RNA, 19 nt, Artificial Sequence
  Description of Artificial Sequence: Synthetic oligonucleotide
ugaggcuaugggcaacaag

SEQ ID NO: 932837 - RNA, 19 nt, Artificial Sequence
  Description of Artificial Sequence: Synthetic oligonucleotide
ucccucuugguuauaaaua

SEQ ID NO: 932838 - RNA, 19 nt, Artificial Sequence
  Description of Artificial Sequence: Synthetic oligonucleotide
aguuggaacuuuuguucag

SEQ ID NO: 932839 - RNA, 19 nt, Artificial Sequence
  Description of Artificial Sequence: Synthetic oligonucleotide
caguccuagacagagaauc

SEQ ID NO: 932840 - RNA, 19 nt, Artificial Sequence
  Description of Artificial Sequence: Synthetic oligonucleotide
gaggauguguguguagucc

SEQ ID NO: 932841 - RNA, 19 nt, Artificial Sequence
  Description of Artificial Sequence: Synthetic oligonucleotide
cagggguaugaagagaagg

SEQ ID NO: 932842 - RNA, 19 nt, Artificial Sequence
  Description of Artificial Sequence: Synthetic oligonucleotide
uggccuaagaagccucucc

SEQ ID NO: 932843 - RNA, 19 nt, Artificial Sequence
  Description of Artificial Sequence: Synthetic oligonucleotide
agaacacgauguguguccc

SEQ ID NO: 932844 - RNA, 19 nt, Artificial Sequence
  Description of Artificial Sequence: Synthetic oligonucleotide
ccuauagagggccaggugc

SEQ ID NO: 932845 - RNA, 19 nt, Artificial Sequence
  Description of Artificial Sequence: Synthetic oligonucleotide
ugacugucagcugagaaua

SEQ ID NO: 932846 - RNA, 19 nt, Artificial Sequence
  Description of Artificial Sequence: Synthetic oligonucleotide
acgaugugugucccuauag

SEQ ID NO: 932847 - RNA, 19 nt, Artificial Sequence
  Description of Artificial Sequence: Synthetic oligonucleotide
ggugaaacuguguagcuga

SEQ ID NO: 932848 - RNA, 19 nt, Artificial Sequence
  Description of Artificial Sequence: Synthetic oligonucleotide
gguaggaccacagccaggg

SEQ ID NO: 932849 - RNA, 19 nt, Artificial Sequence
  Description of Artificial Sequence: Synthetic oligonucleotide
uucccucuugguuauaaau

SEQ ID NO: 932850 - RNA, 19 nt, Artificial Sequence
  Description of Artificial Sequence: Synthetic oligonucleotide
guagcauaaggcccagcag

SEQ ID NO: 932851 - RNA, 19 nt, Artificial Sequence
  Description of Artificial Sequence: Synthetic oligonucleotide
uugucauaccuccagccuu

SEQ ID NO: 932852 - RNA, 19 nt, Artificial Sequence
  Description of Artificial Sequence: Synthetic oligonucleotide
aagagggcccaccuaugcu

SEQ ID NO: 932853 - RNA, 19 nt, Artificial Sequence
  Description of Artificial Sequence: Synthetic oligonucleotide
agaaucccugcugggaugg

SEQ ID NO: 932854 - RNA, 19 nt, Artificial Sequence
  Description of Artificial Sequence: Synthetic oligonucleotide
aucacaagcagaguuccca

SEQ ID NO: 932855 - RNA, 19 nt, Artificial Sequence
  Description of Artificial Sequence: Synthetic oligonucleotide
gucaguccuagacagagaa

SEQ ID NO: 932856 - RNA, 19 nt, Artificial Sequence
  Description of Artificial Sequence: Synthetic oligonucleotide
acgaaucccagguuuggca

SEQ ID NO: 932857 - RNA, 19 nt, Artificial Sequence
  Description of Artificial Sequence: Synthetic oligonucleotide
caauaagguggauggcagc

SEQ ID NO: 932858 - RNA, 19 nt, Artificial Sequence
  Description of Artificial Sequence: Synthetic oligonucleotide
acaggcaauaagguggaug

SEQ ID NO: 932859 - RNA, 19 nt, Artificial Sequence
  Description of Artificial Sequence: Synthetic oligonucleotide
gucaugcguagccuguagg

SEQ ID NO: 932860 - RNA, 19 nt, Artificial Sequence
  Description of Artificial Sequence: Synthetic oligonucleotide
uccacuacacccaggggua

SEQ ID NO: 932861 - RNA, 19 nt, Artificial Sequence
  Description of Artificial Sequence: Synthetic oligonucleotide
gaaccgcagcuccuuaugc

SEQ ID NO: 932862 - RNA, 19 nt, Artificial Sequence
  Description of Artificial Sequence: Synthetic oligonucleotide
agguugacaucaaagggug

SEQ ID NO: 932863 - RNA, 19 nt, Artificial Sequence
  Description of Artificial Sequence: Synthetic oligonucleotide
agaauguucuagccuggcu

SEQ ID NO: 932864 - RNA, 19 nt, Artificial Sequence
  Description of Artificial Sequence: Synthetic oligonucleotide
uuguaauguccagagucca

SEQ ID NO: 932865 - RNA, 19 nt, Artificial Sequence
  Description of Artificial Sequence: Synthetic oligonucleotide
uggcuacagacaaucuucu

SEQ ID NO: 932866 - RNA, 19 nt, Artificial Sequence
  Description of Artificial Sequence: Synthetic oligonucleotide
guacaguagaacaugaggu

SEQ ID NO: 932867 - RNA, 19 nt, Artificial Sequence
  Description of Artificial Sequence: Synthetic oligonucleotide
uguuguaccaaagcaccuc

SEQ ID NO: 932868 - RNA, 19 nt, Artificial Sequence
  Description of Artificial Sequence: Synthetic oligonucleotide
ugguauagggacaggcaau

SEQ ID NO: 932869 - RNA, 19 nt, Artificial Sequence
  Description of Artificial Sequence: Synthetic oligonucleotide
cuugguauagggacaggca

SEQ ID NO: 932870 - RNA, 19 nt, Artificial Sequence
  Description of Artificial Sequence: Synthetic oligonucleotide
cugaacugucuucacugag

SEQ ID NO: 932871 - RNA, 19 nt, Artificial Sequence
  Description of Artificial Sequence: Synthetic oligonucleotide
accgugacacaccugucug

SEQ ID NO: 932872 - RNA, 19 nt, Artificial Sequence
  Description of Artificial Sequence: Synthetic oligonucleotide
ggagcgaauacaaagccac

SEQ ID NO: 932873 - RNA, 19 nt, Artificial Sequence
  Description of Artificial Sequence: Synthetic oligonucleotide
agacaaagagggcccaccu

SEQ ID NO: 932874 - RNA, 19 nt, Artificial Sequence
  Description of Artificial Sequence: Synthetic oligonucleotide
cuaagaagccucuccagaa

SEQ ID NO: 932875 - RNA, 19 nt, Artificial Sequence
  Description of Artificial Sequence: Synthetic oligonucleotide
cccucuugguuauaaauag

SEQ ID NO: 932876 - RNA, 19 nt, Artificial Sequence
  Description of Artificial Sequence: Synthetic oligonucleotide
cauuuaccaugaugugucc

SEQ ID NO: 932877 - RNA, 19 nt, Artificial Sequence
  Description of Artificial Sequence: Synthetic oligonucleotide
gugaccauacuugauguuc

SEQ ID NO: 932878 - RNA, 19 nt, Artificial Sequence
  Description of Artificial Sequence: Synthetic oligonucleotide
aaucauccugugggcgacc

SEQ ID NO: 932879 - RNA, 19 nt, Artificial Sequence
  Description of Artificial Sequence: Synthetic oligonucleotide
gucagcugagaauaaaacu

SEQ ID NO: 932880 - RNA, 19 nt, Artificial Sequence
  Description of Artificial Sequence: Synthetic oligonucleotide
gagaaucccugcugggaug

SEQ ID NO: 932881 - RNA, 19 nt, Artificial Sequence
  Description of Artificial Sequence: Synthetic oligonucleotide
gcuaugggcaacaaguaug

SEQ ID NO: 932882 - RNA, 19 nt, Artificial Sequence
  Description of Artificial Sequence: Synthetic oligonucleotide
cuacaggacagcacuagga

SEQ ID NO: 932883 - RNA, 19 nt, Artificial Sequence
  Description of Artificial Sequence: Synthetic oligonucleotide
agggauguggcuguauaug

SEQ ID NO: 932884 - RNA, 19 nt, Artificial Sequence
  Description of Artificial Sequence: Synthetic oligonucleotide
gcaaccgucaguccuagac

SEQ ID NO: 932885 - RNA, 19 nt, Artificial Sequence
  Description of Artificial Sequence: Synthetic oligonucleotide
cucuugucauaccuccagc

SEQ ID NO: 932886 - RNA, 19 nt, Artificial Sequence
  Description of Artificial Sequence: Synthetic oligonucleotide
gguauagaugaugaaccgc

SEQ ID NO: 932887 - RNA, 19 nt, Artificial Sequence
  Description of Artificial Sequence: Synthetic oligonucleotide
ucccaucuuguacagccaa

SEQ ID NO: 932888 - RNA, 19 nt, Artificial Sequence
  Description of Artificial Sequence: Synthetic oligonucleotide
gaguucccaucuuguacag

SEQ ID NO: 932889 - RNA, 19 nt, Artificial Sequence
  Description of Artificial Sequence: Synthetic oligonucleotide
guagguugaagcucuccuc

SEQ ID NO: 932890 - RNA, 19 nt, Artificial Sequence
  Description of Artificial Sequence: Synthetic oligonucleotide
ggccuaucacaccuggugg

SEQ ID NO: 932891 - RNA, 19 nt, Artificial Sequence
  Description of Artificial Sequence: Synthetic oligonucleotide
agggaagguauagaugaug

SEQ ID NO: 932892 - RNA, 19 nt, Artificial Sequence
  Description of Artificial Sequence: Synthetic oligonucleotide
aacucaugguggucauacu

SEQ ID NO: 932893 - RNA, 19 nt, Artificial Sequence
  Description of Artificial Sequence: Synthetic oligonucleotide
caaagcaccucuccuucug

SEQ ID NO: 932894 - RNA, 19 nt, Artificial Sequence
  Description of Artificial Sequence: Synthetic oligonucleotide
uccugugggcgaccuaacc

SEQ ID NO: 932895 - RNA, 19 nt, Artificial Sequence
  Description of Artificial Sequence: Synthetic oligonucleotide
ggaggagcgaauacaaagc

SEQ ID NO: 932896 - RNA, 19 nt, Artificial Sequence
  Description of Artificial Sequence: Synthetic oligonucleotide
cuaucacaccugguggugg

SEQ ID NO: 932897 - RNA, 19 nt, Artificial Sequence
  Description of Artificial Sequence: Synthetic oligonucleotide
ggucacuacagagcuaggg

SEQ ID NO: 932898 - RNA, 19 nt, Artificial Sequence
  Description of Artificial Sequence: Synthetic oligonucleotide
gagugcagggaagguauag

SEQ ID NO: 932899 - RNA, 19 nt, Artificial Sequence
  Description of Artificial Sequence: Synthetic oligonucleotide
ugaggauguguguguaguc

SEQ ID NO: 932900 - RNA, 19 nt, Artificial Sequence
  Description of Artificial Sequence: Synthetic oligonucleotide
ugugggcgaccuaaccaug

SEQ ID NO: 932901 - RNA, 19 nt, Artificial Sequence
  Description of Artificial Sequence: Synthetic oligonucleotide
uauauccagcuggugguac

SEQ ID NO: 932902 - RNA, 19 nt, Artificial Sequence
  Description of Artificial Sequence: Synthetic oligonucleotide
aacacgaugugugucccua

SEQ ID NO: 932903 - RNA, 19 nt, Artificial Sequence
  Description of Artificial Sequence: Synthetic oligonucleotide
gagcgaauacaaagccacg

SEQ ID NO: 932904 - RNA, 19 nt, Artificial Sequence
  Description of Artificial Sequence: Synthetic oligonucleotide
uaccaaagcaccucuccuu

SEQ ID NO: 932905 - RNA, 19 nt, Artificial Sequence
  Description of Artificial Sequence: Synthetic oligonucleotide
cugaguuagaagggugacc

SEQ ID NO: 932906 - RNA, 19 nt, Artificial Sequence
  Description of Artificial Sequence: Synthetic oligonucleotide
uaguugaaaugggacacau

SEQ ID NO: 932907 - RNA, 19 nt, Artificial Sequence
  Description of Artificial Sequence: Synthetic oligonucleotide
cuaggguggcagaauguuc

SEQ ID NO: 932908 - RNA, 19 nt, Artificial Sequence
  Description of Artificial Sequence: Synthetic oligonucleotide
cagcaggucaugcguagcc

SEQ ID NO: 932909 - RNA, 19 nt, Artificial Sequence
  Description of Artificial Sequence: Synthetic oligonucleotide
auauccagcuggugguaca

SEQ ID NO: 932910 - RNA, 19 nt, Artificial Sequence
  Description of Artificial Sequence: Synthetic oligonucleotide
uccuaaguguggcuaucuc

SEQ ID NO: 932911 - RNA, 19 nt, Artificial Sequence
  Description of Artificial Sequence: Synthetic oligonucleotide
agguaucuccagaaauagg

SEQ ID NO: 932912 - RNA, 19 nt, Artificial Sequence
  Description of Artificial Sequence: Synthetic oligonucleotide
auuuaccaugauguguccu

SEQ ID NO: 932913 - RNA, 19 nt, Artificial Sequence
  Description of Artificial Sequence: Synthetic oligonucleotide
augcgggaggagcgaauac

SEQ ID NO: 932914 - RNA, 19 nt, Artificial Sequence
  Description of Artificial Sequence: Synthetic oligonucleotide
guagugcccucaauacugg

SEQ ID NO: 932915 - RNA, 19 nt, Artificial Sequence
  Description of Artificial Sequence: Synthetic oligonucleotide
cacugaguuagaaggguga

SEQ ID NO: 932916 - RNA, 19 nt, Artificial Sequence
  Description of Artificial Sequence: Synthetic oligonucleotide
caauaauggcaaaggcuga

SEQ ID NO: 932917 - RNA, 19 nt, Artificial Sequence
  Description of Artificial Sequence: Synthetic oligonucleotide
guccacuacacccaggggu

SEQ ID NO: 932918 - RNA, 19 nt, Artificial Sequence
  Description of Artificial Sequence: Synthetic oligonucleotide
ggguaguugaaaugggaca

SEQ ID NO: 932919 - RNA, 19 nt, Artificial Sequence
  Description of Artificial Sequence: Synthetic oligonucleotide
aaaccgugacacaccuguc

SEQ ID NO: 932920 - RNA, 19 nt, Artificial Sequence
  Description of Artificial Sequence: Synthetic oligonucleotide
ugcaaucaacagaggccca

SEQ ID NO: 932921 - RNA, 19 nt, Artificial Sequence
  Description of Artificial Sequence: Synthetic oligonucleotide
agccgcugcauugcaacac

SEQ ID NO: 932922 - RNA, 19 nt, Artificial Sequence
  Description of Artificial Sequence: Synthetic oligonucleotide
agguggauggcagcuacug

SEQ ID NO: 932923 - RNA, 19 nt, Artificial Sequence
  Description of Artificial Sequence: Synthetic oligonucleotide
acacauuggggaguguccu

SEQ ID NO: 932924 - RNA, 19 nt, Artificial Sequence
  Description of Artificial Sequence: Synthetic oligonucleotide
ggcgaccuaaccauggcag

SEQ ID NO: 932925 - RNA, 19 nt, Artificial Sequence
  Description of Artificial Sequence: Synthetic oligonucleotide
uuguaccaaagcaccucuc

SEQ ID NO: 932926 - RNA, 19 nt, Artificial Sequence
  Description of Artificial Sequence: Synthetic oligonucleotide
gcccugaagccaauaaugg

SEQ ID NO: 932927 - RNA, 19 nt, Artificial Sequence
  Description of Artificial Sequence: Synthetic oligonucleotide
cuaccuugguauagggaca

SEQ ID NO: 932928 - RNA, 19 nt, Artificial Sequence
  Description of Artificial Sequence: Synthetic oligonucleotide
ugucuauauccagcuggug

SEQ ID NO: 932929 - RNA, 19 nt, Artificial Sequence
  Description of Artificial Sequence: Synthetic oligonucleotide
cuggugguacagcagguca

SEQ ID NO: 932930 - RNA, 19 nt, Artificial Sequence
  Description of Artificial Sequence: Synthetic oligonucleotide
gaacaugaggugaaacugu

SEQ ID NO: 932931 - RNA, 19 nt, Artificial Sequence
  Description of Artificial Sequence: Synthetic oligonucleotide
aggagcggggaggugcccc

SEQ ID NO: 932932 - RNA, 19 nt, Artificial Sequence
  Description of Artificial Sequence: Synthetic oligonucleotide
acuacacccagggguauga

SEQ ID NO: 932933 - RNA, 19 nt, Artificial Sequence
  Description of Artificial Sequence: Synthetic oligonucleotide
gugggcgaccuaaccaugg

SEQ ID NO: 932934 - RNA, 19 nt, Artificial Sequence
  Description of Artificial Sequence: Synthetic oligonucleotide
uuaugcgggaggagcgaau

SEQ ID NO: 932935 - RNA, 19 nt, Artificial Sequence
  Description of Artificial Sequence: Synthetic oligonucleotide
uaugcgggaggagcgaaua

SEQ ID NO: 932936 - RNA, 19 nt, Artificial Sequence
  Description of Artificial Sequence: Synthetic oligonucleotide
aggagcgaauacaaagcca

SEQ ID NO: 932937 - RNA, 19 nt, Artificial Sequence
  Description of Artificial Sequence: Synthetic oligonucleotide
cagaauguucuagccuggc

SEQ ID NO: 932938 - RNA, 19 nt, Artificial Sequence
  Description of Artificial Sequence: Synthetic oligonucleotide
ccaccuaugcugcagccag

SEQ ID NO: 932939 - RNA, 19 nt, Artificial Sequence
  Description of Artificial Sequence: Synthetic oligonucleotide
ccucuugguuauaaauagc

SEQ ID NO: 932940 - RNA, 19 nt, Artificial Sequence
  Description of Artificial Sequence: Synthetic oligonucleotide
auguguccuaucacaagca

SEQ ID NO: 932941 - RNA, 19 nt, Artificial Sequence
  Description of Artificial Sequence: Synthetic oligonucleotide
gagcaggccuaucacaccu

SEQ ID NO: 932942 - RNA, 19 nt, Artificial Sequence
  Description of Artificial Sequence: Synthetic oligonucleotide
agaauaaaacuuggacauu

SEQ ID NO: 932943 - RNA, 19 nt, Artificial Sequence
  Description of Artificial Sequence: Synthetic oligonucleotide
cccugaagccaauaauggc

SEQ ID NO: 932944 - RNA, 19 nt, Artificial Sequence
  Description of Artificial Sequence: Synthetic oligonucleotide
gcaggccuaucacaccugg

SEQ ID NO: 932945 - RNA, 19 nt, Artificial Sequence
  Description of Artificial Sequence: Synthetic oligonucleotide
ccuugguauagggacaggc

SEQ ID NO: 932946 - RNA, 19 nt, Artificial Sequence
  Description of Artificial Sequence: Synthetic oligonucleotide
acgccaggaaacucauggu

SEQ ID NO: 932947 - RNA, 19 nt, Artificial Sequence
  Description of Artificial Sequence: Synthetic oligonucleotide
cacauuggggaguguccug

SEQ ID NO: 932948 - RNA, 19 nt, Artificial Sequence
  Description of Artificial Sequence: Synthetic oligonucleotide
cacgaaucccagguuuggc

SEQ ID NO: 932949 - RNA, 19 nt, Artificial Sequence
  Description of Artificial Sequence: Synthetic oligonucleotide
ccuucguugacuuguagaa

SEQ ID NO: 932950 - RNA, 19 nt, Artificial Sequence
  Description of Artificial Sequence: Synthetic oligonucleotide
agccuucguugacuuguag

SEQ ID NO: 932951 - RNA, 19 nt, Artificial Sequence
  Description of Artificial Sequence: Synthetic oligonucleotide
gggccaacacauuggggag

SEQ ID NO: 932952 - RNA, 19 nt, Artificial Sequence
  Description of Artificial Sequence: Synthetic oligonucleotide
auguucuagccuggcucac

SEQ ID NO: 932953 - RNA, 19 nt, Artificial Sequence
  Description of Artificial Sequence: Synthetic oligonucleotide
ggcagaguagaaauaccac

SEQ ID NO: 932954 - RNA, 19 nt, Artificial Sequence
  Description of Artificial Sequence: Synthetic oligonucleotide
cacauuuaccaugaugugu

SEQ ID NO: 932955 - RNA, 19 nt, Artificial Sequence
  Description of Artificial Sequence: Synthetic oligonucleotide
ccuaaguguggcuaucuca

SEQ ID NO: 932956 - RNA, 19 nt, Artificial Sequence
  Description of Artificial Sequence: Synthetic oligonucleotide
gcauugcaacaccaccagg

SEQ ID NO: 932957 - RNA, 19 nt, Artificial Sequence
  Description of Artificial Sequence: Synthetic oligonucleotide
accguggccccaaacuguc

SEQ ID NO: 932958 - RNA, 19 nt, Artificial Sequence
  Description of Artificial Sequence: Synthetic oligonucleotide
gccuaagaagccucuccag

SEQ ID NO: 932959 - RNA, 19 nt, Artificial Sequence
  Description of Artificial Sequence: Synthetic oligonucleotide
uagcucccaguuugaauau

SEQ ID NO: 932960 - RNA, 19 nt, Artificial Sequence
  Description of Artificial Sequence: Synthetic oligonucleotide
guaguugaaaugggacaca

SEQ ID NO: 932961 - RNA, 19 nt, Artificial Sequence
  Description of Artificial Sequence: Synthetic oligonucleotide
gggcagaguagaaauacca

SEQ ID NO: 932962 - RNA, 19 nt, Artificial Sequence
  Description of Artificial Sequence: Synthetic oligonucleotide
ucauaccuccagccuucgu

SEQ ID NO: 932963 - RNA, 19 nt, Artificial Sequence
  Description of Artificial Sequence: Synthetic oligonucleotide
guguccuaucacaagcaga

SEQ ID NO: 932964 - RNA, 19 nt, Artificial Sequence
  Description of Artificial Sequence: Synthetic oligonucleotide
ggcuguauaugccacauuu

SEQ ID NO: 932965 - RNA, 19 nt, Artificial Sequence
  Description of Artificial Sequence: Synthetic oligonucleotide
caccuaugcugcagccagg

SEQ ID NO: 932966 - RNA, 19 nt, Artificial Sequence
  Description of Artificial Sequence: Synthetic oligonucleotide
ccucuaccuugguauaggg

SEQ ID NO: 932967 - RNA, 19 nt, Artificial Sequence
  Description of Artificial Sequence: Synthetic oligonucleotide
uguccuaaguguggcuauc

SEQ ID NO: 932968 - RNA, 19 nt, Artificial Sequence
  Description of Artificial Sequence: Synthetic oligonucleotide
ggucaugcguagccuguag

SEQ ID NO: 932969 - RNA, 19 nt, Artificial Sequence
  Description of Artificial Sequence: Synthetic oligonucleotide
ggccuaagaagccucucca

SEQ ID NO: 932970 - RNA, 19 nt, Artificial Sequence
  Description of Artificial Sequence: Synthetic oligonucleotide
cagcuacugugaccaacag

SEQ ID NO: 932971 - RNA, 19 nt, Artificial Sequence
  Description of Artificial Sequence: Synthetic oligonucleotide
uaugggcaacaaguauggu

SEQ ID NO: 932972 - RNA, 19 nt, Artificial Sequence
  Description of Artificial Sequence: Synthetic oligonucleotide
cuacaucaaugugcagaag

SEQ ID NO: 932973 - RNA, 19 nt, Artificial Sequence
  Description of Artificial Sequence: Synthetic oligonucleotide
gugacacaccugucugggc

SEQ ID NO: 932974 - RNA, 19 nt, Artificial Sequence
  Description of Artificial Sequence: Synthetic oligonucleotide
acaugaggugaaacugugu

SEQ ID NO: 932975 - RNA, 19 nt, Artificial Sequence
  Description of Artificial Sequence: Synthetic oligonucleotide
gccuucguugacuuguaga

SEQ ID NO: 932976 - RNA, 19 nt, Artificial Sequence
  Description of Artificial Sequence: Synthetic oligonucleotide
auuggggaguguccuggua

SEQ ID NO: 932977 - RNA, 19 nt, Artificial Sequence
  Description of Artificial Sequence: Synthetic oligonucleotide
guggcuaucucagggccca

SEQ ID NO: 932978 - RNA, 19 nt, Artificial Sequence
  Description of Artificial Sequence: Synthetic oligonucleotide
cauaccuccagccuucguu

SEQ ID NO: 932979 - RNA, 19 nt, Artificial Sequence
  Description of Artificial Sequence: Synthetic oligonucleotide
gucauaccuccagccuucg

SEQ ID NO: 932980 - RNA, 19 nt, Artificial Sequence
  Description of Artificial Sequence: Synthetic oligonucleotide
aagguggauggcagcuacu

SEQ ID NO: 932981 - RNA, 19 nt, Artificial Sequence
  Description of Artificial Sequence: Synthetic oligonucleotide
ccgucaguccuagacagag

SEQ ID NO: 932982 - RNA, 19 nt, Artificial Sequence
  Description of Artificial Sequence: Synthetic oligonucleotide
agagcuaggguggcagaau

SEQ ID NO: 932983 - RNA, 19 nt, Artificial Sequence
  Description of Artificial Sequence: Synthetic oligonucleotide
gcgaauacaaagccacgaa

SEQ ID NO: 932984 - RNA, 19 nt, Artificial Sequence
  Description of Artificial Sequence: Synthetic oligonucleotide
ugccccaguuggaacuuuu

SEQ ID NO: 932985 - RNA, 19 nt, Artificial Sequence
  Description of Artificial Sequence: Synthetic oligonucleotide
auaagguggauggcagcua

SEQ ID NO: 932986 - RNA, 19 nt, Artificial Sequence
  Description of Artificial Sequence: Synthetic oligonucleotide
ggacaguguuguaccaaag

SEQ ID NO: 932987 - RNA, 19 nt, Artificial Sequence
  Description of Artificial Sequence: Synthetic oligonucleotide
ccaugauguguccuaucac

SEQ ID NO: 932988 - RNA, 19 nt, Artificial Sequence
  Description of Artificial Sequence: Synthetic oligonucleotide
acacgaugugugucccuau

SEQ ID NO: 932989 - RNA, 19 nt, Artificial Sequence
  Description of Artificial Sequence: Synthetic oligonucleotide
agcuaggguggcagaaugu

SEQ ID NO: 932990 - RNA, 19 nt, Artificial Sequence
  Description of Artificial Sequence: Synthetic oligonucleotide
gccgcugcauugcaacacc

SEQ ID NO: 932991 - RNA, 19 nt, Artificial Sequence
  Description of Artificial Sequence: Synthetic oligonucleotide
cugccugccugaugauuuc

SEQ ID NO: 932992 - RNA, 19 nt, Artificial Sequence
  Description of Artificial Sequence: Synthetic oligonucleotide
cuucguugacuuguagaaa

SEQ ID NO: 932993 - RNA, 19 nt, Artificial Sequence
  Description of Artificial Sequence: Synthetic oligonucleotide
guucccucuugguuauaaa

SEQ ID NO: 932994 - RNA, 19 nt, Artificial Sequence
  Description of Artificial Sequence: Synthetic oligonucleotide
cacauagagggauguggcu

SEQ ID NO: 932995 - RNA, 19 nt, Artificial Sequence
  Description of Artificial Sequence: Synthetic oligonucleotide
agaaaccgugacacaccug

SEQ ID NO: 932996 - RNA, 19 nt, Artificial Sequence
  Description of Artificial Sequence: Synthetic oligonucleotide
cgugacacaccugucuggg

SEQ ID NO: 932997 - RNA, 19 nt, Artificial Sequence
  Description of Artificial Sequence: Synthetic oligonucleotide
gccaacacauuggggagug

SEQ ID NO: 932998 - RNA, 19 nt, Artificial Sequence
  Description of Artificial Sequence: Synthetic oligonucleotide
aguugaaaugggacacaua

SEQ ID NO: 932999 - RNA, 19 nt, Artificial Sequence
  Description of Artificial Sequence: Synthetic oligonucleotide
ccgugacacaccugucugg

SEQ ID NO: 933000 - RNA, 19 nt, Artificial Sequence
  Description of Artificial Sequence: Synthetic oligonucleotide
ggaguccacagcaaccguc

SEQ ID NO: 933001 - RNA, 19 nt, Artificial Sequence
  Description of Artificial Sequence: Synthetic oligonucleotide
cuguagugcccucaauacu

SEQ ID NO: 933002 - RNA, 19 nt, Artificial Sequence
  Description of Artificial Sequence: Synthetic oligonucleotide
aucuggcuacagacaaucu

SEQ ID NO: 933003 - RNA, 19 nt, Artificial Sequence
  Description of Artificial Sequence: Synthetic oligonucleotide
cugugggcgaccuaaccau

SEQ ID NO: 933004 - RNA, 19 nt, Artificial Sequence
  Description of Artificial Sequence: Synthetic oligonucleotide
cacuacacccagggguaug

SEQ ID NO: 933005 - RNA, 19 nt, Artificial Sequence
  Description of Artificial Sequence: Synthetic oligonucleotide
cacuaggagcaugauggaa

SEQ ID NO: 933006 - RNA, 19 nt, Artificial Sequence
  Description of Artificial Sequence: Synthetic oligonucleotide
uagagggauguggcuguau

SEQ ID NO: 933007 - RNA, 19 nt, Artificial Sequence
  Description of Artificial Sequence: Synthetic oligonucleotide
ccucuggcagccaugaugu

SEQ ID NO: 933008 - RNA, 19 nt, Artificial Sequence
  Description of Artificial Sequence: Synthetic oligonucleotide
gggcccagacugcuacagg

SEQ ID NO: 933009 - RNA, 19 nt, Artificial Sequence
  Description of Artificial Sequence: Synthetic oligonucleotide
cucucaggcuggccuaaga

SEQ ID NO: 933010 - RNA, 19 nt, Artificial Sequence
  Description of Artificial Sequence: Synthetic oligonucleotide
cagcaaccgucaguccuag

SEQ ID NO: 933011 - RNA, 19 nt, Artificial Sequence
  Description of Artificial Sequence: Synthetic oligonucleotide
ggaacaacgccaggaaacu

SEQ ID NO: 933012 - RNA, 19 nt, Artificial Sequence
  Description of Artificial Sequence: Synthetic oligonucleotide
cuuaugcgggaggagcgaa

SEQ ID NO: 933013 - RNA, 19 nt, Artificial Sequence
  Description of Artificial Sequence: Synthetic oligonucleotide
cacaccuguagugcccuca

SEQ ID NO: 933014 - RNA, 19 nt, Artificial Sequence
  Description of Artificial Sequence: Synthetic oligonucleotide
gacugucagcugagaauaa

SEQ ID NO: 933015 - RNA, 19 nt, Artificial Sequence
  Description of Artificial Sequence: Synthetic oligonucleotide
guccuccuguccacuacac

SEQ ID NO: 933016 - RNA, 19 nt, Artificial Sequence
  Description of Artificial Sequence: Synthetic oligonucleotide
ggugaacucccacccucuc

SEQ ID NO: 933017 - RNA, 19 nt, Artificial Sequence
  Description of Artificial Sequence: Synthetic oligonucleotide
cacgaugugugucccuaua

SEQ ID NO: 933018 - RNA, 19 nt, Artificial Sequence
  Description of Artificial Sequence: Synthetic oligonucleotide
gggguaugaagagaaggcu

SEQ ID NO: 933019 - RNA, 19 nt, Artificial Sequence
  Description of Artificial Sequence: Synthetic oligonucleotide
ucacaccuguagugcccuc

SEQ ID NO: 933020 - RNA, 19 nt, Artificial Sequence
  Description of Artificial Sequence: Synthetic oligonucleotide
gggcgaccuaaccauggca

SEQ ID NO: 933021 - RNA, 19 nt, Artificial Sequence
  Description of Artificial Sequence: Synthetic oligonucleotide
caguagcauaaggcccagc

SEQ ID NO: 933022 - RNA, 19 nt, Artificial Sequence
  Description of Artificial Sequence: Synthetic oligonucleotide
gcgaccuaaccauggcaga

SEQ ID NO: 933023 - RNA, 19 nt, Artificial Sequence
  Description of Artificial Sequence: Synthetic oligonucleotide
ggcuaugggcaacaaguau

SEQ ID NO: 933024 - RNA, 19 nt, Artificial Sequence
  Description of Artificial Sequence: Synthetic oligonucleotide
agcaugccuucugcuccag

SEQ ID NO: 933025 - RNA, 19 nt, Artificial Sequence
  Description of Artificial Sequence: Synthetic oligonucleotide
cuauauccagcugguggua

SEQ ID NO: 933026 - RNA, 19 nt, Artificial Sequence
  Description of Artificial Sequence: Synthetic oligonucleotide
guguuguaccaaagcaccu

SEQ ID NO: 933027 - RNA, 19 nt, Artificial Sequence
  Description of Artificial Sequence: Synthetic oligonucleotide
cagagcuaggguggcagaa

SEQ ID NO: 933028 - RNA, 19 nt, Artificial Sequence
  Description of Artificial Sequence: Synthetic oligonucleotide
guguccuaaguguggcuau

SEQ ID NO: 933029 - RNA, 19 nt, Artificial Sequence
  Description of Artificial Sequence: Synthetic oligonucleotide
agcggggaggugccccagu

SEQ ID NO: 933030 - RNA, 19 nt, Artificial Sequence
  Description of Artificial Sequence: Synthetic oligonucleotide
gcuguauaugccacauuua

SEQ ID NO: 933031 - RNA, 19 nt, Artificial Sequence
  Description of Artificial Sequence: Synthetic oligonucleotide
agggcccaccuaugcugca

SEQ ID NO: 933032 - RNA, 19 nt, Artificial Sequence
  Description of Artificial Sequence: Synthetic oligonucleotide
gcacuaggagcaugaugga

SEQ ID NO: 933033 - RNA, 19 nt, Artificial Sequence
  Description of Artificial Sequence: Synthetic oligonucleotide
guccuaaguguggcuaucu

SEQ ID NO: 933034 - RNA, 19 nt, Artificial Sequence
  Description of Artificial Sequence: Synthetic oligonucleotide
uggcuaucucagggcccag

SEQ ID NO: 933035 - RNA, 19 nt, Artificial Sequence
  Description of Artificial Sequence: Synthetic oligonucleotide
accgucaguccuagacaga

SEQ ID NO: 933036 - RNA, 19 nt, Artificial Sequence
  Description of Artificial Sequence: Synthetic oligonucleotide
cgaugugugucccuauaga

SEQ ID NO: 933037 - RNA, 19 nt, Artificial Sequence
  Description of Artificial Sequence: Synthetic oligonucleotide
cugcuacaggacagcacua

SEQ ID NO: 933038 - RNA, 19 nt, Artificial Sequence
  Description of Artificial Sequence: Synthetic oligonucleotide
gccuaucacaccugguggu

SEQ ID NO: 933039 - RNA, 19 nt, Artificial Sequence
  Description of Artificial Sequence: Synthetic oligonucleotide
gguggucauacuugucuau

SEQ ID NO: 933040 - RNA, 19 nt, Artificial Sequence
  Description of Artificial Sequence: Synthetic oligonucleotide
gcaguagcauaaggcccag

SEQ ID NO: 933041 - RNA, 19 nt, Artificial Sequence
  Description of Artificial Sequence: Synthetic oligonucleotide
auagagggauguggcugua

SEQ ID NO: 933042 - RNA, 19 nt, Artificial Sequence
  Description of Artificial Sequence: Synthetic oligonucleotide
cgaccuaaccauggcagac

SEQ ID NO: 933043 - RNA, 19 nt, Artificial Sequence
  Description of Artificial Sequence: Synthetic oligonucleotide
gccagaacacgaugugugu

SEQ ID NO: 933044 - RNA, 19 nt, Artificial Sequence
  Description of Artificial Sequence: Synthetic oligonucleotide
gcgggaggagcgaauacaa

SEQ ID NO: 933045 - RNA, 19 nt, Artificial Sequence
  Description of Artificial Sequence: Synthetic oligonucleotide
uggcagcuacugugaccaa

SEQ ID NO: 933046 - RNA, 19 nt, Artificial Sequence
  Description of Artificial Sequence: Synthetic oligonucleotide
gggucacuacagagcuagg

SEQ ID NO: 933047 - RNA, 19 nt, Artificial Sequence
  Description of Artificial Sequence: Synthetic oligonucleotide
gggacacauagagggaugu

SEQ ID NO: 933048 - RNA, 19 nt, Artificial Sequence
  Description of Artificial Sequence: Synthetic oligonucleotide
cucacaccuguagugcccu

SEQ ID NO: 933049 - RNA, 19 nt, Artificial Sequence
  Description of Artificial Sequence: Synthetic oligonucleotide
gggcccaccuaugcugcag

SEQ ID NO: 933050 - RNA, 19 nt, Artificial Sequence
  Description of Artificial Sequence: Synthetic oligonucleotide
ggccccaaacugucgccuc

SEQ ID NO: 933051 - RNA, 19 nt, Artificial Sequence
  Description of Artificial Sequence: Synthetic oligonucleotide
ggugcccgggugcugccuc

SEQ ID NO: 933052 - RNA, 19 nt, Artificial Sequence
  Description of Artificial Sequence: Synthetic oligonucleotide
gccccaguuggaacuuuug

SEQ ID NO: 933053 - RNA, 19 nt, Artificial Sequence
  Description of Artificial Sequence: Synthetic oligonucleotide
ugcccgggugcugccucca

SEQ ID NO: 933054 - RNA, 19 nt, Artificial Sequence
  Description of Artificial Sequence: Synthetic oligonucleotide
ggagcggggaggugcccca

SEQ ID NO: 933055 - RNA, 19 nt, Artificial Sequence
  Description of Artificial Sequence: Synthetic oligonucleotide
ccagacaaagagggcccac

SEQ ID NO: 933056 - RNA, 19 nt, Artificial Sequence
  Description of Artificial Sequence: Synthetic oligonucleotide
cuuguacagccaagacuuu

SEQ ID NO: 933057 - RNA, 19 nt, Artificial Sequence
  Description of Artificial Sequence: Synthetic oligonucleotide
ccguggccccaaacugucg

SEQ ID NO: 933058 - RNA, 19 nt, Artificial Sequence
  Description of Artificial Sequence: Synthetic oligonucleotide
cgaauacaaagccacgaau

SEQ ID NO: 933059 - RNA, 19 nt, Artificial Sequence
  Description of Artificial Sequence: Synthetic oligonucleotide
caggagcggggaggugccc

SEQ ID NO: 933060 - RNA, 19 nt, Artificial Sequence
  Description of Artificial Sequence: Synthetic oligonucleotide
gcuaggguggcagaauguu

SEQ ID NO: 933061 - RNA, 19 nt, Artificial Sequence
  Description of Artificial Sequence: Synthetic oligonucleotide
caggccuaucacaccuggu

SEQ ID NO: 933062 - RNA, 19 nt, Artificial Sequence
  Description of Artificial Sequence: Synthetic oligonucleotide
cuacacccagggguaugaa

SEQ ID NO: 933063 - RNA, 19 nt, Artificial Sequence
  Description of Artificial Sequence: Synthetic oligonucleotide
ccuuaugcgggaggagcga

SEQ ID NO: 933064 - RNA, 19 nt, Artificial Sequence
  Description of Artificial Sequence: Synthetic oligonucleotide
ggcuacagacaaucuucuu

SEQ ID NO: 933065 - RNA, 19 nt, Artificial Sequence
  Description of Artificial Sequence: Synthetic oligonucleotide
ggccaacacauuggggagu

SEQ ID NO: 933066 - RNA, 19 nt, Artificial Sequence
  Description of Artificial Sequence: Synthetic oligonucleotide
gggccagugcauggguccu

SEQ ID NO: 933067 - RNA, 19 nt, Artificial Sequence
  Description of Artificial Sequence: Synthetic oligonucleotide
gcggggaggugccccaguu

SEQ ID NO: 933068 - RNA, 19 nt, Artificial Sequence
  Description of Artificial Sequence: Synthetic oligonucleotide
caacaccaccaggguaguu

SEQ ID NO: 933069 - RNA, 19 nt, Artificial Sequence
  Description of Artificial Sequence: Synthetic oligonucleotide
gcguagccuguagguugaa

SEQ ID NO: 933070 - RNA, 19 nt, Artificial Sequence
  Description of Artificial Sequence: Synthetic oligonucleotide
ccacuacacccagggguau

SEQ ID NO: 933071 - RNA, 19 nt, Artificial Sequence
  Description of Artificial Sequence: Synthetic oligonucleotide
acaacauuggccuugaugg

SEQ ID NO: 933072 - RNA, 19 nt, Artificial Sequence
  Description of Artificial Sequence: Synthetic oligonucleotide
aguaaaacuaucuccaucg

SEQ ID NO: 933073 - RNA, 19 nt, Artificial Sequence
  Description of Artificial Sequence: Synthetic oligonucleotide
ucugcaaacacaaugcagg

SEQ ID NO: 933074 - RNA, 19 nt, Artificial Sequence
  Description of Artificial Sequence: Synthetic oligonucleotide
aucauauagcaauuuaccc

SEQ ID NO: 933075 - RNA, 19 nt, Artificial Sequence
  Description of Artificial Sequence: Synthetic oligonucleotide
aauuuacccacacuacccc

SEQ ID NO: 933076 - RNA, 19 nt, Artificial Sequence
  Description of Artificial Sequence: Synthetic oligonucleotide
auaaauugacuccucaacg

SEQ ID NO: 933077 - RNA, 19 nt, Artificial Sequence
  Description of Artificial Sequence: Synthetic oligonucleotide
aaacucaucauaaauugac

SEQ ID NO: 933078 - RNA, 19 nt, Artificial Sequence
  Description of Artificial Sequence: Synthetic oligonucleotide
uuaugugcaaacucaacgg

SEQ ID NO: 933079 - RNA, 19 nt, Artificial Sequence
  Description of Artificial Sequence: Synthetic oligonucleotide
aaugcaggggcucuuuccc

SEQ ID NO: 933080 - RNA, 19 nt, Artificial Sequence
  Description of Artificial Sequence: Synthetic oligonucleotide
ucaacgaaaagccuggaug

SEQ ID NO: 933081 - RNA, 19 nt, Artificial Sequence
  Description of Artificial Sequence: Synthetic oligonucleotide
aauucaaggagggacagag

SEQ ID NO: 933082 - RNA, 19 nt, Artificial Sequence
  Description of Artificial Sequence: Synthetic oligonucleotide
aaacucaacggcugugucc

SEQ ID NO: 933083 - RNA, 19 nt, Artificial Sequence
  Description of Artificial Sequence: Synthetic oligonucleotide
ucauauagcaauuuaccca

SEQ ID NO: 933084 - RNA, 19 nt, Artificial Sequence
  Description of Artificial Sequence: Synthetic oligonucleotide
gaacgcauuucuuagcucg

SEQ ID NO: 933085 - RNA, 19 nt, Artificial Sequence
  Description of Artificial Sequence: Synthetic oligonucleotide
ucuuguguaaguaaaacua

SEQ ID NO: 933086 - RNA, 19 nt, Artificial Sequence
  Description of Artificial Sequence: Synthetic oligonucleotide
aaguaaaacuaucuccauc

SEQ ID NO: 933087 - RNA, 19 nt, Artificial Sequence
  Description of Artificial Sequence: Synthetic oligonucleotide
cagaggauuuccaagaacg

SEQ ID NO: 933088 - RNA, 19 nt, Artificial Sequence
  Description of Artificial Sequence: Synthetic oligonucleotide
aucaucuagggauuuaaac

SEQ ID NO: 933089 - RNA, 19 nt, Artificial Sequence
  Description of Artificial Sequence: Synthetic oligonucleotide
augauaacugucuugagcu

SEQ ID NO: 933090 - RNA, 19 nt, Artificial Sequence
  Description of Artificial Sequence: Synthetic oligonucleotide
ugaucuguugcacuggucc

SEQ ID NO: 933091 - RNA, 19 nt, Artificial Sequence
  Description of Artificial Sequence: Synthetic oligonucleotide
agagauaaaggaaaacacc

SEQ ID NO: 933092 - RNA, 19 nt, Artificial Sequence
  Description of Artificial Sequence: Synthetic oligonucleotide
aaagcuuaaaucacaagug

SEQ ID NO: 933093 - RNA, 19 nt, Artificial Sequence
  Description of Artificial Sequence: Synthetic oligonucleotide
acucaucauaaauugacuc

SEQ ID NO: 933094 - RNA, 19 nt, Artificial Sequence
  Description of Artificial Sequence: Synthetic oligonucleotide
uuuauuaaagaugccaugu

SEQ ID NO: 933095 - RNA, 19 nt, Artificial Sequence
  Description of Artificial Sequence: Synthetic oligonucleotide
agaacaccccauuaugugc

SEQ ID NO: 933096 - RNA, 19 nt, Artificial Sequence
  Description of Artificial Sequence: Synthetic oligonucleotide
cauauagcaauuuacccac

SEQ ID NO: 933097 - RNA, 19 nt, Artificial Sequence
  Description of Artificial Sequence: Synthetic oligonucleotide
acaauuacgguguucccac

SEQ ID NO: 933098 - RNA, 19 nt, Artificial Sequence
  Description of Artificial Sequence: Synthetic oligonucleotide
cauauggaguaauucaagg

SEQ ID NO: 933099 - RNA, 19 nt, Artificial Sequence
  Description of Artificial Sequence: Synthetic oligonucleotide
uguuuacuacgccaggagg

SEQ ID NO: 933100 - RNA, 19 nt, Artificial Sequence
  Description of Artificial Sequence: Synthetic oligonucleotide
uccauaugagaggagaugg

SEQ ID NO: 933101 - RNA, 19 nt, Artificial Sequence
  Description of Artificial Sequence: Synthetic oligonucleotide
ucaacaucugccuuguccc

SEQ ID NO: 933102 - RNA, 19 nt, Artificial Sequence
  Description of Artificial Sequence: Synthetic oligonucleotide
ugguuugacaauuacggug

SEQ ID NO: 933103 - RNA, 19 nt, Artificial Sequence
  Description of Artificial Sequence: Synthetic oligonucleotide
uuuuauuaaagaugccaug

SEQ ID NO: 933104 - RNA, 19 nt, Artificial Sequence
  Description of Artificial Sequence: Synthetic oligonucleotide
uugacaauuacgguguucc

SEQ ID NO: 933105 - RNA, 19 nt, Artificial Sequence
  Description of Artificial Sequence: Synthetic oligonucleotide
ugauuaauuugccaaccug

SEQ ID NO: 933106 - RNA, 19 nt, Artificial Sequence
  Description of Artificial Sequence: Synthetic oligonucleotide
uaaauugacuccucaacga

SEQ ID NO: 933107 - RNA, 19 nt, Artificial Sequence
  Description of Artificial Sequence: Synthetic oligonucleotide
aauugguucacgucuugug

SEQ ID NO: 933108 - RNA, 19 nt, Artificial Sequence
  Description of Artificial Sequence: Synthetic oligonucleotide
cauuggagaacacuguggg

SEQ ID NO: 933109 - RNA, 19 nt, Artificial Sequence
  Description of Artificial Sequence: Synthetic oligonucleotide
uugaccauggaccuugucu

SEQ ID NO: 933110 - RNA, 19 nt, Artificial Sequence
  Description of Artificial Sequence: Synthetic oligonucleotide
uucaugauaacugucuuga

SEQ ID NO: 933111 - RNA, 19 nt, Artificial Sequence
  Description of Artificial Sequence: Synthetic oligonucleotide
uuugucaacaucugccuug

SEQ ID NO: 933112 - RNA, 19 nt, Artificial Sequence
  Description of Artificial Sequence: Synthetic oligonucleotide
aauuacgguguucccacag

SEQ ID NO: 933113 - RNA, 19 nt, Artificial Sequence
  Description of Artificial Sequence: Synthetic oligonucleotide
caacgaaaagccuggaugc

SEQ ID NO: 933114 - RNA, 19 nt, Artificial Sequence
  Description of Artificial Sequence: Synthetic oligonucleotide
ugcugguuugacaauuacg

SEQ ID NO: 933115 - RNA, 19 nt, Artificial Sequence
  Description of Artificial Sequence: Synthetic oligonucleotide
uuuaugugugacauuaaua

SEQ ID NO: 933116 - RNA, 19 nt, Artificial Sequence
  Description of Artificial Sequence: Synthetic oligonucleotide
uuaaacuucaugaucuguu

SEQ ID NO: 933117 - RNA, 19 nt, Artificial Sequence
  Description of Artificial Sequence: Synthetic oligonucleotide
uuugauuaauuugccaacc

SEQ ID NO: 933118 - RNA, 19 nt, Artificial Sequence
  Description of Artificial Sequence: Synthetic oligonucleotide
uaauuugccaaccuguguu

SEQ ID NO: 933119 - RNA, 19 nt, Artificial Sequence
  Description of Artificial Sequence: Synthetic oligonucleotide
uccauaaccagggacaaug

SEQ ID NO: 933120 - RNA, 19 nt, Artificial Sequence
  Description of Artificial Sequence: Synthetic oligonucleotide
uccucaacgaaaagccugg

SEQ ID NO: 933121 - RNA, 19 nt, Artificial Sequence
  Description of Artificial Sequence: Synthetic oligonucleotide
cauccuuuuagucuagggc

SEQ ID NO: 933122 - RNA, 19 nt, Artificial Sequence
  Description of Artificial Sequence: Synthetic oligonucleotide
ugcucucuugaucacauca

SEQ ID NO: 933123 - RNA, 19 nt, Artificial Sequence
  Description of Artificial Sequence: Synthetic oligonucleotide
agucagaggaguuugcucu

SEQ ID NO: 933124 - RNA, 19 nt, Artificial Sequence
  Description of Artificial Sequence: Synthetic oligonucleotide
aaucugagggccuugguuu

SEQ ID NO: 933125 - RNA, 19 nt, Artificial Sequence
  Description of Artificial Sequence: Synthetic oligonucleotide
uguguugaucccguaaagg

SEQ ID NO: 933126 - RNA, 19 nt, Artificial Sequence
  Description of Artificial Sequence: Synthetic oligonucleotide
uaaaacuaucuccaucgcu

SEQ ID NO: 933127 - RNA, 19 nt, Artificial Sequence
  Description of Artificial Sequence: Synthetic oligonucleotide
ccucuuuuauuaaagaugc

SEQ ID NO: 933128 - RNA, 19 nt, Artificial Sequence
  Description of Artificial Sequence: Synthetic oligonucleotide
caaguauuuucucauguug

SEQ ID NO: 933129 - RNA, 19 nt, Artificial Sequence
  Description of Artificial Sequence: Synthetic oligonucleotide
uagggauuuaaacuucaug

SEQ ID NO: 933130 - RNA, 19 nt, Artificial Sequence
  Description of Artificial Sequence: Synthetic oligonucleotide
aaaacuaucuccaucgcuu

SEQ ID NO: 933131 - RNA, 19 nt, Artificial Sequence
  Description of Artificial Sequence: Synthetic oligonucleotide
ugaccauggaccuugucug

SEQ ID NO: 933132 - RNA, 19 nt, Artificial Sequence
  Description of Artificial Sequence: Synthetic oligonucleotide
cuuucguaaagacuccugc

SEQ ID NO: 933133 - RNA, 19 nt, Artificial Sequence
  Description of Artificial Sequence: Synthetic oligonucleotide
auauggaguaauucaagga

SEQ ID NO: 933134 - RNA, 19 nt, Artificial Sequence
  Description of Artificial Sequence: Synthetic oligonucleotide
aaagacuccugcugcuagg

SEQ ID NO: 933135 - RNA, 19 nt, Artificial Sequence
  Description of Artificial Sequence: Synthetic oligonucleotide
uaaagagcagucagaggag

SEQ ID NO: 933136 - RNA, 19 nt, Artificial Sequence
  Description of Artificial Sequence: Synthetic oligonucleotide
auuacgguguucccacagc

SEQ ID NO: 933137 - RNA, 19 nt, Artificial Sequence
  Description of Artificial Sequence: Synthetic oligonucleotide
gcugguuugacaauuacgg

SEQ ID NO: 933138 - RNA, 19 nt, Artificial Sequence
  Description of Artificial Sequence: Synthetic oligonucleotide
gacuccucaacgaaaagcc

SEQ ID NO: 933139 - RNA, 19 nt, Artificial Sequence
  Description of Artificial Sequence: Synthetic oligonucleotide
gucgauguccauaugagag

SEQ ID NO: 933140 - RNA, 19 nt, Artificial Sequence
  Description of Artificial Sequence: Synthetic oligonucleotide
aaauugacuccucaacgaa

SEQ ID NO: 933141 - RNA, 19 nt, Artificial Sequence
  Description of Artificial Sequence: Synthetic oligonucleotide
ugguccauaaccagggaca

SEQ ID NO: 933142 - RNA, 19 nt, Artificial Sequence
  Description of Artificial Sequence: Synthetic oligonucleotide
ucguaaagacuccugcugc

SEQ ID NO: 933143 - RNA, 19 nt, Artificial Sequence
  Description of Artificial Sequence: Synthetic oligonucleotide
caaugggaaauuccaaggg

SEQ ID NO: 933144 - RNA, 19 nt, Artificial Sequence
  Description of Artificial Sequence: Synthetic oligonucleotide
aucaaguauuuucucaugu

SEQ ID NO: 933145 - RNA, 19 nt, Artificial Sequence
  Description of Artificial Sequence: Synthetic oligonucleotide
uaaagacuccugcugcuag

SEQ ID NO: 933146 - RNA, 19 nt, Artificial Sequence
  Description of Artificial Sequence: Synthetic oligonucleotide
ucgauguccauaugagagg

SEQ ID NO: 933147 - RNA, 19 nt, Artificial Sequence
  Description of Artificial Sequence: Synthetic oligonucleotide
auuguuugaccauggaccu

SEQ ID NO: 933148 - RNA, 19 nt, Artificial Sequence
  Description of Artificial Sequence: Synthetic oligonucleotide
gucaacaucugccuugucc

SEQ ID NO: 933149 - RNA, 19 nt, Artificial Sequence
  Description of Artificial Sequence: Synthetic oligonucleotide
uugaugguagaacacccca

SEQ ID NO: 933150 - RNA, 19 nt, Artificial Sequence
  Description of Artificial Sequence: Synthetic oligonucleotide
guguugaucccguaaaggc

SEQ ID NO: 933151 - RNA, 19 nt, Artificial Sequence
  Description of Artificial Sequence: Synthetic oligonucleotide
uauagcaauuuacccacac

SEQ ID NO: 933152 - RNA, 19 nt, Artificial Sequence
  Description of Artificial Sequence: Synthetic oligonucleotide
aaacuaucuccaucgcuug

SEQ ID NO: 933153 - RNA, 19 nt, Artificial Sequence
  Description of Artificial Sequence: Synthetic oligonucleotide
gauugcuuuucccugcagc

SEQ ID NO: 933154 - RNA, 19 nt, Artificial Sequence
  Description of Artificial Sequence: Synthetic oligonucleotide
auuccaagggaugauuugg

SEQ ID NO: 933155 - RNA, 19 nt, Artificial Sequence
  Description of Artificial Sequence: Synthetic oligonucleotide
gaugauuuggccacacacc

SEQ ID NO: 933156 - RNA, 19 nt, Artificial Sequence
  Description of Artificial Sequence: Synthetic oligonucleotide
uagaacaccccauuaugug

SEQ ID NO: 933157 - RNA, 19 nt, Artificial Sequence
  Description of Artificial Sequence: Synthetic oligonucleotide
ucuagggauuuaaacuuca

SEQ ID NO: 933158 - RNA, 19 nt, Artificial Sequence
  Description of Artificial Sequence: Synthetic oligonucleotide
aagacuccugcugcuaggc

SEQ ID NO: 933159 - RNA, 19 nt, Artificial Sequence
  Description of Artificial Sequence: Synthetic oligonucleotide
aacuaucuccaucgcuugg

SEQ ID NO: 933160 - RNA, 19 nt, Artificial Sequence
  Description of Artificial Sequence: Synthetic oligonucleotide
ugguauuguuugaccaugg

SEQ ID NO: 933161 - RNA, 19 nt, Artificial Sequence
  Description of Artificial Sequence: Synthetic oligonucleotide
uugauuaauuugccaaccu

SEQ ID NO: 933162 - RNA, 19 nt, Artificial Sequence
  Description of Artificial Sequence: Synthetic oligonucleotide
agaucaaguauuuucucau

SEQ ID NO: 933163 - RNA, 19 nt, Artificial Sequence
  Description of Artificial Sequence: Synthetic oligonucleotide
uguuugaccauggaccuug

SEQ ID NO: 933164 - RNA, 19 nt, Artificial Sequence
  Description of Artificial Sequence: Synthetic oligonucleotide
gagaucaaguauuuucuca

SEQ ID NO: 933165 - RNA, 19 nt, Artificial Sequence
  Description of Artificial Sequence: Synthetic oligonucleotide
uuacgguguucccacagcc

SEQ ID NO: 933166 - RNA, 19 nt, Artificial Sequence
  Description of Artificial Sequence: Synthetic oligonucleotide
aacccugccucuuuuauua

SEQ ID NO: 933167 - RNA, 19 nt, Artificial Sequence
  Description of Artificial Sequence: Synthetic oligonucleotide
uuauuaaagaugccaugua

SEQ ID NO: 933168 - RNA, 19 nt, Artificial Sequence
  Description of Artificial Sequence: Synthetic oligonucleotide
caagggaugauuuggccac

SEQ ID NO: 933169 - RNA, 19 nt, Artificial Sequence
  Description of Artificial Sequence: Synthetic oligonucleotide
uguuguuccuugucaaucu

SEQ ID NO: 933170 - RNA, 19 nt, Artificial Sequence
  Description of Artificial Sequence: Synthetic oligonucleotide
ucuuagcucgcucaacacu

SEQ ID NO: 933171 - RNA, 19 nt, Artificial Sequence
  Description of Artificial Sequence: Synthetic oligonucleotide
uaaccagggacaauguuua

SEQ ID NO: 933172 - RNA, 19 nt, Artificial Sequence
  Description of Artificial Sequence: Synthetic oligonucleotide
agagggacaaagcuuaaau

SEQ ID NO: 933173 - RNA, 19 nt, Artificial Sequence
  Description of Artificial Sequence: Synthetic oligonucleotide
auugguucacgucuugugu

SEQ ID NO: 933174 - RNA, 19 nt, Artificial Sequence
  Description of Artificial Sequence: Synthetic oligonucleotide
aaguagcccuuguuucccc

SEQ ID NO: 933175 - RNA, 19 nt, Artificial Sequence
  Description of Artificial Sequence: Synthetic oligonucleotide
uuucguaaagacuccugcu

SEQ ID NO: 933176 - RNA, 19 nt, Artificial Sequence
  Description of Artificial Sequence: Synthetic oligonucleotide
gacagcaucauauagcaau

SEQ ID NO: 933177 - RNA, 19 nt, Artificial Sequence
  Description of Artificial Sequence: Synthetic oligonucleotide
augagcaaugggaaauucc

SEQ ID NO: 933178 - RNA, 19 nt, Artificial Sequence
  Description of Artificial Sequence: Synthetic oligonucleotide
auguuuacuacgccaggag

SEQ ID NO: 933179 - RNA, 19 nt, Artificial Sequence
  Description of Artificial Sequence: Synthetic oligonucleotide
ucuuucguaaagacuccug

SEQ ID NO: 933180 - RNA, 19 nt, Artificial Sequence
  Description of Artificial Sequence: Synthetic oligonucleotide
agagcaacucacucuguag

SEQ ID NO: 933181 - RNA, 19 nt, Artificial Sequence
  Description of Artificial Sequence: Synthetic oligonucleotide
ugcgguugguccauaacca

SEQ ID NO: 933182 - RNA, 19 nt, Artificial Sequence
  Description of Artificial Sequence: Synthetic oligonucleotide
ugggaaauuccaagggaug

SEQ ID NO: 933183 - RNA, 19 nt, Artificial Sequence
  Description of Artificial Sequence: Synthetic oligonucleotide
uuagucuagggcacgaauu

SEQ ID NO: 933184 - RNA, 19 nt, Artificial Sequence
  Description of Artificial Sequence: Synthetic oligonucleotide
ugacuccucaacgaaaagc

SEQ ID NO: 933185 - RNA, 19 nt, Artificial Sequence
  Description of Artificial Sequence: Synthetic oligonucleotide
ucccguaaaggccaccuug

SEQ ID NO: 933186 - RNA, 19 nt, Artificial Sequence
  Description of Artificial Sequence: Synthetic oligonucleotide
acaaagcuuaaaucacaag

SEQ ID NO: 933187 - RNA, 19 nt, Artificial Sequence
  Description of Artificial Sequence: Synthetic oligonucleotide
aaacacaaugcaggggcuc

SEQ ID NO: 933188 - RNA, 19 nt, Artificial Sequence
  Description of Artificial Sequence: Synthetic oligonucleotide
auagcuaguauuguuugcu

SEQ ID NO: 933189 - RNA, 19 nt, Artificial Sequence
  Description of Artificial Sequence: Synthetic oligonucleotide
cuugaugguagaacacccc

SEQ ID NO: 933190 - RNA, 19 nt, Artificial Sequence
  Description of Artificial Sequence: Synthetic oligonucleotide
uuuaaacuucaugaucugu

SEQ ID NO: 933191 - RNA, 19 nt, Artificial Sequence
  Description of Artificial Sequence: Synthetic oligonucleotide
acaagugguccuccuuacc

SEQ ID NO: 933192 - RNA, 19 nt, Artificial Sequence
  Description of Artificial Sequence: Synthetic oligonucleotide
agcaauuuacccacacuac

SEQ ID NO: 933193 - RNA, 19 nt, Artificial Sequence
  Description of Artificial Sequence: Synthetic oligonucleotide
agaggauuuccaagaacgc

SEQ ID NO: 933194 - RNA, 19 nt, Artificial Sequence
  Description of Artificial Sequence: Synthetic oligonucleotide
uugguccauaaccagggac

SEQ ID NO: 933195 - RNA, 19 nt, Artificial Sequence
  Description of Artificial Sequence: Synthetic oligonucleotide
guucagaggauuuccaaga

SEQ ID NO: 933196 - RNA, 19 nt, Artificial Sequence
  Description of Artificial Sequence: Synthetic oligonucleotide
ugugcauauggaguaauuc

SEQ ID NO: 933197 - RNA, 19 nt, Artificial Sequence
  Description of Artificial Sequence: Synthetic oligonucleotide
cacaacauuggccuugaug

SEQ ID NO: 933198 - RNA, 19 nt, Artificial Sequence
  Description of Artificial Sequence: Synthetic oligonucleotide
cugcaaacacaaugcaggg

SEQ ID NO: 933199 - RNA, 19 nt, Artificial Sequence
  Description of Artificial Sequence: Synthetic oligonucleotide
cauagcuaguauuguuugc

SEQ ID NO: 933200 - RNA, 19 nt, Artificial Sequence
  Description of Artificial Sequence: Synthetic oligonucleotide
aaucuggaaaagccugccu

SEQ ID NO: 933201 - RNA, 19 nt, Artificial Sequence
  Description of Artificial Sequence: Synthetic oligonucleotide
uuccaagggaugauuuggc

SEQ ID NO: 933202 - RNA, 19 nt, Artificial Sequence
  Description of Artificial Sequence: Synthetic oligonucleotide
aacgcauuucuuagcucgc

SEQ ID NO: 933203 - RNA, 19 nt, Artificial Sequence
  Description of Artificial Sequence: Synthetic oligonucleotide
auuaauuugccaaccugug

SEQ ID NO: 933204 - RNA, 19 nt, Artificial Sequence
  Description of Artificial Sequence: Synthetic oligonucleotide
uacuacgccaggaggaaac

SEQ ID NO: 933205 - RNA, 19 nt, Artificial Sequence
  Description of Artificial Sequence: Synthetic oligonucleotide
gcugcuaggccauagcuag

SEQ ID NO: 933206 - RNA, 19 nt, Artificial Sequence
  Description of Artificial Sequence: Synthetic oligonucleotide
augagaucaaguauuuucu

SEQ ID NO: 933207 - RNA, 19 nt, Artificial Sequence
  Description of Artificial Sequence: Synthetic oligonucleotide
aguaauucaaggagggaca

SEQ ID NO: 933208 - RNA, 19 nt, Artificial Sequence
  Description of Artificial Sequence: Synthetic oligonucleotide
uugguauuguuugaccaug

SEQ ID NO: 933209 - RNA, 19 nt, Artificial Sequence
  Description of Artificial Sequence: Synthetic oligonucleotide
uccuuuuagucuagggcac

SEQ ID NO: 933210 - RNA, 19 nt, Artificial Sequence
  Description of Artificial Sequence: Synthetic oligonucleotide
auagcaauuuacccacacu

SEQ ID NO: 933211 - RNA, 19 nt, Artificial Sequence
  Description of Artificial Sequence: Synthetic oligonucleotide
gauaacugucuugagcuca

SEQ ID NO: 933212 - RNA, 19 nt, Artificial Sequence
  Description of Artificial Sequence: Synthetic oligonucleotide
guauuguuugcucucuuga

SEQ ID NO: 933213 - RNA, 19 nt, Artificial Sequence
  Description of Artificial Sequence: Synthetic oligonucleotide
uccuugucaaucugagggc

SEQ ID NO: 933214 - RNA, 19 nt, Artificial Sequence
  Description of Artificial Sequence: Synthetic oligonucleotide
gguagaacaccccauuaug

SEQ ID NO: 933215 - RNA, 19 nt, Artificial Sequence
  Description of Artificial Sequence: Synthetic oligonucleotide
ggauuuaaacuucaugauc

SEQ ID NO: 933216 - RNA, 19 nt, Artificial Sequence
  Description of Artificial Sequence: Synthetic oligonucleotide
agcuaguauuguuugcucu

SEQ ID NO: 933217 - RNA, 19 nt, Artificial Sequence
  Description of Artificial Sequence: Synthetic oligonucleotide
ugagaucaaguauuuucuc

SEQ ID NO: 933218 - RNA, 19 nt, Artificial Sequence
  Description of Artificial Sequence: Synthetic oligonucleotide
ugguagaacaccccauuau

SEQ ID NO: 933219 - RNA, 19 nt, Artificial Sequence
  Description of Artificial Sequence: Synthetic oligonucleotide
uuguuccuugucaaucuga

SEQ ID NO: 933220 - RNA, 19 nt, Artificial Sequence
  Description of Artificial Sequence: Synthetic oligonucleotide
ggaugauuuggccacacac

SEQ ID NO: 933221 - RNA, 19 nt, Artificial Sequence
  Description of Artificial Sequence: Synthetic oligonucleotide
uccaagggaugauuuggcc

SEQ ID NO: 933222 - RNA, 19 nt, Artificial Sequence
  Description of Artificial Sequence: Synthetic oligonucleotide
gcaauuuacccacacuacc

SEQ ID NO: 933223 - RNA, 19 nt, Artificial Sequence
  Description of Artificial Sequence: Synthetic oligonucleotide
uacgccaggaggaaacccu

SEQ ID NO: 933224 - RNA, 19 nt, Artificial Sequence
  Description of Artificial Sequence: Synthetic oligonucleotide
ucacaagugguccuccuua

SEQ ID NO: 933225 - RNA, 19 nt, Artificial Sequence
  Description of Artificial Sequence: Synthetic oligonucleotide
ucaugauaacugucuugag

SEQ ID NO: 933226 - RNA, 19 nt, Artificial Sequence
  Description of Artificial Sequence: Synthetic oligonucleotide
ucaugaucuguugcacugg

SEQ ID NO: 933227 - RNA, 19 nt, Artificial Sequence
  Description of Artificial Sequence: Synthetic oligonucleotide
uucccacucucaaugagau

SEQ ID NO: 933228 - RNA, 19 nt, Artificial Sequence
  Description of Artificial Sequence: Synthetic oligonucleotide
aaccagggacaauguuuac

SEQ ID NO: 933229 - RNA, 19 nt, Artificial Sequence
  Description of Artificial Sequence: Synthetic oligonucleotide
aaucacaagugguccuccu

SEQ ID NO: 933230 - RNA, 19 nt, Artificial Sequence
  Description of Artificial Sequence: Synthetic oligonucleotide
caauguuuacuacgccagg

SEQ ID NO: 933231 - RNA, 19 nt, Artificial Sequence
  Description of Artificial Sequence: Synthetic oligonucleotide
uucagaggauuuccaagaa

SEQ ID NO: 933232 - RNA, 19 nt, Artificial Sequence
  Description of Artificial Sequence: Synthetic oligonucleotide
acuaccccagccugcagag

SEQ ID NO: 933233 - RNA, 19 nt, Artificial Sequence
  Description of Artificial Sequence: Synthetic oligonucleotide
cucucaaugagaucaagua

SEQ ID NO: 933234 - RNA, 19 nt, Artificial Sequence
  Description of Artificial Sequence: Synthetic oligonucleotide
uguugcacugguccaaaua

SEQ ID NO: 933235 - RNA, 19 nt, Artificial Sequence
  Description of Artificial Sequence: Synthetic oligonucleotide
agugguccuccuuaccaag

SEQ ID NO: 933236 - RNA, 19 nt, Artificial Sequence
  Description of Artificial Sequence: Synthetic oligonucleotide
gacaauuacgguguuccca

SEQ ID NO: 933237 - RNA, 19 nt, Artificial Sequence
  Description of Artificial Sequence: Synthetic oligonucleotide
cauguaaagagcagucaga

SEQ ID NO: 933238 - RNA, 19 nt, Artificial Sequence
  Description of Artificial Sequence: Synthetic oligonucleotide
ucucauguuguuccuuguc

SEQ ID NO: 933239 - RNA, 19 nt, Artificial Sequence
  Description of Artificial Sequence: Synthetic oligonucleotide
guuuacuacgccaggagga

SEQ ID NO: 933240 - RNA, 19 nt, Artificial Sequence
  Description of Artificial Sequence: Synthetic oligonucleotide
auaaccagggacaauguuu

SEQ ID NO: 933241 - RNA, 19 nt, Artificial Sequence
  Description of Artificial Sequence: Synthetic oligonucleotide
aaauuccaagggaugauuu

SEQ ID NO: 933242 - RNA, 19 nt, Artificial Sequence
  Description of Artificial Sequence: Synthetic oligonucleotide
cacacuccaguuuggcucc

SEQ ID NO: 933243 - RNA, 19 nt, Artificial Sequence
  Description of Artificial Sequence: Synthetic oligonucleotide
uuagcucgcucaacacucc

SEQ ID NO: 933244 - RNA, 19 nt, Artificial Sequence
  Description of Artificial Sequence: Synthetic oligonucleotide
accccaauugguucacguc

SEQ ID NO: 933245 - RNA, 19 nt, Artificial Sequence
  Description of Artificial Sequence: Synthetic oligonucleotide
auaugagaggagauggcug

SEQ ID NO: 933246 - RNA, 19 nt, Artificial Sequence
  Description of Artificial Sequence: Synthetic oligonucleotide
aauugacuccucaacgaaa

SEQ ID NO: 933247 - RNA, 19 nt, Artificial Sequence
  Description of Artificial Sequence: Synthetic oligonucleotide
ccaagaacgcauuucuuag

SEQ ID NO: 933248 - RNA, 19 nt, Artificial Sequence
  Description of Artificial Sequence: Synthetic oligonucleotide
agggugacccucuucagau

SEQ ID NO: 933249 - RNA, 19 nt, Artificial Sequence
  Description of Artificial Sequence: Synthetic oligonucleotide
uuuacuacgccaggaggaa

SEQ ID NO: 933250 - RNA, 19 nt, Artificial Sequence
  Description of Artificial Sequence: Synthetic oligonucleotide
guugaucccguaaaggcca

SEQ ID NO: 933251 - RNA, 19 nt, Artificial Sequence
  Description of Artificial Sequence: Synthetic oligonucleotide
acccucuucagauugcuuu

SEQ ID NO: 933252 - RNA, 19 nt, Artificial Sequence
  Description of Artificial Sequence: Synthetic oligonucleotide
aucuagggauuuaaacuuc

SEQ ID NO: 933253 - RNA, 19 nt, Artificial Sequence
  Description of Artificial Sequence: Synthetic oligonucleotide
ugacaauuacgguguuccc

SEQ ID NO: 933254 - RNA, 19 nt, Artificial Sequence
  Description of Artificial Sequence: Synthetic oligonucleotide
uugguuuauuccuguguuc

SEQ ID NO: 933255 - RNA, 19 nt, Artificial Sequence
  Description of Artificial Sequence: Synthetic oligonucleotide
uugguucacgucuugugua

SEQ ID NO: 933256 - RNA, 19 nt, Artificial Sequence
  Description of Artificial Sequence: Synthetic oligonucleotide
ccauguaaagagcagucag

SEQ ID NO: 933257 - RNA, 19 nt, Artificial Sequence
  Description of Artificial Sequence: Synthetic oligonucleotide
gaggauuuccaagaacgca

SEQ ID NO: 933258 - RNA, 19 nt, Artificial Sequence
  Description of Artificial Sequence: Synthetic oligonucleotide
ccaaguuccagggugaccc

SEQ ID NO: 933259 - RNA, 19 nt, Artificial Sequence
  Description of Artificial Sequence: Synthetic oligonucleotide
aggauuuccaagaacgcau

SEQ ID NO: 933260 - RNA, 19 nt, Artificial Sequence
  Description of Artificial Sequence: Synthetic oligonucleotide
gggccuaucuuccaaauga

SEQ ID NO: 933261 - RNA, 19 nt, Artificial Sequence
  Description of Artificial Sequence: Synthetic oligonucleotide
aucuccaucgcuugguauu

SEQ ID NO: 933262 - RNA, 19 nt, Artificial Sequence
  Description of Artificial Sequence: Synthetic oligonucleotide
acuacgccaggaggaaacc

SEQ ID NO: 933263 - RNA, 19 nt, Artificial Sequence
  Description of Artificial Sequence: Synthetic oligonucleotide
agcccuuguuuccccagcg

SEQ ID NO: 933264 - RNA, 19 nt, Artificial Sequence
  Description of Artificial Sequence: Synthetic oligonucleotide
aacgaaaagccuggaugcu

SEQ ID NO: 933265 - RNA, 19 nt, Artificial Sequence
  Description of Artificial Sequence: Synthetic oligonucleotide
ggugacccucuucagauug

SEQ ID NO: 933266 - RNA, 19 nt, Artificial Sequence
  Description of Artificial Sequence: Synthetic oligonucleotide
ucacgucuuguguaaguaa

SEQ ID NO: 933267 - RNA, 19 nt, Artificial Sequence
  Description of Artificial Sequence: Synthetic oligonucleotide
aaacccugccucuuuuauu

SEQ ID NO: 933268 - RNA, 19 nt, Artificial Sequence
  Description of Artificial Sequence: Synthetic oligonucleotide
auugacuccucaacgaaaa

SEQ ID NO: 933269 - RNA, 19 nt, Artificial Sequence
  Description of Artificial Sequence: Synthetic oligonucleotide
gggacaauguuuacuacgc

SEQ ID NO: 933270 - RNA, 19 nt, Artificial Sequence
  Description of Artificial Sequence: Synthetic oligonucleotide
uacgguguucccacagcca

SEQ ID NO: 933271 - RNA, 19 nt, Artificial Sequence
  Description of Artificial Sequence: Synthetic oligonucleotide
guuguuccuugucaaucug

SEQ ID NO: 933272 - RNA, 19 nt, Artificial Sequence
  Description of Artificial Sequence: Synthetic oligonucleotide
cuguguugaucccguaaag

SEQ ID NO: 933273 - RNA, 19 nt, Artificial Sequence
  Description of Artificial Sequence: Synthetic oligonucleotide
gaacaccccauuaugugca

SEQ ID NO: 933274 - RNA, 19 nt, Artificial Sequence
  Description of Artificial Sequence: Synthetic oligonucleotide
cacacaccccaauugguuc

SEQ ID NO: 933275 - RNA, 19 nt, Artificial Sequence
  Description of Artificial Sequence: Synthetic oligonucleotide
ugauaacugucuugagcuc

SEQ ID NO: 933276 - RNA, 19 nt, Artificial Sequence
  Description of Artificial Sequence: Synthetic oligonucleotide
acauuggccuugaugguag

SEQ ID NO: 933277 - RNA, 19 nt, Artificial Sequence
  Description of Artificial Sequence: Synthetic oligonucleotide
aaguuccagggugacccuc

SEQ ID NO: 933278 - RNA, 19 nt, Artificial Sequence
  Description of Artificial Sequence: Synthetic oligonucleotide
ucuccaucgcuugguauug

SEQ ID NO: 933279 - RNA, 19 nt, Artificial Sequence
  Description of Artificial Sequence: Synthetic oligonucleotide
cuaucuuccaaaugaacau

SEQ ID NO: 933280 - RNA, 19 nt, Artificial Sequence
  Description of Artificial Sequence: Synthetic oligonucleotide
ucugcugguuugacaauua

SEQ ID NO: 933281 - RNA, 19 nt, Artificial Sequence
  Description of Artificial Sequence: Synthetic oligonucleotide
ugcugcuaggccauagcua

SEQ ID NO: 933282 - RNA, 19 nt, Artificial Sequence
  Description of Artificial Sequence: Synthetic oligonucleotide
guugcacugguccaaauau

SEQ ID NO: 933283 - RNA, 19 nt, Artificial Sequence
  Description of Artificial Sequence: Synthetic oligonucleotide
ucgcucaacacuccuucuc

SEQ ID NO: 933284 - RNA, 19 nt, Artificial Sequence
  Description of Artificial Sequence: Synthetic oligonucleotide
augggaaauuccaagggau

SEQ ID NO: 933285 - RNA, 19 nt, Artificial Sequence
  Description of Artificial Sequence: Synthetic oligonucleotide
acuaucuccaucgcuuggu

SEQ ID NO: 933286 - RNA, 19 nt, Artificial Sequence
  Description of Artificial Sequence: Synthetic oligonucleotide
uuugacaauuacgguguuc

SEQ ID NO: 933287 - RNA, 19 nt, Artificial Sequence
  Description of Artificial Sequence: Synthetic oligonucleotide
uagcuaguauuguuugcuc

SEQ ID NO: 933288 - RNA, 19 nt, Artificial Sequence
  Description of Artificial Sequence: Synthetic oligonucleotide
ugguucacgucuuguguaa

SEQ ID NO: 933289 - RNA, 19 nt, Artificial Sequence
  Description of Artificial Sequence: Synthetic oligonucleotide
ggccacacaccccaauugg

SEQ ID NO: 933290 - RNA, 19 nt, Artificial Sequence
  Description of Artificial Sequence: Synthetic oligonucleotide
aucgcuugguauuguuuga

SEQ ID NO: 933291 - RNA, 19 nt, Artificial Sequence
  Description of Artificial Sequence: Synthetic oligonucleotide
gagcagucagaggaguuug

SEQ ID NO: 933292 - RNA, 19 nt, Artificial Sequence
  Description of Artificial Sequence: Synthetic oligonucleotide
guccauaugagaggagaug

SEQ ID NO: 933293 - RNA, 19 nt, Artificial Sequence
  Description of Artificial Sequence: Synthetic oligonucleotide
ugagaggagauggcugccc

SEQ ID NO: 933294 - RNA, 19 nt, Artificial Sequence
  Description of Artificial Sequence: Synthetic oligonucleotide
uucucauguuguuccuugu

SEQ ID NO: 933295 - RNA, 19 nt, Artificial Sequence
  Description of Artificial Sequence: Synthetic oligonucleotide
cuucccacucucaaugaga

SEQ ID NO: 933296 - RNA, 19 nt, Artificial Sequence
  Description of Artificial Sequence: Synthetic oligonucleotide
ugcaaacucaacggcugug

SEQ ID NO: 933297 - RNA, 19 nt, Artificial Sequence
  Description of Artificial Sequence: Synthetic oligonucleotide
acaucaucuagggauuuaa

SEQ ID NO: 933298 - RNA, 19 nt, Artificial Sequence
  Description of Artificial Sequence: Synthetic oligonucleotide
uucacgucuuguguaagua

SEQ ID NO: 933299 - RNA, 19 nt, Artificial Sequence
  Description of Artificial Sequence: Synthetic oligonucleotide
cacaagugguccuccuuac

SEQ ID NO: 933300 - RNA, 19 nt, Artificial Sequence
  Description of Artificial Sequence: Synthetic oligonucleotide
acgaaaagccuggaugcug

SEQ ID NO: 933301 - RNA, 19 nt, Artificial Sequence
  Description of Artificial Sequence: Synthetic oligonucleotide
uugugcauauggaguaauu

SEQ ID NO: 933302 - RNA, 19 nt, Artificial Sequence
  Description of Artificial Sequence: Synthetic oligonucleotide
cacgucuuguguaaguaaa

SEQ ID NO: 933303 - RNA, 19 nt, Artificial Sequence
  Description of Artificial Sequence: Synthetic oligonucleotide
augugcaaacucaacggcu

SEQ ID NO: 933304 - RNA, 19 nt, Artificial Sequence
  Description of Artificial Sequence: Synthetic oligonucleotide
caucuagggauuuaaacuu

SEQ ID NO: 933305 - RNA, 19 nt, Artificial Sequence
  Description of Artificial Sequence: Synthetic oligonucleotide
uccuguguucagaggauuu

SEQ ID NO: 933306 - RNA, 19 nt, Artificial Sequence
  Description of Artificial Sequence: Synthetic oligonucleotide
uguuugcucucuugaucac

SEQ ID NO: 933307 - RNA, 19 nt, Artificial Sequence
  Description of Artificial Sequence: Synthetic oligonucleotide
augccauguaaagagcagu

SEQ ID NO: 933308 - RNA, 19 nt, Artificial Sequence
  Description of Artificial Sequence: Synthetic oligonucleotide
gguuuauuccuguguucag

SEQ ID NO: 933309 - RNA, 19 nt, Artificial Sequence
  Description of Artificial Sequence: Synthetic oligonucleotide
cagucagaggaguuugcuc

SEQ ID NO: 933310 - RNA, 19 nt, Artificial Sequence
  Description of Artificial Sequence: Synthetic oligonucleotide
gcuaguauuguuugcucuc

SEQ ID NO: 933311 - RNA, 19 nt, Artificial Sequence
  Description of Artificial Sequence: Synthetic oligonucleotide
uuugccaaccuguguugau

SEQ ID NO: 933312 - RNA, 19 nt, Artificial Sequence
  Description of Artificial Sequence: Synthetic oligonucleotide
uaucuccaucgcuugguau

SEQ ID NO: 933313 - RNA, 19 nt, Artificial Sequence
  Description of Artificial Sequence: Synthetic oligonucleotide
augguagaacaccccauua

SEQ ID NO: 933314 - RNA, 19 nt, Artificial Sequence
  Description of Artificial Sequence: Synthetic oligonucleotide
agauugcuuuucccugcag

SEQ ID NO: 933315 - RNA, 19 nt, Artificial Sequence
  Description of Artificial Sequence: Synthetic oligonucleotide
cccauuaugugcaaacuca

SEQ ID NO: 933316 - RNA, 19 nt, Artificial Sequence
  Description of Artificial Sequence: Synthetic oligonucleotide
ccugcuauaucaaacaggu

SEQ ID NO: 933317 - RNA, 19 nt, Artificial Sequence
  Description of Artificial Sequence: Synthetic oligonucleotide
ccauagcuaguauuguuug

SEQ ID NO: 933318 - RNA, 19 nt, Artificial Sequence
  Description of Artificial Sequence: Synthetic oligonucleotide
uaauucaaggagggacaga

SEQ ID NO: 933319 - RNA, 19 nt, Artificial Sequence
  Description of Artificial Sequence: Synthetic oligonucleotide
cucacaaacucaucauaaa

SEQ ID NO: 933320 - RNA, 19 nt, Artificial Sequence
  Description of Artificial Sequence: Synthetic oligonucleotide
gauguccauaugagaggag

SEQ ID NO: 933321 - RNA, 19 nt, Artificial Sequence
  Description of Artificial Sequence: Synthetic oligonucleotide
gucagaggaguuugcucug

SEQ ID NO: 933322 - RNA, 19 nt, Artificial Sequence
  Description of Artificial Sequence: Synthetic oligonucleotide
uuccaagaacgcauuucuu

SEQ ID NO: 933323 - RNA, 19 nt, Artificial Sequence
  Description of Artificial Sequence: Synthetic oligonucleotide
guagcccuuguuuccccag

SEQ ID NO: 933324 - RNA, 19 nt, Artificial Sequence
  Description of Artificial Sequence: Synthetic oligonucleotide
agggaugauuuggccacac

SEQ ID NO: 933325 - RNA, 19 nt, Artificial Sequence
  Description of Artificial Sequence: Synthetic oligonucleotide
accuguguugaucccguaa

SEQ ID NO: 933326 - RNA, 19 nt, Artificial Sequence
  Description of Artificial Sequence: Synthetic oligonucleotide
gccugcuauaucaaacagg

SEQ ID NO: 933327 - RNA, 19 nt, Artificial Sequence
  Description of Artificial Sequence: Synthetic oligonucleotide
agggcggggccuaucuucc

SEQ ID NO: 933328 - RNA, 19 nt, Artificial Sequence
  Description of Artificial Sequence: Synthetic oligonucleotide
cagggacaauguuuacuac

SEQ ID NO: 933329 - RNA, 19 nt, Artificial Sequence
  Description of Artificial Sequence: Synthetic oligonucleotide
ggagccaaucuggaaaagc

SEQ ID NO: 933330 - RNA, 19 nt, Artificial Sequence
  Description of Artificial Sequence: Synthetic oligonucleotide
ucgcuugguauuguuugac

SEQ ID NO: 933331 - RNA, 19 nt, Artificial Sequence
  Description of Artificial Sequence: Synthetic oligonucleotide
auuugccaaccuguguuga

SEQ ID NO: 933332 - RNA, 19 nt, Artificial Sequence
  Description of Artificial Sequence: Synthetic oligonucleotide
uucacggcuuugucaacau

SEQ ID NO: 933333 - RNA, 19 nt, Artificial Sequence
  Description of Artificial Sequence: Synthetic oligonucleotide
ugcuaggccauagcuagua

SEQ ID NO: 933334 - RNA, 19 nt, Artificial Sequence
  Description of Artificial Sequence: Synthetic oligonucleotide
ugagggccuugguuuauuc

SEQ ID NO: 933335 - RNA, 19 nt, Artificial Sequence
  Description of Artificial Sequence: Synthetic oligonucleotide
cugcugguuugacaauuac

SEQ ID NO: 933336 - RNA, 19 nt, Artificial Sequence
  Description of Artificial Sequence: Synthetic oligonucleotide
ggacaauguuuacuacgcc

SEQ ID NO: 933337 - RNA, 19 nt, Artificial Sequence
  Description of Artificial Sequence: Synthetic oligonucleotide
caugagcaaugggaaauuc

SEQ ID NO: 933338 - RNA, 19 nt, Artificial Sequence
  Description of Artificial Sequence: Synthetic oligonucleotide
uggaccuugucugcccagc

SEQ ID NO: 933339 - RNA, 19 nt, Artificial Sequence
  Description of Artificial Sequence: Synthetic oligonucleotide
aagacacagugauggccuu

SEQ ID NO: 933340 - RNA, 19 nt, Artificial Sequence
  Description of Artificial Sequence: Synthetic oligonucleotide
ugacccucuucagauugcu

SEQ ID NO: 933341 - RNA, 19 nt, Artificial Sequence
  Description of Artificial Sequence: Synthetic oligonucleotide
uagcucgcucaacacuccu

SEQ ID NO: 933342 - RNA, 19 nt, Artificial Sequence
  Description of Artificial Sequence: Synthetic oligonucleotide
gagcagagcaacucacucu

SEQ ID NO: 933343 - RNA, 19 nt, Artificial Sequence
  Description of Artificial Sequence: Synthetic oligonucleotide
cgaaaagccuggaugcugc

SEQ ID NO: 933344 - RNA, 19 nt, Artificial Sequence
  Description of Artificial Sequence: Synthetic oligonucleotide
uugaucccguaaaggccac

SEQ ID NO: 933345 - RNA, 19 nt, Artificial Sequence
  Description of Artificial Sequence: Synthetic oligonucleotide
gguuugacaauuacggugu

SEQ ID NO: 933346 - RNA, 19 nt, Artificial Sequence
  Description of Artificial Sequence: Synthetic oligonucleotide
guagaacaccccauuaugu

SEQ ID NO: 933347 - RNA, 19 nt, Artificial Sequence
  Description of Artificial Sequence: Synthetic oligonucleotide
gggaaauuccaagggauga

SEQ ID NO: 933348 - RNA, 19 nt, Artificial Sequence
  Description of Artificial Sequence: Synthetic oligonucleotide
ccauaugagaggagauggc

SEQ ID NO: 933349 - RNA, 19 nt, Artificial Sequence
  Description of Artificial Sequence: Synthetic oligonucleotide
cuacgccaggaggaaaccc

SEQ ID NO: 933350 - RNA, 19 nt, Artificial Sequence
  Description of Artificial Sequence: Synthetic oligonucleotide
agccuggaugcugccacac

SEQ ID NO: 933351 - RNA, 19 nt, Artificial Sequence
  Description of Artificial Sequence: Synthetic oligonucleotide
cauaugagaggagauggcu

SEQ ID NO: 933352 - RNA, 19 nt, Artificial Sequence
  Description of Artificial Sequence: Synthetic oligonucleotide
gaaacccugccucuuuuau

SEQ ID NO: 933353 - RNA, 19 nt, Artificial Sequence
  Description of Artificial Sequence: Synthetic oligonucleotide
augaucuguugcacugguc

SEQ ID NO: 933354 - RNA, 19 nt, Artificial Sequence
  Description of Artificial Sequence: Synthetic oligonucleotide
agcagaagacacagugaug

SEQ ID NO: 933355 - RNA, 19 nt, Artificial Sequence
  Description of Artificial Sequence: Synthetic oligonucleotide
cuugguauuguuugaccau

SEQ ID NO: 933356 - RNA, 19 nt, Artificial Sequence
  Description of Artificial Sequence: Synthetic oligonucleotide
aagagcagucagaggaguu

SEQ ID NO: 933357 - RNA, 19 nt, Artificial Sequence
  Description of Artificial Sequence: Synthetic oligonucleotide
cuuguuuccccagcgucca

SEQ ID NO: 933358 - RNA, 19 nt, Artificial Sequence
  Description of Artificial Sequence: Synthetic oligonucleotide
ccuugucaaucugagggcc

SEQ ID NO: 933359 - RNA, 19 nt, Artificial Sequence
  Description of Artificial Sequence: Synthetic oligonucleotide
cuuuuagucuagggcacga

SEQ ID NO: 933360 - RNA, 19 nt, Artificial Sequence
  Description of Artificial Sequence: Synthetic oligonucleotide
ccaaccuguguugaucccg

SEQ ID NO: 933361 - RNA, 19 nt, Artificial Sequence
  Description of Artificial Sequence: Synthetic oligonucleotide
aagggaugauuuggccaca

SEQ ID NO: 933362 - RNA, 19 nt, Artificial Sequence
  Description of Artificial Sequence: Synthetic oligonucleotide
gggauuuaaacuucaugau

SEQ ID NO: 933363 - RNA, 19 nt, Artificial Sequence
  Description of Artificial Sequence: Synthetic oligonucleotide
gaaauuccaagggaugauu

SEQ ID NO: 933364 - RNA, 19 nt, Artificial Sequence
  Description of Artificial Sequence: Synthetic oligonucleotide
ugccccugcgguuggucca

SEQ ID NO: 933365 - RNA, 19 nt, Artificial Sequence
  Description of Artificial Sequence: Synthetic oligonucleotide
aggaaacccugccucuuuu

SEQ ID NO: 933366 - RNA, 19 nt, Artificial Sequence
  Description of Artificial Sequence: Synthetic oligonucleotide
uuacuacgccaggaggaaa

SEQ ID NO: 933367 - RNA, 19 nt, Artificial Sequence
  Description of Artificial Sequence: Synthetic oligonucleotide
aucugagggccuugguuua

SEQ ID NO: 933368 - RNA, 19 nt, Artificial Sequence
  Description of Artificial Sequence: Synthetic oligonucleotide
caccacacuccaguuuggc

SEQ ID NO: 933369 - RNA, 19 nt, Artificial Sequence
  Description of Artificial Sequence: Synthetic oligonucleotide
cacuaccccagccugcaga

SEQ ID NO: 933370 - RNA, 19 nt, Artificial Sequence
  Description of Artificial Sequence: Synthetic oligonucleotide
gcucgcucaacacuccuuc

SEQ ID NO: 933371 - RNA, 19 nt, Artificial Sequence
  Description of Artificial Sequence: Synthetic oligonucleotide
auuccuguguucagaggau

SEQ ID NO: 933372 - RNA, 19 nt, Artificial Sequence
  Description of Artificial Sequence: Synthetic oligonucleotide
gaucccguaaaggccaccu

SEQ ID NO: 933373 - RNA, 19 nt, Artificial Sequence
  Description of Artificial Sequence: Synthetic oligonucleotide
auauagcaauuuacccaca

SEQ ID NO: 933374 - RNA, 19 nt, Artificial Sequence
  Description of Artificial Sequence: Synthetic oligonucleotide
uuccuguguucagaggauu

SEQ ID NO: 933375 - RNA, 19 nt, Artificial Sequence
  Description of Artificial Sequence: Synthetic oligonucleotide
ccccauuaugugcaaacuc

SEQ ID NO: 933376 - RNA, 19 nt, Artificial Sequence
  Description of Artificial Sequence: Synthetic oligonucleotide
cugguuugacaauuacggu

SEQ ID NO: 933377 - RNA, 19 nt, Artificial Sequence
  Description of Artificial Sequence: Synthetic oligonucleotide
cauggaccuugucugccca

SEQ ID NO: 933378 - RNA, 19 nt, Artificial Sequence
  Description of Artificial Sequence: Synthetic oligonucleotide
cagagcaacucacucugua

SEQ ID NO: 933379 - RNA, 19 nt, Artificial Sequence
  Description of Artificial Sequence: Synthetic oligonucleotide
ggggccuaucuuccaaaug

SEQ ID NO: 933380 - RNA, 19 nt, Artificial Sequence
  Description of Artificial Sequence: Synthetic oligonucleotide
acgucuuguguaaguaaaa

SEQ ID NO: 933381 - RNA, 19 nt, Artificial Sequence
  Description of Artificial Sequence: Synthetic oligonucleotide
ugaucccguaaaggccacc

SEQ ID NO: 933382 - RNA, 19 nt, Artificial Sequence
  Description of Artificial Sequence: Synthetic oligonucleotide
ccuuuuagucuagggcacg

SEQ ID NO: 933383 - RNA, 19 nt, Artificial Sequence
  Description of Artificial Sequence: Synthetic oligonucleotide
acgcauuucuuagcucgcu

SEQ ID NO: 933384 - RNA, 19 nt, Artificial Sequence
  Description of Artificial Sequence: Synthetic oligonucleotide
ggaccuugucugcccagcc

SEQ ID NO: 933385 - RNA, 19 nt, Artificial Sequence
  Description of Artificial Sequence: Synthetic oligonucleotide
cugugggcuggacaaagua

SEQ ID NO: 933386 - RNA, 19 nt, Artificial Sequence
  Description of Artificial Sequence: Synthetic oligonucleotide
acacuaccccagccugcag

SEQ ID NO: 933387 - RNA, 19 nt, Artificial Sequence
  Description of Artificial Sequence: Synthetic oligonucleotide
ccauugugcauauggagua

SEQ ID NO: 933388 - RNA, 19 nt, Artificial Sequence
  Description of Artificial Sequence: Synthetic oligonucleotide
aaccuguguugaucccgua

SEQ ID NO: 933389 - RNA, 19 nt, Artificial Sequence
  Description of Artificial Sequence: Synthetic oligonucleotide
caacggcuguguccaaguc

SEQ ID NO: 933390 - RNA, 19 nt, Artificial Sequence
  Description of Artificial Sequence: Synthetic oligonucleotide
gcucaacacuccuucucac

SEQ ID NO: 933391 - RNA, 19 nt, Artificial Sequence
  Description of Artificial Sequence: Synthetic oligonucleotide
cuugucaaucugagggccu

SEQ ID NO: 933392 - RNA, 19 nt, Artificial Sequence
  Description of Artificial Sequence: Synthetic oligonucleotide
ugucaacaucugccuuguc

SEQ ID NO: 933393 - RNA, 19 nt, Artificial Sequence
  Description of Artificial Sequence: Synthetic oligonucleotide
cgucuuguguaaguaaaac

SEQ ID NO: 933394 - RNA, 19 nt, Artificial Sequence
  Description of Artificial Sequence: Synthetic oligonucleotide
caacacuccuucucacaaa

SEQ ID NO: 933395 - RNA, 19 nt, Artificial Sequence
  Description of Artificial Sequence: Synthetic oligonucleotide
acaccccaauugguucacg

SEQ ID NO: 933396 - RNA, 19 nt, Artificial Sequence
  Description of Artificial Sequence: Synthetic oligonucleotide
cccacacuaccccagccug

SEQ ID NO: 933397 - RNA, 19 nt, Artificial Sequence
  Description of Artificial Sequence: Synthetic oligonucleotide
caauuacgguguucccaca

SEQ ID NO: 933398 - RNA, 19 nt, Artificial Sequence
  Description of Artificial Sequence: Synthetic oligonucleotide
cacacuaccccagccugca

SEQ ID NO: 933399 - RNA, 19 nt, Artificial Sequence
  Description of Artificial Sequence: Synthetic oligonucleotide
caaucugagggccuugguu

SEQ ID NO: 933400 - RNA, 19 nt, Artificial Sequence
  Description of Artificial Sequence: Synthetic oligonucleotide
cccuuguuuccccagcguc

SEQ ID NO: 933401 - RNA, 19 nt, Artificial Sequence
  Description of Artificial Sequence: Synthetic oligonucleotide
acgccaggaggaaacccug

SEQ ID NO: 933402 - RNA, 19 nt, Artificial Sequence
  Description of Artificial Sequence: Synthetic oligonucleotide
cgcuugguauuguuugacc

SEQ ID NO: 933403 - RNA, 19 nt, Artificial Sequence
  Description of Artificial Sequence: Synthetic oligonucleotide
ggaguaauucaaggaggga

SEQ ID NO: 933404 - RNA, 19 nt, Artificial Sequence
  Description of Artificial Sequence: Synthetic oligonucleotide
cuaucuccaucgcuuggua

SEQ ID NO: 933405 - RNA, 19 nt, Artificial Sequence
  Description of Artificial Sequence: Synthetic oligonucleotide
gccauugugcauauggagu

SEQ ID NO: 933406 - RNA, 19 nt, Artificial Sequence
  Description of Artificial Sequence: Synthetic oligonucleotide
cauugugcauauggaguaa

SEQ ID NO: 933407 - RNA, 19 nt, Artificial Sequence
  Description of Artificial Sequence: Synthetic oligonucleotide
uuguuugaccauggaccuu

SEQ ID NO: 933408 - RNA, 19 nt, Artificial Sequence
  Description of Artificial Sequence: Synthetic oligonucleotide
auccauccuuuuagucuag

SEQ ID NO: 933409 - RNA, 19 nt, Artificial Sequence
  Description of Artificial Sequence: Synthetic oligonucleotide
cacaccccaauugguucac

SEQ ID NO: 933410 - RNA, 19 nt, Artificial Sequence
  Description of Artificial Sequence: Synthetic oligonucleotide
caaccuguguugaucccgu

SEQ ID NO: 933411 - RNA, 19 nt, Artificial Sequence
  Description of Artificial Sequence: Synthetic oligonucleotide
aucccguaaaggccaccuu

SEQ ID NO: 933412 - RNA, 19 nt, Artificial Sequence
  Description of Artificial Sequence: Synthetic oligonucleotide
cuagggauuuaaacuucau

SEQ ID NO: 933413 - RNA, 19 nt, Artificial Sequence
  Description of Artificial Sequence: Synthetic oligonucleotide
cugcugcuaggccauagcu

SEQ ID NO: 933414 - RNA, 19 nt, Artificial Sequence
  Description of Artificial Sequence: Synthetic oligonucleotide
gcaacucacucuguagcca

SEQ ID NO: 933415 - RNA, 19 nt, Artificial Sequence
  Description of Artificial Sequence: Synthetic oligonucleotide
ccacacuaccccagccugc

SEQ ID NO: 933416 - RNA, 19 nt, Artificial Sequence
  Description of Artificial Sequence: Synthetic oligonucleotide
cucaacgaaaagccuggau

SEQ ID NO: 933417 - RNA, 19 nt, Artificial Sequence
  Description of Artificial Sequence: Synthetic oligonucleotide
gccaaccuguguugauccc

SEQ ID NO: 933418 - RNA, 19 nt, Artificial Sequence
  Description of Artificial Sequence: Synthetic oligonucleotide
caccccaauugguucacgu

SEQ ID NO: 933419 - RNA, 19 nt, Artificial Sequence
  Description of Artificial Sequence: Synthetic oligonucleotide
gguccauaaccagggacaa

SEQ ID NO: 933420 - RNA, 19 nt, Artificial Sequence
  Description of Artificial Sequence: Synthetic oligonucleotide
ccaccacacuccaguuugg

SEQ ID NO: 933421 - RNA, 19 nt, Artificial Sequence
  Description of Artificial Sequence: Synthetic oligonucleotide
caauugguucacgucuugu

SEQ ID NO: 933422 - RNA, 19 nt, Artificial Sequence
  Description of Artificial Sequence: Synthetic oligonucleotide
cauuggccuugaugguaga

SEQ ID NO: 933423 - RNA, 19 nt, Artificial Sequence
  Description of Artificial Sequence: Synthetic oligonucleotide
ggaaacccugccucuuuua

SEQ ID NO: 933424 - RNA, 19 nt, Artificial Sequence
  Description of Artificial Sequence: Synthetic oligonucleotide
ccccaauugguucacgucu

SEQ ID NO: 933425 - RNA, 19 nt, Artificial Sequence
  Description of Artificial Sequence: Synthetic oligonucleotide
cagagggacaaagcuuaaa

SEQ ID NO: 933426 - RNA, 19 nt, Artificial Sequence
  Description of Artificial Sequence: Synthetic oligonucleotide
acaccccauuaugugcaaa

SEQ ID NO: 933427 - RNA, 19 nt, Artificial Sequence
  Description of Artificial Sequence: Synthetic oligonucleotide
ggaaauuccaagggaugau

SEQ ID NO: 933428 - RNA, 19 nt, Artificial Sequence
  Description of Artificial Sequence: Synthetic oligonucleotide
acacaaugcaggggcucuu

SEQ ID NO: 933429 - RNA, 19 nt, Artificial Sequence
  Description of Artificial Sequence: Synthetic oligonucleotide
ggccuaucuuccaaaugaa

SEQ ID NO: 933430 - RNA, 19 nt, Artificial Sequence
  Description of Artificial Sequence: Synthetic oligonucleotide
ccaaaugaacaugagcaau

SEQ ID NO: 933431 - RNA, 19 nt, Artificial Sequence
  Description of Artificial Sequence: Synthetic oligonucleotide
agcucgcucaacacuccuu

SEQ ID NO: 933432 - RNA, 19 nt, Artificial Sequence
  Description of Artificial Sequence: Synthetic oligonucleotide
gccauagcuaguauuguuu

SEQ ID NO: 933433 - RNA, 19 nt, Artificial Sequence
  Description of Artificial Sequence: Synthetic oligonucleotide
cucgcucaacacuccuucu

SEQ ID NO: 933434 - RNA, 19 nt, Artificial Sequence
  Description of Artificial Sequence: Synthetic oligonucleotide
cgcucaacacuccuucuca

SEQ ID NO: 933435 - RNA, 19 nt, Artificial Sequence
  Description of Artificial Sequence: Synthetic oligonucleotide
guuugacaauuacgguguu

SEQ ID NO: 933436 - RNA, 19 nt, Artificial Sequence
  Description of Artificial Sequence: Synthetic oligonucleotide
ccguaaaggccaccuuguc

SEQ ID NO: 933437 - RNA, 19 nt, Artificial Sequence
  Description of Artificial Sequence: Synthetic oligonucleotide
auuuggccacacaccccaa

SEQ ID NO: 933438 - RNA, 19 nt, Artificial Sequence
  Description of Artificial Sequence: Synthetic oligonucleotide
gcagucagaggaguuugcu

SEQ ID NO: 933439 - RNA, 19 nt, Artificial Sequence
  Description of Artificial Sequence: Synthetic oligonucleotide
cccguaaaggccaccuugu

SEQ ID NO: 933440 - RNA, 19 nt, Artificial Sequence
  Description of Artificial Sequence: Synthetic oligonucleotide
ggcggggccuaucuuccaa

SEQ ID NO: 933441 - RNA, 19 nt, Artificial Sequence
  Description of Artificial Sequence: Synthetic oligonucleotide
acacuccaguuuggcuccu

SEQ ID NO: 933442 - RNA, 19 nt, Artificial Sequence
  Description of Artificial Sequence: Synthetic oligonucleotide
cgccaggaggaaacccugc

SEQ ID NO: 933443 - RNA, 19 nt, Artificial Sequence
  Description of Artificial Sequence: Synthetic oligonucleotide
ccauaaccagggacaaugu

SEQ ID NO: 933444 - RNA, 19 nt, Artificial Sequence
  Description of Artificial Sequence: Synthetic oligonucleotide
ggauuuccaagaacgcauu

SEQ ID NO: 933445 - RNA, 19 nt, Artificial Sequence
  Description of Artificial Sequence: Synthetic oligonucleotide
gcggggccuaucuuccaaa

SEQ ID NO: 933446 - RNA, 19 nt, Artificial Sequence
  Description of Artificial Sequence: Synthetic oligonucleotide
cugcuaggccauagcuagu

SEQ ID NO: 933447 - RNA, 19 nt, Artificial Sequence
  Description of Artificial Sequence: Synthetic oligonucleotide
gccacacaccccaauuggu

SEQ ID NO: 933448 - RNA, 19 nt, Artificial Sequence
  Description of Artificial Sequence: Synthetic oligonucleotide
ccaagggcggggccuaucu

SEQ ID NO: 933449 - RNA, 19 nt, Artificial Sequence
  Description of Artificial Sequence: Synthetic oligonucleotide
guccauaaccagggacaau

SEQ ID NO: 933450 - RNA, 19 nt, Artificial Sequence
  Description of Artificial Sequence: Synthetic oligonucleotide
cccaauugguucacgucuu

SEQ ID NO: 933451 - RNA, 19 nt, Artificial Sequence
  Description of Artificial Sequence: Synthetic oligonucleotide
gcccuuguuuccccagcgu

SEQ ID NO: 933452 - RNA, 19 nt, Artificial Sequence
  Description of Artificial Sequence: Synthetic oligonucleotide
gcugccccugcgguugguc

SEQ ID NO: 933453 - RNA, 19 nt, Artificial Sequence
  Description of Artificial Sequence: Synthetic oligonucleotide
ccucaacgaaaagccugga

SEQ ID NO: 933454 - RNA, 19 nt, Artificial Sequence
  Description of Artificial Sequence: Synthetic oligonucleotide
gcucugcugguuugacaau

SEQ ID NO: 933455 - RNA, 19 nt, Artificial Sequence
  Description of Artificial Sequence: Synthetic oligonucleotide
caagggcggggccuaucuu

SEQ ID NO: 933456 - RNA, 19 nt, Artificial Sequence
  Description of Artificial Sequence: Synthetic oligonucleotide
cugagggccuugguuuauu

SEQ ID NO: 933457 - RNA, 19 nt, Artificial Sequence
  Description of Artificial Sequence: Synthetic oligonucleotide
cccugcgguugguccauaa

SEQ ID NO: 933458 - RNA, 19 nt, Artificial Sequence
  Description of Artificial Sequence: Synthetic oligonucleotide
cagcguccaccaccacacu

SEQ ID NO: 933459 - RNA, 19 nt, Artificial Sequence
  Description of Artificial Sequence: Synthetic oligonucleotide
cggggccuaucuuccaaau

SEQ ID NO: 933460 - RNA, 19 nt, Artificial Sequence
  Description of Artificial Sequence: Synthetic oligonucleotide
ccccugcgguugguccaua

SEQ ID NO: 933461 - RNA, 19 nt, Artificial Sequence
  Description of Artificial Sequence: Synthetic oligonucleotide
cauaucauaaaauucaugc

SEQ ID NO: 933462 - RNA, 19 nt, Artificial Sequence
  Description of Artificial Sequence: Synthetic oligonucleotide
uuaaaagagaccaguaucg

SEQ ID NO: 933463 - RNA, 19 nt, Artificial Sequence
  Description of Artificial Sequence: Synthetic oligonucleotide
uuuacaaagguccuaauug

SEQ ID NO: 933464 - RNA, 19 nt, Artificial Sequence
  Description of Artificial Sequence: Synthetic oligonucleotide
aagaauuccauuccagugg

SEQ ID NO: 933465 - RNA, 19 nt, Artificial Sequence
  Description of Artificial Sequence: Synthetic oligonucleotide
uuuaaaagagaccaguauc

SEQ ID NO: 933466 - RNA, 19 nt, Artificial Sequence
  Description of Artificial Sequence: Synthetic oligonucleotide
auaucaccaauuuagacug

SEQ ID NO: 933467 - RNA, 19 nt, Artificial Sequence
  Description of Artificial Sequence: Synthetic oligonucleotide
agugccgugaacuuucugc

SEQ ID NO: 933468 - RNA, 19 nt, Artificial Sequence
  Description of Artificial Sequence: Synthetic oligonucleotide
ucuaaucuccuucagggag

SEQ ID NO: 933469 - RNA, 19 nt, Artificial Sequence
  Description of Artificial Sequence: Synthetic oligonucleotide
aauaagauaguacaucauu

SEQ ID NO: 933470 - RNA, 19 nt, Artificial Sequence
  Description of Artificial Sequence: Synthetic oligonucleotide
aaaggaucuuccuuccucg

SEQ ID NO: 933471 - RNA, 19 nt, Artificial Sequence
  Description of Artificial Sequence: Synthetic oligonucleotide
cuuucaauaagauaguaca

SEQ ID NO: 933472 - RNA, 19 nt, Artificial Sequence
  Description of Artificial Sequence: Synthetic oligonucleotide
uuuaguuccagacggggag

SEQ ID NO: 933473 - RNA, 19 nt, Artificial Sequence
  Description of Artificial Sequence: Synthetic oligonucleotide
ugaucuuugcaagagaugc

SEQ ID NO: 933474 - RNA, 19 nt, Artificial Sequence
  Description of Artificial Sequence: Synthetic oligonucleotide
ugaaugaacauuugggaca

SEQ ID NO: 933475 - RNA, 19 nt, Artificial Sequence
  Description of Artificial Sequence: Synthetic oligonucleotide
ugauuucacuaccucaugg

SEQ ID NO: 933476 - RNA, 19 nt, Artificial Sequence
  Description of Artificial Sequence: Synthetic oligonucleotide
aucaccuugguccaacagc

SEQ ID NO: 933477 - RNA, 19 nt, Artificial Sequence
  Description of Artificial Sequence: Synthetic oligonucleotide
cuuuaguguccccagaugg

SEQ ID NO: 933478 - RNA, 19 nt, Artificial Sequence
  Description of Artificial Sequence: Synthetic oligonucleotide
caugauauggugaaugaac

SEQ ID NO: 933479 - RNA, 19 nt, Artificial Sequence
  Description of Artificial Sequence: Synthetic oligonucleotide
uuugauugcuucuagugac

SEQ ID NO: 933480 - RNA, 19 nt, Artificial Sequence
  Description of Artificial Sequence: Synthetic oligonucleotide
agugucuacuacuucauag

SEQ ID NO: 933481 - RNA, 19 nt, Artificial Sequence
  Description of Artificial Sequence: Synthetic oligonucleotide
uuauucaugggccaaaauu

SEQ ID NO: 933482 - RNA, 19 nt, Artificial Sequence
  Description of Artificial Sequence: Synthetic oligonucleotide
auucaugcaucacagacug

SEQ ID NO: 933483 - RNA, 19 nt, Artificial Sequence
  Description of Artificial Sequence: Synthetic oligonucleotide
ucaguauucucuaagggau

SEQ ID NO: 933484 - RNA, 19 nt, Artificial Sequence
  Description of Artificial Sequence: Synthetic oligonucleotide
ugggugaagaucuugauau

SEQ ID NO: 933485 - RNA, 19 nt, Artificial Sequence
  Description of Artificial Sequence: Synthetic oligonucleotide
auaagauaguacaucauuc

SEQ ID NO: 933486 - RNA, 19 nt, Artificial Sequence
  Description of Artificial Sequence: Synthetic oligonucleotide
ugucagagcaacuaaggca

SEQ ID NO: 933487 - RNA, 19 nt, Artificial Sequence
  Description of Artificial Sequence: Synthetic oligonucleotide
uuugccgagagaaggaagc

SEQ ID NO: 933488 - RNA, 19 nt, Artificial Sequence
  Description of Artificial Sequence: Synthetic oligonucleotide
uccuucuacaguaauaauc

SEQ ID NO: 933489 - RNA, 19 nt, Artificial Sequence
  Description of Artificial Sequence: Synthetic oligonucleotide
aggauuucagaacaaaccu

SEQ ID NO: 933490 - RNA, 19 nt, Artificial Sequence
  Description of Artificial Sequence: Synthetic oligonucleotide
augcauaucaccaauuuag

SEQ ID NO: 933491 - RNA, 19 nt, Artificial Sequence
  Description of Artificial Sequence: Synthetic oligonucleotide
gauaacauggugcucucug

SEQ ID NO: 933492 - RNA, 19 nt, Artificial Sequence
  Description of Artificial Sequence: Synthetic oligonucleotide
aggaguucaaaucaccuug

SEQ ID NO: 933493 - RNA, 19 nt, Artificial Sequence
  Description of Artificial Sequence: Synthetic oligonucleotide
uaaacuucgggauuuaguu

SEQ ID NO: 933494 - RNA, 19 nt, Artificial Sequence
  Description of Artificial Sequence: Synthetic oligonucleotide
uuagggucuagguaaaaga

SEQ ID NO: 933495 - RNA, 19 nt, Artificial Sequence
  Description of Artificial Sequence: Synthetic oligonucleotide
uuacaaagguccuaauuga

SEQ ID NO: 933496 - RNA, 19 nt, Artificial Sequence
  Description of Artificial Sequence: Synthetic oligonucleotide
ugucuacuacuucauagcc

SEQ ID NO: 933497 - RNA, 19 nt, Artificial Sequence
  Description of Artificial Sequence: Synthetic oligonucleotide
uuccggauuaaacuucggg

SEQ ID NO: 933498 - RNA, 19 nt, Artificial Sequence
  Description of Artificial Sequence: Synthetic oligonucleotide
uuaaacuucgggauuuagu

SEQ ID NO: 933499 - RNA, 19 nt, Artificial Sequence
  Description of Artificial Sequence: Synthetic oligonucleotide
aguucaaaucaccuugguc

SEQ ID NO: 933500 - RNA, 19 nt, Artificial Sequence
  Description of Artificial Sequence: Synthetic oligonucleotide
gggauuuaguuccagacgg

SEQ ID NO: 933501 - RNA, 19 nt, Artificial Sequence
  Description of Artificial Sequence: Synthetic oligonucleotide
gucuagguaaaagagacag

SEQ ID NO: 933502 - RNA, 19 nt, Artificial Sequence
  Description of Artificial Sequence: Synthetic oligonucleotide
ucaucuugauaacauggug

SEQ ID NO: 933503 - RNA, 19 nt, Artificial Sequence
  Description of Artificial Sequence: Synthetic oligonucleotide
ucagauuuucuuuaugcaa

SEQ ID NO: 933504 - RNA, 19 nt, Artificial Sequence
  Description of Artificial Sequence: Synthetic oligonucleotide
aacacuguagccaugcuga

SEQ ID NO: 933505 - RNA, 19 nt, Artificial Sequence
  Description of Artificial Sequence: Synthetic oligonucleotide
aaaaccuugugaaugauuu

SEQ ID NO: 933506 - RNA, 19 nt, Artificial Sequence
  Description of Artificial Sequence: Synthetic oligonucleotide
aagagaccaguaucgggac

SEQ ID NO: 933507 - RNA, 19 nt, Artificial Sequence
  Description of Artificial Sequence: Synthetic oligonucleotide
ugugaucuuugcaagagau

SEQ ID NO: 933508 - RNA, 19 nt, Artificial Sequence
  Description of Artificial Sequence: Synthetic oligonucleotide
uccggauuaaacuucggga

SEQ ID NO: 933509 - RNA, 19 nt, Artificial Sequence
  Description of Artificial Sequence: Synthetic oligonucleotide
uauuggaccucugacauga

SEQ ID NO: 933510 - RNA, 19 nt, Artificial Sequence
  Description of Artificial Sequence: Synthetic oligonucleotide
uguuaggaaaugcacucca

SEQ ID NO: 933511 - RNA, 19 nt, Artificial Sequence
  Description of Artificial Sequence: Synthetic oligonucleotide
uuuagugccgugaacuuuc

SEQ ID NO: 933512 - RNA, 19 nt, Artificial Sequence
  Description of Artificial Sequence: Synthetic oligonucleotide
ugaucacuaggauauugag

SEQ ID NO: 933513 - RNA, 19 nt, Artificial Sequence
  Description of Artificial Sequence: Synthetic oligonucleotide
ucucuaagggaugugaucu

SEQ ID NO: 933514 - RNA, 19 nt, Artificial Sequence
  Description of Artificial Sequence: Synthetic oligonucleotide
ugggaauuaagccacugaa

SEQ ID NO: 933515 - RNA, 19 nt, Artificial Sequence
  Description of Artificial Sequence: Synthetic oligonucleotide
ucaacgaagggcuuaucca

SEQ ID NO: 933516 - RNA, 19 nt, Artificial Sequence
  Description of Artificial Sequence: Synthetic oligonucleotide
uaccucauggaaaugacau

SEQ ID NO: 933517 - RNA, 19 nt, Artificial Sequence
  Description of Artificial Sequence: Synthetic oligonucleotide
gauuuaguuccagacgggg

SEQ ID NO: 933518 - RNA, 19 nt, Artificial Sequence
  Description of Artificial Sequence: Synthetic oligonucleotide
uucuuagucccucggagug

SEQ ID NO: 933519 - RNA, 19 nt, Artificial Sequence
  Description of Artificial Sequence: Synthetic oligonucleotide
ucaccuuccggauuaaacu

SEQ ID NO: 933520 - RNA, 19 nt, Artificial Sequence
  Description of Artificial Sequence: Synthetic oligonucleotide
ugucgucccauugugauag

SEQ ID NO: 933521 - RNA, 19 nt, Artificial Sequence
  Description of Artificial Sequence: Synthetic oligonucleotide
uugucagagcaacuaaggc

SEQ ID NO: 933522 - RNA, 19 nt, Artificial Sequence
  Description of Artificial Sequence: Synthetic oligonucleotide
aauacugucuggucaguau

SEQ ID NO: 933523 - RNA, 19 nt, Artificial Sequence
  Description of Artificial Sequence: Synthetic oligonucleotide
uaggaguaacugaucaaag

SEQ ID NO: 933524 - RNA, 19 nt, Artificial Sequence
  Description of Artificial Sequence: Synthetic oligonucleotide
ugaauuuccuccaggaguu

SEQ ID NO: 933525 - RNA, 19 nt, Artificial Sequence
  Description of Artificial Sequence: Synthetic oligonucleotide
uggaccucugacaugauau

SEQ ID NO: 933526 - RNA, 19 nt, Artificial Sequence
  Description of Artificial Sequence: Synthetic oligonucleotide
ugggacagaauuuugccgu

SEQ ID NO: 933527 - RNA, 19 nt, Artificial Sequence
  Description of Artificial Sequence: Synthetic oligonucleotide
aaguuuugaugaucacuag

SEQ ID NO: 933528 - RNA, 19 nt, Artificial Sequence
  Description of Artificial Sequence: Synthetic oligonucleotide
gaauuaagccacugaacac

SEQ ID NO: 933529 - RNA, 19 nt, Artificial Sequence
  Description of Artificial Sequence: Synthetic oligonucleotide
agugcuuucucaaauguug

SEQ ID NO: 933530 - RNA, 19 nt, Artificial Sequence
  Description of Artificial Sequence: Synthetic oligonucleotide
uucaccuuccggauuaaac

SEQ ID NO: 933531 - RNA, 19 nt, Artificial Sequence
  Description of Artificial Sequence: Synthetic oligonucleotide
accaauacugucuggucag

SEQ ID NO: 933532 - RNA, 19 nt, Artificial Sequence
  Description of Artificial Sequence: Synthetic oligonucleotide
uuaugcauaucaccaauuu

SEQ ID NO: 933533 - RNA, 19 nt, Artificial Sequence
  Description of Artificial Sequence: Synthetic oligonucleotide
uuuccccacaauaugguuc

SEQ ID NO: 933534 - RNA, 19 nt, Artificial Sequence
  Description of Artificial Sequence: Synthetic oligonucleotide
aaagguccuaauugaguga

SEQ ID NO: 933535 - RNA, 19 nt, Artificial Sequence
  Description of Artificial Sequence: Synthetic oligonucleotide
gauaguacaucauuccucu

SEQ ID NO: 933536 - RNA, 19 nt, Artificial Sequence
  Description of Artificial Sequence: Synthetic oligonucleotide
aauucaugcaucacagacu

SEQ ID NO: 933537 - RNA, 19 nt, Artificial Sequence
  Description of Artificial Sequence: Synthetic oligonucleotide
acugggguagaguuuagug

SEQ ID NO: 933538 - RNA, 19 nt, Artificial Sequence
  Description of Artificial Sequence: Synthetic oligonucleotide
ugugcuccccaucuaaucu

SEQ ID NO: 933539 - RNA, 19 nt, Artificial Sequence
  Description of Artificial Sequence: Synthetic oligonucleotide
cucgcugcaagcuucuuag

SEQ ID NO: 933540 - RNA, 19 nt, Artificial Sequence
  Description of Artificial Sequence: Synthetic oligonucleotide
ugaaugauuugcaggugcu

SEQ ID NO: 933541 - RNA, 19 nt, Artificial Sequence
  Description of Artificial Sequence: Synthetic oligonucleotide
aacaaccaauacugucugg

SEQ ID NO: 933542 - RNA, 19 nt, Artificial Sequence
  Description of Artificial Sequence: Synthetic oligonucleotide
uccuaauugagugaauuuc

SEQ ID NO: 933543 - RNA, 19 nt, Artificial Sequence
  Description of Artificial Sequence: Synthetic oligonucleotide
aaaccuugugaaugauuug

SEQ ID NO: 933544 - RNA, 19 nt, Artificial Sequence
  Description of Artificial Sequence: Synthetic oligonucleotide
acaaaccugguuuauugga

SEQ ID NO: 933545 - RNA, 19 nt, Artificial Sequence
  Description of Artificial Sequence: Synthetic oligonucleotide
ucgggauuuaguuccagac

SEQ ID NO: 933546 - RNA, 19 nt, Artificial Sequence
  Description of Artificial Sequence: Synthetic oligonucleotide
gaucacuaggauauugagc

SEQ ID NO: 933547 - RNA, 19 nt, Artificial Sequence
  Description of Artificial Sequence: Synthetic oligonucleotide
gaaguuccggcuugguuag

SEQ ID NO: 933548 - RNA, 19 nt, Artificial Sequence
  Description of Artificial Sequence: Synthetic oligonucleotide
cagaauuuugccguuguag

SEQ ID NO: 933549 - RNA, 19 nt, Artificial Sequence
  Description of Artificial Sequence: Synthetic oligonucleotide
ucccagacucccaaguucc

SEQ ID NO: 933550 - RNA, 19 nt, Artificial Sequence
  Description of Artificial Sequence: Synthetic oligonucleotide
auuccauuccaguggaugu

SEQ ID NO: 933551 - RNA, 19 nt, Artificial Sequence
  Description of Artificial Sequence: Synthetic oligonucleotide
cauaucaccaauuuagacu

SEQ ID NO: 933552 - RNA, 19 nt, Artificial Sequence
  Description of Artificial Sequence: Synthetic oligonucleotide
ugucccacggguauccuug

SEQ ID NO: 933553 - RNA, 19 nt, Artificial Sequence
  Description of Artificial Sequence: Synthetic oligonucleotide
agaguuuagugccgugaac

SEQ ID NO: 933554 - RNA, 19 nt, Artificial Sequence
  Description of Artificial Sequence: Synthetic oligonucleotide
agaauuccauuccagugga

SEQ ID NO: 933555 - RNA, 19 nt, Artificial Sequence
  Description of Artificial Sequence: Synthetic oligonucleotide
gaugaucacuaggauauug

SEQ ID NO: 933556 - RNA, 19 nt, Artificial Sequence
  Description of Artificial Sequence: Synthetic oligonucleotide
uuuugaugaucacuaggau

SEQ ID NO: 933557 - RNA, 19 nt, Artificial Sequence
  Description of Artificial Sequence: Synthetic oligonucleotide
aguuugagagggugugugg

SEQ ID NO: 933558 - RNA, 19 nt, Artificial Sequence
  Description of Artificial Sequence: Synthetic oligonucleotide
aggaguaacugaucaaagu

SEQ ID NO: 933559 - RNA, 19 nt, Artificial Sequence
  Description of Artificial Sequence: Synthetic oligonucleotide
caggugaaauccaaucccc

SEQ ID NO: 933560 - RNA, 19 nt, Artificial Sequence
  Description of Artificial Sequence: Synthetic oligonucleotide
agaccugaagaggauggcc

SEQ ID NO: 933561 - RNA, 19 nt, Artificial Sequence
  Description of Artificial Sequence: Synthetic oligonucleotide
uaggauuugccauaucaua

SEQ ID NO: 933562 - RNA, 19 nt, Artificial Sequence
  Description of Artificial Sequence: Synthetic oligonucleotide
caaauguuggucucaacga

SEQ ID NO: 933563 - RNA, 19 nt, Artificial Sequence
  Description of Artificial Sequence: Synthetic oligonucleotide
ccaauuuagacugugcucc

SEQ ID NO: 933564 - RNA, 19 nt, Artificial Sequence
  Description of Artificial Sequence: Synthetic oligonucleotide
uuccaguggauguagcugu

SEQ ID NO: 933565 - RNA, 19 nt, Artificial Sequence
  Description of Artificial Sequence: Synthetic oligonucleotide
ccaccaacaaccaauacug

SEQ ID NO: 933566 - RNA, 19 nt, Artificial Sequence
  Description of Artificial Sequence: Synthetic oligonucleotide
ucuagguaaaagagacaga

SEQ ID NO: 933567 - RNA, 19 nt, Artificial Sequence
  Description of Artificial Sequence: Synthetic oligonucleotide
ccuaauugagugaauuucc

SEQ ID NO: 933568 - RNA, 19 nt, Artificial Sequence
  Description of Artificial Sequence: Synthetic oligonucleotide
agucuguguuaggaaaugc

SEQ ID NO: 933569 - RNA, 19 nt, Artificial Sequence
  Description of Artificial Sequence: Synthetic oligonucleotide
gacagucccaggaaccucg

SEQ ID NO: 933570 - RNA, 19 nt, Artificial Sequence
  Description of Artificial Sequence: Synthetic oligonucleotide
gagaccaguaucgggacag

SEQ ID NO: 933571 - RNA, 19 nt, Artificial Sequence
  Description of Artificial Sequence: Synthetic oligonucleotide
ggucaguauucucuaaggg

SEQ ID NO: 933572 - RNA, 19 nt, Artificial Sequence
  Description of Artificial Sequence: Synthetic oligonucleotide
ccaaugaaaaggaucuucc

SEQ ID NO: 933573 - RNA, 19 nt, Artificial Sequence
  Description of Artificial Sequence: Synthetic oligonucleotide
uggaauucucccagacucc

SEQ ID NO: 933574 - RNA, 19 nt, Artificial Sequence
  Description of Artificial Sequence: Synthetic oligonucleotide
ugugucgucccauugugau

SEQ ID NO: 933575 - RNA, 19 nt, Artificial Sequence
  Description of Artificial Sequence: Synthetic oligonucleotide
ggugaaugaacauuuggga

SEQ ID NO: 933576 - RNA, 19 nt, Artificial Sequence
  Description of Artificial Sequence: Synthetic oligonucleotide
uggauaacuuugauuucac

SEQ ID NO: 933577 - RNA, 19 nt, Artificial Sequence
  Description of Artificial Sequence: Synthetic oligonucleotide
auuguguuggcaguugugu

SEQ ID NO: 933578 - RNA, 19 nt, Artificial Sequence
  Description of Artificial Sequence: Synthetic oligonucleotide
uacuacuucauagccauau

SEQ ID NO: 933579 - RNA, 19 nt, Artificial Sequence
  Description of Artificial Sequence: Synthetic oligonucleotide
guuagggucuagguaaaag

SEQ ID NO: 933580 - RNA, 19 nt, Artificial Sequence
  Description of Artificial Sequence: Synthetic oligonucleotide
ugauagugaaagugucuac

SEQ ID NO: 933581 - RNA, 19 nt, Artificial Sequence
  Description of Artificial Sequence: Synthetic oligonucleotide
ucgaucuuccugauuucca

SEQ ID NO: 933582 - RNA, 19 nt, Artificial Sequence
  Description of Artificial Sequence: Synthetic oligonucleotide
uguuuugacugcugaagua

SEQ ID NO: 933583 - RNA, 19 nt, Artificial Sequence
  Description of Artificial Sequence: Synthetic oligonucleotide
gaccugaagaggauggccc

SEQ ID NO: 933584 - RNA, 19 nt, Artificial Sequence
  Description of Artificial Sequence: Synthetic oligonucleotide
auagugaaagugucuacua

SEQ ID NO: 933585 - RNA, 19 nt, Artificial Sequence
  Description of Artificial Sequence: Synthetic oligonucleotide
uuguguuggcaguugugug

SEQ ID NO: 933586 - RNA, 19 nt, Artificial Sequence
  Description of Artificial Sequence: Synthetic oligonucleotide
agcaccguuugucccacgg

SEQ ID NO: 933587 - RNA, 19 nt, Artificial Sequence
  Description of Artificial Sequence: Synthetic oligonucleotide
cuugugucgucccauugug

SEQ ID NO: 933588 - RNA, 19 nt, Artificial Sequence
  Description of Artificial Sequence: Synthetic oligonucleotide
gauuugccauaucauaaaa

SEQ ID NO: 933589 - RNA, 19 nt, Artificial Sequence
  Description of Artificial Sequence: Synthetic oligonucleotide
acuaccucauggaaaugac

SEQ ID NO: 933590 - RNA, 19 nt, Artificial Sequence
  Description of Artificial Sequence: Synthetic oligonucleotide
uuuauucaugggccaaaau

SEQ ID NO: 933591 - RNA, 19 nt, Artificial Sequence
  Description of Artificial Sequence: Synthetic oligonucleotide
aagguccuaauugagugaa

SEQ ID NO: 933592 - RNA, 19 nt, Artificial Sequence
  Description of Artificial Sequence: Synthetic oligonucleotide
uugauugcuucuagugacu

SEQ ID NO: 933593 - RNA, 19 nt, Artificial Sequence
  Description of Artificial Sequence: Synthetic oligonucleotide
aggauauugagcaaauuuu

SEQ ID NO: 933594 - RNA, 19 nt, Artificial Sequence
  Description of Artificial Sequence: Synthetic oligonucleotide
guaucgggacaguagugag

SEQ ID NO: 933595 - RNA, 19 nt, Artificial Sequence
  Description of Artificial Sequence: Synthetic oligonucleotide
agguccuguugucagagca

SEQ ID NO: 933596 - RNA, 19 nt, Artificial Sequence
  Description of Artificial Sequence: Synthetic oligonucleotide
gguuuauuggaccucugac

SEQ ID NO: 933597 - RNA, 19 nt, Artificial Sequence
  Description of Artificial Sequence: Synthetic oligonucleotide
caagcuucuuagucccucg

SEQ ID NO: 933598 - RNA, 19 nt, Artificial Sequence
  Description of Artificial Sequence: Synthetic oligonucleotide
uucgaucuuccugauuucc

SEQ ID NO: 933599 - RNA, 19 nt, Artificial Sequence
  Description of Artificial Sequence: Synthetic oligonucleotide
gcaggugaaauccaauccc

SEQ ID NO: 933600 - RNA, 19 nt, Artificial Sequence
  Description of Artificial Sequence: Synthetic oligonucleotide
ugacucgcacacauccugc

SEQ ID NO: 933601 - RNA, 19 nt, Artificial Sequence
  Description of Artificial Sequence: Synthetic oligonucleotide
uccccaucuaaucuccuuc

SEQ ID NO: 933602 - RNA, 19 nt, Artificial Sequence
  Description of Artificial Sequence: Synthetic oligonucleotide
auuaaacuucgggauuuag

SEQ ID NO: 933603 - RNA, 19 nt, Artificial Sequence
  Description of Artificial Sequence: Synthetic oligonucleotide
agggcauuugccgagagaa

SEQ ID NO: 933604 - RNA, 19 nt, Artificial Sequence
  Description of Artificial Sequence: Synthetic oligonucleotide
agaaugcucagauuuucuu

SEQ ID NO: 933605 - RNA, 19 nt, Artificial Sequence
  Description of Artificial Sequence: Synthetic oligonucleotide
augcaucacagacugaauu

SEQ ID NO: 933606 - RNA, 19 nt, Artificial Sequence
  Description of Artificial Sequence: Synthetic oligonucleotide
aaggcacaauccacuggcc

SEQ ID NO: 933607 - RNA, 19 nt, Artificial Sequence
  Description of Artificial Sequence: Synthetic oligonucleotide
ugcugaaguauuuccccac

SEQ ID NO: 933608 - RNA, 19 nt, Artificial Sequence
  Description of Artificial Sequence: Synthetic oligonucleotide
guuugagaggguguguggc

SEQ ID NO: 933609 - RNA, 19 nt, Artificial Sequence
  Description of Artificial Sequence: Synthetic oligonucleotide
ugcuccccaucuaaucucc

SEQ ID NO: 933610 - RNA, 19 nt, Artificial Sequence
  Description of Artificial Sequence: Synthetic oligonucleotide
gauauugcagacugugccu

SEQ ID NO: 933611 - RNA, 19 nt, Artificial Sequence
  Description of Artificial Sequence: Synthetic oligonucleotide
auauggugaaugaacauuu

SEQ ID NO: 933612 - RNA, 19 nt, Artificial Sequence
  Description of Artificial Sequence: Synthetic oligonucleotide
uuuugacugcugaaguauu

SEQ ID NO: 933613 - RNA, 19 nt, Artificial Sequence
  Description of Artificial Sequence: Synthetic oligonucleotide
gugugaaggagaccugaag

SEQ ID NO: 933614 - RNA, 19 nt, Artificial Sequence
  Description of Artificial Sequence: Synthetic oligonucleotide
uuuuauucaugggccaaaa

SEQ ID NO: 933615 - RNA, 19 nt, Artificial Sequence
  Description of Artificial Sequence: Synthetic oligonucleotide
gugccgugaacuuucugcc

SEQ ID NO: 933616 - RNA, 19 nt, Artificial Sequence
  Description of Artificial Sequence: Synthetic oligonucleotide
ccuuucaauaagauaguac

SEQ ID NO: 933617 - RNA, 19 nt, Artificial Sequence
  Description of Artificial Sequence: Synthetic oligonucleotide
uuauuggaccucugacaug

SEQ ID NO: 933618 - RNA, 19 nt, Artificial Sequence
  Description of Artificial Sequence: Synthetic oligonucleotide
uucgggauuuaguuccaga

SEQ ID NO: 933619 - RNA, 19 nt, Artificial Sequence
  Description of Artificial Sequence: Synthetic oligonucleotide
aguuguguggcugccaggu

SEQ ID NO: 933620 - RNA, 19 nt, Artificial Sequence
  Description of Artificial Sequence: Synthetic oligonucleotide
agucacagguccuguuguc

SEQ ID NO: 933621 - RNA, 19 nt, Artificial Sequence
  Description of Artificial Sequence: Synthetic oligonucleotide
cuugauaacauggugcucu

SEQ ID NO: 933622 - RNA, 19 nt, Artificial Sequence
  Description of Artificial Sequence: Synthetic oligonucleotide
caaagugugucucaaucaa

SEQ ID NO: 933623 - RNA, 19 nt, Artificial Sequence
  Description of Artificial Sequence: Synthetic oligonucleotide
ugugaaugauuugcaggug

SEQ ID NO: 933624 - RNA, 19 nt, Artificial Sequence
  Description of Artificial Sequence: Synthetic oligonucleotide
ugugugaaggagaccugaa

SEQ ID NO: 933625 - RNA, 19 nt, Artificial Sequence
  Description of Artificial Sequence: Synthetic oligonucleotide
gauggacaacuccuucuac

SEQ ID NO: 933626 - RNA, 19 nt, Artificial Sequence
  Description of Artificial Sequence: Synthetic oligonucleotide
caugggccaaaauuguuca

SEQ ID NO: 933627 - RNA, 19 nt, Artificial Sequence
  Description of Artificial Sequence: Synthetic oligonucleotide
cugacucgcacacauccug

SEQ ID NO: 933628 - RNA, 19 nt, Artificial Sequence
  Description of Artificial Sequence: Synthetic oligonucleotide
guaggaguaacugaucaaa

SEQ ID NO: 933629 - RNA, 19 nt, Artificial Sequence
  Description of Artificial Sequence: Synthetic oligonucleotide
gcaguuggaauucucccag

SEQ ID NO: 933630 - RNA, 19 nt, Artificial Sequence
  Description of Artificial Sequence: Synthetic oligonucleotide
ggaaaugcacuccauccac

SEQ ID NO: 933631 - RNA, 19 nt, Artificial Sequence
  Description of Artificial Sequence: Synthetic oligonucleotide
uguagccaugcugaccaag

SEQ ID NO: 933632 - RNA, 19 nt, Artificial Sequence
  Description of Artificial Sequence: Synthetic oligonucleotide
gaguuuagugccgugaacu

SEQ ID NO: 933633 - RNA, 19 nt, Artificial Sequence
  Description of Artificial Sequence: Synthetic oligonucleotide
uuccggcuugguuaggaca

SEQ ID NO: 933634 - RNA, 19 nt, Artificial Sequence
  Description of Artificial Sequence: Synthetic oligonucleotide
acaaagguccuaauugagu

SEQ ID NO: 933635 - RNA, 19 nt, Artificial Sequence
  Description of Artificial Sequence: Synthetic oligonucleotide
gaaugauuugcaggugcug

SEQ ID NO: 933636 - RNA, 19 nt, Artificial Sequence
  Description of Artificial Sequence: Synthetic oligonucleotide
guuccagacggggaguggg

SEQ ID NO: 933637 - RNA, 19 nt, Artificial Sequence
  Description of Artificial Sequence: Synthetic oligonucleotide
accaguaucgggacaguag

SEQ ID NO: 933638 - RNA, 19 nt, Artificial Sequence
  Description of Artificial Sequence: Synthetic oligonucleotide
cccacaauaugguucuugg

SEQ ID NO: 933639 - RNA, 19 nt, Artificial Sequence
  Description of Artificial Sequence: Synthetic oligonucleotide
cugugacugccaaagugug

SEQ ID NO: 933640 - RNA, 19 nt, Artificial Sequence
  Description of Artificial Sequence: Synthetic oligonucleotide
cuuggucgcaucugcuagc

SEQ ID NO: 933641 - RNA, 19 nt, Artificial Sequence
  Description of Artificial Sequence: Synthetic oligonucleotide
ggauauugagcaaauuuuc

SEQ ID NO: 933642 - RNA, 19 nt, Artificial Sequence
  Description of Artificial Sequence: Synthetic oligonucleotide
cugaguuugagagggugug

SEQ ID NO: 933643 - RNA, 19 nt, Artificial Sequence
  Description of Artificial Sequence: Synthetic oligonucleotide
uucucaaauguuggucuca

SEQ ID NO: 933644 - RNA, 19 nt, Artificial Sequence
  Description of Artificial Sequence: Synthetic oligonucleotide
uguugguggaauccccaau

SEQ ID NO: 933645 - RNA, 19 nt, Artificial Sequence
  Description of Artificial Sequence: Synthetic oligonucleotide
agauggacaacuccuucua

SEQ ID NO: 933646 - RNA, 19 nt, Artificial Sequence
  Description of Artificial Sequence: Synthetic oligonucleotide
uccuugugucgucccauug

SEQ ID NO: 933647 - RNA, 19 nt, Artificial Sequence
  Description of Artificial Sequence: Synthetic oligonucleotide
gugacucugguguuuucug

SEQ ID NO: 933648 - RNA, 19 nt, Artificial Sequence
  Description of Artificial Sequence: Synthetic oligonucleotide
uggccuuuaguguccccag

SEQ ID NO: 933649 - RNA, 19 nt, Artificial Sequence
  Description of Artificial Sequence: Synthetic oligonucleotide
augugaucuuugcaagaga

SEQ ID NO: 933650 - RNA, 19 nt, Artificial Sequence
  Description of Artificial Sequence: Synthetic oligonucleotide
guagugagcuaggauuugc

SEQ ID NO: 933651 - RNA, 19 nt, Artificial Sequence
  Description of Artificial Sequence: Synthetic oligonucleotide
aguuuagugccgugaacuu

SEQ ID NO: 933652 - RNA, 19 nt, Artificial Sequence
  Description of Artificial Sequence: Synthetic oligonucleotide
uguguggcggacaguccca

SEQ ID NO: 933653 - RNA, 19 nt, Artificial Sequence
  Description of Artificial Sequence: Synthetic oligonucleotide
uagucccucggaguguuag

SEQ ID NO: 933654 - RNA, 19 nt, Artificial Sequence
  Description of Artificial Sequence: Synthetic oligonucleotide
gaccuaggccaguaccaag

SEQ ID NO: 933655 - RNA, 19 nt, Artificial Sequence
  Description of Artificial Sequence: Synthetic oligonucleotide
ggauuucagaacaaaccug

SEQ ID NO: 933656 - RNA, 19 nt, Artificial Sequence
  Description of Artificial Sequence: Synthetic oligonucleotide
uugugucgucccauuguga

SEQ ID NO: 933657 - RNA, 19 nt, Artificial Sequence
  Description of Artificial Sequence: Synthetic oligonucleotide
ugcacuccauccacuggca

SEQ ID NO: 933658 - RNA, 19 nt, Artificial Sequence
  Description of Artificial Sequence: Synthetic oligonucleotide
gaguguuagggucuaggua

SEQ ID NO: 933659 - RNA, 19 nt, Artificial Sequence
  Description of Artificial Sequence: Synthetic oligonucleotide
gggauaguaggaguaacug

SEQ ID NO: 933660 - RNA, 19 nt, Artificial Sequence
  Description of Artificial Sequence: Synthetic oligonucleotide
agucccucggaguguuagg

SEQ ID NO: 933661 - RNA, 19 nt, Artificial Sequence
  Description of Artificial Sequence: Synthetic oligonucleotide
guuugucccacggguaucc

SEQ ID NO: 933662 - RNA, 19 nt, Artificial Sequence
  Description of Artificial Sequence: Synthetic oligonucleotide
ggaguucaaaucaccuugg

SEQ ID NO: 933663 - RNA, 19 nt, Artificial Sequence
  Description of Artificial Sequence: Synthetic oligonucleotide
aagugucuacuacuucaua

SEQ ID NO: 933664 - RNA, 19 nt, Artificial Sequence
  Description of Artificial Sequence: Synthetic oligonucleotide
ugauugcuucuagugacuc

SEQ ID NO: 933665 - RNA, 19 nt, Artificial Sequence
  Description of Artificial Sequence: Synthetic oligonucleotide
uugauaacauggugcucuc

SEQ ID NO: 933666 - RNA, 19 nt, Artificial Sequence
  Description of Artificial Sequence: Synthetic oligonucleotide
caauaugguucuuggaucu

SEQ ID NO: 933667 - RNA, 19 nt, Artificial Sequence
  Description of Artificial Sequence: Synthetic oligonucleotide
uuggucgcaucugcuagcc

SEQ ID NO: 933668 - RNA, 19 nt, Artificial Sequence
  Description of Artificial Sequence: Synthetic oligonucleotide
auaguacaucauuccucug

SEQ ID NO: 933669 - RNA, 19 nt, Artificial Sequence
  Description of Artificial Sequence: Synthetic oligonucleotide
ccacggguauccuuggucg

SEQ ID NO: 933670 - RNA, 19 nt, Artificial Sequence
  Description of Artificial Sequence: Synthetic oligonucleotide
guagaguuuagugccguga

SEQ ID NO: 933671 - RNA, 19 nt, Artificial Sequence
  Description of Artificial Sequence: Synthetic oligonucleotide
agcuucuuagucccucgga

SEQ ID NO: 933672 - RNA, 19 nt, Artificial Sequence
  Description of Artificial Sequence: Synthetic oligonucleotide
cuaauugagugaauuuccu

SEQ ID NO: 933673 - RNA, 19 nt, Artificial Sequence
  Description of Artificial Sequence: Synthetic oligonucleotide
gugauagugaaagugucua

SEQ ID NO: 933674 - RNA, 19 nt, Artificial Sequence
  Description of Artificial Sequence: Synthetic oligonucleotide
cuuccggauuaaacuucgg

SEQ ID NO: 933675 - RNA, 19 nt, Artificial Sequence
  Description of Artificial Sequence: Synthetic oligonucleotide
augggccaaaauuguucag

SEQ ID NO: 933676 - RNA, 19 nt, Artificial Sequence
  Description of Artificial Sequence: Synthetic oligonucleotide
uuuagacugugcuccccau

SEQ ID NO: 933677 - RNA, 19 nt, Artificial Sequence
  Description of Artificial Sequence: Synthetic oligonucleotide
ucuaagggaugugaucuuu

SEQ ID NO: 933678 - RNA, 19 nt, Artificial Sequence
  Description of Artificial Sequence: Synthetic oligonucleotide
ccuuccggauuaaacuucg

SEQ ID NO: 933679 - RNA, 19 nt, Artificial Sequence
  Description of Artificial Sequence: Synthetic oligonucleotide
accugaagaggauggcccu

SEQ ID NO: 933680 - RNA, 19 nt, Artificial Sequence
  Description of Artificial Sequence: Synthetic oligonucleotide
cucccagacucccaaguuc

SEQ ID NO: 933681 - RNA, 19 nt, Artificial Sequence
  Description of Artificial Sequence: Synthetic oligonucleotide
uuggaccucugacaugaua

SEQ ID NO: 933682 - RNA, 19 nt, Artificial Sequence
  Description of Artificial Sequence: Synthetic oligonucleotide
cagaccuaggccaguacca

SEQ ID NO: 933683 - RNA, 19 nt, Artificial Sequence
  Description of Artificial Sequence: Synthetic oligonucleotide
cucgcacacauccugcuga

SEQ ID NO: 933684 - RNA, 19 nt, Artificial Sequence
  Description of Artificial Sequence: Synthetic oligonucleotide
caguaucgggacaguagug

SEQ ID NO: 933685 - RNA, 19 nt, Artificial Sequence
  Description of Artificial Sequence: Synthetic oligonucleotide
caaaguuuugaugaucacu

SEQ ID NO: 933686 - RNA, 19 nt, Artificial Sequence
  Description of Artificial Sequence: Synthetic oligonucleotide
ucccauuacugcaguguau

SEQ ID NO: 933687 - RNA, 19 nt, Artificial Sequence
  Description of Artificial Sequence: Synthetic oligonucleotide
guguuggcaguuguguggc

SEQ ID NO: 933688 - RNA, 19 nt, Artificial Sequence
  Description of Artificial Sequence: Synthetic oligonucleotide
caaaauuguucagauauau

SEQ ID NO: 933689 - RNA, 19 nt, Artificial Sequence
  Description of Artificial Sequence: Synthetic oligonucleotide
uuagugccgugaacuuucu

SEQ ID NO: 933690 - RNA, 19 nt, Artificial Sequence
  Description of Artificial Sequence: Synthetic oligonucleotide
gugaucuuugcaagagaug

SEQ ID NO: 933691 - RNA, 19 nt, Artificial Sequence
  Description of Artificial Sequence: Synthetic oligonucleotide
acucgcacacauccugcug

SEQ ID NO: 933692 - RNA, 19 nt, Artificial Sequence
  Description of Artificial Sequence: Synthetic oligonucleotide
uggggauaguaggaguaac

SEQ ID NO: 933693 - RNA, 19 nt, Artificial Sequence
  Description of Artificial Sequence: Synthetic oligonucleotide
cuaccucauggaaaugaca

SEQ ID NO: 933694 - RNA, 19 nt, Artificial Sequence
  Description of Artificial Sequence: Synthetic oligonucleotide
gacagaauuuugccguugu

SEQ ID NO: 933695 - RNA, 19 nt, Artificial Sequence
  Description of Artificial Sequence: Synthetic oligonucleotide
ugaguuugagagggugugu

SEQ ID NO: 933696 - RNA, 19 nt, Artificial Sequence
  Description of Artificial Sequence: Synthetic oligonucleotide
acuaggauauugagcaaau

SEQ ID NO: 933697 - RNA, 19 nt, Artificial Sequence
  Description of Artificial Sequence: Synthetic oligonucleotide
cugugcuccccaucuaauc

SEQ ID NO: 933698 - RNA, 19 nt, Artificial Sequence
  Description of Artificial Sequence: Synthetic oligonucleotide
uguggcggacagucccagg

SEQ ID NO: 933699 - RNA, 19 nt, Artificial Sequence
  Description of Artificial Sequence: Synthetic oligonucleotide
uuugccguuguaguuuguu

SEQ ID NO: 933700 - RNA, 19 nt, Artificial Sequence
  Description of Artificial Sequence: Synthetic oligonucleotide
aguagugagcuaggauuug

SEQ ID NO: 933701 - RNA, 19 nt, Artificial Sequence
  Description of Artificial Sequence: Synthetic oligonucleotide
ugccgugaacuuucugcca

SEQ ID NO: 933702 - RNA, 19 nt, Artificial Sequence
  Description of Artificial Sequence: Synthetic oligonucleotide
gaauuuugccguuguaguu

SEQ ID NO: 933703 - RNA, 19 nt, Artificial Sequence
  Description of Artificial Sequence: Synthetic oligonucleotide
gguggaauccccaaugaaa

SEQ ID NO: 933704 - RNA, 19 nt, Artificial Sequence
  Description of Artificial Sequence: Synthetic oligonucleotide
ucacuaggauauugagcaa

SEQ ID NO: 933705 - RNA, 19 nt, Artificial Sequence
  Description of Artificial Sequence: Synthetic oligonucleotide
cuucgaucuuccugauuuc

SEQ ID NO: 933706 - RNA, 19 nt, Artificial Sequence
  Description of Artificial Sequence: Synthetic oligonucleotide
agaacaaaccugguuuauu

SEQ ID NO: 933707 - RNA, 19 nt, Artificial Sequence
  Description of Artificial Sequence: Synthetic oligonucleotide
auauugcagacugugccuu

SEQ ID NO: 933708 - RNA, 19 nt, Artificial Sequence
  Description of Artificial Sequence: Synthetic oligonucleotide
ggauuuaguuccagacggg

SEQ ID NO: 933709 - RNA, 19 nt, Artificial Sequence
  Description of Artificial Sequence: Synthetic oligonucleotide
aauaugguucuuggaucuu

SEQ ID NO: 933710 - RNA, 19 nt, Artificial Sequence
  Description of Artificial Sequence: Synthetic oligonucleotide
ggauuugccauaucauaaa

SEQ ID NO: 933711 - RNA, 19 nt, Artificial Sequence
  Description of Artificial Sequence: Synthetic oligonucleotide
cugggaauuaagccacuga

SEQ ID NO: 933712 - RNA, 19 nt, Artificial Sequence
  Description of Artificial Sequence: Synthetic oligonucleotide
ugcuagccugaguuugaga

SEQ ID NO: 933713 - RNA, 19 nt, Artificial Sequence
  Description of Artificial Sequence: Synthetic oligonucleotide
guggcggacagucccagga

SEQ ID NO: 933714 - RNA, 19 nt, Artificial Sequence
  Description of Artificial Sequence: Synthetic oligonucleotide
ucuugauaacauggugcuc

SEQ ID NO: 933715 - RNA, 19 nt, Artificial Sequence
  Description of Artificial Sequence: Synthetic oligonucleotide
gggaauuaagccacugaac

SEQ ID NO: 933716 - RNA, 19 nt, Artificial Sequence
  Description of Artificial Sequence: Synthetic oligonucleotide
auccaauccccaaaguuuu

SEQ ID NO: 933717 - RNA, 19 nt, Artificial Sequence
  Description of Artificial Sequence: Synthetic oligonucleotide
uugccgagagaaggaagca

SEQ ID NO: 933718 - RNA, 19 nt, Artificial Sequence
  Description of Artificial Sequence: Synthetic oligonucleotide
gaaccucgcugcaagcuuc

SEQ ID NO: 933719 - RNA, 19 nt, Artificial Sequence
  Description of Artificial Sequence: Synthetic oligonucleotide
ucgucccauugugauagug

SEQ ID NO: 933720 - RNA, 19 nt, Artificial Sequence
  Description of Artificial Sequence: Synthetic oligonucleotide
cacggguauccuuggucgc

SEQ ID NO: 933721 - RNA, 19 nt, Artificial Sequence
  Description of Artificial Sequence: Synthetic oligonucleotide
acagaauuuugccguugua

SEQ ID NO: 933722 - RNA, 19 nt, Artificial Sequence
  Description of Artificial Sequence: Synthetic oligonucleotide
cuuuacaaagguccuaauu

SEQ ID NO: 933723 - RNA, 19 nt, Artificial Sequence
  Description of Artificial Sequence: Synthetic oligonucleotide
cuaggauuugccauaucau

SEQ ID NO: 933724 - RNA, 19 nt, Artificial Sequence
  Description of Artificial Sequence: Synthetic oligonucleotide
cacuguagccaugcugacc

SEQ ID NO: 933725 - RNA, 19 nt, Artificial Sequence
  Description of Artificial Sequence: Synthetic oligonucleotide
ugauaacauggugcucucu

SEQ ID NO: 933726 - RNA, 19 nt, Artificial Sequence
  Description of Artificial Sequence: Synthetic oligonucleotide
cugucuggucaguauucuc

SEQ ID NO: 933727 - RNA, 19 nt, Artificial Sequence
  Description of Artificial Sequence: Synthetic oligonucleotide
caaugaaaaggaucuuccu

SEQ ID NO: 933728 - RNA, 19 nt, Artificial Sequence
  Description of Artificial Sequence: Synthetic oligonucleotide
aguaacaaauggggaacuu

SEQ ID NO: 933729 - RNA, 19 nt, Artificial Sequence
  Description of Artificial Sequence: Synthetic oligonucleotide
ccgagagaaggaagcaccg

SEQ ID NO: 933730 - RNA, 19 nt, Artificial Sequence
  Description of Artificial Sequence: Synthetic oligonucleotide
agcuaggauuugccauauc

SEQ ID NO: 933731 - RNA, 19 nt, Artificial Sequence
  Description of Artificial Sequence: Synthetic oligonucleotide
gcaacuaaggcaaggcaca

SEQ ID NO: 933732 - RNA, 19 nt, Artificial Sequence
  Description of Artificial Sequence: Synthetic oligonucleotide
uagugccgugaacuuucug

SEQ ID NO: 933733 - RNA, 19 nt, Artificial Sequence
  Description of Artificial Sequence: Synthetic oligonucleotide
cacuaggauauugagcaaa

SEQ ID NO: 933734 - RNA, 19 nt, Artificial Sequence
  Description of Artificial Sequence: Synthetic oligonucleotide
ccaacaaccaauacugucu

SEQ ID NO: 933735 - RNA, 19 nt, Artificial Sequence
  Description of Artificial Sequence: Synthetic oligonucleotide
ggaccucugacaugauaug

SEQ ID NO: 933736 - RNA, 19 nt, Artificial Sequence
  Description of Artificial Sequence: Synthetic oligonucleotide
cagaccucugacucgcaca

SEQ ID NO: 933737 - RNA, 19 nt, Artificial Sequence
  Description of Artificial Sequence: Synthetic oligonucleotide
ccuuggucgcaucugcuag

SEQ ID NO: 933738 - RNA, 19 nt, Artificial Sequence
  Description of Artificial Sequence: Synthetic oligonucleotide
ggaugugaucuuugcaaga

SEQ ID NO: 933739 - RNA, 19 nt, Artificial Sequence
  Description of Artificial Sequence: Synthetic oligonucleotide
gugagcuaggauuugccau

SEQ ID NO: 933740 - RNA, 19 nt, Artificial Sequence
  Description of Artificial Sequence: Synthetic oligonucleotide
aaggagaccugaagaggau

SEQ ID NO: 933741 - RNA, 19 nt, Artificial Sequence
  Description of Artificial Sequence: Synthetic oligonucleotide
cgggauuuaguuccagacg

SEQ ID NO: 933742 - RNA, 19 nt, Artificial Sequence
  Description of Artificial Sequence: Synthetic oligonucleotide
uuccauuccaguggaugua

SEQ ID NO: 933743 - RNA, 19 nt, Artificial Sequence
  Description of Artificial Sequence: Synthetic oligonucleotide
uguggcugccagguuauuu

SEQ ID NO: 933744 - RNA, 19 nt, Artificial Sequence
  Description of Artificial Sequence: Synthetic oligonucleotide
gugcuccccaucuaaucuc

SEQ ID NO: 933745 - RNA, 19 nt, Artificial Sequence
  Description of Artificial Sequence: Synthetic oligonucleotide
aagcaccguuugucccacg

SEQ ID NO: 933746 - RNA, 19 nt, Artificial Sequence
  Description of Artificial Sequence: Synthetic oligonucleotide
gaagcaccguuugucccac

SEQ ID NO: 933747 - RNA, 19 nt, Artificial Sequence
  Description of Artificial Sequence: Synthetic oligonucleotide
gggucugaagcucuggucu

SEQ ID NO: 933748 - RNA, 19 nt, Artificial Sequence
  Description of Artificial Sequence: Synthetic oligonucleotide
cauuccaguggauguagcu

SEQ ID NO: 933749 - RNA, 19 nt, Artificial Sequence
  Description of Artificial Sequence: Synthetic oligonucleotide
uggcggacagucccaggaa

SEQ ID NO: 933750 - RNA, 19 nt, Artificial Sequence
  Description of Artificial Sequence: Synthetic oligonucleotide
gccgugaacuuucugccac

SEQ ID NO: 933751 - RNA, 19 nt, Artificial Sequence
  Description of Artificial Sequence: Synthetic oligonucleotide
gcugagcaggauuucagaa

SEQ ID NO: 933752 - RNA, 19 nt, Artificial Sequence
  Description of Artificial Sequence: Synthetic oligonucleotide
cuguugucagagcaacuaa

SEQ ID NO: 933753 - RNA, 19 nt, Artificial Sequence
  Description of Artificial Sequence: Synthetic oligonucleotide
uguuagggucuagguaaaa

SEQ ID NO: 933754 - RNA, 19 nt, Artificial Sequence
  Description of Artificial Sequence: Synthetic oligonucleotide
gaacaccaccaacaaccaa

SEQ ID NO: 933755 - RNA, 19 nt, Artificial Sequence
  Description of Artificial Sequence: Synthetic oligonucleotide
cuucuuagucccucggagu

SEQ ID NO: 933756 - RNA, 19 nt, Artificial Sequence
  Description of Artificial Sequence: Synthetic oligonucleotide
cccaaugaaaaggaucuuc

SEQ ID NO: 933757 - RNA, 19 nt, Artificial Sequence
  Description of Artificial Sequence: Synthetic oligonucleotide
guuccggcuugguuaggac

SEQ ID NO: 933758 - RNA, 19 nt, Artificial Sequence
  Description of Artificial Sequence: Synthetic oligonucleotide
gucccacggguauccuugg

SEQ ID NO: 933759 - RNA, 19 nt, Artificial Sequence
  Description of Artificial Sequence: Synthetic oligonucleotide
cagaaauuccuugugucgu

SEQ ID NO: 933760 - RNA, 19 nt, Artificial Sequence
  Description of Artificial Sequence: Synthetic oligonucleotide
guaguuuguuuugacugcu

SEQ ID NO: 933761 - RNA, 19 nt, Artificial Sequence
  Description of Artificial Sequence: Synthetic oligonucleotide
gauuaaacuucgggauuua

SEQ ID NO: 933762 - RNA, 19 nt, Artificial Sequence
  Description of Artificial Sequence: Synthetic oligonucleotide
ucacuaccucauggaaaug

SEQ ID NO: 933763 - RNA, 19 nt, Artificial Sequence
  Description of Artificial Sequence: Synthetic oligonucleotide
gaucuuugcaagagaugcu

SEQ ID NO: 933764 - RNA, 19 nt, Artificial Sequence
  Description of Artificial Sequence: Synthetic oligonucleotide
gacggggagugggugaaga

SEQ ID NO: 933765 - RNA, 19 nt, Artificial Sequence
  Description of Artificial Sequence: Synthetic oligonucleotide
agcccgugcagaccucuga

SEQ ID NO: 933766 - RNA, 19 nt, Artificial Sequence
  Description of Artificial Sequence: Synthetic oligonucleotide
gcaucugcuagccugaguu

SEQ ID NO: 933767 - RNA, 19 nt, Artificial Sequence
  Description of Artificial Sequence: Synthetic oligonucleotide
ccuuuaguguccccagaug

SEQ ID NO: 933768 - RNA, 19 nt, Artificial Sequence
  Description of Artificial Sequence: Synthetic oligonucleotide
cuucgggauuuaguuccag

SEQ ID NO: 933769 - RNA, 19 nt, Artificial Sequence
  Description of Artificial Sequence: Synthetic oligonucleotide
agaccuaggccaguaccaa

SEQ ID NO: 933770 - RNA, 19 nt, Artificial Sequence
  Description of Artificial Sequence: Synthetic oligonucleotide
caauccacuggccuuuagu

SEQ ID NO: 933771 - RNA, 19 nt, Artificial Sequence
  Description of Artificial Sequence: Synthetic oligonucleotide
cagaaugcucagauuuucu

SEQ ID NO: 933772 - RNA, 19 nt, Artificial Sequence
  Description of Artificial Sequence: Synthetic oligonucleotide
cugcuagccugaguuugag

SEQ ID NO: 933773 - RNA, 19 nt, Artificial Sequence
  Description of Artificial Sequence: Synthetic oligonucleotide
acggguauccuuggucgca

SEQ ID NO: 933774 - RNA, 19 nt, Artificial Sequence
  Description of Artificial Sequence: Synthetic oligonucleotide
ggaguguuagggucuaggu

SEQ ID NO: 933775 - RNA, 19 nt, Artificial Sequence
  Description of Artificial Sequence: Synthetic oligonucleotide
cauugacacugggguagag

SEQ ID NO: 933776 - RNA, 19 nt, Artificial Sequence
  Description of Artificial Sequence: Synthetic oligonucleotide
ucgcugcaagcuucuuagu

SEQ ID NO: 933777 - RNA, 19 nt, Artificial Sequence
  Description of Artificial Sequence: Synthetic oligonucleotide
ggcggacagucccaggaac

SEQ ID NO: 933778 - RNA, 19 nt, Artificial Sequence
  Description of Artificial Sequence: Synthetic oligonucleotide
ucccacggguauccuuggu

SEQ ID NO: 933779 - RNA, 19 nt, Artificial Sequence
  Description of Artificial Sequence: Synthetic oligonucleotide
uuugucccacggguauccu

SEQ ID NO: 933780 - RNA, 19 nt, Artificial Sequence
  Description of Artificial Sequence: Synthetic oligonucleotide
gacucgcacacauccugcu

SEQ ID NO: 933781 - RNA, 19 nt, Artificial Sequence
  Description of Artificial Sequence: Synthetic oligonucleotide
uggucucaacgaagggcuu

SEQ ID NO: 933782 - RNA, 19 nt, Artificial Sequence
  Description of Artificial Sequence: Synthetic oligonucleotide
uggucgcaucugcuagccu

SEQ ID NO: 933783 - RNA, 19 nt, Artificial Sequence
  Description of Artificial Sequence: Synthetic oligonucleotide
acggggagugggugaagau

SEQ ID NO: 933784 - RNA, 19 nt, Artificial Sequence
  Description of Artificial Sequence: Synthetic oligonucleotide
ugaugaucacuaggauauu

SEQ ID NO: 933785 - RNA, 19 nt, Artificial Sequence
  Description of Artificial Sequence: Synthetic oligonucleotide
cgggacaguagugagcuag

SEQ ID NO: 933786 - RNA, 19 nt, Artificial Sequence
  Description of Artificial Sequence: Synthetic oligonucleotide
gucgcaucugcuagccuga

SEQ ID NO: 933787 - RNA, 19 nt, Artificial Sequence
  Description of Artificial Sequence: Synthetic oligonucleotide
acugugcuccccaucuaau

SEQ ID NO: 933788 - RNA, 19 nt, Artificial Sequence
  Description of Artificial Sequence: Synthetic oligonucleotide
caccguuugucccacgggu

SEQ ID NO: 933789 - RNA, 19 nt, Artificial Sequence
  Description of Artificial Sequence: Synthetic oligonucleotide
ucgcaucugcuagccugag

SEQ ID NO: 933790 - RNA, 19 nt, Artificial Sequence
  Description of Artificial Sequence: Synthetic oligonucleotide
cccaucuaaucuccuucag

SEQ ID NO: 933791 - RNA, 19 nt, Artificial Sequence
  Description of Artificial Sequence: Synthetic oligonucleotide
caccuugguccaacagcuc

SEQ ID NO: 933792 - RNA, 19 nt, Artificial Sequence
  Description of Artificial Sequence: Synthetic oligonucleotide
agaggguguguggcggaca

SEQ ID NO: 933793 - RNA, 19 nt, Artificial Sequence
  Description of Artificial Sequence: Synthetic oligonucleotide
gcggacagucccaggaacc

SEQ ID NO: 933794 - RNA, 19 nt, Artificial Sequence
  Description of Artificial Sequence: Synthetic oligonucleotide
gcagaccucugacucgcac

SEQ ID NO: 933795 - RNA, 19 nt, Artificial Sequence
  Description of Artificial Sequence: Synthetic oligonucleotide
guguggcggacagucccag

SEQ ID NO: 933796 - RNA, 19 nt, Artificial Sequence
  Description of Artificial Sequence: Synthetic oligonucleotide
ggauuaaacuucgggauuu

SEQ ID NO: 933797 - RNA, 19 nt, Artificial Sequence
  Description of Artificial Sequence: Synthetic oligonucleotide
ucggaguguuagggucuag

SEQ ID NO: 933798 - RNA, 19 nt, Artificial Sequence
  Description of Artificial Sequence: Synthetic oligonucleotide
caggaguucaaaucaccuu

SEQ ID NO: 933799 - RNA, 19 nt, Artificial Sequence
  Description of Artificial Sequence: Synthetic oligonucleotide
gaccaguaucgggacagua

SEQ ID NO: 933800 - RNA, 19 nt, Artificial Sequence
  Description of Artificial Sequence: Synthetic oligonucleotide
ucucaacgaagggcuuauc

SEQ ID NO: 933801 - RNA, 19 nt, Artificial Sequence
  Description of Artificial Sequence: Synthetic oligonucleotide
cccacggguauccuugguc

SEQ ID NO: 933802 - RNA, 19 nt, Artificial Sequence
  Description of Artificial Sequence: Synthetic oligonucleotide
ccggauuaaacuucgggau

SEQ ID NO: 933803 - RNA, 19 nt, Artificial Sequence
  Description of Artificial Sequence: Synthetic oligonucleotide
gugucgucccauugugaua

SEQ ID NO: 933804 - RNA, 19 nt, Artificial Sequence
  Description of Artificial Sequence: Synthetic oligonucleotide
guggauguagcuguuccuu

SEQ ID NO: 933805 - RNA, 19 nt, Artificial Sequence
  Description of Artificial Sequence: Synthetic oligonucleotide
agaccaguaucgggacagu

SEQ ID NO: 933806 - RNA, 19 nt, Artificial Sequence
  Description of Artificial Sequence: Synthetic oligonucleotide
cagggcauuugccgagaga

SEQ ID NO: 933807 - RNA, 19 nt, Artificial Sequence
  Description of Artificial Sequence: Synthetic oligonucleotide
gguccuaauugagugaauu

SEQ ID NO: 933808 - RNA, 19 nt, Artificial Sequence
  Description of Artificial Sequence: Synthetic oligonucleotide
aggguuucauucagccuuu

SEQ ID NO: 933809 - RNA, 19 nt, Artificial Sequence
  Description of Artificial Sequence: Synthetic oligonucleotide
cuucuacaguaauaaucuu

SEQ ID NO: 933810 - RNA, 19 nt, Artificial Sequence
  Description of Artificial Sequence: Synthetic oligonucleotide
guguuagggucuagguaaa

SEQ ID NO: 933811 - RNA, 19 nt, Artificial Sequence
  Description of Artificial Sequence: Synthetic oligonucleotide
ccaguaucgggacaguagu

SEQ ID NO: 933812 - RNA, 19 nt, Artificial Sequence
  Description of Artificial Sequence: Synthetic oligonucleotide
caugcaucacagacugaau

SEQ ID NO: 933813 - RNA, 19 nt, Artificial Sequence
  Description of Artificial Sequence: Synthetic oligonucleotide
ccacaauaugguucuugga

SEQ ID NO: 933814 - RNA, 19 nt, Artificial Sequence
  Description of Artificial Sequence: Synthetic oligonucleotide
cgaagggcuuauccaaaac

SEQ ID NO: 933815 - RNA, 19 nt, Artificial Sequence
  Description of Artificial Sequence: Synthetic oligonucleotide
accguuugucccacgggua

SEQ ID NO: 933816 - RNA, 19 nt, Artificial Sequence
  Description of Artificial Sequence: Synthetic oligonucleotide
gcccgugcagaccucugac

SEQ ID NO: 933817 - RNA, 19 nt, Artificial Sequence
  Description of Artificial Sequence: Synthetic oligonucleotide
cugccaaagugugucucaa

SEQ ID NO: 933818 - RNA, 19 nt, Artificial Sequence
  Description of Artificial Sequence: Synthetic oligonucleotide
ggccaaaauuguucagaua

SEQ ID NO: 933819 - RNA, 19 nt, Artificial Sequence
  Description of Artificial Sequence: Synthetic oligonucleotide
ggggauaguaggaguaacu

SEQ ID NO: 933820 - RNA, 19 nt, Artificial Sequence
  Description of Artificial Sequence: Synthetic oligonucleotide
ccccaucuaaucuccuuca

SEQ ID NO: 933821 - RNA, 19 nt, Artificial Sequence
  Description of Artificial Sequence: Synthetic oligonucleotide
caccaacaaccaauacugu

SEQ ID NO: 933822 - RNA, 19 nt, Artificial Sequence
  Description of Artificial Sequence: Synthetic oligonucleotide
caauuucccugcagaaauu

SEQ ID NO: 933823 - RNA, 19 nt, Artificial Sequence
  Description of Artificial Sequence: Synthetic oligonucleotide
agacggggagugggugaag

SEQ ID NO: 933824 - RNA, 19 nt, Artificial Sequence
  Description of Artificial Sequence: Synthetic oligonucleotide
cugaaguuccggcuugguu

SEQ ID NO: 933825 - RNA, 19 nt, Artificial Sequence
  Description of Artificial Sequence: Synthetic oligonucleotide
gagcccgugcagaccucug

SEQ ID NO: 933826 - RNA, 19 nt, Artificial Sequence
  Description of Artificial Sequence: Synthetic oligonucleotide
gagcuaggauuugccauau

SEQ ID NO: 933827 - RNA, 19 nt, Artificial Sequence
  Description of Artificial Sequence: Synthetic oligonucleotide
gucucaacgaagggcuuau

SEQ ID NO: 933828 - RNA, 19 nt, Artificial Sequence
  Description of Artificial Sequence: Synthetic oligonucleotide
ucgggacaguagugagcua

SEQ ID NO: 933829 - RNA, 19 nt, Artificial Sequence
  Description of Artificial Sequence: Synthetic oligonucleotide
agguccuaauugagugaau

SEQ ID NO: 933830 - RNA, 19 nt, Artificial Sequence
  Description of Artificial Sequence: Synthetic oligonucleotide
ggucucaacgaagggcuua

SEQ ID NO: 933831 - RNA, 19 nt, Artificial Sequence
  Description of Artificial Sequence: Synthetic oligonucleotide
cagacggggagugggugaa

SEQ ID NO: 933832 - RNA, 19 nt, Artificial Sequence
  Description of Artificial Sequence: Synthetic oligonucleotide
ggaaccucgcugcaagcuu

SEQ ID NO: 933833 - RNA, 19 nt, Artificial Sequence
  Description of Artificial Sequence: Synthetic oligonucleotide
cuuagucccucggaguguu

SEQ ID NO: 933834 - RNA, 19 nt, Artificial Sequence
  Description of Artificial Sequence: Synthetic oligonucleotide
cucuaagggaugugaucuu

SEQ ID NO: 933835 - RNA, 19 nt, Artificial Sequence
  Description of Artificial Sequence: Synthetic oligonucleotide
cagaacaaaccugguuuau

SEQ ID NO: 933836 - RNA, 19 nt, Artificial Sequence
  Description of Artificial Sequence: Synthetic oligonucleotide
ccuugugucgucccauugu

SEQ ID NO: 933837 - RNA, 19 nt, Artificial Sequence
  Description of Artificial Sequence: Synthetic oligonucleotide
gaauuccauuccaguggau

SEQ ID NO: 933838 - RNA, 19 nt, Artificial Sequence
  Description of Artificial Sequence: Synthetic oligonucleotide
ggguauccuuggucgcauc

SEQ ID NO: 933839 - RNA, 19 nt, Artificial Sequence
  Description of Artificial Sequence: Synthetic oligonucleotide
agccugaguuugagagggu

SEQ ID NO: 933840 - RNA, 19 nt, Artificial Sequence
  Description of Artificial Sequence: Synthetic oligonucleotide
ccaugcugaccaaggaggu

SEQ ID NO: 933841 - RNA, 19 nt, Artificial Sequence
  Description of Artificial Sequence: Synthetic oligonucleotide
cugacaugauauggugaau

SEQ ID NO: 933842 - RNA, 19 nt, Artificial Sequence
  Description of Artificial Sequence: Synthetic oligonucleotide
guuguguggcugccagguu

SEQ ID NO: 933843 - RNA, 19 nt, Artificial Sequence
  Description of Artificial Sequence: Synthetic oligonucleotide
cacugggguagaguuuagu

SEQ ID NO: 933844 - RNA, 19 nt, Artificial Sequence
  Description of Artificial Sequence: Synthetic oligonucleotide
ccucgcugcaagcuucuua

SEQ ID NO: 933845 - RNA, 19 nt, Artificial Sequence
  Description of Artificial Sequence: Synthetic oligonucleotide
cggcuugguuaggacauug

SEQ ID NO: 933846 - RNA, 19 nt, Artificial Sequence
  Description of Artificial Sequence: Synthetic oligonucleotide
cucuucgaucuuccugauu

SEQ ID NO: 933847 - RNA, 19 nt, Artificial Sequence
  Description of Artificial Sequence: Synthetic oligonucleotide
gcacaauccacuggccuuu

SEQ ID NO: 933848 - RNA, 19 nt, Artificial Sequence
  Description of Artificial Sequence: Synthetic oligonucleotide
ccuuucccauuacugcagu

SEQ ID NO: 933849 - RNA, 19 nt, Artificial Sequence
  Description of Artificial Sequence: Synthetic oligonucleotide
gucgucccauugugauagu

SEQ ID NO: 933850 - RNA, 19 nt, Artificial Sequence
  Description of Artificial Sequence: Synthetic oligonucleotide
ccguuugucccacggguau

SEQ ID NO: 933851 - RNA, 19 nt, Artificial Sequence
  Description of Artificial Sequence: Synthetic oligonucleotide
cggauuaaacuucgggauu

SEQ ID NO: 933852 - RNA, 19 nt, Artificial Sequence
  Description of Artificial Sequence: Synthetic oligonucleotide
cccgugcagaccucugacu

SEQ ID NO: 933853 - RNA, 19 nt, Artificial Sequence
  Description of Artificial Sequence: Synthetic oligonucleotide
ccgugaacuuucugccacu

SEQ ID NO: 933854 - RNA, 19 nt, Artificial Sequence
  Description of Artificial Sequence: Synthetic oligonucleotide
cgagagaaggaagcaccgu

SEQ ID NO: 933855 - RNA, 19 nt, Artificial Sequence
  Description of Artificial Sequence: Synthetic oligonucleotide
guguggcugccagguuauu

SEQ ID NO: 933856 - RNA, 19 nt, Artificial Sequence
  Description of Artificial Sequence: Synthetic oligonucleotide
cggguauccuuggucgcau

SEQ ID NO: 933857 - RNA, 19 nt, Artificial Sequence
  Description of Artificial Sequence: Synthetic oligonucleotide
ccggcuugguuaggacauu

SEQ ID NO: 933858 - RNA, 19 nt, Artificial Sequence
  Description of Artificial Sequence: Synthetic oligonucleotide
uccagaacaagcaucauag

SEQ ID NO: 933859 - RNA, 19 nt, Artificial Sequence
  Description of Artificial Sequence: Synthetic oligonucleotide
auugucguugcucaggagc

SEQ ID NO: 933860 - RNA, 19 nt, Artificial Sequence
  Description of Artificial Sequence: Synthetic oligonucleotide
agaaagauacuuuaaagga

SEQ ID NO: 933861 - RNA, 19 nt, Artificial Sequence
  Description of Artificial Sequence: Synthetic oligonucleotide
auauaauccagacgcacgc

SEQ ID NO: 933862 - RNA, 19 nt, Artificial Sequence
  Description of Artificial Sequence: Synthetic oligonucleotide
ugaccaacccaccagaggg

SEQ ID NO: 933863 - RNA, 19 nt, Artificial Sequence
  Description of Artificial Sequence: Synthetic oligonucleotide
ucaacugacuagcuaaugg

SEQ ID NO: 933864 - RNA, 19 nt, Artificial Sequence
  Description of Artificial Sequence: Synthetic oligonucleotide
gaagugacggcaaagaaag

SEQ ID NO: 933865 - RNA, 19 nt, Artificial Sequence
  Description of Artificial Sequence: Synthetic oligonucleotide
acaagcaucauaguaauuc

SEQ ID NO: 933866 - RNA, 19 nt, Artificial Sequence
  Description of Artificial Sequence: Synthetic oligonucleotide
gaaguuguauaucaguccc

SEQ ID NO: 933867 - RNA, 19 nt, Artificial Sequence
  Description of Artificial Sequence: Synthetic oligonucleotide
cucgucauuguaaauaggg

SEQ ID NO: 933868 - RNA, 19 nt, Artificial Sequence
  Description of Artificial Sequence: Synthetic oligonucleotide
cuaucaauauaucuccugg

SEQ ID NO: 933869 - RNA, 19 nt, Artificial Sequence
  Description of Artificial Sequence: Synthetic oligonucleotide
aucucguauguccacaggc

SEQ ID NO: 933870 - RNA, 19 nt, Artificial Sequence
  Description of Artificial Sequence: Synthetic oligonucleotide
ucaccagucacuaggagcc

SEQ ID NO: 933871 - RNA, 19 nt, Artificial Sequence
  Description of Artificial Sequence: Synthetic oligonucleotide
uaccuaucaauauaucucc

SEQ ID NO: 933872 - RNA, 19 nt, Artificial Sequence
  Description of Artificial Sequence: Synthetic oligonucleotide
agcucaaccuggcugaccc

SEQ ID NO: 933873 - RNA, 19 nt, Artificial Sequence
  Description of Artificial Sequence: Synthetic oligonucleotide
uacuacguagacaagcccc

SEQ ID NO: 933874 - RNA, 19 nt, Artificial Sequence
  Description of Artificial Sequence: Synthetic oligonucleotide
auaccuaucaauauaucuc

SEQ ID NO: 933875 - RNA, 19 nt, Artificial Sequence
  Description of Artificial Sequence: Synthetic oligonucleotide
ugaaguuguauaucagucc

SEQ ID NO: 933876 - RNA, 19 nt, Artificial Sequence
  Description of Artificial Sequence: Synthetic oligonucleotide
guauuguugaccugaaagc

SEQ ID NO: 933877 - RNA, 19 nt, Artificial Sequence
  Description of Artificial Sequence: Synthetic oligonucleotide
acaugugucagcccauacc

SEQ ID NO: 933878 - RNA, 19 nt, Artificial Sequence
  Description of Artificial Sequence: Synthetic oligonucleotide
ucgucauuguaaauagggg

SEQ ID NO: 933879 - RNA, 19 nt, Artificial Sequence
  Description of Artificial Sequence: Synthetic oligonucleotide
agguuaaaaguugacggcc

SEQ ID NO: 933880 - RNA, 19 nt, Artificial Sequence
  Description of Artificial Sequence: Synthetic oligonucleotide
acuggcaucgugcaacccc

SEQ ID NO: 933881 - RNA, 19 nt, Artificial Sequence
  Description of Artificial Sequence: Synthetic oligonucleotide
aguaguccaaugcucguac

SEQ ID NO: 933882 - RNA, 19 nt, Artificial Sequence
  Description of Artificial Sequence: Synthetic oligonucleotide
aguacuacguagacaagcc

SEQ ID NO: 933883 - RNA, 19 nt, Artificial Sequence
  Description of Artificial Sequence: Synthetic oligonucleotide
agggagauauaauccagac

SEQ ID NO: 933884 - RNA, 19 nt, Artificial Sequence
  Description of Artificial Sequence: Synthetic oligonucleotide
ugauugucgagguagagua

SEQ ID NO: 933885 - RNA, 19 nt, Artificial Sequence
  Description of Artificial Sequence: Synthetic oligonucleotide
uguauaucagucccugcgc

SEQ ID NO: 933886 - RNA, 19 nt, Artificial Sequence
  Description of Artificial Sequence: Synthetic oligonucleotide
ucugguucauuccaagucu

SEQ ID NO: 933887 - RNA, 19 nt, Artificial Sequence
  Description of Artificial Sequence: Synthetic oligonucleotide
auccgaccagaccagaacc

SEQ ID NO: 933888 - RNA, 19 nt, Artificial Sequence
  Description of Artificial Sequence: Synthetic oligonucleotide
ugaagagucacagggauac

SEQ ID NO: 933889 - RNA, 19 nt, Artificial Sequence
  Description of Artificial Sequence: Synthetic oligonucleotide
aaagaaagcuuccugugua

SEQ ID NO: 933890 - RNA, 19 nt, Artificial Sequence
  Description of Artificial Sequence: Synthetic oligonucleotide
auagggguguccuugaacu

SEQ ID NO: 933891 - RNA, 19 nt, Artificial Sequence
  Description of Artificial Sequence: Synthetic oligonucleotide
agauauaauccagacgcac

SEQ ID NO: 933892 - RNA, 19 nt, Artificial Sequence
  Description of Artificial Sequence: Synthetic oligonucleotide
auuguaaauaggggugucc

SEQ ID NO: 933893 - RNA, 19 nt, Artificial Sequence
  Description of Artificial Sequence: Synthetic oligonucleotide
aagaaagcuuccuguguag

SEQ ID NO: 933894 - RNA, 19 nt, Artificial Sequence
  Description of Artificial Sequence: Synthetic oligonucleotide
gagguagaguacuacguag

SEQ ID NO: 933895 - RNA, 19 nt, Artificial Sequence
  Description of Artificial Sequence: Synthetic oligonucleotide
uguacgcugggagaaaggg

SEQ ID NO: 933896 - RNA, 19 nt, Artificial Sequence
  Description of Artificial Sequence: Synthetic oligonucleotide
aacaugugucagcccauac

SEQ ID NO: 933897 - RNA, 19 nt, Artificial Sequence
  Description of Artificial Sequence: Synthetic oligonucleotide
caacugacuagcuaauggc

SEQ ID NO: 933898 - RNA, 19 nt, Artificial Sequence
  Description of Artificial Sequence: Synthetic oligonucleotide
uagaucaggacugugguac

SEQ ID NO: 933899 - RNA, 19 nt, Artificial Sequence
  Description of Artificial Sequence: Synthetic oligonucleotide
uaaugcauggaggagcugc

SEQ ID NO: 933900 - RNA, 19 nt, Artificial Sequence
  Description of Artificial Sequence: Synthetic oligonucleotide
aggagcacauaaugcaugg

SEQ ID NO: 933901 - RNA, 19 nt, Artificial Sequence
  Description of Artificial Sequence: Synthetic oligonucleotide
ugcgcagaugacuuucugg

SEQ ID NO: 933902 - RNA, 19 nt, Artificial Sequence
  Description of Artificial Sequence: Synthetic oligonucleotide
uguagagucaggcggcccc

SEQ ID NO: 933903 - RNA, 19 nt, Artificial Sequence
  Description of Artificial Sequence: Synthetic oligonucleotide
uacgccaggccucugagga

SEQ ID NO: 933904 - RNA, 19 nt, Artificial Sequence
  Description of Artificial Sequence: Synthetic oligonucleotide
ucacuaguguagaucagga

SEQ ID NO: 933905 - RNA, 19 nt, Artificial Sequence
  Description of Artificial Sequence: Synthetic oligonucleotide
ugugauugcuguccaacac

SEQ ID NO: 933906 - RNA, 19 nt, Artificial Sequence
  Description of Artificial Sequence: Synthetic oligonucleotide
aggcucaccagucacuagg

SEQ ID NO: 933907 - RNA, 19 nt, Artificial Sequence
  Description of Artificial Sequence: Synthetic oligonucleotide
uugaccugaaagcgggcgg

SEQ ID NO: 933908 - RNA, 19 nt, Artificial Sequence
  Description of Artificial Sequence: Synthetic oligonucleotide
ucaugaggcagggacaucc

SEQ ID NO: 933909 - RNA, 19 nt, Artificial Sequence
  Description of Artificial Sequence: Synthetic oligonucleotide
ugaggacuggcuuucgcag

SEQ ID NO: 933910 - RNA, 19 nt, Artificial Sequence
  Description of Artificial Sequence: Synthetic oligonucleotide
gaguacuacguagacaagc

SEQ ID NO: 933911 - RNA, 19 nt, Artificial Sequence
  Description of Artificial Sequence: Synthetic oligonucleotide
cagugaagaaguugguucc

SEQ ID NO: 933912 - RNA, 19 nt, Artificial Sequence
  Description of Artificial Sequence: Synthetic oligonucleotide
aaguccgugaaguggccag

SEQ ID NO: 933913 - RNA, 19 nt, Artificial Sequence
  Description of Artificial Sequence: Synthetic oligonucleotide
ucgaaguuccacuuggaaa

SEQ ID NO: 933914 - RNA, 19 nt, Artificial Sequence
  Description of Artificial Sequence: Synthetic oligonucleotide
aucacuaguguagaucagg

SEQ ID NO: 933915 - RNA, 19 nt, Artificial Sequence
  Description of Artificial Sequence: Synthetic oligonucleotide
ucggaauugcucugcagag

SEQ ID NO: 933916 - RNA, 19 nt, Artificial Sequence
  Description of Artificial Sequence: Synthetic oligonucleotide
uaguccaaugcucguaccc

SEQ ID NO: 933917 - RNA, 19 nt, Artificial Sequence
  Description of Artificial Sequence: Synthetic oligonucleotide
gucgagguagaguacuacg

SEQ ID NO: 933918 - RNA, 19 nt, Artificial Sequence
  Description of Artificial Sequence: Synthetic oligonucleotide
uggugccucaaccacuggg

SEQ ID NO: 933919 - RNA, 19 nt, Artificial Sequence
  Description of Artificial Sequence: Synthetic oligonucleotide
ucucguauguccacaggca

SEQ ID NO: 933920 - RNA, 19 nt, Artificial Sequence
  Description of Artificial Sequence: Synthetic oligonucleotide
ucgagguagaguacuacgu

SEQ ID NO: 933921 - RNA, 19 nt, Artificial Sequence
  Description of Artificial Sequence: Synthetic oligonucleotide
uauaucagucccugcgcag

SEQ ID NO: 933922 - RNA, 19 nt, Artificial Sequence
  Description of Artificial Sequence: Synthetic oligonucleotide
caugggacuggcaucgugc

SEQ ID NO: 933923 - RNA, 19 nt, Artificial Sequence
  Description of Artificial Sequence: Synthetic oligonucleotide
agucgugguggucugguuc

SEQ ID NO: 933924 - RNA, 19 nt, Artificial Sequence
  Description of Artificial Sequence: Synthetic oligonucleotide
ugguucauuccaagucucg

SEQ ID NO: 933925 - RNA, 19 nt, Artificial Sequence
  Description of Artificial Sequence: Synthetic oligonucleotide
accaaggcggcauaaguca

SEQ ID NO: 933926 - RNA, 19 nt, Artificial Sequence
  Description of Artificial Sequence: Synthetic oligonucleotide
agugacggcaaagaaagcu

SEQ ID NO: 933927 - RNA, 19 nt, Artificial Sequence
  Description of Artificial Sequence: Synthetic oligonucleotide
gauuggugcauacuccuca

SEQ ID NO: 933928 - RNA, 19 nt, Artificial Sequence
  Description of Artificial Sequence: Synthetic oligonucleotide
uauaucuccuggccaggag

SEQ ID NO: 933929 - RNA, 19 nt, Artificial Sequence
  Description of Artificial Sequence: Synthetic oligonucleotide
aaguugacggccuccugcu

SEQ ID NO: 933930 - RNA, 19 nt, Artificial Sequence
  Description of Artificial Sequence: Synthetic oligonucleotide
accuuguguggucauggac

SEQ ID NO: 933931 - RNA, 19 nt, Artificial Sequence
  Description of Artificial Sequence: Synthetic oligonucleotide
guguauccggaccugcucg

SEQ ID NO: 933932 - RNA, 19 nt, Artificial Sequence
  Description of Artificial Sequence: Synthetic oligonucleotide
ucgcaggagcugcacaugg

SEQ ID NO: 933933 - RNA, 19 nt, Artificial Sequence
  Description of Artificial Sequence: Synthetic oligonucleotide
guuguucuccauccaacag

SEQ ID NO: 933934 - RNA, 19 nt, Artificial Sequence
  Description of Artificial Sequence: Synthetic oligonucleotide
caaugcucguacccgauag

SEQ ID NO: 933935 - RNA, 19 nt, Artificial Sequence
  Description of Artificial Sequence: Synthetic oligonucleotide
auuggcacaaugacgcagg

SEQ ID NO: 933936 - RNA, 19 nt, Artificial Sequence
  Description of Artificial Sequence: Synthetic oligonucleotide
acaaugacgcaggaggcuc

SEQ ID NO: 933937 - RNA, 19 nt, Artificial Sequence
  Description of Artificial Sequence: Synthetic oligonucleotide
guguagaucaggacugugg

SEQ ID NO: 933938 - RNA, 19 nt, Artificial Sequence
  Description of Artificial Sequence: Synthetic oligonucleotide
aguuguauaucagucccug

SEQ ID NO: 933939 - RNA, 19 nt, Artificial Sequence
  Description of Artificial Sequence: Synthetic oligonucleotide
gauacugccguugaggugu

SEQ ID NO: 933940 - RNA, 19 nt, Artificial Sequence
  Description of Artificial Sequence: Synthetic oligonucleotide
uucuugugcagggagauau

SEQ ID NO: 933941 - RNA, 19 nt, Artificial Sequence
  Description of Artificial Sequence: Synthetic oligonucleotide
cuugaacucagggaagagc

SEQ ID NO: 933942 - RNA, 19 nt, Artificial Sequence
  Description of Artificial Sequence: Synthetic oligonucleotide
auaucuccuggccaggaga

SEQ ID NO: 933943 - RNA, 19 nt, Artificial Sequence
  Description of Artificial Sequence: Synthetic oligonucleotide
uaaauagggguguccuuga

SEQ ID NO: 933944 - RNA, 19 nt, Artificial Sequence
  Description of Artificial Sequence: Synthetic oligonucleotide
ggaaacaugugucagccca

SEQ ID NO: 933945 - RNA, 19 nt, Artificial Sequence
  Description of Artificial Sequence: Synthetic oligonucleotide
cuagcuaauggcaguccag

SEQ ID NO: 933946 - RNA, 19 nt, Artificial Sequence
  Description of Artificial Sequence: Synthetic oligonucleotide
acuagcuaauggcagucca

SEQ ID NO: 933947 - RNA, 19 nt, Artificial Sequence
  Description of Artificial Sequence: Synthetic oligonucleotide
ugcccaguaguccaaugcu

SEQ ID NO: 933948 - RNA, 19 nt, Artificial Sequence
  Description of Artificial Sequence: Synthetic oligonucleotide
gucacgucagcucuccaag

SEQ ID NO: 933949 - RNA, 19 nt, Artificial Sequence
  Description of Artificial Sequence: Synthetic oligonucleotide
cauaccuaucaauauaucu

SEQ ID NO: 933950 - RNA, 19 nt, Artificial Sequence
  Description of Artificial Sequence: Synthetic oligonucleotide
gaucucguauguccacagg

SEQ ID NO: 933951 - RNA, 19 nt, Artificial Sequence
  Description of Artificial Sequence: Synthetic oligonucleotide
acugacuagcuaauggcag

SEQ ID NO: 933952 - RNA, 19 nt, Artificial Sequence
  Description of Artificial Sequence: Synthetic oligonucleotide
uugauugucgagguagagu

SEQ ID NO: 933953 - RNA, 19 nt, Artificial Sequence
  Description of Artificial Sequence: Synthetic oligonucleotide
guugaccugaaagcgggcg

SEQ ID NO: 933954 - RNA, 19 nt, Artificial Sequence
  Description of Artificial Sequence: Synthetic oligonucleotide
ugcucguacccgauaggag

SEQ ID NO: 933955 - RNA, 19 nt, Artificial Sequence
  Description of Artificial Sequence: Synthetic oligonucleotide
uagcuaauggcaguccagc

SEQ ID NO: 933956 - RNA, 19 nt, Artificial Sequence
  Description of Artificial Sequence: Synthetic oligonucleotide
aaccucaacaugggacugg

SEQ ID NO: 933957 - RNA, 19 nt, Artificial Sequence
  Description of Artificial Sequence: Synthetic oligonucleotide
auugucgagguagaguacu

SEQ ID NO: 933958 - RNA, 19 nt, Artificial Sequence
  Description of Artificial Sequence: Synthetic oligonucleotide
cuguguagagucaggcggc

SEQ ID NO: 933959 - RNA, 19 nt, Artificial Sequence
  Description of Artificial Sequence: Synthetic oligonucleotide
aguugguuccauuggcaca

SEQ ID NO: 933960 - RNA, 19 nt, Artificial Sequence
  Description of Artificial Sequence: Synthetic oligonucleotide
uauaauccagacgcacgcc

SEQ ID NO: 933961 - RNA, 19 nt, Artificial Sequence
  Description of Artificial Sequence: Synthetic oligonucleotide
ugugaggacuggcuuucgc

SEQ ID NO: 933962 - RNA, 19 nt, Artificial Sequence
  Description of Artificial Sequence: Synthetic oligonucleotide
uuucgcaggagcugcacau

SEQ ID NO: 933963 - RNA, 19 nt, Artificial Sequence
  Description of Artificial Sequence: Synthetic oligonucleotide
ucguauguccacaggcacu

SEQ ID NO: 933964 - RNA, 19 nt, Artificial Sequence
  Description of Artificial Sequence: Synthetic oligonucleotide
gugaccaacccaccagagg

SEQ ID NO: 933965 - RNA, 19 nt, Artificial Sequence
  Description of Artificial Sequence: Synthetic oligonucleotide
guaaguguacgcugggaga

SEQ ID NO: 933966 - RNA, 19 nt, Artificial Sequence
  Description of Artificial Sequence: Synthetic oligonucleotide
accucaacaugggacuggc

SEQ ID NO: 933967 - RNA, 19 nt, Artificial Sequence
  Description of Artificial Sequence: Synthetic oligonucleotide
auagucaacugacuagcua

SEQ ID NO: 933968 - RNA, 19 nt, Artificial Sequence
  Description of Artificial Sequence: Synthetic oligonucleotide
uccgaccagaccagaacca

SEQ ID NO: 933969 - RNA, 19 nt, Artificial Sequence
  Description of Artificial Sequence: Synthetic oligonucleotide
cucguauguccacaggcac

SEQ ID NO: 933970 - RNA, 19 nt, Artificial Sequence
  Description of Artificial Sequence: Synthetic oligonucleotide
caaggcggcauaagucacg

SEQ ID NO: 933971 - RNA, 19 nt, Artificial Sequence
  Description of Artificial Sequence: Synthetic oligonucleotide
guacuacguagacaagccc

SEQ ID NO: 933972 - RNA, 19 nt, Artificial Sequence
  Description of Artificial Sequence: Synthetic oligonucleotide
caggagcacauaaugcaug

SEQ ID NO: 933973 - RNA, 19 nt, Artificial Sequence
  Description of Artificial Sequence: Synthetic oligonucleotide
cagaacaagcaucauagua

SEQ ID NO: 933974 - RNA, 19 nt, Artificial Sequence
  Description of Artificial Sequence: Synthetic oligonucleotide
ugcgcauacgucggaauug

SEQ ID NO: 933975 - RNA, 19 nt, Artificial Sequence
  Description of Artificial Sequence: Synthetic oligonucleotide
agguuagagaaagauacuu

SEQ ID NO: 933976 - RNA, 19 nt, Artificial Sequence
  Description of Artificial Sequence: Synthetic oligonucleotide
guauaucagucccugcgca

SEQ ID NO: 933977 - RNA, 19 nt, Artificial Sequence
  Description of Artificial Sequence: Synthetic oligonucleotide
ggcggcauaagucacguca

SEQ ID NO: 933978 - RNA, 19 nt, Artificial Sequence
  Description of Artificial Sequence: Synthetic oligonucleotide
aagugacggcaaagaaagc

SEQ ID NO: 933979 - RNA, 19 nt, Artificial Sequence
  Description of Artificial Sequence: Synthetic oligonucleotide
aaguauuguugaccugaaa

SEQ ID NO: 933980 - RNA, 19 nt, Artificial Sequence
  Description of Artificial Sequence: Synthetic oligonucleotide
cauuggcacaaugacgcag

SEQ ID NO: 933981 - RNA, 19 nt, Artificial Sequence
  Description of Artificial Sequence: Synthetic oligonucleotide
gcucucaugaggcagggac

SEQ ID NO: 933982 - RNA, 19 nt, Artificial Sequence
  Description of Artificial Sequence: Synthetic oligonucleotide
cacauaaugcauggaggag

SEQ ID NO: 933983 - RNA, 19 nt, Artificial Sequence
  Description of Artificial Sequence: Synthetic oligonucleotide
gaacaagcaucauaguaau

SEQ ID NO: 933984 - RNA, 19 nt, Artificial Sequence
  Description of Artificial Sequence: Synthetic oligonucleotide
gcgcagaugacuuucuggc

SEQ ID NO: 933985 - RNA, 19 nt, Artificial Sequence
  Description of Artificial Sequence: Synthetic oligonucleotide
gaaguugguuccauuggca

SEQ ID NO: 933986 - RNA, 19 nt, Artificial Sequence
  Description of Artificial Sequence: Synthetic oligonucleotide
cucgccagucagcacaggc

SEQ ID NO: 933987 - RNA, 19 nt, Artificial Sequence
  Description of Artificial Sequence: Synthetic oligonucleotide
aguguacgcugggagaaag

SEQ ID NO: 933988 - RNA, 19 nt, Artificial Sequence
  Description of Artificial Sequence: Synthetic oligonucleotide
ccgugaaguggccagaagg

SEQ ID NO: 933989 - RNA, 19 nt, Artificial Sequence
  Description of Artificial Sequence: Synthetic oligonucleotide
cccaguaguccaaugcucg

SEQ ID NO: 933990 - RNA, 19 nt, Artificial Sequence
  Description of Artificial Sequence: Synthetic oligonucleotide
aaauagggguguccuugaa

SEQ ID NO: 933991 - RNA, 19 nt, Artificial Sequence
  Description of Artificial Sequence: Synthetic oligonucleotide
ugaaagcgggcgguaagug

SEQ ID NO: 933992 - RNA, 19 nt, Artificial Sequence
  Description of Artificial Sequence: Synthetic oligonucleotide
caucgugcaaccccuccag

SEQ ID NO: 933993 - RNA, 19 nt, Artificial Sequence
  Description of Artificial Sequence: Synthetic oligonucleotide
cauccgaccagaccagaac

SEQ ID NO: 933994 - RNA, 19 nt, Artificial Sequence
  Description of Artificial Sequence: Synthetic oligonucleotide
agucucgaaguuccacuug

SEQ ID NO: 933995 - RNA, 19 nt, Artificial Sequence
  Description of Artificial Sequence: Synthetic oligonucleotide
ugauuggugcauacuccuc

SEQ ID NO: 933996 - RNA, 19 nt, Artificial Sequence
  Description of Artificial Sequence: Synthetic oligonucleotide
uguauccggaccugcucga

SEQ ID NO: 933997 - RNA, 19 nt, Artificial Sequence
  Description of Artificial Sequence: Synthetic oligonucleotide
aaggcggcauaagucacgu

SEQ ID NO: 933998 - RNA, 19 nt, Artificial Sequence
  Description of Artificial Sequence: Synthetic oligonucleotide
caccaugcgcauacgucgg

SEQ ID NO: 933999 - RNA, 19 nt, Artificial Sequence
  Description of Artificial Sequence: Synthetic oligonucleotide
acagggauacugccguuga

SEQ ID NO: 934000 - RNA, 19 nt, Artificial Sequence
  Description of Artificial Sequence: Synthetic oligonucleotide
ucacuaggagccaguggcu

SEQ ID NO: 934001 - RNA, 19 nt, Artificial Sequence
  Description of Artificial Sequence: Synthetic oligonucleotide
aaacauccaaguaggugaa

SEQ ID NO: 934002 - RNA, 19 nt, Artificial Sequence
  Description of Artificial Sequence: Synthetic oligonucleotide
ugugcaugggugucaucac

SEQ ID NO: 934003 - RNA, 19 nt, Artificial Sequence
  Description of Artificial Sequence: Synthetic oligonucleotide
gguagaguacuacguagac

SEQ ID NO: 934004 - RNA, 19 nt, Artificial Sequence
  Description of Artificial Sequence: Synthetic oligonucleotide
aaguuguauaucagucccu

SEQ ID NO: 934005 - RNA, 19 nt, Artificial Sequence
  Description of Artificial Sequence: Synthetic oligonucleotide
ucgugcaaccccuccagaa

SEQ ID NO: 934006 - RNA, 19 nt, Artificial Sequence
  Description of Artificial Sequence: Synthetic oligonucleotide
agcuaauggcaguccagcu

SEQ ID NO: 934007 - RNA, 19 nt, Artificial Sequence
  Description of Artificial Sequence: Synthetic oligonucleotide
acuaggagccaguggcucu

SEQ ID NO: 934008 - RNA, 19 nt, Artificial Sequence
  Description of Artificial Sequence: Synthetic oligonucleotide
aaaguccgugaaguggcca

SEQ ID NO: 934009 - RNA, 19 nt, Artificial Sequence
  Description of Artificial Sequence: Synthetic oligonucleotide
guugauugucgagguagag

SEQ ID NO: 934010 - RNA, 19 nt, Artificial Sequence
  Description of Artificial Sequence: Synthetic oligonucleotide
ccuaucaauauaucuccug

SEQ ID NO: 934011 - RNA, 19 nt, Artificial Sequence
  Description of Artificial Sequence: Synthetic oligonucleotide
ucauccgaccagaccagaa

SEQ ID NO: 934012 - RNA, 19 nt, Artificial Sequence
  Description of Artificial Sequence: Synthetic oligonucleotide
cugguucauuccaagucuc

SEQ ID NO: 934013 - RNA, 19 nt, Artificial Sequence
  Description of Artificial Sequence: Synthetic oligonucleotide
gcaaguauuguugaccuga

SEQ ID NO: 934014 - RNA, 19 nt, Artificial Sequence
  Description of Artificial Sequence: Synthetic oligonucleotide
caaugacgcaggaggcucc

SEQ ID NO: 934015 - RNA, 19 nt, Artificial Sequence
  Description of Artificial Sequence: Synthetic oligonucleotide
caucacuaguguagaucag

SEQ ID NO: 934016 - RNA, 19 nt, Artificial Sequence
  Description of Artificial Sequence: Synthetic oligonucleotide
auaucagucccugcgcaga

SEQ ID NO: 934017 - RNA, 19 nt, Artificial Sequence
  Description of Artificial Sequence: Synthetic oligonucleotide
uguguagagucaggcggcc

SEQ ID NO: 934018 - RNA, 19 nt, Artificial Sequence
  Description of Artificial Sequence: Synthetic oligonucleotide
uggaucucguauguccaca

SEQ ID NO: 934019 - RNA, 19 nt, Artificial Sequence
  Description of Artificial Sequence: Synthetic oligonucleotide
aaggggccuggccgugccc

SEQ ID NO: 934020 - RNA, 19 nt, Artificial Sequence
  Description of Artificial Sequence: Synthetic oligonucleotide
acuacguagacaagcccca

SEQ ID NO: 934021 - RNA, 19 nt, Artificial Sequence
  Description of Artificial Sequence: Synthetic oligonucleotide
guaguccaaugcucguacc

SEQ ID NO: 934022 - RNA, 19 nt, Artificial Sequence
  Description of Artificial Sequence: Synthetic oligonucleotide
auaggagccggagaccaca

SEQ ID NO: 934023 - RNA, 19 nt, Artificial Sequence
  Description of Artificial Sequence: Synthetic oligonucleotide
guccauagucaacugacua

SEQ ID NO: 934024 - RNA, 19 nt, Artificial Sequence
  Description of Artificial Sequence: Synthetic oligonucleotide
agaaagcuuccuguguaga

SEQ ID NO: 934025 - RNA, 19 nt, Artificial Sequence
  Description of Artificial Sequence: Synthetic oligonucleotide
accaacccaccagaggguc

SEQ ID NO: 934026 - RNA, 19 nt, Artificial Sequence
  Description of Artificial Sequence: Synthetic oligonucleotide
gacuagcuaauggcagucc

SEQ ID NO: 934027 - RNA, 19 nt, Artificial Sequence
  Description of Artificial Sequence: Synthetic oligonucleotide
agccggagaccacagcugu

SEQ ID NO: 934028 - RNA, 19 nt, Artificial Sequence
  Description of Artificial Sequence: Synthetic oligonucleotide
cuggcugaccccacucgcc

SEQ ID NO: 934029 - RNA, 19 nt, Artificial Sequence
  Description of Artificial Sequence: Synthetic oligonucleotide
agguagaguacuacguaga

SEQ ID NO: 934030 - RNA, 19 nt, Artificial Sequence
  Description of Artificial Sequence: Synthetic oligonucleotide
gugugauugcuguccaaca

SEQ ID NO: 934031 - RNA, 19 nt, Artificial Sequence
  Description of Artificial Sequence: Synthetic oligonucleotide
aguuccacuuggaaacaug

SEQ ID NO: 934032 - RNA, 19 nt, Artificial Sequence
  Description of Artificial Sequence: Synthetic oligonucleotide
augcucguacccgauagga

SEQ ID NO: 934033 - RNA, 19 nt, Artificial Sequence
  Description of Artificial Sequence: Synthetic oligonucleotide
acuggaucucguaugucca

SEQ ID NO: 934034 - RNA, 19 nt, Artificial Sequence
  Description of Artificial Sequence: Synthetic oligonucleotide
gugcaaccccuccagaaca

SEQ ID NO: 934035 - RNA, 19 nt, Artificial Sequence
  Description of Artificial Sequence: Synthetic oligonucleotide
uaucagucccugcgcagau

SEQ ID NO: 934036 - RNA, 19 nt, Artificial Sequence
  Description of Artificial Sequence: Synthetic oligonucleotide
ggaucucguauguccacag

SEQ ID NO: 934037 - RNA, 19 nt, Artificial Sequence
  Description of Artificial Sequence: Synthetic oligonucleotide
aaugacgcaggaggcucca

SEQ ID NO: 934038 - RNA, 19 nt, Artificial Sequence
  Description of Artificial Sequence: Synthetic oligonucleotide
guggugacuuuggcgaggg

SEQ ID NO: 934039 - RNA, 19 nt, Artificial Sequence
  Description of Artificial Sequence: Synthetic oligonucleotide
uacccgauaggagccggag

SEQ ID NO: 934040 - RNA, 19 nt, Artificial Sequence
  Description of Artificial Sequence: Synthetic oligonucleotide
ccuuguguggucauggaca

SEQ ID NO: 934041 - RNA, 19 nt, Artificial Sequence
  Description of Artificial Sequence: Synthetic oligonucleotide
ugccguugaggugugcaug

SEQ ID NO: 934042 - RNA, 19 nt, Artificial Sequence
  Description of Artificial Sequence: Synthetic oligonucleotide
ugaccugaaagcgggcggu

SEQ ID NO: 934043 - RNA, 19 nt, Artificial Sequence
  Description of Artificial Sequence: Synthetic oligonucleotide
cagggagauauaauccaga

SEQ ID NO: 934044 - RNA, 19 nt, Artificial Sequence
  Description of Artificial Sequence: Synthetic oligonucleotide
ccacuuggaaacauguguc

SEQ ID NO: 934045 - RNA, 19 nt, Artificial Sequence
  Description of Artificial Sequence: Synthetic oligonucleotide
aagcgggcgguaaguguac

SEQ ID NO: 934046 - RNA, 19 nt, Artificial Sequence
  Description of Artificial Sequence: Synthetic oligonucleotide
gucgugguggucugguuca

SEQ ID NO: 934047 - RNA, 19 nt, Artificial Sequence
  Description of Artificial Sequence: Synthetic oligonucleotide
ugcaaccccuccagaacaa

SEQ ID NO: 934048 - RNA, 19 nt, Artificial Sequence
  Description of Artificial Sequence: Synthetic oligonucleotide
cuggaucucguauguccac

SEQ ID NO: 934049 - RNA, 19 nt, Artificial Sequence
  Description of Artificial Sequence: Synthetic oligonucleotide
gcuaauggcaguccagcuc

SEQ ID NO: 934050 - RNA, 19 nt, Artificial Sequence
  Description of Artificial Sequence: Synthetic oligonucleotide
ggcgguaaguguacgcugg

SEQ ID NO: 934051 - RNA, 19 nt, Artificial Sequence
  Description of Artificial Sequence: Synthetic oligonucleotide
gauugucgagguagaguac

SEQ ID NO: 934052 - RNA, 19 nt, Artificial Sequence
  Description of Artificial Sequence: Synthetic oligonucleotide
auauaucuccuggccagga

SEQ ID NO: 934053 - RNA, 19 nt, Artificial Sequence
  Description of Artificial Sequence: Synthetic oligonucleotide
gaggagcugcuauuggcaa

SEQ ID NO: 934054 - RNA, 19 nt, Artificial Sequence
  Description of Artificial Sequence: Synthetic oligonucleotide
cccgauaggagccggagac

SEQ ID NO: 934055 - RNA, 19 nt, Artificial Sequence
  Description of Artificial Sequence: Synthetic oligonucleotide
uugucgagguagaguacua

SEQ ID NO: 934056 - RNA, 19 nt, Artificial Sequence
  Description of Artificial Sequence: Synthetic oligonucleotide
agcucaaacccagggagaa

SEQ ID NO: 934057 - RNA, 19 nt, Artificial Sequence
  Description of Artificial Sequence: Synthetic oligonucleotide
guacgccaggccucugagg

SEQ ID NO: 934058 - RNA, 19 nt, Artificial Sequence
  Description of Artificial Sequence: Synthetic oligonucleotide
cauuguaaauagggguguc

SEQ ID NO: 934059 - RNA, 19 nt, Artificial Sequence
  Description of Artificial Sequence: Synthetic oligonucleotide
acugccguugaggugugca

SEQ ID NO: 934060 - RNA, 19 nt, Artificial Sequence
  Description of Artificial Sequence: Synthetic oligonucleotide
cauugucguugcucaggag

SEQ ID NO: 934061 - RNA, 19 nt, Artificial Sequence
  Description of Artificial Sequence: Synthetic oligonucleotide
gugaaguggccagaaggac

SEQ ID NO: 934062 - RNA, 19 nt, Artificial Sequence
  Description of Artificial Sequence: Synthetic oligonucleotide
gcucaggagcacauaaugc

SEQ ID NO: 934063 - RNA, 19 nt, Artificial Sequence
  Description of Artificial Sequence: Synthetic oligonucleotide
ucguacccgauaggagccg

SEQ ID NO: 934064 - RNA, 19 nt, Artificial Sequence
  Description of Artificial Sequence: Synthetic oligonucleotide
cugauuggugcauacuccu

SEQ ID NO: 934065 - RNA, 19 nt, Artificial Sequence
  Description of Artificial Sequence: Synthetic oligonucleotide
ggcaguccagcucaaccug

SEQ ID NO: 934066 - RNA, 19 nt, Artificial Sequence
  Description of Artificial Sequence: Synthetic oligonucleotide
agaguugauugucgaggua

SEQ ID NO: 934067 - RNA, 19 nt, Artificial Sequence
  Description of Artificial Sequence: Synthetic oligonucleotide
cuugugcagggagauauaa

SEQ ID NO: 934068 - RNA, 19 nt, Artificial Sequence
  Description of Artificial Sequence: Synthetic oligonucleotide
gaaagggcguggugccuca

SEQ ID NO: 934069 - RNA, 19 nt, Artificial Sequence
  Description of Artificial Sequence: Synthetic oligonucleotide
guccaaugcucguacccga

SEQ ID NO: 934070 - RNA, 19 nt, Artificial Sequence
  Description of Artificial Sequence: Synthetic oligonucleotide
agacaagccccaagccagg

SEQ ID NO: 934071 - RNA, 19 nt, Artificial Sequence
  Description of Artificial Sequence: Synthetic oligonucleotide
gugugcauacaugcaccag

SEQ ID NO: 934072 - RNA, 19 nt, Artificial Sequence
  Description of Artificial Sequence: Synthetic oligonucleotide
augcaccagcagaagugac

SEQ ID NO: 934073 - RNA, 19 nt, Artificial Sequence
  Description of Artificial Sequence: Synthetic oligonucleotide
uucaaggggcgugugcaua

SEQ ID NO: 934074 - RNA, 19 nt, Artificial Sequence
  Description of Artificial Sequence: Synthetic oligonucleotide
agaguacuacguagacaag

SEQ ID NO: 934075 - RNA, 19 nt, Artificial Sequence
  Description of Artificial Sequence: Synthetic oligonucleotide
ggcuguaaugagauccagc

SEQ ID NO: 934076 - RNA, 19 nt, Artificial Sequence
  Description of Artificial Sequence: Synthetic oligonucleotide
cagugaccaacccaccaga

SEQ ID NO: 934077 - RNA, 19 nt, Artificial Sequence
  Description of Artificial Sequence: Synthetic oligonucleotide
caaagucgugguggucugg

SEQ ID NO: 934078 - RNA, 19 nt, Artificial Sequence
  Description of Artificial Sequence: Synthetic oligonucleotide
ggauacugccguugaggug

SEQ ID NO: 934079 - RNA, 19 nt, Artificial Sequence
  Description of Artificial Sequence: Synthetic oligonucleotide
cagggauacugccguugag

SEQ ID NO: 934080 - RNA, 19 nt, Artificial Sequence
  Description of Artificial Sequence: Synthetic oligonucleotide
acccgauaggagccggaga

SEQ ID NO: 934081 - RNA, 19 nt, Artificial Sequence
  Description of Artificial Sequence: Synthetic oligonucleotide
acgucggaauugcucugca

SEQ ID NO: 934082 - RNA, 19 nt, Artificial Sequence
  Description of Artificial Sequence: Synthetic oligonucleotide
aagucgugguggucugguu

SEQ ID NO: 934083 - RNA, 19 nt, Artificial Sequence
  Description of Artificial Sequence: Synthetic oligonucleotide
uggccgugcccaguagucc

SEQ ID NO: 934084 - RNA, 19 nt, Artificial Sequence
  Description of Artificial Sequence: Synthetic oligonucleotide
aaguguacgcugggagaaa

SEQ ID NO: 934085 - RNA, 19 nt, Artificial Sequence
  Description of Artificial Sequence: Synthetic oligonucleotide
cacuaggagccaguggcuc

SEQ ID NO: 934086 - RNA, 19 nt, Artificial Sequence
  Description of Artificial Sequence: Synthetic oligonucleotide
gggcaaguauuguugaccu

SEQ ID NO: 934087 - RNA, 19 nt, Artificial Sequence
  Description of Artificial Sequence: Synthetic oligonucleotide
ggcaaguauuguugaccug

SEQ ID NO: 934088 - RNA, 19 nt, Artificial Sequence
  Description of Artificial Sequence: Synthetic oligonucleotide
gcuucaaggggcgugugca

SEQ ID NO: 934089 - RNA, 19 nt, Artificial Sequence
  Description of Artificial Sequence: Synthetic oligonucleotide
auaaugcauggaggagcug

SEQ ID NO: 934090 - RNA, 19 nt, Artificial Sequence
  Description of Artificial Sequence: Synthetic oligonucleotide
gcauacgucggaauugcuc

SEQ ID NO: 934091 - RNA, 19 nt, Artificial Sequence
  Description of Artificial Sequence: Synthetic oligonucleotide
cauagucaacugacuagcu

SEQ ID NO: 934092 - RNA, 19 nt, Artificial Sequence
  Description of Artificial Sequence: Synthetic oligonucleotide
ggacuggcaucgugcaacc

SEQ ID NO: 934093 - RNA, 19 nt, Artificial Sequence
  Description of Artificial Sequence: Synthetic oligonucleotide
agugcgcggagccggcuaa

SEQ ID NO: 934094 - RNA, 19 nt, Artificial Sequence
  Description of Artificial Sequence: Synthetic oligonucleotide
cagcucaaacccagggaga

SEQ ID NO: 934095 - RNA, 19 nt, Artificial Sequence
  Description of Artificial Sequence: Synthetic oligonucleotide
accaugcgcauacgucgga

SEQ ID NO: 934096 - RNA, 19 nt, Artificial Sequence
  Description of Artificial Sequence: Synthetic oligonucleotide
gggcgguaaguguacgcug

SEQ ID NO: 934097 - RNA, 19 nt, Artificial Sequence
  Description of Artificial Sequence: Synthetic oligonucleotide
agccggcuaaccugcccug

SEQ ID NO: 934098 - RNA, 19 nt, Artificial Sequence
  Description of Artificial Sequence: Synthetic oligonucleotide
gaggugugcauggguguca

SEQ ID NO: 934099 - RNA, 19 nt, Artificial Sequence
  Description of Artificial Sequence: Synthetic oligonucleotide
gacgcacgcccaccucacc

SEQ ID NO: 934100 - RNA, 19 nt, Artificial Sequence
  Description of Artificial Sequence: Synthetic oligonucleotide
ccauaccuaucaauauauc

SEQ ID NO: 934101 - RNA, 19 nt, Artificial Sequence
  Description of Artificial Sequence: Synthetic oligonucleotide
gcggcauaagucacgucag

SEQ ID NO: 934102 - RNA, 19 nt, Artificial Sequence
  Description of Artificial Sequence: Synthetic oligonucleotide
agcgggcgguaaguguacg

SEQ ID NO: 934103 - RNA, 19 nt, Artificial Sequence
  Description of Artificial Sequence: Synthetic oligonucleotide
aggcggcauaagucacguc

SEQ ID NO: 934104 - RNA, 19 nt, Artificial Sequence
  Description of Artificial Sequence: Synthetic oligonucleotide
cauuccaagucucgaaguu

SEQ ID NO: 934105 - RNA, 19 nt, Artificial Sequence
  Description of Artificial Sequence: Synthetic oligonucleotide
cgucauuguaaauaggggu

SEQ ID NO: 934106 - RNA, 19 nt, Artificial Sequence
  Description of Artificial Sequence: Synthetic oligonucleotide
guggugccucaaccacugg

SEQ ID NO: 934107 - RNA, 19 nt, Artificial Sequence
  Description of Artificial Sequence: Synthetic oligonucleotide
ccaaggcggcauaagucac

SEQ ID NO: 934108 - RNA, 19 nt, Artificial Sequence
  Description of Artificial Sequence: Synthetic oligonucleotide
aguccgugaaguggccaga

SEQ ID NO: 934109 - RNA, 19 nt, Artificial Sequence
  Description of Artificial Sequence: Synthetic oligonucleotide
cugugaggacuggcuuucg

SEQ ID NO: 934110 - RNA, 19 nt, Artificial Sequence
  Description of Artificial Sequence: Synthetic oligonucleotide
guguagagucaggcggccc

SEQ ID NO: 934111 - RNA, 19 nt, Artificial Sequence
  Description of Artificial Sequence: Synthetic oligonucleotide
agguucuggugcugugcaa

SEQ ID NO: 934112 - RNA, 19 nt, Artificial Sequence
  Description of Artificial Sequence: Synthetic oligonucleotide
gcgcauacgucggaauugc

SEQ ID NO: 934113 - RNA, 19 nt, Artificial Sequence
  Description of Artificial Sequence: Synthetic oligonucleotide
gccugcgcccuucuugugc

SEQ ID NO: 934114 - RNA, 19 nt, Artificial Sequence
  Description of Artificial Sequence: Synthetic oligonucleotide
gacuggcaucgugcaaccc

SEQ ID NO: 934115 - RNA, 19 nt, Artificial Sequence
  Description of Artificial Sequence: Synthetic oligonucleotide
gcccauaccuaucaauaua

SEQ ID NO: 934116 - RNA, 19 nt, Artificial Sequence
  Description of Artificial Sequence: Synthetic oligonucleotide
cauccaaguaggugaaguu

SEQ ID NO: 934117 - RNA, 19 nt, Artificial Sequence
  Description of Artificial Sequence: Synthetic oligonucleotide
cguggugccucaaccacug

SEQ ID NO: 934118 - RNA, 19 nt, Artificial Sequence
  Description of Artificial Sequence: Synthetic oligonucleotide
ggagccggcuaaccugccc

SEQ ID NO: 934119 - RNA, 19 nt, Artificial Sequence
  Description of Artificial Sequence: Synthetic oligonucleotide
gugcaugggugucaucacu

SEQ ID NO: 934120 - RNA, 19 nt, Artificial Sequence
  Description of Artificial Sequence: Synthetic oligonucleotide
ggugcauacuccucacccu

SEQ ID NO: 934121 - RNA, 19 nt, Artificial Sequence
  Description of Artificial Sequence: Synthetic oligonucleotide
cccauaccuaucaauauau

SEQ ID NO: 934122 - RNA, 19 nt, Artificial Sequence
  Description of Artificial Sequence: Synthetic oligonucleotide
accugaaagcgggcgguaa

SEQ ID NO: 934123 - RNA, 19 nt, Artificial Sequence
  Description of Artificial Sequence: Synthetic oligonucleotide
caugggugucaucacuagu

SEQ ID NO: 934124 - RNA, 19 nt, Artificial Sequence
  Description of Artificial Sequence: Synthetic oligonucleotide
cagcucaaccuggcugacc

SEQ ID NO: 934125 - RNA, 19 nt, Artificial Sequence
  Description of Artificial Sequence: Synthetic oligonucleotide
uggcaucgugcaaccccuc

SEQ ID NO: 934126 - RNA, 19 nt, Artificial Sequence
  Description of Artificial Sequence: Synthetic oligonucleotide
ugccugcgcccuucuugug

SEQ ID NO: 934127 - RNA, 19 nt, Artificial Sequence
  Description of Artificial Sequence: Synthetic oligonucleotide
gucagcccauaccuaucaa

SEQ ID NO: 934128 - RNA, 19 nt, Artificial Sequence
  Description of Artificial Sequence: Synthetic oligonucleotide
ggccgugcccaguagucca

SEQ ID NO: 934129 - RNA, 19 nt, Artificial Sequence
  Description of Artificial Sequence: Synthetic oligonucleotide
gcucauccgaccagaccag

SEQ ID NO: 934130 - RNA, 19 nt, Artificial Sequence
  Description of Artificial Sequence: Synthetic oligonucleotide
guaccccacgaaggugaag

SEQ ID NO: 934131 - RNA, 19 nt, Artificial Sequence
  Description of Artificial Sequence: Synthetic oligonucleotide
ccuugaacucagggaagag

SEQ ID NO: 934132 - RNA, 19 nt, Artificial Sequence
  Description of Artificial Sequence: Synthetic oligonucleotide
cagucccugcgcagaugac

SEQ ID NO: 934133 - RNA, 19 nt, Artificial Sequence
  Description of Artificial Sequence: Synthetic oligonucleotide
ccacgggccacccaaccuc

SEQ ID NO: 934134 - RNA, 19 nt, Artificial Sequence
  Description of Artificial Sequence: Synthetic oligonucleotide
ggugccucaaccacugggu

SEQ ID NO: 934135 - RNA, 19 nt, Artificial Sequence
  Description of Artificial Sequence: Synthetic oligonucleotide
gcgggcgguaaguguacgc

SEQ ID NO: 934136 - RNA, 19 nt, Artificial Sequence
  Description of Artificial Sequence: Synthetic oligonucleotide
gauguacauggagcugccu

SEQ ID NO: 934137 - RNA, 19 nt, Artificial Sequence
  Description of Artificial Sequence: Synthetic oligonucleotide
gccagaaggacugcccauc

SEQ ID NO: 934138 - RNA, 19 nt, Artificial Sequence
  Description of Artificial Sequence: Synthetic oligonucleotide
cugaaagcgggcgguaagu

SEQ ID NO: 934139 - RNA, 19 nt, Artificial Sequence
  Description of Artificial Sequence: Synthetic oligonucleotide
cggaauugcucugcagagg

SEQ ID NO: 934140 - RNA, 19 nt, Artificial Sequence
  Description of Artificial Sequence: Synthetic oligonucleotide
caguaguccaaugcucgua

SEQ ID NO: 934141 - RNA, 19 nt, Artificial Sequence
  Description of Artificial Sequence: Synthetic oligonucleotide
guacgcugggagaaagggu

SEQ ID NO: 934142 - RNA, 19 nt, Artificial Sequence
  Description of Artificial Sequence: Synthetic oligonucleotide
aaagggcguggugccucaa

SEQ ID NO: 934143 - RNA, 19 nt, Artificial Sequence
  Description of Artificial Sequence: Synthetic oligonucleotide
caugcgcauacgucggaau

SEQ ID NO: 934144 - RNA, 19 nt, Artificial Sequence
  Description of Artificial Sequence: Synthetic oligonucleotide
gcccaugugucaggggcag

SEQ ID NO: 934145 - RNA, 19 nt, Artificial Sequence
  Description of Artificial Sequence: Synthetic oligonucleotide
ggcucaccagucacuagga

SEQ ID NO: 934146 - RNA, 19 nt, Artificial Sequence
  Description of Artificial Sequence: Synthetic oligonucleotide
gaagagucacagggauacu

SEQ ID NO: 934147 - RNA, 19 nt, Artificial Sequence
  Description of Artificial Sequence: Synthetic oligonucleotide
gcccaguaguccaaugcuc

SEQ ID NO: 934148 - RNA, 19 nt, Artificial Sequence
  Description of Artificial Sequence: Synthetic oligonucleotide
gcucaaccuggcugacccc

SEQ ID NO: 934149 - RNA, 19 nt, Artificial Sequence
  Description of Artificial Sequence: Synthetic oligonucleotide
ucccugcgcagaugacuuu

SEQ ID NO: 934150 - RNA, 19 nt, Artificial Sequence
  Description of Artificial Sequence: Synthetic oligonucleotide
gguaagucacagggucuga

SEQ ID NO: 934151 - RNA, 19 nt, Artificial Sequence
  Description of Artificial Sequence: Synthetic oligonucleotide
auacugccguugaggugug

SEQ ID NO: 934152 - RNA, 19 nt, Artificial Sequence
  Description of Artificial Sequence: Synthetic oligonucleotide
cucauccgaccagaccaga

SEQ ID NO: 934153 - RNA, 19 nt, Artificial Sequence
  Description of Artificial Sequence: Synthetic oligonucleotide
cgcggagccggcuaaccug

SEQ ID NO: 934154 - RNA, 19 nt, Artificial Sequence
  Description of Artificial Sequence: Synthetic oligonucleotide
gcccaccucaccagugaag

SEQ ID NO: 934155 - RNA, 19 nt, Artificial Sequence
  Description of Artificial Sequence: Synthetic oligonucleotide
guacccgauaggagccgga

SEQ ID NO: 934156 - RNA, 19 nt, Artificial Sequence
  Description of Artificial Sequence: Synthetic oligonucleotide
ccugcgcccuucuugugca

SEQ ID NO: 934157 - RNA, 19 nt, Artificial Sequence
  Description of Artificial Sequence: Synthetic oligonucleotide
ccgauaggagccggagacc

SEQ ID NO: 934158 - RNA, 19 nt, Artificial Sequence
  Description of Artificial Sequence: Synthetic oligonucleotide
cuacguagacaagccccaa

SEQ ID NO: 934159 - RNA, 19 nt, Artificial Sequence
  Description of Artificial Sequence: Synthetic oligonucleotide
cggcauaagucacgucagc

SEQ ID NO: 934160 - RNA, 19 nt, Artificial Sequence
  Description of Artificial Sequence: Synthetic oligonucleotide
gaccugaaagcgggcggua

SEQ ID NO: 934161 - RNA, 19 nt, Artificial Sequence
  Description of Artificial Sequence: Synthetic oligonucleotide
ucgugguggucugguucau

SEQ ID NO: 934162 - RNA, 19 nt, Artificial Sequence
  Description of Artificial Sequence: Synthetic oligonucleotide
caaugaccuucaccaccaa

SEQ ID NO: 934163 - RNA, 19 nt, Artificial Sequence
  Description of Artificial Sequence: Synthetic oligonucleotide
gucccugcgcagaugacuu

SEQ ID NO: 934164 - RNA, 19 nt, Artificial Sequence
  Description of Artificial Sequence: Synthetic oligonucleotide
caaggggcgugugcauaca

SEQ ID NO: 934165 - RNA, 19 nt, Artificial Sequence
  Description of Artificial Sequence: Synthetic oligonucleotide
cccugcgcagaugacuuuc

SEQ ID NO: 934166 - RNA, 19 nt, Artificial Sequence
  Description of Artificial Sequence: Synthetic oligonucleotide
gcugugcaaugaccuucac

SEQ ID NO: 934167 - RNA, 19 nt, Artificial Sequence
  Description of Artificial Sequence: Synthetic oligonucleotide
ccauguguugccacucacu

SEQ ID NO: 934168 - RNA, 19 nt, Artificial Sequence
  Description of Artificial Sequence: Synthetic oligonucleotide
ccguugaggugugcauggg

SEQ ID NO: 934169 - RNA, 19 nt, Artificial Sequence
  Description of Artificial Sequence: Synthetic oligonucleotide
ccauuggcacaaugacgca

SEQ ID NO: 934170 - RNA, 19 nt, Artificial Sequence
  Description of Artificial Sequence: Synthetic oligonucleotide
ccccacgggccacccaacc

SEQ ID NO: 934171 - RNA, 19 nt, Artificial Sequence
  Description of Artificial Sequence: Synthetic oligonucleotide
ggugugcaugggugucauc

SEQ ID NO: 934172 - RNA, 19 nt, Artificial Sequence
  Description of Artificial Sequence: Synthetic oligonucleotide
caccagucacuaggagcca

SEQ ID NO: 934173 - RNA, 19 nt, Artificial Sequence
  Description of Artificial Sequence: Synthetic oligonucleotide
caaccuggcugaccccacu

SEQ ID NO: 934174 - RNA, 19 nt, Artificial Sequence
  Description of Artificial Sequence: Synthetic oligonucleotide
ccagaacaagcaucauagu

SEQ ID NO: 934175 - RNA, 19 nt, Artificial Sequence
  Description of Artificial Sequence: Synthetic oligonucleotide
ggcagugcgcggagccggc

SEQ ID NO: 934176 - RNA, 19 nt, Artificial Sequence
  Description of Artificial Sequence: Synthetic oligonucleotide
gccggagaccacagcugug

SEQ ID NO: 934177 - RNA, 19 nt, Artificial Sequence
  Description of Artificial Sequence: Synthetic oligonucleotide
cggcuaaccugcccuggug

SEQ ID NO: 934178 - RNA, 19 nt, Artificial Sequence
  Description of Artificial Sequence: Synthetic oligonucleotide
ccaaugcucguacccgaua

SEQ ID NO: 934179 - RNA, 19 nt, Artificial Sequence
  Description of Artificial Sequence: Synthetic oligonucleotide
ccucaacaugggacuggca

SEQ ID NO: 934180 - RNA, 19 nt, Artificial Sequence
  Description of Artificial Sequence: Synthetic oligonucleotide
guauccggaccugcucgau

SEQ ID NO: 934181 - RNA, 19 nt, Artificial Sequence
  Description of Artificial Sequence: Synthetic oligonucleotide
gugcgcggagccggcuaac

SEQ ID NO: 934182 - RNA, 19 nt, Artificial Sequence
  Description of Artificial Sequence: Synthetic oligonucleotide
cggagaccacagcuguguc

SEQ ID NO: 934183 - RNA, 19 nt, Artificial Sequence
  Description of Artificial Sequence: Synthetic oligonucleotide
ccggagaccacagcugugu

SEQ ID NO: 934184 - RNA, 19 nt, Artificial Sequence
  Description of Artificial Sequence: Synthetic oligonucleotide
ccaugcgcauacgucggaa

SEQ ID NO: 934185 - RNA, 19 nt, Artificial Sequence
  Description of Artificial Sequence: Synthetic oligonucleotide
ccugcgcagaugacuuucu

SEQ ID NO: 934186 - RNA, 19 nt, Artificial Sequence
  Description of Artificial Sequence: Synthetic oligonucleotide
gcgcggagccggcuaaccu

SEQ ID NO: 934187 - RNA, 19 nt, Artificial Sequence
  Description of Artificial Sequence: Synthetic oligonucleotide
gcguggugccucaaccacu

SEQ ID NO: 934188 - RNA, 19 nt, Artificial Sequence
  Description of Artificial Sequence: Synthetic oligonucleotide
ccuggccgugcccaguagu

SEQ ID NO: 934189 - RNA, 19 nt, Artificial Sequence
  Description of Artificial Sequence: Synthetic oligonucleotide
cccacgggccacccaaccu

SEQ ID NO: 934190 - RNA, 19 nt, Artificial Sequence
  Description of Artificial Sequence: Synthetic oligonucleotide
cgggcgguaaguguacgcu

SEQ ID NO: 934191 - RNA, 19 nt, Artificial Sequence
  Description of Artificial Sequence: Synthetic oligonucleotide
ccggcuaaccugcccuggu

SEQ ID NO: 934192 - RNA, 19 nt, Artificial Sequence
  Description of Artificial Sequence: Synthetic oligonucleotide
gccccacgggccacccaac

SEQ ID NO: 934193 - RNA, 19 nt, Artificial Sequence
  Description of Artificial Sequence: Synthetic oligonucleotide
cgcccaccucaccagugaa

SEQ ID NO: 934194 - RNA, 19 nt, Artificial Sequence
  Description of Artificial Sequence: Synthetic oligonucleotide
ggacacccacugugugauu

SEQ ID NO: 934195 - RNA, 19 nt, Artificial Sequence
  Description of Artificial Sequence: Synthetic oligonucleotide
cgcauacgucggaauugcu

SEQ ID NO: 934196 - RNA, 19 nt, Artificial Sequence
  Description of Artificial Sequence: Synthetic oligonucleotide
cccaugugucaggggcagu

SEQ ID NO: 934197 - RNA, 19 nt, Artificial Sequence
  Description of Artificial Sequence: Synthetic oligonucleotide
ccgugcccaguaguccaau

SEQ ID NO: 934198 - RNA, 19 nt, Artificial Sequence
  Description of Artificial Sequence: Synthetic oligonucleotide
acuaaaaccaaccacauac

SEQ ID NO: 934199 - RNA, 19 nt, Artificial Sequence
  Description of Artificial Sequence: Synthetic oligonucleotide
ucaacuuaaaauaugagcc

SEQ ID NO: 934200 - RNA, 19 nt, Artificial Sequence
  Description of Artificial Sequence: Synthetic oligonucleotide
aauaucuacaacuaaucuc

SEQ ID NO: 934201 - RNA, 19 nt, Artificial Sequence
  Description of Artificial Sequence: Synthetic oligonucleotide
uacauuaccacacagggca

SEQ ID NO: 934202 - RNA, 19 nt, Artificial Sequence
  Description of Artificial Sequence: Synthetic oligonucleotide
aacuuaucaacagaauugc

SEQ ID NO: 934203 - RNA, 19 nt, Artificial Sequence
  Description of Artificial Sequence: Synthetic oligonucleotide
aacuuaaaauaugagcccc

SEQ ID NO: 934204 - RNA, 19 nt, Artificial Sequence
  Description of Artificial Sequence: Synthetic oligonucleotide
auaacagucaacuuaaaau

SEQ ID NO: 934205 - RNA, 19 nt, Artificial Sequence
  Description of Artificial Sequence: Synthetic oligonucleotide
ucuuauuacauuaccacac

SEQ ID NO: 934206 - RNA, 19 nt, Artificial Sequence
  Description of Artificial Sequence: Synthetic oligonucleotide
aacacggaaauacaaaagu

SEQ ID NO: 934207 - RNA, 19 nt, Artificial Sequence
  Description of Artificial Sequence: Synthetic oligonucleotide
uuuucauucgguacuggcg

SEQ ID NO: 934208 - RNA, 19 nt, Artificial Sequence
  Description of Artificial Sequence: Synthetic oligonucleotide
ucaauacuugucuagagca

SEQ ID NO: 934209 - RNA, 19 nt, Artificial Sequence
  Description of Artificial Sequence: Synthetic oligonucleotide
aaacuuaucaacagaauug

SEQ ID NO: 934210 - RNA, 19 nt, Artificial Sequence
  Description of Artificial Sequence: Synthetic oligonucleotide
aguggauuaauguacaaca

SEQ ID NO: 934211 - RNA, 19 nt, Artificial Sequence
  Description of Artificial Sequence: Synthetic oligonucleotide
uuaucaacagaauugcaug

SEQ ID NO: 934212 - RNA, 19 nt, Artificial Sequence
  Description of Artificial Sequence: Synthetic oligonucleotide
agggcaaccccauacaacc

SEQ ID NO: 934213 - RNA, 19 nt, Artificial Sequence
  Description of Artificial Sequence: Synthetic oligonucleotide
gucaacuuaaaauaugagc

SEQ ID NO: 934214 - RNA, 19 nt, Artificial Sequence
  Description of Artificial Sequence: Synthetic oligonucleotide
ugugcagacacacacacac

SEQ ID NO: 934215 - RNA, 19 nt, Artificial Sequence
  Description of Artificial Sequence: Synthetic oligonucleotide
uaagaguggauuaauguac

SEQ ID NO: 934216 - RNA, 19 nt, Artificial Sequence
  Description of Artificial Sequence: Synthetic oligonucleotide
gauaagacuaagcucacac

SEQ ID NO: 934217 - RNA, 19 nt, Artificial Sequence
  Description of Artificial Sequence: Synthetic oligonucleotide
aggaagauaagacuaagcu

SEQ ID NO: 934218 - RNA, 19 nt, Artificial Sequence
  Description of Artificial Sequence: Synthetic oligonucleotide
ucuauugagucagagaagc

SEQ ID NO: 934219 - RNA, 19 nt, Artificial Sequence
  Description of Artificial Sequence: Synthetic oligonucleotide
guaagaauccucuauggug

SEQ ID NO: 934220 - RNA, 19 nt, Artificial Sequence
  Description of Artificial Sequence: Synthetic oligonucleotide
agacuaagcucacacauuc

SEQ ID NO: 934221 - RNA, 19 nt, Artificial Sequence
  Description of Artificial Sequence: Synthetic oligonucleotide
aauaugagccccuuuacuu

SEQ ID NO: 934222 - RNA, 19 nt, Artificial Sequence
  Description of Artificial Sequence: Synthetic oligonucleotide
auuaacuggauugucaaag

SEQ ID NO: 934223 - RNA, 19 nt, Artificial Sequence
  Description of Artificial Sequence: Synthetic oligonucleotide
aaacgucuaucccacuuac

SEQ ID NO: 934224 - RNA, 19 nt, Artificial Sequence
  Description of Artificial Sequence: Synthetic oligonucleotide
uucaauacuugucuagagc

SEQ ID NO: 934225 - RNA, 19 nt, Artificial Sequence
  Description of Artificial Sequence: Synthetic oligonucleotide
uaagacuaagcucacacau

SEQ ID NO: 934226 - RNA, 19 nt, Artificial Sequence
  Description of Artificial Sequence: Synthetic oligonucleotide
uuacuuagagccacagagg

SEQ ID NO: 934227 - RNA, 19 nt, Artificial Sequence
  Description of Artificial Sequence: Synthetic oligonucleotide
uaagugaaauuacucauaa

SEQ ID NO: 934228 - RNA, 19 nt, Artificial Sequence
  Description of Artificial Sequence: Synthetic oligonucleotide
agcuuaagaguuuuaugac

SEQ ID NO: 934229 - RNA, 19 nt, Artificial Sequence
  Description of Artificial Sequence: Synthetic oligonucleotide
auaaugguucuugaaaacg

SEQ ID NO: 934230 - RNA, 19 nt, Artificial Sequence
  Description of Artificial Sequence: Synthetic oligonucleotide
ucuagagcaguacucagac

SEQ ID NO: 934231 - RNA, 19 nt, Artificial Sequence
  Description of Artificial Sequence: Synthetic oligonucleotide
aaauaugagccccuuuacu

SEQ ID NO: 934232 - RNA, 19 nt, Artificial Sequence
  Description of Artificial Sequence: Synthetic oligonucleotide
uauugagucagagaagcag

SEQ ID NO: 934233 - RNA, 19 nt, Artificial Sequence
  Description of Artificial Sequence: Synthetic oligonucleotide
gagguaguuauucugagga

SEQ ID NO: 934234 - RNA, 19 nt, Artificial Sequence
  Description of Artificial Sequence: Synthetic oligonucleotide
gaaacuaucuucauguaca

SEQ ID NO: 934235 - RNA, 19 nt, Artificial Sequence
  Description of Artificial Sequence: Synthetic oligonucleotide
ucuaaagggucuuauuaca

SEQ ID NO: 934236 - RNA, 19 nt, Artificial Sequence
  Description of Artificial Sequence: Synthetic oligonucleotide
uuacucauaauuguuucag

SEQ ID NO: 934237 - RNA, 19 nt, Artificial Sequence
  Description of Artificial Sequence: Synthetic oligonucleotide
cuuuccuauauaaugguuc

SEQ ID NO: 934238 - RNA, 19 nt, Artificial Sequence
  Description of Artificial Sequence: Synthetic oligonucleotide
uacaacuaaucucaugaga

SEQ ID NO: 934239 - RNA, 19 nt, Artificial Sequence
  Description of Artificial Sequence: Synthetic oligonucleotide
uaaugguucuugaaaacgu

SEQ ID NO: 934240 - RNA, 19 nt, Artificial Sequence
  Description of Artificial Sequence: Synthetic oligonucleotide
ucuugaaaacgucuauccc

SEQ ID NO: 934241 - RNA, 19 nt, Artificial Sequence
  Description of Artificial Sequence: Synthetic oligonucleotide
acucagacuuuuaaaacgc

SEQ ID NO: 934242 - RNA, 19 nt, Artificial Sequence
  Description of Artificial Sequence: Synthetic oligonucleotide
uugaaaacgucuaucccac

SEQ ID NO: 934243 - RNA, 19 nt, Artificial Sequence
  Description of Artificial Sequence: Synthetic oligonucleotide
uuuccuauauaaugguucu

SEQ ID NO: 934244 - RNA, 19 nt, Artificial Sequence
  Description of Artificial Sequence: Synthetic oligonucleotide
gacacacacacacacacac

SEQ ID NO: 934245 - RNA, 19 nt, Artificial Sequence
  Description of Artificial Sequence: Synthetic oligonucleotide
acacucuuaaaacaagcug

SEQ ID NO: 934246 - RNA, 19 nt, Artificial Sequence
  Description of Artificial Sequence: Synthetic oligonucleotide
aauugcauguauaguuugg

SEQ ID NO: 934247 - RNA, 19 nt, Artificial Sequence
  Description of Artificial Sequence: Synthetic oligonucleotide
guuagagaccccgaaaccg

SEQ ID NO: 934248 - RNA, 19 nt, Artificial Sequence
  Description of Artificial Sequence: Synthetic oligonucleotide
aaacccgguuggcagaggg

SEQ ID NO: 934249 - RNA, 19 nt, Artificial Sequence
  Description of Artificial Sequence: Synthetic oligonucleotide
caucuauugagucagagaa

SEQ ID NO: 934250 - RNA, 19 nt, Artificial Sequence
  Description of Artificial Sequence: Synthetic oligonucleotide
uuuuaaaacgcaguuguau

SEQ ID NO: 934251 - RNA, 19 nt, Artificial Sequence
  Description of Artificial Sequence: Synthetic oligonucleotide
acuaagcucacacauucug

SEQ ID NO: 934252 - RNA, 19 nt, Artificial Sequence
  Description of Artificial Sequence: Synthetic oligonucleotide
cuugaaaacgucuauccca

SEQ ID NO: 934253 - RNA, 19 nt, Artificial Sequence
  Description of Artificial Sequence: Synthetic oligonucleotide
aacauaacagucaacuuaa

SEQ ID NO: 934254 - RNA, 19 nt, Artificial Sequence
  Description of Artificial Sequence: Synthetic oligonucleotide
auaacucuuggccagcuca

SEQ ID NO: 934255 - RNA, 19 nt, Artificial Sequence
  Description of Artificial Sequence: Synthetic oligonucleotide
uuuaaaacgcaguuguauu

SEQ ID NO: 934256 - RNA, 19 nt, Artificial Sequence
  Description of Artificial Sequence: Synthetic oligonucleotide
uccuauauaaugguucuug

SEQ ID NO: 934257 - RNA, 19 nt, Artificial Sequence
  Description of Artificial Sequence: Synthetic oligonucleotide
ugcagacacacacacacac

SEQ ID NO: 934258 - RNA, 19 nt, Artificial Sequence
  Description of Artificial Sequence: Synthetic oligonucleotide
uuaacuggauugucaaagc

SEQ ID NO: 934259 - RNA, 19 nt, Artificial Sequence
  Description of Artificial Sequence: Synthetic oligonucleotide
uucccgaccagcaccauag

SEQ ID NO: 934260 - RNA, 19 nt, Artificial Sequence
  Description of Artificial Sequence: Synthetic oligonucleotide
ugaccuuuauuugacaaca

SEQ ID NO: 934261 - RNA, 19 nt, Artificial Sequence
  Description of Artificial Sequence: Synthetic oligonucleotide
uacucagucauuucacacc

SEQ ID NO: 934262 - RNA, 19 nt, Artificial Sequence
  Description of Artificial Sequence: Synthetic oligonucleotide
uuagagaccccgaaaccgc

SEQ ID NO: 934263 - RNA, 19 nt, Artificial Sequence
  Description of Artificial Sequence: Synthetic oligonucleotide
gaguucaauacuugucuag

SEQ ID NO: 934264 - RNA, 19 nt, Artificial Sequence
  Description of Artificial Sequence: Synthetic oligonucleotide
aggguguuuguuucuaagg

SEQ ID NO: 934265 - RNA, 19 nt, Artificial Sequence
  Description of Artificial Sequence: Synthetic oligonucleotide
uguuagagaccccgaaacc

SEQ ID NO: 934266 - RNA, 19 nt, Artificial Sequence
  Description of Artificial Sequence: Synthetic oligonucleotide
acuaaucucaugagaacac

SEQ ID NO: 934267 - RNA, 19 nt, Artificial Sequence
  Description of Artificial Sequence: Synthetic oligonucleotide
uuacauuaccacacagggc

SEQ ID NO: 934268 - RNA, 19 nt, Artificial Sequence
  Description of Artificial Sequence: Synthetic oligonucleotide
uugacaacacggaaauaca

SEQ ID NO: 934269 - RNA, 19 nt, Artificial Sequence
  Description of Artificial Sequence: Synthetic oligonucleotide
cuuuauuugacaacacgga

SEQ ID NO: 934270 - RNA, 19 nt, Artificial Sequence
  Description of Artificial Sequence: Synthetic oligonucleotide
uaccuuagagcuuaagaaa

SEQ ID NO: 934271 - RNA, 19 nt, Artificial Sequence
  Description of Artificial Sequence: Synthetic oligonucleotide
agugaggagguaguuauuc

SEQ ID NO: 934272 - RNA, 19 nt, Artificial Sequence
  Description of Artificial Sequence: Synthetic oligonucleotide
accucaaccugccaaacug

SEQ ID NO: 934273 - RNA, 19 nt, Artificial Sequence
  Description of Artificial Sequence: Synthetic oligonucleotide
auuaccacuuguuuucggu

SEQ ID NO: 934274 - RNA, 19 nt, Artificial Sequence
  Description of Artificial Sequence: Synthetic oligonucleotide
ugcuuugugucaacugucc

SEQ ID NO: 934275 - RNA, 19 nt, Artificial Sequence
  Description of Artificial Sequence: Synthetic oligonucleotide
acaacuaaucucaugagaa

SEQ ID NO: 934276 - RNA, 19 nt, Artificial Sequence
  Description of Artificial Sequence: Synthetic oligonucleotide
cacacacacacacacacac

SEQ ID NO: 934277 - RNA, 19 nt, Artificial Sequence
  Description of Artificial Sequence: Synthetic oligonucleotide
uuaaaacgcaguuguauuu

SEQ ID NO: 934278 - RNA, 19 nt, Artificial Sequence
  Description of Artificial Sequence: Synthetic oligonucleotide
auuaccacacagggcaacc

SEQ ID NO: 934279 - RNA, 19 nt, Artificial Sequence
  Description of Artificial Sequence: Synthetic oligonucleotide
acucagucauuucacacca

SEQ ID NO: 934280 - RNA, 19 nt, Artificial Sequence
  Description of Artificial Sequence: Synthetic oligonucleotide
ucaaugaauggaauuccau

SEQ ID NO: 934281 - RNA, 19 nt, Artificial Sequence
  Description of Artificial Sequence: Synthetic oligonucleotide
uauuggucucucauggcac

SEQ ID NO: 934282 - RNA, 19 nt, Artificial Sequence
  Description of Artificial Sequence: Synthetic oligonucleotide
cuaccuuagagcuuaagaa

SEQ ID NO: 934283 - RNA, 19 nt, Artificial Sequence
  Description of Artificial Sequence: Synthetic oligonucleotide
cagacacacacacacacac

SEQ ID NO: 934284 - RNA, 19 nt, Artificial Sequence
  Description of Artificial Sequence: Synthetic oligonucleotide
aagauuagaugaaaauuaa

SEQ ID NO: 934285 - RNA, 19 nt, Artificial Sequence
  Description of Artificial Sequence: Synthetic oligonucleotide
ggucuuauuacauuaccac

SEQ ID NO: 934286 - RNA, 19 nt, Artificial Sequence
  Description of Artificial Sequence: Synthetic oligonucleotide
guucaauacuugucuagag

SEQ ID NO: 934287 - RNA, 19 nt, Artificial Sequence
  Description of Artificial Sequence: Synthetic oligonucleotide
aguuauucugaggaggucu

SEQ ID NO: 934288 - RNA, 19 nt, Artificial Sequence
  Description of Artificial Sequence: Synthetic oligonucleotide
gaaacuuaucaacagaauu

SEQ ID NO: 934289 - RNA, 19 nt, Artificial Sequence
  Description of Artificial Sequence: Synthetic oligonucleotide
ugacaacacggaaauacaa

SEQ ID NO: 934290 - RNA, 19 nt, Artificial Sequence
  Description of Artificial Sequence: Synthetic oligonucleotide
guacucagacuuuuaaaac

SEQ ID NO: 934291 - RNA, 19 nt, Artificial Sequence
  Description of Artificial Sequence: Synthetic oligonucleotide
cuugucuagagcaguacuc

SEQ ID NO: 934292 - RNA, 19 nt, Artificial Sequence
  Description of Artificial Sequence: Synthetic oligonucleotide
aaauuaagaguggauuaau

SEQ ID NO: 934293 - RNA, 19 nt, Artificial Sequence
  Description of Artificial Sequence: Synthetic oligonucleotide
ugugcucaucuauugaguc

SEQ ID NO: 934294 - RNA, 19 nt, Artificial Sequence
  Description of Artificial Sequence: Synthetic oligonucleotide
caaaagucauacagcuucc

SEQ ID NO: 934295 - RNA, 19 nt, Artificial Sequence
  Description of Artificial Sequence: Synthetic oligonucleotide
auaagacuaagcucacaca

SEQ ID NO: 934296 - RNA, 19 nt, Artificial Sequence
  Description of Artificial Sequence: Synthetic oligonucleotide
ugauucuacagguggcuga

SEQ ID NO: 934297 - RNA, 19 nt, Artificial Sequence
  Description of Artificial Sequence: Synthetic oligonucleotide
cacacacacacacacuacc

SEQ ID NO: 934298 - RNA, 19 nt, Artificial Sequence
  Description of Artificial Sequence: Synthetic oligonucleotide
ucucagauuagaugacugu

SEQ ID NO: 934299 - RNA, 19 nt, Artificial Sequence
  Description of Artificial Sequence: Synthetic oligonucleotide
agacuuuuaaaacgcaguu

SEQ ID NO: 934300 - RNA, 19 nt, Artificial Sequence
  Description of Artificial Sequence: Synthetic oligonucleotide
uagagguuaauaucugcaa

SEQ ID NO: 934301 - RNA, 19 nt, Artificial Sequence
  Description of Artificial Sequence: Synthetic oligonucleotide
cucuguagagguuaauauc

SEQ ID NO: 934302 - RNA, 19 nt, Artificial Sequence
  Description of Artificial Sequence: Synthetic oligonucleotide
uaucccacuuacaaacagu

SEQ ID NO: 934303 - RNA, 19 nt, Artificial Sequence
  Description of Artificial Sequence: Synthetic oligonucleotide
aagauaagacuaagcucac

SEQ ID NO: 934304 - RNA, 19 nt, Artificial Sequence
  Description of Artificial Sequence: Synthetic oligonucleotide
agagguuaauaucugcaaa

SEQ ID NO: 934305 - RNA, 19 nt, Artificial Sequence
  Description of Artificial Sequence: Synthetic oligonucleotide
agauuagaugaaaauuaag

SEQ ID NO: 934306 - RNA, 19 nt, Artificial Sequence
  Description of Artificial Sequence: Synthetic oligonucleotide
cuacaacuaaucucaugag

SEQ ID NO: 934307 - RNA, 19 nt, Artificial Sequence
  Description of Artificial Sequence: Synthetic oligonucleotide
ucuaucccacuuacaaaca

SEQ ID NO: 934308 - RNA, 19 nt, Artificial Sequence
  Description of Artificial Sequence: Synthetic oligonucleotide
auacaccuuucccucaaag

SEQ ID NO: 934309 - RNA, 19 nt, Artificial Sequence
  Description of Artificial Sequence: Synthetic oligonucleotide
acuugucuagagcaguacu

SEQ ID NO: 934310 - RNA, 19 nt, Artificial Sequence
  Description of Artificial Sequence: Synthetic oligonucleotide
guaucagaguguaaauugc

SEQ ID NO: 934311 - RNA, 19 nt, Artificial Sequence
  Description of Artificial Sequence: Synthetic oligonucleotide
cagaggacaaacccgguug

SEQ ID NO: 934312 - RNA, 19 nt, Artificial Sequence
  Description of Artificial Sequence: Synthetic oligonucleotide
uugucuagagcaguacuca

SEQ ID NO: 934313 - RNA, 19 nt, Artificial Sequence
  Description of Artificial Sequence: Synthetic oligonucleotide
cuaucccacuuacaaacag

SEQ ID NO: 934314 - RNA, 19 nt, Artificial Sequence
  Description of Artificial Sequence: Synthetic oligonucleotide
cucagauuagaugacugug

SEQ ID NO: 934315 - RNA, 19 nt, Artificial Sequence
  Description of Artificial Sequence: Synthetic oligonucleotide
uggcguaucucccuuacua

SEQ ID NO: 934316 - RNA, 19 nt, Artificial Sequence
  Description of Artificial Sequence: Synthetic oligonucleotide
acuggcguaucucccuuac

SEQ ID NO: 934317 - RNA, 19 nt, Artificial Sequence
  Description of Artificial Sequence: Synthetic oligonucleotide
caacauaacagucaacuua

SEQ ID NO: 934318 - RNA, 19 nt, Artificial Sequence
  Description of Artificial Sequence: Synthetic oligonucleotide
caacuaaucucaugagaac

SEQ ID NO: 934319 - RNA, 19 nt, Artificial Sequence
  Description of Artificial Sequence: Synthetic oligonucleotide
aacuguuagagaccccgaa

SEQ ID NO: 934320 - RNA, 19 nt, Artificial Sequence
  Description of Artificial Sequence: Synthetic oligonucleotide
aagaguggauuaauguaca

SEQ ID NO: 934321 - RNA, 19 nt, Artificial Sequence
  Description of Artificial Sequence: Synthetic oligonucleotide
aauccuucgccuguccuca

SEQ ID NO: 934322 - RNA, 19 nt, Artificial Sequence
  Description of Artificial Sequence: Synthetic oligonucleotide
aaccucaagcuccgcugac

SEQ ID NO: 934323 - RNA, 19 nt, Artificial Sequence
  Description of Artificial Sequence: Synthetic oligonucleotide
aguucaauacuugucuaga

SEQ ID NO: 934324 - RNA, 19 nt, Artificial Sequence
  Description of Artificial Sequence: Synthetic oligonucleotide
aaaacgcaguuguauuuua

SEQ ID NO: 934325 - RNA, 19 nt, Artificial Sequence
  Description of Artificial Sequence: Synthetic oligonucleotide
aguaacaggcgcauuucuc

SEQ ID NO: 934326 - RNA, 19 nt, Artificial Sequence
  Description of Artificial Sequence: Synthetic oligonucleotide
ggaaacuaucuucauguac

SEQ ID NO: 934327 - RNA, 19 nt, Artificial Sequence
  Description of Artificial Sequence: Synthetic oligonucleotide
aguauguccaacagacaag

SEQ ID NO: 934328 - RNA, 19 nt, Artificial Sequence
  Description of Artificial Sequence: Synthetic oligonucleotide
uacucauaauuguuucagu

SEQ ID NO: 934329 - RNA, 19 nt, Artificial Sequence
  Description of Artificial Sequence: Synthetic oligonucleotide
agguaguuauucugaggag

SEQ ID NO: 934330 - RNA, 19 nt, Artificial Sequence
  Description of Artificial Sequence: Synthetic oligonucleotide
agagcuuaagaaacuuauc

SEQ ID NO: 934331 - RNA, 19 nt, Artificial Sequence
  Description of Artificial Sequence: Synthetic oligonucleotide
uucucuugggagaacccaa

SEQ ID NO: 934332 - RNA, 19 nt, Artificial Sequence
  Description of Artificial Sequence: Synthetic oligonucleotide
uaacaggcgcauuucucug

SEQ ID NO: 934333 - RNA, 19 nt, Artificial Sequence
  Description of Artificial Sequence: Synthetic oligonucleotide
guagagguuaauaucugca

SEQ ID NO: 934334 - RNA, 19 nt, Artificial Sequence
  Description of Artificial Sequence: Synthetic oligonucleotide
uaucucccuuacuagugug

SEQ ID NO: 934335 - RNA, 19 nt, Artificial Sequence
  Description of Artificial Sequence: Synthetic oligonucleotide
ugcuccaaccaccaccagu

SEQ ID NO: 934336 - RNA, 19 nt, Artificial Sequence
  Description of Artificial Sequence: Synthetic oligonucleotide
auugcauguauaguuuggu

SEQ ID NO: 934337 - RNA, 19 nt, Artificial Sequence
  Description of Artificial Sequence: Synthetic oligonucleotide
agucaugagaaaguucaca

SEQ ID NO: 934338 - RNA, 19 nt, Artificial Sequence
  Description of Artificial Sequence: Synthetic oligonucleotide
auauucaagucaugagaaa

SEQ ID NO: 934339 - RNA, 19 nt, Artificial Sequence
  Description of Artificial Sequence: Synthetic oligonucleotide
gagguuucaaugaauggaa

SEQ ID NO: 934340 - RNA, 19 nt, Artificial Sequence
  Description of Artificial Sequence: Synthetic oligonucleotide
agcucacacauucuggaau

SEQ ID NO: 934341 - RNA, 19 nt, Artificial Sequence
  Description of Artificial Sequence: Synthetic oligonucleotide
aggaauccuucgccugucc

SEQ ID NO: 934342 - RNA, 19 nt, Artificial Sequence
  Description of Artificial Sequence: Synthetic oligonucleotide
aggcgcauuucucugguca

SEQ ID NO: 934343 - RNA, 19 nt, Artificial Sequence
  Description of Artificial Sequence: Synthetic oligonucleotide
ggaggucucagauuagaug

SEQ ID NO: 934344 - RNA, 19 nt, Artificial Sequence
  Description of Artificial Sequence: Synthetic oligonucleotide
agaaaguucacagcaguua

SEQ ID NO: 934345 - RNA, 19 nt, Artificial Sequence
  Description of Artificial Sequence: Synthetic oligonucleotide
cucaucuauugagucagag

SEQ ID NO: 934346 - RNA, 19 nt, Artificial Sequence
  Description of Artificial Sequence: Synthetic oligonucleotide
acacacacacacuaccaaa

SEQ ID NO: 934347 - RNA, 19 nt, Artificial Sequence
  Description of Artificial Sequence: Synthetic oligonucleotide
accacuuguuuucgguaag

SEQ ID NO: 934348 - RNA, 19 nt, Artificial Sequence
  Description of Artificial Sequence: Synthetic oligonucleotide
cucauagucacuuuccuau

SEQ ID NO: 934349 - RNA, 19 nt, Artificial Sequence
  Description of Artificial Sequence: Synthetic oligonucleotide
auuggucucucauggcacu

SEQ ID NO: 934350 - RNA, 19 nt, Artificial Sequence
  Description of Artificial Sequence: Synthetic oligonucleotide
acggaaauacaaaagucau

SEQ ID NO: 934351 - RNA, 19 nt, Artificial Sequence
  Description of Artificial Sequence: Synthetic oligonucleotide
uuaccacuuguuuucggua

SEQ ID NO: 934352 - RNA, 19 nt, Artificial Sequence
  Description of Artificial Sequence: Synthetic oligonucleotide
ucaugggcuugcuuugugu

SEQ ID NO: 934353 - RNA, 19 nt, Artificial Sequence
  Description of Artificial Sequence: Synthetic oligonucleotide
uguuggcaagucacauuug

SEQ ID NO: 934354 - RNA, 19 nt, Artificial Sequence
  Description of Artificial Sequence: Synthetic oligonucleotide
cugaggaggucucagauua

SEQ ID NO: 934355 - RNA, 19 nt, Artificial Sequence
  Description of Artificial Sequence: Synthetic oligonucleotide
cauguacauagacauggca

SEQ ID NO: 934356 - RNA, 19 nt, Artificial Sequence
  Description of Artificial Sequence: Synthetic oligonucleotide
aagcucacacauucuggaa

SEQ ID NO: 934357 - RNA, 19 nt, Artificial Sequence
  Description of Artificial Sequence: Synthetic oligonucleotide
caugggcuugcuuuguguc

SEQ ID NO: 934358 - RNA, 19 nt, Artificial Sequence
  Description of Artificial Sequence: Synthetic oligonucleotide
gcuaccuuagagcuuaaga

SEQ ID NO: 934359 - RNA, 19 nt, Artificial Sequence
  Description of Artificial Sequence: Synthetic oligonucleotide
uucacucguuuaaucugcu

SEQ ID NO: 934360 - RNA, 19 nt, Artificial Sequence
  Description of Artificial Sequence: Synthetic oligonucleotide
gacaacacggaaauacaaa

SEQ ID NO: 934361 - RNA, 19 nt, Artificial Sequence
  Description of Artificial Sequence: Synthetic oligonucleotide
guaacaggcgcauuucucu

SEQ ID NO: 934362 - RNA, 19 nt, Artificial Sequence
  Description of Artificial Sequence: Synthetic oligonucleotide
agguggcugacuaaaacca

SEQ ID NO: 934363 - RNA, 19 nt, Artificial Sequence
  Description of Artificial Sequence: Synthetic oligonucleotide
aucuauugagucagagaag

SEQ ID NO: 934364 - RNA, 19 nt, Artificial Sequence
  Description of Artificial Sequence: Synthetic oligonucleotide
agaaaauuacuggggagua

SEQ ID NO: 934365 - RNA, 19 nt, Artificial Sequence
  Description of Artificial Sequence: Synthetic oligonucleotide
ucaaccugccaaacuguua

SEQ ID NO: 934366 - RNA, 19 nt, Artificial Sequence
  Description of Artificial Sequence: Synthetic oligonucleotide
ggcucuuuucugaugacag

SEQ ID NO: 934367 - RNA, 19 nt, Artificial Sequence
  Description of Artificial Sequence: Synthetic oligonucleotide
uggaccucaaccugccaaa

SEQ ID NO: 934368 - RNA, 19 nt, Artificial Sequence
  Description of Artificial Sequence: Synthetic oligonucleotide
guugcuaccuuagagcuua

SEQ ID NO: 934369 - RNA, 19 nt, Artificial Sequence
  Description of Artificial Sequence: Synthetic oligonucleotide
caaagcacuuuucccaaca

SEQ ID NO: 934370 - RNA, 19 nt, Artificial Sequence
  Description of Artificial Sequence: Synthetic oligonucleotide
uugcauguauaguuugguu

SEQ ID NO: 934371 - RNA, 19 nt, Artificial Sequence
  Description of Artificial Sequence: Synthetic oligonucleotide
cuugcuuugugucaacugu

SEQ ID NO: 934372 - RNA, 19 nt, Artificial Sequence
  Description of Artificial Sequence: Synthetic oligonucleotide
ucaaagcacuuuucccaac

SEQ ID NO: 934373 - RNA, 19 nt, Artificial Sequence
  Description of Artificial Sequence: Synthetic oligonucleotide
ggguguuuguuucuaagga

SEQ ID NO: 934374 - RNA, 19 nt, Artificial Sequence
  Description of Artificial Sequence: Synthetic oligonucleotide
cuaaggaggagaacccaga

SEQ ID NO: 934375 - RNA, 19 nt, Artificial Sequence
  Description of Artificial Sequence: Synthetic oligonucleotide
uaacucuuggccagcucau

SEQ ID NO: 934376 - RNA, 19 nt, Artificial Sequence
  Description of Artificial Sequence: Synthetic oligonucleotide
acacacacacacacacuac

SEQ ID NO: 934377 - RNA, 19 nt, Artificial Sequence
  Description of Artificial Sequence: Synthetic oligonucleotide
cacacacacacacacacua

SEQ ID NO: 934378 - RNA, 19 nt, Artificial Sequence
  Description of Artificial Sequence: Synthetic oligonucleotide
agaaacuuaucaacagaau

SEQ ID NO: 934379 - RNA, 19 nt, Artificial Sequence
  Description of Artificial Sequence: Synthetic oligonucleotide
cagggcaaccccauacaac

SEQ ID NO: 934380 - RNA, 19 nt, Artificial Sequence
  Description of Artificial Sequence: Synthetic oligonucleotide
guuggcaagucacauuugu

SEQ ID NO: 934381 - RNA, 19 nt, Artificial Sequence
  Description of Artificial Sequence: Synthetic oligonucleotide
ugucagaaccagggcauca

SEQ ID NO: 934382 - RNA, 19 nt, Artificial Sequence
  Description of Artificial Sequence: Synthetic oligonucleotide
ccauacaaccuugagugcc

SEQ ID NO: 934383 - RNA, 19 nt, Artificial Sequence
  Description of Artificial Sequence: Synthetic oligonucleotide
ggcguaucucccuuacuag

SEQ ID NO: 934384 - RNA, 19 nt, Artificial Sequence
  Description of Artificial Sequence: Synthetic oligonucleotide
ucgccuguccucauguauu

SEQ ID NO: 934385 - RNA, 19 nt, Artificial Sequence
  Description of Artificial Sequence: Synthetic oligonucleotide
aaacuguuagagaccccga

SEQ ID NO: 934386 - RNA, 19 nt, Artificial Sequence
  Description of Artificial Sequence: Synthetic oligonucleotide
auucgguacuggcguaucu

SEQ ID NO: 934387 - RNA, 19 nt, Artificial Sequence
  Description of Artificial Sequence: Synthetic oligonucleotide
acagggcaaccccauacaa

SEQ ID NO: 934388 - RNA, 19 nt, Artificial Sequence
  Description of Artificial Sequence: Synthetic oligonucleotide
aggucucagauuagaugac

SEQ ID NO: 934389 - RNA, 19 nt, Artificial Sequence
  Description of Artificial Sequence: Synthetic oligonucleotide
ugaaaacgucuaucccacu

SEQ ID NO: 934390 - RNA, 19 nt, Artificial Sequence
  Description of Artificial Sequence: Synthetic oligonucleotide
aggacaaacccgguuggca

SEQ ID NO: 934391 - RNA, 19 nt, Artificial Sequence
  Description of Artificial Sequence: Synthetic oligonucleotide
gguggauacaccuuucccu

SEQ ID NO: 934392 - RNA, 19 nt, Artificial Sequence
  Description of Artificial Sequence: Synthetic oligonucleotide
uucgguacuggcguaucuc

SEQ ID NO: 934393 - RNA, 19 nt, Artificial Sequence
  Description of Artificial Sequence: Synthetic oligonucleotide
cucagacuuuuaaaacgca

SEQ ID NO: 934394 - RNA, 19 nt, Artificial Sequence
  Description of Artificial Sequence: Synthetic oligonucleotide
auuagaugacugugcucau

SEQ ID NO: 934395 - RNA, 19 nt, Artificial Sequence
  Description of Artificial Sequence: Synthetic oligonucleotide
acacacacacacacuacca

SEQ ID NO: 934396 - RNA, 19 nt, Artificial Sequence
  Description of Artificial Sequence: Synthetic oligonucleotide
cuauugagucagagaagca

SEQ ID NO: 934397 - RNA, 19 nt, Artificial Sequence
  Description of Artificial Sequence: Synthetic oligonucleotide
caguugcuaccuuagagcu

SEQ ID NO: 934398 - RNA, 19 nt, Artificial Sequence
  Description of Artificial Sequence: Synthetic oligonucleotide
agcuucaaugagaugcaga

SEQ ID NO: 934399 - RNA, 19 nt, Artificial Sequence
  Description of Artificial Sequence: Synthetic oligonucleotide
aucaacagaauugcaugua

SEQ ID NO: 934400 - RNA, 19 nt, Artificial Sequence
  Description of Artificial Sequence: Synthetic oligonucleotide
agauggcucauagucacuu

SEQ ID NO: 934401 - RNA, 19 nt, Artificial Sequence
  Description of Artificial Sequence: Synthetic oligonucleotide
gaggaggucucagauuaga

SEQ ID NO: 934402 - RNA, 19 nt, Artificial Sequence
  Description of Artificial Sequence: Synthetic oligonucleotide
ggguggauacaccuuuccc

SEQ ID NO: 934403 - RNA, 19 nt, Artificial Sequence
  Description of Artificial Sequence: Synthetic oligonucleotide
ccuuacuaguguguaaaag

SEQ ID NO: 934404 - RNA, 19 nt, Artificial Sequence
  Description of Artificial Sequence: Synthetic oligonucleotide
ucacucguuuaaucugcuc

SEQ ID NO: 934405 - RNA, 19 nt, Artificial Sequence
  Description of Artificial Sequence: Synthetic oligonucleotide
cucuggucagacagccgag

SEQ ID NO: 934406 - RNA, 19 nt, Artificial Sequence
  Description of Artificial Sequence: Synthetic oligonucleotide
agauaagacuaagcucaca

SEQ ID NO: 934407 - RNA, 19 nt, Artificial Sequence
  Description of Artificial Sequence: Synthetic oligonucleotide
cauuaccacacagggcaac

SEQ ID NO: 934408 - RNA, 19 nt, Artificial Sequence
  Description of Artificial Sequence: Synthetic oligonucleotide
cauacagcuuccaccaccu

SEQ ID NO: 934409 - RNA, 19 nt, Artificial Sequence
  Description of Artificial Sequence: Synthetic oligonucleotide
ugcuaccuuagagcuuaag

SEQ ID NO: 934410 - RNA, 19 nt, Artificial Sequence
  Description of Artificial Sequence: Synthetic oligonucleotide
gaggacaaacccgguuggc

SEQ ID NO: 934411 - RNA, 19 nt, Artificial Sequence
  Description of Artificial Sequence: Synthetic oligonucleotide
gaccccgaaaccgccauga

SEQ ID NO: 934412 - RNA, 19 nt, Artificial Sequence
  Description of Artificial Sequence: Synthetic oligonucleotide
aguugauguucugaccuuu

SEQ ID NO: 934413 - RNA, 19 nt, Artificial Sequence
  Description of Artificial Sequence: Synthetic oligonucleotide
cucaagcuccgcugacccc

SEQ ID NO: 934414 - RNA, 19 nt, Artificial Sequence
  Description of Artificial Sequence: Synthetic oligonucleotide
uaguuauucugaggagguc

SEQ ID NO: 934415 - RNA, 19 nt, Artificial Sequence
  Description of Artificial Sequence: Synthetic oligonucleotide
uucauucgguacuggcgua

SEQ ID NO: 934416 - RNA, 19 nt, Artificial Sequence
  Description of Artificial Sequence: Synthetic oligonucleotide
ggcgcauuucucuggucag

SEQ ID NO: 934417 - RNA, 19 nt, Artificial Sequence
  Description of Artificial Sequence: Synthetic oligonucleotide
gggucuuauuacauuacca

SEQ ID NO: 934418 - RNA, 19 nt, Artificial Sequence
  Description of Artificial Sequence: Synthetic oligonucleotide
acuuuccuauauaaugguu

SEQ ID NO: 934419 - RNA, 19 nt, Artificial Sequence
  Description of Artificial Sequence: Synthetic oligonucleotide
ucauucgguacuggcguau

SEQ ID NO: 934420 - RNA, 19 nt, Artificial Sequence
  Description of Artificial Sequence: Synthetic oligonucleotide
augacugugcucaucuauu

SEQ ID NO: 934421 - RNA, 19 nt, Artificial Sequence
  Description of Artificial Sequence: Synthetic oligonucleotide
ucggguggauacaccuuuc

SEQ ID NO: 934422 - RNA, 19 nt, Artificial Sequence
  Description of Artificial Sequence: Synthetic oligonucleotide
cagccgagugaggagguag

SEQ ID NO: 934423 - RNA, 19 nt, Artificial Sequence
  Description of Artificial Sequence: Synthetic oligonucleotide
ccuauauaaugguucuuga

SEQ ID NO: 934424 - RNA, 19 nt, Artificial Sequence
  Description of Artificial Sequence: Synthetic oligonucleotide
cacacacacacacuaccaa

SEQ ID NO: 934425 - RNA, 19 nt, Artificial Sequence
  Description of Artificial Sequence: Synthetic oligonucleotide
gcugaccccgcuucgggag

SEQ ID NO: 934426 - RNA, 19 nt, Artificial Sequence
  Description of Artificial Sequence: Synthetic oligonucleotide
gauacaccuuucccucaaa

SEQ ID NO: 934427 - RNA, 19 nt, Artificial Sequence
  Description of Artificial Sequence: Synthetic oligonucleotide
uuggcagaggguguuuguu

SEQ ID NO: 934428 - RNA, 19 nt, Artificial Sequence
  Description of Artificial Sequence: Synthetic oligonucleotide
cugaccccgcuucgggagg

SEQ ID NO: 934429 - RNA, 19 nt, Artificial Sequence
  Description of Artificial Sequence: Synthetic oligonucleotide
cuuugugucaacuguccuu

SEQ ID NO: 934430 - RNA, 19 nt, Artificial Sequence
  Description of Artificial Sequence: Synthetic oligonucleotide
guacauagacauggcaucu

SEQ ID NO: 934431 - RNA, 19 nt, Artificial Sequence
  Description of Artificial Sequence: Synthetic oligonucleotide
agacacacacacacacaca

SEQ ID NO: 934432 - RNA, 19 nt, Artificial Sequence
  Description of Artificial Sequence: Synthetic oligonucleotide
uuccuauauaaugguucuu

SEQ ID NO: 934433 - RNA, 19 nt, Artificial Sequence
  Description of Artificial Sequence: Synthetic oligonucleotide
caaacagggaaacuaucuu

SEQ ID NO: 934434 - RNA, 19 nt, Artificial Sequence
  Description of Artificial Sequence: Synthetic oligonucleotide
agguuucaaugaauggaau

SEQ ID NO: 934435 - RNA, 19 nt, Artificial Sequence
  Description of Artificial Sequence: Synthetic oligonucleotide
acacacacacacacacaca

SEQ ID NO: 934436 - RNA, 19 nt, Artificial Sequence
  Description of Artificial Sequence: Synthetic oligonucleotide
acacacacacacacacacu

SEQ ID NO: 934437 - RNA, 19 nt, Artificial Sequence
  Description of Artificial Sequence: Synthetic oligonucleotide
cuaaucucaugagaacacu

SEQ ID NO: 934438 - RNA, 19 nt, Artificial Sequence
  Description of Artificial Sequence: Synthetic oligonucleotide
agaugacugugcucaucua

SEQ ID NO: 934439 - RNA, 19 nt, Artificial Sequence
  Description of Artificial Sequence: Synthetic oligonucleotide
aggaggucucagauuagau

SEQ ID NO: 934440 - RNA, 19 nt, Artificial Sequence
  Description of Artificial Sequence: Synthetic oligonucleotide
caagcuccgcugaccccgc

SEQ ID NO: 934441 - RNA, 19 nt, Artificial Sequence
  Description of Artificial Sequence: Synthetic oligonucleotide
ggaguaacaggcgcauuuc

SEQ ID NO: 934442 - RNA, 19 nt, Artificial Sequence
  Description of Artificial Sequence: Synthetic oligonucleotide
cuguccuuguuggcaaguc

SEQ ID NO: 934443 - RNA, 19 nt, Artificial Sequence
  Description of Artificial Sequence: Synthetic oligonucleotide
cauucgguacuggcguauc

SEQ ID NO: 934444 - RNA, 19 nt, Artificial Sequence
  Description of Artificial Sequence: Synthetic oligonucleotide
cccauacaaccuugagugc

SEQ ID NO: 934445 - RNA, 19 nt, Artificial Sequence
  Description of Artificial Sequence: Synthetic oligonucleotide
cuccgcugaccccgcuucg

SEQ ID NO: 934446 - RNA, 19 nt, Artificial Sequence
  Description of Artificial Sequence: Synthetic oligonucleotide
gcaaccccauacaaccuug

SEQ ID NO: 934447 - RNA, 19 nt, Artificial Sequence
  Description of Artificial Sequence: Synthetic oligonucleotide
ugccagcuuaagaguuuua

SEQ ID NO: 934448 - RNA, 19 nt, Artificial Sequence
  Description of Artificial Sequence: Synthetic oligonucleotide
agagcaguacucagacuuu

SEQ ID NO: 934449 - RNA, 19 nt, Artificial Sequence
  Description of Artificial Sequence: Synthetic oligonucleotide
ccugccaaacuguuagaga

SEQ ID NO: 934450 - RNA, 19 nt, Artificial Sequence
  Description of Artificial Sequence: Synthetic oligonucleotide
ccgaaaccgccaugaacag

SEQ ID NO: 934451 - RNA, 19 nt, Artificial Sequence
  Description of Artificial Sequence: Synthetic oligonucleotide
guuggcagaggguguuugu

SEQ ID NO: 934452 - RNA, 19 nt, Artificial Sequence
  Description of Artificial Sequence: Synthetic oligonucleotide
agccgagugaggagguagu

SEQ ID NO: 934453 - RNA, 19 nt, Artificial Sequence
  Description of Artificial Sequence: Synthetic oligonucleotide
gaacccaaacagggaaacu

SEQ ID NO: 934454 - RNA, 19 nt, Artificial Sequence
  Description of Artificial Sequence: Synthetic oligonucleotide
ccaaacuguuagagacccc

SEQ ID NO: 934455 - RNA, 19 nt, Artificial Sequence
  Description of Artificial Sequence: Synthetic oligonucleotide
aguugcuaccuuagagcuu

SEQ ID NO: 934456 - RNA, 19 nt, Artificial Sequence
  Description of Artificial Sequence: Synthetic oligonucleotide
caaacccgguuggcagagg

SEQ ID NO: 934457 - RNA, 19 nt, Artificial Sequence
  Description of Artificial Sequence: Synthetic oligonucleotide
acauuaccacacagggcaa

SEQ ID NO: 934458 - RNA, 19 nt, Artificial Sequence
  Description of Artificial Sequence: Synthetic oligonucleotide
ccccgaaaccgccaugaac

SEQ ID NO: 934459 - RNA, 19 nt, Artificial Sequence
  Description of Artificial Sequence: Synthetic oligonucleotide
accccgcuucgggagguuc

SEQ ID NO: 934460 - RNA, 19 nt, Artificial Sequence
  Description of Artificial Sequence: Synthetic oligonucleotide
ccauaggcacaucaucaga

SEQ ID NO: 934461 - RNA, 19 nt, Artificial Sequence
  Description of Artificial Sequence: Synthetic oligonucleotide
ugaccccgcuucgggaggu

SEQ ID NO: 934462 - RNA, 19 nt, Artificial Sequence
  Description of Artificial Sequence: Synthetic oligonucleotide
gugcagacacacacacaca

SEQ ID NO: 934463 - RNA, 19 nt, Artificial Sequence
  Description of Artificial Sequence: Synthetic oligonucleotide
uugcuaccuuagagcuuaa

SEQ ID NO: 934464 - RNA, 19 nt, Artificial Sequence
  Description of Artificial Sequence: Synthetic oligonucleotide
gcguaucucccuuacuagu

SEQ ID NO: 934465 - RNA, 19 nt, Artificial Sequence
  Description of Artificial Sequence: Synthetic oligonucleotide
gcagacacacacacacaca

SEQ ID NO: 934466 - RNA, 19 nt, Artificial Sequence
  Description of Artificial Sequence: Synthetic oligonucleotide
accccgaaaccgccaugaa

SEQ ID NO: 934467 - RNA, 19 nt, Artificial Sequence
  Description of Artificial Sequence: Synthetic oligonucleotide
ggaauccuucgccuguccu

SEQ ID NO: 934468 - RNA, 19 nt, Artificial Sequence
  Description of Artificial Sequence: Synthetic oligonucleotide
gcuuugugucaacuguccu

SEQ ID NO: 934469 - RNA, 19 nt, Artificial Sequence
  Description of Artificial Sequence: Synthetic oligonucleotide
ggaccucaaccugccaaac

SEQ ID NO: 934470 - RNA, 19 nt, Artificial Sequence
  Description of Artificial Sequence: Synthetic oligonucleotide
gagcaguacucagacuuuu

SEQ ID NO: 934471 - RNA, 19 nt, Artificial Sequence
  Description of Artificial Sequence: Synthetic oligonucleotide
cggguggauacaccuuucc

SEQ ID NO: 934472 - RNA, 19 nt, Artificial Sequence
  Description of Artificial Sequence: Synthetic oligonucleotide
cagaggguguuuguuucua

SEQ ID NO: 934473 - RNA, 19 nt, Artificial Sequence
  Description of Artificial Sequence: Synthetic oligonucleotide
cuucgccuguccucaugua

SEQ ID NO: 934474 - RNA, 19 nt, Artificial Sequence
  Description of Artificial Sequence: Synthetic oligonucleotide
ggcaaccccauacaaccuu

SEQ ID NO: 934475 - RNA, 19 nt, Artificial Sequence
  Description of Artificial Sequence: Synthetic oligonucleotide
cgaaaccgccaugaacagc

SEQ ID NO: 934476 - RNA, 19 nt, Artificial Sequence
  Description of Artificial Sequence: Synthetic oligonucleotide
cugccaucggguggauaca

SEQ ID NO: 934477 - RNA, 19 nt, Artificial Sequence
  Description of Artificial Sequence: Synthetic oligonucleotide
cgucuaucccacuuacaaa

SEQ ID NO: 934478 - RNA, 19 nt, Artificial Sequence
  Description of Artificial Sequence: Synthetic oligonucleotide
gccccuuuacuuagagcca

SEQ ID NO: 934479 - RNA, 19 nt, Artificial Sequence
  Description of Artificial Sequence: Synthetic oligonucleotide
gggcuugcuuugugucaac

SEQ ID NO: 934480 - RNA, 19 nt, Artificial Sequence
  Description of Artificial Sequence: Synthetic oligonucleotide
ccacuuguuuucgguaaga

SEQ ID NO: 934481 - RNA, 19 nt, Artificial Sequence
  Description of Artificial Sequence: Synthetic oligonucleotide
cuggcguaucucccuuacu

SEQ ID NO: 934482 - RNA, 19 nt, Artificial Sequence
  Description of Artificial Sequence: Synthetic oligonucleotide
gcgcauuucucuggucaga

SEQ ID NO: 934483 - RNA, 19 nt, Artificial Sequence
  Description of Artificial Sequence: Synthetic oligonucleotide
cagcaguuaaaaggcugau

SEQ ID NO: 934484 - RNA, 19 nt, Artificial Sequence
  Description of Artificial Sequence: Synthetic oligonucleotide
cugccagcuuaagaguuuu

SEQ ID NO: 934485 - RNA, 19 nt, Artificial Sequence
  Description of Artificial Sequence: Synthetic oligonucleotide
gcucaucuauugagucaga

SEQ ID NO: 934486 - RNA, 19 nt, Artificial Sequence
  Description of Artificial Sequence: Synthetic oligonucleotide
cccacccgggagcagcaca

SEQ ID NO: 934487 - RNA, 19 nt, Artificial Sequence
  Description of Artificial Sequence: Synthetic oligonucleotide
ccgagugaggagguaguua

SEQ ID NO: 934488 - RNA, 19 nt, Artificial Sequence
  Description of Artificial Sequence: Synthetic oligonucleotide
gggcaaccccauacaaccu

SEQ ID NO: 934489 - RNA, 19 nt, Artificial Sequence
  Description of Artificial Sequence: Synthetic oligonucleotide
ccgcuucgggagguucuug

SEQ ID NO: 934490 - RNA, 19 nt, Artificial Sequence
  Description of Artificial Sequence: Synthetic oligonucleotide
ccacccgggagcagcacau

SEQ ID NO: 934491 - RNA, 19 nt, Artificial Sequence
  Description of Artificial Sequence: Synthetic oligonucleotide
ccccgcuucgggagguucu

SEQ ID NO: 934492 - RNA, 19 nt, Artificial Sequence
  Description of Artificial Sequence: Synthetic oligonucleotide
gccgagugaggagguaguu

SEQ ID NO: 934493 - RNA, 19 nt, Artificial Sequence
  Description of Artificial Sequence: Synthetic oligonucleotide
ggggaguaacaggcgcauu

SEQ ID NO: 934494 - RNA, 19 nt, Artificial Sequence
  Description of Artificial Sequence: Synthetic oligonucleotide
cgggagguucuuggaccuc

SEQ ID NO: 934495 - RNA, 19 nt, Artificial Sequence
  Description of Artificial Sequence: Synthetic oligonucleotide
ugaguaacaauuaaggucc

SEQ ID NO: 934496 - RNA, 19 nt, Artificial Sequence
  Description of Artificial Sequence: Synthetic oligonucleotide
gauaguaaaugucugauug

SEQ ID NO: 934497 - RNA, 19 nt, Artificial Sequence
  Description of Artificial Sequence: Synthetic oligonucleotide
uaauccaucguuucaaucg

SEQ ID NO: 934498 - RNA, 19 nt, Artificial Sequence
  Description of Artificial Sequence: Synthetic oligonucleotide
aaugacuggagguaacugg

SEQ ID NO: 934499 - RNA, 19 nt, Artificial Sequence
  Description of Artificial Sequence: Synthetic oligonucleotide
ucuagcgaagauauaaagg

SEQ ID NO: 934500 - RNA, 19 nt, Artificial Sequence
  Description of Artificial Sequence: Synthetic oligonucleotide
uauucuucgagccaggaca

SEQ ID NO: 934501 - RNA, 19 nt, Artificial Sequence
  Description of Artificial Sequence: Synthetic oligonucleotide
uuggauaugaucuggacug

SEQ ID NO: 934502 - RNA, 19 nt, Artificial Sequence
  Description of Artificial Sequence: Synthetic oligonucleotide
uauguuguuagaaugcuga

SEQ ID NO: 934503 - RNA, 19 nt, Artificial Sequence
  Description of Artificial Sequence: Synthetic oligonucleotide
auaagaucugccuuuaaag

SEQ ID NO: 934504 - RNA, 19 nt, Artificial Sequence
  Description of Artificial Sequence: Synthetic oligonucleotide
auaaccugcaguuucacag

SEQ ID NO: 934505 - RNA, 19 nt, Artificial Sequence
  Description of Artificial Sequence: Synthetic oligonucleotide
uaauaugccugaaacaccc

SEQ ID NO: 934506 - RNA, 19 nt, Artificial Sequence
  Description of Artificial Sequence: Synthetic oligonucleotide
caaucaauggauuauuccc

SEQ ID NO: 934507 - RNA, 19 nt, Artificial Sequence
  Description of Artificial Sequence: Synthetic oligonucleotide
aauaauaugcaaaugcagu

SEQ ID NO: 934508 - RNA, 19 nt, Artificial Sequence
  Description of Artificial Sequence: Synthetic oligonucleotide
uucaucuaugucuaaagcc

SEQ ID NO: 934509 - RNA, 19 nt, Artificial Sequence
  Description of Artificial Sequence: Synthetic oligonucleotide
ugaucaccaaucauaaucc

SEQ ID NO: 934510 - RNA, 19 nt, Artificial Sequence
  Description of Artificial Sequence: Synthetic oligonucleotide
aaaguucgccaucuggggc

SEQ ID NO: 934511 - RNA, 19 nt, Artificial Sequence
  Description of Artificial Sequence: Synthetic oligonucleotide
gaugucccgaaucagaugc

SEQ ID NO: 934512 - RNA, 19 nt, Artificial Sequence
  Description of Artificial Sequence: Synthetic oligonucleotide
aaaucuaucaacaguuguc

SEQ ID NO: 934513 - RNA, 19 nt, Artificial Sequence
  Description of Artificial Sequence: Synthetic oligonucleotide
auuguauguuguuagaaug

SEQ ID NO: 934514 - RNA, 19 nt, Artificial Sequence
  Description of Artificial Sequence: Synthetic oligonucleotide
uuaccuguacuucaugagg

SEQ ID NO: 934515 - RNA, 19 nt, Artificial Sequence
  Description of Artificial Sequence: Synthetic oligonucleotide
aauccaucguuucaaucgg

SEQ ID NO: 934516 - RNA, 19 nt, Artificial Sequence
  Description of Artificial Sequence: Synthetic oligonucleotide
auaauaugcaaaugcagug

SEQ ID NO: 934517 - RNA, 19 nt, Artificial Sequence
  Description of Artificial Sequence: Synthetic oligonucleotide
uguauagaagaauaaccug

SEQ ID NO: 934518 - RNA, 19 nt, Artificial Sequence
  Description of Artificial Sequence: Synthetic oligonucleotide
gauaaugauggguagucug

SEQ ID NO: 934519 - RNA, 19 nt, Artificial Sequence
  Description of Artificial Sequence: Synthetic oligonucleotide
uguaucaaaugcauguaca

SEQ ID NO: 934520 - RNA, 19 nt, Artificial Sequence
  Description of Artificial Sequence: Synthetic oligonucleotide
ugcgaagcaguucugaggc

SEQ ID NO: 934521 - RNA, 19 nt, Artificial Sequence
  Description of Artificial Sequence: Synthetic oligonucleotide
uagaagaauaaccugcagu

SEQ ID NO: 934522 - RNA, 19 nt, Artificial Sequence
  Description of Artificial Sequence: Synthetic oligonucleotide
agguauaaagguuucuauc

SEQ ID NO: 934523 - RNA, 19 nt, Artificial Sequence
  Description of Artificial Sequence: Synthetic oligonucleotide
aauggauuauucccacauc

SEQ ID NO: 934524 - RNA, 19 nt, Artificial Sequence
  Description of Artificial Sequence: Synthetic oligonucleotide
ugcauguacauauuguaca

SEQ ID NO: 934525 - RNA, 19 nt, Artificial Sequence
  Description of Artificial Sequence: Synthetic oligonucleotide
auaguaaaugucugauugg

SEQ ID NO: 934526 - RNA, 19 nt, Artificial Sequence
  Description of Artificial Sequence: Synthetic oligonucleotide
uguuggaauaauaugcaaa

SEQ ID NO: 934527 - RNA, 19 nt, Artificial Sequence
  Description of Artificial Sequence: Synthetic oligonucleotide
ucuguuggaauaauaugca

SEQ ID NO: 934528 - RNA, 19 nt, Artificial Sequence
  Description of Artificial Sequence: Synthetic oligonucleotide
ugagcaucgagauccacag

SEQ ID NO: 934529 - RNA, 19 nt, Artificial Sequence
  Description of Artificial Sequence: Synthetic oligonucleotide
uuugauaguaaaugucuga

SEQ ID NO: 934530 - RNA, 19 nt, Artificial Sequence
  Description of Artificial Sequence: Synthetic oligonucleotide
aaauugugguaaauguugg

SEQ ID NO: 934531 - RNA, 19 nt, Artificial Sequence
  Description of Artificial Sequence: Synthetic oligonucleotide
uagagguuacacaagcuug

SEQ ID NO: 934532 - RNA, 19 nt, Artificial Sequence
  Description of Artificial Sequence: Synthetic oligonucleotide
aaucuaucaacaguuguca

SEQ ID NO: 934533 - RNA, 19 nt, Artificial Sequence
  Description of Artificial Sequence: Synthetic oligonucleotide
auaugaucuggacugcaac

SEQ ID NO: 934534 - RNA, 19 nt, Artificial Sequence
  Description of Artificial Sequence: Synthetic oligonucleotide
aagaucugccuuuaaagau

SEQ ID NO: 934535 - RNA, 19 nt, Artificial Sequence
  Description of Artificial Sequence: Synthetic oligonucleotide
aacaauuaagguccucugu

SEQ ID NO: 934536 - RNA, 19 nt, Artificial Sequence
  Description of Artificial Sequence: Synthetic oligonucleotide
uguagcgccaguuguagag

SEQ ID NO: 934537 - RNA, 19 nt, Artificial Sequence
  Description of Artificial Sequence: Synthetic oligonucleotide
uauuaccuguacuucauga

SEQ ID NO: 934538 - RNA, 19 nt, Artificial Sequence
  Description of Artificial Sequence: Synthetic oligonucleotide
uauaugagcaucuccugga

SEQ ID NO: 934539 - RNA, 19 nt, Artificial Sequence
  Description of Artificial Sequence: Synthetic oligonucleotide
gaagagugcuaccacauac

SEQ ID NO: 934540 - RNA, 19 nt, Artificial Sequence
  Description of Artificial Sequence: Synthetic oligonucleotide
uaaagauggguugaggcgc

SEQ ID NO: 934541 - RNA, 19 nt, Artificial Sequence
  Description of Artificial Sequence: Synthetic oligonucleotide
auuggaaugaguaacaauu

SEQ ID NO: 934542 - RNA, 19 nt, Artificial Sequence
  Description of Artificial Sequence: Synthetic oligonucleotide
guauaugagcaucuccugg

SEQ ID NO: 934543 - RNA, 19 nt, Artificial Sequence
  Description of Artificial Sequence: Synthetic oligonucleotide
uauuugaauacuucugaaa

SEQ ID NO: 934544 - RNA, 19 nt, Artificial Sequence
  Description of Artificial Sequence: Synthetic oligonucleotide
uccauaccugcuaaaaucu

SEQ ID NO: 934545 - RNA, 19 nt, Artificial Sequence
  Description of Artificial Sequence: Synthetic oligonucleotide
auuaccuguacuucaugag

SEQ ID NO: 934546 - RNA, 19 nt, Artificial Sequence
  Description of Artificial Sequence: Synthetic oligonucleotide
aaagcgagugaaaagagau

SEQ ID NO: 934547 - RNA, 19 nt, Artificial Sequence
  Description of Artificial Sequence: Synthetic oligonucleotide
uuccauaccugcuaaaauc

SEQ ID NO: 934548 - RNA, 19 nt, Artificial Sequence
  Description of Artificial Sequence: Synthetic oligonucleotide
guuguuagaaugcugaucu

SEQ ID NO: 934549 - RNA, 19 nt, Artificial Sequence
  Description of Artificial Sequence: Synthetic oligonucleotide
aaaagagauugcuccauau

SEQ ID NO: 934550 - RNA, 19 nt, Artificial Sequence
  Description of Artificial Sequence: Synthetic oligonucleotide
augauguuagcuugggcag

SEQ ID NO: 934551 - RNA, 19 nt, Artificial Sequence
  Description of Artificial Sequence: Synthetic oligonucleotide
acggacaucccucaaauga

SEQ ID NO: 934552 - RNA, 19 nt, Artificial Sequence
  Description of Artificial Sequence: Synthetic oligonucleotide
uggaaaauugugguaaaug

SEQ ID NO: 934553 - RNA, 19 nt, Artificial Sequence
  Description of Artificial Sequence: Synthetic oligonucleotide
uguuagaaugcugaucuug

SEQ ID NO: 934554 - RNA, 19 nt, Artificial Sequence
  Description of Artificial Sequence: Synthetic oligonucleotide
aaucguuugacuucuucua

SEQ ID NO: 934555 - RNA, 19 nt, Artificial Sequence
  Description of Artificial Sequence: Synthetic oligonucleotide
uggucgagcagugagcugg

SEQ ID NO: 934556 - RNA, 19 nt, Artificial Sequence
  Description of Artificial Sequence: Synthetic oligonucleotide
gacaaagcgagugaaaaga

SEQ ID NO: 934557 - RNA, 19 nt, Artificial Sequence
  Description of Artificial Sequence: Synthetic oligonucleotide
agcgagugaaaagagauug

SEQ ID NO: 934558 - RNA, 19 nt, Artificial Sequence
  Description of Artificial Sequence: Synthetic oligonucleotide
agagugcuaccacauacuc

SEQ ID NO: 934559 - RNA, 19 nt, Artificial Sequence
  Description of Artificial Sequence: Synthetic oligonucleotide
agagguuacacaagcuugc

SEQ ID NO: 934560 - RNA, 19 nt, Artificial Sequence
  Description of Artificial Sequence: Synthetic oligonucleotide
uggguaugauguuagcuug

SEQ ID NO: 934561 - RNA, 19 nt, Artificial Sequence
  Description of Artificial Sequence: Synthetic oligonucleotide
aauaaccugcaguuucaca

SEQ ID NO: 934562 - RNA, 19 nt, Artificial Sequence
  Description of Artificial Sequence: Synthetic oligonucleotide
gguagucuguaucaaaugc

SEQ ID NO: 934563 - RNA, 19 nt, Artificial Sequence
  Description of Artificial Sequence: Synthetic oligonucleotide
uugagcaucgagauccaca

SEQ ID NO: 934564 - RNA, 19 nt, Artificial Sequence
  Description of Artificial Sequence: Synthetic oligonucleotide
uaaccugcaguuucacagg

SEQ ID NO: 934565 - RNA, 19 nt, Artificial Sequence
  Description of Artificial Sequence: Synthetic oligonucleotide
agguuacacaagcuugccc

SEQ ID NO: 934566 - RNA, 19 nt, Artificial Sequence
  Description of Artificial Sequence: Synthetic oligonucleotide
ucuaugucuaaagccauga

SEQ ID NO: 934567 - RNA, 19 nt, Artificial Sequence
  Description of Artificial Sequence: Synthetic oligonucleotide
gaauacuucugaaaggcca

SEQ ID NO: 934568 - RNA, 19 nt, Artificial Sequence
  Description of Artificial Sequence: Synthetic oligonucleotide
gaaugggaagaaugaggcg

SEQ ID NO: 934569 - RNA, 19 nt, Artificial Sequence
  Description of Artificial Sequence: Synthetic oligonucleotide
cucuagcgaagauauaaag

SEQ ID NO: 934570 - RNA, 19 nt, Artificial Sequence
  Description of Artificial Sequence: Synthetic oligonucleotide
uggaaugaguaacaauuaa

SEQ ID NO: 934571 - RNA, 19 nt, Artificial Sequence
  Description of Artificial Sequence: Synthetic oligonucleotide
uaccuguacuucaugaggu

SEQ ID NO: 934572 - RNA, 19 nt, Artificial Sequence
  Description of Artificial Sequence: Synthetic oligonucleotide
uuuaaugacuggagguaac

SEQ ID NO: 934573 - RNA, 19 nt, Artificial Sequence
  Description of Artificial Sequence: Synthetic oligonucleotide
aaguucgccaucuggggca

SEQ ID NO: 934574 - RNA, 19 nt, Artificial Sequence
  Description of Artificial Sequence: Synthetic oligonucleotide
uuuuguccauuguauguug

SEQ ID NO: 934575 - RNA, 19 nt, Artificial Sequence
  Description of Artificial Sequence: Synthetic oligonucleotide
caaaguucgccaucugggg

SEQ ID NO: 934576 - RNA, 19 nt, Artificial Sequence
  Description of Artificial Sequence: Synthetic oligonucleotide
uacuguauagaagaauaac

SEQ ID NO: 934577 - RNA, 19 nt, Artificial Sequence
  Description of Artificial Sequence: Synthetic oligonucleotide
ccuaaauucuuguagcgcc

SEQ ID NO: 934578 - RNA, 19 nt, Artificial Sequence
  Description of Artificial Sequence: Synthetic oligonucleotide
uagucuguaucaaaugcau

SEQ ID NO: 934579 - RNA, 19 nt, Artificial Sequence
  Description of Artificial Sequence: Synthetic oligonucleotide
uucuaaaaguucuauucuu

SEQ ID NO: 934580 - RNA, 19 nt, Artificial Sequence
  Description of Artificial Sequence: Synthetic oligonucleotide
agcagcgugacauuacugu

SEQ ID NO: 934581 - RNA, 19 nt, Artificial Sequence
  Description of Artificial Sequence: Synthetic oligonucleotide
uggacccacaaccauaguc

SEQ ID NO: 934582 - RNA, 19 nt, Artificial Sequence
  Description of Artificial Sequence: Synthetic oligonucleotide
auguaaucauucuguugac

SEQ ID NO: 934583 - RNA, 19 nt, Artificial Sequence
  Description of Artificial Sequence: Synthetic oligonucleotide
aacacccuucagcaauuuc

SEQ ID NO: 934584 - RNA, 19 nt, Artificial Sequence
  Description of Artificial Sequence: Synthetic oligonucleotide
auagaagaauaaccugcag

SEQ ID NO: 934585 - RNA, 19 nt, Artificial Sequence
  Description of Artificial Sequence: Synthetic oligonucleotide
aaaagguauuuagaucugu

SEQ ID NO: 934586 - RNA, 19 nt, Artificial Sequence
  Description of Artificial Sequence: Synthetic oligonucleotide
ugaggauucuguagaagaa

SEQ ID NO: 934587 - RNA, 19 nt, Artificial Sequence
  Description of Artificial Sequence: Synthetic oligonucleotide
  modified_base (5)..(5): a, c, u, g, unknown or other
acccngacgcaggagaugc

SEQ ID NO: 934588 - RNA, 19 nt, Artificial Sequence
  Description of Artificial Sequence: Synthetic oligonucleotide
uuucaaucggcugaaccca

SEQ ID NO: 934589 - RNA, 19 nt, Artificial Sequence
  Description of Artificial Sequence: Synthetic oligonucleotide
uguagagguuacacaagcu

SEQ ID NO: 934590 - RNA, 19 nt, Artificial Sequence
  Description of Artificial Sequence: Synthetic oligonucleotide
ucuuucaccaaaagguauu

SEQ ID NO: 934591 - RNA, 19 nt, Artificial Sequence
  Description of Artificial Sequence: Synthetic oligonucleotide
uucuuucaccaaaagguau

SEQ ID NO: 934592 - RNA, 19 nt, Artificial Sequence
  Description of Artificial Sequence: Synthetic oligonucleotide
augcauguacauauuguac

SEQ ID NO: 934593 - RNA, 19 nt, Artificial Sequence
  Description of Artificial Sequence: Synthetic oligonucleotide
uuauuaccuguacuucaug

SEQ ID NO: 934594 - RNA, 19 nt, Artificial Sequence
  Description of Artificial Sequence: Synthetic oligonucleotide
guaaucauucuguugaccu

SEQ ID NO: 934595 - RNA, 19 nt, Artificial Sequence
  Description of Artificial Sequence: Synthetic oligonucleotide
aggcgcauuggcaaaauac

SEQ ID NO: 934596 - RNA, 19 nt, Artificial Sequence
  Description of Artificial Sequence: Synthetic oligonucleotide
uguaaucauucuguugacc

SEQ ID NO: 934597 - RNA, 19 nt, Artificial Sequence
  Description of Artificial Sequence: Synthetic oligonucleotide
ggcacauauacaugaagag

SEQ ID NO: 934598 - RNA, 19 nt, Artificial Sequence
  Description of Artificial Sequence: Synthetic oligonucleotide
uaaaggccaagccuggcuc

SEQ ID NO: 934599 - RNA, 19 nt, Artificial Sequence
  Description of Artificial Sequence: Synthetic oligonucleotide
auaccugcuaaaaucuuuc

SEQ ID NO: 934600 - RNA, 19 nt, Artificial Sequence
  Description of Artificial Sequence: Synthetic oligonucleotide
cuuguuuggccuuccaauc

SEQ ID NO: 934601 - RNA, 19 nt, Artificial Sequence
  Description of Artificial Sequence: Synthetic oligonucleotide
ggaaugaguaacaauuaag

SEQ ID NO: 934602 - RNA, 19 nt, Artificial Sequence
  Description of Artificial Sequence: Synthetic oligonucleotide
uggggcauguucuuuauua

SEQ ID NO: 934603 - RNA, 19 nt, Artificial Sequence
  Description of Artificial Sequence: Synthetic oligonucleotide
uccgcacuagagaaaggag

SEQ ID NO: 934604 - RNA, 19 nt, Artificial Sequence
  Description of Artificial Sequence: Synthetic oligonucleotide
uggauuauucccacaucgu

SEQ ID NO: 934605 - RNA, 19 nt, Artificial Sequence
  Description of Artificial Sequence: Synthetic oligonucleotide
ucuauugaugaugucccga

SEQ ID NO: 934606 - RNA, 19 nt, Artificial Sequence
  Description of Artificial Sequence: Synthetic oligonucleotide
aaugauggguagucuguau

SEQ ID NO: 934607 - RNA, 19 nt, Artificial Sequence
  Description of Artificial Sequence: Synthetic oligonucleotide
agugaagauuuucuuaaua

SEQ ID NO: 934608 - RNA, 19 nt, Artificial Sequence
  Description of Artificial Sequence: Synthetic oligonucleotide
uguuggauaugaucuggac

SEQ ID NO: 934609 - RNA, 19 nt, Artificial Sequence
  Description of Artificial Sequence: Synthetic oligonucleotide
ggagcucucaggcugagag

SEQ ID NO: 934610 - RNA, 19 nt, Artificial Sequence
  Description of Artificial Sequence: Synthetic oligonucleotide
aaauacucauggaauggga

SEQ ID NO: 934611 - RNA, 19 nt, Artificial Sequence
  Description of Artificial Sequence: Synthetic oligonucleotide
uaugccugaaacacccuuc

SEQ ID NO: 934612 - RNA, 19 nt, Artificial Sequence
  Description of Artificial Sequence: Synthetic oligonucleotide
cuguaucaaaugcauguac

SEQ ID NO: 934613 - RNA, 19 nt, Artificial Sequence
  Description of Artificial Sequence: Synthetic oligonucleotide
cuguauagaagaauaaccu

SEQ ID NO: 934614 - RNA, 19 nt, Artificial Sequence
  Description of Artificial Sequence: Synthetic oligonucleotide
uccaucguuucaaucggcu

SEQ ID NO: 934615 - RNA, 19 nt, Artificial Sequence
  Description of Artificial Sequence: Synthetic oligonucleotide
caucgagauccacaguagg

SEQ ID NO: 934616 - RNA, 19 nt, Artificial Sequence
  Description of Artificial Sequence: Synthetic oligonucleotide
aauucuuguagcgccaguu

SEQ ID NO: 934617 - RNA, 19 nt, Artificial Sequence
  Description of Artificial Sequence: Synthetic oligonucleotide
agcgaagauauaaaggcca

SEQ ID NO: 934618 - RNA, 19 nt, Artificial Sequence
  Description of Artificial Sequence: Synthetic oligonucleotide
gguauaaagguuucuaucu

SEQ ID NO: 934619 - RNA, 19 nt, Artificial Sequence
  Description of Artificial Sequence: Synthetic oligonucleotide
acaucgucuauugaugaug

SEQ ID NO: 934620 - RNA, 19 nt, Artificial Sequence
  Description of Artificial Sequence: Synthetic oligonucleotide
uuguaaucguuugacuucu

SEQ ID NO: 934621 - RNA, 19 nt, Artificial Sequence
  Description of Artificial Sequence: Synthetic oligonucleotide
agagggacacucuagcgaa

SEQ ID NO: 934622 - RNA, 19 nt, Artificial Sequence
  Description of Artificial Sequence: Synthetic oligonucleotide
agaucugccuuuaaagaug

SEQ ID NO: 934623 - RNA, 19 nt, Artificial Sequence
  Description of Artificial Sequence: Synthetic oligonucleotide
aaccugcaguuucacaggu

SEQ ID NO: 934624 - RNA, 19 nt, Artificial Sequence
  Description of Artificial Sequence: Synthetic oligonucleotide
uaugagcaucuccuggaac

SEQ ID NO: 934625 - RNA, 19 nt, Artificial Sequence
  Description of Artificial Sequence: Synthetic oligonucleotide
uguuuggccuuccaaucaa

SEQ ID NO: 934626 - RNA, 19 nt, Artificial Sequence
  Description of Artificial Sequence: Synthetic oligonucleotide
aagaagagguauaaagguu

SEQ ID NO: 934627 - RNA, 19 nt, Artificial Sequence
  Description of Artificial Sequence: Synthetic oligonucleotide
aacccggacaaagcgagug

SEQ ID NO: 934628 - RNA, 19 nt, Artificial Sequence
  Description of Artificial Sequence: Synthetic oligonucleotide
uauuuagaucuguccaguc

SEQ ID NO: 934629 - RNA, 19 nt, Artificial Sequence
  Description of Artificial Sequence: Synthetic oligonucleotide
caccaagcgacggacaucc

SEQ ID NO: 934630 - RNA, 19 nt, Artificial Sequence
  Description of Artificial Sequence: Synthetic oligonucleotide
ggaaaauugugguaaaugu

SEQ ID NO: 934631 - RNA, 19 nt, Artificial Sequence
  Description of Artificial Sequence: Synthetic oligonucleotide
  modified_base (8)..(8): a, c, u, g, unknown or other
augacccngacgcaggaga

SEQ ID NO: 934632 - RNA, 19 nt, Artificial Sequence
  Description of Artificial Sequence: Synthetic oligonucleotide
agagauugcuccauauuug

SEQ ID NO: 934633 - RNA, 19 nt, Artificial Sequence
  Description of Artificial Sequence: Synthetic oligonucleotide
uuacacaagcuugcccugg

SEQ ID NO: 934634 - RNA, 19 nt, Artificial Sequence
  Description of Artificial Sequence: Synthetic oligonucleotide
acaagcuugcccuggcucu

SEQ ID NO: 934635 - RNA, 19 nt, Artificial Sequence
  Description of Artificial Sequence: Synthetic oligonucleotide
ugaucuugucugcagggua

SEQ ID NO: 934636 - RNA, 19 nt, Artificial Sequence
  Description of Artificial Sequence: Synthetic oligonucleotide
aggaacgccaacccggaca

SEQ ID NO: 934637 - RNA, 19 nt, Artificial Sequence
  Description of Artificial Sequence: Synthetic oligonucleotide
ggacauaauuaacucuucc

SEQ ID NO: 934638 - RNA, 19 nt, Artificial Sequence
  Description of Artificial Sequence: Synthetic oligonucleotide
augaggcgaccucugcagc

SEQ ID NO: 934639 - RNA, 19 nt, Artificial Sequence
  Description of Artificial Sequence: Synthetic oligonucleotide
cauagucaguccaggcugc

SEQ ID NO: 934640 - RNA, 19 nt, Artificial Sequence
  Description of Artificial Sequence: Synthetic oligonucleotide
gacccacaaccauagucag

SEQ ID NO: 934641 - RNA, 19 nt, Artificial Sequence
  Description of Artificial Sequence: Synthetic oligonucleotide
ucaauggauuauucccaca

SEQ ID NO: 934642 - RNA, 19 nt, Artificial Sequence
  Description of Artificial Sequence: Synthetic oligonucleotide
accuugaaaucuaucaaca

SEQ ID NO: 934643 - RNA, 19 nt, Artificial Sequence
  Description of Artificial Sequence: Synthetic oligonucleotide
agguggucuuucuccauuc

SEQ ID NO: 934644 - RNA, 19 nt, Artificial Sequence
  Description of Artificial Sequence: Synthetic oligonucleotide
aagagugcuaccacauacu

SEQ ID NO: 934645 - RNA, 19 nt, Artificial Sequence
  Description of Artificial Sequence: Synthetic oligonucleotide
cuugacucaggcuggcuuc

SEQ ID NO: 934646 - RNA, 19 nt, Artificial Sequence
  Description of Artificial Sequence: Synthetic oligonucleotide
acaaagcgagugaaaagag

SEQ ID NO: 934647 - RNA, 19 nt, Artificial Sequence
  Description of Artificial Sequence: Synthetic oligonucleotide
auggaaugggaagaaugag

SEQ ID NO: 934648 - RNA, 19 nt, Artificial Sequence
  Description of Artificial Sequence: Synthetic oligonucleotide
caauuuuggaagagggaca

SEQ ID NO: 934649 - RNA, 19 nt, Artificial Sequence
  Description of Artificial Sequence: Synthetic oligonucleotide
cauaagaucugccuuuaaa

SEQ ID NO: 934650 - RNA, 19 nt, Artificial Sequence
  Description of Artificial Sequence: Synthetic oligonucleotide
caucguuucaaucggcuga

SEQ ID NO: 934651 - RNA, 19 nt, Artificial Sequence
  Description of Artificial Sequence: Synthetic oligonucleotide
gucuauugaugaugucccg

SEQ ID NO: 934652 - RNA, 19 nt, Artificial Sequence
  Description of Artificial Sequence: Synthetic oligonucleotide
acaaccauagucaguccag

SEQ ID NO: 934653 - RNA, 19 nt, Artificial Sequence
  Description of Artificial Sequence: Synthetic oligonucleotide
agagaaaggaggauguaau

SEQ ID NO: 934654 - RNA, 19 nt, Artificial Sequence
  Description of Artificial Sequence: Synthetic oligonucleotide
ucuucgagccaggacauaa

SEQ ID NO: 934655 - RNA, 19 nt, Artificial Sequence
  Description of Artificial Sequence: Synthetic oligonucleotide
cuuguagcgccaguuguag

SEQ ID NO: 934656 - RNA, 19 nt, Artificial Sequence
  Description of Artificial Sequence: Synthetic oligonucleotide
gaugccguucaucuauguc

SEQ ID NO: 934657 - RNA, 19 nt, Artificial Sequence
  Description of Artificial Sequence: Synthetic oligonucleotide
caagcgacggacaucccuc

SEQ ID NO: 934658 - RNA, 19 nt, Artificial Sequence
  Description of Artificial Sequence: Synthetic oligonucleotide
ggauguaaucauucuguug

SEQ ID NO: 934659 - RNA, 19 nt, Artificial Sequence
  Description of Artificial Sequence: Synthetic oligonucleotide
cauagcaaugauuuuggcu

SEQ ID NO: 934660 - RNA, 19 nt, Artificial Sequence
  Description of Artificial Sequence: Synthetic oligonucleotide
guuggauaugaucuggacu

SEQ ID NO: 934661 - RNA, 19 nt, Artificial Sequence
  Description of Artificial Sequence: Synthetic oligonucleotide
cuauucuucgagccaggac

SEQ ID NO: 934662 - RNA, 19 nt, Artificial Sequence
  Description of Artificial Sequence: Synthetic oligonucleotide
ugaucuggacugcaacauc

SEQ ID NO: 934663 - RNA, 19 nt, Artificial Sequence
  Description of Artificial Sequence: Synthetic oligonucleotide
gaacccaucuugaggauuc

SEQ ID NO: 934664 - RNA, 19 nt, Artificial Sequence
  Description of Artificial Sequence: Synthetic oligonucleotide
aguaacaauuaagguccuc

SEQ ID NO: 934665 - RNA, 19 nt, Artificial Sequence
  Description of Artificial Sequence: Synthetic oligonucleotide
guuacacaagcuugcccug

SEQ ID NO: 934666 - RNA, 19 nt, Artificial Sequence
  Description of Artificial Sequence: Synthetic oligonucleotide
gguauaugagcaucuccug

SEQ ID NO: 934667 - RNA, 19 nt, Artificial Sequence
  Description of Artificial Sequence: Synthetic oligonucleotide
uguuagcuugggcagucau

SEQ ID NO: 934668 - RNA, 19 nt, Artificial Sequence
  Description of Artificial Sequence: Synthetic oligonucleotide
uucacagguauaugagcau

SEQ ID NO: 934669 - RNA, 19 nt, Artificial Sequence
  Description of Artificial Sequence: Synthetic oligonucleotide
ugauuggaaugaguaacaa

SEQ ID NO: 934670 - RNA, 19 nt, Artificial Sequence
  Description of Artificial Sequence: Synthetic oligonucleotide
caugccguuucaaggcagc

SEQ ID NO: 934671 - RNA, 19 nt, Artificial Sequence
  Description of Artificial Sequence: Synthetic oligonucleotide
uguccauuguauguuguua

SEQ ID NO: 934672 - RNA, 19 nt, Artificial Sequence
  Description of Artificial Sequence: Synthetic oligonucleotide
ggauuauucccacaucguc

SEQ ID NO: 934673 - RNA, 19 nt, Artificial Sequence
  Description of Artificial Sequence: Synthetic oligonucleotide
uugcuccauauuugaauac

SEQ ID NO: 934674 - RNA, 19 nt, Artificial Sequence
  Description of Artificial Sequence: Synthetic oligonucleotide
uucgagccaggacauaauu

SEQ ID NO: 934675 - RNA, 19 nt, Artificial Sequence
  Description of Artificial Sequence: Synthetic oligonucleotide
gacacucuagcgaagauau

SEQ ID NO: 934676 - RNA, 19 nt, Artificial Sequence
  Description of Artificial Sequence: Synthetic oligonucleotide
gccugaaacacccuucagc

SEQ ID NO: 934677 - RNA, 19 nt, Artificial Sequence
  Description of Artificial Sequence: Synthetic oligonucleotide
ccugauuggaaugaguaac

SEQ ID NO: 934678 - RNA, 19 nt, Artificial Sequence
  Description of Artificial Sequence: Synthetic oligonucleotide
gucugaugauaaugauggg

SEQ ID NO: 934679 - RNA, 19 nt, Artificial Sequence
  Description of Artificial Sequence: Synthetic oligonucleotide
auaugccugaaacacccuu

SEQ ID NO: 934680 - RNA, 19 nt, Artificial Sequence
  Description of Artificial Sequence: Synthetic oligonucleotide
ccgcacuagagaaaggagg

SEQ ID NO: 934681 - RNA, 19 nt, Artificial Sequence
  Description of Artificial Sequence: Synthetic oligonucleotide
  modified_base (7)..(7): a, c, u, g, unknown or other
ugacccngacgcaggagau

SEQ ID NO: 934682 - RNA, 19 nt, Artificial Sequence
  Description of Artificial Sequence: Synthetic oligonucleotide
cgucuauugaugauguccc

SEQ ID NO: 934683 - RNA, 19 nt, Artificial Sequence
  Description of Artificial Sequence: Synthetic oligonucleotide
guauguuguuagaaugcug

SEQ ID NO: 934684 - RNA, 19 nt, Artificial Sequence
  Description of Artificial Sequence: Synthetic oligonucleotide
cacucuagcgaagauauaa

SEQ ID NO: 934685 - RNA, 19 nt, Artificial Sequence
  Description of Artificial Sequence: Synthetic oligonucleotide
accuguacuucaugaggug

SEQ ID NO: 934686 - RNA, 19 nt, Artificial Sequence
  Description of Artificial Sequence: Synthetic oligonucleotide
gguaugauguuagcuuggg

SEQ ID NO: 934687 - RNA, 19 nt, Artificial Sequence
  Description of Artificial Sequence: Synthetic oligonucleotide
caaccauagucaguccagg

SEQ ID NO: 934688 - RNA, 19 nt, Artificial Sequence
  Description of Artificial Sequence: Synthetic oligonucleotide
aucgucuauugaugauguc

SEQ ID NO: 934689 - RNA, 19 nt, Artificial Sequence
  Description of Artificial Sequence: Synthetic oligonucleotide
auaugagcaucuccuggaa

SEQ ID NO: 934690 - RNA, 19 nt, Artificial Sequence
  Description of Artificial Sequence: Synthetic oligonucleotide
agguccucuguucuggaaa

SEQ ID NO: 934691 - RNA, 19 nt, Artificial Sequence
  Description of Artificial Sequence: Synthetic oligonucleotide
gagguauaaagguuucuau

SEQ ID NO: 934692 - RNA, 19 nt, Artificial Sequence
  Description of Artificial Sequence: Synthetic oligonucleotide
gauuggaaugaguaacaau

SEQ ID NO: 934693 - RNA, 19 nt, Artificial Sequence
  Description of Artificial Sequence: Synthetic oligonucleotide
gcacauguggcaaauugcc

SEQ ID NO: 934694 - RNA, 19 nt, Artificial Sequence
  Description of Artificial Sequence: Synthetic oligonucleotide
gccguuucaaggcagcaug

SEQ ID NO: 934695 - RNA, 19 nt, Artificial Sequence
  Description of Artificial Sequence: Synthetic oligonucleotide
aaagauggguugaggcgca

SEQ ID NO: 934696 - RNA, 19 nt, Artificial Sequence
  Description of Artificial Sequence: Synthetic oligonucleotide
ccauagucaguccaggcug

SEQ ID NO: 934697 - RNA, 19 nt, Artificial Sequence
  Description of Artificial Sequence: Synthetic oligonucleotide
caguggucgagcagugagc

SEQ ID NO: 934698 - RNA, 19 nt, Artificial Sequence
  Description of Artificial Sequence: Synthetic oligonucleotide
ucccgaaucagaugcuuuu

SEQ ID NO: 934699 - RNA, 19 nt, Artificial Sequence
  Description of Artificial Sequence: Synthetic oligonucleotide
agcgugacauuacuguaua

SEQ ID NO: 934700 - RNA, 19 nt, Artificial Sequence
  Description of Artificial Sequence: Synthetic oligonucleotide
cacaagcuugcccuggcuc

SEQ ID NO: 934701 - RNA, 19 nt, Artificial Sequence
  Description of Artificial Sequence: Synthetic oligonucleotide
gauaugaucuggacugcaa

SEQ ID NO: 934702 - RNA, 19 nt, Artificial Sequence
  Description of Artificial Sequence: Synthetic oligonucleotide
gacuggguaugauguuagc

SEQ ID NO: 934703 - RNA, 19 nt, Artificial Sequence
  Description of Artificial Sequence: Synthetic oligonucleotide
gacggacaucccucaaaug

SEQ ID NO: 934704 - RNA, 19 nt, Artificial Sequence
  Description of Artificial Sequence: Synthetic oligonucleotide
guuagcuugggcagucaug

SEQ ID NO: 934705 - RNA, 19 nt, Artificial Sequence
  Description of Artificial Sequence: Synthetic oligonucleotide
aagcgacggacaucccuca

SEQ ID NO: 934706 - RNA, 19 nt, Artificial Sequence
  Description of Artificial Sequence: Synthetic oligonucleotide
uggauaugaucuggacugc

SEQ ID NO: 934707 - RNA, 19 nt, Artificial Sequence
  Description of Artificial Sequence: Synthetic oligonucleotide
guagcgccaguuguagagg

SEQ ID NO: 934708 - RNA, 19 nt, Artificial Sequence
  Description of Artificial Sequence: Synthetic oligonucleotide
uuccaaucaauggauuauu

SEQ ID NO: 934709 - RNA, 19 nt, Artificial Sequence
  Description of Artificial Sequence: Synthetic oligonucleotide
cuuucuggagguugggaaa

SEQ ID NO: 934710 - RNA, 19 nt, Artificial Sequence
  Description of Artificial Sequence: Synthetic oligonucleotide
uggacuggguaugauguua

SEQ ID NO: 934711 - RNA, 19 nt, Artificial Sequence
  Description of Artificial Sequence: Synthetic oligonucleotide
auccaucguuucaaucggc

SEQ ID NO: 934712 - RNA, 19 nt, Artificial Sequence
  Description of Artificial Sequence: Synthetic oligonucleotide
uucaaucggcugaacccau

SEQ ID NO: 934713 - RNA, 19 nt, Artificial Sequence
  Description of Artificial Sequence: Synthetic oligonucleotide
aauaugccugaaacacccu

SEQ ID NO: 934714 - RNA, 19 nt, Artificial Sequence
  Description of Artificial Sequence: Synthetic oligonucleotide
aacugguucagagccugau

SEQ ID NO: 934715 - RNA, 19 nt, Artificial Sequence
  Description of Artificial Sequence: Synthetic oligonucleotide
caccaaaagguauuuagau

SEQ ID NO: 934716 - RNA, 19 nt, Artificial Sequence
  Description of Artificial Sequence: Synthetic oligonucleotide
guuagaaugcugaucuugu

SEQ ID NO: 934717 - RNA, 19 nt, Artificial Sequence
  Description of Artificial Sequence: Synthetic oligonucleotide
uugacauggcuaccaccaa

SEQ ID NO: 934718 - RNA, 19 nt, Artificial Sequence
  Description of Artificial Sequence: Synthetic oligonucleotide
ggacccacaaccauaguca

SEQ ID NO: 934719 - RNA, 19 nt, Artificial Sequence
  Description of Artificial Sequence: Synthetic oligonucleotide
aagguccucuguucuggaa

SEQ ID NO: 934720 - RNA, 19 nt, Artificial Sequence
  Description of Artificial Sequence: Synthetic oligonucleotide
caagguucugauagaagua

SEQ ID NO: 934721 - RNA, 19 nt, Artificial Sequence
  Description of Artificial Sequence: Synthetic oligonucleotide
cauguggcaaauugccuaa

SEQ ID NO: 934722 - RNA, 19 nt, Artificial Sequence
  Description of Artificial Sequence: Synthetic oligonucleotide
cccacaaccauagucaguc

SEQ ID NO: 934723 - RNA, 19 nt, Artificial Sequence
  Description of Artificial Sequence: Synthetic oligonucleotide
cacccuucagcaauuucca

SEQ ID NO: 934724 - RNA, 19 nt, Artificial Sequence
  Description of Artificial Sequence: Synthetic oligonucleotide
agagccugauuggaaugag

SEQ ID NO: 934725 - RNA, 19 nt, Artificial Sequence
  Description of Artificial Sequence: Synthetic oligonucleotide
ucaaucggcugaacccauc

SEQ ID NO: 934726 - RNA, 19 nt, Artificial Sequence
  Description of Artificial Sequence: Synthetic oligonucleotide
cagaugcuuuuguccauug

SEQ ID NO: 934727 - RNA, 19 nt, Artificial Sequence
  Description of Artificial Sequence: Synthetic oligonucleotide
caauggauuauucccacau

SEQ ID NO: 934728 - RNA, 19 nt, Artificial Sequence
  Description of Artificial Sequence: Synthetic oligonucleotide
cucuugacauggcuaccac

SEQ ID NO: 934729 - RNA, 19 nt, Artificial Sequence
  Description of Artificial Sequence: Synthetic oligonucleotide
guccgcacuagagaaagga

SEQ ID NO: 934730 - RNA, 19 nt, Artificial Sequence
  Description of Artificial Sequence: Synthetic oligonucleotide
aucagaugcuuuuguccau

SEQ ID NO: 934731 - RNA, 19 nt, Artificial Sequence
  Description of Artificial Sequence: Synthetic oligonucleotide
agaugccguucaucuaugu

SEQ ID NO: 934732 - RNA, 19 nt, Artificial Sequence
  Description of Artificial Sequence: Synthetic oligonucleotide
caaaugcaguggucgagca

SEQ ID NO: 934733 - RNA, 19 nt, Artificial Sequence
  Description of Artificial Sequence: Synthetic oligonucleotide
aggcgaccucugcagcagc

SEQ ID NO: 934734 - RNA, 19 nt, Artificial Sequence
  Description of Artificial Sequence: Synthetic oligonucleotide
cccacaucgucuauugaug

SEQ ID NO: 934735 - RNA, 19 nt, Artificial Sequence
  Description of Artificial Sequence: Synthetic oligonucleotide
gguaguuguaagaaagucu

SEQ ID NO: 934736 - RNA, 19 nt, Artificial Sequence
  Description of Artificial Sequence: Synthetic oligonucleotide
caucgucuauugaugaugu

SEQ ID NO: 934737 - RNA, 19 nt, Artificial Sequence
  Description of Artificial Sequence: Synthetic oligonucleotide
gaggcgaccucugcagcag

SEQ ID NO: 934738 - RNA, 19 nt, Artificial Sequence
  Description of Artificial Sequence: Synthetic oligonucleotide
gcaaaugcaguggucgagc

SEQ ID NO: 934739 - RNA, 19 nt, Artificial Sequence
  Description of Artificial Sequence: Synthetic oligonucleotide
uuauucccacaucgucuau

SEQ ID NO: 934740 - RNA, 19 nt, Artificial Sequence
  Description of Artificial Sequence: Synthetic oligonucleotide
gccuaaauucuuguagcgc

SEQ ID NO: 934741 - RNA, 19 nt, Artificial Sequence
  Description of Artificial Sequence: Synthetic oligonucleotide
gauggguagucuguaucaa

SEQ ID NO: 934742 - RNA, 19 nt, Artificial Sequence
  Description of Artificial Sequence: Synthetic oligonucleotide
ggguaugauguuagcuugg

SEQ ID NO: 934743 - RNA, 19 nt, Artificial Sequence
  Description of Artificial Sequence: Synthetic oligonucleotide
acucuagcgaagauauaaa

SEQ ID NO: 934744 - RNA, 19 nt, Artificial Sequence
  Description of Artificial Sequence: Synthetic oligonucleotide
uggcugaaagcaggaguca

SEQ ID NO: 934745 - RNA, 19 nt, Artificial Sequence
  Description of Artificial Sequence: Synthetic oligonucleotide
aagcgagugaaaagagauu

SEQ ID NO: 934746 - RNA, 19 nt, Artificial Sequence
  Description of Artificial Sequence: Synthetic oligonucleotide
aucguuucaaucggcugaa

SEQ ID NO: 934747 - RNA, 19 nt, Artificial Sequence
  Description of Artificial Sequence: Synthetic oligonucleotide
ggacuggguaugauguuag

SEQ ID NO: 934748 - RNA, 19 nt, Artificial Sequence
  Description of Artificial Sequence: Synthetic oligonucleotide
ggacaucccucaaaugacc

SEQ ID NO: 934749 - RNA, 19 nt, Artificial Sequence
  Description of Artificial Sequence: Synthetic oligonucleotide
acccggacaaagcgaguga

SEQ ID NO: 934750 - RNA, 19 nt, Artificial Sequence
  Description of Artificial Sequence: Synthetic oligonucleotide
uccaccauugcagguggua

SEQ ID NO: 934751 - RNA, 19 nt, Artificial Sequence
  Description of Artificial Sequence: Synthetic oligonucleotide
uguaaucguuugacuucuu

SEQ ID NO: 934752 - RNA, 19 nt, Artificial Sequence
  Description of Artificial Sequence: Synthetic oligonucleotide
  modified_base (3)..(3): a, c, u, g, unknown or other
ccngacgcaggagaugccg

SEQ ID NO: 934753 - RNA, 19 nt, Artificial Sequence
  Description of Artificial Sequence: Synthetic oligonucleotide
ggcauguucuuuauuaccu

SEQ ID NO: 934754 - RNA, 19 nt, Artificial Sequence
  Description of Artificial Sequence: Synthetic oligonucleotide
  modified_base (9)..(9): a, c, u, g, unknown or other
caugacccngacgcaggag

SEQ ID NO: 934755 - RNA, 19 nt, Artificial Sequence
  Description of Artificial Sequence: Synthetic oligonucleotide
uugaggcgcauuggcaaaa

SEQ ID NO: 934756 - RNA, 19 nt, Artificial Sequence
  Description of Artificial Sequence: Synthetic oligonucleotide
uaggaacgccaacccggac

SEQ ID NO: 934757 - RNA, 19 nt, Artificial Sequence
  Description of Artificial Sequence: Synthetic oligonucleotide
agguugggaaagguucugu

SEQ ID NO: 934758 - RNA, 19 nt, Artificial Sequence
  Description of Artificial Sequence: Synthetic oligonucleotide
ggaacgccaacccggacaa

SEQ ID NO: 934759 - RNA, 19 nt, Artificial Sequence
  Description of Artificial Sequence: Synthetic oligonucleotide
agacucuuuuguaaucguu

SEQ ID NO: 934760 - RNA, 19 nt, Artificial Sequence
  Description of Artificial Sequence: Synthetic oligonucleotide
ccuuuaaagauggguugag

SEQ ID NO: 934761 - RNA, 19 nt, Artificial Sequence
  Description of Artificial Sequence: Synthetic oligonucleotide
  modified_base (6)..(6): a, c, u, g, unknown or other
gacccngacgcaggagaug

SEQ ID NO: 934762 - RNA, 19 nt, Artificial Sequence
  Description of Artificial Sequence: Synthetic oligonucleotide
ugccguuucaaggcagcau

SEQ ID NO: 934763 - RNA, 19 nt, Artificial Sequence
  Description of Artificial Sequence: Synthetic oligonucleotide
guaggaacgccaacccgga

SEQ ID NO: 934764 - RNA, 19 nt, Artificial Sequence
  Description of Artificial Sequence: Synthetic oligonucleotide
aaacacccuucagcaauuu

SEQ ID NO: 934765 - RNA, 19 nt, Artificial Sequence
  Description of Artificial Sequence: Synthetic oligonucleotide
gacgcaggagaugccguuc

SEQ ID NO: 934766 - RNA, 19 nt, Artificial Sequence
  Description of Artificial Sequence: Synthetic oligonucleotide
cuugagcaucgagauccac

SEQ ID NO: 934767 - RNA, 19 nt, Artificial Sequence
  Description of Artificial Sequence: Synthetic oligonucleotide
cuuccaaucaauggauuau

SEQ ID NO: 934768 - RNA, 19 nt, Artificial Sequence
  Description of Artificial Sequence: Synthetic oligonucleotide
cuuccauaccugcuaaaau

SEQ ID NO: 934769 - RNA, 19 nt, Artificial Sequence
  Description of Artificial Sequence: Synthetic oligonucleotide
cggacaucccucaaaugac

SEQ ID NO: 934770 - RNA, 19 nt, Artificial Sequence
  Description of Artificial Sequence: Synthetic oligonucleotide
gcgagugaaaagagauugc

SEQ ID NO: 934771 - RNA, 19 nt, Artificial Sequence
  Description of Artificial Sequence: Synthetic oligonucleotide
gccuuuaaagauggguuga

SEQ ID NO: 934772 - RNA, 19 nt, Artificial Sequence
  Description of Artificial Sequence: Synthetic oligonucleotide
uuccaccauugcagguggu

SEQ ID NO: 934773 - RNA, 19 nt, Artificial Sequence
  Description of Artificial Sequence: Synthetic oligonucleotide
ugaggcgcauuggcaaaau

SEQ ID NO: 934774 - RNA, 19 nt, Artificial Sequence
  Description of Artificial Sequence: Synthetic oligonucleotide
agcccugguccgcacuaga

SEQ ID NO: 934775 - RNA, 19 nt, Artificial Sequence
  Description of Artificial Sequence: Synthetic oligonucleotide
gcgugacauuacuguauag

SEQ ID NO: 934776 - RNA, 19 nt, Artificial Sequence
  Description of Artificial Sequence: Synthetic oligonucleotide
ccugguccgcacuagagaa

SEQ ID NO: 934777 - RNA, 19 nt, Artificial Sequence
  Description of Artificial Sequence: Synthetic oligonucleotide
gugguaguuguaagaaagu

SEQ ID NO: 934778 - RNA, 19 nt, Artificial Sequence
  Description of Artificial Sequence: Synthetic oligonucleotide
ggauaugaucuggacugca

SEQ ID NO: 934779 - RNA, 19 nt, Artificial Sequence
  Description of Artificial Sequence: Synthetic oligonucleotide
ccacaucgucuauugauga

SEQ ID NO: 934780 - RNA, 19 nt, Artificial Sequence
  Description of Artificial Sequence: Synthetic oligonucleotide
ggcgcauuggcaaaauacu

SEQ ID NO: 934781 - RNA, 19 nt, Artificial Sequence
  Description of Artificial Sequence: Synthetic oligonucleotide
guggucgagcagugagcug

SEQ ID NO: 934782 - RNA, 19 nt, Artificial Sequence
  Description of Artificial Sequence: Synthetic oligonucleotide
gcgcauuggcaaaauacuc

SEQ ID NO: 934783 - RNA, 19 nt, Artificial Sequence
  Description of Artificial Sequence: Synthetic oligonucleotide
augccguuucaaggcagca

SEQ ID NO: 934784 - RNA, 19 nt, Artificial Sequence
  Description of Artificial Sequence: Synthetic oligonucleotide
gccugauuggaaugaguaa

SEQ ID NO: 934785 - RNA, 19 nt, Artificial Sequence
  Description of Artificial Sequence: Synthetic oligonucleotide
gaggcgcauuggcaaaaua

SEQ ID NO: 934786 - RNA, 19 nt, Artificial Sequence
  Description of Artificial Sequence: Synthetic oligonucleotide
cgccaacccggacaaagcg

SEQ ID NO: 934787 - RNA, 19 nt, Artificial Sequence
  Description of Artificial Sequence: Synthetic oligonucleotide
cccagacucuuuuguaauc

SEQ ID NO: 934788 - RNA, 19 nt, Artificial Sequence
  Description of Artificial Sequence: Synthetic oligonucleotide
cacugcgaagcaguucuga

SEQ ID NO: 934789 - RNA, 19 nt, Artificial Sequence
  Description of Artificial Sequence: Synthetic oligonucleotide
gcaggguagccaagcaggc

SEQ ID NO: 934790 - RNA, 19 nt, Artificial Sequence
  Description of Artificial Sequence: Synthetic oligonucleotide
ucguuucaaucggcugaac

SEQ ID NO: 934791 - RNA, 19 nt, Artificial Sequence
  Description of Artificial Sequence: Synthetic oligonucleotide
auugcaggugguaguugua

SEQ ID NO: 934792 - RNA, 19 nt, Artificial Sequence
  Description of Artificial Sequence: Synthetic oligonucleotide
agcgacggacaucccucaa

SEQ ID NO: 934793 - RNA, 19 nt, Artificial Sequence
  Description of Artificial Sequence: Synthetic oligonucleotide
ggacacucuagcgaagaua

SEQ ID NO: 934794 - RNA, 19 nt, Artificial Sequence
  Description of Artificial Sequence: Synthetic oligonucleotide
uggagcucucaggcugaga

SEQ ID NO: 934795 - RNA, 19 nt, Artificial Sequence
  Description of Artificial Sequence: Synthetic oligonucleotide
acccacaaccauagucagu

SEQ ID NO: 934796 - RNA, 19 nt, Artificial Sequence
  Description of Artificial Sequence: Synthetic oligonucleotide
cuaugucuaaagccaugau

SEQ ID NO: 934797 - RNA, 19 nt, Artificial Sequence
  Description of Artificial Sequence: Synthetic oligonucleotide
ccuuguuuggccuuccaau

SEQ ID NO: 934798 - RNA, 19 nt, Artificial Sequence
  Description of Artificial Sequence: Synthetic oligonucleotide
gugcuaccacauacucugc

SEQ ID NO: 934799 - RNA, 19 nt, Artificial Sequence
  Description of Artificial Sequence: Synthetic oligonucleotide
gaguaacaauuaagguccu

SEQ ID NO: 934800 - RNA, 19 nt, Artificial Sequence
  Description of Artificial Sequence: Synthetic oligonucleotide
ggcuccgauucucccacuc

SEQ ID NO: 934801 - RNA, 19 nt, Artificial Sequence
  Description of Artificial Sequence: Synthetic oligonucleotide
ccgauucucccacucccug

SEQ ID NO: 934802 - RNA, 19 nt, Artificial Sequence
  Description of Artificial Sequence: Synthetic oligonucleotide
cugguccgcacuagagaaa

SEQ ID NO: 934803 - RNA, 19 nt, Artificial Sequence
  Description of Artificial Sequence: Synthetic oligonucleotide
cuuucaccaaaagguauuu

SEQ ID NO: 934804 - RNA, 19 nt, Artificial Sequence
  Description of Artificial Sequence: Synthetic oligonucleotide
cacaucgucuauugaugau

SEQ ID NO: 934805 - RNA, 19 nt, Artificial Sequence
  Description of Artificial Sequence: Synthetic oligonucleotide
gagccugauuggaaugagu

SEQ ID NO: 934806 - RNA, 19 nt, Artificial Sequence
  Description of Artificial Sequence: Synthetic oligonucleotide
gcgaagauauaaaggccaa

SEQ ID NO: 934807 - RNA, 19 nt, Artificial Sequence
  Description of Artificial Sequence: Synthetic oligonucleotide
cccgaaucagaugcuuuug

SEQ ID NO: 934808 - RNA, 19 nt, Artificial Sequence
  Description of Artificial Sequence: Synthetic oligonucleotide
aguucgccaucuggggcau

SEQ ID NO: 934809 - RNA, 19 nt, Artificial Sequence
  Description of Artificial Sequence: Synthetic oligonucleotide
uucuucgagccaggacaua

SEQ ID NO: 934810 - RNA, 19 nt, Artificial Sequence
  Description of Artificial Sequence: Synthetic oligonucleotide
gggaagaaugaggcgaccu

SEQ ID NO: 934811 - RNA, 19 nt, Artificial Sequence
  Description of Artificial Sequence: Synthetic oligonucleotide
cugaucuugucugcagggu

SEQ ID NO: 934812 - RNA, 19 nt, Artificial Sequence
  Description of Artificial Sequence: Synthetic oligonucleotide
  modified_base (2)..(2): a, c, u, g, unknown or other
cngacgcaggagaugccgu

SEQ ID NO: 934813 - RNA, 19 nt, Artificial Sequence
  Description of Artificial Sequence: Synthetic oligonucleotide
gagcaucgagauccacagu

SEQ ID NO: 934814 - RNA, 19 nt, Artificial Sequence
  Description of Artificial Sequence: Synthetic oligonucleotide
cuucgagccaggacauaau

SEQ ID NO: 934815 - RNA, 19 nt, Artificial Sequence
  Description of Artificial Sequence: Synthetic oligonucleotide
gccaacccggacaaagcga

SEQ ID NO: 934816 - RNA, 19 nt, Artificial Sequence
  Description of Artificial Sequence: Synthetic oligonucleotide
gcuaccacauacucugcuu

SEQ ID NO: 934817 - RNA, 19 nt, Artificial Sequence
  Description of Artificial Sequence: Synthetic oligonucleotide
gcgacggacaucccucaaa

SEQ ID NO: 934818 - RNA, 19 nt, Artificial Sequence
  Description of Artificial Sequence: Synthetic oligonucleotide
  modified_base (10)..(10): a, c, u, g, unknown or other
ccaugacccngacgcagga

SEQ ID NO: 934819 - RNA, 19 nt, Artificial Sequence
  Description of Artificial Sequence: Synthetic oligonucleotide
ccguuucaaggcagcauga

SEQ ID NO: 934820 - RNA, 19 nt, Artificial Sequence
  Description of Artificial Sequence: Synthetic oligonucleotide
  modified_base (4)..(4): a, c, u, g, unknown or other
cccngacgcaggagaugcc

SEQ ID NO: 934821 - RNA, 19 nt, Artificial Sequence
  Description of Artificial Sequence: Synthetic oligonucleotide
ggucgagcagugagcuggc

SEQ ID NO: 934822 - RNA, 19 nt, Artificial Sequence
  Description of Artificial Sequence: Synthetic oligonucleotide
cggacaaagcgagugaaaa

SEQ ID NO: 934823 - RNA, 19 nt, Artificial Sequence
  Description of Artificial Sequence: Synthetic oligonucleotide
gcgccaguuguagagguua

SEQ ID NO: 934824 - RNA, 19 nt, Artificial Sequence
  Description of Artificial Sequence: Synthetic oligonucleotide
caacaguugucaccuuguu

SEQ ID NO: 934825 - RNA, 19 nt, Artificial Sequence
  Description of Artificial Sequence: Synthetic oligonucleotide
cucauggaaugggaagaau

SEQ ID NO: 934826 - RNA, 19 nt, Artificial Sequence
  Description of Artificial Sequence: Synthetic oligonucleotide
acacucuagcgaagauaua

SEQ ID NO: 934827 - RNA, 19 nt, Artificial Sequence
  Description of Artificial Sequence: Synthetic oligonucleotide
ccgaaucagaugcuuuugu

SEQ ID NO: 934828 - RNA, 19 nt, Artificial Sequence
  Description of Artificial Sequence: Synthetic oligonucleotide
agcgccaguuguagagguu

SEQ ID NO: 934829 - RNA, 19 nt, Artificial Sequence
  Description of Artificial Sequence: Synthetic oligonucleotide
ccaagcgacggacaucccu

SEQ ID NO: 934830 - RNA, 19 nt, Artificial Sequence
  Description of Artificial Sequence: Synthetic oligonucleotide
ccggacaaagcgagugaaa

SEQ ID NO: 934831 - RNA, 19 nt, Artificial Sequence
  Description of Artificial Sequence: Synthetic oligonucleotide
gucccgaaucagaugcuuu

SEQ ID NO: 934832 - RNA, 19 nt, Artificial Sequence
  Description of Artificial Sequence: Synthetic oligonucleotide
caacccggacaaagcgagu

SEQ ID NO: 934833 - RNA, 19 nt, Artificial Sequence
  Description of Artificial Sequence: Synthetic oligonucleotide
ccaagucaugccguuucaa

SEQ ID NO: 934834 - RNA, 19 nt, Artificial Sequence
  Description of Artificial Sequence: Synthetic oligonucleotide
guggacccacaaccauagu

SEQ ID NO: 934835 - RNA, 19 nt, Artificial Sequence
  Description of Artificial Sequence: Synthetic oligonucleotide
gaacgccaacccggacaaa

SEQ ID NO: 934836 - RNA, 19 nt, Artificial Sequence
  Description of Artificial Sequence: Synthetic oligonucleotide
ccccagacucuuuuguaau

SEQ ID NO: 934837 - RNA, 19 nt, Artificial Sequence
  Description of Artificial Sequence: Synthetic oligonucleotide
ccauaccugcuaaaaucuu

SEQ ID NO: 934838 - RNA, 19 nt, Artificial Sequence
  Description of Artificial Sequence: Synthetic oligonucleotide
gcgaagcaguucugaggcu

SEQ ID NO: 934839 - RNA, 19 nt, Artificial Sequence
  Description of Artificial Sequence: Synthetic oligonucleotide
cgacggacaucccucaaau

SEQ ID NO: 934840 - RNA, 19 nt, Artificial Sequence
  Description of Artificial Sequence: Synthetic oligonucleotide
  modified_base (1)..(1): a, c, u, g, unknown or other
ngacgcaggagaugccguu

SEQ ID NO: 934841 - RNA, 19 nt, Artificial Sequence
  Description of Artificial Sequence: Synthetic oligonucleotide
aaugagaacacucucauug

SEQ ID NO: 934842 - RNA, 19 nt, Artificial Sequence
  Description of Artificial Sequence: Synthetic oligonucleotide
aacacucucauugagauac

SEQ ID NO: 934843 - RNA, 19 nt, Artificial Sequence
  Description of Artificial Sequence: Synthetic oligonucleotide
uuuauaaagcauaauggcc

SEQ ID NO: 934844 - RNA, 19 nt, Artificial Sequence
  Description of Artificial Sequence: Synthetic oligonucleotide
uuuuauaaagcauaauggc

SEQ ID NO: 934845 - RNA, 19 nt, Artificial Sequence
  Description of Artificial Sequence: Synthetic oligonucleotide
aauauuuaucguucuaauc

SEQ ID NO: 934846 - RNA, 19 nt, Artificial Sequence
  Description of Artificial Sequence: Synthetic oligonucleotide
uuagauacuuccuagacac

SEQ ID NO: 934847 - RNA, 19 nt, Artificial Sequence
  Description of Artificial Sequence: Synthetic oligonucleotide
aaacgaacuuuucaucagc

SEQ ID NO: 934848 - RNA, 19 nt, Artificial Sequence
  Description of Artificial Sequence: Synthetic oligonucleotide
aaagaacacucccaaugcc

SEQ ID NO: 934849 - RNA, 19 nt, Artificial Sequence
  Description of Artificial Sequence: Synthetic oligonucleotide
ucuuuauagccccagagca

SEQ ID NO: 934850 - RNA, 19 nt, Artificial Sequence
  Description of Artificial Sequence: Synthetic oligonucleotide
auugagauacaucacuggg

SEQ ID NO: 934851 - RNA, 19 nt, Artificial Sequence
  Description of Artificial Sequence: Synthetic oligonucleotide
agaucucaucuuuauagcc

SEQ ID NO: 934852 - RNA, 19 nt, Artificial Sequence
  Description of Artificial Sequence: Synthetic oligonucleotide
uugaaaacauggacgaggg

SEQ ID NO: 934853 - RNA, 19 nt, Artificial Sequence
  Description of Artificial Sequence: Synthetic oligonucleotide
gagacaugauuuuauaaag

SEQ ID NO: 934854 - RNA, 19 nt, Artificial Sequence
  Description of Artificial Sequence: Synthetic oligonucleotide
ugucccguuaaucauauug

SEQ ID NO: 934855 - RNA, 19 nt, Artificial Sequence
  Description of Artificial Sequence: Synthetic oligonucleotide
caugauaaucgguacaccg

SEQ ID NO: 934856 - RNA, 19 nt, Artificial Sequence
  Description of Artificial Sequence: Synthetic oligonucleotide
uaucguucuaaucaaguca

SEQ ID NO: 934857 - RNA, 19 nt, Artificial Sequence
  Description of Artificial Sequence: Synthetic oligonucleotide
accugcagaagucagacgg

SEQ ID NO: 934858 - RNA, 19 nt, Artificial Sequence
  Description of Artificial Sequence: Synthetic oligonucleotide
aguccagugacguuuuacc

SEQ ID NO: 934859 - RNA, 19 nt, Artificial Sequence
  Description of Artificial Sequence: Synthetic oligonucleotide
ugcucuuaaaauaauucca

SEQ ID NO: 934860 - RNA, 19 nt, Artificial Sequence
  Description of Artificial Sequence: Synthetic oligonucleotide
gacgggaacacauagagga

SEQ ID NO: 934861 - RNA, 19 nt, Artificial Sequence
  Description of Artificial Sequence: Synthetic oligonucleotide
ucuaaucaagucaacauua

SEQ ID NO: 934862 - RNA, 19 nt, Artificial Sequence
  Description of Artificial Sequence: Synthetic oligonucleotide
uguacugaccugcagaagu

SEQ ID NO: 934863 - RNA, 19 nt, Artificial Sequence
  Description of Artificial Sequence: Synthetic oligonucleotide
uuuauggcagaaacgaacu

SEQ ID NO: 934864 - RNA, 19 nt, Artificial Sequence
  Description of Artificial Sequence: Synthetic oligonucleotide
gaaaacauggacgagggac

SEQ ID NO: 934865 - RNA, 19 nt, Artificial Sequence
  Description of Artificial Sequence: Synthetic oligonucleotide
agucguguuagucacggac

SEQ ID NO: 934866 - RNA, 19 nt, Artificial Sequence
  Description of Artificial Sequence: Synthetic oligonucleotide
aagucaacauuagugucgc

SEQ ID NO: 934867 - RNA, 19 nt, Artificial Sequence
  Description of Artificial Sequence: Synthetic oligonucleotide
caagucaacauuagugucg

SEQ ID NO: 934868 - RNA, 19 nt, Artificial Sequence
  Description of Artificial Sequence: Synthetic oligonucleotide
cuaacagccgauaugguug

SEQ ID NO: 934869 - RNA, 19 nt, Artificial Sequence
  Description of Artificial Sequence: Synthetic oligonucleotide
uuaucaguggaugaaaaga

SEQ ID NO: 934870 - RNA, 19 nt, Artificial Sequence
  Description of Artificial Sequence: Synthetic oligonucleotide
uauaccgaaaagcaggcaa

SEQ ID NO: 934871 - RNA, 19 nt, Artificial Sequence
  Description of Artificial Sequence: Synthetic oligonucleotide
agaaacgaacuuuucauca

SEQ ID NO: 934872 - RNA, 19 nt, Artificial Sequence
  Description of Artificial Sequence: Synthetic oligonucleotide
uuaaucauauugcauucgu

SEQ ID NO: 934873 - RNA, 19 nt, Artificial Sequence
  Description of Artificial Sequence: Synthetic oligonucleotide
aaagucguguuagucacgg

SEQ ID NO: 934874 - RNA, 19 nt, Artificial Sequence
  Description of Artificial Sequence: Synthetic oligonucleotide
auaaguguugauuuggaau

SEQ ID NO: 934875 - RNA, 19 nt, Artificial Sequence
  Description of Artificial Sequence: Synthetic oligonucleotide
auuagguucguaugagggg

SEQ ID NO: 934876 - RNA, 19 nt, Artificial Sequence
  Description of Artificial Sequence: Synthetic oligonucleotide
agagacaugauuuuauaaa

SEQ ID NO: 934877 - RNA, 19 nt, Artificial Sequence
  Description of Artificial Sequence: Synthetic oligonucleotide
uaaaguugagguaauuguc

SEQ ID NO: 934878 - RNA, 19 nt, Artificial Sequence
  Description of Artificial Sequence: Synthetic oligonucleotide
uccagaucaggucaguuca

SEQ ID NO: 934879 - RNA, 19 nt, Artificial Sequence
  Description of Artificial Sequence: Synthetic oligonucleotide
ucaguggaugaaaagaauc

SEQ ID NO: 934880 - RNA, 19 nt, Artificial Sequence
  Description of Artificial Sequence: Synthetic oligonucleotide
ucagcuugguaaaagugug

SEQ ID NO: 934881 - RNA, 19 nt, Artificial Sequence
  Description of Artificial Sequence: Synthetic oligonucleotide
uaacaccauacucuucucg

SEQ ID NO: 934882 - RNA, 19 nt, Artificial Sequence
  Description of Artificial Sequence: Synthetic oligonucleotide
caaugauuuccuuaagcag

SEQ ID NO: 934883 - RNA, 19 nt, Artificial Sequence
  Description of Artificial Sequence: Synthetic oligonucleotide
aucgguacaccguucuugc

SEQ ID NO: 934884 - RNA, 19 nt, Artificial Sequence
  Description of Artificial Sequence: Synthetic oligonucleotide
aggauuaauguccacaaau

SEQ ID NO: 934885 - RNA, 19 nt, Artificial Sequence
  Description of Artificial Sequence: Synthetic oligonucleotide
ucgacuugcagucucuuug

SEQ ID NO: 934886 - RNA, 19 nt, Artificial Sequence
  Description of Artificial Sequence: Synthetic oligonucleotide
aacguuaacaagugaugca

SEQ ID NO: 934887 - RNA, 19 nt, Artificial Sequence
  Description of Artificial Sequence: Synthetic oligonucleotide
acuaucaaagucguguuag

SEQ ID NO: 934888 - RNA, 19 nt, Artificial Sequence
  Description of Artificial Sequence: Synthetic oligonucleotide
gacacuagccaccagcagc

SEQ ID NO: 934889 - RNA, 19 nt, Artificial Sequence
  Description of Artificial Sequence: Synthetic oligonucleotide
gaaacgaacuuuucaucag

SEQ ID NO: 934890 - RNA, 19 nt, Artificial Sequence
  Description of Artificial Sequence: Synthetic oligonucleotide
uaacguuaacaagugaugc

SEQ ID NO: 934891 - RNA, 19 nt, Artificial Sequence
  Description of Artificial Sequence: Synthetic oligonucleotide
cuuauaccgaaaagcaggc

SEQ ID NO: 934892 - RNA, 19 nt, Artificial Sequence
  Description of Artificial Sequence: Synthetic oligonucleotide
auuagauacuuccuagaca

SEQ ID NO: 934893 - RNA, 19 nt, Artificial Sequence
  Description of Artificial Sequence: Synthetic oligonucleotide
caaagaacacucccaaugc

SEQ ID NO: 934894 - RNA, 19 nt, Artificial Sequence
  Description of Artificial Sequence: Synthetic oligonucleotide
ucuacacaaguuuauuaga

SEQ ID NO: 934895 - RNA, 19 nt, Artificial Sequence
  Description of Artificial Sequence: Synthetic oligonucleotide
guuauauguacugaccugc

SEQ ID NO: 934896 - RNA, 19 nt, Artificial Sequence
  Description of Artificial Sequence: Synthetic oligonucleotide
gguaaguuugauuagguuc

SEQ ID NO: 934897 - RNA, 19 nt, Artificial Sequence
  Description of Artificial Sequence: Synthetic oligonucleotide
ugacguuuuaccauuccac

SEQ ID NO: 934898 - RNA, 19 nt, Artificial Sequence
  Description of Artificial Sequence: Synthetic oligonucleotide
agaggaauauuuaucguuc

SEQ ID NO: 934899 - RNA, 19 nt, Artificial Sequence
  Description of Artificial Sequence: Synthetic oligonucleotide
auauguacugaccugcaga

SEQ ID NO: 934900 - RNA, 19 nt, Artificial Sequence
  Description of Artificial Sequence: Synthetic oligonucleotide
cuaacguuaacaagugaug

SEQ ID NO: 934901 - RNA, 19 nt, Artificial Sequence
  Description of Artificial Sequence: Synthetic oligonucleotide
ugauuagguucguaugagg

SEQ ID NO: 934902 - RNA, 19 nt, Artificial Sequence
  Description of Artificial Sequence: Synthetic oligonucleotide
aagugugggaaagacauga

SEQ ID NO: 934903 - RNA, 19 nt, Artificial Sequence
  Description of Artificial Sequence: Synthetic oligonucleotide
aagcguuccucacuugccg

SEQ ID NO: 934904 - RNA, 19 nt, Artificial Sequence
  Description of Artificial Sequence: Synthetic oligonucleotide
agaacacucucauugagau

SEQ ID NO: 934905 - RNA, 19 nt, Artificial Sequence
  Description of Artificial Sequence: Synthetic oligonucleotide
auugcuaacagccgauaug

SEQ ID NO: 934906 - RNA, 19 nt, Artificial Sequence
  Description of Artificial Sequence: Synthetic oligonucleotide
uauuuaucguucuaaucaa

SEQ ID NO: 934907 - RNA, 19 nt, Artificial Sequence
  Description of Artificial Sequence: Synthetic oligonucleotide
aguuauauguacugaccug

SEQ ID NO: 934908 - RNA, 19 nt, Artificial Sequence
  Description of Artificial Sequence: Synthetic oligonucleotide
ucauauugcauucgucugu

SEQ ID NO: 934909 - RNA, 19 nt, Artificial Sequence
  Description of Artificial Sequence: Synthetic oligonucleotide
aguuugauuagguucguau

SEQ ID NO: 934910 - RNA, 19 nt, Artificial Sequence
  Description of Artificial Sequence: Synthetic oligonucleotide
uucuaaucaagucaacauu

SEQ ID NO: 934911 - RNA, 19 nt, Artificial Sequence
  Description of Artificial Sequence: Synthetic oligonucleotide
agugacguuuuaccauucc

SEQ ID NO: 934912 - RNA, 19 nt, Artificial Sequence
  Description of Artificial Sequence: Synthetic oligonucleotide
ugugaaaaccaagccaaag

SEQ ID NO: 934913 - RNA, 19 nt, Artificial Sequence
  Description of Artificial Sequence: Synthetic oligonucleotide
cuucaaucgacuugcaguc

SEQ ID NO: 934914 - RNA, 19 nt, Artificial Sequence
  Description of Artificial Sequence: Synthetic oligonucleotide
cagacgggaacacauagag

SEQ ID NO: 934915 - RNA, 19 nt, Artificial Sequence
  Description of Artificial Sequence: Synthetic oligonucleotide
agccaugugaaaaccaagc

SEQ ID NO: 934916 - RNA, 19 nt, Artificial Sequence
  Description of Artificial Sequence: Synthetic oligonucleotide
gaucucaucuuuauagccc

SEQ ID NO: 934917 - RNA, 19 nt, Artificial Sequence
  Description of Artificial Sequence: Synthetic oligonucleotide
uuggcugcucuuaaaauaa

SEQ ID NO: 934918 - RNA, 19 nt, Artificial Sequence
  Description of Artificial Sequence: Synthetic oligonucleotide
uaguauuucugcaggcacc

SEQ ID NO: 934919 - RNA, 19 nt, Artificial Sequence
  Description of Artificial Sequence: Synthetic oligonucleotide
caugugaaaaccaagccaa

SEQ ID NO: 934920 - RNA, 19 nt, Artificial Sequence
  Description of Artificial Sequence: Synthetic oligonucleotide
ucaguaccauuucuuaaca

SEQ ID NO: 934921 - RNA, 19 nt, Artificial Sequence
  Description of Artificial Sequence: Synthetic oligonucleotide
uuaucguucuaaucaaguc

SEQ ID NO: 934922 - RNA, 19 nt, Artificial Sequence
  Description of Artificial Sequence: Synthetic oligonucleotide
ggauuggugacauugaaga

SEQ ID NO: 934923 - RNA, 19 nt, Artificial Sequence
  Description of Artificial Sequence: Synthetic oligonucleotide
agaucaggucaguucacac

SEQ ID NO: 934924 - RNA, 19 nt, Artificial Sequence
  Description of Artificial Sequence: Synthetic oligonucleotide
uacugcgcgaggcucacgg

SEQ ID NO: 934925 - RNA, 19 nt, Artificial Sequence
  Description of Artificial Sequence: Synthetic oligonucleotide
aaaccauaguccuaauguu

SEQ ID NO: 934926 - RNA, 19 nt, Artificial Sequence
  Description of Artificial Sequence: Synthetic oligonucleotide
uaugguuguuccauucucu

SEQ ID NO: 934927 - RNA, 19 nt, Artificial Sequence
  Description of Artificial Sequence: Synthetic oligonucleotide
agauacaucacugggaaaa

SEQ ID NO: 934928 - RNA, 19 nt, Artificial Sequence
  Description of Artificial Sequence: Synthetic oligonucleotide
aaucgguacaccguucuug

SEQ ID NO: 934929 - RNA, 19 nt, Artificial Sequence
  Description of Artificial Sequence: Synthetic oligonucleotide
gacaugauaaucgguacac

SEQ ID NO: 934930 - RNA, 19 nt, Artificial Sequence
  Description of Artificial Sequence: Synthetic oligonucleotide
aaaacauggacgagggaca

SEQ ID NO: 934931 - RNA, 19 nt, Artificial Sequence
  Description of Artificial Sequence: Synthetic oligonucleotide
uagugucgccaacagauug

SEQ ID NO: 934932 - RNA, 19 nt, Artificial Sequence
  Description of Artificial Sequence: Synthetic oligonucleotide
acguuaacaagugaugcag

SEQ ID NO: 934933 - RNA, 19 nt, Artificial Sequence
  Description of Artificial Sequence: Synthetic oligonucleotide
uuagguucguaugaggggu

SEQ ID NO: 934934 - RNA, 19 nt, Artificial Sequence
  Description of Artificial Sequence: Synthetic oligonucleotide
caacagguaaguuugauua

SEQ ID NO: 934935 - RNA, 19 nt, Artificial Sequence
  Description of Artificial Sequence: Synthetic oligonucleotide
guuaaucauauugcauucg

SEQ ID NO: 934936 - RNA, 19 nt, Artificial Sequence
  Description of Artificial Sequence: Synthetic oligonucleotide
auaaucuccaucauuaguu

SEQ ID NO: 934937 - RNA, 19 nt, Artificial Sequence
  Description of Artificial Sequence: Synthetic oligonucleotide
aaucaggucaggucaacua

SEQ ID NO: 934938 - RNA, 19 nt, Artificial Sequence
  Description of Artificial Sequence: Synthetic oligonucleotide
uuauauguacugaccugca

SEQ ID NO: 934939 - RNA, 19 nt, Artificial Sequence
  Description of Artificial Sequence: Synthetic oligonucleotide
acuaacguuaacaagugau

SEQ ID NO: 934940 - RNA, 19 nt, Artificial Sequence
  Description of Artificial Sequence: Synthetic oligonucleotide
acauaugccuuauugcuaa

SEQ ID NO: 934941 - RNA, 19 nt, Artificial Sequence
  Description of Artificial Sequence: Synthetic oligonucleotide
ucaacauuagugucgccaa

SEQ ID NO: 934942 - RNA, 19 nt, Artificial Sequence
  Description of Artificial Sequence: Synthetic oligonucleotide
uugauuagguucguaugag

SEQ ID NO: 934943 - RNA, 19 nt, Artificial Sequence
  Description of Artificial Sequence: Synthetic oligonucleotide
aucaggucaguucacacau

SEQ ID NO: 934944 - RNA, 19 nt, Artificial Sequence
  Description of Artificial Sequence: Synthetic oligonucleotide
cugugugagucacaaacag

SEQ ID NO: 934945 - RNA, 19 nt, Artificial Sequence
  Description of Artificial Sequence: Synthetic oligonucleotide
ugauaaucgguacaccguu

SEQ ID NO: 934946 - RNA, 19 nt, Artificial Sequence
  Description of Artificial Sequence: Synthetic oligonucleotide
guaaaguugagguaauugu

SEQ ID NO: 934947 - RNA, 19 nt, Artificial Sequence
  Description of Artificial Sequence: Synthetic oligonucleotide
aagaacacucccaaugcca

SEQ ID NO: 934948 - RNA, 19 nt, Artificial Sequence
  Description of Artificial Sequence: Synthetic oligonucleotide
uaaucauauugcauucguc

SEQ ID NO: 934949 - RNA, 19 nt, Artificial Sequence
  Description of Artificial Sequence: Synthetic oligonucleotide
uucucgaucgucuggucca

SEQ ID NO: 934950 - RNA, 19 nt, Artificial Sequence
  Description of Artificial Sequence: Synthetic oligonucleotide
auggacgagggacaagauc

SEQ ID NO: 934951 - RNA, 19 nt, Artificial Sequence
  Description of Artificial Sequence: Synthetic oligonucleotide
uuaggggagauuccaggcu

SEQ ID NO: 934952 - RNA, 19 nt, Artificial Sequence
  Description of Artificial Sequence: Synthetic oligonucleotide
accaagcucaggcaacagg

SEQ ID NO: 934953 - RNA, 19 nt, Artificial Sequence
  Description of Artificial Sequence: Synthetic oligonucleotide
caacuaacguuaacaagug

SEQ ID NO: 934954 - RNA, 19 nt, Artificial Sequence
  Description of Artificial Sequence: Synthetic oligonucleotide
aggucaacuaacguuaaca

SEQ ID NO: 934955 - RNA, 19 nt, Artificial Sequence
  Description of Artificial Sequence: Synthetic oligonucleotide
ucgaucgucugguccaccg

SEQ ID NO: 934956 - RNA, 19 nt, Artificial Sequence
  Description of Artificial Sequence: Synthetic oligonucleotide
gucagacgggaacacauag

SEQ ID NO: 934957 - RNA, 19 nt, Artificial Sequence
  Description of Artificial Sequence: Synthetic oligonucleotide
aacuaacguuaacaaguga

SEQ ID NO: 934958 - RNA, 19 nt, Artificial Sequence
  Description of Artificial Sequence: Synthetic oligonucleotide
ucaaucgacuugcagucuc

SEQ ID NO: 934959 - RNA, 19 nt, Artificial Sequence
  Description of Artificial Sequence: Synthetic oligonucleotide
uauugcuaacagccgauau

SEQ ID NO: 934960 - RNA, 19 nt, Artificial Sequence
  Description of Artificial Sequence: Synthetic oligonucleotide
ucgucugugguccaccagu

SEQ ID NO: 934961 - RNA, 19 nt, Artificial Sequence
  Description of Artificial Sequence: Synthetic oligonucleotide
uucaacacucccgagucca

SEQ ID NO: 934962 - RNA, 19 nt, Artificial Sequence
  Description of Artificial Sequence: Synthetic oligonucleotide
uuuguaaaguugagguaau

SEQ ID NO: 934963 - RNA, 19 nt, Artificial Sequence
  Description of Artificial Sequence: Synthetic oligonucleotide
uacugaaucaggucagguc

SEQ ID NO: 934964 - RNA, 19 nt, Artificial Sequence
  Description of Artificial Sequence: Synthetic oligonucleotide
agcagcgugacacuagcca

SEQ ID NO: 934965 - RNA, 19 nt, Artificial Sequence
  Description of Artificial Sequence: Synthetic oligonucleotide
acaugauaaucgguacacc

SEQ ID NO: 934966 - RNA, 19 nt, Artificial Sequence
  Description of Artificial Sequence: Synthetic oligonucleotide
agacaugauaaucgguaca

SEQ ID NO: 934967 - RNA, 19 nt, Artificial Sequence
  Description of Artificial Sequence: Synthetic oligonucleotide
uucuuaacaccauacucuu

SEQ ID NO: 934968 - RNA, 19 nt, Artificial Sequence
  Description of Artificial Sequence: Synthetic oligonucleotide
caccuuauaccgaaaagca

SEQ ID NO: 934969 - RNA, 19 nt, Artificial Sequence
  Description of Artificial Sequence: Synthetic oligonucleotide
aagugaugcagacuuugua

SEQ ID NO: 934970 - RNA, 19 nt, Artificial Sequence
  Description of Artificial Sequence: Synthetic oligonucleotide
ucaggucaggucaacuaac

SEQ ID NO: 934971 - RNA, 19 nt, Artificial Sequence
  Description of Artificial Sequence: Synthetic oligonucleotide
gaucgucugguccaccgcc

SEQ ID NO: 934972 - RNA, 19 nt, Artificial Sequence
  Description of Artificial Sequence: Synthetic oligonucleotide
ucccguuaaucauauugca

SEQ ID NO: 934973 - RNA, 19 nt, Artificial Sequence
  Description of Artificial Sequence: Synthetic oligonucleotide
aauuggauguuugccuugu

SEQ ID NO: 934974 - RNA, 19 nt, Artificial Sequence
  Description of Artificial Sequence: Synthetic oligonucleotide
gaucaggucaguucacaca

SEQ ID NO: 934975 - RNA, 19 nt, Artificial Sequence
  Description of Artificial Sequence: Synthetic oligonucleotide
uguaggguauguuggugac

SEQ ID NO: 934976 - RNA, 19 nt, Artificial Sequence
  Description of Artificial Sequence: Synthetic oligonucleotide
aacgaacuuuucaucagcu

SEQ ID NO: 934977 - RNA, 19 nt, Artificial Sequence
  Description of Artificial Sequence: Synthetic oligonucleotide
ugggucaguuccacaacag

SEQ ID NO: 934978 - RNA, 19 nt, Artificial Sequence
  Description of Artificial Sequence: Synthetic oligonucleotide
ucagacgggaacacauaga

SEQ ID NO: 934979 - RNA, 19 nt, Artificial Sequence
  Description of Artificial Sequence: Synthetic oligonucleotide
ccgaaaagcaggcaaaccc

SEQ ID NO: 934980 - RNA, 19 nt, Artificial Sequence
  Description of Artificial Sequence: Synthetic oligonucleotide
uccugauuucccuguaugu

SEQ ID NO: 934981 - RNA, 19 nt, Artificial Sequence
  Description of Artificial Sequence: Synthetic oligonucleotide
cauaguccuaauguuuccc

SEQ ID NO: 934982 - RNA, 19 nt, Artificial Sequence
  Description of Artificial Sequence: Synthetic oligonucleotide
caucugcccauacugcgcg

SEQ ID NO: 934983 - RNA, 19 nt, Artificial Sequence
  Description of Artificial Sequence: Synthetic oligonucleotide
acggacuucaaucgacuug

SEQ ID NO: 934984 - RNA, 19 nt, Artificial Sequence
  Description of Artificial Sequence: Synthetic oligonucleotide
uaucaaagucguguuaguc

SEQ ID NO: 934985 - RNA, 19 nt, Artificial Sequence
  Description of Artificial Sequence: Synthetic oligonucleotide
uaauuccagucaaaggauu

SEQ ID NO: 934986 - RNA, 19 nt, Artificial Sequence
  Description of Artificial Sequence: Synthetic oligonucleotide
cuuccuagacacauuagaa

SEQ ID NO: 934987 - RNA, 19 nt, Artificial Sequence
  Description of Artificial Sequence: Synthetic oligonucleotide
uggguguacacagguagag

SEQ ID NO: 934988 - RNA, 19 nt, Artificial Sequence
  Description of Artificial Sequence: Synthetic oligonucleotide
cagccgauaugguuguucc

SEQ ID NO: 934989 - RNA, 19 nt, Artificial Sequence
  Description of Artificial Sequence: Synthetic oligonucleotide
ggauuaauguccacaaaug

SEQ ID NO: 934990 - RNA, 19 nt, Artificial Sequence
  Description of Artificial Sequence: Synthetic oligonucleotide
gcucuuaaaauaauuccag

SEQ ID NO: 934991 - RNA, 19 nt, Artificial Sequence
  Description of Artificial Sequence: Synthetic oligonucleotide
uacccucuguccaggaagc

SEQ ID NO: 934992 - RNA, 19 nt, Artificial Sequence
  Description of Artificial Sequence: Synthetic oligonucleotide
aucaggucaggucaacuaa

SEQ ID NO: 934993 - RNA, 19 nt, Artificial Sequence
  Description of Artificial Sequence: Synthetic oligonucleotide
gucccguuaaucauauugc

SEQ ID NO: 934994 - RNA, 19 nt, Artificial Sequence
  Description of Artificial Sequence: Synthetic oligonucleotide
uccaccgccuucuggaaga

SEQ ID NO: 934995 - RNA, 19 nt, Artificial Sequence
  Description of Artificial Sequence: Synthetic oligonucleotide
ucacggacuucaaucgacu

SEQ ID NO: 934996 - RNA, 19 nt, Artificial Sequence
  Description of Artificial Sequence: Synthetic oligonucleotide
aggcucacgggucgggccc

SEQ ID NO: 934997 - RNA, 19 nt, Artificial Sequence
  Description of Artificial Sequence: Synthetic oligonucleotide
agugucgccaacagauugg

SEQ ID NO: 934998 - RNA, 19 nt, Artificial Sequence
  Description of Artificial Sequence: Synthetic oligonucleotide
auuuaucguucuaaucaag

SEQ ID NO: 934999 - RNA, 19 nt, Artificial Sequence
  Description of Artificial Sequence: Synthetic oligonucleotide
guccccgccguguagaagc

SEQ ID NO: 935000 - RNA, 19 nt, Artificial Sequence
  Description of Artificial Sequence: Synthetic oligonucleotide
ugacacuagccaccagcag

SEQ ID NO: 935001 - RNA, 19 nt, Artificial Sequence
  Description of Artificial Sequence: Synthetic oligonucleotide
uaggguauguuggugacua

SEQ ID NO: 935002 - RNA, 19 nt, Artificial Sequence
  Description of Artificial Sequence: Synthetic oligonucleotide
cuguccucggcaugcaagc

SEQ ID NO: 935003 - RNA, 19 nt, Artificial Sequence
  Description of Artificial Sequence: Synthetic oligonucleotide
gugacuaucaaagucgugu

SEQ ID NO: 935004 - RNA, 19 nt, Artificial Sequence
  Description of Artificial Sequence: Synthetic oligonucleotide
gcaccuuauaccgaaaagc

SEQ ID NO: 935005 - RNA, 19 nt, Artificial Sequence
  Description of Artificial Sequence: Synthetic oligonucleotide
ggcuugaaaacauggacga

SEQ ID NO: 935006 - RNA, 19 nt, Artificial Sequence
  Description of Artificial Sequence: Synthetic oligonucleotide
aaguuucuacacaaguuua

SEQ ID NO: 935007 - RNA, 19 nt, Artificial Sequence
  Description of Artificial Sequence: Synthetic oligonucleotide
guucuaaucaagucaacau

SEQ ID NO: 935008 - RNA, 19 nt, Artificial Sequence
  Description of Artificial Sequence: Synthetic oligonucleotide
aucguucuaaucaagucaa

SEQ ID NO: 935009 - RNA, 19 nt, Artificial Sequence
  Description of Artificial Sequence: Synthetic oligonucleotide
agccaaagaacacucccaa

SEQ ID NO: 935010 - RNA, 19 nt, Artificial Sequence
  Description of Artificial Sequence: Synthetic oligonucleotide
cagcuugguaaaagugugg

SEQ ID NO: 935011 - RNA, 19 nt, Artificial Sequence
  Description of Artificial Sequence: Synthetic oligonucleotide
aguguugauuuggaaucuc

SEQ ID NO: 935012 - RNA, 19 nt, Artificial Sequence
  Description of Artificial Sequence: Synthetic oligonucleotide
aggaaaacauaaucuccau

SEQ ID NO: 935013 - RNA, 19 nt, Artificial Sequence
  Description of Artificial Sequence: Synthetic oligonucleotide
guucccucauccaugggcc

SEQ ID NO: 935014 - RNA, 19 nt, Artificial Sequence
  Description of Artificial Sequence: Synthetic oligonucleotide
aacauaugccuuauugcua

SEQ ID NO: 935015 - RNA, 19 nt, Artificial Sequence
  Description of Artificial Sequence: Synthetic oligonucleotide
acucucauugagauacauc

SEQ ID NO: 935016 - RNA, 19 nt, Artificial Sequence
  Description of Artificial Sequence: Synthetic oligonucleotide
gugugagucacaaacagcu

SEQ ID NO: 935017 - RNA, 19 nt, Artificial Sequence
  Description of Artificial Sequence: Synthetic oligonucleotide
accuuauaccgaaaagcag

SEQ ID NO: 935018 - RNA, 19 nt, Artificial Sequence
  Description of Artificial Sequence: Synthetic oligonucleotide
augauaaucgguacaccgu

SEQ ID NO: 935019 - RNA, 19 nt, Artificial Sequence
  Description of Artificial Sequence: Synthetic oligonucleotide
caaagucguguuagucacg

SEQ ID NO: 935020 - RNA, 19 nt, Artificial Sequence
  Description of Artificial Sequence: Synthetic oligonucleotide
uguauguguauggucccac

SEQ ID NO: 935021 - RNA, 19 nt, Artificial Sequence
  Description of Artificial Sequence: Synthetic oligonucleotide
gaagcguuccucacuugcc

SEQ ID NO: 935022 - RNA, 19 nt, Artificial Sequence
  Description of Artificial Sequence: Synthetic oligonucleotide
cuugaaguaugggaauuuc

SEQ ID NO: 935023 - RNA, 19 nt, Artificial Sequence
  Description of Artificial Sequence: Synthetic oligonucleotide
ucgccaacagauugguuuc

SEQ ID NO: 935024 - RNA, 19 nt, Artificial Sequence
  Description of Artificial Sequence: Synthetic oligonucleotide
uaggggagauuccaggcuu

SEQ ID NO: 935025 - RNA, 19 nt, Artificial Sequence
  Description of Artificial Sequence: Synthetic oligonucleotide
gaaaucccacagcucccag

SEQ ID NO: 935026 - RNA, 19 nt, Artificial Sequence
  Description of Artificial Sequence: Synthetic oligonucleotide
cguuuuaccauuccacucc

SEQ ID NO: 935027 - RNA, 19 nt, Artificial Sequence
  Description of Artificial Sequence: Synthetic oligonucleotide
ugaggggugcucuuucauc

SEQ ID NO: 935028 - RNA, 19 nt, Artificial Sequence
  Description of Artificial Sequence: Synthetic oligonucleotide
agucaacauuagugucgcc

SEQ ID NO: 935029 - RNA, 19 nt, Artificial Sequence
  Description of Artificial Sequence: Synthetic oligonucleotide
gugacguuuuaccauucca

SEQ ID NO: 935030 - RNA, 19 nt, Artificial Sequence
  Description of Artificial Sequence: Synthetic oligonucleotide
ccaaaguuaggggagauuc

SEQ ID NO: 935031 - RNA, 19 nt, Artificial Sequence
  Description of Artificial Sequence: Synthetic oligonucleotide
guauggucccacuucuuga

SEQ ID NO: 935032 - RNA, 19 nt, Artificial Sequence
  Description of Artificial Sequence: Synthetic oligonucleotide
agguucguaugaggggugc

SEQ ID NO: 935033 - RNA, 19 nt, Artificial Sequence
  Description of Artificial Sequence: Synthetic oligonucleotide
ucguguuagucacggacuu

SEQ ID NO: 935034 - RNA, 19 nt, Artificial Sequence
  Description of Artificial Sequence: Synthetic oligonucleotide
guguuagucacggacuuca

SEQ ID NO: 935035 - RNA, 19 nt, Artificial Sequence
  Description of Artificial Sequence: Synthetic oligonucleotide
uucguaugaggggugcucu

SEQ ID NO: 935036 - RNA, 19 nt, Artificial Sequence
  Description of Artificial Sequence: Synthetic oligonucleotide
gucaggucaacuaacguua

SEQ ID NO: 935037 - RNA, 19 nt, Artificial Sequence
  Description of Artificial Sequence: Synthetic oligonucleotide
ccuuuuauggcagaaacga

SEQ ID NO: 935038 - RNA, 19 nt, Artificial Sequence
  Description of Artificial Sequence: Synthetic oligonucleotide
ucaggucaacuaacguuaa

SEQ ID NO: 935039 - RNA, 19 nt, Artificial Sequence
  Description of Artificial Sequence: Synthetic oligonucleotide
auaugccuuauugcuaaca

SEQ ID NO: 935040 - RNA, 19 nt, Artificial Sequence
  Description of Artificial Sequence: Synthetic oligonucleotide
uucgucugugguccaccag

SEQ ID NO: 935041 - RNA, 19 nt, Artificial Sequence
  Description of Artificial Sequence: Synthetic oligonucleotide
ggcaccuuauaccgaaaag

SEQ ID NO: 935042 - RNA, 19 nt, Artificial Sequence
  Description of Artificial Sequence: Synthetic oligonucleotide
uagguucguaugaggggug

SEQ ID NO: 935043 - RNA, 19 nt, Artificial Sequence
  Description of Artificial Sequence: Synthetic oligonucleotide
guaauugucuucuccaguu

SEQ ID NO: 935044 - RNA, 19 nt, Artificial Sequence
  Description of Artificial Sequence: Synthetic oligonucleotide
aguccuaauguuucccauu

SEQ ID NO: 935045 - RNA, 19 nt, Artificial Sequence
  Description of Artificial Sequence: Synthetic oligonucleotide
uaguccuaauguuucccau

SEQ ID NO: 935046 - RNA, 19 nt, Artificial Sequence
  Description of Artificial Sequence: Synthetic oligonucleotide
ucugccguucccucaucca

SEQ ID NO: 935047 - RNA, 19 nt, Artificial Sequence
  Description of Artificial Sequence: Synthetic oligonucleotide
cagagacaugauuuuauaa

SEQ ID NO: 935048 - RNA, 19 nt, Artificial Sequence
  Description of Artificial Sequence: Synthetic oligonucleotide
agguaaguuugauuagguu

SEQ ID NO: 935049 - RNA, 19 nt, Artificial Sequence
  Description of Artificial Sequence: Synthetic oligonucleotide
agucacggacuucaaucga

SEQ ID NO: 935050 - RNA, 19 nt, Artificial Sequence
  Description of Artificial Sequence: Synthetic oligonucleotide
uuauaccgaaaagcaggca

SEQ ID NO: 935051 - RNA, 19 nt, Artificial Sequence
  Description of Artificial Sequence: Synthetic oligonucleotide
ucccaaugccaugaugaug

SEQ ID NO: 935052 - RNA, 19 nt, Artificial Sequence
  Description of Artificial Sequence: Synthetic oligonucleotide
aaacauggacgagggacaa

SEQ ID NO: 935053 - RNA, 19 nt, Artificial Sequence
  Description of Artificial Sequence: Synthetic oligonucleotide
cauaaguguugauuuggaa

SEQ ID NO: 935054 - RNA, 19 nt, Artificial Sequence
  Description of Artificial Sequence: Synthetic oligonucleotide
uuagugucgccaacagauu

SEQ ID NO: 935055 - RNA, 19 nt, Artificial Sequence
  Description of Artificial Sequence: Synthetic oligonucleotide
gucacccugcucauuaccc

SEQ ID NO: 935056 - RNA, 19 nt, Artificial Sequence
  Description of Artificial Sequence: Synthetic oligonucleotide
uaccgaaaagcaggcaaac

SEQ ID NO: 935057 - RNA, 19 nt, Artificial Sequence
  Description of Artificial Sequence: Synthetic oligonucleotide
cuacacaaguuuauuagau

SEQ ID NO: 935058 - RNA, 19 nt, Artificial Sequence
  Description of Artificial Sequence: Synthetic oligonucleotide
agucaacagaggaauauuu

SEQ ID NO: 935059 - RNA, 19 nt, Artificial Sequence
  Description of Artificial Sequence: Synthetic oligonucleotide
ugggaaaaccauaguccua

SEQ ID NO: 935060 - RNA, 19 nt, Artificial Sequence
  Description of Artificial Sequence: Synthetic oligonucleotide
gaggaauauuuaucguucu

SEQ ID NO: 935061 - RNA, 19 nt, Artificial Sequence
  Description of Artificial Sequence: Synthetic oligonucleotide
cuuuuauggcagaaacgaa

SEQ ID NO: 935062 - RNA, 19 nt, Artificial Sequence
  Description of Artificial Sequence: Synthetic oligonucleotide
agaaaucccacagcuccca

SEQ ID NO: 935063 - RNA, 19 nt, Artificial Sequence
  Description of Artificial Sequence: Synthetic oligonucleotide
aacauggacgagggacaag

SEQ ID NO: 935064 - RNA, 19 nt, Artificial Sequence
  Description of Artificial Sequence: Synthetic oligonucleotide
ucguucuaaucaagucaac

SEQ ID NO: 935065 - RNA, 19 nt, Artificial Sequence
  Description of Artificial Sequence: Synthetic oligonucleotide
ucccuguauguguaugguc

SEQ ID NO: 935066 - RNA, 19 nt, Artificial Sequence
  Description of Artificial Sequence: Synthetic oligonucleotide
agacgggaacacauagagg

SEQ ID NO: 935067 - RNA, 19 nt, Artificial Sequence
  Description of Artificial Sequence: Synthetic oligonucleotide
ugcccauacugcgcgaggc

SEQ ID NO: 935068 - RNA, 19 nt, Artificial Sequence
  Description of Artificial Sequence: Synthetic oligonucleotide
agguguuggcuaguauuuc

SEQ ID NO: 935069 - RNA, 19 nt, Artificial Sequence
  Description of Artificial Sequence: Synthetic oligonucleotide
auucgucugugguccacca

SEQ ID NO: 935070 - RNA, 19 nt, Artificial Sequence
  Description of Artificial Sequence: Synthetic oligonucleotide
gaacuggguguacacaggu

SEQ ID NO: 935071 - RNA, 19 nt, Artificial Sequence
  Description of Artificial Sequence: Synthetic oligonucleotide
ugcaggcaccuuauaccga

SEQ ID NO: 935072 - RNA, 19 nt, Artificial Sequence
  Description of Artificial Sequence: Synthetic oligonucleotide
caacauuagugucgccaac

SEQ ID NO: 935073 - RNA, 19 nt, Artificial Sequence
  Description of Artificial Sequence: Synthetic oligonucleotide
uuauugcuaacagccgaua

SEQ ID NO: 935074 - RNA, 19 nt, Artificial Sequence
  Description of Artificial Sequence: Synthetic oligonucleotide
ucgugcacugugugaguca

SEQ ID NO: 935075 - RNA, 19 nt, Artificial Sequence
  Description of Artificial Sequence: Synthetic oligonucleotide
gccuuuuauggcagaaacg

SEQ ID NO: 935076 - RNA, 19 nt, Artificial Sequence
  Description of Artificial Sequence: Synthetic oligonucleotide
guaugaggggugcucuuuc

SEQ ID NO: 935077 - RNA, 19 nt, Artificial Sequence
  Description of Artificial Sequence: Synthetic oligonucleotide
gucacggacuucaaucgac

SEQ ID NO: 935078 - RNA, 19 nt, Artificial Sequence
  Description of Artificial Sequence: Synthetic oligonucleotide
gcucauuacccucugucca

SEQ ID NO: 935079 - RNA, 19 nt, Artificial Sequence
  Description of Artificial Sequence: Synthetic oligonucleotide
aggcaccuuauaccgaaaa

SEQ ID NO: 935080 - RNA, 19 nt, Artificial Sequence
  Description of Artificial Sequence: Synthetic oligonucleotide
cauucgucugugguccacc

SEQ ID NO: 935081 - RNA, 19 nt, Artificial Sequence
  Description of Artificial Sequence: Synthetic oligonucleotide
ccaugugaaaaccaagcca

SEQ ID NO: 935082 - RNA, 19 nt, Artificial Sequence
  Description of Artificial Sequence: Synthetic oligonucleotide
aagucguguuagucacgga

SEQ ID NO: 935083 - RNA, 19 nt, Artificial Sequence
  Description of Artificial Sequence: Synthetic oligonucleotide
auaccgaaaagcaggcaaa

SEQ ID NO: 935084 - RNA, 19 nt, Artificial Sequence
  Description of Artificial Sequence: Synthetic oligonucleotide
cgugacacuagccaccagc

SEQ ID NO: 935085 - RNA, 19 nt, Artificial Sequence
  Description of Artificial Sequence: Synthetic oligonucleotide
acaauuucagagacaugau

SEQ ID NO: 935086 - RNA, 19 nt, Artificial Sequence
  Description of Artificial Sequence: Synthetic oligonucleotide
uaaucgguacaccguucuu

SEQ ID NO: 935087 - RNA, 19 nt, Artificial Sequence
  Description of Artificial Sequence: Synthetic oligonucleotide
ggcuaguauuucugcaggc

SEQ ID NO: 935088 - RNA, 19 nt, Artificial Sequence
  Description of Artificial Sequence: Synthetic oligonucleotide
uucaaucgacuugcagucu

SEQ ID NO: 935089 - RNA, 19 nt, Artificial Sequence
  Description of Artificial Sequence: Synthetic oligonucleotide
acugcgcgaggcucacggg

SEQ ID NO: 935090 - RNA, 19 nt, Artificial Sequence
  Description of Artificial Sequence: Synthetic oligonucleotide
gguacaccguucuugcaga

SEQ ID NO: 935091 - RNA, 19 nt, Artificial Sequence
  Description of Artificial Sequence: Synthetic oligonucleotide
cguuaaucauauugcauuc

SEQ ID NO: 935092 - RNA, 19 nt, Artificial Sequence
  Description of Artificial Sequence: Synthetic oligonucleotide
ugcgcgaggcucacggguc

SEQ ID NO: 935093 - RNA, 19 nt, Artificial Sequence
  Description of Artificial Sequence: Synthetic oligonucleotide
caguucacacauucucuca

SEQ ID NO: 935094 - RNA, 19 nt, Artificial Sequence
  Description of Artificial Sequence: Synthetic oligonucleotide
cagggauuccccuguccug

SEQ ID NO: 935095 - RNA, 19 nt, Artificial Sequence
  Description of Artificial Sequence: Synthetic oligonucleotide
agaaugaggcauacugaau

SEQ ID NO: 935096 - RNA, 19 nt, Artificial Sequence
  Description of Artificial Sequence: Synthetic oligonucleotide
cacucccgaguccaugcag

SEQ ID NO: 935097 - RNA, 19 nt, Artificial Sequence
  Description of Artificial Sequence: Synthetic oligonucleotide
cacccugcucauuacccuc

SEQ ID NO: 935098 - RNA, 19 nt, Artificial Sequence
  Description of Artificial Sequence: Synthetic oligonucleotide
cacuugccggcacugugac

SEQ ID NO: 935099 - RNA, 19 nt, Artificial Sequence
  Description of Artificial Sequence: Synthetic oligonucleotide
cuccaguuaggaaaacaua

SEQ ID NO: 935100 - RNA, 19 nt, Artificial Sequence
  Description of Artificial Sequence: Synthetic oligonucleotide
cuuauugcuaacagccgau

SEQ ID NO: 935101 - RNA, 19 nt, Artificial Sequence
  Description of Artificial Sequence: Synthetic oligonucleotide
gcagcgugacacuagccac

SEQ ID NO: 935102 - RNA, 19 nt, Artificial Sequence
  Description of Artificial Sequence: Synthetic oligonucleotide
cggacuucaaucgacuugc

SEQ ID NO: 935103 - RNA, 19 nt, Artificial Sequence
  Description of Artificial Sequence: Synthetic oligonucleotide
ccauaguccuaauguuucc

SEQ ID NO: 935104 - RNA, 19 nt, Artificial Sequence
  Description of Artificial Sequence: Synthetic oligonucleotide
caggucaacuaacguuaac

SEQ ID NO: 935105 - RNA, 19 nt, Artificial Sequence
  Description of Artificial Sequence: Synthetic oligonucleotide
ucaacacucccgaguccau

SEQ ID NO: 935106 - RNA, 19 nt, Artificial Sequence
  Description of Artificial Sequence: Synthetic oligonucleotide
gagauacaucacugggaaa

SEQ ID NO: 935107 - RNA, 19 nt, Artificial Sequence
  Description of Artificial Sequence: Synthetic oligonucleotide
acgggucgggcccgcgacc

SEQ ID NO: 935108 - RNA, 19 nt, Artificial Sequence
  Description of Artificial Sequence: Synthetic oligonucleotide
ccguguagaagcaacaucu

SEQ ID NO: 935109 - RNA, 19 nt, Artificial Sequence
  Description of Artificial Sequence: Synthetic oligonucleotide
guucguaugaggggugcuc

SEQ ID NO: 935110 - RNA, 19 nt, Artificial Sequence
  Description of Artificial Sequence: Synthetic oligonucleotide
cguucccucauccaugggc

SEQ ID NO: 935111 - RNA, 19 nt, Artificial Sequence
  Description of Artificial Sequence: Synthetic oligonucleotide
aaucgacuugcagucucuu

SEQ ID NO: 935112 - RNA, 19 nt, Artificial Sequence
  Description of Artificial Sequence: Synthetic oligonucleotide
ggguguacacagguagagg

SEQ ID NO: 935113 - RNA, 19 nt, Artificial Sequence
  Description of Artificial Sequence: Synthetic oligonucleotide
ucgguacaccguucuugca

SEQ ID NO: 935114 - RNA, 19 nt, Artificial Sequence
  Description of Artificial Sequence: Synthetic oligonucleotide
aguguccccgccguguaga

SEQ ID NO: 935115 - RNA, 19 nt, Artificial Sequence
  Description of Artificial Sequence: Synthetic oligonucleotide
agccgauaugguuguucca

SEQ ID NO: 935116 - RNA, 19 nt, Artificial Sequence
  Description of Artificial Sequence: Synthetic oligonucleotide
agcgugacacuagccacca

SEQ ID NO: 935117 - RNA, 19 nt, Artificial Sequence
  Description of Artificial Sequence: Synthetic oligonucleotide
cagguaaguuugauuaggu

SEQ ID NO: 935118 - RNA, 19 nt, Artificial Sequence
  Description of Artificial Sequence: Synthetic oligonucleotide
cucgugcacugugugaguc

SEQ ID NO: 935119 - RNA, 19 nt, Artificial Sequence
  Description of Artificial Sequence: Synthetic oligonucleotide
gcuaguauuucugcaggca

SEQ ID NO: 935120 - RNA, 19 nt, Artificial Sequence
  Description of Artificial Sequence: Synthetic oligonucleotide
uuggaaucucuuggcugcu

SEQ ID NO: 935121 - RNA, 19 nt, Artificial Sequence
  Description of Artificial Sequence: Synthetic oligonucleotide
accagcagcgugacacuag

SEQ ID NO: 935122 - RNA, 19 nt, Artificial Sequence
  Description of Artificial Sequence: Synthetic oligonucleotide
acacucccgaguccaugca

SEQ ID NO: 935123 - RNA, 19 nt, Artificial Sequence
  Description of Artificial Sequence: Synthetic oligonucleotide
cagugacguuuuaccauuc

SEQ ID NO: 935124 - RNA, 19 nt, Artificial Sequence
  Description of Artificial Sequence: Synthetic oligonucleotide
gguguuggcuaguauuucu

SEQ ID NO: 935125 - RNA, 19 nt, Artificial Sequence
  Description of Artificial Sequence: Synthetic oligonucleotide
gaaucaggucaggucaacu

SEQ ID NO: 935126 - RNA, 19 nt, Artificial Sequence
  Description of Artificial Sequence: Synthetic oligonucleotide
ggucaggucaacuaacguu

SEQ ID NO: 935127 - RNA, 19 nt, Artificial Sequence
  Description of Artificial Sequence: Synthetic oligonucleotide
gccguguagaagcaacauc

SEQ ID NO: 935128 - RNA, 19 nt, Artificial Sequence
  Description of Artificial Sequence: Synthetic oligonucleotide
cauacugcgcgaggcucac

SEQ ID NO: 935129 - RNA, 19 nt, Artificial Sequence
  Description of Artificial Sequence: Synthetic oligonucleotide
cuugccggcacugugacuu

SEQ ID NO: 935130 - RNA, 19 nt, Artificial Sequence
  Description of Artificial Sequence: Synthetic oligonucleotide
ucucgaucgucugguccac

SEQ ID NO: 935131 - RNA, 19 nt, Artificial Sequence
  Description of Artificial Sequence: Synthetic oligonucleotide
gcaggcaccuuauaccgaa

SEQ ID NO: 935132 - RNA, 19 nt, Artificial Sequence
  Description of Artificial Sequence: Synthetic oligonucleotide
cgguacaccguucuugcag

SEQ ID NO: 935133 - RNA, 19 nt, Artificial Sequence
  Description of Artificial Sequence: Synthetic oligonucleotide
cagaucaggucaguucaca

SEQ ID NO: 935134 - RNA, 19 nt, Artificial Sequence
  Description of Artificial Sequence: Synthetic oligonucleotide
gucguguuagucacggacu

SEQ ID NO: 935135 - RNA, 19 nt, Artificial Sequence
  Description of Artificial Sequence: Synthetic oligonucleotide
guauguguauggucccacu

SEQ ID NO: 935136 - RNA, 19 nt, Artificial Sequence
  Description of Artificial Sequence: Synthetic oligonucleotide
ucguaugaggggugcucuu

SEQ ID NO: 935137 - RNA, 19 nt, Artificial Sequence
  Description of Artificial Sequence: Synthetic oligonucleotide
uguccccgccguguagaag

SEQ ID NO: 935138 - RNA, 19 nt, Artificial Sequence
  Description of Artificial Sequence: Synthetic oligonucleotide
uccccgccguguagaagca

SEQ ID NO: 935139 - RNA, 19 nt, Artificial Sequence
  Description of Artificial Sequence: Synthetic oligonucleotide
cauuacccucuguccagga

SEQ ID NO: 935140 - RNA, 19 nt, Artificial Sequence
  Description of Artificial Sequence: Synthetic oligonucleotide
acccucuguccaggaagcg

SEQ ID NO: 935141 - RNA, 19 nt, Artificial Sequence
  Description of Artificial Sequence: Synthetic oligonucleotide
ugucgccaacagauugguu

SEQ ID NO: 935142 - RNA, 19 nt, Artificial Sequence
  Description of Artificial Sequence: Synthetic oligonucleotide
ccguuaaucauauugcauu

SEQ ID NO: 935143 - RNA, 19 nt, Artificial Sequence
  Description of Artificial Sequence: Synthetic oligonucleotide
cacgggucgggcccgcgac

SEQ ID NO: 935144 - RNA, 19 nt, Artificial Sequence
  Description of Artificial Sequence: Synthetic oligonucleotide
ucgucugguccaccgccuu

SEQ ID NO: 935145 - RNA, 19 nt, Artificial Sequence
  Description of Artificial Sequence: Synthetic oligonucleotide
cguguagaagcaacaucug

SEQ ID NO: 935146 - RNA, 19 nt, Artificial Sequence
  Description of Artificial Sequence: Synthetic oligonucleotide
gcuaacagccgauaugguu

SEQ ID NO: 935147 - RNA, 19 nt, Artificial Sequence
  Description of Artificial Sequence: Synthetic oligonucleotide
cauagaggacuucauccuu

SEQ ID NO: 935148 - RNA, 19 nt, Artificial Sequence
  Description of Artificial Sequence: Synthetic oligonucleotide
cccgccguguagaagcaac

SEQ ID NO: 935149 - RNA, 19 nt, Artificial Sequence
  Description of Artificial Sequence: Synthetic oligonucleotide
cguucuaaucaagucaaca

SEQ ID NO: 935150 - RNA, 19 nt, Artificial Sequence
  Description of Artificial Sequence: Synthetic oligonucleotide
aggguauguuggugacuau

SEQ ID NO: 935151 - RNA, 19 nt, Artificial Sequence
  Description of Artificial Sequence: Synthetic oligonucleotide
agucagacgggaacacaua

SEQ ID NO: 935152 - RNA, 19 nt, Artificial Sequence
  Description of Artificial Sequence: Synthetic oligonucleotide
aucgucugguccaccgccu

SEQ ID NO: 935153 - RNA, 19 nt, Artificial Sequence
  Description of Artificial Sequence: Synthetic oligonucleotide
caaucgacuugcagucucu

SEQ ID NO: 935154 - RNA, 19 nt, Artificial Sequence
  Description of Artificial Sequence: Synthetic oligonucleotide
ccagaucaggucaguucac

SEQ ID NO: 935155 - RNA, 19 nt, Artificial Sequence
  Description of Artificial Sequence: Synthetic oligonucleotide
auacugcgcgaggcucacg

SEQ ID NO: 935156 - RNA, 19 nt, Artificial Sequence
  Description of Artificial Sequence: Synthetic oligonucleotide
cacugugacuucucccucu

SEQ ID NO: 935157 - RNA, 19 nt, Artificial Sequence
  Description of Artificial Sequence: Synthetic oligonucleotide
cucgaucgucugguccacc

SEQ ID NO: 935158 - RNA, 19 nt, Artificial Sequence
  Description of Artificial Sequence: Synthetic oligonucleotide
uugccggcacugugacuuc

SEQ ID NO: 935159 - RNA, 19 nt, Artificial Sequence
  Description of Artificial Sequence: Synthetic oligonucleotide
ggaacacauagaggacuuc

SEQ ID NO: 935160 - RNA, 19 nt, Artificial Sequence
  Description of Artificial Sequence: Synthetic oligonucleotide
gcgcgaggcucacgggucg

SEQ ID NO: 935161 - RNA, 19 nt, Artificial Sequence
  Description of Artificial Sequence: Synthetic oligonucleotide
ccggcacugugacuucucc

SEQ ID NO: 935162 - RNA, 19 nt, Artificial Sequence
  Description of Artificial Sequence: Synthetic oligonucleotide
cggcaugcaagccauguga

SEQ ID NO: 935163 - RNA, 19 nt, Artificial Sequence
  Description of Artificial Sequence: Synthetic oligonucleotide
gugucgccaacagauuggu

SEQ ID NO: 935164 - RNA, 19 nt, Artificial Sequence
  Description of Artificial Sequence: Synthetic oligonucleotide
guaggguauguuggugacu

SEQ ID NO: 935165 - RNA, 19 nt, Artificial Sequence
  Description of Artificial Sequence: Synthetic oligonucleotide
aacagccgauaugguuguu

SEQ ID NO: 935166 - RNA, 19 nt, Artificial Sequence
  Description of Artificial Sequence: Synthetic oligonucleotide
cugcgcgaggcucacgggu

SEQ ID NO: 935167 - RNA, 19 nt, Artificial Sequence
  Description of Artificial Sequence: Synthetic oligonucleotide
ggauuccccuguccugguc

SEQ ID NO: 935168 - RNA, 19 nt, Artificial Sequence
  Description of Artificial Sequence: Synthetic oligonucleotide
caggcaccuuauaccgaaa

SEQ ID NO: 935169 - RNA, 19 nt, Artificial Sequence
  Description of Artificial Sequence: Synthetic oligonucleotide
cucacgggucgggcccgcg

SEQ ID NO: 935170 - RNA, 19 nt, Artificial Sequence
  Description of Artificial Sequence: Synthetic oligonucleotide
cccguuaaucauauugcau

SEQ ID NO: 935171 - RNA, 19 nt, Artificial Sequence
  Description of Artificial Sequence: Synthetic oligonucleotide
cacggacuucaaucgacuu

SEQ ID NO: 935172 - RNA, 19 nt, Artificial Sequence
  Description of Artificial Sequence: Synthetic oligonucleotide
guacaccguucuugcagau

SEQ ID NO: 935173 - RNA, 19 nt, Artificial Sequence
  Description of Artificial Sequence: Synthetic oligonucleotide
ccagugacguuuuaccauu

SEQ ID NO: 935174 - RNA, 19 nt, Artificial Sequence
  Description of Artificial Sequence: Synthetic oligonucleotide
gcauucgucugugguccac

SEQ ID NO: 935175 - RNA, 19 nt, Artificial Sequence
  Description of Artificial Sequence: Synthetic oligonucleotide
cacucucauugagauacau

SEQ ID NO: 935176 - RNA, 19 nt, Artificial Sequence
  Description of Artificial Sequence: Synthetic oligonucleotide
ccucuguccaggaagcguu

SEQ ID NO: 935177 - RNA, 19 nt, Artificial Sequence
  Description of Artificial Sequence: Synthetic oligonucleotide
ccgccguguagaagcaaca

SEQ ID NO: 935178 - RNA, 19 nt, Artificial Sequence
  Description of Artificial Sequence: Synthetic oligonucleotide
caccguucuugcagaugcu

SEQ ID NO: 935179 - RNA, 19 nt, Artificial Sequence
  Description of Artificial Sequence: Synthetic oligonucleotide
gcgugacacuagccaccag

SEQ ID NO: 935180 - RNA, 19 nt, Artificial Sequence
  Description of Artificial Sequence: Synthetic oligonucleotide
cguguuagucacggacuuc

SEQ ID NO: 935181 - RNA, 19 nt, Artificial Sequence
  Description of Artificial Sequence: Synthetic oligonucleotide
gucgggcccgcgaccuaac

SEQ ID NO: 935182 - RNA, 19 nt, Artificial Sequence
  Description of Artificial Sequence: Synthetic oligonucleotide
gguucguaugaggggugcu

SEQ ID NO: 935183 - RNA, 19 nt, Artificial Sequence
  Description of Artificial Sequence: Synthetic oligonucleotide
gcccauacugcgcgaggcu

SEQ ID NO: 935184 - RNA, 19 nt, Artificial Sequence
  Description of Artificial Sequence: Synthetic oligonucleotide
ggucgggcccgcgaccuaa

SEQ ID NO: 935185 - RNA, 19 nt, Artificial Sequence
  Description of Artificial Sequence: Synthetic oligonucleotide
cgacuugcagucucuuugu

SEQ ID NO: 935186 - RNA, 19 nt, Artificial Sequence
  Description of Artificial Sequence: Synthetic oligonucleotide
gggauuccccuguccuggu

SEQ ID NO: 935187 - RNA, 19 nt, Artificial Sequence
  Description of Artificial Sequence: Synthetic oligonucleotide
gcucgugcacugugugagu

SEQ ID NO: 935188 - RNA, 19 nt, Artificial Sequence
  Description of Artificial Sequence: Synthetic oligonucleotide
ccgauaugguuguuccauu

SEQ ID NO: 935189 - RNA, 19 nt, Artificial Sequence
  Description of Artificial Sequence: Synthetic oligonucleotide
ccaccgccuucuggaagac

SEQ ID NO: 935190 - RNA, 19 nt, Artificial Sequence
  Description of Artificial Sequence: Synthetic oligonucleotide
cgcgaggcucacgggucgg

SEQ ID NO: 935191 - RNA, 19 nt, Artificial Sequence
  Description of Artificial Sequence: Synthetic oligonucleotide
cucgagccaccagcagcgu

SEQ ID NO: 935192 - RNA, 19 nt, Artificial Sequence
  Description of Artificial Sequence: Synthetic oligonucleotide
cugucccguuaaucauauu

SEQ ID NO: 935193 - RNA, 19 nt, Artificial Sequence
  Description of Artificial Sequence: Synthetic oligonucleotide
ccucacuugccggcacugu

SEQ ID NO: 935194 - RNA, 19 nt, Artificial Sequence
  Description of Artificial Sequence: Synthetic oligonucleotide
ccaccaguccagugacguu

SEQ ID NO: 935195 - RNA, 19 nt, Artificial Sequence
  Description of Artificial Sequence: Synthetic oligonucleotide
cgccguguagaagcaacau

SEQ ID NO: 935196 - RNA, 19 nt, Artificial Sequence
  Description of Artificial Sequence: Synthetic oligonucleotide
ccccgccguguagaagcaa

SEQ ID NO: 935197 - RNA, 19 nt, Artificial Sequence
  Description of Artificial Sequence: Synthetic oligonucleotide
cgggucgggcccgcgaccu

SEQ ID NO: 935198 - RNA, 19 nt, Artificial Sequence
  Description of Artificial Sequence: Synthetic oligonucleotide
aagaguaucacguuguuuc

SEQ ID NO: 935199 - RNA, 19 nt, Artificial Sequence
  Description of Artificial Sequence: Synthetic oligonucleotide
uuuacuaagaauaugugac

SEQ ID NO: 935200 - RNA, 19 nt, Artificial Sequence
  Description of Artificial Sequence: Synthetic oligonucleotide
ucaaaucuuucaaagaagg

SEQ ID NO: 935201 - RNA, 19 nt, Artificial Sequence
  Description of Artificial Sequence: Synthetic oligonucleotide
ugacuaacgaacuagcugg

SEQ ID NO: 935202 - RNA, 19 nt, Artificial Sequence
  Description of Artificial Sequence: Synthetic oligonucleotide
ucauauucaauauucgggg

SEQ ID NO: 935203 - RNA, 19 nt, Artificial Sequence
  Description of Artificial Sequence: Synthetic oligonucleotide
aauuauggaauaauuuccc

SEQ ID NO: 935204 - RNA, 19 nt, Artificial Sequence
  Description of Artificial Sequence: Synthetic oligonucleotide
uuugacaagaguaucacgu

SEQ ID NO: 935205 - RNA, 19 nt, Artificial Sequence
  Description of Artificial Sequence: Synthetic oligonucleotide
uuuaguaagauacugguuu

SEQ ID NO: 935206 - RNA, 19 nt, Artificial Sequence
  Description of Artificial Sequence: Synthetic oligonucleotide
auauucaauauucggggcc

SEQ ID NO: 935207 - RNA, 19 nt, Artificial Sequence
  Description of Artificial Sequence: Synthetic oligonucleotide
aaagcaauuguuacuacac

SEQ ID NO: 935208 - RNA, 19 nt, Artificial Sequence
  Description of Artificial Sequence: Synthetic oligonucleotide
aauauucggggccaugaac

SEQ ID NO: 935209 - RNA, 19 nt, Artificial Sequence
  Description of Artificial Sequence: Synthetic oligonucleotide
ucuguauucauuaaagcaa

SEQ ID NO: 935210 - RNA, 19 nt, Artificial Sequence
  Description of Artificial Sequence: Synthetic oligonucleotide
aaaugaauaccacaucugu

SEQ ID NO: 935211 - RNA, 19 nt, Artificial Sequence
  Description of Artificial Sequence: Synthetic oligonucleotide
acugauuucauggcgaacc

SEQ ID NO: 935212 - RNA, 19 nt, Artificial Sequence
  Description of Artificial Sequence: Synthetic oligonucleotide
uguaguacgcuucugaaaa

SEQ ID NO: 935213 - RNA, 19 nt, Artificial Sequence
  Description of Artificial Sequence: Synthetic oligonucleotide
uggucuuacuucuugauag

SEQ ID NO: 935214 - RNA, 19 nt, Artificial Sequence
  Description of Artificial Sequence: Synthetic oligonucleotide
aaugcugccaaucuuugca

SEQ ID NO: 935215 - RNA, 19 nt, Artificial Sequence
  Description of Artificial Sequence: Synthetic oligonucleotide
gaauaugugacaaaugcug

SEQ ID NO: 935216 - RNA, 19 nt, Artificial Sequence
  Description of Artificial Sequence: Synthetic oligonucleotide
uuucguguuuugaagaugc

SEQ ID NO: 935217 - RNA, 19 nt, Artificial Sequence
  Description of Artificial Sequence: Synthetic oligonucleotide
uuauuaaaccauuaguaaa

SEQ ID NO: 935218 - RNA, 19 nt, Artificial Sequence
  Description of Artificial Sequence: Synthetic oligonucleotide
gaauuauggaauaauuucc

SEQ ID NO: 935219 - RNA, 19 nt, Artificial Sequence
  Description of Artificial Sequence: Synthetic oligonucleotide
uuugaagaugcaaauacaa

SEQ ID NO: 935220 - RNA, 19 nt, Artificial Sequence
  Description of Artificial Sequence: Synthetic oligonucleotide
auaugugacaaaugcugcc

SEQ ID NO: 935221 - RNA, 19 nt, Artificial Sequence
  Description of Artificial Sequence: Synthetic oligonucleotide
ugaccuguaaucaggaccc

SEQ ID NO: 935222 - RNA, 19 nt, Artificial Sequence
  Description of Artificial Sequence: Synthetic oligonucleotide
caaagagucugcaauagag

SEQ ID NO: 935223 - RNA, 19 nt, Artificial Sequence
  Description of Artificial Sequence: Synthetic oligonucleotide
aagauacugguuugagggc

SEQ ID NO: 935224 - RNA, 19 nt, Artificial Sequence
  Description of Artificial Sequence: Synthetic oligonucleotide
ugauagacuggaaaugaag

SEQ ID NO: 935225 - RNA, 19 nt, Artificial Sequence
  Description of Artificial Sequence: Synthetic oligonucleotide
uauggaauaauuucccugu

SEQ ID NO: 935226 - RNA, 19 nt, Artificial Sequence
  Description of Artificial Sequence: Synthetic oligonucleotide
uugacuaacgaacuagcug

SEQ ID NO: 935227 - RNA, 19 nt, Artificial Sequence
  Description of Artificial Sequence: Synthetic oligonucleotide
ucgagugcguuuaugagag

SEQ ID NO: 935228 - RNA, 19 nt, Artificial Sequence
  Description of Artificial Sequence: Synthetic oligonucleotide
uuacauguuacauuccgug

SEQ ID NO: 935229 - RNA, 19 nt, Artificial Sequence
  Description of Artificial Sequence: Synthetic oligonucleotide
aaguguacuugauucaugu

SEQ ID NO: 935230 - RNA, 19 nt, Artificial Sequence
  Description of Artificial Sequence: Synthetic oligonucleotide
uuauggaauaauuucccug

SEQ ID NO: 935231 - RNA, 19 nt, Artificial Sequence
  Description of Artificial Sequence: Synthetic oligonucleotide
agcaauuguuacuacacag

SEQ ID NO: 935232 - RNA, 19 nt, Artificial Sequence
  Description of Artificial Sequence: Synthetic oligonucleotide
ucauuaaagcaauuguuac

SEQ ID NO: 935233 - RNA, 19 nt, Artificial Sequence
  Description of Artificial Sequence: Synthetic oligonucleotide
aaagaauccaucccuugcu

SEQ ID NO: 935234 - RNA, 19 nt, Artificial Sequence
  Description of Artificial Sequence: Synthetic oligonucleotide
uguacugcaacuccuauua

SEQ ID NO: 935235 - RNA, 19 nt, Artificial Sequence
  Description of Artificial Sequence: Synthetic oligonucleotide
augaauaccacaucuguga

SEQ ID NO: 935236 - RNA, 19 nt, Artificial Sequence
  Description of Artificial Sequence: Synthetic oligonucleotide
uguguuacauuguuaacac

SEQ ID NO: 935237 - RNA, 19 nt, Artificial Sequence
  Description of Artificial Sequence: Synthetic oligonucleotide
uaacacugauuucauggcg

SEQ ID NO: 935238 - RNA, 19 nt, Artificial Sequence
  Description of Artificial Sequence: Synthetic oligonucleotide
aaaugcugccaaucuuugc

SEQ ID NO: 935239 - RNA, 19 nt, Artificial Sequence
  Description of Artificial Sequence: Synthetic oligonucleotide
auauucggggccaugaacc

SEQ ID NO: 935240 - RNA, 19 nt, Artificial Sequence
  Description of Artificial Sequence: Synthetic oligonucleotide
uaacgaacuagcuggauca

SEQ ID NO: 935241 - RNA, 19 nt, Artificial Sequence
  Description of Artificial Sequence: Synthetic oligonucleotide
aggaauaacaguugcuguc

SEQ ID NO: 935242 - RNA, 19 nt, Artificial Sequence
  Description of Artificial Sequence: Synthetic oligonucleotide
agaggcagaacaccgaguc

SEQ ID NO: 935243 - RNA, 19 nt, Artificial Sequence
  Description of Artificial Sequence: Synthetic oligonucleotide
aaagagucugcaauagagg

SEQ ID NO: 935244 - RNA, 19 nt, Artificial Sequence
  Description of Artificial Sequence: Synthetic oligonucleotide
agugauuuuagguuuagua

SEQ ID NO: 935245 - RNA, 19 nt, Artificial Sequence
  Description of Artificial Sequence: Synthetic oligonucleotide
uacauuguacugcaacucc

SEQ ID NO: 935246 - RNA, 19 nt, Artificial Sequence
  Description of Artificial Sequence: Synthetic oligonucleotide
caauagaggcagaacaccg

SEQ ID NO: 935247 - RNA, 19 nt, Artificial Sequence
  Description of Artificial Sequence: Synthetic oligonucleotide
aguucugguaaagacuugc

SEQ ID NO: 935248 - RNA, 19 nt, Artificial Sequence
  Description of Artificial Sequence: Synthetic oligonucleotide
ugaauacuuaacacuguug

SEQ ID NO: 935249 - RNA, 19 nt, Artificial Sequence
  Description of Artificial Sequence: Synthetic oligonucleotide
auugugagauccaugaauc

SEQ ID NO: 935250 - RNA, 19 nt, Artificial Sequence
  Description of Artificial Sequence: Synthetic oligonucleotide
uuuugacaagaguaucacg

SEQ ID NO: 935251 - RNA, 19 nt, Artificial Sequence
  Description of Artificial Sequence: Synthetic oligonucleotide
uggaucaccaaaugaauac

SEQ ID NO: 935252 - RNA, 19 nt, Artificial Sequence
  Description of Artificial Sequence: Synthetic oligonucleotide
uguacugauucaacaaaca

SEQ ID NO: 935253 - RNA, 19 nt, Artificial Sequence
  Description of Artificial Sequence: Synthetic oligonucleotide
ggaauuauggaauaauuuc

SEQ ID NO: 935254 - RNA, 19 nt, Artificial Sequence
  Description of Artificial Sequence: Synthetic oligonucleotide
uuuauauucaguggcacaa

SEQ ID NO: 935255 - RNA, 19 nt, Artificial Sequence
  Description of Artificial Sequence: Synthetic oligonucleotide
acuugcuugacuccacugg

SEQ ID NO: 935256 - RNA, 19 nt, Artificial Sequence
  Description of Artificial Sequence: Synthetic oligonucleotide
uuacauuccgugucuuucg

SEQ ID NO: 935257 - RNA, 19 nt, Artificial Sequence
  Description of Artificial Sequence: Synthetic oligonucleotide
guaaagacuugcuugacuc

SEQ ID NO: 935258 - RNA, 19 nt, Artificial Sequence
  Description of Artificial Sequence: Synthetic oligonucleotide
uuaguaagauacugguuug

SEQ ID NO: 935259 - RNA, 19 nt, Artificial Sequence
  Description of Artificial Sequence: Synthetic oligonucleotide
ugaauaccacaucugugag

SEQ ID NO: 935260 - RNA, 19 nt, Artificial Sequence
  Description of Artificial Sequence: Synthetic oligonucleotide
aauccaaauucuugguacu

SEQ ID NO: 935261 - RNA, 19 nt, Artificial Sequence
  Description of Artificial Sequence: Synthetic oligonucleotide
uuugcugaccuguaaucag

SEQ ID NO: 935262 - RNA, 19 nt, Artificial Sequence
  Description of Artificial Sequence: Synthetic oligonucleotide
uauacaucuugacuuagua

SEQ ID NO: 935263 - RNA, 19 nt, Artificial Sequence
  Description of Artificial Sequence: Synthetic oligonucleotide
uguacuugauucauguaau

SEQ ID NO: 935264 - RNA, 19 nt, Artificial Sequence
  Description of Artificial Sequence: Synthetic oligonucleotide
gauuuucguguuuugaaga

SEQ ID NO: 935265 - RNA, 19 nt, Artificial Sequence
  Description of Artificial Sequence: Synthetic oligonucleotide
ucuuacuugagguggauua

SEQ ID NO: 935266 - RNA, 19 nt, Artificial Sequence
  Description of Artificial Sequence: Synthetic oligonucleotide
ugcaauagaggcagaacac

SEQ ID NO: 935267 - RNA, 19 nt, Artificial Sequence
  Description of Artificial Sequence: Synthetic oligonucleotide
auuaguaaaucuguauuca

SEQ ID NO: 935268 - RNA, 19 nt, Artificial Sequence
  Description of Artificial Sequence: Synthetic oligonucleotide
auuaaagcaauuguuacua

SEQ ID NO: 935269 - RNA, 19 nt, Artificial Sequence
  Description of Artificial Sequence: Synthetic oligonucleotide
ugaaaguguacuugauuca

SEQ ID NO: 935270 - RNA, 19 nt, Artificial Sequence
  Description of Artificial Sequence: Synthetic oligonucleotide
agugcagaucuguagcuuc

SEQ ID NO: 935271 - RNA, 19 nt, Artificial Sequence
  Description of Artificial Sequence: Synthetic oligonucleotide
uacugcaacuccuauuacc

SEQ ID NO: 935272 - RNA, 19 nt, Artificial Sequence
  Description of Artificial Sequence: Synthetic oligonucleotide
uuuacauguuacauuccgu

SEQ ID NO: 935273 - RNA, 19 nt, Artificial Sequence
  Description of Artificial Sequence: Synthetic oligonucleotide
gagucugcaauagaggcag

SEQ ID NO: 935274 - RNA, 19 nt, Artificial Sequence
  Description of Artificial Sequence: Synthetic oligonucleotide
ugggaguauucacaggaag

SEQ ID NO: 935275 - RNA, 19 nt, Artificial Sequence
  Description of Artificial Sequence: Synthetic oligonucleotide
uuugaauacuuaacacugu

SEQ ID NO: 935276 - RNA, 19 nt, Artificial Sequence
  Description of Artificial Sequence: Synthetic oligonucleotide
ugaaaacuuccuuccagug

SEQ ID NO: 935277 - RNA, 19 nt, Artificial Sequence
  Description of Artificial Sequence: Synthetic oligonucleotide
uguuacuacacaguuuaug

SEQ ID NO: 935278 - RNA, 19 nt, Artificial Sequence
  Description of Artificial Sequence: Synthetic oligonucleotide
guauucauuaaagcaauug

SEQ ID NO: 935279 - RNA, 19 nt, Artificial Sequence
  Description of Artificial Sequence: Synthetic oligonucleotide
accucuccuaauuuauuac

SEQ ID NO: 935280 - RNA, 19 nt, Artificial Sequence
  Description of Artificial Sequence: Synthetic oligonucleotide
cauauucaauauucggggc

SEQ ID NO: 935281 - RNA, 19 nt, Artificial Sequence
  Description of Artificial Sequence: Synthetic oligonucleotide
cuuuggaggccgaauagag

SEQ ID NO: 935282 - RNA, 19 nt, Artificial Sequence
  Description of Artificial Sequence: Synthetic oligonucleotide
acuuggaagaauccgugug

SEQ ID NO: 935283 - RNA, 19 nt, Artificial Sequence
  Description of Artificial Sequence: Synthetic oligonucleotide
uuacuacacaguuuaugug

SEQ ID NO: 935284 - RNA, 19 nt, Artificial Sequence
  Description of Artificial Sequence: Synthetic oligonucleotide
auagaggcagaacaccgag

SEQ ID NO: 935285 - RNA, 19 nt, Artificial Sequence
  Description of Artificial Sequence: Synthetic oligonucleotide
uuucgagugcguuuaugag

SEQ ID NO: 935286 - RNA, 19 nt, Artificial Sequence
  Description of Artificial Sequence: Synthetic oligonucleotide
guacuugccacauugcuca

SEQ ID NO: 935287 - RNA, 19 nt, Artificial Sequence
  Description of Artificial Sequence: Synthetic oligonucleotide
aagaauccguguguaguac

SEQ ID NO: 935288 - RNA, 19 nt, Artificial Sequence
  Description of Artificial Sequence: Synthetic oligonucleotide
aauucuguuuaggaaguga

SEQ ID NO: 935289 - RNA, 19 nt, Artificial Sequence
  Description of Artificial Sequence: Synthetic oligonucleotide
uucgagugcguuuaugaga

SEQ ID NO: 935290 - RNA, 19 nt, Artificial Sequence
  Description of Artificial Sequence: Synthetic oligonucleotide
auaaagaauccaucccuug

SEQ ID NO: 935291 - RNA, 19 nt, Artificial Sequence
  Description of Artificial Sequence: Synthetic oligonucleotide
aagcaauuguuacuacaca

SEQ ID NO: 935292 - RNA, 19 nt, Artificial Sequence
  Description of Artificial Sequence: Synthetic oligonucleotide
uuuauguguuacauuguua

SEQ ID NO: 935293 - RNA, 19 nt, Artificial Sequence
  Description of Artificial Sequence: Synthetic oligonucleotide
ucuuuugcugaccuguaau

SEQ ID NO: 935294 - RNA, 19 nt, Artificial Sequence
  Description of Artificial Sequence: Synthetic oligonucleotide
uuaugagagaaagaagaaa

SEQ ID NO: 935295 - RNA, 19 nt, Artificial Sequence
  Description of Artificial Sequence: Synthetic oligonucleotide
guuacuacacaguuuaugu

SEQ ID NO: 935296 - RNA, 19 nt, Artificial Sequence
  Description of Artificial Sequence: Synthetic oligonucleotide
ccaugaaucaggauugugg

SEQ ID NO: 935297 - RNA, 19 nt, Artificial Sequence
  Description of Artificial Sequence: Synthetic oligonucleotide
agaauccguguguaguacg

SEQ ID NO: 935298 - RNA, 19 nt, Artificial Sequence
  Description of Artificial Sequence: Synthetic oligonucleotide
uuccauuaucucuuuauau

SEQ ID NO: 935299 - RNA, 19 nt, Artificial Sequence
  Description of Artificial Sequence: Synthetic oligonucleotide
cucuccuaauuuauuacac

SEQ ID NO: 935300 - RNA, 19 nt, Artificial Sequence
  Description of Artificial Sequence: Synthetic oligonucleotide
uuuugcugaccuguaauca

SEQ ID NO: 935301 - RNA, 19 nt, Artificial Sequence
  Description of Artificial Sequence: Synthetic oligonucleotide
cuguacugauucaacaaac

SEQ ID NO: 935302 - RNA, 19 nt, Artificial Sequence
  Description of Artificial Sequence: Synthetic oligonucleotide
auagacuggaaaugaagaa

SEQ ID NO: 935303 - RNA, 19 nt, Artificial Sequence
  Description of Artificial Sequence: Synthetic oligonucleotide
uuaguaaaucuguauucau

SEQ ID NO: 935304 - RNA, 19 nt, Artificial Sequence
  Description of Artificial Sequence: Synthetic oligonucleotide
uguaaucaggacccugugu

SEQ ID NO: 935305 - RNA, 19 nt, Artificial Sequence
  Description of Artificial Sequence: Synthetic oligonucleotide
uaguaaaucuguauucauu

SEQ ID NO: 935306 - RNA, 19 nt, Artificial Sequence
  Description of Artificial Sequence: Synthetic oligonucleotide
acuccuauuaccucugaaa

SEQ ID NO: 935307 - RNA, 19 nt, Artificial Sequence
  Description of Artificial Sequence: Synthetic oligonucleotide
uuugcacccguucucauuu

SEQ ID NO: 935308 - RNA, 19 nt, Artificial Sequence
  Description of Artificial Sequence: Synthetic oligonucleotide
uugggcauguacuugccac

SEQ ID NO: 935309 - RNA, 19 nt, Artificial Sequence
  Description of Artificial Sequence: Synthetic oligonucleotide
aacacugauuucauggcga

SEQ ID NO: 935310 - RNA, 19 nt, Artificial Sequence
  Description of Artificial Sequence: Synthetic oligonucleotide
aguaagauacugguuugag

SEQ ID NO: 935311 - RNA, 19 nt, Artificial Sequence
  Description of Artificial Sequence: Synthetic oligonucleotide
aaugcccggcucuaaagau

SEQ ID NO: 935312 - RNA, 19 nt, Artificial Sequence
  Description of Artificial Sequence: Synthetic oligonucleotide
cuaacgaacuagcuggauc

SEQ ID NO: 935313 - RNA, 19 nt, Artificial Sequence
  Description of Artificial Sequence: Synthetic oligonucleotide
ucuaaagaucaugccagug

SEQ ID NO: 935314 - RNA, 19 nt, Artificial Sequence
  Description of Artificial Sequence: Synthetic oligonucleotide
ucuuuauauucaguggcac

SEQ ID NO: 935315 - RNA, 19 nt, Artificial Sequence
  Description of Artificial Sequence: Synthetic oligonucleotide
ggauuuucguguuuugaag

SEQ ID NO: 935316 - RNA, 19 nt, Artificial Sequence
  Description of Artificial Sequence: Synthetic oligonucleotide
ugaugugcauuucacucuc

SEQ ID NO: 935317 - RNA, 19 nt, Artificial Sequence
  Description of Artificial Sequence: Synthetic oligonucleotide
augaagaaauccaaauucu

SEQ ID NO: 935318 - RNA, 19 nt, Artificial Sequence
  Description of Artificial Sequence: Synthetic oligonucleotide
cuggaggaauaacaguugc

SEQ ID NO: 935319 - RNA, 19 nt, Artificial Sequence
  Description of Artificial Sequence: Synthetic oligonucleotide
ucuucguguuuacuaagaa

SEQ ID NO: 935320 - RNA, 19 nt, Artificial Sequence
  Description of Artificial Sequence: Synthetic oligonucleotide
uguguaguacgcuucugaa

SEQ ID NO: 935321 - RNA, 19 nt, Artificial Sequence
  Description of Artificial Sequence: Synthetic oligonucleotide
cagaacaccgagucuuugg

SEQ ID NO: 935322 - RNA, 19 nt, Artificial Sequence
  Description of Artificial Sequence: Synthetic oligonucleotide
uauguguuacauuguuaac

SEQ ID NO: 935323 - RNA, 19 nt, Artificial Sequence
  Description of Artificial Sequence: Synthetic oligonucleotide
cuuucgagugcguuuauga

SEQ ID NO: 935324 - RNA, 19 nt, Artificial Sequence
  Description of Artificial Sequence: Synthetic oligonucleotide
uaaucaggacccugugucc

SEQ ID NO: 935325 - RNA, 19 nt, Artificial Sequence
  Description of Artificial Sequence: Synthetic oligonucleotide
auuuucguguuuugaagau

SEQ ID NO: 935326 - RNA, 19 nt, Artificial Sequence
  Description of Artificial Sequence: Synthetic oligonucleotide
aaucaggauuguggugugc

SEQ ID NO: 935327 - RNA, 19 nt, Artificial Sequence
  Description of Artificial Sequence: Synthetic oligonucleotide
ggaauaauuucccugugga

SEQ ID NO: 935328 - RNA, 19 nt, Artificial Sequence
  Description of Artificial Sequence: Synthetic oligonucleotide
cugacagcauuccuuuucc

SEQ ID NO: 935329 - RNA, 19 nt, Artificial Sequence
  Description of Artificial Sequence: Synthetic oligonucleotide
gugcguuuaugagagaaag

SEQ ID NO: 935330 - RNA, 19 nt, Artificial Sequence
  Description of Artificial Sequence: Synthetic oligonucleotide
ugcccggcucuaaagauca

SEQ ID NO: 935331 - RNA, 19 nt, Artificial Sequence
  Description of Artificial Sequence: Synthetic oligonucleotide
uugauagacuggaaaugaa

SEQ ID NO: 935332 - RNA, 19 nt, Artificial Sequence
  Description of Artificial Sequence: Synthetic oligonucleotide
augcugccaaucuuugcac

SEQ ID NO: 935333 - RNA, 19 nt, Artificial Sequence
  Description of Artificial Sequence: Synthetic oligonucleotide
ugcguuuaugagagaaaga

SEQ ID NO: 935334 - RNA, 19 nt, Artificial Sequence
  Description of Artificial Sequence: Synthetic oligonucleotide
aacuagcuggaucaccaaa

SEQ ID NO: 935335 - RNA, 19 nt, Artificial Sequence
  Description of Artificial Sequence: Synthetic oligonucleotide
uugguacuauguuuguuuc

SEQ ID NO: 935336 - RNA, 19 nt, Artificial Sequence
  Description of Artificial Sequence: Synthetic oligonucleotide
uuuucguguuuugaagaug

SEQ ID NO: 935337 - RNA, 19 nt, Artificial Sequence
  Description of Artificial Sequence: Synthetic oligonucleotide
ucguguuuacuaagaauau

SEQ ID NO: 935338 - RNA, 19 nt, Artificial Sequence
  Description of Artificial Sequence: Synthetic oligonucleotide
auuccgugucuuucgagug

SEQ ID NO: 935339 - RNA, 19 nt, Artificial Sequence
  Description of Artificial Sequence: Synthetic oligonucleotide
aauagaggcagaacaccga

SEQ ID NO: 935340 - RNA, 19 nt, Artificial Sequence
  Description of Artificial Sequence: Synthetic oligonucleotide
ugguacuauguuuguuucc

SEQ ID NO: 935341 - RNA, 19 nt, Artificial Sequence
  Description of Artificial Sequence: Synthetic oligonucleotide
ucccuguggauuuucgugu

SEQ ID NO: 935342 - RNA, 19 nt, Artificial Sequence
  Description of Artificial Sequence: Synthetic oligonucleotide
acuaagaauaugugacaaa

SEQ ID NO: 935343 - RNA, 19 nt, Artificial Sequence
  Description of Artificial Sequence: Synthetic oligonucleotide
uuucucugguauuucuccu

SEQ ID NO: 935344 - RNA, 19 nt, Artificial Sequence
  Description of Artificial Sequence: Synthetic oligonucleotide
uggaagaauccguguguag

SEQ ID NO: 935345 - RNA, 19 nt, Artificial Sequence
  Description of Artificial Sequence: Synthetic oligonucleotide
aacgaacuagcuggaucac

SEQ ID NO: 935346 - RNA, 19 nt, Artificial Sequence
  Description of Artificial Sequence: Synthetic oligonucleotide
cuuuauauucaguggcaca

SEQ ID NO: 935347 - RNA, 19 nt, Artificial Sequence
  Description of Artificial Sequence: Synthetic oligonucleotide
augaaucaggauuguggug

SEQ ID NO: 935348 - RNA, 19 nt, Artificial Sequence
  Description of Artificial Sequence: Synthetic oligonucleotide
gcucuaaagaucaugccag

SEQ ID NO: 935349 - RNA, 19 nt, Artificial Sequence
  Description of Artificial Sequence: Synthetic oligonucleotide
aaucaggacccugugucca

SEQ ID NO: 935350 - RNA, 19 nt, Artificial Sequence
  Description of Artificial Sequence: Synthetic oligonucleotide
uccgugucuuucgagugcg

SEQ ID NO: 935351 - RNA, 19 nt, Artificial Sequence
  Description of Artificial Sequence: Synthetic oligonucleotide
uucugguaaagacuugcuu

SEQ ID NO: 935352 - RNA, 19 nt, Artificial Sequence
  Description of Artificial Sequence: Synthetic oligonucleotide
uuggucuuacuucuugaua

SEQ ID NO: 935353 - RNA, 19 nt, Artificial Sequence
  Description of Artificial Sequence: Synthetic oligonucleotide
gaauccguguguaguacgc

SEQ ID NO: 935354 - RNA, 19 nt, Artificial Sequence
  Description of Artificial Sequence: Synthetic oligonucleotide
guguuuacuaagaauaugu

SEQ ID NO: 935355 - RNA, 19 nt, Artificial Sequence
  Description of Artificial Sequence: Synthetic oligonucleotide
cugguaaagacuugcuuga

SEQ ID NO: 935356 - RNA, 19 nt, Artificial Sequence
  Description of Artificial Sequence: Synthetic oligonucleotide
aauuguuacuacacaguuu

SEQ ID NO: 935357 - RNA, 19 nt, Artificial Sequence
  Description of Artificial Sequence: Synthetic oligonucleotide
agaguaucacguuguuuca

SEQ ID NO: 935358 - RNA, 19 nt, Artificial Sequence
  Description of Artificial Sequence: Synthetic oligonucleotide
aagacuugcuugacuccac

SEQ ID NO: 935359 - RNA, 19 nt, Artificial Sequence
  Description of Artificial Sequence: Synthetic oligonucleotide
aggaauuauggaauaauuu

SEQ ID NO: 935360 - RNA, 19 nt, Artificial Sequence
  Description of Artificial Sequence: Synthetic oligonucleotide
acgaacuagcuggaucacc

SEQ ID NO: 935361 - RNA, 19 nt, Artificial Sequence
  Description of Artificial Sequence: Synthetic oligonucleotide
uacauuccgugucuuucga

SEQ ID NO: 935362 - RNA, 19 nt, Artificial Sequence
  Description of Artificial Sequence: Synthetic oligonucleotide
agauacugguuugagggcu

SEQ ID NO: 935363 - RNA, 19 nt, Artificial Sequence
  Description of Artificial Sequence: Synthetic oligonucleotide
uaguacgcuucugaaaacu

SEQ ID NO: 935364 - RNA, 19 nt, Artificial Sequence
  Description of Artificial Sequence: Synthetic oligonucleotide
aggcgugcuccaccaaugc

SEQ ID NO: 935365 - RNA, 19 nt, Artificial Sequence
  Description of Artificial Sequence: Synthetic oligonucleotide
gaagaauccguguguagua

SEQ ID NO: 935366 - RNA, 19 nt, Artificial Sequence
  Description of Artificial Sequence: Synthetic oligonucleotide
cuagcuggaucaccaaaug

SEQ ID NO: 935367 - RNA, 19 nt, Artificial Sequence
  Description of Artificial Sequence: Synthetic oligonucleotide
uuccgugucuuucgagugc

SEQ ID NO: 935368 - RNA, 19 nt, Artificial Sequence
  Description of Artificial Sequence: Synthetic oligonucleotide
ugcauuucacucucuucgu

SEQ ID NO: 935369 - RNA, 19 nt, Artificial Sequence
  Description of Artificial Sequence: Synthetic oligonucleotide
gcugcauccauccuaccag

SEQ ID NO: 935370 - RNA, 19 nt, Artificial Sequence
  Description of Artificial Sequence: Synthetic oligonucleotide
cauuguuaacacugauuuc

SEQ ID NO: 935371 - RNA, 19 nt, Artificial Sequence
  Description of Artificial Sequence: Synthetic oligonucleotide
ugcauugacuaacgaacua

SEQ ID NO: 935372 - RNA, 19 nt, Artificial Sequence
  Description of Artificial Sequence: Synthetic oligonucleotide
aguaucacguuguuucaua

SEQ ID NO: 935373 - RNA, 19 nt, Artificial Sequence
  Description of Artificial Sequence: Synthetic oligonucleotide
ggcucuaaagaucaugcca

SEQ ID NO: 935374 - RNA, 19 nt, Artificial Sequence
  Description of Artificial Sequence: Synthetic oligonucleotide
agcucuuuugcugaccugu

SEQ ID NO: 935375 - RNA, 19 nt, Artificial Sequence
  Description of Artificial Sequence: Synthetic oligonucleotide
uguagcuucacugguuuua

SEQ ID NO: 935376 - RNA, 19 nt, Artificial Sequence
  Description of Artificial Sequence: Synthetic oligonucleotide
auuguggugugcugcaaau

SEQ ID NO: 935377 - RNA, 19 nt, Artificial Sequence
  Description of Artificial Sequence: Synthetic oligonucleotide
uccccuucaucaucaauaa

SEQ ID NO: 935378 - RNA, 19 nt, Artificial Sequence
  Description of Artificial Sequence: Synthetic oligonucleotide
cuucuugauagacuggaaa

SEQ ID NO: 935379 - RNA, 19 nt, Artificial Sequence
  Description of Artificial Sequence: Synthetic oligonucleotide
ugauugugagauccaugaa

SEQ ID NO: 935380 - RNA, 19 nt, Artificial Sequence
  Description of Artificial Sequence: Synthetic oligonucleotide
gaccuggugguuuucucac

SEQ ID NO: 935381 - RNA, 19 nt, Artificial Sequence
  Description of Artificial Sequence: Synthetic oligonucleotide
cugcauccauccuaccagg

SEQ ID NO: 935382 - RNA, 19 nt, Artificial Sequence
  Description of Artificial Sequence: Synthetic oligonucleotide
ugcugccaaucuuugcacc

SEQ ID NO: 935383 - RNA, 19 nt, Artificial Sequence
  Description of Artificial Sequence: Synthetic oligonucleotide
ggggccaugaaccugguga

SEQ ID NO: 935384 - RNA, 19 nt, Artificial Sequence
  Description of Artificial Sequence: Synthetic oligonucleotide
ucacagcaguucauuauua

SEQ ID NO: 935385 - RNA, 19 nt, Artificial Sequence
  Description of Artificial Sequence: Synthetic oligonucleotide
gguuuaguaagauacuggu

SEQ ID NO: 935386 - RNA, 19 nt, Artificial Sequence
  Description of Artificial Sequence: Synthetic oligonucleotide
uaguaagauacugguuuga

SEQ ID NO: 935387 - RNA, 19 nt, Artificial Sequence
  Description of Artificial Sequence: Synthetic oligonucleotide
gcauugacuaacgaacuag

SEQ ID NO: 935388 - RNA, 19 nt, Artificial Sequence
  Description of Artificial Sequence: Synthetic oligonucleotide
auugacuaacgaacuagcu

SEQ ID NO: 935389 - RNA, 19 nt, Artificial Sequence
  Description of Artificial Sequence: Synthetic oligonucleotide
auuguacugcaacuccuau

SEQ ID NO: 935390 - RNA, 19 nt, Artificial Sequence
  Description of Artificial Sequence: Synthetic oligonucleotide
guuacauuguuaacacuga

SEQ ID NO: 935391 - RNA, 19 nt, Artificial Sequence
  Description of Artificial Sequence: Synthetic oligonucleotide
cacauuauacaucuugacu

SEQ ID NO: 935392 - RNA, 19 nt, Artificial Sequence
  Description of Artificial Sequence: Synthetic oligonucleotide
ucguguuuugaagaugcaa

SEQ ID NO: 935393 - RNA, 19 nt, Artificial Sequence
  Description of Artificial Sequence: Synthetic oligonucleotide
gacucugggaguauucaca

SEQ ID NO: 935394 - RNA, 19 nt, Artificial Sequence
  Description of Artificial Sequence: Synthetic oligonucleotide
uccguguguaguacgcuuc

SEQ ID NO: 935395 - RNA, 19 nt, Artificial Sequence
  Description of Artificial Sequence: Synthetic oligonucleotide
ugucuuucgagugcguuua

SEQ ID NO: 935396 - RNA, 19 nt, Artificial Sequence
  Description of Artificial Sequence: Synthetic oligonucleotide
aagguccuacaccagucuu

SEQ ID NO: 935397 - RNA, 19 nt, Artificial Sequence
  Description of Artificial Sequence: Synthetic oligonucleotide
acacaguuuauguguuaca

SEQ ID NO: 935398 - RNA, 19 nt, Artificial Sequence
  Description of Artificial Sequence: Synthetic oligonucleotide
cauuauacaucuugacuua

SEQ ID NO: 935399 - RNA, 19 nt, Artificial Sequence
  Description of Artificial Sequence: Synthetic oligonucleotide
gguacuauguuuguuucca

SEQ ID NO: 935400 - RNA, 19 nt, Artificial Sequence
  Description of Artificial Sequence: Synthetic oligonucleotide
gguaagauuuuaauuuuga

SEQ ID NO: 935401 - RNA, 19 nt, Artificial Sequence
  Description of Artificial Sequence: Synthetic oligonucleotide
aguucauuauuaaaccauu

SEQ ID NO: 935402 - RNA, 19 nt, Artificial Sequence
  Description of Artificial Sequence: Synthetic oligonucleotide
acauuccgugucuuucgag

SEQ ID NO: 935403 - RNA, 19 nt, Artificial Sequence
  Description of Artificial Sequence: Synthetic oligonucleotide
ugugacaaaugcugccaau

SEQ ID NO: 935404 - RNA, 19 nt, Artificial Sequence
  Description of Artificial Sequence: Synthetic oligonucleotide
augcacuaugaaguucugg

SEQ ID NO: 935405 - RNA, 19 nt, Artificial Sequence
  Description of Artificial Sequence: Synthetic oligonucleotide
aucaggauuguggugugcu

SEQ ID NO: 935406 - RNA, 19 nt, Artificial Sequence
  Description of Artificial Sequence: Synthetic oligonucleotide
uucguguuuugaagaugca

SEQ ID NO: 935407 - RNA, 19 nt, Artificial Sequence
  Description of Artificial Sequence: Synthetic oligonucleotide
cauuuguuucugugucccc

SEQ ID NO: 935408 - RNA, 19 nt, Artificial Sequence
  Description of Artificial Sequence: Synthetic oligonucleotide
acuggaggaauaacaguug

SEQ ID NO: 935409 - RNA, 19 nt, Artificial Sequence
  Description of Artificial Sequence: Synthetic oligonucleotide
gaaggaggaauuauggaau

SEQ ID NO: 935410 - RNA, 19 nt, Artificial Sequence
  Description of Artificial Sequence: Synthetic oligonucleotide
gauuguggugugcugcaaa

SEQ ID NO: 935411 - RNA, 19 nt, Artificial Sequence
  Description of Artificial Sequence: Synthetic oligonucleotide
aauccguguguaguacgcu

SEQ ID NO: 935412 - RNA, 19 nt, Artificial Sequence
  Description of Artificial Sequence: Synthetic oligonucleotide
guuuucucaccacuuggaa

SEQ ID NO: 935413 - RNA, 19 nt, Artificial Sequence
  Description of Artificial Sequence: Synthetic oligonucleotide
gcguuuaugagagaaagaa

SEQ ID NO: 935414 - RNA, 19 nt, Artificial Sequence
  Description of Artificial Sequence: Synthetic oligonucleotide
gguccuacaccagucuugg

SEQ ID NO: 935415 - RNA, 19 nt, Artificial Sequence
  Description of Artificial Sequence: Synthetic oligonucleotide
uguuacauuccgugucuuu

SEQ ID NO: 935416 - RNA, 19 nt, Artificial Sequence
  Description of Artificial Sequence: Synthetic oligonucleotide
uaucacguuguuucauauu

SEQ ID NO: 935417 - RNA, 19 nt, Artificial Sequence
  Description of Artificial Sequence: Synthetic oligonucleotide
ggaucaccaaaugaauacc

SEQ ID NO: 935418 - RNA, 19 nt, Artificial Sequence
  Description of Artificial Sequence: Synthetic oligonucleotide
gcaauagaggcagaacacc

SEQ ID NO: 935419 - RNA, 19 nt, Artificial Sequence
  Description of Artificial Sequence: Synthetic oligonucleotide
uuauauucaguggcacaau

SEQ ID NO: 935420 - RNA, 19 nt, Artificial Sequence
  Description of Artificial Sequence: Synthetic oligonucleotide
cucuucguguuuacuaaga

SEQ ID NO: 935421 - RNA, 19 nt, Artificial Sequence
  Description of Artificial Sequence: Synthetic oligonucleotide
cuugguacuauguuuguuu

SEQ ID NO: 935422 - RNA, 19 nt, Artificial Sequence
  Description of Artificial Sequence: Synthetic oligonucleotide
aguuuauguguuacauugu

SEQ ID NO: 935423 - RNA, 19 nt, Artificial Sequence
  Description of Artificial Sequence: Synthetic oligonucleotide
gaauaauuucccuguggau

SEQ ID NO: 935424 - RNA, 19 nt, Artificial Sequence
  Description of Artificial Sequence: Synthetic oligonucleotide
guaguacgcuucugaaaac

SEQ ID NO: 935425 - RNA, 19 nt, Artificial Sequence
  Description of Artificial Sequence: Synthetic oligonucleotide
agacuugcuugacuccacu

SEQ ID NO: 935426 - RNA, 19 nt, Artificial Sequence
  Description of Artificial Sequence: Synthetic oligonucleotide
acacugauuucauggcgaa

SEQ ID NO: 935427 - RNA, 19 nt, Artificial Sequence
  Description of Artificial Sequence: Synthetic oligonucleotide
guaguugaacagaagagau

SEQ ID NO: 935428 - RNA, 19 nt, Artificial Sequence
  Description of Artificial Sequence: Synthetic oligonucleotide
gaaaguguacuugauucau

SEQ ID NO: 935429 - RNA, 19 nt, Artificial Sequence
  Description of Artificial Sequence: Synthetic oligonucleotide
aucuuugcacccguucuca

SEQ ID NO: 935430 - RNA, 19 nt, Artificial Sequence
  Description of Artificial Sequence: Synthetic oligonucleotide
uggcgaaccucuccuaauu

SEQ ID NO: 935431 - RNA, 19 nt, Artificial Sequence
  Description of Artificial Sequence: Synthetic oligonucleotide
cuggaucaccaaaugaaua

SEQ ID NO: 935432 - RNA, 19 nt, Artificial Sequence
  Description of Artificial Sequence: Synthetic oligonucleotide
aguguacuugauucaugua

SEQ ID NO: 935433 - RNA, 19 nt, Artificial Sequence
  Description of Artificial Sequence: Synthetic oligonucleotide
acaagaguaucacguuguu

SEQ ID NO: 935434 - RNA, 19 nt, Artificial Sequence
  Description of Artificial Sequence: Synthetic oligonucleotide
uuguuacuacacaguuuau

SEQ ID NO: 935435 - RNA, 19 nt, Artificial Sequence
  Description of Artificial Sequence: Synthetic oligonucleotide
auacugguuugagggcugg

SEQ ID NO: 935436 - RNA, 19 nt, Artificial Sequence
  Description of Artificial Sequence: Synthetic oligonucleotide
uucugagacucugggagua

SEQ ID NO: 935437 - RNA, 19 nt, Artificial Sequence
  Description of Artificial Sequence: Synthetic oligonucleotide
guguaguacgcuucugaaa

SEQ ID NO: 935438 - RNA, 19 nt, Artificial Sequence
  Description of Artificial Sequence: Synthetic oligonucleotide
guacgcuucugaaaacuuc

SEQ ID NO: 935439 - RNA, 19 nt, Artificial Sequence
  Description of Artificial Sequence: Synthetic oligonucleotide
aaguucugguaaagacuug

SEQ ID NO: 935440 - RNA, 19 nt, Artificial Sequence
  Description of Artificial Sequence: Synthetic oligonucleotide
gauaaagaauccaucccuu

SEQ ID NO: 935441 - RNA, 19 nt, Artificial Sequence
  Description of Artificial Sequence: Synthetic oligonucleotide
uuccuuuccucagcucuug

SEQ ID NO: 935442 - RNA, 19 nt, Artificial Sequence
  Description of Artificial Sequence: Synthetic oligonucleotide
caaugcccggcucuaaaga

SEQ ID NO: 935443 - RNA, 19 nt, Artificial Sequence
  Description of Artificial Sequence: Synthetic oligonucleotide
caauuguuacuacacaguu

SEQ ID NO: 935444 - RNA, 19 nt, Artificial Sequence
  Description of Artificial Sequence: Synthetic oligonucleotide
gaugcacuaugaaguucug

SEQ ID NO: 935445 - RNA, 19 nt, Artificial Sequence
  Description of Artificial Sequence: Synthetic oligonucleotide
cacaagugauuuuagguuu

SEQ ID NO: 935446 - RNA, 19 nt, Artificial Sequence
  Description of Artificial Sequence: Synthetic oligonucleotide
auccguguguaguacgcuu

SEQ ID NO: 935447 - RNA, 19 nt, Artificial Sequence
  Description of Artificial Sequence: Synthetic oligonucleotide
gaggccgaauagaguagcc

SEQ ID NO: 935448 - RNA, 19 nt, Artificial Sequence
  Description of Artificial Sequence: Synthetic oligonucleotide
gggaguauucacaggaaga

SEQ ID NO: 935449 - RNA, 19 nt, Artificial Sequence
  Description of Artificial Sequence: Synthetic oligonucleotide
acuacacaguuuauguguu

SEQ ID NO: 935450 - RNA, 19 nt, Artificial Sequence
  Description of Artificial Sequence: Synthetic oligonucleotide
gcuacauuguacugcaacu

SEQ ID NO: 935451 - RNA, 19 nt, Artificial Sequence
  Description of Artificial Sequence: Synthetic oligonucleotide
augcccggcucuaaagauc

SEQ ID NO: 935452 - RNA, 19 nt, Artificial Sequence
  Description of Artificial Sequence: Synthetic oligonucleotide
uggaggcuguacugauuca

SEQ ID NO: 935453 - RNA, 19 nt, Artificial Sequence
  Description of Artificial Sequence: Synthetic oligonucleotide
accaaugcccggcucuaaa

SEQ ID NO: 935454 - RNA, 19 nt, Artificial Sequence
  Description of Artificial Sequence: Synthetic oligonucleotide
cauguuacauuccgugucu

SEQ ID NO: 935455 - RNA, 19 nt, Artificial Sequence
  Description of Artificial Sequence: Synthetic oligonucleotide
auggcgaaccucuccuaau

SEQ ID NO: 935456 - RNA, 19 nt, Artificial Sequence
  Description of Artificial Sequence: Synthetic oligonucleotide
augcaaauacaaaguuccu

SEQ ID NO: 935457 - RNA, 19 nt, Artificial Sequence
  Description of Artificial Sequence: Synthetic oligonucleotide
guacugcaacuccuauuac

SEQ ID NO: 935458 - RNA, 19 nt, Artificial Sequence
  Description of Artificial Sequence: Synthetic oligonucleotide
guauucacaggaagacaga

SEQ ID NO: 935459 - RNA, 19 nt, Artificial Sequence
  Description of Artificial Sequence: Synthetic oligonucleotide
accuguaaucaggacccug

SEQ ID NO: 935460 - RNA, 19 nt, Artificial Sequence
  Description of Artificial Sequence: Synthetic oligonucleotide
gccgaauagaguagccagg

SEQ ID NO: 935461 - RNA, 19 nt, Artificial Sequence
  Description of Artificial Sequence: Synthetic oligonucleotide
gcgugcuccaccaaugccc

SEQ ID NO: 935462 - RNA, 19 nt, Artificial Sequence
  Description of Artificial Sequence: Synthetic oligonucleotide
guggcacaauucuggcagc

SEQ ID NO: 935463 - RNA, 19 nt, Artificial Sequence
  Description of Artificial Sequence: Synthetic oligonucleotide
agugcguuuaugagagaaa

SEQ ID NO: 935464 - RNA, 19 nt, Artificial Sequence
  Description of Artificial Sequence: Synthetic oligonucleotide
cuugacuccacuggaggaa

SEQ ID NO: 935465 - RNA, 19 nt, Artificial Sequence
  Description of Artificial Sequence: Synthetic oligonucleotide
gacuaacgaacuagcugga

SEQ ID NO: 935466 - RNA, 19 nt, Artificial Sequence
  Description of Artificial Sequence: Synthetic oligonucleotide
acaagugauuuuagguuua

SEQ ID NO: 935467 - RNA, 19 nt, Artificial Sequence
  Description of Artificial Sequence: Synthetic oligonucleotide
aguacgcuucugaaaacuu

SEQ ID NO: 935468 - RNA, 19 nt, Artificial Sequence
  Description of Artificial Sequence: Synthetic oligonucleotide
cuguguccccuucaucauc

SEQ ID NO: 935469 - RNA, 19 nt, Artificial Sequence
  Description of Artificial Sequence: Synthetic oligonucleotide
gguuuucucaccacuugga

SEQ ID NO: 935470 - RNA, 19 nt, Artificial Sequence
  Description of Artificial Sequence: Synthetic oligonucleotide
ggucuuacuucuugauaga

SEQ ID NO: 935471 - RNA, 19 nt, Artificial Sequence
  Description of Artificial Sequence: Synthetic oligonucleotide
ggaccuggugguuuucuca

SEQ ID NO: 935472 - RNA, 19 nt, Artificial Sequence
  Description of Artificial Sequence: Synthetic oligonucleotide
guaucacguuguuucauau

SEQ ID NO: 935473 - RNA, 19 nt, Artificial Sequence
  Description of Artificial Sequence: Synthetic oligonucleotide
ucauggcgaaccucuccua

SEQ ID NO: 935474 - RNA, 19 nt, Artificial Sequence
  Description of Artificial Sequence: Synthetic oligonucleotide
acuaacgaacuagcuggau

SEQ ID NO: 935475 - RNA, 19 nt, Artificial Sequence
  Description of Artificial Sequence: Synthetic oligonucleotide
ggaagaauccguguguagu

SEQ ID NO: 935476 - RNA, 19 nt, Artificial Sequence
  Description of Artificial Sequence: Synthetic oligonucleotide
ccucuccuaauuuauuaca

SEQ ID NO: 935477 - RNA, 19 nt, Artificial Sequence
  Description of Artificial Sequence: Synthetic oligonucleotide
cauggcgaaccucuccuaa

SEQ ID NO: 935478 - RNA, 19 nt, Artificial Sequence
  Description of Artificial Sequence: Synthetic oligonucleotide
caauauucggggccaugaa

SEQ ID NO: 935479 - RNA, 19 nt, Artificial Sequence
  Description of Artificial Sequence: Synthetic oligonucleotide
ggaggccgaauagaguagc

SEQ ID NO: 935480 - RNA, 19 nt, Artificial Sequence
  Description of Artificial Sequence: Synthetic oligonucleotide
cacaguuuauguguuacau

SEQ ID NO: 935481 - RNA, 19 nt, Artificial Sequence
  Description of Artificial Sequence: Synthetic oligonucleotide
acguuguuucauauucaau

SEQ ID NO: 935482 - RNA, 19 nt, Artificial Sequence
  Description of Artificial Sequence: Synthetic oligonucleotide
gagggcuggaaauucuguu

SEQ ID NO: 935483 - RNA, 19 nt, Artificial Sequence
  Description of Artificial Sequence: Synthetic oligonucleotide
cacugauuucauggcgaac

SEQ ID NO: 935484 - RNA, 19 nt, Artificial Sequence
  Description of Artificial Sequence: Synthetic oligonucleotide
ccauucaguaaaauuggua

SEQ ID NO: 935485 - RNA, 19 nt, Artificial Sequence
  Description of Artificial Sequence: Synthetic oligonucleotide
gucugcaauagaggcagaa

SEQ ID NO: 935486 - RNA, 19 nt, Artificial Sequence
  Description of Artificial Sequence: Synthetic oligonucleotide
cucacagcaguucauuauu

SEQ ID NO: 935487 - RNA, 19 nt, Artificial Sequence
  Description of Artificial Sequence: Synthetic oligonucleotide
ggcgugcuccaccaaugcc

SEQ ID NO: 935488 - RNA, 19 nt, Artificial Sequence
  Description of Artificial Sequence: Synthetic oligonucleotide
gcaauuguuacuacacagu

SEQ ID NO: 935489 - RNA, 19 nt, Artificial Sequence
  Description of Artificial Sequence: Synthetic oligonucleotide
guguuacauuguuaacacu

SEQ ID NO: 935490 - RNA, 19 nt, Artificial Sequence
  Description of Artificial Sequence: Synthetic oligonucleotide
guacuugauucauguaauu

SEQ ID NO: 935491 - RNA, 19 nt, Artificial Sequence
  Description of Artificial Sequence: Synthetic oligonucleotide
cucuaaagaucaugccagu

SEQ ID NO: 935492 - RNA, 19 nt, Artificial Sequence
  Description of Artificial Sequence: Synthetic oligonucleotide
uugcacccguucucauuuc

SEQ ID NO: 935493 - RNA, 19 nt, Artificial Sequence
  Description of Artificial Sequence: Synthetic oligonucleotide
cacuuggaagaauccgugu

SEQ ID NO: 935494 - RNA, 19 nt, Artificial Sequence
  Description of Artificial Sequence: Synthetic oligonucleotide
guucugguaaagacuugcu

SEQ ID NO: 935495 - RNA, 19 nt, Artificial Sequence
  Description of Artificial Sequence: Synthetic oligonucleotide
auguuacauuccgugucuu

SEQ ID NO: 935496 - RNA, 19 nt, Artificial Sequence
  Description of Artificial Sequence: Synthetic oligonucleotide
gaguaucacguuguuucau

SEQ ID NO: 935497 - RNA, 19 nt, Artificial Sequence
  Description of Artificial Sequence: Synthetic oligonucleotide
ccgaauagaguagccagga

SEQ ID NO: 935498 - RNA, 19 nt, Artificial Sequence
  Description of Artificial Sequence: Synthetic oligonucleotide
caacuccuauuaccucuga

SEQ ID NO: 935499 - RNA, 19 nt, Artificial Sequence
  Description of Artificial Sequence: Synthetic oligonucleotide
gcagaacaccgagucuuug

SEQ ID NO: 935500 - RNA, 19 nt, Artificial Sequence
  Description of Artificial Sequence: Synthetic oligonucleotide
gcucacagcaguucauuau

SEQ ID NO: 935501 - RNA, 19 nt, Artificial Sequence
  Description of Artificial Sequence: Synthetic oligonucleotide
gagucuuuggaggccgaau

SEQ ID NO: 935502 - RNA, 19 nt, Artificial Sequence
  Description of Artificial Sequence: Synthetic oligonucleotide
gaaccucuccuaauuuauu

SEQ ID NO: 935503 - RNA, 19 nt, Artificial Sequence
  Description of Artificial Sequence: Synthetic oligonucleotide
ucggggccaugaaccuggu

SEQ ID NO: 935504 - RNA, 19 nt, Artificial Sequence
  Description of Artificial Sequence: Synthetic oligonucleotide
cccggcucuaaagaucaug

SEQ ID NO: 935505 - RNA, 19 nt, Artificial Sequence
  Description of Artificial Sequence: Synthetic oligonucleotide
caagaguaucacguuguuu

SEQ ID NO: 935506 - RNA, 19 nt, Artificial Sequence
  Description of Artificial Sequence: Synthetic oligonucleotide
ggccaugaaccuggugaug

SEQ ID NO: 935507 - RNA, 19 nt, Artificial Sequence
  Description of Artificial Sequence: Synthetic oligonucleotide
acccuguguccaguguuuu

SEQ ID NO: 935508 - RNA, 19 nt, Artificial Sequence
  Description of Artificial Sequence: Synthetic oligonucleotide
agucugcaauagaggcaga

SEQ ID NO: 935509 - RNA, 19 nt, Artificial Sequence
  Description of Artificial Sequence: Synthetic oligonucleotide
gacccuguguccaguguuu

SEQ ID NO: 935510 - RNA, 19 nt, Artificial Sequence
  Description of Artificial Sequence: Synthetic oligonucleotide
ccccaaagagucugcaaua

SEQ ID NO: 935511 - RNA, 19 nt, Artificial Sequence
  Description of Artificial Sequence: Synthetic oligonucleotide
ggcgaaccucuccuaauuu

SEQ ID NO: 935512 - RNA, 19 nt, Artificial Sequence
  Description of Artificial Sequence: Synthetic oligonucleotide
cgaaccucuccuaauuuau

SEQ ID NO: 935513 - RNA, 19 nt, Artificial Sequence
  Description of Artificial Sequence: Synthetic oligonucleotide
gaccuguaaucaggacccu

SEQ ID NO: 935514 - RNA, 19 nt, Artificial Sequence
  Description of Artificial Sequence: Synthetic oligonucleotide
ggauuguggugugcugcaa

SEQ ID NO: 935515 - RNA, 19 nt, Artificial Sequence
  Description of Artificial Sequence: Synthetic oligonucleotide
cuguagcuucacugguuuu

SEQ ID NO: 935516 - RNA, 19 nt, Artificial Sequence
  Description of Artificial Sequence: Synthetic oligonucleotide
gucuuucgagugcguuuau

SEQ ID NO: 935517 - RNA, 19 nt, Artificial Sequence
  Description of Artificial Sequence: Synthetic oligonucleotide
cguguguaguacgcuucug

SEQ ID NO: 935518 - RNA, 19 nt, Artificial Sequence
  Description of Artificial Sequence: Synthetic oligonucleotide
cagugcagaucuguagcuu

SEQ ID NO: 935519 - RNA, 19 nt, Artificial Sequence
  Description of Artificial Sequence: Synthetic oligonucleotide
gggcauguacuugccacau

SEQ ID NO: 935520 - RNA, 19 nt, Artificial Sequence
  Description of Artificial Sequence: Synthetic oligonucleotide
ccguguguaguacgcuucu

SEQ ID NO: 935521 - RNA, 19 nt, Artificial Sequence
  Description of Artificial Sequence: Synthetic oligonucleotide
ccgagucuuuggaggccga

SEQ ID NO: 935522 - RNA, 19 nt, Artificial Sequence
  Description of Artificial Sequence: Synthetic oligonucleotide
cgagugcguuuaugagaga

SEQ ID NO: 935523 - RNA, 19 nt, Artificial Sequence
  Description of Artificial Sequence: Synthetic oligonucleotide
gccaaucuuugcacccguu

SEQ ID NO: 935524 - RNA, 19 nt, Artificial Sequence
  Description of Artificial Sequence: Synthetic oligonucleotide
cgagucuuuggaggccgaa

SEQ ID NO: 935525 - RNA, 19 nt, Artificial Sequence
  Description of Artificial Sequence: Synthetic oligonucleotide
cgugucuuucgagugcguu

SEQ ID NO: 935526 - RNA, 19 nt, Artificial Sequence
  Description of Artificial Sequence: Synthetic oligonucleotide
ccgugucuuucgagugcgu

SEQ ID NO: 935527 - RNA, 19 nt, Artificial Sequence
  Description of Artificial Sequence: Synthetic oligonucleotide
gcccggcucuaaagaucau

SEQ ID NO: 935528 - RNA, 19 nt, Artificial Sequence
  Description of Artificial Sequence: Synthetic oligonucleotide
gguaaauuuauucagaagg

SEQ ID NO: 935529 - RNA, 19 nt, Artificial Sequence
  Description of Artificial Sequence: Synthetic oligonucleotide
uaaaaguucgcccacgucc

SEQ ID NO: 935530 - RNA, 19 nt, Artificial Sequence
  Description of Artificial Sequence: Synthetic oligonucleotide
aagcacaucgaucccaucc

SEQ ID NO: 935531 - RNA, 19 nt, Artificial Sequence
  Description of Artificial Sequence: Synthetic oligonucleotide
auuaucaugucccagcaag

SEQ ID NO: 935532 - RNA, 19 nt, Artificial Sequence
  Description of Artificial Sequence: Synthetic oligonucleotide
aucgaugagaacuucugcc

SEQ ID NO: 935533 - RNA, 19 nt, Artificial Sequence
  Description of Artificial Sequence: Synthetic oligonucleotide
uuaaacacggauaacugcu

SEQ ID NO: 935534 - RNA, 19 nt, Artificial Sequence
  Description of Artificial Sequence: Synthetic oligonucleotide
gauuccaugaacuucucug

SEQ ID NO: 935535 - RNA, 19 nt, Artificial Sequence
  Description of Artificial Sequence: Synthetic oligonucleotide
uguauuaucaugucccagc

SEQ ID NO: 935536 - RNA, 19 nt, Artificial Sequence
  Description of Artificial Sequence: Synthetic oligonucleotide
aagagugggaagauggucc

SEQ ID NO: 935537 - RNA, 19 nt, Artificial Sequence
  Description of Artificial Sequence: Synthetic oligonucleotide
ucaaccacggcuauggaca

SEQ ID NO: 935538 - RNA, 19 nt, Artificial Sequence
  Description of Artificial Sequence: Synthetic oligonucleotide
auaaagagugggaagaugg

SEQ ID NO: 935539 - RNA, 19 nt, Artificial Sequence
  Description of Artificial Sequence: Synthetic oligonucleotide
aaugguuucgagcagggau

SEQ ID NO: 935540 - RNA, 19 nt, Artificial Sequence
  Description of Artificial Sequence: Synthetic oligonucleotide
caugauauagcagaugugc

SEQ ID NO: 935541 - RNA, 19 nt, Artificial Sequence
  Description of Artificial Sequence: Synthetic oligonucleotide
aauuuauucagaaggcgag

SEQ ID NO: 935542 - RNA, 19 nt, Artificial Sequence
  Description of Artificial Sequence: Synthetic oligonucleotide
auucucgguaaauuuauuc

SEQ ID NO: 935543 - RNA, 19 nt, Artificial Sequence
  Description of Artificial Sequence: Synthetic oligonucleotide
ucugcguacuccuugauga

SEQ ID NO: 935544 - RNA, 19 nt, Artificial Sequence
  Description of Artificial Sequence: Synthetic oligonucleotide
aaauuuauucagaaggcga

SEQ ID NO: 935545 - RNA, 19 nt, Artificial Sequence
  Description of Artificial Sequence: Synthetic oligonucleotide
uguuauguacgccaucggc

SEQ ID NO: 935546 - RNA, 19 nt, Artificial Sequence
  Description of Artificial Sequence: Synthetic oligonucleotide
ucucgguaaauuuauucag

SEQ ID NO: 935547 - RNA, 19 nt, Artificial Sequence
  Description of Artificial Sequence: Synthetic oligonucleotide
uaagguguuauguacgcca

SEQ ID NO: 935548 - RNA, 19 nt, Artificial Sequence
  Description of Artificial Sequence: Synthetic oligonucleotide
uucucgguaaauuuauuca

SEQ ID NO: 935549 - RNA, 19 nt, Artificial Sequence
  Description of Artificial Sequence: Synthetic oligonucleotide
aaacuugugacaguugucu

SEQ ID NO: 935550 - RNA, 19 nt, Artificial Sequence
  Description of Artificial Sequence: Synthetic oligonucleotide
guagcuuaaaaguucgccc

SEQ ID NO: 935551 - RNA, 19 nt, Artificial Sequence
  Description of Artificial Sequence: Synthetic oligonucleotide
aucaagcaggagcagagcg

SEQ ID NO: 935552 - RNA, 19 nt, Artificial Sequence
  Description of Artificial Sequence: Synthetic oligonucleotide
ucacgauuggagcugagca

SEQ ID NO: 935553 - RNA, 19 nt, Artificial Sequence
  Description of Artificial Sequence: Synthetic oligonucleotide
uccacgucgcacuaugucg

SEQ ID NO: 935554 - RNA, 19 nt, Artificial Sequence
  Description of Artificial Sequence: Synthetic oligonucleotide
cacggauucauccaggcgc

SEQ ID NO: 935555 - RNA, 19 nt, Artificial Sequence
  Description of Artificial Sequence: Synthetic oligonucleotide
gaccaguuugcuuucgacg

SEQ ID NO: 935556 - RNA, 19 nt, Artificial Sequence
  Description of Artificial Sequence: Synthetic oligonucleotide
ugucuuuuaaacacggaua

SEQ ID NO: 935557 - RNA, 19 nt, Artificial Sequence
  Description of Artificial Sequence: Synthetic oligonucleotide
ugucuaugaucucuccacg

SEQ ID NO: 935558 - RNA, 19 nt, Artificial Sequence
  Description of Artificial Sequence: Synthetic oligonucleotide
uuguucaagccacacaagu

SEQ ID NO: 935559 - RNA, 19 nt, Artificial Sequence
  Description of Artificial Sequence: Synthetic oligonucleotide
agaucaaccacggcuaugg

SEQ ID NO: 935560 - RNA, 19 nt, Artificial Sequence
  Description of Artificial Sequence: Synthetic oligonucleotide
ugggcugguagcuuaaaag

SEQ ID NO: 935561 - RNA, 19 nt, Artificial Sequence
  Description of Artificial Sequence: Synthetic oligonucleotide
ucggauuccaugaacuucu

SEQ ID NO: 935562 - RNA, 19 nt, Artificial Sequence
  Description of Artificial Sequence: Synthetic oligonucleotide
aaggcgaguccgcugcugc

SEQ ID NO: 935563 - RNA, 19 nt, Artificial Sequence
  Description of Artificial Sequence: Synthetic oligonucleotide
ucucucggaacucagggcu

SEQ ID NO: 935564 - RNA, 19 nt, Artificial Sequence
  Description of Artificial Sequence: Synthetic oligonucleotide
ucugucaaccuucucgcug

SEQ ID NO: 935565 - RNA, 19 nt, Artificial Sequence
  Description of Artificial Sequence: Synthetic oligonucleotide
ucgaugagaacuucugccc

SEQ ID NO: 935566 - RNA, 19 nt, Artificial Sequence
  Description of Artificial Sequence: Synthetic oligonucleotide
cuaugaucucuccacgucg

SEQ ID NO: 935567 - RNA, 19 nt, Artificial Sequence
  Description of Artificial Sequence: Synthetic oligonucleotide
ucucugucaauaaucugca

SEQ ID NO: 935568 - RNA, 19 nt, Artificial Sequence
  Description of Artificial Sequence: Synthetic oligonucleotide
cugguagcuuaaaaguucg

SEQ ID NO: 935569 - RNA, 19 nt, Artificial Sequence
  Description of Artificial Sequence: Synthetic oligonucleotide
uagcuuaaaaguucgccca

SEQ ID NO: 935570 - RNA, 19 nt, Artificial Sequence
  Description of Artificial Sequence: Synthetic oligonucleotide
uauuuguucaagccacaca

SEQ ID NO: 935571 - RNA, 19 nt, Artificial Sequence
  Description of Artificial Sequence: Synthetic oligonucleotide
ucgacgagucuucaguucc

SEQ ID NO: 935572 - RNA, 19 nt, Artificial Sequence
  Description of Artificial Sequence: Synthetic oligonucleotide
uguaggaccgcuuuucaaa

SEQ ID NO: 935573 - RNA, 19 nt, Artificial Sequence
  Description of Artificial Sequence: Synthetic oligonucleotide
cuuucuugaucuuccgggg

SEQ ID NO: 935574 - RNA, 19 nt, Artificial Sequence
  Description of Artificial Sequence: Synthetic oligonucleotide
uuauguacgccaucggccu

SEQ ID NO: 935575 - RNA, 19 nt, Artificial Sequence
  Description of Artificial Sequence: Synthetic oligonucleotide
acguccaugguuccagacc

SEQ ID NO: 935576 - RNA, 19 nt, Artificial Sequence
  Description of Artificial Sequence: Synthetic oligonucleotide
cugaagcagaucaaccacg

SEQ ID NO: 935577 - RNA, 19 nt, Artificial Sequence
  Description of Artificial Sequence: Synthetic oligonucleotide
accaguuugcuuucgacga

SEQ ID NO: 935578 - RNA, 19 nt, Artificial Sequence
  Description of Artificial Sequence: Synthetic oligonucleotide
ucauucucgguaaauuuau

SEQ ID NO: 935579 - RNA, 19 nt, Artificial Sequence
  Description of Artificial Sequence: Synthetic oligonucleotide
cugucaauaaucugcaaca

SEQ ID NO: 935580 - RNA, 19 nt, Artificial Sequence
  Description of Artificial Sequence: Synthetic oligonucleotide
guuauguacgccaucggcc

SEQ ID NO: 935581 - RNA, 19 nt, Artificial Sequence
  Description of Artificial Sequence: Synthetic oligonucleotide
gagcaugagguucaugagc

SEQ ID NO: 935582 - RNA, 19 nt, Artificial Sequence
  Description of Artificial Sequence: Synthetic oligonucleotide
ucgguaaauuuauucagaa

SEQ ID NO: 935583 - RNA, 19 nt, Artificial Sequence
  Description of Artificial Sequence: Synthetic oligonucleotide
uuugcuuucgacgagucuu

SEQ ID NO: 935584 - RNA, 19 nt, Artificial Sequence
  Description of Artificial Sequence: Synthetic oligonucleotide
ucuaugaucucuccacguc

SEQ ID NO: 935585 - RNA, 19 nt, Artificial Sequence
  Description of Artificial Sequence: Synthetic oligonucleotide
uaaacacggauaacugcug

SEQ ID NO: 935586 - RNA, 19 nt, Artificial Sequence
  Description of Artificial Sequence: Synthetic oligonucleotide
agcuuaaaaguucgcccac

SEQ ID NO: 935587 - RNA, 19 nt, Artificial Sequence
  Description of Artificial Sequence: Synthetic oligonucleotide
aacuugugacaguugucug

SEQ ID NO: 935588 - RNA, 19 nt, Artificial Sequence
  Description of Artificial Sequence: Synthetic oligonucleotide
uugucggccaccugcauug

SEQ ID NO: 935589 - RNA, 19 nt, Artificial Sequence
  Description of Artificial Sequence: Synthetic oligonucleotide
uucccucacggauucaucc

SEQ ID NO: 935590 - RNA, 19 nt, Artificial Sequence
  Description of Artificial Sequence: Synthetic oligonucleotide
agagugggaagaugguccg

SEQ ID NO: 935591 - RNA, 19 nt, Artificial Sequence
  Description of Artificial Sequence: Synthetic oligonucleotide
aacgugaggaucaucuucu

SEQ ID NO: 935592 - RNA, 19 nt, Artificial Sequence
  Description of Artificial Sequence: Synthetic oligonucleotide
ugucgggaaacuugauccg

SEQ ID NO: 935593 - RNA, 19 nt, Artificial Sequence
  Description of Artificial Sequence: Synthetic oligonucleotide
uucaggaucuggugaaccc

SEQ ID NO: 935594 - RNA, 19 nt, Artificial Sequence
  Description of Artificial Sequence: Synthetic oligonucleotide
ugucaauaaucugcaacag

SEQ ID NO: 935595 - RNA, 19 nt, Artificial Sequence
  Description of Artificial Sequence: Synthetic oligonucleotide
uaugucguguuucuccccu

SEQ ID NO: 935596 - RNA, 19 nt, Artificial Sequence
  Description of Artificial Sequence: Synthetic oligonucleotide
gguguuauguacgccaucg

SEQ ID NO: 935597 - RNA, 19 nt, Artificial Sequence
  Description of Artificial Sequence: Synthetic oligonucleotide
uagcuaagguguuauguac

SEQ ID NO: 935598 - RNA, 19 nt, Artificial Sequence
  Description of Artificial Sequence: Synthetic oligonucleotide
uuuguaggaccgcuuuuca

SEQ ID NO: 935599 - RNA, 19 nt, Artificial Sequence
  Description of Artificial Sequence: Synthetic oligonucleotide
ucggccucuucccucacgg

SEQ ID NO: 935600 - RNA, 19 nt, Artificial Sequence
  Description of Artificial Sequence: Synthetic oligonucleotide
gcagaugugcuguagaaug

SEQ ID NO: 935601 - RNA, 19 nt, Artificial Sequence
  Description of Artificial Sequence: Synthetic oligonucleotide
uuuauucagaaggcgaguc

SEQ ID NO: 935602 - RNA, 19 nt, Artificial Sequence
  Description of Artificial Sequence: Synthetic oligonucleotide
aacacggauaacugcugca

SEQ ID NO: 935603 - RNA, 19 nt, Artificial Sequence
  Description of Artificial Sequence: Synthetic oligonucleotide
aucucagccaugauauagc

SEQ ID NO: 935604 - RNA, 19 nt, Artificial Sequence
  Description of Artificial Sequence: Synthetic oligonucleotide
aguacagcuuguuggcauc

SEQ ID NO: 935605 - RNA, 19 nt, Artificial Sequence
  Description of Artificial Sequence: Synthetic oligonucleotide
gagacuucauaaagagugg

SEQ ID NO: 935606 - RNA, 19 nt, Artificial Sequence
  Description of Artificial Sequence: Synthetic oligonucleotide
ucacggauucauccaggcg

SEQ ID NO: 935607 - RNA, 19 nt, Artificial Sequence
  Description of Artificial Sequence: Synthetic oligonucleotide
gggauugugucuuuuaaac

SEQ ID NO: 935608 - RNA, 19 nt, Artificial Sequence
  Description of Artificial Sequence: Synthetic oligonucleotide
ugcacccagauauuuaaaa

SEQ ID NO: 935609 - RNA, 19 nt, Artificial Sequence
  Description of Artificial Sequence: Synthetic oligonucleotide
ucuaggucguugucuauga

SEQ ID NO: 935610 - RNA, 19 nt, Artificial Sequence
  Description of Artificial Sequence: Synthetic oligonucleotide
agacuucauaaagaguggg

SEQ ID NO: 935611 - RNA, 19 nt, Artificial Sequence
  Description of Artificial Sequence: Synthetic oligonucleotide
auagcuaagguguuaugua

SEQ ID NO: 935612 - RNA, 19 nt, Artificial Sequence
  Description of Artificial Sequence: Synthetic oligonucleotide
uuucuugaucuuccgggga

SEQ ID NO: 935613 - RNA, 19 nt, Artificial Sequence
  Description of Artificial Sequence: Synthetic oligonucleotide
aaaaguucgcccacgucca

SEQ ID NO: 935614 - RNA, 19 nt, Artificial Sequence
  Description of Artificial Sequence: Synthetic oligonucleotide
gagcgcgucaaacagguuc

SEQ ID NO: 935615 - RNA, 19 nt, Artificial Sequence
  Description of Artificial Sequence: Synthetic oligonucleotide
acgauuggagcugagcauc

SEQ ID NO: 935616 - RNA, 19 nt, Artificial Sequence
  Description of Artificial Sequence: Synthetic oligonucleotide
caggaucgaacagacaugc

SEQ ID NO: 935617 - RNA, 19 nt, Artificial Sequence
  Description of Artificial Sequence: Synthetic oligonucleotide
ggggagacuucauaaagag

SEQ ID NO: 935618 - RNA, 19 nt, Artificial Sequence
  Description of Artificial Sequence: Synthetic oligonucleotide
caagcaggagcagagcgcg

SEQ ID NO: 935619 - RNA, 19 nt, Artificial Sequence
  Description of Artificial Sequence: Synthetic oligonucleotide
acucacucccgauccacgg

SEQ ID NO: 935620 - RNA, 19 nt, Artificial Sequence
  Description of Artificial Sequence: Synthetic oligonucleotide
ucauggagggugucuaugu

SEQ ID NO: 935621 - RNA, 19 nt, Artificial Sequence
  Description of Artificial Sequence: Synthetic oligonucleotide
aaggugguacaggucuggc

SEQ ID NO: 935622 - RNA, 19 nt, Artificial Sequence
  Description of Artificial Sequence: Synthetic oligonucleotide
ucgauagcggccacgcucu

SEQ ID NO: 935623 - RNA, 19 nt, Artificial Sequence
  Description of Artificial Sequence: Synthetic oligonucleotide
uguacugggauugugucuu

SEQ ID NO: 935624 - RNA, 19 nt, Artificial Sequence
  Description of Artificial Sequence: Synthetic oligonucleotide
caugguggccaccacgugc

SEQ ID NO: 935625 - RNA, 19 nt, Artificial Sequence
  Description of Artificial Sequence: Synthetic oligonucleotide
auagcagaugugcuguaga

SEQ ID NO: 935626 - RNA, 19 nt, Artificial Sequence
  Description of Artificial Sequence: Synthetic oligonucleotide
agcuaagguguuauguacg

SEQ ID NO: 935627 - RNA, 19 nt, Artificial Sequence
  Description of Artificial Sequence: Synthetic oligonucleotide
uuauuuguucaagccacac

SEQ ID NO: 935628 - RNA, 19 nt, Artificial Sequence
  Description of Artificial Sequence: Synthetic oligonucleotide
gaagcgcucacgauuggag

SEQ ID NO: 935629 - RNA, 19 nt, Artificial Sequence
  Description of Artificial Sequence: Synthetic oligonucleotide
caucgaugagaacuucugc

SEQ ID NO: 935630 - RNA, 19 nt, Artificial Sequence
  Description of Artificial Sequence: Synthetic oligonucleotide
ucaacaaacuugugacagu

SEQ ID NO: 935631 - RNA, 19 nt, Artificial Sequence
  Description of Artificial Sequence: Synthetic oligonucleotide
uccauuagucugucaaccu

SEQ ID NO: 935632 - RNA, 19 nt, Artificial Sequence
  Description of Artificial Sequence: Synthetic oligonucleotide
ucuucaucaucccgggguc

SEQ ID NO: 935633 - RNA, 19 nt, Artificial Sequence
  Description of Artificial Sequence: Synthetic oligonucleotide
gaagaugguccguaagcca

SEQ ID NO: 935634 - RNA, 19 nt, Artificial Sequence
  Description of Artificial Sequence: Synthetic oligonucleotide
ggauaacugcugcagaagc

SEQ ID NO: 935635 - RNA, 19 nt, Artificial Sequence
  Description of Artificial Sequence: Synthetic oligonucleotide
guauuaucaugucccagca

SEQ ID NO: 935636 - RNA, 19 nt, Artificial Sequence
  Description of Artificial Sequence: Synthetic oligonucleotide
ugaucuuccggggagacuu

SEQ ID NO: 935637 - RNA, 19 nt, Artificial Sequence
  Description of Artificial Sequence: Synthetic oligonucleotide
cucucgaggaccaguuugc

SEQ ID NO: 935638 - RNA, 19 nt, Artificial Sequence
  Description of Artificial Sequence: Synthetic oligonucleotide
uaggaccgcuuuucaaacg

SEQ ID NO: 935639 - RNA, 19 nt, Artificial Sequence
  Description of Artificial Sequence: Synthetic oligonucleotide
augguuucgagcagggauc

SEQ ID NO: 935640 - RNA, 19 nt, Artificial Sequence
  Description of Artificial Sequence: Synthetic oligonucleotide
gagcugaaggcccucgccc

SEQ ID NO: 935641 - RNA, 19 nt, Artificial Sequence
  Description of Artificial Sequence: Synthetic oligonucleotide
gguagcuuaaaaguucgcc

SEQ ID NO: 935642 - RNA, 19 nt, Artificial Sequence
  Description of Artificial Sequence: Synthetic oligonucleotide
aggaccgcuuuucaaacgu

SEQ ID NO: 935643 - RNA, 19 nt, Artificial Sequence
  Description of Artificial Sequence: Synthetic oligonucleotide
gauauagcagaugugcugu

SEQ ID NO: 935644 - RNA, 19 nt, Artificial Sequence
  Description of Artificial Sequence: Synthetic oligonucleotide
acgugcaucuccugaauga

SEQ ID NO: 935645 - RNA, 19 nt, Artificial Sequence
  Description of Artificial Sequence: Synthetic oligonucleotide
aagaugguccguaagccaa

SEQ ID NO: 935646 - RNA, 19 nt, Artificial Sequence
  Description of Artificial Sequence: Synthetic oligonucleotide
cuaaaaggugguacagguc

SEQ ID NO: 935647 - RNA, 19 nt, Artificial Sequence
  Description of Artificial Sequence: Synthetic oligonucleotide
gguccguaagccaagaaug

SEQ ID NO: 935648 - RNA, 19 nt, Artificial Sequence
  Description of Artificial Sequence: Synthetic oligonucleotide
cucacggauucauccaggc

SEQ ID NO: 935649 - RNA, 19 nt, Artificial Sequence
  Description of Artificial Sequence: Synthetic oligonucleotide
cucgauagcggccacgcuc

SEQ ID NO: 935650 - RNA, 19 nt, Artificial Sequence
  Description of Artificial Sequence: Synthetic oligonucleotide
cuugugacaguugucugug

SEQ ID NO: 935651 - RNA, 19 nt, Artificial Sequence
  Description of Artificial Sequence: Synthetic oligonucleotide
ugggauugugucuuuuaaa

SEQ ID NO: 935652 - RNA, 19 nt, Artificial Sequence
  Description of Artificial Sequence: Synthetic oligonucleotide
guucaagccacacaagugu

SEQ ID NO: 935653 - RNA, 19 nt, Artificial Sequence
  Description of Artificial Sequence: Synthetic oligonucleotide
ggaucgaacagacaugcuc

SEQ ID NO: 935654 - RNA, 19 nt, Artificial Sequence
  Description of Artificial Sequence: Synthetic oligonucleotide
uauuaucaugucccagcaa

SEQ ID NO: 935655 - RNA, 19 nt, Artificial Sequence
  Description of Artificial Sequence: Synthetic oligonucleotide
guugucgggaaacuugauc

SEQ ID NO: 935656 - RNA, 19 nt, Artificial Sequence
  Description of Artificial Sequence: Synthetic oligonucleotide
uuaccuccacucacucccg

SEQ ID NO: 935657 - RNA, 19 nt, Artificial Sequence
  Description of Artificial Sequence: Synthetic oligonucleotide
guaggaccgcuuuucaaac

SEQ ID NO: 935658 - RNA, 19 nt, Artificial Sequence
  Description of Artificial Sequence: Synthetic oligonucleotide
cauaaagagugggaagaug

SEQ ID NO: 935659 - RNA, 19 nt, Artificial Sequence
  Description of Artificial Sequence: Synthetic oligonucleotide
acaauagcuaagguguuau

SEQ ID NO: 935660 - RNA, 19 nt, Artificial Sequence
  Description of Artificial Sequence: Synthetic oligonucleotide
gauaacugcugcagaagca

SEQ ID NO: 935661 - RNA, 19 nt, Artificial Sequence
  Description of Artificial Sequence: Synthetic oligonucleotide
agcgcucacgauuggagcu

SEQ ID NO: 935662 - RNA, 19 nt, Artificial Sequence
  Description of Artificial Sequence: Synthetic oligonucleotide
acacggauaacugcugcag

SEQ ID NO: 935663 - RNA, 19 nt, Artificial Sequence
  Description of Artificial Sequence: Synthetic oligonucleotide
acggauaacugcugcagaa

SEQ ID NO: 935664 - RNA, 19 nt, Artificial Sequence
  Description of Artificial Sequence: Synthetic oligonucleotide
cacaucuguauuaucaugu

SEQ ID NO: 935665 - RNA, 19 nt, Artificial Sequence
  Description of Artificial Sequence: Synthetic oligonucleotide
aaaaggugguacaggucug

SEQ ID NO: 935666 - RNA, 19 nt, Artificial Sequence
  Description of Artificial Sequence: Synthetic oligonucleotide
ucucuggacggaacucugc

SEQ ID NO: 935667 - RNA, 19 nt, Artificial Sequence
  Description of Artificial Sequence: Synthetic oligonucleotide
auuuauucagaaggcgagu

SEQ ID NO: 935668 - RNA, 19 nt, Artificial Sequence
  Description of Artificial Sequence: Synthetic oligonucleotide
auucagaaggcgaguccgc

SEQ ID NO: 935669 - RNA, 19 nt, Artificial Sequence
  Description of Artificial Sequence: Synthetic oligonucleotide
aacaagcccaggaugcgcu

SEQ ID NO: 935670 - RNA, 19 nt, Artificial Sequence
  Description of Artificial Sequence: Synthetic oligonucleotide
gcuaagguguuauguacgc

SEQ ID NO: 935671 - RNA, 19 nt, Artificial Sequence
  Description of Artificial Sequence: Synthetic oligonucleotide
uucauggagggugucuaug

SEQ ID NO: 935672 - RNA, 19 nt, Artificial Sequence
  Description of Artificial Sequence: Synthetic oligonucleotide
gugguucccacuuucuuga

SEQ ID NO: 935673 - RNA, 19 nt, Artificial Sequence
  Description of Artificial Sequence: Synthetic oligonucleotide
guguuauguacgccaucgg

SEQ ID NO: 935674 - RNA, 19 nt, Artificial Sequence
  Description of Artificial Sequence: Synthetic oligonucleotide
ugaugugccugacaaucuu

SEQ ID NO: 935675 - RNA, 19 nt, Artificial Sequence
  Description of Artificial Sequence: Synthetic oligonucleotide
ucggccaccugcauugcac

SEQ ID NO: 935676 - RNA, 19 nt, Artificial Sequence
  Description of Artificial Sequence: Synthetic oligonucleotide
uuucgacgagucuucaguu

SEQ ID NO: 935677 - RNA, 19 nt, Artificial Sequence
  Description of Artificial Sequence: Synthetic oligonucleotide
ggaagaugguccguaagcc

SEQ ID NO: 935678 - RNA, 19 nt, Artificial Sequence
  Description of Artificial Sequence: Synthetic oligonucleotide
augauauagcagaugugcu

SEQ ID NO: 935679 - RNA, 19 nt, Artificial Sequence
  Description of Artificial Sequence: Synthetic oligonucleotide
ugguagcuuaaaaguucgc

SEQ ID NO: 935680 - RNA, 19 nt, Artificial Sequence
  Description of Artificial Sequence: Synthetic oligonucleotide
gacuucauaaagaguggga

SEQ ID NO: 935681 - RNA, 19 nt, Artificial Sequence
  Description of Artificial Sequence: Synthetic oligonucleotide
uccucuaggucguugucua

SEQ ID NO: 935682 - RNA, 19 nt, Artificial Sequence
  Description of Artificial Sequence: Synthetic oligonucleotide
ucauaaagagugggaagau

SEQ ID NO: 935683 - RNA, 19 nt, Artificial Sequence
  Description of Artificial Sequence: Synthetic oligonucleotide
uugcuuucgacgagucuuc

SEQ ID NO: 935684 - RNA, 19 nt, Artificial Sequence
  Description of Artificial Sequence: Synthetic oligonucleotide
uucgacgagucuucaguuc

SEQ ID NO: 935685 - RNA, 19 nt, Artificial Sequence
  Description of Artificial Sequence: Synthetic oligonucleotide
cuaagguguuauguacgcc

SEQ ID NO: 935686 - RNA, 19 nt, Artificial Sequence
  Description of Artificial Sequence: Synthetic oligonucleotide
ucgggaaacuugauccgaa

SEQ ID NO: 935687 - RNA, 19 nt, Artificial Sequence
  Description of Artificial Sequence: Synthetic oligonucleotide
agguguuauguacgccauc

SEQ ID NO: 935688 - RNA, 19 nt, Artificial Sequence
  Description of Artificial Sequence: Synthetic oligonucleotide
ucauggcauggucuaggac

SEQ ID NO: 935689 - RNA, 19 nt, Artificial Sequence
  Description of Artificial Sequence: Synthetic oligonucleotide
acugcuccgggagaucuuc

SEQ ID NO: 935690 - RNA, 19 nt, Artificial Sequence
  Description of Artificial Sequence: Synthetic oligonucleotide
uuguaggaccgcuuuucaa

SEQ ID NO: 935691 - RNA, 19 nt, Artificial Sequence
  Description of Artificial Sequence: Synthetic oligonucleotide
gcuuguuggcaucgaaggg

SEQ ID NO: 935692 - RNA, 19 nt, Artificial Sequence
  Description of Artificial Sequence: Synthetic oligonucleotide
gauagcggccacgcucucg

SEQ ID NO: 935693 - RNA, 19 nt, Artificial Sequence
  Description of Artificial Sequence: Synthetic oligonucleotide
ucguguuucuccccuucaa

SEQ ID NO: 935694 - RNA, 19 nt, Artificial Sequence
  Description of Artificial Sequence: Synthetic oligonucleotide
agggugucuaugucuguca

SEQ ID NO: 935695 - RNA, 19 nt, Artificial Sequence
  Description of Artificial Sequence: Synthetic oligonucleotide
ugucguguuucuccccuuc

SEQ ID NO: 935696 - RNA, 19 nt, Artificial Sequence
  Description of Artificial Sequence: Synthetic oligonucleotide
cuaugucguguuucucccc

SEQ ID NO: 935697 - RNA, 19 nt, Artificial Sequence
  Description of Artificial Sequence: Synthetic oligonucleotide
uuccagacccaaucagcac

SEQ ID NO: 935698 - RNA, 19 nt, Artificial Sequence
  Description of Artificial Sequence: Synthetic oligonucleotide
cucacucccgauccacggg

SEQ ID NO: 935699 - RNA, 19 nt, Artificial Sequence
  Description of Artificial Sequence: Synthetic oligonucleotide
ucccucacggauucaucca

SEQ ID NO: 935700 - RNA, 19 nt, Artificial Sequence
  Description of Artificial Sequence: Synthetic oligonucleotide
cucgcugucauucucggua

SEQ ID NO: 935701 - RNA, 19 nt, Artificial Sequence
  Description of Artificial Sequence: Synthetic oligonucleotide
aguuugcuuucgacgaguc

SEQ ID NO: 935702 - RNA, 19 nt, Artificial Sequence
  Description of Artificial Sequence: Synthetic oligonucleotide
uccuccgcuguacugggau

SEQ ID NO: 935703 - RNA, 19 nt, Artificial Sequence
  Description of Artificial Sequence: Synthetic oligonucleotide
aggauaccaaaacuaucuu

SEQ ID NO: 935704 - RNA, 19 nt, Artificial Sequence
  Description of Artificial Sequence: Synthetic oligonucleotide
guacagcuuguuggcaucg

SEQ ID NO: 935705 - RNA, 19 nt, Artificial Sequence
  Description of Artificial Sequence: Synthetic oligonucleotide
cucggauuccaugaacuuc

SEQ ID NO: 935706 - RNA, 19 nt, Artificial Sequence
  Description of Artificial Sequence: Synthetic oligonucleotide
cucacgauuggagcugagc

SEQ ID NO: 935707 - RNA, 19 nt, Artificial Sequence
  Description of Artificial Sequence: Synthetic oligonucleotide
aaaugguuucgagcaggga

SEQ ID NO: 935708 - RNA, 19 nt, Artificial Sequence
  Description of Artificial Sequence: Synthetic oligonucleotide
gugucuaugucugucagcu

SEQ ID NO: 935709 - RNA, 19 nt, Artificial Sequence
  Description of Artificial Sequence: Synthetic oligonucleotide
agcucggauuccaugaacu

SEQ ID NO: 935710 - RNA, 19 nt, Artificial Sequence
  Description of Artificial Sequence: Synthetic oligonucleotide
gggacguuggcauugcaga

SEQ ID NO: 935711 - RNA, 19 nt, Artificial Sequence
  Description of Artificial Sequence: Synthetic oligonucleotide
cucuaggucguugucuaug

SEQ ID NO: 935712 - RNA, 19 nt, Artificial Sequence
  Description of Artificial Sequence: Synthetic oligonucleotide
cuuucgacgagucuucagu

SEQ ID NO: 935713 - RNA, 19 nt, Artificial Sequence
  Description of Artificial Sequence: Synthetic oligonucleotide
ucccagcaagccgagaagu

SEQ ID NO: 935714 - RNA, 19 nt, Artificial Sequence
  Description of Artificial Sequence: Synthetic oligonucleotide
cacagggugcccugguuac

SEQ ID NO: 935715 - RNA, 19 nt, Artificial Sequence
  Description of Artificial Sequence: Synthetic oligonucleotide
cauggucuaggaccuucag

SEQ ID NO: 935716 - RNA, 19 nt, Artificial Sequence
  Description of Artificial Sequence: Synthetic oligonucleotide
cucuccacgucgcacuaug

SEQ ID NO: 935717 - RNA, 19 nt, Artificial Sequence
  Description of Artificial Sequence: Synthetic oligonucleotide
acuuucauggagggugucu

SEQ ID NO: 935718 - RNA, 19 nt, Artificial Sequence
  Description of Artificial Sequence: Synthetic oligonucleotide
uccggggagacuucauaaa

SEQ ID NO: 935719 - RNA, 19 nt, Artificial Sequence
  Description of Artificial Sequence: Synthetic oligonucleotide
ucucggaacucagggcucc

SEQ ID NO: 935720 - RNA, 19 nt, Artificial Sequence
  Description of Artificial Sequence: Synthetic oligonucleotide
agcugaaggcccucgcccu

SEQ ID NO: 935721 - RNA, 19 nt, Artificial Sequence
  Description of Artificial Sequence: Synthetic oligonucleotide
uccguaagccaagaauguc

SEQ ID NO: 935722 - RNA, 19 nt, Artificial Sequence
  Description of Artificial Sequence: Synthetic oligonucleotide
gaugagaacuucugccccu

SEQ ID NO: 935723 - RNA, 19 nt, Artificial Sequence
  Description of Artificial Sequence: Synthetic oligonucleotide
accacgugcaucuccugaa

SEQ ID NO: 935724 - RNA, 19 nt, Artificial Sequence
  Description of Artificial Sequence: Synthetic oligonucleotide
gaucucuccacgucgcacu

SEQ ID NO: 935725 - RNA, 19 nt, Artificial Sequence
  Description of Artificial Sequence: Synthetic oligonucleotide
aagguguuauguacgccau

SEQ ID NO: 935726 - RNA, 19 nt, Artificial Sequence
  Description of Artificial Sequence: Synthetic oligonucleotide
acugggauugugucuuuua

SEQ ID NO: 935727 - RNA, 19 nt, Artificial Sequence
  Description of Artificial Sequence: Synthetic oligonucleotide
accgcuuuucaaacgugag

SEQ ID NO: 935728 - RNA, 19 nt, Artificial Sequence
  Description of Artificial Sequence: Synthetic oligonucleotide
aggcgccgcagguagaacu

SEQ ID NO: 935729 - RNA, 19 nt, Artificial Sequence
  Description of Artificial Sequence: Synthetic oligonucleotide
auggacacaucuguauuau

SEQ ID NO: 935730 - RNA, 19 nt, Artificial Sequence
  Description of Artificial Sequence: Synthetic oligonucleotide
agcuuucauccaguggcuc

SEQ ID NO: 935731 - RNA, 19 nt, Artificial Sequence
  Description of Artificial Sequence: Synthetic oligonucleotide
uucaucaucccggggucgu

SEQ ID NO: 935732 - RNA, 19 nt, Artificial Sequence
  Description of Artificial Sequence: Synthetic oligonucleotide
cacgugcaucuccugaaug

SEQ ID NO: 935733 - RNA, 19 nt, Artificial Sequence
  Description of Artificial Sequence: Synthetic oligonucleotide
gcuuaaaaguucgcccacg

SEQ ID NO: 935734 - RNA, 19 nt, Artificial Sequence
  Description of Artificial Sequence: Synthetic oligonucleotide
ugguuucgagcagggaucu

SEQ ID NO: 935735 - RNA, 19 nt, Artificial Sequence
  Description of Artificial Sequence: Synthetic oligonucleotide
cauggagggugucuauguc

SEQ ID NO: 935736 - RNA, 19 nt, Artificial Sequence
  Description of Artificial Sequence: Synthetic oligonucleotide
agcagaucaaccacggcua

SEQ ID NO: 935737 - RNA, 19 nt, Artificial Sequence
  Description of Artificial Sequence: Synthetic oligonucleotide
cagaugugcuguagaauga

SEQ ID NO: 935738 - RNA, 19 nt, Artificial Sequence
  Description of Artificial Sequence: Synthetic oligonucleotide
cuccacgucgcacuauguc

SEQ ID NO: 935739 - RNA, 19 nt, Artificial Sequence
  Description of Artificial Sequence: Synthetic oligonucleotide
ucgcugucauucucgguaa

SEQ ID NO: 935740 - RNA, 19 nt, Artificial Sequence
  Description of Artificial Sequence: Synthetic oligonucleotide
gaccgcuuuucaaacguga

SEQ ID NO: 935741 - RNA, 19 nt, Artificial Sequence
  Description of Artificial Sequence: Synthetic oligonucleotide
gucauucucgguaaauuua

SEQ ID NO: 935742 - RNA, 19 nt, Artificial Sequence
  Description of Artificial Sequence: Synthetic oligonucleotide
cuucaucaucccggggucg

SEQ ID NO: 935743 - RNA, 19 nt, Artificial Sequence
  Description of Artificial Sequence: Synthetic oligonucleotide
auccucuaggucguugucu

SEQ ID NO: 935744 - RNA, 19 nt, Artificial Sequence
  Description of Artificial Sequence: Synthetic oligonucleotide
uggugaacccgcuggcgaa

SEQ ID NO: 935745 - RNA, 19 nt, Artificial Sequence
  Description of Artificial Sequence: Synthetic oligonucleotide
uauguacgccaucggccuc

SEQ ID NO: 935746 - RNA, 19 nt, Artificial Sequence
  Description of Artificial Sequence: Synthetic oligonucleotide
agcgcgucaaacagguucu

SEQ ID NO: 935747 - RNA, 19 nt, Artificial Sequence
  Description of Artificial Sequence: Synthetic oligonucleotide
aaaguucgcccacguccau

SEQ ID NO: 935748 - RNA, 19 nt, Artificial Sequence
  Description of Artificial Sequence: Synthetic oligonucleotide
acggaacucugccauguuu

SEQ ID NO: 935749 - RNA, 19 nt, Artificial Sequence
  Description of Artificial Sequence: Synthetic oligonucleotide
ggugucuaugucugucagc

SEQ ID NO: 935750 - RNA, 19 nt, Artificial Sequence
  Description of Artificial Sequence: Synthetic oligonucleotide
aggcccaaucauggcaugg

SEQ ID NO: 935751 - RNA, 19 nt, Artificial Sequence
  Description of Artificial Sequence: Synthetic oligonucleotide
augugccugacaaucuuga

SEQ ID NO: 935752 - RNA, 19 nt, Artificial Sequence
  Description of Artificial Sequence: Synthetic oligonucleotide
agagcaucgaugagaacuu

SEQ ID NO: 935753 - RNA, 19 nt, Artificial Sequence
  Description of Artificial Sequence: Synthetic oligonucleotide
ucgcacuaugucguguuuc

SEQ ID NO: 935754 - RNA, 19 nt, Artificial Sequence
  Description of Artificial Sequence: Synthetic oligonucleotide
auggagcugccacgcaugu

SEQ ID NO: 935755 - RNA, 19 nt, Artificial Sequence
  Description of Artificial Sequence: Synthetic oligonucleotide
ugcacaucucuggacggaa

SEQ ID NO: 935756 - RNA, 19 nt, Artificial Sequence
  Description of Artificial Sequence: Synthetic oligonucleotide
caaucauggcauggucuag

SEQ ID NO: 935757 - RNA, 19 nt, Artificial Sequence
  Description of Artificial Sequence: Synthetic oligonucleotide
ucaucccggggucguuuug

SEQ ID NO: 935758 - RNA, 19 nt, Artificial Sequence
  Description of Artificial Sequence: Synthetic oligonucleotide
cuccgcuguacugggauug

SEQ ID NO: 935759 - RNA, 19 nt, Artificial Sequence
  Description of Artificial Sequence: Synthetic oligonucleotide
ugcccugguuaccuccacu

SEQ ID NO: 935760 - RNA, 19 nt, Artificial Sequence
  Description of Artificial Sequence: Synthetic oligonucleotide
ccgcuuuucaaacgugagg

SEQ ID NO: 935761 - RNA, 19 nt, Artificial Sequence
  Description of Artificial Sequence: Synthetic oligonucleotide
cugggauugugucuuuuaa

SEQ ID NO: 935762 - RNA, 19 nt, Artificial Sequence
  Description of Artificial Sequence: Synthetic oligonucleotide
agcagaugugcuguagaau

SEQ ID NO: 935763 - RNA, 19 nt, Artificial Sequence
  Description of Artificial Sequence: Synthetic oligonucleotide
augaucucuccacgucgca

SEQ ID NO: 935764 - RNA, 19 nt, Artificial Sequence
  Description of Artificial Sequence: Synthetic oligonucleotide
ccaaucagcacagggugcc

SEQ ID NO: 935765 - RNA, 19 nt, Artificial Sequence
  Description of Artificial Sequence: Synthetic oligonucleotide
cuucccucacggauucauc

SEQ ID NO: 935766 - RNA, 19 nt, Artificial Sequence
  Description of Artificial Sequence: Synthetic oligonucleotide
gaggaccaguuugcuuucg

SEQ ID NO: 935767 - RNA, 19 nt, Artificial Sequence
  Description of Artificial Sequence: Synthetic oligonucleotide
ucgaucccauccagcuccc

SEQ ID NO: 935768 - RNA, 19 nt, Artificial Sequence
  Description of Artificial Sequence: Synthetic oligonucleotide
agaugguccguaagccaag

SEQ ID NO: 935769 - RNA, 19 nt, Artificial Sequence
  Description of Artificial Sequence: Synthetic oligonucleotide
ucuaggcgccgcagguaga

SEQ ID NO: 935770 - RNA, 19 nt, Artificial Sequence
  Description of Artificial Sequence: Synthetic oligonucleotide
ccgagaagugacugcacag

SEQ ID NO: 935771 - RNA, 19 nt, Artificial Sequence
  Description of Artificial Sequence: Synthetic oligonucleotide
ggaccaguuugcuuucgac

SEQ ID NO: 935772 - RNA, 19 nt, Artificial Sequence
  Description of Artificial Sequence: Synthetic oligonucleotide
cuggugaacccgcuggcga

SEQ ID NO: 935773 - RNA, 19 nt, Artificial Sequence
  Description of Artificial Sequence: Synthetic oligonucleotide
ucucgauagcggccacgcu

SEQ ID NO: 935774 - RNA, 19 nt, Artificial Sequence
  Description of Artificial Sequence: Synthetic oligonucleotide
ccggggagacuucauaaag

SEQ ID NO: 935775 - RNA, 19 nt, Artificial Sequence
  Description of Artificial Sequence: Synthetic oligonucleotide
ccugguuaccuccacucac

SEQ ID NO: 935776 - RNA, 19 nt, Artificial Sequence
  Description of Artificial Sequence: Synthetic oligonucleotide
ccguaagccaagaauguca

SEQ ID NO: 935777 - RNA, 19 nt, Artificial Sequence
  Description of Artificial Sequence: Synthetic oligonucleotide
gaacagacaugcucuucgu

SEQ ID NO: 935778 - RNA, 19 nt, Artificial Sequence
  Description of Artificial Sequence: Synthetic oligonucleotide
cucgccaucucugucaaua

SEQ ID NO: 935779 - RNA, 19 nt, Artificial Sequence
  Description of Artificial Sequence: Synthetic oligonucleotide
ggauucauccaggcgcucc

SEQ ID NO: 935780 - RNA, 19 nt, Artificial Sequence
  Description of Artificial Sequence: Synthetic oligonucleotide
ucucgaggaccaguuugcu

SEQ ID NO: 935781 - RNA, 19 nt, Artificial Sequence
  Description of Artificial Sequence: Synthetic oligonucleotide
gucuaugaucucuccacgu

SEQ ID NO: 935782 - RNA, 19 nt, Artificial Sequence
  Description of Artificial Sequence: Synthetic oligonucleotide
cagcucggauuccaugaac

SEQ ID NO: 935783 - RNA, 19 nt, Artificial Sequence
  Description of Artificial Sequence: Synthetic oligonucleotide
gaucaaccacggcuaugga

SEQ ID NO: 935784 - RNA, 19 nt, Artificial Sequence
  Description of Artificial Sequence: Synthetic oligonucleotide
gaugguccguaagccaaga

SEQ ID NO: 935785 - RNA, 19 nt, Artificial Sequence
  Description of Artificial Sequence: Synthetic oligonucleotide
acggauucauccaggcgcu

SEQ ID NO: 935786 - RNA, 19 nt, Artificial Sequence
  Description of Artificial Sequence: Synthetic oligonucleotide
ucucuggguugucgggaaa

SEQ ID NO: 935787 - RNA, 19 nt, Artificial Sequence
  Description of Artificial Sequence: Synthetic oligonucleotide
cauugcagaucucagccau

SEQ ID NO: 935788 - RNA, 19 nt, Artificial Sequence
  Description of Artificial Sequence: Synthetic oligonucleotide
ucucgcugucauucucggu

SEQ ID NO: 935789 - RNA, 19 nt, Artificial Sequence
  Description of Artificial Sequence: Synthetic oligonucleotide
gaaggcgaguccgcugcug

SEQ ID NO: 935790 - RNA, 19 nt, Artificial Sequence
  Description of Artificial Sequence: Synthetic oligonucleotide
gcuuucgacgagucuucag

SEQ ID NO: 935791 - RNA, 19 nt, Artificial Sequence
  Description of Artificial Sequence: Synthetic oligonucleotide
cacggcuauggacacaucu

SEQ ID NO: 935792 - RNA, 19 nt, Artificial Sequence
  Description of Artificial Sequence: Synthetic oligonucleotide
aucucuggacggaacucug

SEQ ID NO: 935793 - RNA, 19 nt, Artificial Sequence
  Description of Artificial Sequence: Synthetic oligonucleotide
cacggauaacugcugcaga

SEQ ID NO: 935794 - RNA, 19 nt, Artificial Sequence
  Description of Artificial Sequence: Synthetic oligonucleotide
aucccggggucguuuugug

SEQ ID NO: 935795 - RNA, 19 nt, Artificial Sequence
  Description of Artificial Sequence: Synthetic oligonucleotide
cgaugagaacuucugcccc

SEQ ID NO: 935796 - RNA, 19 nt, Artificial Sequence
  Description of Artificial Sequence: Synthetic oligonucleotide
ugcuuucgacgagucuuca

SEQ ID NO: 935797 - RNA, 19 nt, Artificial Sequence
  Description of Artificial Sequence: Synthetic oligonucleotide
gacgagucuucaguuccuc

SEQ ID NO: 935798 - RNA, 19 nt, Artificial Sequence
  Description of Artificial Sequence: Synthetic oligonucleotide
gucguguuucuccccuuca

SEQ ID NO: 935799 - RNA, 19 nt, Artificial Sequence
  Description of Artificial Sequence: Synthetic oligonucleotide
ucuugucggccaccugcau

SEQ ID NO: 935800 - RNA, 19 nt, Artificial Sequence
  Description of Artificial Sequence: Synthetic oligonucleotide
gucgggaaacuugauccga

SEQ ID NO: 935801 - RNA, 19 nt, Artificial Sequence
  Description of Artificial Sequence: Synthetic oligonucleotide
agggugcccugguuaccuc

SEQ ID NO: 935802 - RNA, 19 nt, Artificial Sequence
  Description of Artificial Sequence: Synthetic oligonucleotide
ugucaaccuucucgcuguc

SEQ ID NO: 935803 - RNA, 19 nt, Artificial Sequence
  Description of Artificial Sequence: Synthetic oligonucleotide
caaucagcacagggugccc

SEQ ID NO: 935804 - RNA, 19 nt, Artificial Sequence
  Description of Artificial Sequence: Synthetic oligonucleotide
gguugcgcaggagggaagc

SEQ ID NO: 935805 - RNA, 19 nt, Artificial Sequence
  Description of Artificial Sequence: Synthetic oligonucleotide
cccaaucagcacagggugc

SEQ ID NO: 935806 - RNA, 19 nt, Artificial Sequence
  Description of Artificial Sequence: Synthetic oligonucleotide
agaucucagccaugauaua

SEQ ID NO: 935807 - RNA, 19 nt, Artificial Sequence
  Description of Artificial Sequence: Synthetic oligonucleotide
gcagagcgcgucaaacagg

SEQ ID NO: 935808 - RNA, 19 nt, Artificial Sequence
  Description of Artificial Sequence: Synthetic oligonucleotide
cagaucaaccacggcuaug

SEQ ID NO: 935809 - RNA, 19 nt, Artificial Sequence
  Description of Artificial Sequence: Synthetic oligonucleotide
agaaggcgaguccgcugcu

SEQ ID NO: 935810 - RNA, 19 nt, Artificial Sequence
  Description of Artificial Sequence: Synthetic oligonucleotide
gcuauggacacaucuguau

SEQ ID NO: 935811 - RNA, 19 nt, Artificial Sequence
  Description of Artificial Sequence: Synthetic oligonucleotide
cacgucgcacuaugucgug

SEQ ID NO: 935812 - RNA, 19 nt, Artificial Sequence
  Description of Artificial Sequence: Synthetic oligonucleotide
gccgagaagugacugcaca

SEQ ID NO: 935813 - RNA, 19 nt, Artificial Sequence
  Description of Artificial Sequence: Synthetic oligonucleotide
cagguagaacucauccucu

SEQ ID NO: 935814 - RNA, 19 nt, Artificial Sequence
  Description of Artificial Sequence: Synthetic oligonucleotide
caccacgugcaucuccuga

SEQ ID NO: 935815 - RNA, 19 nt, Artificial Sequence
  Description of Artificial Sequence: Synthetic oligonucleotide
cacaucucuggacggaacu

SEQ ID NO: 935816 - RNA, 19 nt, Artificial Sequence
  Description of Artificial Sequence: Synthetic oligonucleotide
guugcgcaggagggaagcc

SEQ ID NO: 935817 - RNA, 19 nt, Artificial Sequence
  Description of Artificial Sequence: Synthetic oligonucleotide
cuccgggagaucuucuucu

SEQ ID NO: 935818 - RNA, 19 nt, Artificial Sequence
  Description of Artificial Sequence: Synthetic oligonucleotide
aucaucccggggucguuuu

SEQ ID NO: 935819 - RNA, 19 nt, Artificial Sequence
  Description of Artificial Sequence: Synthetic oligonucleotide
aggagcagagcgcgucaaa

SEQ ID NO: 935820 - RNA, 19 nt, Artificial Sequence
  Description of Artificial Sequence: Synthetic oligonucleotide
gcauugcagaucucagcca

SEQ ID NO: 935821 - RNA, 19 nt, Artificial Sequence
  Description of Artificial Sequence: Synthetic oligonucleotide
gucguuuugugccucuguu

SEQ ID NO: 935822 - RNA, 19 nt, Artificial Sequence
  Description of Artificial Sequence: Synthetic oligonucleotide
gccacgcauguucaggauc

SEQ ID NO: 935823 - RNA, 19 nt, Artificial Sequence
  Description of Artificial Sequence: Synthetic oligonucleotide
caggcccaaucauggcaug

SEQ ID NO: 935824 - RNA, 19 nt, Artificial Sequence
  Description of Artificial Sequence: Synthetic oligonucleotide
cuggacggaacucugccau

SEQ ID NO: 935825 - RNA, 19 nt, Artificial Sequence
  Description of Artificial Sequence: Synthetic oligonucleotide
ggguugucgggaaacuuga

SEQ ID NO: 935826 - RNA, 19 nt, Artificial Sequence
  Description of Artificial Sequence: Synthetic oligonucleotide
gauuggagcugagcaucaa

SEQ ID NO: 935827 - RNA, 19 nt, Artificial Sequence
  Description of Artificial Sequence: Synthetic oligonucleotide
cuuccggggagacuucaua

SEQ ID NO: 935828 - RNA, 19 nt, Artificial Sequence
  Description of Artificial Sequence: Synthetic oligonucleotide
gcggccacgcucucgagga

SEQ ID NO: 935829 - RNA, 19 nt, Artificial Sequence
  Description of Artificial Sequence: Synthetic oligonucleotide
gcuccggccguccccaaug

SEQ ID NO: 935830 - RNA, 19 nt, Artificial Sequence
  Description of Artificial Sequence: Synthetic oligonucleotide
gcacccagauauuuaaaau

SEQ ID NO: 935831 - RNA, 19 nt, Artificial Sequence
  Description of Artificial Sequence: Synthetic oligonucleotide
guccguaagccaagaaugu

SEQ ID NO: 935832 - RNA, 19 nt, Artificial Sequence
  Description of Artificial Sequence: Synthetic oligonucleotide
ggcgcuccagauucugcac

SEQ ID NO: 935833 - RNA, 19 nt, Artificial Sequence
  Description of Artificial Sequence: Synthetic oligonucleotide
acgucgcacuaugucgugu

SEQ ID NO: 935834 - RNA, 19 nt, Artificial Sequence
  Description of Artificial Sequence: Synthetic oligonucleotide
ugucggccaccugcauugc

SEQ ID NO: 935835 - RNA, 19 nt, Artificial Sequence
  Description of Artificial Sequence: Synthetic oligonucleotide
gaucuuccggggagacuuc

SEQ ID NO: 935836 - RNA, 19 nt, Artificial Sequence
  Description of Artificial Sequence: Synthetic oligonucleotide
augucguguuucuccccuu

SEQ ID NO: 935837 - RNA, 19 nt, Artificial Sequence
  Description of Artificial Sequence: Synthetic oligonucleotide
aggaucgaacagacaugcu

SEQ ID NO: 935838 - RNA, 19 nt, Artificial Sequence
  Description of Artificial Sequence: Synthetic oligonucleotide
cguaagccaagaaugucaa

SEQ ID NO: 935839 - RNA, 19 nt, Artificial Sequence
  Description of Artificial Sequence: Synthetic oligonucleotide
ccucuucccucacggauuc

SEQ ID NO: 935840 - RNA, 19 nt, Artificial Sequence
  Description of Artificial Sequence: Synthetic oligonucleotide
gugcacaucucuggacgga

SEQ ID NO: 935841 - RNA, 19 nt, Artificial Sequence
  Description of Artificial Sequence: Synthetic oligonucleotide
cuaggcgccgcagguagaa

SEQ ID NO: 935842 - RNA, 19 nt, Artificial Sequence
  Description of Artificial Sequence: Synthetic oligonucleotide
gucaaccuucucgcuguca

SEQ ID NO: 935843 - RNA, 19 nt, Artificial Sequence
  Description of Artificial Sequence: Synthetic oligonucleotide
ggaccgcuuuucaaacgug

SEQ ID NO: 935844 - RNA, 19 nt, Artificial Sequence
  Description of Artificial Sequence: Synthetic oligonucleotide
ucucuccacgucgcacuau

SEQ ID NO: 935845 - RNA, 19 nt, Artificial Sequence
  Description of Artificial Sequence: Synthetic oligonucleotide
ggauuccaugaacuucucu

SEQ ID NO: 935846 - RNA, 19 nt, Artificial Sequence
  Description of Artificial Sequence: Synthetic oligonucleotide
caaacgugaggaucaucuu

SEQ ID NO: 935847 - RNA, 19 nt, Artificial Sequence
  Description of Artificial Sequence: Synthetic oligonucleotide
ccagcaagccgagaaguga

SEQ ID NO: 935848 - RNA, 19 nt, Artificial Sequence
  Description of Artificial Sequence: Synthetic oligonucleotide
ccacgcauguucaggaucu

SEQ ID NO: 935849 - RNA, 19 nt, Artificial Sequence
  Description of Artificial Sequence: Synthetic oligonucleotide
cccaaucauggcauggucu

SEQ ID NO: 935850 - RNA, 19 nt, Artificial Sequence
  Description of Artificial Sequence: Synthetic oligonucleotide
ucaucaucccggggucguu

SEQ ID NO: 935851 - RNA, 19 nt, Artificial Sequence
  Description of Artificial Sequence: Synthetic oligonucleotide
uaggcgccgcagguagaac

SEQ ID NO: 935852 - RNA, 19 nt, Artificial Sequence
  Description of Artificial Sequence: Synthetic oligonucleotide
gcaucuaggcgccgcaggu

SEQ ID NO: 935853 - RNA, 19 nt, Artificial Sequence
  Description of Artificial Sequence: Synthetic oligonucleotide
cuugucggccaccugcauu

SEQ ID NO: 935854 - RNA, 19 nt, Artificial Sequence
  Description of Artificial Sequence: Synthetic oligonucleotide
gcaggagcagagcgcguca

SEQ ID NO: 935855 - RNA, 19 nt, Artificial Sequence
  Description of Artificial Sequence: Synthetic oligonucleotide
ggucuggcaugguggccac

SEQ ID NO: 935856 - RNA, 19 nt, Artificial Sequence
  Description of Artificial Sequence: Synthetic oligonucleotide
ggucguuuugugccucugu

SEQ ID NO: 935857 - RNA, 19 nt, Artificial Sequence
  Description of Artificial Sequence: Synthetic oligonucleotide
ccguccccaauguucucug

SEQ ID NO: 935858 - RNA, 19 nt, Artificial Sequence
  Description of Artificial Sequence: Synthetic oligonucleotide
uggagcugccacgcauguu

SEQ ID NO: 935859 - RNA, 19 nt, Artificial Sequence
  Description of Artificial Sequence: Synthetic oligonucleotide
ggcuauggacacaucugua

SEQ ID NO: 935860 - RNA, 19 nt, Artificial Sequence
  Description of Artificial Sequence: Synthetic oligonucleotide
caucggccucuucccucac

SEQ ID NO: 935861 - RNA, 19 nt, Artificial Sequence
  Description of Artificial Sequence: Synthetic oligonucleotide
ccaucggccucuucccuca

SEQ ID NO: 935862 - RNA, 19 nt, Artificial Sequence
  Description of Artificial Sequence: Synthetic oligonucleotide
ggacggaacucugccaugu

SEQ ID NO: 935863 - RNA, 19 nt, Artificial Sequence
  Description of Artificial Sequence: Synthetic oligonucleotide
gggagacuucauaaagagu

SEQ ID NO: 935864 - RNA, 19 nt, Artificial Sequence
  Description of Artificial Sequence: Synthetic oligonucleotide
ccucucgauagcggccacg

SEQ ID NO: 935865 - RNA, 19 nt, Artificial Sequence
  Description of Artificial Sequence: Synthetic oligonucleotide
cuucacuuucauggagggu

SEQ ID NO: 935866 - RNA, 19 nt, Artificial Sequence
  Description of Artificial Sequence: Synthetic oligonucleotide
gccaccugcauugcaccca

SEQ ID NO: 935867 - RNA, 19 nt, Artificial Sequence
  Description of Artificial Sequence: Synthetic oligonucleotide
cgcgucaaacagguucucc

SEQ ID NO: 935868 - RNA, 19 nt, Artificial Sequence
  Description of Artificial Sequence: Synthetic oligonucleotide
caucuaggcgccgcaggua

SEQ ID NO: 935869 - RNA, 19 nt, Artificial Sequence
  Description of Artificial Sequence: Synthetic oligonucleotide
gaguccgcugcugcccucu

SEQ ID NO: 935870 - RNA, 19 nt, Artificial Sequence
  Description of Artificial Sequence: Synthetic oligonucleotide
gggucguuuugugccucug

SEQ ID NO: 935871 - RNA, 19 nt, Artificial Sequence
  Description of Artificial Sequence: Synthetic oligonucleotide
gagugggaagaugguccgu

SEQ ID NO: 935872 - RNA, 19 nt, Artificial Sequence
  Description of Artificial Sequence: Synthetic oligonucleotide
ccacgucgcacuaugucgu

SEQ ID NO: 935873 - RNA, 19 nt, Artificial Sequence
  Description of Artificial Sequence: Synthetic oligonucleotide
caucccggggucguuuugu

SEQ ID NO: 935874 - RNA, 19 nt, Artificial Sequence
  Description of Artificial Sequence: Synthetic oligonucleotide
cuccuccgcuguacuggga

SEQ ID NO: 935875 - RNA, 19 nt, Artificial Sequence
  Description of Artificial Sequence: Synthetic oligonucleotide
gucgcacuaugucguguuu

SEQ ID NO: 935876 - RNA, 19 nt, Artificial Sequence
  Description of Artificial Sequence: Synthetic oligonucleotide
gcucggauuccaugaacuu

SEQ ID NO: 935877 - RNA, 19 nt, Artificial Sequence
  Description of Artificial Sequence: Synthetic oligonucleotide
gcagaucaaccacggcuau

SEQ ID NO: 935878 - RNA, 19 nt, Artificial Sequence
  Description of Artificial Sequence: Synthetic oligonucleotide
gcauugcacccagauauuu

SEQ ID NO: 935879 - RNA, 19 nt, Artificial Sequence
  Description of Artificial Sequence: Synthetic oligonucleotide
guacgccaucggccucuuc

SEQ ID NO: 935880 - RNA, 19 nt, Artificial Sequence
  Description of Artificial Sequence: Synthetic oligonucleotide
gcuccacuaaaagguggua

SEQ ID NO: 935881 - RNA, 19 nt, Artificial Sequence
  Description of Artificial Sequence: Synthetic oligonucleotide
cugcuccgggagaucuucu

SEQ ID NO: 935882 - RNA, 19 nt, Artificial Sequence
  Description of Artificial Sequence: Synthetic oligonucleotide
cuggguugucgggaaacuu

SEQ ID NO: 935883 - RNA, 19 nt, Artificial Sequence
  Description of Artificial Sequence: Synthetic oligonucleotide
caccugcauugcacccaga

SEQ ID NO: 935884 - RNA, 19 nt, Artificial Sequence
  Description of Artificial Sequence: Synthetic oligonucleotide
agagcgcgucaaacagguu

SEQ ID NO: 935885 - RNA, 19 nt, Artificial Sequence
  Description of Artificial Sequence: Synthetic oligonucleotide
cggauuccaugaacuucuc

SEQ ID NO: 935886 - RNA, 19 nt, Artificial Sequence
  Description of Artificial Sequence: Synthetic oligonucleotide
cggcuauggacacaucugu

SEQ ID NO: 935887 - RNA, 19 nt, Artificial Sequence
  Description of Artificial Sequence: Synthetic oligonucleotide
cucuucccucacggauuca

SEQ ID NO: 935888 - RNA, 19 nt, Artificial Sequence
  Description of Artificial Sequence: Synthetic oligonucleotide
guucgcccacguccauggu

SEQ ID NO: 935889 - RNA, 19 nt, Artificial Sequence
  Description of Artificial Sequence: Synthetic oligonucleotide
caucaucccggggucguuu

SEQ ID NO: 935890 - RNA, 19 nt, Artificial Sequence
  Description of Artificial Sequence: Synthetic oligonucleotide
ggggucguuuugugccucu

SEQ ID NO: 935891 - RNA, 19 nt, Artificial Sequence
  Description of Artificial Sequence: Synthetic oligonucleotide
cuccggccguccccaaugu

SEQ ID NO: 935892 - RNA, 19 nt, Artificial Sequence
  Description of Artificial Sequence: Synthetic oligonucleotide
ggccguccccaauguucuc

SEQ ID NO: 935893 - RNA, 19 nt, Artificial Sequence
  Description of Artificial Sequence: Synthetic oligonucleotide
cguguuucuccccuucaau

SEQ ID NO: 935894 - RNA, 19 nt, Artificial Sequence
  Description of Artificial Sequence: Synthetic oligonucleotide
gcgaguccgcugcugcccu

SEQ ID NO: 935895 - RNA, 19 nt, Artificial Sequence
  Description of Artificial Sequence: Synthetic oligonucleotide
gcgccgcagguagaacuca

SEQ ID NO: 935896 - RNA, 19 nt, Artificial Sequence
  Description of Artificial Sequence: Synthetic oligonucleotide
gguugucgggaaacuugau

SEQ ID NO: 935897 - RNA, 19 nt, Artificial Sequence
  Description of Artificial Sequence: Synthetic oligonucleotide
ggccugcaucuaggcgccg

SEQ ID NO: 935898 - RNA, 19 nt, Artificial Sequence
  Description of Artificial Sequence: Synthetic oligonucleotide
cacugcuccgggagaucuu

SEQ ID NO: 935899 - RNA, 19 nt, Artificial Sequence
  Description of Artificial Sequence: Synthetic oligonucleotide
gcgcgucaaacagguucuc

SEQ ID NO: 935900 - RNA, 19 nt, Artificial Sequence
  Description of Artificial Sequence: Synthetic oligonucleotide
ccacggcuauggacacauc

SEQ ID NO: 935901 - RNA, 19 nt, Artificial Sequence
  Description of Artificial Sequence: Synthetic oligonucleotide
cgacgagucuucaguuccu

SEQ ID NO: 935902 - RNA, 19 nt, Artificial Sequence
  Description of Artificial Sequence: Synthetic oligonucleotide
cgucgcacuaugucguguu

SEQ ID NO: 935903 - RNA, 19 nt, Artificial Sequence
  Description of Artificial Sequence: Synthetic oligonucleotide
ccggggucguuuugugccu

SEQ ID NO: 935904 - RNA, 19 nt, Artificial Sequence
  Description of Artificial Sequence: Synthetic oligonucleotide
cgaguccgcugcugcccuc

SEQ ID NO: 935905 - RNA, 19 nt, Artificial Sequence
  Description of Artificial Sequence: Synthetic oligonucleotide
cggggucguuuugugccuc

SEQ ID NO: 935906 - RNA, 19 nt, Artificial Sequence
  Description of Artificial Sequence: Synthetic oligonucleotide
ccuccgcuguacugggauu

SEQ ID NO: 935907 - RNA, 19 nt, Artificial Sequence
  Description of Artificial Sequence: Synthetic oligonucleotide
auggaaacugucuacacgg

SEQ ID NO: 935908 - RNA, 19 nt, Artificial Sequence
  Description of Artificial Sequence: Synthetic oligonucleotide
uuauggauaauguucagcu

SEQ ID NO: 935909 - RNA, 19 nt, Artificial Sequence
  Description of Artificial Sequence: Synthetic oligonucleotide
uuuucuaucuccacgguca

SEQ ID NO: 935910 - RNA, 19 nt, Artificial Sequence
  Description of Artificial Sequence: Synthetic oligonucleotide
ucuucgaguacuuaucccg

SEQ ID NO: 935911 - RNA, 19 nt, Artificial Sequence
  Description of Artificial Sequence: Synthetic oligonucleotide
aaugacucgguacucgggg

SEQ ID NO: 935912 - RNA, 19 nt, Artificial Sequence
  Description of Artificial Sequence: Synthetic oligonucleotide
uuggcgaugcucuugaccg

SEQ ID NO: 935913 - RNA, 19 nt, Artificial Sequence
  Description of Artificial Sequence: Synthetic oligonucleotide
auaggcaucuuccucaauc

SEQ ID NO: 935914 - RNA, 19 nt, Artificial Sequence
  Description of Artificial Sequence: Synthetic oligonucleotide
auuuaacuggggcagcagc

SEQ ID NO: 935915 - RNA, 19 nt, Artificial Sequence
  Description of Artificial Sequence: Synthetic oligonucleotide
uucagguggacauagugcc

SEQ ID NO: 935916 - RNA, 19 nt, Artificial Sequence
  Description of Artificial Sequence: Synthetic oligonucleotide
acacugacgaccaugaugg

SEQ ID NO: 935917 - RNA, 19 nt, Artificial Sequence
  Description of Artificial Sequence: Synthetic oligonucleotide
ucguuuucuaucuccacgg

SEQ ID NO: 935918 - RNA, 19 nt, Artificial Sequence
  Description of Artificial Sequence: Synthetic oligonucleotide
gaugcggugacacugacga

SEQ ID NO: 935919 - RNA, 19 nt, Artificial Sequence
  Description of Artificial Sequence: Synthetic oligonucleotide
ucgaggucagccaagagcu

SEQ ID NO: 935920 - RNA, 19 nt, Artificial Sequence
  Description of Artificial Sequence: Synthetic oligonucleotide
gaacuuauggauaauguuc

SEQ ID NO: 935921 - RNA, 19 nt, Artificial Sequence
  Description of Artificial Sequence: Synthetic oligonucleotide
ugugcauuuaauuguacuc

SEQ ID NO: 935922 - RNA, 19 nt, Artificial Sequence
  Description of Artificial Sequence: Synthetic oligonucleotide
ucauccuuuaguucguacc

SEQ ID NO: 935923 - RNA, 19 nt, Artificial Sequence
  Description of Artificial Sequence: Synthetic oligonucleotide
agugccgcuuuucucaccc

SEQ ID NO: 935924 - RNA, 19 nt, Artificial Sequence
  Description of Artificial Sequence: Synthetic oligonucleotide
uuuaguucguaccccaccu

SEQ ID NO: 935925 - RNA, 19 nt, Artificial Sequence
  Description of Artificial Sequence: Synthetic oligonucleotide
gacacugacgaccaugaug

SEQ ID NO: 935926 - RNA, 19 nt, Artificial Sequence
  Description of Artificial Sequence: Synthetic oligonucleotide
uuuaacuggggcagcagca

SEQ ID NO: 935927 - RNA, 19 nt, Artificial Sequence
  Description of Artificial Sequence: Synthetic oligonucleotide
uuguacucuuucuagaaaa

SEQ ID NO: 935928 - RNA, 19 nt, Artificial Sequence
  Description of Artificial Sequence: Synthetic oligonucleotide
ugugcggcagcacugaggu

SEQ ID NO: 935929 - RNA, 19 nt, Artificial Sequence
  Description of Artificial Sequence: Synthetic oligonucleotide
uucucauuguucuugcacu

SEQ ID NO: 935930 - RNA, 19 nt, Artificial Sequence
  Description of Artificial Sequence: Synthetic oligonucleotide
gaugaacuuauggauaaug

SEQ ID NO: 935931 - RNA, 19 nt, Artificial Sequence
  Description of Artificial Sequence: Synthetic oligonucleotide
ucucuucgaguacuuaucc

SEQ ID NO: 935932 - RNA, 19 nt, Artificial Sequence
  Description of Artificial Sequence: Synthetic oligonucleotide
uucuagaaaaccacuuccu

SEQ ID NO: 935933 - RNA, 19 nt, Artificial Sequence
  Description of Artificial Sequence: Synthetic oligonucleotide
uaauuguacucuuucuaga

SEQ ID NO: 935934 - RNA, 19 nt, Artificial Sequence
  Description of Artificial Sequence: Synthetic oligonucleotide
uacuuaucccggaugaacu

SEQ ID NO: 935935 - RNA, 19 nt, Artificial Sequence
  Description of Artificial Sequence: Synthetic oligonucleotide
acaucuugcuaucccauag

SEQ ID NO: 935936 - RNA, 19 nt, Artificial Sequence
  Description of Artificial Sequence: Synthetic oligonucleotide
cucguuuucuaucuccacg

SEQ ID NO: 935937 - RNA, 19 nt, Artificial Sequence
  Description of Artificial Sequence: Synthetic oligonucleotide
aagaccuccgcccauuuaa

SEQ ID NO: 935938 - RNA, 19 nt, Artificial Sequence
  Description of Artificial Sequence: Synthetic oligonucleotide
cauccuuuaguucguaccc

SEQ ID NO: 935939 - RNA, 19 nt, Artificial Sequence
  Description of Artificial Sequence: Synthetic oligonucleotide
ugcgaugaacgacauccgg

SEQ ID NO: 935940 - RNA, 19 nt, Artificial Sequence
  Description of Artificial Sequence: Synthetic oligonucleotide
aguguuuuggagauccugg

SEQ ID NO: 935941 - RNA, 19 nt, Artificial Sequence
  Description of Artificial Sequence: Synthetic oligonucleotide
ucggaugguagacuucccg

SEQ ID NO: 935942 - RNA, 19 nt, Artificial Sequence
  Description of Artificial Sequence: Synthetic oligonucleotide
acaaugacucgguacucgg

SEQ ID NO: 935943 - RNA, 19 nt, Artificial Sequence
  Description of Artificial Sequence: Synthetic oligonucleotide
acaacuuccuugccggagg

SEQ ID NO: 935944 - RNA, 19 nt, Artificial Sequence
  Description of Artificial Sequence: Synthetic oligonucleotide
uguaagguccgcugcagug

SEQ ID NO: 935945 - RNA, 19 nt, Artificial Sequence
  Description of Artificial Sequence: Synthetic oligonucleotide
uuucuguaagguccgcugc

SEQ ID NO: 935946 - RNA, 19 nt, Artificial Sequence
  Description of Artificial Sequence: Synthetic oligonucleotide
uguacucuuucuagaaaac

SEQ ID NO: 935947 - RNA, 19 nt, Artificial Sequence
  Description of Artificial Sequence: Synthetic oligonucleotide
uugggugcgaugaacgaca

SEQ ID NO: 935948 - RNA, 19 nt, Artificial Sequence
  Description of Artificial Sequence: Synthetic oligonucleotide
gaugguagcauuggucagg

SEQ ID NO: 935949 - RNA, 19 nt, Artificial Sequence
  Description of Artificial Sequence: Synthetic oligonucleotide
ucuuccgcugcccaucaag

SEQ ID NO: 935950 - RNA, 19 nt, Artificial Sequence
  Description of Artificial Sequence: Synthetic oligonucleotide
ugcuuggaagcauucagcu

SEQ ID NO: 935951 - RNA, 19 nt, Artificial Sequence
  Description of Artificial Sequence: Synthetic oligonucleotide
caaacuugcgcucaaucuc

SEQ ID NO: 935952 - RNA, 19 nt, Artificial Sequence
  Description of Artificial Sequence: Synthetic oligonucleotide
ucuucaccccguuucuugg

SEQ ID NO: 935953 - RNA, 19 nt, Artificial Sequence
  Description of Artificial Sequence: Synthetic oligonucleotide
aucccggaugaacuuaugg

SEQ ID NO: 935954 - RNA, 19 nt, Artificial Sequence
  Description of Artificial Sequence: Synthetic oligonucleotide
gacugugcggauguaaucc

SEQ ID NO: 935955 - RNA, 19 nt, Artificial Sequence
  Description of Artificial Sequence: Synthetic oligonucleotide
cuucgaguacuuaucccgg

SEQ ID NO: 935956 - RNA, 19 nt, Artificial Sequence
  Description of Artificial Sequence: Synthetic oligonucleotide
aagcccgacagcgucuugc

SEQ ID NO: 935957 - RNA, 19 nt, Artificial Sequence
  Description of Artificial Sequence: Synthetic oligonucleotide
acgagugugaggaagaccu

SEQ ID NO: 935958 - RNA, 19 nt, Artificial Sequence
  Description of Artificial Sequence: Synthetic oligonucleotide
cauagugccgcuuuucuca

SEQ ID NO: 935959 - RNA, 19 nt, Artificial Sequence
  Description of Artificial Sequence: Synthetic oligonucleotide
ugcuuguggguucacaauc

SEQ ID NO: 935960 - RNA, 19 nt, Artificial Sequence
  Description of Artificial Sequence: Synthetic oligonucleotide
ucuagaaaaccacuuccuu

SEQ ID NO: 935961 - RNA, 19 nt, Artificial Sequence
  Description of Artificial Sequence: Synthetic oligonucleotide
ugaccgaauccccggagag

SEQ ID NO: 935962 - RNA, 19 nt, Artificial Sequence
  Description of Artificial Sequence: Synthetic oligonucleotide
uggaaacugucuacacggg

SEQ ID NO: 935963 - RNA, 19 nt, Artificial Sequence
  Description of Artificial Sequence: Synthetic oligonucleotide
cuuuaguucguaccccacc

SEQ ID NO: 935964 - RNA, 19 nt, Artificial Sequence
  Description of Artificial Sequence: Synthetic oligonucleotide
aagcucaugcgguuggccu

SEQ ID NO: 935965 - RNA, 19 nt, Artificial Sequence
  Description of Artificial Sequence: Synthetic oligonucleotide
acauagugccgcuuuucuc

SEQ ID NO: 935966 - RNA, 19 nt, Artificial Sequence
  Description of Artificial Sequence: Synthetic oligonucleotide
gauguagccggugugcggc

SEQ ID NO: 935967 - RNA, 19 nt, Artificial Sequence
  Description of Artificial Sequence: Synthetic oligonucleotide
gauuggucaggccuccggc

SEQ ID NO: 935968 - RNA, 19 nt, Artificial Sequence
  Description of Artificial Sequence: Synthetic oligonucleotide
uuucuaucuccacggucag

SEQ ID NO: 935969 - RNA, 19 nt, Artificial Sequence
  Description of Artificial Sequence: Synthetic oligonucleotide
augaacgacauccgggacu

SEQ ID NO: 935970 - RNA, 19 nt, Artificial Sequence
  Description of Artificial Sequence: Synthetic oligonucleotide
aaacuugcgcucaaucuca

SEQ ID NO: 935971 - RNA, 19 nt, Artificial Sequence
  Description of Artificial Sequence: Synthetic oligonucleotide
aucuugcuaucccauagcu

SEQ ID NO: 935972 - RNA, 19 nt, Artificial Sequence
  Description of Artificial Sequence: Synthetic oligonucleotide
ugaggagcggucucggaug

SEQ ID NO: 935973 - RNA, 19 nt, Artificial Sequence
  Description of Artificial Sequence: Synthetic oligonucleotide
uaucccauagcuuggcgau

SEQ ID NO: 935974 - RNA, 19 nt, Artificial Sequence
  Description of Artificial Sequence: Synthetic oligonucleotide
agauuggucaggccuccgg

SEQ ID NO: 935975 - RNA, 19 nt, Artificial Sequence
  Description of Artificial Sequence: Synthetic oligonucleotide
uggauaauguucagcucgu

SEQ ID NO: 935976 - RNA, 19 nt, Artificial Sequence
  Description of Artificial Sequence: Synthetic oligonucleotide
cuuccgcugcccaucaagg

SEQ ID NO: 935977 - RNA, 19 nt, Artificial Sequence
  Description of Artificial Sequence: Synthetic oligonucleotide
ugcucuugaccgaaucccc

SEQ ID NO: 935978 - RNA, 19 nt, Artificial Sequence
  Description of Artificial Sequence: Synthetic oligonucleotide
auagugccgcuuuucucac

SEQ ID NO: 935979 - RNA, 19 nt, Artificial Sequence
  Description of Artificial Sequence: Synthetic oligonucleotide
aacugucuacacgggcugc

SEQ ID NO: 935980 - RNA, 19 nt, Artificial Sequence
  Description of Artificial Sequence: Synthetic oligonucleotide
ugugcggauguaauccaga

SEQ ID NO: 935981 - RNA, 19 nt, Artificial Sequence
  Description of Artificial Sequence: Synthetic oligonucleotide
agagcguugggaaccaagg

SEQ ID NO: 935982 - RNA, 19 nt, Artificial Sequence
  Description of Artificial Sequence: Synthetic oligonucleotide
acuuauggauaauguucag

SEQ ID NO: 935983 - RNA, 19 nt, Artificial Sequence
  Description of Artificial Sequence: Synthetic oligonucleotide
gauucuagcuccgggaauc

SEQ ID NO: 935984 - RNA, 19 nt, Artificial Sequence
  Description of Artificial Sequence: Synthetic oligonucleotide
guacucuuucuagaaaacc

SEQ ID NO: 935985 - RNA, 19 nt, Artificial Sequence
  Description of Artificial Sequence: Synthetic oligonucleotide
uuuacccauguaaguaaaa

SEQ ID NO: 935986 - RNA, 19 nt, Artificial Sequence
  Description of Artificial Sequence: Synthetic oligonucleotide
agcguugggaaccaaggau

SEQ ID NO: 935987 - RNA, 19 nt, Artificial Sequence
  Description of Artificial Sequence: Synthetic oligonucleotide
cucuugaccgaauccccgg

SEQ ID NO: 935988 - RNA, 19 nt, Artificial Sequence
  Description of Artificial Sequence: Synthetic oligonucleotide
gugucugccgcacacgccc

SEQ ID NO: 935989 - RNA, 19 nt, Artificial Sequence
  Description of Artificial Sequence: Synthetic oligonucleotide
ugcauuuaauuguacucuu

SEQ ID NO: 935990 - RNA, 19 nt, Artificial Sequence
  Description of Artificial Sequence: Synthetic oligonucleotide
cucuucgaguacuuauccc

SEQ ID NO: 935991 - RNA, 19 nt, Artificial Sequence
  Description of Artificial Sequence: Synthetic oligonucleotide
agagauuggucaggccucc

SEQ ID NO: 935992 - RNA, 19 nt, Artificial Sequence
  Description of Artificial Sequence: Synthetic oligonucleotide
uugaccgaauccccggaga

SEQ ID NO: 935993 - RNA, 19 nt, Artificial Sequence
  Description of Artificial Sequence: Synthetic oligonucleotide
uccuuuacccauguaagua

SEQ ID NO: 935994 - RNA, 19 nt, Artificial Sequence
  Description of Artificial Sequence: Synthetic oligonucleotide
cuuuucucacccuugaccu

SEQ ID NO: 935995 - RNA, 19 nt, Artificial Sequence
  Description of Artificial Sequence: Synthetic oligonucleotide
caggcuaaagcccaaaucu

SEQ ID NO: 935996 - RNA, 19 nt, Artificial Sequence
  Description of Artificial Sequence: Synthetic oligonucleotide
guguuuuggagauccuggc

SEQ ID NO: 935997 - RNA, 19 nt, Artificial Sequence
  Description of Artificial Sequence: Synthetic oligonucleotide
aguucguaccccaccuugc

SEQ ID NO: 935998 - RNA, 19 nt, Artificial Sequence
  Description of Artificial Sequence: Synthetic oligonucleotide
cacuuggcagccaccagcc

SEQ ID NO: 935999 - RNA, 19 nt, Artificial Sequence
  Description of Artificial Sequence: Synthetic oligonucleotide
guagauguagccggugugc

SEQ ID NO: 936000 - RNA, 19 nt, Artificial Sequence
  Description of Artificial Sequence: Synthetic oligonucleotide
caucuugcuaucccauagc

SEQ ID NO: 936001 - RNA, 19 nt, Artificial Sequence
  Description of Artificial Sequence: Synthetic oligonucleotide
cacaaugacucgguacucg

SEQ ID NO: 936002 - RNA, 19 nt, Artificial Sequence
  Description of Artificial Sequence: Synthetic oligonucleotide
uguucagcucguuuucuau

SEQ ID NO: 936003 - RNA, 19 nt, Artificial Sequence
  Description of Artificial Sequence: Synthetic oligonucleotide
acugucuacacgggcugcc

SEQ ID NO: 936004 - RNA, 19 nt, Artificial Sequence
  Description of Artificial Sequence: Synthetic oligonucleotide
uuaucccggaugaacuuau

SEQ ID NO: 936005 - RNA, 19 nt, Artificial Sequence
  Description of Artificial Sequence: Synthetic oligonucleotide
cacuucaaagcuccaguug

SEQ ID NO: 936006 - RNA, 19 nt, Artificial Sequence
  Description of Artificial Sequence: Synthetic oligonucleotide
ugaacgacauccgggacuc

SEQ ID NO: 936007 - RNA, 19 nt, Artificial Sequence
  Description of Artificial Sequence: Synthetic oligonucleotide
ccugacuugcccaaguggc

SEQ ID NO: 936008 - RNA, 19 nt, Artificial Sequence
  Description of Artificial Sequence: Synthetic oligonucleotide
uuccgcugcccaucaaggg

SEQ ID NO: 936009 - RNA, 19 nt, Artificial Sequence
  Description of Artificial Sequence: Synthetic oligonucleotide
ucguaccccaccuugcccu

SEQ ID NO: 936010 - RNA, 19 nt, Artificial Sequence
  Description of Artificial Sequence: Synthetic oligonucleotide
ucuacacgggcugccagag

SEQ ID NO: 936011 - RNA, 19 nt, Artificial Sequence
  Description of Artificial Sequence: Synthetic oligonucleotide
guggaugccccaaugauga

SEQ ID NO: 936012 - RNA, 19 nt, Artificial Sequence
  Description of Artificial Sequence: Synthetic oligonucleotide
uucguaccccaccuugccc

SEQ ID NO: 936013 - RNA, 19 nt, Artificial Sequence
  Description of Artificial Sequence: Synthetic oligonucleotide
gaggagcggucucggaugg

SEQ ID NO: 936014 - RNA, 19 nt, Artificial Sequence
  Description of Artificial Sequence: Synthetic oligonucleotide
ucuugaccgaauccccgga

SEQ ID NO: 936015 - RNA, 19 nt, Artificial Sequence
  Description of Artificial Sequence: Synthetic oligonucleotide
caucuugcgguaccugcgg

SEQ ID NO: 936016 - RNA, 19 nt, Artificial Sequence
  Description of Artificial Sequence: Synthetic oligonucleotide
guacuuaucccggaugaac

SEQ ID NO: 936017 - RNA, 19 nt, Artificial Sequence
  Description of Artificial Sequence: Synthetic oligonucleotide
cugacuugcccaaguggcc

SEQ ID NO: 936018 - RNA, 19 nt, Artificial Sequence
  Description of Artificial Sequence: Synthetic oligonucleotide
aacgacauccgggacucca

SEQ ID NO: 936019 - RNA, 19 nt, Artificial Sequence
  Description of Artificial Sequence: Synthetic oligonucleotide
uuuggcuuguuugcugaug

SEQ ID NO: 936020 - RNA, 19 nt, Artificial Sequence
  Description of Artificial Sequence: Synthetic oligonucleotide
gaggccgccgagaugcucg

SEQ ID NO: 936021 - RNA, 19 nt, Artificial Sequence
  Description of Artificial Sequence: Synthetic oligonucleotide
agguugggugcgaugaacg

SEQ ID NO: 936022 - RNA, 19 nt, Artificial Sequence
  Description of Artificial Sequence: Synthetic oligonucleotide
aagcccaaaucuucuugau

SEQ ID NO: 936023 - RNA, 19 nt, Artificial Sequence
  Description of Artificial Sequence: Synthetic oligonucleotide
gaugaacgacauccgggac

SEQ ID NO: 936024 - RNA, 19 nt, Artificial Sequence
  Description of Artificial Sequence: Synthetic oligonucleotide
gaaacugucuacacgggcu

SEQ ID NO: 936025 - RNA, 19 nt, Artificial Sequence
  Description of Artificial Sequence: Synthetic oligonucleotide
uucgaguacuuaucccgga

SEQ ID NO: 936026 - RNA, 19 nt, Artificial Sequence
  Description of Artificial Sequence: Synthetic oligonucleotide
ucuugcuaucccauagcuu

SEQ ID NO: 936027 - RNA, 19 nt, Artificial Sequence
  Description of Artificial Sequence: Synthetic oligonucleotide
aaaagacgagugugaggaa

SEQ ID NO: 936028 - RNA, 19 nt, Artificial Sequence
  Description of Artificial Sequence: Synthetic oligonucleotide
ucgaguacuuaucccggau

SEQ ID NO: 936029 - RNA, 19 nt, Artificial Sequence
  Description of Artificial Sequence: Synthetic oligonucleotide
aucaaggggagcaggcagg

SEQ ID NO: 936030 - RNA, 19 nt, Artificial Sequence
  Description of Artificial Sequence: Synthetic oligonucleotide
cacguacucguagaugcgg

SEQ ID NO: 936031 - RNA, 19 nt, Artificial Sequence
  Description of Artificial Sequence: Synthetic oligonucleotide
acgaccguuccuaagaaau

SEQ ID NO: 936032 - RNA, 19 nt, Artificial Sequence
  Description of Artificial Sequence: Synthetic oligonucleotide
uccgggaaucucuucgagu

SEQ ID NO: 936033 - RNA, 19 nt, Artificial Sequence
  Description of Artificial Sequence: Synthetic oligonucleotide
cagagcguugggaaccaag

SEQ ID NO: 936034 - RNA, 19 nt, Artificial Sequence
  Description of Artificial Sequence: Synthetic oligonucleotide
gacuccacguacucguaga

SEQ ID NO: 936035 - RNA, 19 nt, Artificial Sequence
  Description of Artificial Sequence: Synthetic oligonucleotide
gauaauguucagcucguuu

SEQ ID NO: 936036 - RNA, 19 nt, Artificial Sequence
  Description of Artificial Sequence: Synthetic oligonucleotide
guacucguagaugcggugc

SEQ ID NO: 936037 - RNA, 19 nt, Artificial Sequence
  Description of Artificial Sequence: Synthetic oligonucleotide
ugauaggcaucuuccucaa

SEQ ID NO: 936038 - RNA, 19 nt, Artificial Sequence
  Description of Artificial Sequence: Synthetic oligonucleotide
cugcacgaugucacugugg

SEQ ID NO: 936039 - RNA, 19 nt, Artificial Sequence
  Description of Artificial Sequence: Synthetic oligonucleotide
uccggccacacccaugauc

SEQ ID NO: 936040 - RNA, 19 nt, Artificial Sequence
  Description of Artificial Sequence: Synthetic oligonucleotide
uccgugcucucauggaaac

SEQ ID NO: 936041 - RNA, 19 nt, Artificial Sequence
  Description of Artificial Sequence: Synthetic oligonucleotide
cuugaccgaauccccggag

SEQ ID NO: 936042 - RNA, 19 nt, Artificial Sequence
  Description of Artificial Sequence: Synthetic oligonucleotide
agacgagugugaggaagac

SEQ ID NO: 936043 - RNA, 19 nt, Artificial Sequence
  Description of Artificial Sequence: Synthetic oligonucleotide
accguuccuaagaaauccg

SEQ ID NO: 936044 - RNA, 19 nt, Artificial Sequence
  Description of Artificial Sequence: Synthetic oligonucleotide
uucuagagccugacacugu

SEQ ID NO: 936045 - RNA, 19 nt, Artificial Sequence
  Description of Artificial Sequence: Synthetic oligonucleotide
gagagauuggucaggccuc

SEQ ID NO: 936046 - RNA, 19 nt, Artificial Sequence
  Description of Artificial Sequence: Synthetic oligonucleotide
cuagagaaauacuucuggu

SEQ ID NO: 936047 - RNA, 19 nt, Artificial Sequence
  Description of Artificial Sequence: Synthetic oligonucleotide
ggagagauuggucaggccu

SEQ ID NO: 936048 - RNA, 19 nt, Artificial Sequence
  Description of Artificial Sequence: Synthetic oligonucleotide
cuugcgguaccugcggccc

SEQ ID NO: 936049 - RNA, 19 nt, Artificial Sequence
  Description of Artificial Sequence: Synthetic oligonucleotide
gguggaugcggugacacug

SEQ ID NO: 936050 - RNA, 19 nt, Artificial Sequence
  Description of Artificial Sequence: Synthetic oligonucleotide
acuuaucccggaugaacuu

SEQ ID NO: 936051 - RNA, 19 nt, Artificial Sequence
  Description of Artificial Sequence: Synthetic oligonucleotide
cugugcggauguaauccag

SEQ ID NO: 936052 - RNA, 19 nt, Artificial Sequence
  Description of Artificial Sequence: Synthetic oligonucleotide
uaccccaccuugcccuccg

SEQ ID NO: 936053 - RNA, 19 nt, Artificial Sequence
  Description of Artificial Sequence: Synthetic oligonucleotide
acgaccaugaugguagcau

SEQ ID NO: 936054 - RNA, 19 nt, Artificial Sequence
  Description of Artificial Sequence: Synthetic oligonucleotide
uggagagauuggucaggcc

SEQ ID NO: 936055 - RNA, 19 nt, Artificial Sequence
  Description of Artificial Sequence: Synthetic oligonucleotide
gcgaugaacgacauccggg

SEQ ID NO: 936056 - RNA, 19 nt, Artificial Sequence
  Description of Artificial Sequence: Synthetic oligonucleotide
accgaauccccggagagau

SEQ ID NO: 936057 - RNA, 19 nt, Artificial Sequence
  Description of Artificial Sequence: Synthetic oligonucleotide
cccggagagauccagcugc

SEQ ID NO: 936058 - RNA, 19 nt, Artificial Sequence
  Description of Artificial Sequence: Synthetic oligonucleotide
cuuguggguucacaaucuc

SEQ ID NO: 936059 - RNA, 19 nt, Artificial Sequence
  Description of Artificial Sequence: Synthetic oligonucleotide
uucaccccguuucuuggau

SEQ ID NO: 936060 - RNA, 19 nt, Artificial Sequence
  Description of Artificial Sequence: Synthetic oligonucleotide
uaucccggaugaacuuaug

SEQ ID NO: 936061 - RNA, 19 nt, Artificial Sequence
  Description of Artificial Sequence: Synthetic oligonucleotide
guccgcugcaguguuuugg

SEQ ID NO: 936062 - RNA, 19 nt, Artificial Sequence
  Description of Artificial Sequence: Synthetic oligonucleotide
guagacuucccgccguaca

SEQ ID NO: 936063 - RNA, 19 nt, Artificial Sequence
  Description of Artificial Sequence: Synthetic oligonucleotide
ugcuaucccauagcuuggc

SEQ ID NO: 936064 - RNA, 19 nt, Artificial Sequence
  Description of Artificial Sequence: Synthetic oligonucleotide
cacaacuuccuugccggag

SEQ ID NO: 936065 - RNA, 19 nt, Artificial Sequence
  Description of Artificial Sequence: Synthetic oligonucleotide
cuugggccaaggacagagc

SEQ ID NO: 936066 - RNA, 19 nt, Artificial Sequence
  Description of Artificial Sequence: Synthetic oligonucleotide
uaagguccgcugcaguguu

SEQ ID NO: 936067 - RNA, 19 nt, Artificial Sequence
  Description of Artificial Sequence: Synthetic oligonucleotide
guugggugcgaugaacgac

SEQ ID NO: 936068 - RNA, 19 nt, Artificial Sequence
  Description of Artificial Sequence: Synthetic oligonucleotide
gugcauuuaauuguacucu

SEQ ID NO: 936069 - RNA, 19 nt, Artificial Sequence
  Description of Artificial Sequence: Synthetic oligonucleotide
cauccgggacuccacguac

SEQ ID NO: 936070 - RNA, 19 nt, Artificial Sequence
  Description of Artificial Sequence: Synthetic oligonucleotide
gccugacuugcccaagugg

SEQ ID NO: 936071 - RNA, 19 nt, Artificial Sequence
  Description of Artificial Sequence: Synthetic oligonucleotide
gaugcggugcuuggaagca

SEQ ID NO: 936072 - RNA, 19 nt, Artificial Sequence
  Description of Artificial Sequence: Synthetic oligonucleotide
cagagugcacuuggcagcc

SEQ ID NO: 936073 - RNA, 19 nt, Artificial Sequence
  Description of Artificial Sequence: Synthetic oligonucleotide
gucaggauuugcuggaggu

SEQ ID NO: 936074 - RNA, 19 nt, Artificial Sequence
  Description of Artificial Sequence: Synthetic oligonucleotide
cuuccgccggagaucuggg

SEQ ID NO: 936075 - RNA, 19 nt, Artificial Sequence
  Description of Artificial Sequence: Synthetic oligonucleotide
acggucagguuguuggcau

SEQ ID NO: 936076 - RNA, 19 nt, Artificial Sequence
  Description of Artificial Sequence: Synthetic oligonucleotide
augguagcauuggucagga

SEQ ID NO: 936077 - RNA, 19 nt, Artificial Sequence
  Description of Artificial Sequence: Synthetic oligonucleotide
uuccgccggagaucugggg

SEQ ID NO: 936078 - RNA, 19 nt, Artificial Sequence
  Description of Artificial Sequence: Synthetic oligonucleotide
cuccgcccauuuaacuggg

SEQ ID NO: 936079 - RNA, 19 nt, Artificial Sequence
  Description of Artificial Sequence: Synthetic oligonucleotide
cucguagaugcggugcuug

SEQ ID NO: 936080 - RNA, 19 nt, Artificial Sequence
  Description of Artificial Sequence: Synthetic oligonucleotide
agaccuccgcccauuuaac

SEQ ID NO: 936081 - RNA, 19 nt, Artificial Sequence
  Description of Artificial Sequence: Synthetic oligonucleotide
agcccaaaucuucuugaua

SEQ ID NO: 936082 - RNA, 19 nt, Artificial Sequence
  Description of Artificial Sequence: Synthetic oligonucleotide
ccaaagcucaugcgguugg

SEQ ID NO: 936083 - RNA, 19 nt, Artificial Sequence
  Description of Artificial Sequence: Synthetic oligonucleotide
ggagaagcccgacagcguc

SEQ ID NO: 936084 - RNA, 19 nt, Artificial Sequence
  Description of Artificial Sequence: Synthetic oligonucleotide
gcuaucccauagcuuggcg

SEQ ID NO: 936085 - RNA, 19 nt, Artificial Sequence
  Description of Artificial Sequence: Synthetic oligonucleotide
gaugcucgcacgaccguuc

SEQ ID NO: 936086 - RNA, 19 nt, Artificial Sequence
  Description of Artificial Sequence: Synthetic oligonucleotide
uggaugcggugacacugac

SEQ ID NO: 936087 - RNA, 19 nt, Artificial Sequence
  Description of Artificial Sequence: Synthetic oligonucleotide
cuugccggaggucggucac

SEQ ID NO: 936088 - RNA, 19 nt, Artificial Sequence
  Description of Artificial Sequence: Synthetic oligonucleotide
ugcggugcuuggaagcauu

SEQ ID NO: 936089 - RNA, 19 nt, Artificial Sequence
  Description of Artificial Sequence: Synthetic oligonucleotide
cuccgggaaucucuucgag

SEQ ID NO: 936090 - RNA, 19 nt, Artificial Sequence
  Description of Artificial Sequence: Synthetic oligonucleotide
ucgcacgaccguuccuaag

SEQ ID NO: 936091 - RNA, 19 nt, Artificial Sequence
  Description of Artificial Sequence: Synthetic oligonucleotide
agcggucucggaugguaga

SEQ ID NO: 936092 - RNA, 19 nt, Artificial Sequence
  Description of Artificial Sequence: Synthetic oligonucleotide
cucggaugguagacuuccc

SEQ ID NO: 936093 - RNA, 19 nt, Artificial Sequence
  Description of Artificial Sequence: Synthetic oligonucleotide
gugcgaugaacgacauccg

SEQ ID NO: 936094 - RNA, 19 nt, Artificial Sequence
  Description of Artificial Sequence: Synthetic oligonucleotide
acugacgaccaugauggua

SEQ ID NO: 936095 - RNA, 19 nt, Artificial Sequence
  Description of Artificial Sequence: Synthetic oligonucleotide
gacugcacgaugucacugu

SEQ ID NO: 936096 - RNA, 19 nt, Artificial Sequence
  Description of Artificial Sequence: Synthetic oligonucleotide
acacgggcugccagagugc

SEQ ID NO: 936097 - RNA, 19 nt, Artificial Sequence
  Description of Artificial Sequence: Synthetic oligonucleotide
cacugugcauuuaauugua

SEQ ID NO: 936098 - RNA, 19 nt, Artificial Sequence
  Description of Artificial Sequence: Synthetic oligonucleotide
cuucccgccguacaccaca

SEQ ID NO: 936099 - RNA, 19 nt, Artificial Sequence
  Description of Artificial Sequence: Synthetic oligonucleotide
ugccgcuuuucucacccuu

SEQ ID NO: 936100 - RNA, 19 nt, Artificial Sequence
  Description of Artificial Sequence: Synthetic oligonucleotide
gagauuggucaggccuccg

SEQ ID NO: 936101 - RNA, 19 nt, Artificial Sequence
  Description of Artificial Sequence: Synthetic oligonucleotide
ggacuccacguacucguag

SEQ ID NO: 936102 - RNA, 19 nt, Artificial Sequence
  Description of Artificial Sequence: Synthetic oligonucleotide
ccguuccuaagaaauccgc

SEQ ID NO: 936103 - RNA, 19 nt, Artificial Sequence
  Description of Artificial Sequence: Synthetic oligonucleotide
acauccgggacuccacgua

SEQ ID NO: 936104 - RNA, 19 nt, Artificial Sequence
  Description of Artificial Sequence: Synthetic oligonucleotide
ccuugggccaaggacagag

SEQ ID NO: 936105 - RNA, 19 nt, Artificial Sequence
  Description of Artificial Sequence: Synthetic oligonucleotide
ggucagguuguuggcaucc

SEQ ID NO: 936106 - RNA, 19 nt, Artificial Sequence
  Description of Artificial Sequence: Synthetic oligonucleotide
gagcggucucggaugguag

SEQ ID NO: 936107 - RNA, 19 nt, Artificial Sequence
  Description of Artificial Sequence: Synthetic oligonucleotide
cccgaggccgccgagaugc

SEQ ID NO: 936108 - RNA, 19 nt, Artificial Sequence
  Description of Artificial Sequence: Synthetic oligonucleotide
gucuacacgggcugccaga

SEQ ID NO: 936109 - RNA, 19 nt, Artificial Sequence
  Description of Artificial Sequence: Synthetic oligonucleotide
agagccugacacugugcau

SEQ ID NO: 936110 - RNA, 19 nt, Artificial Sequence
  Description of Artificial Sequence: Synthetic oligonucleotide
cuuccucgccauagcuccc

SEQ ID NO: 936111 - RNA, 19 nt, Artificial Sequence
  Description of Artificial Sequence: Synthetic oligonucleotide
cuuggaugcucuggccuug

SEQ ID NO: 936112 - RNA, 19 nt, Artificial Sequence
  Description of Artificial Sequence: Synthetic oligonucleotide
uugcccuccgugcucucau

SEQ ID NO: 936113 - RNA, 19 nt, Artificial Sequence
  Description of Artificial Sequence: Synthetic oligonucleotide
cgaauccccggagagaucc

SEQ ID NO: 936114 - RNA, 19 nt, Artificial Sequence
  Description of Artificial Sequence: Synthetic oligonucleotide
auucuagcuccgggaaucu

SEQ ID NO: 936115 - RNA, 19 nt, Artificial Sequence
  Description of Artificial Sequence: Synthetic oligonucleotide
uccagagcguugggaacca

SEQ ID NO: 936116 - RNA, 19 nt, Artificial Sequence
  Description of Artificial Sequence: Synthetic oligonucleotide
uagugccgcuuuucucacc

SEQ ID NO: 936117 - RNA, 19 nt, Artificial Sequence
  Description of Artificial Sequence: Synthetic oligonucleotide
uucccgccguacaccacac

SEQ ID NO: 936118 - RNA, 19 nt, Artificial Sequence
  Description of Artificial Sequence: Synthetic oligonucleotide
augauguugcaggcaggca

SEQ ID NO: 936119 - RNA, 19 nt, Artificial Sequence
  Description of Artificial Sequence: Synthetic oligonucleotide
uugcgguaccugcggcccc

SEQ ID NO: 936120 - RNA, 19 nt, Artificial Sequence
  Description of Artificial Sequence: Synthetic oligonucleotide
uggcgaugcucuugaccga

SEQ ID NO: 936121 - RNA, 19 nt, Artificial Sequence
  Description of Artificial Sequence: Synthetic oligonucleotide
gaugauggacagguugggu

SEQ ID NO: 936122 - RNA, 19 nt, Artificial Sequence
  Description of Artificial Sequence: Synthetic oligonucleotide
cggaugguagacuucccgc

SEQ ID NO: 936123 - RNA, 19 nt, Artificial Sequence
  Description of Artificial Sequence: Synthetic oligonucleotide
cugcuuccggaucucuguc

SEQ ID NO: 936124 - RNA, 19 nt, Artificial Sequence
  Description of Artificial Sequence: Synthetic oligonucleotide
acguacucguagaugcggu

SEQ ID NO: 936125 - RNA, 19 nt, Artificial Sequence
  Description of Artificial Sequence: Synthetic oligonucleotide
agacaucccgaggccgccg

SEQ ID NO: 936126 - RNA, 19 nt, Artificial Sequence
  Description of Artificial Sequence: Synthetic oligonucleotide
gccgaggcucuucaccccg

SEQ ID NO: 936127 - RNA, 19 nt, Artificial Sequence
  Description of Artificial Sequence: Synthetic oligonucleotide
uuccucgccauagcucccu

SEQ ID NO: 936128 - RNA, 19 nt, Artificial Sequence
  Description of Artificial Sequence: Synthetic oligonucleotide
gacgggccgaggcucuuca

SEQ ID NO: 936129 - RNA, 19 nt, Artificial Sequence
  Description of Artificial Sequence: Synthetic oligonucleotide
gguugggugcgaugaacga

SEQ ID NO: 936130 - RNA, 19 nt, Artificial Sequence
  Description of Artificial Sequence: Synthetic oligonucleotide
cuuaucccggaugaacuua

SEQ ID NO: 936131 - RNA, 19 nt, Artificial Sequence
  Description of Artificial Sequence: Synthetic oligonucleotide
caucacuuccgaggcuuug

SEQ ID NO: 936132 - RNA, 19 nt, Artificial Sequence
  Description of Artificial Sequence: Synthetic oligonucleotide
ccuuccgccggagaucugg

SEQ ID NO: 936133 - RNA, 19 nt, Artificial Sequence
  Description of Artificial Sequence: Synthetic oligonucleotide
ccgcccauuuaacuggggc

SEQ ID NO: 936134 - RNA, 19 nt, Artificial Sequence
  Description of Artificial Sequence: Synthetic oligonucleotide
gacauccgggacuccacgu

SEQ ID NO: 936135 - RNA, 19 nt, Artificial Sequence
  Description of Artificial Sequence: Synthetic oligonucleotide
gugguagauguagccggug

SEQ ID NO: 936136 - RNA, 19 nt, Artificial Sequence
  Description of Artificial Sequence: Synthetic oligonucleotide
ggaugcggugacacugacg

SEQ ID NO: 936137 - RNA, 19 nt, Artificial Sequence
  Description of Artificial Sequence: Synthetic oligonucleotide
ccacguacucguagaugcg

SEQ ID NO: 936138 - RNA, 19 nt, Artificial Sequence
  Description of Artificial Sequence: Synthetic oligonucleotide
ccgagaugcucgcacgacc

SEQ ID NO: 936139 - RNA, 19 nt, Artificial Sequence
  Description of Artificial Sequence: Synthetic oligonucleotide
cuucaccccguuucuugga

SEQ ID NO: 936140 - RNA, 19 nt, Artificial Sequence
  Description of Artificial Sequence: Synthetic oligonucleotide
acgggccgaggcucuucac

SEQ ID NO: 936141 - RNA, 19 nt, Artificial Sequence
  Description of Artificial Sequence: Synthetic oligonucleotide
gacgaccaugaugguagca

SEQ ID NO: 936142 - RNA, 19 nt, Artificial Sequence
  Description of Artificial Sequence: Synthetic oligonucleotide
gaagaccuccgcccauuua

SEQ ID NO: 936143 - RNA, 19 nt, Artificial Sequence
  Description of Artificial Sequence: Synthetic oligonucleotide
gcccuccgugcucucaugg

SEQ ID NO: 936144 - RNA, 19 nt, Artificial Sequence
  Description of Artificial Sequence: Synthetic oligonucleotide
aacuugcgcucaaucucau

SEQ ID NO: 936145 - RNA, 19 nt, Artificial Sequence
  Description of Artificial Sequence: Synthetic oligonucleotide
gaccgaauccccggagaga

SEQ ID NO: 936146 - RNA, 19 nt, Artificial Sequence
  Description of Artificial Sequence: Synthetic oligonucleotide
acaucccgaggccgccgag

SEQ ID NO: 936147 - RNA, 19 nt, Artificial Sequence
  Description of Artificial Sequence: Synthetic oligonucleotide
ggacugcacgaugucacug

SEQ ID NO: 936148 - RNA, 19 nt, Artificial Sequence
  Description of Artificial Sequence: Synthetic oligonucleotide
ccuuuaguucguaccccac

SEQ ID NO: 936149 - RNA, 19 nt, Artificial Sequence
  Description of Artificial Sequence: Synthetic oligonucleotide
acccaugaucuuggcagcu

SEQ ID NO: 936150 - RNA, 19 nt, Artificial Sequence
  Description of Artificial Sequence: Synthetic oligonucleotide
guaagguccgcugcagugu

SEQ ID NO: 936151 - RNA, 19 nt, Artificial Sequence
  Description of Artificial Sequence: Synthetic oligonucleotide
gagccugacacugugcauu

SEQ ID NO: 936152 - RNA, 19 nt, Artificial Sequence
  Description of Artificial Sequence: Synthetic oligonucleotide
acuugcccaaguggcccag

SEQ ID NO: 936153 - RNA, 19 nt, Artificial Sequence
  Description of Artificial Sequence: Synthetic oligonucleotide
agaugcucgcacgaccguu

SEQ ID NO: 936154 - RNA, 19 nt, Artificial Sequence
  Description of Artificial Sequence: Synthetic oligonucleotide
aucccauagcuuggcgaug

SEQ ID NO: 936155 - RNA, 19 nt, Artificial Sequence
  Description of Artificial Sequence: Synthetic oligonucleotide
cgaugaacgacauccggga

SEQ ID NO: 936156 - RNA, 19 nt, Artificial Sequence
  Description of Artificial Sequence: Synthetic oligonucleotide
gaccuccgcccauuuaacu

SEQ ID NO: 936157 - RNA, 19 nt, Artificial Sequence
  Description of Artificial Sequence: Synthetic oligonucleotide
ugcccuccgugcucucaug

SEQ ID NO: 936158 - RNA, 19 nt, Artificial Sequence
  Description of Artificial Sequence: Synthetic oligonucleotide
ccgggaaucucuucgagua

SEQ ID NO: 936159 - RNA, 19 nt, Artificial Sequence
  Description of Artificial Sequence: Synthetic oligonucleotide
cgaguacuuaucccggaug

SEQ ID NO: 936160 - RNA, 19 nt, Artificial Sequence
  Description of Artificial Sequence: Synthetic oligonucleotide
gaagcccgacagcgucuug

SEQ ID NO: 936161 - RNA, 19 nt, Artificial Sequence
  Description of Artificial Sequence: Synthetic oligonucleotide
cccgccguacaccacacuc

SEQ ID NO: 936162 - RNA, 19 nt, Artificial Sequence
  Description of Artificial Sequence: Synthetic oligonucleotide
acguccucgauggcuggcu

SEQ ID NO: 936163 - RNA, 19 nt, Artificial Sequence
  Description of Artificial Sequence: Synthetic oligonucleotide
cucgccauagcucccuccu

SEQ ID NO: 936164 - RNA, 19 nt, Artificial Sequence
  Description of Artificial Sequence: Synthetic oligonucleotide
cacacgcccacugccugac

SEQ ID NO: 936165 - RNA, 19 nt, Artificial Sequence
  Description of Artificial Sequence: Synthetic oligonucleotide
ucccgaggccgccgagaug

SEQ ID NO: 936166 - RNA, 19 nt, Artificial Sequence
  Description of Artificial Sequence: Synthetic oligonucleotide
agguccgcugcaguguuuu

SEQ ID NO: 936167 - RNA, 19 nt, Artificial Sequence
  Description of Artificial Sequence: Synthetic oligonucleotide
guggacauagugccgcuuu

SEQ ID NO: 936168 - RNA, 19 nt, Artificial Sequence
  Description of Artificial Sequence: Synthetic oligonucleotide
agaagcccgacagcgucuu

SEQ ID NO: 936169 - RNA, 19 nt, Artificial Sequence
  Description of Artificial Sequence: Synthetic oligonucleotide
acuucccgccguacaccac

SEQ ID NO: 936170 - RNA, 19 nt, Artificial Sequence
  Description of Artificial Sequence: Synthetic oligonucleotide
ggacauagugccgcuuuuc

SEQ ID NO: 936171 - RNA, 19 nt, Artificial Sequence
  Description of Artificial Sequence: Synthetic oligonucleotide
cacggucagguuguuggca

SEQ ID NO: 936172 - RNA, 19 nt, Artificial Sequence
  Description of Artificial Sequence: Synthetic oligonucleotide
cacgaccguuccuaagaaa

SEQ ID NO: 936173 - RNA, 19 nt, Artificial Sequence
  Description of Artificial Sequence: Synthetic oligonucleotide
cugaggagcggucucggau

SEQ ID NO: 936174 - RNA, 19 nt, Artificial Sequence
  Description of Artificial Sequence: Synthetic oligonucleotide
gccgccgagaugcucgcac

SEQ ID NO: 936175 - RNA, 19 nt, Artificial Sequence
  Description of Artificial Sequence: Synthetic oligonucleotide
ccggccacacccaugaucu

SEQ ID NO: 936176 - RNA, 19 nt, Artificial Sequence
  Description of Artificial Sequence: Synthetic oligonucleotide
gcgucuugcgcugggcucc

SEQ ID NO: 936177 - RNA, 19 nt, Artificial Sequence
  Description of Artificial Sequence: Synthetic oligonucleotide
cugacacugugcauuuaau

SEQ ID NO: 936178 - RNA, 19 nt, Artificial Sequence
  Description of Artificial Sequence: Synthetic oligonucleotide
caccuugcccuccgugcuc

SEQ ID NO: 936179 - RNA, 19 nt, Artificial Sequence
  Description of Artificial Sequence: Synthetic oligonucleotide
ucccgccguacaccacacu

SEQ ID NO: 936180 - RNA, 19 nt, Artificial Sequence
  Description of Artificial Sequence: Synthetic oligonucleotide
auccgggacuccacguacu

SEQ ID NO: 936181 - RNA, 19 nt, Artificial Sequence
  Description of Artificial Sequence: Synthetic oligonucleotide
cacugccugacuugcccaa

SEQ ID NO: 936182 - RNA, 19 nt, Artificial Sequence
  Description of Artificial Sequence: Synthetic oligonucleotide
gcucaugcgguuggccugc

SEQ ID NO: 936183 - RNA, 19 nt, Artificial Sequence
  Description of Artificial Sequence: Synthetic oligonucleotide
cagcaugauguugcaggca

SEQ ID NO: 936184 - RNA, 19 nt, Artificial Sequence
  Description of Artificial Sequence: Synthetic oligonucleotide
gguagacuucccgccguac

SEQ ID NO: 936185 - RNA, 19 nt, Artificial Sequence
  Description of Artificial Sequence: Synthetic oligonucleotide
gccgcuuuucucacccuug

SEQ ID NO: 936186 - RNA, 19 nt, Artificial Sequence
  Description of Artificial Sequence: Synthetic oligonucleotide
cguacucguagaugcggug

SEQ ID NO: 936187 - RNA, 19 nt, Artificial Sequence
  Description of Artificial Sequence: Synthetic oligonucleotide
ugccggaggucggucacuu

SEQ ID NO: 936188 - RNA, 19 nt, Artificial Sequence
  Description of Artificial Sequence: Synthetic oligonucleotide
uugccggaggucggucacu

SEQ ID NO: 936189 - RNA, 19 nt, Artificial Sequence
  Description of Artificial Sequence: Synthetic oligonucleotide
ccgccgagaugcucgcacg

SEQ ID NO: 936190 - RNA, 19 nt, Artificial Sequence
  Description of Artificial Sequence: Synthetic oligonucleotide
cgacauccgggacuccacg

SEQ ID NO: 936191 - RNA, 19 nt, Artificial Sequence
  Description of Artificial Sequence: Synthetic oligonucleotide
gagaagcccgacagcgucu

SEQ ID NO: 936192 - RNA, 19 nt, Artificial Sequence
  Description of Artificial Sequence: Synthetic oligonucleotide
gaacgacauccgggacucc

SEQ ID NO: 936193 - RNA, 19 nt, Artificial Sequence
  Description of Artificial Sequence: Synthetic oligonucleotide
gucugccgcacacgcccac

SEQ ID NO: 936194 - RNA, 19 nt, Artificial Sequence
  Description of Artificial Sequence: Synthetic oligonucleotide
acucguagaugcggugcuu

SEQ ID NO: 936195 - RNA, 19 nt, Artificial Sequence
  Description of Artificial Sequence: Synthetic oligonucleotide
ccucgccauagcucccucc

SEQ ID NO: 936196 - RNA, 19 nt, Artificial Sequence
  Description of Artificial Sequence: Synthetic oligonucleotide
cgcacgaccguuccuaaga

SEQ ID NO: 936197 - RNA, 19 nt, Artificial Sequence
  Description of Artificial Sequence: Synthetic oligonucleotide
cucgcacgaccguuccuaa

SEQ ID NO: 936198 - RNA, 19 nt, Artificial Sequence
  Description of Artificial Sequence: Synthetic oligonucleotide
cgcccauuuaacuggggca

SEQ ID NO: 936199 - RNA, 19 nt, Artificial Sequence
  Description of Artificial Sequence: Synthetic oligonucleotide
cacgggcugccagagugca

SEQ ID NO: 936200 - RNA, 19 nt, Artificial Sequence
  Description of Artificial Sequence: Synthetic oligonucleotide
gcacgaccguuccuaagaa

SEQ ID NO: 936201 - RNA, 19 nt, Artificial Sequence
  Description of Artificial Sequence: Synthetic oligonucleotide
gcggugacacugacgacca

SEQ ID NO: 936202 - RNA, 19 nt, Artificial Sequence
  Description of Artificial Sequence: Synthetic oligonucleotide
gggagacgggccgaggcuc

SEQ ID NO: 936203 - RNA, 19 nt, Artificial Sequence
  Description of Artificial Sequence: Synthetic oligonucleotide
cuugcccuccgugcucuca

SEQ ID NO: 936204 - RNA, 19 nt, Artificial Sequence
  Description of Artificial Sequence: Synthetic oligonucleotide
ggauuugcuggagguucuc

SEQ ID NO: 936205 - RNA, 19 nt, Artificial Sequence
  Description of Artificial Sequence: Synthetic oligonucleotide
augcggugcuuggaagcau

SEQ ID NO: 936206 - RNA, 19 nt, Artificial Sequence
  Description of Artificial Sequence: Synthetic oligonucleotide
accccguuucuuggaugcu

SEQ ID NO: 936207 - RNA, 19 nt, Artificial Sequence
  Description of Artificial Sequence: Synthetic oligonucleotide
caccagccgggcugccuuc

SEQ ID NO: 936208 - RNA, 19 nt, Artificial Sequence
  Description of Artificial Sequence: Synthetic oligonucleotide
ccgcuccuucaucuugcgg

SEQ ID NO: 936209 - RNA, 19 nt, Artificial Sequence
  Description of Artificial Sequence: Synthetic oligonucleotide
ggagcggucucggauggua

SEQ ID NO: 936210 - RNA, 19 nt, Artificial Sequence
  Description of Artificial Sequence: Synthetic oligonucleotide
ccguuucuuggaugcucug

SEQ ID NO: 936211 - RNA, 19 nt, Artificial Sequence
  Description of Artificial Sequence: Synthetic oligonucleotide
cguuccuaagaaauccgcu

SEQ ID NO: 936212 - RNA, 19 nt, Artificial Sequence
  Description of Artificial Sequence: Synthetic oligonucleotide
gcucgcacgaccguuccua

SEQ ID NO: 936213 - RNA, 19 nt, Artificial Sequence
  Description of Artificial Sequence: Synthetic oligonucleotide
ccacaaugacucgguacuc

SEQ ID NO: 936214 - RNA, 19 nt, Artificial Sequence
  Description of Artificial Sequence: Synthetic oligonucleotide
ccuccgugcucucauggaa

SEQ ID NO: 936215 - RNA, 19 nt, Artificial Sequence
  Description of Artificial Sequence: Synthetic oligonucleotide
gccgagaugcucgcacgac

SEQ ID NO: 936216 - RNA, 19 nt, Artificial Sequence
  Description of Artificial Sequence: Synthetic oligonucleotide
gcguugggaaccaaggauu

SEQ ID NO: 936217 - RNA, 19 nt, Artificial Sequence
  Description of Artificial Sequence: Synthetic oligonucleotide
ccgcuuuucucacccuuga

SEQ ID NO: 936218 - RNA, 19 nt, Artificial Sequence
  Description of Artificial Sequence: Synthetic oligonucleotide
gcuuggcgaugcucuugac

SEQ ID NO: 936219 - RNA, 19 nt, Artificial Sequence
  Description of Artificial Sequence: Synthetic oligonucleotide
gggugcgaugaacgacauc

SEQ ID NO: 936220 - RNA, 19 nt, Artificial Sequence
  Description of Artificial Sequence: Synthetic oligonucleotide
cacgcccacugccugacuu

SEQ ID NO: 936221 - RNA, 19 nt, Artificial Sequence
  Description of Artificial Sequence: Synthetic oligonucleotide
cccguuucuuggaugcucu

SEQ ID NO: 936222 - RNA, 19 nt, Artificial Sequence
  Description of Artificial Sequence: Synthetic oligonucleotide
aggagcggucucggauggu

SEQ ID NO: 936223 - RNA, 19 nt, Artificial Sequence
  Description of Artificial Sequence: Synthetic oligonucleotide
ggggagacgggccgaggcu

SEQ ID NO: 936224 - RNA, 19 nt, Artificial Sequence
  Description of Artificial Sequence: Synthetic oligonucleotide
uccgaggcuuuggcuuguu

SEQ ID NO: 936225 - RNA, 19 nt, Artificial Sequence
  Description of Artificial Sequence: Synthetic oligonucleotide
ucuccacggucagguuguu

SEQ ID NO: 936226 - RNA, 19 nt, Artificial Sequence
  Description of Artificial Sequence: Synthetic oligonucleotide
gcggugcuuggaagcauuc

SEQ ID NO: 936227 - RNA, 19 nt, Artificial Sequence
  Description of Artificial Sequence: Synthetic oligonucleotide
cccuccgugcucucaugga

SEQ ID NO: 936228 - RNA, 19 nt, Artificial Sequence
  Description of Artificial Sequence: Synthetic oligonucleotide
ccacaacuuccuugccgga

SEQ ID NO: 936229 - RNA, 19 nt, Artificial Sequence
  Description of Artificial Sequence: Synthetic oligonucleotide
ccgaauccccggagagauc

SEQ ID NO: 936230 - RNA, 19 nt, Artificial Sequence
  Description of Artificial Sequence: Synthetic oligonucleotide
cuacacgggcugccagagu

SEQ ID NO: 936231 - RNA, 19 nt, Artificial Sequence
  Description of Artificial Sequence: Synthetic oligonucleotide
gguuggccugcuuccggau

SEQ ID NO: 936232 - RNA, 19 nt, Artificial Sequence
  Description of Artificial Sequence: Synthetic oligonucleotide
cacugacgaccaugauggu

SEQ ID NO: 936233 - RNA, 19 nt, Artificial Sequence
  Description of Artificial Sequence: Synthetic oligonucleotide
gugccgcuuuucucacccu

SEQ ID NO: 936234 - RNA, 19 nt, Artificial Sequence
  Description of Artificial Sequence: Synthetic oligonucleotide
cggucagguuguuggcauc

SEQ ID NO: 936235 - RNA, 19 nt, Artificial Sequence
  Description of Artificial Sequence: Synthetic oligonucleotide
gugcggcagcacugaggua

SEQ ID NO: 936236 - RNA, 19 nt, Artificial Sequence
  Description of Artificial Sequence: Synthetic oligonucleotide
cggaggucggucacuucaa

SEQ ID NO: 936237 - RNA, 19 nt, Artificial Sequence
  Description of Artificial Sequence: Synthetic oligonucleotide
cccaggcuaaagcccaaau

SEQ ID NO: 936238 - RNA, 19 nt, Artificial Sequence
  Description of Artificial Sequence: Synthetic oligonucleotide
cgccgagaugcucgcacga

SEQ ID NO: 936239 - RNA, 19 nt, Artificial Sequence
  Description of Artificial Sequence: Synthetic oligonucleotide
gguggacauagugccgcuu

SEQ ID NO: 936240 - RNA, 19 nt, Artificial Sequence
  Description of Artificial Sequence: Synthetic oligonucleotide
gcccaggcuaaagcccaaa

SEQ ID NO: 936241 - RNA, 19 nt, Artificial Sequence
  Description of Artificial Sequence: Synthetic oligonucleotide
cgucuugcgcugggcuccc

SEQ ID NO: 936242 - RNA, 19 nt, Artificial Sequence
  Description of Artificial Sequence: Synthetic oligonucleotide
gccuugggccaaggacaga

SEQ ID NO: 936243 - RNA, 19 nt, Artificial Sequence
  Description of Artificial Sequence: Synthetic oligonucleotide
cucaugcgguuggccugcu

SEQ ID NO: 936244 - RNA, 19 nt, Artificial Sequence
  Description of Artificial Sequence: Synthetic oligonucleotide
ccaucacuuccgaggcuuu

SEQ ID NO: 936245 - RNA, 19 nt, Artificial Sequence
  Description of Artificial Sequence: Synthetic oligonucleotide
cgaggccgccgagaugcuc

SEQ ID NO: 936246 - RNA, 19 nt, Artificial Sequence
  Description of Artificial Sequence: Synthetic oligonucleotide
ccgugcucucauggaaacu

SEQ ID NO: 936247 - RNA, 19 nt, Artificial Sequence
  Description of Artificial Sequence: Synthetic oligonucleotide
ccgaggcucuucaccccgu

SEQ ID NO: 936248 - RNA, 19 nt, Artificial Sequence
  Description of Artificial Sequence: Synthetic oligonucleotide
gcgaugcucuugaccgaau

SEQ ID NO: 936249 - RNA, 19 nt, Artificial Sequence
  Description of Artificial Sequence: Synthetic oligonucleotide
ccagagcguugggaaccaa

SEQ ID NO: 936250 - RNA, 19 nt, Artificial Sequence
  Description of Artificial Sequence: Synthetic oligonucleotide
ccgaggcuuuggcuuguuu

SEQ ID NO: 936251 - RNA, 19 nt, Artificial Sequence
  Description of Artificial Sequence: Synthetic oligonucleotide
cacccggggccuggccccu

SEQ ID NO: 936252 - RNA, 19 nt, Artificial Sequence
  Description of Artificial Sequence: Synthetic oligonucleotide
cggagagauccagcugcgu

SEQ ID NO: 936253 - RNA, 19 nt, Artificial Sequence
  Description of Artificial Sequence: Synthetic oligonucleotide
ucugaauugacauaguugc

SEQ ID NO: 936254 - RNA, 19 nt, Artificial Sequence
  Description of Artificial Sequence: Synthetic oligonucleotide
ugaauguugacguugaagc

SEQ ID NO: 936255 - RNA, 19 nt, Artificial Sequence
  Description of Artificial Sequence: Synthetic oligonucleotide
aaucgcagaagucaauacc

SEQ ID NO: 936256 - RNA, 19 nt, Artificial Sequence
  Description of Artificial Sequence: Synthetic oligonucleotide
agcaacaacuaucucaucc

SEQ ID NO: 936257 - RNA, 19 nt, Artificial Sequence
  Description of Artificial Sequence: Synthetic oligonucleotide
guuaaaaucgucuagaucu

SEQ ID NO: 936258 - RNA, 19 nt, Artificial Sequence
  Description of Artificial Sequence: Synthetic oligonucleotide
uuuaugauaaguugggcug

SEQ ID NO: 936259 - RNA, 19 nt, Artificial Sequence
  Description of Artificial Sequence: Synthetic oligonucleotide
aucgucuagaucuaaaagg

SEQ ID NO: 936260 - RNA, 19 nt, Artificial Sequence
  Description of Artificial Sequence: Synthetic oligonucleotide
uguacugacguugauaacg

SEQ ID NO: 936261 - RNA, 19 nt, Artificial Sequence
  Description of Artificial Sequence: Synthetic oligonucleotide
agcauucuaaagcagagac

SEQ ID NO: 936262 - RNA, 19 nt, Artificial Sequence
  Description of Artificial Sequence: Synthetic oligonucleotide
ucagcuaucaagcuuggag

SEQ ID NO: 936263 - RNA, 19 nt, Artificial Sequence
  Description of Artificial Sequence: Synthetic oligonucleotide
aagaaaggauugcauacac

SEQ ID NO: 936264 - RNA, 19 nt, Artificial Sequence
  Description of Artificial Sequence: Synthetic oligonucleotide
aaucgucuagaucuaaaag

SEQ ID NO: 936265 - RNA, 19 nt, Artificial Sequence
  Description of Artificial Sequence: Synthetic oligonucleotide
gaguugagaaaacugacag

SEQ ID NO: 936266 - RNA, 19 nt, Artificial Sequence
  Description of Artificial Sequence: Synthetic oligonucleotide
ugccuaauaaaucuugugc

SEQ ID NO: 936267 - RNA, 19 nt, Artificial Sequence
  Description of Artificial Sequence: Synthetic oligonucleotide
uuuacaaccuucuggagga

SEQ ID NO: 936268 - RNA, 19 nt, Artificial Sequence
  Description of Artificial Sequence: Synthetic oligonucleotide
gaaaggauugcauacacga

SEQ ID NO: 936269 - RNA, 19 nt, Artificial Sequence
  Description of Artificial Sequence: Synthetic oligonucleotide
uucaguguuauuuguacag

SEQ ID NO: 936270 - RNA, 19 nt, Artificial Sequence
  Description of Artificial Sequence: Synthetic oligonucleotide
ucauaguuggaucagugga

SEQ ID NO: 936271 - RNA, 19 nt, Artificial Sequence
  Description of Artificial Sequence: Synthetic oligonucleotide
cauugucagacucugaugc

SEQ ID NO: 936272 - RNA, 19 nt, Artificial Sequence
  Description of Artificial Sequence: Synthetic oligonucleotide
acgauagauacacaccagc

SEQ ID NO: 936273 - RNA, 19 nt, Artificial Sequence
  Description of Artificial Sequence: Synthetic oligonucleotide
aguguuuaugauaaguugg

SEQ ID NO: 936274 - RNA, 19 nt, Artificial Sequence
  Description of Artificial Sequence: Synthetic oligonucleotide
acaguuuuagcugcaaacc

SEQ ID NO: 936275 - RNA, 19 nt, Artificial Sequence
  Description of Artificial Sequence: Synthetic oligonucleotide
acaaguuuagaccuucaag

SEQ ID NO: 936276 - RNA, 19 nt, Artificial Sequence
  Description of Artificial Sequence: Synthetic oligonucleotide
ugcauuugcaugccuacgg

SEQ ID NO: 936277 - RNA, 19 nt, Artificial Sequence
  Description of Artificial Sequence: Synthetic oligonucleotide
ucgucuagaucuaaaagga

SEQ ID NO: 936278 - RNA, 19 nt, Artificial Sequence
  Description of Artificial Sequence: Synthetic oligonucleotide
ucauucggaacaauaagcu

SEQ ID NO: 936279 - RNA, 19 nt, Artificial Sequence
  Description of Artificial Sequence: Synthetic oligonucleotide
gauauguuggcuucauuug

SEQ ID NO: 936280 - RNA, 19 nt, Artificial Sequence
  Description of Artificial Sequence: Synthetic oligonucleotide
ucucauucggaacaauaag

SEQ ID NO: 936281 - RNA, 19 nt, Artificial Sequence
  Description of Artificial Sequence: Synthetic oligonucleotide
cucauucggaacaauaagc

SEQ ID NO: 936282 - RNA, 19 nt, Artificial Sequence
  Description of Artificial Sequence: Synthetic oligonucleotide
cacugauacaguaacagac

SEQ ID NO: 936283 - RNA, 19 nt, Artificial Sequence
  Description of Artificial Sequence: Synthetic oligonucleotide
ugauaacggaugaagaagu

SEQ ID NO: 936284 - RNA, 19 nt, Artificial Sequence
  Description of Artificial Sequence: Synthetic oligonucleotide
uggcuuuucacguaggucu

SEQ ID NO: 936285 - RNA, 19 nt, Artificial Sequence
  Description of Artificial Sequence: Synthetic oligonucleotide
uugauaacggaugaagaag

SEQ ID NO: 936286 - RNA, 19 nt, Artificial Sequence
  Description of Artificial Sequence: Synthetic oligonucleotide
aauuucuaccaugcugugc

SEQ ID NO: 936287 - RNA, 19 nt, Artificial Sequence
  Description of Artificial Sequence: Synthetic oligonucleotide
uucuaaagcagagacaaga

SEQ ID NO: 936288 - RNA, 19 nt, Artificial Sequence
  Description of Artificial Sequence: Synthetic oligonucleotide
aucgcagaagucaauaccc

SEQ ID NO: 936289 - RNA, 19 nt, Artificial Sequence
  Description of Artificial Sequence: Synthetic oligonucleotide
uguagcagaggucucauuc

SEQ ID NO: 936290 - RNA, 19 nt, Artificial Sequence
  Description of Artificial Sequence: Synthetic oligonucleotide
aagcggucuguguagaauc

SEQ ID NO: 936291 - RNA, 19 nt, Artificial Sequence
  Description of Artificial Sequence: Synthetic oligonucleotide
gauaaguugggcuguggag

SEQ ID NO: 936292 - RNA, 19 nt, Artificial Sequence
  Description of Artificial Sequence: Synthetic oligonucleotide
guuaucuuggccugaaggc

SEQ ID NO: 936293 - RNA, 19 nt, Artificial Sequence
  Description of Artificial Sequence: Synthetic oligonucleotide
ucuugcuccacucuucuca

SEQ ID NO: 936294 - RNA, 19 nt, Artificial Sequence
  Description of Artificial Sequence: Synthetic oligonucleotide
gaagaguugauauguuggc

SEQ ID NO: 936295 - RNA, 19 nt, Artificial Sequence
  Description of Artificial Sequence: Synthetic oligonucleotide
aaacauacccuuucucuga

SEQ ID NO: 936296 - RNA, 19 nt, Artificial Sequence
  Description of Artificial Sequence: Synthetic oligonucleotide
aaacaagcggucuguguag

SEQ ID NO: 936297 - RNA, 19 nt, Artificial Sequence
  Description of Artificial Sequence: Synthetic oligonucleotide
uacacgauagauacacacc

SEQ ID NO: 936298 - RNA, 19 nt, Artificial Sequence
  Description of Artificial Sequence: Synthetic oligonucleotide
acacgauagauacacacca

SEQ ID NO: 936299 - RNA, 19 nt, Artificial Sequence
  Description of Artificial Sequence: Synthetic oligonucleotide
auaguuggaucaguggacc

SEQ ID NO: 936300 - RNA, 19 nt, Artificial Sequence
  Description of Artificial Sequence: Synthetic oligonucleotide
auucacguccaucauuuuc

SEQ ID NO: 936301 - RNA, 19 nt, Artificial Sequence
  Description of Artificial Sequence: Synthetic oligonucleotide
aaggauugcauacacgaua

SEQ ID NO: 936302 - RNA, 19 nt, Artificial Sequence
  Description of Artificial Sequence: Synthetic oligonucleotide
aaaccuguguacguuaucu

SEQ ID NO: 936303 - RNA, 19 nt, Artificial Sequence
  Description of Artificial Sequence: Synthetic oligonucleotide
acuucggugaugcugguug

SEQ ID NO: 936304 - RNA, 19 nt, Artificial Sequence
  Description of Artificial Sequence: Synthetic oligonucleotide
auugucagacucugaugcc

SEQ ID NO: 936305 - RNA, 19 nt, Artificial Sequence
  Description of Artificial Sequence: Synthetic oligonucleotide
cucugaauugacauaguug

SEQ ID NO: 936306 - RNA, 19 nt, Artificial Sequence
  Description of Artificial Sequence: Synthetic oligonucleotide
guggaccugacauagaaac

SEQ ID NO: 936307 - RNA, 19 nt, Artificial Sequence
  Description of Artificial Sequence: Synthetic oligonucleotide
ugauucacguccaucauuu

SEQ ID NO: 936308 - RNA, 19 nt, Artificial Sequence
  Description of Artificial Sequence: Synthetic oligonucleotide
aaacaugcauuugcaugcc

SEQ ID NO: 936309 - RNA, 19 nt, Artificial Sequence
  Description of Artificial Sequence: Synthetic oligonucleotide
cuaucuuucgaucagaagu

SEQ ID NO: 936310 - RNA, 19 nt, Artificial Sequence
  Description of Artificial Sequence: Synthetic oligonucleotide
auagauacacaccagcauu

SEQ ID NO: 936311 - RNA, 19 nt, Artificial Sequence
  Description of Artificial Sequence: Synthetic oligonucleotide
cugacaguaaaauauaugu

SEQ ID NO: 936312 - RNA, 19 nt, Artificial Sequence
  Description of Artificial Sequence: Synthetic oligonucleotide
uugguuagcaaagcgaaga

SEQ ID NO: 936313 - RNA, 19 nt, Artificial Sequence
  Description of Artificial Sequence: Synthetic oligonucleotide
uguacguuaucuuggccug

SEQ ID NO: 936314 - RNA, 19 nt, Artificial Sequence
  Description of Artificial Sequence: Synthetic oligonucleotide
ugauaaguugggcugugga

SEQ ID NO: 936315 - RNA, 19 nt, Artificial Sequence
  Description of Artificial Sequence: Synthetic oligonucleotide
uggauacuggguuaaaauc

SEQ ID NO: 936316 - RNA, 19 nt, Artificial Sequence
  Description of Artificial Sequence: Synthetic oligonucleotide
ugugacuagcaucaaugac

SEQ ID NO: 936317 - RNA, 19 nt, Artificial Sequence
  Description of Artificial Sequence: Synthetic oligonucleotide
caaacauacccuuucucug

SEQ ID NO: 936318 - RNA, 19 nt, Artificial Sequence
  Description of Artificial Sequence: Synthetic oligonucleotide
cuaucaagcuuggagaaag

SEQ ID NO: 936319 - RNA, 19 nt, Artificial Sequence
  Description of Artificial Sequence: Synthetic oligonucleotide
acugugcacaguuuuagcu

SEQ ID NO: 936320 - RNA, 19 nt, Artificial Sequence
  Description of Artificial Sequence: Synthetic oligonucleotide
uuugguuagcaaagcgaag

SEQ ID NO: 936321 - RNA, 19 nt, Artificial Sequence
  Description of Artificial Sequence: Synthetic oligonucleotide
ucugccuauggucugaaua

SEQ ID NO: 936322 - RNA, 19 nt, Artificial Sequence
  Description of Artificial Sequence: Synthetic oligonucleotide
cugccuauggucugaauag

SEQ ID NO: 936323 - RNA, 19 nt, Artificial Sequence
  Description of Artificial Sequence: Synthetic oligonucleotide
ucuaucuuucgaucagaag

SEQ ID NO: 936324 - RNA, 19 nt, Artificial Sequence
  Description of Artificial Sequence: Synthetic oligonucleotide
uuuggugcacaacuggaaa

SEQ ID NO: 936325 - RNA, 19 nt, Artificial Sequence
  Description of Artificial Sequence: Synthetic oligonucleotide
guguuuaugauaaguuggg

SEQ ID NO: 936326 - RNA, 19 nt, Artificial Sequence
  Description of Artificial Sequence: Synthetic oligonucleotide
aaaugcugcauggauucag

SEQ ID NO: 936327 - RNA, 19 nt, Artificial Sequence
  Description of Artificial Sequence: Synthetic oligonucleotide
cugacguugauaacggaug

SEQ ID NO: 936328 - RNA, 19 nt, Artificial Sequence
  Description of Artificial Sequence: Synthetic oligonucleotide
agaucagcuaucaagcuug

SEQ ID NO: 936329 - RNA, 19 nt, Artificial Sequence
  Description of Artificial Sequence: Synthetic oligonucleotide
uuugcaugccuacgggaag

SEQ ID NO: 936330 - RNA, 19 nt, Artificial Sequence
  Description of Artificial Sequence: Synthetic oligonucleotide
gaaucuacuuuuccucuug

SEQ ID NO: 936331 - RNA, 19 nt, Artificial Sequence
  Description of Artificial Sequence: Synthetic oligonucleotide
ugguuagcaaagcgaagag

SEQ ID NO: 936332 - RNA, 19 nt, Artificial Sequence
  Description of Artificial Sequence: Synthetic oligonucleotide
aggaagggcaacuggagug

SEQ ID NO: 936333 - RNA, 19 nt, Artificial Sequence
  Description of Artificial Sequence: Synthetic oligonucleotide
uuucaguguuauuuguaca

SEQ ID NO: 936334 - RNA, 19 nt, Artificial Sequence
  Description of Artificial Sequence: Synthetic oligonucleotide
ugaagcaaucaucuuuggu

SEQ ID NO: 936335 - RNA, 19 nt, Artificial Sequence
  Description of Artificial Sequence: Synthetic oligonucleotide
aagaucagcuaucaagcuu

SEQ ID NO: 936336 - RNA, 19 nt, Artificial Sequence
  Description of Artificial Sequence: Synthetic oligonucleotide
uugucagacucugaugccg

SEQ ID NO: 936337 - RNA, 19 nt, Artificial Sequence
  Description of Artificial Sequence: Synthetic oligonucleotide
uagauacacaccagcauuc

SEQ ID NO: 936338 - RNA, 19 nt, Artificial Sequence
  Description of Artificial Sequence: Synthetic oligonucleotide
uuauaacaaccacacuuuc

SEQ ID NO: 936339 - RNA, 19 nt, Artificial Sequence
  Description of Artificial Sequence: Synthetic oligonucleotide
ugacaguaaaauauauguu

SEQ ID NO: 936340 - RNA, 19 nt, Artificial Sequence
  Description of Artificial Sequence: Synthetic oligonucleotide
uaucaagcuuggagaaagg

SEQ ID NO: 936341 - RNA, 19 nt, Artificial Sequence
  Description of Artificial Sequence: Synthetic oligonucleotide
guugauaacggaugaagaa

SEQ ID NO: 936342 - RNA, 19 nt, Artificial Sequence
  Description of Artificial Sequence: Synthetic oligonucleotide
uggguuaaaaucgucuaga

SEQ ID NO: 936343 - RNA, 19 nt, Artificial Sequence
  Description of Artificial Sequence: Synthetic oligonucleotide
uuaucuuggccugaaggca

SEQ ID NO: 936344 - RNA, 19 nt, Artificial Sequence
  Description of Artificial Sequence: Synthetic oligonucleotide
gaagagaagaaaggauugc

SEQ ID NO: 936345 - RNA, 19 nt, Artificial Sequence
  Description of Artificial Sequence: Synthetic oligonucleotide
uaauaaaucuugugcgguc

SEQ ID NO: 936346 - RNA, 19 nt, Artificial Sequence
  Description of Artificial Sequence: Synthetic oligonucleotide
uacccacugauacaguaac

SEQ ID NO: 936347 - RNA, 19 nt, Artificial Sequence
  Description of Artificial Sequence: Synthetic oligonucleotide
agguaagguucaaacauac

SEQ ID NO: 936348 - RNA, 19 nt, Artificial Sequence
  Description of Artificial Sequence: Synthetic oligonucleotide
aagcgaagagaagaaagga

SEQ ID NO: 936349 - RNA, 19 nt, Artificial Sequence
  Description of Artificial Sequence: Synthetic oligonucleotide
ugacguugauaacggauga

SEQ ID NO: 936350 - RNA, 19 nt, Artificial Sequence
  Description of Artificial Sequence: Synthetic oligonucleotide
gauggaagggcuauuauua

SEQ ID NO: 936351 - RNA, 19 nt, Artificial Sequence
  Description of Artificial Sequence: Synthetic oligonucleotide
guuuaugauaaguugggcu

SEQ ID NO: 936352 - RNA, 19 nt, Artificial Sequence
  Description of Artificial Sequence: Synthetic oligonucleotide
accuguguacguuaucuug

SEQ ID NO: 936353 - RNA, 19 nt, Artificial Sequence
  Description of Artificial Sequence: Synthetic oligonucleotide
uguuuaugauaaguugggc

SEQ ID NO: 936354 - RNA, 19 nt, Artificial Sequence
  Description of Artificial Sequence: Synthetic oligonucleotide
gaucauaguuggaucagug

SEQ ID NO: 936355 - RNA, 19 nt, Artificial Sequence
  Description of Artificial Sequence: Synthetic oligonucleotide
auaguugcaauguuuugua

SEQ ID NO: 936356 - RNA, 19 nt, Artificial Sequence
  Description of Artificial Sequence: Synthetic oligonucleotide
uuaaaaucgucuagaucua

SEQ ID NO: 936357 - RNA, 19 nt, Artificial Sequence
  Description of Artificial Sequence: Synthetic oligonucleotide
gaaucgcagaagucaauac

SEQ ID NO: 936358 - RNA, 19 nt, Artificial Sequence
  Description of Artificial Sequence: Synthetic oligonucleotide
aggauugcauacacgauag

SEQ ID NO: 936359 - RNA, 19 nt, Artificial Sequence
  Description of Artificial Sequence: Synthetic oligonucleotide
cauucggaacaauaagcug

SEQ ID NO: 936360 - RNA, 19 nt, Artificial Sequence
  Description of Artificial Sequence: Synthetic oligonucleotide
uuaccccugggacaggaca

SEQ ID NO: 936361 - RNA, 19 nt, Artificial Sequence
  Description of Artificial Sequence: Synthetic oligonucleotide
cuuugguuagcaaagcgaa

SEQ ID NO: 936362 - RNA, 19 nt, Artificial Sequence
  Description of Artificial Sequence: Synthetic oligonucleotide
ucuugugcggucucugaug

SEQ ID NO: 936363 - RNA, 19 nt, Artificial Sequence
  Description of Artificial Sequence: Synthetic oligonucleotide
auaacggaugaagaaguug

SEQ ID NO: 936364 - RNA, 19 nt, Artificial Sequence
  Description of Artificial Sequence: Synthetic oligonucleotide
ucucugaauugacauaguu

SEQ ID NO: 936365 - RNA, 19 nt, Artificial Sequence
  Description of Artificial Sequence: Synthetic oligonucleotide
ucacguaggucugaaauuc

SEQ ID NO: 936366 - RNA, 19 nt, Artificial Sequence
  Description of Artificial Sequence: Synthetic oligonucleotide
ucugaauaguggcggcugc

SEQ ID NO: 936367 - RNA, 19 nt, Artificial Sequence
  Description of Artificial Sequence: Synthetic oligonucleotide
uucuaucuuucgaucagaa

SEQ ID NO: 936368 - RNA, 19 nt, Artificial Sequence
  Description of Artificial Sequence: Synthetic oligonucleotide
uugaucauaguuggaucag

SEQ ID NO: 936369 - RNA, 19 nt, Artificial Sequence
  Description of Artificial Sequence: Synthetic oligonucleotide
auacccuuucucugaauug

SEQ ID NO: 936370 - RNA, 19 nt, Artificial Sequence
  Description of Artificial Sequence: Synthetic oligonucleotide
uguguacguuaucuuggcc

SEQ ID NO: 936371 - RNA, 19 nt, Artificial Sequence
  Description of Artificial Sequence: Synthetic oligonucleotide
guacugacguugauaacgg

SEQ ID NO: 936372 - RNA, 19 nt, Artificial Sequence
  Description of Artificial Sequence: Synthetic oligonucleotide
caugccuacgggaagcuuc

SEQ ID NO: 936373 - RNA, 19 nt, Artificial Sequence
  Description of Artificial Sequence: Synthetic oligonucleotide
cuggguuaaaaucgucuag

SEQ ID NO: 936374 - RNA, 19 nt, Artificial Sequence
  Description of Artificial Sequence: Synthetic oligonucleotide
aaaucuugugcggucucug

SEQ ID NO: 936375 - RNA, 19 nt, Artificial Sequence
  Description of Artificial Sequence: Synthetic oligonucleotide
uuaugauaaguugggcugu

SEQ ID NO: 936376 - RNA, 19 nt, Artificial Sequence
  Description of Artificial Sequence: Synthetic oligonucleotide
gaagaaaggauugcauaca

SEQ ID NO: 936377 - RNA, 19 nt, Artificial Sequence
  Description of Artificial Sequence: Synthetic oligonucleotide
gguguacugacguugauaa

SEQ ID NO: 936378 - RNA, 19 nt, Artificial Sequence
  Description of Artificial Sequence: Synthetic oligonucleotide
agauggaagggcuauuauu

SEQ ID NO: 936379 - RNA, 19 nt, Artificial Sequence
  Description of Artificial Sequence: Synthetic oligonucleotide
gaagucaauacccacugau

SEQ ID NO: 936380 - RNA, 19 nt, Artificial Sequence
  Description of Artificial Sequence: Synthetic oligonucleotide
cuuccccgcugccagaugg

SEQ ID NO: 936381 - RNA, 19 nt, Artificial Sequence
  Description of Artificial Sequence: Synthetic oligonucleotide
guaggucugaaauucucga

SEQ ID NO: 936382 - RNA, 19 nt, Artificial Sequence
  Description of Artificial Sequence: Synthetic oligonucleotide
acuggguuaaaaucgucua

SEQ ID NO: 936383 - RNA, 19 nt, Artificial Sequence
  Description of Artificial Sequence: Synthetic oligonucleotide
cagagagucuauuggauga

SEQ ID NO: 936384 - RNA, 19 nt, Artificial Sequence
  Description of Artificial Sequence: Synthetic oligonucleotide
aacauacccuuucucugaa

SEQ ID NO: 936385 - RNA, 19 nt, Artificial Sequence
  Description of Artificial Sequence: Synthetic oligonucleotide
aaacugacaguaaaauaua

SEQ ID NO: 936386 - RNA, 19 nt, Artificial Sequence
  Description of Artificial Sequence: Synthetic oligonucleotide
cugccuaauaaaucuugug

SEQ ID NO: 936387 - RNA, 19 nt, Artificial Sequence
  Description of Artificial Sequence: Synthetic oligonucleotide
uuuuccccuauguggauau

SEQ ID NO: 936388 - RNA, 19 nt, Artificial Sequence
  Description of Artificial Sequence: Synthetic oligonucleotide
aaaaucgucuagaucuaaa

SEQ ID NO: 936389 - RNA, 19 nt, Artificial Sequence
  Description of Artificial Sequence: Synthetic oligonucleotide
ucccuguuggauagcaaac

SEQ ID NO: 936390 - RNA, 19 nt, Artificial Sequence
  Description of Artificial Sequence: Synthetic oligonucleotide
uuuuagcugcaaaccugug

SEQ ID NO: 936391 - RNA, 19 nt, Artificial Sequence
  Description of Artificial Sequence: Synthetic oligonucleotide
gucaccgaaaacugccaag

SEQ ID NO: 936392 - RNA, 19 nt, Artificial Sequence
  Description of Artificial Sequence: Synthetic oligonucleotide
aucccuguuggauagcaaa

SEQ ID NO: 936393 - RNA, 19 nt, Artificial Sequence
  Description of Artificial Sequence: Synthetic oligonucleotide
uuucuaucuuucgaucaga

SEQ ID NO: 936394 - RNA, 19 nt, Artificial Sequence
  Description of Artificial Sequence: Synthetic oligonucleotide
auucucgaagaagaguuga

SEQ ID NO: 936395 - RNA, 19 nt, Artificial Sequence
  Description of Artificial Sequence: Synthetic oligonucleotide
aacaugcauuugcaugccu

SEQ ID NO: 936396 - RNA, 19 nt, Artificial Sequence
  Description of Artificial Sequence: Synthetic oligonucleotide
ucgcagaagucaauaccca

SEQ ID NO: 936397 - RNA, 19 nt, Artificial Sequence
  Description of Artificial Sequence: Synthetic oligonucleotide
cagcuaucaagcuuggaga

SEQ ID NO: 936398 - RNA, 19 nt, Artificial Sequence
  Description of Artificial Sequence: Synthetic oligonucleotide
gauagauacacaccagcau

SEQ ID NO: 936399 - RNA, 19 nt, Artificial Sequence
  Description of Artificial Sequence: Synthetic oligonucleotide
caucuuuggugcacaacug

SEQ ID NO: 936400 - RNA, 19 nt, Artificial Sequence
  Description of Artificial Sequence: Synthetic oligonucleotide
uugucaccgaaaacugcca

SEQ ID NO: 936401 - RNA, 19 nt, Artificial Sequence
  Description of Artificial Sequence: Synthetic oligonucleotide
ggaacaauaagcugccuaa

SEQ ID NO: 936402 - RNA, 19 nt, Artificial Sequence
  Description of Artificial Sequence: Synthetic oligonucleotide
cacgauagauacacaccag

SEQ ID NO: 936403 - RNA, 19 nt, Artificial Sequence
  Description of Artificial Sequence: Synthetic oligonucleotide
gguucaaacauacccuuuc

SEQ ID NO: 936404 - RNA, 19 nt, Artificial Sequence
  Description of Artificial Sequence: Synthetic oligonucleotide
ugacaaguuuagaccuuca

SEQ ID NO: 936405 - RNA, 19 nt, Artificial Sequence
  Description of Artificial Sequence: Synthetic oligonucleotide
uaugauaaguugggcugug

SEQ ID NO: 936406 - RNA, 19 nt, Artificial Sequence
  Description of Artificial Sequence: Synthetic oligonucleotide
ugucaccgaaaacugccaa

SEQ ID NO: 936407 - RNA, 19 nt, Artificial Sequence
  Description of Artificial Sequence: Synthetic oligonucleotide
cacucuucucauucggaac

SEQ ID NO: 936408 - RNA, 19 nt, Artificial Sequence
  Description of Artificial Sequence: Synthetic oligonucleotide
caucuugucaccgaaaacu

SEQ ID NO: 936409 - RNA, 19 nt, Artificial Sequence
  Description of Artificial Sequence: Synthetic oligonucleotide
uggcugaauguugacguug

SEQ ID NO: 936410 - RNA, 19 nt, Artificial Sequence
  Description of Artificial Sequence: Synthetic oligonucleotide
uugacaaguuuagaccuuc

SEQ ID NO: 936411 - RNA, 19 nt, Artificial Sequence
  Description of Artificial Sequence: Synthetic oligonucleotide
ccagauguaagcagguuac

SEQ ID NO: 936412 - RNA, 19 nt, Artificial Sequence
  Description of Artificial Sequence: Synthetic oligonucleotide
ucuuucgaucagaaguauu

SEQ ID NO: 936413 - RNA, 19 nt, Artificial Sequence
  Description of Artificial Sequence: Synthetic oligonucleotide
guguacguuaucuuggccu

SEQ ID NO: 936414 - RNA, 19 nt, Artificial Sequence
  Description of Artificial Sequence: Synthetic oligonucleotide
uucucgaagaagaguugau

SEQ ID NO: 936415 - RNA, 19 nt, Artificial Sequence
  Description of Artificial Sequence: Synthetic oligonucleotide
gguuaaaaucgucuagauc

SEQ ID NO: 936416 - RNA, 19 nt, Artificial Sequence
  Description of Artificial Sequence: Synthetic oligonucleotide
aaaggauugcauacacgau

SEQ ID NO: 936417 - RNA, 19 nt, Artificial Sequence
  Description of Artificial Sequence: Synthetic oligonucleotide
ugcacuggaugauucugaa

SEQ ID NO: 936418 - RNA, 19 nt, Artificial Sequence
  Description of Artificial Sequence: Synthetic oligonucleotide
agcaguagugggugccagg

SEQ ID NO: 936419 - RNA, 19 nt, Artificial Sequence
  Description of Artificial Sequence: Synthetic oligonucleotide
uggaagggcuauuauuaua

SEQ ID NO: 936420 - RNA, 19 nt, Artificial Sequence
  Description of Artificial Sequence: Synthetic oligonucleotide
ugaucauaguuggaucagu

SEQ ID NO: 936421 - RNA, 19 nt, Artificial Sequence
  Description of Artificial Sequence: Synthetic oligonucleotide
ugaaucuacuuuuccucuu

SEQ ID NO: 936422 - RNA, 19 nt, Artificial Sequence
  Description of Artificial Sequence: Synthetic oligonucleotide
cagguuaccccugggacag

SEQ ID NO: 936423 - RNA, 19 nt, Artificial Sequence
  Description of Artificial Sequence: Synthetic oligonucleotide
uaaaucuugugcggucucu

SEQ ID NO: 936424 - RNA, 19 nt, Artificial Sequence
  Description of Artificial Sequence: Synthetic oligonucleotide
cagguucauugucagacuc

SEQ ID NO: 936425 - RNA, 19 nt, Artificial Sequence
  Description of Artificial Sequence: Synthetic oligonucleotide
cuagaucuaaaaggaaaca

SEQ ID NO: 936426 - RNA, 19 nt, Artificial Sequence
  Description of Artificial Sequence: Synthetic oligonucleotide
agaccuucaagaucagcua

SEQ ID NO: 936427 - RNA, 19 nt, Artificial Sequence
  Description of Artificial Sequence: Synthetic oligonucleotide
ucucgaagaagaguugaua

SEQ ID NO: 936428 - RNA, 19 nt, Artificial Sequence
  Description of Artificial Sequence: Synthetic oligonucleotide
acugacguugauaacggau

SEQ ID NO: 936429 - RNA, 19 nt, Artificial Sequence
  Description of Artificial Sequence: Synthetic oligonucleotide
cuuucgaucagaaguauuu

SEQ ID NO: 936430 - RNA, 19 nt, Artificial Sequence
  Description of Artificial Sequence: Synthetic oligonucleotide
agaaucgcagaagucaaua

SEQ ID NO: 936431 - RNA, 19 nt, Artificial Sequence
  Description of Artificial Sequence: Synthetic oligonucleotide
ugcaaaccuguguacguua

SEQ ID NO: 936432 - RNA, 19 nt, Artificial Sequence
  Description of Artificial Sequence: Synthetic oligonucleotide
uaaaaucgucuagaucuaa

SEQ ID NO: 936433 - RNA, 19 nt, Artificial Sequence
  Description of Artificial Sequence: Synthetic oligonucleotide
aaccuguguacguuaucuu

SEQ ID NO: 936434 - RNA, 19 nt, Artificial Sequence
  Description of Artificial Sequence: Synthetic oligonucleotide
caaccacacuuucagcaac

SEQ ID NO: 936435 - RNA, 19 nt, Artificial Sequence
  Description of Artificial Sequence: Synthetic oligonucleotide
aagucaauacccacugaua

SEQ ID NO: 936436 - RNA, 19 nt, Artificial Sequence
  Description of Artificial Sequence: Synthetic oligonucleotide
gcauuugcaugccuacggg

SEQ ID NO: 936437 - RNA, 19 nt, Artificial Sequence
  Description of Artificial Sequence: Synthetic oligonucleotide
ucucaguguuuaugauaag

SEQ ID NO: 936438 - RNA, 19 nt, Artificial Sequence
  Description of Artificial Sequence: Synthetic oligonucleotide
auggaagggcuauuauuau

SEQ ID NO: 936439 - RNA, 19 nt, Artificial Sequence
  Description of Artificial Sequence: Synthetic oligonucleotide
gaucagcuaucaagcuugg

SEQ ID NO: 936440 - RNA, 19 nt, Artificial Sequence
  Description of Artificial Sequence: Synthetic oligonucleotide
acguaggucugaaauucuc

SEQ ID NO: 936441 - RNA, 19 nt, Artificial Sequence
  Description of Artificial Sequence: Synthetic oligonucleotide
cccgcugccagauggaagg

SEQ ID NO: 936442 - RNA, 19 nt, Artificial Sequence
  Description of Artificial Sequence: Synthetic oligonucleotide
uaguuggaucaguggaccu

SEQ ID NO: 936443 - RNA, 19 nt, Artificial Sequence
  Description of Artificial Sequence: Synthetic oligonucleotide
aacaagcggucuguguaga

SEQ ID NO: 936444 - RNA, 19 nt, Artificial Sequence
  Description of Artificial Sequence: Synthetic oligonucleotide
cuucggugaugcugguugc

SEQ ID NO: 936445 - RNA, 19 nt, Artificial Sequence
  Description of Artificial Sequence: Synthetic oligonucleotide
ugaauaguggcggcugcaa

SEQ ID NO: 936446 - RNA, 19 nt, Artificial Sequence
  Description of Artificial Sequence: Synthetic oligonucleotide
uagaaucgcagaagucaau

SEQ ID NO: 936447 - RNA, 19 nt, Artificial Sequence
  Description of Artificial Sequence: Synthetic oligonucleotide
agcgaagagaagaaaggau

SEQ ID NO: 936448 - RNA, 19 nt, Artificial Sequence
  Description of Artificial Sequence: Synthetic oligonucleotide
cugugacuagcaucaauga

SEQ ID NO: 936449 - RNA, 19 nt, Artificial Sequence
  Description of Artificial Sequence: Synthetic oligonucleotide
cuguggagccuucuuucag

SEQ ID NO: 936450 - RNA, 19 nt, Artificial Sequence
  Description of Artificial Sequence: Synthetic oligonucleotide
uuuucacguaggucugaaa

SEQ ID NO: 936451 - RNA, 19 nt, Artificial Sequence
  Description of Artificial Sequence: Synthetic oligonucleotide
agaccaucuugucaccgaa

SEQ ID NO: 936452 - RNA, 19 nt, Artificial Sequence
  Description of Artificial Sequence: Synthetic oligonucleotide
ggaagggcaacuggagugg

SEQ ID NO: 936453 - RNA, 19 nt, Artificial Sequence
  Description of Artificial Sequence: Synthetic oligonucleotide
agagucuauuggaugaaaa

SEQ ID NO: 936454 - RNA, 19 nt, Artificial Sequence
  Description of Artificial Sequence: Synthetic oligonucleotide
ggcggcugcaaacuguuug

SEQ ID NO: 936455 - RNA, 19 nt, Artificial Sequence
  Description of Artificial Sequence: Synthetic oligonucleotide
cguaggucugaaauucucg

SEQ ID NO: 936456 - RNA, 19 nt, Artificial Sequence
  Description of Artificial Sequence: Synthetic oligonucleotide
uugcuaaguuugucaaaau

SEQ ID NO: 936457 - RNA, 19 nt, Artificial Sequence
  Description of Artificial Sequence: Synthetic oligonucleotide
cuacgggaagcuucuuuuc

SEQ ID NO: 936458 - RNA, 19 nt, Artificial Sequence
  Description of Artificial Sequence: Synthetic oligonucleotide
gaagggcuauuauuauaaa

SEQ ID NO: 936459 - RNA, 19 nt, Artificial Sequence
  Description of Artificial Sequence: Synthetic oligonucleotide
cuuuggugcacaacuggaa

SEQ ID NO: 936460 - RNA, 19 nt, Artificial Sequence
  Description of Artificial Sequence: Synthetic oligonucleotide
gacauaguugcaauguuuu

SEQ ID NO: 936461 - RNA, 19 nt, Artificial Sequence
  Description of Artificial Sequence: Synthetic oligonucleotide
agcaaagcgaagagaagaa

SEQ ID NO: 936462 - RNA, 19 nt, Artificial Sequence
  Description of Artificial Sequence: Synthetic oligonucleotide
gcugcauggauucaggagu

SEQ ID NO: 936463 - RNA, 19 nt, Artificial Sequence
  Description of Artificial Sequence: Synthetic oligonucleotide
gauacacaccagcauucua

SEQ ID NO: 936464 - RNA, 19 nt, Artificial Sequence
  Description of Artificial Sequence: Synthetic oligonucleotide
uacugacguugauaacgga

SEQ ID NO: 936465 - RNA, 19 nt, Artificial Sequence
  Description of Artificial Sequence: Synthetic oligonucleotide
ccagagagucuauuggaug

SEQ ID NO: 936466 - RNA, 19 nt, Artificial Sequence
  Description of Artificial Sequence: Synthetic oligonucleotide
caguggaccugacauagaa

SEQ ID NO: 936467 - RNA, 19 nt, Artificial Sequence
  Description of Artificial Sequence: Synthetic oligonucleotide
guucaaacauacccuuucu

SEQ ID NO: 936468 - RNA, 19 nt, Artificial Sequence
  Description of Artificial Sequence: Synthetic oligonucleotide
uacguuaucuuggccugaa

SEQ ID NO: 936469 - RNA, 19 nt, Artificial Sequence
  Description of Artificial Sequence: Synthetic oligonucleotide
acguuaucuuggccugaag

SEQ ID NO: 936470 - RNA, 19 nt, Artificial Sequence
  Description of Artificial Sequence: Synthetic oligonucleotide
uguugacguugaagcaauc

SEQ ID NO: 936471 - RNA, 19 nt, Artificial Sequence
  Description of Artificial Sequence: Synthetic oligonucleotide
ucggugaugcugguugcac

SEQ ID NO: 936472 - RNA, 19 nt, Artificial Sequence
  Description of Artificial Sequence: Synthetic oligonucleotide
ggucuguguagaaucgcag

SEQ ID NO: 936473 - RNA, 19 nt, Artificial Sequence
  Description of Artificial Sequence: Synthetic oligonucleotide
gguaagguucaaacauacc

SEQ ID NO: 936474 - RNA, 19 nt, Artificial Sequence
  Description of Artificial Sequence: Synthetic oligonucleotide
caguuuuagcugcaaaccu

SEQ ID NO: 936475 - RNA, 19 nt, Artificial Sequence
  Description of Artificial Sequence: Synthetic oligonucleotide
cagguaagguucaaacaua

SEQ ID NO: 936476 - RNA, 19 nt, Artificial Sequence
  Description of Artificial Sequence: Synthetic oligonucleotide
acaugcauuugcaugccua

SEQ ID NO: 936477 - RNA, 19 nt, Artificial Sequence
  Description of Artificial Sequence: Synthetic oligonucleotide
uucggugaugcugguugca

SEQ ID NO: 936478 - RNA, 19 nt, Artificial Sequence
  Description of Artificial Sequence: Synthetic oligonucleotide
acagaaccaaucaggguuu

SEQ ID NO: 936479 - RNA, 19 nt, Artificial Sequence
  Description of Artificial Sequence: Synthetic oligonucleotide
auacccacugauacaguaa

SEQ ID NO: 936480 - RNA, 19 nt, Artificial Sequence
  Description of Artificial Sequence: Synthetic oligonucleotide
agagagucuauuggaugaa

SEQ ID NO: 936481 - RNA, 19 nt, Artificial Sequence
  Description of Artificial Sequence: Synthetic oligonucleotide
caggccauugaggcaagug

SEQ ID NO: 936482 - RNA, 19 nt, Artificial Sequence
  Description of Artificial Sequence: Synthetic oligonucleotide
cuauguggauauuuucuau

SEQ ID NO: 936483 - RNA, 19 nt, Artificial Sequence
  Description of Artificial Sequence: Synthetic oligonucleotide
uuggaucaguggaccugac

SEQ ID NO: 936484 - RNA, 19 nt, Artificial Sequence
  Description of Artificial Sequence: Synthetic oligonucleotide
ugguugcacaucugccuau

SEQ ID NO: 936485 - RNA, 19 nt, Artificial Sequence
  Description of Artificial Sequence: Synthetic oligonucleotide
agguguacugacguugaua

SEQ ID NO: 936486 - RNA, 19 nt, Artificial Sequence
  Description of Artificial Sequence: Synthetic oligonucleotide
ugucaagagugugcucuuc

SEQ ID NO: 936487 - RNA, 19 nt, Artificial Sequence
  Description of Artificial Sequence: Synthetic oligonucleotide
ggcuguggagccuucuuuc

SEQ ID NO: 936488 - RNA, 19 nt, Artificial Sequence
  Description of Artificial Sequence: Synthetic oligonucleotide
agggcaacuggaguggaua

SEQ ID NO: 936489 - RNA, 19 nt, Artificial Sequence
  Description of Artificial Sequence: Synthetic oligonucleotide
caagaucagcuaucaagcu

SEQ ID NO: 936490 - RNA, 19 nt, Artificial Sequence
  Description of Artificial Sequence: Synthetic oligonucleotide
cauuccucguuccuucuua

SEQ ID NO: 936491 - RNA, 19 nt, Artificial Sequence
  Description of Artificial Sequence: Synthetic oligonucleotide
gagagucuauuggaugaaa

SEQ ID NO: 936492 - RNA, 19 nt, Artificial Sequence
  Description of Artificial Sequence: Synthetic oligonucleotide
ggggagaugucuuucuugu

SEQ ID NO: 936493 - RNA, 19 nt, Artificial Sequence
  Description of Artificial Sequence: Synthetic oligonucleotide
ggcuauuauuauaaaugaa

SEQ ID NO: 936494 - RNA, 19 nt, Artificial Sequence
  Description of Artificial Sequence: Synthetic oligonucleotide
ccgacucagagccugaaga

SEQ ID NO: 936495 - RNA, 19 nt, Artificial Sequence
  Description of Artificial Sequence: Synthetic oligonucleotide
acguugaagcaaucaucuu

SEQ ID NO: 936496 - RNA, 19 nt, Artificial Sequence
  Description of Artificial Sequence: Synthetic oligonucleotide
aggcaagugucggugacuu

SEQ ID NO: 936497 - RNA, 19 nt, Artificial Sequence
  Description of Artificial Sequence: Synthetic oligonucleotide
ugcaugccuacgggaagcu

SEQ ID NO: 936498 - RNA, 19 nt, Artificial Sequence
  Description of Artificial Sequence: Synthetic oligonucleotide
ggagaaaaugcugcaugga

SEQ ID NO: 936499 - RNA, 19 nt, Artificial Sequence
  Description of Artificial Sequence: Synthetic oligonucleotide
augucguaguuuugaucuu

SEQ ID NO: 936500 - RNA, 19 nt, Artificial Sequence
  Description of Artificial Sequence: Synthetic oligonucleotide
cgauagauacacaccagca

SEQ ID NO: 936501 - RNA, 19 nt, Artificial Sequence
  Description of Artificial Sequence: Synthetic oligonucleotide
acauacccuuucucugaau

SEQ ID NO: 936502 - RNA, 19 nt, Artificial Sequence
  Description of Artificial Sequence: Synthetic oligonucleotide
cugguugcacaucugccua

SEQ ID NO: 936503 - RNA, 19 nt, Artificial Sequence
  Description of Artificial Sequence: Synthetic oligonucleotide
ggaucauggagggagugaa

SEQ ID NO: 936504 - RNA, 19 nt, Artificial Sequence
  Description of Artificial Sequence: Synthetic oligonucleotide
augccuacgggaagcuucu

SEQ ID NO: 936505 - RNA, 19 nt, Artificial Sequence
  Description of Artificial Sequence: Synthetic oligonucleotide
caccaggccauugaggcaa

SEQ ID NO: 936506 - RNA, 19 nt, Artificial Sequence
  Description of Artificial Sequence: Synthetic oligonucleotide
aguggaccugacauagaaa

SEQ ID NO: 936507 - RNA, 19 nt, Artificial Sequence
  Description of Artificial Sequence: Synthetic oligonucleotide
ugaugccgacucagagccu

SEQ ID NO: 936508 - RNA, 19 nt, Artificial Sequence
  Description of Artificial Sequence: Synthetic oligonucleotide
cagcgaugacuguagcaga

SEQ ID NO: 936509 - RNA, 19 nt, Artificial Sequence
  Description of Artificial Sequence: Synthetic oligonucleotide
cuuggcuuuucacguaggu

SEQ ID NO: 936510 - RNA, 19 nt, Artificial Sequence
  Description of Artificial Sequence: Synthetic oligonucleotide
gcauucuaaagcagagaca

SEQ ID NO: 936511 - RNA, 19 nt, Artificial Sequence
  Description of Artificial Sequence: Synthetic oligonucleotide
cuucaagaucagcuaucaa

SEQ ID NO: 936512 - RNA, 19 nt, Artificial Sequence
  Description of Artificial Sequence: Synthetic oligonucleotide
ugacuucggugaugcuggu

SEQ ID NO: 936513 - RNA, 19 nt, Artificial Sequence
  Description of Artificial Sequence: Synthetic oligonucleotide
cugaauaguggcggcugca

SEQ ID NO: 936514 - RNA, 19 nt, Artificial Sequence
  Description of Artificial Sequence: Synthetic oligonucleotide
ggcuuuucacguaggucug

SEQ ID NO: 936515 - RNA, 19 nt, Artificial Sequence
  Description of Artificial Sequence: Synthetic oligonucleotide
ggaaacaagcggucugugu

SEQ ID NO: 936516 - RNA, 19 nt, Artificial Sequence
  Description of Artificial Sequence: Synthetic oligonucleotide
aagggcaacuggaguggau

SEQ ID NO: 936517 - RNA, 19 nt, Artificial Sequence
  Description of Artificial Sequence: Synthetic oligonucleotide
ucggaacaauaagcugccu

SEQ ID NO: 936518 - RNA, 19 nt, Artificial Sequence
  Description of Artificial Sequence: Synthetic oligonucleotide
cugcacccagguuggcaac

SEQ ID NO: 936519 - RNA, 19 nt, Artificial Sequence
  Description of Artificial Sequence: Synthetic oligonucleotide
aucagcuaucaagcuugga

SEQ ID NO: 936520 - RNA, 19 nt, Artificial Sequence
  Description of Artificial Sequence: Synthetic oligonucleotide
acccacugauacaguaaca

SEQ ID NO: 936521 - RNA, 19 nt, Artificial Sequence
  Description of Artificial Sequence: Synthetic oligonucleotide
gacuagcaucaaugaccca

SEQ ID NO: 936522 - RNA, 19 nt, Artificial Sequence
  Description of Artificial Sequence: Synthetic oligonucleotide
cucugacauggccacaggu

SEQ ID NO: 936523 - RNA, 19 nt, Artificial Sequence
  Description of Artificial Sequence: Synthetic oligonucleotide
ggcugaauguugacguuga

SEQ ID NO: 936524 - RNA, 19 nt, Artificial Sequence
  Description of Artificial Sequence: Synthetic oligonucleotide
gugagcauuccucguuccu

SEQ ID NO: 936525 - RNA, 19 nt, Artificial Sequence
  Description of Artificial Sequence: Synthetic oligonucleotide
gaccaucuugucaccgaaa

SEQ ID NO: 936526 - RNA, 19 nt, Artificial Sequence
  Description of Artificial Sequence: Synthetic oligonucleotide
cuggaaacaagcggucugu

SEQ ID NO: 936527 - RNA, 19 nt, Artificial Sequence
  Description of Artificial Sequence: Synthetic oligonucleotide
cugaugucguaguuuugau

SEQ ID NO: 936528 - RNA, 19 nt, Artificial Sequence
  Description of Artificial Sequence: Synthetic oligonucleotide
cugauucacguccaucauu

SEQ ID NO: 936529 - RNA, 19 nt, Artificial Sequence
  Description of Artificial Sequence: Synthetic oligonucleotide
guacguuaucuuggccuga

SEQ ID NO: 936530 - RNA, 19 nt, Artificial Sequence
  Description of Artificial Sequence: Synthetic oligonucleotide
guuaccccugggacaggac

SEQ ID NO: 936531 - RNA, 19 nt, Artificial Sequence
  Description of Artificial Sequence: Synthetic oligonucleotide
cacguaggucugaaauucu

SEQ ID NO: 936532 - RNA, 19 nt, Artificial Sequence
  Description of Artificial Sequence: Synthetic oligonucleotide
gcaaagcgaagagaagaaa

SEQ ID NO: 936533 - RNA, 19 nt, Artificial Sequence
  Description of Artificial Sequence: Synthetic oligonucleotide
guuccacugugacuagcau

SEQ ID NO: 936534 - RNA, 19 nt, Artificial Sequence
  Description of Artificial Sequence: Synthetic oligonucleotide
gggcggagaaaaugcugca

SEQ ID NO: 936535 - RNA, 19 nt, Artificial Sequence
  Description of Artificial Sequence: Synthetic oligonucleotide
ugccgacucagagccugaa

SEQ ID NO: 936536 - RNA, 19 nt, Artificial Sequence
  Description of Artificial Sequence: Synthetic oligonucleotide
cuggaugauucugaaguuu

SEQ ID NO: 936537 - RNA, 19 nt, Artificial Sequence
  Description of Artificial Sequence: Synthetic oligonucleotide
gaggcaagugucggugacu

SEQ ID NO: 936538 - RNA, 19 nt, Artificial Sequence
  Description of Artificial Sequence: Synthetic oligonucleotide
gguuaccccugggacagga

SEQ ID NO: 936539 - RNA, 19 nt, Artificial Sequence
  Description of Artificial Sequence: Synthetic oligonucleotide
gauucacguccaucauuuu

SEQ ID NO: 936540 - RNA, 19 nt, Artificial Sequence
  Description of Artificial Sequence: Synthetic oligonucleotide
gaguggauacuggguuaaa

SEQ ID NO: 936541 - RNA, 19 nt, Artificial Sequence
  Description of Artificial Sequence: Synthetic oligonucleotide
cugcauggauucaggaguu

SEQ ID NO: 936542 - RNA, 19 nt, Artificial Sequence
  Description of Artificial Sequence: Synthetic oligonucleotide
gcugccuaauaaaucuugu

SEQ ID NO: 936543 - RNA, 19 nt, Artificial Sequence
  Description of Artificial Sequence: Synthetic oligonucleotide
agguuaccccugggacagg

SEQ ID NO: 936544 - RNA, 19 nt, Artificial Sequence
  Description of Artificial Sequence: Synthetic oligonucleotide
ggugccaggcacuuuuguu

SEQ ID NO: 936545 - RNA, 19 nt, Artificial Sequence
  Description of Artificial Sequence: Synthetic oligonucleotide
uuuccccuauguggauauu

SEQ ID NO: 936546 - RNA, 19 nt, Artificial Sequence
  Description of Artificial Sequence: Synthetic oligonucleotide
ccccgcugccagauggaag

SEQ ID NO: 936547 - RNA, 19 nt, Artificial Sequence
  Description of Artificial Sequence: Synthetic oligonucleotide
cggucuguguagaaucgca

SEQ ID NO: 936548 - RNA, 19 nt, Artificial Sequence
  Description of Artificial Sequence: Synthetic oligonucleotide
cggaacaauaagcugccua

SEQ ID NO: 936549 - RNA, 19 nt, Artificial Sequence
  Description of Artificial Sequence: Synthetic oligonucleotide
cgucuagaucuaaaaggaa

SEQ ID NO: 936550 - RNA, 19 nt, Artificial Sequence
  Description of Artificial Sequence: Synthetic oligonucleotide
gcuuuucacguaggucuga

SEQ ID NO: 936551 - RNA, 19 nt, Artificial Sequence
  Description of Artificial Sequence: Synthetic oligonucleotide
caucugccuauggucugaa

SEQ ID NO: 936552 - RNA, 19 nt, Artificial Sequence
  Description of Artificial Sequence: Synthetic oligonucleotide
gacuucggugaugcugguu

SEQ ID NO: 936553 - RNA, 19 nt, Artificial Sequence
  Description of Artificial Sequence: Synthetic oligonucleotide
ugccuacgggaagcuucuu

SEQ ID NO: 936554 - RNA, 19 nt, Artificial Sequence
  Description of Artificial Sequence: Synthetic oligonucleotide
ccgcugccagauggaaggg

SEQ ID NO: 936555 - RNA, 19 nt, Artificial Sequence
  Description of Artificial Sequence: Synthetic oligonucleotide
ccaggcggccaguccuuuc

SEQ ID NO: 936556 - RNA, 19 nt, Artificial Sequence
  Description of Artificial Sequence: Synthetic oligonucleotide
gccuacgggaagcuucuuu

SEQ ID NO: 936557 - RNA, 19 nt, Artificial Sequence
  Description of Artificial Sequence: Synthetic oligonucleotide
gcauuccucguuccuucuu

SEQ ID NO: 936558 - RNA, 19 nt, Artificial Sequence
  Description of Artificial Sequence: Synthetic oligonucleotide
cagaaccaaucaggguuuu

SEQ ID NO: 936559 - RNA, 19 nt, Artificial Sequence
  Description of Artificial Sequence: Synthetic oligonucleotide
gcaguaccaggcggccagu

SEQ ID NO: 936560 - RNA, 19 nt, Artificial Sequence
  Description of Artificial Sequence: Synthetic oligonucleotide
gcaugccuacgggaagcuu

SEQ ID NO: 936561 - RNA, 19 nt, Artificial Sequence
  Description of Artificial Sequence: Synthetic oligonucleotide
ccaggccauugaggcaagu

SEQ ID NO: 936562 - RNA, 19 nt, Artificial Sequence
  Description of Artificial Sequence: Synthetic oligonucleotide
uguaguuggugucugaucg

SEQ ID NO: 936563 - RNA, 19 nt, Artificial Sequence
  Description of Artificial Sequence: Synthetic oligonucleotide
aucgugacaaacuuggugc

SEQ ID NO: 936564 - RNA, 19 nt, Artificial Sequence
  Description of Artificial Sequence: Synthetic oligonucleotide
ugugaauaaaucuucagcu

SEQ ID NO: 936565 - RNA, 19 nt, Artificial Sequence
  Description of Artificial Sequence: Synthetic oligonucleotide
uaguaaauccauuaggugc

SEQ ID NO: 936566 - RNA, 19 nt, Artificial Sequence
  Description of Artificial Sequence: Synthetic oligonucleotide
aaaccggagacuuucauca

SEQ ID NO: 936567 - RNA, 19 nt, Artificial Sequence
  Description of Artificial Sequence: Synthetic oligonucleotide
uuaugcugauauaaagucg

SEQ ID NO: 936568 - RNA, 19 nt, Artificial Sequence
  Description of Artificial Sequence: Synthetic oligonucleotide
ucugguuuuaguaaaucca

SEQ ID NO: 936569 - RNA, 19 nt, Artificial Sequence
  Description of Artificial Sequence: Synthetic oligonucleotide
uccaucguaaugaaggaag

SEQ ID NO: 936570 - RNA, 19 nt, Artificial Sequence
  Description of Artificial Sequence: Synthetic oligonucleotide
caucuaauaacccugcagc

SEQ ID NO: 936571 - RNA, 19 nt, Artificial Sequence
  Description of Artificial Sequence: Synthetic oligonucleotide
uguacauugcaucuugggc

SEQ ID NO: 936572 - RNA, 19 nt, Artificial Sequence
  Description of Artificial Sequence: Synthetic oligonucleotide
aauucaugguagguggucc

SEQ ID NO: 936573 - RNA, 19 nt, Artificial Sequence
  Description of Artificial Sequence: Synthetic oligonucleotide
uguaguacugcauuugaug

SEQ ID NO: 936574 - RNA, 19 nt, Artificial Sequence
  Description of Artificial Sequence: Synthetic oligonucleotide
aauguguacuugucaugcc

SEQ ID NO: 936575 - RNA, 19 nt, Artificial Sequence
  Description of Artificial Sequence: Synthetic oligonucleotide
ucaauauucgcaacuguga

SEQ ID NO: 936576 - RNA, 19 nt, Artificial Sequence
  Description of Artificial Sequence: Synthetic oligonucleotide
uuucgcauugcacaugugc

SEQ ID NO: 936577 - RNA, 19 nt, Artificial Sequence
  Description of Artificial Sequence: Synthetic oligonucleotide
ucacuuaugcaacauaaaa

SEQ ID NO: 936578 - RNA, 19 nt, Artificial Sequence
  Description of Artificial Sequence: Synthetic oligonucleotide
cucuaauucucacuuaugc

SEQ ID NO: 936579 - RNA, 19 nt, Artificial Sequence
  Description of Artificial Sequence: Synthetic oligonucleotide
ucgagaaccucaaagguga

SEQ ID NO: 936580 - RNA, 19 nt, Artificial Sequence
  Description of Artificial Sequence: Synthetic oligonucleotide
auaaagucguugcugggcg

SEQ ID NO: 936581 - RNA, 19 nt, Artificial Sequence
  Description of Artificial Sequence: Synthetic oligonucleotide
gagggucuuaguuugagug

SEQ ID NO: 936582 - RNA, 19 nt, Artificial Sequence
  Description of Artificial Sequence: Synthetic oligonucleotide
ugugucaauauucgcaacu

SEQ ID NO: 936583 - RNA, 19 nt, Artificial Sequence
  Description of Artificial Sequence: Synthetic oligonucleotide
ucaaguuaugcugauauaa

SEQ ID NO: 936584 - RNA, 19 nt, Artificial Sequence
  Description of Artificial Sequence: Synthetic oligonucleotide
gacgugguaauccaggcug

SEQ ID NO: 936585 - RNA, 19 nt, Artificial Sequence
  Description of Artificial Sequence: Synthetic oligonucleotide
ucuaagucugugaauaaau

SEQ ID NO: 936586 - RNA, 19 nt, Artificial Sequence
  Description of Artificial Sequence: Synthetic oligonucleotide
ugaguugauuuaaaaguac

SEQ ID NO: 936587 - RNA, 19 nt, Artificial Sequence
  Description of Artificial Sequence: Synthetic oligonucleotide
ucugugaauaaaucuucag

SEQ ID NO: 936588 - RNA, 19 nt, Artificial Sequence
  Description of Artificial Sequence: Synthetic oligonucleotide
cauuaggugccuuaugaag

SEQ ID NO: 936589 - RNA, 19 nt, Artificial Sequence
  Description of Artificial Sequence: Synthetic oligonucleotide
ucuaccagcgcagcgaggg

SEQ ID NO: 936590 - RNA, 19 nt, Artificial Sequence
  Description of Artificial Sequence: Synthetic oligonucleotide
uuaugaagucuccuuggcc

SEQ ID NO: 936591 - RNA, 19 nt, Artificial Sequence
  Description of Artificial Sequence: Synthetic oligonucleotide
gaucgugacaaacuuggug

SEQ ID NO: 936592 - RNA, 19 nt, Artificial Sequence
  Description of Artificial Sequence: Synthetic oligonucleotide
uaauucucacuuaugcaac

SEQ ID NO: 936593 - RNA, 19 nt, Artificial Sequence
  Description of Artificial Sequence: Synthetic oligonucleotide
aauuaugugacuggauagu

SEQ ID NO: 936594 - RNA, 19 nt, Artificial Sequence
  Description of Artificial Sequence: Synthetic oligonucleotide
agaagugugucaauauucg

SEQ ID NO: 936595 - RNA, 19 nt, Artificial Sequence
  Description of Artificial Sequence: Synthetic oligonucleotide
agacacuaggcucaggaug

SEQ ID NO: 936596 - RNA, 19 nt, Artificial Sequence
  Description of Artificial Sequence: Synthetic oligonucleotide
aagaagcagguaccgccgc

SEQ ID NO: 936597 - RNA, 19 nt, Artificial Sequence
  Description of Artificial Sequence: Synthetic oligonucleotide
caaagcucaucccaggagc

SEQ ID NO: 936598 - RNA, 19 nt, Artificial Sequence
  Description of Artificial Sequence: Synthetic oligonucleotide
augaaaugcaccaucucgg

SEQ ID NO: 936599 - RNA, 19 nt, Artificial Sequence
  Description of Artificial Sequence: Synthetic oligonucleotide
gcugauauaaagucguugc

SEQ ID NO: 936600 - RNA, 19 nt, Artificial Sequence
  Description of Artificial Sequence: Synthetic oligonucleotide
agucggucagucuuaacag

SEQ ID NO: 936601 - RNA, 19 nt, Artificial Sequence
  Description of Artificial Sequence: Synthetic oligonucleotide
uauccaucgguagaggaag

SEQ ID NO: 936602 - RNA, 19 nt, Artificial Sequence
  Description of Artificial Sequence: Synthetic oligonucleotide
aagacaucccauccggugu

SEQ ID NO: 936603 - RNA, 19 nt, Artificial Sequence
  Description of Artificial Sequence: Synthetic oligonucleotide
cuggucucgaaauaagcag

SEQ ID NO: 936604 - RNA, 19 nt, Artificial Sequence
  Description of Artificial Sequence: Synthetic oligonucleotide
gaggauguacuccaugcgc

SEQ ID NO: 936605 - RNA, 19 nt, Artificial Sequence
  Description of Artificial Sequence: Synthetic oligonucleotide
ugaaaguauaauacuuuua

SEQ ID NO: 936606 - RNA, 19 nt, Artificial Sequence
  Description of Artificial Sequence: Synthetic oligonucleotide
cuuuccguaugucagugag

SEQ ID NO: 936607 - RNA, 19 nt, Artificial Sequence
  Description of Artificial Sequence: Synthetic oligonucleotide
gaucgguccaucgacgugg

SEQ ID NO: 936608 - RNA, 19 nt, Artificial Sequence
  Description of Artificial Sequence: Synthetic oligonucleotide
uauauccaucgguagagga

SEQ ID NO: 936609 - RNA, 19 nt, Artificial Sequence
  Description of Artificial Sequence: Synthetic oligonucleotide
aaguccaguggguaaugag

SEQ ID NO: 936610 - RNA, 19 nt, Artificial Sequence
  Description of Artificial Sequence: Synthetic oligonucleotide
ggcuuuguaauguucauug

SEQ ID NO: 936611 - RNA, 19 nt, Artificial Sequence
  Description of Artificial Sequence: Synthetic oligonucleotide
gaagacaucccauccggug

SEQ ID NO: 936612 - RNA, 19 nt, Artificial Sequence
  Description of Artificial Sequence: Synthetic oligonucleotide
uuugguauggaguccugga

SEQ ID NO: 936613 - RNA, 19 nt, Artificial Sequence
  Description of Artificial Sequence: Synthetic oligonucleotide
ugagugggcaucuaauaac

SEQ ID NO: 936614 - RNA, 19 nt, Artificial Sequence
  Description of Artificial Sequence: Synthetic oligonucleotide
ugcugggcgaacaaguucu

SEQ ID NO: 936615 - RNA, 19 nt, Artificial Sequence
  Description of Artificial Sequence: Synthetic oligonucleotide
ucguaaugaaggaagggau

SEQ ID NO: 936616 - RNA, 19 nt, Artificial Sequence
  Description of Artificial Sequence: Synthetic oligonucleotide
ucugaucgugacaaacuug

SEQ ID NO: 936617 - RNA, 19 nt, Artificial Sequence
  Description of Artificial Sequence: Synthetic oligonucleotide
uucgcaacugugaacacau

SEQ ID NO: 936618 - RNA, 19 nt, Artificial Sequence
  Description of Artificial Sequence: Synthetic oligonucleotide
agggugagacacuaggcuc

SEQ ID NO: 936619 - RNA, 19 nt, Artificial Sequence
  Description of Artificial Sequence: Synthetic oligonucleotide
cucgugugaacacaguggc

SEQ ID NO: 936620 - RNA, 19 nt, Artificial Sequence
  Description of Artificial Sequence: Synthetic oligonucleotide
uuaugugacuggauaguac

SEQ ID NO: 936621 - RNA, 19 nt, Artificial Sequence
  Description of Artificial Sequence: Synthetic oligonucleotide
uugagugggcaucuaauaa

SEQ ID NO: 936622 - RNA, 19 nt, Artificial Sequence
  Description of Artificial Sequence: Synthetic oligonucleotide
auccaauaaguauuugcug

SEQ ID NO: 936623 - RNA, 19 nt, Artificial Sequence
  Description of Artificial Sequence: Synthetic oligonucleotide
uuccguaugucagugagga

SEQ ID NO: 936624 - RNA, 19 nt, Artificial Sequence
  Description of Artificial Sequence: Synthetic oligonucleotide
uugggcauucugaaguuca

SEQ ID NO: 936625 - RNA, 19 nt, Artificial Sequence
  Description of Artificial Sequence: Synthetic oligonucleotide
uuucccuugaaauguauuu

SEQ ID NO: 936626 - RNA, 19 nt, Artificial Sequence
  Description of Artificial Sequence: Synthetic oligonucleotide
guaaugagacuucuuccag

SEQ ID NO: 936627 - RNA, 19 nt, Artificial Sequence
  Description of Artificial Sequence: Synthetic oligonucleotide
augaaggaagggaucaucg

SEQ ID NO: 936628 - RNA, 19 nt, Artificial Sequence
  Description of Artificial Sequence: Synthetic oligonucleotide
cuuaugaagucuccuuggc

SEQ ID NO: 936629 - RNA, 19 nt, Artificial Sequence
  Description of Artificial Sequence: Synthetic oligonucleotide
cuaauaacccugcagccuc

SEQ ID NO: 936630 - RNA, 19 nt, Artificial Sequence
  Description of Artificial Sequence: Synthetic oligonucleotide
uuuccguaugucagugagg

SEQ ID NO: 936631 - RNA, 19 nt, Artificial Sequence
  Description of Artificial Sequence: Synthetic oligonucleotide
gaagugugucaauauucgc

SEQ ID NO: 936632 - RNA, 19 nt, Artificial Sequence
  Description of Artificial Sequence: Synthetic oligonucleotide
gugaacacaguggcgaucg

SEQ ID NO: 936633 - RNA, 19 nt, Artificial Sequence
  Description of Artificial Sequence: Synthetic oligonucleotide
aguaaucuaccagcgcagc

SEQ ID NO: 936634 - RNA, 19 nt, Artificial Sequence
  Description of Artificial Sequence: Synthetic oligonucleotide
aguuucgcauugcacaugu

SEQ ID NO: 936635 - RNA, 19 nt, Artificial Sequence
  Description of Artificial Sequence: Synthetic oligonucleotide
ucuaauaacccugcagccu

SEQ ID NO: 936636 - RNA, 19 nt, Artificial Sequence
  Description of Artificial Sequence: Synthetic oligonucleotide
guuucaagaauccccguca

SEQ ID NO: 936637 - RNA, 19 nt, Artificial Sequence
  Description of Artificial Sequence: Synthetic oligonucleotide
aucguaaugaaggaaggga

SEQ ID NO: 936638 - RNA, 19 nt, Artificial Sequence
  Description of Artificial Sequence: Synthetic oligonucleotide
aaauccauuaggugccuua

SEQ ID NO: 936639 - RNA, 19 nt, Artificial Sequence
  Description of Artificial Sequence: Synthetic oligonucleotide
ucucuaauucucacuuaug

SEQ ID NO: 936640 - RNA, 19 nt, Artificial Sequence
  Description of Artificial Sequence: Synthetic oligonucleotide
ugaaaugcaccaucucgga

SEQ ID NO: 936641 - RNA, 19 nt, Artificial Sequence
  Description of Artificial Sequence: Synthetic oligonucleotide
uggaauucucggauccucc

SEQ ID NO: 936642 - RNA, 19 nt, Artificial Sequence
  Description of Artificial Sequence: Synthetic oligonucleotide
acacaguggcgaucggucc

SEQ ID NO: 936643 - RNA, 19 nt, Artificial Sequence
  Description of Artificial Sequence: Synthetic oligonucleotide
uccccgucaaguuaugcug

SEQ ID NO: 936644 - RNA, 19 nt, Artificial Sequence
  Description of Artificial Sequence: Synthetic oligonucleotide
aaggcauaauuaugugacu

SEQ ID NO: 936645 - RNA, 19 nt, Artificial Sequence
  Description of Artificial Sequence: Synthetic oligonucleotide
ugagaaaccggagacuuuc

SEQ ID NO: 936646 - RNA, 19 nt, Artificial Sequence
  Description of Artificial Sequence: Synthetic oligonucleotide
uuugagugggcaucuaaua

SEQ ID NO: 936647 - RNA, 19 nt, Artificial Sequence
  Description of Artificial Sequence: Synthetic oligonucleotide
aauccccgucaaguuaugc

SEQ ID NO: 936648 - RNA, 19 nt, Artificial Sequence
  Description of Artificial Sequence: Synthetic oligonucleotide
ucagucuuaacaguuggau

SEQ ID NO: 936649 - RNA, 19 nt, Artificial Sequence
  Description of Artificial Sequence: Synthetic oligonucleotide
uucaagaauccccgucaag

SEQ ID NO: 936650 - RNA, 19 nt, Artificial Sequence
  Description of Artificial Sequence: Synthetic oligonucleotide
gagugggcaucuaauaacc

SEQ ID NO: 936651 - RNA, 19 nt, Artificial Sequence
  Description of Artificial Sequence: Synthetic oligonucleotide
ucgugugcugcgauaaugu

SEQ ID NO: 936652 - RNA, 19 nt, Artificial Sequence
  Description of Artificial Sequence: Synthetic oligonucleotide
gaaaccggagacuuucauc

SEQ ID NO: 936653 - RNA, 19 nt, Artificial Sequence
  Description of Artificial Sequence: Synthetic oligonucleotide
aaacacucucagguagugg

SEQ ID NO: 936654 - RNA, 19 nt, Artificial Sequence
  Description of Artificial Sequence: Synthetic oligonucleotide
guaaugaaggaagggauca

SEQ ID NO: 936655 - RNA, 19 nt, Artificial Sequence
  Description of Artificial Sequence: Synthetic oligonucleotide
aggcauaauuaugugacug

SEQ ID NO: 936656 - RNA, 19 nt, Artificial Sequence
  Description of Artificial Sequence: Synthetic oligonucleotide
uccaucgacgugguaaucc

SEQ ID NO: 936657 - RNA, 19 nt, Artificial Sequence
  Description of Artificial Sequence: Synthetic oligonucleotide
cuuaguuugagugggcauc

SEQ ID NO: 936658 - RNA, 19 nt, Artificial Sequence
  Description of Artificial Sequence: Synthetic oligonucleotide
acuuuccuaucaaaaggac

SEQ ID NO: 936659 - RNA, 19 nt, Artificial Sequence
  Description of Artificial Sequence: Synthetic oligonucleotide
uuaggugccuuaugaaguc

SEQ ID NO: 936660 - RNA, 19 nt, Artificial Sequence
  Description of Artificial Sequence: Synthetic oligonucleotide
agacuuucaucagagcuug

SEQ ID NO: 936661 - RNA, 19 nt, Artificial Sequence
  Description of Artificial Sequence: Synthetic oligonucleotide
gguaaugagacuucuucca

SEQ ID NO: 936662 - RNA, 19 nt, Artificial Sequence
  Description of Artificial Sequence: Synthetic oligonucleotide
uuggaucugaugccaacaa

SEQ ID NO: 936663 - RNA, 19 nt, Artificial Sequence
  Description of Artificial Sequence: Synthetic oligonucleotide
acagggugagacacuaggc

SEQ ID NO: 936664 - RNA, 19 nt, Artificial Sequence
  Description of Artificial Sequence: Synthetic oligonucleotide
aaguccaaccugaagcuga

SEQ ID NO: 936665 - RNA, 19 nt, Artificial Sequence
  Description of Artificial Sequence: Synthetic oligonucleotide
caguaaucuaccagcgcag

SEQ ID NO: 936666 - RNA, 19 nt, Artificial Sequence
  Description of Artificial Sequence: Synthetic oligonucleotide
ucgcauugcacaugugccc

SEQ ID NO: 936667 - RNA, 19 nt, Artificial Sequence
  Description of Artificial Sequence: Synthetic oligonucleotide
gaauucucggauccuccug

SEQ ID NO: 936668 - RNA, 19 nt, Artificial Sequence
  Description of Artificial Sequence: Synthetic oligonucleotide
uuucaagaauccccgucaa

SEQ ID NO: 936669 - RNA, 19 nt, Artificial Sequence
  Description of Artificial Sequence: Synthetic oligonucleotide
aacuuggugcaagaaauuu

SEQ ID NO: 936670 - RNA, 19 nt, Artificial Sequence
  Description of Artificial Sequence: Synthetic oligonucleotide
cauccaauaaguauuugcu

SEQ ID NO: 936671 - RNA, 19 nt, Artificial Sequence
  Description of Artificial Sequence: Synthetic oligonucleotide
caucguaaugaaggaaggg

SEQ ID NO: 936672 - RNA, 19 nt, Artificial Sequence
  Description of Artificial Sequence: Synthetic oligonucleotide
uugucgucagcaacaccag

SEQ ID NO: 936673 - RNA, 19 nt, Artificial Sequence
  Description of Artificial Sequence: Synthetic oligonucleotide
aacacccugguagaagugu

SEQ ID NO: 936674 - RNA, 19 nt, Artificial Sequence
  Description of Artificial Sequence: Synthetic oligonucleotide
uugguauggaguccuggaa

SEQ ID NO: 936675 - RNA, 19 nt, Artificial Sequence
  Description of Artificial Sequence: Synthetic oligonucleotide
gguaccgccgcauagccug

SEQ ID NO: 936676 - RNA, 19 nt, Artificial Sequence
  Description of Artificial Sequence: Synthetic oligonucleotide
gcaucuaauaacccugcag

SEQ ID NO: 936677 - RNA, 19 nt, Artificial Sequence
  Description of Artificial Sequence: Synthetic oligonucleotide
gucgcuguccaggagacag

SEQ ID NO: 936678 - RNA, 19 nt, Artificial Sequence
  Description of Artificial Sequence: Synthetic oligonucleotide
ucaucagagcuugucguca

SEQ ID NO: 936679 - RNA, 19 nt, Artificial Sequence
  Description of Artificial Sequence: Synthetic oligonucleotide
aaaauucaugguagguggu

SEQ ID NO: 936680 - RNA, 19 nt, Artificial Sequence
  Description of Artificial Sequence: Synthetic oligonucleotide
ccaagaagcagguaccgcc

SEQ ID NO: 936681 - RNA, 19 nt, Artificial Sequence
  Description of Artificial Sequence: Synthetic oligonucleotide
cucggggcugucaaacugg

SEQ ID NO: 936682 - RNA, 19 nt, Artificial Sequence
  Description of Artificial Sequence: Synthetic oligonucleotide
aguggcgaucgguccaucg

SEQ ID NO: 936683 - RNA, 19 nt, Artificial Sequence
  Description of Artificial Sequence: Synthetic oligonucleotide
aaaaguccaguggguaaug

SEQ ID NO: 936684 - RNA, 19 nt, Artificial Sequence
  Description of Artificial Sequence: Synthetic oligonucleotide
cagucggucagucuuaaca

SEQ ID NO: 936685 - RNA, 19 nt, Artificial Sequence
  Description of Artificial Sequence: Synthetic oligonucleotide
gggaucaucgauuuccuca

SEQ ID NO: 936686 - RNA, 19 nt, Artificial Sequence
  Description of Artificial Sequence: Synthetic oligonucleotide
agugggcaucuaauaaccc

SEQ ID NO: 936687 - RNA, 19 nt, Artificial Sequence
  Description of Artificial Sequence: Synthetic oligonucleotide
ucggucagucuuaacaguu

SEQ ID NO: 936688 - RNA, 19 nt, Artificial Sequence
  Description of Artificial Sequence: Synthetic oligonucleotide
gucagugaggauguacucc

SEQ ID NO: 936689 - RNA, 19 nt, Artificial Sequence
  Description of Artificial Sequence: Synthetic oligonucleotide
aauccauuaggugccuuau

SEQ ID NO: 936690 - RNA, 19 nt, Artificial Sequence
  Description of Artificial Sequence: Synthetic oligonucleotide
gaggacauccaauaaguau

SEQ ID NO: 936691 - RNA, 19 nt, Artificial Sequence
  Description of Artificial Sequence: Synthetic oligonucleotide
caucgguagaggaagcuca

SEQ ID NO: 936692 - RNA, 19 nt, Artificial Sequence
  Description of Artificial Sequence: Synthetic oligonucleotide
ugacacuggugcagcaccc

SEQ ID NO: 936693 - RNA, 19 nt, Artificial Sequence
  Description of Artificial Sequence: Synthetic oligonucleotide
ccuuaugaagucuccuugg

SEQ ID NO: 936694 - RNA, 19 nt, Artificial Sequence
  Description of Artificial Sequence: Synthetic oligonucleotide
ucgugacaaacuuggugca

SEQ ID NO: 936695 - RNA, 19 nt, Artificial Sequence
  Description of Artificial Sequence: Synthetic oligonucleotide
aguccugggccuguuguac

SEQ ID NO: 936696 - RNA, 19 nt, Artificial Sequence
  Description of Artificial Sequence: Synthetic oligonucleotide
auccccgucaaguuaugcu

SEQ ID NO: 936697 - RNA, 19 nt, Artificial Sequence
  Description of Artificial Sequence: Synthetic oligonucleotide
guagccgccacuguaacuc

SEQ ID NO: 936698 - RNA, 19 nt, Artificial Sequence
  Description of Artificial Sequence: Synthetic oligonucleotide
ugaagacaucccauccggu

SEQ ID NO: 936699 - RNA, 19 nt, Artificial Sequence
  Description of Artificial Sequence: Synthetic oligonucleotide
uaguuggugucugaucgug

SEQ ID NO: 936700 - RNA, 19 nt, Artificial Sequence
  Description of Artificial Sequence: Synthetic oligonucleotide
uggaucugaugccaacaaa

SEQ ID NO: 936701 - RNA, 19 nt, Artificial Sequence
  Description of Artificial Sequence: Synthetic oligonucleotide
ucucccgucuuuguguaug

SEQ ID NO: 936702 - RNA, 19 nt, Artificial Sequence
  Description of Artificial Sequence: Synthetic oligonucleotide
gaaugccucgugugcugcg

SEQ ID NO: 936703 - RNA, 19 nt, Artificial Sequence
  Description of Artificial Sequence: Synthetic oligonucleotide
cacucucgugugaacacag

SEQ ID NO: 936704 - RNA, 19 nt, Artificial Sequence
  Description of Artificial Sequence: Synthetic oligonucleotide
gaucucggggcugucaaac

SEQ ID NO: 936705 - RNA, 19 nt, Artificial Sequence
  Description of Artificial Sequence: Synthetic oligonucleotide
uggcgaucgguccaucgac

SEQ ID NO: 936706 - RNA, 19 nt, Artificial Sequence
  Description of Artificial Sequence: Synthetic oligonucleotide
ggagacuuucaucagagcu

SEQ ID NO: 936707 - RNA, 19 nt, Artificial Sequence
  Description of Artificial Sequence: Synthetic oligonucleotide
ucaugguaggugguccucc

SEQ ID NO: 936708 - RNA, 19 nt, Artificial Sequence
  Description of Artificial Sequence: Synthetic oligonucleotide
uaaugugguccaaguccug

SEQ ID NO: 936709 - RNA, 19 nt, Artificial Sequence
  Description of Artificial Sequence: Synthetic oligonucleotide
cuuggugcaagaaauuuau

SEQ ID NO: 936710 - RNA, 19 nt, Artificial Sequence
  Description of Artificial Sequence: Synthetic oligonucleotide
auuaugugacuggauagua

SEQ ID NO: 936711 - RNA, 19 nt, Artificial Sequence
  Description of Artificial Sequence: Synthetic oligonucleotide
cagcucaccuuccuuuccg

SEQ ID NO: 936712 - RNA, 19 nt, Artificial Sequence
  Description of Artificial Sequence: Synthetic oligonucleotide
caucagagcuugucgucag

SEQ ID NO: 936713 - RNA, 19 nt, Artificial Sequence
  Description of Artificial Sequence: Synthetic oligonucleotide
ugaucgugacaaacuuggu

SEQ ID NO: 936714 - RNA, 19 nt, Artificial Sequence
  Description of Artificial Sequence: Synthetic oligonucleotide
ugccuuaugaagucuccuu

SEQ ID NO: 936715 - RNA, 19 nt, Artificial Sequence
  Description of Artificial Sequence: Synthetic oligonucleotide
guccaguggguaaugagac

SEQ ID NO: 936716 - RNA, 19 nt, Artificial Sequence
  Description of Artificial Sequence: Synthetic oligonucleotide
aaagucguugcugggcgaa

SEQ ID NO: 936717 - RNA, 19 nt, Artificial Sequence
  Description of Artificial Sequence: Synthetic oligonucleotide
ccaucguaaugaaggaagg

SEQ ID NO: 936718 - RNA, 19 nt, Artificial Sequence
  Description of Artificial Sequence: Synthetic oligonucleotide
agacagcgggaggugaugg

SEQ ID NO: 936719 - RNA, 19 nt, Artificial Sequence
  Description of Artificial Sequence: Synthetic oligonucleotide
gaaguccaaccugaagcug

SEQ ID NO: 936720 - RNA, 19 nt, Artificial Sequence
  Description of Artificial Sequence: Synthetic oligonucleotide
acaugugcccuuuccguau

SEQ ID NO: 936721 - RNA, 19 nt, Artificial Sequence
  Description of Artificial Sequence: Synthetic oligonucleotide
aggaaugccucgugugcug

SEQ ID NO: 936722 - RNA, 19 nt, Artificial Sequence
  Description of Artificial Sequence: Synthetic oligonucleotide
agaauccccgucaaguuau

SEQ ID NO: 936723 - RNA, 19 nt, Artificial Sequence
  Description of Artificial Sequence: Synthetic oligonucleotide
auucgcaacugugaacaca

SEQ ID NO: 936724 - RNA, 19 nt, Artificial Sequence
  Description of Artificial Sequence: Synthetic oligonucleotide
aagucguugcugggcgaac

SEQ ID NO: 936725 - RNA, 19 nt, Artificial Sequence
  Description of Artificial Sequence: Synthetic oligonucleotide
gccuuaugaagucuccuug

SEQ ID NO: 936726 - RNA, 19 nt, Artificial Sequence
  Description of Artificial Sequence: Synthetic oligonucleotide
aucccauccggugucaccu

SEQ ID NO: 936727 - RNA, 19 nt, Artificial Sequence
  Description of Artificial Sequence: Synthetic oligonucleotide
uauucgcaacugugaacac

SEQ ID NO: 936728 - RNA, 19 nt, Artificial Sequence
  Description of Artificial Sequence: Synthetic oligonucleotide
acuggcccucgauuucacg

SEQ ID NO: 936729 - RNA, 19 nt, Artificial Sequence
  Description of Artificial Sequence: Synthetic oligonucleotide
auauccaucgguagaggaa

SEQ ID NO: 936730 - RNA, 19 nt, Artificial Sequence
  Description of Artificial Sequence: Synthetic oligonucleotide
ccguaugucagugaggaug

SEQ ID NO: 936731 - RNA, 19 nt, Artificial Sequence
  Description of Artificial Sequence: Synthetic oligonucleotide
guuggaucugaugccaaca

SEQ ID NO: 936732 - RNA, 19 nt, Artificial Sequence
  Description of Artificial Sequence: Synthetic oligonucleotide
cacgugugggugcugcgcc

SEQ ID NO: 936733 - RNA, 19 nt, Artificial Sequence
  Description of Artificial Sequence: Synthetic oligonucleotide
caucgacgugguaauccag

SEQ ID NO: 936734 - RNA, 19 nt, Artificial Sequence
  Description of Artificial Sequence: Synthetic oligonucleotide
agaagcagguaccgccgca

SEQ ID NO: 936735 - RNA, 19 nt, Artificial Sequence
  Description of Artificial Sequence: Synthetic oligonucleotide
ucacgugugggugcugcgc

SEQ ID NO: 936736 - RNA, 19 nt, Artificial Sequence
  Description of Artificial Sequence: Synthetic oligonucleotide
aggaucucggggcugucaa

SEQ ID NO: 936737 - RNA, 19 nt, Artificial Sequence
  Description of Artificial Sequence: Synthetic oligonucleotide
gauuucacguuguuucuuu

SEQ ID NO: 936738 - RNA, 19 nt, Artificial Sequence
  Description of Artificial Sequence: Synthetic oligonucleotide
cuucacggggugacucugc

SEQ ID NO: 936739 - RNA, 19 nt, Artificial Sequence
  Description of Artificial Sequence: Synthetic oligonucleotide
gcugcgauaauguggucca

SEQ ID NO: 936740 - RNA, 19 nt, Artificial Sequence
  Description of Artificial Sequence: Synthetic oligonucleotide
aggagcacucgagaaccuc

SEQ ID NO: 936741 - RNA, 19 nt, Artificial Sequence
  Description of Artificial Sequence: Synthetic oligonucleotide
uccccgucauauauccauc

SEQ ID NO: 936742 - RNA, 19 nt, Artificial Sequence
  Description of Artificial Sequence: Synthetic oligonucleotide
auccaucgguagaggaagc

SEQ ID NO: 936743 - RNA, 19 nt, Artificial Sequence
  Description of Artificial Sequence: Synthetic oligonucleotide
ucguugcugggcgaacaag

SEQ ID NO: 936744 - RNA, 19 nt, Artificial Sequence
  Description of Artificial Sequence: Synthetic oligonucleotide
cauccggugucaccuggag

SEQ ID NO: 936745 - RNA, 19 nt, Artificial Sequence
  Description of Artificial Sequence: Synthetic oligonucleotide
uuggugcaagaaauuuauu

SEQ ID NO: 936746 - RNA, 19 nt, Artificial Sequence
  Description of Artificial Sequence: Synthetic oligonucleotide
ccgucuuuguguaugcaug

SEQ ID NO: 936747 - RNA, 19 nt, Artificial Sequence
  Description of Artificial Sequence: Synthetic oligonucleotide
ugugaacacaguggcgauc

SEQ ID NO: 936748 - RNA, 19 nt, Artificial Sequence
  Description of Artificial Sequence: Synthetic oligonucleotide
uggacugguccaucguaau

SEQ ID NO: 936749 - RNA, 19 nt, Artificial Sequence
  Description of Artificial Sequence: Synthetic oligonucleotide
acuuggugcaagaaauuua

SEQ ID NO: 936750 - RNA, 19 nt, Artificial Sequence
  Description of Artificial Sequence: Synthetic oligonucleotide
cucccgucuuuguguaugc

SEQ ID NO: 936751 - RNA, 19 nt, Artificial Sequence
  Description of Artificial Sequence: Synthetic oligonucleotide
ggaucaucgauuuccucaa

SEQ ID NO: 936752 - RNA, 19 nt, Artificial Sequence
  Description of Artificial Sequence: Synthetic oligonucleotide
ggagucgcuguccaggaga

SEQ ID NO: 936753 - RNA, 19 nt, Artificial Sequence
  Description of Artificial Sequence: Synthetic oligonucleotide
auguaggggucucccgucu

SEQ ID NO: 936754 - RNA, 19 nt, Artificial Sequence
  Description of Artificial Sequence: Synthetic oligonucleotide
gugggcaucuaauaacccu

SEQ ID NO: 936755 - RNA, 19 nt, Artificial Sequence
  Description of Artificial Sequence: Synthetic oligonucleotide
cucacgugugggugcugcg

SEQ ID NO: 936756 - RNA, 19 nt, Artificial Sequence
  Description of Artificial Sequence: Synthetic oligonucleotide
acgugugggugcugcgccg

SEQ ID NO: 936757 - RNA, 19 nt, Artificial Sequence
  Description of Artificial Sequence: Synthetic oligonucleotide
gugcccuuuccguauguca

SEQ ID NO: 936758 - RNA, 19 nt, Artificial Sequence
  Description of Artificial Sequence: Synthetic oligonucleotide
cgucuuuguguaugcaugg

SEQ ID NO: 936759 - RNA, 19 nt, Artificial Sequence
  Description of Artificial Sequence: Synthetic oligonucleotide
agcgagggucuuuagucuu

SEQ ID NO: 936760 - RNA, 19 nt, Artificial Sequence
  Description of Artificial Sequence: Synthetic oligonucleotide
gcauaauuaugugacugga

SEQ ID NO: 936761 - RNA, 19 nt, Artificial Sequence
  Description of Artificial Sequence: Synthetic oligonucleotide
gaguuucgcauugcacaug

SEQ ID NO: 936762 - RNA, 19 nt, Artificial Sequence
  Description of Artificial Sequence: Synthetic oligonucleotide
aguccaaccugaagcugag

SEQ ID NO: 936763 - RNA, 19 nt, Artificial Sequence
  Description of Artificial Sequence: Synthetic oligonucleotide
cauaauuaugugacuggau

SEQ ID NO: 936764 - RNA, 19 nt, Artificial Sequence
  Description of Artificial Sequence: Synthetic oligonucleotide
auccggugucaccuggaga

SEQ ID NO: 936765 - RNA, 19 nt, Artificial Sequence
  Description of Artificial Sequence: Synthetic oligonucleotide
gagacagcgggaggugaug

SEQ ID NO: 936766 - RNA, 19 nt, Artificial Sequence
  Description of Artificial Sequence: Synthetic oligonucleotide
ggacugguccaucguaaug

SEQ ID NO: 936767 - RNA, 19 nt, Artificial Sequence
  Description of Artificial Sequence: Synthetic oligonucleotide
gguccaucguaaugaagga

SEQ ID NO: 936768 - RNA, 19 nt, Artificial Sequence
  Description of Artificial Sequence: Synthetic oligonucleotide
cguaaugaaggaagggauc

SEQ ID NO: 936769 - RNA, 19 nt, Artificial Sequence
  Description of Artificial Sequence: Synthetic oligonucleotide
uaggggucucccgucuuug

SEQ ID NO: 936770 - RNA, 19 nt, Artificial Sequence
  Description of Artificial Sequence: Synthetic oligonucleotide
guggcgaucgguccaucga

SEQ ID NO: 936771 - RNA, 19 nt, Artificial Sequence
  Description of Artificial Sequence: Synthetic oligonucleotide
cuggacugguccaucguaa

SEQ ID NO: 936772 - RNA, 19 nt, Artificial Sequence
  Description of Artificial Sequence: Synthetic oligonucleotide
gaaacccggagccuggguu

SEQ ID NO: 936773 - RNA, 19 nt, Artificial Sequence
  Description of Artificial Sequence: Synthetic oligonucleotide
guauggaguccuggaauuc

SEQ ID NO: 936774 - RNA, 19 nt, Artificial Sequence
  Description of Artificial Sequence: Synthetic oligonucleotide
ccccgucauauauccaucg

SEQ ID NO: 936775 - RNA, 19 nt, Artificial Sequence
  Description of Artificial Sequence: Synthetic oligonucleotide
agucguugcugggcgaaca

SEQ ID NO: 936776 - RNA, 19 nt, Artificial Sequence
  Description of Artificial Sequence: Synthetic oligonucleotide
uguaggggucucccgucuu

SEQ ID NO: 936777 - RNA, 19 nt, Artificial Sequence
  Description of Artificial Sequence: Synthetic oligonucleotide
ggccaagaagcagguaccg

SEQ ID NO: 936778 - RNA, 19 nt, Artificial Sequence
  Description of Artificial Sequence: Synthetic oligonucleotide
uggcccucgauuucacguu

SEQ ID NO: 936779 - RNA, 19 nt, Artificial Sequence
  Description of Artificial Sequence: Synthetic oligonucleotide
auugcaucuugggcauucu

SEQ ID NO: 936780 - RNA, 19 nt, Artificial Sequence
  Description of Artificial Sequence: Synthetic oligonucleotide
ggugccuuaugaagucucc

SEQ ID NO: 936781 - RNA, 19 nt, Artificial Sequence
  Description of Artificial Sequence: Synthetic oligonucleotide
ggucucgaaauaagcagca

SEQ ID NO: 936782 - RNA, 19 nt, Artificial Sequence
  Description of Artificial Sequence: Synthetic oligonucleotide
cccgucauauauccaucgg

SEQ ID NO: 936783 - RNA, 19 nt, Artificial Sequence
  Description of Artificial Sequence: Synthetic oligonucleotide
gaacucuggcauguuccuc

SEQ ID NO: 936784 - RNA, 19 nt, Artificial Sequence
  Description of Artificial Sequence: Synthetic oligonucleotide
cacggggugacucugcagu

SEQ ID NO: 936785 - RNA, 19 nt, Artificial Sequence
  Description of Artificial Sequence: Synthetic oligonucleotide
ugugcccuuuccguauguc

SEQ ID NO: 936786 - RNA, 19 nt, Artificial Sequence
  Description of Artificial Sequence: Synthetic oligonucleotide
gucugaucgugacaaacuu

SEQ ID NO: 936787 - RNA, 19 nt, Artificial Sequence
  Description of Artificial Sequence: Synthetic oligonucleotide
uagccgccacuguaacucu

SEQ ID NO: 936788 - RNA, 19 nt, Artificial Sequence
  Description of Artificial Sequence: Synthetic oligonucleotide
uuccuaucaaaaggaccuu

SEQ ID NO: 936789 - RNA, 19 nt, Artificial Sequence
  Description of Artificial Sequence: Synthetic oligonucleotide
cuggcccucgauuucacgu

SEQ ID NO: 936790 - RNA, 19 nt, Artificial Sequence
  Description of Artificial Sequence: Synthetic oligonucleotide
agucuuggucccagcuauc

SEQ ID NO: 936791 - RNA, 19 nt, Artificial Sequence
  Description of Artificial Sequence: Synthetic oligonucleotide
ggcgaucgguccaucgacg

SEQ ID NO: 936792 - RNA, 19 nt, Artificial Sequence
  Description of Artificial Sequence: Synthetic oligonucleotide
gugauguaguacugcauuu

SEQ ID NO: 936793 - RNA, 19 nt, Artificial Sequence
  Description of Artificial Sequence: Synthetic oligonucleotide
gaauccccgucaaguuaug

SEQ ID NO: 936794 - RNA, 19 nt, Artificial Sequence
  Description of Artificial Sequence: Synthetic oligonucleotide
gggucuuuagucuuauuuu

SEQ ID NO: 936795 - RNA, 19 nt, Artificial Sequence
  Description of Artificial Sequence: Synthetic oligonucleotide
uuuccguccuuggcaguaa

SEQ ID NO: 936796 - RNA, 19 nt, Artificial Sequence
  Description of Artificial Sequence: Synthetic oligonucleotide
ucccauccggugucaccug

SEQ ID NO: 936797 - RNA, 19 nt, Artificial Sequence
  Description of Artificial Sequence: Synthetic oligonucleotide
cuccccgucauauauccau

SEQ ID NO: 936798 - RNA, 19 nt, Artificial Sequence
  Description of Artificial Sequence: Synthetic oligonucleotide
aggggucucccgucuuugu

SEQ ID NO: 936799 - RNA, 19 nt, Artificial Sequence
  Description of Artificial Sequence: Synthetic oligonucleotide
gggugagacacuaggcuca

SEQ ID NO: 936800 - RNA, 19 nt, Artificial Sequence
  Description of Artificial Sequence: Synthetic oligonucleotide
uccguaugucagugaggau

SEQ ID NO: 936801 - RNA, 19 nt, Artificial Sequence
  Description of Artificial Sequence: Synthetic oligonucleotide
ggagcacucgagaaccuca

SEQ ID NO: 936802 - RNA, 19 nt, Artificial Sequence
  Description of Artificial Sequence: Synthetic oligonucleotide
gucggucagucuuaacagu

SEQ ID NO: 936803 - RNA, 19 nt, Artificial Sequence
  Description of Artificial Sequence: Synthetic oligonucleotide
guaguuggugucugaucgu

SEQ ID NO: 936804 - RNA, 19 nt, Artificial Sequence
  Description of Artificial Sequence: Synthetic oligonucleotide
guccaucguaaugaaggaa

SEQ ID NO: 936805 - RNA, 19 nt, Artificial Sequence
  Description of Artificial Sequence: Synthetic oligonucleotide
ggugagacacuaggcucag

SEQ ID NO: 936806 - RNA, 19 nt, Artificial Sequence
  Description of Artificial Sequence: Synthetic oligonucleotide
ucccgucuuuguguaugca

SEQ ID NO: 936807 - RNA, 19 nt, Artificial Sequence
  Description of Artificial Sequence: Synthetic oligonucleotide
ggcccucgauuucacguug

SEQ ID NO: 936808 - RNA, 19 nt, Artificial Sequence
  Description of Artificial Sequence: Synthetic oligonucleotide
ggaaugccucgugugcugc

SEQ ID NO: 936809 - RNA, 19 nt, Artificial Sequence
  Description of Artificial Sequence: Synthetic oligonucleotide
ggcaucuaauaacccugca

SEQ ID NO: 936810 - RNA, 19 nt, Artificial Sequence
  Description of Artificial Sequence: Synthetic oligonucleotide
ggaguuucgcauugcacau

SEQ ID NO: 936811 - RNA, 19 nt, Artificial Sequence
  Description of Artificial Sequence: Synthetic oligonucleotide
cgauaaugugguccaaguc

SEQ ID NO: 936812 - RNA, 19 nt, Artificial Sequence
  Description of Artificial Sequence: Synthetic oligonucleotide
cgugugaacacaguggcga

SEQ ID NO: 936813 - RNA, 19 nt, Artificial Sequence
  Description of Artificial Sequence: Synthetic oligonucleotide
cgucauauauccaucggua

SEQ ID NO: 936814 - RNA, 19 nt, Artificial Sequence
  Description of Artificial Sequence: Synthetic oligonucleotide
gagcacucgagaaccucaa

SEQ ID NO: 936815 - RNA, 19 nt, Artificial Sequence
  Description of Artificial Sequence: Synthetic oligonucleotide
cacuggcccucgauuucac

SEQ ID NO: 936816 - RNA, 19 nt, Artificial Sequence
  Description of Artificial Sequence: Synthetic oligonucleotide
agcgcagcgagggucuuua

SEQ ID NO: 936817 - RNA, 19 nt, Artificial Sequence
  Description of Artificial Sequence: Synthetic oligonucleotide
acaguggcgaucgguccau

SEQ ID NO: 936818 - RNA, 19 nt, Artificial Sequence
  Description of Artificial Sequence: Synthetic oligonucleotide
caggcugaagacaucccau

SEQ ID NO: 936819 - RNA, 19 nt, Artificial Sequence
  Description of Artificial Sequence: Synthetic oligonucleotide
cuuuccguccuuggcagua

SEQ ID NO: 936820 - RNA, 19 nt, Artificial Sequence
  Description of Artificial Sequence: Synthetic oligonucleotide
guuucgcauugcacaugug

SEQ ID NO: 936821 - RNA, 19 nt, Artificial Sequence
  Description of Artificial Sequence: Synthetic oligonucleotide
ugccucgugugcugcgaua

SEQ ID NO: 936822 - RNA, 19 nt, Artificial Sequence
  Description of Artificial Sequence: Synthetic oligonucleotide
ccaucgacgugguaaucca

SEQ ID NO: 936823 - RNA, 19 nt, Artificial Sequence
  Description of Artificial Sequence: Synthetic oligonucleotide
cuguuguacucuguuccaa

SEQ ID NO: 936824 - RNA, 19 nt, Artificial Sequence
  Description of Artificial Sequence: Synthetic oligonucleotide
caguuggaucugaugccaa

SEQ ID NO: 936825 - RNA, 19 nt, Artificial Sequence
  Description of Artificial Sequence: Synthetic oligonucleotide
ucgcaacugugaacacauu

SEQ ID NO: 936826 - RNA, 19 nt, Artificial Sequence
  Description of Artificial Sequence: Synthetic oligonucleotide
cuagccuccugaggaucuc

SEQ ID NO: 936827 - RNA, 19 nt, Artificial Sequence
  Description of Artificial Sequence: Synthetic oligonucleotide
agccucacgugugggugcu

SEQ ID NO: 936828 - RNA, 19 nt, Artificial Sequence
  Description of Artificial Sequence: Synthetic oligonucleotide
cagcgagggucuuuagucu

SEQ ID NO: 936829 - RNA, 19 nt, Artificial Sequence
  Description of Artificial Sequence: Synthetic oligonucleotide
ccaucgguagaggaagcuc

SEQ ID NO: 936830 - RNA, 19 nt, Artificial Sequence
  Description of Artificial Sequence: Synthetic oligonucleotide
ccucacaucuagccuccug

SEQ ID NO: 936831 - RNA, 19 nt, Artificial Sequence
  Description of Artificial Sequence: Synthetic oligonucleotide
ccucacgugugggugcugc

SEQ ID NO: 936832 - RNA, 19 nt, Artificial Sequence
  Description of Artificial Sequence: Synthetic oligonucleotide
ggcgaacaaguucugguuu

SEQ ID NO: 936833 - RNA, 19 nt, Artificial Sequence
  Description of Artificial Sequence: Synthetic oligonucleotide
gguccaucgacgugguaau

SEQ ID NO: 936834 - RNA, 19 nt, Artificial Sequence
  Description of Artificial Sequence: Synthetic oligonucleotide
gugugaacacaguggcgau

SEQ ID NO: 936835 - RNA, 19 nt, Artificial Sequence
  Description of Artificial Sequence: Synthetic oligonucleotide
aucgguccaucgacguggu

SEQ ID NO: 936836 - RNA, 19 nt, Artificial Sequence
  Description of Artificial Sequence: Synthetic oligonucleotide
ggucucccgucuuugugua

SEQ ID NO: 936837 - RNA, 19 nt, Artificial Sequence
  Description of Artificial Sequence: Synthetic oligonucleotide
ccgccacuguaacucuucc

SEQ ID NO: 936838 - RNA, 19 nt, Artificial Sequence
  Description of Artificial Sequence: Synthetic oligonucleotide
cagcgggaggugauggugu

SEQ ID NO: 936839 - RNA, 19 nt, Artificial Sequence
  Description of Artificial Sequence: Synthetic oligonucleotide
agguaccgccgcauagccu

SEQ ID NO: 936840 - RNA, 19 nt, Artificial Sequence
  Description of Artificial Sequence: Synthetic oligonucleotide
accgccgcauagccugcau

SEQ ID NO: 936841 - RNA, 19 nt, Artificial Sequence
  Description of Artificial Sequence: Synthetic oligonucleotide
ccgucauauauccaucggu

SEQ ID NO: 936842 - RNA, 19 nt, Artificial Sequence
  Description of Artificial Sequence: Synthetic oligonucleotide
ggguucccuggcuuuguaa

SEQ ID NO: 936843 - RNA, 19 nt, Artificial Sequence
  Description of Artificial Sequence: Synthetic oligonucleotide
guaccgccgcauagccugc

SEQ ID NO: 936844 - RNA, 19 nt, Artificial Sequence
  Description of Artificial Sequence: Synthetic oligonucleotide
ccccgucaaguuaugcuga

SEQ ID NO: 936845 - RNA, 19 nt, Artificial Sequence
  Description of Artificial Sequence: Synthetic oligonucleotide
agucgcuguccaggagaca

SEQ ID NO: 936846 - RNA, 19 nt, Artificial Sequence
  Description of Artificial Sequence: Synthetic oligonucleotide
ggugucugaucgugacaaa

SEQ ID NO: 936847 - RNA, 19 nt, Artificial Sequence
  Description of Artificial Sequence: Synthetic oligonucleotide
gcacucucgugugaacaca

SEQ ID NO: 936848 - RNA, 19 nt, Artificial Sequence
  Description of Artificial Sequence: Synthetic oligonucleotide
gcgaacaaguucugguuuu

SEQ ID NO: 936849 - RNA, 19 nt, Artificial Sequence
  Description of Artificial Sequence: Synthetic oligonucleotide
ggacauccaauaaguauuu

SEQ ID NO: 936850 - RNA, 19 nt, Artificial Sequence
  Description of Artificial Sequence: Synthetic oligonucleotide
guaggggucucccgucuuu

SEQ ID NO: 936851 - RNA, 19 nt, Artificial Sequence
  Description of Artificial Sequence: Synthetic oligonucleotide
gggcgaacaaguucugguu

SEQ ID NO: 936852 - RNA, 19 nt, Artificial Sequence
  Description of Artificial Sequence: Synthetic oligonucleotide
guccaucgacgugguaauc

SEQ ID NO: 936853 - RNA, 19 nt, Artificial Sequence
  Description of Artificial Sequence: Synthetic oligonucleotide
gccgcauagccugcaugug

SEQ ID NO: 936854 - RNA, 19 nt, Artificial Sequence
  Description of Artificial Sequence: Synthetic oligonucleotide
gcgaucgguccaucgacgu

SEQ ID NO: 936855 - RNA, 19 nt, Artificial Sequence
  Description of Artificial Sequence: Synthetic oligonucleotide
gucucgaaauaagcagcau

SEQ ID NO: 936856 - RNA, 19 nt, Artificial Sequence
  Description of Artificial Sequence: Synthetic oligonucleotide
ccguccuuggcaguaaucu

SEQ ID NO: 936857 - RNA, 19 nt, Artificial Sequence
  Description of Artificial Sequence: Synthetic oligonucleotide
ccuuuccguaugucaguga

SEQ ID NO: 936858 - RNA, 19 nt, Artificial Sequence
  Description of Artificial Sequence: Synthetic oligonucleotide
gccgccacuguaacucuuc

SEQ ID NO: 936859 - RNA, 19 nt, Artificial Sequence
  Description of Artificial Sequence: Synthetic oligonucleotide
guccaaccugaagcugaga

SEQ ID NO: 936860 - RNA, 19 nt, Artificial Sequence
  Description of Artificial Sequence: Synthetic oligonucleotide
cgaucgguccaucgacgug

SEQ ID NO: 936861 - RNA, 19 nt, Artificial Sequence
  Description of Artificial Sequence: Synthetic oligonucleotide
caggagcacucgagaaccu

SEQ ID NO: 936862 - RNA, 19 nt, Artificial Sequence
  Description of Artificial Sequence: Synthetic oligonucleotide
ccgccgcauagccugcaug

SEQ ID NO: 936863 - RNA, 19 nt, Artificial Sequence
  Description of Artificial Sequence: Synthetic oligonucleotide
cagcaccccagagaacucu

SEQ ID NO: 936864 - RNA, 19 nt, Artificial Sequence
  Description of Artificial Sequence: Synthetic oligonucleotide
guggguaaugagacuucuu

SEQ ID NO: 936865 - RNA, 19 nt, Artificial Sequence
  Description of Artificial Sequence: Synthetic oligonucleotide
cccgucuuuguguaugcau

SEQ ID NO: 936866 - RNA, 19 nt, Artificial Sequence
  Description of Artificial Sequence: Synthetic oligonucleotide
ccauccggugucaccugga

SEQ ID NO: 936867 - RNA, 19 nt, Artificial Sequence
  Description of Artificial Sequence: Synthetic oligonucleotide
cugcgauaaugugguccaa

SEQ ID NO: 936868 - RNA, 19 nt, Artificial Sequence
  Description of Artificial Sequence: Synthetic oligonucleotide
ccgcauagccugcaugugu

SEQ ID NO: 936869 - RNA, 19 nt, Artificial Sequence
  Description of Artificial Sequence: Synthetic oligonucleotide
ggagacagcgggaggugau

SEQ ID NO: 936870 - RNA, 19 nt, Artificial Sequence
  Description of Artificial Sequence: Synthetic oligonucleotide
caguggcgaucgguccauc

SEQ ID NO: 936871 - RNA, 19 nt, Artificial Sequence
  Description of Artificial Sequence: Synthetic oligonucleotide
cgccgcauagccugcaugu

SEQ ID NO: 936872 - RNA, 19 nt, Artificial Sequence
  Description of Artificial Sequence: Synthetic oligonucleotide
gucucccgucuuuguguau

SEQ ID NO: 936873 - RNA, 19 nt, Artificial Sequence
  Description of Artificial Sequence: Synthetic oligonucleotide
cuccccacuggcccucgau

SEQ ID NO: 936874 - RNA, 19 nt, Artificial Sequence
  Description of Artificial Sequence: Synthetic oligonucleotide
ccuccccgucauauaucca

SEQ ID NO: 936875 - RNA, 19 nt, Artificial Sequence
  Description of Artificial Sequence: Synthetic oligonucleotide
cccgaugccuggagggucu

SEQ ID NO: 936876 - RNA, 19 nt, Artificial Sequence
  Description of Artificial Sequence: Synthetic oligonucleotide
gcauugcacaugugcccuu

SEQ ID NO: 936877 - RNA, 19 nt, Artificial Sequence
  Description of Artificial Sequence: Synthetic oligonucleotide
cccgucaaguuaugcugau

SEQ ID NO: 936878 - RNA, 19 nt, Artificial Sequence
  Description of Artificial Sequence: Synthetic oligonucleotide
cgugguaauccaggcugaa

SEQ ID NO: 936879 - RNA, 19 nt, Artificial Sequence
  Description of Artificial Sequence: Synthetic oligonucleotide
ccgucaaguuaugcugaua

SEQ ID NO: 936880 - RNA, 19 nt, Artificial Sequence
  Description of Artificial Sequence: Synthetic oligonucleotide
ccccuacugcccagagaaa

SEQ ID NO: 936881 - RNA, 19 nt, Artificial Sequence
  Description of Artificial Sequence: Synthetic oligonucleotide
gcccucgauuucacguugu

SEQ ID NO: 936882 - RNA, 19 nt, Artificial Sequence
  Description of Artificial Sequence: Synthetic oligonucleotide
ccuuuccguccuuggcagu

SEQ ID NO: 936883 - RNA, 19 nt, Artificial Sequence
  Description of Artificial Sequence: Synthetic oligonucleotide
cgauuucacguuguuucuu

SEQ ID NO: 936884 - RNA, 19 nt, Artificial Sequence
  Description of Artificial Sequence: Synthetic oligonucleotide
cccucgauuucacguuguu

SEQ ID NO: 936885 - RNA, 19 nt, Artificial Sequence
  Description of Artificial Sequence: Synthetic oligonucleotide
cgagaaccucaaaggugau

SEQ ID NO: 936886 - RNA, 19 nt, Artificial Sequence
  Description of Artificial Sequence: Synthetic oligonucleotide
ccucgugugcugcgauaau

SEQ ID NO: 936887 - RNA, 19 nt, Artificial Sequence
  Description of Artificial Sequence: Synthetic oligonucleotide
aagacuaggguguacaacg

SEQ ID NO: 936888 - RNA, 19 nt, Artificial Sequence
  Description of Artificial Sequence: Synthetic oligonucleotide
aagauugccggucaguccc

SEQ ID NO: 936889 - RNA, 19 nt, Artificial Sequence
  Description of Artificial Sequence: Synthetic oligonucleotide
augaucaugauuugggagc

SEQ ID NO: 936890 - RNA, 19 nt, Artificial Sequence
  Description of Artificial Sequence: Synthetic oligonucleotide
acuacagucacauugccuc

SEQ ID NO: 936891 - RNA, 19 nt, Artificial Sequence
  Description of Artificial Sequence: Synthetic oligonucleotide
cuaaauaccuucaccaugg

SEQ ID NO: 936892 - RNA, 19 nt, Artificial Sequence
  Description of Artificial Sequence: Synthetic oligonucleotide
uuuuauggaaccaucagaa

SEQ ID NO: 936893 - RNA, 19 nt, Artificial Sequence
  Description of Artificial Sequence: Synthetic oligonucleotide
uugccgaccaauaugaucc

SEQ ID NO: 936894 - RNA, 19 nt, Artificial Sequence
  Description of Artificial Sequence: Synthetic oligonucleotide
ugguccaacaaacugauug

SEQ ID NO: 936895 - RNA, 19 nt, Artificial Sequence
  Description of Artificial Sequence: Synthetic oligonucleotide
uucaaaauggacuucacau

SEQ ID NO: 936896 - RNA, 19 nt, Artificial Sequence
  Description of Artificial Sequence: Synthetic oligonucleotide
auuccuauugaacugcuuc

SEQ ID NO: 936897 - RNA, 19 nt, Artificial Sequence
  Description of Artificial Sequence: Synthetic oligonucleotide
aaugcagugauuuugucuu

SEQ ID NO: 936898 - RNA, 19 nt, Artificial Sequence
  Description of Artificial Sequence: Synthetic oligonucleotide
cuuucuacgaugaaugcag

SEQ ID NO: 936899 - RNA, 19 nt, Artificial Sequence
  Description of Artificial Sequence: Synthetic oligonucleotide
uacauaugccuucugagcc

SEQ ID NO: 936900 - RNA, 19 nt, Artificial Sequence
  Description of Artificial Sequence: Synthetic oligonucleotide
gaaauaagcuuccacgcag

SEQ ID NO: 936901 - RNA, 19 nt, Artificial Sequence
  Description of Artificial Sequence: Synthetic oligonucleotide
auauucagcagucaguuca

SEQ ID NO: 936902 - RNA, 19 nt, Artificial Sequence
  Description of Artificial Sequence: Synthetic oligonucleotide
aaucccgaagcuuccgacc

SEQ ID NO: 936903 - RNA, 19 nt, Artificial Sequence
  Description of Artificial Sequence: Synthetic oligonucleotide
aauagccugaugugcugcc

SEQ ID NO: 936904 - RNA, 19 nt, Artificial Sequence
  Description of Artificial Sequence: Synthetic oligonucleotide
uacaacgccaagauugccg

SEQ ID NO: 936905 - RNA, 19 nt, Artificial Sequence
  Description of Artificial Sequence: Synthetic oligonucleotide
aaccgaagaaucucauugg

SEQ ID NO: 936906 - RNA, 19 nt, Artificial Sequence
  Description of Artificial Sequence: Synthetic oligonucleotide
aauggucuuuccaaaacgg

SEQ ID NO: 936907 - RNA, 19 nt, Artificial Sequence
  Description of Artificial Sequence: Synthetic oligonucleotide
aaacugauugauuucacua

SEQ ID NO: 936908 - RNA, 19 nt, Artificial Sequence
  Description of Artificial Sequence: Synthetic oligonucleotide
aaugaacaaccgaagaauc

SEQ ID NO: 936909 - RNA, 19 nt, Artificial Sequence
  Description of Artificial Sequence: Synthetic oligonucleotide
aaagucucuuucuacgaug

SEQ ID NO: 936910 - RNA, 19 nt, Artificial Sequence
  Description of Artificial Sequence: Synthetic oligonucleotide
ucauugccgaccaauauga

SEQ ID NO: 936911 - RNA, 19 nt, Artificial Sequence
  Description of Artificial Sequence: Synthetic oligonucleotide
aaauggacuucacaugugu

SEQ ID NO: 936912 - RNA, 19 nt, Artificial Sequence
  Description of Artificial Sequence: Synthetic oligonucleotide
uuacauaugccuucugagc

SEQ ID NO: 936913 - RNA, 19 nt, Artificial Sequence
  Description of Artificial Sequence: Synthetic oligonucleotide
uuuucgagaguccacuucu

SEQ ID NO: 936914 - RNA, 19 nt, Artificial Sequence
  Description of Artificial Sequence: Synthetic oligonucleotide
cuauugaacugcuuccucg

SEQ ID NO: 936915 - RNA, 19 nt, Artificial Sequence
  Description of Artificial Sequence: Synthetic oligonucleotide
aauucacugagauuccuau

SEQ ID NO: 936916 - RNA, 19 nt, Artificial Sequence
  Description of Artificial Sequence: Synthetic oligonucleotide
uggucuuuccaaaacggag

SEQ ID NO: 936917 - RNA, 19 nt, Artificial Sequence
  Description of Artificial Sequence: Synthetic oligonucleotide
ucgguaaagaaucuuucca

SEQ ID NO: 936918 - RNA, 19 nt, Artificial Sequence
  Description of Artificial Sequence: Synthetic oligonucleotide
cuaccuuaaagccaccucc

SEQ ID NO: 936919 - RNA, 19 nt, Artificial Sequence
  Description of Artificial Sequence: Synthetic oligonucleotide
acagauguaggcucgcuuc

SEQ ID NO: 936920 - RNA, 19 nt, Artificial Sequence
  Description of Artificial Sequence: Synthetic oligonucleotide
ucuggaaacgggaaaacuc

SEQ ID NO: 936921 - RNA, 19 nt, Artificial Sequence
  Description of Artificial Sequence: Synthetic oligonucleotide
guguacaacgccaagauug

SEQ ID NO: 936922 - RNA, 19 nt, Artificial Sequence
  Description of Artificial Sequence: Synthetic oligonucleotide
auaugauccccuugaggcc

SEQ ID NO: 936923 - RNA, 19 nt, Artificial Sequence
  Description of Artificial Sequence: Synthetic oligonucleotide
accauggcagccucgaucg

SEQ ID NO: 936924 - RNA, 19 nt, Artificial Sequence
  Description of Artificial Sequence: Synthetic oligonucleotide
aaucaguuucuugagcauc

SEQ ID NO: 936925 - RNA, 19 nt, Artificial Sequence
  Description of Artificial Sequence: Synthetic oligonucleotide
accaucagaaucaaccacc

SEQ ID NO: 936926 - RNA, 19 nt, Artificial Sequence
  Description of Artificial Sequence: Synthetic oligonucleotide
ugagauuccuauugaacug

SEQ ID NO: 936927 - RNA, 19 nt, Artificial Sequence
  Description of Artificial Sequence: Synthetic oligonucleotide
ucgagaguccacuucuucg

SEQ ID NO: 936928 - RNA, 19 nt, Artificial Sequence
  Description of Artificial Sequence: Synthetic oligonucleotide
aacugauugauuucacuaa

SEQ ID NO: 936929 - RNA, 19 nt, Artificial Sequence
  Description of Artificial Sequence: Synthetic oligonucleotide
ucuuuuaagcucuuugauc

SEQ ID NO: 936930 - RNA, 19 nt, Artificial Sequence
  Description of Artificial Sequence: Synthetic oligonucleotide
aacauguuggccaacagaa

SEQ ID NO: 936931 - RNA, 19 nt, Artificial Sequence
  Description of Artificial Sequence: Synthetic oligonucleotide
cuggaaacgggaaaacucc

SEQ ID NO: 936932 - RNA, 19 nt, Artificial Sequence
  Description of Artificial Sequence: Synthetic oligonucleotide
aaccucaugaucaugauuu

SEQ ID NO: 936933 - RNA, 19 nt, Artificial Sequence
  Description of Artificial Sequence: Synthetic oligonucleotide
gaauuuucccuccugguca

SEQ ID NO: 936934 - RNA, 19 nt, Artificial Sequence
  Description of Artificial Sequence: Synthetic oligonucleotide
acuuaauguagcucugguc

SEQ ID NO: 936935 - RNA, 19 nt, Artificial Sequence
  Description of Artificial Sequence: Synthetic oligonucleotide
aagccgagcauacauggug

SEQ ID NO: 936936 - RNA, 19 nt, Artificial Sequence
  Description of Artificial Sequence: Synthetic oligonucleotide
auugccgaccaauaugauc

SEQ ID NO: 936937 - RNA, 19 nt, Artificial Sequence
  Description of Artificial Sequence: Synthetic oligonucleotide
caugaucaugauuugggag

SEQ ID NO: 936938 - RNA, 19 nt, Artificial Sequence
  Description of Artificial Sequence: Synthetic oligonucleotide
cauacaugguguuggagag

SEQ ID NO: 936939 - RNA, 19 nt, Artificial Sequence
  Description of Artificial Sequence: Synthetic oligonucleotide
uccgaccaaaauaauacac

SEQ ID NO: 936940 - RNA, 19 nt, Artificial Sequence
  Description of Artificial Sequence: Synthetic oligonucleotide
aacgggaaaacuccuuucu

SEQ ID NO: 936941 - RNA, 19 nt, Artificial Sequence
  Description of Artificial Sequence: Synthetic oligonucleotide
uucgguaaagaaucuuucc

SEQ ID NO: 936942 - RNA, 19 nt, Artificial Sequence
  Description of Artificial Sequence: Synthetic oligonucleotide
uguacaacgccaagauugc

SEQ ID NO: 936943 - RNA, 19 nt, Artificial Sequence
  Description of Artificial Sequence: Synthetic oligonucleotide
acgcagaaaacgcucauag

SEQ ID NO: 936944 - RNA, 19 nt, Artificial Sequence
  Description of Artificial Sequence: Synthetic oligonucleotide
cucgauguugcccaggaag

SEQ ID NO: 936945 - RNA, 19 nt, Artificial Sequence
  Description of Artificial Sequence: Synthetic oligonucleotide
acaacgccaagauugccgg

SEQ ID NO: 936946 - RNA, 19 nt, Artificial Sequence
  Description of Artificial Sequence: Synthetic oligonucleotide
uuugggcaaauacuuggcc

SEQ ID NO: 936947 - RNA, 19 nt, Artificial Sequence
  Description of Artificial Sequence: Synthetic oligonucleotide
gaagcuuccgaccaauuga

SEQ ID NO: 936948 - RNA, 19 nt, Artificial Sequence
  Description of Artificial Sequence: Synthetic oligonucleotide
guagcucuggucugaaugg

SEQ ID NO: 936949 - RNA, 19 nt, Artificial Sequence
  Description of Artificial Sequence: Synthetic oligonucleotide
aacaguccgaccaaaauaa

SEQ ID NO: 936950 - RNA, 19 nt, Artificial Sequence
  Description of Artificial Sequence: Synthetic oligonucleotide
aaucacgcagaaaacgcuc

SEQ ID NO: 936951 - RNA, 19 nt, Artificial Sequence
  Description of Artificial Sequence: Synthetic oligonucleotide
uuccuauugaacugcuucc

SEQ ID NO: 936952 - RNA, 19 nt, Artificial Sequence
  Description of Artificial Sequence: Synthetic oligonucleotide
agucagggaauccugguug

SEQ ID NO: 936953 - RNA, 19 nt, Artificial Sequence
  Description of Artificial Sequence: Synthetic oligonucleotide
guucauggcuaccuuaaag

SEQ ID NO: 936954 - RNA, 19 nt, Artificial Sequence
  Description of Artificial Sequence: Synthetic oligonucleotide
aagcucgcacagcagucgc

SEQ ID NO: 936955 - RNA, 19 nt, Artificial Sequence
  Description of Artificial Sequence: Synthetic oligonucleotide
uccugaaucaaaccaaauu

SEQ ID NO: 936956 - RNA, 19 nt, Artificial Sequence
  Description of Artificial Sequence: Synthetic oligonucleotide
aguucggcccagugaaucc

SEQ ID NO: 936957 - RNA, 19 nt, Artificial Sequence
  Description of Artificial Sequence: Synthetic oligonucleotide
agcuccuuggcaaaagagc

SEQ ID NO: 936958 - RNA, 19 nt, Artificial Sequence
  Description of Artificial Sequence: Synthetic oligonucleotide
agaaaacgcucauaggggu

SEQ ID NO: 936959 - RNA, 19 nt, Artificial Sequence
  Description of Artificial Sequence: Synthetic oligonucleotide
cuuccgaccaauugacucc

SEQ ID NO: 936960 - RNA, 19 nt, Artificial Sequence
  Description of Artificial Sequence: Synthetic oligonucleotide
ucaugaucaugauuuggga

SEQ ID NO: 936961 - RNA, 19 nt, Artificial Sequence
  Description of Artificial Sequence: Synthetic oligonucleotide
agaaucaaccaccucaguu

SEQ ID NO: 936962 - RNA, 19 nt, Artificial Sequence
  Description of Artificial Sequence: Synthetic oligonucleotide
aagcuuccgaccaauugac

SEQ ID NO: 936963 - RNA, 19 nt, Artificial Sequence
  Description of Artificial Sequence: Synthetic oligonucleotide
ucgauguugcccaggaaga

SEQ ID NO: 936964 - RNA, 19 nt, Artificial Sequence
  Description of Artificial Sequence: Synthetic oligonucleotide
ugucaacuggaauuuuccc

SEQ ID NO: 936965 - RNA, 19 nt, Artificial Sequence
  Description of Artificial Sequence: Synthetic oligonucleotide
aacgccaagauugccgguc

SEQ ID NO: 936966 - RNA, 19 nt, Artificial Sequence
  Description of Artificial Sequence: Synthetic oligonucleotide
uuuccugaaucaaaccaaa

SEQ ID NO: 936967 - RNA, 19 nt, Artificial Sequence
  Description of Artificial Sequence: Synthetic oligonucleotide
gacuaaucucuggaaacgg

SEQ ID NO: 936968 - RNA, 19 nt, Artificial Sequence
  Description of Artificial Sequence: Synthetic oligonucleotide
ugaacaaccgaagaaucuc

SEQ ID NO: 936969 - RNA, 19 nt, Artificial Sequence
  Description of Artificial Sequence: Synthetic oligonucleotide
ucuuucuacgaugaaugca

SEQ ID NO: 936970 - RNA, 19 nt, Artificial Sequence
  Description of Artificial Sequence: Synthetic oligonucleotide
uuuccaaaacggaguagca

SEQ ID NO: 936971 - RNA, 19 nt, Artificial Sequence
  Description of Artificial Sequence: Synthetic oligonucleotide
ugucuccaagacuagggug

SEQ ID NO: 936972 - RNA, 19 nt, Artificial Sequence
  Description of Artificial Sequence: Synthetic oligonucleotide
ugauagacccguccauugc

SEQ ID NO: 936973 - RNA, 19 nt, Artificial Sequence
  Description of Artificial Sequence: Synthetic oligonucleotide
aauacuggcuaguccucca

SEQ ID NO: 936974 - RNA, 19 nt, Artificial Sequence
  Description of Artificial Sequence: Synthetic oligonucleotide
ugaugugcugccaggguca

SEQ ID NO: 936975 - RNA, 19 nt, Artificial Sequence
  Description of Artificial Sequence: Synthetic oligonucleotide
accaauugacuccaugacu

SEQ ID NO: 936976 - RNA, 19 nt, Artificial Sequence
  Description of Artificial Sequence: Synthetic oligonucleotide
auugacuccaugacuacag

SEQ ID NO: 936977 - RNA, 19 nt, Artificial Sequence
  Description of Artificial Sequence: Synthetic oligonucleotide
cucauugccgaccaauaug

SEQ ID NO: 936978 - RNA, 19 nt, Artificial Sequence
  Description of Artificial Sequence: Synthetic oligonucleotide
uccucgugcaggcauauuc

SEQ ID NO: 936979 - RNA, 19 nt, Artificial Sequence
  Description of Artificial Sequence: Synthetic oligonucleotide
ucaacaguccgaccaaaau

SEQ ID NO: 936980 - RNA, 19 nt, Artificial Sequence
  Description of Artificial Sequence: Synthetic oligonucleotide
ugucuuuuauggaaccauc

SEQ ID NO: 936981 - RNA, 19 nt, Artificial Sequence
  Description of Artificial Sequence: Synthetic oligonucleotide
cagccucagagcuaaauac

SEQ ID NO: 936982 - RNA, 19 nt, Artificial Sequence
  Description of Artificial Sequence: Synthetic oligonucleotide
gaggaugcgggaaucacgc

SEQ ID NO: 936983 - RNA, 19 nt, Artificial Sequence
  Description of Artificial Sequence: Synthetic oligonucleotide
gaacauguuggccaacaga

SEQ ID NO: 936984 - RNA, 19 nt, Artificial Sequence
  Description of Artificial Sequence: Synthetic oligonucleotide
aacuccuuucugcucgaug

SEQ ID NO: 936985 - RNA, 19 nt, Artificial Sequence
  Description of Artificial Sequence: Synthetic oligonucleotide
uaugauccccuugaggcca

SEQ ID NO: 936986 - RNA, 19 nt, Artificial Sequence
  Description of Artificial Sequence: Synthetic oligonucleotide
uguaggcucgcuucucaag

SEQ ID NO: 936987 - RNA, 19 nt, Artificial Sequence
  Description of Artificial Sequence: Synthetic oligonucleotide
auccccuugaggccaauag

SEQ ID NO: 936988 - RNA, 19 nt, Artificial Sequence
  Description of Artificial Sequence: Synthetic oligonucleotide
agugacuccgccaaagucu

SEQ ID NO: 936989 - RNA, 19 nt, Artificial Sequence
  Description of Artificial Sequence: Synthetic oligonucleotide
ugacuacagucacauugcc

SEQ ID NO: 936990 - RNA, 19 nt, Artificial Sequence
  Description of Artificial Sequence: Synthetic oligonucleotide
agaacauguuggccaacag

SEQ ID NO: 936991 - RNA, 19 nt, Artificial Sequence
  Description of Artificial Sequence: Synthetic oligonucleotide
agggaauccugguuggucu

SEQ ID NO: 936992 - RNA, 19 nt, Artificial Sequence
  Description of Artificial Sequence: Synthetic oligonucleotide
cauuacauaugccuucuga

SEQ ID NO: 936993 - RNA, 19 nt, Artificial Sequence
  Description of Artificial Sequence: Synthetic oligonucleotide
uccaagacuaggguguaca

SEQ ID NO: 936994 - RNA, 19 nt, Artificial Sequence
  Description of Artificial Sequence: Synthetic oligonucleotide
aagucucuuucuacgauga

SEQ ID NO: 936995 - RNA, 19 nt, Artificial Sequence
  Description of Artificial Sequence: Synthetic oligonucleotide
aggaugaaguacuucuuau

SEQ ID NO: 936996 - RNA, 19 nt, Artificial Sequence
  Description of Artificial Sequence: Synthetic oligonucleotide
aaaauggacuucacaugug

SEQ ID NO: 936997 - RNA, 19 nt, Artificial Sequence
  Description of Artificial Sequence: Synthetic oligonucleotide
cucuggucugaauggaggc

SEQ ID NO: 936998 - RNA, 19 nt, Artificial Sequence
  Description of Artificial Sequence: Synthetic oligonucleotide
gaaugccuaauuucucuuc

SEQ ID NO: 936999 - RNA, 19 nt, Artificial Sequence
  Description of Artificial Sequence: Synthetic oligonucleotide
aacggaguagcagggucuc

SEQ ID NO: 937000 - RNA, 19 nt, Artificial Sequence
  Description of Artificial Sequence: Synthetic oligonucleotide
cuucugagccauuagugca

SEQ ID NO: 937001 - RNA, 19 nt, Artificial Sequence
  Description of Artificial Sequence: Synthetic oligonucleotide
accgaagaaucucauuggu

SEQ ID NO: 937002 - RNA, 19 nt, Artificial Sequence
  Description of Artificial Sequence: Synthetic oligonucleotide
agcccaauccggauggagc

SEQ ID NO: 937003 - RNA, 19 nt, Artificial Sequence
  Description of Artificial Sequence: Synthetic oligonucleotide
gacuaggguguacaacgcc

SEQ ID NO: 937004 - RNA, 19 nt, Artificial Sequence
  Description of Artificial Sequence: Synthetic oligonucleotide
caagauugccggucagucc

SEQ ID NO: 937005 - RNA, 19 nt, Artificial Sequence
  Description of Artificial Sequence: Synthetic oligonucleotide
aaauaagcuuccacgcaga

SEQ ID NO: 937006 - RNA, 19 nt, Artificial Sequence
  Description of Artificial Sequence: Synthetic oligonucleotide
gugauagacccguccauug

SEQ ID NO: 937007 - RNA, 19 nt, Artificial Sequence
  Description of Artificial Sequence: Synthetic oligonucleotide
ugguuggucuagcaucccc

SEQ ID NO: 937008 - RNA, 19 nt, Artificial Sequence
  Description of Artificial Sequence: Synthetic oligonucleotide
uagccugaugugcugccag

SEQ ID NO: 937009 - RNA, 19 nt, Artificial Sequence
  Description of Artificial Sequence: Synthetic oligonucleotide
ggaaucacgcagaaaacgc

SEQ ID NO: 937010 - RNA, 19 nt, Artificial Sequence
  Description of Artificial Sequence: Synthetic oligonucleotide
ugauccuugaggucaggau

SEQ ID NO: 937011 - RNA, 19 nt, Artificial Sequence
  Description of Artificial Sequence: Synthetic oligonucleotide
acgcucauagggguagucc

SEQ ID NO: 937012 - RNA, 19 nt, Artificial Sequence
  Description of Artificial Sequence: Synthetic oligonucleotide
agggucucaacaguccgac

SEQ ID NO: 937013 - RNA, 19 nt, Artificial Sequence
  Description of Artificial Sequence: Synthetic oligonucleotide
agcuaaauaccuucaccau

SEQ ID NO: 937014 - RNA, 19 nt, Artificial Sequence
  Description of Artificial Sequence: Synthetic oligonucleotide
agggcaaugaacaaccgaa

SEQ ID NO: 937015 - RNA, 19 nt, Artificial Sequence
  Description of Artificial Sequence: Synthetic oligonucleotide
ugacuccaugacuacaguc

SEQ ID NO: 937016 - RNA, 19 nt, Artificial Sequence
  Description of Artificial Sequence: Synthetic oligonucleotide
ucgugcaggcauauucagc

SEQ ID NO: 937017 - RNA, 19 nt, Artificial Sequence
  Description of Artificial Sequence: Synthetic oligonucleotide
uccaacaaacugauugauu

SEQ ID NO: 937018 - RNA, 19 nt, Artificial Sequence
  Description of Artificial Sequence: Synthetic oligonucleotide
uccucuacaauggucuuuc

SEQ ID NO: 937019 - RNA, 19 nt, Artificial Sequence
  Description of Artificial Sequence: Synthetic oligonucleotide
aaacggaguagcagggucu

SEQ ID NO: 937020 - RNA, 19 nt, Artificial Sequence
  Description of Artificial Sequence: Synthetic oligonucleotide
auguguuggagccucgaau

SEQ ID NO: 937021 - RNA, 19 nt, Artificial Sequence
  Description of Artificial Sequence: Synthetic oligonucleotide
acauaugccuucugagcca

SEQ ID NO: 937022 - RNA, 19 nt, Artificial Sequence
  Description of Artificial Sequence: Synthetic oligonucleotide
uuucuacgaugaaugcagu

SEQ ID NO: 937023 - RNA, 19 nt, Artificial Sequence
  Description of Artificial Sequence: Synthetic oligonucleotide
uccauuacauaugccuucu

SEQ ID NO: 937024 - RNA, 19 nt, Artificial Sequence
  Description of Artificial Sequence: Synthetic oligonucleotide
acgaugaaugcagugauuu

SEQ ID NO: 937025 - RNA, 19 nt, Artificial Sequence
  Description of Artificial Sequence: Synthetic oligonucleotide
agacuaggguguacaacgc

SEQ ID NO: 937026 - RNA, 19 nt, Artificial Sequence
  Description of Artificial Sequence: Synthetic oligonucleotide
uucccucaaagaugaggag

SEQ ID NO: 937027 - RNA, 19 nt, Artificial Sequence
  Description of Artificial Sequence: Synthetic oligonucleotide
cacugugauagacccgucc

SEQ ID NO: 937028 - RNA, 19 nt, Artificial Sequence
  Description of Artificial Sequence: Synthetic oligonucleotide
uucgagaguccacuucuuc

SEQ ID NO: 937029 - RNA, 19 nt, Artificial Sequence
  Description of Artificial Sequence: Synthetic oligonucleotide
ugggcaaauacuuggccuu

SEQ ID NO: 937030 - RNA, 19 nt, Artificial Sequence
  Description of Artificial Sequence: Synthetic oligonucleotide
ggucucaacaguccgacca

SEQ ID NO: 937031 - RNA, 19 nt, Artificial Sequence
  Description of Artificial Sequence: Synthetic oligonucleotide
ugaggaugaaguacuucuu

SEQ ID NO: 937032 - RNA, 19 nt, Artificial Sequence
  Description of Artificial Sequence: Synthetic oligonucleotide
uggcuaguccuccauuggu

SEQ ID NO: 937033 - RNA, 19 nt, Artificial Sequence
  Description of Artificial Sequence: Synthetic oligonucleotide
gauguaggcucgcuucuca

SEQ ID NO: 937034 - RNA, 19 nt, Artificial Sequence
  Description of Artificial Sequence: Synthetic oligonucleotide
uccacaguucggcccagug

SEQ ID NO: 937035 - RNA, 19 nt, Artificial Sequence
  Description of Artificial Sequence: Synthetic oligonucleotide
caucccggccacaacacug

SEQ ID NO: 937036 - RNA, 19 nt, Artificial Sequence
  Description of Artificial Sequence: Synthetic oligonucleotide
cucgaucgagcagucaggg

SEQ ID NO: 937037 - RNA, 19 nt, Artificial Sequence
  Description of Artificial Sequence: Synthetic oligonucleotide
uacuucuuaucuucacuua

SEQ ID NO: 937038 - RNA, 19 nt, Artificial Sequence
  Description of Artificial Sequence: Synthetic oligonucleotide
uccuauugaacugcuuccu

SEQ ID NO: 937039 - RNA, 19 nt, Artificial Sequence
  Description of Artificial Sequence: Synthetic oligonucleotide
aucccgaagcuuccgacca

SEQ ID NO: 937040 - RNA, 19 nt, Artificial Sequence
  Description of Artificial Sequence: Synthetic oligonucleotide
gcgggaaucacgcagaaaa

SEQ ID NO: 937041 - RNA, 19 nt, Artificial Sequence
  Description of Artificial Sequence: Synthetic oligonucleotide
augaacaaccgaagaaucu

SEQ ID NO: 937042 - RNA, 19 nt, Artificial Sequence
  Description of Artificial Sequence: Synthetic oligonucleotide
acccuaggcacucgggaag

SEQ ID NO: 937043 - RNA, 19 nt, Artificial Sequence
  Description of Artificial Sequence: Synthetic oligonucleotide
cuggcuaguccuccauugg

SEQ ID NO: 937044 - RNA, 19 nt, Artificial Sequence
  Description of Artificial Sequence: Synthetic oligonucleotide
acuaggguguacaacgcca

SEQ ID NO: 937045 - RNA, 19 nt, Artificial Sequence
  Description of Artificial Sequence: Synthetic oligonucleotide
uugacuccaugacuacagu

SEQ ID NO: 937046 - RNA, 19 nt, Artificial Sequence
  Description of Artificial Sequence: Synthetic oligonucleotide
agacccuaggcacucggga

SEQ ID NO: 937047 - RNA, 19 nt, Artificial Sequence
  Description of Artificial Sequence: Synthetic oligonucleotide
guuggucuagcauccccgc

SEQ ID NO: 937048 - RNA, 19 nt, Artificial Sequence
  Description of Artificial Sequence: Synthetic oligonucleotide
cucgugcaggcauauucag

SEQ ID NO: 937049 - RNA, 19 nt, Artificial Sequence
  Description of Artificial Sequence: Synthetic oligonucleotide
aucaugauuugggagccca

SEQ ID NO: 937050 - RNA, 19 nt, Artificial Sequence
  Description of Artificial Sequence: Synthetic oligonucleotide
uccccgugaagacccuagg

SEQ ID NO: 937051 - RNA, 19 nt, Artificial Sequence
  Description of Artificial Sequence: Synthetic oligonucleotide
cuccauuggugauccaaac

SEQ ID NO: 937052 - RNA, 19 nt, Artificial Sequence
  Description of Artificial Sequence: Synthetic oligonucleotide
ggaauuuucccuccugguc

SEQ ID NO: 937053 - RNA, 19 nt, Artificial Sequence
  Description of Artificial Sequence: Synthetic oligonucleotide
ccaaaacggaguagcaggg

SEQ ID NO: 937054 - RNA, 19 nt, Artificial Sequence
  Description of Artificial Sequence: Synthetic oligonucleotide
aagacccuaggcacucggg

SEQ ID NO: 937055 - RNA, 19 nt, Artificial Sequence
  Description of Artificial Sequence: Synthetic oligonucleotide
uuccugaaucaaaccaaau

SEQ ID NO: 937056 - RNA, 19 nt, Artificial Sequence
  Description of Artificial Sequence: Synthetic oligonucleotide
ccccuugaggccaauagcc

SEQ ID NO: 937057 - RNA, 19 nt, Artificial Sequence
  Description of Artificial Sequence: Synthetic oligonucleotide
uccucauugccgaccaaua

SEQ ID NO: 937058 - RNA, 19 nt, Artificial Sequence
  Description of Artificial Sequence: Synthetic oligonucleotide
gauagacccguccauugcu

SEQ ID NO: 937059 - RNA, 19 nt, Artificial Sequence
  Description of Artificial Sequence: Synthetic oligonucleotide
gaguccacuucuucgguaa

SEQ ID NO: 937060 - RNA, 19 nt, Artificial Sequence
  Description of Artificial Sequence: Synthetic oligonucleotide
uccggcgugcuguaggccu

SEQ ID NO: 937061 - RNA, 19 nt, Artificial Sequence
  Description of Artificial Sequence: Synthetic oligonucleotide
uggcuacccgcuucaauac

SEQ ID NO: 937062 - RNA, 19 nt, Artificial Sequence
  Description of Artificial Sequence: Synthetic oligonucleotide
gcccaauccggauggagcg

SEQ ID NO: 937063 - RNA, 19 nt, Artificial Sequence
  Description of Artificial Sequence: Synthetic oligonucleotide
gguuggucuagcauccccg

SEQ ID NO: 937064 - RNA, 19 nt, Artificial Sequence
  Description of Artificial Sequence: Synthetic oligonucleotide
ugugauagacccguccauu

SEQ ID NO: 937065 - RNA, 19 nt, Artificial Sequence
  Description of Artificial Sequence: Synthetic oligonucleotide
ucucauugguucccucaaa

SEQ ID NO: 937066 - RNA, 19 nt, Artificial Sequence
  Description of Artificial Sequence: Synthetic oligonucleotide
caacaguccgaccaaaaua

SEQ ID NO: 937067 - RNA, 19 nt, Artificial Sequence
  Description of Artificial Sequence: Synthetic oligonucleotide
accucaugaucaugauuug

SEQ ID NO: 937068 - RNA, 19 nt, Artificial Sequence
  Description of Artificial Sequence: Synthetic oligonucleotide
aauggacuucacauguguu

SEQ ID NO: 937069 - RNA, 19 nt, Artificial Sequence
  Description of Artificial Sequence: Synthetic oligonucleotide
cucuaaggugucaacugga

SEQ ID NO: 937070 - RNA, 19 nt, Artificial Sequence
  Description of Artificial Sequence: Synthetic oligonucleotide
gaugcgggaaucacgcaga

SEQ ID NO: 937071 - RNA, 19 nt, Artificial Sequence
  Description of Artificial Sequence: Synthetic oligonucleotide
cuccaaggacauuuuccac

SEQ ID NO: 937072 - RNA, 19 nt, Artificial Sequence
  Description of Artificial Sequence: Synthetic oligonucleotide
gcugucaugccauacaggu

SEQ ID NO: 937073 - RNA, 19 nt, Artificial Sequence
  Description of Artificial Sequence: Synthetic oligonucleotide
ucucuggaaacgggaaaac

SEQ ID NO: 937074 - RNA, 19 nt, Artificial Sequence
  Description of Artificial Sequence: Synthetic oligonucleotide
gguaaagaaucuuuccacu

SEQ ID NO: 937075 - RNA, 19 nt, Artificial Sequence
  Description of Artificial Sequence: Synthetic oligonucleotide
ucaugauuugggagcccaa

SEQ ID NO: 937076 - RNA, 19 nt, Artificial Sequence
  Description of Artificial Sequence: Synthetic oligonucleotide
cauggcagccucgaucgag

SEQ ID NO: 937077 - RNA, 19 nt, Artificial Sequence
  Description of Artificial Sequence: Synthetic oligonucleotide
uuugauccuugaggucagg

SEQ ID NO: 937078 - RNA, 19 nt, Artificial Sequence
  Description of Artificial Sequence: Synthetic oligonucleotide
uuccgaccaauugacucca

SEQ ID NO: 937079 - RNA, 19 nt, Artificial Sequence
  Description of Artificial Sequence: Synthetic oligonucleotide
guccgaccaaaauaauaca

SEQ ID NO: 937080 - RNA, 19 nt, Artificial Sequence
  Description of Artificial Sequence: Synthetic oligonucleotide
uacgaugaaugcagugauu

SEQ ID NO: 937081 - RNA, 19 nt, Artificial Sequence
  Description of Artificial Sequence: Synthetic oligonucleotide
agcaucccggccacaacac

SEQ ID NO: 937082 - RNA, 19 nt, Artificial Sequence
  Description of Artificial Sequence: Synthetic oligonucleotide
guacuucuuaucuucacuu

SEQ ID NO: 937083 - RNA, 19 nt, Artificial Sequence
  Description of Artificial Sequence: Synthetic oligonucleotide
cucuuugauccuugagguc

SEQ ID NO: 937084 - RNA, 19 nt, Artificial Sequence
  Description of Artificial Sequence: Synthetic oligonucleotide
agcauccccgcagugaggu

SEQ ID NO: 937085 - RNA, 19 nt, Artificial Sequence
  Description of Artificial Sequence: Synthetic oligonucleotide
auucacugagauuccuauu

SEQ ID NO: 937086 - RNA, 19 nt, Artificial Sequence
  Description of Artificial Sequence: Synthetic oligonucleotide
ucacgcagaaaacgcucau

SEQ ID NO: 937087 - RNA, 19 nt, Artificial Sequence
  Description of Artificial Sequence: Synthetic oligonucleotide
auugccggucagucccagg

SEQ ID NO: 937088 - RNA, 19 nt, Artificial Sequence
  Description of Artificial Sequence: Synthetic oligonucleotide
ggaggaugcgggaaucacg

SEQ ID NO: 937089 - RNA, 19 nt, Artificial Sequence
  Description of Artificial Sequence: Synthetic oligonucleotide
acccgcuucaauaccagcu

SEQ ID NO: 937090 - RNA, 19 nt, Artificial Sequence
  Description of Artificial Sequence: Synthetic oligonucleotide
agaaucucauugguucccu

SEQ ID NO: 937091 - RNA, 19 nt, Artificial Sequence
  Description of Artificial Sequence: Synthetic oligonucleotide
gaauccugguuggucuagc

SEQ ID NO: 937092 - RNA, 19 nt, Artificial Sequence
  Description of Artificial Sequence: Synthetic oligonucleotide
uacccgcuucaauaccagc

SEQ ID NO: 937093 - RNA, 19 nt, Artificial Sequence
  Description of Artificial Sequence: Synthetic oligonucleotide
ugagcaucccggccacaac

SEQ ID NO: 937094 - RNA, 19 nt, Artificial Sequence
  Description of Artificial Sequence: Synthetic oligonucleotide
auggucuuuccaaaacgga

SEQ ID NO: 937095 - RNA, 19 nt, Artificial Sequence
  Description of Artificial Sequence: Synthetic oligonucleotide
agcugucaugccauacagg

SEQ ID NO: 937096 - RNA, 19 nt, Artificial Sequence
  Description of Artificial Sequence: Synthetic oligonucleotide
agucccagguccacaguuc

SEQ ID NO: 937097 - RNA, 19 nt, Artificial Sequence
  Description of Artificial Sequence: Synthetic oligonucleotide
cuucaccauggcagccucg

SEQ ID NO: 937098 - RNA, 19 nt, Artificial Sequence
  Description of Artificial Sequence: Synthetic oligonucleotide
aggacauuuuccacaggca

SEQ ID NO: 937099 - RNA, 19 nt, Artificial Sequence
  Description of Artificial Sequence: Synthetic oligonucleotide
gcucuggucugaauggagg

SEQ ID NO: 937100 - RNA, 19 nt, Artificial Sequence
  Description of Artificial Sequence: Synthetic oligonucleotide
gugaaucccgaagcuuccg

SEQ ID NO: 937101 - RNA, 19 nt, Artificial Sequence
  Description of Artificial Sequence: Synthetic oligonucleotide
uuucgagaguccacuucuu

SEQ ID NO: 937102 - RNA, 19 nt, Artificial Sequence
  Description of Artificial Sequence: Synthetic oligonucleotide
cgagcauacaugguguugg

SEQ ID NO: 937103 - RNA, 19 nt, Artificial Sequence
  Description of Artificial Sequence: Synthetic oligonucleotide
aucacgcagaaaacgcuca

SEQ ID NO: 937104 - RNA, 19 nt, Artificial Sequence
  Description of Artificial Sequence: Synthetic oligonucleotide
gaaucacgcagaaaacgcu

SEQ ID NO: 937105 - RNA, 19 nt, Artificial Sequence
  Description of Artificial Sequence: Synthetic oligonucleotide
gacccuaggcacucgggaa

SEQ ID NO: 937106 - RNA, 19 nt, Artificial Sequence
  Description of Artificial Sequence: Synthetic oligonucleotide
ucgaucgagcagucaggga

SEQ ID NO: 937107 - RNA, 19 nt, Artificial Sequence
  Description of Artificial Sequence: Synthetic oligonucleotide
guccacuucuucgguaaag

SEQ ID NO: 937108 - RNA, 19 nt, Artificial Sequence
  Description of Artificial Sequence: Synthetic oligonucleotide
ggcccagugaaucccgaag

SEQ ID NO: 937109 - RNA, 19 nt, Artificial Sequence
  Description of Artificial Sequence: Synthetic oligonucleotide
ggccaacagaaccucauga

SEQ ID NO: 937110 - RNA, 19 nt, Artificial Sequence
  Description of Artificial Sequence: Synthetic oligonucleotide
ugccgaccaauaugauccc

SEQ ID NO: 937111 - RNA, 19 nt, Artificial Sequence
  Description of Artificial Sequence: Synthetic oligonucleotide
ccgugaagacccuaggcac

SEQ ID NO: 937112 - RNA, 19 nt, Artificial Sequence
  Description of Artificial Sequence: Synthetic oligonucleotide
cacauguguuggagccucg

SEQ ID NO: 937113 - RNA, 19 nt, Artificial Sequence
  Description of Artificial Sequence: Synthetic oligonucleotide
aucgagcagucagggaauc

SEQ ID NO: 937114 - RNA, 19 nt, Artificial Sequence
  Description of Artificial Sequence: Synthetic oligonucleotide
gagcccaauccggauggag

SEQ ID NO: 937115 - RNA, 19 nt, Artificial Sequence
  Description of Artificial Sequence: Synthetic oligonucleotide
gagguaggucauacucucc

SEQ ID NO: 937116 - RNA, 19 nt, Artificial Sequence
  Description of Artificial Sequence: Synthetic oligonucleotide
ccgaccaaaauaauacaca

SEQ ID NO: 937117 - RNA, 19 nt, Artificial Sequence
  Description of Artificial Sequence: Synthetic oligonucleotide
cgugcuguaggccugucag

SEQ ID NO: 937118 - RNA, 19 nt, Artificial Sequence
  Description of Artificial Sequence: Synthetic oligonucleotide
agaguccacuucuucggua

SEQ ID NO: 937119 - RNA, 19 nt, Artificial Sequence
  Description of Artificial Sequence: Synthetic oligonucleotide
caguccgaccaaaauaaua

SEQ ID NO: 937120 - RNA, 19 nt, Artificial Sequence
  Description of Artificial Sequence: Synthetic oligonucleotide
ggcaaaagagcagcucugc

SEQ ID NO: 937121 - RNA, 19 nt, Artificial Sequence
  Description of Artificial Sequence: Synthetic oligonucleotide
ugcagugauuuugucuuuu

SEQ ID NO: 937122 - RNA, 19 nt, Artificial Sequence
  Description of Artificial Sequence: Synthetic oligonucleotide
agacuggugugcagccggc

SEQ ID NO: 937123 - RNA, 19 nt, Artificial Sequence
  Description of Artificial Sequence: Synthetic oligonucleotide
uggaaccuguauccccaaa

SEQ ID NO: 937124 - RNA, 19 nt, Artificial Sequence
  Description of Artificial Sequence: Synthetic oligonucleotide
gcuaguccuccauugguga

SEQ ID NO: 937125 - RNA, 19 nt, Artificial Sequence
  Description of Artificial Sequence: Synthetic oligonucleotide
ggccaauagccugaugugc

SEQ ID NO: 937126 - RNA, 19 nt, Artificial Sequence
  Description of Artificial Sequence: Synthetic oligonucleotide
agauuccuauugaacugcu

SEQ ID NO: 937127 - RNA, 19 nt, Artificial Sequence
  Description of Artificial Sequence: Synthetic oligonucleotide
guucggcccagugaauccc

SEQ ID NO: 937128 - RNA, 19 nt, Artificial Sequence
  Description of Artificial Sequence: Synthetic oligonucleotide
gaugcguccggcgugcugu

SEQ ID NO: 937129 - RNA, 19 nt, Artificial Sequence
  Description of Artificial Sequence: Synthetic oligonucleotide
gcuaccuuaaagccaccuc

SEQ ID NO: 937130 - RNA, 19 nt, Artificial Sequence
  Description of Artificial Sequence: Synthetic oligonucleotide
gaaaacgcucauaggggua

SEQ ID NO: 937131 - RNA, 19 nt, Artificial Sequence
  Description of Artificial Sequence: Synthetic oligonucleotide
ggugucaacuggaauuuuc

SEQ ID NO: 937132 - RNA, 19 nt, Artificial Sequence
  Description of Artificial Sequence: Synthetic oligonucleotide
caucagaaucaaccaccuc

SEQ ID NO: 937133 - RNA, 19 nt, Artificial Sequence
  Description of Artificial Sequence: Synthetic oligonucleotide
caguucggcccagugaauc

SEQ ID NO: 937134 - RNA, 19 nt, Artificial Sequence
  Description of Artificial Sequence: Synthetic oligonucleotide
agaggccuaggccaccaua

SEQ ID NO: 937135 - RNA, 19 nt, Artificial Sequence
  Description of Artificial Sequence: Synthetic oligonucleotide
agccgagcauacauggugu

SEQ ID NO: 937136 - RNA, 19 nt, Artificial Sequence
  Description of Artificial Sequence: Synthetic oligonucleotide
ugaucuccccaagccgagc

SEQ ID NO: 937137 - RNA, 19 nt, Artificial Sequence
  Description of Artificial Sequence: Synthetic oligonucleotide
acagucacauugccucuuu

SEQ ID NO: 937138 - RNA, 19 nt, Artificial Sequence
  Description of Artificial Sequence: Synthetic oligonucleotide
uggagccucgaaugccuaa

SEQ ID NO: 937139 - RNA, 19 nt, Artificial Sequence
  Description of Artificial Sequence: Synthetic oligonucleotide
cacucgggaagcucgcaca

SEQ ID NO: 937140 - RNA, 19 nt, Artificial Sequence
  Description of Artificial Sequence: Synthetic oligonucleotide
aaacgcucauagggguagu

SEQ ID NO: 937141 - RNA, 19 nt, Artificial Sequence
  Description of Artificial Sequence: Synthetic oligonucleotide
ccucgaucgagcagucagg

SEQ ID NO: 937142 - RNA, 19 nt, Artificial Sequence
  Description of Artificial Sequence: Synthetic oligonucleotide
agguuucccauuagugacu

SEQ ID NO: 937143 - RNA, 19 nt, Artificial Sequence
  Description of Artificial Sequence: Synthetic oligonucleotide
cuacgaugaaugcagugau

SEQ ID NO: 937144 - RNA, 19 nt, Artificial Sequence
  Description of Artificial Sequence: Synthetic oligonucleotide
gggcaaugaacaaccgaag

SEQ ID NO: 937145 - RNA, 19 nt, Artificial Sequence
  Description of Artificial Sequence: Synthetic oligonucleotide
cacuaaguucaucuugacu

SEQ ID NO: 937146 - RNA, 19 nt, Artificial Sequence
  Description of Artificial Sequence: Synthetic oligonucleotide
aggcucgcuucucaaggau

SEQ ID NO: 937147 - RNA, 19 nt, Artificial Sequence
  Description of Artificial Sequence: Synthetic oligonucleotide
gucucaacaguccgaccaa

SEQ ID NO: 937148 - RNA, 19 nt, Artificial Sequence
  Description of Artificial Sequence: Synthetic oligonucleotide
gauugccggucagucccag

SEQ ID NO: 937149 - RNA, 19 nt, Artificial Sequence
  Description of Artificial Sequence: Synthetic oligonucleotide
cuccgccaaagucucuuuc

SEQ ID NO: 937150 - RNA, 19 nt, Artificial Sequence
  Description of Artificial Sequence: Synthetic oligonucleotide
acauguguuggagccucga

SEQ ID NO: 937151 - RNA, 19 nt, Artificial Sequence
  Description of Artificial Sequence: Synthetic oligonucleotide
gacuacagucacauugccu

SEQ ID NO: 937152 - RNA, 19 nt, Artificial Sequence
  Description of Artificial Sequence: Synthetic oligonucleotide
guccccgugaagacccuag

SEQ ID NO: 937153 - RNA, 19 nt, Artificial Sequence
  Description of Artificial Sequence: Synthetic oligonucleotide
auagccugaugugcugcca

SEQ ID NO: 937154 - RNA, 19 nt, Artificial Sequence
  Description of Artificial Sequence: Synthetic oligonucleotide
ucacugugauagacccguc

SEQ ID NO: 937155 - RNA, 19 nt, Artificial Sequence
  Description of Artificial Sequence: Synthetic oligonucleotide
ggugcguccccgugaagac

SEQ ID NO: 937156 - RNA, 19 nt, Artificial Sequence
  Description of Artificial Sequence: Synthetic oligonucleotide
cuucagguuucccauuagu

SEQ ID NO: 937157 - RNA, 19 nt, Artificial Sequence
  Description of Artificial Sequence: Synthetic oligonucleotide
ccaagauugccggucaguc

SEQ ID NO: 937158 - RNA, 19 nt, Artificial Sequence
  Description of Artificial Sequence: Synthetic oligonucleotide
cugagccauuagugcaaac

SEQ ID NO: 937159 - RNA, 19 nt, Artificial Sequence
  Description of Artificial Sequence: Synthetic oligonucleotide
aggaugcgggaaucacgca

SEQ ID NO: 937160 - RNA, 19 nt, Artificial Sequence
  Description of Artificial Sequence: Synthetic oligonucleotide
aguccacuucuucgguaaa

SEQ ID NO: 937161 - RNA, 19 nt, Artificial Sequence
  Description of Artificial Sequence: Synthetic oligonucleotide
cgcagaaaacgcucauagg

SEQ ID NO: 937162 - RNA, 19 nt, Artificial Sequence
  Description of Artificial Sequence: Synthetic oligonucleotide
ggaguagcagggucucaac

SEQ ID NO: 937163 - RNA, 19 nt, Artificial Sequence
  Description of Artificial Sequence: Synthetic oligonucleotide
cuccaugacuacagucaca

SEQ ID NO: 937164 - RNA, 19 nt, Artificial Sequence
  Description of Artificial Sequence: Synthetic oligonucleotide
cgaccaauugacuccauga

SEQ ID NO: 937165 - RNA, 19 nt, Artificial Sequence
  Description of Artificial Sequence: Synthetic oligonucleotide
cauguguuggagccucgaa

SEQ ID NO: 937166 - RNA, 19 nt, Artificial Sequence
  Description of Artificial Sequence: Synthetic oligonucleotide
ggcuacccgcuucaauacc

SEQ ID NO: 937167 - RNA, 19 nt, Artificial Sequence
  Description of Artificial Sequence: Synthetic oligonucleotide
gguguuggagaggccuagg

SEQ ID NO: 937168 - RNA, 19 nt, Artificial Sequence
  Description of Artificial Sequence: Synthetic oligonucleotide
cccgugaagacccuaggca

SEQ ID NO: 937169 - RNA, 19 nt, Artificial Sequence
  Description of Artificial Sequence: Synthetic oligonucleotide
ggucacugugauagacccg

SEQ ID NO: 937170 - RNA, 19 nt, Artificial Sequence
  Description of Artificial Sequence: Synthetic oligonucleotide
agcggcuggcccgugacaa

SEQ ID NO: 937171 - RNA, 19 nt, Artificial Sequence
  Description of Artificial Sequence: Synthetic oligonucleotide
uggagcggcuggcccguga

SEQ ID NO: 937172 - RNA, 19 nt, Artificial Sequence
  Description of Artificial Sequence: Synthetic oligonucleotide
caccuccaacuucuccaag

SEQ ID NO: 937173 - RNA, 19 nt, Artificial Sequence
  Description of Artificial Sequence: Synthetic oligonucleotide
guuggagccucgaaugccu

SEQ ID NO: 937174 - RNA, 19 nt, Artificial Sequence
  Description of Artificial Sequence: Synthetic oligonucleotide
uggcuaccuuaaagccacc

SEQ ID NO: 937175 - RNA, 19 nt, Artificial Sequence
  Description of Artificial Sequence: Synthetic oligonucleotide
guaggucauacucuccauu

SEQ ID NO: 937176 - RNA, 19 nt, Artificial Sequence
  Description of Artificial Sequence: Synthetic oligonucleotide
cuaaggugucaacuggaau

SEQ ID NO: 937177 - RNA, 19 nt, Artificial Sequence
  Description of Artificial Sequence: Synthetic oligonucleotide
augcgggaaucacgcagaa

SEQ ID NO: 937178 - RNA, 19 nt, Artificial Sequence
  Description of Artificial Sequence: Synthetic oligonucleotide
aaacuccuuucugcucgau

SEQ ID NO: 937179 - RNA, 19 nt, Artificial Sequence
  Description of Artificial Sequence: Synthetic oligonucleotide
cucgggaagcucgcacagc

SEQ ID NO: 937180 - RNA, 19 nt, Artificial Sequence
  Description of Artificial Sequence: Synthetic oligonucleotide
gcguccggcgugcuguagg

SEQ ID NO: 937181 - RNA, 19 nt, Artificial Sequence
  Description of Artificial Sequence: Synthetic oligonucleotide
uugaggccaauagccugau

SEQ ID NO: 937182 - RNA, 19 nt, Artificial Sequence
  Description of Artificial Sequence: Synthetic oligonucleotide
ggguguacaacgccaagau

SEQ ID NO: 937183 - RNA, 19 nt, Artificial Sequence
  Description of Artificial Sequence: Synthetic oligonucleotide
cagaugccaguuugggcaa

SEQ ID NO: 937184 - RNA, 19 nt, Artificial Sequence
  Description of Artificial Sequence: Synthetic oligonucleotide
ccaauccggauggagcggc

SEQ ID NO: 937185 - RNA, 19 nt, Artificial Sequence
  Description of Artificial Sequence: Synthetic oligonucleotide
ggcagccucgaucgagcag

SEQ ID NO: 937186 - RNA, 19 nt, Artificial Sequence
  Description of Artificial Sequence: Synthetic oligonucleotide
ggaagcucgcacagcaguc

SEQ ID NO: 937187 - RNA, 19 nt, Artificial Sequence
  Description of Artificial Sequence: Synthetic oligonucleotide
ccccgugaagacccuaggc

SEQ ID NO: 937188 - RNA, 19 nt, Artificial Sequence
  Description of Artificial Sequence: Synthetic oligonucleotide
cugguuggucuagcauccc

SEQ ID NO: 937189 - RNA, 19 nt, Artificial Sequence
  Description of Artificial Sequence: Synthetic oligonucleotide
uaggccugucagggcaaug

SEQ ID NO: 937190 - RNA, 19 nt, Artificial Sequence
  Description of Artificial Sequence: Synthetic oligonucleotide
cuacagucacauugccucu

SEQ ID NO: 937191 - RNA, 19 nt, Artificial Sequence
  Description of Artificial Sequence: Synthetic oligonucleotide
cccgugacaacacagcugu

SEQ ID NO: 937192 - RNA, 19 nt, Artificial Sequence
  Description of Artificial Sequence: Synthetic oligonucleotide
cagauguaggcucgcuucu

SEQ ID NO: 937193 - RNA, 19 nt, Artificial Sequence
  Description of Artificial Sequence: Synthetic oligonucleotide
cucuggaaacgggaaaacu

SEQ ID NO: 937194 - RNA, 19 nt, Artificial Sequence
  Description of Artificial Sequence: Synthetic oligonucleotide
acaguccgaccaaaauaau

SEQ ID NO: 937195 - RNA, 19 nt, Artificial Sequence
  Description of Artificial Sequence: Synthetic oligonucleotide
gugcguccccgugaagacc

SEQ ID NO: 937196 - RNA, 19 nt, Artificial Sequence
  Description of Artificial Sequence: Synthetic oligonucleotide
ggcauauucagcagucagu

SEQ ID NO: 937197 - RNA, 19 nt, Artificial Sequence
  Description of Artificial Sequence: Synthetic oligonucleotide
cuccaagacuaggguguac

SEQ ID NO: 937198 - RNA, 19 nt, Artificial Sequence
  Description of Artificial Sequence: Synthetic oligonucleotide
gccaacagaaccucaugau

SEQ ID NO: 937199 - RNA, 19 nt, Artificial Sequence
  Description of Artificial Sequence: Synthetic oligonucleotide
ggagcggcuggcccgugac

SEQ ID NO: 937200 - RNA, 19 nt, Artificial Sequence
  Description of Artificial Sequence: Synthetic oligonucleotide
uccgaccaauugacuccau

SEQ ID NO: 937201 - RNA, 19 nt, Artificial Sequence
  Description of Artificial Sequence: Synthetic oligonucleotide
guuggcuacccgcuucaau

SEQ ID NO: 937202 - RNA, 19 nt, Artificial Sequence
  Description of Artificial Sequence: Synthetic oligonucleotide
guccaacaaacugauugau

SEQ ID NO: 937203 - RNA, 19 nt, Artificial Sequence
  Description of Artificial Sequence: Synthetic oligonucleotide
gggucucaacaguccgacc

SEQ ID NO: 937204 - RNA, 19 nt, Artificial Sequence
  Description of Artificial Sequence: Synthetic oligonucleotide
gcagccucgaucgagcagu

SEQ ID NO: 937205 - RNA, 19 nt, Artificial Sequence
  Description of Artificial Sequence: Synthetic oligonucleotide
cgggaaucacgcagaaaac

SEQ ID NO: 937206 - RNA, 19 nt, Artificial Sequence
  Description of Artificial Sequence: Synthetic oligonucleotide
agauugccggucaguccca

SEQ ID NO: 937207 - RNA, 19 nt, Artificial Sequence
  Description of Artificial Sequence: Synthetic oligonucleotide
ugcguccggcgugcuguag

SEQ ID NO: 937208 - RNA, 19 nt, Artificial Sequence
  Description of Artificial Sequence: Synthetic oligonucleotide
gcccgugacaacacagcug

SEQ ID NO: 937209 - RNA, 19 nt, Artificial Sequence
  Description of Artificial Sequence: Synthetic oligonucleotide
caagccgagcauacauggu

SEQ ID NO: 937210 - RNA, 19 nt, Artificial Sequence
  Description of Artificial Sequence: Synthetic oligonucleotide
ccauuacauaugccuucug

SEQ ID NO: 937211 - RNA, 19 nt, Artificial Sequence
  Description of Artificial Sequence: Synthetic oligonucleotide
gauuccuauugaacugcuu

SEQ ID NO: 937212 - RNA, 19 nt, Artificial Sequence
  Description of Artificial Sequence: Synthetic oligonucleotide
gacuccgccaaagucucuu

SEQ ID NO: 937213 - RNA, 19 nt, Artificial Sequence
  Description of Artificial Sequence: Synthetic oligonucleotide
cagccucgaucgagcaguc

SEQ ID NO: 937214 - RNA, 19 nt, Artificial Sequence
  Description of Artificial Sequence: Synthetic oligonucleotide
ggcucgcuucucaaggauc

SEQ ID NO: 937215 - RNA, 19 nt, Artificial Sequence
  Description of Artificial Sequence: Synthetic oligonucleotide
cuaguccuccauuggugau

SEQ ID NO: 937216 - RNA, 19 nt, Artificial Sequence
  Description of Artificial Sequence: Synthetic oligonucleotide
gccuaggccaccauauucu

SEQ ID NO: 937217 - RNA, 19 nt, Artificial Sequence
  Description of Artificial Sequence: Synthetic oligonucleotide
caaaacggaguagcagggu

SEQ ID NO: 937218 - RNA, 19 nt, Artificial Sequence
  Description of Artificial Sequence: Synthetic oligonucleotide
cccggccacaacacugccc

SEQ ID NO: 937219 - RNA, 19 nt, Artificial Sequence
  Description of Artificial Sequence: Synthetic oligonucleotide
cauagggguaguccuucau

SEQ ID NO: 937220 - RNA, 19 nt, Artificial Sequence
  Description of Artificial Sequence: Synthetic oligonucleotide
ccaucagaaucaaccaccu

SEQ ID NO: 937221 - RNA, 19 nt, Artificial Sequence
  Description of Artificial Sequence: Synthetic oligonucleotide
gggcaaauacuuggccuuc

SEQ ID NO: 937222 - RNA, 19 nt, Artificial Sequence
  Description of Artificial Sequence: Synthetic oligonucleotide
gccgaccaauaugaucccc

SEQ ID NO: 937223 - RNA, 19 nt, Artificial Sequence
  Description of Artificial Sequence: Synthetic oligonucleotide
ggcccgugacaacacagcu

SEQ ID NO: 937224 - RNA, 19 nt, Artificial Sequence
  Description of Artificial Sequence: Synthetic oligonucleotide
cccaauccggauggagcgg

SEQ ID NO: 937225 - RNA, 19 nt, Artificial Sequence
  Description of Artificial Sequence: Synthetic oligonucleotide
ccaagacuaggguguacaa

SEQ ID NO: 937226 - RNA, 19 nt, Artificial Sequence
  Description of Artificial Sequence: Synthetic oligonucleotide
gauccccuugaggccaaua

SEQ ID NO: 937227 - RNA, 19 nt, Artificial Sequence
  Description of Artificial Sequence: Synthetic oligonucleotide
cauaugccuucugagccau

SEQ ID NO: 937228 - RNA, 19 nt, Artificial Sequence
  Description of Artificial Sequence: Synthetic oligonucleotide
acaguucggcccagugaau

SEQ ID NO: 937229 - RNA, 19 nt, Artificial Sequence
  Description of Artificial Sequence: Synthetic oligonucleotide
augccaguuugggcaaaua

SEQ ID NO: 937230 - RNA, 19 nt, Artificial Sequence
  Description of Artificial Sequence: Synthetic oligonucleotide
gcccaugcugaaucuccca

SEQ ID NO: 937231 - RNA, 19 nt, Artificial Sequence
  Description of Artificial Sequence: Synthetic oligonucleotide
guccggcgugcuguaggcc

SEQ ID NO: 937232 - RNA, 19 nt, Artificial Sequence
  Description of Artificial Sequence: Synthetic oligonucleotide
ccgaccaauaugauccccu

SEQ ID NO: 937233 - RNA, 19 nt, Artificial Sequence
  Description of Artificial Sequence: Synthetic oligonucleotide
ggccugucagggcaaugaa

SEQ ID NO: 937234 - RNA, 19 nt, Artificial Sequence
  Description of Artificial Sequence: Synthetic oligonucleotide
cguccggcgugcuguaggc

SEQ ID NO: 937235 - RNA, 19 nt, Artificial Sequence
  Description of Artificial Sequence: Synthetic oligonucleotide
gguguacaacgccaagauu

SEQ ID NO: 937236 - RNA, 19 nt, Artificial Sequence
  Description of Artificial Sequence: Synthetic oligonucleotide
cagucagggaauccugguu

SEQ ID NO: 937237 - RNA, 19 nt, Artificial Sequence
  Description of Artificial Sequence: Synthetic oligonucleotide
cagccggcggugcgucccc

SEQ ID NO: 937238 - RNA, 19 nt, Artificial Sequence
  Description of Artificial Sequence: Synthetic oligonucleotide
agccucgaucgagcaguca

SEQ ID NO: 937239 - RNA, 19 nt, Artificial Sequence
  Description of Artificial Sequence: Synthetic oligonucleotide
cauugccgaccaauaugau

SEQ ID NO: 937240 - RNA, 19 nt, Artificial Sequence
  Description of Artificial Sequence: Synthetic oligonucleotide
gcagccggcggugcguccc

SEQ ID NO: 937241 - RNA, 19 nt, Artificial Sequence
  Description of Artificial Sequence: Synthetic oligonucleotide
uuccucgugcaggcauauu

SEQ ID NO: 937242 - RNA, 19 nt, Artificial Sequence
  Description of Artificial Sequence: Synthetic oligonucleotide
augcguccggcgugcugua

SEQ ID NO: 937243 - RNA, 19 nt, Artificial Sequence
  Description of Artificial Sequence: Synthetic oligonucleotide
ggcuaccuuaaagccaccu

SEQ ID NO: 937244 - RNA, 19 nt, Artificial Sequence
  Description of Artificial Sequence: Synthetic oligonucleotide
caauccggauggagcggcu

SEQ ID NO: 937245 - RNA, 19 nt, Artificial Sequence
  Description of Artificial Sequence: Synthetic oligonucleotide
cgcagaacauguuggccaa

SEQ ID NO: 937246 - RNA, 19 nt, Artificial Sequence
  Description of Artificial Sequence: Synthetic oligonucleotide
ggagccucgaaugccuaau

SEQ ID NO: 937247 - RNA, 19 nt, Artificial Sequence
  Description of Artificial Sequence: Synthetic oligonucleotide
ccggcgugcuguaggccug

SEQ ID NO: 937248 - RNA, 19 nt, Artificial Sequence
  Description of Artificial Sequence: Synthetic oligonucleotide
caacgccaagauugccggu

SEQ ID NO: 937249 - RNA, 19 nt, Artificial Sequence
  Description of Artificial Sequence: Synthetic oligonucleotide
cccuugaggccaauagccu

SEQ ID NO: 937250 - RNA, 19 nt, Artificial Sequence
  Description of Artificial Sequence: Synthetic oligonucleotide
gccaagauugccggucagu

SEQ ID NO: 937251 - RNA, 19 nt, Artificial Sequence
  Description of Artificial Sequence: Synthetic oligonucleotide
ggcuggcccgugacaacac

SEQ ID NO: 937252 - RNA, 19 nt, Artificial Sequence
  Description of Artificial Sequence: Synthetic oligonucleotide
ccucauugccgaccaauau

SEQ ID NO: 937253 - RNA, 19 nt, Artificial Sequence
  Description of Artificial Sequence: Synthetic oligonucleotide
gcggcuggcccgugacaac

SEQ ID NO: 937254 - RNA, 19 nt, Artificial Sequence
  Description of Artificial Sequence: Synthetic oligonucleotide
ggcacucgggaagcucgca

SEQ ID NO: 937255 - RNA, 19 nt, Artificial Sequence
  Description of Artificial Sequence: Synthetic oligonucleotide
cuuccucgugcaggcauau

SEQ ID NO: 937256 - RNA, 19 nt, Artificial Sequence
  Description of Artificial Sequence: Synthetic oligonucleotide
gcuuccucgugcaggcaua

SEQ ID NO: 937257 - RNA, 19 nt, Artificial Sequence
  Description of Artificial Sequence: Synthetic oligonucleotide
cagucacauugccucuuuu

SEQ ID NO: 937258 - RNA, 19 nt, Artificial Sequence
  Description of Artificial Sequence: Synthetic oligonucleotide
auggagcggcuggcccgug

SEQ ID NO: 937259 - RNA, 19 nt, Artificial Sequence
  Description of Artificial Sequence: Synthetic oligonucleotide
ccucagagcuaaauaccuu

SEQ ID NO: 937260 - RNA, 19 nt, Artificial Sequence
  Description of Artificial Sequence: Synthetic oligonucleotide
ccggcggugcguccccgug

SEQ ID NO: 937261 - RNA, 19 nt, Artificial Sequence
  Description of Artificial Sequence: Synthetic oligonucleotide
cgaaugccuaauuucucuu

SEQ ID NO: 937262 - RNA, 19 nt, Artificial Sequence
  Description of Artificial Sequence: Synthetic oligonucleotide
gcggugcguccccgugaag

SEQ ID NO: 937263 - RNA, 19 nt, Artificial Sequence
  Description of Artificial Sequence: Synthetic oligonucleotide
gccgagcauacaugguguu

SEQ ID NO: 937264 - RNA, 19 nt, Artificial Sequence
  Description of Artificial Sequence: Synthetic oligonucleotide
cgaugaaugcagugauuuu

SEQ ID NO: 937265 - RNA, 19 nt, Artificial Sequence
  Description of Artificial Sequence: Synthetic oligonucleotide
cggucagucccagguccac

SEQ ID NO: 937266 - RNA, 19 nt, Artificial Sequence
  Description of Artificial Sequence: Synthetic oligonucleotide
gcauccccgcagugaggua

SEQ ID NO: 937267 - RNA, 19 nt, Artificial Sequence
  Description of Artificial Sequence: Synthetic oligonucleotide
ccgcagugagguaggucau

SEQ ID NO: 937268 - RNA, 19 nt, Artificial Sequence
  Description of Artificial Sequence: Synthetic oligonucleotide
ccgaagcuuccgaccaauu

SEQ ID NO: 937269 - RNA, 19 nt, Artificial Sequence
  Description of Artificial Sequence: Synthetic oligonucleotide
cggcggugcguccccguga

SEQ ID NO: 937270 - RNA, 19 nt, Artificial Sequence
  Description of Artificial Sequence: Synthetic oligonucleotide
gccggcggugcguccccgu

SEQ ID NO: 937271 - RNA, 19 nt, Artificial Sequence
  Description of Artificial Sequence: Synthetic oligonucleotide
gcguccccgugaagacccu

SEQ ID NO: 937272 - RNA, 19 nt, Artificial Sequence
  Description of Artificial Sequence: Synthetic oligonucleotide
acuucuacaaaccagcguc

SEQ ID NO: 937273 - RNA, 19 nt, Artificial Sequence
  Description of Artificial Sequence: Synthetic oligonucleotide
aauauggcaaucucaguuc

SEQ ID NO: 937274 - RNA, 19 nt, Artificial Sequence
  Description of Artificial Sequence: Synthetic oligonucleotide
uaauaaauacugaaccggg

SEQ ID NO: 937275 - RNA, 19 nt, Artificial Sequence
  Description of Artificial Sequence: Synthetic oligonucleotide
gaaguauucaugccaaugg

SEQ ID NO: 937276 - RNA, 19 nt, Artificial Sequence
  Description of Artificial Sequence: Synthetic oligonucleotide
aucgaauucucacugacac

SEQ ID NO: 937277 - RNA, 19 nt, Artificial Sequence
  Description of Artificial Sequence: Synthetic oligonucleotide
ugcuuuaggaacaccaagg

SEQ ID NO: 937278 - RNA, 19 nt, Artificial Sequence
  Description of Artificial Sequence: Synthetic oligonucleotide
aauguggagguuuauuuca

SEQ ID NO: 937279 - RNA, 19 nt, Artificial Sequence
  Description of Artificial Sequence: Synthetic oligonucleotide
ucuaagaugucguuaauaa

SEQ ID NO: 937280 - RNA, 19 nt, Artificial Sequence
  Description of Artificial Sequence: Synthetic oligonucleotide
aaagaaucuuaagaguagg

SEQ ID NO: 937281 - RNA, 19 nt, Artificial Sequence
  Description of Artificial Sequence: Synthetic oligonucleotide
ugaacagauaauauggcaa

SEQ ID NO: 937282 - RNA, 19 nt, Artificial Sequence
  Description of Artificial Sequence: Synthetic oligonucleotide
aguagaagaagcuacggga

SEQ ID NO: 937283 - RNA, 19 nt, Artificial Sequence
  Description of Artificial Sequence: Synthetic oligonucleotide
gauaaauggguuguuaagc

SEQ ID NO: 937284 - RNA, 19 nt, Artificial Sequence
  Description of Artificial Sequence: Synthetic oligonucleotide
uuugugaacgaagugaaca

SEQ ID NO: 937285 - RNA, 19 nt, Artificial Sequence
  Description of Artificial Sequence: Synthetic oligonucleotide
uaauauggcaaucucaguu

SEQ ID NO: 937286 - RNA, 19 nt, Artificial Sequence
  Description of Artificial Sequence: Synthetic oligonucleotide
uuaauaacacccuucuccu

SEQ ID NO: 937287 - RNA, 19 nt, Artificial Sequence
  Description of Artificial Sequence: Synthetic oligonucleotide
ucgaucacaacccaagaac

SEQ ID NO: 937288 - RNA, 19 nt, Artificial Sequence
  Description of Artificial Sequence: Synthetic oligonucleotide
caugagguguuccugaagg

SEQ ID NO: 937289 - RNA, 19 nt, Artificial Sequence
  Description of Artificial Sequence: Synthetic oligonucleotide
ucuaguaagaccucauggu

SEQ ID NO: 937290 - RNA, 19 nt, Artificial Sequence
  Description of Artificial Sequence: Synthetic oligonucleotide
aagagaacugucaucacag

SEQ ID NO: 937291 - RNA, 19 nt, Artificial Sequence
  Description of Artificial Sequence: Synthetic oligonucleotide
gguaggaucgaucacaacc

SEQ ID NO: 937292 - RNA, 19 nt, Artificial Sequence
  Description of Artificial Sequence: Synthetic oligonucleotide
agguccuuauuauuguccc

SEQ ID NO: 937293 - RNA, 19 nt, Artificial Sequence
  Description of Artificial Sequence: Synthetic oligonucleotide
aagaugucguuaauaacac

SEQ ID NO: 937294 - RNA, 19 nt, Artificial Sequence
  Description of Artificial Sequence: Synthetic oligonucleotide
auugucccaaacauaagcc

SEQ ID NO: 937295 - RNA, 19 nt, Artificial Sequence
  Description of Artificial Sequence: Synthetic oligonucleotide
guaaauggguauuaggaac

SEQ ID NO: 937296 - RNA, 19 nt, Artificial Sequence
  Description of Artificial Sequence: Synthetic oligonucleotide
agcgucuuaacauagccug

SEQ ID NO: 937297 - RNA, 19 nt, Artificial Sequence
  Description of Artificial Sequence: Synthetic oligonucleotide
uuuuguggaauccaggguu

SEQ ID NO: 937298 - RNA, 19 nt, Artificial Sequence
  Description of Artificial Sequence: Synthetic oligonucleotide
aaacauaagccuucacugu

SEQ ID NO: 937299 - RNA, 19 nt, Artificial Sequence
  Description of Artificial Sequence: Synthetic oligonucleotide
auaaauggguuguuaagcu

SEQ ID NO: 937300 - RNA, 19 nt, Artificial Sequence
  Description of Artificial Sequence: Synthetic oligonucleotide
uguagacugggucuacccg

SEQ ID NO: 937301 - RNA, 19 nt, Artificial Sequence
  Description of Artificial Sequence: Synthetic oligonucleotide
cuguucuuggauaaauggg

SEQ ID NO: 937302 - RNA, 19 nt, Artificial Sequence
  Description of Artificial Sequence: Synthetic oligonucleotide
aaguauucaugccaauggu

SEQ ID NO: 937303 - RNA, 19 nt, Artificial Sequence
  Description of Artificial Sequence: Synthetic oligonucleotide
uuucuaucaggaauaggga

SEQ ID NO: 937304 - RNA, 19 nt, Artificial Sequence
  Description of Artificial Sequence: Synthetic oligonucleotide
uugugaacgaagugaacag

SEQ ID NO: 937305 - RNA, 19 nt, Artificial Sequence
  Description of Artificial Sequence: Synthetic oligonucleotide
ucguuaauaacacccuucu

SEQ ID NO: 937306 - RNA, 19 nt, Artificial Sequence
  Description of Artificial Sequence: Synthetic oligonucleotide
uuaagaguaggugaauucu

SEQ ID NO: 937307 - RNA, 19 nt, Artificial Sequence
  Description of Artificial Sequence: Synthetic oligonucleotide
aaauggguuguuaagcucu

SEQ ID NO: 937308 - RNA, 19 nt, Artificial Sequence
  Description of Artificial Sequence: Synthetic oligonucleotide
auguagacugggucuaccc

SEQ ID NO: 937309 - RNA, 19 nt, Artificial Sequence
  Description of Artificial Sequence: Synthetic oligonucleotide
uugcuuuaggaacaccaag

SEQ ID NO: 937310 - RNA, 19 nt, Artificial Sequence
  Description of Artificial Sequence: Synthetic oligonucleotide
uaaauacugaaccggguau

SEQ ID NO: 937311 - RNA, 19 nt, Artificial Sequence
  Description of Artificial Sequence: Synthetic oligonucleotide
ugggcuaauaaauacugaa

SEQ ID NO: 937312 - RNA, 19 nt, Artificial Sequence
  Description of Artificial Sequence: Synthetic oligonucleotide
aucaaggugggugaccugc

SEQ ID NO: 937313 - RNA, 19 nt, Artificial Sequence
  Description of Artificial Sequence: Synthetic oligonucleotide
auuucaacaaaaugugaaa

SEQ ID NO: 937314 - RNA, 19 nt, Artificial Sequence
  Description of Artificial Sequence: Synthetic oligonucleotide
uuucuguggcaucuuagug

SEQ ID NO: 937315 - RNA, 19 nt, Artificial Sequence
  Description of Artificial Sequence: Synthetic oligonucleotide
cuuaacauagccuggaucu

SEQ ID NO: 937316 - RNA, 19 nt, Artificial Sequence
  Description of Artificial Sequence: Synthetic oligonucleotide
aauucucacugacacgagu

SEQ ID NO: 937317 - RNA, 19 nt, Artificial Sequence
  Description of Artificial Sequence: Synthetic oligonucleotide
cuaccugaugguaaauggg

SEQ ID NO: 937318 - RNA, 19 nt, Artificial Sequence
  Description of Artificial Sequence: Synthetic oligonucleotide
caaucgcucagccaagugg

SEQ ID NO: 937319 - RNA, 19 nt, Artificial Sequence
  Description of Artificial Sequence: Synthetic oligonucleotide
agaaucuuaagaguaggug

SEQ ID NO: 937320 - RNA, 19 nt, Artificial Sequence
  Description of Artificial Sequence: Synthetic oligonucleotide
auguguaaugggcuguggg

SEQ ID NO: 937321 - RNA, 19 nt, Artificial Sequence
  Description of Artificial Sequence: Synthetic oligonucleotide
cuuaagaguaggugaauuc

SEQ ID NO: 937322 - RNA, 19 nt, Artificial Sequence
  Description of Artificial Sequence: Synthetic oligonucleotide
cuuuagucuaguaagaccu

SEQ ID NO: 937323 - RNA, 19 nt, Artificial Sequence
  Description of Artificial Sequence: Synthetic oligonucleotide
aacauagccuggaucugcc

SEQ ID NO: 937324 - RNA, 19 nt, Artificial Sequence
  Description of Artificial Sequence: Synthetic oligonucleotide
agaugucguuaauaacacc

SEQ ID NO: 937325 - RNA, 19 nt, Artificial Sequence
  Description of Artificial Sequence: Synthetic oligonucleotide
auaaauacugaaccgggua

SEQ ID NO: 937326 - RNA, 19 nt, Artificial Sequence
  Description of Artificial Sequence: Synthetic oligonucleotide
aggggcuacagacacuugg

SEQ ID NO: 937327 - RNA, 19 nt, Artificial Sequence
  Description of Artificial Sequence: Synthetic oligonucleotide
uggauaaauggguuguuaa

SEQ ID NO: 937328 - RNA, 19 nt, Artificial Sequence
  Description of Artificial Sequence: Synthetic oligonucleotide
ugcccaaucgcucagccaa

SEQ ID NO: 937329 - RNA, 19 nt, Artificial Sequence
  Description of Artificial Sequence: Synthetic oligonucleotide
augguacaaggauguaccc

SEQ ID NO: 937330 - RNA, 19 nt, Artificial Sequence
  Description of Artificial Sequence: Synthetic oligonucleotide
uauuauugucccaaacaua

SEQ ID NO: 937331 - RNA, 19 nt, Artificial Sequence
  Description of Artificial Sequence: Synthetic oligonucleotide
aaauacugaaccggguaug

SEQ ID NO: 937332 - RNA, 19 nt, Artificial Sequence
  Description of Artificial Sequence: Synthetic oligonucleotide
uacugaaccggguaugugu

SEQ ID NO: 937333 - RNA, 19 nt, Artificial Sequence
  Description of Artificial Sequence: Synthetic oligonucleotide
gguauuaggaacuccuccc

SEQ ID NO: 937334 - RNA, 19 nt, Artificial Sequence
  Description of Artificial Sequence: Synthetic oligonucleotide
ucaguucaagcaagucugg

SEQ ID NO: 937335 - RNA, 19 nt, Artificial Sequence
  Description of Artificial Sequence: Synthetic oligonucleotide
aguaagaccucaugguaca

SEQ ID NO: 937336 - RNA, 19 nt, Artificial Sequence
  Description of Artificial Sequence: Synthetic oligonucleotide
ccugcuuuagucuaguaag

SEQ ID NO: 937337 - RNA, 19 nt, Artificial Sequence
  Description of Artificial Sequence: Synthetic oligonucleotide
uggugugucgugcaaguca

SEQ ID NO: 937338 - RNA, 19 nt, Artificial Sequence
  Description of Artificial Sequence: Synthetic oligonucleotide
caguagaagaagcuacggg

SEQ ID NO: 937339 - RNA, 19 nt, Artificial Sequence
  Description of Artificial Sequence: Synthetic oligonucleotide
gguuguuaagcucuccggg

SEQ ID NO: 937340 - RNA, 19 nt, Artificial Sequence
  Description of Artificial Sequence: Synthetic oligonucleotide
guucaagcaagucuggguc

SEQ ID NO: 937341 - RNA, 19 nt, Artificial Sequence
  Description of Artificial Sequence: Synthetic oligonucleotide
cagaaagucuggaaacacc

SEQ ID NO: 937342 - RNA, 19 nt, Artificial Sequence
  Description of Artificial Sequence: Synthetic oligonucleotide
uagaagaagcuacgggaug

SEQ ID NO: 937343 - RNA, 19 nt, Artificial Sequence
  Description of Artificial Sequence: Synthetic oligonucleotide
agaaguauucaugccaaug

SEQ ID NO: 937344 - RNA, 19 nt, Artificial Sequence
  Description of Artificial Sequence: Synthetic oligonucleotide
ucgaauucucacugacacg

SEQ ID NO: 937345 - RNA, 19 nt, Artificial Sequence
  Description of Artificial Sequence: Synthetic oligonucleotide
uccugcuuuagucuaguaa

SEQ ID NO: 937346 - RNA, 19 nt, Artificial Sequence
  Description of Artificial Sequence: Synthetic oligonucleotide
gaugguaaauggguauuag

SEQ ID NO: 937347 - RNA, 19 nt, Artificial Sequence
  Description of Artificial Sequence: Synthetic oligonucleotide
gcuaccugaugguaaaugg

SEQ ID NO: 937348 - RNA, 19 nt, Artificial Sequence
  Description of Artificial Sequence: Synthetic oligonucleotide
agaaagucuggaaacacca

SEQ ID NO: 937349 - RNA, 19 nt, Artificial Sequence
  Description of Artificial Sequence: Synthetic oligonucleotide
agaacugucaucacagcug

SEQ ID NO: 937350 - RNA, 19 nt, Artificial Sequence
  Description of Artificial Sequence: Synthetic oligonucleotide
ucuguggcaucuuagugau

SEQ ID NO: 937351 - RNA, 19 nt, Artificial Sequence
  Description of Artificial Sequence: Synthetic oligonucleotide
uguggcaucuuagugauuu

SEQ ID NO: 937352 - RNA, 19 nt, Artificial Sequence
  Description of Artificial Sequence: Synthetic oligonucleotide
ugacugaacuguaaagaau

SEQ ID NO: 937353 - RNA, 19 nt, Artificial Sequence
  Description of Artificial Sequence: Synthetic oligonucleotide
aagucuggaaacaccagca

SEQ ID NO: 937354 - RNA, 19 nt, Artificial Sequence
  Description of Artificial Sequence: Synthetic oligonucleotide
aaucgcucagccaagugga

SEQ ID NO: 937355 - RNA, 19 nt, Artificial Sequence
  Description of Artificial Sequence: Synthetic oligonucleotide
uguccaucgaauucucacu

SEQ ID NO: 937356 - RNA, 19 nt, Artificial Sequence
  Description of Artificial Sequence: Synthetic oligonucleotide
aaaccagcgucuuaacaua

SEQ ID NO: 937357 - RNA, 19 nt, Artificial Sequence
  Description of Artificial Sequence: Synthetic oligonucleotide
ggauaaauggguuguuaag

SEQ ID NO: 937358 - RNA, 19 nt, Artificial Sequence
  Description of Artificial Sequence: Synthetic oligonucleotide
uguuaagcucuccggguca

SEQ ID NO: 937359 - RNA, 19 nt, Artificial Sequence
  Description of Artificial Sequence: Synthetic oligonucleotide
ucaugguacaaggauguac

SEQ ID NO: 937360 - RNA, 19 nt, Artificial Sequence
  Description of Artificial Sequence: Synthetic oligonucleotide
uaaauggguuguuaagcuc

SEQ ID NO: 937361 - RNA, 19 nt, Artificial Sequence
  Description of Artificial Sequence: Synthetic oligonucleotide
gaagcuacgggauguuuuc

SEQ ID NO: 937362 - RNA, 19 nt, Artificial Sequence
  Description of Artificial Sequence: Synthetic oligonucleotide
uuggcguguguguccaucg

SEQ ID NO: 937363 - RNA, 19 nt, Artificial Sequence
  Description of Artificial Sequence: Synthetic oligonucleotide
uuagucuaguaagaccuca

SEQ ID NO: 937364 - RNA, 19 nt, Artificial Sequence
  Description of Artificial Sequence: Synthetic oligonucleotide
auggaaagagaacugucau

SEQ ID NO: 937365 - RNA, 19 nt, Artificial Sequence
  Description of Artificial Sequence: Synthetic oligonucleotide
gcaacugccucucugacug

SEQ ID NO: 937366 - RNA, 19 nt, Artificial Sequence
  Description of Artificial Sequence: Synthetic oligonucleotide
gaagcaacugccucucuga

SEQ ID NO: 937367 - RNA, 19 nt, Artificial Sequence
  Description of Artificial Sequence: Synthetic oligonucleotide
ugcaugagucacacuguag

SEQ ID NO: 937368 - RNA, 19 nt, Artificial Sequence
  Description of Artificial Sequence: Synthetic oligonucleotide
aagaaucuuaagaguaggu

SEQ ID NO: 937369 - RNA, 19 nt, Artificial Sequence
  Description of Artificial Sequence: Synthetic oligonucleotide
ugucccaaacauaagccuu

SEQ ID NO: 937370 - RNA, 19 nt, Artificial Sequence
  Description of Artificial Sequence: Synthetic oligonucleotide
uaagaguaggugaauucuu

SEQ ID NO: 937371 - RNA, 19 nt, Artificial Sequence
  Description of Artificial Sequence: Synthetic oligonucleotide
ucuggggugcccaaucgcu

SEQ ID NO: 937372 - RNA, 19 nt, Artificial Sequence
  Description of Artificial Sequence: Synthetic oligonucleotide
augugccgaggguugaugg

SEQ ID NO: 937373 - RNA, 19 nt, Artificial Sequence
  Description of Artificial Sequence: Synthetic oligonucleotide
uuccagucuaagaugucgu

SEQ ID NO: 937374 - RNA, 19 nt, Artificial Sequence
  Description of Artificial Sequence: Synthetic oligonucleotide
cuagaagccuccucacacc

SEQ ID NO: 937375 - RNA, 19 nt, Artificial Sequence
  Description of Artificial Sequence: Synthetic oligonucleotide
aaagagugcauuggacuga

SEQ ID NO: 937376 - RNA, 19 nt, Artificial Sequence
  Description of Artificial Sequence: Synthetic oligonucleotide
uuugcggaauuugauuucu

SEQ ID NO: 937377 - RNA, 19 nt, Artificial Sequence
  Description of Artificial Sequence: Synthetic oligonucleotide
ucaucaaggugggugaccu

SEQ ID NO: 937378 - RNA, 19 nt, Artificial Sequence
  Description of Artificial Sequence: Synthetic oligonucleotide
uccacucuugcuuuaggaa

SEQ ID NO: 937379 - RNA, 19 nt, Artificial Sequence
  Description of Artificial Sequence: Synthetic oligonucleotide
ugaaacacucaaggggaag

SEQ ID NO: 937380 - RNA, 19 nt, Artificial Sequence
  Description of Artificial Sequence: Synthetic oligonucleotide
uacgggauguuuuccaguc

SEQ ID NO: 937381 - RNA, 19 nt, Artificial Sequence
  Description of Artificial Sequence: Synthetic oligonucleotide
guguccaucgaauucucac

SEQ ID NO: 937382 - RNA, 19 nt, Artificial Sequence
  Description of Artificial Sequence: Synthetic oligonucleotide
uuuugcggaauuugauuuc

SEQ ID NO: 937383 - RNA, 19 nt, Artificial Sequence
  Description of Artificial Sequence: Synthetic oligonucleotide
uuuagucuaguaagaccuc

SEQ ID NO: 937384 - RNA, 19 nt, Artificial Sequence
  Description of Artificial Sequence: Synthetic oligonucleotide
acacucaaggggaagcaac

SEQ ID NO: 937385 - RNA, 19 nt, Artificial Sequence
  Description of Artificial Sequence: Synthetic oligonucleotide
gacugggucuacccgacgc

SEQ ID NO: 937386 - RNA, 19 nt, Artificial Sequence
  Description of Artificial Sequence: Synthetic oligonucleotide
uggcaaucucaguucaagc

SEQ ID NO: 937387 - RNA, 19 nt, Artificial Sequence
  Description of Artificial Sequence: Synthetic oligonucleotide
ugaccugccacacuuucua

SEQ ID NO: 937388 - RNA, 19 nt, Artificial Sequence
  Description of Artificial Sequence: Synthetic oligonucleotide
agaagaagcuacgggaugu

SEQ ID NO: 937389 - RNA, 19 nt, Artificial Sequence
  Description of Artificial Sequence: Synthetic oligonucleotide
gaucgcucauguguugugg

SEQ ID NO: 937390 - RNA, 19 nt, Artificial Sequence
  Description of Artificial Sequence: Synthetic oligonucleotide
gcuuuagucuaguaagacc

SEQ ID NO: 937391 - RNA, 19 nt, Artificial Sequence
  Description of Artificial Sequence: Synthetic oligonucleotide
gacgcaugguuuucacuag

SEQ ID NO: 937392 - RNA, 19 nt, Artificial Sequence
  Description of Artificial Sequence: Synthetic oligonucleotide
auggcaaucucaguucaag

SEQ ID NO: 937393 - RNA, 19 nt, Artificial Sequence
  Description of Artificial Sequence: Synthetic oligonucleotide
aauggguuguuaagcucuc

SEQ ID NO: 937394 - RNA, 19 nt, Artificial Sequence
  Description of Artificial Sequence: Synthetic oligonucleotide
caggagacgccucagccgc

SEQ ID NO: 937395 - RNA, 19 nt, Artificial Sequence
  Description of Artificial Sequence: Synthetic oligonucleotide
cugaccaucuccacucuug

SEQ ID NO: 937396 - RNA, 19 nt, Artificial Sequence
  Description of Artificial Sequence: Synthetic oligonucleotide
ugcuuuagucuaguaagac

SEQ ID NO: 937397 - RNA, 19 nt, Artificial Sequence
  Description of Artificial Sequence: Synthetic oligonucleotide
ugauccuagagcccagaau

SEQ ID NO: 937398 - RNA, 19 nt, Artificial Sequence
  Description of Artificial Sequence: Synthetic oligonucleotide
ugugaacgaagugaacaga

SEQ ID NO: 937399 - RNA, 19 nt, Artificial Sequence
  Description of Artificial Sequence: Synthetic oligonucleotide
aucacagcugggcuaauaa

SEQ ID NO: 937400 - RNA, 19 nt, Artificial Sequence
  Description of Artificial Sequence: Synthetic oligonucleotide
gaaagucuggaaacaccag

SEQ ID NO: 937401 - RNA, 19 nt, Artificial Sequence
  Description of Artificial Sequence: Synthetic oligonucleotide
aucgaucacaacccaagaa

SEQ ID NO: 937402 - RNA, 19 nt, Artificial Sequence
  Description of Artificial Sequence: Synthetic oligonucleotide
gugcauuggacugaagccc

SEQ ID NO: 937403 - RNA, 19 nt, Artificial Sequence
  Description of Artificial Sequence: Synthetic oligonucleotide
agaacagauccccugcuuu

SEQ ID NO: 937404 - RNA, 19 nt, Artificial Sequence
  Description of Artificial Sequence: Synthetic oligonucleotide
ccuugcauguguaaugggc

SEQ ID NO: 937405 - RNA, 19 nt, Artificial Sequence
  Description of Artificial Sequence: Synthetic oligonucleotide
ggguauuaggaacuccucc

SEQ ID NO: 937406 - RNA, 19 nt, Artificial Sequence
  Description of Artificial Sequence: Synthetic oligonucleotide
ugucguuaauaacacccuu

SEQ ID NO: 937407 - RNA, 19 nt, Artificial Sequence
  Description of Artificial Sequence: Synthetic oligonucleotide
acgaagugaacagauaaua

SEQ ID NO: 937408 - RNA, 19 nt, Artificial Sequence
  Description of Artificial Sequence: Synthetic oligonucleotide
uguggagguuuauuucaac

SEQ ID NO: 937409 - RNA, 19 nt, Artificial Sequence
  Description of Artificial Sequence: Synthetic oligonucleotide
ucuagccacuccaccaggu

SEQ ID NO: 937410 - RNA, 19 nt, Artificial Sequence
  Description of Artificial Sequence: Synthetic oligonucleotide
guagacugggucuacccga

SEQ ID NO: 937411 - RNA, 19 nt, Artificial Sequence
  Description of Artificial Sequence: Synthetic oligonucleotide
caguccugugcauggaaag

SEQ ID NO: 937412 - RNA, 19 nt, Artificial Sequence
  Description of Artificial Sequence: Synthetic oligonucleotide
acuuucuaucaggaauagg

SEQ ID NO: 937413 - RNA, 19 nt, Artificial Sequence
  Description of Artificial Sequence: Synthetic oligonucleotide
aagguccucuggaauaucu

SEQ ID NO: 937414 - RNA, 19 nt, Artificial Sequence
  Description of Artificial Sequence: Synthetic oligonucleotide
caucagaucgcucaugugu

SEQ ID NO: 937415 - RNA, 19 nt, Artificial Sequence
  Description of Artificial Sequence: Synthetic oligonucleotide
gagaagguccucuggaaua

SEQ ID NO: 937416 - RNA, 19 nt, Artificial Sequence
  Description of Artificial Sequence: Synthetic oligonucleotide
gaucgaucacaacccaaga

SEQ ID NO: 937417 - RNA, 19 nt, Artificial Sequence
  Description of Artificial Sequence: Synthetic oligonucleotide
aaccagcgucuuaacauag

SEQ ID NO: 937418 - RNA, 19 nt, Artificial Sequence
  Description of Artificial Sequence: Synthetic oligonucleotide
cuuugugaacgaagugaac

SEQ ID NO: 937419 - RNA, 19 nt, Artificial Sequence
  Description of Artificial Sequence: Synthetic oligonucleotide
ugacacgagugaaggcugc

SEQ ID NO: 937420 - RNA, 19 nt, Artificial Sequence
  Description of Artificial Sequence: Synthetic oligonucleotide
aggguucucuagccacucc

SEQ ID NO: 937421 - RNA, 19 nt, Artificial Sequence
  Description of Artificial Sequence: Synthetic oligonucleotide
auuaggaacuccucccguu

SEQ ID NO: 937422 - RNA, 19 nt, Artificial Sequence
  Description of Artificial Sequence: Synthetic oligonucleotide
ggguuguuaagcucuccgg

SEQ ID NO: 937423 - RNA, 19 nt, Artificial Sequence
  Description of Artificial Sequence: Synthetic oligonucleotide
ucagaucgcucauguguug

SEQ ID NO: 937424 - RNA, 19 nt, Artificial Sequence
  Description of Artificial Sequence: Synthetic oligonucleotide
cugacacgagugaaggcug

SEQ ID NO: 937425 - RNA, 19 nt, Artificial Sequence
  Description of Artificial Sequence: Synthetic oligonucleotide
uccaucgaauucucacuga

SEQ ID NO: 937426 - RNA, 19 nt, Artificial Sequence
  Description of Artificial Sequence: Synthetic oligonucleotide
aggaauagggauggggcug

SEQ ID NO: 937427 - RNA, 19 nt, Artificial Sequence
  Description of Artificial Sequence: Synthetic oligonucleotide
uggguauuaggaacuccuc

SEQ ID NO: 937428 - RNA, 19 nt, Artificial Sequence
  Description of Artificial Sequence: Synthetic oligonucleotide
aaucucaguucaagcaagu

SEQ ID NO: 937429 - RNA, 19 nt, Artificial Sequence
  Description of Artificial Sequence: Synthetic oligonucleotide
agcucuggggugcccaauc

SEQ ID NO: 937430 - RNA, 19 nt, Artificial Sequence
  Description of Artificial Sequence: Synthetic oligonucleotide
ggaucgaucacaacccaag

SEQ ID NO: 937431 - RNA, 19 nt, Artificial Sequence
  Description of Artificial Sequence: Synthetic oligonucleotide
ucaauacaucauucauccu

SEQ ID NO: 937432 - RNA, 19 nt, Artificial Sequence
  Description of Artificial Sequence: Synthetic oligonucleotide
aucucaguucaagcaaguc

SEQ ID NO: 937433 - RNA, 19 nt, Artificial Sequence
  Description of Artificial Sequence: Synthetic oligonucleotide
ggaguuagaagcacagccc

SEQ ID NO: 937434 - RNA, 19 nt, Artificial Sequence
  Description of Artificial Sequence: Synthetic oligonucleotide
aguaaccuugcauguguaa

SEQ ID NO: 937435 - RNA, 19 nt, Artificial Sequence
  Description of Artificial Sequence: Synthetic oligonucleotide
ucccucaguaaccuugcau

SEQ ID NO: 937436 - RNA, 19 nt, Artificial Sequence
  Description of Artificial Sequence: Synthetic oligonucleotide
cccucaguaaccuugcaug

SEQ ID NO: 937437 - RNA, 19 nt, Artificial Sequence
  Description of Artificial Sequence: Synthetic oligonucleotide
accuugcauguguaauggg

SEQ ID NO: 937438 - RNA, 19 nt, Artificial Sequence
  Description of Artificial Sequence: Synthetic oligonucleotide
cuaguaagaccucauggua

SEQ ID NO: 937439 - RNA, 19 nt, Artificial Sequence
  Description of Artificial Sequence: Synthetic oligonucleotide
ugaagccccuugcucguug

SEQ ID NO: 937440 - RNA, 19 nt, Artificial Sequence
  Description of Artificial Sequence: Synthetic oligonucleotide
guccugugcauggaaagag

SEQ ID NO: 937441 - RNA, 19 nt, Artificial Sequence
  Description of Artificial Sequence: Synthetic oligonucleotide
ugaaccggguaugugugac

SEQ ID NO: 937442 - RNA, 19 nt, Artificial Sequence
  Description of Artificial Sequence: Synthetic oligonucleotide
uagacugggucuacccgac

SEQ ID NO: 937443 - RNA, 19 nt, Artificial Sequence
  Description of Artificial Sequence: Synthetic oligonucleotide
acagaaguauucaugccaa

SEQ ID NO: 937444 - RNA, 19 nt, Artificial Sequence
  Description of Artificial Sequence: Synthetic oligonucleotide
cagugguuucagauguaag

SEQ ID NO: 937445 - RNA, 19 nt, Artificial Sequence
  Description of Artificial Sequence: Synthetic oligonucleotide
uccuuccgcucaauggggc

SEQ ID NO: 937446 - RNA, 19 nt, Artificial Sequence
  Description of Artificial Sequence: Synthetic oligonucleotide
acuugugauguggagcuga

SEQ ID NO: 937447 - RNA, 19 nt, Artificial Sequence
  Description of Artificial Sequence: Synthetic oligonucleotide
auaacacccuucuccugca

SEQ ID NO: 937448 - RNA, 19 nt, Artificial Sequence
  Description of Artificial Sequence: Synthetic oligonucleotide
accucaugguacaaggaug

SEQ ID NO: 937449 - RNA, 19 nt, Artificial Sequence
  Description of Artificial Sequence: Synthetic oligonucleotide
ucaauggggcuuagcucug

SEQ ID NO: 937450 - RNA, 19 nt, Artificial Sequence
  Description of Artificial Sequence: Synthetic oligonucleotide
gucguuaauaacacccuuc

SEQ ID NO: 937451 - RNA, 19 nt, Artificial Sequence
  Description of Artificial Sequence: Synthetic oligonucleotide
cauguguuguggcucugac

SEQ ID NO: 937452 - RNA, 19 nt, Artificial Sequence
  Description of Artificial Sequence: Synthetic oligonucleotide
accgugacugaacuguaaa

SEQ ID NO: 937453 - RNA, 19 nt, Artificial Sequence
  Description of Artificial Sequence: Synthetic oligonucleotide
agcuaccugaugguaaaug

SEQ ID NO: 937454 - RNA, 19 nt, Artificial Sequence
  Description of Artificial Sequence: Synthetic oligonucleotide
cucguuggcgugugugucc

SEQ ID NO: 937455 - RNA, 19 nt, Artificial Sequence
  Description of Artificial Sequence: Synthetic oligonucleotide
acugaaccggguaugugug

SEQ ID NO: 937456 - RNA, 19 nt, Artificial Sequence
  Description of Artificial Sequence: Synthetic oligonucleotide
cauuacagugguuucagau

SEQ ID NO: 937457 - RNA, 19 nt, Artificial Sequence
  Description of Artificial Sequence: Synthetic oligonucleotide
gagguguuccugaagggga

SEQ ID NO: 937458 - RNA, 19 nt, Artificial Sequence
  Description of Artificial Sequence: Synthetic oligonucleotide
ugaugguaaauggguauua

SEQ ID NO: 937459 - RNA, 19 nt, Artificial Sequence
  Description of Artificial Sequence: Synthetic oligonucleotide
accaaggcuguucuuggau

SEQ ID NO: 937460 - RNA, 19 nt, Artificial Sequence
  Description of Artificial Sequence: Synthetic oligonucleotide
ucuacccgacgcaugguuu

SEQ ID NO: 937461 - RNA, 19 nt, Artificial Sequence
  Description of Artificial Sequence: Synthetic oligonucleotide
uggggugcccaaucgcuca

SEQ ID NO: 937462 - RNA, 19 nt, Artificial Sequence
  Description of Artificial Sequence: Synthetic oligonucleotide
aguauucaugccaaugguu

SEQ ID NO: 937463 - RNA, 19 nt, Artificial Sequence
  Description of Artificial Sequence: Synthetic oligonucleotide
aggggaguuagaagcacag

SEQ ID NO: 937464 - RNA, 19 nt, Artificial Sequence
  Description of Artificial Sequence: Synthetic oligonucleotide
acugaagccccuugcucgu

SEQ ID NO: 937465 - RNA, 19 nt, Artificial Sequence
  Description of Artificial Sequence: Synthetic oligonucleotide
acugaacuguaaagaaucu

SEQ ID NO: 937466 - RNA, 19 nt, Artificial Sequence
  Description of Artificial Sequence: Synthetic oligonucleotide
ggucaauacaucauucauc

SEQ ID NO: 937467 - RNA, 19 nt, Artificial Sequence
  Description of Artificial Sequence: Synthetic oligonucleotide
accagcgucuuaacauagc

SEQ ID NO: 937468 - RNA, 19 nt, Artificial Sequence
  Description of Artificial Sequence: Synthetic oligonucleotide
ugcucguuggcgugugugu

SEQ ID NO: 937469 - RNA, 19 nt, Artificial Sequence
  Description of Artificial Sequence: Synthetic oligonucleotide
uccuuauuauugucccaaa

SEQ ID NO: 937470 - RNA, 19 nt, Artificial Sequence
  Description of Artificial Sequence: Synthetic oligonucleotide
aacacucaaggggaagcaa

SEQ ID NO: 937471 - RNA, 19 nt, Artificial Sequence
  Description of Artificial Sequence: Synthetic oligonucleotide
ggugugucgugcaagucag

SEQ ID NO: 937472 - RNA, 19 nt, Artificial Sequence
  Description of Artificial Sequence: Synthetic oligonucleotide
guuguuaagcucuccgggu

SEQ ID NO: 937473 - RNA, 19 nt, Artificial Sequence
  Description of Artificial Sequence: Synthetic oligonucleotide
ugauuucuacugucccuuc

SEQ ID NO: 937474 - RNA, 19 nt, Artificial Sequence
  Description of Artificial Sequence: Synthetic oligonucleotide
augucguuaauaacacccu

SEQ ID NO: 937475 - RNA, 19 nt, Artificial Sequence
  Description of Artificial Sequence: Synthetic oligonucleotide
gcaggagacgccucagccg

SEQ ID NO: 937476 - RNA, 19 nt, Artificial Sequence
  Description of Artificial Sequence: Synthetic oligonucleotide
caucgaauucucacugaca

SEQ ID NO: 937477 - RNA, 19 nt, Artificial Sequence
  Description of Artificial Sequence: Synthetic oligonucleotide
ccaggguuaaggcucagac

SEQ ID NO: 937478 - RNA, 19 nt, Artificial Sequence
  Description of Artificial Sequence: Synthetic oligonucleotide
cuccaugugccgaggguug

SEQ ID NO: 937479 - RNA, 19 nt, Artificial Sequence
  Description of Artificial Sequence: Synthetic oligonucleotide
cacuuucuaucaggaauag

SEQ ID NO: 937480 - RNA, 19 nt, Artificial Sequence
  Description of Artificial Sequence: Synthetic oligonucleotide
cugcuuuagucuaguaaga

SEQ ID NO: 937481 - RNA, 19 nt, Artificial Sequence
  Description of Artificial Sequence: Synthetic oligonucleotide
ucuccaugugccgaggguu

SEQ ID NO: 937482 - RNA, 19 nt, Artificial Sequence
  Description of Artificial Sequence: Synthetic oligonucleotide
ugggucuacccgacgcaug

SEQ ID NO: 937483 - RNA, 19 nt, Artificial Sequence
  Description of Artificial Sequence: Synthetic oligonucleotide
cucaguaaccuugcaugug

SEQ ID NO: 937484 - RNA, 19 nt, Artificial Sequence
  Description of Artificial Sequence: Synthetic oligonucleotide
cacugacacgagugaaggc

SEQ ID NO: 937485 - RNA, 19 nt, Artificial Sequence
  Description of Artificial Sequence: Synthetic oligonucleotide
uagaagcacagcccaccuc

SEQ ID NO: 937486 - RNA, 19 nt, Artificial Sequence
  Description of Artificial Sequence: Synthetic oligonucleotide
gugugacugggcuuuguga

SEQ ID NO: 937487 - RNA, 19 nt, Artificial Sequence
  Description of Artificial Sequence: Synthetic oligonucleotide
cauguguaaugggcugugg

SEQ ID NO: 937488 - RNA, 19 nt, Artificial Sequence
  Description of Artificial Sequence: Synthetic oligonucleotide
uugcucguuggcgugugug

SEQ ID NO: 937489 - RNA, 19 nt, Artificial Sequence
  Description of Artificial Sequence: Synthetic oligonucleotide
augcaugagucacacugua

SEQ ID NO: 937490 - RNA, 19 nt, Artificial Sequence
  Description of Artificial Sequence: Synthetic oligonucleotide
guccuuauuauugucccaa

SEQ ID NO: 937491 - RNA, 19 nt, Artificial Sequence
  Description of Artificial Sequence: Synthetic oligonucleotide
ucauguguuguggcucuga

SEQ ID NO: 937492 - RNA, 19 nt, Artificial Sequence
  Description of Artificial Sequence: Synthetic oligonucleotide
gggcuaauaaauacugaac

SEQ ID NO: 937493 - RNA, 19 nt, Artificial Sequence
  Description of Artificial Sequence: Synthetic oligonucleotide
uggauguagacugggucua

SEQ ID NO: 937494 - RNA, 19 nt, Artificial Sequence
  Description of Artificial Sequence: Synthetic oligonucleotide
cuccacucuugcuuuagga

SEQ ID NO: 937495 - RNA, 19 nt, Artificial Sequence
  Description of Artificial Sequence: Synthetic oligonucleotide
accggguaugugugacugg

SEQ ID NO: 937496 - RNA, 19 nt, Artificial Sequence
  Description of Artificial Sequence: Synthetic oligonucleotide
ucgugcaagucagcaaacu

SEQ ID NO: 937497 - RNA, 19 nt, Artificial Sequence
  Description of Artificial Sequence: Synthetic oligonucleotide
gcuacgggauguuuuccag

SEQ ID NO: 937498 - RNA, 19 nt, Artificial Sequence
  Description of Artificial Sequence: Synthetic oligonucleotide
uguacccuucauugccuuc

SEQ ID NO: 937499 - RNA, 19 nt, Artificial Sequence
  Description of Artificial Sequence: Synthetic oligonucleotide
uccagucuaagaugucguu

SEQ ID NO: 937500 - RNA, 19 nt, Artificial Sequence
  Description of Artificial Sequence: Synthetic oligonucleotide
guuaaggcucagacagaag

SEQ ID NO: 937501 - RNA, 19 nt, Artificial Sequence
  Description of Artificial Sequence: Synthetic oligonucleotide
gguuucuguggcaucuuag

SEQ ID NO: 937502 - RNA, 19 nt, Artificial Sequence
  Description of Artificial Sequence: Synthetic oligonucleotide
acgcaugguuuucacuaga

SEQ ID NO: 937503 - RNA, 19 nt, Artificial Sequence
  Description of Artificial Sequence: Synthetic oligonucleotide
cugggcuaauaaauacuga

SEQ ID NO: 937504 - RNA, 19 nt, Artificial Sequence
  Description of Artificial Sequence: Synthetic oligonucleotide
ggagagcccagaaagucug

SEQ ID NO: 937505 - RNA, 19 nt, Artificial Sequence
  Description of Artificial Sequence: Synthetic oligonucleotide
agucuaagaugucguuaau

SEQ ID NO: 937506 - RNA, 19 nt, Artificial Sequence
  Description of Artificial Sequence: Synthetic oligonucleotide
agacugggucuacccgacg

SEQ ID NO: 937507 - RNA, 19 nt, Artificial Sequence
  Description of Artificial Sequence: Synthetic oligonucleotide
cacagcuaccugaugguaa

SEQ ID NO: 937508 - RNA, 19 nt, Artificial Sequence
  Description of Artificial Sequence: Synthetic oligonucleotide
ccacuucuacaaaccagcg

SEQ ID NO: 937509 - RNA, 19 nt, Artificial Sequence
  Description of Artificial Sequence: Synthetic oligonucleotide
cuagccacuccaccagguc

SEQ ID NO: 937510 - RNA, 19 nt, Artificial Sequence
  Description of Artificial Sequence: Synthetic oligonucleotide
aagaagcuacgggauguuu

SEQ ID NO: 937511 - RNA, 19 nt, Artificial Sequence
  Description of Artificial Sequence: Synthetic oligonucleotide
aucagaucgcucauguguu

SEQ ID NO: 937512 - RNA, 19 nt, Artificial Sequence
  Description of Artificial Sequence: Synthetic oligonucleotide
caaugguuucuguggcauc

SEQ ID NO: 937513 - RNA, 19 nt, Artificial Sequence
  Description of Artificial Sequence: Synthetic oligonucleotide
ccaucgaauucucacugac

SEQ ID NO: 937514 - RNA, 19 nt, Artificial Sequence
  Description of Artificial Sequence: Synthetic oligonucleotide
gucuaagaugucguuaaua

SEQ ID NO: 937515 - RNA, 19 nt, Artificial Sequence
  Description of Artificial Sequence: Synthetic oligonucleotide
ccaguagaagaagcuacgg

SEQ ID NO: 937516 - RNA, 19 nt, Artificial Sequence
  Description of Artificial Sequence: Synthetic oligonucleotide
gucccaaacauaagccuuc

SEQ ID NO: 937517 - RNA, 19 nt, Artificial Sequence
  Description of Artificial Sequence: Synthetic oligonucleotide
ucguuggcgugugugucca

SEQ ID NO: 937518 - RNA, 19 nt, Artificial Sequence
  Description of Artificial Sequence: Synthetic oligonucleotide
cuggauguccacuugugau

SEQ ID NO: 937519 - RNA, 19 nt, Artificial Sequence
  Description of Artificial Sequence: Synthetic oligonucleotide
uugugauguggagcugaug

SEQ ID NO: 937520 - RNA, 19 nt, Artificial Sequence
  Description of Artificial Sequence: Synthetic oligonucleotide
ggugcccaaucgcucagcc

SEQ ID NO: 937521 - RNA, 19 nt, Artificial Sequence
  Description of Artificial Sequence: Synthetic oligonucleotide
gaugcaugagucacacugu

SEQ ID NO: 937522 - RNA, 19 nt, Artificial Sequence
  Description of Artificial Sequence: Synthetic oligonucleotide
cuccucacaccaggaaagc

SEQ ID NO: 937523 - RNA, 19 nt, Artificial Sequence
  Description of Artificial Sequence: Synthetic oligonucleotide
gguuaaggcucagacagaa

SEQ ID NO: 937524 - RNA, 19 nt, Artificial Sequence
  Description of Artificial Sequence: Synthetic oligonucleotide
gagcccagaaagucuggaa

SEQ ID NO: 937525 - RNA, 19 nt, Artificial Sequence
  Description of Artificial Sequence: Synthetic oligonucleotide
ccaaacauaagccuucacu

SEQ ID NO: 937526 - RNA, 19 nt, Artificial Sequence
  Description of Artificial Sequence: Synthetic oligonucleotide
uuaagcucuccgggucacc

SEQ ID NO: 937527 - RNA, 19 nt, Artificial Sequence
  Description of Artificial Sequence: Synthetic oligonucleotide
uucacauggcccgguccug

SEQ ID NO: 937528 - RNA, 19 nt, Artificial Sequence
  Description of Artificial Sequence: Synthetic oligonucleotide
uugcggaauuugauuucua

SEQ ID NO: 937529 - RNA, 19 nt, Artificial Sequence
  Description of Artificial Sequence: Synthetic oligonucleotide
caucugguccccuggaugu

SEQ ID NO: 937530 - RNA, 19 nt, Artificial Sequence
  Description of Artificial Sequence: Synthetic oligonucleotide
ccgugacugaacuguaaag

SEQ ID NO: 937531 - RNA, 19 nt, Artificial Sequence
  Description of Artificial Sequence: Synthetic oligonucleotide
gcaguacuggcuuccggug

SEQ ID NO: 937532 - RNA, 19 nt, Artificial Sequence
  Description of Artificial Sequence: Synthetic oligonucleotide
cgaauucucacugacacga

SEQ ID NO: 937533 - RNA, 19 nt, Artificial Sequence
  Description of Artificial Sequence: Synthetic oligonucleotide
guagaagaagcuacgggau

SEQ ID NO: 937534 - RNA, 19 nt, Artificial Sequence
  Description of Artificial Sequence: Synthetic oligonucleotide
gaccaucagaucgcucaug

SEQ ID NO: 937535 - RNA, 19 nt, Artificial Sequence
  Description of Artificial Sequence: Synthetic oligonucleotide
guaaccuugcauguguaau

SEQ ID NO: 937536 - RNA, 19 nt, Artificial Sequence
  Description of Artificial Sequence: Synthetic oligonucleotide
guuaagcucuccgggucac

SEQ ID NO: 937537 - RNA, 19 nt, Artificial Sequence
  Description of Artificial Sequence: Synthetic oligonucleotide
uacccuucauugccuucuc

SEQ ID NO: 937538 - RNA, 19 nt, Artificial Sequence
  Description of Artificial Sequence: Synthetic oligonucleotide
ggguucucuagccacucca

SEQ ID NO: 937539 - RNA, 19 nt, Artificial Sequence
  Description of Artificial Sequence: Synthetic oligonucleotide
gugaacgaagugaacagau

SEQ ID NO: 937540 - RNA, 19 nt, Artificial Sequence
  Description of Artificial Sequence: Synthetic oligonucleotide
cuggggugcccaaucgcuc

SEQ ID NO: 937541 - RNA, 19 nt, Artificial Sequence
  Description of Artificial Sequence: Synthetic oligonucleotide
uguucccuagaagccuccu

SEQ ID NO: 937542 - RNA, 19 nt, Artificial Sequence
  Description of Artificial Sequence: Synthetic oligonucleotide
ccggguaugugugacuggg

SEQ ID NO: 937543 - RNA, 19 nt, Artificial Sequence
  Description of Artificial Sequence: Synthetic oligonucleotide
caugugccgaggguugaug

SEQ ID NO: 937544 - RNA, 19 nt, Artificial Sequence
  Description of Artificial Sequence: Synthetic oligonucleotide
ggacugaagccccuugcuc

SEQ ID NO: 937545 - RNA, 19 nt, Artificial Sequence
  Description of Artificial Sequence: Synthetic oligonucleotide
cacuguucacauggcccgg

SEQ ID NO: 937546 - RNA, 19 nt, Artificial Sequence
  Description of Artificial Sequence: Synthetic oligonucleotide
caauggggcuuagcucugg

SEQ ID NO: 937547 - RNA, 19 nt, Artificial Sequence
  Description of Artificial Sequence: Synthetic oligonucleotide
cuucuacaaaccagcgucu

SEQ ID NO: 937548 - RNA, 19 nt, Artificial Sequence
  Description of Artificial Sequence: Synthetic oligonucleotide
ccuagagcccagaauguca

SEQ ID NO: 937549 - RNA, 19 nt, Artificial Sequence
  Description of Artificial Sequence: Synthetic oligonucleotide
gucaccccugaggaggccc

SEQ ID NO: 937550 - RNA, 19 nt, Artificial Sequence
  Description of Artificial Sequence: Synthetic oligonucleotide
cgugcaagucagcaaacug

SEQ ID NO: 937551 - RNA, 19 nt, Artificial Sequence
  Description of Artificial Sequence: Synthetic oligonucleotide
cacucaaggggaagcaacu

SEQ ID NO: 937552 - RNA, 19 nt, Artificial Sequence
  Description of Artificial Sequence: Synthetic oligonucleotide
caucaaggugggugaccug

SEQ ID NO: 937553 - RNA, 19 nt, Artificial Sequence
  Description of Artificial Sequence: Synthetic oligonucleotide
caggaauagggauggggcu

SEQ ID NO: 937554 - RNA, 19 nt, Artificial Sequence
  Description of Artificial Sequence: Synthetic oligonucleotide
uaacacccuucuccugcau

SEQ ID NO: 937555 - RNA, 19 nt, Artificial Sequence
  Description of Artificial Sequence: Synthetic oligonucleotide
guuggcguguguguccauc

SEQ ID NO: 937556 - RNA, 19 nt, Artificial Sequence
  Description of Artificial Sequence: Synthetic oligonucleotide
ggguaugugugacugggcu

SEQ ID NO: 937557 - RNA, 19 nt, Artificial Sequence
  Description of Artificial Sequence: Synthetic oligonucleotide
gcgucuuaacauagccugg

SEQ ID NO: 937558 - RNA, 19 nt, Artificial Sequence
  Description of Artificial Sequence: Synthetic oligonucleotide
gugucgugcaagucagcaa

SEQ ID NO: 937559 - RNA, 19 nt, Artificial Sequence
  Description of Artificial Sequence: Synthetic oligonucleotide
gguccuuauuauuguccca

SEQ ID NO: 937560 - RNA, 19 nt, Artificial Sequence
  Description of Artificial Sequence: Synthetic oligonucleotide
ccucccucaguaaccuugc

SEQ ID NO: 937561 - RNA, 19 nt, Artificial Sequence
  Description of Artificial Sequence: Synthetic oligonucleotide
ugggaccaucagaucgcuc

SEQ ID NO: 937562 - RNA, 19 nt, Artificial Sequence
  Description of Artificial Sequence: Synthetic oligonucleotide
caacugccucucugacugc

SEQ ID NO: 937563 - RNA, 19 nt, Artificial Sequence
  Description of Artificial Sequence: Synthetic oligonucleotide
agacgccucagccgccagu

SEQ ID NO: 937564 - RNA, 19 nt, Artificial Sequence
  Description of Artificial Sequence: Synthetic oligonucleotide
cacuucuacaaaccagcgu

SEQ ID NO: 937565 - RNA, 19 nt, Artificial Sequence
  Description of Artificial Sequence: Synthetic oligonucleotide
cugaaccggguauguguga

SEQ ID NO: 937566 - RNA, 19 nt, Artificial Sequence
  Description of Artificial Sequence: Synthetic oligonucleotide
cucaguccugugcauggaa

SEQ ID NO: 937567 - RNA, 19 nt, Artificial Sequence
  Description of Artificial Sequence: Synthetic oligonucleotide
aggagacgccucagccgcc

SEQ ID NO: 937568 - RNA, 19 nt, Artificial Sequence
  Description of Artificial Sequence: Synthetic oligonucleotide
gacgccucagccgccagua

SEQ ID NO: 937569 - RNA, 19 nt, Artificial Sequence
  Description of Artificial Sequence: Synthetic oligonucleotide
gcauguguaaugggcugug

SEQ ID NO: 937570 - RNA, 19 nt, Artificial Sequence
  Description of Artificial Sequence: Synthetic oligonucleotide
cagcaccgugacugaacug

SEQ ID NO: 937571 - RNA, 19 nt, Artificial Sequence
  Description of Artificial Sequence: Synthetic oligonucleotide
cuacgggauguuuuccagu

SEQ ID NO: 937572 - RNA, 19 nt, Artificial Sequence
  Description of Artificial Sequence: Synthetic oligonucleotide
ggggaguuagaagcacagc

SEQ ID NO: 937573 - RNA, 19 nt, Artificial Sequence
  Description of Artificial Sequence: Synthetic oligonucleotide
gggcuuagcucuggggugc

SEQ ID NO: 937574 - RNA, 19 nt, Artificial Sequence
  Description of Artificial Sequence: Synthetic oligonucleotide
uuccgcucaauggggcuua

SEQ ID NO: 937575 - RNA, 19 nt, Artificial Sequence
  Description of Artificial Sequence: Synthetic oligonucleotide
ccauaugaaaagcuccugu

SEQ ID NO: 937576 - RNA, 19 nt, Artificial Sequence
  Description of Artificial Sequence: Synthetic oligonucleotide
gugcccaaucgcucagcca

SEQ ID NO: 937577 - RNA, 19 nt, Artificial Sequence
  Description of Artificial Sequence: Synthetic oligonucleotide
cagcuugcaucuggucccc

SEQ ID NO: 937578 - RNA, 19 nt, Artificial Sequence
  Description of Artificial Sequence: Synthetic oligonucleotide
caguaaccuugcaugugua

SEQ ID NO: 937579 - RNA, 19 nt, Artificial Sequence
  Description of Artificial Sequence: Synthetic oligonucleotide
ggggcuacagacacuugga

SEQ ID NO: 937580 - RNA, 19 nt, Artificial Sequence
  Description of Artificial Sequence: Synthetic oligonucleotide
acacgagugaaggcugcuu

SEQ ID NO: 937581 - RNA, 19 nt, Artificial Sequence
  Description of Artificial Sequence: Synthetic oligonucleotide
cuccucccguuccuucaac

SEQ ID NO: 937582 - RNA, 19 nt, Artificial Sequence
  Description of Artificial Sequence: Synthetic oligonucleotide
cuggugugucgugcaaguc

SEQ ID NO: 937583 - RNA, 19 nt, Artificial Sequence
  Description of Artificial Sequence: Synthetic oligonucleotide
gccgaggguugaugguagg

SEQ ID NO: 937584 - RNA, 19 nt, Artificial Sequence
  Description of Artificial Sequence: Synthetic oligonucleotide
ccaaucgcucagccaagug

SEQ ID NO: 937585 - RNA, 19 nt, Artificial Sequence
  Description of Artificial Sequence: Synthetic oligonucleotide
cgacgcaugguuuucacua

SEQ ID NO: 937586 - RNA, 19 nt, Artificial Sequence
  Description of Artificial Sequence: Synthetic oligonucleotide
caccgugacugaacuguaa

SEQ ID NO: 937587 - RNA, 19 nt, Artificial Sequence
  Description of Artificial Sequence: Synthetic oligonucleotide
cucauguguuguggcucug

SEQ ID NO: 937588 - RNA, 19 nt, Artificial Sequence
  Description of Artificial Sequence: Synthetic oligonucleotide
ggugggugaccugccacac

SEQ ID NO: 937589 - RNA, 19 nt, Artificial Sequence
  Description of Artificial Sequence: Synthetic oligonucleotide
caggggcuacagacacuug

SEQ ID NO: 937590 - RNA, 19 nt, Artificial Sequence
  Description of Artificial Sequence: Synthetic oligonucleotide
ggcguguguguccaucgaa

SEQ ID NO: 937591 - RNA, 19 nt, Artificial Sequence
  Description of Artificial Sequence: Synthetic oligonucleotide
gugccgaggguugauggua

SEQ ID NO: 937592 - RNA, 19 nt, Artificial Sequence
  Description of Artificial Sequence: Synthetic oligonucleotide
cacgagugaaggcugcuuu

SEQ ID NO: 937593 - RNA, 19 nt, Artificial Sequence
  Description of Artificial Sequence: Synthetic oligonucleotide
gccuggugugucgugcaag

SEQ ID NO: 937594 - RNA, 19 nt, Artificial Sequence
  Description of Artificial Sequence: Synthetic oligonucleotide
acccgacgcaugguuuuca

SEQ ID NO: 937595 - RNA, 19 nt, Artificial Sequence
  Description of Artificial Sequence: Synthetic oligonucleotide
ugcauccggccuggugugu

SEQ ID NO: 937596 - RNA, 19 nt, Artificial Sequence
  Description of Artificial Sequence: Synthetic oligonucleotide
gucuacccgacgcaugguu

SEQ ID NO: 937597 - RNA, 19 nt, Artificial Sequence
  Description of Artificial Sequence: Synthetic oligonucleotide
gugugucgugcaagucagc

SEQ ID NO: 937598 - RNA, 19 nt, Artificial Sequence
  Description of Artificial Sequence: Synthetic oligonucleotide
gacacgagugaaggcugcu

SEQ ID NO: 937599 - RNA, 19 nt, Artificial Sequence
  Description of Artificial Sequence: Synthetic oligonucleotide
gaagaagcuacgggauguu

SEQ ID NO: 937600 - RNA, 19 nt, Artificial Sequence
  Description of Artificial Sequence: Synthetic oligonucleotide
cagaucgcucauguguugu

SEQ ID NO: 937601 - RNA, 19 nt, Artificial Sequence
  Description of Artificial Sequence: Synthetic oligonucleotide
ccaaggcuguucuuggaua

SEQ ID NO: 937602 - RNA, 19 nt, Artificial Sequence
  Description of Artificial Sequence: Synthetic oligonucleotide
ccucaccucuuccuuccac

SEQ ID NO: 937603 - RNA, 19 nt, Artificial Sequence
  Description of Artificial Sequence: Synthetic oligonucleotide
ccagaaugucaugcagaac

SEQ ID NO: 937604 - RNA, 19 nt, Artificial Sequence
  Description of Artificial Sequence: Synthetic oligonucleotide
cccgacgcaugguuuucac

SEQ ID NO: 937605 - RNA, 19 nt, Artificial Sequence
  Description of Artificial Sequence: Synthetic oligonucleotide
cagaaguauucaugccaau

SEQ ID NO: 937606 - RNA, 19 nt, Artificial Sequence
  Description of Artificial Sequence: Synthetic oligonucleotide
aucgcucagccaaguggau

SEQ ID NO: 937607 - RNA, 19 nt, Artificial Sequence
  Description of Artificial Sequence: Synthetic oligonucleotide
ccucaguaaccuugcaugu

SEQ ID NO: 937608 - RNA, 19 nt, Artificial Sequence
  Description of Artificial Sequence: Synthetic oligonucleotide
cagacacuuggacacuguu

SEQ ID NO: 937609 - RNA, 19 nt, Artificial Sequence
  Description of Artificial Sequence: Synthetic oligonucleotide
caucacagcugggcuaaua

SEQ ID NO: 937610 - RNA, 19 nt, Artificial Sequence
  Description of Artificial Sequence: Synthetic oligonucleotide
cccgguccugugcuggggc

SEQ ID NO: 937611 - RNA, 19 nt, Artificial Sequence
  Description of Artificial Sequence: Synthetic oligonucleotide
ccagucuaagaugucguua

SEQ ID NO: 937612 - RNA, 19 nt, Artificial Sequence
  Description of Artificial Sequence: Synthetic oligonucleotide
accccugaggaggcccugu

SEQ ID NO: 937613 - RNA, 19 nt, Artificial Sequence
  Description of Artificial Sequence: Synthetic oligonucleotide
ucaucacagcugggcuaau

SEQ ID NO: 937614 - RNA, 19 nt, Artificial Sequence
  Description of Artificial Sequence: Synthetic oligonucleotide
guccugcuuuagucuagua

SEQ ID NO: 937615 - RNA, 19 nt, Artificial Sequence
  Description of Artificial Sequence: Synthetic oligonucleotide
cgucuuaacauagccugga

SEQ ID NO: 937616 - RNA, 19 nt, Artificial Sequence
  Description of Artificial Sequence: Synthetic oligonucleotide
ggguuaaggcucagacaga

SEQ ID NO: 937617 - RNA, 19 nt, Artificial Sequence
  Description of Artificial Sequence: Synthetic oligonucleotide
cgcucaauggggcuuagcu

SEQ ID NO: 937618 - RNA, 19 nt, Artificial Sequence
  Description of Artificial Sequence: Synthetic oligonucleotide
cggguaugugugacugggc

SEQ ID NO: 937619 - RNA, 19 nt, Artificial Sequence
  Description of Artificial Sequence: Synthetic oligonucleotide
cucaugguacaaggaugua

SEQ ID NO: 937620 - RNA, 19 nt, Artificial Sequence
  Description of Artificial Sequence: Synthetic oligonucleotide
ccguuccuucaacuuguuc

SEQ ID NO: 937621 - RNA, 19 nt, Artificial Sequence
  Description of Artificial Sequence: Synthetic oligonucleotide
cuuccggugccuucucauu

SEQ ID NO: 937622 - RNA, 19 nt, Artificial Sequence
  Description of Artificial Sequence: Synthetic oligonucleotide
ccggccuggugugucgugc

SEQ ID NO: 937623 - RNA, 19 nt, Artificial Sequence
  Description of Artificial Sequence: Synthetic oligonucleotide
ggcuuagcucuggggugcc

SEQ ID NO: 937624 - RNA, 19 nt, Artificial Sequence
  Description of Artificial Sequence: Synthetic oligonucleotide
agcuugcaucugguccccu

SEQ ID NO: 937625 - RNA, 19 nt, Artificial Sequence
  Description of Artificial Sequence: Synthetic oligonucleotide
gcuuccggugccuucucau

SEQ ID NO: 937626 - RNA, 19 nt, Artificial Sequence
  Description of Artificial Sequence: Synthetic oligonucleotide
ccccuugcucguuggcgug

SEQ ID NO: 937627 - RNA, 19 nt, Artificial Sequence
  Description of Artificial Sequence: Synthetic oligonucleotide
gugggaccaucagaucgcu

SEQ ID NO: 937628 - RNA, 19 nt, Artificial Sequence
  Description of Artificial Sequence: Synthetic oligonucleotide
ggaccaucagaucgcucau

SEQ ID NO: 937629 - RNA, 19 nt, Artificial Sequence
  Description of Artificial Sequence: Synthetic oligonucleotide
gccgccaguagaagaagcu

SEQ ID NO: 937630 - RNA, 19 nt, Artificial Sequence
  Description of Artificial Sequence: Synthetic oligonucleotide
ggguuggcauuguggauuu

SEQ ID NO: 937631 - RNA, 19 nt, Artificial Sequence
  Description of Artificial Sequence: Synthetic oligonucleotide
ccucagccgccaguagaag

SEQ ID NO: 937632 - RNA, 19 nt, Artificial Sequence
  Description of Artificial Sequence: Synthetic oligonucleotide
gguugaugguaggaucgau

SEQ ID NO: 937633 - RNA, 19 nt, Artificial Sequence
  Description of Artificial Sequence: Synthetic oligonucleotide
gcauccggccugguguguc

SEQ ID NO: 937634 - RNA, 19 nt, Artificial Sequence
  Description of Artificial Sequence: Synthetic oligonucleotide
ccuugcucguuggcgugug

SEQ ID NO: 937635 - RNA, 19 nt, Artificial Sequence
  Description of Artificial Sequence: Synthetic oligonucleotide
ccgaggguugaugguagga

SEQ ID NO: 937636 - RNA, 19 nt, Artificial Sequence
  Description of Artificial Sequence: Synthetic oligonucleotide
cuuccgcucaauggggcuu

SEQ ID NO: 937637 - RNA, 19 nt, Artificial Sequence
  Description of Artificial Sequence: Synthetic oligonucleotide
gcccgguccugugcugggg

SEQ ID NO: 937638 - RNA, 19 nt, Artificial Sequence
  Description of Artificial Sequence: Synthetic oligonucleotide
cauuggacugaagccccuu

SEQ ID NO: 937639 - RNA, 19 nt, Artificial Sequence
  Description of Artificial Sequence: Synthetic oligonucleotide
ccggugccuucucauuaca

SEQ ID NO: 937640 - RNA, 19 nt, Artificial Sequence
  Description of Artificial Sequence: Synthetic oligonucleotide
ccuuccgcucaauggggcu

SEQ ID NO: 937641 - RNA, 19 nt, Artificial Sequence
  Description of Artificial Sequence: Synthetic oligonucleotide
gcaccgugacugaacugua

SEQ ID NO: 937642 - RNA, 19 nt, Artificial Sequence
  Description of Artificial Sequence: Synthetic oligonucleotide
ccgcucaauggggcuuagc

SEQ ID NO: 937643 - RNA, 19 nt, Artificial Sequence
  Description of Artificial Sequence: Synthetic oligonucleotide
ccgguccugugcuggggca

SEQ ID NO: 937644 - RNA, 19 nt, Artificial Sequence
  Description of Artificial Sequence: Synthetic oligonucleotide
cgcaugguuuucacuagau

SEQ ID NO: 937645 - RNA, 19 nt, Artificial Sequence
  Description of Artificial Sequence: Synthetic oligonucleotide
gggaagcaacugccucucu

SEQ ID NO: 937646 - RNA, 19 nt, Artificial Sequence
  Description of Artificial Sequence: Synthetic oligonucleotide
ccgacgcaugguuuucacu

SEQ ID NO: 937647 - RNA, 19 nt, Artificial Sequence
  Description of Artificial Sequence: Synthetic oligonucleotide
ggucuacccgacgcauggu

SEQ ID NO: 937648 - RNA, 19 nt, Artificial Sequence
  Description of Artificial Sequence: Synthetic oligonucleotide
cccaaucgcucagccaagu

SEQ ID NO: 937649 - RNA, 19 nt, Artificial Sequence
  Description of Artificial Sequence: Synthetic oligonucleotide
cugaagccccuugcucguu

SEQ ID NO: 937650 - RNA, 19 nt, Artificial Sequence
  Description of Artificial Sequence: Synthetic oligonucleotide
gggugaccugccacacuuu

SEQ ID NO: 937651 - RNA, 19 nt, Artificial Sequence
  Description of Artificial Sequence: Synthetic oligonucleotide
cccuugcucguuggcgugu

SEQ ID NO: 937652 - RNA, 19 nt, Artificial Sequence
  Description of Artificial Sequence: Synthetic oligonucleotide
ccaugugccgaggguugau

SEQ ID NO: 937653 - RNA, 19 nt, Artificial Sequence
  Description of Artificial Sequence: Synthetic oligonucleotide
cguuggcguguguguccau

SEQ ID NO: 937654 - RNA, 19 nt, Artificial Sequence
  Description of Artificial Sequence: Synthetic oligonucleotide
aaaggauauacuaaggcac

SEQ ID NO: 937655 - RNA, 19 nt, Artificial Sequence
  Description of Artificial Sequence: Synthetic oligonucleotide
uuacuaaugaauucaacag

SEQ ID NO: 937656 - RNA, 19 nt, Artificial Sequence
  Description of Artificial Sequence: Synthetic oligonucleotide
uauacuaaggcacuuuaca

SEQ ID NO: 937657 - RNA, 19 nt, Artificial Sequence
  Description of Artificial Sequence: Synthetic oligonucleotide
aaucagucugaccaccacc

SEQ ID NO: 937658 - RNA, 19 nt, Artificial Sequence
  Description of Artificial Sequence: Synthetic oligonucleotide
aacgauagaccacauuuuc

SEQ ID NO: 937659 - RNA, 19 nt, Artificial Sequence
  Description of Artificial Sequence: Synthetic oligonucleotide
uucuaauuaggaaugguca

SEQ ID NO: 937660 - RNA, 19 nt, Artificial Sequence
  Description of Artificial Sequence: Synthetic oligonucleotide
aguuaaucuacucuuaggu

SEQ ID NO: 937661 - RNA, 19 nt, Artificial Sequence
  Description of Artificial Sequence: Synthetic oligonucleotide
guauaauagugccaaauag

SEQ ID NO: 937662 - RNA, 19 nt, Artificial Sequence
  Description of Artificial Sequence: Synthetic oligonucleotide
cuaaaagauguuacuaugc

SEQ ID NO: 937663 - RNA, 19 nt, Artificial Sequence
  Description of Artificial Sequence: Synthetic oligonucleotide
uaaaagauguuacuaugca

SEQ ID NO: 937664 - RNA, 19 nt, Artificial Sequence
  Description of Artificial Sequence: Synthetic oligonucleotide
aacaauaugggucacugua

SEQ ID NO: 937665 - RNA, 19 nt, Artificial Sequence
  Description of Artificial Sequence: Synthetic oligonucleotide
ucuuagguauaauagugcc

SEQ ID NO: 937666 - RNA, 19 nt, Artificial Sequence
  Description of Artificial Sequence: Synthetic oligonucleotide
aauaucccaauauguugac

SEQ ID NO: 937667 - RNA, 19 nt, Artificial Sequence
  Description of Artificial Sequence: Synthetic oligonucleotide
uggucuacuuccuaguggg

SEQ ID NO: 937668 - RNA, 19 nt, Artificial Sequence
  Description of Artificial Sequence: Synthetic oligonucleotide
cuacucuuagguauaauag

SEQ ID NO: 937669 - RNA, 19 nt, Artificial Sequence
  Description of Artificial Sequence: Synthetic oligonucleotide
auaaaaucagucugaccac

SEQ ID NO: 937670 - RNA, 19 nt, Artificial Sequence
  Description of Artificial Sequence: Synthetic oligonucleotide
uugcaguccagauauauug

SEQ ID NO: 937671 - RNA, 19 nt, Artificial Sequence
  Description of Artificial Sequence: Synthetic oligonucleotide
agaacgauagaccacauuu

SEQ ID NO: 937672 - RNA, 19 nt, Artificial Sequence
  Description of Artificial Sequence: Synthetic oligonucleotide
uuaaauaccaaagggauuu

SEQ ID NO: 937673 - RNA, 19 nt, Artificial Sequence
  Description of Artificial Sequence: Synthetic oligonucleotide
aguuggggcuuucagaacg

SEQ ID NO: 937674 - RNA, 19 nt, Artificial Sequence
  Description of Artificial Sequence: Synthetic oligonucleotide
auacaaauguuacuaaggu

SEQ ID NO: 937675 - RNA, 19 nt, Artificial Sequence
  Description of Artificial Sequence: Synthetic oligonucleotide
gaaccuaaacauuauauaa

SEQ ID NO: 937676 - RNA, 19 nt, Artificial Sequence
  Description of Artificial Sequence: Synthetic oligonucleotide
aauuagcagagugacuugg

SEQ ID NO: 937677 - RNA, 19 nt, Artificial Sequence
  Description of Artificial Sequence: Synthetic oligonucleotide
aaauaucccaauauguuga

SEQ ID NO: 937678 - RNA, 19 nt, Artificial Sequence
  Description of Artificial Sequence: Synthetic oligonucleotide
uguuauuaguuuucugaag

SEQ ID NO: 937679 - RNA, 19 nt, Artificial Sequence
  Description of Artificial Sequence: Synthetic oligonucleotide
auaugggucacuguacugc

SEQ ID NO: 937680 - RNA, 19 nt, Artificial Sequence
  Description of Artificial Sequence: Synthetic oligonucleotide
uaggaguuuauuaauaauu

SEQ ID NO: 937681 - RNA, 19 nt, Artificial Sequence
  Description of Artificial Sequence: Synthetic oligonucleotide
acacgaaugcuuuucacag

SEQ ID NO: 937682 - RNA, 19 nt, Artificial Sequence
  Description of Artificial Sequence: Synthetic oligonucleotide
uauguugacccaaauuaca

SEQ ID NO: 937683 - RNA, 19 nt, Artificial Sequence
  Description of Artificial Sequence: Synthetic oligonucleotide
uagaaccuaaacauuauau

SEQ ID NO: 937684 - RNA, 19 nt, Artificial Sequence
  Description of Artificial Sequence: Synthetic oligonucleotide
uguuagguugccacguagg

SEQ ID NO: 937685 - RNA, 19 nt, Artificial Sequence
  Description of Artificial Sequence: Synthetic oligonucleotide
uccuaguggguuauuaaag

SEQ ID NO: 937686 - RNA, 19 nt, Artificial Sequence
  Description of Artificial Sequence: Synthetic oligonucleotide
aaaucagucugaccaccac

SEQ ID NO: 937687 - RNA, 19 nt, Artificial Sequence
  Description of Artificial Sequence: Synthetic oligonucleotide
aaguguuaagagguggugg

SEQ ID NO: 937688 - RNA, 19 nt, Artificial Sequence
  Description of Artificial Sequence: Synthetic oligonucleotide
agcuugaauaaccaauguc

SEQ ID NO: 937689 - RNA, 19 nt, Artificial Sequence
  Description of Artificial Sequence: Synthetic oligonucleotide
uaauuaggaauggucaucc

SEQ ID NO: 937690 - RNA, 19 nt, Artificial Sequence
  Description of Artificial Sequence: Synthetic oligonucleotide
uucgggaggauuuacauau

SEQ ID NO: 937691 - RNA, 19 nt, Artificial Sequence
  Description of Artificial Sequence: Synthetic oligonucleotide
uaaccaguuaaucuacucu

SEQ ID NO: 937692 - RNA, 19 nt, Artificial Sequence
  Description of Artificial Sequence: Synthetic oligonucleotide
cagaauagcgcuuugucug

SEQ ID NO: 937693 - RNA, 19 nt, Artificial Sequence
  Description of Artificial Sequence: Synthetic oligonucleotide
aggauuuacauauuuccca

SEQ ID NO: 937694 - RNA, 19 nt, Artificial Sequence
  Description of Artificial Sequence: Synthetic oligonucleotide
ugucaugaaaggaaucuac

SEQ ID NO: 937695 - RNA, 19 nt, Artificial Sequence
  Description of Artificial Sequence: Synthetic oligonucleotide
uggguuauuaaagaauuug

SEQ ID NO: 937696 - RNA, 19 nt, Artificial Sequence
  Description of Artificial Sequence: Synthetic oligonucleotide
uuacauuuuaguuuagauu

SEQ ID NO: 937697 - RNA, 19 nt, Artificial Sequence
  Description of Artificial Sequence: Synthetic oligonucleotide
uguaaugccggauccagac

SEQ ID NO: 937698 - RNA, 19 nt, Artificial Sequence
  Description of Artificial Sequence: Synthetic oligonucleotide
uuggucuacuuccuagugg

SEQ ID NO: 937699 - RNA, 19 nt, Artificial Sequence
  Description of Artificial Sequence: Synthetic oligonucleotide
uccuacaucugccugugag

SEQ ID NO: 937700 - RNA, 19 nt, Artificial Sequence
  Description of Artificial Sequence: Synthetic oligonucleotide
agaauagcgcuuugucugc

SEQ ID NO: 937701 - RNA, 19 nt, Artificial Sequence
  Description of Artificial Sequence: Synthetic oligonucleotide
ggaggauuuacauauuucc

SEQ ID NO: 937702 - RNA, 19 nt, Artificial Sequence
  Description of Artificial Sequence: Synthetic oligonucleotide
uugucugcgaguuugguuc

SEQ ID NO: 937703 - RNA, 19 nt, Artificial Sequence
  Description of Artificial Sequence: Synthetic oligonucleotide
cuucuaauuaggaaugguc

SEQ ID NO: 937704 - RNA, 19 nt, Artificial Sequence
  Description of Artificial Sequence: Synthetic oligonucleotide
uauugauauuauaaagcuc

SEQ ID NO: 937705 - RNA, 19 nt, Artificial Sequence
  Description of Artificial Sequence: Synthetic oligonucleotide
gagaaauuagcagagugac

SEQ ID NO: 937706 - RNA, 19 nt, Artificial Sequence
  Description of Artificial Sequence: Synthetic oligonucleotide
gaugagcuugagcaaaugc

SEQ ID NO: 937707 - RNA, 19 nt, Artificial Sequence
  Description of Artificial Sequence: Synthetic oligonucleotide
ucgguuaauugauuguugc

SEQ ID NO: 937708 - RNA, 19 nt, Artificial Sequence
  Description of Artificial Sequence: Synthetic oligonucleotide
acuaaugaauucaacagcu

SEQ ID NO: 937709 - RNA, 19 nt, Artificial Sequence
  Description of Artificial Sequence: Synthetic oligonucleotide
uguaaagcaagaagggcuc

SEQ ID NO: 937710 - RNA, 19 nt, Artificial Sequence
  Description of Artificial Sequence: Synthetic oligonucleotide
guuaagaggugguggaggg

SEQ ID NO: 937711 - RNA, 19 nt, Artificial Sequence
  Description of Artificial Sequence: Synthetic oligonucleotide
aacucauuuuacuaaugaa

SEQ ID NO: 937712 - RNA, 19 nt, Artificial Sequence
  Description of Artificial Sequence: Synthetic oligonucleotide
cauguuaugacuguuccug

SEQ ID NO: 937713 - RNA, 19 nt, Artificial Sequence
  Description of Artificial Sequence: Synthetic oligonucleotide
auuugcauaugauggagga

SEQ ID NO: 937714 - RNA, 19 nt, Artificial Sequence
  Description of Artificial Sequence: Synthetic oligonucleotide
acguaggaauuucaugccc

SEQ ID NO: 937715 - RNA, 19 nt, Artificial Sequence
  Description of Artificial Sequence: Synthetic oligonucleotide
uuguuauauuugcaaagcu

SEQ ID NO: 937716 - RNA, 19 nt, Artificial Sequence
  Description of Artificial Sequence: Synthetic oligonucleotide
guuacuaaggucagaauac

SEQ ID NO: 937717 - RNA, 19 nt, Artificial Sequence
  Description of Artificial Sequence: Synthetic oligonucleotide
aacgucugguuucaggaca

SEQ ID NO: 937718 - RNA, 19 nt, Artificial Sequence
  Description of Artificial Sequence: Synthetic oligonucleotide
cugagaaauuagcagagug

SEQ ID NO: 937719 - RNA, 19 nt, Artificial Sequence
  Description of Artificial Sequence: Synthetic oligonucleotide
uucagaacgauagaccaca

SEQ ID NO: 937720 - RNA, 19 nt, Artificial Sequence
  Description of Artificial Sequence: Synthetic oligonucleotide
aaagcagucugcaacgucu

SEQ ID NO: 937721 - RNA, 19 nt, Artificial Sequence
  Description of Artificial Sequence: Synthetic oligonucleotide
aaauuagcagagugacuug

SEQ ID NO: 937722 - RNA, 19 nt, Artificial Sequence
  Description of Artificial Sequence: Synthetic oligonucleotide
ugcauuguagcacugucau

SEQ ID NO: 937723 - RNA, 19 nt, Artificial Sequence
  Description of Artificial Sequence: Synthetic oligonucleotide
cucuuagguauaauagugc

SEQ ID NO: 937724 - RNA, 19 nt, Artificial Sequence
  Description of Artificial Sequence: Synthetic oligonucleotide
auauguugacccaaauuac

SEQ ID NO: 937725 - RNA, 19 nt, Artificial Sequence
  Description of Artificial Sequence: Synthetic oligonucleotide
agaauuugaccucacuggu

SEQ ID NO: 937726 - RNA, 19 nt, Artificial Sequence
  Description of Artificial Sequence: Synthetic oligonucleotide
cuuccuuagaaccuaaaca

SEQ ID NO: 937727 - RNA, 19 nt, Artificial Sequence
  Description of Artificial Sequence: Synthetic oligonucleotide
ugauuugcauuguagcacu

SEQ ID NO: 937728 - RNA, 19 nt, Artificial Sequence
  Description of Artificial Sequence: Synthetic oligonucleotide
ugugaguuggggcuuucag

SEQ ID NO: 937729 - RNA, 19 nt, Artificial Sequence
  Description of Artificial Sequence: Synthetic oligonucleotide
uuggugcaugauaaaauca

SEQ ID NO: 937730 - RNA, 19 nt, Artificial Sequence
  Description of Artificial Sequence: Synthetic oligonucleotide
uuaggaguucuuuaauuuc

SEQ ID NO: 937731 - RNA, 19 nt, Artificial Sequence
  Description of Artificial Sequence: Synthetic oligonucleotide
guuaguacuuugcaugaug

SEQ ID NO: 937732 - RNA, 19 nt, Artificial Sequence
  Description of Artificial Sequence: Synthetic oligonucleotide
uccuaaaagauguuacuau

SEQ ID NO: 937733 - RNA, 19 nt, Artificial Sequence
  Description of Artificial Sequence: Synthetic oligonucleotide
uaaggucagaauacagccc

SEQ ID NO: 937734 - RNA, 19 nt, Artificial Sequence
  Description of Artificial Sequence: Synthetic oligonucleotide
acucuuuagaaccuuucca

SEQ ID NO: 937735 - RNA, 19 nt, Artificial Sequence
  Description of Artificial Sequence: Synthetic oligonucleotide
augcuguaaugccggaucc

SEQ ID NO: 937736 - RNA, 19 nt, Artificial Sequence
  Description of Artificial Sequence: Synthetic oligonucleotide
auaauagugccaaauagaa

SEQ ID NO: 937737 - RNA, 19 nt, Artificial Sequence
  Description of Artificial Sequence: Synthetic oligonucleotide
aguguuaagagguggugga

SEQ ID NO: 937738 - RNA, 19 nt, Artificial Sequence
  Description of Artificial Sequence: Synthetic oligonucleotide
uucgguuaauugauuguug

SEQ ID NO: 937739 - RNA, 19 nt, Artificial Sequence
  Description of Artificial Sequence: Synthetic oligonucleotide
uuguuaguacuuugcauga

SEQ ID NO: 937740 - RNA, 19 nt, Artificial Sequence
  Description of Artificial Sequence: Synthetic oligonucleotide
uagguugccacguaggaau

SEQ ID NO: 937741 - RNA, 19 nt, Artificial Sequence
  Description of Artificial Sequence: Synthetic oligonucleotide
aaccuuaagaaaaggaaau

SEQ ID NO: 937742 - RNA, 19 nt, Artificial Sequence
  Description of Artificial Sequence: Synthetic oligonucleotide
uccauugcuuggaugagcu

SEQ ID NO: 937743 - RNA, 19 nt, Artificial Sequence
  Description of Artificial Sequence: Synthetic oligonucleotide
ugauaaaaucagucugacc

SEQ ID NO: 937744 - RNA, 19 nt, Artificial Sequence
  Description of Artificial Sequence: Synthetic oligonucleotide
auuuguuaguacuuugcau

SEQ ID NO: 937745 - RNA, 19 nt, Artificial Sequence
  Description of Artificial Sequence: Synthetic oligonucleotide
agcuaccgcagccauuugc

SEQ ID NO: 937746 - RNA, 19 nt, Artificial Sequence
  Description of Artificial Sequence: Synthetic oligonucleotide
uaaaaucagucugaccacc

SEQ ID NO: 937747 - RNA, 19 nt, Artificial Sequence
  Description of Artificial Sequence: Synthetic oligonucleotide
uugguaacucauuuuacua

SEQ ID NO: 937748 - RNA, 19 nt, Artificial Sequence
  Description of Artificial Sequence: Synthetic oligonucleotide
ugggccgugucucugagga

SEQ ID NO: 937749 - RNA, 19 nt, Artificial Sequence
  Description of Artificial Sequence: Synthetic oligonucleotide
auacuaaggcacuuuacaa

SEQ ID NO: 937750 - RNA, 19 nt, Artificial Sequence
  Description of Artificial Sequence: Synthetic oligonucleotide
acaacaauaugggucacug

SEQ ID NO: 937751 - RNA, 19 nt, Artificial Sequence
  Description of Artificial Sequence: Synthetic oligonucleotide
uuaauugauuguugcacau

SEQ ID NO: 937752 - RNA, 19 nt, Artificial Sequence
  Description of Artificial Sequence: Synthetic oligonucleotide
ugguaacucauuuuacuaa

SEQ ID NO: 937753 - RNA, 19 nt, Artificial Sequence
  Description of Artificial Sequence: Synthetic oligonucleotide
ugcaacgucugguuucagg

SEQ ID NO: 937754 - RNA, 19 nt, Artificial Sequence
  Description of Artificial Sequence: Synthetic oligonucleotide
uaacacuccuaaccugagg

SEQ ID NO: 937755 - RNA, 19 nt, Artificial Sequence
  Description of Artificial Sequence: Synthetic oligonucleotide
cauuaguuggggucagagg

SEQ ID NO: 937756 - RNA, 19 nt, Artificial Sequence
  Description of Artificial Sequence: Synthetic oligonucleotide
caaauguuacuaaggucag

SEQ ID NO: 937757 - RNA, 19 nt, Artificial Sequence
  Description of Artificial Sequence: Synthetic oligonucleotide
auuaauaggucuggcagcu

SEQ ID NO: 937758 - RNA, 19 nt, Artificial Sequence
  Description of Artificial Sequence: Synthetic oligonucleotide
aggaaucuacagcacugac

SEQ ID NO: 937759 - RNA, 19 nt, Artificial Sequence
  Description of Artificial Sequence: Synthetic oligonucleotide
aauuaggaguuuauuaaua

SEQ ID NO: 937760 - RNA, 19 nt, Artificial Sequence
  Description of Artificial Sequence: Synthetic oligonucleotide
acaauaugggucacuguac

SEQ ID NO: 937761 - RNA, 19 nt, Artificial Sequence
  Description of Artificial Sequence: Synthetic oligonucleotide
guagcacugucaugaaagg

SEQ ID NO: 937762 - RNA, 19 nt, Artificial Sequence
  Description of Artificial Sequence: Synthetic oligonucleotide
aguguugccauugauucca

SEQ ID NO: 937763 - RNA, 19 nt, Artificial Sequence
  Description of Artificial Sequence: Synthetic oligonucleotide
gaaauuagcagagugacuu

SEQ ID NO: 937764 - RNA, 19 nt, Artificial Sequence
  Description of Artificial Sequence: Synthetic oligonucleotide
auauacuaaggcacuuuac

SEQ ID NO: 937765 - RNA, 19 nt, Artificial Sequence
  Description of Artificial Sequence: Synthetic oligonucleotide
gauauacuaaggcacuuua

SEQ ID NO: 937766 - RNA, 19 nt, Artificial Sequence
  Description of Artificial Sequence: Synthetic oligonucleotide
uuuagaaccuuuccagcuu

SEQ ID NO: 937767 - RNA, 19 nt, Artificial Sequence
  Description of Artificial Sequence: Synthetic oligonucleotide
ugcaguccagauauauuga

SEQ ID NO: 937768 - RNA, 19 nt, Artificial Sequence
  Description of Artificial Sequence: Synthetic oligonucleotide
cugguuagaaggauucaug

SEQ ID NO: 937769 - RNA, 19 nt, Artificial Sequence
  Description of Artificial Sequence: Synthetic oligonucleotide
ucuaugcuucuguuauuag

SEQ ID NO: 937770 - RNA, 19 nt, Artificial Sequence
  Description of Artificial Sequence: Synthetic oligonucleotide
uuauauuugcaaagcugua

SEQ ID NO: 937771 - RNA, 19 nt, Artificial Sequence
  Description of Artificial Sequence: Synthetic oligonucleotide
aauaggcacauuaaucuua

SEQ ID NO: 937772 - RNA, 19 nt, Artificial Sequence
  Description of Artificial Sequence: Synthetic oligonucleotide
gaacaggagagauucggga

SEQ ID NO: 937773 - RNA, 19 nt, Artificial Sequence
  Description of Artificial Sequence: Synthetic oligonucleotide
uguugaauaggagcuggug

SEQ ID NO: 937774 - RNA, 19 nt, Artificial Sequence
  Description of Artificial Sequence: Synthetic oligonucleotide
ugugauugcagugacugua

SEQ ID NO: 937775 - RNA, 19 nt, Artificial Sequence
  Description of Artificial Sequence: Synthetic oligonucleotide
cauugauuccauuuuaaua

SEQ ID NO: 937776 - RNA, 19 nt, Artificial Sequence
  Description of Artificial Sequence: Synthetic oligonucleotide
gguauguuagguugccacg

SEQ ID NO: 937777 - RNA, 19 nt, Artificial Sequence
  Description of Artificial Sequence: Synthetic oligonucleotide
ugaauucaacagcugcuuc

SEQ ID NO: 937778 - RNA, 19 nt, Artificial Sequence
  Description of Artificial Sequence: Synthetic oligonucleotide
aguaacacuccuaaccuga

SEQ ID NO: 937779 - RNA, 19 nt, Artificial Sequence
  Description of Artificial Sequence: Synthetic oligonucleotide
gguuaauugauuguugcac

SEQ ID NO: 937780 - RNA, 19 nt, Artificial Sequence
  Description of Artificial Sequence: Synthetic oligonucleotide
uaaucuacucuuagguaua

SEQ ID NO: 937781 - RNA, 19 nt, Artificial Sequence
  Description of Artificial Sequence: Synthetic oligonucleotide
uugaauaaccaauguccuc

SEQ ID NO: 937782 - RNA, 19 nt, Artificial Sequence
  Description of Artificial Sequence: Synthetic oligonucleotide
uaugggucacuguacugca

SEQ ID NO: 937783 - RNA, 19 nt, Artificial Sequence
  Description of Artificial Sequence: Synthetic oligonucleotide
uuacuaaggucagaauaca

SEQ ID NO: 937784 - RNA, 19 nt, Artificial Sequence
  Description of Artificial Sequence: Synthetic oligonucleotide
cacguaggaauuucaugcc

SEQ ID NO: 937785 - RNA, 19 nt, Artificial Sequence
  Description of Artificial Sequence: Synthetic oligonucleotide
cacuccuaaccugaggugg

SEQ ID NO: 937786 - RNA, 19 nt, Artificial Sequence
  Description of Artificial Sequence: Synthetic oligonucleotide
uguccauuaguugggguca

SEQ ID NO: 937787 - RNA, 19 nt, Artificial Sequence
  Description of Artificial Sequence: Synthetic oligonucleotide
auguuagguugccacguag

SEQ ID NO: 937788 - RNA, 19 nt, Artificial Sequence
  Description of Artificial Sequence: Synthetic oligonucleotide
uuccuaaaagauguuacua

SEQ ID NO: 937789 - RNA, 19 nt, Artificial Sequence
  Description of Artificial Sequence: Synthetic oligonucleotide
aauucuuccuuagaaccua

SEQ ID NO: 937790 - RNA, 19 nt, Artificial Sequence
  Description of Artificial Sequence: Synthetic oligonucleotide
ccauguucccagaauagcg

SEQ ID NO: 937791 - RNA, 19 nt, Artificial Sequence
  Description of Artificial Sequence: Synthetic oligonucleotide
aguuguuugcaguccagau

SEQ ID NO: 937792 - RNA, 19 nt, Artificial Sequence
  Description of Artificial Sequence: Synthetic oligonucleotide
gugauuugcauuguagcac

SEQ ID NO: 937793 - RNA, 19 nt, Artificial Sequence
  Description of Artificial Sequence: Synthetic oligonucleotide
aggaacuaaagacucuuua

SEQ ID NO: 937794 - RNA, 19 nt, Artificial Sequence
  Description of Artificial Sequence: Synthetic oligonucleotide
gaaguguuaagagguggug

SEQ ID NO: 937795 - RNA, 19 nt, Artificial Sequence
  Description of Artificial Sequence: Synthetic oligonucleotide
aaggcacuuuacaaauauc

SEQ ID NO: 937796 - RNA, 19 nt, Artificial Sequence
  Description of Artificial Sequence: Synthetic oligonucleotide
ccuaaaagauguuacuaug

SEQ ID NO: 937797 - RNA, 19 nt, Artificial Sequence
  Description of Artificial Sequence: Synthetic oligonucleotide
acuauguaucuucuucuaa

SEQ ID NO: 937798 - RNA, 19 nt, Artificial Sequence
  Description of Artificial Sequence: Synthetic oligonucleotide
aaaaucagucugaccacca

SEQ ID NO: 937799 - RNA, 19 nt, Artificial Sequence
  Description of Artificial Sequence: Synthetic oligonucleotide
cuaauuaggaauggucauc

SEQ ID NO: 937800 - RNA, 19 nt, Artificial Sequence
  Description of Artificial Sequence: Synthetic oligonucleotide
auggucaucccaauuagga

SEQ ID NO: 937801 - RNA, 19 nt, Artificial Sequence
  Description of Artificial Sequence: Synthetic oligonucleotide
cuuagguauaauagugcca

SEQ ID NO: 937802 - RNA, 19 nt, Artificial Sequence
  Description of Artificial Sequence: Synthetic oligonucleotide
aauucaacagcugcuucua

SEQ ID NO: 937803 - RNA, 19 nt, Artificial Sequence
  Description of Artificial Sequence: Synthetic oligonucleotide
aauagcgcuuugucugcga

SEQ ID NO: 937804 - RNA, 19 nt, Artificial Sequence
  Description of Artificial Sequence: Synthetic oligonucleotide
auagcgcuuugucugcgag

SEQ ID NO: 937805 - RNA, 19 nt, Artificial Sequence
  Description of Artificial Sequence: Synthetic oligonucleotide
cuggcauuaauaggucugg

SEQ ID NO: 937806 - RNA, 19 nt, Artificial Sequence
  Description of Artificial Sequence: Synthetic oligonucleotide
guuaaucuacucuuaggua

SEQ ID NO: 937807 - RNA, 19 nt, Artificial Sequence
  Description of Artificial Sequence: Synthetic oligonucleotide
uugugcuauuacauucaga

SEQ ID NO: 937808 - RNA, 19 nt, Artificial Sequence
  Description of Artificial Sequence: Synthetic oligonucleotide
cacgaaugcuuuucacagg

SEQ ID NO: 937809 - RNA, 19 nt, Artificial Sequence
  Description of Artificial Sequence: Synthetic oligonucleotide
aggaguuuauuaauaauua

SEQ ID NO: 937810 - RNA, 19 nt, Artificial Sequence
  Description of Artificial Sequence: Synthetic oligonucleotide
cuguuauuaguuuucugaa

SEQ ID NO: 937811 - RNA, 19 nt, Artificial Sequence
  Description of Artificial Sequence: Synthetic oligonucleotide
guugaauaggagcuggugu

SEQ ID NO: 937812 - RNA, 19 nt, Artificial Sequence
  Description of Artificial Sequence: Synthetic oligonucleotide
ugccaaauagaaacauuuu

SEQ ID NO: 937813 - RNA, 19 nt, Artificial Sequence
  Description of Artificial Sequence: Synthetic oligonucleotide
uagaaggauucaugggaga

SEQ ID NO: 937814 - RNA, 19 nt, Artificial Sequence
  Description of Artificial Sequence: Synthetic oligonucleotide
uuugcucccgacgaggguc

SEQ ID NO: 937815 - RNA, 19 nt, Artificial Sequence
  Description of Artificial Sequence: Synthetic oligonucleotide
auuuacagccccagcuugg

SEQ ID NO: 937816 - RNA, 19 nt, Artificial Sequence
  Description of Artificial Sequence: Synthetic oligonucleotide
ugcuuggggaugauuggac

SEQ ID NO: 937817 - RNA, 19 nt, Artificial Sequence
  Description of Artificial Sequence: Synthetic oligonucleotide
cuuggucuacuuccuagug

SEQ ID NO: 937818 - RNA, 19 nt, Artificial Sequence
  Description of Artificial Sequence: Synthetic oligonucleotide
auuuuccugugccagugau

SEQ ID NO: 937819 - RNA, 19 nt, Artificial Sequence
  Description of Artificial Sequence: Synthetic oligonucleotide
gaguugugccucguggagg

SEQ ID NO: 937820 - RNA, 19 nt, Artificial Sequence
  Description of Artificial Sequence: Synthetic oligonucleotide
gaagugcccuccacaaagg

SEQ ID NO: 937821 - RNA, 19 nt, Artificial Sequence
  Description of Artificial Sequence: Synthetic oligonucleotide
aaaccacuauguaucuucu

SEQ ID NO: 937822 - RNA, 19 nt, Artificial Sequence
  Description of Artificial Sequence: Synthetic oligonucleotide
ugauauuauaaagcuccau

SEQ ID NO: 937823 - RNA, 19 nt, Artificial Sequence
  Description of Artificial Sequence: Synthetic oligonucleotide
caugggagaaguguuaaga

SEQ ID NO: 937824 - RNA, 19 nt, Artificial Sequence
  Description of Artificial Sequence: Synthetic oligonucleotide
guuagguugccacguagga

SEQ ID NO: 937825 - RNA, 19 nt, Artificial Sequence
  Description of Artificial Sequence: Synthetic oligonucleotide
aauuucaugcccacugcuu

SEQ ID NO: 937826 - RNA, 19 nt, Artificial Sequence
  Description of Artificial Sequence: Synthetic oligonucleotide
ugcgaguuugguucccaug

SEQ ID NO: 937827 - RNA, 19 nt, Artificial Sequence
  Description of Artificial Sequence: Synthetic oligonucleotide
cacugguauguuagguugc

SEQ ID NO: 937828 - RNA, 19 nt, Artificial Sequence
  Description of Artificial Sequence: Synthetic oligonucleotide
uccuaaccugagguggugg

SEQ ID NO: 937829 - RNA, 19 nt, Artificial Sequence
  Description of Artificial Sequence: Synthetic oligonucleotide
agacucuuuagaaccuuuc

SEQ ID NO: 937830 - RNA, 19 nt, Artificial Sequence
  Description of Artificial Sequence: Synthetic oligonucleotide
cuugguaacucauuuuacu

SEQ ID NO: 937831 - RNA, 19 nt, Artificial Sequence
  Description of Artificial Sequence: Synthetic oligonucleotide
auguuaugacuguuccugu

SEQ ID NO: 937832 - RNA, 19 nt, Artificial Sequence
  Description of Artificial Sequence: Synthetic oligonucleotide
ucugcaacgucugguuuca

SEQ ID NO: 937833 - RNA, 19 nt, Artificial Sequence
  Description of Artificial Sequence: Synthetic oligonucleotide
gguauaauagugccaaaua

SEQ ID NO: 937834 - RNA, 19 nt, Artificial Sequence
  Description of Artificial Sequence: Synthetic oligonucleotide
gaauagcgcuuugucugcg

SEQ ID NO: 937835 - RNA, 19 nt, Artificial Sequence
  Description of Artificial Sequence: Synthetic oligonucleotide
ggaauuucaugcccacugc

SEQ ID NO: 937836 - RNA, 19 nt, Artificial Sequence
  Description of Artificial Sequence: Synthetic oligonucleotide
uauguuagguugccacgua

SEQ ID NO: 937837 - RNA, 19 nt, Artificial Sequence
  Description of Artificial Sequence: Synthetic oligonucleotide
uguugcacauuuccugguu

SEQ ID NO: 937838 - RNA, 19 nt, Artificial Sequence
  Description of Artificial Sequence: Synthetic oligonucleotide
uuagguugccacguaggaa

SEQ ID NO: 937839 - RNA, 19 nt, Artificial Sequence
  Description of Artificial Sequence: Synthetic oligonucleotide
acacuccuaaccugaggug

SEQ ID NO: 937840 - RNA, 19 nt, Artificial Sequence
  Description of Artificial Sequence: Synthetic oligonucleotide
aaaugcuguaaugccggau

SEQ ID NO: 937841 - RNA, 19 nt, Artificial Sequence
  Description of Artificial Sequence: Synthetic oligonucleotide
gcuuucagaacgauagacc

SEQ ID NO: 937842 - RNA, 19 nt, Artificial Sequence
  Description of Artificial Sequence: Synthetic oligonucleotide
gugauugcagugacuguag

SEQ ID NO: 937843 - RNA, 19 nt, Artificial Sequence
  Description of Artificial Sequence: Synthetic oligonucleotide
gauucgggaggauuuacau

SEQ ID NO: 937844 - RNA, 19 nt, Artificial Sequence
  Description of Artificial Sequence: Synthetic oligonucleotide
uugccacguaggaauuuca

SEQ ID NO: 937845 - RNA, 19 nt, Artificial Sequence
  Description of Artificial Sequence: Synthetic oligonucleotide
ugucugcgaguuugguucc

SEQ ID NO: 937846 - RNA, 19 nt, Artificial Sequence
  Description of Artificial Sequence: Synthetic oligonucleotide
aaucuacucuuagguauaa

SEQ ID NO: 937847 - RNA, 19 nt, Artificial Sequence
  Description of Artificial Sequence: Synthetic oligonucleotide
cuauguaucuucuucuaau

SEQ ID NO: 937848 - RNA, 19 nt, Artificial Sequence
  Description of Artificial Sequence: Synthetic oligonucleotide
gcaacgucugguuucagga

SEQ ID NO: 937849 - RNA, 19 nt, Artificial Sequence
  Description of Artificial Sequence: Synthetic oligonucleotide
gaagggcucuguccauuag

SEQ ID NO: 937850 - RNA, 19 nt, Artificial Sequence
  Description of Artificial Sequence: Synthetic oligonucleotide
aggccaaguuguuugcagu

SEQ ID NO: 937851 - RNA, 19 nt, Artificial Sequence
  Description of Artificial Sequence: Synthetic oligonucleotide
ggguuauuaaagaauuuga

SEQ ID NO: 937852 - RNA, 19 nt, Artificial Sequence
  Description of Artificial Sequence: Synthetic oligonucleotide
uagaccacauuuucuccua

SEQ ID NO: 937853 - RNA, 19 nt, Artificial Sequence
  Description of Artificial Sequence: Synthetic oligonucleotide
cugaggccaaguuguuugc

SEQ ID NO: 937854 - RNA, 19 nt, Artificial Sequence
  Description of Artificial Sequence: Synthetic oligonucleotide
auguugacccaaauuacau

SEQ ID NO: 937855 - RNA, 19 nt, Artificial Sequence
  Description of Artificial Sequence: Synthetic oligonucleotide
ggcauuaauaggucuggca

SEQ ID NO: 937856 - RNA, 19 nt, Artificial Sequence
  Description of Artificial Sequence: Synthetic oligonucleotide
ugccacguaggaauuucau

SEQ ID NO: 937857 - RNA, 19 nt, Artificial Sequence
  Description of Artificial Sequence: Synthetic oligonucleotide
caacgucugguuucaggac

SEQ ID NO: 937858 - RNA, 19 nt, Artificial Sequence
  Description of Artificial Sequence: Synthetic oligonucleotide
agaaauuagcagagugacu

SEQ ID NO: 937859 - RNA, 19 nt, Artificial Sequence
  Description of Artificial Sequence: Synthetic oligonucleotide
auucgggaggauuuacaua

SEQ ID NO: 937860 - RNA, 19 nt, Artificial Sequence
  Description of Artificial Sequence: Synthetic oligonucleotide
acgauagaccacauuuucu

SEQ ID NO: 937861 - RNA, 19 nt, Artificial Sequence
  Description of Artificial Sequence: Synthetic oligonucleotide
acgucugguuucaggacac

SEQ ID NO: 937862 - RNA, 19 nt, Artificial Sequence
  Description of Artificial Sequence: Synthetic oligonucleotide
cuaugcauuuuguuaugaa

SEQ ID NO: 937863 - RNA, 19 nt, Artificial Sequence
  Description of Artificial Sequence: Synthetic oligonucleotide
ggggauucacucucugucc

SEQ ID NO: 937864 - RNA, 19 nt, Artificial Sequence
  Description of Artificial Sequence: Synthetic oligonucleotide
guaacacuccuaaccugag

SEQ ID NO: 937865 - RNA, 19 nt, Artificial Sequence
  Description of Artificial Sequence: Synthetic oligonucleotide
ugguaguguugccauugau

SEQ ID NO: 937866 - RNA, 19 nt, Artificial Sequence
  Description of Artificial Sequence: Synthetic oligonucleotide
gcgaguuugguucccauga

SEQ ID NO: 937867 - RNA, 19 nt, Artificial Sequence
  Description of Artificial Sequence: Synthetic oligonucleotide
caucauugauuuuggggaa

SEQ ID NO: 937868 - RNA, 19 nt, Artificial Sequence
  Description of Artificial Sequence: Synthetic oligonucleotide
uggcauuaauaggucuggc

SEQ ID NO: 937869 - RNA, 19 nt, Artificial Sequence
  Description of Artificial Sequence: Synthetic oligonucleotide
gauuugcauuguagcacug

SEQ ID NO: 937870 - RNA, 19 nt, Artificial Sequence
  Description of Artificial Sequence: Synthetic oligonucleotide
ucagaacgauagaccacau

SEQ ID NO: 937871 - RNA, 19 nt, Artificial Sequence
  Description of Artificial Sequence: Synthetic oligonucleotide
ccuuagaaccuaaacauua

SEQ ID NO: 937872 - RNA, 19 nt, Artificial Sequence
  Description of Artificial Sequence: Synthetic oligonucleotide
guguuaagaggugguggag

SEQ ID NO: 937873 - RNA, 19 nt, Artificial Sequence
  Description of Artificial Sequence: Synthetic oligonucleotide
gagauucgggaggauuuac

SEQ ID NO: 937874 - RNA, 19 nt, Artificial Sequence
  Description of Artificial Sequence: Synthetic oligonucleotide
agcgcuuugucugcgaguu

SEQ ID NO: 937875 - RNA, 19 nt, Artificial Sequence
  Description of Artificial Sequence: Synthetic oligonucleotide
gcuguaaugccggauccag

SEQ ID NO: 937876 - RNA, 19 nt, Artificial Sequence
  Description of Artificial Sequence: Synthetic oligonucleotide
uguuaguacuuugcaugau

SEQ ID NO: 937877 - RNA, 19 nt, Artificial Sequence
  Description of Artificial Sequence: Synthetic oligonucleotide
uaggagcuggugugauugc

SEQ ID NO: 937878 - RNA, 19 nt, Artificial Sequence
  Description of Artificial Sequence: Synthetic oligonucleotide
auuugcucccgacgagggu

SEQ ID NO: 937879 - RNA, 19 nt, Artificial Sequence
  Description of Artificial Sequence: Synthetic oligonucleotide
ggaaucuacagcacugaca

SEQ ID NO: 937880 - RNA, 19 nt, Artificial Sequence
  Description of Artificial Sequence: Synthetic oligonucleotide
agauucgggaggauuuaca

SEQ ID NO: 937881 - RNA, 19 nt, Artificial Sequence
  Description of Artificial Sequence: Synthetic oligonucleotide
ccuaguggguuauuaaaga

SEQ ID NO: 937882 - RNA, 19 nt, Artificial Sequence
  Description of Artificial Sequence: Synthetic oligonucleotide
cccuccacaaaggauauac

SEQ ID NO: 937883 - RNA, 19 nt, Artificial Sequence
  Description of Artificial Sequence: Synthetic oligonucleotide
uccugguuagaaggauuca

SEQ ID NO: 937884 - RNA, 19 nt, Artificial Sequence
  Description of Artificial Sequence: Synthetic oligonucleotide
acacaacaauaugggucac

SEQ ID NO: 937885 - RNA, 19 nt, Artificial Sequence
  Description of Artificial Sequence: Synthetic oligonucleotide
caauaugggucacuguacu

SEQ ID NO: 937886 - RNA, 19 nt, Artificial Sequence
  Description of Artificial Sequence: Synthetic oligonucleotide
gguaacucauuuuacuaau

SEQ ID NO: 937887 - RNA, 19 nt, Artificial Sequence
  Description of Artificial Sequence: Synthetic oligonucleotide
uagcgcuuugucugcgagu

SEQ ID NO: 937888 - RNA, 19 nt, Artificial Sequence
  Description of Artificial Sequence: Synthetic oligonucleotide
ucccaauuaggaguuuauu

SEQ ID NO: 937889 - RNA, 19 nt, Artificial Sequence
  Description of Artificial Sequence: Synthetic oligonucleotide
acuuccuaguggguuauua

SEQ ID NO: 937890 - RNA, 19 nt, Artificial Sequence
  Description of Artificial Sequence: Synthetic oligonucleotide
ggauuuacauauuucccau

SEQ ID NO: 937891 - RNA, 19 nt, Artificial Sequence
  Description of Artificial Sequence: Synthetic oligonucleotide
aucauugauuuuggggaau

SEQ ID NO: 937892 - RNA, 19 nt, Artificial Sequence
  Description of Artificial Sequence: Synthetic oligonucleotide
guauguuagguugccacgu

SEQ ID NO: 937893 - RNA, 19 nt, Artificial Sequence
  Description of Artificial Sequence: Synthetic oligonucleotide
cacuauguaucuucuucua

SEQ ID NO: 937894 - RNA, 19 nt, Artificial Sequence
  Description of Artificial Sequence: Synthetic oligonucleotide
caauauguugacccaaauu

SEQ ID NO: 937895 - RNA, 19 nt, Artificial Sequence
  Description of Artificial Sequence: Synthetic oligonucleotide
gggucacuguacugcaaag

SEQ ID NO: 937896 - RNA, 19 nt, Artificial Sequence
  Description of Artificial Sequence: Synthetic oligonucleotide
gggauucacucucugucca

SEQ ID NO: 937897 - RNA, 19 nt, Artificial Sequence
  Description of Artificial Sequence: Synthetic oligonucleotide
cucuagcaaagcauuauuu

SEQ ID NO: 937898 - RNA, 19 nt, Artificial Sequence
  Description of Artificial Sequence: Synthetic oligonucleotide
cccagaauagcgcuuuguc

SEQ ID NO: 937899 - RNA, 19 nt, Artificial Sequence
  Description of Artificial Sequence: Synthetic oligonucleotide
cuaccgcagccauuugcuc

SEQ ID NO: 937900 - RNA, 19 nt, Artificial Sequence
  Description of Artificial Sequence: Synthetic oligonucleotide
ggccaaguuguuugcaguc

SEQ ID NO: 937901 - RNA, 19 nt, Artificial Sequence
  Description of Artificial Sequence: Synthetic oligonucleotide
cugcaaagguuccuuuuaa

SEQ ID NO: 937902 - RNA, 19 nt, Artificial Sequence
  Description of Artificial Sequence: Synthetic oligonucleotide
aggauauacuaaggcacuu

SEQ ID NO: 937903 - RNA, 19 nt, Artificial Sequence
  Description of Artificial Sequence: Synthetic oligonucleotide
acuccuaaccugagguggu

SEQ ID NO: 937904 - RNA, 19 nt, Artificial Sequence
  Description of Artificial Sequence: Synthetic oligonucleotide
cuguaaugccggauccaga

SEQ ID NO: 937905 - RNA, 19 nt, Artificial Sequence
  Description of Artificial Sequence: Synthetic oligonucleotide
accaguuaaucuacucuua

SEQ ID NO: 937906 - RNA, 19 nt, Artificial Sequence
  Description of Artificial Sequence: Synthetic oligonucleotide
uuccuacaucugccuguga

SEQ ID NO: 937907 - RNA, 19 nt, Artificial Sequence
  Description of Artificial Sequence: Synthetic oligonucleotide
gaacgauagaccacauuuu

SEQ ID NO: 937908 - RNA, 19 nt, Artificial Sequence
  Description of Artificial Sequence: Synthetic oligonucleotide
auacagcccgauucuucuu

SEQ ID NO: 937909 - RNA, 19 nt, Artificial Sequence
  Description of Artificial Sequence: Synthetic oligonucleotide
ucgggaggauuuacauauu

SEQ ID NO: 937910 - RNA, 19 nt, Artificial Sequence
  Description of Artificial Sequence: Synthetic oligonucleotide
cucacugguauguuagguu

SEQ ID NO: 937911 - RNA, 19 nt, Artificial Sequence
  Description of Artificial Sequence: Synthetic oligonucleotide
ccgacgagggucuugguaa

SEQ ID NO: 937912 - RNA, 19 nt, Artificial Sequence
  Description of Artificial Sequence: Synthetic oligonucleotide
cugucaugaaaggaaucua

SEQ ID NO: 937913 - RNA, 19 nt, Artificial Sequence
  Description of Artificial Sequence: Synthetic oligonucleotide
cuagaggugggccgugucu

SEQ ID NO: 937914 - RNA, 19 nt, Artificial Sequence
  Description of Artificial Sequence: Synthetic oligonucleotide
gccgauuuacagccccagc

SEQ ID NO: 937915 - RNA, 19 nt, Artificial Sequence
  Description of Artificial Sequence: Synthetic oligonucleotide
ccaaguuguuugcagucca

SEQ ID NO: 937916 - RNA, 19 nt, Artificial Sequence
  Description of Artificial Sequence: Synthetic oligonucleotide
cuccuaaccugagguggug

SEQ ID NO: 937917 - RNA, 19 nt, Artificial Sequence
  Description of Artificial Sequence: Synthetic oligonucleotide
ugccaugugccagguggaa

SEQ ID NO: 937918 - RNA, 19 nt, Artificial Sequence
  Description of Artificial Sequence: Synthetic oligonucleotide
aucuacucuuagguauaau

SEQ ID NO: 937919 - RNA, 19 nt, Artificial Sequence
  Description of Artificial Sequence: Synthetic oligonucleotide
caucccaauuaggaguuua

SEQ ID NO: 937920 - RNA, 19 nt, Artificial Sequence
  Description of Artificial Sequence: Synthetic oligonucleotide
uccuagaggugggccgugu

SEQ ID NO: 937921 - RNA, 19 nt, Artificial Sequence
  Description of Artificial Sequence: Synthetic oligonucleotide
gaauaggagcuggugugau

SEQ ID NO: 937922 - RNA, 19 nt, Artificial Sequence
  Description of Artificial Sequence: Synthetic oligonucleotide
caacaauaugggucacugu

SEQ ID NO: 937923 - RNA, 19 nt, Artificial Sequence
  Description of Artificial Sequence: Synthetic oligonucleotide
ccccugcuuguaaagcaag

SEQ ID NO: 937924 - RNA, 19 nt, Artificial Sequence
  Description of Artificial Sequence: Synthetic oligonucleotide
ccagaauagcgcuuugucu

SEQ ID NO: 937925 - RNA, 19 nt, Artificial Sequence
  Description of Artificial Sequence: Synthetic oligonucleotide
gauucacucucuguccauu

SEQ ID NO: 937926 - RNA, 19 nt, Artificial Sequence
  Description of Artificial Sequence: Synthetic oligonucleotide
guaaagcaagaagggcucu

SEQ ID NO: 937927 - RNA, 19 nt, Artificial Sequence
  Description of Artificial Sequence: Synthetic oligonucleotide
ccgauuuacagccccagcu

SEQ ID NO: 937928 - RNA, 19 nt, Artificial Sequence
  Description of Artificial Sequence: Synthetic oligonucleotide
gcccgauucuucuuccuaa

SEQ ID NO: 937929 - RNA, 19 nt, Artificial Sequence
  Description of Artificial Sequence: Synthetic oligonucleotide
cagugacuguaguggcuga

SEQ ID NO: 937930 - RNA, 19 nt, Artificial Sequence
  Description of Artificial Sequence: Synthetic oligonucleotide
gugugauugcagugacugu

SEQ ID NO: 937931 - RNA, 19 nt, Artificial Sequence
  Description of Artificial Sequence: Synthetic oligonucleotide
agguggaacaggagagauu

SEQ ID NO: 937932 - RNA, 19 nt, Artificial Sequence
  Description of Artificial Sequence: Synthetic oligonucleotide
ucaucccaauuaggaguuu

SEQ ID NO: 937933 - RNA, 19 nt, Artificial Sequence
  Description of Artificial Sequence: Synthetic oligonucleotide
cgguuaauugauuguugca

SEQ ID NO: 937934 - RNA, 19 nt, Artificial Sequence
  Description of Artificial Sequence: Synthetic oligonucleotide
gcuaccgcagccauuugcu

SEQ ID NO: 937935 - RNA, 19 nt, Artificial Sequence
  Description of Artificial Sequence: Synthetic oligonucleotide
cacaacaauaugggucacu

SEQ ID NO: 937936 - RNA, 19 nt, Artificial Sequence
  Description of Artificial Sequence: Synthetic oligonucleotide
ccauugauuccauuuuaau

SEQ ID NO: 937937 - RNA, 19 nt, Artificial Sequence
  Description of Artificial Sequence: Synthetic oligonucleotide
cauugauuuuggggaauau

SEQ ID NO: 937938 - RNA, 19 nt, Artificial Sequence
  Description of Artificial Sequence: Synthetic oligonucleotide
ccuacaucugccugugagu

SEQ ID NO: 937939 - RNA, 19 nt, Artificial Sequence
  Description of Artificial Sequence: Synthetic oligonucleotide
ggauauacuaaggcacuuu

SEQ ID NO: 937940 - RNA, 19 nt, Artificial Sequence
  Description of Artificial Sequence: Synthetic oligonucleotide
augggucacuguacugcaa

SEQ ID NO: 937941 - RNA, 19 nt, Artificial Sequence
  Description of Artificial Sequence: Synthetic oligonucleotide
ucccgacgagggucuuggu

SEQ ID NO: 937942 - RNA, 19 nt, Artificial Sequence
  Description of Artificial Sequence: Synthetic oligonucleotide
gacgagggucuugguaacu

SEQ ID NO: 937943 - RNA, 19 nt, Artificial Sequence
  Description of Artificial Sequence: Synthetic oligonucleotide
gggaagugcccuccacaaa

SEQ ID NO: 937944 - RNA, 19 nt, Artificial Sequence
  Description of Artificial Sequence: Synthetic oligonucleotide
gcagcuaccgcagccauuu

SEQ ID NO: 937945 - RNA, 19 nt, Artificial Sequence
  Description of Artificial Sequence: Synthetic oligonucleotide
agguugccacguaggaauu

SEQ ID NO: 937946 - RNA, 19 nt, Artificial Sequence
  Description of Artificial Sequence: Synthetic oligonucleotide
ccuagaggugggccguguc

SEQ ID NO: 937947 - RNA, 19 nt, Artificial Sequence
  Description of Artificial Sequence: Synthetic oligonucleotide
uacuuccuaguggguuauu

SEQ ID NO: 937948 - RNA, 19 nt, Artificial Sequence
  Description of Artificial Sequence: Synthetic oligonucleotide
gcagagugacuuggucuac

SEQ ID NO: 937949 - RNA, 19 nt, Artificial Sequence
  Description of Artificial Sequence: Synthetic oligonucleotide
cugcaacgucugguuucag

SEQ ID NO: 937950 - RNA, 19 nt, Artificial Sequence
  Description of Artificial Sequence: Synthetic oligonucleotide
cagaacgauagaccacauu

SEQ ID NO: 937951 - RNA, 19 nt, Artificial Sequence
  Description of Artificial Sequence: Synthetic oligonucleotide
ccgauucuucuuccuaaaa

SEQ ID NO: 937952 - RNA, 19 nt, Artificial Sequence
  Description of Artificial Sequence: Synthetic oligonucleotide
cgacgagggucuugguaac

SEQ ID NO: 937953 - RNA, 19 nt, Artificial Sequence
  Description of Artificial Sequence: Synthetic oligonucleotide
ccuaaccugaggugguggu

SEQ ID NO: 937954 - RNA, 19 nt, Artificial Sequence
  Description of Artificial Sequence: Synthetic oligonucleotide
gguaggcccucccugccau

SEQ ID NO: 937955 - RNA, 19 nt, Artificial Sequence
  Description of Artificial Sequence: Synthetic oligonucleotide
cuacuuccuaguggguuau

SEQ ID NO: 937956 - RNA, 19 nt, Artificial Sequence
  Description of Artificial Sequence: Synthetic oligonucleotide
ggucagaauacagcccgau

SEQ ID NO: 937957 - RNA, 19 nt, Artificial Sequence
  Description of Artificial Sequence: Synthetic oligonucleotide
ccuccacaaaggauauacu

SEQ ID NO: 937958 - RNA, 19 nt, Artificial Sequence
  Description of Artificial Sequence: Synthetic oligonucleotide
cugcgaguuugguucccau

SEQ ID NO: 937959 - RNA, 19 nt, Artificial Sequence
  Description of Artificial Sequence: Synthetic oligonucleotide
cccgacgagggucuuggua

SEQ ID NO: 937960 - RNA, 19 nt, Artificial Sequence
  Description of Artificial Sequence: Synthetic oligonucleotide
ccucacugguauguuaggu

SEQ ID NO: 937961 - RNA, 19 nt, Artificial Sequence
  Description of Artificial Sequence: Synthetic oligonucleotide
ccugguggaaagguaaauu

SEQ ID NO: 937962 - RNA, 19 nt, Artificial Sequence
  Description of Artificial Sequence: Synthetic oligonucleotide
gcucccgacgagggucuug

SEQ ID NO: 937963 - RNA, 19 nt, Artificial Sequence
  Description of Artificial Sequence: Synthetic oligonucleotide
cgauuuacagccccagcuu

SEQ ID NO: 937964 - RNA, 19 nt, Artificial Sequence
  Description of Artificial Sequence: Synthetic oligonucleotide
cgugucucugaggaacuaa

SEQ ID NO: 937965 - RNA, 19 nt, Artificial Sequence
  Description of Artificial Sequence: Synthetic oligonucleotide
gccgugucucugaggaacu

SEQ ID NO: 937966 - RNA, 19 nt, Artificial Sequence
  Description of Artificial Sequence: Synthetic oligonucleotide
gguugccacguaggaauuu

SEQ ID NO: 937967 - RNA, 19 nt, Artificial Sequence
  Description of Artificial Sequence: Synthetic oligonucleotide
ccgugucucugaggaacua

SEQ ID NO: 937968 - RNA, 19 nt, Artificial Sequence
  Description of Artificial Sequence: Synthetic oligonucleotide
gcccuccacaaaggauaua

SEQ ID NO: 937969 - RNA, 19 nt, Artificial Sequence
  Description of Artificial Sequence: Synthetic oligonucleotide
gcgcuuugucugcgaguuu

SEQ ID NO: 937970 - RNA, 19 nt, Artificial Sequence
  Description of Artificial Sequence: Synthetic oligonucleotide
aggagaaauaaacacaugc

SEQ ID NO: 937971 - RNA, 19 nt, Artificial Sequence
  Description of Artificial Sequence: Synthetic oligonucleotide
uuuuacauaaguguggugg

SEQ ID NO: 937972 - RNA, 19 nt, Artificial Sequence
  Description of Artificial Sequence: Synthetic oligonucleotide
aauuccuauguacuggagc

SEQ ID NO: 937973 - RNA, 19 nt, Artificial Sequence
  Description of Artificial Sequence: Synthetic oligonucleotide
ucagaaaagaauuugggug

SEQ ID NO: 937974 - RNA, 19 nt, Artificial Sequence
  Description of Artificial Sequence: Synthetic oligonucleotide
uuaauugcaagaaaaggga

SEQ ID NO: 937975 - RNA, 19 nt, Artificial Sequence
  Description of Artificial Sequence: Synthetic oligonucleotide
acacaauuuaaacauguac

SEQ ID NO: 937976 - RNA, 19 nt, Artificial Sequence
  Description of Artificial Sequence: Synthetic oligonucleotide
ugaucuuaauuccuaaucc

SEQ ID NO: 937977 - RNA, 19 nt, Artificial Sequence
  Description of Artificial Sequence: Synthetic oligonucleotide
ugauagaugugcaugcacg

SEQ ID NO: 937978 - RNA, 19 nt, Artificial Sequence
  Description of Artificial Sequence: Synthetic oligonucleotide
agcucaauaaaucagaaau

SEQ ID NO: 937979 - RNA, 19 nt, Artificial Sequence
  Description of Artificial Sequence: Synthetic oligonucleotide
ugacuuucaauuaucacca

SEQ ID NO: 937980 - RNA, 19 nt, Artificial Sequence
  Description of Artificial Sequence: Synthetic oligonucleotide
uuugcuuacaagcuaggag

SEQ ID NO: 937981 - RNA, 19 nt, Artificial Sequence
  Description of Artificial Sequence: Synthetic oligonucleotide
aaaacauuacaucuuuacu

SEQ ID NO: 937982 - RNA, 19 nt, Artificial Sequence
  Description of Artificial Sequence: Synthetic oligonucleotide
aaaacuacuuguuaaguuu

SEQ ID NO: 937983 - RNA, 19 nt, Artificial Sequence
  Description of Artificial Sequence: Synthetic oligonucleotide
uacuuguuaaguuucacca

SEQ ID NO: 937984 - RNA, 19 nt, Artificial Sequence
  Description of Artificial Sequence: Synthetic oligonucleotide
ucucauaggaugaaagcag

SEQ ID NO: 937985 - RNA, 19 nt, Artificial Sequence
  Description of Artificial Sequence: Synthetic oligonucleotide
cauaugguuauacaagucc

SEQ ID NO: 937986 - RNA, 19 nt, Artificial Sequence
  Description of Artificial Sequence: Synthetic oligonucleotide
gauagugcaucucaguuug

SEQ ID NO: 937987 - RNA, 19 nt, Artificial Sequence
  Description of Artificial Sequence: Synthetic oligonucleotide
uucaacuugacuuucaauu

SEQ ID NO: 937988 - RNA, 19 nt, Artificial Sequence
  Description of Artificial Sequence: Synthetic oligonucleotide
uuugcuaugguuccagaca

SEQ ID NO: 937989 - RNA, 19 nt, Artificial Sequence
  Description of Artificial Sequence: Synthetic oligonucleotide
uacuaaaccaucucuaccu

SEQ ID NO: 937990 - RNA, 19 nt, Artificial Sequence
  Description of Artificial Sequence: Synthetic oligonucleotide
gaucuuaauuccuaauccc

SEQ ID NO: 937991 - RNA, 19 nt, Artificial Sequence
  Description of Artificial Sequence: Synthetic oligonucleotide
ugugaaacaugaaacacau

SEQ ID NO: 937992 - RNA, 19 nt, Artificial Sequence
  Description of Artificial Sequence: Synthetic oligonucleotide
uuccuaaucuucaacacac

SEQ ID NO: 937993 - RNA, 19 nt, Artificial Sequence
  Description of Artificial Sequence: Synthetic oligonucleotide
uacacaauuccuauguacu

SEQ ID NO: 937994 - RNA, 19 nt, Artificial Sequence
  Description of Artificial Sequence: Synthetic oligonucleotide
ugugcaugaucuuaauucc

SEQ ID NO: 937995 - RNA, 19 nt, Artificial Sequence
  Description of Artificial Sequence: Synthetic oligonucleotide
cagaaaucgaauugggucc

SEQ ID NO: 937996 - RNA, 19 nt, Artificial Sequence
  Description of Artificial Sequence: Synthetic oligonucleotide
cuagcaagacuuaacagac

SEQ ID NO: 937997 - RNA, 19 nt, Artificial Sequence
  Description of Artificial Sequence: Synthetic oligonucleotide
uguaacuccauaaccucag

SEQ ID NO: 937998 - RNA, 19 nt, Artificial Sequence
  Description of Artificial Sequence: Synthetic oligonucleotide
uacaacagguuauaaauaa

SEQ ID NO: 937999 - RNA, 19 nt, Artificial Sequence
  Description of Artificial Sequence: Synthetic oligonucleotide
aggugauagaugugcaugc

SEQ ID NO: 938000 - RNA, 19 nt, Artificial Sequence
  Description of Artificial Sequence: Synthetic oligonucleotide
uuacuaaaccaucucuacc

SEQ ID NO: 938001 - RNA, 19 nt, Artificial Sequence
  Description of Artificial Sequence: Synthetic oligonucleotide
caagcauagagccagcccc

SEQ ID NO: 938002 - RNA, 19 nt, Artificial Sequence
  Description of Artificial Sequence: Synthetic oligonucleotide
uugcuaugguuccagacag

SEQ ID NO: 938003 - RNA, 19 nt, Artificial Sequence
  Description of Artificial Sequence: Synthetic oligonucleotide
uuuacauaagugugguggc

SEQ ID NO: 938004 - RNA, 19 nt, Artificial Sequence
  Description of Artificial Sequence: Synthetic oligonucleotide
uuaauaaaaccuugaccca

SEQ ID NO: 938005 - RNA, 19 nt, Artificial Sequence
  Description of Artificial Sequence: Synthetic oligonucleotide
uaacacuucagaaguuuag

SEQ ID NO: 938006 - RNA, 19 nt, Artificial Sequence
  Description of Artificial Sequence: Synthetic oligonucleotide
uuuugugccaguguuauaa

SEQ ID NO: 938007 - RNA, 19 nt, Artificial Sequence
  Description of Artificial Sequence: Synthetic oligonucleotide
ggcucaauuagucucauag

SEQ ID NO: 938008 - RNA, 19 nt, Artificial Sequence
  Description of Artificial Sequence: Synthetic oligonucleotide
aaauaucacguacuuuccu

SEQ ID NO: 938009 - RNA, 19 nt, Artificial Sequence
  Description of Artificial Sequence: Synthetic oligonucleotide
ugagaucacaacuaugaaa

SEQ ID NO: 938010 - RNA, 19 nt, Artificial Sequence
  Description of Artificial Sequence: Synthetic oligonucleotide
uuaaacauguacaguugcu

SEQ ID NO: 938011 - RNA, 19 nt, Artificial Sequence
  Description of Artificial Sequence: Synthetic oligonucleotide
aauuaucaccauauuaaca

SEQ ID NO: 938012 - RNA, 19 nt, Artificial Sequence
  Description of Artificial Sequence: Synthetic oligonucleotide
cuuguuaaguuucaccaug

SEQ ID NO: 938013 - RNA, 19 nt, Artificial Sequence
  Description of Artificial Sequence: Synthetic oligonucleotide
augguuauacaaguccugc

SEQ ID NO: 938014 - RNA, 19 nt, Artificial Sequence
  Description of Artificial Sequence: Synthetic oligonucleotide
cuuguuccugauauggcgg

SEQ ID NO: 938015 - RNA, 19 nt, Artificial Sequence
  Description of Artificial Sequence: Synthetic oligonucleotide
uguuggaugauagacggga

SEQ ID NO: 938016 - RNA, 19 nt, Artificial Sequence
  Description of Artificial Sequence: Synthetic oligonucleotide
cuacuuguuaaguuucacc

SEQ ID NO: 938017 - RNA, 19 nt, Artificial Sequence
  Description of Artificial Sequence: Synthetic oligonucleotide
ugaugguucacuugaaguc

SEQ ID NO: 938018 - RNA, 19 nt, Artificial Sequence
  Description of Artificial Sequence: Synthetic oligonucleotide
agaaaagggauagugcauc

SEQ ID NO: 938019 - RNA, 19 nt, Artificial Sequence
  Description of Artificial Sequence: Synthetic oligonucleotide
agacgagagacccuggcuc

SEQ ID NO: 938020 - RNA, 19 nt, Artificial Sequence
  Description of Artificial Sequence: Synthetic oligonucleotide
agacucgugaagcagggag

SEQ ID NO: 938021 - RNA, 19 nt, Artificial Sequence
  Description of Artificial Sequence: Synthetic oligonucleotide
agugugguggcacaguuca

SEQ ID NO: 938022 - RNA, 19 nt, Artificial Sequence
  Description of Artificial Sequence: Synthetic oligonucleotide
uaacagacaccuuuccaag

SEQ ID NO: 938023 - RNA, 19 nt, Artificial Sequence
  Description of Artificial Sequence: Synthetic oligonucleotide
cuuacaagcuaggagaaug

SEQ ID NO: 938024 - RNA, 19 nt, Artificial Sequence
  Description of Artificial Sequence: Synthetic oligonucleotide
uaugguuauacaaguccug

SEQ ID NO: 938025 - RNA, 19 nt, Artificial Sequence
  Description of Artificial Sequence: Synthetic oligonucleotide
acgauaauaauacacuauu

SEQ ID NO: 938026 - RNA, 19 nt, Artificial Sequence
  Description of Artificial Sequence: Synthetic oligonucleotide
ugcuguauaaggccuauuc

SEQ ID NO: 938027 - RNA, 19 nt, Artificial Sequence
  Description of Artificial Sequence: Synthetic oligonucleotide
acacuucagaaguuuagag

SEQ ID NO: 938028 - RNA, 19 nt, Artificial Sequence
  Description of Artificial Sequence: Synthetic oligonucleotide
agcguugguuuccugacac

SEQ ID NO: 938029 - RNA, 19 nt, Artificial Sequence
  Description of Artificial Sequence: Synthetic oligonucleotide
gaggucggggauuugaggc

SEQ ID NO: 938030 - RNA, 19 nt, Artificial Sequence
  Description of Artificial Sequence: Synthetic oligonucleotide
gaagucagacgagagaccc

SEQ ID NO: 938031 - RNA, 19 nt, Artificial Sequence
  Description of Artificial Sequence: Synthetic oligonucleotide
aaagcuagcccggucggac

SEQ ID NO: 938032 - RNA, 19 nt, Artificial Sequence
  Description of Artificial Sequence: Synthetic oligonucleotide
caaacaagcuuacaacuac

SEQ ID NO: 938033 - RNA, 19 nt, Artificial Sequence
  Description of Artificial Sequence: Synthetic oligonucleotide
augaaagcagugcugcauc

SEQ ID NO: 938034 - RNA, 19 nt, Artificial Sequence
  Description of Artificial Sequence: Synthetic oligonucleotide
ucaauuagucucauaggau

SEQ ID NO: 938035 - RNA, 19 nt, Artificial Sequence
  Description of Artificial Sequence: Synthetic oligonucleotide
uagaugugcaugcacggca

SEQ ID NO: 938036 - RNA, 19 nt, Artificial Sequence
  Description of Artificial Sequence: Synthetic oligonucleotide
uccccguaaacaaagucca

SEQ ID NO: 938037 - RNA, 19 nt, Artificial Sequence
  Description of Artificial Sequence: Synthetic oligonucleotide
ucaagcauagagccagccc

SEQ ID NO: 938038 - RNA, 19 nt, Artificial Sequence
  Description of Artificial Sequence: Synthetic oligonucleotide
uaauugcaagaaaagggaa

SEQ ID NO: 938039 - RNA, 19 nt, Artificial Sequence
  Description of Artificial Sequence: Synthetic oligonucleotide
uuggaguauucuuacauua

SEQ ID NO: 938040 - RNA, 19 nt, Artificial Sequence
  Description of Artificial Sequence: Synthetic oligonucleotide
agauguguuucuguaacuc

SEQ ID NO: 938041 - RNA, 19 nt, Artificial Sequence
  Description of Artificial Sequence: Synthetic oligonucleotide
augcuaaguggauaaaaca

SEQ ID NO: 938042 - RNA, 19 nt, Artificial Sequence
  Description of Artificial Sequence: Synthetic oligonucleotide
cuuacaacagguuauaaau

SEQ ID NO: 938043 - RNA, 19 nt, Artificial Sequence
  Description of Artificial Sequence: Synthetic oligonucleotide
uuuugcuaugguuccagac

SEQ ID NO: 938044 - RNA, 19 nt, Artificial Sequence
  Description of Artificial Sequence: Synthetic oligonucleotide
gguaugugaaacaugaaac

SEQ ID NO: 938045 - RNA, 19 nt, Artificial Sequence
  Description of Artificial Sequence: Synthetic oligonucleotide
gaugauagacgggaacggg

SEQ ID NO: 938046 - RNA, 19 nt, Artificial Sequence
  Description of Artificial Sequence: Synthetic oligonucleotide
agcccggucggacugagac

SEQ ID NO: 938047 - RNA, 19 nt, Artificial Sequence
  Description of Artificial Sequence: Synthetic oligonucleotide
ucaaccagucaucuauaca

SEQ ID NO: 938048 - RNA, 19 nt, Artificial Sequence
  Description of Artificial Sequence: Synthetic oligonucleotide
ucauaggaugaaagcagug

SEQ ID NO: 938049 - RNA, 19 nt, Artificial Sequence
  Description of Artificial Sequence: Synthetic oligonucleotide
gagacccuggcucaauuag

SEQ ID NO: 938050 - RNA, 19 nt, Artificial Sequence
  Description of Artificial Sequence: Synthetic oligonucleotide
aaggucuaauaacaauuau

SEQ ID NO: 938051 - RNA, 19 nt, Artificial Sequence
  Description of Artificial Sequence: Synthetic oligonucleotide
auaaggccuauucuuugag

SEQ ID NO: 938052 - RNA, 19 nt, Artificial Sequence
  Description of Artificial Sequence: Synthetic oligonucleotide
aacgauaauaauacacuau

SEQ ID NO: 938053 - RNA, 19 nt, Artificial Sequence
  Description of Artificial Sequence: Synthetic oligonucleotide
uuauacaaguccugcugca

SEQ ID NO: 938054 - RNA, 19 nt, Artificial Sequence
  Description of Artificial Sequence: Synthetic oligonucleotide
agcacuacaguaacaagag

SEQ ID NO: 938055 - RNA, 19 nt, Artificial Sequence
  Description of Artificial Sequence: Synthetic oligonucleotide
gagaucacaacuaugaaau

SEQ ID NO: 938056 - RNA, 19 nt, Artificial Sequence
  Description of Artificial Sequence: Synthetic oligonucleotide
uuccugacacaucaacuca

SEQ ID NO: 938057 - RNA, 19 nt, Artificial Sequence
  Description of Artificial Sequence: Synthetic oligonucleotide
gguuauacaaguccugcug

SEQ ID NO: 938058 - RNA, 19 nt, Artificial Sequence
  Description of Artificial Sequence: Synthetic oligonucleotide
ucauaugguuauacaaguc

SEQ ID NO: 938059 - RNA, 19 nt, Artificial Sequence
  Description of Artificial Sequence: Synthetic oligonucleotide
agggagaugucauccgagg

SEQ ID NO: 938060 - RNA, 19 nt, Artificial Sequence
  Description of Artificial Sequence: Synthetic oligonucleotide
uccccuaaguuucuaaaau

SEQ ID NO: 938061 - RNA, 19 nt, Artificial Sequence
  Description of Artificial Sequence: Synthetic oligonucleotide
uggguccccguaaacaaag

SEQ ID NO: 938062 - RNA, 19 nt, Artificial Sequence
  Description of Artificial Sequence: Synthetic oligonucleotide
acguacuuuccucaacauc

SEQ ID NO: 938063 - RNA, 19 nt, Artificial Sequence
  Description of Artificial Sequence: Synthetic oligonucleotide
accuagcaagacuuaacag

SEQ ID NO: 938064 - RNA, 19 nt, Artificial Sequence
  Description of Artificial Sequence: Synthetic oligonucleotide
aaaucgaauuggguccccg

SEQ ID NO: 938065 - RNA, 19 nt, Artificial Sequence
  Description of Artificial Sequence: Synthetic oligonucleotide
ugaguugcuagccgagucu

SEQ ID NO: 938066 - RNA, 19 nt, Artificial Sequence
  Description of Artificial Sequence: Synthetic oligonucleotide
aacgggaacuuguuccuga

SEQ ID NO: 938067 - RNA, 19 nt, Artificial Sequence
  Description of Artificial Sequence: Synthetic oligonucleotide
acuuuacacaauuccuaug

SEQ ID NO: 938068 - RNA, 19 nt, Artificial Sequence
  Description of Artificial Sequence: Synthetic oligonucleotide
aagcucaauaaaucagaaa

SEQ ID NO: 938069 - RNA, 19 nt, Artificial Sequence
  Description of Artificial Sequence: Synthetic oligonucleotide
uaaggccuauucuuugagc

SEQ ID NO: 938070 - RNA, 19 nt, Artificial Sequence
  Description of Artificial Sequence: Synthetic oligonucleotide
aucacguacuuuccucaac

SEQ ID NO: 938071 - RNA, 19 nt, Artificial Sequence
  Description of Artificial Sequence: Synthetic oligonucleotide
uagcacuuacaacagguua

SEQ ID NO: 938072 - RNA, 19 nt, Artificial Sequence
  Description of Artificial Sequence: Synthetic oligonucleotide
cuuugagaucacaacuaug

SEQ ID NO: 938073 - RNA, 19 nt, Artificial Sequence
  Description of Artificial Sequence: Synthetic oligonucleotide
agaucacaacuaugaaauc

SEQ ID NO: 938074 - RNA, 19 nt, Artificial Sequence
  Description of Artificial Sequence: Synthetic oligonucleotide
uggaguauucuuacauuaa

SEQ ID NO: 938075 - RNA, 19 nt, Artificial Sequence
  Description of Artificial Sequence: Synthetic oligonucleotide
aaucgaauuggguccccgu

SEQ ID NO: 938076 - RNA, 19 nt, Artificial Sequence
  Description of Artificial Sequence: Synthetic oligonucleotide
auaugguuauacaaguccu

SEQ ID NO: 938077 - RNA, 19 nt, Artificial Sequence
  Description of Artificial Sequence: Synthetic oligonucleotide
auaagauaagacacacaag

SEQ ID NO: 938078 - RNA, 19 nt, Artificial Sequence
  Description of Artificial Sequence: Synthetic oligonucleotide
gucaucuauacaguccagg

SEQ ID NO: 938079 - RNA, 19 nt, Artificial Sequence
  Description of Artificial Sequence: Synthetic oligonucleotide
guuucuaaaauaucacgua

SEQ ID NO: 938080 - RNA, 19 nt, Artificial Sequence
  Description of Artificial Sequence: Synthetic oligonucleotide
ucagacgagagacccuggc

SEQ ID NO: 938081 - RNA, 19 nt, Artificial Sequence
  Description of Artificial Sequence: Synthetic oligonucleotide
uccuauguacuggagcaag

SEQ ID NO: 938082 - RNA, 19 nt, Artificial Sequence
  Description of Artificial Sequence: Synthetic oligonucleotide
aacugguuuucaagcauag

SEQ ID NO: 938083 - RNA, 19 nt, Artificial Sequence
  Description of Artificial Sequence: Synthetic oligonucleotide
ucaccuagcaagacuuaac

SEQ ID NO: 938084 - RNA, 19 nt, Artificial Sequence
  Description of Artificial Sequence: Synthetic oligonucleotide
uuaggaaacuuuugugcau

SEQ ID NO: 938085 - RNA, 19 nt, Artificial Sequence
  Description of Artificial Sequence: Synthetic oligonucleotide
auaccauccauccuacuuu

SEQ ID NO: 938086 - RNA, 19 nt, Artificial Sequence
  Description of Artificial Sequence: Synthetic oligonucleotide
gggaacgggaacuuguucc

SEQ ID NO: 938087 - RNA, 19 nt, Artificial Sequence
  Description of Artificial Sequence: Synthetic oligonucleotide
caucuauacaguccaggug

SEQ ID NO: 938088 - RNA, 19 nt, Artificial Sequence
  Description of Artificial Sequence: Synthetic oligonucleotide
aagaccuaaggcaaugaau

SEQ ID NO: 938089 - RNA, 19 nt, Artificial Sequence
  Description of Artificial Sequence: Synthetic oligonucleotide
agaccuaaggcaaugaauu

SEQ ID NO: 938090 - RNA, 19 nt, Artificial Sequence
  Description of Artificial Sequence: Synthetic oligonucleotide
gcaugcacggcagaaaucg

SEQ ID NO: 938091 - RNA, 19 nt, Artificial Sequence
  Description of Artificial Sequence: Synthetic oligonucleotide
uucagaaguuuagagacuu

SEQ ID NO: 938092 - RNA, 19 nt, Artificial Sequence
  Description of Artificial Sequence: Synthetic oligonucleotide
guccccguaaacaaagucc

SEQ ID NO: 938093 - RNA, 19 nt, Artificial Sequence
  Description of Artificial Sequence: Synthetic oligonucleotide
cacgugaaggaucucauca

SEQ ID NO: 938094 - RNA, 19 nt, Artificial Sequence
  Description of Artificial Sequence: Synthetic oligonucleotide
uuuccccuaaguuucuaaa

SEQ ID NO: 938095 - RNA, 19 nt, Artificial Sequence
  Description of Artificial Sequence: Synthetic oligonucleotide
aucacacacucucggaucu

SEQ ID NO: 938096 - RNA, 19 nt, Artificial Sequence
  Description of Artificial Sequence: Synthetic oligonucleotide
gaucacacacucucggauc

SEQ ID NO: 938097 - RNA, 19 nt, Artificial Sequence
  Description of Artificial Sequence: Synthetic oligonucleotide
ugaggugugugcgugagau

SEQ ID NO: 938098 - RNA, 19 nt, Artificial Sequence
  Description of Artificial Sequence: Synthetic oligonucleotide
cuagcguugguuuccugac

SEQ ID NO: 938099 - RNA, 19 nt, Artificial Sequence
  Description of Artificial Sequence: Synthetic oligonucleotide
auuuugcuagcguugguuu

SEQ ID NO: 938100 - RNA, 19 nt, Artificial Sequence
  Description of Artificial Sequence: Synthetic oligonucleotide
uaccucuaacacuucagaa

SEQ ID NO: 938101 - RNA, 19 nt, Artificial Sequence
  Description of Artificial Sequence: Synthetic oligonucleotide
ugcuuacaagcuaggagaa

SEQ ID NO: 938102 - RNA, 19 nt, Artificial Sequence
  Description of Artificial Sequence: Synthetic oligonucleotide
acagacuagauguguuucu

SEQ ID NO: 938103 - RNA, 19 nt, Artificial Sequence
  Description of Artificial Sequence: Synthetic oligonucleotide
ugguuauacaaguccugcu

SEQ ID NO: 938104 - RNA, 19 nt, Artificial Sequence
  Description of Artificial Sequence: Synthetic oligonucleotide
cauugguaugugaaacaug

SEQ ID NO: 938105 - RNA, 19 nt, Artificial Sequence
  Description of Artificial Sequence: Synthetic oligonucleotide
agguguuggaugauagacg

SEQ ID NO: 938106 - RNA, 19 nt, Artificial Sequence
  Description of Artificial Sequence: Synthetic oligonucleotide
uuaauagaaaagggauagu

SEQ ID NO: 938107 - RNA, 19 nt, Artificial Sequence
  Description of Artificial Sequence: Synthetic oligonucleotide
ucgaauuggguccccguaa

SEQ ID NO: 938108 - RNA, 19 nt, Artificial Sequence
  Description of Artificial Sequence: Synthetic oligonucleotide
cacggcagaaaucgaauug

SEQ ID NO: 938109 - RNA, 19 nt, Artificial Sequence
  Description of Artificial Sequence: Synthetic oligonucleotide
aguugcuguaacacuuuac

SEQ ID NO: 938110 - RNA, 19 nt, Artificial Sequence
  Description of Artificial Sequence: Synthetic oligonucleotide
gaaggggauaucaaaucca

SEQ ID NO: 938111 - RNA, 19 nt, Artificial Sequence
  Description of Artificial Sequence: Synthetic oligonucleotide
aucaccuuuagaacagaag

SEQ ID NO: 938112 - RNA, 19 nt, Artificial Sequence
  Description of Artificial Sequence: Synthetic oligonucleotide
uuuugcuagcguugguuuc

SEQ ID NO: 938113 - RNA, 19 nt, Artificial Sequence
  Description of Artificial Sequence: Synthetic oligonucleotide
uuccccuaaguuucuaaaa

SEQ ID NO: 938114 - RNA, 19 nt, Artificial Sequence
  Description of Artificial Sequence: Synthetic oligonucleotide
caagacuuaacagacaccu

SEQ ID NO: 938115 - RNA, 19 nt, Artificial Sequence
  Description of Artificial Sequence: Synthetic oligonucleotide
cuaaucccuggcucuuugg

SEQ ID NO: 938116 - RNA, 19 nt, Artificial Sequence
  Description of Artificial Sequence: Synthetic oligonucleotide
aacacaugcuaaguggaua

SEQ ID NO: 938117 - RNA, 19 nt, Artificial Sequence
  Description of Artificial Sequence: Synthetic oligonucleotide
uuacauaagugugguggca

SEQ ID NO: 938118 - RNA, 19 nt, Artificial Sequence
  Description of Artificial Sequence: Synthetic oligonucleotide
cucgccaaagcuagcccgg

SEQ ID NO: 938119 - RNA, 19 nt, Artificial Sequence
  Description of Artificial Sequence: Synthetic oligonucleotide
aaggggauaucaaauccau

SEQ ID NO: 938120 - RNA, 19 nt, Artificial Sequence
  Description of Artificial Sequence: Synthetic oligonucleotide
ugugugcgugagaucuggg

SEQ ID NO: 938121 - RNA, 19 nt, Artificial Sequence
  Description of Artificial Sequence: Synthetic oligonucleotide
gccaaagcuagcccggucg

SEQ ID NO: 938122 - RNA, 19 nt, Artificial Sequence
  Description of Artificial Sequence: Synthetic oligonucleotide
ugcacggcagaaaucgaau

SEQ ID NO: 938123 - RNA, 19 nt, Artificial Sequence
  Description of Artificial Sequence: Synthetic oligonucleotide
uccuaaucuucaacacaca

SEQ ID NO: 938124 - RNA, 19 nt, Artificial Sequence
  Description of Artificial Sequence: Synthetic oligonucleotide
agacuagauguguuucugu

SEQ ID NO: 938125 - RNA, 19 nt, Artificial Sequence
  Description of Artificial Sequence: Synthetic oligonucleotide
ccuagcaagacuuaacaga

SEQ ID NO: 938126 - RNA, 19 nt, Artificial Sequence
  Description of Artificial Sequence: Synthetic oligonucleotide
aguuccccaucuuccgggg

SEQ ID NO: 938127 - RNA, 19 nt, Artificial Sequence
  Description of Artificial Sequence: Synthetic oligonucleotide
ugucauccgaggucgggga

SEQ ID NO: 938128 - RNA, 19 nt, Artificial Sequence
  Description of Artificial Sequence: Synthetic oligonucleotide
gagacuuggaguauucuua

SEQ ID NO: 938129 - RNA, 19 nt, Artificial Sequence
  Description of Artificial Sequence: Synthetic oligonucleotide
cuggcuagguguuggauga

SEQ ID NO: 938130 - RNA, 19 nt, Artificial Sequence
  Description of Artificial Sequence: Synthetic oligonucleotide
aacaagcuuacaacuacuu

SEQ ID NO: 938131 - RNA, 19 nt, Artificial Sequence
  Description of Artificial Sequence: Synthetic oligonucleotide
aggaucucaucaaccaguc

SEQ ID NO: 938132 - RNA, 19 nt, Artificial Sequence
  Description of Artificial Sequence: Synthetic oligonucleotide
augucauccgaggucgggg

SEQ ID NO: 938133 - RNA, 19 nt, Artificial Sequence
  Description of Artificial Sequence: Synthetic oligonucleotide
caacgauaauaauacacua

SEQ ID NO: 938134 - RNA, 19 nt, Artificial Sequence
  Description of Artificial Sequence: Synthetic oligonucleotide
uguuccugauauggcggcg

SEQ ID NO: 938135 - RNA, 19 nt, Artificial Sequence
  Description of Artificial Sequence: Synthetic oligonucleotide
gauagacgggaacgggaac

SEQ ID NO: 938136 - RNA, 19 nt, Artificial Sequence
  Description of Artificial Sequence: Synthetic oligonucleotide
caccuagcaagacuuaaca

SEQ ID NO: 938137 - RNA, 19 nt, Artificial Sequence
  Description of Artificial Sequence: Synthetic oligonucleotide
aaacugguuuucaagcaua

SEQ ID NO: 938138 - RNA, 19 nt, Artificial Sequence
  Description of Artificial Sequence: Synthetic oligonucleotide
agggauagugcaucucagu

SEQ ID NO: 938139 - RNA, 19 nt, Artificial Sequence
  Description of Artificial Sequence: Synthetic oligonucleotide
gucaaggcuuuacauaaaa

SEQ ID NO: 938140 - RNA, 19 nt, Artificial Sequence
  Description of Artificial Sequence: Synthetic oligonucleotide
guuccugauauggcggcgg

SEQ ID NO: 938141 - RNA, 19 nt, Artificial Sequence
  Description of Artificial Sequence: Synthetic oligonucleotide
uagugcaucucaguuugcu

SEQ ID NO: 938142 - RNA, 19 nt, Artificial Sequence
  Description of Artificial Sequence: Synthetic oligonucleotide
auaaacuccuuuaggcaga

SEQ ID NO: 938143 - RNA, 19 nt, Artificial Sequence
  Description of Artificial Sequence: Synthetic oligonucleotide
acuuuugugcaugaucuua

SEQ ID NO: 938144 - RNA, 19 nt, Artificial Sequence
  Description of Artificial Sequence: Synthetic oligonucleotide
cuguaacuccauaaccuca

SEQ ID NO: 938145 - RNA, 19 nt, Artificial Sequence
  Description of Artificial Sequence: Synthetic oligonucleotide
ccuaacugcaaacagaaua

SEQ ID NO: 938146 - RNA, 19 nt, Artificial Sequence
  Description of Artificial Sequence: Synthetic oligonucleotide
ugcuagccgagucuggcua

SEQ ID NO: 938147 - RNA, 19 nt, Artificial Sequence
  Description of Artificial Sequence: Synthetic oligonucleotide
gaguugcuagccgagucug

SEQ ID NO: 938148 - RNA, 19 nt, Artificial Sequence
  Description of Artificial Sequence: Synthetic oligonucleotide
uuccugauauggcggcggc

SEQ ID NO: 938149 - RNA, 19 nt, Artificial Sequence
  Description of Artificial Sequence: Synthetic oligonucleotide
guugcuagccgagucuggc

SEQ ID NO: 938150 - RNA, 19 nt, Artificial Sequence
  Description of Artificial Sequence: Synthetic oligonucleotide
gacgagagacccuggcuca

SEQ ID NO: 938151 - RNA, 19 nt, Artificial Sequence
  Description of Artificial Sequence: Synthetic oligonucleotide
aguuugcuuacaagcuagg

SEQ ID NO: 938152 - RNA, 19 nt, Artificial Sequence
  Description of Artificial Sequence: Synthetic oligonucleotide
aauuuggguggaagggaga

SEQ ID NO: 938153 - RNA, 19 nt, Artificial Sequence
  Description of Artificial Sequence: Synthetic oligonucleotide
augauagacgggaacggga

SEQ ID NO: 938154 - RNA, 19 nt, Artificial Sequence
  Description of Artificial Sequence: Synthetic oligonucleotide
ccuaaguuucuaaaauauc

SEQ ID NO: 938155 - RNA, 19 nt, Artificial Sequence
  Description of Artificial Sequence: Synthetic oligonucleotide
gugugugcgugagaucugg

SEQ ID NO: 938156 - RNA, 19 nt, Artificial Sequence
  Description of Artificial Sequence: Synthetic oligonucleotide
aagcuagcccggucggacu

SEQ ID NO: 938157 - RNA, 19 nt, Artificial Sequence
  Description of Artificial Sequence: Synthetic oligonucleotide
cagacuagauguguuucug

SEQ ID NO: 938158 - RNA, 19 nt, Artificial Sequence
  Description of Artificial Sequence: Synthetic oligonucleotide
agaugugcaugcacggcag

SEQ ID NO: 938159 - RNA, 19 nt, Artificial Sequence
  Description of Artificial Sequence: Synthetic oligonucleotide
ucggacugagacucgugaa

SEQ ID NO: 938160 - RNA, 19 nt, Artificial Sequence
  Description of Artificial Sequence: Synthetic oligonucleotide
agugcaucucaguuugcuu

SEQ ID NO: 938161 - RNA, 19 nt, Artificial Sequence
  Description of Artificial Sequence: Synthetic oligonucleotide
ugcaugcacggcagaaauc

SEQ ID NO: 938162 - RNA, 19 nt, Artificial Sequence
  Description of Artificial Sequence: Synthetic oligonucleotide
agccccaacgauaauaaua

SEQ ID NO: 938163 - RNA, 19 nt, Artificial Sequence
  Description of Artificial Sequence: Synthetic oligonucleotide
gucggacugagacucguga

SEQ ID NO: 938164 - RNA, 19 nt, Artificial Sequence
  Description of Artificial Sequence: Synthetic oligonucleotide
gacccuggcucaauuaguc

SEQ ID NO: 938165 - RNA, 19 nt, Artificial Sequence
  Description of Artificial Sequence: Synthetic oligonucleotide
gacuuggaguauucuuaca

SEQ ID NO: 938166 - RNA, 19 nt, Artificial Sequence
  Description of Artificial Sequence: Synthetic oligonucleotide
aucgaauuggguccccgua

SEQ ID NO: 938167 - RNA, 19 nt, Artificial Sequence
  Description of Artificial Sequence: Synthetic oligonucleotide
ccaguaacuuuucagaaaa

SEQ ID NO: 938168 - RNA, 19 nt, Artificial Sequence
  Description of Artificial Sequence: Synthetic oligonucleotide
auuagucucauaggaugaa

SEQ ID NO: 938169 - RNA, 19 nt, Artificial Sequence
  Description of Artificial Sequence: Synthetic oligonucleotide
gcuagguguuggaugauag

SEQ ID NO: 938170 - RNA, 19 nt, Artificial Sequence
  Description of Artificial Sequence: Synthetic oligonucleotide
ggauuugaggcaguucccc

SEQ ID NO: 938171 - RNA, 19 nt, Artificial Sequence
  Description of Artificial Sequence: Synthetic oligonucleotide
uccugauauggcggcggcg

SEQ ID NO: 938172 - RNA, 19 nt, Artificial Sequence
  Description of Artificial Sequence: Synthetic oligonucleotide
agcuagcccggucggacug

SEQ ID NO: 938173 - RNA, 19 nt, Artificial Sequence
  Description of Artificial Sequence: Synthetic oligonucleotide
ugugacccggucucccgca

SEQ ID NO: 938174 - RNA, 19 nt, Artificial Sequence
  Description of Artificial Sequence: Synthetic oligonucleotide
ccaucucuaccucuaacac

SEQ ID NO: 938175 - RNA, 19 nt, Artificial Sequence
  Description of Artificial Sequence: Synthetic oligonucleotide
ugcuaugguuccagacagu

SEQ ID NO: 938176 - RNA, 19 nt, Artificial Sequence
  Description of Artificial Sequence: Synthetic oligonucleotide
uugcuagccgagucuggcu

SEQ ID NO: 938177 - RNA, 19 nt, Artificial Sequence
  Description of Artificial Sequence: Synthetic oligonucleotide
auagugcaucucaguuugc

SEQ ID NO: 938178 - RNA, 19 nt, Artificial Sequence
  Description of Artificial Sequence: Synthetic oligonucleotide
aucauacagaucacacacu

SEQ ID NO: 938179 - RNA, 19 nt, Artificial Sequence
  Description of Artificial Sequence: Synthetic oligonucleotide
auccuacuuuccccuaagu

SEQ ID NO: 938180 - RNA, 19 nt, Artificial Sequence
  Description of Artificial Sequence: Synthetic oligonucleotide
ccucgccaaagcuagcccg

SEQ ID NO: 938181 - RNA, 19 nt, Artificial Sequence
  Description of Artificial Sequence: Synthetic oligonucleotide
gacucgugaagcagggaga

SEQ ID NO: 938182 - RNA, 19 nt, Artificial Sequence
  Description of Artificial Sequence: Synthetic oligonucleotide
ccaacgauaauaauacacu

SEQ ID NO: 938183 - RNA, 19 nt, Artificial Sequence
  Description of Artificial Sequence: Synthetic oligonucleotide
gcuagcguugguuuccuga

SEQ ID NO: 938184 - RNA, 19 nt, Artificial Sequence
  Description of Artificial Sequence: Synthetic oligonucleotide
ugauauggcggcggcggcu

SEQ ID NO: 938185 - RNA, 19 nt, Artificial Sequence
  Description of Artificial Sequence: Synthetic oligonucleotide
cucauaggaugaaagcagu

SEQ ID NO: 938186 - RNA, 19 nt, Artificial Sequence
  Description of Artificial Sequence: Synthetic oligonucleotide
acucgugaagcagggagau

SEQ ID NO: 938187 - RNA, 19 nt, Artificial Sequence
  Description of Artificial Sequence: Synthetic oligonucleotide
augguuccagacagugggg

SEQ ID NO: 938188 - RNA, 19 nt, Artificial Sequence
  Description of Artificial Sequence: Synthetic oligonucleotide
acccuggcucaauuagucu

SEQ ID NO: 938189 - RNA, 19 nt, Artificial Sequence
  Description of Artificial Sequence: Synthetic oligonucleotide
ucagucagcugaguugcua

SEQ ID NO: 938190 - RNA, 19 nt, Artificial Sequence
  Description of Artificial Sequence: Synthetic oligonucleotide
gauauggcggcggcggcuc

SEQ ID NO: 938191 - RNA, 19 nt, Artificial Sequence
  Description of Artificial Sequence: Synthetic oligonucleotide
aguugcuagccgagucugg

SEQ ID NO: 938192 - RNA, 19 nt, Artificial Sequence
  Description of Artificial Sequence: Synthetic oligonucleotide
cagaucacacacucucgga

SEQ ID NO: 938193 - RNA, 19 nt, Artificial Sequence
  Description of Artificial Sequence: Synthetic oligonucleotide
aagucagacgagagacccu

SEQ ID NO: 938194 - RNA, 19 nt, Artificial Sequence
  Description of Artificial Sequence: Synthetic oligonucleotide
aagacuuaacagacaccuu

SEQ ID NO: 938195 - RNA, 19 nt, Artificial Sequence
  Description of Artificial Sequence: Synthetic oligonucleotide
cugauauggcggcggcggc

SEQ ID NO: 938196 - RNA, 19 nt, Artificial Sequence
  Description of Artificial Sequence: Synthetic oligonucleotide
cugugacccggucucccgc

SEQ ID NO: 938197 - RNA, 19 nt, Artificial Sequence
  Description of Artificial Sequence: Synthetic oligonucleotide
uccguccccucgccaaagc

SEQ ID NO: 938198 - RNA, 19 nt, Artificial Sequence
  Description of Artificial Sequence: Synthetic oligonucleotide
agcauccuuuugcuauggu

SEQ ID NO: 938199 - RNA, 19 nt, Artificial Sequence
  Description of Artificial Sequence: Synthetic oligonucleotide
cuagccgagucuggcuagg

SEQ ID NO: 938200 - RNA, 19 nt, Artificial Sequence
  Description of Artificial Sequence: Synthetic oligonucleotide
aggccuauucuuugagcua

SEQ ID NO: 938201 - RNA, 19 nt, Artificial Sequence
  Description of Artificial Sequence: Synthetic oligonucleotide
gguccccguaaacaaaguc

SEQ ID NO: 938202 - RNA, 19 nt, Artificial Sequence
  Description of Artificial Sequence: Synthetic oligonucleotide
aagggagaagaaacuuauu

SEQ ID NO: 938203 - RNA, 19 nt, Artificial Sequence
  Description of Artificial Sequence: Synthetic oligonucleotide
caguggggaaagaggucac

SEQ ID NO: 938204 - RNA, 19 nt, Artificial Sequence
  Description of Artificial Sequence: Synthetic oligonucleotide
ggaguauucuuacauuaau

SEQ ID NO: 938205 - RNA, 19 nt, Artificial Sequence
  Description of Artificial Sequence: Synthetic oligonucleotide
ccaaagcuagcccggucgg

SEQ ID NO: 938206 - RNA, 19 nt, Artificial Sequence
  Description of Artificial Sequence: Synthetic oligonucleotide
gcuauucuaauuuguuccu

SEQ ID NO: 938207 - RNA, 19 nt, Artificial Sequence
  Description of Artificial Sequence: Synthetic oligonucleotide
cuucagaaguuuagagacu

SEQ ID NO: 938208 - RNA, 19 nt, Artificial Sequence
  Description of Artificial Sequence: Synthetic oligonucleotide
caacuugacuuucaauuau

SEQ ID NO: 938209 - RNA, 19 nt, Artificial Sequence
  Description of Artificial Sequence: Synthetic oligonucleotide
gucaccuagcaagacuuaa

SEQ ID NO: 938210 - RNA, 19 nt, Artificial Sequence
  Description of Artificial Sequence: Synthetic oligonucleotide
augugcaugcacggcagaa

SEQ ID NO: 938211 - RNA, 19 nt, Artificial Sequence
  Description of Artificial Sequence: Synthetic oligonucleotide
agacccuggcucaauuagu

SEQ ID NO: 938212 - RNA, 19 nt, Artificial Sequence
  Description of Artificial Sequence: Synthetic oligonucleotide
gccaguaacuuuucagaaa

SEQ ID NO: 938213 - RNA, 19 nt, Artificial Sequence
  Description of Artificial Sequence: Synthetic oligonucleotide
gcaagacuuaacagacacc

SEQ ID NO: 938214 - RNA, 19 nt, Artificial Sequence
  Description of Artificial Sequence: Synthetic oligonucleotide
uccauccuacuuuccccua

SEQ ID NO: 938215 - RNA, 19 nt, Artificial Sequence
  Description of Artificial Sequence: Synthetic oligonucleotide
ccuacuuuccccuaaguuu

SEQ ID NO: 938216 - RNA, 19 nt, Artificial Sequence
  Description of Artificial Sequence: Synthetic oligonucleotide
cacugggucaaggcuuuac

SEQ ID NO: 938217 - RNA, 19 nt, Artificial Sequence
  Description of Artificial Sequence: Synthetic oligonucleotide
augcacggcagaaaucgaa

SEQ ID NO: 938218 - RNA, 19 nt, Artificial Sequence
  Description of Artificial Sequence: Synthetic oligonucleotide
gcucaauaaaucagaaaua

SEQ ID NO: 938219 - RNA, 19 nt, Artificial Sequence
  Description of Artificial Sequence: Synthetic oligonucleotide
uagacgggaacgggaacuu

SEQ ID NO: 938220 - RNA, 19 nt, Artificial Sequence
  Description of Artificial Sequence: Synthetic oligonucleotide
gucagucaccuagcaagac

SEQ ID NO: 938221 - RNA, 19 nt, Artificial Sequence
  Description of Artificial Sequence: Synthetic oligonucleotide
gcuagccgagucuggcuag

SEQ ID NO: 938222 - RNA, 19 nt, Artificial Sequence
  Description of Artificial Sequence: Synthetic oligonucleotide
cgugaaggaucucaucaac

SEQ ID NO: 938223 - RNA, 19 nt, Artificial Sequence
  Description of Artificial Sequence: Synthetic oligonucleotide
ggucggggauuugaggcag

SEQ ID NO: 938224 - RNA, 19 nt, Artificial Sequence
  Description of Artificial Sequence: Synthetic oligonucleotide
uccggggcugaggugugug

SEQ ID NO: 938225 - RNA, 19 nt, Artificial Sequence
  Description of Artificial Sequence: Synthetic oligonucleotide
cccguaaacaaaguccauc

SEQ ID NO: 938226 - RNA, 19 nt, Artificial Sequence
  Description of Artificial Sequence: Synthetic oligonucleotide
caugcacggcagaaaucga

SEQ ID NO: 938227 - RNA, 19 nt, Artificial Sequence
  Description of Artificial Sequence: Synthetic oligonucleotide
uugcuagcguugguuuccu

SEQ ID NO: 938228 - RNA, 19 nt, Artificial Sequence
  Description of Artificial Sequence: Synthetic oligonucleotide
uuccuaaucccuggcucuu

SEQ ID NO: 938229 - RNA, 19 nt, Artificial Sequence
  Description of Artificial Sequence: Synthetic oligonucleotide
gggauagugcaucucaguu

SEQ ID NO: 938230 - RNA, 19 nt, Artificial Sequence
  Description of Artificial Sequence: Synthetic oligonucleotide
agacgggaacgggaacuug

SEQ ID NO: 938231 - RNA, 19 nt, Artificial Sequence
  Description of Artificial Sequence: Synthetic oligonucleotide
ggaacgggaacuuguuccu

SEQ ID NO: 938232 - RNA, 19 nt, Artificial Sequence
  Description of Artificial Sequence: Synthetic oligonucleotide
ggauagugcaucucaguuu

SEQ ID NO: 938233 - RNA, 19 nt, Artificial Sequence
  Description of Artificial Sequence: Synthetic oligonucleotide
cgaggucggggauuugagg

SEQ ID NO: 938234 - RNA, 19 nt, Artificial Sequence
  Description of Artificial Sequence: Synthetic oligonucleotide
uggcucaauuagucucaua

SEQ ID NO: 938235 - RNA, 19 nt, Artificial Sequence
  Description of Artificial Sequence: Synthetic oligonucleotide
ucgccaaagcuagcccggu

SEQ ID NO: 938236 - RNA, 19 nt, Artificial Sequence
  Description of Artificial Sequence: Synthetic oligonucleotide
ucggggauuugaggcaguu

SEQ ID NO: 938237 - RNA, 19 nt, Artificial Sequence
  Description of Artificial Sequence: Synthetic oligonucleotide
ccgaggucggggauuugag

SEQ ID NO: 938238 - RNA, 19 nt, Artificial Sequence
  Description of Artificial Sequence: Synthetic oligonucleotide
ccagccccaacgauaauaa

SEQ ID NO: 938239 - RNA, 19 nt, Artificial Sequence
  Description of Artificial Sequence: Synthetic oligonucleotide
cuagcccggucggacugag

SEQ ID NO: 938240 - RNA, 19 nt, Artificial Sequence
  Description of Artificial Sequence: Synthetic oligonucleotide
gcuaaguggauaaaacauu

SEQ ID NO: 938241 - RNA, 19 nt, Artificial Sequence
  Description of Artificial Sequence: Synthetic oligonucleotide
cccggucggacugagacuc

SEQ ID NO: 938242 - RNA, 19 nt, Artificial Sequence
  Description of Artificial Sequence: Synthetic oligonucleotide
caugcaggaggggcacgug

SEQ ID NO: 938243 - RNA, 19 nt, Artificial Sequence
  Description of Artificial Sequence: Synthetic oligonucleotide
cacuuacaacagguuauaa

SEQ ID NO: 938244 - RNA, 19 nt, Artificial Sequence
  Description of Artificial Sequence: Synthetic oligonucleotide
uagccgagucuggcuaggu

SEQ ID NO: 938245 - RNA, 19 nt, Artificial Sequence
  Description of Artificial Sequence: Synthetic oligonucleotide
gcacgugaaggaucucauc

SEQ ID NO: 938246 - RNA, 19 nt, Artificial Sequence
  Description of Artificial Sequence: Synthetic oligonucleotide
gcauugguaugugaaacau

SEQ ID NO: 938247 - RNA, 19 nt, Artificial Sequence
  Description of Artificial Sequence: Synthetic oligonucleotide
caaagcuagcccggucgga

SEQ ID NO: 938248 - RNA, 19 nt, Artificial Sequence
  Description of Artificial Sequence: Synthetic oligonucleotide
uagcccggucggacugaga

SEQ ID NO: 938249 - RNA, 19 nt, Artificial Sequence
  Description of Artificial Sequence: Synthetic oligonucleotide
ggugugugcgugagaucug

SEQ ID NO: 938250 - RNA, 19 nt, Artificial Sequence
  Description of Artificial Sequence: Synthetic oligonucleotide
acgggaacgggaacuuguu

SEQ ID NO: 938251 - RNA, 19 nt, Artificial Sequence
  Description of Artificial Sequence: Synthetic oligonucleotide
cacguacuuuccucaacau

SEQ ID NO: 938252 - RNA, 19 nt, Artificial Sequence
  Description of Artificial Sequence: Synthetic oligonucleotide
ggccuauucuuugagcuau

SEQ ID NO: 938253 - RNA, 19 nt, Artificial Sequence
  Description of Artificial Sequence: Synthetic oligonucleotide
gcacuuacaacagguuaua

SEQ ID NO: 938254 - RNA, 19 nt, Artificial Sequence
  Description of Artificial Sequence: Synthetic oligonucleotide
cuauacaguccaggugaua

SEQ ID NO: 938255 - RNA, 19 nt, Artificial Sequence
  Description of Artificial Sequence: Synthetic oligonucleotide
cuuugggcucagugacaaa

SEQ ID NO: 938256 - RNA, 19 nt, Artificial Sequence
  Description of Artificial Sequence: Synthetic oligonucleotide
ggucggacugagacucgug

SEQ ID NO: 938257 - RNA, 19 nt, Artificial Sequence
  Description of Artificial Sequence: Synthetic oligonucleotide
ccuuugagaucacaacuau

SEQ ID NO: 938258 - RNA, 19 nt, Artificial Sequence
  Description of Artificial Sequence: Synthetic oligonucleotide
gggcucagugacaaaagau

SEQ ID NO: 938259 - RNA, 19 nt, Artificial Sequence
  Description of Artificial Sequence: Synthetic oligonucleotide
cgauaauaauacacuauuu

SEQ ID NO: 938260 - RNA, 19 nt, Artificial Sequence
  Description of Artificial Sequence: Synthetic oligonucleotide
uuccggggcugaggugugu

SEQ ID NO: 938261 - RNA, 19 nt, Artificial Sequence
  Description of Artificial Sequence: Synthetic oligonucleotide
gcguugguuuccugacaca

SEQ ID NO: 938262 - RNA, 19 nt, Artificial Sequence
  Description of Artificial Sequence: Synthetic oligonucleotide
ggucaaggcuuuacauaaa

SEQ ID NO: 938263 - RNA, 19 nt, Artificial Sequence
  Description of Artificial Sequence: Synthetic oligonucleotide
ccauccuacuuuccccuaa

SEQ ID NO: 938264 - RNA, 19 nt, Artificial Sequence
  Description of Artificial Sequence: Synthetic oligonucleotide
ccggucggacugagacucg

SEQ ID NO: 938265 - RNA, 19 nt, Artificial Sequence
  Description of Artificial Sequence: Synthetic oligonucleotide
gcacggcagaaaucgaauu

SEQ ID NO: 938266 - RNA, 19 nt, Artificial Sequence
  Description of Artificial Sequence: Synthetic oligonucleotide
agccagccccaacgauaau

SEQ ID NO: 938267 - RNA, 19 nt, Artificial Sequence
  Description of Artificial Sequence: Synthetic oligonucleotide
cgaauuggguccccguaaa

SEQ ID NO: 938268 - RNA, 19 nt, Artificial Sequence
  Description of Artificial Sequence: Synthetic oligonucleotide
cgggaacgggaacuuguuc

SEQ ID NO: 938269 - RNA, 19 nt, Artificial Sequence
  Description of Artificial Sequence: Synthetic oligonucleotide
auccgaggucggggauuug

SEQ ID NO: 938270 - RNA, 19 nt, Artificial Sequence
  Description of Artificial Sequence: Synthetic oligonucleotide
ccaggugauagaugugcau

SEQ ID NO: 938271 - RNA, 19 nt, Artificial Sequence
  Description of Artificial Sequence: Synthetic oligonucleotide
cauccgaggucggggauuu

SEQ ID NO: 938272 - RNA, 19 nt, Artificial Sequence
  Description of Artificial Sequence: Synthetic oligonucleotide
cagccccaacgauaauaau

SEQ ID NO: 938273 - RNA, 19 nt, Artificial Sequence
  Description of Artificial Sequence: Synthetic oligonucleotide
cuggcucaauuagucucau

SEQ ID NO: 938274 - RNA, 19 nt, Artificial Sequence
  Description of Artificial Sequence: Synthetic oligonucleotide
gcuagcccggucggacuga

SEQ ID NO: 938275 - RNA, 19 nt, Artificial Sequence
  Description of Artificial Sequence: Synthetic oligonucleotide
gucggggauuugaggcagu

SEQ ID NO: 938276 - RNA, 19 nt, Artificial Sequence
  Description of Artificial Sequence: Synthetic oligonucleotide
cggggauuugaggcaguuc

SEQ ID NO: 938277 - RNA, 19 nt, Artificial Sequence
  Description of Artificial Sequence: Synthetic oligonucleotide
gcccggucggacugagacu

SEQ ID NO: 938278 - RNA, 19 nt, Artificial Sequence
  Description of Artificial Sequence: Synthetic oligonucleotide
ccguccccucgccaaagcu

SEQ ID NO: 938279 - RNA, 19 nt, Artificial Sequence
  Description of Artificial Sequence: Synthetic oligonucleotide
ccccguaaacaaaguccau

SEQ ID NO: 938280 - RNA, 19 nt, Artificial Sequence
  Description of Artificial Sequence: Synthetic oligonucleotide
gccuauucuuugagcuauu

SEQ ID NO: 938281 - RNA, 19 nt, Artificial Sequence
  Description of Artificial Sequence: Synthetic oligonucleotide
aaugcugucaccuuugcuc

SEQ ID NO: 938282 - RNA, 19 nt, Artificial Sequence
  Description of Artificial Sequence: Synthetic oligonucleotide
uuuaaacucaaacaagagg

SEQ ID NO: 938283 - RNA, 19 nt, Artificial Sequence
  Description of Artificial Sequence: Synthetic oligonucleotide
auagggaucaagccgaccc

SEQ ID NO: 938284 - RNA, 19 nt, Artificial Sequence
  Description of Artificial Sequence: Synthetic oligonucleotide
uguaugaggcacuucaacg

SEQ ID NO: 938285 - RNA, 19 nt, Artificial Sequence
  Description of Artificial Sequence: Synthetic oligonucleotide
aagcauagggaucaagccg

SEQ ID NO: 938286 - RNA, 19 nt, Artificial Sequence
  Description of Artificial Sequence: Synthetic oligonucleotide
gaugaauagguuccgaagc

SEQ ID NO: 938287 - RNA, 19 nt, Artificial Sequence
  Description of Artificial Sequence: Synthetic oligonucleotide
ucugacaacuucccuaugg

SEQ ID NO: 938288 - RNA, 19 nt, Artificial Sequence
  Description of Artificial Sequence: Synthetic oligonucleotide
aaccccauggaccuuacuc

SEQ ID NO: 938289 - RNA, 19 nt, Artificial Sequence
  Description of Artificial Sequence: Synthetic oligonucleotide
gaaauugaggggcucaucc

SEQ ID NO: 938290 - RNA, 19 nt, Artificial Sequence
  Description of Artificial Sequence: Synthetic oligonucleotide
gauuugaccacaucacggg

SEQ ID NO: 938291 - RNA, 19 nt, Artificial Sequence
  Description of Artificial Sequence: Synthetic oligonucleotide
uuuucuucgaaguuugugu

SEQ ID NO: 938292 - RNA, 19 nt, Artificial Sequence
  Description of Artificial Sequence: Synthetic oligonucleotide
ugugguauucugcaggcag

SEQ ID NO: 938293 - RNA, 19 nt, Artificial Sequence
  Description of Artificial Sequence: Synthetic oligonucleotide
ucaccuuugcucuggaugg

SEQ ID NO: 938294 - RNA, 19 nt, Artificial Sequence
  Description of Artificial Sequence: Synthetic oligonucleotide
uuuccaacacagcacggcg

SEQ ID NO: 938295 - RNA, 19 nt, Artificial Sequence
  Description of Artificial Sequence: Synthetic oligonucleotide
uuacucucaagguagggcc

SEQ ID NO: 938296 - RNA, 19 nt, Artificial Sequence
  Description of Artificial Sequence: Synthetic oligonucleotide
aaguuuguguccccgcugg

SEQ ID NO: 938297 - RNA, 19 nt, Artificial Sequence
  Description of Artificial Sequence: Synthetic oligonucleotide
ugagacucgguuaugguga

SEQ ID NO: 938298 - RNA, 19 nt, Artificial Sequence
  Description of Artificial Sequence: Synthetic oligonucleotide
auagaugaggacaagacug

SEQ ID NO: 938299 - RNA, 19 nt, Artificial Sequence
  Description of Artificial Sequence: Synthetic oligonucleotide
ugcggauuugaccacauca

SEQ ID NO: 938300 - RNA, 19 nt, Artificial Sequence
  Description of Artificial Sequence: Synthetic oligonucleotide
ugaugaauagguuccgaag

SEQ ID NO: 938301 - RNA, 19 nt, Artificial Sequence
  Description of Artificial Sequence: Synthetic oligonucleotide
uuucacuagaccuuugaac

SEQ ID NO: 938302 - RNA, 19 nt, Artificial Sequence
  Description of Artificial Sequence: Synthetic oligonucleotide
guaugaggcacuucaacgg

SEQ ID NO: 938303 - RNA, 19 nt, Artificial Sequence
  Description of Artificial Sequence: Synthetic oligonucleotide
aaaacggucggcagggccc

SEQ ID NO: 938304 - RNA, 19 nt, Artificial Sequence
  Description of Artificial Sequence: Synthetic oligonucleotide
uacagcuuacugauggcgg

SEQ ID NO: 938305 - RNA, 19 nt, Artificial Sequence
  Description of Artificial Sequence: Synthetic oligonucleotide
agguccaggacagacaacc

SEQ ID NO: 938306 - RNA, 19 nt, Artificial Sequence
  Description of Artificial Sequence: Synthetic oligonucleotide
uccaaugggucaaucaucu

SEQ ID NO: 938307 - RNA, 19 nt, Artificial Sequence
  Description of Artificial Sequence: Synthetic oligonucleotide
gguaaccgcacccagaagg

SEQ ID NO: 938308 - RNA, 19 nt, Artificial Sequence
  Description of Artificial Sequence: Synthetic oligonucleotide
uugaagagggauuggcagg

SEQ ID NO: 938309 - RNA, 19 nt, Artificial Sequence
  Description of Artificial Sequence: Synthetic oligonucleotide
agguuccgaagcuucaugc

SEQ ID NO: 938310 - RNA, 19 nt, Artificial Sequence
  Description of Artificial Sequence: Synthetic oligonucleotide
uggccuuguacucagcucc

SEQ ID NO: 938311 - RNA, 19 nt, Artificial Sequence
  Description of Artificial Sequence: Synthetic oligonucleotide
auguguaugaggcacuuca

SEQ ID NO: 938312 - RNA, 19 nt, Artificial Sequence
  Description of Artificial Sequence: Synthetic oligonucleotide
agugcguagggccuggcac

SEQ ID NO: 938313 - RNA, 19 nt, Artificial Sequence
  Description of Artificial Sequence: Synthetic oligonucleotide
aaagcggcucacuucagca

SEQ ID NO: 938314 - RNA, 19 nt, Artificial Sequence
  Description of Artificial Sequence: Synthetic oligonucleotide
ugucuugucagcuuccgcu

SEQ ID NO: 938315 - RNA, 19 nt, Artificial Sequence
  Description of Artificial Sequence: Synthetic oligonucleotide
ucagcuuuccggauguuga

SEQ ID NO: 938316 - RNA, 19 nt, Artificial Sequence
  Description of Artificial Sequence: Synthetic oligonucleotide
gauguaagcauagggauca

SEQ ID NO: 938317 - RNA, 19 nt, Artificial Sequence
  Description of Artificial Sequence: Synthetic oligonucleotide
uuugugguauucugcaggc

SEQ ID NO: 938318 - RNA, 19 nt, Artificial Sequence
  Description of Artificial Sequence: Synthetic oligonucleotide
aacugagacucgguuaugg

SEQ ID NO: 938319 - RNA, 19 nt, Artificial Sequence
  Description of Artificial Sequence: Synthetic oligonucleotide
guaagcauagggaucaagc

SEQ ID NO: 938320 - RNA, 19 nt, Artificial Sequence
  Description of Artificial Sequence: Synthetic oligonucleotide
ugcgccacguccaugacca

SEQ ID NO: 938321 - RNA, 19 nt, Artificial Sequence
  Description of Artificial Sequence: Synthetic oligonucleotide
cuuugcacaaaacggucgg

SEQ ID NO: 938322 - RNA, 19 nt, Artificial Sequence
  Description of Artificial Sequence: Synthetic oligonucleotide
agcccuuuaaacucaaaca

SEQ ID NO: 938323 - RNA, 19 nt, Artificial Sequence
  Description of Artificial Sequence: Synthetic oligonucleotide
cuugcuucggccucuuucc

SEQ ID NO: 938324 - RNA, 19 nt, Artificial Sequence
  Description of Artificial Sequence: Synthetic oligonucleotide
aaacuugcggaugaacuug

SEQ ID NO: 938325 - RNA, 19 nt, Artificial Sequence
  Description of Artificial Sequence: Synthetic oligonucleotide
ugcgguugagcuugguucg

SEQ ID NO: 938326 - RNA, 19 nt, Artificial Sequence
  Description of Artificial Sequence: Synthetic oligonucleotide
uucaucugcgugaggagcc

SEQ ID NO: 938327 - RNA, 19 nt, Artificial Sequence
  Description of Artificial Sequence: Synthetic oligonucleotide
gaccuuacucucaagguag

SEQ ID NO: 938328 - RNA, 19 nt, Artificial Sequence
  Description of Artificial Sequence: Synthetic oligonucleotide
gaugguagaguacagcuua

SEQ ID NO: 938329 - RNA, 19 nt, Artificial Sequence
  Description of Artificial Sequence: Synthetic oligonucleotide
aagccgacccuucuucuuc

SEQ ID NO: 938330 - RNA, 19 nt, Artificial Sequence
  Description of Artificial Sequence: Synthetic oligonucleotide
guuccgaagcuucaugcgg

SEQ ID NO: 938331 - RNA, 19 nt, Artificial Sequence
  Description of Artificial Sequence: Synthetic oligonucleotide
agcaaagcggcucacuuca

SEQ ID NO: 938332 - RNA, 19 nt, Artificial Sequence
  Description of Artificial Sequence: Synthetic oligonucleotide
guagaguacagcuuacuga

SEQ ID NO: 938333 - RNA, 19 nt, Artificial Sequence
  Description of Artificial Sequence: Synthetic oligonucleotide
gucaccuuugcucuggaug

SEQ ID NO: 938334 - RNA, 19 nt, Artificial Sequence
  Description of Artificial Sequence: Synthetic oligonucleotide
aacaagaggugggucagag

SEQ ID NO: 938335 - RNA, 19 nt, Artificial Sequence
  Description of Artificial Sequence: Synthetic oligonucleotide
aacccaaacuugcggauga

SEQ ID NO: 938336 - RNA, 19 nt, Artificial Sequence
  Description of Artificial Sequence: Synthetic oligonucleotide
ucgcccuuugcuuucuugg

SEQ ID NO: 938337 - RNA, 19 nt, Artificial Sequence
  Description of Artificial Sequence: Synthetic oligonucleotide
ucuucgaaguuuguguccc

SEQ ID NO: 938338 - RNA, 19 nt, Artificial Sequence
  Description of Artificial Sequence: Synthetic oligonucleotide
uuucuucgaaguuuguguc

SEQ ID NO: 938339 - RNA, 19 nt, Artificial Sequence
  Description of Artificial Sequence: Synthetic oligonucleotide
uuuaaccaugcccggcucc

SEQ ID NO: 938340 - RNA, 19 nt, Artificial Sequence
  Description of Artificial Sequence: Synthetic oligonucleotide
guaaauuuugaugguuucc

SEQ ID NO: 938341 - RNA, 19 nt, Artificial Sequence
  Description of Artificial Sequence: Synthetic oligonucleotide
uacucucaagguagggccg

SEQ ID NO: 938342 - RNA, 19 nt, Artificial Sequence
  Description of Artificial Sequence: Synthetic oligonucleotide
uugaugaauagguuccgaa

SEQ ID NO: 938343 - RNA, 19 nt, Artificial Sequence
  Description of Artificial Sequence: Synthetic oligonucleotide
aacggggccuuuucgcagg

SEQ ID NO: 938344 - RNA, 19 nt, Artificial Sequence
  Description of Artificial Sequence: Synthetic oligonucleotide
uucuucgaaguuugugucc

SEQ ID NO: 938345 - RNA, 19 nt, Artificial Sequence
  Description of Artificial Sequence: Synthetic oligonucleotide
ucuuccaaauggcuuugca

SEQ ID NO: 938346 - RNA, 19 nt, Artificial Sequence
  Description of Artificial Sequence: Synthetic oligonucleotide
uugagugggauguaagcau

SEQ ID NO: 938347 - RNA, 19 nt, Artificial Sequence
  Description of Artificial Sequence: Synthetic oligonucleotide
ugagguaaauuuugauggu

SEQ ID NO: 938348 - RNA, 19 nt, Artificial Sequence
  Description of Artificial Sequence: Synthetic oligonucleotide
gaucagccggccaucagcg

SEQ ID NO: 938349 - RNA, 19 nt, Artificial Sequence
  Description of Artificial Sequence: Synthetic oligonucleotide
cugacaacuucccuauggc

SEQ ID NO: 938350 - RNA, 19 nt, Artificial Sequence
  Description of Artificial Sequence: Synthetic oligonucleotide
ucccguaugaucagccggc

SEQ ID NO: 938351 - RNA, 19 nt, Artificial Sequence
  Description of Artificial Sequence: Synthetic oligonucleotide
guuauggugagguaaauuu

SEQ ID NO: 938352 - RNA, 19 nt, Artificial Sequence
  Description of Artificial Sequence: Synthetic oligonucleotide
ggauuugaccacaucacgg

SEQ ID NO: 938353 - RNA, 19 nt, Artificial Sequence
  Description of Artificial Sequence: Synthetic oligonucleotide
cugagacucgguuauggug

SEQ ID NO: 938354 - RNA, 19 nt, Artificial Sequence
  Description of Artificial Sequence: Synthetic oligonucleotide
augcuuggcaagaugcgcc

SEQ ID NO: 938355 - RNA, 19 nt, Artificial Sequence
  Description of Artificial Sequence: Synthetic oligonucleotide
ucacuagaccuuugaacug

SEQ ID NO: 938356 - RNA, 19 nt, Artificial Sequence
  Description of Artificial Sequence: Synthetic oligonucleotide
uuccgaagcuucaugcgga

SEQ ID NO: 938357 - RNA, 19 nt, Artificial Sequence
  Description of Artificial Sequence: Synthetic oligonucleotide
guaggccuucuucugaacc

SEQ ID NO: 938358 - RNA, 19 nt, Artificial Sequence
  Description of Artificial Sequence: Synthetic oligonucleotide
gugaugagagugcguaggg

SEQ ID NO: 938359 - RNA, 19 nt, Artificial Sequence
  Description of Artificial Sequence: Synthetic oligonucleotide
ggcgauggauaccagagcc

SEQ ID NO: 938360 - RNA, 19 nt, Artificial Sequence
  Description of Artificial Sequence: Synthetic oligonucleotide
uuccaaugggucaaucauc

SEQ ID NO: 938361 - RNA, 19 nt, Artificial Sequence
  Description of Artificial Sequence: Synthetic oligonucleotide
uuuucgcaggcgaggaugu

SEQ ID NO: 938362 - RNA, 19 nt, Artificial Sequence
  Description of Artificial Sequence: Synthetic oligonucleotide
cagcccuuuaaacucaaac

SEQ ID NO: 938363 - RNA, 19 nt, Artificial Sequence
  Description of Artificial Sequence: Synthetic oligonucleotide
aauguguaugaggcacuuc

SEQ ID NO: 938364 - RNA, 19 nt, Artificial Sequence
  Description of Artificial Sequence: Synthetic oligonucleotide
ugugguaaccgcacccaga

SEQ ID NO: 938365 - RNA, 19 nt, Artificial Sequence
  Description of Artificial Sequence: Synthetic oligonucleotide
agugccgucgcaugucauc

SEQ ID NO: 938366 - RNA, 19 nt, Artificial Sequence
  Description of Artificial Sequence: Synthetic oligonucleotide
gaaguuuguguccccgcug

SEQ ID NO: 938367 - RNA, 19 nt, Artificial Sequence
  Description of Artificial Sequence: Synthetic oligonucleotide
ugacaacuucccuauggcu

SEQ ID NO: 938368 - RNA, 19 nt, Artificial Sequence
  Description of Artificial Sequence: Synthetic oligonucleotide
gguggcaaggacucgcugg

SEQ ID NO: 938369 - RNA, 19 nt, Artificial Sequence
  Description of Artificial Sequence: Synthetic oligonucleotide
ugcuucgcagcccuuggug

SEQ ID NO: 938370 - RNA, 19 nt, Artificial Sequence
  Description of Artificial Sequence: Synthetic oligonucleotide
gaggacaagacugacaccu

SEQ ID NO: 938371 - RNA, 19 nt, Artificial Sequence
  Description of Artificial Sequence: Synthetic oligonucleotide
ucaacggggccuuuucgca

SEQ ID NO: 938372 - RNA, 19 nt, Artificial Sequence
  Description of Artificial Sequence: Synthetic oligonucleotide
gguagaguacagcuuacug

SEQ ID NO: 938373 - RNA, 19 nt, Artificial Sequence
  Description of Artificial Sequence: Synthetic oligonucleotide
uguaagcauagggaucaag

SEQ ID NO: 938374 - RNA, 19 nt, Artificial Sequence
  Description of Artificial Sequence: Synthetic oligonucleotide
cucacugugguaaccgcac

SEQ ID NO: 938375 - RNA, 19 nt, Artificial Sequence
  Description of Artificial Sequence: Synthetic oligonucleotide
cagugagucuagcagaguc

SEQ ID NO: 938376 - RNA, 19 nt, Artificial Sequence
  Description of Artificial Sequence: Synthetic oligonucleotide
uuuucacaauguguaugag

SEQ ID NO: 938377 - RNA, 19 nt, Artificial Sequence
  Description of Artificial Sequence: Synthetic oligonucleotide
cucccguaugaucagccgg

SEQ ID NO: 938378 - RNA, 19 nt, Artificial Sequence
  Description of Artificial Sequence: Synthetic oligonucleotide
ucgguuauggugagguaaa

SEQ ID NO: 938379 - RNA, 19 nt, Artificial Sequence
  Description of Artificial Sequence: Synthetic oligonucleotide
guauucugcaggcagcaga

SEQ ID NO: 938380 - RNA, 19 nt, Artificial Sequence
  Description of Artificial Sequence: Synthetic oligonucleotide
uugaacugucccuguagcu

SEQ ID NO: 938381 - RNA, 19 nt, Artificial Sequence
  Description of Artificial Sequence: Synthetic oligonucleotide
agcauagggaucaagccga

SEQ ID NO: 938382 - RNA, 19 nt, Artificial Sequence
  Description of Artificial Sequence: Synthetic oligonucleotide
auuugaccacaucacgggu

SEQ ID NO: 938383 - RNA, 19 nt, Artificial Sequence
  Description of Artificial Sequence: Synthetic oligonucleotide
uucacaucgcccuuugcuu

SEQ ID NO: 938384 - RNA, 19 nt, Artificial Sequence
  Description of Artificial Sequence: Synthetic oligonucleotide
gaauagguuccgaagcuuc

SEQ ID NO: 938385 - RNA, 19 nt, Artificial Sequence
  Description of Artificial Sequence: Synthetic oligonucleotide
acagacaaccuggugaagu

SEQ ID NO: 938386 - RNA, 19 nt, Artificial Sequence
  Description of Artificial Sequence: Synthetic oligonucleotide
ucaugcggaagugccgucg

SEQ ID NO: 938387 - RNA, 19 nt, Artificial Sequence
  Description of Artificial Sequence: Synthetic oligonucleotide
accccauggaccuuacucu

SEQ ID NO: 938388 - RNA, 19 nt, Artificial Sequence
  Description of Artificial Sequence: Synthetic oligonucleotide
caaaacggucggcagggcc

SEQ ID NO: 938389 - RNA, 19 nt, Artificial Sequence
  Description of Artificial Sequence: Synthetic oligonucleotide
gaagccguucaccaacuga

SEQ ID NO: 938390 - RNA, 19 nt, Artificial Sequence
  Description of Artificial Sequence: Synthetic oligonucleotide
auagugcuuguccccauca

SEQ ID NO: 938391 - RNA, 19 nt, Artificial Sequence
  Description of Artificial Sequence: Synthetic oligonucleotide
cuuuucgcaggcgaggaug

SEQ ID NO: 938392 - RNA, 19 nt, Artificial Sequence
  Description of Artificial Sequence: Synthetic oligonucleotide
acuugaugaauagguuccg

SEQ ID NO: 938393 - RNA, 19 nt, Artificial Sequence
  Description of Artificial Sequence: Synthetic oligonucleotide
ccagguguagcuuucuugc

SEQ ID NO: 938394 - RNA, 19 nt, Artificial Sequence
  Description of Artificial Sequence: Synthetic oligonucleotide
ugaugaagcccagugcgga

SEQ ID NO: 938395 - RNA, 19 nt, Artificial Sequence
  Description of Artificial Sequence: Synthetic oligonucleotide
uguguaugaggcacuucaa

SEQ ID NO: 938396 - RNA, 19 nt, Artificial Sequence
  Description of Artificial Sequence: Synthetic oligonucleotide
cuucaucugcgugaggagc

SEQ ID NO: 938397 - RNA, 19 nt, Artificial Sequence
  Description of Artificial Sequence: Synthetic oligonucleotide
uugcacaaaacggucggca

SEQ ID NO: 938398 - RNA, 19 nt, Artificial Sequence
  Description of Artificial Sequence: Synthetic oligonucleotide
gauggcggcuucaucugcg

SEQ ID NO: 938399 - RNA, 19 nt, Artificial Sequence
  Description of Artificial Sequence: Synthetic oligonucleotide
ucgcaugucaucugacaac

SEQ ID NO: 938400 - RNA, 19 nt, Artificial Sequence
  Description of Artificial Sequence: Synthetic oligonucleotide
ggugaugagagugcguagg

SEQ ID NO: 938401 - RNA, 19 nt, Artificial Sequence
  Description of Artificial Sequence: Synthetic oligonucleotide
gguugagugggauguaagc

SEQ ID NO: 938402 - RNA, 19 nt, Artificial Sequence
  Description of Artificial Sequence: Synthetic oligonucleotide
cacgaugcuucuuggcccg

SEQ ID NO: 938403 - RNA, 19 nt, Artificial Sequence
  Description of Artificial Sequence: Synthetic oligonucleotide
ucugggaugagagcagcga

SEQ ID NO: 938404 - RNA, 19 nt, Artificial Sequence
  Description of Artificial Sequence: Synthetic oligonucleotide
caugcuuggcaagaugcgc

SEQ ID NO: 938405 - RNA, 19 nt, Artificial Sequence
  Description of Artificial Sequence: Synthetic oligonucleotide
guugagugggauguaagca

SEQ ID NO: 938406 - RNA, 19 nt, Artificial Sequence
  Description of Artificial Sequence: Synthetic oligonucleotide
gucggcagggcccugggag

SEQ ID NO: 938407 - RNA, 19 nt, Artificial Sequence
  Description of Artificial Sequence: Synthetic oligonucleotide
uagugcuuguccccaucag

SEQ ID NO: 938408 - RNA, 19 nt, Artificial Sequence
  Description of Artificial Sequence: Synthetic oligonucleotide
agggcgauggauaccagag

SEQ ID NO: 938409 - RNA, 19 nt, Artificial Sequence
  Description of Artificial Sequence: Synthetic oligonucleotide
gugcuuguccccaucagcc

SEQ ID NO: 938410 - RNA, 19 nt, Artificial Sequence
  Description of Artificial Sequence: Synthetic oligonucleotide
gguaaauuuugaugguuuc

SEQ ID NO: 938411 - RNA, 19 nt, Artificial Sequence
  Description of Artificial Sequence: Synthetic oligonucleotide
gguuccgaagcuucaugcg

SEQ ID NO: 938412 - RNA, 19 nt, Artificial Sequence
  Description of Artificial Sequence: Synthetic oligonucleotide
cacugugguaaccgcaccc

SEQ ID NO: 938413 - RNA, 19 nt, Artificial Sequence
  Description of Artificial Sequence: Synthetic oligonucleotide
ucugcgugaggagccaaag

SEQ ID NO: 938414 - RNA, 19 nt, Artificial Sequence
  Description of Artificial Sequence: Synthetic oligonucleotide
cuugcccacagggcgaugg

SEQ ID NO: 938415 - RNA, 19 nt, Artificial Sequence
  Description of Artificial Sequence: Synthetic oligonucleotide
uccuccguagcauccuggc

SEQ ID NO: 938416 - RNA, 19 nt, Artificial Sequence
  Description of Artificial Sequence: Synthetic oligonucleotide
uggugaugagagugcguag

SEQ ID NO: 938417 - RNA, 19 nt, Artificial Sequence
  Description of Artificial Sequence: Synthetic oligonucleotide
ggugcgggaagccagcagc

SEQ ID NO: 938418 - RNA, 19 nt, Artificial Sequence
  Description of Artificial Sequence: Synthetic oligonucleotide
uuugcacaaaacggucggc

SEQ ID NO: 938419 - RNA, 19 nt, Artificial Sequence
  Description of Artificial Sequence: Synthetic oligonucleotide
agagggauuggcaggaagu

SEQ ID NO: 938420 - RNA, 19 nt, Artificial Sequence
  Description of Artificial Sequence: Synthetic oligonucleotide
uucgcaggcgaggaugugc

SEQ ID NO: 938421 - RNA, 19 nt, Artificial Sequence
  Description of Artificial Sequence: Synthetic oligonucleotide
acaugcuuggcaagaugcg

SEQ ID NO: 938422 - RNA, 19 nt, Artificial Sequence
  Description of Artificial Sequence: Synthetic oligonucleotide
ugggcagcuuucacuagac

SEQ ID NO: 938423 - RNA, 19 nt, Artificial Sequence
  Description of Artificial Sequence: Synthetic oligonucleotide
uccccaucagcccuuuaaa

SEQ ID NO: 938424 - RNA, 19 nt, Artificial Sequence
  Description of Artificial Sequence: Synthetic oligonucleotide
uuaaccaugcccggcuccu

SEQ ID NO: 938425 - RNA, 19 nt, Artificial Sequence
  Description of Artificial Sequence: Synthetic oligonucleotide
aggaucgagcaccuucuca

SEQ ID NO: 938426 - RNA, 19 nt, Artificial Sequence
  Description of Artificial Sequence: Synthetic oligonucleotide
ugcuuguccccaucagccc

SEQ ID NO: 938427 - RNA, 19 nt, Artificial Sequence
  Description of Artificial Sequence: Synthetic oligonucleotide
gagacucgguuauggugag

SEQ ID NO: 938428 - RNA, 19 nt, Artificial Sequence
  Description of Artificial Sequence: Synthetic oligonucleotide
agggauuggcaggaaguuc

SEQ ID NO: 938429 - RNA, 19 nt, Artificial Sequence
  Description of Artificial Sequence: Synthetic oligonucleotide
ucgcaggcgaggaugugcu

SEQ ID NO: 938430 - RNA, 19 nt, Artificial Sequence
  Description of Artificial Sequence: Synthetic oligonucleotide
gcacaaaacggucggcagg

SEQ ID NO: 938431 - RNA, 19 nt, Artificial Sequence
  Description of Artificial Sequence: Synthetic oligonucleotide
acggucagccucugcuucg

SEQ ID NO: 938432 - RNA, 19 nt, Artificial Sequence
  Description of Artificial Sequence: Synthetic oligonucleotide
guaaccgcacccagaaggc

SEQ ID NO: 938433 - RNA, 19 nt, Artificial Sequence
  Description of Artificial Sequence: Synthetic oligonucleotide
uccuuuaaccaugcccggc

SEQ ID NO: 938434 - RNA, 19 nt, Artificial Sequence
  Description of Artificial Sequence: Synthetic oligonucleotide
uaugaucagccggccauca

SEQ ID NO: 938435 - RNA, 19 nt, Artificial Sequence
  Description of Artificial Sequence: Synthetic oligonucleotide
agggcacgaugcuucuugg

SEQ ID NO: 938436 - RNA, 19 nt, Artificial Sequence
  Description of Artificial Sequence: Synthetic oligonucleotide
cucugggaugagagcagcg

SEQ ID NO: 938437 - RNA, 19 nt, Artificial Sequence
  Description of Artificial Sequence: Synthetic oligonucleotide
cucaagguagggccggaug

SEQ ID NO: 938438 - RNA, 19 nt, Artificial Sequence
  Description of Artificial Sequence: Synthetic oligonucleotide
cugggauccacgcugggca

SEQ ID NO: 938439 - RNA, 19 nt, Artificial Sequence
  Description of Artificial Sequence: Synthetic oligonucleotide
gauggauaccagagccucc

SEQ ID NO: 938440 - RNA, 19 nt, Artificial Sequence
  Description of Artificial Sequence: Synthetic oligonucleotide
cagguguagcuuucuugcc

SEQ ID NO: 938441 - RNA, 19 nt, Artificial Sequence
  Description of Artificial Sequence: Synthetic oligonucleotide
gucgcaugucaucugacaa

SEQ ID NO: 938442 - RNA, 19 nt, Artificial Sequence
  Description of Artificial Sequence: Synthetic oligonucleotide
aaccgcacccagaaggcca

SEQ ID NO: 938443 - RNA, 19 nt, Artificial Sequence
  Description of Artificial Sequence: Synthetic oligonucleotide
gugguaaccgcacccagaa

SEQ ID NO: 938444 - RNA, 19 nt, Artificial Sequence
  Description of Artificial Sequence: Synthetic oligonucleotide
cuuguacucagcuccaggu

SEQ ID NO: 938445 - RNA, 19 nt, Artificial Sequence
  Description of Artificial Sequence: Synthetic oligonucleotide
gcuuugcacaaaacggucg

SEQ ID NO: 938446 - RNA, 19 nt, Artificial Sequence
  Description of Artificial Sequence: Synthetic oligonucleotide
caggcgaggaugugcuccg

SEQ ID NO: 938447 - RNA, 19 nt, Artificial Sequence
  Description of Artificial Sequence: Synthetic oligonucleotide
ugaauagguuccgaagcuu

SEQ ID NO: 938448 - RNA, 19 nt, Artificial Sequence
  Description of Artificial Sequence: Synthetic oligonucleotide
cagcucacugugguaaccg

SEQ ID NO: 938449 - RNA, 19 nt, Artificial Sequence
  Description of Artificial Sequence: Synthetic oligonucleotide
aucacgggugcgggaagcc

SEQ ID NO: 938450 - RNA, 19 nt, Artificial Sequence
  Description of Artificial Sequence: Synthetic oligonucleotide
cuguccauacagguugaag

SEQ ID NO: 938451 - RNA, 19 nt, Artificial Sequence
  Description of Artificial Sequence: Synthetic oligonucleotide
caugcggaagugccgucgc

SEQ ID NO: 938452 - RNA, 19 nt, Artificial Sequence
  Description of Artificial Sequence: Synthetic oligonucleotide
augguagaguacagcuuac

SEQ ID NO: 938453 - RNA, 19 nt, Artificial Sequence
  Description of Artificial Sequence: Synthetic oligonucleotide
ugagcuugguucgguugag

SEQ ID NO: 938454 - RNA, 19 nt, Artificial Sequence
  Description of Artificial Sequence: Synthetic oligonucleotide
ugguaaccgcacccagaag

SEQ ID NO: 938455 - RNA, 19 nt, Artificial Sequence
  Description of Artificial Sequence: Synthetic oligonucleotide
ugcuccgcagugagucuag

SEQ ID NO: 938456 - RNA, 19 nt, Artificial Sequence
  Description of Artificial Sequence: Synthetic oligonucleotide
cuucacaucgcccuuugcu

SEQ ID NO: 938457 - RNA, 19 nt, Artificial Sequence
  Description of Artificial Sequence: Synthetic oligonucleotide
cuuucacuagaccuuugaa

SEQ ID NO: 938458 - RNA, 19 nt, Artificial Sequence
  Description of Artificial Sequence: Synthetic oligonucleotide
gagucuagcagagucuucu

SEQ ID NO: 938459 - RNA, 19 nt, Artificial Sequence
  Description of Artificial Sequence: Synthetic oligonucleotide
cacgggugcgggaagccag

SEQ ID NO: 938460 - RNA, 19 nt, Artificial Sequence
  Description of Artificial Sequence: Synthetic oligonucleotide
aucgcccuuugcuuucuug

SEQ ID NO: 938461 - RNA, 19 nt, Artificial Sequence
  Description of Artificial Sequence: Synthetic oligonucleotide
caacggggccuuuucgcag

SEQ ID NO: 938462 - RNA, 19 nt, Artificial Sequence
  Description of Artificial Sequence: Synthetic oligonucleotide
uuggcaagaugcgccacgu

SEQ ID NO: 938463 - RNA, 19 nt, Artificial Sequence
  Description of Artificial Sequence: Synthetic oligonucleotide
ggcagcuuucacuagaccu

SEQ ID NO: 938464 - RNA, 19 nt, Artificial Sequence
  Description of Artificial Sequence: Synthetic oligonucleotide
gacucgguuauggugaggu

SEQ ID NO: 938465 - RNA, 19 nt, Artificial Sequence
  Description of Artificial Sequence: Synthetic oligonucleotide
cuucgaaguuugugucccc

SEQ ID NO: 938466 - RNA, 19 nt, Artificial Sequence
  Description of Artificial Sequence: Synthetic oligonucleotide
acaaaacggucggcagggc

SEQ ID NO: 938467 - RNA, 19 nt, Artificial Sequence
  Description of Artificial Sequence: Synthetic oligonucleotide
aguucuuagcaaagcggcu

SEQ ID NO: 938468 - RNA, 19 nt, Artificial Sequence
  Description of Artificial Sequence: Synthetic oligonucleotide
gggacugccgccucgccag

SEQ ID NO: 938469 - RNA, 19 nt, Artificial Sequence
  Description of Artificial Sequence: Synthetic oligonucleotide
gccaagaugcugcagcuca

SEQ ID NO: 938470 - RNA, 19 nt, Artificial Sequence
  Description of Artificial Sequence: Synthetic oligonucleotide
aggggcucauccccaccac

SEQ ID NO: 938471 - RNA, 19 nt, Artificial Sequence
  Description of Artificial Sequence: Synthetic oligonucleotide
cuuccaaugggucaaucau

SEQ ID NO: 938472 - RNA, 19 nt, Artificial Sequence
  Description of Artificial Sequence: Synthetic oligonucleotide
ggcaggaucgagcaccuuc

SEQ ID NO: 938473 - RNA, 19 nt, Artificial Sequence
  Description of Artificial Sequence: Synthetic oligonucleotide
uaaccgcacccagaaggcc

SEQ ID NO: 938474 - RNA, 19 nt, Artificial Sequence
  Description of Artificial Sequence: Synthetic oligonucleotide
cacggcgagggacugccgc

SEQ ID NO: 938475 - RNA, 19 nt, Artificial Sequence
  Description of Artificial Sequence: Synthetic oligonucleotide
acaauguguaugaggcacu

SEQ ID NO: 938476 - RNA, 19 nt, Artificial Sequence
  Description of Artificial Sequence: Synthetic oligonucleotide
aaacaagaggugggucaga

SEQ ID NO: 938477 - RNA, 19 nt, Artificial Sequence
  Description of Artificial Sequence: Synthetic oligonucleotide
ucggcagggcccugggagc

SEQ ID NO: 938478 - RNA, 19 nt, Artificial Sequence
  Description of Artificial Sequence: Synthetic oligonucleotide
cucgguuauggugagguaa

SEQ ID NO: 938479 - RNA, 19 nt, Artificial Sequence
  Description of Artificial Sequence: Synthetic oligonucleotide
cauagugcuuguccccauc

SEQ ID NO: 938480 - RNA, 19 nt, Artificial Sequence
  Description of Artificial Sequence: Synthetic oligonucleotide
ugaccagaacuuuguggua

SEQ ID NO: 938481 - RNA, 19 nt, Artificial Sequence
  Description of Artificial Sequence: Synthetic oligonucleotide
acaucacgggugcgggaag

SEQ ID NO: 938482 - RNA, 19 nt, Artificial Sequence
  Description of Artificial Sequence: Synthetic oligonucleotide
gcucgcacacacuuccucc

SEQ ID NO: 938483 - RNA, 19 nt, Artificial Sequence
  Description of Artificial Sequence: Synthetic oligonucleotide
accuuacucucaagguagg

SEQ ID NO: 938484 - RNA, 19 nt, Artificial Sequence
  Description of Artificial Sequence: Synthetic oligonucleotide
cagcuuuccggauguugac

SEQ ID NO: 938485 - RNA, 19 nt, Artificial Sequence
  Description of Artificial Sequence: Synthetic oligonucleotide
cuaggaucuuuucuucgaa

SEQ ID NO: 938486 - RNA, 19 nt, Artificial Sequence
  Description of Artificial Sequence: Synthetic oligonucleotide
ugugcuccgcagugagucu

SEQ ID NO: 938487 - RNA, 19 nt, Artificial Sequence
  Description of Artificial Sequence: Synthetic oligonucleotide
aaacggucggcagggcccu

SEQ ID NO: 938488 - RNA, 19 nt, Artificial Sequence
  Description of Artificial Sequence: Synthetic oligonucleotide
gguucgguugagugggaug

SEQ ID NO: 938489 - RNA, 19 nt, Artificial Sequence
  Description of Artificial Sequence: Synthetic oligonucleotide
ucgguugagugggauguaa

SEQ ID NO: 938490 - RNA, 19 nt, Artificial Sequence
  Description of Artificial Sequence: Synthetic oligonucleotide
acggggccuuuucgcaggc

SEQ ID NO: 938491 - RNA, 19 nt, Artificial Sequence
  Description of Artificial Sequence: Synthetic oligonucleotide
ugaaccccauggaccuuac

SEQ ID NO: 938492 - RNA, 19 nt, Artificial Sequence
  Description of Artificial Sequence: Synthetic oligonucleotide
ggucucagcuuuccggaug

SEQ ID NO: 938493 - RNA, 19 nt, Artificial Sequence
  Description of Artificial Sequence: Synthetic oligonucleotide
uccgaagcuucaugcggaa

SEQ ID NO: 938494 - RNA, 19 nt, Artificial Sequence
  Description of Artificial Sequence: Synthetic oligonucleotide
cucgcugggccaccuuggg

SEQ ID NO: 938495 - RNA, 19 nt, Artificial Sequence
  Description of Artificial Sequence: Synthetic oligonucleotide
guucgguugagugggaugu

SEQ ID NO: 938496 - RNA, 19 nt, Artificial Sequence
  Description of Artificial Sequence: Synthetic oligonucleotide
cacaucgcccuuugcuuuc

SEQ ID NO: 938497 - RNA, 19 nt, Artificial Sequence
  Description of Artificial Sequence: Synthetic oligonucleotide
cuugaugaauagguuccga

SEQ ID NO: 938498 - RNA, 19 nt, Artificial Sequence
  Description of Artificial Sequence: Synthetic oligonucleotide
ucaucugcgugaggagcca

SEQ ID NO: 938499 - RNA, 19 nt, Artificial Sequence
  Description of Artificial Sequence: Synthetic oligonucleotide
agggacugccgccucgcca

SEQ ID NO: 938500 - RNA, 19 nt, Artificial Sequence
  Description of Artificial Sequence: Synthetic oligonucleotide
cggauuugaccacaucacg

SEQ ID NO: 938501 - RNA, 19 nt, Artificial Sequence
  Description of Artificial Sequence: Synthetic oligonucleotide
gcucacuucagcacgguca

SEQ ID NO: 938502 - RNA, 19 nt, Artificial Sequence
  Description of Artificial Sequence: Synthetic oligonucleotide
agccaagaugcugcagcuc

SEQ ID NO: 938503 - RNA, 19 nt, Artificial Sequence
  Description of Artificial Sequence: Synthetic oligonucleotide
ggaccuuacucucaaggua

SEQ ID NO: 938504 - RNA, 19 nt, Artificial Sequence
  Description of Artificial Sequence: Synthetic oligonucleotide
uggcggcuucaucugcgug

SEQ ID NO: 938505 - RNA, 19 nt, Artificial Sequence
  Description of Artificial Sequence: Synthetic oligonucleotide
ucagcccuuuaaacucaaa

SEQ ID NO: 938506 - RNA, 19 nt, Artificial Sequence
  Description of Artificial Sequence: Synthetic oligonucleotide
ucuuagcaaagcggcucac

SEQ ID NO: 938507 - RNA, 19 nt, Artificial Sequence
  Description of Artificial Sequence: Synthetic oligonucleotide
ccgggucucagcuuuccgg

SEQ ID NO: 938508 - RNA, 19 nt, Artificial Sequence
  Description of Artificial Sequence: Synthetic oligonucleotide
gccguucaccaacugagac

SEQ ID NO: 938509 - RNA, 19 nt, Artificial Sequence
  Description of Artificial Sequence: Synthetic oligonucleotide
acucgcugggccaccuugg

SEQ ID NO: 938510 - RNA, 19 nt, Artificial Sequence
  Description of Artificial Sequence: Synthetic oligonucleotide
agguagggccggaugguag

SEQ ID NO: 938511 - RNA, 19 nt, Artificial Sequence
  Description of Artificial Sequence: Synthetic oligonucleotide
caucacgggugcgggaagc

SEQ ID NO: 938512 - RNA, 19 nt, Artificial Sequence
  Description of Artificial Sequence: Synthetic oligonucleotide
cugggcagcuuucacuaga

SEQ ID NO: 938513 - RNA, 19 nt, Artificial Sequence
  Description of Artificial Sequence: Synthetic oligonucleotide
uucgcagcccuuggugaug

SEQ ID NO: 938514 - RNA, 19 nt, Artificial Sequence
  Description of Artificial Sequence: Synthetic oligonucleotide
gugcguagggccuggcaca

SEQ ID NO: 938515 - RNA, 19 nt, Artificial Sequence
  Description of Artificial Sequence: Synthetic oligonucleotide
gcggauuugaccacaucac

SEQ ID NO: 938516 - RNA, 19 nt, Artificial Sequence
  Description of Artificial Sequence: Synthetic oligonucleotide
agccgacccuucuucuuca

SEQ ID NO: 938517 - RNA, 19 nt, Artificial Sequence
  Description of Artificial Sequence: Synthetic oligonucleotide
gcgaggaugugcuccgcag

SEQ ID NO: 938518 - RNA, 19 nt, Artificial Sequence
  Description of Artificial Sequence: Synthetic oligonucleotide
gaccagaacuuugugguau

SEQ ID NO: 938519 - RNA, 19 nt, Artificial Sequence
  Description of Artificial Sequence: Synthetic oligonucleotide
gcacacagugacccucagg

SEQ ID NO: 938520 - RNA, 19 nt, Artificial Sequence
  Description of Artificial Sequence: Synthetic oligonucleotide
ccugggagcucgcacacac

SEQ ID NO: 938521 - RNA, 19 nt, Artificial Sequence
  Description of Artificial Sequence: Synthetic oligonucleotide
gaugcgccacguccaugac

SEQ ID NO: 938522 - RNA, 19 nt, Artificial Sequence
  Description of Artificial Sequence: Synthetic oligonucleotide
guagggccggaugguagag

SEQ ID NO: 938523 - RNA, 19 nt, Artificial Sequence
  Description of Artificial Sequence: Synthetic oligonucleotide
uucaugcggaagugccguc

SEQ ID NO: 938524 - RNA, 19 nt, Artificial Sequence
  Description of Artificial Sequence: Synthetic oligonucleotide
gcaggcgaggaugugcucc

SEQ ID NO: 938525 - RNA, 19 nt, Artificial Sequence
  Description of Artificial Sequence: Synthetic oligonucleotide
acgggugcgggaagccagc

SEQ ID NO: 938526 - RNA, 19 nt, Artificial Sequence
  Description of Artificial Sequence: Synthetic oligonucleotide
gagugcguagggccuggca

SEQ ID NO: 938527 - RNA, 19 nt, Artificial Sequence
  Description of Artificial Sequence: Synthetic oligonucleotide
augcccggcuccucugucu

SEQ ID NO: 938528 - RNA, 19 nt, Artificial Sequence
  Description of Artificial Sequence: Synthetic oligonucleotide
gaucgagcaccuucucagu

SEQ ID NO: 938529 - RNA, 19 nt, Artificial Sequence
  Description of Artificial Sequence: Synthetic oligonucleotide
agagugcguagggccuggc

SEQ ID NO: 938530 - RNA, 19 nt, Artificial Sequence
  Description of Artificial Sequence: Synthetic oligonucleotide
ugcguagggccuggcacac

SEQ ID NO: 938531 - RNA, 19 nt, Artificial Sequence
  Description of Artificial Sequence: Synthetic oligonucleotide
guaugaucagccggccauc

SEQ ID NO: 938532 - RNA, 19 nt, Artificial Sequence
  Description of Artificial Sequence: Synthetic oligonucleotide
uucagggccuaggaucuuu

SEQ ID NO: 938533 - RNA, 19 nt, Artificial Sequence
  Description of Artificial Sequence: Synthetic oligonucleotide
cugcagcucacugugguaa

SEQ ID NO: 938534 - RNA, 19 nt, Artificial Sequence
  Description of Artificial Sequence: Synthetic oligonucleotide
cagggcgauggauaccaga

SEQ ID NO: 938535 - RNA, 19 nt, Artificial Sequence
  Description of Artificial Sequence: Synthetic oligonucleotide
gguagggccggaugguaga

SEQ ID NO: 938536 - RNA, 19 nt, Artificial Sequence
  Description of Artificial Sequence: Synthetic oligonucleotide
agacucgguuauggugagg

SEQ ID NO: 938537 - RNA, 19 nt, Artificial Sequence
  Description of Artificial Sequence: Synthetic oligonucleotide
gcuucgcagcccuugguga

SEQ ID NO: 938538 - RNA, 19 nt, Artificial Sequence
  Description of Artificial Sequence: Synthetic oligonucleotide
uggcaagaugcgccacguc

SEQ ID NO: 938539 - RNA, 19 nt, Artificial Sequence
  Description of Artificial Sequence: Synthetic oligonucleotide
uuucgcaggcgaggaugug

SEQ ID NO: 938540 - RNA, 19 nt, Artificial Sequence
  Description of Artificial Sequence: Synthetic oligonucleotide
cuccgcagugagucuagca

SEQ ID NO: 938541 - RNA, 19 nt, Artificial Sequence
  Description of Artificial Sequence: Synthetic oligonucleotide
gcucaccuugaagccaugg

SEQ ID NO: 938542 - RNA, 19 nt, Artificial Sequence
  Description of Artificial Sequence: Synthetic oligonucleotide
gaugaagcccagugcggau

SEQ ID NO: 938543 - RNA, 19 nt, Artificial Sequence
  Description of Artificial Sequence: Synthetic oligonucleotide
ccuuacucucaagguaggg

SEQ ID NO: 938544 - RNA, 19 nt, Artificial Sequence
  Description of Artificial Sequence: Synthetic oligonucleotide
gagggacugccgccucgcc

SEQ ID NO: 938545 - RNA, 19 nt, Artificial Sequence
  Description of Artificial Sequence: Synthetic oligonucleotide
cagggccuaggaucuuuuc

SEQ ID NO: 938546 - RNA, 19 nt, Artificial Sequence
  Description of Artificial Sequence: Synthetic oligonucleotide
ggugcacaggaucaccucu

SEQ ID NO: 938547 - RNA, 19 nt, Artificial Sequence
  Description of Artificial Sequence: Synthetic oligonucleotide
ggggccuuuucgcaggcga

SEQ ID NO: 938548 - RNA, 19 nt, Artificial Sequence
  Description of Artificial Sequence: Synthetic oligonucleotide
cacaucacgggugcgggaa

SEQ ID NO: 938549 - RNA, 19 nt, Artificial Sequence
  Description of Artificial Sequence: Synthetic oligonucleotide
gguauucugcaggcagcag

SEQ ID NO: 938550 - RNA, 19 nt, Artificial Sequence
  Description of Artificial Sequence: Synthetic oligonucleotide
ucucaagguagggccggau

SEQ ID NO: 938551 - RNA, 19 nt, Artificial Sequence
  Description of Artificial Sequence: Synthetic oligonucleotide
cuucaugcggaagugccgu

SEQ ID NO: 938552 - RNA, 19 nt, Artificial Sequence
  Description of Artificial Sequence: Synthetic oligonucleotide
ugguucgguugagugggau

SEQ ID NO: 938553 - RNA, 19 nt, Artificial Sequence
  Description of Artificial Sequence: Synthetic oligonucleotide
ggccggaugguagaguaca

SEQ ID NO: 938554 - RNA, 19 nt, Artificial Sequence
  Description of Artificial Sequence: Synthetic oligonucleotide
acucgguuauggugaggua

SEQ ID NO: 938555 - RNA, 19 nt, Artificial Sequence
  Description of Artificial Sequence: Synthetic oligonucleotide
gaucaagccgacccuucuu

SEQ ID NO: 938556 - RNA, 19 nt, Artificial Sequence
  Description of Artificial Sequence: Synthetic oligonucleotide
agggaucaagccgacccuu

SEQ ID NO: 938557 - RNA, 19 nt, Artificial Sequence
  Description of Artificial Sequence: Synthetic oligonucleotide
caggaucgagcaccuucuc

SEQ ID NO: 938558 - RNA, 19 nt, Artificial Sequence
  Description of Artificial Sequence: Synthetic oligonucleotide
guccccgcugggauccacg

SEQ ID NO: 938559 - RNA, 19 nt, Artificial Sequence
  Description of Artificial Sequence: Synthetic oligonucleotide
gcggaagugccgucgcaug

SEQ ID NO: 938560 - RNA, 19 nt, Artificial Sequence
  Description of Artificial Sequence: Synthetic oligonucleotide
caacugagacucgguuaug

SEQ ID NO: 938561 - RNA, 19 nt, Artificial Sequence
  Description of Artificial Sequence: Synthetic oligonucleotide
agugcggauuugaccacau

SEQ ID NO: 938562 - RNA, 19 nt, Artificial Sequence
  Description of Artificial Sequence: Synthetic oligonucleotide
cgagcaccuucucaguggc

SEQ ID NO: 938563 - RNA, 19 nt, Artificial Sequence
  Description of Artificial Sequence: Synthetic oligonucleotide
agcuuacugauggcggcuu

SEQ ID NO: 938564 - RNA, 19 nt, Artificial Sequence
  Description of Artificial Sequence: Synthetic oligonucleotide
gggcagcuuucacuagacc

SEQ ID NO: 938565 - RNA, 19 nt, Artificial Sequence
  Description of Artificial Sequence: Synthetic oligonucleotide
agccguucaccaacugaga

SEQ ID NO: 938566 - RNA, 19 nt, Artificial Sequence
  Description of Artificial Sequence: Synthetic oligonucleotide
gagggauuggcaggaaguu

SEQ ID NO: 938567 - RNA, 19 nt, Artificial Sequence
  Description of Artificial Sequence: Synthetic oligonucleotide
acgaugcuucuuggcccgg

SEQ ID NO: 938568 - RNA, 19 nt, Artificial Sequence
  Description of Artificial Sequence: Synthetic oligonucleotide
ccccauggaccuuacucuc

SEQ ID NO: 938569 - RNA, 19 nt, Artificial Sequence
  Description of Artificial Sequence: Synthetic oligonucleotide
uucgguugagugggaugua

SEQ ID NO: 938570 - RNA, 19 nt, Artificial Sequence
  Description of Artificial Sequence: Synthetic oligonucleotide
cuuagcaaagcggcucacu

SEQ ID NO: 938571 - RNA, 19 nt, Artificial Sequence
  Description of Artificial Sequence: Synthetic oligonucleotide
acaucgcccuuugcuuucu

SEQ ID NO: 938572 - RNA, 19 nt, Artificial Sequence
  Description of Artificial Sequence: Synthetic oligonucleotide
gugcggauuugaccacauc

SEQ ID NO: 938573 - RNA, 19 nt, Artificial Sequence
  Description of Artificial Sequence: Synthetic oligonucleotide
gccgucgcaugucaucuga

SEQ ID NO: 938574 - RNA, 19 nt, Artificial Sequence
  Description of Artificial Sequence: Synthetic oligonucleotide
cgguugagugggauguaag

SEQ ID NO: 938575 - RNA, 19 nt, Artificial Sequence
  Description of Artificial Sequence: Synthetic oligonucleotide
aagugccgucgcaugucau

SEQ ID NO: 938576 - RNA, 19 nt, Artificial Sequence
  Description of Artificial Sequence: Synthetic oligonucleotide
cugggaugagagcagcgau

SEQ ID NO: 938577 - RNA, 19 nt, Artificial Sequence
  Description of Artificial Sequence: Synthetic oligonucleotide
gaagagggauuggcaggaa

SEQ ID NO: 938578 - RNA, 19 nt, Artificial Sequence
  Description of Artificial Sequence: Synthetic oligonucleotide
gugcgggaagccagcagca

SEQ ID NO: 938579 - RNA, 19 nt, Artificial Sequence
  Description of Artificial Sequence: Synthetic oligonucleotide
gcggcucacuucagcacgg

SEQ ID NO: 938580 - RNA, 19 nt, Artificial Sequence
  Description of Artificial Sequence: Synthetic oligonucleotide
gugccgucgcaugucaucu

SEQ ID NO: 938581 - RNA, 19 nt, Artificial Sequence
  Description of Artificial Sequence: Synthetic oligonucleotide
aucugcgugaggagccaaa

SEQ ID NO: 938582 - RNA, 19 nt, Artificial Sequence
  Description of Artificial Sequence: Synthetic oligonucleotide
gggccuaggaucuuuucuu

SEQ ID NO: 938583 - RNA, 19 nt, Artificial Sequence
  Description of Artificial Sequence: Synthetic oligonucleotide
gguacugaggugggaucuc

SEQ ID NO: 938584 - RNA, 19 nt, Artificial Sequence
  Description of Artificial Sequence: Synthetic oligonucleotide
gggccuuuucgcaggcgag

SEQ ID NO: 938585 - RNA, 19 nt, Artificial Sequence
  Description of Artificial Sequence: Synthetic oligonucleotide
ccagcucaaacccaaacuu

SEQ ID NO: 938586 - RNA, 19 nt, Artificial Sequence
  Description of Artificial Sequence: Synthetic oligonucleotide
ggcgaggaugugcuccgca

SEQ ID NO: 938587 - RNA, 19 nt, Artificial Sequence
  Description of Artificial Sequence: Synthetic oligonucleotide
cuucgcagcccuuggugau

SEQ ID NO: 938588 - RNA, 19 nt, Artificial Sequence
  Description of Artificial Sequence: Synthetic oligonucleotide
acuugcggaugaacuugau

SEQ ID NO: 938589 - RNA, 19 nt, Artificial Sequence
  Description of Artificial Sequence: Synthetic oligonucleotide
gcgguugagcuugguucgg

SEQ ID NO: 938590 - RNA, 19 nt, Artificial Sequence
  Description of Artificial Sequence: Synthetic oligonucleotide
gccuuuucgcaggcgagga

SEQ ID NO: 938591 - RNA, 19 nt, Artificial Sequence
  Description of Artificial Sequence: Synthetic oligonucleotide
gggaucaagccgacccuuc

SEQ ID NO: 938592 - RNA, 19 nt, Artificial Sequence
  Description of Artificial Sequence: Synthetic oligonucleotide
uguccccgcugggauccac

SEQ ID NO: 938593 - RNA, 19 nt, Artificial Sequence
  Description of Artificial Sequence: Synthetic oligonucleotide
gaaccccauggaccuuacu

SEQ ID NO: 938594 - RNA, 19 nt, Artificial Sequence
  Description of Artificial Sequence: Synthetic oligonucleotide
ccauggaccuuacucucaa

SEQ ID NO: 938595 - RNA, 19 nt, Artificial Sequence
  Description of Artificial Sequence: Synthetic oligonucleotide
gccuuguacucagcuccag

SEQ ID NO: 938596 - RNA, 19 nt, Artificial Sequence
  Description of Artificial Sequence: Synthetic oligonucleotide
gcaaagcggcucacuucag

SEQ ID NO: 938597 - RNA, 19 nt, Artificial Sequence
  Description of Artificial Sequence: Synthetic oligonucleotide
cccauggaccuuacucuca

SEQ ID NO: 938598 - RNA, 19 nt, Artificial Sequence
  Description of Artificial Sequence: Synthetic oligonucleotide
cccgggucucagcuuuccg

SEQ ID NO: 938599 - RNA, 19 nt, Artificial Sequence
  Description of Artificial Sequence: Synthetic oligonucleotide
caauguguaugaggcacuu

SEQ ID NO: 938600 - RNA, 19 nt, Artificial Sequence
  Description of Artificial Sequence: Synthetic oligonucleotide
aacggucggcagggcccug

SEQ ID NO: 938601 - RNA, 19 nt, Artificial Sequence
  Description of Artificial Sequence: Synthetic oligonucleotide
ccgucgcaugucaucugac

SEQ ID NO: 938602 - RNA, 19 nt, Artificial Sequence
  Description of Artificial Sequence: Synthetic oligonucleotide
cgucgcaugucaucugaca

SEQ ID NO: 938603 - RNA, 19 nt, Artificial Sequence
  Description of Artificial Sequence: Synthetic oligonucleotide
caagaugcgccacguccau

SEQ ID NO: 938604 - RNA, 19 nt, Artificial Sequence
  Description of Artificial Sequence: Synthetic oligonucleotide
ccguucaccaacugagacu

SEQ ID NO: 938605 - RNA, 19 nt, Artificial Sequence
  Description of Artificial Sequence: Synthetic oligonucleotide
gugcuccgcagugagucua

SEQ ID NO: 938606 - RNA, 19 nt, Artificial Sequence
  Description of Artificial Sequence: Synthetic oligonucleotide
cccguaugaucagccggcc

SEQ ID NO: 938607 - RNA, 19 nt, Artificial Sequence
  Description of Artificial Sequence: Synthetic oligonucleotide
gagcuugguucgguugagu

SEQ ID NO: 938608 - RNA, 19 nt, Artificial Sequence
  Description of Artificial Sequence: Synthetic oligonucleotide
cguaugaucagccggccau

SEQ ID NO: 938609 - RNA, 19 nt, Artificial Sequence
  Description of Artificial Sequence: Synthetic oligonucleotide
gggagcucgcacacacuuc

SEQ ID NO: 938610 - RNA, 19 nt, Artificial Sequence
  Description of Artificial Sequence: Synthetic oligonucleotide
ggaugguagaguacagcuu

SEQ ID NO: 938611 - RNA, 19 nt, Artificial Sequence
  Description of Artificial Sequence: Synthetic oligonucleotide
ggccuuguacucagcucca

SEQ ID NO: 938612 - RNA, 19 nt, Artificial Sequence
  Description of Artificial Sequence: Synthetic oligonucleotide
gguugagcuugguucgguu

SEQ ID NO: 938613 - RNA, 19 nt, Artificial Sequence
  Description of Artificial Sequence: Synthetic oligonucleotide
gcggaugaacuugaugaau

SEQ ID NO: 938614 - RNA, 19 nt, Artificial Sequence
  Description of Artificial Sequence: Synthetic oligonucleotide
caucugcgugaggagccaa

SEQ ID NO: 938615 - RNA, 19 nt, Artificial Sequence
  Description of Artificial Sequence: Synthetic oligonucleotide
gccgacccuucuucuucac

SEQ ID NO: 938616 - RNA, 19 nt, Artificial Sequence
  Description of Artificial Sequence: Synthetic oligonucleotide
agcacccgguaggccuucu

SEQ ID NO: 938617 - RNA, 19 nt, Artificial Sequence
  Description of Artificial Sequence: Synthetic oligonucleotide
cgaugcuucuuggcccggg

SEQ ID NO: 938618 - RNA, 19 nt, Artificial Sequence
  Description of Artificial Sequence: Synthetic oligonucleotide
ccaaggguucagggccuag

SEQ ID NO: 938619 - RNA, 19 nt, Artificial Sequence
  Description of Artificial Sequence: Synthetic oligonucleotide
ccguaugaucagccggcca

SEQ ID NO: 938620 - RNA, 19 nt, Artificial Sequence
  Description of Artificial Sequence: Synthetic oligonucleotide
gggccggaugguagaguac

SEQ ID NO: 938621 - RNA, 19 nt, Artificial Sequence
  Description of Artificial Sequence: Synthetic oligonucleotide
cuuccgcugcuccuugcuu

SEQ ID NO: 938622 - RNA, 19 nt, Artificial Sequence
  Description of Artificial Sequence: Synthetic oligonucleotide
ggaucaccucugggaugag

SEQ ID NO: 938623 - RNA, 19 nt, Artificial Sequence
  Description of Artificial Sequence: Synthetic oligonucleotide
cugcuucgcagcccuuggu

SEQ ID NO: 938624 - RNA, 19 nt, Artificial Sequence
  Description of Artificial Sequence: Synthetic oligonucleotide
gcuccgcagugagucuagc

SEQ ID NO: 938625 - RNA, 19 nt, Artificial Sequence
  Description of Artificial Sequence: Synthetic oligonucleotide
ccgacccuucuucuucaca

SEQ ID NO: 938626 - RNA, 19 nt, Artificial Sequence
  Description of Artificial Sequence: Synthetic oligonucleotide
ccacaucacgggugcggga

SEQ ID NO: 938627 - RNA, 19 nt, Artificial Sequence
  Description of Artificial Sequence: Synthetic oligonucleotide
cagcacccgguaggccuuc

SEQ ID NO: 938628 - RNA, 19 nt, Artificial Sequence
  Description of Artificial Sequence: Synthetic oligonucleotide
cacuucaacggggccuuuu

SEQ ID NO: 938629 - RNA, 19 nt, Artificial Sequence
  Description of Artificial Sequence: Synthetic oligonucleotide
ccgccucgccagcugcaac

SEQ ID NO: 938630 - RNA, 19 nt, Artificial Sequence
  Description of Artificial Sequence: Synthetic oligonucleotide
ccuuucgugccaucuucuu

SEQ ID NO: 938631 - RNA, 19 nt, Artificial Sequence
  Description of Artificial Sequence: Synthetic oligonucleotide
gcgcucaccuugaagccau

SEQ ID NO: 938632 - RNA, 19 nt, Artificial Sequence
  Description of Artificial Sequence: Synthetic oligonucleotide
ccacgcugggcagcuuuca

SEQ ID NO: 938633 - RNA, 19 nt, Artificial Sequence
  Description of Artificial Sequence: Synthetic oligonucleotide
ccucagagucagccaaaau

SEQ ID NO: 938634 - RNA, 19 nt, Artificial Sequence
  Description of Artificial Sequence: Synthetic oligonucleotide
cggaagugccgucgcaugu

SEQ ID NO: 938635 - RNA, 19 nt, Artificial Sequence
  Description of Artificial Sequence: Synthetic oligonucleotide
cgcucaccuugaagccaug

SEQ ID NO: 938636 - RNA, 19 nt, Artificial Sequence
  Description of Artificial Sequence: Synthetic oligonucleotide
cgcaggcgaggaugugcuc

SEQ ID NO: 938637 - RNA, 19 nt, Artificial Sequence
  Description of Artificial Sequence: Synthetic oligonucleotide
guucagggccuaggaucuu

SEQ ID NO: 938638 - RNA, 19 nt, Artificial Sequence
  Description of Artificial Sequence: Synthetic oligonucleotide
ccuuuucgcaggcgaggau

SEQ ID NO: 938639 - RNA, 19 nt, Artificial Sequence
  Description of Artificial Sequence: Synthetic oligonucleotide
gccgccucgccagcugcaa

SEQ ID NO: 938640 - RNA, 19 nt, Artificial Sequence
  Description of Artificial Sequence: Synthetic oligonucleotide
caucgcccuuugcuuucuu

SEQ ID NO: 938641 - RNA, 19 nt, Artificial Sequence
  Description of Artificial Sequence: Synthetic oligonucleotide
gcacccgguaggccuucuu

SEQ ID NO: 938642 - RNA, 19 nt, Artificial Sequence
  Description of Artificial Sequence: Synthetic oligonucleotide
ccuugggauccaggaaauu

SEQ ID NO: 938643 - RNA, 19 nt, Artificial Sequence
  Description of Artificial Sequence: Synthetic oligonucleotide
cgguugagcuugguucggu

SEQ ID NO: 938644 - RNA, 19 nt, Artificial Sequence
  Description of Artificial Sequence: Synthetic oligonucleotide
cggcucacuucagcacggu

SEQ ID NO: 938645 - RNA, 19 nt, Artificial Sequence
  Description of Artificial Sequence: Synthetic oligonucleotide
aacuuugaggcccagaccc

SEQ ID NO: 938646 - RNA, 19 nt, Artificial Sequence
  Description of Artificial Sequence: Synthetic oligonucleotide
aauguauugaucccgaaga

SEQ ID NO: 938647 - RNA, 19 nt, Artificial Sequence
  Description of Artificial Sequence: Synthetic oligonucleotide
cuuuagauagggaagaugc

SEQ ID NO: 938648 - RNA, 19 nt, Artificial Sequence
  Description of Artificial Sequence: Synthetic oligonucleotide
aaagauuggcaccagcacg

SEQ ID NO: 938649 - RNA, 19 nt, Artificial Sequence
  Description of Artificial Sequence: Synthetic oligonucleotide
aauacuaggcaucuccagg

SEQ ID NO: 938650 - RNA, 19 nt, Artificial Sequence
  Description of Artificial Sequence: Synthetic oligonucleotide
gaugcaaucugaaaagugg

SEQ ID NO: 938651 - RNA, 19 nt, Artificial Sequence
  Description of Artificial Sequence: Synthetic oligonucleotide
uagaauacuaggcaucucc

SEQ ID NO: 938652 - RNA, 19 nt, Artificial Sequence
  Description of Artificial Sequence: Synthetic oligonucleotide
uuugucaauacuccacagg

SEQ ID NO: 938653 - RNA, 19 nt, Artificial Sequence
  Description of Artificial Sequence: Synthetic oligonucleotide
uugucaauacuccacagga

SEQ ID NO: 938654 - RNA, 19 nt, Artificial Sequence
  Description of Artificial Sequence: Synthetic oligonucleotide
ucacuuagcaugcacacca

SEQ ID NO: 938655 - RNA, 19 nt, Artificial Sequence
  Description of Artificial Sequence: Synthetic oligonucleotide
uuugucggagaccacaagc

SEQ ID NO: 938656 - RNA, 19 nt, Artificial Sequence
  Description of Artificial Sequence: Synthetic oligonucleotide
uugucggagaccacaagcg

SEQ ID NO: 938657 - RNA, 19 nt, Artificial Sequence
  Description of Artificial Sequence: Synthetic oligonucleotide
gaauguauugaucccgaag

SEQ ID NO: 938658 - RNA, 19 nt, Artificial Sequence
  Description of Artificial Sequence: Synthetic oligonucleotide
cagagauagaauacuaggc

SEQ ID NO: 938659 - RNA, 19 nt, Artificial Sequence
  Description of Artificial Sequence: Synthetic oligonucleotide
aagccgaagaagcagagau

SEQ ID NO: 938660 - RNA, 19 nt, Artificial Sequence
  Description of Artificial Sequence: Synthetic oligonucleotide
accggaaugaucucauugg

SEQ ID NO: 938661 - RNA, 19 nt, Artificial Sequence
  Description of Artificial Sequence: Synthetic oligonucleotide
uuguaucgcagguaguccg

SEQ ID NO: 938662 - RNA, 19 nt, Artificial Sequence
  Description of Artificial Sequence: Synthetic oligonucleotide
caagccauaggcaauccag

SEQ ID NO: 938663 - RNA, 19 nt, Artificial Sequence
  Description of Artificial Sequence: Synthetic oligonucleotide
uauaacacuugcgaugacc

SEQ ID NO: 938664 - RNA, 19 nt, Artificial Sequence
  Description of Artificial Sequence: Synthetic oligonucleotide
  modified_base (10)..(10): a, c, u, g, unknown or other
ugaccaaagnugacacucc

SEQ ID NO: 938665 - RNA, 19 nt, Artificial Sequence
  Description of Artificial Sequence: Synthetic oligonucleotide
agauagggaagaugcaauc

SEQ ID NO: 938666 - RNA, 19 nt, Artificial Sequence
  Description of Artificial Sequence: Synthetic oligonucleotide
auguauugaucccgaagac

SEQ ID NO: 938667 - RNA, 19 nt, Artificial Sequence
  Description of Artificial Sequence: Synthetic oligonucleotide
ugcauguguaccacagagg

SEQ ID NO: 938668 - RNA, 19 nt, Artificial Sequence
  Description of Artificial Sequence: Synthetic oligonucleotide
ugucguaaauuucccacca

SEQ ID NO: 938669 - RNA, 19 nt, Artificial Sequence
  Description of Artificial Sequence: Synthetic oligonucleotide
acaguugaccccaacacgg

SEQ ID NO: 938670 - RNA, 19 nt, Artificial Sequence
  Description of Artificial Sequence: Synthetic oligonucleotide
uuuagauagggaagaugca

SEQ ID NO: 938671 - RNA, 19 nt, Artificial Sequence
  Description of Artificial Sequence: Synthetic oligonucleotide
uuuugucaauacuccacag

SEQ ID NO: 938672 - RNA, 19 nt, Artificial Sequence
  Description of Artificial Sequence: Synthetic oligonucleotide
uguauugaucccgaagacc

SEQ ID NO: 938673 - RNA, 19 nt, Artificial Sequence
  Description of Artificial Sequence: Synthetic oligonucleotide
aggacgugcacauaguaga

SEQ ID NO: 938674 - RNA, 19 nt, Artificial Sequence
  Description of Artificial Sequence: Synthetic oligonucleotide
gaauacuaggcaucuccag

SEQ ID NO: 938675 - RNA, 19 nt, Artificial Sequence
  Description of Artificial Sequence: Synthetic oligonucleotide
ucguaaauuucccaccagu

SEQ ID NO: 938676 - RNA, 19 nt, Artificial Sequence
  Description of Artificial Sequence: Synthetic oligonucleotide
gaaagauuggcaccagcac

SEQ ID NO: 938677 - RNA, 19 nt, Artificial Sequence
  Description of Artificial Sequence: Synthetic oligonucleotide
agacaaucagguaguagcc

SEQ ID NO: 938678 - RNA, 19 nt, Artificial Sequence
  Description of Artificial Sequence: Synthetic oligonucleotide
uuagauagggaagaugcaa

SEQ ID NO: 938679 - RNA, 19 nt, Artificial Sequence
  Description of Artificial Sequence: Synthetic oligonucleotide
acguaggucauguagagua

SEQ ID NO: 938680 - RNA, 19 nt, Artificial Sequence
  Description of Artificial Sequence: Synthetic oligonucleotide
aguugaccccaacacgggc

SEQ ID NO: 938681 - RNA, 19 nt, Artificial Sequence
  Description of Artificial Sequence: Synthetic oligonucleotide
acggaguagaugcaaaacu

SEQ ID NO: 938682 - RNA, 19 nt, Artificial Sequence
  Description of Artificial Sequence: Synthetic oligonucleotide
aaccaguccggccuggaug

SEQ ID NO: 938683 - RNA, 19 nt, Artificial Sequence
  Description of Artificial Sequence: Synthetic oligonucleotide
ggacgcuuuagaaagaggg

SEQ ID NO: 938684 - RNA, 19 nt, Artificial Sequence
  Description of Artificial Sequence: Synthetic oligonucleotide
auggugacgcuguagaaga

SEQ ID NO: 938685 - RNA, 19 nt, Artificial Sequence
  Description of Artificial Sequence: Synthetic oligonucleotide
ugcacaagugcacugcggu

SEQ ID NO: 938686 - RNA, 19 nt, Artificial Sequence
  Description of Artificial Sequence: Synthetic oligonucleotide
gauggcuauaacacuugcg

SEQ ID NO: 938687 - RNA, 19 nt, Artificial Sequence
  Description of Artificial Sequence: Synthetic oligonucleotide
guauugaucccgaagacca

SEQ ID NO: 938688 - RNA, 19 nt, Artificial Sequence
  Description of Artificial Sequence: Synthetic oligonucleotide
cagcuuugaccacagagcc

SEQ ID NO: 938689 - RNA, 19 nt, Artificial Sequence
  Description of Artificial Sequence: Synthetic oligonucleotide
agccagacgcacaugaagc

SEQ ID NO: 938690 - RNA, 19 nt, Artificial Sequence
  Description of Artificial Sequence: Synthetic oligonucleotide
  modified_base (7)..(7): a, c, u, g, unknown or other
ccaaagnugacacuccacc

SEQ ID NO: 938691 - RNA, 19 nt, Artificial Sequence
  Description of Artificial Sequence: Synthetic oligonucleotide
aguaccucacgccauccag

SEQ ID NO: 938692 - RNA, 19 nt, Artificial Sequence
  Description of Artificial Sequence: Synthetic oligonucleotide
acguggaucacaaagccag

SEQ ID NO: 938693 - RNA, 19 nt, Artificial Sequence
  Description of Artificial Sequence: Synthetic oligonucleotide
uaguccgugagcagaaaga

SEQ ID NO: 938694 - RNA, 19 nt, Artificial Sequence
  Description of Artificial Sequence: Synthetic oligonucleotide
ucuuuagauagggaagaug

SEQ ID NO: 938695 - RNA, 19 nt, Artificial Sequence
  Description of Artificial Sequence: Synthetic oligonucleotide
gacgcuguagaagacuucc

SEQ ID NO: 938696 - RNA, 19 nt, Artificial Sequence
  Description of Artificial Sequence: Synthetic oligonucleotide
uguagaguacccagauaca

SEQ ID NO: 938697 - RNA, 19 nt, Artificial Sequence
  Description of Artificial Sequence: Synthetic oligonucleotide
uaggucauguagaguaccc

SEQ ID NO: 938698 - RNA, 19 nt, Artificial Sequence
  Description of Artificial Sequence: Synthetic oligonucleotide
  modified_base (9)..(9): a, c, u, g, unknown or other
ugcuuuucngccaccuggc

SEQ ID NO: 938699 - RNA, 19 nt, Artificial Sequence
  Description of Artificial Sequence: Synthetic oligonucleotide
acgcuuuagaaagagggag

SEQ ID NO: 938700 - RNA, 19 nt, Artificial Sequence
  Description of Artificial Sequence: Synthetic oligonucleotide
uuuucaacuuugaggccca

SEQ ID NO: 938701 - RNA, 19 nt, Artificial Sequence
  Description of Artificial Sequence: Synthetic oligonucleotide
agcggaucuucacgaagcc

SEQ ID NO: 938702 - RNA, 19 nt, Artificial Sequence
  Description of Artificial Sequence: Synthetic oligonucleotide
cacaguugaccccaacacg

SEQ ID NO: 938703 - RNA, 19 nt, Artificial Sequence
  Description of Artificial Sequence: Synthetic oligonucleotide
ugugguugucguaaauuuc

SEQ ID NO: 938704 - RNA, 19 nt, Artificial Sequence
  Description of Artificial Sequence: Synthetic oligonucleotide
ucuacggcgccauuguagu

SEQ ID NO: 938705 - RNA, 19 nt, Artificial Sequence
  Description of Artificial Sequence: Synthetic oligonucleotide
uugaguagcuggccaugcg

SEQ ID NO: 938706 - RNA, 19 nt, Artificial Sequence
  Description of Artificial Sequence: Synthetic oligonucleotide
agaaagauuggcaccagca

SEQ ID NO: 938707 - RNA, 19 nt, Artificial Sequence
  Description of Artificial Sequence: Synthetic oligonucleotide
  modified_base (3)..(3): a, c, u, g, unknown or other
ucngccaccuggccagugg

SEQ ID NO: 938708 - RNA, 19 nt, Artificial Sequence
  Description of Artificial Sequence: Synthetic oligonucleotide
guucacuuagcaugcacac

SEQ ID NO: 938709 - RNA, 19 nt, Artificial Sequence
  Description of Artificial Sequence: Synthetic oligonucleotide
ugucaauacuccacaggac

SEQ ID NO: 938710 - RNA, 19 nt, Artificial Sequence
  Description of Artificial Sequence: Synthetic oligonucleotide
auaacacuugcgaugacca

SEQ ID NO: 938711 - RNA, 19 nt, Artificial Sequence
  Description of Artificial Sequence: Synthetic oligonucleotide
aagaugcaaucugaaaagu

SEQ ID NO: 938712 - RNA, 19 nt, Artificial Sequence
  Description of Artificial Sequence: Synthetic oligonucleotide
uugagcauguuggaguucu

SEQ ID NO: 938713 - RNA, 19 nt, Artificial Sequence
  Description of Artificial Sequence: Synthetic oligonucleotide
ggcuauaacacuugcgaug

SEQ ID NO: 938714 - RNA, 19 nt, Artificial Sequence
  Description of Artificial Sequence: Synthetic oligonucleotide
  modified_base (11)..(11): a, c, u, g, unknown or other
gugaccaaagnugacacuc

SEQ ID NO: 938715 - RNA, 19 nt, Artificial Sequence
  Description of Artificial Sequence: Synthetic oligonucleotide
agaauucuccaagggacuc

SEQ ID NO: 938716 - RNA, 19 nt, Artificial Sequence
  Description of Artificial Sequence: Synthetic oligonucleotide
ugguugucguaaauuuccc

SEQ ID NO: 938717 - RNA, 19 nt, Artificial Sequence
  Description of Artificial Sequence: Synthetic oligonucleotide
cacagcuaaagcaugaugu

SEQ ID NO: 938718 - RNA, 19 nt, Artificial Sequence
  Description of Artificial Sequence: Synthetic oligonucleotide
acgguccucagagucaggc

SEQ ID NO: 938719 - RNA, 19 nt, Artificial Sequence
  Description of Artificial Sequence: Synthetic oligonucleotide
ggucauguagaguacccag

SEQ ID NO: 938720 - RNA, 19 nt, Artificial Sequence
  Description of Artificial Sequence: Synthetic oligonucleotide
caggacgugcacauaguag

SEQ ID NO: 938721 - RNA, 19 nt, Artificial Sequence
  Description of Artificial Sequence: Synthetic oligonucleotide
guaguccgugagcagaaag

SEQ ID NO: 938722 - RNA, 19 nt, Artificial Sequence
  Description of Artificial Sequence: Synthetic oligonucleotide
gaucccgaagaccaaggca

SEQ ID NO: 938723 - RNA, 19 nt, Artificial Sequence
  Description of Artificial Sequence: Synthetic oligonucleotide
acgugcacauaguagacaa

SEQ ID NO: 938724 - RNA, 19 nt, Artificial Sequence
  Description of Artificial Sequence: Synthetic oligonucleotide
caaucagguaguagccugc

SEQ ID NO: 938725 - RNA, 19 nt, Artificial Sequence
  Description of Artificial Sequence: Synthetic oligonucleotide
agcagagauagaauacuag

SEQ ID NO: 938726 - RNA, 19 nt, Artificial Sequence
  Description of Artificial Sequence: Synthetic oligonucleotide
gaacugguaggccccgcgg

SEQ ID NO: 938727 - RNA, 19 nt, Artificial Sequence
  Description of Artificial Sequence: Synthetic oligonucleotide
gcgaugaccagcuuugacc

SEQ ID NO: 938728 - RNA, 19 nt, Artificial Sequence
  Description of Artificial Sequence: Synthetic oligonucleotide
ugcgcugguagcgggaagg

SEQ ID NO: 938729 - RNA, 19 nt, Artificial Sequence
  Description of Artificial Sequence: Synthetic oligonucleotide
ucucaagcuugccucgcug

SEQ ID NO: 938730 - RNA, 19 nt, Artificial Sequence
  Description of Artificial Sequence: Synthetic oligonucleotide
agaugcaaucugaaaagug

SEQ ID NO: 938731 - RNA, 19 nt, Artificial Sequence
  Description of Artificial Sequence: Synthetic oligonucleotide
aucgcagguaguccgugag

SEQ ID NO: 938732 - RNA, 19 nt, Artificial Sequence
  Description of Artificial Sequence: Synthetic oligonucleotide
cuuguaucgcagguagucc

SEQ ID NO: 938733 - RNA, 19 nt, Artificial Sequence
  Description of Artificial Sequence: Synthetic oligonucleotide
ugucggagaccacaagcgu

SEQ ID NO: 938734 - RNA, 19 nt, Artificial Sequence
  Description of Artificial Sequence: Synthetic oligonucleotide
ggcacgaggaacugguagg

SEQ ID NO: 938735 - RNA, 19 nt, Artificial Sequence
  Description of Artificial Sequence: Synthetic oligonucleotide
gcucgugaaguuuuguugc

SEQ ID NO: 938736 - RNA, 19 nt, Artificial Sequence
  Description of Artificial Sequence: Synthetic oligonucleotide
  modified_base (7)..(7): a, c, u, g, unknown or other
cuuuucngccaccuggcca

SEQ ID NO: 938737 - RNA, 19 nt, Artificial Sequence
  Description of Artificial Sequence: Synthetic oligonucleotide
uagaguacccagauacaua

SEQ ID NO: 938738 - RNA, 19 nt, Artificial Sequence
  Description of Artificial Sequence: Synthetic oligonucleotide
ugacagaaagcaccaugaa

SEQ ID NO: 938739 - RNA, 19 nt, Artificial Sequence
  Description of Artificial Sequence: Synthetic oligonucleotide
uaacacuugcgaugaccag

SEQ ID NO: 938740 - RNA, 19 nt, Artificial Sequence
  Description of Artificial Sequence: Synthetic oligonucleotide
uuaggacgcuuuagaaaga

SEQ ID NO: 938741 - RNA, 19 nt, Artificial Sequence
  Description of Artificial Sequence: Synthetic oligonucleotide
uguaucgcagguaguccgu

SEQ ID NO: 938742 - RNA, 19 nt, Artificial Sequence
  Description of Artificial Sequence: Synthetic oligonucleotide
cuucacgaagcccgcagag

SEQ ID NO: 938743 - RNA, 19 nt, Artificial Sequence
  Description of Artificial Sequence: Synthetic oligonucleotide
uacggcgccauuguaguug

SEQ ID NO: 938744 - RNA, 19 nt, Artificial Sequence
  Description of Artificial Sequence: Synthetic oligonucleotide
aggauuggcuuguaucgca

SEQ ID NO: 938745 - RNA, 19 nt, Artificial Sequence
  Description of Artificial Sequence: Synthetic oligonucleotide
cugguggcgaccacgccgg

SEQ ID NO: 938746 - RNA, 19 nt, Artificial Sequence
  Description of Artificial Sequence: Synthetic oligonucleotide
uucacuuagcaugcacacc

SEQ ID NO: 938747 - RNA, 19 nt, Artificial Sequence
  Description of Artificial Sequence: Synthetic oligonucleotide
gaguucgcgguccugccug

SEQ ID NO: 938748 - RNA, 19 nt, Artificial Sequence
  Description of Artificial Sequence: Synthetic oligonucleotide
guagaugcaaaacuguuuu

SEQ ID NO: 938749 - RNA, 19 nt, Artificial Sequence
  Description of Artificial Sequence: Synthetic oligonucleotide
uuucccggguucuggucgg

SEQ ID NO: 938750 - RNA, 19 nt, Artificial Sequence
  Description of Artificial Sequence: Synthetic oligonucleotide
cacgccauccagcacggcc

SEQ ID NO: 938751 - RNA, 19 nt, Artificial Sequence
  Description of Artificial Sequence: Synthetic oligonucleotide
cucgcucuaguuucccggg

SEQ ID NO: 938752 - RNA, 19 nt, Artificial Sequence
  Description of Artificial Sequence: Synthetic oligonucleotide
ccgacaaagcagaugacag

SEQ ID NO: 938753 - RNA, 19 nt, Artificial Sequence
  Description of Artificial Sequence: Synthetic oligonucleotide
cacaagugcacugcgguug

SEQ ID NO: 938754 - RNA, 19 nt, Artificial Sequence
  Description of Artificial Sequence: Synthetic oligonucleotide
gauggcgcucagcagugug

SEQ ID NO: 938755 - RNA, 19 nt, Artificial Sequence
  Description of Artificial Sequence: Synthetic oligonucleotide
aagacccaccaaaggcacc

SEQ ID NO: 938756 - RNA, 19 nt, Artificial Sequence
  Description of Artificial Sequence: Synthetic oligonucleotide
caacuuugaggcccagacc

SEQ ID NO: 938757 - RNA, 19 nt, Artificial Sequence
  Description of Artificial Sequence: Synthetic oligonucleotide
ugcgaugaccagcuuugac

SEQ ID NO: 938758 - RNA, 19 nt, Artificial Sequence
  Description of Artificial Sequence: Synthetic oligonucleotide
acgccauccagcacggccc

SEQ ID NO: 938759 - RNA, 19 nt, Artificial Sequence
  Description of Artificial Sequence: Synthetic oligonucleotide
acuugcgaugaccagcuuu

SEQ ID NO: 938760 - RNA, 19 nt, Artificial Sequence
  Description of Artificial Sequence: Synthetic oligonucleotide
agaggcgcagcugugguug

SEQ ID NO: 938761 - RNA, 19 nt, Artificial Sequence
  Description of Artificial Sequence: Synthetic oligonucleotide
gaagacccaccaaaggcac

SEQ ID NO: 938762 - RNA, 19 nt, Artificial Sequence
  Description of Artificial Sequence: Synthetic oligonucleotide
guaggcugggccuacgguc

SEQ ID NO: 938763 - RNA, 19 nt, Artificial Sequence
  Description of Artificial Sequence: Synthetic oligonucleotide
auguaggcugggccuacgg

SEQ ID NO: 938764 - RNA, 19 nt, Artificial Sequence
  Description of Artificial Sequence: Synthetic oligonucleotide
uggcuauaacacuugcgau

SEQ ID NO: 938765 - RNA, 19 nt, Artificial Sequence
  Description of Artificial Sequence: Synthetic oligonucleotide
cagccagacgcacaugaag

SEQ ID NO: 938766 - RNA, 19 nt, Artificial Sequence
  Description of Artificial Sequence: Synthetic oligonucleotide
gggccuacgguccucagag

SEQ ID NO: 938767 - RNA, 19 nt, Artificial Sequence
  Description of Artificial Sequence: Synthetic oligonucleotide
aucuacggcgccauuguag

SEQ ID NO: 938768 - RNA, 19 nt, Artificial Sequence
  Description of Artificial Sequence: Synthetic oligonucleotide
aaucagguaguagccugca

SEQ ID NO: 938769 - RNA, 19 nt, Artificial Sequence
  Description of Artificial Sequence: Synthetic oligonucleotide
  modified_base (8)..(8): a, c, u, g, unknown or other
accaaagnugacacuccac

SEQ ID NO: 938770 - RNA, 19 nt, Artificial Sequence
  Description of Artificial Sequence: Synthetic oligonucleotide
  modified_base (18)..(18): a, c, u, g, unknown or other
caccaugccugcuuuucng

SEQ ID NO: 938771 - RNA, 19 nt, Artificial Sequence
  Description of Artificial Sequence: Synthetic oligonucleotide
ucgugaaguuuuguugcag

SEQ ID NO: 938772 - RNA, 19 nt, Artificial Sequence
  Description of Artificial Sequence: Synthetic oligonucleotide
agaauacuaggcaucucca

SEQ ID NO: 938773 - RNA, 19 nt, Artificial Sequence
  Description of Artificial Sequence: Synthetic oligonucleotide
ccucacgccauccagcacg

SEQ ID NO: 938774 - RNA, 19 nt, Artificial Sequence
  Description of Artificial Sequence: Synthetic oligonucleotide
caguugaccccaacacggg

SEQ ID NO: 938775 - RNA, 19 nt, Artificial Sequence
  Description of Artificial Sequence: Synthetic oligonucleotide
aguagggcagcaccggaau

SEQ ID NO: 938776 - RNA, 19 nt, Artificial Sequence
  Description of Artificial Sequence: Synthetic oligonucleotide
guggcgaccacgccggcag

SEQ ID NO: 938777 - RNA, 19 nt, Artificial Sequence
  Description of Artificial Sequence: Synthetic oligonucleotide
gucguaaauuucccaccag

SEQ ID NO: 938778 - RNA, 19 nt, Artificial Sequence
  Description of Artificial Sequence: Synthetic oligonucleotide
gcugguggcgaccacgccg

SEQ ID NO: 938779 - RNA, 19 nt, Artificial Sequence
  Description of Artificial Sequence: Synthetic oligonucleotide
caacugugccaugaagccg

SEQ ID NO: 938780 - RNA, 19 nt, Artificial Sequence
  Description of Artificial Sequence: Synthetic oligonucleotide
uggccaugcgcugguagcg

SEQ ID NO: 938781 - RNA, 19 nt, Artificial Sequence
  Description of Artificial Sequence: Synthetic oligonucleotide
aggcacagagcucuuuaga

SEQ ID NO: 938782 - RNA, 19 nt, Artificial Sequence
  Description of Artificial Sequence: Synthetic oligonucleotide
aguagaugcaaaacuguuu

SEQ ID NO: 938783 - RNA, 19 nt, Artificial Sequence
  Description of Artificial Sequence: Synthetic oligonucleotide
agaguugaagacccaccaa

SEQ ID NO: 938784 - RNA, 19 nt, Artificial Sequence
  Description of Artificial Sequence: Synthetic oligonucleotide
gcuauaacacuugcgauga

SEQ ID NO: 938785 - RNA, 19 nt, Artificial Sequence
  Description of Artificial Sequence: Synthetic oligonucleotide
ucuaguuucccggguucug

SEQ ID NO: 938786 - RNA, 19 nt, Artificial Sequence
  Description of Artificial Sequence: Synthetic oligonucleotide
gacgcuuuagaaagaggga

SEQ ID NO: 938787 - RNA, 19 nt, Artificial Sequence
  Description of Artificial Sequence: Synthetic oligonucleotide
aucagguaguagccugcag

SEQ ID NO: 938788 - RNA, 19 nt, Artificial Sequence
  Description of Artificial Sequence: Synthetic oligonucleotide
gcacguggaucacaaagcc

SEQ ID NO: 938789 - RNA, 19 nt, Artificial Sequence
  Description of Artificial Sequence: Synthetic oligonucleotide
uaucgcagguaguccguga

SEQ ID NO: 938790 - RNA, 19 nt, Artificial Sequence
  Description of Artificial Sequence: Synthetic oligonucleotide
acacggaguagaugcaaaa

SEQ ID NO: 938791 - RNA, 19 nt, Artificial Sequence
  Description of Artificial Sequence: Synthetic oligonucleotide
caguucacuuagcaugcac

SEQ ID NO: 938792 - RNA, 19 nt, Artificial Sequence
  Description of Artificial Sequence: Synthetic oligonucleotide
aaaccaguccggccuggau

SEQ ID NO: 938793 - RNA, 19 nt, Artificial Sequence
  Description of Artificial Sequence: Synthetic oligonucleotide
ugaguucgcgguccugccu

SEQ ID NO: 938794 - RNA, 19 nt, Artificial Sequence
  Description of Artificial Sequence: Synthetic oligonucleotide
uucacgaagcccgcagaga

SEQ ID NO: 938795 - RNA, 19 nt, Artificial Sequence
  Description of Artificial Sequence: Synthetic oligonucleotide
gccccgacaaagcagauga

SEQ ID NO: 938796 - RNA, 19 nt, Artificial Sequence
  Description of Artificial Sequence: Synthetic oligonucleotide
acaagcgugauggcagucu

SEQ ID NO: 938797 - RNA, 19 nt, Artificial Sequence
  Description of Artificial Sequence: Synthetic oligonucleotide
agcacggccaggugggagu

SEQ ID NO: 938798 - RNA, 19 nt, Artificial Sequence
  Description of Artificial Sequence: Synthetic oligonucleotide
uccugcauacuuggcaccu

SEQ ID NO: 938799 - RNA, 19 nt, Artificial Sequence
  Description of Artificial Sequence: Synthetic oligonucleotide
ucccgaagaccaaggcaca

SEQ ID NO: 938800 - RNA, 19 nt, Artificial Sequence
  Description of Artificial Sequence: Synthetic oligonucleotide
gcacguaggucauguagag

SEQ ID NO: 938801 - RNA, 19 nt, Artificial Sequence
  Description of Artificial Sequence: Synthetic oligonucleotide
caggauuggcuuguaucgc

SEQ ID NO: 938802 - RNA, 19 nt, Artificial Sequence
  Description of Artificial Sequence: Synthetic oligonucleotide
  modified_base (16)..(16): a, c, u, g, unknown or other
ccaugccugcuuuucngcc

SEQ ID NO: 938803 - RNA, 19 nt, Artificial Sequence
  Description of Artificial Sequence: Synthetic oligonucleotide
auaggcaauccaggcucac

SEQ ID NO: 938804 - RNA, 19 nt, Artificial Sequence
  Description of Artificial Sequence: Synthetic oligonucleotide
ggcgccauuguaguugagg

SEQ ID NO: 938805 - RNA, 19 nt, Artificial Sequence
  Description of Artificial Sequence: Synthetic oligonucleotide
  modified_base (6)..(6): a, c, u, g, unknown or other
caaagnugacacuccaccu

SEQ ID NO: 938806 - RNA, 19 nt, Artificial Sequence
  Description of Artificial Sequence: Synthetic oligonucleotide
ugggccuacgguccucaga

SEQ ID NO: 938807 - RNA, 19 nt, Artificial Sequence
  Description of Artificial Sequence: Synthetic oligonucleotide
ggcacguggaucacaaagc

SEQ ID NO: 938808 - RNA, 19 nt, Artificial Sequence
  Description of Artificial Sequence: Synthetic oligonucleotide
cacggccccgacaaagcag

SEQ ID NO: 938809 - RNA, 19 nt, Artificial Sequence
  Description of Artificial Sequence: Synthetic oligonucleotide
  modified_base (2)..(2): a, c, u, g, unknown or other
cngccaccuggccaguggg

SEQ ID NO: 938810 - RNA, 19 nt, Artificial Sequence
  Description of Artificial Sequence: Synthetic oligonucleotide
aguucgcgguccugccugg

SEQ ID NO: 938811 - RNA, 19 nt, Artificial Sequence
  Description of Artificial Sequence: Synthetic oligonucleotide
aggacgcuuuagaaagagg

SEQ ID NO: 938812 - RNA, 19 nt, Artificial Sequence
  Description of Artificial Sequence: Synthetic oligonucleotide
gaaauguaguugagcaugu

SEQ ID NO: 938813 - RNA, 19 nt, Artificial Sequence
  Description of Artificial Sequence: Synthetic oligonucleotide
cacugcugcccuugaguag

SEQ ID NO: 938814 - RNA, 19 nt, Artificial Sequence
  Description of Artificial Sequence: Synthetic oligonucleotide
guaccucacgccauccagc

SEQ ID NO: 938815 - RNA, 19 nt, Artificial Sequence
  Description of Artificial Sequence: Synthetic oligonucleotide
gcuuaggacgcuuuagaaa

SEQ ID NO: 938816 - RNA, 19 nt, Artificial Sequence
  Description of Artificial Sequence: Synthetic oligonucleotide
gucauguagaguacccaga

SEQ ID NO: 938817 - RNA, 19 nt, Artificial Sequence
  Description of Artificial Sequence: Synthetic oligonucleotide
guaggccccgcggaaaagc

SEQ ID NO: 938818 - RNA, 19 nt, Artificial Sequence
  Description of Artificial Sequence: Synthetic oligonucleotide
guagggcagcaccggaaug

SEQ ID NO: 938819 - RNA, 19 nt, Artificial Sequence
  Description of Artificial Sequence: Synthetic oligonucleotide
aggucauguagaguaccca

SEQ ID NO: 938820 - RNA, 19 nt, Artificial Sequence
  Description of Artificial Sequence: Synthetic oligonucleotide
gacgugcacauaguagaca

SEQ ID NO: 938821 - RNA, 19 nt, Artificial Sequence
  Description of Artificial Sequence: Synthetic oligonucleotide
gguugucguaaauuuccca

SEQ ID NO: 938822 - RNA, 19 nt, Artificial Sequence
  Description of Artificial Sequence: Synthetic oligonucleotide
cucgugaaguuuuguugca

SEQ ID NO: 938823 - RNA, 19 nt, Artificial Sequence
  Description of Artificial Sequence: Synthetic oligonucleotide
gaagaagcagagauagaau

SEQ ID NO: 938824 - RNA, 19 nt, Artificial Sequence
  Description of Artificial Sequence: Synthetic oligonucleotide
gcucuuuagauagggaaga

SEQ ID NO: 938825 - RNA, 19 nt, Artificial Sequence
  Description of Artificial Sequence: Synthetic oligonucleotide
guguggaggcagcaucuac

SEQ ID NO: 938826 - RNA, 19 nt, Artificial Sequence
  Description of Artificial Sequence: Synthetic oligonucleotide
accucacgccauccagcac

SEQ ID NO: 938827 - RNA, 19 nt, Artificial Sequence
  Description of Artificial Sequence: Synthetic oligonucleotide
caaguccucaugggaacug

SEQ ID NO: 938828 - RNA, 19 nt, Artificial Sequence
  Description of Artificial Sequence: Synthetic oligonucleotide
ucgcucuaguuucccgggu

SEQ ID NO: 938829 - RNA, 19 nt, Artificial Sequence
  Description of Artificial Sequence: Synthetic oligonucleotide
ccaaaggcaccagaggcgc

SEQ ID NO: 938830 - RNA, 19 nt, Artificial Sequence
  Description of Artificial Sequence: Synthetic oligonucleotide
guagaguacccagauacau

SEQ ID NO: 938831 - RNA, 19 nt, Artificial Sequence
  Description of Artificial Sequence: Synthetic oligonucleotide
auguuggaguucugggauu

SEQ ID NO: 938832 - RNA, 19 nt, Artificial Sequence
  Description of Artificial Sequence: Synthetic oligonucleotide
aagcgugauggcagucuug

SEQ ID NO: 938833 - RNA, 19 nt, Artificial Sequence
  Description of Artificial Sequence: Synthetic oligonucleotide
guaccacagaggugcccag

SEQ ID NO: 938834 - RNA, 19 nt, Artificial Sequence
  Description of Artificial Sequence: Synthetic oligonucleotide
cuauaacacuugcgaugac

SEQ ID NO: 938835 - RNA, 19 nt, Artificial Sequence
  Description of Artificial Sequence: Synthetic oligonucleotide
cacgccggcaguaccucac

SEQ ID NO: 938836 - RNA, 19 nt, Artificial Sequence
  Description of Artificial Sequence: Synthetic oligonucleotide
acgccggcaguaccucacg

SEQ ID NO: 938837 - RNA, 19 nt, Artificial Sequence
  Description of Artificial Sequence: Synthetic oligonucleotide
gacgcacaugaagcucagg

SEQ ID NO: 938838 - RNA, 19 nt, Artificial Sequence
  Description of Artificial Sequence: Synthetic oligonucleotide
augcgcgcagccaugguga

SEQ ID NO: 938839 - RNA, 19 nt, Artificial Sequence
  Description of Artificial Sequence: Synthetic oligonucleotide
ggauuggcuuguaucgcag

SEQ ID NO: 938840 - RNA, 19 nt, Artificial Sequence
  Description of Artificial Sequence: Synthetic oligonucleotide
gcuaaggcgggcuggccug

SEQ ID NO: 938841 - RNA, 19 nt, Artificial Sequence
  Description of Artificial Sequence: Synthetic oligonucleotide
ccgcggaaaagcacguagg

SEQ ID NO: 938842 - RNA, 19 nt, Artificial Sequence
  Description of Artificial Sequence: Synthetic oligonucleotide
cagacaugauuuguccuga

SEQ ID NO: 938843 - RNA, 19 nt, Artificial Sequence
  Description of Artificial Sequence: Synthetic oligonucleotide
agcugugguugucguaaau

SEQ ID NO: 938844 - RNA, 19 nt, Artificial Sequence
  Description of Artificial Sequence: Synthetic oligonucleotide
caaggcacagagcucuuua

SEQ ID NO: 938845 - RNA, 19 nt, Artificial Sequence
  Description of Artificial Sequence: Synthetic oligonucleotide
ggccccgcggaaaagcacg

SEQ ID NO: 938846 - RNA, 19 nt, Artificial Sequence
  Description of Artificial Sequence: Synthetic oligonucleotide
aggaugugauggcgcucag

SEQ ID NO: 938847 - RNA, 19 nt, Artificial Sequence
  Description of Artificial Sequence: Synthetic oligonucleotide
guagcgggaagggcgcacc

SEQ ID NO: 938848 - RNA, 19 nt, Artificial Sequence
  Description of Artificial Sequence: Synthetic oligonucleotide
guaucgcagguaguccgug

SEQ ID NO: 938849 - RNA, 19 nt, Artificial Sequence
  Description of Artificial Sequence: Synthetic oligonucleotide
acggccccgacaaagcaga

SEQ ID NO: 938850 - RNA, 19 nt, Artificial Sequence
  Description of Artificial Sequence: Synthetic oligonucleotide
  modified_base (8)..(8): a, c, u, g, unknown or other
gcuuuucngccaccuggcc

SEQ ID NO: 938851 - RNA, 19 nt, Artificial Sequence
  Description of Artificial Sequence: Synthetic oligonucleotide
ccacagcuaaagcaugaug

SEQ ID NO: 938852 - RNA, 19 nt, Artificial Sequence
  Description of Artificial Sequence: Synthetic oligonucleotide
ccagcggaucuucacgaag

SEQ ID NO: 938853 - RNA, 19 nt, Artificial Sequence
  Description of Artificial Sequence: Synthetic oligonucleotide
cgaagaagcagagauagaa

SEQ ID NO: 938854 - RNA, 19 nt, Artificial Sequence
  Description of Artificial Sequence: Synthetic oligonucleotide
  modified_base (4)..(4): a, c, u, g, unknown or other
uucngccaccuggccagug

SEQ ID NO: 938855 - RNA, 19 nt, Artificial Sequence
  Description of Artificial Sequence: Synthetic oligonucleotide
  modified_base (13)..(13): a, c, u, g, unknown or other
ugccugcuuuucngccacc

SEQ ID NO: 938856 - RNA, 19 nt, Artificial Sequence
  Description of Artificial Sequence: Synthetic oligonucleotide
ggcaaggaauguauugauc

SEQ ID NO: 938857 - RNA, 19 nt, Artificial Sequence
  Description of Artificial Sequence: Synthetic oligonucleotide
cuaaggcgggcuggccugg

SEQ ID NO: 938858 - RNA, 19 nt, Artificial Sequence
  Description of Artificial Sequence: Synthetic oligonucleotide
accacgccggcaguaccuc

SEQ ID NO: 938859 - RNA, 19 nt, Artificial Sequence
  Description of Artificial Sequence: Synthetic oligonucleotide
ccaacacgggcucuucuug

SEQ ID NO: 938860 - RNA, 19 nt, Artificial Sequence
  Description of Artificial Sequence: Synthetic oligonucleotide
cccuaggccuccauccugc

SEQ ID NO: 938861 - RNA, 19 nt, Artificial Sequence
  Description of Artificial Sequence: Synthetic oligonucleotide
agacgcacaugaagcucag

SEQ ID NO: 938862 - RNA, 19 nt, Artificial Sequence
  Description of Artificial Sequence: Synthetic oligonucleotide
uugcgaugaccagcuuuga

SEQ ID NO: 938863 - RNA, 19 nt, Artificial Sequence
  Description of Artificial Sequence: Synthetic oligonucleotide
gcacgaggaacugguaggc

SEQ ID NO: 938864 - RNA, 19 nt, Artificial Sequence
  Description of Artificial Sequence: Synthetic oligonucleotide
gcucuaguuucccggguuc

SEQ ID NO: 938865 - RNA, 19 nt, Artificial Sequence
  Description of Artificial Sequence: Synthetic oligonucleotide
agcccgcagagaaggaugu

SEQ ID NO: 938866 - RNA, 19 nt, Artificial Sequence
  Description of Artificial Sequence: Synthetic oligonucleotide
cacgggcucuucuuggcaa

SEQ ID NO: 938867 - RNA, 19 nt, Artificial Sequence
  Description of Artificial Sequence: Synthetic oligonucleotide
ugcgcgcagccauggugac

SEQ ID NO: 938868 - RNA, 19 nt, Artificial Sequence
  Description of Artificial Sequence: Synthetic oligonucleotide
ggaauguauugaucccgaa

SEQ ID NO: 938869 - RNA, 19 nt, Artificial Sequence
  Description of Artificial Sequence: Synthetic oligonucleotide
cugcaggaucaggauuggc

SEQ ID NO: 938870 - RNA, 19 nt, Artificial Sequence
  Description of Artificial Sequence: Synthetic oligonucleotide
cuaaagcaugauguaggcu

SEQ ID NO: 938871 - RNA, 19 nt, Artificial Sequence
  Description of Artificial Sequence: Synthetic oligonucleotide
cggaaugaucucauugguc

SEQ ID NO: 938872 - RNA, 19 nt, Artificial Sequence
  Description of Artificial Sequence: Synthetic oligonucleotide
gcccagggaaauguaguug

SEQ ID NO: 938873 - RNA, 19 nt, Artificial Sequence
  Description of Artificial Sequence: Synthetic oligonucleotide
gcaagccauaggcaaucca

SEQ ID NO: 938874 - RNA, 19 nt, Artificial Sequence
  Description of Artificial Sequence: Synthetic oligonucleotide
cguaggucauguagaguac

SEQ ID NO: 938875 - RNA, 19 nt, Artificial Sequence
  Description of Artificial Sequence: Synthetic oligonucleotide
cgcgcagccauggugacgc

SEQ ID NO: 938876 - RNA, 19 nt, Artificial Sequence
  Description of Artificial Sequence: Synthetic oligonucleotide
caguaccucacgccaucca

SEQ ID NO: 938877 - RNA, 19 nt, Artificial Sequence
  Description of Artificial Sequence: Synthetic oligonucleotide
gcggaaaagcacguagguc

SEQ ID NO: 938878 - RNA, 19 nt, Artificial Sequence
  Description of Artificial Sequence: Synthetic oligonucleotide
cacagagcccagcggaucu

SEQ ID NO: 938879 - RNA, 19 nt, Artificial Sequence
  Description of Artificial Sequence: Synthetic oligonucleotide
acgcuguagaagacuucca

SEQ ID NO: 938880 - RNA, 19 nt, Artificial Sequence
  Description of Artificial Sequence: Synthetic oligonucleotide
ucccggguucuggucggcc

SEQ ID NO: 938881 - RNA, 19 nt, Artificial Sequence
  Description of Artificial Sequence: Synthetic oligonucleotide
  modified_base (5)..(5): a, c, u, g, unknown or other
uuucngccaccuggccagu

SEQ ID NO: 938882 - RNA, 19 nt, Artificial Sequence
  Description of Artificial Sequence: Synthetic oligonucleotide
ugauggcgcucagcagugu

SEQ ID NO: 938883 - RNA, 19 nt, Artificial Sequence
  Description of Artificial Sequence: Synthetic oligonucleotide
ucgcagggcaaggcuuugu

SEQ ID NO: 938884 - RNA, 19 nt, Artificial Sequence
  Description of Artificial Sequence: Synthetic oligonucleotide
cacaagcgugauggcaguc

SEQ ID NO: 938885 - RNA, 19 nt, Artificial Sequence
  Description of Artificial Sequence: Synthetic oligonucleotide
agccgaagaagcagagaua

SEQ ID NO: 938886 - RNA, 19 nt, Artificial Sequence
  Description of Artificial Sequence: Synthetic oligonucleotide
gcccagcggaucuucacga

SEQ ID NO: 938887 - RNA, 19 nt, Artificial Sequence
  Description of Artificial Sequence: Synthetic oligonucleotide
ggaguaggcgaugcgcgca

SEQ ID NO: 938888 - RNA, 19 nt, Artificial Sequence
  Description of Artificial Sequence: Synthetic oligonucleotide
gacuugaguucgcgguccu

SEQ ID NO: 938889 - RNA, 19 nt, Artificial Sequence
  Description of Artificial Sequence: Synthetic oligonucleotide
agcucgcagggcaaggcuu

SEQ ID NO: 938890 - RNA, 19 nt, Artificial Sequence
  Description of Artificial Sequence: Synthetic oligonucleotide
cagagcccagcggaucuuc

SEQ ID NO: 938891 - RNA, 19 nt, Artificial Sequence
  Description of Artificial Sequence: Synthetic oligonucleotide
agcgcccuggcacguggau

SEQ ID NO: 938892 - RNA, 19 nt, Artificial Sequence
  Description of Artificial Sequence: Synthetic oligonucleotide
agaccccguuugucggaga

SEQ ID NO: 938893 - RNA, 19 nt, Artificial Sequence
  Description of Artificial Sequence: Synthetic oligonucleotide
ggccaugcgcugguagcgg

SEQ ID NO: 938894 - RNA, 19 nt, Artificial Sequence
  Description of Artificial Sequence: Synthetic oligonucleotide
guucgcgguccugccuggg

SEQ ID NO: 938895 - RNA, 19 nt, Artificial Sequence
  Description of Artificial Sequence: Synthetic oligonucleotide
ggcaagccauaggcaaucc

SEQ ID NO: 938896 - RNA, 19 nt, Artificial Sequence
  Description of Artificial Sequence: Synthetic oligonucleotide
gcaguaccucacgccaucc

SEQ ID NO: 938897 - RNA, 19 nt, Artificial Sequence
  Description of Artificial Sequence: Synthetic oligonucleotide
gcaucuacggcgccauugu

SEQ ID NO: 938898 - RNA, 19 nt, Artificial Sequence
  Description of Artificial Sequence: Synthetic oligonucleotide
gcgaugcgcgcagccaugg

SEQ ID NO: 938899 - RNA, 19 nt, Artificial Sequence
  Description of Artificial Sequence: Synthetic oligonucleotide
gugacgcuguagaagacuu

SEQ ID NO: 938900 - RNA, 19 nt, Artificial Sequence
  Description of Artificial Sequence: Synthetic oligonucleotide
ucacagcgcccuggcacgu

SEQ ID NO: 938901 - RNA, 19 nt, Artificial Sequence
  Description of Artificial Sequence: Synthetic oligonucleotide
  modified_base (12)..(12): a, c, u, g, unknown or other
ggugaccaaagnugacacu

SEQ ID NO: 938902 - RNA, 19 nt, Artificial Sequence
  Description of Artificial Sequence: Synthetic oligonucleotide
ccggcaguaccucacgcca

SEQ ID NO: 938903 - RNA, 19 nt, Artificial Sequence
  Description of Artificial Sequence: Synthetic oligonucleotide
gcgugauggcagucuugag

SEQ ID NO: 938904 - RNA, 19 nt, Artificial Sequence
  Description of Artificial Sequence: Synthetic oligonucleotide
gguaggccccgcggaaaag

SEQ ID NO: 938905 - RNA, 19 nt, Artificial Sequence
  Description of Artificial Sequence: Synthetic oligonucleotide
caugcgcugguagcgggaa

SEQ ID NO: 938906 - RNA, 19 nt, Artificial Sequence
  Description of Artificial Sequence: Synthetic oligonucleotide
uggcgaccacgccggcagu

SEQ ID NO: 938907 - RNA, 19 nt, Artificial Sequence
  Description of Artificial Sequence: Synthetic oligonucleotide
ggggcuaaggcgggcuggc

SEQ ID NO: 938908 - RNA, 19 nt, Artificial Sequence
  Description of Artificial Sequence: Synthetic oligonucleotide
uucccggguucuggucggc

SEQ ID NO: 938909 - RNA, 19 nt, Artificial Sequence
  Description of Artificial Sequence: Synthetic oligonucleotide
caucuacggcgccauugua

SEQ ID NO: 938910 - RNA, 19 nt, Artificial Sequence
  Description of Artificial Sequence: Synthetic oligonucleotide
ccguuugucggagaccaca

SEQ ID NO: 938911 - RNA, 19 nt, Artificial Sequence
  Description of Artificial Sequence: Synthetic oligonucleotide
caagcgugauggcagucuu

SEQ ID NO: 938912 - RNA, 19 nt, Artificial Sequence
  Description of Artificial Sequence: Synthetic oligonucleotide
caacugcccagcacucgcu

SEQ ID NO: 938913 - RNA, 19 nt, Artificial Sequence
  Description of Artificial Sequence: Synthetic oligonucleotide
ggccgcaacugugccauga

SEQ ID NO: 938914 - RNA, 19 nt, Artificial Sequence
  Description of Artificial Sequence: Synthetic oligonucleotide
ggcugguggcgaccacgcc

SEQ ID NO: 938915 - RNA, 19 nt, Artificial Sequence
  Description of Artificial Sequence: Synthetic oligonucleotide
cguuugucggagaccacaa

SEQ ID NO: 938916 - RNA, 19 nt, Artificial Sequence
  Description of Artificial Sequence: Synthetic oligonucleotide
cagcucgcagggcaaggcu

SEQ ID NO: 938917 - RNA, 19 nt, Artificial Sequence
  Description of Artificial Sequence: Synthetic oligonucleotide
cacagcgcccuggcacgug

SEQ ID NO: 938918 - RNA, 19 nt, Artificial Sequence
  Description of Artificial Sequence: Synthetic oligonucleotide
cacggccaggugggaguag

SEQ ID NO: 938919 - RNA, 19 nt, Artificial Sequence
  Description of Artificial Sequence: Synthetic oligonucleotide
gaggcgcagcugugguugu

SEQ ID NO: 938920 - RNA, 19 nt, Artificial Sequence
  Description of Artificial Sequence: Synthetic oligonucleotide
ccgaagaagcagagauaga

SEQ ID NO: 938921 - RNA, 19 nt, Artificial Sequence
  Description of Artificial Sequence: Synthetic oligonucleotide
ccggaaugaucucauuggu

SEQ ID NO: 938922 - RNA, 19 nt, Artificial Sequence
  Description of Artificial Sequence: Synthetic oligonucleotide
uccggccuggauggcuaua

SEQ ID NO: 938923 - RNA, 19 nt, Artificial Sequence
  Description of Artificial Sequence: Synthetic oligonucleotide
caguggcaaggaauguauu

SEQ ID NO: 938924 - RNA, 19 nt, Artificial Sequence
  Description of Artificial Sequence: Synthetic oligonucleotide
gggcacaguugaccccaac

SEQ ID NO: 938925 - RNA, 19 nt, Artificial Sequence
  Description of Artificial Sequence: Synthetic oligonucleotide
ccccgacaaagcagaugac

SEQ ID NO: 938926 - RNA, 19 nt, Artificial Sequence
  Description of Artificial Sequence: Synthetic oligonucleotide
ggcccagaccccguuuguc

SEQ ID NO: 938927 - RNA, 19 nt, Artificial Sequence
  Description of Artificial Sequence: Synthetic oligonucleotide
ccacagagcccagcggauc

SEQ ID NO: 938928 - RNA, 19 nt, Artificial Sequence
  Description of Artificial Sequence: Synthetic oligonucleotide
gcgaccacgccggcaguac

SEQ ID NO: 938929 - RNA, 19 nt, Artificial Sequence
  Description of Artificial Sequence: Synthetic oligonucleotide
gguaguccgugagcagaaa

SEQ ID NO: 938930 - RNA, 19 nt, Artificial Sequence
  Description of Artificial Sequence: Synthetic oligonucleotide
gcgcgcagccauggugacg

SEQ ID NO: 938931 - RNA, 19 nt, Artificial Sequence
  Description of Artificial Sequence: Synthetic oligonucleotide
guccgugagcagaaagauu

SEQ ID NO: 938932 - RNA, 19 nt, Artificial Sequence
  Description of Artificial Sequence: Synthetic oligonucleotide
cgaccacgccggcaguacc

SEQ ID NO: 938933 - RNA, 19 nt, Artificial Sequence
  Description of Artificial Sequence: Synthetic oligonucleotide
cccguuugucggagaccac

SEQ ID NO: 938934 - RNA, 19 nt, Artificial Sequence
  Description of Artificial Sequence: Synthetic oligonucleotide
ccgcagagaaggaugugau

SEQ ID NO: 938935 - RNA, 19 nt, Artificial Sequence
  Description of Artificial Sequence: Synthetic oligonucleotide
cgccggcaguaccucacgc

SEQ ID NO: 938936 - RNA, 19 nt, Artificial Sequence
  Description of Artificial Sequence: Synthetic oligonucleotide
cgcggaaaagcacguaggu

SEQ ID NO: 938937 - RNA, 19 nt, Artificial Sequence
  Description of Artificial Sequence: Synthetic oligonucleotide
gggcaccauguugcccaag

SEQ ID NO: 938938 - RNA, 19 nt, Artificial Sequence
  Description of Artificial Sequence: Synthetic oligonucleotide
cuacggcgccauuguaguu

SEQ ID NO: 938939 - RNA, 19 nt, Artificial Sequence
  Description of Artificial Sequence: Synthetic oligonucleotide
gcgcccuggcacguggauc

SEQ ID NO: 938940 - RNA, 19 nt, Artificial Sequence
  Description of Artificial Sequence: Synthetic oligonucleotide
ccacaagcgugauggcagu

SEQ ID NO: 938941 - RNA, 19 nt, Artificial Sequence
  Description of Artificial Sequence: Synthetic oligonucleotide
cccaacacgggcucuucuu

SEQ ID NO: 938942 - RNA, 19 nt, Artificial Sequence
  Description of Artificial Sequence: Synthetic oligonucleotide
ccacgccggcaguaccuca

SEQ ID NO: 938943 - RNA, 19 nt, Artificial Sequence
  Description of Artificial Sequence: Synthetic oligonucleotide
ggccuacgguccucagagu

SEQ ID NO: 938944 - RNA, 19 nt, Artificial Sequence
  Description of Artificial Sequence: Synthetic oligonucleotide
gcucgcagggcaaggcuuu

SEQ ID NO: 938945 - RNA, 19 nt, Artificial Sequence
  Description of Artificial Sequence: Synthetic oligonucleotide
cgugcacauaguagacaau

SEQ ID NO: 938946 - RNA, 19 nt, Artificial Sequence
  Description of Artificial Sequence: Synthetic oligonucleotide
cacuugcgaugaccagcuu

SEQ ID NO: 938947 - RNA, 19 nt, Artificial Sequence
  Description of Artificial Sequence: Synthetic oligonucleotide
cgggugcaucugguccagc

SEQ ID NO: 938948 - RNA, 19 nt, Artificial Sequence
  Description of Artificial Sequence: Synthetic oligonucleotide
ccccgcggaaaagcacgua

SEQ ID NO: 938949 - RNA, 19 nt, Artificial Sequence
  Description of Artificial Sequence: Synthetic oligonucleotide
gcgcagccauggugacgcu

SEQ ID NO: 938950 - RNA, 19 nt, Artificial Sequence
  Description of Artificial Sequence: Synthetic oligonucleotide
aauuccuugaggcagaaag

SEQ ID NO: 938951 - RNA, 19 nt, Artificial Sequence
  Description of Artificial Sequence: Synthetic oligonucleotide
cuaauuugcaaccauaccg

SEQ ID NO: 938952 - RNA, 19 nt, Artificial Sequence
  Description of Artificial Sequence: Synthetic oligonucleotide
uaauuugcaaccauaccgg

SEQ ID NO: 938953 - RNA, 19 nt, Artificial Sequence
  Description of Artificial Sequence: Synthetic oligonucleotide
aguauugggaaagagagac

SEQ ID NO: 938954 - RNA, 19 nt, Artificial Sequence
  Description of Artificial Sequence: Synthetic oligonucleotide
caaguauugggaaagagag

SEQ ID NO: 938955 - RNA, 19 nt, Artificial Sequence
  Description of Artificial Sequence: Synthetic oligonucleotide
gauugauacagguugagug

SEQ ID NO: 938956 - RNA, 19 nt, Artificial Sequence
  Description of Artificial Sequence: Synthetic oligonucleotide
aacaugguugccuaggcag

SEQ ID NO: 938957 - RNA, 19 nt, Artificial Sequence
  Description of Artificial Sequence: Synthetic oligonucleotide
agcccuuugguacaaagcc

SEQ ID NO: 938958 - RNA, 19 nt, Artificial Sequence
  Description of Artificial Sequence: Synthetic oligonucleotide
auuugaaucaauagcagcg

SEQ ID NO: 938959 - RNA, 19 nt, Artificial Sequence
  Description of Artificial Sequence: Synthetic oligonucleotide
agcgaaacuucuuaggugg

SEQ ID NO: 938960 - RNA, 19 nt, Artificial Sequence
  Description of Artificial Sequence: Synthetic oligonucleotide
agagacaugauugauacag

SEQ ID NO: 938961 - RNA, 19 nt, Artificial Sequence
  Description of Artificial Sequence: Synthetic oligonucleotide
aauagcagcgucuaauccu

SEQ ID NO: 938962 - RNA, 19 nt, Artificial Sequence
  Description of Artificial Sequence: Synthetic oligonucleotide
uagcauacagauaagugcc

SEQ ID NO: 938963 - RNA, 19 nt, Artificial Sequence
  Description of Artificial Sequence: Synthetic oligonucleotide
agggacuaagguuucagcc

SEQ ID NO: 938964 - RNA, 19 nt, Artificial Sequence
  Description of Artificial Sequence: Synthetic oligonucleotide
ucaaguggaauccuggggc

SEQ ID NO: 938965 - RNA, 19 nt, Artificial Sequence
  Description of Artificial Sequence: Synthetic oligonucleotide
gaucuuacagcgcagcagg

SEQ ID NO: 938966 - RNA, 19 nt, Artificial Sequence
  Description of Artificial Sequence: Synthetic oligonucleotide
acagauaagugccuacacc

SEQ ID NO: 938967 - RNA, 19 nt, Artificial Sequence
  Description of Artificial Sequence: Synthetic oligonucleotide
acuagcuggacaugggucc

SEQ ID NO: 938968 - RNA, 19 nt, Artificial Sequence
  Description of Artificial Sequence: Synthetic oligonucleotide
uuugcaaccauaccgggac

SEQ ID NO: 938969 - RNA, 19 nt, Artificial Sequence
  Description of Artificial Sequence: Synthetic oligonucleotide
ugagugaauaauauacaac

SEQ ID NO: 938970 - RNA, 19 nt, Artificial Sequence
  Description of Artificial Sequence: Synthetic oligonucleotide
acaguccuuagagagagcc

SEQ ID NO: 938971 - RNA, 19 nt, Artificial Sequence
  Description of Artificial Sequence: Synthetic oligonucleotide
ugagcgaaacuucuuaggu

SEQ ID NO: 938972 - RNA, 19 nt, Artificial Sequence
  Description of Artificial Sequence: Synthetic oligonucleotide
auugauacagguugaguga

SEQ ID NO: 938973 - RNA, 19 nt, Artificial Sequence
  Description of Artificial Sequence: Synthetic oligonucleotide
ugaaucaauagcagcgucu

SEQ ID NO: 938974 - RNA, 19 nt, Artificial Sequence
  Description of Artificial Sequence: Synthetic oligonucleotide
gauaagugccuacaccaag

SEQ ID NO: 938975 - RNA, 19 nt, Artificial Sequence
  Description of Artificial Sequence: Synthetic oligonucleotide
aaggcugugcccgggagcc

SEQ ID NO: 938976 - RNA, 19 nt, Artificial Sequence
  Description of Artificial Sequence: Synthetic oligonucleotide
aguccuuagagagagcccg

SEQ ID NO: 938977 - RNA, 19 nt, Artificial Sequence
  Description of Artificial Sequence: Synthetic oligonucleotide
cuuacagcgcagcaggucc

SEQ ID NO: 938978 - RNA, 19 nt, Artificial Sequence
  Description of Artificial Sequence: Synthetic oligonucleotide
cuuuguuggugcuaucugc

SEQ ID NO: 938979 - RNA, 19 nt, Artificial Sequence
  Description of Artificial Sequence: Synthetic oligonucleotide
ugacuauccagcaaagaau

SEQ ID NO: 938980 - RNA, 19 nt, Artificial Sequence
  Description of Artificial Sequence: Synthetic oligonucleotide
ugucaccucagucagugca

SEQ ID NO: 938981 - RNA, 19 nt, Artificial Sequence
  Description of Artificial Sequence: Synthetic oligonucleotide
gguugagugaauaauauac

SEQ ID NO: 938982 - RNA, 19 nt, Artificial Sequence
  Description of Artificial Sequence: Synthetic oligonucleotide
uggaaccaaagaaaaguga

SEQ ID NO: 938983 - RNA, 19 nt, Artificial Sequence
  Description of Artificial Sequence: Synthetic oligonucleotide
ugcucuaagaguguggcca

SEQ ID NO: 938984 - RNA, 19 nt, Artificial Sequence
  Description of Artificial Sequence: Synthetic oligonucleotide
agaaaagugagcgaaacuu

SEQ ID NO: 938985 - RNA, 19 nt, Artificial Sequence
  Description of Artificial Sequence: Synthetic oligonucleotide
agcauagccccuuuuccac

SEQ ID NO: 938986 - RNA, 19 nt, Artificial Sequence
  Description of Artificial Sequence: Synthetic oligonucleotide
ucuugcucuaagagugugg

SEQ ID NO: 938987 - RNA, 19 nt, Artificial Sequence
  Description of Artificial Sequence: Synthetic oligonucleotide
cuagaggcuauuaggauuc

SEQ ID NO: 938988 - RNA, 19 nt, Artificial Sequence
  Description of Artificial Sequence: Synthetic oligonucleotide
uucgggauagcgaauggac

SEQ ID NO: 938989 - RNA, 19 nt, Artificial Sequence
  Description of Artificial Sequence: Synthetic oligonucleotide
accgggacaggacacgacc

SEQ ID NO: 938990 - RNA, 19 nt, Artificial Sequence
  Description of Artificial Sequence: Synthetic oligonucleotide
ugaucaggcacuucauggc

SEQ ID NO: 938991 - RNA, 19 nt, Artificial Sequence
  Description of Artificial Sequence: Synthetic oligonucleotide
gagguuguguguuuucuug

SEQ ID NO: 938992 - RNA, 19 nt, Artificial Sequence
  Description of Artificial Sequence: Synthetic oligonucleotide
aucuaagugggguaugcug

SEQ ID NO: 938993 - RNA, 19 nt, Artificial Sequence
  Description of Artificial Sequence: Synthetic oligonucleotide
aggcuauuaggauuccagg

SEQ ID NO: 938994 - RNA, 19 nt, Artificial Sequence
  Description of Artificial Sequence: Synthetic oligonucleotide
guaaagaugacuggccugc

SEQ ID NO: 938995 - RNA, 19 nt, Artificial Sequence
  Description of Artificial Sequence: Synthetic oligonucleotide
cuucaaguggaauccuggg

SEQ ID NO: 938996 - RNA, 19 nt, Artificial Sequence
  Description of Artificial Sequence: Synthetic oligonucleotide
ucuagaggcuauuaggauu

SEQ ID NO: 938997 - RNA, 19 nt, Artificial Sequence
  Description of Artificial Sequence: Synthetic oligonucleotide
ggaaccaaagaaaagugag

SEQ ID NO: 938998 - RNA, 19 nt, Artificial Sequence
  Description of Artificial Sequence: Synthetic oligonucleotide
ucgacccuaauuugcaacc

SEQ ID NO: 938999 - RNA, 19 nt, Artificial Sequence
  Description of Artificial Sequence: Synthetic oligonucleotide
ucaauagcagcgucuaauc

SEQ ID NO: 939000 - RNA, 19 nt, Artificial Sequence
  Description of Artificial Sequence: Synthetic oligonucleotide
gaggcuauuaggauuccag

SEQ ID NO: 939001 - RNA, 19 nt, Artificial Sequence
  Description of Artificial Sequence: Synthetic oligonucleotide
uacagauaagugccuacac

SEQ ID NO: 939002 - RNA, 19 nt, Artificial Sequence
  Description of Artificial Sequence: Synthetic oligonucleotide
aaacaugguugccuaggca

SEQ ID NO: 939003 - RNA, 19 nt, Artificial Sequence
  Description of Artificial Sequence: Synthetic oligonucleotide
uuugaaucaauagcagcgu

SEQ ID NO: 939004 - RNA, 19 nt, Artificial Sequence
  Description of Artificial Sequence: Synthetic oligonucleotide
gacuauccagcaaagaauc

SEQ ID NO: 939005 - RNA, 19 nt, Artificial Sequence
  Description of Artificial Sequence: Synthetic oligonucleotide
caucaaaguggacuguaag

SEQ ID NO: 939006 - RNA, 19 nt, Artificial Sequence
  Description of Artificial Sequence: Synthetic oligonucleotide
uuuuccacgcccagggacu

SEQ ID NO: 939007 - RNA, 19 nt, Artificial Sequence
  Description of Artificial Sequence: Synthetic oligonucleotide
gggcaaacugacuagcugg

SEQ ID NO: 939008 - RNA, 19 nt, Artificial Sequence
  Description of Artificial Sequence: Synthetic oligonucleotide
cuugcucuaagaguguggc

SEQ ID NO: 939009 - RNA, 19 nt, Artificial Sequence
  Description of Artificial Sequence: Synthetic oligonucleotide
agugggguaugcugugagc

SEQ ID NO: 939010 - RNA, 19 nt, Artificial Sequence
  Description of Artificial Sequence: Synthetic oligonucleotide
gagagcccguccuucaagg

SEQ ID NO: 939011 - RNA, 19 nt, Artificial Sequence
  Description of Artificial Sequence: Synthetic oligonucleotide
gcuauuaggauuccaggcc

SEQ ID NO: 939012 - RNA, 19 nt, Artificial Sequence
  Description of Artificial Sequence: Synthetic oligonucleotide
cuacaccaagcauagcccc

SEQ ID NO: 939013 - RNA, 19 nt, Artificial Sequence
  Description of Artificial Sequence: Synthetic oligonucleotide
ucuguagcauacagauaag

SEQ ID NO: 939014 - RNA, 19 nt, Artificial Sequence
  Description of Artificial Sequence: Synthetic oligonucleotide
gagcgaaacuucuuaggug

SEQ ID NO: 939015 - RNA, 19 nt, Artificial Sequence
  Description of Artificial Sequence: Synthetic oligonucleotide
agagggcaaacugacuagc

SEQ ID NO: 939016 - RNA, 19 nt, Artificial Sequence
  Description of Artificial Sequence: Synthetic oligonucleotide
gauucgggauagcgaaugg

SEQ ID NO: 939017 - RNA, 19 nt, Artificial Sequence
  Description of Artificial Sequence: Synthetic oligonucleotide
cuggauucucaccauggcc

SEQ ID NO: 939018 - RNA, 19 nt, Artificial Sequence
  Description of Artificial Sequence: Synthetic oligonucleotide
ugcugauucugcaaagcuc

SEQ ID NO: 939019 - RNA, 19 nt, Artificial Sequence
  Description of Artificial Sequence: Synthetic oligonucleotide
agaauccucaaugguaaag

SEQ ID NO: 939020 - RNA, 19 nt, Artificial Sequence
  Description of Artificial Sequence: Synthetic oligonucleotide
acacgacccacaccgaguc

SEQ ID NO: 939021 - RNA, 19 nt, Artificial Sequence
  Description of Artificial Sequence: Synthetic oligonucleotide
cagucgaugucaucauugg

SEQ ID NO: 939022 - RNA, 19 nt, Artificial Sequence
  Description of Artificial Sequence: Synthetic oligonucleotide
uugaaucaauagcagcguc

SEQ ID NO: 939023 - RNA, 19 nt, Artificial Sequence
  Description of Artificial Sequence: Synthetic oligonucleotide
ucgggauagcgaauggaca

SEQ ID NO: 939024 - RNA, 19 nt, Artificial Sequence
  Description of Artificial Sequence: Synthetic oligonucleotide
gccuacaccaagcauagcc

SEQ ID NO: 939025 - RNA, 19 nt, Artificial Sequence
  Description of Artificial Sequence: Synthetic oligonucleotide
ggcuauuaggauuccaggc

SEQ ID NO: 939026 - RNA, 19 nt, Artificial Sequence
  Description of Artificial Sequence: Synthetic oligonucleotide
auagcagcgucuaauccuc

SEQ ID NO: 939027 - RNA, 19 nt, Artificial Sequence
  Description of Artificial Sequence: Synthetic oligonucleotide
uagagcucguccccgauuc

SEQ ID NO: 939028 - RNA, 19 nt, Artificial Sequence
  Description of Artificial Sequence: Synthetic oligonucleotide
agaucuuacagcgcagcag

SEQ ID NO: 939029 - RNA, 19 nt, Artificial Sequence
  Description of Artificial Sequence: Synthetic oligonucleotide
agcgaauggacagccuugc

SEQ ID NO: 939030 - RNA, 19 nt, Artificial Sequence
  Description of Artificial Sequence: Synthetic oligonucleotide
acuaagguuucagcccugc

SEQ ID NO: 939031 - RNA, 19 nt, Artificial Sequence
  Description of Artificial Sequence: Synthetic oligonucleotide
gaacucgacccuaauuugc

SEQ ID NO: 939032 - RNA, 19 nt, Artificial Sequence
  Description of Artificial Sequence: Synthetic oligonucleotide
ucagacagugggccaguag

SEQ ID NO: 939033 - RNA, 19 nt, Artificial Sequence
  Description of Artificial Sequence: Synthetic oligonucleotide
agugaccauggcuuuguug

SEQ ID NO: 939034 - RNA, 19 nt, Artificial Sequence
  Description of Artificial Sequence: Synthetic oligonucleotide
auagcgaauggacagccuu

SEQ ID NO: 939035 - RNA, 19 nt, Artificial Sequence
  Description of Artificial Sequence: Synthetic oligonucleotide
uagcgaauggacagccuug

SEQ ID NO: 939036 - RNA, 19 nt, Artificial Sequence
  Description of Artificial Sequence: Synthetic oligonucleotide
aucaauagcagcgucuaau

SEQ ID NO: 939037 - RNA, 19 nt, Artificial Sequence
  Description of Artificial Sequence: Synthetic oligonucleotide
cuucugaggcacuggcugg

SEQ ID NO: 939038 - RNA, 19 nt, Artificial Sequence
  Description of Artificial Sequence: Synthetic oligonucleotide
gaagagcggggcaaagagg

SEQ ID NO: 939039 - RNA, 19 nt, Artificial Sequence
  Description of Artificial Sequence: Synthetic oligonucleotide
guagcccuuugguacaaag

SEQ ID NO: 939040 - RNA, 19 nt, Artificial Sequence
  Description of Artificial Sequence: Synthetic oligonucleotide
uggaccacaagguggcugu

SEQ ID NO: 939041 - RNA, 19 nt, Artificial Sequence
  Description of Artificial Sequence: Synthetic oligonucleotide
cuauuaggauuccaggcca

SEQ ID NO: 939042 - RNA, 19 nt, Artificial Sequence
  Description of Artificial Sequence: Synthetic oligonucleotide
accaaagaaaagugagcga

SEQ ID NO: 939043 - RNA, 19 nt, Artificial Sequence
  Description of Artificial Sequence: Synthetic oligonucleotide
aguucacaguccuuagaga

SEQ ID NO: 939044 - RNA, 19 nt, Artificial Sequence
  Description of Artificial Sequence: Synthetic oligonucleotide
cauugguaaagucaucuaa

SEQ ID NO: 939045 - RNA, 19 nt, Artificial Sequence
  Description of Artificial Sequence: Synthetic oligonucleotide
gggacuaagguuucagccc

SEQ ID NO: 939046 - RNA, 19 nt, Artificial Sequence
  Description of Artificial Sequence: Synthetic oligonucleotide
ugauugauacagguugagu

SEQ ID NO: 939047 - RNA, 19 nt, Artificial Sequence
  Description of Artificial Sequence: Synthetic oligonucleotide
cucgacccuaauuugcaac

SEQ ID NO: 939048 - RNA, 19 nt, Artificial Sequence
  Description of Artificial Sequence: Synthetic oligonucleotide
acaugguugccuaggcagc

SEQ ID NO: 939049 - RNA, 19 nt, Artificial Sequence
  Description of Artificial Sequence: Synthetic oligonucleotide
agggcaaccccaauagcac

SEQ ID NO: 939050 - RNA, 19 nt, Artificial Sequence
  Description of Artificial Sequence: Synthetic oligonucleotide
uccccgauucgggauagcg

SEQ ID NO: 939051 - RNA, 19 nt, Artificial Sequence
  Description of Artificial Sequence: Synthetic oligonucleotide
uuucagcccugccaauggc

SEQ ID NO: 939052 - RNA, 19 nt, Artificial Sequence
  Description of Artificial Sequence: Synthetic oligonucleotide
ugcaaccauaccgggacag

SEQ ID NO: 939053 - RNA, 19 nt, Artificial Sequence
  Description of Artificial Sequence: Synthetic oligonucleotide
cugacuagcuggacauggg

SEQ ID NO: 939054 - RNA, 19 nt, Artificial Sequence
  Description of Artificial Sequence: Synthetic oligonucleotide
uugauacagguugagugaa

SEQ ID NO: 939055 - RNA, 19 nt, Artificial Sequence
  Description of Artificial Sequence: Synthetic oligonucleotide
aacucgacccuaauuugca

SEQ ID NO: 939056 - RNA, 19 nt, Artificial Sequence
  Description of Artificial Sequence: Synthetic oligonucleotide
uguguuuucuugaccccau

SEQ ID NO: 939057 - RNA, 19 nt, Artificial Sequence
  Description of Artificial Sequence: Synthetic oligonucleotide
agcgucuaauccucccagg

SEQ ID NO: 939058 - RNA, 19 nt, Artificial Sequence
  Description of Artificial Sequence: Synthetic oligonucleotide
cagggcaaccccaauagca

SEQ ID NO: 939059 - RNA, 19 nt, Artificial Sequence
  Description of Artificial Sequence: Synthetic oligonucleotide
gugggguaugcugugagcc

SEQ ID NO: 939060 - RNA, 19 nt, Artificial Sequence
  Description of Artificial Sequence: Synthetic oligonucleotide
gaccgcuaucccuucuggg

SEQ ID NO: 939061 - RNA, 19 nt, Artificial Sequence
  Description of Artificial Sequence: Synthetic oligonucleotide
aagugacuauccagcaaag

SEQ ID NO: 939062 - RNA, 19 nt, Artificial Sequence
  Description of Artificial Sequence: Synthetic oligonucleotide
aagugaccgcuaucccuuc

SEQ ID NO: 939063 - RNA, 19 nt, Artificial Sequence
  Description of Artificial Sequence: Synthetic oligonucleotide
agaguucacaguccuuaga

SEQ ID NO: 939064 - RNA, 19 nt, Artificial Sequence
  Description of Artificial Sequence: Synthetic oligonucleotide
augcuagucucagugacca

SEQ ID NO: 939065 - RNA, 19 nt, Artificial Sequence
  Description of Artificial Sequence: Synthetic oligonucleotide
agguuguguguuuucuuga

SEQ ID NO: 939066 - RNA, 19 nt, Artificial Sequence
  Description of Artificial Sequence: Synthetic oligonucleotide
guugccgccggugaucagg

SEQ ID NO: 939067 - RNA, 19 nt, Artificial Sequence
  Description of Artificial Sequence: Synthetic oligonucleotide
ucuaauccucccagggcuc

SEQ ID NO: 939068 - RNA, 19 nt, Artificial Sequence
  Description of Artificial Sequence: Synthetic oligonucleotide
gaacccgugcuggugcucg

SEQ ID NO: 939069 - RNA, 19 nt, Artificial Sequence
  Description of Artificial Sequence: Synthetic oligonucleotide
acugaacucgacccuaauu

SEQ ID NO: 939070 - RNA, 19 nt, Artificial Sequence
  Description of Artificial Sequence: Synthetic oligonucleotide
augcaacugcuggaagucc

SEQ ID NO: 939071 - RNA, 19 nt, Artificial Sequence
  Description of Artificial Sequence: Synthetic oligonucleotide
auagccccuuuuccacgcc

SEQ ID NO: 939072 - RNA, 19 nt, Artificial Sequence
  Description of Artificial Sequence: Synthetic oligonucleotide
cccaaugcuagucucagug

SEQ ID NO: 939073 - RNA, 19 nt, Artificial Sequence
  Description of Artificial Sequence: Synthetic oligonucleotide
ggucucuugaauaaagguc

SEQ ID NO: 939074 - RNA, 19 nt, Artificial Sequence
  Description of Artificial Sequence: Synthetic oligonucleotide
ccuacaccaagcauagccc

SEQ ID NO: 939075 - RNA, 19 nt, Artificial Sequence
  Description of Artificial Sequence: Synthetic oligonucleotide
gauacagguugagugaaua

SEQ ID NO: 939076 - RNA, 19 nt, Artificial Sequence
  Description of Artificial Sequence: Synthetic oligonucleotide
agagcccguccuucaaggg

SEQ ID NO: 939077 - RNA, 19 nt, Artificial Sequence
  Description of Artificial Sequence: Synthetic oligonucleotide
aacagucgaugucaucauu

SEQ ID NO: 939078 - RNA, 19 nt, Artificial Sequence
  Description of Artificial Sequence: Synthetic oligonucleotide
caugcaacugcuggaaguc

SEQ ID NO: 939079 - RNA, 19 nt, Artificial Sequence
  Description of Artificial Sequence: Synthetic oligonucleotide
aguucagccuucaccauca

SEQ ID NO: 939080 - RNA, 19 nt, Artificial Sequence
  Description of Artificial Sequence: Synthetic oligonucleotide
aucgccagagagcggaaga

SEQ ID NO: 939081 - RNA, 19 nt, Artificial Sequence
  Description of Artificial Sequence: Synthetic oligonucleotide
ccuaauuugcaaccauacc

SEQ ID NO: 939082 - RNA, 19 nt, Artificial Sequence
  Description of Artificial Sequence: Synthetic oligonucleotide
gagcggggcaaagaggaag

SEQ ID NO: 939083 - RNA, 19 nt, Artificial Sequence
  Description of Artificial Sequence: Synthetic oligonucleotide
ugguugccuaggcagcucu

SEQ ID NO: 939084 - RNA, 19 nt, Artificial Sequence
  Description of Artificial Sequence: Synthetic oligonucleotide
uaacagucgaugucaucau

SEQ ID NO: 939085 - RNA, 19 nt, Artificial Sequence
  Description of Artificial Sequence: Synthetic oligonucleotide
ggggacaaggucaugggag

SEQ ID NO: 939086 - RNA, 19 nt, Artificial Sequence
  Description of Artificial Sequence: Synthetic oligonucleotide
agguugagugaauaauaua

SEQ ID NO: 939087 - RNA, 19 nt, Artificial Sequence
  Description of Artificial Sequence: Synthetic oligonucleotide
accaucgccagagagcgga

SEQ ID NO: 939088 - RNA, 19 nt, Artificial Sequence
  Description of Artificial Sequence: Synthetic oligonucleotide
aguggagcuggaccacaag

SEQ ID NO: 939089 - RNA, 19 nt, Artificial Sequence
  Description of Artificial Sequence: Synthetic oligonucleotide
gugccuacaccaagcauag

SEQ ID NO: 939090 - RNA, 19 nt, Artificial Sequence
  Description of Artificial Sequence: Synthetic oligonucleotide
gggaacaugggucuugcuc

SEQ ID NO: 939091 - RNA, 19 nt, Artificial Sequence
  Description of Artificial Sequence: Synthetic oligonucleotide
caugggagggcugggagac

SEQ ID NO: 939092 - RNA, 19 nt, Artificial Sequence
  Description of Artificial Sequence: Synthetic oligonucleotide
ucuugaccccauacuugca

SEQ ID NO: 939093 - RNA, 19 nt, Artificial Sequence
  Description of Artificial Sequence: Synthetic oligonucleotide
cccuaauuugcaaccauac

SEQ ID NO: 939094 - RNA, 19 nt, Artificial Sequence
  Description of Artificial Sequence: Synthetic oligonucleotide
caguccuuagagagagccc

SEQ ID NO: 939095 - RNA, 19 nt, Artificial Sequence
  Description of Artificial Sequence: Synthetic oligonucleotide
accuucacguugccgccgg

SEQ ID NO: 939096 - RNA, 19 nt, Artificial Sequence
  Description of Artificial Sequence: Synthetic oligonucleotide
uggagcaacccaucugguc

SEQ ID NO: 939097 - RNA, 19 nt, Artificial Sequence
  Description of Artificial Sequence: Synthetic oligonucleotide
ugauacagguugagugaau

SEQ ID NO: 939098 - RNA, 19 nt, Artificial Sequence
  Description of Artificial Sequence: Synthetic oligonucleotide
cugaacucgacccuaauuu

SEQ ID NO: 939099 - RNA, 19 nt, Artificial Sequence
  Description of Artificial Sequence: Synthetic oligonucleotide
ucuuacagcgcagcagguc

SEQ ID NO: 939100 - RNA, 19 nt, Artificial Sequence
  Description of Artificial Sequence: Synthetic oligonucleotide
ugggguaugcugugagccu

SEQ ID NO: 939101 - RNA, 19 nt, Artificial Sequence
  Description of Artificial Sequence: Synthetic oligonucleotide
gcaggcauaggcagaacgg

SEQ ID NO: 939102 - RNA, 19 nt, Artificial Sequence
  Description of Artificial Sequence: Synthetic oligonucleotide
ccgaaauuccuugaggcag

SEQ ID NO: 939103 - RNA, 19 nt, Artificial Sequence
  Description of Artificial Sequence: Synthetic oligonucleotide
cagcgucuaauccucccag

SEQ ID NO: 939104 - RNA, 19 nt, Artificial Sequence
  Description of Artificial Sequence: Synthetic oligonucleotide
ccaaguauugggaaagaga

SEQ ID NO: 939105 - RNA, 19 nt, Artificial Sequence
  Description of Artificial Sequence: Synthetic oligonucleotide
ugagggagaugcagcacuu

SEQ ID NO: 939106 - RNA, 19 nt, Artificial Sequence
  Description of Artificial Sequence: Synthetic oligonucleotide
agucaucuaagugggguau

SEQ ID NO: 939107 - RNA, 19 nt, Artificial Sequence
  Description of Artificial Sequence: Synthetic oligonucleotide
ggcaaguuugcugauucug

SEQ ID NO: 939108 - RNA, 19 nt, Artificial Sequence
  Description of Artificial Sequence: Synthetic oligonucleotide
gcaaguuugcugauucugc

SEQ ID NO: 939109 - RNA, 19 nt, Artificial Sequence
  Description of Artificial Sequence: Synthetic oligonucleotide
auucgggauagcgaaugga

SEQ ID NO: 939110 - RNA, 19 nt, Artificial Sequence
  Description of Artificial Sequence: Synthetic oligonucleotide
ccaccaucgccagagagcg

SEQ ID NO: 939111 - RNA, 19 nt, Artificial Sequence
  Description of Artificial Sequence: Synthetic oligonucleotide
uuucgaguucagccuucac

SEQ ID NO: 939112 - RNA, 19 nt, Artificial Sequence
  Description of Artificial Sequence: Synthetic oligonucleotide
ggagcaacccaucuggucu

SEQ ID NO: 939113 - RNA, 19 nt, Artificial Sequence
  Description of Artificial Sequence: Synthetic oligonucleotide
ccaauagcacacuuugguc

SEQ ID NO: 939114 - RNA, 19 nt, Artificial Sequence
  Description of Artificial Sequence: Synthetic oligonucleotide
cuaauccucccagggcucc

SEQ ID NO: 939115 - RNA, 19 nt, Artificial Sequence
  Description of Artificial Sequence: Synthetic oligonucleotide
gcuuuguuggugcuaucug

SEQ ID NO: 939116 - RNA, 19 nt, Artificial Sequence
  Description of Artificial Sequence: Synthetic oligonucleotide
uugcaaccauaccgggaca

SEQ ID NO: 939117 - RNA, 19 nt, Artificial Sequence
  Description of Artificial Sequence: Synthetic oligonucleotide
uggccaagacaaagugacu

SEQ ID NO: 939118 - RNA, 19 nt, Artificial Sequence
  Description of Artificial Sequence: Synthetic oligonucleotide
ggauagcgaauggacagcc

SEQ ID NO: 939119 - RNA, 19 nt, Artificial Sequence
  Description of Artificial Sequence: Synthetic oligonucleotide
ucuauggccuuuggacaca

SEQ ID NO: 939120 - RNA, 19 nt, Artificial Sequence
  Description of Artificial Sequence: Synthetic oligonucleotide
cuuagagagagcccguccu

SEQ ID NO: 939121 - RNA, 19 nt, Artificial Sequence
  Description of Artificial Sequence: Synthetic oligonucleotide
uaagugggguaugcuguga

SEQ ID NO: 939122 - RNA, 19 nt, Artificial Sequence
  Description of Artificial Sequence: Synthetic oligonucleotide
gagcaacccaucuggucuc

SEQ ID NO: 939123 - RNA, 19 nt, Artificial Sequence
  Description of Artificial Sequence: Synthetic oligonucleotide
caugggucuugcucuaaga

SEQ ID NO: 939124 - RNA, 19 nt, Artificial Sequence
  Description of Artificial Sequence: Synthetic oligonucleotide
gagagacaugauugauaca

SEQ ID NO: 939125 - RNA, 19 nt, Artificial Sequence
  Description of Artificial Sequence: Synthetic oligonucleotide
gccuaggcagcucuguagc

SEQ ID NO: 939126 - RNA, 19 nt, Artificial Sequence
  Description of Artificial Sequence: Synthetic oligonucleotide
ggcccaaguauugggaaag

SEQ ID NO: 939127 - RNA, 19 nt, Artificial Sequence
  Description of Artificial Sequence: Synthetic oligonucleotide
cagaccaaacaugguugcc

SEQ ID NO: 939128 - RNA, 19 nt, Artificial Sequence
  Description of Artificial Sequence: Synthetic oligonucleotide
accgagucccagcggccac

SEQ ID NO: 939129 - RNA, 19 nt, Artificial Sequence
  Description of Artificial Sequence: Synthetic oligonucleotide
cgggauagcgaauggacag

SEQ ID NO: 939130 - RNA, 19 nt, Artificial Sequence
  Description of Artificial Sequence: Synthetic oligonucleotide
gacccgucggccauggcca

SEQ ID NO: 939131 - RNA, 19 nt, Artificial Sequence
  Description of Artificial Sequence: Synthetic oligonucleotide
ggacacgacccacaccgag

SEQ ID NO: 939132 - RNA, 19 nt, Artificial Sequence
  Description of Artificial Sequence: Synthetic oligonucleotide
acgcccagggacuaagguu

SEQ ID NO: 939133 - RNA, 19 nt, Artificial Sequence
  Description of Artificial Sequence: Synthetic oligonucleotide
guguguuuucuugacccca

SEQ ID NO: 939134 - RNA, 19 nt, Artificial Sequence
  Description of Artificial Sequence: Synthetic oligonucleotide
auagagcucguccccgauu

SEQ ID NO: 939135 - RNA, 19 nt, Artificial Sequence
  Description of Artificial Sequence: Synthetic oligonucleotide
ucgccagagagcggaagac

SEQ ID NO: 939136 - RNA, 19 nt, Artificial Sequence
  Description of Artificial Sequence: Synthetic oligonucleotide
gaccagauugugggucucc

SEQ ID NO: 939137 - RNA, 19 nt, Artificial Sequence
  Description of Artificial Sequence: Synthetic oligonucleotide
acaccgagucccagcggcc

SEQ ID NO: 939138 - RNA, 19 nt, Artificial Sequence
  Description of Artificial Sequence: Synthetic oligonucleotide
gguuucagcccugccaaug

SEQ ID NO: 939139 - RNA, 19 nt, Artificial Sequence
  Description of Artificial Sequence: Synthetic oligonucleotide
cuauggccuuuggacacag

SEQ ID NO: 939140 - RNA, 19 nt, Artificial Sequence
  Description of Artificial Sequence: Synthetic oligonucleotide
agcucguccccgauucggg

SEQ ID NO: 939141 - RNA, 19 nt, Artificial Sequence
  Description of Artificial Sequence: Synthetic oligonucleotide
gucaucuaagugggguaug

SEQ ID NO: 939142 - RNA, 19 nt, Artificial Sequence
  Description of Artificial Sequence: Synthetic oligonucleotide
ccuuagagagagcccgucc

SEQ ID NO: 939143 - RNA, 19 nt, Artificial Sequence
  Description of Artificial Sequence: Synthetic oligonucleotide
agaggcuauuaggauucca

SEQ ID NO: 939144 - RNA, 19 nt, Artificial Sequence
  Description of Artificial Sequence: Synthetic oligonucleotide
uaccgggacaggacacgac

SEQ ID NO: 939145 - RNA, 19 nt, Artificial Sequence
  Description of Artificial Sequence: Synthetic oligonucleotide
caaccauaccgggacagga

SEQ ID NO: 939146 - RNA, 19 nt, Artificial Sequence
  Description of Artificial Sequence: Synthetic oligonucleotide
agaccagauugugggucuc

SEQ ID NO: 939147 - RNA, 19 nt, Artificial Sequence
  Description of Artificial Sequence: Synthetic oligonucleotide
aggcauaggcagaacggga

SEQ ID NO: 939148 - RNA, 19 nt, Artificial Sequence
  Description of Artificial Sequence: Synthetic oligonucleotide
uagaggcuauuaggauucc

SEQ ID NO: 939149 - RNA, 19 nt, Artificial Sequence
  Description of Artificial Sequence: Synthetic oligonucleotide
ucguccccgauucgggaua

SEQ ID NO: 939150 - RNA, 19 nt, Artificial Sequence
  Description of Artificial Sequence: Synthetic oligonucleotide
auaccgggacaggacacga

SEQ ID NO: 939151 - RNA, 19 nt, Artificial Sequence
  Description of Artificial Sequence: Synthetic oligonucleotide
ggacuaagguuucagcccu

SEQ ID NO: 939152 - RNA, 19 nt, Artificial Sequence
  Description of Artificial Sequence: Synthetic oligonucleotide
gacuaagguuucagcccug

SEQ ID NO: 939153 - RNA, 19 nt, Artificial Sequence
  Description of Artificial Sequence: Synthetic oligonucleotide
aacaugggucuugcucuaa

SEQ ID NO: 939154 - RNA, 19 nt, Artificial Sequence
  Description of Artificial Sequence: Synthetic oligonucleotide
caggucuauggccuuugga

SEQ ID NO: 939155 - RNA, 19 nt, Artificial Sequence
  Description of Artificial Sequence: Synthetic oligonucleotide
ggccaagacaaagugacua

SEQ ID NO: 939156 - RNA, 19 nt, Artificial Sequence
  Description of Artificial Sequence: Synthetic oligonucleotide
gagcccguccuucaagggu

SEQ ID NO: 939157 - RNA, 19 nt, Artificial Sequence
  Description of Artificial Sequence: Synthetic oligonucleotide
ugggaacaugggucuugcu

SEQ ID NO: 939158 - RNA, 19 nt, Artificial Sequence
  Description of Artificial Sequence: Synthetic oligonucleotide
agagagcggaagacggaca

SEQ ID NO: 939159 - RNA, 19 nt, Artificial Sequence
  Description of Artificial Sequence: Synthetic oligonucleotide
gggauagcgaauggacagc

SEQ ID NO: 939160 - RNA, 19 nt, Artificial Sequence
  Description of Artificial Sequence: Synthetic oligonucleotide
acccuaauuugcaaccaua

SEQ ID NO: 939161 - RNA, 19 nt, Artificial Sequence
  Description of Artificial Sequence: Synthetic oligonucleotide
gagucccaggcacuguacu

SEQ ID NO: 939162 - RNA, 19 nt, Artificial Sequence
  Description of Artificial Sequence: Synthetic oligonucleotide
caucgccagagagcggaag

SEQ ID NO: 939163 - RNA, 19 nt, Artificial Sequence
  Description of Artificial Sequence: Synthetic oligonucleotide
uagcuggacauggguccag

SEQ ID NO: 939164 - RNA, 19 nt, Artificial Sequence
  Description of Artificial Sequence: Synthetic oligonucleotide
agaacccgugcuggugcuc

SEQ ID NO: 939165 - RNA, 19 nt, Artificial Sequence
  Description of Artificial Sequence: Synthetic oligonucleotide
cccaaguauugggaaagag

SEQ ID NO: 939166 - RNA, 19 nt, Artificial Sequence
  Description of Artificial Sequence: Synthetic oligonucleotide
accaagcauagccccuuuu

SEQ ID NO: 939167 - RNA, 19 nt, Artificial Sequence
  Description of Artificial Sequence: Synthetic oligonucleotide
gcaaccauaccgggacagg

SEQ ID NO: 939168 - RNA, 19 nt, Artificial Sequence
  Description of Artificial Sequence: Synthetic oligonucleotide
cccauacuugcaguggagc

SEQ ID NO: 939169 - RNA, 19 nt, Artificial Sequence
  Description of Artificial Sequence: Synthetic oligonucleotide
gacccuaauuugcaaccau

SEQ ID NO: 939170 - RNA, 19 nt, Artificial Sequence
  Description of Artificial Sequence: Synthetic oligonucleotide
gcagguccugaccagggga

SEQ ID NO: 939171 - RNA, 19 nt, Artificial Sequence
  Description of Artificial Sequence: Synthetic oligonucleotide
gggguaugcugugagccug

SEQ ID NO: 939172 - RNA, 19 nt, Artificial Sequence
  Description of Artificial Sequence: Synthetic oligonucleotide
gugucaccucagucagugc

SEQ ID NO: 939173 - RNA, 19 nt, Artificial Sequence
  Description of Artificial Sequence: Synthetic oligonucleotide
cacgacccacaccgagucc

SEQ ID NO: 939174 - RNA, 19 nt, Artificial Sequence
  Description of Artificial Sequence: Synthetic oligonucleotide
gcagaccagauuguggguc

SEQ ID NO: 939175 - RNA, 19 nt, Artificial Sequence
  Description of Artificial Sequence: Synthetic oligonucleotide
cgucuaauccucccagggc

SEQ ID NO: 939176 - RNA, 19 nt, Artificial Sequence
  Description of Artificial Sequence: Synthetic oligonucleotide
cccgauucgggauagcgaa

SEQ ID NO: 939177 - RNA, 19 nt, Artificial Sequence
  Description of Artificial Sequence: Synthetic oligonucleotide
cccaauagcacacuuuggu

SEQ ID NO: 939178 - RNA, 19 nt, Artificial Sequence
  Description of Artificial Sequence: Synthetic oligonucleotide
acguugccgccggugauca

SEQ ID NO: 939179 - RNA, 19 nt, Artificial Sequence
  Description of Artificial Sequence: Synthetic oligonucleotide
aggagagguuguguguuuu

SEQ ID NO: 939180 - RNA, 19 nt, Artificial Sequence
  Description of Artificial Sequence: Synthetic oligonucleotide
ccgggacaggacacgaccc

SEQ ID NO: 939181 - RNA, 19 nt, Artificial Sequence
  Description of Artificial Sequence: Synthetic oligonucleotide
gcaugcaacugcuggaagu

SEQ ID NO: 939182 - RNA, 19 nt, Artificial Sequence
  Description of Artificial Sequence: Synthetic oligonucleotide
cugcgcaggaugacccguc

SEQ ID NO: 939183 - RNA, 19 nt, Artificial Sequence
  Description of Artificial Sequence: Synthetic oligonucleotide
ccauaccgggacaggacac

SEQ ID NO: 939184 - RNA, 19 nt, Artificial Sequence
  Description of Artificial Sequence: Synthetic oligonucleotide
gcagcgucuaauccuccca

SEQ ID NO: 939185 - RNA, 19 nt, Artificial Sequence
  Description of Artificial Sequence: Synthetic oligonucleotide
ggcagaacgggaagaguuc

SEQ ID NO: 939186 - RNA, 19 nt, Artificial Sequence
  Description of Artificial Sequence: Synthetic oligonucleotide
gacacgacccacaccgagu

SEQ ID NO: 939187 - RNA, 19 nt, Artificial Sequence
  Description of Artificial Sequence: Synthetic oligonucleotide
gauagagcucguccccgau

SEQ ID NO: 939188 - RNA, 19 nt, Artificial Sequence
  Description of Artificial Sequence: Synthetic oligonucleotide
uuuccacgcccagggacua

SEQ ID NO: 939189 - RNA, 19 nt, Artificial Sequence
  Description of Artificial Sequence: Synthetic oligonucleotide
agcccguccuucaaggguu

SEQ ID NO: 939190 - RNA, 19 nt, Artificial Sequence
  Description of Artificial Sequence: Synthetic oligonucleotide
gcagaacgggaagaguuca

SEQ ID NO: 939191 - RNA, 19 nt, Artificial Sequence
  Description of Artificial Sequence: Synthetic oligonucleotide
ggcauaggcagaacgggaa

SEQ ID NO: 939192 - RNA, 19 nt, Artificial Sequence
  Description of Artificial Sequence: Synthetic oligonucleotide
ugcuagucucagugaccau

SEQ ID NO: 939193 - RNA, 19 nt, Artificial Sequence
  Description of Artificial Sequence: Synthetic oligonucleotide
cagaccagauugugggucu

SEQ ID NO: 939194 - RNA, 19 nt, Artificial Sequence
  Description of Artificial Sequence: Synthetic oligonucleotide
cacguugccgccggugauc

SEQ ID NO: 939195 - RNA, 19 nt, Artificial Sequence
  Description of Artificial Sequence: Synthetic oligonucleotide
caccaucgccagagagcgg

SEQ ID NO: 939196 - RNA, 19 nt, Artificial Sequence
  Description of Artificial Sequence: Synthetic oligonucleotide
gauagcgaauggacagccu

SEQ ID NO: 939197 - RNA, 19 nt, Artificial Sequence
  Description of Artificial Sequence: Synthetic oligonucleotide
uucagacagugggccagua

SEQ ID NO: 939198 - RNA, 19 nt, Artificial Sequence
  Description of Artificial Sequence: Synthetic oligonucleotide
ccccauacuugcaguggag

SEQ ID NO: 939199 - RNA, 19 nt, Artificial Sequence
  Description of Artificial Sequence: Synthetic oligonucleotide
cgauucgggauagcgaaug

SEQ ID NO: 939200 - RNA, 19 nt, Artificial Sequence
  Description of Artificial Sequence: Synthetic oligonucleotide
guggaauccuggggccaag

SEQ ID NO: 939201 - RNA, 19 nt, Artificial Sequence
  Description of Artificial Sequence: Synthetic oligonucleotide
ccaguagcccuuugguaca

SEQ ID NO: 939202 - RNA, 19 nt, Artificial Sequence
  Description of Artificial Sequence: Synthetic oligonucleotide
gccagaacccgugcuggug

SEQ ID NO: 939203 - RNA, 19 nt, Artificial Sequence
  Description of Artificial Sequence: Synthetic oligonucleotide
ggguaugcugugagccugc

SEQ ID NO: 939204 - RNA, 19 nt, Artificial Sequence
  Description of Artificial Sequence: Synthetic oligonucleotide
ggcagaaagugaccgcuau

SEQ ID NO: 939205 - RNA, 19 nt, Artificial Sequence
  Description of Artificial Sequence: Synthetic oligonucleotide
gcccagugucaccucaguc

SEQ ID NO: 939206 - RNA, 19 nt, Artificial Sequence
  Description of Artificial Sequence: Synthetic oligonucleotide
caugguugccuaggcagcu

SEQ ID NO: 939207 - RNA, 19 nt, Artificial Sequence
  Description of Artificial Sequence: Synthetic oligonucleotide
cuaucccuucuggggcaug

SEQ ID NO: 939208 - RNA, 19 nt, Artificial Sequence
  Description of Artificial Sequence: Synthetic oligonucleotide
aguagcccuuugguacaaa

SEQ ID NO: 939209 - RNA, 19 nt, Artificial Sequence
  Description of Artificial Sequence: Synthetic oligonucleotide
caucuaagugggguaugcu

SEQ ID NO: 939210 - RNA, 19 nt, Artificial Sequence
  Description of Artificial Sequence: Synthetic oligonucleotide
cuggagcaacccaucuggu

SEQ ID NO: 939211 - RNA, 19 nt, Artificial Sequence
  Description of Artificial Sequence: Synthetic oligonucleotide
gcucguccccgauucggga

SEQ ID NO: 939212 - RNA, 19 nt, Artificial Sequence
  Description of Artificial Sequence: Synthetic oligonucleotide
caccgagucccagcggcca

SEQ ID NO: 939213 - RNA, 19 nt, Artificial Sequence
  Description of Artificial Sequence: Synthetic oligonucleotide
ccccgauucgggauagcga

SEQ ID NO: 939214 - RNA, 19 nt, Artificial Sequence
  Description of Artificial Sequence: Synthetic oligonucleotide
cucguccccgauucgggau

SEQ ID NO: 939215 - RNA, 19 nt, Artificial Sequence
  Description of Artificial Sequence: Synthetic oligonucleotide
gggaagccgccugguacug

SEQ ID NO: 939216 - RNA, 19 nt, Artificial Sequence
  Description of Artificial Sequence: Synthetic oligonucleotide
ggaagccgccugguacugc

SEQ ID NO: 939217 - RNA, 19 nt, Artificial Sequence
  Description of Artificial Sequence: Synthetic oligonucleotide
uuccacgcccagggacuaa

SEQ ID NO: 939218 - RNA, 19 nt, Artificial Sequence
  Description of Artificial Sequence: Synthetic oligonucleotide
ccacaccgagucccagcgg

SEQ ID NO: 939219 - RNA, 19 nt, Artificial Sequence
  Description of Artificial Sequence: Synthetic oligonucleotide
ggcagaccagauugugggu

SEQ ID NO: 939220 - RNA, 19 nt, Artificial Sequence
  Description of Artificial Sequence: Synthetic oligonucleotide
augggagggcugggagaca

SEQ ID NO: 939221 - RNA, 19 nt, Artificial Sequence
  Description of Artificial Sequence: Synthetic oligonucleotide
cagaacccgugcuggugcu

SEQ ID NO: 939222 - RNA, 19 nt, Artificial Sequence
  Description of Artificial Sequence: Synthetic oligonucleotide
acccgucggccauggccaa

SEQ ID NO: 939223 - RNA, 19 nt, Artificial Sequence
  Description of Artificial Sequence: Synthetic oligonucleotide
guacaggggccaggaugga

SEQ ID NO: 939224 - RNA, 19 nt, Artificial Sequence
  Description of Artificial Sequence: Synthetic oligonucleotide
ccgucggccauggccaaug

SEQ ID NO: 939225 - RNA, 19 nt, Artificial Sequence
  Description of Artificial Sequence: Synthetic oligonucleotide
guccuuagagagagcccgu

SEQ ID NO: 939226 - RNA, 19 nt, Artificial Sequence
  Description of Artificial Sequence: Synthetic oligonucleotide
gcccaaguauugggaaaga

SEQ ID NO: 939227 - RNA, 19 nt, Artificial Sequence
  Description of Artificial Sequence: Synthetic oligonucleotide
caggggaagccgccuggua

SEQ ID NO: 939228 - RNA, 19 nt, Artificial Sequence
  Description of Artificial Sequence: Synthetic oligonucleotide
caguagcccuuugguacaa

SEQ ID NO: 939229 - RNA, 19 nt, Artificial Sequence
  Description of Artificial Sequence: Synthetic oligonucleotide
cacugaacucgacccuaau

SEQ ID NO: 939230 - RNA, 19 nt, Artificial Sequence
  Description of Artificial Sequence: Synthetic oligonucleotide
gugcccgggagcccucacu

SEQ ID NO: 939231 - RNA, 19 nt, Artificial Sequence
  Description of Artificial Sequence: Synthetic oligonucleotide
guccccgauucgggauagc

SEQ ID NO: 939232 - RNA, 19 nt, Artificial Sequence
  Description of Artificial Sequence: Synthetic oligonucleotide
gcacugaacucgacccuaa

SEQ ID NO: 939233 - RNA, 19 nt, Artificial Sequence
  Description of Artificial Sequence: Synthetic oligonucleotide
gcucuguagcauacagaua

SEQ ID NO: 939234 - RNA, 19 nt, Artificial Sequence
  Description of Artificial Sequence: Synthetic oligonucleotide
cuuuggucuagaggcuauu

SEQ ID NO: 939235 - RNA, 19 nt, Artificial Sequence
  Description of Artificial Sequence: Synthetic oligonucleotide
cgcccagggacuaagguuu

SEQ ID NO: 939236 - RNA, 19 nt, Artificial Sequence
  Description of Artificial Sequence: Synthetic oligonucleotide
cgacccuaauuugcaacca

SEQ ID NO: 939237 - RNA, 19 nt, Artificial Sequence
  Description of Artificial Sequence: Synthetic oligonucleotide
ggguggcuucaggucuaug

SEQ ID NO: 939238 - RNA, 19 nt, Artificial Sequence
  Description of Artificial Sequence: Synthetic oligonucleotide
ggacuguaagaggcaaguu

SEQ ID NO: 939239 - RNA, 19 nt, Artificial Sequence
  Description of Artificial Sequence: Synthetic oligonucleotide
gguaugcugugagccugcu

SEQ ID NO: 939240 - RNA, 19 nt, Artificial Sequence
  Description of Artificial Sequence: Synthetic oligonucleotide
cgucggccauggccaaugc

SEQ ID NO: 939241 - RNA, 19 nt, Artificial Sequence
  Description of Artificial Sequence: Synthetic oligonucleotide
cguccccgauucgggauag

SEQ ID NO: 939242 - RNA, 19 nt, Artificial Sequence
  Description of Artificial Sequence: Synthetic oligonucleotide
gcugcgcaggaugacccgu

SEQ ID NO: 939243 - RNA, 19 nt, Artificial Sequence
  Description of Artificial Sequence: Synthetic oligonucleotide
cugugcccgggagcccuca

SEQ ID NO: 939244 - RNA, 19 nt, Artificial Sequence
  Description of Artificial Sequence: Synthetic oligonucleotide
gcccguccuucaaggguuc

SEQ ID NO: 939245 - RNA, 19 nt, Artificial Sequence
  Description of Artificial Sequence: Synthetic oligonucleotide
gccggugaucaggcacuuc

SEQ ID NO: 939246 - RNA, 19 nt, Artificial Sequence
  Description of Artificial Sequence: Synthetic oligonucleotide
ccaucgccagagagcggaa

SEQ ID NO: 939247 - RNA, 19 nt, Artificial Sequence
  Description of Artificial Sequence: Synthetic oligonucleotide
cgggagcccucacugccca

SEQ ID NO: 939248 - RNA, 19 nt, Artificial Sequence
  Description of Artificial Sequence: Synthetic oligonucleotide
ccgauucgggauagcgaau

SEQ ID NO: 939249 - RNA, 19 nt, Artificial Sequence
  Description of Artificial Sequence: Synthetic oligonucleotide
cguugccgccggugaucag

SEQ ID NO: 939250 - RNA, 19 nt, Artificial Sequence
  Description of Artificial Sequence: Synthetic oligonucleotide
ccgagucccagcggccacu

SEQ ID NO: 939251 - RNA, 19 nt, Artificial Sequence
  Description of Artificial Sequence: Synthetic oligonucleotide
cccgucggccauggccaau

SEQ ID NO: 939252 - RNA, 19 nt, Artificial Sequence
  Description of Artificial Sequence: Synthetic oligonucleotide
uuugugaacaagaucuggg

SEQ ID NO: 939253 - RNA, 19 nt, Artificial Sequence
  Description of Artificial Sequence: Synthetic oligonucleotide
uuacaaguugccaugugcg

SEQ ID NO: 939254 - RNA, 19 nt, Artificial Sequence
  Description of Artificial Sequence: Synthetic oligonucleotide
uuauugaguuacaaguugc

SEQ ID NO: 939255 - RNA, 19 nt, Artificial Sequence
  Description of Artificial Sequence: Synthetic oligonucleotide
aucaugaucacuuugugaa

SEQ ID NO: 939256 - RNA, 19 nt, Artificial Sequence
  Description of Artificial Sequence: Synthetic oligonucleotide
acaaggccggucuugaccc

SEQ ID NO: 939257 - RNA, 19 nt, Artificial Sequence
  Description of Artificial Sequence: Synthetic oligonucleotide
ugggaauuggcgcaggacc

SEQ ID NO: 939258 - RNA, 19 nt, Artificial Sequence
  Description of Artificial Sequence: Synthetic oligonucleotide
uauugaguuacaaguugcc

SEQ ID NO: 939259 - RNA, 19 nt, Artificial Sequence
  Description of Artificial Sequence: Synthetic oligonucleotide
uugcgauacaccgugaugc

SEQ ID NO: 939260 - RNA, 19 nt, Artificial Sequence
  Description of Artificial Sequence: Synthetic oligonucleotide
ugcgcuucuuggcauagcg

SEQ ID NO: 939261 - RNA, 19 nt, Artificial Sequence
  Description of Artificial Sequence: Synthetic oligonucleotide
gauaacucgggcgucaccc

SEQ ID NO: 939262 - RNA, 19 nt, Artificial Sequence
  Description of Artificial Sequence: Synthetic oligonucleotide
agaguguugacugucuccg

SEQ ID NO: 939263 - RNA, 19 nt, Artificial Sequence
  Description of Artificial Sequence: Synthetic oligonucleotide
uugaguuacaaguugccau

SEQ ID NO: 939264 - RNA, 19 nt, Artificial Sequence
  Description of Artificial Sequence: Synthetic oligonucleotide
cacaugcccagucaaaggg

SEQ ID NO: 939265 - RNA, 19 nt, Artificial Sequence
  Description of Artificial Sequence: Synthetic oligonucleotide
caccucauagccaagucgc

SEQ ID NO: 939266 - RNA, 19 nt, Artificial Sequence
  Description of Artificial Sequence: Synthetic oligonucleotide
uacaaggucacaccugcga

SEQ ID NO: 939267 - RNA, 19 nt, Artificial Sequence
  Description of Artificial Sequence: Synthetic oligonucleotide
acaaacguguagccgucgc

SEQ ID NO: 939268 - RNA, 19 nt, Artificial Sequence
  Description of Artificial Sequence: Synthetic oligonucleotide
gaacucgugcagcagagug

SEQ ID NO: 939269 - RNA, 19 nt, Artificial Sequence
  Description of Artificial Sequence: Synthetic oligonucleotide
gaccccauaagaguguccg

SEQ ID NO: 939270 - RNA, 19 nt, Artificial Sequence
  Description of Artificial Sequence: Synthetic oligonucleotide
uccacuggcacgaacuugu

SEQ ID NO: 939271 - RNA, 19 nt, Artificial Sequence
  Description of Artificial Sequence: Synthetic oligonucleotide
aacguguagccgucgcugg

SEQ ID NO: 939272 - RNA, 19 nt, Artificial Sequence
  Description of Artificial Sequence: Synthetic oligonucleotide
uugaaggucggcacguggc

SEQ ID NO: 939273 - RNA, 19 nt, Artificial Sequence
  Description of Artificial Sequence: Synthetic oligonucleotide
gagcgagccgcccacaccg

SEQ ID NO: 939274 - RNA, 19 nt, Artificial Sequence
  Description of Artificial Sequence: Synthetic oligonucleotide
cauugaaugcauuucccuc

SEQ ID NO: 939275 - RNA, 19 nt, Artificial Sequence
  Description of Artificial Sequence: Synthetic oligonucleotide
cuaugggugcgguucagcg

SEQ ID NO: 939276 - RNA, 19 nt, Artificial Sequence
  Description of Artificial Sequence: Synthetic oligonucleotide
acuggcacgaacuugucau

SEQ ID NO: 939277 - RNA, 19 nt, Artificial Sequence
  Description of Artificial Sequence: Synthetic oligonucleotide
gccacugcggccuugaagg

SEQ ID NO: 939278 - RNA, 19 nt, Artificial Sequence
  Description of Artificial Sequence: Synthetic oligonucleotide
uugugaacaagaucugggu

SEQ ID NO: 939279 - RNA, 19 nt, Artificial Sequence
  Description of Artificial Sequence: Synthetic oligonucleotide
caugcguugguccuccucc

SEQ ID NO: 939280 - RNA, 19 nt, Artificial Sequence
  Description of Artificial Sequence: Synthetic oligonucleotide
cucccguugcgauacaccg

SEQ ID NO: 939281 - RNA, 19 nt, Artificial Sequence
  Description of Artificial Sequence: Synthetic oligonucleotide
gacucgacgcuuuccagag

SEQ ID NO: 939282 - RNA, 19 nt, Artificial Sequence
  Description of Artificial Sequence: Synthetic oligonucleotide
uuuggggcuucccagugca

SEQ ID NO: 939283 - RNA, 19 nt, Artificial Sequence
  Description of Artificial Sequence: Synthetic oligonucleotide
ugucaugcaugccaugcac

SEQ ID NO: 939284 - RNA, 19 nt, Artificial Sequence
  Description of Artificial Sequence: Synthetic oligonucleotide
uaugggugcgguucagcgg

SEQ ID NO: 939285 - RNA, 19 nt, Artificial Sequence
  Description of Artificial Sequence: Synthetic oligonucleotide
aaacguguagccgucgcug

SEQ ID NO: 939286 - RNA, 19 nt, Artificial Sequence
  Description of Artificial Sequence: Synthetic oligonucleotide
auuggcgugaggccccgcc

SEQ ID NO: 939287 - RNA, 19 nt, Artificial Sequence
  Description of Artificial Sequence: Synthetic oligonucleotide
caaacuaugggugcgguuc

SEQ ID NO: 939288 - RNA, 19 nt, Artificial Sequence
  Description of Artificial Sequence: Synthetic oligonucleotide
cuggcagcgcacaaggccg

SEQ ID NO: 939289 - RNA, 19 nt, Artificial Sequence
  Description of Artificial Sequence: Synthetic oligonucleotide
acaaguugccaugugcggg

SEQ ID NO: 939290 - RNA, 19 nt, Artificial Sequence
  Description of Artificial Sequence: Synthetic oligonucleotide
aaggucacaccugcgauca

SEQ ID NO: 939291 - RNA, 19 nt, Artificial Sequence
  Description of Artificial Sequence: Synthetic oligonucleotide
uagcgcgugaagauggccc

SEQ ID NO: 939292 - RNA, 19 nt, Artificial Sequence
  Description of Artificial Sequence: Synthetic oligonucleotide
agccaagucgcacaaagaa

SEQ ID NO: 939293 - RNA, 19 nt, Artificial Sequence
  Description of Artificial Sequence: Synthetic oligonucleotide
ugcgauacaccgugaugcg

SEQ ID NO: 939294 - RNA, 19 nt, Artificial Sequence
  Description of Artificial Sequence: Synthetic oligonucleotide
uagacuucgucacccucag

SEQ ID NO: 939295 - RNA, 19 nt, Artificial Sequence
  Description of Artificial Sequence: Synthetic oligonucleotide
ucgucuucgggaagcggcg

SEQ ID NO: 939296 - RNA, 19 nt, Artificial Sequence
  Description of Artificial Sequence: Synthetic oligonucleotide
ucaucgaggggcccgggcc

SEQ ID NO: 939297 - RNA, 19 nt, Artificial Sequence
  Description of Artificial Sequence: Synthetic oligonucleotide
aaacuaugggugcgguuca

SEQ ID NO: 939298 - RNA, 19 nt, Artificial Sequence
  Description of Artificial Sequence: Synthetic oligonucleotide
gaucggccgcauuagcgcg

SEQ ID NO: 939299 - RNA, 19 nt, Artificial Sequence
  Description of Artificial Sequence: Synthetic oligonucleotide
gauacaccgugaugcgccg

SEQ ID NO: 939300 - RNA, 19 nt, Artificial Sequence
  Description of Artificial Sequence: Synthetic oligonucleotide
auacuggccgcucaucaug

SEQ ID NO: 939301 - RNA, 19 nt, Artificial Sequence
  Description of Artificial Sequence: Synthetic oligonucleotide
gcguaaaagguguaggcag

SEQ ID NO: 939302 - RNA, 19 nt, Artificial Sequence
  Description of Artificial Sequence: Synthetic oligonucleotide
uguugacugucuccggaca

SEQ ID NO: 939303 - RNA, 19 nt, Artificial Sequence
  Description of Artificial Sequence: Synthetic oligonucleotide
ugcaagcgcguaaaaggug

SEQ ID NO: 939304 - RNA, 19 nt, Artificial Sequence
  Description of Artificial Sequence: Synthetic oligonucleotide
aguguugacugucuccgga

SEQ ID NO: 939305 - RNA, 19 nt, Artificial Sequence
  Description of Artificial Sequence: Synthetic oligonucleotide
cacaaggccggucuugacc

SEQ ID NO: 939306 - RNA, 19 nt, Artificial Sequence
  Description of Artificial Sequence: Synthetic oligonucleotide
agcgggucuccccugacag

SEQ ID NO: 939307 - RNA, 19 nt, Artificial Sequence
  Description of Artificial Sequence: Synthetic oligonucleotide
uccccugacaggacgggag

SEQ ID NO: 939308 - RNA, 19 nt, Artificial Sequence
  Description of Artificial Sequence: Synthetic oligonucleotide
agcgcguaaaagguguagg

SEQ ID NO: 939309 - RNA, 19 nt, Artificial Sequence
  Description of Artificial Sequence: Synthetic oligonucleotide
ucgugggccaggaauguac

SEQ ID NO: 939310 - RNA, 19 nt, Artificial Sequence
  Description of Artificial Sequence: Synthetic oligonucleotide
ucuauccaagccccgccca

SEQ ID NO: 939311 - RNA, 19 nt, Artificial Sequence
  Description of Artificial Sequence: Synthetic oligonucleotide
uccgaucagcacauugcgc

SEQ ID NO: 939312 - RNA, 19 nt, Artificial Sequence
  Description of Artificial Sequence: Synthetic oligonucleotide
cauaagaguguccgaucag

SEQ ID NO: 939313 - RNA, 19 nt, Artificial Sequence
  Description of Artificial Sequence: Synthetic oligonucleotide
agucuccaacacuggcugc

SEQ ID NO: 939314 - RNA, 19 nt, Artificial Sequence
  Description of Artificial Sequence: Synthetic oligonucleotide
acaccguggaugaagaaca

SEQ ID NO: 939315 - RNA, 19 nt, Artificial Sequence
  Description of Artificial Sequence: Synthetic oligonucleotide
ugucuccggacacucgagc

SEQ ID NO: 939316 - RNA, 19 nt, Artificial Sequence
  Description of Artificial Sequence: Synthetic oligonucleotide
ucauagccaagucgcacaa

SEQ ID NO: 939317 - RNA, 19 nt, Artificial Sequence
  Description of Artificial Sequence: Synthetic oligonucleotide
gcuuacaugguggagcggg

SEQ ID NO: 939318 - RNA, 19 nt, Artificial Sequence
  Description of Artificial Sequence: Synthetic oligonucleotide
uuccagauggcgagcgagc

SEQ ID NO: 939319 - RNA, 19 nt, Artificial Sequence
  Description of Artificial Sequence: Synthetic oligonucleotide
ugugcggggauuuguggcu

SEQ ID NO: 939320 - RNA, 19 nt, Artificial Sequence
  Description of Artificial Sequence: Synthetic oligonucleotide
agaaaccaucugucacccc

SEQ ID NO: 939321 - RNA, 19 nt, Artificial Sequence
  Description of Artificial Sequence: Synthetic oligonucleotide
guugcgauacaccgugaug

SEQ ID NO: 939322 - RNA, 19 nt, Artificial Sequence
  Description of Artificial Sequence: Synthetic oligonucleotide
cuccgcaugguagacuucg

SEQ ID NO: 939323 - RNA, 19 nt, Artificial Sequence
  Description of Artificial Sequence: Synthetic oligonucleotide
auagcgcgugaagauggcc

SEQ ID NO: 939324 - RNA, 19 nt, Artificial Sequence
  Description of Artificial Sequence: Synthetic oligonucleotide
caugguagacuucgucacc

SEQ ID NO: 939325 - RNA, 19 nt, Artificial Sequence
  Description of Artificial Sequence: Synthetic oligonucleotide
guggcgugggaauuggcgc

SEQ ID NO: 939326 - RNA, 19 nt, Artificial Sequence
  Description of Artificial Sequence: Synthetic oligonucleotide
ucgugcagcagaguguuga

SEQ ID NO: 939327 - RNA, 19 nt, Artificial Sequence
  Description of Artificial Sequence: Synthetic oligonucleotide
acuaugggugcgguucagc

SEQ ID NO: 939328 - RNA, 19 nt, Artificial Sequence
  Description of Artificial Sequence: Synthetic oligonucleotide
guguccugaggucaucgag

SEQ ID NO: 939329 - RNA, 19 nt, Artificial Sequence
  Description of Artificial Sequence: Synthetic oligonucleotide
ggucuugaccccaggaucg

SEQ ID NO: 939330 - RNA, 19 nt, Artificial Sequence
  Description of Artificial Sequence: Synthetic oligonucleotide
aagcgcguaaaagguguag

SEQ ID NO: 939331 - RNA, 19 nt, Artificial Sequence
  Description of Artificial Sequence: Synthetic oligonucleotide
uccuuccagauggcgagcg

SEQ ID NO: 939332 - RNA, 19 nt, Artificial Sequence
  Description of Artificial Sequence: Synthetic oligonucleotide
ucacucgugcagaggacac

SEQ ID NO: 939333 - RNA, 19 nt, Artificial Sequence
  Description of Artificial Sequence: Synthetic oligonucleotide
uuuagccccuugacgggca
